United States Patent Application Publication US 2005/0244851 A1 - sequence listing, part 140

SEQ ID NO: 5465914 - DNA, 25 bp, Homo sapien
gagacctaggaatccaggaatgcca

SEQ ID NO: 5465915 - DNA, 25 bp, Homo sapien
agacctaggaatccaggaatgccag

SEQ ID NO: 5465916 - DNA, 25 bp, Homo sapien
cttttatccctggcactcctgaaag

SEQ ID NO: 5465917 - DNA, 25 bp, Homo sapien
caaatgcagggtctcccgggattcc

SEQ ID NO: 5465918 - DNA, 25 bp, Homo sapien
ggtcccaggtgaccaaatgcagggt

SEQ ID NO: 5465919 - DNA, 25 bp, Homo sapien
agcccctggacatcccggatcacct

SEQ ID NO: 5465920 - DNA, 25 bp, Homo sapien
tggtatttccgctgttcctggtgtg

SEQ ID NO: 5465921 - DNA, 25 bp, Homo sapien
aggtggacctggtatttccgctgtt

SEQ ID NO: 5465922 - DNA, 25 bp, Homo sapien
gacctggtatttccgctgttcctgg

SEQ ID NO: 5465923 - DNA, 25 bp, Homo sapien
tggacctggtatttccgctgttcct

SEQ ID NO: 5465924 - DNA, 25 bp, Homo sapien
tgaaacacgactatgcaaccattgt

SEQ ID NO: 5465925 - DNA, 25 bp, Homo sapien
ccattgtctgcccttgtaggggtaa

SEQ ID NO: 5465926 - DNA, 25 bp, Homo sapien
tttttggtatcttcccatgctaggt

SEQ ID NO: 5465927 - DNA, 25 bp, Homo sapien
ttcccatgctaggtctgaaacacga

SEQ ID NO: 5465928 - DNA, 25 bp, Homo sapien
tgttctcaaaccagcagactagagg

SEQ ID NO: 5465929 - DNA, 25 bp, Homo sapien
cagaaatgtcctaactagtctgagg

SEQ ID NO: 5465930 - DNA, 25 bp, Homo sapien
gaaaagcccatctggagtgttctca

SEQ ID NO: 5465931 - DNA, 25 bp, Homo sapien
gactagaggcccaactacaaattac

SEQ ID NO: 5465932 - DNA, 25 bp, Homo sapien
gttacgttgcaagaaattgtgtcac

SEQ ID NO: 5465933 - DNA, 25 bp, Homo sapien
tcccagggtaggttacgttgcaaga

SEQ ID NO: 5465934 - DNA, 25 bp, Homo sapien
ggccatgcctcccagggtaggttac

SEQ ID NO: 5465935 - DNA, 25 bp, Homo sapien
gtaggttacgttgcaagaaattgtg

SEQ ID NO: 5465936 - DNA, 25 bp, Homo sapien
tctgacccttcaagccatcagggcc

SEQ ID NO: 5465937 - DNA, 25 bp, Homo sapien
ttctgacccttcaagccatcagggc

SEQ ID NO: 5465938 - DNA, 25 bp, Homo sapien
ctgacccttcaagccatcagggccc

SEQ ID NO: 5465939 - DNA, 25 bp, Homo sapien
cctggtggaccaggaaatcccagtc

SEQ ID NO: 5465940 - DNA, 25 bp, Homo sapien
ctggggtcgcatcttcatgatcccc

SEQ ID NO: 5465941 - DNA, 25 bp, Homo sapien
tcccgaccatgtgatcctggctgcc

SEQ ID NO: 5465942 - DNA, 25 bp, Homo sapien
ccgaccatgtgatcctggctgccct

SEQ ID NO: 5465943 - DNA, 25 bp, Homo sapien
ccatcccgaccatgtgatcctggct

SEQ ID NO: 5465944 - DNA, 25 bp, Homo sapien
catcccgaccatgtgatcctggctg

SEQ ID NO: 5465945 - DNA, 25 bp, Homo sapien
catgtcacccttcgcccctttgttg

SEQ ID NO: 5465946 - DNA, 25 bp, Homo sapien
aggtggtccagaggcaccatgcttt

SEQ ID NO: 5465947 - DNA, 25 bp, Homo sapien
taactcttgatacaaccatgtcacc

SEQ ID NO: 5465948 - DNA, 25 bp, Homo sapien
ttgatacaaccatgtcacccttcgc

SEQ ID NO: 5465949 - DNA, 25 bp, Homo sapien
ccttcagcaccaggaggtcctgggt

SEQ ID NO: 5465950 - DNA, 25 bp, Homo sapien
ggtagccctggaggtccttcagcac

SEQ ID NO: 5465951 - DNA, 25 bp, Homo sapien
tggtagccctggaggtccttcagca

SEQ ID NO: 5465952 - DNA, 25 bp, Homo sapien
tcagcaccaggaggtcctgggtcac

SEQ ID NO: 5465953 - DNA, 25 bp, Homo sapien
caagtctcccttactcccctgcctc

SEQ ID NO: 5465954 - DNA, 25 bp, Homo sapien
ccaagtctcccttactcccctgcct

SEQ ID NO: 5465955 - DNA, 25 bp, Homo sapien
gccaggggggcccatgggtccaggc

SEQ ID NO: 5465956 - DNA, 25 bp, Homo sapien
ctggagggccaggggggcccatggg

SEQ ID NO: 5465957 - DNA, 25 bp, Homo sapien
aggggggcccatgggtccaggctca

SEQ ID NO: 5465958 - DNA, 25 bp, Homo sapien
ggtccaggctcacaggcacagagtc

SEQ ID NO: 5465959 - DNA, 25 bp, Homo sapien
ctccttttgggcctcttcctcctgg

SEQ ID NO: 5465960 - DNA, 25 bp, Homo sapien
gggttcccaacactacagtatatca

SEQ ID NO: 5465961 - DNA, 25 bp, Homo sapien
caactttgccttttattccttgtgg

SEQ ID NO: 5465962 - DNA, 25 bp, Homo sapien
cggggttcccaacactacagtatat

SEQ ID NO: 5465963 - DNA, 25 bp, Homo sapien
ggagcagaatcaggtctcccaggaa

SEQ ID NO: 5465964 - DNA, 25 bp, Homo sapien
gcagaatcaggtctcccaggaatac

SEQ ID NO: 5465965 - DNA, 25 bp, Homo sapien
cagaatcaggtctcccaggaatacc

SEQ ID NO: 5465966 - DNA, 25 bp, Homo sapien
tggtgctccaggcaagccaggtgat

SEQ ID NO: 5465967 - DNA, 25 bp, Homo sapien
caggaagaccaggaaatccttgtgg

SEQ ID NO: 5465968 - DNA, 25 bp, Homo sapien
aggaagaccaggaaatccttgtggc

SEQ ID NO: 5465969 - DNA, 25 bp, Homo sapien
cttgtggcccagggggtcctatcat

SEQ ID NO: 5465970 - DNA, 25 bp, Homo sapien
tctccatagcggccagggaaccctg

SEQ ID NO: 5465971 - DNA, 25 bp, Homo sapien
tggtccaacatcccctgtttctcca

SEQ ID NO: 5465972 - DNA, 25 bp, Homo sapien
ttctccatagcggccagggaaccct

SEQ ID NO: 5465973 - DNA, 25 bp, Homo sapien
tccaacatcccctgtttctccatag

SEQ ID NO: 5465974 - DNA, 25 bp, Homo sapien
gaagaggtggagtcaccaaaacacc

SEQ ID NO: 5465975 - DNA, 25 bp, Homo sapien
ggtgccctcgatttccaggatcccc

SEQ ID NO: 5465976 - DNA, 25 bp, Homo sapien
gggtgccctcgatttccaggatccc

SEQ ID NO: 5465977 - DNA, 25 bp, Homo sapien
gaggtggagtcaccaaaacacctgg

SEQ ID NO: 5465978 - DNA, 25 bp, Homo sapien
ctctgatgtcaccaagtttcttaga

SEQ ID NO: 5465979 - DNA, 25 bp, Homo sapien
ggcatcgatgacaaatagtttattc

SEQ ID NO: 5465980 - DNA, 25 bp, Homo sapien
tataccatgagcattaatgtctaac

SEQ ID NO: 5465981 - DNA, 25 bp, Homo sapien
gtctaacttggcatcgatgacaaat

SEQ ID NO: 5465982 - DNA, 25 bp, Homo sapien
tttgggccaattaatccaaatagcc

SEQ ID NO: 5465983 - DNA, 25 bp, Homo sapien
taatccaaatagcccaggatctcca

SEQ ID NO: 5465984 - DNA, 25 bp, Homo sapien
gatctccaaccagtcctagttctcc

SEQ ID NO: 5465985 - DNA, 25 bp, Homo sapien
aatccaaatagcccaggatctccaa

SEQ ID NO: 5465986 - DNA, 25 bp, Homo sapien
cctggaaaacctggagatccatagg

SEQ ID NO: 5465987 - DNA, 25 bp, Homo sapien
gagatccataggaaccaggatcccc

SEQ ID NO: 5465988 - DNA, 25 bp, Homo sapien
aaaacctggagatccataggaacca

SEQ ID NO: 5465989 - DNA, 25 bp, Homo sapien
tggagatccataggaaccaggatcc

SEQ ID NO: 5465990 - DNA, 25 bp, Homo sapien
ttctccttttgccccaataccagat

SEQ ID NO: 5465991 - DNA, 25 bp, Homo sapien
gaggccctggaaatccaggaatacc

SEQ ID NO: 5465992 - DNA, 25 bp, Homo sapien
ccgaggccctggaaatccaggaata

SEQ ID NO: 5465993 - DNA, 25 bp, Homo sapien
cttttgccccaataccagattctcc

SEQ ID NO: 5465994 - DNA, 25 bp, Homo sapien
gcagtccaaccattccaggaattcc

SEQ ID NO: 5465995 - DNA, 25 bp, Homo sapien
caaccattccaggaattccttttat

SEQ ID NO: 5465996 - DNA, 25 bp, Homo sapien
ctggcagtccaaccattccaggaat

SEQ ID NO: 5465997 - DNA, 25 bp, Homo sapien
agtccaaccattccaggaattcctt

SEQ ID NO: 5465998 - DNA, 25 bp, Homo sapien
ggagaaccttgctgaccaacctcac

SEQ ID NO: 5465999 - DNA, 25 bp, Homo sapien
acaaaagtcaggtggctctaccaac

SEQ ID NO: 5466000 - DNA, 25 bp, Homo sapien
ggctctaccaacagggtgggtccag

SEQ ID NO: 5466001 - DNA, 25 bp, Homo sapien
tccaggagaaccttgctgaccaacc

SEQ ID NO: 5466002 - DNA, 25 bp, Homo sapien
aaagaattaaggtaagcacatttga

SEQ ID NO: 5466003 - DNA, 25 bp, Homo sapien
aattaaggtaagcacatttgagatc

SEQ ID NO: 5466004 - DNA, 25 bp, Homo sapien
acatttgagatcatttgaatggcca

SEQ ID NO: 5466005 - DNA, 25 bp, Homo sapien
ggtaagcacatttgagatcatttga

SEQ ID NO: 5466006 - DNA, 25 bp, Homo sapien
tctgattggactggcgcggaaagtc

SEQ ID NO: 5466007 - DNA, 25 bp, Homo sapien
ctcatagccaaatacttccaagtta

SEQ ID NO: 5466008 - DNA, 25 bp, Homo sapien
ggctcctgtggcttcgacgaacata

SEQ ID NO: 5466009 - DNA, 25 bp, Homo sapien
cggaaagtcactaagatgccaatgc

SEQ ID NO: 5466010 - DNA, 25 bp, Homo sapien
tctcccatttgcccctttactccca

SEQ ID NO: 5466011 - DNA, 25 bp, Homo sapien
tcccatttgcccctttactcccaca

SEQ ID NO: 5466012 - DNA, 25 bp, Homo sapien
cttcaaacctggacgccctggttgg

SEQ ID NO: 5466013 - DNA, 25 bp, Homo sapien
cctggacgccctggttggcccggag

SEQ ID NO: 5466014 - DNA, 25 bp, Homo sapien
tcaaacctggacgccctggttggcc

SEQ ID NO: 5466015 - DNA, 25 bp, Homo sapien
ctggacgccctggttggcccggagg

SEQ ID NO: 5466016 - DNA, 25 bp, Homo sapien
aggatatcctgtgggacctgccggt

SEQ ID NO: 5466017 - DNA, 25 bp, Homo sapien
tatcctgtgggacctgccggtcctc

SEQ ID NO: 5466018 - DNA, 25 bp, Homo sapien
gatatcctgtgggacctgccggtcc

SEQ ID NO: 5466019 - DNA, 25 bp, Homo sapien
ccaggatatcctgtgggacctgccg

SEQ ID NO: 5466020 - DNA, 25 bp, Homo sapien
ggtaagccaggcagtcctgggtccc

SEQ ID NO: 5466021 - DNA, 25 bp, Homo sapien
caggcagtcctgggtcccctctgtc

SEQ ID NO: 5466022 - DNA, 25 bp, Homo sapien
gcagtcctgggtcccctctgtctcc

SEQ ID NO: 5466023 - DNA, 25 bp, Homo sapien
tggtaagccaggcagtcctgggtcc

SEQ ID NO: 5466024 - DNA, 25 bp, Homo sapien
aaataagaatgcattgctttaagtc

SEQ ID NO: 5466025 - DNA, 25 bp, Homo sapien
attgctttaagtccacacaatgttc

SEQ ID NO: 5466026 - DNA, 25 bp, Homo sapien
aataagaatgcattgctttaagtcc

SEQ ID NO: 5466027 - DNA, 25 bp, Homo sapien
caaaaataagaatgcattgctttaa

SEQ ID NO: 5466028 - DNA, 25 bp, Homo sapien
tgctttataaacatcttgaccccct

SEQ ID NO: 5466029 - DNA, 25 bp, Homo sapien
atgctttataaacatcttgaccccc

SEQ ID NO: 5466030 - DNA, 25 bp, Homo sapien
ccctgagggtcagggtaatgataaa

SEQ ID NO: 5466031 - DNA, 25 bp, Homo sapien
caaaagcatgatgccatccctgagg

SEQ ID NO: 5466032 - DNA, 25 bp, Homo sapien
aatgataaaaattggtgtattcagg

SEQ ID NO: 5466033 - DNA, 25 bp, Homo sapien
ctgagtatttcctgcatgggcttac

SEQ ID NO: 5466034 - DNA, 25 bp, Homo sapien
aacggcacctaaaatgaacactgaa

SEQ ID NO: 5466035 - DNA, 25 bp, Homo sapien
cggcacctaaaatgaacactgaatt

SEQ ID NO: 5466036 - DNA, 25 bp, Homo sapien
cacctaaaatgaacactgaatttcc

SEQ ID NO: 5466037 - DNA, 25 bp, Homo sapien
cctaaaatgaacactgaatttcctt

SEQ ID NO: 5466038 - DNA, 25 bp, Homo sapien
tcttcctcctggaaaccctgggtca

SEQ ID NO: 5466039 - DNA, 25 bp, Homo sapien
tagggggcctcctgggccaagagct

SEQ ID NO: 5466040 - DNA, 25 bp, Homo sapien
ggggcctcctgggccaagagctcct

SEQ ID NO: 5466041 - DNA, 25 bp, Homo sapien
gcctcctgggccaagagctcctctt

SEQ ID NO: 5466042 - DNA, 25 bp, Homo sapien
ttgtggccactcataccaggtttgc

SEQ ID NO: 5466043 - DNA, 25 bp, Homo sapien
tgtggccactcataccaggtttgcc

SEQ ID NO: 5466044 - DNA, 25 bp, Homo sapien
ggccactcataccaggtttgcctct

SEQ ID NO: 5466045 - DNA, 25 bp, Homo sapien
cattgtggccactcataccaggttt

SEQ ID NO: 5466046 - DNA, 25 bp, Homo sapien
tgccatctaaacctggaaatccagg

SEQ ID NO: 5466047 - DNA, 25 bp, Homo sapien
gccatctaaacctggaaatccagga

SEQ ID NO: 5466048 - DNA, 25 bp, Homo sapien
tatgccatctaaacctggaaatcca

SEQ ID NO: 5466049 - DNA, 25 bp, Homo sapien
atgccatctaaacctggaaatccag

SEQ ID NO: 5466050 - DNA, 25 bp, Homo sapien
ctcccaggggtccaattggaccctg

SEQ ID NO: 5466051 - DNA, 25 bp, Homo sapien
agggccgcggtcccctctcattcct

SEQ ID NO: 5466052 - DNA, 25 bp, Homo sapien
ggtccaattggaccctgtggccctg

SEQ ID NO: 5466053 - DNA, 25 bp, Homo sapien
aattggaccctgtggccctggtggt

SEQ ID NO: 5466054 - DNA, 25 bp, Homo sapien
ctggtgtcattgctttcaccaacac

SEQ ID NO: 5466055 - DNA, 25 bp, Homo sapien
tgccccatgcaaccgtcaatgaatc

SEQ ID NO: 5466056 - DNA, 25 bp, Homo sapien
gggttccacaagcaccaatctctcg

SEQ ID NO: 5466057 - DNA, 25 bp, Homo sapien
tggtcttgtcaactctcgcacgggt

SEQ ID NO: 5466058 - DNA, 25 bp, Homo sapien
gtagcctttctttacctgtagctca

SEQ ID NO: 5466059 - DNA, 25 bp, Homo sapien
acacttgtttccatgaggtcagagt

SEQ ID NO: 5466060 - DNA, 25 bp, Homo sapien
ggtcagagtagcctttctttacctg

SEQ ID NO: 5466061 - DNA, 25 bp, Homo sapien
ttacctgtagctcaaattctgccat

SEQ ID NO: 5466062 - DNA, 25 bp, Homo sapien
tgccctggcttcttgtcactttctc

SEQ ID NO: 5466063 - DNA, 25 bp, Homo sapien
ctcccccagagctcttcagggctgc

SEQ ID NO: 5466064 - DNA, 25 bp, Homo sapien
tcctgtttggagtctcccccagagc

SEQ ID NO: 5466065 - DNA, 25 bp, Homo sapien
gtcactttctctccagccaaagcat

SEQ ID NO: 5466066 - DNA, 25 bp, Homo sapien
ccgtgtttgtaaaaccaccacatca

SEQ ID NO: 5466067 - DNA, 25 bp, Homo sapien
ctccgtgtttgtaaaaccaccacat

SEQ ID NO: 5466068 - DNA, 25 bp, Homo sapien
attcttgacatttacgtcatttgac

SEQ ID NO: 5466069 - DNA, 25 bp, Homo sapien
gacatttacgtcatttgacctccgt

SEQ ID NO: 5466070 - DNA, 25 bp, Homo sapien
tctggcagggagacatcgacactga

SEQ ID NO: 5466071 - DNA, 25 bp, Homo sapien
tcaataaagtcgggcacattcactc

SEQ ID NO: 5466072 - DNA, 25 bp, Homo sapien
cactgactgtgatgagcagaaaggc

SEQ ID NO: 5466073 - DNA, 25 bp, Homo sapien
actgtgatgagcagaaaggccttgt

SEQ ID NO: 5466074 - DNA, 25 bp, Homo sapien
aatagcccgctatgccacttgaagg

SEQ ID NO: 5466075 - DNA, 25 bp, Homo sapien
caaatcctcgctggaagatgtcaca

SEQ ID NO: 5466076 - DNA, 25 bp, Homo sapien
cgacttgcagccttcccatggaaaa

SEQ ID NO: 5466077 - DNA, 25 bp, Homo sapien
cacaggctccctgttgtggcacaca

SEQ ID NO: 5466078 - DNA, 25 bp, Homo sapien
cgagaccccttttcaggaacacagt

SEQ ID NO: 5466079 - DNA, 25 bp, Homo sapien
atctcttcctccacaaggaccaatg

SEQ ID NO: 5466080 - DNA, 25 bp, Homo sapien
ccgagaccccttttcaggaacacag

SEQ ID NO: 5466081 - DNA, 25 bp, Homo sapien
caaggaccaatgtatttctttccac

SEQ ID NO: 5466082 - DNA, 25 bp, Homo sapien
tccataggcagatcccttaacagca

SEQ ID NO: 5466083 - DNA, 25 bp, Homo sapien
agtcccagagtactatttccatagg

SEQ ID NO: 5466084 - DNA, 25 bp, Homo sapien
taggcagatcccttaacagcaatca

SEQ ID NO: 5466085 - DNA, 25 bp, Homo sapien
ccatataaaagcatagtcccagagt

SEQ ID NO: 5466086 - DNA, 25 bp, Homo sapien
aaccagagctagtgaatgtacttac

SEQ ID NO: 5466087 - DNA, 25 bp, Homo sapien
gtgaattttcacaacgcaaccagag

SEQ ID NO: 5466088 - DNA, 25 bp, Homo sapien
attgagtcccagagggtgatttctt

SEQ ID NO: 5466089 - DNA, 25 bp, Homo sapien
caacgcaaccagagctagtgaatgt

SEQ ID NO: 5466090 - DNA, 25 bp, Homo sapien
cccatatacatattgtacagaaaag

SEQ ID NO: 5466091 - DNA, 25 bp, Homo sapien
catatacatattgtacagaaaagag

SEQ ID NO: 5466092 - DNA, 25 bp, Homo sapien
agaaaagagaatgagtataagtgac

SEQ ID NO: 5466093 - DNA, 25 bp, Homo sapien
tacatattgtacagaaaagagaatg

SEQ ID NO: 5466094 - DNA, 25 bp, Homo sapien
tttatttctatgaggctgctcctac

SEQ ID NO: 5466095 - DNA, 25 bp, Homo sapien
ctttttatttctatgaggctgctcc

SEQ ID NO: 5466096 - DNA, 25 bp, Homo sapien
tttttatttctatgaggctgctcct

SEQ ID NO: 5466097 - DNA, 25 bp, Homo sapien
ttttatttctatgaggctgctccta

SEQ ID NO: 5466098 - DNA, 25 bp, Homo sapien
ggaccgtgaggaccctctgaaagtg

SEQ ID NO: 5466099 - DNA, 25 bp, Homo sapien
ctttcctctttttaatcagccaaga

SEQ ID NO: 5466100 - DNA, 25 bp, Homo sapien
tgttgaaccccttgtgtggtcctca

SEQ ID NO: 5466101 - DNA, 25 bp, Homo sapien
agtgacaagatccatgctttcctct

SEQ ID NO: 5466102 - DNA, 25 bp, Homo sapien
gaagatgattctcagaatgaaaact

SEQ ID NO: 5466103 - DNA, 25 bp, Homo sapien
agatgattctcagaatgaaaactgc

SEQ ID NO: 5466104 - DNA, 25 bp, Homo sapien
tcccataatgccatttagtggaagc

SEQ ID NO: 5466105 - DNA, 25 bp, Homo sapien
taatgccatttagtggaagcaacta

SEQ ID NO: 5466106 - DNA, 25 bp, Homo sapien
cttggtcaatctgaaggagcacctc

SEQ ID NO: 5466107 - DNA, 25 bp, Homo sapien
gaaggagcacctcattagtactatg

SEQ ID NO: 5466108 - DNA, 25 bp, Homo sapien
gccaaggacttggtcaatctgaagg

SEQ ID NO: 5466109 - DNA, 25 bp, Homo sapien
cacctcattagtactatgtgcagag

SEQ ID NO: 5466110 - DNA, 25 bp, Homo sapien
gcaggcaagtcttagtacttaaaaa

SEQ ID NO: 5466111 - DNA, 25 bp, Homo sapien
aggttctgtgttctgggtcaaagtc

SEQ ID NO: 5466112 - DNA, 25 bp, Homo sapien
cagaaggttcttgttgacaagtgag

SEQ ID NO: 5466113 - DNA, 25 bp, Homo sapien
cgcaggcaagtcttagtacttaaaa

SEQ ID NO: 5466114 - DNA, 25 bp, Homo sapien
tatcattttccccttgaggtctcct

SEQ ID NO: 5466115 - DNA, 25 bp, Homo sapien
gaggtctcctcccaatatcaacaga

SEQ ID NO: 5466116 - DNA, 25 bp, Homo sapien
caacagaaaatttgacagcaaccat

SEQ ID NO: 5466117 - DNA, 25 bp, Homo sapien
catctggcaatataggcttttatta

SEQ ID NO: 5466118 - DNA, 25 bp, Homo sapien
tcccgcttaatctgggcagggccgc

SEQ ID NO: 5466119 - DNA, 25 bp, Homo sapien
aagggacactgcctggtaagttggg

SEQ ID NO: 5466120 - DNA, 25 bp, Homo sapien
cacgatgcccgggtagaagggacac

SEQ ID NO: 5466121 - DNA, 25 bp, Homo sapien
ggaccttgggagcatcacctcctta

SEQ ID NO: 5466122 - DNA, 25 bp, Homo sapien
tgtgacctgaatgagcagcatcccc

SEQ ID NO: 5466123 - DNA, 25 bp, Homo sapien
tgctcaggcctttcagagacggaac

SEQ ID NO: 5466124 - DNA, 25 bp, Homo sapien
gaaaccgttcagagcttctactcgc

SEQ ID NO: 5466125 - DNA, 25 bp, Homo sapien
gagacggaacattcagagcccatgt

SEQ ID NO: 5466126 - DNA, 25 bp, Homo sapien
gatactatatttcctctgctggctc

SEQ ID NO: 5466127 - DNA, 25 bp, Homo sapien
gtgcctgctccatgatactatattt

SEQ ID NO: 5466128 - DNA, 25 bp, Homo sapien
tgcaaacatgccttgaattccattt

SEQ ID NO: 5466129 - DNA, 25 bp, Homo sapien
tgccatcttggcgtgcctgctccat

SEQ ID NO: 5466130 - DNA, 25 bp, Homo sapien
tccgtttccagttgaccttatttca

SEQ ID NO: 5466131 - DNA, 25 bp, Homo sapien
ccagttgacgttagaagaatagtag

SEQ ID NO: 5466132 - DNA, 25 bp, Homo sapien
taaggtctgaagacgcagaaagaag

SEQ ID NO: 5466133 - DNA, 25 bp, Homo sapien
gtatccgtttccagttgacgttaga

SEQ ID NO: 5466134 - DNA, 25 bp, Homo sapien
gtattcggagagctatgtaatttac

SEQ ID NO: 5466135 - DNA, 25 bp, Homo sapien
ctgtattcggagagctatgtaattt

SEQ ID NO: 5466136 - DNA, 25 bp, Homo sapien
attcggagagctatgtaatttacac

SEQ ID NO: 5466137 - DNA, 25 bp, Homo sapien
ttcggagagctatgtaatttacact

SEQ ID NO: 5466138 - DNA, 25 bp, Homo sapien
tctgaacgacacaaaacatgacttg

SEQ ID NO: 5466139 - DNA, 25 bp, Homo sapien
gggattccctaagagtatgtggcct

SEQ ID NO: 5466140 - DNA, 25 bp, Homo sapien
tgcgtccagctggttctagatggtc

SEQ ID NO: 5466141 - DNA, 25 bp, Homo sapien
gcctaagccagatgtttctgaacga

SEQ ID NO: 5466142 - DNA, 25 bp, Homo sapien
aaacataatagctacttcctttcat

SEQ ID NO: 5466143 - DNA, 25 bp, Homo sapien
tggtcaaactttggtttgacattta

SEQ ID NO: 5466144 - DNA, 25 bp, Homo sapien
tgacatttaaaaccttgtaaacata

SEQ ID NO: 5466145 - DNA, 25 bp, Homo sapien
aaccttgtaaacataatagctactt

SEQ ID NO: 5466146 - DNA, 25 bp, Homo sapien
gaaattaccattgcagtggtctcat

SEQ ID NO: 5466147 - DNA, 25 bp, Homo sapien
aaggagccatcaggaccactttttt

SEQ ID NO: 5466148 - DNA, 25 bp, Homo sapien
cctttatttcatggtcaaggagcca

SEQ ID NO: 5466149 - DNA, 25 bp, Homo sapien
tggttcccctgtaagacagtactct

SEQ ID NO: 5466150 - DNA, 25 bp, Homo sapien
gaggcagctaagaggacactttcct

SEQ ID NO: 5466151 - DNA, 25 bp, Homo sapien
tccagagagtgtcctattatcatca

SEQ ID NO: 5466152 - DNA, 25 bp, Homo sapien
tcaaatgggcccctgaagtcatggg

SEQ ID NO: 5466153 - DNA, 25 bp, Homo sapien
tgtcccccctcctaggaatgtagag

SEQ ID NO: 5466154 - DNA, 25 bp, Homo sapien
caatcgctccgaacgcagtcagctt

SEQ ID NO: 5466155 - DNA, 25 bp, Homo sapien
ggctctgatactccaagcaggccag

SEQ ID NO: 5466156 - DNA, 25 bp, Homo sapien
cctctgtgctctgaagtttgcacgc

SEQ ID NO: 5466157 - DNA, 25 bp, Homo sapien
cagtcagcttatcggtccaagggaa

SEQ ID NO: 5466158 - DNA, 25 bp, Homo sapien
cctgatcaagggatcccgtggagcc

SEQ ID NO: 5466159 - DNA, 25 bp, Homo sapien
ccgtggagcctatttttcttacatg

SEQ ID NO: 5466160 - DNA, 25 bp, Homo sapien
tgagatcattacagtgctgatggaa

SEQ ID NO: 5466161 - DNA, 25 bp, Homo sapien
gatggaagttcatttcctctaccac

SEQ ID NO: 5466162 - DNA, 25 bp, Homo sapien
tctagactagtgatgtgtctctgga

SEQ ID NO: 5466163 - DNA, 25 bp, Homo sapien
gggggcatcccgcaaagcagtccat

SEQ ID NO: 5466164 - DNA, 25 bp, Homo sapien
tctggacgggagttgagggatagga

SEQ ID NO: 5466165 - DNA, 25 bp, Homo sapien
actagtgatgtgtctctggacggga

SEQ ID NO: 5466166 - DNA, 25 bp, Homo sapien
taaccagctgtgaacggtgccaact

SEQ ID NO: 5466167 - DNA, 25 bp, Homo sapien
gcatgcacaggaacgagcatgctgg

SEQ ID NO: 5466168 - DNA, 25 bp, Homo sapien
accagcatgcacaggaacgagcatg

SEQ ID NO: 5466169 - DNA, 25 bp, Homo sapien
ctgctcagtagggtgttaaccagct

SEQ ID NO: 5466170 - DNA, 25 bp, Homo sapien
aaaactattcaattacatgtggctg

SEQ ID NO: 5466171 - DNA, 25 bp, Homo sapien
gattaatatccagaaggactctata

SEQ ID NO: 5466172 - DNA, 25 bp, Homo sapien
agccatttcactctaattcctgatg

SEQ ID NO: 5466173 - DNA, 25 bp, Homo sapien
ggctgagctagcacttaaagagtta

SEQ ID NO: 5466174 - DNA, 25 bp, Homo sapien
tgccggttgggatttattcagctgt

SEQ ID NO: 5466175 - DNA, 25 bp, Homo sapien
gcatttgcttttaccctgccggttg

SEQ ID NO: 5466176 - DNA, 25 bp, Homo sapien
gtgtccaatactcgaagaacagaga

SEQ ID NO: 5466177 - DNA, 25 bp, Homo sapien
gtcacctggctcctaacagatagtg

SEQ ID NO: 5466178 - DNA, 25 bp, Homo sapien
cttctttcatcggtagcagaaagat

SEQ ID NO: 5466179 - DNA, 25 bp, Homo sapien
tcatcggtagcagaaagatccgcag

SEQ ID NO: 5466180 - DNA, 25 bp, Homo sapien
aaagatccgcagtatgttgttccat

SEQ ID NO: 5466181 - DNA, 25 bp, Homo sapien
ggtagcagaaagatccgcagtatgt

SEQ ID NO: 5466182 - DNA, 25 bp, Homo sapien
tctctggatgccaactgggtacccc

SEQ ID NO: 5466183 - DNA, 25 bp, Homo sapien
aatttttcctgggtcacgcagctca

SEQ ID NO: 5466184 - DNA, 25 bp, Homo sapien
tgagaaaacggacacagagcacttg

SEQ ID NO: 5466185 - DNA, 25 bp, Homo sapien
cataagtagtgggtcctcagttacc

SEQ ID NO: 5466186 - DNA, 25 bp, Homo sapien
taagtcatgtgcaaatacggtacca

SEQ ID NO: 5466187 - DNA, 25 bp, Homo sapien
gaaagaaaacttggagctcaactgg

SEQ ID NO: 5466188 - DNA, 25 bp, Homo sapien
ggacttgtcggtgtaccaggatgca

SEQ ID NO: 5466189 - DNA, 25 bp, Homo sapien
taagtcttcatatcagtcagcctgt

SEQ ID NO: 5466190 - DNA, 25 bp, Homo sapien
gggttggttacagctgggacacttg

SEQ ID NO: 5466191 - DNA, 25 bp, Homo sapien
acttccagtagaattctgaaatgac

SEQ ID NO: 5466192 - DNA, 25 bp, Homo sapien
taccctttaatagtatcacttccag

SEQ ID NO: 5466193 - DNA, 25 bp, Homo sapien
tggaaatgcatacaccccacagact

SEQ ID NO: 5466194 - DNA, 25 bp, Homo sapien
gccctccaggatttcgtggtccagt

SEQ ID NO: 5466195 - DNA, 25 bp, Homo sapien
aatactttgggtgaccatattcaca

SEQ ID NO: 5466196 - DNA, 25 bp, Homo sapien
tcaatgctatgtttgatcaagttct

SEQ ID NO: 5466197 - DNA, 25 bp, Homo sapien
aatttggtttgtacatgacatctac

SEQ ID NO: 5466198 - DNA, 25 bp, Homo sapien
aaatagctggtcactatgtgtccct

SEQ ID NO: 5466199 - DNA, 25 bp, Homo sapien
cctggaaggcactagtgatgcccat

SEQ ID NO: 5466200 - DNA, 25 bp, Homo sapien
tatgtgtccctttgaccacgggtaa

SEQ ID NO: 5466201 - DNA, 25 bp, Homo sapien
gtcaaaccagggcagaaaatagctg

SEQ ID NO: 5466202 - DNA, 25 bp, Homo sapien
cagaggaattcttagcactcttcac

SEQ ID NO: 5466203 - DNA, 25 bp, Homo sapien
gcccaacacttggtaggtgcacgca

SEQ ID NO: 5466204 - DNA, 25 bp, Homo sapien
tattgcttaaccacaagactcttgt

SEQ ID NO: 5466205 - DNA, 25 bp, Homo sapien
taaatactttagtggagttgccagg

SEQ ID NO: 5466206 - DNA, 25 bp, Homo sapien
taagaacaccagcagtaggtccact

SEQ ID NO: 5466207 - DNA, 25 bp, Homo sapien
ttcctcgattcttgcaggtcaagga

SEQ ID NO: 5466208 - DNA, 25 bp, Homo sapien
aaatggttaagaacaccagcagtag

SEQ ID NO: 5466209 - DNA, 25 bp, Homo sapien
gaaacaatattcctcgattcttgca

SEQ ID NO: 5466210 - DNA, 25 bp, Homo sapien
ggctgacatacagagttcacagggc

SEQ ID NO: 5466211 - DNA, 25 bp, Homo sapien
ttcaagtccagcagaaagctttcag

SEQ ID NO: 5466212 - DNA, 25 bp, Homo sapien
tcacagggctaatgaagctaaagct

SEQ ID NO: 5466213 - DNA, 25 bp, Homo sapien
ggctctctcccgaaggtgtcatgct

SEQ ID NO: 5466214 - DNA, 25 bp, Homo sapien
cacggctggggagtcctcagtaaac

SEQ ID NO: 5466215 - DNA, 25 bp, Homo sapien
agcacggctggggagtcctcagtaa

SEQ ID NO: 5466216 - DNA, 25 bp, Homo sapien
tcagcacggctggggagtcctcagt

SEQ ID NO: 5466217 - DNA, 25 bp, Homo sapien
cggctggggagtcctcagtaaactt

SEQ ID NO: 5466218 - DNA, 25 bp, Homo sapien
ccttcttcacatgatggcaacatgg

SEQ ID NO: 5466219 - DNA, 25 bp, Homo sapien
ttcttcacatgatggcaacatggag

SEQ ID NO: 5466220 - DNA, 25 bp, Homo sapien
ttcacatgatggcaacatggagaag

SEQ ID NO: 5466221 - DNA, 25 bp, Homo sapien
actcgtggcagaagcagaagcaaac

SEQ ID NO: 5466222 - DNA, 25 bp, Homo sapien
actgcggtgctgtcgcctgtctcct

SEQ ID NO: 5466223 - DNA, 25 bp, Homo sapien
ctgcatcccctgactgcggtgctgt

SEQ ID NO: 5466224 - DNA, 25 bp, Homo sapien
ccctgactgcggtgctgtcgcctgt

SEQ ID NO: 5466225 - DNA, 25 bp, Homo sapien
cggtgctgtcgcctgtctcctaggg

SEQ ID NO: 5466226 - DNA, 25 bp, Homo sapien
tgggcagggatcctttgtcccctca

SEQ ID NO: 5466227 - DNA, 25 bp, Homo sapien
agctgttcctcttgttactcctgtt

SEQ ID NO: 5466228 - DNA, 25 bp, Homo sapien
caggggggaggtaggagctgttcct

SEQ ID NO: 5466229 - DNA, 25 bp, Homo sapien
ggcctctgctactttcagtggctgc

SEQ ID NO: 5466230 - DNA, 25 bp, Homo sapien
cctcttgttactcctgttcagtatc

SEQ ID NO: 5466231 - DNA, 25 bp, Homo sapien
caaccagcatcagtggtttgaagaa

SEQ ID NO: 5466232 - DNA, 25 bp, Homo sapien
ggtcaaccagcatcagtggtttgaa

SEQ ID NO: 5466233 - DNA, 25 bp, Homo sapien
aaacaaagtcaaatggtcaaccagc

SEQ ID NO: 5466234 - DNA, 25 bp, Homo sapien
accagcatcagtggtttgaagaatt

SEQ ID NO: 5466235 - DNA, 25 bp, Homo sapien
gagtgagcagcactcataaggtgca

SEQ ID NO: 5466236 - DNA, 25 bp, Homo sapien
ggctctgtatgtcttctgcaggaaa

SEQ ID NO: 5466237 - DNA, 25 bp, Homo sapien
ggtgcagtcccagaatgtgtctgca

SEQ ID NO: 5466238 - DNA, 25 bp, Homo sapien
tatgcgaacggctctgtatgtcttc

SEQ ID NO: 5466239 - DNA, 25 bp, Homo sapien
tccagaccttcttcacccaattagt

SEQ ID NO: 5466240 - DNA, 25 bp, Homo sapien
ttcaagactgagctaaaaaatacca

SEQ ID NO: 5466241 - DNA, 25 bp, Homo sapien
tccctgtagtatattgtgcccaact

SEQ ID NO: 5466242 - DNA, 25 bp, Homo sapien
tctgggaatcctgtctcattccaga

SEQ ID NO: 5466243 - DNA, 25 bp, Homo sapien
ccctggtgctcaaggtaagcagttc

SEQ ID NO: 5466244 - DNA, 25 bp, Homo sapien
gaccaatgggtataagaggtgacca

SEQ ID NO: 5466245 - DNA, 25 bp, Homo sapien
tagtaacagtgtaatcctttgctgc

SEQ ID NO: 5466246 - DNA, 25 bp, Homo sapien
caaggacgtgatggaattcctggtc

SEQ ID NO: 5466247 - DNA, 25 bp, Homo sapien
gagaaactcagttgggcaggaacca

SEQ ID NO: 5466248 - DNA, 25 bp, Homo sapien
cagcaaagagcagctggatgccaat

SEQ ID NO: 5466249 - DNA, 25 bp, Homo sapien
tgatgttcacgcaaaccagcaaaga

SEQ ID NO: 5466250 - DNA, 25 bp, Homo sapien
ttctttcggttgagctcagtcttcc

SEQ ID NO: 5466251 - DNA, 25 bp, Homo sapien
gaattagctagaacaggtattacct

SEQ ID NO: 5466252 - DNA, 25 bp, Homo sapien
atcagacagctagttggagacagac

SEQ ID NO: 5466253 - DNA, 25 bp, Homo sapien
gcacacatcagtgctacgcagttta

SEQ ID NO: 5466254 - DNA, 25 bp, Homo sapien
taacactttagagcttacaccatgc

SEQ ID NO: 5466255 - DNA, 25 bp, Homo sapien
tttaacaacactttatccaagcaat

SEQ ID NO: 5466256 - DNA, 25 bp, Homo sapien
ctccaaagatagctggttcaaggcc

SEQ ID NO: 5466257 - DNA, 25 bp, Homo sapien
cagttttatccttggcacttttcat

SEQ ID NO: 5466258 - DNA, 25 bp, Homo sapien
aacactttatccaagcaatcagatg

SEQ ID NO: 5466259 - DNA, 25 bp, Homo sapien
aagagcaactgagtatcctttttta

SEQ ID NO: 5466260 - DNA, 25 bp, Homo sapien
gaagagcaactgagtatcctttttt

SEQ ID NO: 5466261 - DNA, 25 bp, Homo sapien
cttggtatgagtagaagagcaactg

SEQ ID NO: 5466262 - DNA, 25 bp, Homo sapien
ttggtatgagtagaagagcaactga

SEQ ID NO: 5466263 - DNA, 25 bp, Homo sapien
tgtaagggagcagttcaataatcca

SEQ ID NO: 5466264 - DNA, 25 bp, Homo sapien
tgtcggtgcataccttatgtaaggg

SEQ ID NO: 5466265 - DNA, 25 bp, Homo sapien
catttgttggtttatcagactcgga

SEQ ID NO: 5466266 - DNA, 25 bp, Homo sapien
ctgatggaaccataatacccttgga

SEQ ID NO: 5466267 - DNA, 25 bp, Homo sapien
tgacactggcataacgagacaagaa

SEQ ID NO: 5466268 - DNA, 25 bp, Homo sapien
gattacgtaagaatctagcaccttt

SEQ ID NO: 5466269 - DNA, 25 bp, Homo sapien
atctaaggggcctagggattcatgc

SEQ ID NO: 5466270 - DNA, 25 bp, Homo sapien
ttttgacatatcttgaaacggctct

SEQ ID NO: 5466271 - DNA, 25 bp, Homo sapien
acctcgtttcgcccacaacaaagat

SEQ ID NO: 5466272 - DNA, 25 bp, Homo sapien
cgtttcgcccacaacaaagatgtct

SEQ ID NO: 5466273 - DNA, 25 bp, Homo sapien
ctcgtttcgcccacaacaaagatgt

SEQ ID NO: 5466274 - DNA, 25 bp, Homo sapien
tcacctcgtttcgcccacaacaaag

SEQ ID NO: 5466275 - DNA, 25 bp, Homo sapien
cagtgcgtgggccacgcgtccgccc

SEQ ID NO: 5466276 - DNA, 25 bp, Homo sapien
ccagtgcgtgggccacgcgtccgcc

SEQ ID NO: 5466277 - DNA, 25 bp, Homo sapien
agtgcgtgggccacgcgtccgccct

SEQ ID NO: 5466278 - DNA, 25 bp, Homo sapien
gctttaaagcttactgccgtaggct

SEQ ID NO: 5466279 - DNA, 25 bp, Homo sapien
tttatcagcttttgtattggcggca

SEQ ID NO: 5466280 - DNA, 25 bp, Homo sapien
gccgtaggctaaccatgctctttta

SEQ ID NO: 5466281 - DNA, 25 bp, Homo sapien
tgagtaaaggaacaagcagtgacac

SEQ ID NO: 5466282 - DNA, 25 bp, Homo sapien
ctgtagaatgtttgcaacatttgtg

SEQ ID NO: 5466283 - DNA, 25 bp, Homo sapien
tgtgatctctatctacaagatgcca

SEQ ID NO: 5466284 - DNA, 25 bp, Homo sapien
catatagtaactcttattcagccat

SEQ ID NO: 5466285 - DNA, 25 bp, Homo sapien
gatgccattaccgtcttccaagtca

SEQ ID NO: 5466286 - DNA, 25 bp, Homo sapien
tgttggtgctgttttgtcgtgtaaa

SEQ ID NO: 5466287 - DNA, 25 bp, Homo sapien
ggtgcagctaaccaggtcctgatat

SEQ ID NO: 5466288 - DNA, 25 bp, Homo sapien
cactttttaagcagagttgtcctct

SEQ ID NO: 5466289 - DNA, 25 bp, Homo sapien
tgagcaactgtggtcataccggtgc

SEQ ID NO: 5466290 - DNA, 25 bp, Homo sapien
ggtaacatcagccctcaaaaatact

SEQ ID NO: 5466291 - DNA, 25 bp, Homo sapien
ggtttcgccgctagaggtaacatca

SEQ ID NO: 5466292 - DNA, 25 bp, Homo sapien
gctggctctggtttcgccgctagag

SEQ ID NO: 5466293 - DNA, 25 bp, Homo sapien
ctggtttcgccgctagaggtaacat

SEQ ID NO: 5466294 - DNA, 25 bp, Homo sapien
taatagacatttttgcatcgacact

SEQ ID NO: 5466295 - DNA, 25 bp, Homo sapien
cattgcagcagtttcatatgtgtgc

SEQ ID NO: 5466296 - DNA, 25 bp, Homo sapien
tcaaagtcatggtctggtgccagat

SEQ ID NO: 5466297 - DNA, 25 bp, Homo sapien
agtccacccaactgattctgaatgg

SEQ ID NO: 5466298 - DNA, 25 bp, Homo sapien
ttttaaagattggcacatatagaaa

SEQ ID NO: 5466299 - DNA, 25 bp, Homo sapien
cacatatagaaaatagcttttgaaa

SEQ ID NO: 5466300 - DNA, 25 bp, Homo sapien
tgataaatacccttgttatcctgtt

SEQ ID NO: 5466301 - DNA, 25 bp, Homo sapien
cattttaatgtgataaatacccttg

SEQ ID NO: 5466302 - DNA, 25 bp, Homo sapien
tacaacgtgctttctacgtgaaggg

SEQ ID NO: 5466303 - DNA, 25 bp, Homo sapien
gaattgccatgtacctgtcacctaa

SEQ ID NO: 5466304 - DNA, 25 bp, Homo sapien
tgtcctagtgttccctgcaagctga

SEQ ID NO: 5466305 - DNA, 25 bp, Homo sapien
tgtgcccgctgacccactttttgga

SEQ ID NO: 5466306 - DNA, 25 bp, Homo sapien
gatacttacattttattcccattaa

SEQ ID NO: 5466307 - DNA, 25 bp, Homo sapien
tgatacttacattttattcccatta

SEQ ID NO: 5466308 - DNA, 25 bp, Homo sapien
tgactatctgactgagcccaaacag

SEQ ID NO: 5466309 - DNA, 25 bp, Homo sapien
tccagaattccaacaagcaatagac

SEQ ID NO: 5466310 - DNA, 25 bp, Homo sapien
gacttcttcgcttagagactccaca

SEQ ID NO: 5466311 - DNA, 25 bp, Homo sapien
gacagccaaggaaaccgatgactat

SEQ ID NO: 5466312 - DNA, 25 bp, Homo sapien
cactcgccatggtgtcgttactggt

SEQ ID NO: 5466313 - DNA, 25 bp, Homo sapien
gtggaaactagatgctctccagcca

SEQ ID NO: 5466314 - DNA, 25 bp, Homo sapien
ccagtaggaggtgcacaagagtcat

SEQ ID NO: 5466315 - DNA, 25 bp, Homo sapien
tactgagaagtggataagcctatgt

SEQ ID NO: 5466316 - DNA, 25 bp, Homo sapien
tatcagcatgcaatacagagcacca

SEQ ID NO: 5466317 - DNA, 25 bp, Homo sapien
acacatgagaggaccttttaagaga

SEQ ID NO: 5466318 - DNA, 25 bp, Homo sapien
ggatatcagcatgcaatacagagca

SEQ ID NO: 5466319 - DNA, 25 bp, Homo sapien
ttaagagagcctggatggatatcag

SEQ ID NO: 5466320 - DNA, 25 bp, Homo sapien
tcagtgtggctttgcttaggtagca

SEQ ID NO: 5466321 - DNA, 25 bp, Homo sapien
tagatgcgagtgactcagtgtggct

SEQ ID NO: 5466322 - DNA, 25 bp, Homo sapien
ttccacgccgactgcttcatactta

SEQ ID NO: 5466323 - DNA, 25 bp, Homo sapien
tgtgattcggtagatgcgagtgact

SEQ ID NO: 5466324 - DNA, 25 bp, Homo sapien
tccagttctgttgttgcagcacgct

SEQ ID NO: 5466325 - DNA, 25 bp, Homo sapien
tgttgcagcacgctctttttcttgc

SEQ ID NO: 5466326 - DNA, 25 bp, Homo sapien
gctgtcaaggacattgttgttgctg

SEQ ID NO: 5466327 - DNA, 25 bp, Homo sapien
tttttcttgctgtcaaggacattgt

SEQ ID NO: 5466328 - DNA, 25 bp, Homo sapien
ctagagtttgttcattctcatcttc

SEQ ID NO: 5466329 - DNA, 25 bp, Homo sapien
ttccctgctgccttcacccttgccc

SEQ ID NO: 5466330 - DNA, 25 bp, Homo sapien
tcttccctgctgccttcacccttgc

SEQ ID NO: 5466331 - DNA, 25 bp, Homo sapien
ccctgctgccttcacccttgcccat

SEQ ID NO: 5466332 - DNA, 25 bp, Homo sapien
ccttccagttactcccactctgatt

SEQ ID NO: 5466333 - DNA, 25 bp, Homo sapien
cattgtccttccagttactcccact

SEQ ID NO: 5466334 - DNA, 25 bp, Homo sapien
tccagttactcccactctgattcat

SEQ ID NO: 5466335 - DNA, 25 bp, Homo sapien
tcattgtccttccagttactcccac

SEQ ID NO: 5466336 - DNA, 25 bp, Homo sapien
cagacctgctcctataattcctggg

SEQ ID NO: 5466337 - DNA, 25 bp, Homo sapien
taagctgacaattagaggtatcgca

SEQ ID NO: 5466338 - DNA, 25 bp, Homo sapien
ggaaccaccactcaaagcaagagat

SEQ ID NO: 5466339 - DNA, 25 bp, Homo sapien
gaatccattgcaggatgtccatcct

SEQ ID NO: 5466340 - DNA, 25 bp, Homo sapien
tggctcagaaacgttgtcaaagtgg

SEQ ID NO: 5466341 - DNA, 25 bp, Homo sapien
gctcagaaacgttgtcaaagtggct

SEQ ID NO: 5466342 - DNA, 25 bp, Homo sapien
ccctggctcagaaacgttgtcaaag

SEQ ID NO: 5466343 - DNA, 25 bp, Homo sapien
cctggctcagaaacgttgtcaaagt

SEQ ID NO: 5466344 - DNA, 25 bp, Homo sapien
catagttccactcgggtttagtact

SEQ ID NO: 5466345 - DNA, 25 bp, Homo sapien
catttgtggctaaaaggaagtatct

SEQ ID NO: 5466346 - DNA, 25 bp, Homo sapien
tgctagtgggcataacatagttcca

SEQ ID NO: 5466347 - DNA, 25 bp, Homo sapien
ggttggactccacctgactgtgaga

SEQ ID NO: 5466348 - DNA, 25 bp, Homo sapien
catttgtgttatggaactttgctcc

SEQ ID NO: 5466349 - DNA, 25 bp, Homo sapien
atgcatagatcctctgtattccatt

SEQ ID NO: 5466350 - DNA, 25 bp, Homo sapien
tatggaactttgctcccctggccat

SEQ ID NO: 5466351 - DNA, 25 bp, Homo sapien
tgtgttatggaactttgctcccctg

SEQ ID NO: 5466352 - DNA, 25 bp, Homo sapien
acagctgtagccacacgagctgcag

SEQ ID NO: 5466353 - DNA, 25 bp, Homo sapien
cacagctgtagccacacgagctgca

SEQ ID NO: 5466354 - DNA, 25 bp, Homo sapien
tcagtctcccctagcattcgggaag

SEQ ID NO: 5466355 - DNA, 25 bp, Homo sapien
caggagtactgattggtcaggaatg

SEQ ID NO: 5466356 - DNA, 25 bp, Homo sapien
caggaatgaaatcatagagagtcga

SEQ ID NO: 5466357 - DNA, 25 bp, Homo sapien
cctaggtggggggtccagatcagat

SEQ ID NO: 5466358 - DNA, 25 bp, Homo sapien
caggttgtgcactctacagatgcac

SEQ ID NO: 5466359 - DNA, 25 bp, Homo sapien
tgcttggtaaggatgttcaggttgt

SEQ ID NO: 5466360 - DNA, 25 bp, Homo sapien
cagcattggcactctttaggcagga

SEQ ID NO: 5466361 - DNA, 25 bp, Homo sapien
acagatgcacatttatcacagccag

SEQ ID NO: 5466362 - DNA, 25 bp, Homo sapien
tacaggaccctgcactagtcagcat

SEQ ID NO: 5466363 - DNA, 25 bp, Homo sapien
caaaagtctggtgtgtatcataggc

SEQ ID NO: 5466364 - DNA, 25 bp, Homo sapien
ttaaccagggttacactgcgactcc

SEQ ID NO: 5466365 - DNA, 25 bp, Homo sapien
tcatagcacttttgtgggagaccac

SEQ ID NO: 5466366 - DNA, 25 bp, Homo sapien
aagtcagccgtcacagtcagcttca

SEQ ID NO: 5466367 - DNA, 25 bp, Homo sapien
cccagagacacaagggttgccaata

SEQ ID NO: 5466368 - DNA, 25 bp, Homo sapien
agaaatatattgcagaagtcagccg

SEQ ID NO: 5466369 - DNA, 25 bp, Homo sapien
gacacaagggttgccaataccggtg

SEQ ID NO: 5466370 - DNA, 25 bp, Homo sapien
caggttggcctcgaatgtgtagcct

SEQ ID NO: 5466371 - DNA, 25 bp, Homo sapien
gtgactgccaccctatgtcctgagc

SEQ ID NO: 5466372 - DNA, 25 bp, Homo sapien
gatggtgcttccagggtgactgcca

SEQ ID NO: 5466373 - DNA, 25 bp, Homo sapien
gaaaactgtgagttgttggaatgac

SEQ ID NO: 5466374 - DNA, 25 bp, Homo sapien
gactctgacactgggtttaccaaag

SEQ ID NO: 5466375 - DNA, 25 bp, Homo sapien
agtaaaattgactctgacactgggt

SEQ ID NO: 5466376 - DNA, 25 bp, Homo sapien
gacactgggtttaccaaagtgcatt

SEQ ID NO: 5466377 - DNA, 25 bp, Homo sapien
ctgttctggactcagtaaaattgac

SEQ ID NO: 5466378 - DNA, 25 bp, Homo sapien
ttctatggtatttgctgacccttgc

SEQ ID NO: 5466379 - DNA, 25 bp, Homo sapien
gtactcatagccttttactgctgag

SEQ ID NO: 5466380 - DNA, 25 bp, Homo sapien
ggtttgagagccaatttctatggta

SEQ ID NO: 5466381 - DNA, 25 bp, Homo sapien
tactgctgaggtttgagagccaatt

SEQ ID NO: 5466382 - DNA, 25 bp, Homo sapien
caatacctctgttgagtcgagttaa

SEQ ID NO: 5466383 - DNA, 25 bp, Homo sapien
cagtgctctggtaatgcattgtaaa

SEQ ID NO: 5466384 - DNA, 25 bp, Homo sapien
ctgttgagtcgagttaatatctgag

SEQ ID NO: 5466385 - DNA, 25 bp, Homo sapien
ttcaccacacgaaacagtccacttt

SEQ ID NO: 5466386 - DNA, 25 bp, Homo sapien
taactgtcttggctctcagagcggg

SEQ ID NO: 5466387 - DNA, 25 bp, Homo sapien
gaacttcaccggctgaaacactgag

SEQ ID NO: 5466388 - DNA, 25 bp, Homo sapien
tagaatgcttctggtgtcgagtaac

SEQ ID NO: 5466389 - DNA, 25 bp, Homo sapien
gatagggcatgatcagggtcatcag

SEQ ID NO: 5466390 - DNA, 25 bp, Homo sapien
aagacagcatgtcacaggctctctc

SEQ ID NO: 5466391 - DNA, 25 bp, Homo sapien
ctctctctggagacctgggcctgct

SEQ ID NO: 5466392 - DNA, 25 bp, Homo sapien
ctaagacagcatgtcacaggctctc

SEQ ID NO: 5466393 - DNA, 25 bp, Homo sapien
gacagcatgtcacaggctctctctg

SEQ ID NO: 5466394 - DNA, 25 bp, Homo sapien
taatcaatgcgctgatgctgaaaac

SEQ ID NO: 5466395 - DNA, 25 bp, Homo sapien
aatcaatgcgctgatgctgaaaaca

SEQ ID NO: 5466396 - DNA, 25 bp, Homo sapien
cataatcaatgcgctgatgctgaaa

SEQ ID NO: 5466397 - DNA, 25 bp, Homo sapien
cagcataatcaatgcgctgatgctg

SEQ ID NO: 5466398 - DNA, 25 bp, Homo sapien
ggcaaggtaatcccctcctctgtcc

SEQ ID NO: 5466399 - DNA, 25 bp, Homo sapien
gggcaaggtaatcccctcctctgtc

SEQ ID NO: 5466400 - DNA, 25 bp, Homo sapien
gagggcaaggtaatcccctcctctg

SEQ ID NO: 5466401 - DNA, 25 bp, Homo sapien
caagagggcaaggtaatcccctcct

SEQ ID NO: 5466402 - DNA, 25 bp, Homo sapien
tagttgcaagggattccaaggctac

SEQ ID NO: 5466403 - DNA, 25 bp, Homo sapien
gattccaaggctacacgtggtatta

SEQ ID NO: 5466404 - DNA, 25 bp, Homo sapien
caagggattccaaggctacacgtgg

SEQ ID NO: 5466405 - DNA, 25 bp, Homo sapien
ctggagcagagagttagttgcaagg

SEQ ID NO: 5466406 - DNA, 25 bp, Homo sapien
gctctgagcaaagggtagccgcaca

SEQ ID NO: 5466407 - DNA, 25 bp, Homo sapien
tggttcacttaacggcagcttctgg

SEQ ID NO: 5466408 - DNA, 25 bp, Homo sapien
tagccgcacacaaggtggttcactt

SEQ ID NO: 5466409 - DNA, 25 bp, Homo sapien
tcaaagtgcagcaatgctctgagca

SEQ ID NO: 5466410 - DNA, 25 bp, Homo sapien
tctctgagtgcacaaaattcagctc

SEQ ID NO: 5466411 - DNA, 25 bp, Homo sapien
ccctgctctctgagtgcacaaaatt

SEQ ID NO: 5466412 - DNA, 25 bp, Homo sapien
tctgagtgcacaaaattcagctcac

SEQ ID NO: 5466413 - DNA, 25 bp, Homo sapien
tgctctctgagtgcacaaaattcag

SEQ ID NO: 5466414 - DNA, 25 bp, Homo sapien
tccaacaacacggacagctggaggg

SEQ ID NO: 5466415 - DNA, 25 bp, Homo sapien
aaaaagtctccaacaacacggacag

SEQ ID NO: 5466416 - DNA, 25 bp, Homo sapien
aagtctccaacaacacggacagctg

SEQ ID NO: 5466417 - DNA, 25 bp, Homo sapien
tctccaacaacacggacagctggag

SEQ ID NO: 5466418 - DNA, 25 bp, Homo sapien
agtgccacagccactggtggtaagg

SEQ ID NO: 5466419 - DNA, 25 bp, Homo sapien
ctagcttctacatccctggtgctct

SEQ ID NO: 5466420 - DNA, 25 bp, Homo sapien
gtctagcttctacatccctggtgct

SEQ ID NO: 5466421 - DNA, 25 bp, Homo sapien
cagtgccacagccactggtggtaag

SEQ ID NO: 5466422 - DNA, 25 bp, Homo sapien
acaccagggtttgtcggggatatag

SEQ ID NO: 5466423 - DNA, 25 bp, Homo sapien
tcggggatatagtctctgactcacc

SEQ ID NO: 5466424 - DNA, 25 bp, Homo sapien
tctgactcaccactagtgataagac

SEQ ID NO: 5466425 - DNA, 25 bp, Homo sapien
taagacaggccaagaacctttaagc

SEQ ID NO: 5466426 - DNA, 25 bp, Homo sapien
tcccgcacaaccgaaagtgcttcga

SEQ ID NO: 5466427 - DNA, 25 bp, Homo sapien
cacctacgttaacatgacggtcggc

SEQ ID NO: 5466428 - DNA, 25 bp, Homo sapien
tcggctccttcgtgtgtacctcctg

SEQ ID NO: 5466429 - DNA, 25 bp, Homo sapien
agtgcttcgactgcgaccagcgcgg

SEQ ID NO: 5466430 - DNA, 25 bp, Homo sapien
gaatagtagcaggatgaaagcatct

SEQ ID NO: 5466431 - DNA, 25 bp, Homo sapien
gaagcaggcacttaggaatagtagc

SEQ ID NO: 5466432 - DNA, 25 bp, Homo sapien
tccatgcgggtcctttgtgtgcccc

SEQ ID NO: 5466433 - DNA, 25 bp, Homo sapien
tttctgggtcgagagtacctacgta

SEQ ID NO: 5466434 - DNA, 25 bp, Homo sapien
cgaaacaaatgaagtgtaacttgtc

SEQ ID NO: 5466435 - DNA, 25 bp, Homo sapien
tgaaagatgacatttatctgtgaca

SEQ ID NO: 5466436 - DNA, 25 bp, Homo sapien
cttctcctttgtgttttgacaagca

SEQ ID NO: 5466437 - DNA, 25 bp, Homo sapien
gaagcagtgaattgaggagcttctc

SEQ ID NO: 5466438 - DNA, 25 bp, Homo sapien
gtgaaatctatctccatgacaacat

SEQ ID NO: 5466439 - DNA, 25 bp, Homo sapien
ggtgaaatctatctccatgacaaca

SEQ ID NO: 5466440 - DNA, 25 bp, Homo sapien
tgaaatctatctccatgacaacatt

SEQ ID NO: 5466441 - DNA, 25 bp, Homo sapien
gaaatctatctccatgacaacattc

SEQ ID NO: 5466442 - DNA, 25 bp, Homo sapien
gaacctgctgtcctaggtagctaca

SEQ ID NO: 5466443 - DNA, 25 bp, Homo sapien
ggacaatctcatactggcctgtgat

SEQ ID NO: 5466444 - DNA, 25 bp, Homo sapien
cagtggttcaccagcttgtctgcct

SEQ ID NO: 5466445 - DNA, 25 bp, Homo sapien
tcttatggcaggtgagcagtggttc

SEQ ID NO: 5466446 - DNA, 25 bp, Homo sapien
ctgtaaacagatttggctaggatta

SEQ ID NO: 5466447 - DNA, 25 bp, Homo sapien
tgatgatagatcttcagcaattcca

SEQ ID NO: 5466448 - DNA, 25 bp, Homo sapien
gattatttgatgatagatcttcagc

SEQ ID NO: 5466449 - DNA, 25 bp, Homo sapien
cagatttggctaggattatttgatg

SEQ ID NO: 5466450 - DNA, 25 bp, Homo sapien
tggagtctcactcccttgttcacac

SEQ ID NO: 5466451 - DNA, 25 bp, Homo sapien
actcccttgttcacactggtgtgca

SEQ ID NO: 5466452 - DNA, 25 bp, Homo sapien
tctcactcccttgttcacactggtg

SEQ ID NO: 5466453 - DNA, 25 bp, Homo sapien
gagtctcactcccttgttcacactg

SEQ ID NO: 5466454 - DNA, 25 bp, Homo sapien
taatatgtgcaaaaccgagggctcc

SEQ ID NO: 5466455 - DNA, 25 bp, Homo sapien
cgagggctccagtaacaccttctaa

SEQ ID NO: 5466456 - DNA, 25 bp, Homo sapien
tatagacaatttactggaacgaact

SEQ ID NO: 5466457 - DNA, 25 bp, Homo sapien
tggcagaaaagggtagcggtatcat

SEQ ID NO: 5466458 - DNA, 25 bp, Homo sapien
cattagtgtaaggaccgctacccag

SEQ ID NO: 5466459 - DNA, 25 bp, Homo sapien
aaaatgtagagggatacctgtctgc

SEQ ID NO: 5466460 - DNA, 25 bp, Homo sapien
ttgaattctcagactgcaaaaggcc

SEQ ID NO: 5466461 - DNA, 25 bp, Homo sapien
tctgagagcatacactgtccaaggc

SEQ ID NO: 5466462 - DNA, 25 bp, Homo sapien
gaaagaagcaaagcatagagaggtt

SEQ ID NO: 5466463 - DNA, 25 bp, Homo sapien
tcatctcttacaatccctgcagtgg

SEQ ID NO: 5466464 - DNA, 25 bp, Homo sapien
cttcaaggtaataatagcagtggta

SEQ ID NO: 5466465 - DNA, 25 bp, Homo sapien
tagagaggttaagctagtggcagct

SEQ ID NO: 5466466 - DNA, 25 bp, Homo sapien
tttagagatatactgggcactgagg

SEQ ID NO: 5466467 - DNA, 25 bp, Homo sapien
gatgaaagagatagccaaccagtgg

SEQ ID NO: 5466468 - DNA, 25 bp, Homo sapien
taatccagtgttgtgctgctgaatg

SEQ ID NO: 5466469 - DNA, 25 bp, Homo sapien
taatatggtaactagtggagcgtgc

SEQ ID NO: 5466470 - DNA, 25 bp, Homo sapien
gaagactatcgccaagaatgcatat

SEQ ID NO: 5466471 - DNA, 25 bp, Homo sapien
cctcattcttgagtggagagacaga

SEQ ID NO: 5466472 - DNA, 25 bp, Homo sapien
tgcttgtccaacacagggctgtagg

SEQ ID NO: 5466473 - DNA, 25 bp, Homo sapien
gctgtagggactgatgaaaagagaa

SEQ ID NO: 5466474 - DNA, 25 bp, Homo sapien
gaagaatacttgtcctaatagctca

SEQ ID NO: 5466475 - DNA, 25 bp, Homo sapien
taacaggaccttctagtcagcaggg

SEQ ID NO: 5466476 - DNA, 25 bp, Homo sapien
tattggatgaaaacttacaggctgt

SEQ ID NO: 5466477 - DNA, 25 bp, Homo sapien
taatacgccatgatttttgaagacc

SEQ ID NO: 5466478 - DNA, 25 bp, Homo sapien
tgaactgtgtttgtcacatccctaa

SEQ ID NO: 5466479 - DNA, 25 bp, Homo sapien
tttctggagtacacattgatggaag

SEQ ID NO: 5466480 - DNA, 25 bp, Homo sapien
gaaagcattgtaatgggaatttacc

SEQ ID NO: 5466481 - DNA, 25 bp, Homo sapien
tattttcactaaccatcaccagaac

SEQ ID NO: 5466482 - DNA, 25 bp, Homo sapien
ggtgagtttccagactattgaaaac

SEQ ID NO: 5466483 - DNA, 25 bp, Homo sapien
tggtggttgaactgaacaaaggagc

SEQ ID NO: 5466484 - DNA, 25 bp, Homo sapien
actggcggacaagtctctctggagg

SEQ ID NO: 5466485 - DNA, 25 bp, Homo sapien
ggtcacaggatgggcatcatttgcc

SEQ ID NO: 5466486 - DNA, 25 bp, Homo sapien
tctgtctctggcccatataccttac

SEQ ID NO: 5466487 - DNA, 25 bp, Homo sapien
taaatggattcttggtgatgtgacc

SEQ ID NO: 5466488 - DNA, 25 bp, Homo sapien
cactggccttgtaaatggctttaaa

SEQ ID NO: 5466489 - DNA, 25 bp, Homo sapien
cactgttcgatacccatcatcactg

SEQ ID NO: 5466490 - DNA, 25 bp, Homo sapien
tggtgatgtgaccacctgatgtcat

SEQ ID NO: 5466491 - DNA, 25 bp, Homo sapien
caggtgccctgcctagcagcagcat

SEQ ID NO: 5466492 - DNA, 25 bp, Homo sapien
cagcaggatttctgttggcaacagc

SEQ ID NO: 5466493 - DNA, 25 bp, Homo sapien
ttggcagcaggatttctgttggcaa

SEQ ID NO: 5466494 - DNA, 25 bp, Homo sapien
gcttttggcagcaggatttctgttg

SEQ ID NO: 5466495 - DNA, 25 bp, Homo sapien
ctgcaagggacccttaaatactgct

SEQ ID NO: 5466496 - DNA, 25 bp, Homo sapien
gggcttggcacatgactatagtcac

SEQ ID NO: 5466497 - DNA, 25 bp, Homo sapien
ctcaggggtgtacacaacttgattt

SEQ ID NO: 5466498 - DNA, 25 bp, Homo sapien
tgttttggccactttccgtggcaaa

SEQ ID NO: 5466499 - DNA, 25 bp, Homo sapien
aagtgggcataagaagggttgcagc

SEQ ID NO: 5466500 - DNA, 25 bp, Homo sapien
tatggaagtgggcataagaagggtt

SEQ ID NO: 5466501 - DNA, 25 bp, Homo sapien
tattgtcaagtgataggaagggagt

SEQ ID NO: 5466502 - DNA, 25 bp, Homo sapien
gggttgcagcttgtggtattgtcaa

SEQ ID NO: 5466503 - DNA, 25 bp, Homo sapien
ctcctcctccatggttaaccgaaga

SEQ ID NO: 5466504 - DNA, 25 bp, Homo sapien
ctccatggttaaccgaagaagagga

SEQ ID NO: 5466505 - DNA, 25 bp, Homo sapien
ttaaccgaagaagaggaggactgac

SEQ ID NO: 5466506 - DNA, 25 bp, Homo sapien
aaggggtcggagaaggcatccaaca

SEQ ID NO: 5466507 - DNA, 25 bp, Homo sapien
aggggagaagataggaagtagtcat

SEQ ID NO: 5466508 - DNA, 25 bp, Homo sapien
gagaagataggaagtagtcattgta

SEQ ID NO: 5466509 - DNA, 25 bp, Homo sapien
aaggggagaagataggaagtagtca

SEQ ID NO: 5466510 - DNA, 25 bp, Homo sapien
gaacgtaggacgtcctgggactcca

SEQ ID NO: 5466511 - DNA, 25 bp, Homo sapien
taaaatctgaacgtaggacgtcctg

SEQ ID NO: 5466512 - DNA, 25 bp, Homo sapien
ctctttggtcaatgtgtgaatgtgc

SEQ ID NO: 5466513 - DNA, 25 bp, Homo sapien
tccaaatccaccgttaaaatctgaa

SEQ ID NO: 5466514 - DNA, 25 bp, Homo sapien
tctactgacaccatgggttgctgtg

SEQ ID NO: 5466515 - DNA, 25 bp, Homo sapien
ctactgacaccatgggttgctgtgg

SEQ ID NO: 5466516 - DNA, 25 bp, Homo sapien
ctctactgacaccatgggttgctgt

SEQ ID NO: 5466517 - DNA, 25 bp, Homo sapien
cccagccgctgaacttgtagctgtt

SEQ ID NO: 5466518 - DNA, 25 bp, Homo sapien
ctgcaacctcctgaagctggccatg

SEQ ID NO: 5466519 - DNA, 25 bp, Homo sapien
gcccagccgctgaacttgtagctgt

SEQ ID NO: 5466520 - DNA, 25 bp, Homo sapien
actcctgcaacctcctgaagctggc

SEQ ID NO: 5466521 - DNA, 25 bp, Homo sapien
tctgtgtactcggactctcccaagg

SEQ ID NO: 5466522 - DNA, 25 bp, Homo sapien
ggtctgtgtactcggactctcccaa

SEQ ID NO: 5466523 - DNA, 25 bp, Homo sapien
tgtactcggactctcccaaggattt

SEQ ID NO: 5466524 - DNA, 25 bp, Homo sapien
tgtgtactcggactctcccaaggat

SEQ ID NO: 5466525 - DNA, 25 bp, Homo sapien
aaagtgacttggaaacgttctgctc

SEQ ID NO: 5466526 - DNA, 25 bp, Homo sapien
agcattatcctcctttcttaacagg

SEQ ID NO: 5466527 - DNA, 25 bp, Homo sapien
gggactgccagaaacatgccttcag

SEQ ID NO: 5466528 - DNA, 25 bp, Homo sapien
ggactggtccaggatcaaccaggct

SEQ ID NO: 5466529 - DNA, 25 bp, Homo sapien
gacgccatgggttgctgtggttgtg

SEQ ID NO: 5466530 - DNA, 25 bp, Homo sapien
tggttgtggtggctgcggtggccgc

SEQ ID NO: 5466531 - DNA, 25 bp, Homo sapien
tgacgccatgggttgctgtggttgt

SEQ ID NO: 5466532 - DNA, 25 bp, Homo sapien
tgcggtggccgctgcagtggtggct

SEQ ID NO: 5466533 - DNA, 25 bp, Homo sapien
ctgtgatctgctgctgccgccgcac

SEQ ID NO: 5466534 - DNA, 25 bp, Homo sapien
aatgctgctgttaggtgggctggcc

SEQ ID NO: 5466535 - DNA, 25 bp, Homo sapien
aagcaatgctgctgttaggtgggct

SEQ ID NO: 5466536 - DNA, 25 bp, Homo sapien
gcaatgctgctgttaggtgggctgg

SEQ ID NO: 5466537 - DNA, 25 bp, Homo sapien
tgctgctgttaggtgggctggcctg

SEQ ID NO: 5466538 - DNA, 25 bp, Homo sapien
tttgccatggtatccctgtcagagg

SEQ ID NO: 5466539 - DNA, 25 bp, Homo sapien
tgtcgaccaatgctcatcaagagac

SEQ ID NO: 5466540 - DNA, 25 bp, Homo sapien
gactcctagatataggctgggcctg

SEQ ID NO: 5466541 - DNA, 25 bp, Homo sapien
caaccacagaattaatgccatcagg

SEQ ID NO: 5466542 - DNA, 25 bp, Homo sapien
tcccctgaaaccatctagaatggct

SEQ ID NO: 5466543 - DNA, 25 bp, Homo sapien
tggacttttcattacatgctccctc

SEQ ID NO: 5466544 - DNA, 25 bp, Homo sapien
tttcattacatgctccctccctcac

SEQ ID NO: 5466545 - DNA, 25 bp, Homo sapien
ctctgtggacttttcattacatgct

SEQ ID NO: 5466546 - DNA, 25 bp, Homo sapien
cgaatcttgtggcttcttgttctct

SEQ ID NO: 5466547 - DNA, 25 bp, Homo sapien
cccgcagggtgaatgaaggtcagcc

SEQ ID NO: 5466548 - DNA, 25 bp, Homo sapien
tcagcccgcatgtctgtacggtaag

SEQ ID NO: 5466549 - DNA, 25 bp, Homo sapien
ggcagtgctggagagagtttcggct

SEQ ID NO: 5466550 - DNA, 25 bp, Homo sapien
gggtcccaaggctctagtttctcag

SEQ ID NO: 5466551 - DNA, 25 bp, Homo sapien
agctgagaaccatcacaagggaggg

SEQ ID NO: 5466552 - DNA, 25 bp, Homo sapien
taagatggatgaactggcacttctc

SEQ ID NO: 5466553 - DNA, 25 bp, Homo sapien
cttagcgtaagatggatgaactggc

SEQ ID NO: 5466554 - DNA, 25 bp, Homo sapien
tccagctgagaaccatcacaaggga

SEQ ID NO: 5466555 - DNA, 25 bp, Homo sapien
ctccaaaccctctcttctgaatttc

SEQ ID NO: 5466556 - DNA, 25 bp, Homo sapien
aggtggaaggaaaactgtctttctg

SEQ ID NO: 5466557 - DNA, 25 bp, Homo sapien
tctgaatttcaaggtggaaggaaaa

SEQ ID NO: 5466558 - DNA, 25 bp, Homo sapien
ggaaaactgtctttctgtgacagca

SEQ ID NO: 5466559 - DNA, 25 bp, Homo sapien
tcccctctttggaaatcttatttga

SEQ ID NO: 5466560 - DNA, 25 bp, Homo sapien
cctctttggaaatcttatttgacat

SEQ ID NO: 5466561 - DNA, 25 bp, Homo sapien
ccctctttggaaatcttatttgaca

SEQ ID NO: 5466562 - DNA, 25 bp, Homo sapien
gaggctgagggccctacctaacagc

SEQ ID NO: 5466563 - DNA, 25 bp, Homo sapien
aggctgagggccctacctaacagca

SEQ ID NO: 5466564 - DNA, 25 bp, Homo sapien
ggctgagggccctacctaacagcag

SEQ ID NO: 5466565 - DNA, 25 bp, Homo sapien
gtgagaatttgtgaccaacaagaag

SEQ ID NO: 5466566 - DNA, 25 bp, Homo sapien
tgagaatttgtgaccaacaagaagc

SEQ ID NO: 5466567 - DNA, 25 bp, Homo sapien
tgtgagaatttgtgaccaacaagaa

SEQ ID NO: 5466568 - DNA, 25 bp, Homo sapien
gcaacaacaaggaagtgaccactgg

SEQ ID NO: 5466569 - DNA, 25 bp, Homo sapien
taacccgaagtctcaaggattcaag

SEQ ID NO: 5466570 - DNA, 25 bp, Homo sapien
caagatggtacataagggtgtcccc

SEQ ID NO: 5466571 - DNA, 25 bp, Homo sapien
gataaccttatcatggaaactgcag

SEQ ID NO: 5466572 - DNA, 25 bp, Homo sapien
tcgtgtggctgtggctatgggaagg

SEQ ID NO: 5466573 - DNA, 25 bp, Homo sapien
cgtgtggctgtggctatgggaaggg

SEQ ID NO: 5466574 - DNA, 25 bp, Homo sapien
aggtatctgccctgtaggtaagact

SEQ ID NO: 5466575 - DNA, 25 bp, Homo sapien
caactcctcgtgtttggtctgatgg

SEQ ID NO: 5466576 - DNA, 25 bp, Homo sapien
caaactaataggaacgatctcatgg

SEQ ID NO: 5466577 - DNA, 25 bp, Homo sapien
tagttccacttttcccatcggcatg

SEQ ID NO: 5466578 - DNA, 25 bp, Homo sapien
tcatggctatgcagctccgtcttag

SEQ ID NO: 5466579 - DNA, 25 bp, Homo sapien
tctctagcttccacactttttctga

SEQ ID NO: 5466580 - DNA, 25 bp, Homo sapien
ttaacgaagagcatgttgctctttc

SEQ ID NO: 5466581 - DNA, 25 bp, Homo sapien
tagcttccacactttttctgactgt

SEQ ID NO: 5466582 - DNA, 25 bp, Homo sapien
taacgaagagcatgttgctctttcc

SEQ ID NO: 5466583 - DNA, 25 bp, Homo sapien
ctggcttttggcgagggctttgctt

SEQ ID NO: 5466584 - DNA, 25 bp, Homo sapien
cagcatctggctggcttttggcgag

SEQ ID NO: 5466585 - DNA, 25 bp, Homo sapien
ctggctggcttttggcgagggcttt

SEQ ID NO: 5466586 - DNA, 25 bp, Homo sapien
ccaagatcaggtggcagcatctggc

SEQ ID NO: 5466587 - DNA, 25 bp, Homo sapien
tgaatgtcaacaggaagccccagtc

SEQ ID NO: 5466588 - DNA, 25 bp, Homo sapien
aacaggaagccccagtccttggttg

SEQ ID NO: 5466589 - DNA, 25 bp, Homo sapien
ctgaatgtcaacaggaagccccagt

SEQ ID NO: 5466590 - DNA, 25 bp, Homo sapien
agccccagtccttggttgtcaacca

SEQ ID NO: 5466591 - DNA, 25 bp, Homo sapien
gcaatgaagggattaattccaaacg

SEQ ID NO: 5466592 - DNA, 25 bp, Homo sapien
ggttgaatcatcaaggcaatgaagg

SEQ ID NO: 5466593 - DNA, 25 bp, Homo sapien
tcatcgtcacgatgggttgaatcat

SEQ ID NO: 5466594 - DNA, 25 bp, Homo sapien
caaacgtcagggcatagtcttccat

SEQ ID NO: 5466595 - DNA, 25 bp, Homo sapien
cagagatagactgaagaaatagaca

SEQ ID NO: 5466596 - DNA, 25 bp, Homo sapien
aaacagcgaattgtgttcttctcaa

SEQ ID NO: 5466597 - DNA, 25 bp, Homo sapien
cacacacatgcgcattcaaatacaa

SEQ ID NO: 5466598 - DNA, 25 bp, Homo sapien
tagacaaatgggatggtgcaatgta

SEQ ID NO: 5466599 - DNA, 25 bp, Homo sapien
gaccaattgaatttaggctttcgta

SEQ ID NO: 5466600 - DNA, 25 bp, Homo sapien
taggctttcgtaaatcatagactgg

SEQ ID NO: 5466601 - DNA, 25 bp, Homo sapien
tcatagactggagaggacccatgga

SEQ ID NO: 5466602 - DNA, 25 bp, Homo sapien
tctcttaagggttgaaatagaccaa

SEQ ID NO: 5466603 - DNA, 25 bp, Homo sapien
taaaagagatgcttcgaggagtagc

SEQ ID NO: 5466604 - DNA, 25 bp, Homo sapien
aagatggcgtcctctcctggtggct

SEQ ID NO: 5466605 - DNA, 25 bp, Homo sapien
aaatcccgggaccactgcacaaaat

SEQ ID NO: 5466606 - DNA, 25 bp, Homo sapien
ggagtagcactcctgcaaatcccgg

SEQ ID NO: 5466607 - DNA, 25 bp, Homo sapien
tatatgtaggcgtagtaagccacct

SEQ ID NO: 5466608 - DNA, 25 bp, Homo sapien
cacgctgtatatgtaggcgtagtaa

SEQ ID NO: 5466609 - DNA, 25 bp, Homo sapien
gctgtatatgtaggcgtagtaagcc

SEQ ID NO: 5466610 - DNA, 25 bp, Homo sapien
gtatatgtaggcgtagtaagccacc

SEQ ID NO: 5466611 - DNA, 25 bp, Homo sapien
ctctacaacctgcacggtcttcact

SEQ ID NO: 5466612 - DNA, 25 bp, Homo sapien
tctacaacctgcacggtcttcactc

SEQ ID NO: 5466613 - DNA, 25 bp, Homo sapien
taatcggtgaggacaaacacaagca

SEQ ID NO: 5466614 - DNA, 25 bp, Homo sapien
tccaaacggggaagatctcatctgt

SEQ ID NO: 5466615 - DNA, 25 bp, Homo sapien
gatgactggcttgtagcggacgtaa

SEQ ID NO: 5466616 - DNA, 25 bp, Homo sapien
gactggcttgtagcggacgtaatcg

SEQ ID NO: 5466617 - DNA, 25 bp, Homo sapien
tgacttcacactgaatccagaccga

SEQ ID NO: 5466618 - DNA, 25 bp, Homo sapien
ctgcgatggacagcaggttgacttc

SEQ ID NO: 5466619 - DNA, 25 bp, Homo sapien
tagagggcagtgtgattacagctac

SEQ ID NO: 5466620 - DNA, 25 bp, Homo sapien
cccgagggttacactagagggcagt

SEQ ID NO: 5466621 - DNA, 25 bp, Homo sapien
catttgtaggtagaaaaggttctgc

SEQ ID NO: 5466622 - DNA, 25 bp, Homo sapien
tttgtaggtagaaaaggttctgctg

SEQ ID NO: 5466623 - DNA, 25 bp, Homo sapien
atttgtaggtagaaaaggttctgct

SEQ ID NO: 5466624 - DNA, 25 bp, Homo sapien
ggggttgcattgtctgtccctgagc

SEQ ID NO: 5466625 - DNA, 25 bp, Homo sapien
ccctgagccgcaaggcccctcctct

SEQ ID NO: 5466626 - DNA, 25 bp, Homo sapien
cctgagccgcaaggcccctcctctc

SEQ ID NO: 5466627 - DNA, 25 bp, Homo sapien
cacggggttgcattgtctgtccctg

SEQ ID NO: 5466628 - DNA, 25 bp, Homo sapien
ttgcctgctctagcacttctgtcct

SEQ ID NO: 5466629 - DNA, 25 bp, Homo sapien
gaacttggaactgagattccagtct

SEQ ID NO: 5466630 - DNA, 25 bp, Homo sapien
ttcctcatgctctcatgcttttcag

SEQ ID NO: 5466631 - DNA, 25 bp, Homo sapien
gcacaactccaagggtgaacttgga

SEQ ID NO: 5466632 - DNA, 25 bp, Homo sapien
tgacaccatgggttgctgtggttgt

SEQ ID NO: 5466633 - DNA, 25 bp, Homo sapien
ttgtggaggttgtggtggctgcggt

SEQ ID NO: 5466634 - DNA, 25 bp, Homo sapien
tggttgtggaggttgtggtggctgc

SEQ ID NO: 5466635 - DNA, 25 bp, Homo sapien
ctgtggttgtggaggttgtggtggc

SEQ ID NO: 5466636 - DNA, 25 bp, Homo sapien
gaagagctttggttctcggaatctc

SEQ ID NO: 5466637 - DNA, 25 bp, Homo sapien
tcagaagagctttggttctcggaat

SEQ ID NO: 5466638 - DNA, 25 bp, Homo sapien
agagctttggttctcggaatctcaa

SEQ ID NO: 5466639 - DNA, 25 bp, Homo sapien
agctttggttctcggaatctcaatt

SEQ ID NO: 5466640 - DNA, 25 bp, Homo sapien
gtttgattgttggtttgtttgttca

SEQ ID NO: 5466641 - DNA, 25 bp, Homo sapien
tgtttgattgttggtttgtttgttc

SEQ ID NO: 5466642 - DNA, 25 bp, Homo sapien
gattgttggtttgtttgttcaagac

SEQ ID NO: 5466643 - DNA, 25 bp, Homo sapien
ttgattgttggtttgtttgttcaag

SEQ ID NO: 5466644 - DNA, 25 bp, Homo sapien
gcatcccttattgaagtttcttgaa

SEQ ID NO: 5466645 - DNA, 25 bp, Homo sapien
tatataggaagcgtggcaacatctg

SEQ ID NO: 5466646 - DNA, 25 bp, Homo sapien
aggcttcacacccatgatccagtcg

SEQ ID NO: 5466647 - DNA, 25 bp, Homo sapien
tgtcagactgctcaatgcatccctt

SEQ ID NO: 5466648 - DNA, 25 bp, Homo sapien
atttagcacaattgctaccatttaa

SEQ ID NO: 5466649 - DNA, 25 bp, Homo sapien
tatttagcacaattgctaccattta

SEQ ID NO: 5466650 - DNA, 25 bp, Homo sapien
tttagcacaattgctaccatttaaa

SEQ ID NO: 5466651 - DNA, 25 bp, Homo sapien
aggcgtggtggtgtgcacccatagt

SEQ ID NO: 5466652 - DNA, 25 bp, Homo sapien
gcgtggtggtgtgcacccatagtcc

SEQ ID NO: 5466653 - DNA, 25 bp, Homo sapien
tgaactcaggaggtgaagtttgcag

SEQ ID NO: 5466654 - DNA, 25 bp, Homo sapien
cagctacttgggaggctgaggtagg

SEQ ID NO: 5466655 - DNA, 25 bp, Homo sapien
accacacaggtgctcttttttggga

SEQ ID NO: 5466656 - DNA, 25 bp, Homo sapien
ttattccactccccccatcagtgtt

SEQ ID NO: 5466657 - DNA, 25 bp, Homo sapien
gacaccacacaggtgctcttttttg

SEQ ID NO: 5466658 - DNA, 25 bp, Homo sapien
ttccactccccccatcagtgttttc

SEQ ID NO: 5466659 - DNA, 25 bp, Homo sapien
ctctgactcctgtgctcaacccatc

SEQ ID NO: 5466660 - DNA, 25 bp, Homo sapien
agtagagtcaggtgtcactgtgttg

SEQ ID NO: 5466661 - DNA, 25 bp, Homo sapien
tcccaccatggcctcccaagtagct

SEQ ID NO: 5466662 - DNA, 25 bp, Homo sapien
tttagtagagtcaggtgtcactgtg

SEQ ID NO: 5466663 - DNA, 25 bp, Homo sapien
tggcccatagatgcattaacacctg

SEQ ID NO: 5466664 - DNA, 25 bp, Homo sapien
cacctgtctatggtggtggagagaa

SEQ ID NO: 5466665 - DNA, 25 bp, Homo sapien
tgttattagagttgaagagaagccc

SEQ ID NO: 5466666 - DNA, 25 bp, Homo sapien
tacacaagaggatctgaagctattc

SEQ ID NO: 5466667 - DNA, 25 bp, Homo sapien
tgaatatcaactccaggatggctgg

SEQ ID NO: 5466668 - DNA, 25 bp, Homo sapien
aaagccactgttgcgtttgttgcga

SEQ ID NO: 5466669 - DNA, 25 bp, Homo sapien
taagcctagcaatagggtcagtcca

SEQ ID NO: 5466670 - DNA, 25 bp, Homo sapien
gacgggtcctgtcaattgcatccag

SEQ ID NO: 5466671 - DNA, 25 bp, Homo sapien
tctgggtgagacacatctggattct

SEQ ID NO: 5466672 - DNA, 25 bp, Homo sapien
taggaaaattccagcaattactgca

SEQ ID NO: 5466673 - DNA, 25 bp, Homo sapien
tctgtacatccttctgggatttggt

SEQ ID NO: 5466674 - DNA, 25 bp, Homo sapien
aatatacatgcttctcattaggaaa

SEQ ID NO: 5466675 - DNA, 25 bp, Homo sapien
tgaatgctgactggcaagttgagcc

SEQ ID NO: 5466676 - DNA, 25 bp, Homo sapien
tcatgatggtctgaatcaccaaggc

SEQ ID NO: 5466677 - DNA, 25 bp, Homo sapien
aaataccaaggcatagcgttccaca

SEQ ID NO: 5466678 - DNA, 25 bp, Homo sapien
cgttccacattcagattaactgcaa

SEQ ID NO: 5466679 - DNA, 25 bp, Homo sapien
taagaagcatatagctggacttgaa

SEQ ID NO: 5466680 - DNA, 25 bp, Homo sapien
cagaaggtcccagttgactttcaca

SEQ ID NO: 5466681 - DNA, 25 bp, Homo sapien
taaagaaccggcattgacaactgag

SEQ ID NO: 5466682 - DNA, 25 bp, Homo sapien
gcatagcacgcccagatattggctg

SEQ ID NO: 5466683 - DNA, 25 bp, Homo sapien
taaaacctgctgtggcgaaagccca

SEQ ID NO: 5466684 - DNA, 25 bp, Homo sapien
gaaagcccaccatagagaccagtag

SEQ ID NO: 5466685 - DNA, 25 bp, Homo sapien
ggttgcaatagcttctacggcccca

SEQ ID NO: 5466686 - DNA, 25 bp, Homo sapien
gaagaatcttgggatggcgccttgt

SEQ ID NO: 5466687 - DNA, 25 bp, Homo sapien
gcctggtgcttcaccttcgtgagtt

SEQ ID NO: 5466688 - DNA, 25 bp, Homo sapien
taatactggattcacgcttgatgac

SEQ ID NO: 5466689 - DNA, 25 bp, Homo sapien
ttcgtgagtttcctctaatactgga

SEQ ID NO: 5466690 - DNA, 25 bp, Homo sapien
gtatttctgatgtgggtttctgctc

SEQ ID NO: 5466691 - DNA, 25 bp, Homo sapien
cagggataccaagagttgagccagc

SEQ ID NO: 5466692 - DNA, 25 bp, Homo sapien
tatatgtaggcgtagtaggccacct

SEQ ID NO: 5466693 - DNA, 25 bp, Homo sapien
tgaggtaaaagtacgacatgttcgc

SEQ ID NO: 5466694 - DNA, 25 bp, Homo sapien
agcaccgaccctgctgtgtaggcgg

SEQ ID NO: 5466695 - DNA, 25 bp, Homo sapien
gactggcttgtagcggacataatcg

SEQ ID NO: 5466696 - DNA, 25 bp, Homo sapien
gatgactggcttgtagcggacataa

SEQ ID NO: 5466697 - DNA, 25 bp, Homo sapien
tgtccaaacggggaagatctcattt

SEQ ID NO: 5466698 - DNA, 25 bp, Homo sapien
tccaaacggggaagatctcatttgt

SEQ ID NO: 5466699 - DNA, 25 bp, Homo sapien
tggatcactgaggttgctggagaaa

SEQ ID NO: 5466700 - DNA, 25 bp, Homo sapien
cgagaagcagaacccagtggattca

SEQ ID NO: 5466701 - DNA, 25 bp, Homo sapien
taactggtccacagtggctcgagaa

SEQ ID NO: 5466702 - DNA, 25 bp, Homo sapien
gagggaaggtctgttaactggtcca

SEQ ID NO: 5466703 - DNA, 25 bp, Homo sapien
gggttgtccctaagtgatctgatgc

SEQ ID NO: 5466704 - DNA, 25 bp, Homo sapien
gagcaactcggaaacagggttgtcc

SEQ ID NO: 5466705 - DNA, 25 bp, Homo sapien
cagcccagggtaattttgcagttag

SEQ ID NO: 5466706 - DNA, 25 bp, Homo sapien
tcttataaagaaatgcgaggccggt

SEQ ID NO: 5466707 - DNA, 25 bp, Homo sapien
cacaaatgttaggactctatgcaag

SEQ ID NO: 5466708 - DNA, 25 bp, Homo sapien
gaaaagttctatatgggacacatat

SEQ ID NO: 5466709 - DNA, 25 bp, Homo sapien
cctgtatccttgttcaagtcccata

SEQ ID NO: 5466710 - DNA, 25 bp, Homo sapien
caggctcactgagtttaatgtgttc

SEQ ID NO: 5466711 - DNA, 25 bp, Homo sapien
aaaccaaataagcagaggatcacag

SEQ ID NO: 5466712 - DNA, 25 bp, Homo sapien
cacagtggggtaaatccaggaactg

SEQ ID NO: 5466713 - DNA, 25 bp, Homo sapien
caaataagcagaggatcacagtggg

SEQ ID NO: 5466714 - DNA, 25 bp, Homo sapien
ggtcaggtttttatctggtccagat

SEQ ID NO: 5466715 - DNA, 25 bp, Homo sapien
ggaagatccaagatgcccaaacact

SEQ ID NO: 5466716 - DNA, 25 bp, Homo sapien
tccttgatgcgatgaaaacctgatt

SEQ ID NO: 5466717 - DNA, 25 bp, Homo sapien
catgtggctaagttctctgagatac

SEQ ID NO: 5466718 - DNA, 25 bp, Homo sapien
cccagaggagcatatggaagatcca

SEQ ID NO: 5466719 - DNA, 25 bp, Homo sapien
acctttgctgaccacggatttgttc

SEQ ID NO: 5466720 - DNA, 25 bp, Homo sapien
gctgaccacggatttgttctctaaa

SEQ ID NO: 5466721 - DNA, 25 bp, Homo sapien
gcatctgctggctctatatccagag

SEQ ID NO: 5466722 - DNA, 25 bp, Homo sapien
gaagagtggtcttgctggggtagca

SEQ ID NO: 5466723 - DNA, 25 bp, Homo sapien
ataacgcaaaaattagtcggttgcg

SEQ ID NO: 5466724 - DNA, 25 bp, Homo sapien
acgcaaaaattagtcggttgcggtg

SEQ ID NO: 5466725 - DNA, 25 bp, Homo sapien
cttggtggacttggacgcacaggag

SEQ ID NO: 5466726 - DNA, 25 bp, Homo sapien
acttggacgcacaggagagagttta

SEQ ID NO: 5466727 - DNA, 25 bp, Homo sapien
ggtggacttggacgcacaggagaga

SEQ ID NO: 5466728 - DNA, 25 bp, Homo sapien
tggacttggacgcacaggagagagt

SEQ ID NO: 5466729 - DNA, 25 bp, Homo sapien
aaactttccaactggctgcaggcta

SEQ ID NO: 5466730 - DNA, 25 bp, Homo sapien
aaattacttcattgctaggatctca

SEQ ID NO: 5466731 - DNA, 25 bp, Homo sapien
gcaggctaaccttctttgatagata

SEQ ID NO: 5466732 - DNA, 25 bp, Homo sapien
tatagtgactgcaagataagttcat

SEQ ID NO: 5466733 - DNA, 25 bp, Homo sapien
caaacctgataagtttcccacaact

SEQ ID NO: 5466734 - DNA, 25 bp, Homo sapien
tgatgaaagcaagtaactccctcaa

SEQ ID NO: 5466735 - DNA, 25 bp, Homo sapien
ggtaggggacaaggtgacctgatga

SEQ ID NO: 5466736 - DNA, 25 bp, Homo sapien
tgataagtttcccacaactgactgc

SEQ ID NO: 5466737 - DNA, 25 bp, Homo sapien
tgtaaaatggcaccaaccctttgga

SEQ ID NO: 5466738 - DNA, 25 bp, Homo sapien
tagcactagaatggctacagaggcc

SEQ ID NO: 5466739 - DNA, 25 bp, Homo sapien
gagtgaactactgcaaatacgtgaa

SEQ ID NO: 5466740 - DNA, 25 bp, Homo sapien
aatttgctgtgccaaggaatccaga

SEQ ID NO: 5466741 - DNA, 25 bp, Homo sapien
tcttctgcagccgatgacatttgaa

SEQ ID NO: 5466742 - DNA, 25 bp, Homo sapien
ctgccaagagcaatagctttatacg

SEQ ID NO: 5466743 - DNA, 25 bp, Homo sapien
caatagctttatacgcagaagccca

SEQ ID NO: 5466744 - DNA, 25 bp, Homo sapien
gcagaagcccatccacttctggtgg

SEQ ID NO: 5466745 - DNA, 25 bp, Homo sapien
tccaaagacgtaaactagacccaga

SEQ ID NO: 5466746 - DNA, 25 bp, Homo sapien
tgtgctaagtgacctagactctcaa

SEQ ID NO: 5466747 - DNA, 25 bp, Homo sapien
ccagatattcagtatgtgggccaga

SEQ ID NO: 5466748 - DNA, 25 bp, Homo sapien
aatctagtcttagggagagcaggag

SEQ ID NO: 5466749 - DNA, 25 bp, Homo sapien
ccactaggaaggaccttttctccat

SEQ ID NO: 5466750 - DNA, 25 bp, Homo sapien
gctgtcggatggatccaggcgctct

SEQ ID NO: 5466751 - DNA, 25 bp, Homo sapien
gtctgttcaccaaatcgctcacttg

SEQ ID NO: 5466752 - DNA, 25 bp, Homo sapien
ttgccgcacgaccacgcacccgcgg

SEQ ID NO: 5466753 - DNA, 25 bp, Homo sapien
tgttcaccaaatcgctcacttgccg

SEQ ID NO: 5466754 - DNA, 25 bp, Homo sapien
tgctgcaggtaacgaactgtcctgt

SEQ ID NO: 5466755 - DNA, 25 bp, Homo sapien
gatgctgcaggtaacgaactgtcct

SEQ ID NO: 5466756 - DNA, 25 bp, Homo sapien
gctgcaggtaacgaactgtcctgtt

SEQ ID NO: 5466757 - DNA, 25 bp, Homo sapien
gcaggtaacgaactgtcctgttggt

SEQ ID NO: 5466758 - DNA, 25 bp, Homo sapien
tgtaaaaccacggacaccgacatcc

SEQ ID NO: 5466759 - DNA, 25 bp, Homo sapien
ctgcagcgtaagttccaagagggac

SEQ ID NO: 5466760 - DNA, 25 bp, Homo sapien
tgaaagaggtgccagttgtaaaacc

SEQ ID NO: 5466761 - DNA, 25 bp, Homo sapien
tgcggggtctccaccgcatgggcct

SEQ ID NO: 5466762 - DNA, 25 bp, Homo sapien
ctggacagcaatgtgcagaattaat

SEQ ID NO: 5466763 - DNA, 25 bp, Homo sapien
gacagcaatgtgcagaattaatcgg

SEQ ID NO: 5466764 - DNA, 25 bp, Homo sapien
ggacagcaatgtgcagaattaatcg

SEQ ID NO: 5466765 - DNA, 25 bp, Homo sapien
tggacagcaatgtgcagaattaatc

SEQ ID NO: 5466766 - DNA, 25 bp, Homo sapien
cctgaagcagttgatgaagaagatc

SEQ ID NO: 5466767 - DNA, 25 bp, Homo sapien
tgggttcactggctcgtgtgttcct

SEQ ID NO: 5466768 - DNA, 25 bp, Homo sapien
cattgtccttgttctgcggcttagg

SEQ ID NO: 5466769 - DNA, 25 bp, Homo sapien
tgagttagcgagagtccaaaaaagg

SEQ ID NO: 5466770 - DNA, 25 bp, Homo sapien
atgaaatcgggcatgttcagagtac

SEQ ID NO: 5466771 - DNA, 25 bp, Homo sapien
acagatgaaatcgggcatgttcaga

SEQ ID NO: 5466772 - DNA, 25 bp, Homo sapien
aatcgggcatgttcagagtactatg

SEQ ID NO: 5466773 - DNA, 25 bp, Homo sapien
gaaatcgggcatgttcagagtacta

SEQ ID NO: 5466774 - DNA, 25 bp, Homo sapien
cctgaaacacagtccacgccgtcac

SEQ ID NO: 5466775 - DNA, 25 bp, Homo sapien
tgaaacacagtccacgccgtcacag

SEQ ID NO: 5466776 - DNA, 25 bp, Homo sapien
aaacacagtccacgccgtcacagga

SEQ ID NO: 5466777 - DNA, 25 bp, Homo sapien
agtccacgccgtcacaggaagagga

SEQ ID NO: 5466778 - DNA, 25 bp, Homo sapien
agagaccagtgatcaaaactgagct

SEQ ID NO: 5466779 - DNA, 25 bp, Homo sapien
gagagaccagtgatcaaaactgagc

SEQ ID NO: 5466780 - DNA, 25 bp, Homo sapien
ggagagaccagtgatcaaaactgag

SEQ ID NO: 5466781 - DNA, 25 bp, Homo sapien
gagaccagtgatcaaaactgagctc

SEQ ID NO: 5466782 - DNA, 25 bp, Homo sapien
ttgccctccatggaatcccgttcct

SEQ ID NO: 5466783 - DNA, 25 bp, Homo sapien
catggaatcccgttcctcccagggt

SEQ ID NO: 5466784 - DNA, 25 bp, Homo sapien
cattctgcggcccagacaaggttac

SEQ ID NO: 5466785 - DNA, 25 bp, Homo sapien
gctcctgagcgctgaaaactgcatt

SEQ ID NO: 5466786 - DNA, 25 bp, Homo sapien
tcatacccaagtttctgttgcttta

SEQ ID NO: 5466787 - DNA, 25 bp, Homo sapien
tacccaagtttctgttgctttataa

SEQ ID NO: 5466788 - DNA, 25 bp, Homo sapien
tctcatcatacccaagtttctgttg

SEQ ID NO: 5466789 - DNA, 25 bp, Homo sapien
tttctgttgctttataatgcaaagc

SEQ ID NO: 5466790 - DNA, 25 bp, Homo sapien
tattgttctgttgcccactagttgc

SEQ ID NO: 5466791 - DNA, 25 bp, Homo sapien
cacctttccaatattgttctgttgc

SEQ ID NO: 5466792 - DNA, 25 bp, Homo sapien
tgttctgttgcccactagttgccat

SEQ ID NO: 5466793 - DNA, 25 bp, Homo sapien
aatattgttctgttgcccactagtt

SEQ ID NO: 5466794 - DNA, 25 bp, Homo sapien
ataaagggctcaaatctctgcaata

SEQ ID NO: 5466795 - DNA, 25 bp, Homo sapien
tcaaatctctgcaatattccttgaa

SEQ ID NO: 5466796 - DNA, 25 bp, Homo sapien
ctctgcaatattccttgaacatgtc

SEQ ID NO: 5466797 - DNA, 25 bp, Homo sapien
ccataagttttttcaacttgagagg

SEQ ID NO: 5466798 - DNA, 25 bp, Homo sapien
tattttgatatcctggaagataacc

SEQ ID NO: 5466799 - DNA, 25 bp, Homo sapien
ttttgatatcctggaagataaccat

SEQ ID NO: 5466800 - DNA, 25 bp, Homo sapien
ttgatatcctggaagataaccatag

SEQ ID NO: 5466801 - DNA, 25 bp, Homo sapien
aatattattttgatatcctggaaga

SEQ ID NO: 5466802 - DNA, 25 bp, Homo sapien
tgtcttgcgcaaggtggatgtccaa

SEQ ID NO: 5466803 - DNA, 25 bp, Homo sapien
ctcaggtcttgatgcagtccccagt

SEQ ID NO: 5466804 - DNA, 25 bp, Homo sapien
cagcagtgccactcaggaatgtctt

SEQ ID NO: 5466805 - DNA, 25 bp, Homo sapien
tccttgtcccatggttgtctactga

SEQ ID NO: 5466806 - DNA, 25 bp, Homo sapien
aggtggtcactgtgctagctgagaa

SEQ ID NO: 5466807 - DNA, 25 bp, Homo sapien
ggaccccacaagacagccagaactt

SEQ ID NO: 5466808 - DNA, 25 bp, Homo sapien
agaacttcaaacagcatggaagagg

SEQ ID NO: 5466809 - DNA, 25 bp, Homo sapien
aagtgaaacttcattgcgcttttga

SEQ ID NO: 5466810 - DNA, 25 bp, Homo sapien
aacatgagctccacgattgtttcca

SEQ ID NO: 5466811 - DNA, 25 bp, Homo sapien
tgttcactttttcccgaacatgagc

SEQ ID NO: 5466812 - DNA, 25 bp, Homo sapien
actttttcccgaacatgagctccac

SEQ ID NO: 5466813 - DNA, 25 bp, Homo sapien
gagctccacgattgtttccaaacag

SEQ ID NO: 5466814 - DNA, 25 bp, Homo sapien
tggcagagttgatgggacctttggg

SEQ ID NO: 5466815 - DNA, 25 bp, Homo sapien
aagaaaatgagggtaggaagctgct

SEQ ID NO: 5466816 - DNA, 25 bp, Homo sapien
tgctgaacaaagagtctctgccttg

SEQ ID NO: 5466817 - DNA, 25 bp, Homo sapien
gggaagcagagaggtttggcagagt

SEQ ID NO: 5466818 - DNA, 25 bp, Homo sapien
cgcatcctgaatccccgtttgagtt

SEQ ID NO: 5466819 - DNA, 25 bp, Homo sapien
cttggcgaaggggatcagatggctc

SEQ ID NO: 5466820 - DNA, 25 bp, Homo sapien
tttgtgtcacactcatgggcttggc

SEQ ID NO: 5466821 - DNA, 25 bp, Homo sapien
tgtcacactcatgggcttggcgaag

SEQ ID NO: 5466822 - DNA, 25 bp, Homo sapien
ggaagggtgatgttccatgggtcct

SEQ ID NO: 5466823 - DNA, 25 bp, Homo sapien
tgctctgcgagttaccagtgtaaat

SEQ ID NO: 5466824 - DNA, 25 bp, Homo sapien
tgcgagttaccagtgtaaatcctat

SEQ ID NO: 5466825 - DNA, 25 bp, Homo sapien
aaatattttgctctgcgagttacca

SEQ ID NO: 5466826 - DNA, 25 bp, Homo sapien
catctctggggtttagtccttcttt

SEQ ID NO: 5466827 - DNA, 25 bp, Homo sapien
cagtcctgtatggttttactataac

SEQ ID NO: 5466828 - DNA, 25 bp, Homo sapien
accacagtcctgtatggttttacta

SEQ ID NO: 5466829 - DNA, 25 bp, Homo sapien
tcagttgcagcgttcatctctgggg

SEQ ID NO: 5466830 - DNA, 25 bp, Homo sapien
tctgagcagaattttcaggtgggtc

SEQ ID NO: 5466831 - DNA, 25 bp, Homo sapien
tttccaaatcattagtgggcgagaa

SEQ ID NO: 5466832 - DNA, 25 bp, Homo sapien
caaatcattagtgggcgagaacaga

SEQ ID NO: 5466833 - DNA, 25 bp, Homo sapien
gattctgagcagaattttcaggtgg

SEQ ID NO: 5466834 - DNA, 25 bp, Homo sapien
tgaatggcctgcacttgtcttgtca

SEQ ID NO: 5466835 - DNA, 25 bp, Homo sapien
gcacacagctgatggctgtgggcca

SEQ ID NO: 5466836 - DNA, 25 bp, Homo sapien
tgtgggccacaatctcgctggcatt

SEQ ID NO: 5466837 - DNA, 25 bp, Homo sapien
ctgctatgatcagggaatagggaac

SEQ ID NO: 5466838 - DNA, 25 bp, Homo sapien
tgatgggaatcaggccacacgtgga

SEQ ID NO: 5466839 - DNA, 25 bp, Homo sapien
aatcaggccacacgtggaacctggg

SEQ ID NO: 5466840 - DNA, 25 bp, Homo sapien
ggtgttgcctgcttgatgggaatca

SEQ ID NO: 5466841 - DNA, 25 bp, Homo sapien
ctgggtgttgcctgcttgatgggaa

SEQ ID NO: 5466842 - DNA, 25 bp, Homo sapien
tctagcttgggaaggtatagaatcc

SEQ ID NO: 5466843 - DNA, 25 bp, Homo sapien
tctctagcttgggaaggtatagaat

SEQ ID NO: 5466844 - DNA, 25 bp, Homo sapien
tagcttgggaaggtatagaatccat

SEQ ID NO: 5466845 - DNA, 25 bp, Homo sapien
ctagcttgggaaggtatagaatcca

SEQ ID NO: 5466846 - DNA, 25 bp, Homo sapien
taatagtaactttgtatagaaaggc

SEQ ID NO: 5466847 - DNA, 25 bp, Homo sapien
gtaactttgtatagaaaggcagatg

SEQ ID NO: 5466848 - DNA, 25 bp, Homo sapien
ctttgtatagaaaggcagatgccag

SEQ ID NO: 5466849 - DNA, 25 bp, Homo sapien
aatagtaactttgtatagaaaggca

SEQ ID NO: 5466850 - DNA, 25 bp, Homo sapien
ccacaattctctttgcgtacaccgt

SEQ ID NO: 5466851 - DNA, 25 bp, Homo sapien
acaattctctttgcgtacaccgtgc

SEQ ID NO: 5466852 - DNA, 25 bp, Homo sapien
attctctttgcgtacaccgtgctca

SEQ ID NO: 5466853 - DNA, 25 bp, Homo sapien
gacccacaattctctttgcgtacac

SEQ ID NO: 5466854 - DNA, 25 bp, Homo sapien
gaccgaggacgaattgcaggctcct

SEQ ID NO: 5466855 - DNA, 25 bp, Homo sapien
ttccatccatagaaggaggggaggc

SEQ ID NO: 5466856 - DNA, 25 bp, Homo sapien
gggaggcaggcacaaaaggacccca

SEQ ID NO: 5466857 - DNA, 25 bp, Homo sapien
gtttggctccttactgtcctgtatc

SEQ ID NO: 5466858 - DNA, 25 bp, Homo sapien
ctgagatggacgcacaagttcccga

SEQ ID NO: 5466859 - DNA, 25 bp, Homo sapien
gatggacgcacaagttcccgatggc

SEQ ID NO: 5466860 - DNA, 25 bp, Homo sapien
gacgcacaagttcccgatggctcag

SEQ ID NO: 5466861 - DNA, 25 bp, Homo sapien
gagatggacgcacaagttcccgatg

SEQ ID NO: 5466862 - DNA, 25 bp, Homo sapien
tctgtctctccgcaggctttctcat

SEQ ID NO: 5466863 - DNA, 25 bp, Homo sapien
ttctcatggaaacgtggcaggcaaa

SEQ ID NO: 5466864 - DNA, 25 bp, Homo sapien
ggcaggcaaacaacgatgctggcaa

SEQ ID NO: 5466865 - DNA, 25 bp, Homo sapien
tggaaacgtggcaggcaaacaacga

SEQ ID NO: 5466866 - DNA, 25 bp, Homo sapien
ccttttgggaaacgcagtgtgctaa

SEQ ID NO: 5466867 - DNA, 25 bp, Homo sapien
caccgtttaaagcaatgtagggcac

SEQ ID NO: 5466868 - DNA, 25 bp, Homo sapien
tctgaggtcgcccttagtgaggaca

SEQ ID NO: 5466869 - DNA, 25 bp, Homo sapien
cctagagtagtaattagcgatgggc

SEQ ID NO: 5466870 - DNA, 25 bp, Homo sapien
caacatcgccgatgaggtatcgcat

SEQ ID NO: 5466871 - DNA, 25 bp, Homo sapien
tccaactgcttggtcaacatcgccg

SEQ ID NO: 5466872 - DNA, 25 bp, Homo sapien
gaggtatcgcatagagatctcatga

SEQ ID NO: 5466873 - DNA, 25 bp, Homo sapien
tgcttggtcaacatcgccgatgagg

SEQ ID NO: 5466874 - DNA, 25 bp, Homo sapien
tttgatggcgatggcaggacacagc

SEQ ID NO: 5466875 - DNA, 25 bp, Homo sapien
gctggtcagtgagcaaccttgctag

SEQ ID NO: 5466876 - DNA, 25 bp, Homo sapien
tggtaatcaagaactggaacttcac

SEQ ID NO: 5466877 - DNA, 25 bp, Homo sapien
gagaccagaacaacttaacaacgtg

SEQ ID NO: 5466878 - DNA, 25 bp, Homo sapien
tagcggatgtcactgtcttaactga

SEQ ID NO: 5466879 - DNA, 25 bp, Homo sapien
agttgacccttctcggacttctgtg

SEQ ID NO: 5466880 - DNA, 25 bp, Homo sapien
tttccagaactattagaagttgacc

SEQ ID NO: 5466881 - DNA, 25 bp, Homo sapien
gacttctgtgagatactcattagcg

SEQ ID NO: 5466882 - DNA, 25 bp, Homo sapien
aatgtcactggagcggcatgtctgc

SEQ ID NO: 5466883 - DNA, 25 bp, Homo sapien
caaggctaatatctacgagtcaggg

SEQ ID NO: 5466884 - DNA, 25 bp, Homo sapien
gatatttatcagtgggctgcaggga

SEQ ID NO: 5466885 - DNA, 25 bp, Homo sapien
gaatgatctatacggcagactgcct

SEQ ID NO: 5466886 - DNA, 25 bp, Homo sapien
cctcatgcattttgcagtactggac

SEQ ID NO: 5466887 - DNA, 25 bp, Homo sapien
gagccagtcaaagagactcagtctc

SEQ ID NO: 5466888 - DNA, 25 bp, Homo sapien
tccaggacttccgatgaaccagctg

SEQ ID NO: 5466889 - DNA, 25 bp, Homo sapien
tgcatggaagatatcacccactttc

SEQ ID NO: 5466890 - DNA, 25 bp, Homo sapien
aggactgttttccgggataatctat

SEQ ID NO: 5466891 - DNA, 25 bp, Homo sapien
attcaaccaccctcgcgaagccaat

SEQ ID NO: 5466892 - DNA, 25 bp, Homo sapien
aacggagagttagggctcacagagc

SEQ ID NO: 5466893 - DNA, 25 bp, Homo sapien
taaatgtctctagtgtcagaggact

SEQ ID NO: 5466894 - DNA, 25 bp, Homo sapien
tgatgcaggaccacctattgattct

SEQ ID NO: 5466895 - DNA, 25 bp, Homo sapien
aaacaccttagatttgtcacctggg

SEQ ID NO: 5466896 - DNA, 25 bp, Homo sapien
ctcattgggtgtgtaaatttaggcc

SEQ ID NO: 5466897 - DNA, 25 bp, Homo sapien
tgtgtattacagctcccagtccctt

SEQ ID NO: 5466898 - DNA, 25 bp, Homo sapien
ttcaatgttctagccgcaattttaa

SEQ ID NO: 5466899 - DNA, 25 bp, Homo sapien
gttctagccgcaattttaagatcaa

SEQ ID NO: 5466900 - DNA, 25 bp, Homo sapien
aacagtcaggatcaaataattcaaa

SEQ ID NO: 5466901 - DNA, 25 bp, Homo sapien
aattcaaatggacaggggtttactg

SEQ ID NO: 5466902 - DNA, 25 bp, Homo sapien
gttttccaaacctggtacatgatac

SEQ ID NO: 5466903 - DNA, 25 bp, Homo sapien
tactgagtttccagtggtgatgaaa

SEQ ID NO: 5466904 - DNA, 25 bp, Homo sapien
cagtggtgatgaaaacacaaagctt

SEQ ID NO: 5466905 - DNA, 25 bp, Homo sapien
tgttttccaaacctggtacatgata

SEQ ID NO: 5466906 - DNA, 25 bp, Homo sapien
tcaaagttgatcaccagcaggctcc

SEQ ID NO: 5466907 - DNA, 25 bp, Homo sapien
tcttaaagtagatggtgggaatccc

SEQ ID NO: 5466908 - DNA, 25 bp, Homo sapien
gagctcggcatctggacactctggc

SEQ ID NO: 5466909 - DNA, 25 bp, Homo sapien
cagaggcagctatccactgcagagt

SEQ ID NO: 5466910 - DNA, 25 bp, Homo sapien
gggctggctgttcccgtaggcggtc

SEQ ID NO: 5466911 - DNA, 25 bp, Homo sapien
ctggctgttcccgtaggcggtccag

SEQ ID NO: 5466912 - DNA, 25 bp, Homo sapien
gctgttcccgtaggcggtccagatg

SEQ ID NO: 5466913 - DNA, 25 bp, Homo sapien
tcccgtaggcggtccagatgcaggt

SEQ ID NO: 5466914 - DNA, 25 bp, Homo sapien
gtgctttctgactgtcctttaagaa

SEQ ID NO: 5466915 - DNA, 25 bp, Homo sapien
ttctgactgtcctttaagaatcttc

SEQ ID NO: 5466916 - DNA, 25 bp, Homo sapien
ctgactgtcctttaagaatcttctt

SEQ ID NO: 5466917 - DNA, 25 bp, Homo sapien
ctctgtgctttctgactgtccttta

SEQ ID NO: 5466918 - DNA, 25 bp, Homo sapien
aacaacagtatatggttggtaatgt

SEQ ID NO: 5466919 - DNA, 25 bp, Homo sapien
caacagtatatggttggtaatgttt

SEQ ID NO: 5466920 - DNA, 25 bp, Homo sapien
acaacagtatatggttggtaatgtt

SEQ ID NO: 5466921 - DNA, 25 bp, Homo sapien
aaacaacagtatatggttggtaatg

SEQ ID NO: 5466922 - DNA, 25 bp, Homo sapien
gcatgtagtgggaggacttggtaaa

SEQ ID NO: 5466923 - DNA, 25 bp, Homo sapien
ctgaagtatttcattagatatggta

SEQ ID NO: 5466924 - DNA, 25 bp, Homo sapien
ttattacagaaccttgcatgtagtg

SEQ ID NO: 5466925 - DNA, 25 bp, Homo sapien
tggtttagaatgagggactcataac

SEQ ID NO: 5466926 - DNA, 25 bp, Homo sapien
gataatgtgtatgctcatctctact

SEQ ID NO: 5466927 - DNA, 25 bp, Homo sapien
aagataatgtgtatgctcatctcta

SEQ ID NO: 5466928 - DNA, 25 bp, Homo sapien
taatgtgtatgctcatctctacttg

SEQ ID NO: 5466929 - DNA, 25 bp, Homo sapien
tgtgtatgctcatctctacttgtga

SEQ ID NO: 5466930 - DNA, 25 bp, Homo sapien
gagtagtcctctttagatggcatgg

SEQ ID NO: 5466931 - DNA, 25 bp, Homo sapien
tggagtagtggtctcacaatcactg

SEQ ID NO: 5466932 - DNA, 25 bp, Homo sapien
cacagcagtacagacatgatgaggt

SEQ ID NO: 5466933 - DNA, 25 bp, Homo sapien
tattctagaagtagtcccgacctca

SEQ ID NO: 5466934 - DNA, 25 bp, Homo sapien
gccaagactgctagtggcactactg

SEQ ID NO: 5466935 - DNA, 25 bp, Homo sapien
gctagtggcactactgttgccattg

SEQ ID NO: 5466936 - DNA, 25 bp, Homo sapien
aaatgtccagatccataatgccaag

SEQ ID NO: 5466937 - DNA, 25 bp, Homo sapien
gatccataatgccaagactgctagt

SEQ ID NO: 5466938 - DNA, 25 bp, Homo sapien
tctggcttgctattttcccatgaga

SEQ ID NO: 5466939 - DNA, 25 bp, Homo sapien
gcaggaaccagttttgacagaaacc

SEQ ID NO: 5466940 - DNA, 25 bp, Homo sapien
gaaggtatttatctatcggcaagag

SEQ ID NO: 5466941 - DNA, 25 bp, Homo sapien
gaaaccagtggactcatgttctccc

SEQ ID NO: 5466942 - DNA, 25 bp, Homo sapien
gagtggtggtgcgtcgtgtagtggg

SEQ ID NO: 5466943 - DNA, 25 bp, Homo sapien
gggtgagtggtggtgcgtcgtgtag

SEQ ID NO: 5466944 - DNA, 25 bp, Homo sapien
ggtgcgtcgtgtagtgggacggctt

SEQ ID NO: 5466945 - DNA, 25 bp, Homo sapien
cgtcgtgtagtgggacggctttctc

SEQ ID NO: 5466946 - DNA, 25 bp, Homo sapien
ggatataccaagagtagatggtact

SEQ ID NO: 5466947 - DNA, 25 bp, Homo sapien
ctggatataccaagagtagatggta

SEQ ID NO: 5466948 - DNA, 25 bp, Homo sapien
tggatataccaagagtagatggtac

SEQ ID NO: 5466949 - DNA, 25 bp, Homo sapien
tctgggttgtcttcctcattggcaa

SEQ ID NO: 5466950 - DNA, 25 bp, Homo sapien
cctcattggcaagctgggtccagct

SEQ ID NO: 5466951 - DNA, 25 bp, Homo sapien
tcctcgctgctgcttggagggttgg

SEQ ID NO: 5466952 - DNA, 25 bp, Homo sapien
gcaagctgggtccagctgcctgtgc

SEQ ID NO: 5466953 - DNA, 25 bp, Homo sapien
gcttcagcctctggtacatctctgg

SEQ ID NO: 5466954 - DNA, 25 bp, Homo sapien
gcctctggtacatctctggtatcaa

SEQ ID NO: 5466955 - DNA, 25 bp, Homo sapien
cagcctctggtacatctctggtatc

SEQ ID NO: 5466956 - DNA, 25 bp, Homo sapien
tacatctctggtatcaaggctgtca

SEQ ID NO: 5466957 - DNA, 25 bp, Homo sapien
catgcaccctatgtagtctgagacg

SEQ ID NO: 5466958 - DNA, 25 bp, Homo sapien
taagacgcaaactccagtcacatgc

SEQ ID NO: 5466959 - DNA, 25 bp, Homo sapien
gaaaatttagttcttgcaccaatca

SEQ ID NO: 5466960 - DNA, 25 bp, Homo sapien
tatgtagtctgagacgattcactca

SEQ ID NO: 5466961 - DNA, 25 bp, Homo sapien
tttcaatctgaatcaaaggcacttc

SEQ ID NO: 5466962 - DNA, 25 bp, Homo sapien
cacttccctcgagcaaagtgatcgc

SEQ ID NO: 5466963 - DNA, 25 bp, Homo sapien
ttttgtcattcgaatgcccttctgc

SEQ ID NO: 5466964 - DNA, 25 bp, Homo sapien
tatggatttgacaagcgctcacggc

SEQ ID NO: 5466965 - DNA, 25 bp, Homo sapien
cttttttagaatctaaagggctgtg

SEQ ID NO: 5466966 - DNA, 25 bp, Homo sapien
cactgggggctgtttacattcggta

SEQ ID NO: 5466967 - DNA, 25 bp, Homo sapien
tgtggtttattggtacagggtcctg

SEQ ID NO: 5466968 - DNA, 25 bp, Homo sapien
agggctgtggtttgtaagagaagca

SEQ ID NO: 5466969 - DNA, 25 bp, Homo sapien
tgaccggctgcacgcttaggaaatc

SEQ ID NO: 5466970 - DNA, 25 bp, Homo sapien
ctcttcaaggatcggcagggtacgt

SEQ ID NO: 5466971 - DNA, 25 bp, Homo sapien
cagatttgcagagaccggatgagga

SEQ ID NO: 5466972 - DNA, 25 bp, Homo sapien
ggagctagcccacgtttcatgaatt

SEQ ID NO: 5466973 - DNA, 25 bp, Homo sapien
cacttctggactggctgaccgttgg

SEQ ID NO: 5466974 - DNA, 25 bp, Homo sapien
gaatcgggcactctgtgactacgtg

SEQ ID NO: 5466975 - DNA, 25 bp, Homo sapien
tgttgtagcagttgaagaatcgggc

SEQ ID NO: 5466976 - DNA, 25 bp, Homo sapien
tgtccaagcttgactagcacccgga

SEQ ID NO: 5466977 - DNA, 25 bp, Homo sapien
taggccttgttaaaaccagagcagc

SEQ ID NO: 5466978 - DNA, 25 bp, Homo sapien
tatgtgccagttcattcctgacgac

SEQ ID NO: 5466979 - DNA, 25 bp, Homo sapien
tcctgacgacattttctgagcacag

SEQ ID NO: 5466980 - DNA, 25 bp, Homo sapien
taacattggacagggtatgtgccag

SEQ ID NO: 5466981 - DNA, 25 bp, Homo sapien
gggcatggcttcagaagcctcagct

SEQ ID NO: 5466982 - DNA, 25 bp, Homo sapien
gccactgagcatgtcacctcttctc

SEQ ID NO: 5466983 - DNA, 25 bp, Homo sapien
gaggctaccacttggagccactgag

SEQ ID NO: 5466984 - DNA, 25 bp, Homo sapien
catgcttgctaaaccacaaagtggg

SEQ ID NO: 5466985 - DNA, 25 bp, Homo sapien
taataaatgcatcctgcagcacgga

SEQ ID NO: 5466986 - DNA, 25 bp, Homo sapien
gaaatagttccaatcacagtggctg

SEQ ID NO: 5466987 - DNA, 25 bp, Homo sapien
ccatcttgtctaggagggagagcgt

SEQ ID NO: 5466988 - DNA, 25 bp, Homo sapien
gccatctggactctgaacaacgacg

SEQ ID NO: 5466989 - DNA, 25 bp, Homo sapien
tatttgtcttccaaagcataaagcc

SEQ ID NO: 5466990 - DNA, 25 bp, Homo sapien
tgagggatctagactctgcaaggct

SEQ ID NO: 5466991 - DNA, 25 bp, Homo sapien
gataataatgtgtggcttgtctccc

SEQ ID NO: 5466992 - DNA, 25 bp, Homo sapien
ctgccacagcacatgcagaaggtac

SEQ ID NO: 5466993 - DNA, 25 bp, Homo sapien
actttccaaaacattggctgagaca

SEQ ID NO: 5466994 - DNA, 25 bp, Homo sapien
ttccaaaacattggctgagacattt

SEQ ID NO: 5466995 - DNA, 25 bp, Homo sapien
tttccaaaacattggctgagacatt

SEQ ID NO: 5466996 - DNA, 25 bp, Homo sapien
ctttccaaaacattggctgagacat

SEQ ID NO: 5466997 - DNA, 25 bp, Homo sapien
gcaccagttccagaccaatcagaaa

SEQ ID NO: 5466998 - DNA, 25 bp, Homo sapien
cattggaccaagcagatatctggca

SEQ ID NO: 5466999 - DNA, 25 bp, Homo sapien
tccaagtgctcagaagcggtgagaa

SEQ ID NO: 5467000 - DNA, 25 bp, Homo sapien
caagatgtttgtttccaggtggagc

SEQ ID NO: 5467001 - DNA, 25 bp, Homo sapien
ccacttaggacaacaatttcatttt

SEQ ID NO: 5467002 - DNA, 25 bp, Homo sapien
cttttggttgttggacattcatgga

SEQ ID NO: 5467003 - DNA, 25 bp, Homo sapien
ttggaagatctggtgaaacgttgac

SEQ ID NO: 5467004 - DNA, 25 bp, Homo sapien
ggagatttccagaggctaacccact

SEQ ID NO: 5467005 - DNA, 25 bp, Homo sapien
ctcccggtcagcttgagtttcaaat

SEQ ID NO: 5467006 - DNA, 25 bp, Homo sapien
ggtcagcttgagtttcaaatgttac

SEQ ID NO: 5467007 - DNA, 25 bp, Homo sapien
tcccggtcagcttgagtttcaaatg

SEQ ID NO: 5467008 - DNA, 25 bp, Homo sapien
ccggtcagcttgagtttcaaatgtt

SEQ ID NO: 5467009 - DNA, 25 bp, Homo sapien
ggtgctctgtgctgcattcatcctt

SEQ ID NO: 5467010 - DNA, 25 bp, Homo sapien
aggtgctctgtgctgcattcatcct

SEQ ID NO: 5467011 - DNA, 25 bp, Homo sapien
tgctctgtgctgcattcatccttgt

SEQ ID NO: 5467012 - DNA, 25 bp, Homo sapien
tctgtgctgcattcatccttgttca

SEQ ID NO: 5467013 - DNA, 25 bp, Homo sapien
cgatgccagtttgatgagatagttc

SEQ ID NO: 5467014 - DNA, 25 bp, Homo sapien
gtttcattgggcatattgctgctac

SEQ ID NO: 5467015 - DNA, 25 bp, Homo sapien
tgttgtgcgcaacagatccttgctc

SEQ ID NO: 5467016 - DNA, 25 bp, Homo sapien
gatagttctgatgttgctatcagga

SEQ ID NO: 5467017 - DNA, 25 bp, Homo sapien
tccatttcgatatgtgtgctccaga

SEQ ID NO: 5467018 - DNA, 25 bp, Homo sapien
tataatgggtgaccgagaaaggacc

SEQ ID NO: 5467019 - DNA, 25 bp, Homo sapien
gaacctttgggatgctttgaactac

SEQ ID NO: 5467020 - DNA, 25 bp, Homo sapien
ggtgacaaaggctccatgaatctca

SEQ ID NO: 5467021 - DNA, 25 bp, Homo sapien
gcccagggctgtaatgagcacaaag

SEQ ID NO: 5467022 - DNA, 25 bp, Homo sapien
tgagcacaaagcgtcttggtctcat

SEQ ID NO: 5467023 - DNA, 25 bp, Homo sapien
cccccggctgcgtgggggcagtgga

SEQ ID NO: 5467024 - DNA, 25 bp, Homo sapien
taatgagcacaaagcgtcttggtct

SEQ ID NO: 5467025 - DNA, 25 bp, Homo sapien
ttaaatcttaacaaatggccattct

SEQ ID NO: 5467026 - DNA, 25 bp, Homo sapien
aatcttaacaaatggccattctgac

SEQ ID NO: 5467027 - DNA, 25 bp, Homo sapien
gaagtgtctgttccacatgcacaca

SEQ ID NO: 5467028 - DNA, 25 bp, Homo sapien
aagaagtgtctgttccacatgcaca

SEQ ID NO: 5467029 - DNA, 25 bp, Homo sapien
caagtggcttgataaagtttagtag

SEQ ID NO: 5467030 - DNA, 25 bp, Homo sapien
ctggatttgctgaggtgcctcagga

SEQ ID NO: 5467031 - DNA, 25 bp, Homo sapien
tcaagtggcttgataaagtttagta

SEQ ID NO: 5467032 - DNA, 25 bp, Homo sapien
gatttgctgaggtgcctcaggaact

SEQ ID NO: 5467033 - DNA, 25 bp, Homo sapien
tgattcctaaagtgagtgggtccag

SEQ ID NO: 5467034 - DNA, 25 bp, Homo sapien
gtgggtccagccgaatacaggacct

SEQ ID NO: 5467035 - DNA, 25 bp, Homo sapien
ctcttgatgcttaaactgattccta

SEQ ID NO: 5467036 - DNA, 25 bp, Homo sapien
atacaggacctttattttgctcaga

SEQ ID NO: 5467037 - DNA, 25 bp, Homo sapien
gacagcatttagctcctccttaaaa

SEQ ID NO: 5467038 - DNA, 25 bp, Homo sapien
tacttttctacagacagcatttagc

SEQ ID NO: 5467039 - DNA, 25 bp, Homo sapien
gcatttgataggttcttacttttct

SEQ ID NO: 5467040 - DNA, 25 bp, Homo sapien
tagcatttgataggttcttactttt

SEQ ID NO: 5467041 - DNA, 25 bp, Homo sapien
ctccaggaatagctcagagctgatg

SEQ ID NO: 5467042 - DNA, 25 bp, Homo sapien
gatgctctcaatttagtcatgcgaa

SEQ ID NO: 5467043 - DNA, 25 bp, Homo sapien
caggaatagctcagagctgatgctc

SEQ ID NO: 5467044 - DNA, 25 bp, Homo sapien
tagtcatgcgaattacattacattt

SEQ ID NO: 5467045 - DNA, 25 bp, Homo sapien
ctactagcaggtgatataaaatata

SEQ ID NO: 5467046 - DNA, 25 bp, Homo sapien
gaatacaagagagttgttgaatggc

SEQ ID NO: 5467047 - DNA, 25 bp, Homo sapien
catttgtagacacttttcatattag

SEQ ID NO: 5467048 - DNA, 25 bp, Homo sapien
gactgtaacatataagaatgatgga

SEQ ID NO: 5467049 - DNA, 25 bp, Homo sapien
catcccaagaattctgtgtacttac

SEQ ID NO: 5467050 - DNA, 25 bp, Homo sapien
tcagacaacatcccaagaattctgt

SEQ ID NO: 5467051 - DNA, 25 bp, Homo sapien
acaacatcccaagaattctgtgtac

SEQ ID NO: 5467052 - DNA, 25 bp, Homo sapien
cagacaacatcccaagaattctgtg

SEQ ID NO: 5467053 - DNA, 25 bp, Homo sapien
ccagcaggctattgctgcgaagaac

SEQ ID NO: 5467054 - DNA, 25 bp, Homo sapien
attctgcaaccagtagtctgttgac

SEQ ID NO: 5467055 - DNA, 25 bp, Homo sapien
aaccaatttggcagggcatcctctg

SEQ ID NO: 5467056 - DNA, 25 bp, Homo sapien
tagtctgttgactccagcaggctat

SEQ ID NO: 5467057 - DNA, 25 bp, Homo sapien
agtcaaccaatgctcattgagcttt

SEQ ID NO: 5467058 - DNA, 25 bp, Homo sapien
taagagcgataactcttctagagaa

SEQ ID NO: 5467059 - DNA, 25 bp, Homo sapien
cttttttgatgtcagcactgagaat

SEQ ID NO: 5467060 - DNA, 25 bp, Homo sapien
tcagtcaatatcagtcaaccaatgc

SEQ ID NO: 5467061 - DNA, 25 bp, Homo sapien
tgctttgatccaagacaatccaggt

SEQ ID NO: 5467062 - DNA, 25 bp, Homo sapien
aagggcttggcccttgactagagcg

SEQ ID NO: 5467063 - DNA, 25 bp, Homo sapien
caatccaggtcagctatcaccaagg

SEQ ID NO: 5467064 - DNA, 25 bp, Homo sapien
ggatggactggtcagttctccctgg

SEQ ID NO: 5467065 - DNA, 25 bp, Homo sapien
atgtatcagggcaggtggagaagac

SEQ ID NO: 5467066 - DNA, 25 bp, Homo sapien
ggatgtatcagggcaggtggagaag

SEQ ID NO: 5467067 - DNA, 25 bp, Homo sapien
gtatcagggcaggtggagaagacat

SEQ ID NO: 5467068 - DNA, 25 bp, Homo sapien
ctggatgtatcagggcaggtggaga

SEQ ID NO: 5467069 - DNA, 25 bp, Homo sapien
cctttaaggcgagagaagccattct

SEQ ID NO: 5467070 - DNA, 25 bp, Homo sapien
tgtttctgcgtggacctggttgcct

SEQ ID NO: 5467071 - DNA, 25 bp, Homo sapien
tcaccacattgacatcttctagagg

SEQ ID NO: 5467072 - DNA, 25 bp, Homo sapien
ttctagaggatgagctgtccatgca

SEQ ID NO: 5467073 - DNA, 25 bp, Homo sapien
cctctcctctgctatccctatcccc

SEQ ID NO: 5467074 - DNA, 25 bp, Homo sapien
ccctctcctctgctatccctatccc

SEQ ID NO: 5467075 - DNA, 25 bp, Homo sapien
ctctccatccactacccctacactg

SEQ ID NO: 5467076 - DNA, 25 bp, Homo sapien
tccatccactacccctacactggtt

SEQ ID NO: 5467077 - DNA, 25 bp, Homo sapien
tgagtgcatgaagtgtgccaagcac

SEQ ID NO: 5467078 - DNA, 25 bp, Homo sapien
gaattatagcgccttagttccctgc

SEQ ID NO: 5467079 - DNA, 25 bp, Homo sapien
gctcaagatcgcacaagtaatgatg

SEQ ID NO: 5467080 - DNA, 25 bp, Homo sapien
gagtatacctaaggttggagacctc

SEQ ID NO: 5467081 - DNA, 25 bp, Homo sapien
atacatccgtgatgactccaagttg

SEQ ID NO: 5467082 - DNA, 25 bp, Homo sapien
atggagttccccgggccgcttcctg

SEQ ID NO: 5467083 - DNA, 25 bp, Homo sapien
tgccctgctgcggttccaaaacgtc

SEQ ID NO: 5467084 - DNA, 25 bp, Homo sapien
gttccaaaacgtcatacatccgtga

SEQ ID NO: 5467085 - DNA, 25 bp, Homo sapien
tatagacttatatccctccccctgt

SEQ ID NO: 5467086 - DNA, 25 bp, Homo sapien
aatgggcttgactacgtacagagct

SEQ ID NO: 5467087 - DNA, 25 bp, Homo sapien
tgcggctggagatagctcctcaaat

SEQ ID NO: 5467088 - DNA, 25 bp, Homo sapien
tctctatctccaaaattatagactt

SEQ ID NO: 5467089 - DNA, 25 bp, Homo sapien
caggtaggtgagtttggttcaacta

SEQ ID NO: 5467090 - DNA, 25 bp, Homo sapien
gcaggtaggtgagtttggttcaact

SEQ ID NO: 5467091 - DNA, 25 bp, Homo sapien
taggtgagtttggttcaactaccca

SEQ ID NO: 5467092 - DNA, 25 bp, Homo sapien
ggtgagtttggttcaactacccaca

SEQ ID NO: 5467093 - DNA, 25 bp, Homo sapien
tgatgactcctcactctcgctcagt

SEQ ID NO: 5467094 - DNA, 25 bp, Homo sapien
gatagagaaggatggcaaataggat

SEQ ID NO: 5467095 - DNA, 25 bp, Homo sapien
taggatgtcaatctttgatgactcc

SEQ ID NO: 5467096 - DNA, 25 bp, Homo sapien
aaaaagtatgtgagccaaatcaaca

SEQ ID NO: 5467097 - DNA, 25 bp, Homo sapien
gaaataacccttgagccatgtagag

SEQ ID NO: 5467098 - DNA, 25 bp, Homo sapien
gaaacaggttgatctccagaatgag

SEQ ID NO: 5467099 - DNA, 25 bp, Homo sapien
tggccaaatcaagtggatccttccc

SEQ ID NO: 5467100 - DNA, 25 bp, Homo sapien
tccccttaattactgattggtaagc

SEQ ID NO: 5467101 - DNA, 25 bp, Homo sapien
tatgaatggattctgttttgccaag

SEQ ID NO: 5467102 - DNA, 25 bp, Homo sapien
ggtcaatgagtgactcggtaactct

SEQ ID NO: 5467103 - DNA, 25 bp, Homo sapien
tctataaagagacttgtttctgtgg

SEQ ID NO: 5467104 - DNA, 25 bp, Homo sapien
tcagctgatattatctgatatacag

SEQ ID NO: 5467105 - DNA, 25 bp, Homo sapien
atatcatggttaacaacaacacaga

SEQ ID NO: 5467106 - DNA, 25 bp, Homo sapien
taataagaggtcaatatcatggtta

SEQ ID NO: 5467107 - DNA, 25 bp, Homo sapien
cacagatactcaggtcataaacttc

SEQ ID NO: 5467108 - DNA, 25 bp, Homo sapien
cactgctgttataattgagctttga

SEQ ID NO: 5467109 - DNA, 25 bp, Homo sapien
actccggagtggaaatgtactggca

SEQ ID NO: 5467110 - DNA, 25 bp, Homo sapien
ttaacatgggaatatgacgctgact

SEQ ID NO: 5467111 - DNA, 25 bp, Homo sapien
gttctggctcggtcactcactacat

SEQ ID NO: 5467112 - DNA, 25 bp, Homo sapien
taaacaaagctatgtggcatgagaa

SEQ ID NO: 5467113 - DNA, 25 bp, Homo sapien
ggtctataacgcaactaacatggaa

SEQ ID NO: 5467114 - DNA, 25 bp, Homo sapien
tgcgacttagcaaatcaaatcaatt

SEQ ID NO: 5467115 - DNA, 25 bp, Homo sapien
aagaacctctatcagcgattttaga

SEQ ID NO: 5467116 - DNA, 25 bp, Homo sapien
tatggacgatatcttccagctttga

SEQ ID NO: 5467117 - DNA, 25 bp, Homo sapien
caacgcggaacggagtttgatcgac

SEQ ID NO: 5467118 - DNA, 25 bp, Homo sapien
ttatttacaagtgcagtgacccctg

SEQ ID NO: 5467119 - DNA, 25 bp, Homo sapien
gaggctgggccggacttatttacaa

SEQ ID NO: 5467120 - DNA, 25 bp, Homo sapien
ggtgtgaaacctctccaagctgtgt

SEQ ID NO: 5467121 - DNA, 25 bp, Homo sapien
cttggtaccgagagcagggagttgc

SEQ ID NO: 5467122 - DNA, 25 bp, Homo sapien
gtaccgagagcagggagttgccatc

SEQ ID NO: 5467123 - DNA, 25 bp, Homo sapien
ccgagagcagggagttgccatccat

SEQ ID NO: 5467124 - DNA, 25 bp, Homo sapien
tggtaccgagagcagggagttgcca

SEQ ID NO: 5467125 - DNA, 25 bp, Homo sapien
actggcgcgcgccaggagagaggcg

SEQ ID NO: 5467126 - DNA, 25 bp, Homo sapien
gaaagacggaaagtgcaggcgaagg

SEQ ID NO: 5467127 - DNA, 25 bp, Homo sapien
aaggataagtctgtggtgctaggac

SEQ ID NO: 5467128 - DNA, 25 bp, Homo sapien
tcccagagtgccagactggcgcgcg

SEQ ID NO: 5467129 - DNA, 25 bp, Homo sapien
tgttatcacagttaccgaatacttc

SEQ ID NO: 5467130 - DNA, 25 bp, Homo sapien
gattgttacccttgatctctcccat

SEQ ID NO: 5467131 - DNA, 25 bp, Homo sapien
cacagttaccgaatacttcaagcaa

SEQ ID NO: 5467132 - DNA, 25 bp, Homo sapien
tacttcaagcaaacaacctgattgt

SEQ ID NO: 5467133 - DNA, 25 bp, Homo sapien
tgcttttagcaggtctctgtgattt

SEQ ID NO: 5467134 - DNA, 25 bp, Homo sapien
ccctcagttccagctgtaacgtttt

SEQ ID NO: 5467135 - DNA, 25 bp, Homo sapien
tcagaatgagttaaagtcacagaga

SEQ ID NO: 5467136 - DNA, 25 bp, Homo sapien
gaatgattccttgcacctgagaccc

SEQ ID NO: 5467137 - DNA, 25 bp, Homo sapien
ctgccttgctttctcatcattatat

SEQ ID NO: 5467138 - DNA, 25 bp, Homo sapien
gccttgctttctcatcattatatga

SEQ ID NO: 5467139 - DNA, 25 bp, Homo sapien
tgctttctcatcattatatgatacc

SEQ ID NO: 5467140 - DNA, 25 bp, Homo sapien
cttgctttctcatcattatatgata

SEQ ID NO: 5467141 - DNA, 25 bp, Homo sapien
ctagactgaggacactataaacata

SEQ ID NO: 5467142 - DNA, 25 bp, Homo sapien
aaacatacaaaaccttaagcttgat

SEQ ID NO: 5467143 - DNA, 25 bp, Homo sapien
aaaaccttaagcttgattacgctca

SEQ ID NO: 5467144 - DNA, 25 bp, Homo sapien
gactgaggacactataaacatacaa

SEQ ID NO: 5467145 - DNA, 25 bp, Homo sapien
acagaagagtgcatgctgagaacac

SEQ ID NO: 5467146 - DNA, 25 bp, Homo sapien
tgctgagaacactttgagagcgtgt

SEQ ID NO: 5467147 - DNA, 25 bp, Homo sapien
ggatagcacgaagatggcacatttg

SEQ ID NO: 5467148 - DNA, 25 bp, Homo sapien
ttaccgctttggtgtctagtacaga

SEQ ID NO: 5467149 - DNA, 25 bp, Homo sapien
gcagacggtgtatagaggttgttca

SEQ ID NO: 5467150 - DNA, 25 bp, Homo sapien
tcacagacataactgcctcataagc

SEQ ID NO: 5467151 - DNA, 25 bp, Homo sapien
tgccatacagcgatgcagacggtgt

SEQ ID NO: 5467152 - DNA, 25 bp, Homo sapien
tcataagcttgccatacagcgatgc

SEQ ID NO: 5467153 - DNA, 25 bp, Homo sapien
ctagttcacccacaggctcaatgac

SEQ ID NO: 5467154 - DNA, 25 bp, Homo sapien
ctgttccaggcagcaccggactgag

SEQ ID NO: 5467155 - DNA, 25 bp, Homo sapien
ccggactgagcaactactgtgaaaa

SEQ ID NO: 5467156 - DNA, 25 bp, Homo sapien
agaggtctggcctcaggtaaggcca

SEQ ID NO: 5467157 - DNA, 25 bp, Homo sapien
tcaggtaaggccaggtccggcccag

SEQ ID NO: 5467158 - DNA, 25 bp, Homo sapien
tttcgggtgatggatgtttggagcc

SEQ ID NO: 5467159 - DNA, 25 bp, Homo sapien
gttctgtccatggtagtttcgggtg

SEQ ID NO: 5467160 - DNA, 25 bp, Homo sapien
gagccccttgtgattccagtccgtg

SEQ ID NO: 5467161 - DNA, 25 bp, Homo sapien
ccagtccgtggatgaaggccagtct

SEQ ID NO: 5467162 - DNA, 25 bp, Homo sapien
agagaaggcccatttggcgagtgca

SEQ ID NO: 5467163 - DNA, 25 bp, Homo sapien
agagcagaaagacagatttgggatg

SEQ ID NO: 5467164 - DNA, 25 bp, Homo sapien
catataatgcatgactctcctctgg

SEQ ID NO: 5467165 - DNA, 25 bp, Homo sapien
cagaaagacagatttgggatggcat

SEQ ID NO: 5467166 - DNA, 25 bp, Homo sapien
cattttactccattcaaaactaaat

SEQ ID NO: 5467167 - DNA, 25 bp, Homo sapien
gtggagagaaagaatctcgttttca

SEQ ID NO: 5467168 - DNA, 25 bp, Homo sapien
tgtagcacagtcaagaacattgtgg

SEQ ID NO: 5467169 - DNA, 25 bp, Homo sapien
tgaactacggatttctttctctact

SEQ ID NO: 5467170 - DNA, 25 bp, Homo sapien
cggagaagctccagatagcctcttg

SEQ ID NO: 5467171 - DNA, 25 bp, Homo sapien
gcctcttgacaaaggcatattgttg

SEQ ID NO: 5467172 - DNA, 25 bp, Homo sapien
tcaagtgacaaagtgtagctggttc

SEQ ID NO: 5467173 - DNA, 25 bp, Homo sapien
gaagaaagaagatccctgtacatga

SEQ ID NO: 5467174 - DNA, 25 bp, Homo sapien
ggtgatgggtactcaaactcctgaa

SEQ ID NO: 5467175 - DNA, 25 bp, Homo sapien
caaactcctgaattgaatgatggta

SEQ ID NO: 5467176 - DNA, 25 bp, Homo sapien
tctggatggtgatgggtactcaaac

SEQ ID NO: 5467177 - DNA, 25 bp, Homo sapien
ggatggtgatgggtactcaaactcc

SEQ ID NO: 5467178 - DNA, 25 bp, Homo sapien
gcagtttagtccacttcacagtgaa

SEQ ID NO: 5467179 - DNA, 25 bp, Homo sapien
gaaaacctgcacaactgcctgagag

SEQ ID NO: 5467180 - DNA, 25 bp, Homo sapien
cctgagagcggacagagtaattttg

SEQ ID NO: 5467181 - DNA, 25 bp, Homo sapien
ttttgagtgtatagacacagcagag

SEQ ID NO: 5467182 - DNA, 25 bp, Homo sapien
tcctctctaacaacgtgcccttcat

SEQ ID NO: 5467183 - DNA, 25 bp, Homo sapien
ctttccctgtgcattgaagtaaatt

SEQ ID NO: 5467184 - DNA, 25 bp, Homo sapien
catcatgcggagatttctgaaatct

SEQ ID NO: 5467185 - DNA, 25 bp, Homo sapien
attccagtaagtctccatcatgcgg

SEQ ID NO: 5467186 - DNA, 25 bp, Homo sapien
ttcttgatggccctgatcaggttgt

SEQ ID NO: 5467187 - DNA, 25 bp, Homo sapien
taagtgccactcatggggatgatgc

SEQ ID NO: 5467188 - DNA, 25 bp, Homo sapien
gatggccctgatcaggttgtcttga

SEQ ID NO: 5467189 - DNA, 25 bp, Homo sapien
ccctgatcaggttgtcttgactgac

SEQ ID NO: 5467190 - DNA, 25 bp, Homo sapien
ctctagagttattggacctccactc

SEQ ID NO: 5467191 - DNA, 25 bp, Homo sapien
cactccaatgctcagcactaggcac

SEQ ID NO: 5467192 - DNA, 25 bp, Homo sapien
acctccactccaatgctcagcacta

SEQ ID NO: 5467193 - DNA, 25 bp, Homo sapien
tcctctagagttattggacctccac

SEQ ID NO: 5467194 - DNA, 25 bp, Homo sapien
caaaggctccaccccaaaggttgca

SEQ ID NO: 5467195 - DNA, 25 bp, Homo sapien
atccttttccagaggccaaaggctc

SEQ ID NO: 5467196 - DNA, 25 bp, Homo sapien
ttttccagaggccaaaggctccacc

SEQ ID NO: 5467197 - DNA, 25 bp, Homo sapien
aaggctccaccccaaaggttgcaca

SEQ ID NO: 5467198 - DNA, 25 bp, Homo sapien
tcctggaactgcacatggaactcag

SEQ ID NO: 5467199 - DNA, 25 bp, Homo sapien
ggtcctcagccaagaccgtcctttg

SEQ ID NO: 5467200 - DNA, 25 bp, Homo sapien
gcttgtgcttgctggcaaattcctc

SEQ ID NO: 5467201 - DNA, 25 bp, Homo sapien
ggttggtcttgaacatgcccaactg

SEQ ID NO: 5467202 - DNA, 25 bp, Homo sapien
gtggaacgagagacttaggaaagaa

SEQ ID NO: 5467203 - DNA, 25 bp, Homo sapien
taaggtggaacgagagacttaggaa

SEQ ID NO: 5467204 - DNA, 25 bp, Homo sapien
ctcgtaaggtggaacgagagactta

SEQ ID NO: 5467205 - DNA, 25 bp, Homo sapien
tggaacgagagacttaggaaagaaa

SEQ ID NO: 5467206 - DNA, 25 bp, Homo sapien
tgccatttctaacaggttgctcaga

SEQ ID NO: 5467207 - DNA, 25 bp, Homo sapien
cagggcaatgggacaggaagatcaa

SEQ ID NO: 5467208 - DNA, 25 bp, Homo sapien
tatgaactctcaaactgcacggtgc

SEQ ID NO: 5467209 - DNA, 25 bp, Homo sapien
tcaaggttaaggacagtcattgcca

SEQ ID NO: 5467210 - DNA, 25 bp, Homo sapien
cttcttcctggaccctgcatgtttc

SEQ ID NO: 5467211 - DNA, 25 bp, Homo sapien
tcttcctggaccctgcatgtttcat

SEQ ID NO: 5467212 - DNA, 25 bp, Homo sapien
tcaacttcttcctggaccctgcatg

SEQ ID NO: 5467213 - DNA, 25 bp, Homo sapien
aacttcttcctggaccctgcatgtt

SEQ ID NO: 5467214 - DNA, 25 bp, Homo sapien
ttctgcatagtagagcatctctgta

SEQ ID NO: 5467215 - DNA, 25 bp, Homo sapien
catagtagagcatctctgtagaact

SEQ ID NO: 5467216 - DNA, 25 bp, Homo sapien
gcttccaccgatcggttcttccaaa

SEQ ID NO: 5467217 - DNA, 25 bp, Homo sapien
tctgtagaacttaagtttgcttcca

SEQ ID NO: 5467218 - DNA, 25 bp, Homo sapien
gttggaataccctgccgtgtgtgag

SEQ ID NO: 5467219 - DNA, 25 bp, Homo sapien
ttggaataccctgccgtgtgtgagg

SEQ ID NO: 5467220 - DNA, 25 bp, Homo sapien
cctgtctttatggttttatctactt

SEQ ID NO: 5467221 - DNA, 25 bp, Homo sapien
ttccctgtctttatggttttatcta

SEQ ID NO: 5467222 - DNA, 25 bp, Homo sapien
tttttagtaccagctgtattatacc

SEQ ID NO: 5467223 - DNA, 25 bp, Homo sapien
cagctgtattataccagccatgggc

SEQ ID NO: 5467224 - DNA, 25 bp, Homo sapien
tataccagccatgggcatcaataca

SEQ ID NO: 5467225 - DNA, 25 bp, Homo sapien
tagtaccagctgtattataccagcc

SEQ ID NO: 5467226 - DNA, 25 bp, Homo sapien
tgttttacttttaagcactgagaat

SEQ ID NO: 5467227 - DNA, 25 bp, Homo sapien
ttgttttacttttaagcactgagaa

SEQ ID NO: 5467228 - DNA, 25 bp, Homo sapien
cttttaagcactgagaattgtccat

SEQ ID NO: 5467229 - DNA, 25 bp, Homo sapien
ttacttttaagcactgagaattgtc

SEQ ID NO: 5467230 - DNA, 25 bp, Homo sapien
cctgtgcaatgctaaatgagactga

SEQ ID NO: 5467231 - DNA, 25 bp, Homo sapien
taggttgttaggctttagtctctcc

SEQ ID NO: 5467232 - DNA, 25 bp, Homo sapien
ctgtgcaatgctaaatgagactgat

SEQ ID NO: 5467233 - DNA, 25 bp, Homo sapien
gtctctccacattgtcattgttctc

SEQ ID NO: 5467234 - DNA, 25 bp, Homo sapien
gcctcacctgagttccctgaactga

SEQ ID NO: 5467235 - DNA, 25 bp, Homo sapien
ctcacctgagttccctgaactgagt

SEQ ID NO: 5467236 - DNA, 25 bp, Homo sapien
cacctgagttccctgaactgagtcc

SEQ ID NO: 5467237 - DNA, 25 bp, Homo sapien
cctcacctgagttccctgaactgag

SEQ ID NO: 5467238 - DNA, 25 bp, Homo sapien
tgtgagtctctcgtatggcctgtcc

SEQ ID NO: 5467239 - DNA, 25 bp, Homo sapien
gtgagtctctcgtatggcctgtcca

SEQ ID NO: 5467240 - DNA, 25 bp, Homo sapien
tgagtctctcgtatggcctgtccat

SEQ ID NO: 5467241 - DNA, 25 bp, Homo sapien
ctgtgagtctctcgtatggcctgtc

SEQ ID NO: 5467242 - DNA, 25 bp, Homo sapien
gagtctgggcgctcctgtttcttca

SEQ ID NO: 5467243 - DNA, 25 bp, Homo sapien
tattattgcatggttatatgaggca

SEQ ID NO: 5467244 - DNA, 25 bp, Homo sapien
gcctcaatactctgtctaatactgt

SEQ ID NO: 5467245 - DNA, 25 bp, Homo sapien
tgaggcactttgtaagtgtctaata

SEQ ID NO: 5467246 - DNA, 25 bp, Homo sapien
tcttggcatctcctgaatttaaaca

SEQ ID NO: 5467247 - DNA, 25 bp, Homo sapien
cattggcctttctatagaggttggg

SEQ ID NO: 5467248 - DNA, 25 bp, Homo sapien
ggtcttctcacgtagcatttcacag

SEQ ID NO: 5467249 - DNA, 25 bp, Homo sapien
cactgctagcttgttgaggttccct

SEQ ID NO: 5467250 - DNA, 25 bp, Homo sapien
ggacacagagtagattcccaaatat

SEQ ID NO: 5467251 - DNA, 25 bp, Homo sapien
gagacaacgtctcctttctcccttg

SEQ ID NO: 5467252 - DNA, 25 bp, Homo sapien
cccattgtataccttgcagaaagct

SEQ ID NO: 5467253 - DNA, 25 bp, Homo sapien
catgctgatgtaatctacagttgac

SEQ ID NO: 5467254 - DNA, 25 bp, Homo sapien
cttggattccagtcattggtgtgca

SEQ ID NO: 5467255 - DNA, 25 bp, Homo sapien
tagcaattctcagatcatggcttgg

SEQ ID NO: 5467256 - DNA, 25 bp, Homo sapien
cagatcatggcttggattccagtca

SEQ ID NO: 5467257 - DNA, 25 bp, Homo sapien
cttagcaattctcagatcatggctt

SEQ ID NO: 5467258 - DNA, 25 bp, Homo sapien
gagaagtttgcctaaagcattttta

SEQ ID NO: 5467259 - DNA, 25 bp, Homo sapien
ggaagaatatctgtacttgtttgag

SEQ ID NO: 5467260 - DNA, 25 bp, Homo sapien
aatacagtgttaagtttcaagcctt

SEQ ID NO: 5467261 - DNA, 25 bp, Homo sapien
caatccaagtatgatggtcattcca

SEQ ID NO: 5467262 - DNA, 25 bp, Homo sapien
ttttccttaataattccacaatgga

SEQ ID NO: 5467263 - DNA, 25 bp, Homo sapien
catatatatctttgacaagaatgcc

SEQ ID NO: 5467264 - DNA, 25 bp, Homo sapien
ttccttaataattccacaatggatc

SEQ ID NO: 5467265 - DNA, 25 bp, Homo sapien
ctatctatccatctagccgtccata

SEQ ID NO: 5467266 - DNA, 25 bp, Homo sapien
gaagtgtgcactcataccgaagaga

SEQ ID NO: 5467267 - DNA, 25 bp, Homo sapien
gagacattagatgaagtcttcattg

SEQ ID NO: 5467268 - DNA, 25 bp, Homo sapien
gaagtcttcattggattgggaggat

SEQ ID NO: 5467269 - DNA, 25 bp, Homo sapien
gcctgttagcttatcttttccctgg

SEQ ID NO: 5467270 - DNA, 25 bp, Homo sapien
gacattttgtattgtagcttctgaa

SEQ ID NO: 5467271 - DNA, 25 bp, Homo sapien
ttgctattggcctttaattgagttg

SEQ ID NO: 5467272 - DNA, 25 bp, Homo sapien
gcttctgaatactgtcagaatttga

SEQ ID NO: 5467273 - DNA, 25 bp, Homo sapien
ttaacagttatagtccaaggcagct

SEQ ID NO: 5467274 - DNA, 25 bp, Homo sapien
cacctgtggactaggagtgattggt

SEQ ID NO: 5467275 - DNA, 25 bp, Homo sapien
ataaccaactgtttcacaaactcct

SEQ ID NO: 5467276 - DNA, 25 bp, Homo sapien
gactaggagtgattggttcccagag

SEQ ID NO: 5467277 - DNA, 25 bp, Homo sapien
tcctccagccaaactgtgagctgct

SEQ ID NO: 5467278 - DNA, 25 bp, Homo sapien
ccttccccggtgatgagaatttagg

SEQ ID NO: 5467279 - DNA, 25 bp, Homo sapien
caaactcattcaaccccttaagcaa

SEQ ID NO: 5467280 - DNA, 25 bp, Homo sapien
tcattcaaccccttaagcaagagtg

SEQ ID NO: 5467281 - DNA, 25 bp, Homo sapien
gaatttagagccataggcatcccca

SEQ ID NO: 5467282 - DNA, 25 bp, Homo sapien
tccctatattgttgacaggcagaag

SEQ ID NO: 5467283 - DNA, 25 bp, Homo sapien
gttccctatattgttgacaggcaga

SEQ ID NO: 5467284 - DNA, 25 bp, Homo sapien
cctatattgttgacaggcagaagaa

SEQ ID NO: 5467285 - DNA, 25 bp, Homo sapien
aaaaggagcataaatgttccctata

SEQ ID NO: 5467286 - DNA, 25 bp, Homo sapien
gctgtgtcacaaaatacgtgagaag

SEQ ID NO: 5467287 - DNA, 25 bp, Homo sapien
caaaatacgtgagaagggatcctgc

SEQ ID NO: 5467288 - DNA, 25 bp, Homo sapien
tacgtgagaagggatcctgctactt

SEQ ID NO: 5467289 - DNA, 25 bp, Homo sapien
gaagggatcctgctacttctccctc

SEQ ID NO: 5467290 - DNA, 25 bp, Homo sapien
gaaattataaccaacacctggctcg

SEQ ID NO: 5467291 - DNA, 25 bp, Homo sapien
cacgaaattataaccaacacctggc

SEQ ID NO: 5467292 - DNA, 25 bp, Homo sapien
tataaccaacacctggctcggaagg

SEQ ID NO: 5467293 - DNA, 25 bp, Homo sapien
gcgcaccacgaaattataaccaaca

SEQ ID NO: 5467294 - DNA, 25 bp, Homo sapien
taaaaccatcaagatagctcagcag

SEQ ID NO: 5467295 - DNA, 25 bp, Homo sapien
agcagcctgaggtttcagtgtacat

SEQ ID NO: 5467296 - DNA, 25 bp, Homo sapien
ttcagtgtacattacagcaggagcc

SEQ ID NO: 5467297 - DNA, 25 bp, Homo sapien
gcaggtaaaggcaccagattgtctt

SEQ ID NO: 5467298 - DNA, 25 bp, Homo sapien
tgactctgttagtacctttagcagg

SEQ ID NO: 5467299 - DNA, 25 bp, Homo sapien
ttcccatgtattgctgaattttcac

SEQ ID NO: 5467300 - DNA, 25 bp, Homo sapien
aaggaaagatcctcaagagcctcct

SEQ ID NO: 5467301 - DNA, 25 bp, Homo sapien
tctgtgactctgttagtacctttag

SEQ ID NO: 5467302 - DNA, 25 bp, Homo sapien
ctaagcctgcagaacagtgaaaaga

SEQ ID NO: 5467303 - DNA, 25 bp, Homo sapien
tgcagaacagtgaaaagaagtacct

SEQ ID NO: 5467304 - DNA, 25 bp, Homo sapien
cctgcagaacagtgaaaagaagtac

SEQ ID NO: 5467305 - DNA, 25 bp, Homo sapien
cagaacagtgaaaagaagtacctgt

SEQ ID NO: 5467306 - DNA, 25 bp, Homo sapien
tcatcaggtcgtgggaaactttccc

SEQ ID NO: 5467307 - DNA, 25 bp, Homo sapien
tccagtgcctagcaactacttccag

SEQ ID NO: 5467308 - DNA, 25 bp, Homo sapien
ttctctctggattaaatcacctcca

SEQ ID NO: 5467309 - DNA, 25 bp, Homo sapien
cagctcgccgacatgagatttgtta

SEQ ID NO: 5467310 - DNA, 25 bp, Homo sapien
gatgacagggatttgacaggacagc

SEQ ID NO: 5467311 - DNA, 25 bp, Homo sapien
caggtgtcacatcgaggtctttggg

SEQ ID NO: 5467312 - DNA, 25 bp, Homo sapien
tttggggaatgcacagctgtccacg

SEQ ID NO: 5467313 - DNA, 25 bp, Homo sapien
gcacagctgtccacggggcacctga

SEQ ID NO: 5467314 - DNA, 25 bp, Homo sapien
taggccccactgatggagatcttac

SEQ ID NO: 5467315 - DNA, 25 bp, Homo sapien
ctgatggagatcttactactaacat

SEQ ID NO: 5467316 - DNA, 25 bp, Homo sapien
ccccactgatggagatcttactact

SEQ ID NO: 5467317 - DNA, 25 bp, Homo sapien
gatttgtgtaggccccactgatgga

SEQ ID NO: 5467318 - DNA, 25 bp, Homo sapien
cacgagggatattgaaagagacgct

SEQ ID NO: 5467319 - DNA, 25 bp, Homo sapien
cactagacgtacacgagggatattg

SEQ ID NO: 5467320 - DNA, 25 bp, Homo sapien
gaaagagacgctaacacaggcagtg

SEQ ID NO: 5467321 - DNA, 25 bp, Homo sapien
ttggtgtatatccactagacgtaca

SEQ ID NO: 5467322 - DNA, 25 bp, Homo sapien
ctgtacctgtttacattcccatgag

SEQ ID NO: 5467323 - DNA, 25 bp, Homo sapien
ggtcatatggaaacaataagtttaa

SEQ ID NO: 5467324 - DNA, 25 bp, Homo sapien
tgctaggtcatatggaaacaataag

SEQ ID NO: 5467325 - DNA, 25 bp, Homo sapien
atgaggagtatacggggtttccatt

SEQ ID NO: 5467326 - DNA, 25 bp, Homo sapien
tactctgaagtagtgcaaggtcgtg

SEQ ID NO: 5467327 - DNA, 25 bp, Homo sapien
gaggtagtttgggagtcatatgtct

SEQ ID NO: 5467328 - DNA, 25 bp, Homo sapien
tattttgggccatacaatgggatag

SEQ ID NO: 5467329 - DNA, 25 bp, Homo sapien
cagaaacttaggtcttgggctggct

SEQ ID NO: 5467330 - DNA, 25 bp, Homo sapien
ttttctatggtagctcagaccaaag

SEQ ID NO: 5467331 - DNA, 25 bp, Homo sapien
ggtagctcagaccaaagaccacata

SEQ ID NO: 5467332 - DNA, 25 bp, Homo sapien
tatctgcaaacagtttgcaggcact

SEQ ID NO: 5467333 - DNA, 25 bp, Homo sapien
caaagaccacatatctgcaaacagt

SEQ ID NO: 5467334 - DNA, 25 bp, Homo sapien
tgatggccaagggtgcggctgcatt

SEQ ID NO: 5467335 - DNA, 25 bp, Homo sapien
gttgagagctgaacccactggggct

SEQ ID NO: 5467336 - DNA, 25 bp, Homo sapien
tgaggacccagcgtggcaagagttc

SEQ ID NO: 5467337 - DNA, 25 bp, Homo sapien
ctcttcttgaggcatgtgttggtgg

SEQ ID NO: 5467338 - DNA, 25 bp, Homo sapien
gagcagaaaccataatgagaaccca

SEQ ID NO: 5467339 - DNA, 25 bp, Homo sapien
gggactcagtcataagggcccccaa

SEQ ID NO: 5467340 - DNA, 25 bp, Homo sapien
tggacacatctgagggttaaacact

SEQ ID NO: 5467341 - DNA, 25 bp, Homo sapien
cataagggcccccaacactgtttgg

SEQ ID NO: 5467342 - DNA, 25 bp, Homo sapien
tcatcttatagctccaatgtagctt

SEQ ID NO: 5467343 - DNA, 25 bp, Homo sapien
atgtagcttcttccgtaaaggcctt

SEQ ID NO: 5467344 - DNA, 25 bp, Homo sapien
gcacccctcgccatgctatgggtgt

SEQ ID NO: 5467345 - DNA, 25 bp, Homo sapien
tcgccatgctatgggtgtcctgatg

SEQ ID NO: 5467346 - DNA, 25 bp, Homo sapien
ctgagaggacaatgctttgtcacca

SEQ ID NO: 5467347 - DNA, 25 bp, Homo sapien
actccagctgtcgatccctggtatg

SEQ ID NO: 5467348 - DNA, 25 bp, Homo sapien
tgacactccagctgtcgatccctgg

SEQ ID NO: 5467349 - DNA, 25 bp, Homo sapien
gtctgagaggacaatgctttgtcac

SEQ ID NO: 5467350 - DNA, 25 bp, Homo sapien
tgcgcaccaacttcaataactgcat

SEQ ID NO: 5467351 - DNA, 25 bp, Homo sapien
ccaacttcaataactgcatcctcag

SEQ ID NO: 5467352 - DNA, 25 bp, Homo sapien
ctgtaaatgcgcaccaacttcaata

SEQ ID NO: 5467353 - DNA, 25 bp, Homo sapien
aacttcaataactgcatcctcagcg

SEQ ID NO: 5467354 - DNA, 25 bp, Homo sapien
cggtagtctaggagctccccagaga

SEQ ID NO: 5467355 - DNA, 25 bp, Homo sapien
atttcaccatgattttccggtagtc

SEQ ID NO: 5467356 - DNA, 25 bp, Homo sapien
catgattttccggtagtctaggagc

SEQ ID NO: 5467357 - DNA, 25 bp, Homo sapien
cacagtgaaagtcctataactatat

SEQ ID NO: 5467358 - DNA, 25 bp, Homo sapien
ttttgaaaaggagaatgtttctcca

SEQ ID NO: 5467359 - DNA, 25 bp, Homo sapien
aaaaggagaatgtttctccatacaa

SEQ ID NO: 5467360 - DNA, 25 bp, Homo sapien
tgaaaaggagaatgtttctccatac

SEQ ID NO: 5467361 - DNA, 25 bp, Homo sapien
tttgaaaaggagaatgtttctccat

SEQ ID NO: 5467362 - DNA, 25 bp, Homo sapien
actatcatagaacttaggtaaggcc

SEQ ID NO: 5467363 - DNA, 25 bp, Homo sapien
cacttccactatcatagaacttagg

SEQ ID NO: 5467364 - DNA, 25 bp, Homo sapien
tccactatcatagaacttaggtaag

SEQ ID NO: 5467365 - DNA, 25 bp, Homo sapien
tatcatagaacttaggtaaggccat

SEQ ID NO: 5467366 - DNA, 25 bp, Homo sapien
acctctgctcaagctccacggattt

SEQ ID NO: 5467367 - DNA, 25 bp, Homo sapien
taactcatcagaatagtttatccta

SEQ ID NO: 5467368 - DNA, 25 bp, Homo sapien
ccacggatttataatcatgggcatc

SEQ ID NO: 5467369 - DNA, 25 bp, Homo sapien
tataatcatgggcatctacatctcc

SEQ ID NO: 5467370 - DNA, 25 bp, Homo sapien
actttatatggcctataatcattcc

SEQ ID NO: 5467371 - DNA, 25 bp, Homo sapien
tccttaggcattgggtgattcactt

SEQ ID NO: 5467372 - DNA, 25 bp, Homo sapien
gattcactttatatggcctataatc

SEQ ID NO: 5467373 - DNA, 25 bp, Homo sapien
ttatatggcctataatcattccagc

SEQ ID NO: 5467374 - DNA, 25 bp, Homo sapien
tatttccatggtttgctgttctcac

SEQ ID NO: 5467375 - DNA, 25 bp, Homo sapien
atatttccatggtttgctgttctca

SEQ ID NO: 5467376 - DNA, 25 bp, Homo sapien
taatatttccatggtttgctgttct

SEQ ID NO: 5467377 - DNA, 25 bp, Homo sapien
tttaatatttccatggtttgctgtt

SEQ ID NO: 5467378 - DNA, 25 bp, Homo sapien
tatggacctcagtctggtaaaaggc

SEQ ID NO: 5467379 - DNA, 25 bp, Homo sapien
tcttgatctggatgcactgaagttg

SEQ ID NO: 5467380 - DNA, 25 bp, Homo sapien
gatggtcagtaataagtcactcact

SEQ ID NO: 5467381 - DNA, 25 bp, Homo sapien
tagtgcctgccattgtctgatgaac

SEQ ID NO: 5467382 - DNA, 25 bp, Homo sapien
gaagtacattcggtttgaatctctg

SEQ ID NO: 5467383 - DNA, 25 bp, Homo sapien
tctgctttggtagtttagaagagct

SEQ ID NO: 5467384 - DNA, 25 bp, Homo sapien
gcaatgggagtactgtccaacaatc

SEQ ID NO: 5467385 - DNA, 25 bp, Homo sapien
catctgatagttccaaatggagcac

SEQ ID NO: 5467386 - DNA, 25 bp, Homo sapien
tgctctccctaacactatcagcatt

SEQ ID NO: 5467387 - DNA, 25 bp, Homo sapien
cctaacactatcagcattgatcttc

SEQ ID NO: 5467388 - DNA, 25 bp, Homo sapien
tccatggcacgactgctctccctaa

SEQ ID NO: 5467389 - DNA, 25 bp, Homo sapien
gcacgactgctctccctaacactat

SEQ ID NO: 5467390 - DNA, 25 bp, Homo sapien
tgctttttgttttccggtgttgtga

SEQ ID NO: 5467391 - DNA, 25 bp, Homo sapien
ttccttggcttttctgtgcaccact

SEQ ID NO: 5467392 - DNA, 25 bp, Homo sapien
tctgtgcaccactagcttgcttttt

SEQ ID NO: 5467393 - DNA, 25 bp, Homo sapien
tttccggtgttgtgatataatctct

SEQ ID NO: 5467394 - DNA, 25 bp, Homo sapien
aaacttgatatttaacactgctgct

SEQ ID NO: 5467395 - DNA, 25 bp, Homo sapien
ctgaccagggccatgggaaacttga

SEQ ID NO: 5467396 - DNA, 25 bp, Homo sapien
gggaaacttgatatttaacactgct

SEQ ID NO: 5467397 - DNA, 25 bp, Homo sapien
atgagctttggaacttgtctgacca

SEQ ID NO: 5467398 - DNA, 25 bp, Homo sapien
gatctggaggaaggactcccaaaaa

SEQ ID NO: 5467399 - DNA, 25 bp, Homo sapien
agagtgacaccaactagtacaaatg

SEQ ID NO: 5467400 - DNA, 25 bp, Homo sapien
atgccattaggcgatctggaggaag

SEQ ID NO: 5467401 - DNA, 25 bp, Homo sapien
agtacaaatgccattaggcgatctg

SEQ ID NO: 5467402 - DNA, 25 bp, Homo sapien
cttagattaagatacaggcctcaca

SEQ ID NO: 5467403 - DNA, 25 bp, Homo sapien
gaacactctggcttactggtctttg

SEQ ID NO: 5467404 - DNA, 25 bp, Homo sapien
tcaaatacggtttctctgagagcca

SEQ ID NO: 5467405 - DNA, 25 bp, Homo sapien
ggcctcacatgatctagtccctaat

SEQ ID NO: 5467406 - DNA, 25 bp, Homo sapien
gatgggtttgtccactagcaggcaa

SEQ ID NO: 5467407 - DNA, 25 bp, Homo sapien
tagcaggcaagaatggcccagctca

SEQ ID NO: 5467408 - DNA, 25 bp, Homo sapien
gtcgatccgactgcagaacgcttgc

SEQ ID NO: 5467409 - DNA, 25 bp, Homo sapien
gattcaagtaccaaacccaggtcga

SEQ ID NO: 5467410 - DNA, 25 bp, Homo sapien
ttgtccacatccttagcctccaaga

SEQ ID NO: 5467411 - DNA, 25 bp, Homo sapien
attgtccacatccttagcctccaag

SEQ ID NO: 5467412 - DNA, 25 bp, Homo sapien
agccatcctgtcaccatggaggtca

SEQ ID NO: 5467413 - DNA, 25 bp, Homo sapien
catggaggtcaccattaccatagca

SEQ ID NO: 5467414 - DNA, 25 bp, Homo sapien
cccagctcgtttgagtgtttcctac

SEQ ID NO: 5467415 - DNA, 25 bp, Homo sapien
ccccagctcgtttgagtgtttccta

SEQ ID NO: 5467416 - DNA, 25 bp, Homo sapien
tccccagctcgtttgagtgtttcct

SEQ ID NO: 5467417 - DNA, 25 bp, Homo sapien
cttccccagctcgtttgagtgtttc

SEQ ID NO: 5467418 - DNA, 25 bp, Homo sapien
aaagatggatcgttcatcaatttga

SEQ ID NO: 5467419 - DNA, 25 bp, Homo sapien
tcttgtaagtatgggcctgcatcca

SEQ ID NO: 5467420 - DNA, 25 bp, Homo sapien
gatttatgtaaattgcaagtggtga

SEQ ID NO: 5467421 - DNA, 25 bp, Homo sapien
gaattagattgatcttgttcgtatc

SEQ ID NO: 5467422 - DNA, 25 bp, Homo sapien
gatcacccttggcaatttaaaagta

SEQ ID NO: 5467423 - DNA, 25 bp, Homo sapien
tatttggttctatagcaagtgacgc

SEQ ID NO: 5467424 - DNA, 25 bp, Homo sapien
agtttttaaatcaagctaatagaca

SEQ ID NO: 5467425 - DNA, 25 bp, Homo sapien
gcaagtgacgcattatgatcatcat

SEQ ID NO: 5467426 - DNA, 25 bp, Homo sapien
catctggtaaagacccatctggcca

SEQ ID NO: 5467427 - DNA, 25 bp, Homo sapien
tctggccacgtgaaatcagcaaaca

SEQ ID NO: 5467428 - DNA, 25 bp, Homo sapien
gaatgaaaaccactacatctggtaa

SEQ ID NO: 5467429 - DNA, 25 bp, Homo sapien
ctataagacggactgcaagagagga

SEQ ID NO: 5467430 - DNA, 25 bp, Homo sapien
tcctgaagccttattgacatgatga

SEQ ID NO: 5467431 - DNA, 25 bp, Homo sapien
tagcctcctgaagccttattgacat

SEQ ID NO: 5467432 - DNA, 25 bp, Homo sapien
tattgacatgatgaaatacatctgg

SEQ ID NO: 5467433 - DNA, 25 bp, Homo sapien
tgacatgatgaaatacatctggagt

SEQ ID NO: 5467434 - DNA, 25 bp, Homo sapien
caattcactgcttctgtttctatat

SEQ ID NO: 5467435 - DNA, 25 bp, Homo sapien
tcaattcactgcttctgtttctata

SEQ ID NO: 5467436 - DNA, 25 bp, Homo sapien
tcagctatttgcattttcacaaaga

SEQ ID NO: 5467437 - DNA, 25 bp, Homo sapien
ctatttgcattttcacaaagataga

SEQ ID NO: 5467438 - DNA, 25 bp, Homo sapien
cagctatttgcattttcacaaagat

SEQ ID NO: 5467439 - DNA, 25 bp, Homo sapien
gctatttgcattttcacaaagatag

SEQ ID NO: 5467440 - DNA, 25 bp, Homo sapien
catgtggatgcaaaccattctttct

SEQ ID NO: 5467441 - DNA, 25 bp, Homo sapien
gcctcttggtgatacacccttcatc

SEQ ID NO: 5467442 - DNA, 25 bp, Homo sapien
tctaaatggtacactctccatgtgg

SEQ ID NO: 5467443 - DNA, 25 bp, Homo sapien
tctttcttccgtattgcctcctggt

SEQ ID NO: 5467444 - DNA, 25 bp, Homo sapien
ggcatgccctctttcatccgtattg

SEQ ID NO: 5467445 - DNA, 25 bp, Homo sapien
ttgccttgtcatggaacaccctctc

SEQ ID NO: 5467446 - DNA, 25 bp, Homo sapien
ccgtattgcttcttgagggtacaca

SEQ ID NO: 5467447 - DNA, 25 bp, Homo sapien
cctgttgtctcttgatggttcaccc

SEQ ID NO: 5467448 - DNA, 25 bp, Homo sapien
tctttatctcacaccccctcgcttt

SEQ ID NO: 5467449 - DNA, 25 bp, Homo sapien
cctctttatgacatgccctctcccc

SEQ ID NO: 5467450 - DNA, 25 bp, Homo sapien
caccccctcgcttttctgtgttgtt

SEQ ID NO: 5467451 - DNA, 25 bp, Homo sapien
tgcctctttatgacatgccctctcc

SEQ ID NO: 5467452 - DNA, 25 bp, Homo sapien
gcacacgctctatctcatgttgcct

SEQ ID NO: 5467453 - DNA, 25 bp, Homo sapien
ttcttgatggcacacgctctatctc

SEQ ID NO: 5467454 - DNA, 25 bp, Homo sapien
aaaacctcttctgtctatgttgtct

SEQ ID NO: 5467455 - DNA, 25 bp, Homo sapien
tcttgattgtacacatcatctcctc

SEQ ID NO: 5467456 - DNA, 25 bp, Homo sapien
gcctgttgcctgattacgccattcc

SEQ ID NO: 5467457 - DNA, 25 bp, Homo sapien
catattgcctcttgatagtaaatgc

SEQ ID NO: 5467458 - DNA, 25 bp, Homo sapien
tgcctcttgttggtacgccctctaa

SEQ ID NO: 5467459 - DNA, 25 bp, Homo sapien
catgttgcctcttaatggtacaatc

SEQ ID NO: 5467460 - DNA, 25 bp, Homo sapien
catcttgtctctcgtggtacaccag

SEQ ID NO: 5467461 - DNA, 25 bp, Homo sapien
tctaagttgcctctagtggtacaca

SEQ ID NO: 5467462 - DNA, 25 bp, Homo sapien
tctatgttgcctctggatggtactc

SEQ ID NO: 5467463 - DNA, 25 bp, Homo sapien
catgttcctcgtgatggtacagtca

SEQ ID NO: 5467464 - DNA, 25 bp, Homo sapien
cagtttttcaggatacccaacctca

SEQ ID NO: 5467465 - DNA, 25 bp, Homo sapien
cagtcagaaatgcaccaagtgatat

SEQ ID NO: 5467466 - DNA, 25 bp, Homo sapien
gggcacactatccatcaatcaagga

SEQ ID NO: 5467467 - DNA, 25 bp, Homo sapien
taaagttttcagagacaatagccat

SEQ ID NO: 5467468 - DNA, 25 bp, Homo sapien
gaacgtgaatccatcatacactgag

SEQ ID NO: 5467469 - DNA, 25 bp, Homo sapien
cagggaagtgctcatcaaaagtaca

SEQ ID NO: 5467470 - DNA, 25 bp, Homo sapien
gagataacacttcgtactcactaga

SEQ ID NO: 5467471 - DNA, 25 bp, Homo sapien
tgctttggcaaacaatctgagagtt

SEQ ID NO: 5467472 - DNA, 25 bp, Homo sapien
tggttgccagtgttgtcctagtgat

SEQ ID NO: 5467473 - DNA, 25 bp, Homo sapien
ctgtgacaattccaacagaggattg

SEQ ID NO: 5467474 - DNA, 25 bp, Homo sapien
gctttctaaggaataagagatgggc

SEQ ID NO: 5467475 - DNA, 25 bp, Homo sapien
agaggattgttttaggccttggaca

SEQ ID NO: 5467476 - DNA, 25 bp, Homo sapien
gctgctcgccaacttttggtagcat

SEQ ID NO: 5467477 - DNA, 25 bp, Homo sapien
tatctgttccggtatttatagccag

SEQ ID NO: 5467478 - DNA, 25 bp, Homo sapien
ttagatattggcttatgaacagcat

SEQ ID NO: 5467479 - DNA, 25 bp, Homo sapien
agttcacgagtgctgtcctctccaa

SEQ ID NO: 5467480 - DNA, 25 bp, Homo sapien
tatttatagccagttcacgagtgct

SEQ ID NO: 5467481 - DNA, 25 bp, Homo sapien
tgaacaattaggtccggggaggaca

SEQ ID NO: 5467482 - DNA, 25 bp, Homo sapien
aggctccagggcagctcagaaagtc

SEQ ID NO: 5467483 - DNA, 25 bp, Homo sapien
tcagaaagtcttagttccagaaagt

SEQ ID NO: 5467484 - DNA, 25 bp, Homo sapien
tcaaatagaaagttgaacaattagg

SEQ ID NO: 5467485 - DNA, 25 bp, Homo sapien
agattgatgacaccctgcctttggc

SEQ ID NO: 5467486 - DNA, 25 bp, Homo sapien
gttactgagcccactgtacttgtgg

SEQ ID NO: 5467487 - DNA, 25 bp, Homo sapien
tgtacttgtgggctgacactctgca

SEQ ID NO: 5467488 - DNA, 25 bp, Homo sapien
tctccaccgatgacttccagattga

SEQ ID NO: 5467489 - DNA, 25 bp, Homo sapien
gtgaactcctctgaggcttgaagca

SEQ ID NO: 5467490 - DNA, 25 bp, Homo sapien
cccatcattacagcgatttctacat

SEQ ID NO: 5467491 - DNA, 25 bp, Homo sapien
tgaactcctctgaggcttgaagcat

SEQ ID NO: 5467492 - DNA, 25 bp, Homo sapien
tcttgaccacgagggctgttaggct

SEQ ID NO: 5467493 - DNA, 25 bp, Homo sapien
tagtagatgactgcacagtaaaaac

SEQ ID NO: 5467494 - DNA, 25 bp, Homo sapien
atgactgcacagtaaaaaccatctt

SEQ ID NO: 5467495 - DNA, 25 bp, Homo sapien
aaaaccatcttcttgaccacgaggg

SEQ ID NO: 5467496 - DNA, 25 bp, Homo sapien
tactgacatgcatttccacaaattg

SEQ ID NO: 5467497 - DNA, 25 bp, Homo sapien
tgcctgctgttagtgaatatctcat

SEQ ID NO: 5467498 - DNA, 25 bp, Homo sapien
gtagaaatggctttgtatattgcct

SEQ ID NO: 5467499 - DNA, 25 bp, Homo sapien
gaatatctcataccatattgtgtct

SEQ ID NO: 5467500 - DNA, 25 bp, Homo sapien
agggctcgggaaaccatcaaagatc

SEQ ID NO: 5467501 - DNA, 25 bp, Homo sapien
tattaaacagacgtaatgggtcctg

SEQ ID NO: 5467502 - DNA, 25 bp, Homo sapien
gaacataagtgcactctcaggatga

SEQ ID NO: 5467503 - DNA, 25 bp, Homo sapien
gactatgctcagtatcgtttcagta

SEQ ID NO: 5467504 - DNA, 25 bp, Homo sapien
aattcgagctgaacctcaatctgct

SEQ ID NO: 5467505 - DNA, 25 bp, Homo sapien
ggaggaggcactatgtcctctaaat

SEQ ID NO: 5467506 - DNA, 25 bp, Homo sapien
atgtcctctaaattcgagctgaacc

SEQ ID NO: 5467507 - DNA, 25 bp, Homo sapien
cagggaggaggcactatgtcctcta

SEQ ID NO: 5467508 - DNA, 25 bp, Homo sapien
tgttgcagagggagacgtaaacaca

SEQ ID NO: 5467509 - DNA, 25 bp, Homo sapien
agtgaggcagaggaataggattcct

SEQ ID NO: 5467510 - DNA, 25 bp, Homo sapien
tggcaaaagatgctcctccacagtg

SEQ ID NO: 5467511 - DNA, 25 bp, Homo sapien
gcagagggagacgtaaacacatgac

SEQ ID NO: 5467512 - DNA, 25 bp, Homo sapien
tgggtctgcaaacgcagcaatgcac

SEQ ID NO: 5467513 - DNA, 25 bp, Homo sapien
ccacagtcctggcattattggcaaa

SEQ ID NO: 5467514 - DNA, 25 bp, Homo sapien
tgatgtggagattttagctggatca

SEQ ID NO: 5467515 - DNA, 25 bp, Homo sapien
tagctggatcatcacgctgagatgc

SEQ ID NO: 5467516 - DNA, 25 bp, Homo sapien
ttggcagacaccaatgcagtaaaag

SEQ ID NO: 5467517 - DNA, 25 bp, Homo sapien
cttgaaaccgtcttatttccttcat

SEQ ID NO: 5467518 - DNA, 25 bp, Homo sapien
ccagtggttggcagacaccaatgca

SEQ ID NO: 5467519 - DNA, 25 bp, Homo sapien
ggccatcctgccgacttgaaaccgt

SEQ ID NO: 5467520 - DNA, 25 bp, Homo sapien
actgagcaaggaagtcactaggata

SEQ ID NO: 5467521 - DNA, 25 bp, Homo sapien
tcagggtttcaagactctgtcctag

SEQ ID NO: 5467522 - DNA, 25 bp, Homo sapien
caaggaagtcactaggatacctttc

SEQ ID NO: 5467523 - DNA, 25 bp, Homo sapien
cctagaacttgcaaatcgatgaaac

SEQ ID NO: 5467524 - DNA, 25 bp, Homo sapien
tgttcttcatgtttttattacttga

SEQ ID NO: 5467525 - DNA, 25 bp, Homo sapien
ttgttcttcatgtttttattacttg

SEQ ID NO: 5467526 - DNA, 25 bp, Homo sapien
tttattacttgaaaaaggacagaca

SEQ ID NO: 5467527 - DNA, 25 bp, Homo sapien
attacttgaaaaaggacagacacaa

SEQ ID NO: 5467528 - DNA, 25 bp, Homo sapien
taaggcttcttaggtgccgcagtgc

SEQ ID NO: 5467529 - DNA, 25 bp, Homo sapien
gcaaggtttcctcggtgataccaaa

SEQ ID NO: 5467530 - DNA, 25 bp, Homo sapien
tggtgtcctgcaacatatgctgaga

SEQ ID NO: 5467531 - DNA, 25 bp, Homo sapien
tatgcagaccgaaatgctgacacca

SEQ ID NO: 5467532 - DNA, 25 bp, Homo sapien
taactgccaactatcaggttgttag

SEQ ID NO: 5467533 - DNA, 25 bp, Homo sapien
caataagagggtactacttggtata

SEQ ID NO: 5467534 - DNA, 25 bp, Homo sapien
tgtaactgtgaattaactgccaact

SEQ ID NO: 5467535 - DNA, 25 bp, Homo sapien
ggccctcccgagatgttccttcctc

SEQ ID NO: 5467536 - DNA, 25 bp, Homo sapien
ccctaacattcttgtggaatttcat

SEQ ID NO: 5467537 - DNA, 25 bp, Homo sapien
tttcataaggcagatcggaatggcc

SEQ ID NO: 5467538 - DNA, 25 bp, Homo sapien
tctcccacagagaggcattgggaaa

SEQ ID NO: 5467539 - DNA, 25 bp, Homo sapien
tttgcctgagcgtggtgaaaactgg

SEQ ID NO: 5467540 - DNA, 25 bp, Homo sapien
accttggtcagccaatagtttggca

SEQ ID NO: 5467541 - DNA, 25 bp, Homo sapien
ccaaatttgaaacgttgcttactca

SEQ ID NO: 5467542 - DNA, 25 bp, Homo sapien
tgaactccgtgaccaatgctgcctt

SEQ ID NO: 5467543 - DNA, 25 bp, Homo sapien
gcctttgctgaagcgtctcaagttc

SEQ ID NO: 5467544 - DNA, 25 bp, Homo sapien
gaaggtatccatgtgcactgtggcc

SEQ ID NO: 5467545 - DNA, 25 bp, Homo sapien
tgatctccctgtagacccaggcgaa

SEQ ID NO: 5467546 - DNA, 25 bp, Homo sapien
cattggccggaaagacatcctctcg

SEQ ID NO: 5467547 - DNA, 25 bp, Homo sapien
caattcctgggaaacctcttcggag

SEQ ID NO: 5467548 - DNA, 25 bp, Homo sapien
taaagcggtagcctaagacagccct

SEQ ID NO: 5467549 - DNA, 25 bp, Homo sapien
gagcagaagccgtgtaagaggtcca

SEQ ID NO: 5467550 - DNA, 25 bp, Homo sapien
tctggaatgccactgaagggccaag

SEQ ID NO: 5467551 - DNA, 25 bp, Homo sapien
cctggatgtgatagagcctgtgaac

SEQ ID NO: 5467552 - DNA, 25 bp, Homo sapien
cctgactgatagcagagacacagcc

SEQ ID NO: 5467553 - DNA, 25 bp, Homo sapien
gacacagccagcgggcaagggtggc

SEQ ID NO: 5467554 - DNA, 25 bp, Homo sapien
agagacacagccagcgggcaagggt

SEQ ID NO: 5467555 - DNA, 25 bp, Homo sapien
tgactgatagcagagacacagccag

SEQ ID NO: 5467556 - DNA, 25 bp, Homo sapien
gccagctctgcattcatgaatcacc

SEQ ID NO: 5467557 - DNA, 25 bp, Homo sapien
gaaaatatagagaggctgtgaagcc

SEQ ID NO: 5467558 - DNA, 25 bp, Homo sapien
ccttccaactcatgagttttccaac

SEQ ID NO: 5467559 - DNA, 25 bp, Homo sapien
taacagcgtcggatcaggagagagc

SEQ ID NO: 5467560 - DNA, 25 bp, Homo sapien
gagatttatgacctcagcttgaatc

SEQ ID NO: 5467561 - DNA, 25 bp, Homo sapien
gcaacatagagatttatgacctcag

SEQ ID NO: 5467562 - DNA, 25 bp, Homo sapien
cagcttgaatctgctcctttcttgc

SEQ ID NO: 5467563 - DNA, 25 bp, Homo sapien
aaaaggcaaagggtgcaacatagag

SEQ ID NO: 5467564 - DNA, 25 bp, Homo sapien
taaaccacaaacactgactcgataa

SEQ ID NO: 5467565 - DNA, 25 bp, Homo sapien
cacaaacactgactcgataattatg

SEQ ID NO: 5467566 - DNA, 25 bp, Homo sapien
ctaaaccacaaacactgactcgata

SEQ ID NO: 5467567 - DNA, 25 bp, Homo sapien
accacaaacactgactcgataatta

SEQ ID NO: 5467568 - DNA, 25 bp, Homo sapien
ttgtcggcacaataataaattttgg

SEQ ID NO: 5467569 - DNA, 25 bp, Homo sapien
ctatgaaattattgtcggcacaata

SEQ ID NO: 5467570 - DNA, 25 bp, Homo sapien
gaaggtattaaaggatagatgctgt

SEQ ID NO: 5467571 - DNA, 25 bp, Homo sapien
tagatgctgttcatagtgaaatcta

SEQ ID NO: 5467572 - DNA, 25 bp, Homo sapien
cagtgagagaatcagctcttgggcc

SEQ ID NO: 5467573 - DNA, 25 bp, Homo sapien
agtgagagaatcagctcttgggccc

SEQ ID NO: 5467574 - DNA, 25 bp, Homo sapien
tgagagaatcagctcttgggcccat

SEQ ID NO: 5467575 - DNA, 25 bp, Homo sapien
gtgagagaatcagctcttgggccca

SEQ ID NO: 5467576 - DNA, 25 bp, Homo sapien
actctaagaaaaatgttccttccat

SEQ ID NO: 5467577 - DNA, 25 bp, Homo sapien
tctcccaactctaagaaaaatgttc

SEQ ID NO: 5467578 - DNA, 25 bp, Homo sapien
gctcttggatgtgtgaagcttggaa

SEQ ID NO: 5467579 - DNA, 25 bp, Homo sapien
tgtgtgaagcttggaaatattgtca

SEQ ID NO: 5467580 - DNA, 25 bp, Homo sapien
tgtcctgtcaattggctcttggatg

SEQ ID NO: 5467581 - DNA, 25 bp, Homo sapien
atttgtcctgtcaattggctcttgg

SEQ ID NO: 5467582 - DNA, 25 bp, Homo sapien
tgtgagaagatctaccaggacttaa

SEQ ID NO: 5467583 - DNA, 25 bp, Homo sapien
cttgtgtgagaagatctaccaggac

SEQ ID NO: 5467584 - DNA, 25 bp, Homo sapien
gagaagatctaccaggacttaaagg

SEQ ID NO: 5467585 - DNA, 25 bp, Homo sapien
tgtgtgagaagatctaccaggactt

SEQ ID NO: 5467586 - DNA, 25 bp, Homo sapien
aaaggcccgcagctgtatctgtaca

SEQ ID NO: 5467587 - DNA, 25 bp, Homo sapien
aatgagggccatgactgatgaaaac

SEQ ID NO: 5467588 - DNA, 25 bp, Homo sapien
tcaaaatgtatagcctctccagcag

SEQ ID NO: 5467589 - DNA, 25 bp, Homo sapien
tagagcgtgtggtcattagttccgc

SEQ ID NO: 5467590 - DNA, 25 bp, Homo sapien
ctttcattgctggtcctatccaggg

SEQ ID NO: 5467591 - DNA, 25 bp, Homo sapien
tccaggggacattggatagttgacg

SEQ ID NO: 5467592 - DNA, 25 bp, Homo sapien
cattggatagttgacgccctccact

SEQ ID NO: 5467593 - DNA, 25 bp, Homo sapien
gttgacgccctccacttctctattt

SEQ ID NO: 5467594 - DNA, 25 bp, Homo sapien
tgggacttggcttagagagcttttt

SEQ ID NO: 5467595 - DNA, 25 bp, Homo sapien
gatgggacttggcttagagagcttt

SEQ ID NO: 5467596 - DNA, 25 bp, Homo sapien
atgggacttggcttagagagctttt

SEQ ID NO: 5467597 - DNA, 25 bp, Homo sapien
ttcttcggcatacagcctgacttca

SEQ ID NO: 5467598 - DNA, 25 bp, Homo sapien
gatttgaacattcttcggcatacag

SEQ ID NO: 5467599 - DNA, 25 bp, Homo sapien
ggataaagcctgagaatatggccat

SEQ ID NO: 5467600 - DNA, 25 bp, Homo sapien
aaagatatctaccaattttgctgtg

SEQ ID NO: 5467601 - DNA, 25 bp, Homo sapien
aaaaacacaaccagcagttttactg

SEQ ID NO: 5467602 - DNA, 25 bp, Homo sapien
tgacagctttcagtatgttctgttt

SEQ ID NO: 5467603 - DNA, 25 bp, Homo sapien
gacagctttcagtatgttctgtttc

SEQ ID NO: 5467604 - DNA, 25 bp, Homo sapien
atttgatgtaggctttatgtgcccc

SEQ ID NO: 5467605 - DNA, 25 bp, Homo sapien
tgcttcgctgttttcaaagccaagg

SEQ ID NO: 5467606 - DNA, 25 bp, Homo sapien
gtatttggcagttgtgcttcgctgt

SEQ ID NO: 5467607 - DNA, 25 bp, Homo sapien
aaagccaaggtactcatcaaatttg

SEQ ID NO: 5467608 - DNA, 25 bp, Homo sapien
tctgaatcttctccccaatcctcaa

SEQ ID NO: 5467609 - DNA, 25 bp, Homo sapien
tcctcaatcacttccccactgtcaa

SEQ ID NO: 5467610 - DNA, 25 bp, Homo sapien
actgtcaaatcccaagacaattttg

SEQ ID NO: 5467611 - DNA, 25 bp, Homo sapien
gctgtgctgtctattccagaatcct

SEQ ID NO: 5467612 - DNA, 25 bp, Homo sapien
gagtctctttccttaagctgctata

SEQ ID NO: 5467613 - DNA, 25 bp, Homo sapien
catggaaagatgtaagatgagacca

SEQ ID NO: 5467614 - DNA, 25 bp, Homo sapien
cgtgccagggaagtgaagtactaca

SEQ ID NO: 5467615 - DNA, 25 bp, Homo sapien
agtgtctatggcactcaagacgtgc

SEQ ID NO: 5467616 - DNA, 25 bp, Homo sapien
ttccagttgtgtctcattgtcataa

SEQ ID NO: 5467617 - DNA, 25 bp, Homo sapien
tccagttgtgtctcattgtcataaa

SEQ ID NO: 5467618 - DNA, 25 bp, Homo sapien
caaggttaagaacaatgcccaagtc

SEQ ID NO: 5467619 - DNA, 25 bp, Homo sapien
aacctgattcatgctccaatcccag

SEQ ID NO: 5467620 - DNA, 25 bp, Homo sapien
tacaaatcatgtttaaagttcttca

SEQ ID NO: 5467621 - DNA, 25 bp, Homo sapien
tctgggtaagagaagtctacaaatc

SEQ ID NO: 5467622 - DNA, 25 bp, Homo sapien
atcacattgaataggaaaaagttga

SEQ ID NO: 5467623 - DNA, 25 bp, Homo sapien
tcacattgaataggaaaaagttgaa

SEQ ID NO: 5467624 - DNA, 25 bp, Homo sapien
ctatgggccaaatgctatgcaaaat

SEQ ID NO: 5467625 - DNA, 25 bp, Homo sapien
catgccttgagtgatcaacaacagg

SEQ ID NO: 5467626 - DNA, 25 bp, Homo sapien
tcatccagagaatgcaaaagccagt

SEQ ID NO: 5467627 - DNA, 25 bp, Homo sapien
caacaggaacttgctaattactaac

SEQ ID NO: 5467628 - DNA, 25 bp, Homo sapien
acccaggaattctccaagattggtg

SEQ ID NO: 5467629 - DNA, 25 bp, Homo sapien
ccactgcccatgtttggatcatcaa

SEQ ID NO: 5467630 - DNA, 25 bp, Homo sapien
tggtgattctgccagccgtctctcc

SEQ ID NO: 5467631 - DNA, 25 bp, Homo sapien
ggcttttaggcttttgatctcagtg

SEQ ID NO: 5467632 - DNA, 25 bp, Homo sapien
ttataaatgaaggaataagtctgta

SEQ ID NO: 5467633 - DNA, 25 bp, Homo sapien
ataagtctgtaatatcattcaataa

SEQ ID NO: 5467634 - DNA, 25 bp, Homo sapien
cagaggccaattatctaaagaaaat

SEQ ID NO: 5467635 - DNA, 25 bp, Homo sapien
aacagaggccaattatctaaagaaa

SEQ ID NO: 5467636 - DNA, 25 bp, Homo sapien
tctctagttatcatgattaccactt

SEQ ID NO: 5467637 - DNA, 25 bp, Homo sapien
gcatctcttactgtgctctgcaaag

SEQ ID NO: 5467638 - DNA, 25 bp, Homo sapien
tttgcagcaattgtggtctgaatgt

SEQ ID NO: 5467639 - DNA, 25 bp, Homo sapien
gagactatggcatagacaccttcct

SEQ ID NO: 5467640 - DNA, 25 bp, Homo sapien
tccctgggattacatagagtctgcc

SEQ ID NO: 5467641 - DNA, 25 bp, Homo sapien
tatggaacggcagcattggcatccc

SEQ ID NO: 5467642 - DNA, 25 bp, Homo sapien
gaatgaccagaaatccgtgcaacac

SEQ ID NO: 5467643 - DNA, 25 bp, Homo sapien
tgttagaaaatgcagggcccttgcc

SEQ ID NO: 5467644 - DNA, 25 bp, Homo sapien
tgcagtcccaaaggaggtaggcttt

SEQ ID NO: 5467645 - DNA, 25 bp, Homo sapien
catttggagccaaggcactgagttt

SEQ ID NO: 5467646 - DNA, 25 bp, Homo sapien
aaaatgcatttggagccaaggcact

SEQ ID NO: 5467647 - DNA, 25 bp, Homo sapien
ccattgtgctacacaaaaaagacag

SEQ ID NO: 5467648 - DNA, 25 bp, Homo sapien
gaaagtaataagctttggctcctga

SEQ ID NO: 5467649 - DNA, 25 bp, Homo sapien
tttggctcctgagatgtgcaaccaa

SEQ ID NO: 5467650 - DNA, 25 bp, Homo sapien
tttggaaagtaataagctttggctc

SEQ ID NO: 5467651 - DNA, 25 bp, Homo sapien
gctcctgagatgtgcaaccaactgg

SEQ ID NO: 5467652 - DNA, 25 bp, Homo sapien
gagtaaagaatctccacatgtgaaa

SEQ ID NO: 5467653 - DNA, 25 bp, Homo sapien
ctccacatgtgaaaatcaccatttt

SEQ ID NO: 5467654 - DNA, 25 bp, Homo sapien
aaagagtaaagaatctccacatgtg

SEQ ID NO: 5467655 - DNA, 25 bp, Homo sapien
gtgaaaagagtaaagaatctccaca

SEQ ID NO: 5467656 - DNA, 25 bp, Homo sapien
ccccgagacacaggtggtcagataa

SEQ ID NO: 5467657 - DNA, 25 bp, Homo sapien
tgagaaatctctggccaacaggcag

SEQ ID NO: 5467658 - DNA, 25 bp, Homo sapien
cagcttgaccacaacctcaggagag

SEQ ID NO: 5467659 - DNA, 25 bp, Homo sapien
tgggtcccaccaacaatcacctgaa

SEQ ID NO: 5467660 - DNA, 25 bp, Homo sapien
tatgtggcaggatgacttatcttcc

SEQ ID NO: 5467661 - DNA, 25 bp, Homo sapien
gaagacaccacgtttttgcaacata

SEQ ID NO: 5467662 - DNA, 25 bp, Homo sapien
gatgacccttgctatgaagcggaaa

SEQ ID NO: 5467663 - DNA, 25 bp, Homo sapien
gactgactctagtatctatgtggca

SEQ ID NO: 5467664 - DNA, 25 bp, Homo sapien
gccactttttggtcatatcttattt

SEQ ID NO: 5467665 - DNA, 25 bp, Homo sapien
tatgaccccgtgttatttattgcca

SEQ ID NO: 5467666 - DNA, 25 bp, Homo sapien
cattgacctctacattcaaacctgg

SEQ ID NO: 5467667 - DNA, 25 bp, Homo sapien
tgttaccattttctctatagttcat

SEQ ID NO: 5467668 - DNA, 25 bp, Homo sapien
aaggataaagagctttgccaaagcc

SEQ ID NO: 5467669 - DNA, 25 bp, Homo sapien
tagaattcgaagttgtaagtttgga

SEQ ID NO: 5467670 - DNA, 25 bp, Homo sapien
caccacggctgttggtggaaagacc

SEQ ID NO: 5467671 - DNA, 25 bp, Homo sapien
aaagaccacagtatagaattcgaag

SEQ ID NO: 5467672 - DNA, 25 bp, Homo sapien
aacactaaaacaatagatggaggct

SEQ ID NO: 5467673 - DNA, 25 bp, Homo sapien
tcaacactaaaacaatagatggagg

SEQ ID NO: 5467674 - DNA, 25 bp, Homo sapien
caacactaaaacaatagatggaggc

SEQ ID NO: 5467675 - DNA, 25 bp, Homo sapien
caaggctgagcgtggcttaagttcc

SEQ ID NO: 5467676 - DNA, 25 bp, Homo sapien
tccactggaacaaggaggttaggag

SEQ ID NO: 5467677 - DNA, 25 bp, Homo sapien
cattgattctgctaggtccttggtc

SEQ ID NO: 5467678 - DNA, 25 bp, Homo sapien
gacgaggagattcctccggttttca

SEQ ID NO: 5467679 - DNA, 25 bp, Homo sapien
ctccccttggtatttctcttctggg

SEQ ID NO: 5467680 - DNA, 25 bp, Homo sapien
cttggtatttctcttctgggttact

SEQ ID NO: 5467681 - DNA, 25 bp, Homo sapien
tcaagaggcacctgtggatagacac

SEQ ID NO: 5467682 - DNA, 25 bp, Homo sapien
tgctagttactaacgagggaccctg

SEQ ID NO: 5467683 - DNA, 25 bp, Homo sapien
tacacctggcacttaaaccgttgag

SEQ ID NO: 5467684 - DNA, 25 bp, Homo sapien
tggtaggcacggaactcagaatcca

SEQ ID NO: 5467685 - DNA, 25 bp, Homo sapien
cagctatgcgagaactgattccttc

SEQ ID NO: 5467686 - DNA, 25 bp, Homo sapien
aagatcgctgtagacgccaacctga

SEQ ID NO: 5467687 - DNA, 25 bp, Homo sapien
gccaacctgaccacagctatgcgag

SEQ ID NO: 5467688 - DNA, 25 bp, Homo sapien
caccatcacccaagatcgctgtaga

SEQ ID NO: 5467689 - DNA, 25 bp, Homo sapien
gagaacccctgctggccacgtgccc

SEQ ID NO: 5467690 - DNA, 25 bp, Homo sapien
aagagaacccctgctggccacgtgc

SEQ ID NO: 5467691 - DNA, 25 bp, Homo sapien
agagaacccctgctggccacgtgcc

SEQ ID NO: 5467692 - DNA, 25 bp, Homo sapien
caagagaacccctgctggccacgtg

SEQ ID NO: 5467693 - DNA, 25 bp, Homo sapien
gtggtcgtgcacagctcaatggcct

SEQ ID NO: 5467694 - DNA, 25 bp, Homo sapien
atggcctccggctcatggaagatga

SEQ ID NO: 5467695 - DNA, 25 bp, Homo sapien
taagacattcaatttagacttcagc

SEQ ID NO: 5467696 - DNA, 25 bp, Homo sapien
aagatgaccgctgggagaggttcct

SEQ ID NO: 5467697 - DNA, 25 bp, Homo sapien
cacatgtagtttaatcacttggact

SEQ ID NO: 5467698 - DNA, 25 bp, Homo sapien
cctgcaattgtacattaaacccagt

SEQ ID NO: 5467699 - DNA, 25 bp, Homo sapien
aataagccacatgtagtttaatcac

SEQ ID NO: 5467700 - DNA, 25 bp, Homo sapien
cattaaacccagtagcaacttgttt

SEQ ID NO: 5467701 - DNA, 25 bp, Homo sapien
tgtcaggacgtcactcagatgaaac

SEQ ID NO: 5467702 - DNA, 25 bp, Homo sapien
catgcagattcagctacataagatg

SEQ ID NO: 5467703 - DNA, 25 bp, Homo sapien
gagaagctcttccaacgtactgtat

SEQ ID NO: 5467704 - DNA, 25 bp, Homo sapien
tagtggtaaagtcacctcacccagg

SEQ ID NO: 5467705 - DNA, 25 bp, Homo sapien
ttgattttgtatccaaaatataaaa

SEQ ID NO: 5467706 - DNA, 25 bp, Homo sapien
gtattgattttgtatccaaaatata

SEQ ID NO: 5467707 - DNA, 25 bp, Homo sapien
gattttgtatccaaaatataaaaca

SEQ ID NO: 5467708 - DNA, 25 bp, Homo sapien
ctttgtattgattttgtatccaaaa

SEQ ID NO: 5467709 - DNA, 25 bp, Homo sapien
catgaagattaacagtggccacact

SEQ ID NO: 5467710 - DNA, 25 bp, Homo sapien
gcaatgagctctggtctaaatccag

SEQ ID NO: 5467711 - DNA, 25 bp, Homo sapien
cctggacaccatcttgcaatgagct

SEQ ID NO: 5467712 - DNA, 25 bp, Homo sapien
cactggttccactgaaatcatacaa

SEQ ID NO: 5467713 - DNA, 25 bp, Homo sapien
cttacaggcccaagtcagagactgg

SEQ ID NO: 5467714 - DNA, 25 bp, Homo sapien
ggaaatgctcacgacaatgctctga

SEQ ID NO: 5467715 - DNA, 25 bp, Homo sapien
tatcctcaggagagggaccacaaca

SEQ ID NO: 5467716 - DNA, 25 bp, Homo sapien
gaagctttcatacttgaggcgaaca

SEQ ID NO: 5467717 - DNA, 25 bp, Homo sapien
tcagaggcggaaagtgtctcttgtg

SEQ ID NO: 5467718 - DNA, 25 bp, Homo sapien
tgacatttcagaggcggaaagtgtc

SEQ ID NO: 5467719 - DNA, 25 bp, Homo sapien
atttcagaggcggaaagtgtctctt

SEQ ID NO: 5467720 - DNA, 25 bp, Homo sapien
tctgacatttcagaggcggaaagtg

SEQ ID NO: 5467721 - DNA, 25 bp, Homo sapien
gaatggccagtcctcgcagacagag

SEQ ID NO: 5467722 - DNA, 25 bp, Homo sapien
ggccagtcctcgcagacagagcctg

SEQ ID NO: 5467723 - DNA, 25 bp, Homo sapien
ccaaagaatggccagtcctcgcaga

SEQ ID NO: 5467724 - DNA, 25 bp, Homo sapien
tgggtttcccacaagcagaggccaa

SEQ ID NO: 5467725 - DNA, 25 bp, Homo sapien
cccgactccctttcgatccgctgag

SEQ ID NO: 5467726 - DNA, 25 bp, Homo sapien
acggcgctcgcccatctctcaggac

SEQ ID NO: 5467727 - DNA, 25 bp, Homo sapien
tccctttcgatccgctgagggcaag

SEQ ID NO: 5467728 - DNA, 25 bp, Homo sapien
tgtcccttcggaacggcgctcgccc

SEQ ID NO: 5467729 - DNA, 25 bp, Homo sapien
tggacgccgccagaacagcgacgct

SEQ ID NO: 5467730 - DNA, 25 bp, Homo sapien
tgctgtttcactggacgccgccaga

SEQ ID NO: 5467731 - DNA, 25 bp, Homo sapien
tgtttcactggacgccgccagaaca

SEQ ID NO: 5467732 - DNA, 25 bp, Homo sapien
actggacgccgccagaacagcgacg

SEQ ID NO: 5467733 - DNA, 25 bp, Homo sapien
tctcggggcgaacccattccagggc

SEQ ID NO: 5467734 - DNA, 25 bp, Homo sapien
ctctcggggcgaacccattccaggg

SEQ ID NO: 5467735 - DNA, 25 bp, Homo sapien
cctctctcggggcgaacccattcca

SEQ ID NO: 5467736 - DNA, 25 bp, Homo sapien
tctctcggggcgaacccattccagg

SEQ ID NO: 5467737 - DNA, 25 bp, Homo sapien
ctgggccaatgtgaggtcaatgcac

SEQ ID NO: 5467738 - DNA, 25 bp, Homo sapien
tagatcacgcaagtggcagagaaac

SEQ ID NO: 5467739 - DNA, 25 bp, Homo sapien
ccaggtccattagatcacgcaagtg

SEQ ID NO: 5467740 - DNA, 25 bp, Homo sapien
acagccccaggtccattagatcacg

SEQ ID NO: 5467741 - DNA, 25 bp, Homo sapien
gaaacaaggtaatttgctctcagcc

SEQ ID NO: 5467742 - DNA, 25 bp, Homo sapien
ttcactgcacaaggtattgaccagg

SEQ ID NO: 5467743 - DNA, 25 bp, Homo sapien
ttcagcacctgacacaatggcgttc

SEQ ID NO: 5467744 - DNA, 25 bp, Homo sapien
tcagccacacaggttattaggaaca

SEQ ID NO: 5467745 - DNA, 25 bp, Homo sapien
ctatatagaaaaatcttcccgaaat

SEQ ID NO: 5467746 - DNA, 25 bp, Homo sapien
agcatggagactaatgccttgtgca

SEQ ID NO: 5467747 - DNA, 25 bp, Homo sapien
tccttaagcatttggccaaggcttt

SEQ ID NO: 5467748 - DNA, 25 bp, Homo sapien
gcatggagactaatgccttgtgcat

SEQ ID NO: 5467749 - DNA, 25 bp, Homo sapien
atttggccaaggctttgcacatctt

SEQ ID NO: 5467750 - DNA, 25 bp, Homo sapien
atgcgacaggcccacttattcataa

SEQ ID NO: 5467751 - DNA, 25 bp, Homo sapien
gacaggcccacttattcataaacaa

SEQ ID NO: 5467752 - DNA, 25 bp, Homo sapien
tccatagtggaccattaatcccagc

SEQ ID NO: 5467753 - DNA, 25 bp, Homo sapien
ttaacattcttgacataaatccata

SEQ ID NO: 5467754 - DNA, 25 bp, Homo sapien
acagagagatgttacagctgccacg

SEQ ID NO: 5467755 - DNA, 25 bp, Homo sapien
gctgccacgtgctgcacactgtctt

SEQ ID NO: 5467756 - DNA, 25 bp, Homo sapien
ccaagagtaagtagaaattcatcac

SEQ ID NO: 5467757 - DNA, 25 bp, Homo sapien
caggaacaggaaattcccatgagaa

SEQ ID NO: 5467758 - DNA, 25 bp, Homo sapien
ccagacactcggctttaagaagaag

SEQ ID NO: 5467759 - DNA, 25 bp, Homo sapien
gaagggctctcggaaggtgaagctg

SEQ ID NO: 5467760 - DNA, 25 bp, Homo sapien
tcctggcttgatagccagacactcg

SEQ ID NO: 5467761 - DNA, 25 bp, Homo sapien
gctttaagaagaagggctctcggaa

SEQ ID NO: 5467762 - DNA, 25 bp, Homo sapien
caacatccagcatcattgttttggg

SEQ ID NO: 5467763 - DNA, 25 bp, Homo sapien
ctccaacatccagcatcattgtttt

SEQ ID NO: 5467764 - DNA, 25 bp, Homo sapien
aaaacagtgggatgagaaagctgca

SEQ ID NO: 5467765 - DNA, 25 bp, Homo sapien
aagctgcatagataagaactcacag

SEQ ID NO: 5467766 - DNA, 25 bp, Homo sapien
atatacagagtccaggttaggagcc

SEQ ID NO: 5467767 - DNA, 25 bp, Homo sapien
tgcatgagctcagtctgaaagcaga

SEQ ID NO: 5467768 - DNA, 25 bp, Homo sapien
gagctcagtctgaaagcagattcca

SEQ ID NO: 5467769 - DNA, 25 bp, Homo sapien
gtctgaaagcagattccatatacag

SEQ ID NO: 5467770 - DNA, 25 bp, Homo sapien
caataggcaatgtgattgggagcct

SEQ ID NO: 5467771 - DNA, 25 bp, Homo sapien
ttggacgtcaggactccaacggccc

SEQ ID NO: 5467772 - DNA, 25 bp, Homo sapien
tgaaccacgggtaggaactccaaca

SEQ ID NO: 5467773 - DNA, 25 bp, Homo sapien
ggcccatgctctccagtgaaccaat

SEQ ID NO: 5467774 - DNA, 25 bp, Homo sapien
cactccatgctccactgtaacctgc

SEQ ID NO: 5467775 - DNA, 25 bp, Homo sapien
tccccactccatgctccactgtaac

SEQ ID NO: 5467776 - DNA, 25 bp, Homo sapien
ctccatgctccactgtaacctgcat

SEQ ID NO: 5467777 - DNA, 25 bp, Homo sapien
acttctgtccccactccatgctcca

SEQ ID NO: 5467778 - DNA, 25 bp, Homo sapien
tgtgttcgcgggtctacatgagcca

SEQ ID NO: 5467779 - DNA, 25 bp, Homo sapien
acatgccagtgccacaaaaagccca

SEQ ID NO: 5467780 - DNA, 25 bp, Homo sapien
aaagcccatgtgttcgcgggtctac

SEQ ID NO: 5467781 - DNA, 25 bp, Homo sapien
tgaatcacatgccagtgccacaaaa

SEQ ID NO: 5467782 - DNA, 25 bp, Homo sapien
actgcaactggtgtccaggaaacac

SEQ ID NO: 5467783 - DNA, 25 bp, Homo sapien
aacaatgtcggctgtttccttcaca

SEQ ID NO: 5467784 - DNA, 25 bp, Homo sapien
tttctgagcccctacactgcaactg

SEQ ID NO: 5467785 - DNA, 25 bp, Homo sapien
ccaatgttggcgatgatgcaaagaa

SEQ ID NO: 5467786 - DNA, 25 bp, Homo sapien
cacggtcttgactatctgtagattt

SEQ ID NO: 5467787 - DNA, 25 bp, Homo sapien
caagtgtattgtgactggagttgca

SEQ ID NO: 5467788 - DNA, 25 bp, Homo sapien
gaatcgattccccagggatactgag

SEQ ID NO: 5467789 - DNA, 25 bp, Homo sapien
aagaggtcctgaatcgattccccag

SEQ ID NO: 5467790 - DNA, 25 bp, Homo sapien
taggaagatcatgatcaaggtgcgg

SEQ ID NO: 5467791 - DNA, 25 bp, Homo sapien
cgttccggaggctaggaagatcatg

SEQ ID NO: 5467792 - DNA, 25 bp, Homo sapien
ttccggaggctaggaagatcatgat

SEQ ID NO: 5467793 - DNA, 25 bp, Homo sapien
catgatcaaggtgcgggcttgtttg

SEQ ID NO: 5467794 - DNA, 25 bp, Homo sapien
cacgaagcctcttgtacaaggcttt

SEQ ID NO: 5467795 - DNA, 25 bp, Homo sapien
ggcacgaagcctcttgtacaaggct

SEQ ID NO: 5467796 - DNA, 25 bp, Homo sapien
gcacgaagcctcttgtacaaggctt

SEQ ID NO: 5467797 - DNA, 25 bp, Homo sapien
acgaagcctcttgtacaaggctttt

SEQ ID NO: 5467798 - DNA, 25 bp, Homo sapien
caagaaactggctaatcggcattcc

SEQ ID NO: 5467799 - DNA, 25 bp, Homo sapien
atggcttccaggcatctcgggacgg

SEQ ID NO: 5467800 - DNA, 25 bp, Homo sapien
gttacttcaaatggatgggctggag

SEQ ID NO: 5467801 - DNA, 25 bp, Homo sapien
tgaagcaagaagaaacgccagccaa

SEQ ID NO: 5467802 - DNA, 25 bp, Homo sapien
gaaggtcaccgttttctgctgggaa

SEQ ID NO: 5467803 - DNA, 25 bp, Homo sapien
gggaaagaggctgtcaccaggtcat

SEQ ID NO: 5467804 - DNA, 25 bp, Homo sapien
ttcaggagggactttcctgaaatgg

SEQ ID NO: 5467805 - DNA, 25 bp, Homo sapien
gcagcccagtctggacagtcagaac

SEQ ID NO: 5467806 - DNA, 25 bp, Homo sapien
taatagaaagggagcgttacttgct

SEQ ID NO: 5467807 - DNA, 25 bp, Homo sapien
gatcaaaatcgcacacacaggtctg

SEQ ID NO: 5467808 - DNA, 25 bp, Homo sapien
tgacatctgccatggcattagccac

SEQ ID NO: 5467809 - DNA, 25 bp, Homo sapien
aaactccataagcagaagcttcagg

SEQ ID NO: 5467810 - DNA, 25 bp, Homo sapien
gttgggctgtttttcgtgctctgtt

SEQ ID NO: 5467811 - DNA, 25 bp, Homo sapien
cctgaacaaataagagttatttctt

SEQ ID NO: 5467812 - DNA, 25 bp, Homo sapien
ctgtagtttcgttggttgttgggct

SEQ ID NO: 5467813 - DNA, 25 bp, Homo sapien
tcattttggctgtagtttcgttggt

SEQ ID NO: 5467814 - DNA, 25 bp, Homo sapien
gcccttaccttatgtgaggacacag

SEQ ID NO: 5467815 - DNA, 25 bp, Homo sapien
caccagtaggtcaggatagacacaa

SEQ ID NO: 5467816 - DNA, 25 bp, Homo sapien
tatgaatcagaaacaggccttcccc

SEQ ID NO: 5467817 - DNA, 25 bp, Homo sapien
aataggcctaagagagctcatccag

SEQ ID NO: 5467818 - DNA, 25 bp, Homo sapien
aaggttgccagtaaactaccagcag

SEQ ID NO: 5467819 - DNA, 25 bp, Homo sapien
taacccgtagtacctcgacatgtga

SEQ ID NO: 5467820 - DNA, 25 bp, Homo sapien
tttggtcagtaaggtgggctcaacc

SEQ ID NO: 5467821 - DNA, 25 bp, Homo sapien
aaaagtaggcccattcctgacgtga

SEQ ID NO: 5467822 - DNA, 25 bp, Homo sapien
tacaggttttcctagtcaggaagag

SEQ ID NO: 5467823 - DNA, 25 bp, Homo sapien
ccaaagcgaaccatcttcaggcctg

SEQ ID NO: 5467824 - DNA, 25 bp, Homo sapien
taatcaacctgacataccatgaggc

SEQ ID NO: 5467825 - DNA, 25 bp, Homo sapien
cacctggaggtcaatttaaatatac

SEQ ID NO: 5467826 - DNA, 25 bp, Homo sapien
gggctgttgtaacaaataaccataa

SEQ ID NO: 5467827 - DNA, 25 bp, Homo sapien
gctacctagggctgttgtaacaaat

SEQ ID NO: 5467828 - DNA, 25 bp, Homo sapien
tagggctgttgtaacaaataaccat

SEQ ID NO: 5467829 - DNA, 25 bp, Homo sapien
caaataaccataaactgggtagctt

SEQ ID NO: 5467830 - DNA, 25 bp, Homo sapien
ctggaagtccaaaatgtaaaggttg

SEQ ID NO: 5467831 - DNA, 25 bp, Homo sapien
atgtcctcgactcttctaacatcag

SEQ ID NO: 5467832 - DNA, 25 bp, Homo sapien
tggagaagaacatgtcctcgactct

SEQ ID NO: 5467833 - DNA, 25 bp, Homo sapien
ggcagggccacacaccatccaaaag

SEQ ID NO: 5467834 - DNA, 25 bp, Homo sapien
ccggtttctgccttgatcttcacaa

SEQ ID NO: 5467835 - DNA, 25 bp, Homo sapien
gatgccataactccggtttctgcct

SEQ ID NO: 5467836 - DNA, 25 bp, Homo sapien
ggcttatgatgccataactccggtt

SEQ ID NO: 5467837 - DNA, 25 bp, Homo sapien
ggtttctgccttgatcttcacaatg

SEQ ID NO: 5467838 - DNA, 25 bp, Homo sapien
taaggcttgtcatgtattgctgcag

SEQ ID NO: 5467839 - DNA, 25 bp, Homo sapien
cagaatcacaatatggctgctgcaa

SEQ ID NO: 5467840 - DNA, 25 bp, Homo sapien
ggtgctgcttactgatccaagtcct

SEQ ID NO: 5467841 - DNA, 25 bp, Homo sapien
catgctagccttcttagtggactgg

SEQ ID NO: 5467842 - DNA, 25 bp, Homo sapien
accatctgctgcctgaacaagctgg

SEQ ID NO: 5467843 - DNA, 25 bp, Homo sapien
cacgtggcatcagcattaagtggaa

SEQ ID NO: 5467844 - DNA, 25 bp, Homo sapien
tcagccagattattgatccacgtgg

SEQ ID NO: 5467845 - DNA, 25 bp, Homo sapien
tctttggcctcaagggttggacctg

SEQ ID NO: 5467846 - DNA, 25 bp, Homo sapien
catcaggcatgggaaagaagacctc

SEQ ID NO: 5467847 - DNA, 25 bp, Homo sapien
caaggtctctagtttggataaatgc

SEQ ID NO: 5467848 - DNA, 25 bp, Homo sapien
caacatgtacattgcactgtgcctg

SEQ ID NO: 5467849 - DNA, 25 bp, Homo sapien
ttaacttcaataggagacagcagct

SEQ ID NO: 5467850 - DNA, 25 bp, Homo sapien
cagagtagcctttggtcaacccact

SEQ ID NO: 5467851 - DNA, 25 bp, Homo sapien
cagctctgctcagggcaataggtcc

SEQ ID NO: 5467852 - DNA, 25 bp, Homo sapien
gaatgagaaattacccagcgcagct

SEQ ID NO: 5467853 - DNA, 25 bp, Homo sapien
taacattcaagggagcagatgaact

SEQ ID NO: 5467854 - DNA, 25 bp, Homo sapien
tgcctcggtttgtgtgactgaatga

SEQ ID NO: 5467855 - DNA, 25 bp, Homo sapien
gtgataagccctgtttatatgagct

SEQ ID NO: 5467856 - DNA, 25 bp, Homo sapien
tgataagccctgtttatatgagctt

SEQ ID NO: 5467857 - DNA, 25 bp, Homo sapien
gggtaaaccgacagcatcatgttgc

SEQ ID NO: 5467858 - DNA, 25 bp, Homo sapien
aagttgtaacgcctgaacccgtgcg

SEQ ID NO: 5467859 - DNA, 25 bp, Homo sapien
tatatgtaccaaccaacacgcacac

SEQ ID NO: 5467860 - DNA, 25 bp, Homo sapien
gttgccatcgatgcgtcttacaaga

SEQ ID NO: 5467861 - DNA, 25 bp, Homo sapien
caggcgctccgtggccggctgccac

SEQ ID NO: 5467862 - DNA, 25 bp, Homo sapien
tgcaggcgctccgtggccggctgcc

SEQ ID NO: 5467863 - DNA, 25 bp, Homo sapien
ggcgctccgtggccggctgccacat

SEQ ID NO: 5467864 - DNA, 25 bp, Homo sapien
ctgcaggcgctccgtggccggctgc

SEQ ID NO: 5467865 - DNA, 25 bp, Homo sapien
cgctggcgagactgtcgatcgcgcc

SEQ ID NO: 5467866 - DNA, 25 bp, Homo sapien
tttacatctggggtcggtgtccgcg

SEQ ID NO: 5467867 - DNA, 25 bp, Homo sapien
ggtgtccgcgggatgtgcgtcctgg

SEQ ID NO: 5467868 - DNA, 25 bp, Homo sapien
gttttggcagaggagacgctggcga

SEQ ID NO: 5467869 - DNA, 25 bp, Homo sapien
gcgccggctgtcctggcgcagctgc

SEQ ID NO: 5467870 - DNA, 25 bp, Homo sapien
cgcggcgctcagctgccggcaactt

SEQ ID NO: 5467871 - DNA, 25 bp, Homo sapien
ccgcgcgccggctgtcctggcgcag

SEQ ID NO: 5467872 - DNA, 25 bp, Homo sapien
gctcagctgccggcaacttgtgggc

SEQ ID NO: 5467873 - DNA, 25 bp, Homo sapien
tccagttcctgctacttgttctgaa

SEQ ID NO: 5467874 - DNA, 25 bp, Homo sapien
tgcctgataaccacctgaaccttct

SEQ ID NO: 5467875 - DNA, 25 bp, Homo sapien
tggatatccacaggaccctcccact

SEQ ID NO: 5467876 - DNA, 25 bp, Homo sapien
gttggtgccaccagccttggcaagc

SEQ ID NO: 5467877 - DNA, 25 bp, Homo sapien
taggcactaggctagacaggactgt

SEQ ID NO: 5467878 - DNA, 25 bp, Homo sapien
tgatgtaggcgctcttatgagtccc

SEQ ID NO: 5467879 - DNA, 25 bp, Homo sapien
gatgtgtaaaaactcaactggctag

SEQ ID NO: 5467880 - DNA, 25 bp, Homo sapien
tagtggtaggctaggaccagacctc

SEQ ID NO: 5467881 - DNA, 25 bp, Homo sapien
ctttctgtgctatccttgtccctca

SEQ ID NO: 5467882 - DNA, 25 bp, Homo sapien
tccagcttgcccagaacttcacttt

SEQ ID NO: 5467883 - DNA, 25 bp, Homo sapien
gatacatccccaatctccatggacg

SEQ ID NO: 5467884 - DNA, 25 bp, Homo sapien
ttgtccctcagatactccctggata

SEQ ID NO: 5467885 - DNA, 25 bp, Homo sapien
ctcattctcaacactgtttcgggtt

SEQ ID NO: 5467886 - DNA, 25 bp, Homo sapien
cagccactggagggcgccccgaaag

SEQ ID NO: 5467887 - DNA, 25 bp, Homo sapien
ccagccactggagggcgccccgaaa

SEQ ID NO: 5467888 - DNA, 25 bp, Homo sapien
agccactggagggcgccccgaaagt

SEQ ID NO: 5467889 - DNA, 25 bp, Homo sapien
tagaagcacacagtttagagagctg

SEQ ID NO: 5467890 - DNA, 25 bp, Homo sapien
tctgggtctcgtgatagtgtctaca

SEQ ID NO: 5467891 - DNA, 25 bp, Homo sapien
tgtttttgaggcctagttcgacgac

SEQ ID NO: 5467892 - DNA, 25 bp, Homo sapien
taactctactcagaaagccggcact

SEQ ID NO: 5467893 - DNA, 25 bp, Homo sapien
gaccaagggtttgtcatcaggactg

SEQ ID NO: 5467894 - DNA, 25 bp, Homo sapien
tcacatcatacattgcaggccggga

SEQ ID NO: 5467895 - DNA, 25 bp, Homo sapien
tgcaggccgggatttctttccaaac

SEQ ID NO: 5467896 - DNA, 25 bp, Homo sapien
gactgtaatcttcataggcgatggg

SEQ ID NO: 5467897 - DNA, 25 bp, Homo sapien
tagagctcaaagttggagcttgcag

SEQ ID NO: 5467898 - DNA, 25 bp, Homo sapien
gcatgacagctccacaatagatttt

SEQ ID NO: 5467899 - DNA, 25 bp, Homo sapien
caggttaaatcttggcaaagcagtc

SEQ ID NO: 5467900 - DNA, 25 bp, Homo sapien
gtaaaaacatattctatagcaagca

SEQ ID NO: 5467901 - DNA, 25 bp, Homo sapien
acagtgcttatctttgtcgttgctg

SEQ ID NO: 5467902 - DNA, 25 bp, Homo sapien
gctgttatgatacatttaggtagat

SEQ ID NO: 5467903 - DNA, 25 bp, Homo sapien
tgggattacagtgcttatctttgtc

SEQ ID NO: 5467904 - DNA, 25 bp, Homo sapien
tctttgtcgttgctgttatgataca

SEQ ID NO: 5467905 - DNA, 25 bp, Homo sapien
ccaagatagatcatatagcacccat

SEQ ID NO: 5467906 - DNA, 25 bp, Homo sapien
gaagagatggcttacttcaacaaac

SEQ ID NO: 5467907 - DNA, 25 bp, Homo sapien
ggaacacatactctgcaaaagtcag

SEQ ID NO: 5467908 - DNA, 25 bp, Homo sapien
ttaatatttgtaatggatgctgggc

SEQ ID NO: 5467909 - DNA, 25 bp, Homo sapien
tgtgaaggcagcattccccacgccg

SEQ ID NO: 5467910 - DNA, 25 bp, Homo sapien
tccccacgccgcccccacagccaac

SEQ ID NO: 5467911 - DNA, 25 bp, Homo sapien
atgtgaaggcagcattccccacgcc

SEQ ID NO: 5467912 - DNA, 25 bp, Homo sapien
cattccccacgccgcccccacagcc

SEQ ID NO: 5467913 - DNA, 25 bp, Homo sapien
gaagaaccctggtattcaatgcggc

SEQ ID NO: 5467914 - DNA, 25 bp, Homo sapien
gaactcgctgtcgatgctgcggcag

SEQ ID NO: 5467915 - DNA, 25 bp, Homo sapien
tcaatgcggctgatgcggcaaatcc

SEQ ID NO: 5467916 - DNA, 25 bp, Homo sapien
tagaactcctcataggctggcctgg

SEQ ID NO: 5467917 - DNA, 25 bp, Homo sapien
aagatcacaccaacacactccagtc

SEQ ID NO: 5467918 - DNA, 25 bp, Homo sapien
agatcacaccaacacactccagtct

SEQ ID NO: 5467919 - DNA, 25 bp, Homo sapien
gccaagatcacaccaacacactcca

SEQ ID NO: 5467920 - DNA, 25 bp, Homo sapien
tgagccaagatcacaccaacacact

SEQ ID NO: 5467921 - DNA, 25 bp, Homo sapien
cactgtcctgggctgtaggcagcat

SEQ ID NO: 5467922 - DNA, 25 bp, Homo sapien
gatgatagagttgagtgaacacggc

SEQ ID NO: 5467923 - DNA, 25 bp, Homo sapien
tgtaatgtaccctatcacacccagc

SEQ ID NO: 5467924 - DNA, 25 bp, Homo sapien
tgaacacggcgtccaggtatgcact

SEQ ID NO: 5467925 - DNA, 25 bp, Homo sapien
gtggctgagctgcagaaatacttac

SEQ ID NO: 5467926 - DNA, 25 bp, Homo sapien
ataacagtggctgagctgcagaaat

SEQ ID NO: 5467927 - DNA, 25 bp, Homo sapien
ttaaataacagtggctgagctgcag

SEQ ID NO: 5467928 - DNA, 25 bp, Homo sapien
cagtggctgagctgcagaaatactt

SEQ ID NO: 5467929 - DNA, 25 bp, Homo sapien
agtttgctcccacccaaccatgcgg

SEQ ID NO: 5467930 - DNA, 25 bp, Homo sapien
caaccatgcgggcagtggcagttat

SEQ ID NO: 5467931 - DNA, 25 bp, Homo sapien
ggcagttataaccattgggctggtc

SEQ ID NO: 5467932 - DNA, 25 bp, Homo sapien
tttatgtcaatgtcgcactcttcac

SEQ ID NO: 5467933 - DNA, 25 bp, Homo sapien
gaaaaagcagtggtgaaaccgctgc

SEQ ID NO: 5467934 - DNA, 25 bp, Homo sapien
gcagtggtgaaaccgctgcacccat

SEQ ID NO: 5467935 - DNA, 25 bp, Homo sapien
gataagaaaaagcagtggtgaaacc

SEQ ID NO: 5467936 - DNA, 25 bp, Homo sapien
ggtgaaaccgctgcacccatggttc

SEQ ID NO: 5467937 - DNA, 25 bp, Homo sapien
ttgctatcagtcttacgcaaagtgt

SEQ ID NO: 5467938 - DNA, 25 bp, Homo sapien
gtgatcatgctttttgctatcagtc

SEQ ID NO: 5467939 - DNA, 25 bp, Homo sapien
gatgcactatgaattatagaaaagt

SEQ ID NO: 5467940 - DNA, 25 bp, Homo sapien
cagtcttacgcaaagtgtttgaaga

SEQ ID NO: 5467941 - DNA, 25 bp, Homo sapien
ctcccctgggatggcttagggacca

SEQ ID NO: 5467942 - DNA, 25 bp, Homo sapien
tcccctgggatggcttagggaccaa

SEQ ID NO: 5467943 - DNA, 25 bp, Homo sapien
tcaccagtagcacagatgaggctcc

SEQ ID NO: 5467944 - DNA, 25 bp, Homo sapien
ctgtaaacccgggtgcacagatgca

SEQ ID NO: 5467945 - DNA, 25 bp, Homo sapien
tgtaaacccgggtgcacagatgcac

SEQ ID NO: 5467946 - DNA, 25 bp, Homo sapien
tggctccgttcagacagctgacgtt

SEQ ID NO: 5467947 - DNA, 25 bp, Homo sapien
gggatccttgtacaattcacagtgt

SEQ ID NO: 5467948 - DNA, 25 bp, Homo sapien
caggccgtcgctgtcacaggtggct

SEQ ID NO: 5467949 - DNA, 25 bp, Homo sapien
cagctgacgttagcgcagggatcct

SEQ ID NO: 5467950 - DNA, 25 bp, Homo sapien
aggatgactcatccaggactctctg

SEQ ID NO: 5467951 - DNA, 25 bp, Homo sapien
cctctgaaagcaaagtcggaactct

SEQ ID NO: 5467952 - DNA, 25 bp, Homo sapien
atggcctctgaaagcaaagtcggaa

SEQ ID NO: 5467953 - DNA, 25 bp, Homo sapien
caggatgactcatccaggactctct

SEQ ID NO: 5467954 - DNA, 25 bp, Homo sapien
gttgtgtcctggtagatgttagtgg

SEQ ID NO: 5467955 - DNA, 25 bp, Homo sapien
ttgtgtcctggtagatgttagtgga

SEQ ID NO: 5467956 - DNA, 25 bp, Homo sapien
gatgttagtggagtttggttctaac

SEQ ID NO: 5467957 - DNA, 25 bp, Homo sapien
tcatactccaacagaagcatcagat

SEQ ID NO: 5467958 - DNA, 25 bp, Homo sapien
ctcttatccaggagcttaatcaagt

SEQ ID NO: 5467959 - DNA, 25 bp, Homo sapien
tcttatccaggagcttaatcaagtt

SEQ ID NO: 5467960 - DNA, 25 bp, Homo sapien
tatccaggagcttaatcaagttttc

SEQ ID NO: 5467961 - DNA, 25 bp, Homo sapien
cttatccaggagcttaatcaagttt

SEQ ID NO: 5467962 - DNA, 25 bp, Homo sapien
acacacactcatagccattaacgag

SEQ ID NO: 5467963 - DNA, 25 bp, Homo sapien
gcactcattatattcctcctcacag

SEQ ID NO: 5467964 - DNA, 25 bp, Homo sapien
cacactcatagccattaacgaggtc

SEQ ID NO: 5467965 - DNA, 25 bp, Homo sapien
ctcatagccattaacgaggtccctg

SEQ ID NO: 5467966 - DNA, 25 bp, Homo sapien
gagaaaggcccactgtcaaatgcat

SEQ ID NO: 5467967 - DNA, 25 bp, Homo sapien
ggaaggctatgaagaaagcgcctgt

SEQ ID NO: 5467968 - DNA, 25 bp, Homo sapien
aaatgcatcccatttacaacccacg

SEQ ID NO: 5467969 - DNA, 25 bp, Homo sapien
cagatgggatttcaggagctagatc

SEQ ID NO: 5467970 - DNA, 25 bp, Homo sapien
tggtggtcatagagccctttggcgc

SEQ ID NO: 5467971 - DNA, 25 bp, Homo sapien
ggtggtcatagagccctttggcgct

SEQ ID NO: 5467972 - DNA, 25 bp, Homo sapien
agcaaaggccctaagcaccatagcc

SEQ ID NO: 5467973 - DNA, 25 bp, Homo sapien
ctaagcaccatagccctgaaggacg

SEQ ID NO: 5467974 - DNA, 25 bp, Homo sapien
ggccctaagcaccatagccctgaag

SEQ ID NO: 5467975 - DNA, 25 bp, Homo sapien
gcaccatagccctgaaggacgccat

SEQ ID NO: 5467976 - DNA, 25 bp, Homo sapien
ccatacaatgggaactctctctata

SEQ ID NO: 5467977 - DNA, 25 bp, Homo sapien
gatggcttccatgactttctctagc

SEQ ID NO: 5467978 - DNA, 25 bp, Homo sapien
gtttcagtcttgttcccacattcca

SEQ ID NO: 5467979 - DNA, 25 bp, Homo sapien
tcaccctctcctatcttgatggctt

SEQ ID NO: 5467980 - DNA, 25 bp, Homo sapien
ttgctcagcctgctgtacccaagcc

SEQ ID NO: 5467981 - DNA, 25 bp, Homo sapien
gttgctcagcctgctgtacccaagc

SEQ ID NO: 5467982 - DNA, 25 bp, Homo sapien
tatttggttgcctcacacgtgttga

SEQ ID NO: 5467983 - DNA, 25 bp, Homo sapien
gaaacatcaggcagtatattttcta

SEQ ID NO: 5467984 - DNA, 25 bp, Homo sapien
tatggttttagtcaataagcgagga

SEQ ID NO: 5467985 - DNA, 25 bp, Homo sapien
tagaaatcaactaactataagaaaa

SEQ ID NO: 5467986 - DNA, 25 bp, Homo sapien
gctgcagttgcaggtaaagtgtacc

SEQ ID NO: 5467987 - DNA, 25 bp, Homo sapien
gaggcatttgtagctggtgcccacg

SEQ ID NO: 5467988 - DNA, 25 bp, Homo sapien
gctgcggcacgtgccatgagcacag

SEQ ID NO: 5467989 - DNA, 25 bp, Homo sapien
tgtaccccgtccacatagcaggtgc

SEQ ID NO: 5467990 - DNA, 25 bp, Homo sapien
ggatttggatcagcagagggctctc

SEQ ID NO: 5467991 - DNA, 25 bp, Homo sapien
gtactgacacatcgtatgacatgaa

SEQ ID NO: 5467992 - DNA, 25 bp, Homo sapien
tgatctacccacacaatgaaatacc

SEQ ID NO: 5467993 - DNA, 25 bp, Homo sapien
ttctctacaagcagccactgttaac

SEQ ID NO: 5467994 - DNA, 25 bp, Homo sapien
taatcaatcttggactggcaaagct

SEQ ID NO: 5467995 - DNA, 25 bp, Homo sapien
actggaaatgcatgttgctccattt

SEQ ID NO: 5467996 - DNA, 25 bp, Homo sapien
tttctgcatgggtctaggatgcagt

SEQ ID NO: 5467997 - DNA, 25 bp, Homo sapien
ggacactggcaggtgaatccactga

SEQ ID NO: 5467998 - DNA, 25 bp, Homo sapien
aacttacagcctatgtgtggttggt

SEQ ID NO: 5467999 - DNA, 25 bp, Homo sapien
acttacagcctatgtgtggttggtt

SEQ ID NO: 5468000 - DNA, 25 bp, Homo sapien
cctcagccgtgtctgctaagatgca

SEQ ID NO: 5468001 - DNA, 25 bp, Homo sapien
ctaagatgcagtgcctaatattagc

SEQ ID NO: 5468002 - DNA, 25 bp, Homo sapien
cctaatattagcactctgaggcaag

SEQ ID NO: 5468003 - DNA, 25 bp, Homo sapien
ccgggggaataaatagtgcaccatc

SEQ ID NO: 5468004 - DNA, 25 bp, Homo sapien
gaggtaagacacattcccatgaaac

SEQ ID NO: 5468005 - DNA, 25 bp, Homo sapien
cagatgaggaggtaagacacattcc

SEQ ID NO: 5468006 - DNA, 25 bp, Homo sapien
tcagggagcttaggctccagatgag

SEQ ID NO: 5468007 - DNA, 25 bp, Homo sapien
cttcagggagcttaggctccagatg

SEQ ID NO: 5468008 - DNA, 25 bp, Homo sapien
aaatgagcaggagaatggtcccaag

SEQ ID NO: 5468009 - DNA, 25 bp, Homo sapien
actgagtaaatgagcaggagaatgg

SEQ ID NO: 5468010 - DNA, 25 bp, Homo sapien
ggagaatggtcccaaggcaggcaca

SEQ ID NO: 5468011 - DNA, 25 bp, Homo sapien
gagaatggtcccaaggcaggcacat

SEQ ID NO: 5468012 - DNA, 25 bp, Homo sapien
tccaagagggatgtcgaaactgggt

SEQ ID NO: 5468013 - DNA, 25 bp, Homo sapien
ggacgaaatgagagaactccaagag

SEQ ID NO: 5468014 - DNA, 25 bp, Homo sapien
ctccctgggagcaagtgttctggtc

SEQ ID NO: 5468015 - DNA, 25 bp, Homo sapien
gagcaagtgttctggtctggacgaa

SEQ ID NO: 5468016 - DNA, 25 bp, Homo sapien
gattcagggtggttgttatctgtta

SEQ ID NO: 5468017 - DNA, 25 bp, Homo sapien
tcagggtggttgttatctgttatct

SEQ ID NO: 5468018 - DNA, 25 bp, Homo sapien
caagattcagggtggttgttatctg

SEQ ID NO: 5468019 - DNA, 25 bp, Homo sapien
tcaagattcagggtggttgttatct

SEQ ID NO: 5468020 - DNA, 25 bp, Homo sapien
ttcttcacagaaagtacccacgtac

SEQ ID NO: 5468021 - DNA, 25 bp, Homo sapien
tgcatcaatacagctcgcgttgttt

SEQ ID NO: 5468022 - DNA, 25 bp, Homo sapien
cagaaagtacccacgtactgctcct

SEQ ID NO: 5468023 - DNA, 25 bp, Homo sapien
ctctggcaagcatcgtattcttcac

SEQ ID NO: 5468024 - DNA, 25 bp, Homo sapien
tcctaacatcggaaagctctggaat

SEQ ID NO: 5468025 - DNA, 25 bp, Homo sapien
tccaggagcctgtccgtaaagattc

SEQ ID NO: 5468026 - DNA, 25 bp, Homo sapien
gagcctatgaataaaaagtccgaag

SEQ ID NO: 5468027 - DNA, 25 bp, Homo sapien
tctgcagccacttttaccgacagct

SEQ ID NO: 5468028 - DNA, 25 bp, Homo sapien
tgtgtcctggccgactcatgtaacg

SEQ ID NO: 5468029 - DNA, 25 bp, Homo sapien
acagtgtgtcctggccgactcatgt

SEQ ID NO: 5468030 - DNA, 25 bp, Homo sapien
tgtaacgacacagcattggtcaggg

SEQ ID NO: 5468031 - DNA, 25 bp, Homo sapien
ggccgactcatgtaacgacacagca

SEQ ID NO: 5468032 - DNA, 25 bp, Homo sapien
ttattactcataaaagcactttctc

SEQ ID NO: 5468033 - DNA, 25 bp, Homo sapien
tttatgatctctatggttaatgtgt

SEQ ID NO: 5468034 - DNA, 25 bp, Homo sapien
ctttctctctcagaggtccacaaag

SEQ ID NO: 5468035 - DNA, 25 bp, Homo sapien
tctcagaggtccacaaagcagtttc

SEQ ID NO: 5468036 - DNA, 25 bp, Homo sapien
tcagtagtcagctctggtatccgat

SEQ ID NO: 5468037 - DNA, 25 bp, Homo sapien
ctaatagattaaggatggtgggttc

SEQ ID NO: 5468038 - DNA, 25 bp, Homo sapien
ggtatccgatcctaatagattaagg

SEQ ID NO: 5468039 - DNA, 25 bp, Homo sapien
agtcagctctggtatccgatcctaa

SEQ ID NO: 5468040 - DNA, 25 bp, Homo sapien
cttgttagagatcttcaggtggacc

SEQ ID NO: 5468041 - DNA, 25 bp, Homo sapien
aatagatgtcccctaatggaacagg

SEQ ID NO: 5468042 - DNA, 25 bp, Homo sapien
tccactagtacccaatgtgctgacg

SEQ ID NO: 5468043 - DNA, 25 bp, Homo sapien
tgctgacgttctcacaagaaggcat

SEQ ID NO: 5468044 - DNA, 25 bp, Homo sapien
gagagttctatactgatgaactttg

SEQ ID NO: 5468045 - DNA, 25 bp, Homo sapien
taagagagttctatactgatgaact

SEQ ID NO: 5468046 - DNA, 25 bp, Homo sapien
aagagagttctatactgatgaactt

SEQ ID NO: 5468047 - DNA, 25 bp, Homo sapien
gagttctatactgatgaactttgac

SEQ ID NO: 5468048 - DNA, 25 bp, Homo sapien
tgtggtcctttgttcatctgactcc

SEQ ID NO: 5468049 - DNA, 25 bp, Homo sapien
tggtcctttgttcatctgactccca

SEQ ID NO: 5468050 - DNA, 25 bp, Homo sapien
gtggtcctttgttcatctgactccc

SEQ ID NO: 5468051 - DNA, 25 bp, Homo sapien
ttcccatagtgtttctgatgccggc

SEQ ID NO: 5468052 - DNA, 25 bp, Homo sapien
tgatgccggctccacaaagagcaaa

SEQ ID NO: 5468053 - DNA, 25 bp, Homo sapien
caaagttaatgtgtcatctcatcca

SEQ ID NO: 5468054 - DNA, 25 bp, Homo sapien
gaggaagctgtactcgggccttgcc

SEQ ID NO: 5468055 - DNA, 25 bp, Homo sapien
aagtgaatgactgtgtttacctttt

SEQ ID NO: 5468056 - DNA, 25 bp, Homo sapien
gtaagtgaatgactgtgtttacctt

SEQ ID NO: 5468057 - DNA, 25 bp, Homo sapien
catttctcttgattgtactactgga

SEQ ID NO: 5468058 - DNA, 25 bp, Homo sapien
taagtgaatgactgtgtttaccttt

SEQ ID NO: 5468059 - DNA, 25 bp, Homo sapien
gcaagaggatctatcactacacaaa

SEQ ID NO: 5468060 - DNA, 25 bp, Homo sapien
gaggatctatcactacacaaatgca

SEQ ID NO: 5468061 - DNA, 25 bp, Homo sapien
caattactttgaaaatcatatggag

SEQ ID NO: 5468062 - DNA, 25 bp, Homo sapien
accaaagcaagaggatctatcacta

SEQ ID NO: 5468063 - DNA, 25 bp, Homo sapien
aatatgtgtatttacaagctaccag

SEQ ID NO: 5468064 - DNA, 25 bp, Homo sapien
ttattcaggtaaatattcatgtaaa

SEQ ID NO: 5468065 - DNA, 25 bp, Homo sapien
tgtatttacaagctaccaggcatcc

SEQ ID NO: 5468066 - DNA, 25 bp, Homo sapien
ttacaagctaccaggcatcccctta

SEQ ID NO: 5468067 - DNA, 25 bp, Homo sapien
gaacactccaagtcatttgcgtgac

SEQ ID NO: 5468068 - DNA, 25 bp, Homo sapien
agcgcaaagccacaatagacttagt

SEQ ID NO: 5468069 - DNA, 25 bp, Homo sapien
tcaccaccagagttaagcgcaaagc

SEQ ID NO: 5468070 - DNA, 25 bp, Homo sapien
gacggcttcgtggtgcattttcctt

SEQ ID NO: 5468071 - DNA, 25 bp, Homo sapien
cccagtgaacctcgcagccatgatt

SEQ ID NO: 5468072 - DNA, 25 bp, Homo sapien
tgtctatgggacaggcagtgcatgc

SEQ ID NO: 5468073 - DNA, 25 bp, Homo sapien
aatgcagacggtccttgaggcagtc

SEQ ID NO: 5468074 - DNA, 25 bp, Homo sapien
cagtgcatgcttgagggaccactct

SEQ ID NO: 5468075 - DNA, 25 bp, Homo sapien
aaatcagcagggcatcatggcatgt

SEQ ID NO: 5468076 - DNA, 25 bp, Homo sapien
gttgggcgtgatggcacacacacct

SEQ ID NO: 5468077 - DNA, 25 bp, Homo sapien
caaaaatcagcagggcatcatggca

SEQ ID NO: 5468078 - DNA, 25 bp, Homo sapien
acaaaaatcagcagggcatcatggc

SEQ ID NO: 5468079 - DNA, 25 bp, Homo sapien
tgtaaacatttccacaatgccccct

SEQ ID NO: 5468080 - DNA, 25 bp, Homo sapien
tcagagaccaccttattcataagcc

SEQ ID NO: 5468081 - DNA, 25 bp, Homo sapien
ttacagccattgagatccagctcag

SEQ ID NO: 5468082 - DNA, 25 bp, Homo sapien
acagccattgagatccagctcagag

SEQ ID NO: 5468083 - DNA, 25 bp, Homo sapien
cctgctagaatgttgggatgctacc

SEQ ID NO: 5468084 - DNA, 25 bp, Homo sapien
caggtacattaatagccaaagcagc

SEQ ID NO: 5468085 - DNA, 25 bp, Homo sapien
gatgctaccagttcttattccaagt

SEQ ID NO: 5468086 - DNA, 25 bp, Homo sapien
caagggacaagtcttagagaagtgg

SEQ ID NO: 5468087 - DNA, 25 bp, Homo sapien
gaaggtgggataaggttagtgcaaa

SEQ ID NO: 5468088 - DNA, 25 bp, Homo sapien
taaggttagtgcaaagctaataagc

SEQ ID NO: 5468089 - DNA, 25 bp, Homo sapien
caaagctaataagccggtcaggatc

SEQ ID NO: 5468090 - DNA, 25 bp, Homo sapien
agccggtcaggatccccctggattt

SEQ ID NO: 5468091 - DNA, 25 bp, Homo sapien
taaacactcaatgtacggcaggtcc

SEQ ID NO: 5468092 - DNA, 25 bp, Homo sapien
tagattgagttccactgagggcccg

SEQ ID NO: 5468093 - DNA, 25 bp, Homo sapien
cacatagcaggagaagtgaggaagc

SEQ ID NO: 5468094 - DNA, 25 bp, Homo sapien
gctgcaaacactcctcatattcggt

SEQ ID NO: 5468095 - DNA, 25 bp, Homo sapien
tatgggaaggttgactctgactcag

SEQ ID NO: 5468096 - DNA, 25 bp, Homo sapien
gatccagaaaggtcttcggcaccca

SEQ ID NO: 5468097 - DNA, 25 bp, Homo sapien
ggctcacaaatacctagaatctgca

SEQ ID NO: 5468098 - DNA, 25 bp, Homo sapien
caatgtattgcaatgaagccccagt

SEQ ID NO: 5468099 - DNA, 25 bp, Homo sapien
ttgggtttccacacttacagaataa

SEQ ID NO: 5468100 - DNA, 25 bp, Homo sapien
gcttatcacctttgctagctggttt

SEQ ID NO: 5468101 - DNA, 25 bp, Homo sapien
ctttcaactgcatgagattctcgct

SEQ ID NO: 5468102 - DNA, 25 bp, Homo sapien
ggagttgggtttccacacttacaga

SEQ ID NO: 5468103 - DNA, 25 bp, Homo sapien
tacacctcgagttctaaagccttca

SEQ ID NO: 5468104 - DNA, 25 bp, Homo sapien
ggccaagctcaagatacacctcgag

SEQ ID NO: 5468105 - DNA, 25 bp, Homo sapien
ctctcaacttgcgatgtgaattcat

SEQ ID NO: 5468106 - DNA, 25 bp, Homo sapien
cttgccccttggtgactactctcaa

SEQ ID NO: 5468107 - DNA, 25 bp, Homo sapien
cttgatcttccgattaatctcttga

SEQ ID NO: 5468108 - DNA, 25 bp, Homo sapien
tctaatattgaatagacactccttg

SEQ ID NO: 5468109 - DNA, 25 bp, Homo sapien
gtagaccctaaatggactgtacagt

SEQ ID NO: 5468110 - DNA, 25 bp, Homo sapien
gaccctaaatggactgtacagttca

SEQ ID NO: 5468111 - DNA, 25 bp, Homo sapien
ttcagcttgaaagggagaaaggcca

SEQ ID NO: 5468112 - DNA, 25 bp, Homo sapien
tgaaagggagaaaggccagcttgct

SEQ ID NO: 5468113 - DNA, 25 bp, Homo sapien
aagggagaaaggccagcttgctggg

SEQ ID NO: 5468114 - DNA, 25 bp, Homo sapien
gagaaaggccagcttgctgggtcat

SEQ ID NO: 5468115 - DNA, 25 bp, Homo sapien
cttgttgagagaaacgcatacttct

SEQ ID NO: 5468116 - DNA, 25 bp, Homo sapien
tgttgagagaaacgcatacttctgg

SEQ ID NO: 5468117 - DNA, 25 bp, Homo sapien
agagaaacgcatacttctggaagtt

SEQ ID NO: 5468118 - DNA, 25 bp, Homo sapien
tgagagaaacgcatacttctggaag

SEQ ID NO: 5468119 - DNA, 25 bp, Homo sapien
tcatgggctgactgggaaaccttct

SEQ ID NO: 5468120 - DNA, 25 bp, Homo sapien
taagacgtcaattagaaagacctgc

SEQ ID NO: 5468121 - DNA, 25 bp, Homo sapien
caaggacattcttatcagccatggg

SEQ ID NO: 5468122 - DNA, 25 bp, Homo sapien
aaggcaactgaaagcactctctcta

SEQ ID NO: 5468123 - DNA, 25 bp, Homo sapien
tcaggcttccgcaaagattgcaaaa

SEQ ID NO: 5468124 - DNA, 25 bp, Homo sapien
ggaagagctcgggacaggactgctg

SEQ ID NO: 5468125 - DNA, 25 bp, Homo sapien
gagttgatttatcatggttaggaac

SEQ ID NO: 5468126 - DNA, 25 bp, Homo sapien
ttgtaagagaagcagctggcggtgt

SEQ ID NO: 5468127 - DNA, 25 bp, Homo sapien
tgttggaatcctgtggccgtgacct

SEQ ID NO: 5468128 - DNA, 25 bp, Homo sapien
cgtccatctatgagggagcactgtt

SEQ ID NO: 5468129 - DNA, 25 bp, Homo sapien
gggtcacacttcgtccatctatgag

SEQ ID NO: 5468130 - DNA, 25 bp, Homo sapien
attattccccaaggcgagcatctcc

SEQ ID NO: 5468131 - DNA, 25 bp, Homo sapien
tggaaacaggaatgatgtaaacaga

SEQ ID NO: 5468132 - DNA, 25 bp, Homo sapien
ctggaaacaggaatgatgtaaacag

SEQ ID NO: 5468133 - DNA, 25 bp, Homo sapien
aaacaggaatgatgtaaacagaaag

SEQ ID NO: 5468134 - DNA, 25 bp, Homo sapien
caggaatgatgtaaacagaaagctc

SEQ ID NO: 5468135 - DNA, 25 bp, Homo sapien
gcgggcgtccactgtaaaggcgtac

SEQ ID NO: 5468136 - DNA, 25 bp, Homo sapien
caaaatgagtcactggtaactcacc

SEQ ID NO: 5468137 - DNA, 25 bp, Homo sapien
taaaggcgtacactcccacttgttc

SEQ ID NO: 5468138 - DNA, 25 bp, Homo sapien
caggagatcgatggcataaacagat

SEQ ID NO: 5468139 - DNA, 25 bp, Homo sapien
ttcggtcccgttctgcagcttaagg

SEQ ID NO: 5468140 - DNA, 25 bp, Homo sapien
gagtcagactctgctaattcggtcc

SEQ ID NO: 5468141 - DNA, 25 bp, Homo sapien
tgaaagcgtaaggagctagtaaccc

SEQ ID NO: 5468142 - DNA, 25 bp, Homo sapien
gaagatcacagtagactccgcacag

SEQ ID NO: 5468143 - DNA, 25 bp, Homo sapien
gactgaggtgttctgtggcacttca

SEQ ID NO: 5468144 - DNA, 25 bp, Homo sapien
ggtgttctgtggcacttcaaaggat

SEQ ID NO: 5468145 - DNA, 25 bp, Homo sapien
tgttctgtggcacttcaaaggatac

SEQ ID NO: 5468146 - DNA, 25 bp, Homo sapien
ttgactgaggtgttctgtggcactt

SEQ ID NO: 5468147 - DNA, 25 bp, Homo sapien
acccgcagagctgttagaactggca

SEQ ID NO: 5468148 - DNA, 25 bp, Homo sapien
gcattcccacaggcaatatctggga

SEQ ID NO: 5468149 - DNA, 25 bp, Homo sapien
cgcagagctgttagaactggcattc

SEQ ID NO: 5468150 - DNA, 25 bp, Homo sapien
cattcccacaggcaatatctgggat

SEQ ID NO: 5468151 - DNA, 25 bp, Homo sapien
catggattcggtccagccagtggct

SEQ ID NO: 5468152 - DNA, 25 bp, Homo sapien
ccctgttttcggctgccaggtaggc

SEQ ID NO: 5468153 - DNA, 25 bp, Homo sapien
gaagtgcctgttcacagttgggacc

SEQ ID NO: 5468154 - DNA, 25 bp, Homo sapien
agtgtcaccgttgcctgagagcgag

SEQ ID NO: 5468155 - DNA, 25 bp, Homo sapien
gacaagggttgctggcacaaggatc

SEQ ID NO: 5468156 - DNA, 25 bp, Homo sapien
acaagggttgctggcacaaggatct

SEQ ID NO: 5468157 - DNA, 25 bp, Homo sapien
gtgacaagggttgctggcacaagga

SEQ ID NO: 5468158 - DNA, 25 bp, Homo sapien
tggtgacaagggttgctggcacaag

SEQ ID NO: 5468159 - DNA, 25 bp, Homo sapien
ctgacaaccatcagtcctcagagag

SEQ ID NO: 5468160 - DNA, 25 bp, Homo sapien
tctgacaaccatcagtcctcagaga

SEQ ID NO: 5468161 - DNA, 25 bp, Homo sapien
caagatagccgttttgagttttcaa

SEQ ID NO: 5468162 - DNA, 25 bp, Homo sapien
tagagtaacttctcttcatgccaac

SEQ ID NO: 5468163 - DNA, 25 bp, Homo sapien
gagaaaccagttaagcacgtgtaca

SEQ ID NO: 5468164 - DNA, 25 bp, Homo sapien
gagttttcaaaggacactccataga

SEQ ID NO: 5468165 - DNA, 25 bp, Homo sapien
tcggagaccatctctgggagccact

SEQ ID NO: 5468166 - DNA, 25 bp, Homo sapien
gtcctcggagaccatctctgggagc

SEQ ID NO: 5468167 - DNA, 25 bp, Homo sapien
cctcggagaccatctctgggagcca

SEQ ID NO: 5468168 - DNA, 25 bp, Homo sapien
ccccagtgggaagtgtcagaggtgc

SEQ ID NO: 5468169 - DNA, 25 bp, Homo sapien
cacagccagtaaagatgcctcaggt

SEQ ID NO: 5468170 - DNA, 25 bp, Homo sapien
gtccctcggaagcttgcagctctat

SEQ ID NO: 5468171 - DNA, 25 bp, Homo sapien
cacaaagagagctgtccctcggaag

SEQ ID NO: 5468172 - DNA, 25 bp, Homo sapien
attatgggcattctggatacactgg

SEQ ID NO: 5468173 - DNA, 25 bp, Homo sapien
gcggacacaaagctgggtggaacat

SEQ ID NO: 5468174 - DNA, 25 bp, Homo sapien
tgcggacacaaagctgggtggaaca

SEQ ID NO: 5468175 - DNA, 25 bp, Homo sapien
ctgcggacacaaagctgggtggaac

SEQ ID NO: 5468176 - DNA, 25 bp, Homo sapien
cgcacttgagaaagcagattgatga

SEQ ID NO: 5468177 - DNA, 25 bp, Homo sapien
gatgaagctaacatgggatgcacgg

SEQ ID NO: 5468178 - DNA, 25 bp, Homo sapien
aaccaaagcgactcggatgggcacc

SEQ ID NO: 5468179 - DNA, 25 bp, Homo sapien
gggtgaagtttcttcgcacttgaga

SEQ ID NO: 5468180 - DNA, 25 bp, Homo sapien
cccatgccaggaggagaggccgtat

SEQ ID NO: 5468181 - DNA, 25 bp, Homo sapien
gcagttgtttgcaagccaaggagaa

SEQ ID NO: 5468182 - DNA, 25 bp, Homo sapien
tattgaagtcccatccctcggtatg

SEQ ID NO: 5468183 - DNA, 25 bp, Homo sapien
gcccttaaaaggaggagtcacacca

SEQ ID NO: 5468184 - DNA, 25 bp, Homo sapien
agggacaatgacacccatgcacagc

SEQ ID NO: 5468185 - DNA, 25 bp, Homo sapien
taagggacaatgacacccatgcaca

SEQ ID NO: 5468186 - DNA, 25 bp, Homo sapien
ctaagggacaatgacacccatgcac

SEQ ID NO: 5468187 - DNA, 25 bp, Homo sapien
aagggacaatgacacccatgcacag

SEQ ID NO: 5468188 - DNA, 25 bp, Homo sapien
cagtattgacacaagtctcaatgtc

SEQ ID NO: 5468189 - DNA, 25 bp, Homo sapien
tggcacttcagtattgacacaagtc

SEQ ID NO: 5468190 - DNA, 25 bp, Homo sapien
cacttcagtattgacacaagtctca

SEQ ID NO: 5468191 - DNA, 25 bp, Homo sapien
ttcagtattgacacaagtctcaatg

SEQ ID NO: 5468192 - DNA, 25 bp, Homo sapien
tattcctcacatgcaggaaaggcaa

SEQ ID NO: 5468193 - DNA, 25 bp, Homo sapien
ttattcctcacatgcaggaaaggca

SEQ ID NO: 5468194 - DNA, 25 bp, Homo sapien
ggcttgtccaaaagcgtagctcact

SEQ ID NO: 5468195 - DNA, 25 bp, Homo sapien
gaggaaggcacaggtaccagatcca

SEQ ID NO: 5468196 - DNA, 25 bp, Homo sapien
tgcgtcttactgactaggtccagag

SEQ ID NO: 5468197 - DNA, 25 bp, Homo sapien
tcccaaatctaggaaggacctggtg

SEQ ID NO: 5468198 - DNA, 25 bp, Homo sapien
gaatgatgatccagtgtcggactca

SEQ ID NO: 5468199 - DNA, 25 bp, Homo sapien
gcagctggccaccaaaggactgggc

SEQ ID NO: 5468200 - DNA, 25 bp, Homo sapien
aggatgcagcgaagaacccaagggc

SEQ ID NO: 5468201 - DNA, 25 bp, Homo sapien
gataggagcaaaaatcggccaggat

SEQ ID NO: 5468202 - DNA, 25 bp, Homo sapien
tgcttaaataccctccatccatcaa

SEQ ID NO: 5468203 - DNA, 25 bp, Homo sapien
atccatcaagtatgatgactgtctt

SEQ ID NO: 5468204 - DNA, 25 bp, Homo sapien
tttgcttaaataccctccatccatc

SEQ ID NO: 5468205 - DNA, 25 bp, Homo sapien
cctccatccatcaagtatgatgact

SEQ ID NO: 5468206 - DNA, 25 bp, Homo sapien
tggatgaattccctgacaatgtgga

SEQ ID NO: 5468207 - DNA, 25 bp, Homo sapien
catggtcaccctgtataaaagctgg

SEQ ID NO: 5468208 - DNA, 25 bp, Homo sapien
gagcccaggtgtcaagtgtaagcag

SEQ ID NO: 5468209 - DNA, 25 bp, Homo sapien
gagaattaacgtcatctggcctgat

SEQ ID NO: 5468210 - DNA, 25 bp, Homo sapien
tggtgcttgcctcacctgatggtgt

SEQ ID NO: 5468211 - DNA, 25 bp, Homo sapien
cattgtcatttccaagctggtgctt

SEQ ID NO: 5468212 - DNA, 25 bp, Homo sapien
ctgtgcattgtcatttccaagctgg

SEQ ID NO: 5468213 - DNA, 25 bp, Homo sapien
tctccaggggccactttatggctgg

SEQ ID NO: 5468214 - DNA, 25 bp, Homo sapien
gcatcgggtgggcagctgtgaagtg

SEQ ID NO: 5468215 - DNA, 25 bp, Homo sapien
gacgcatcgggtgggcagctgtgaa

SEQ ID NO: 5468216 - DNA, 25 bp, Homo sapien
gggacgcatcgggtgggcagctgtg

SEQ ID NO: 5468217 - DNA, 25 bp, Homo sapien
ctgggacgcatcgggtgggcagctg

SEQ ID NO: 5468218 - DNA, 25 bp, Homo sapien
tacaaaggctattgtttatttcagc

SEQ ID NO: 5468219 - DNA, 25 bp, Homo sapien
acaaaggctattgtttatttcagca

SEQ ID NO: 5468220 - DNA, 25 bp, Homo sapien
aatttggacctgcatctcagtgggc

SEQ ID NO: 5468221 - DNA, 25 bp, Homo sapien
tcttctccccggaatttgctgttag

SEQ ID NO: 5468222 - DNA, 25 bp, Homo sapien
tgatgccagcatgctaatttggacc

SEQ ID NO: 5468223 - DNA, 25 bp, Homo sapien
tagtactctgagctatggactctga

SEQ ID NO: 5468224 - DNA, 25 bp, Homo sapien
ctctgctgggcagagcagtaggaaa

SEQ ID NO: 5468225 - DNA, 25 bp, Homo sapien
gctttgggaggcagccgcctctgct

SEQ ID NO: 5468226 - DNA, 25 bp, Homo sapien
atggagagtcgaggctgacacctct

SEQ ID NO: 5468227 - DNA, 25 bp, Homo sapien
ctggagatggagagtcgaggctgac

SEQ ID NO: 5468228 - DNA, 25 bp, Homo sapien
tgtgctttgtaagccttaggccatc

SEQ ID NO: 5468229 - DNA, 25 bp, Homo sapien
tccgtgaatccatctcctacagctg

SEQ ID NO: 5468230 - DNA, 25 bp, Homo sapien
tgtaacacatgtgctttgtaagcct

SEQ ID NO: 5468231 - DNA, 25 bp, Homo sapien
tgtggcctcacattcatgtaacaca

SEQ ID NO: 5468232 - DNA, 25 bp, Homo sapien
tcctgaaggatgtggtgacctaaat

SEQ ID NO: 5468233 - DNA, 25 bp, Homo sapien
gggtacccggcagtttcatatctaa

SEQ ID NO: 5468234 - DNA, 25 bp, Homo sapien
aaactacagctgcaagggtacccgg

SEQ ID NO: 5468235 - DNA, 25 bp, Homo sapien
tatctaaacaagagtgtttctttgt

SEQ ID NO: 5468236 - DNA, 25 bp, Homo sapien
ggtctcaagatctgaactgtaggac

SEQ ID NO: 5468237 - DNA, 25 bp, Homo sapien
ataaatcgggtaccgctcttagcct

SEQ ID NO: 5468238 - DNA, 25 bp, Homo sapien
tgaataaatcgggtaccgctcttag

SEQ ID NO: 5468239 - DNA, 25 bp, Homo sapien
atcgggtaccgctcttagcctccat

SEQ ID NO: 5468240 - DNA, 25 bp, Homo sapien
ccttgaataaatcgggtaccgctct

SEQ ID NO: 5468241 - DNA, 25 bp, Homo sapien
catctggcaagtgctaaatcatagt

SEQ ID NO: 5468242 - DNA, 25 bp, Homo sapien
aggtcttcccatccatccctgtttt

SEQ ID NO: 5468243 - DNA, 25 bp, Homo sapien
gcattaagaaataatcgcctggtta

SEQ ID NO: 5468244 - DNA, 25 bp, Homo sapien
ttatagatgctgaatggcccgatcc

SEQ ID NO: 5468245 - DNA, 25 bp, Homo sapien
gaagcaggcacaacagattgccaga

SEQ ID NO: 5468246 - DNA, 25 bp, Homo sapien
cacacacaaatgtatcgtataacat

SEQ ID NO: 5468247 - DNA, 25 bp, Homo sapien
gattgccagatcctctgcacgtatt

SEQ ID NO: 5468248 - DNA, 25 bp, Homo sapien
gaattgtatacctctgcctaaaaca

SEQ ID NO: 5468249 - DNA, 25 bp, Homo sapien
tatcacccaggtaacgacagtagca

SEQ ID NO: 5468250 - DNA, 25 bp, Homo sapien
gagacaagggatttgagccagcaga

SEQ ID NO: 5468251 - DNA, 25 bp, Homo sapien
gaccaatgacatctagggccactta

SEQ ID NO: 5468252 - DNA, 25 bp, Homo sapien
gctgagacctcagatcacggctgga

SEQ ID NO: 5468253 - DNA, 25 bp, Homo sapien
catataaaacatctgtagggtccgg

SEQ ID NO: 5468254 - DNA, 25 bp, Homo sapien
gagaaaaagctcttgacttcgccta

SEQ ID NO: 5468255 - DNA, 25 bp, Homo sapien
gcatactcacatactaccgggaaag

SEQ ID NO: 5468256 - DNA, 25 bp, Homo sapien
tcagcatcggtttttggcatcacgc

SEQ ID NO: 5468257 - DNA, 25 bp, Homo sapien
ttattcactttcatctttccaacca

SEQ ID NO: 5468258 - DNA, 25 bp, Homo sapien
tattcactttcatctttccaaccat

SEQ ID NO: 5468259 - DNA, 25 bp, Homo sapien
attcactttcatctttccaaccatc

SEQ ID NO: 5468260 - DNA, 25 bp, Homo sapien
acctggacattgaacacctcgccgg

SEQ ID NO: 5468261 - DNA, 25 bp, Homo sapien
cacagccctcaagggcgtaggaaga

SEQ ID NO: 5468262 - DNA, 25 bp, Homo sapien
ctaagcttagagagggctggtcgca

SEQ ID NO: 5468263 - DNA, 25 bp, Homo sapien
ggcgggcaccgctcaagtggttctt

SEQ ID NO: 5468264 - DNA, 25 bp, Homo sapien
ggtccggctcagggcgcgaggtgca

SEQ ID NO: 5468265 - DNA, 25 bp, Homo sapien
gctcagggcgcgaggtgcacacacc

SEQ ID NO: 5468266 - DNA, 25 bp, Homo sapien
gggccgggtgctgcgggtccggctc

SEQ ID NO: 5468267 - DNA, 25 bp, Homo sapien
cagttggcgccggagatcccggcgg

SEQ ID NO: 5468268 - DNA, 25 bp, Homo sapien
gcgcacggcccgggcgcagacaggg

SEQ ID NO: 5468269 - DNA, 25 bp, Homo sapien
ggcccgggcgcagacaggggcgcgg

SEQ ID NO: 5468270 - DNA, 25 bp, Homo sapien
acggcccgggcgcagacaggggcgc

SEQ ID NO: 5468271 - DNA, 25 bp, Homo sapien
cgcggcgcacggcccgggcgcagac

SEQ ID NO: 5468272 - DNA, 25 bp, Homo sapien
tcacgggtgtgtccagaagcagccc

SEQ ID NO: 5468273 - DNA, 25 bp, Homo sapien
ttgcaggaagacgatgcgggacccc

SEQ ID NO: 5468274 - DNA, 25 bp, Homo sapien
tctttccccgcagggagttgggatg

SEQ ID NO: 5468275 - DNA, 25 bp, Homo sapien
tggcgcagaatctgcgagaccgccg

SEQ ID NO: 5468276 - DNA, 25 bp, Homo sapien
tcctgtgagaatgctagcctgggtg

SEQ ID NO: 5468277 - DNA, 25 bp, Homo sapien
ggcctcaatgagaacaccactcctg

SEQ ID NO: 5468278 - DNA, 25 bp, Homo sapien
cacaggtagccaattgggaaccact

SEQ ID NO: 5468279 - DNA, 25 bp, Homo sapien
gggtgcaccgtgtcatcattcacag

SEQ ID NO: 5468280 - DNA, 25 bp, Homo sapien
gatttagcacccaccttctttccaa

SEQ ID NO: 5468281 - DNA, 25 bp, Homo sapien
tgggatttagcacccaccttctttc

SEQ ID NO: 5468282 - DNA, 25 bp, Homo sapien
ggatttagcacccaccttctttcca

SEQ ID NO: 5468283 - DNA, 25 bp, Homo sapien
caggattgtggctttttctgactaa

SEQ ID NO: 5468284 - DNA, 25 bp, Homo sapien
gagtggtaagacaacgtcctcctaa

SEQ ID NO: 5468285 - DNA, 25 bp, Homo sapien
tcctcctaatcgaaggaagctgggt

SEQ ID NO: 5468286 - DNA, 25 bp, Homo sapien
gttctcatttatgtaggaggccaga

SEQ ID NO: 5468287 - DNA, 25 bp, Homo sapien
ggttccattattccaacagttcata

SEQ ID NO: 5468288 - DNA, 25 bp, Homo sapien
agtttgaggttccattattccaaca

SEQ ID NO: 5468289 - DNA, 25 bp, Homo sapien
tccaacagttcatataaatcactgt

SEQ ID NO: 5468290 - DNA, 25 bp, Homo sapien
gtcagtgcatttatgcaattttaca

SEQ ID NO: 5468291 - DNA, 25 bp, Homo sapien
cacagacaggagtcgagagtacagc

SEQ ID NO: 5468292 - DNA, 25 bp, Homo sapien
taggatgccctagggaagtcactcc

SEQ ID NO: 5468293 - DNA, 25 bp, Homo sapien
gaatgtctccttcatgcagaacaag

SEQ ID NO: 5468294 - DNA, 25 bp, Homo sapien
tgtcactacaaatgcagggaaccag

SEQ ID NO: 5468295 - DNA, 25 bp, Homo sapien
gggacatttccatataaggccattt

SEQ ID NO: 5468296 - DNA, 25 bp, Homo sapien
ttcacttgatgaagctgctcagcaa

SEQ ID NO: 5468297 - DNA, 25 bp, Homo sapien
gcaatctatgtcaaacaagccactg

SEQ ID NO: 5468298 - DNA, 25 bp, Homo sapien
ggtcactgcccaagtgaactctcag

SEQ ID NO: 5468299 - DNA, 25 bp, Homo sapien
gcaaaatcagccatgacccgaatca

SEQ ID NO: 5468300 - DNA, 25 bp, Homo sapien
caaggagatgaattatggaaaattc

SEQ ID NO: 5468301 - DNA, 25 bp, Homo sapien
cttcaaatttatgccacaggcctag

SEQ ID NO: 5468302 - DNA, 25 bp, Homo sapien
caattgaaagttatgcatacagcac

SEQ ID NO: 5468303 - DNA, 25 bp, Homo sapien
tcttaactggagagaacatgggaca

SEQ ID NO: 5468304 - DNA, 25 bp, Homo sapien
gctagatggatacacacagcccaga

SEQ ID NO: 5468305 - DNA, 25 bp, Homo sapien
ttatctgcgtcgagacaaaggctga

SEQ ID NO: 5468306 - DNA, 25 bp, Homo sapien
agaataataaataccggccagccca

SEQ ID NO: 5468307 - DNA, 25 bp, Homo sapien
tttgctgtaacaggcagacactgca

SEQ ID NO: 5468308 - DNA, 25 bp, Homo sapien
gcaagccgtttttcctacaacaaga

SEQ ID NO: 5468309 - DNA, 25 bp, Homo sapien
caacaagaaggcgtaacatgtttcc

SEQ ID NO: 5468310 - DNA, 25 bp, Homo sapien
acaacaacgttttagggcctgatca

SEQ ID NO: 5468311 - DNA, 25 bp, Homo sapien
tcttgctgctatcaacagtttttca

SEQ ID NO: 5468312 - DNA, 25 bp, Homo sapien
atctcaatgcttgaatagtccggca

SEQ ID NO: 5468313 - DNA, 25 bp, Homo sapien
cagtttttcacgcattatctcaatg

SEQ ID NO: 5468314 - DNA, 25 bp, Homo sapien
ctcttgctgctatcaacagtttttc

SEQ ID NO: 5468315 - DNA, 25 bp, Homo sapien
tcaaacgtctttcggacaattgtca

SEQ ID NO: 5468316 - DNA, 25 bp, Homo sapien
caagtcattacagagggcaagaagt

SEQ ID NO: 5468317 - DNA, 25 bp, Homo sapien
gatagttcacacaagtcattacaga

SEQ ID NO: 5468318 - DNA, 25 bp, Homo sapien
tcaaaggtggattcaaactccggaa

SEQ ID NO: 5468319 - DNA, 25 bp, Homo sapien
tccattctcatctaagtcaactaag

SEQ ID NO: 5468320 - DNA, 25 bp, Homo sapien
aaccagattttagaatccattctca

SEQ ID NO: 5468321 - DNA, 25 bp, Homo sapien
caatttaacttacattaggattcaa

SEQ ID NO: 5468322 - DNA, 25 bp, Homo sapien
aaaaccagattttagaatccattct

SEQ ID NO: 5468323 - DNA, 25 bp, Homo sapien
gctgctcattatcaaaactactgag

SEQ ID NO: 5468324 - DNA, 25 bp, Homo sapien
actactgagaatctcaaacaaaaac

SEQ ID NO: 5468325 - DNA, 25 bp, Homo sapien
caacaggcaatcttgggctaccagt

SEQ ID NO: 5468326 - DNA, 25 bp, Homo sapien
caaactggagaaataacctctgctg

SEQ ID NO: 5468327 - DNA, 25 bp, Homo sapien
tacagcattccatcagtgtctttgc

SEQ ID NO: 5468328 - DNA, 25 bp, Homo sapien
gtataaccatgatcaggcctacagc

SEQ ID NO: 5468329 - DNA, 25 bp, Homo sapien
ctgtcatgagtataaccatgatcag

SEQ ID NO: 5468330 - DNA, 25 bp, Homo sapien
attccatcagtgtctttgcatccca

SEQ ID NO: 5468331 - DNA, 25 bp, Homo sapien
catctctgaacgaatcaaattgcct

SEQ ID NO: 5468332 - DNA, 25 bp, Homo sapien
aattgcctagaaacgccttcattta

SEQ ID NO: 5468333 - DNA, 25 bp, Homo sapien
ttcctccgggtagaagtactgaaga

SEQ ID NO: 5468334 - DNA, 25 bp, Homo sapien
agtgggaagactgattcaaatccat

SEQ ID NO: 5468335 - DNA, 25 bp, Homo sapien
ataatctgctagaaaactacatgag

SEQ ID NO: 5468336 - DNA, 25 bp, Homo sapien
cacccttctggatcactttataaag

SEQ ID NO: 5468337 - DNA, 25 bp, Homo sapien
tatgtggcaaagtacagtgaaacac

SEQ ID NO: 5468338 - DNA, 25 bp, Homo sapien
caaaaaactgtgacaagatttcaaa

SEQ ID NO: 5468339 - DNA, 25 bp, Homo sapien
aactcattatttgctagtaagatgg

SEQ ID NO: 5468340 - DNA, 25 bp, Homo sapien
aacattaggattttcttgatagaaa

SEQ ID NO: 5468341 - DNA, 25 bp, Homo sapien
gaatactaaaaggaattacttatga

SEQ ID NO: 5468342 - DNA, 25 bp, Homo sapien
cacgcctagccagttattatttaac

SEQ ID NO: 5468343 - DNA, 25 bp, Homo sapien
cacccaatgtcaggaataaaccaaa

SEQ ID NO: 5468344 - DNA, 25 bp, Homo sapien
ttttcaaacattggtaataaggatc

SEQ ID NO: 5468345 - DNA, 25 bp, Homo sapien
aggatctatatagtggtaatttaaa

SEQ ID NO: 5468346 - DNA, 25 bp, Homo sapien
caaacattggtaataaggatctata

SEQ ID NO: 5468347 - DNA, 25 bp, Homo sapien
tgcctaccacggccaaccaaagtgc

SEQ ID NO: 5468348 - DNA, 25 bp, Homo sapien
tgcacggtgcctggagtaaattctg

SEQ ID NO: 5468349 - DNA, 25 bp, Homo sapien
gtaaattctgtcaagctagctgcct

SEQ ID NO: 5468350 - DNA, 25 bp, Homo sapien
aaggtctcaagccatagcgtgtgca

SEQ ID NO: 5468351 - DNA, 25 bp, Homo sapien
ggtacaatcaggcaaagtcctccgt

SEQ ID NO: 5468352 - DNA, 25 bp, Homo sapien
aatgcatactgtagactctctttgg

SEQ ID NO: 5468353 - DNA, 25 bp, Homo sapien
ctcctctaaattgtggatagtgact

SEQ ID NO: 5468354 - DNA, 25 bp, Homo sapien
cagttcgatattgggaaaccctggc

SEQ ID NO: 5468355 - DNA, 25 bp, Homo sapien
cctagatcttcaactgagcagccat

SEQ ID NO: 5468356 - DNA, 25 bp, Homo sapien
tacaactgggtcgatgtcaaacaaa

SEQ ID NO: 5468357 - DNA, 25 bp, Homo sapien
caaacaaatcgtgtgatgtcagtga

SEQ ID NO: 5468358 - DNA, 25 bp, Homo sapien
ctgtctgacaatgtcttctaggtga

SEQ ID NO: 5468359 - DNA, 25 bp, Homo sapien
gataaactgatctggctacaactgg

SEQ ID NO: 5468360 - DNA, 25 bp, Homo sapien
agctggctttgctgtcctaccaaag

SEQ ID NO: 5468361 - DNA, 25 bp, Homo sapien
tgaaatccatgatagccttggccat

SEQ ID NO: 5468362 - DNA, 25 bp, Homo sapien
cgaaacttcatcttaacctttgcga

SEQ ID NO: 5468363 - DNA, 25 bp, Homo sapien
aagggaagcgcaaacaggccctgga

SEQ ID NO: 5468364 - DNA, 25 bp, Homo sapien
ttttggattgctaagagttacttct

SEQ ID NO: 5468365 - DNA, 25 bp, Homo sapien
taaaactccagtgtaggcccaagac

SEQ ID NO: 5468366 - DNA, 25 bp, Homo sapien
tctgtagttcctgagatacaagcgc

SEQ ID NO: 5468367 - DNA, 25 bp, Homo sapien
aagagttacttcttcacctctccaa

SEQ ID NO: 5468368 - DNA, 25 bp, Homo sapien
aacagagatctgcttgggcctagtg

SEQ ID NO: 5468369 - DNA, 25 bp, Homo sapien
gcctgggcactggtattattaaaca

SEQ ID NO: 5468370 - DNA, 25 bp, Homo sapien
tgactgtgcagcctaaagtgaaact

SEQ ID NO: 5468371 - DNA, 25 bp, Homo sapien
gagacacctgatgtggacatgcctg

SEQ ID NO: 5468372 - DNA, 25 bp, Homo sapien
aacatggcccgtgagctgccgaggt

SEQ ID NO: 5468373 - DNA, 25 bp, Homo sapien
ctggatttctaacatggcccgtgag

SEQ ID NO: 5468374 - DNA, 25 bp, Homo sapien
tcattttcatactggatttctaaca

SEQ ID NO: 5468375 - DNA, 25 bp, Homo sapien
agctgccgaggtcctgcatcacaga

SEQ ID NO: 5468376 - DNA, 25 bp, Homo sapien
aacagtgctggtgagaactgtagaa

SEQ ID NO: 5468377 - DNA, 25 bp, Homo sapien
tgtagaatcggtctccactggaaat

SEQ ID NO: 5468378 - DNA, 25 bp, Homo sapien
tggagataaaggctttaggaaaaga

SEQ ID NO: 5468379 - DNA, 25 bp, Homo sapien
gcttttcagtatacacttcactccc

SEQ ID NO: 5468380 - DNA, 25 bp, Homo sapien
ctatcttgagaatcagactggttga

SEQ ID NO: 5468381 - DNA, 25 bp, Homo sapien
tatccaatctaggtgcaactctgct

SEQ ID NO: 5468382 - DNA, 25 bp, Homo sapien
tctgggttggtatcaagtaatcttt

SEQ ID NO: 5468383 - DNA, 25 bp, Homo sapien
gctcggtcccgatcaaatgcagtta

SEQ ID NO: 5468384 - DNA, 25 bp, Homo sapien
tgcttttgctgttaacttactgtta

SEQ ID NO: 5468385 - DNA, 25 bp, Homo sapien
actgttaataaattcactagttgga

SEQ ID NO: 5468386 - DNA, 25 bp, Homo sapien
caggtttttcctagctcagtaagcc

SEQ ID NO: 5468387 - DNA, 25 bp, Homo sapien
ttactaaaggatcttgaagttgcct

SEQ ID NO: 5468388 - DNA, 25 bp, Homo sapien
tcatacaagtaataccagtatcgac

SEQ ID NO: 5468389 - DNA, 25 bp, Homo sapien
ggatcacatctaatgacgggtcttc

SEQ ID NO: 5468390 - DNA, 25 bp, Homo sapien
gactgatagcatgtaaaactcttaa

SEQ ID NO: 5468391 - DNA, 25 bp, Homo sapien
cacatctaatgacgggtcttcaaat

SEQ ID NO: 5468392 - DNA, 25 bp, Homo sapien
taatgcaaggcttaggactgaacag

SEQ ID NO: 5468393 - DNA, 25 bp, Homo sapien
tttcaagtaagggtctgcaaatcct

SEQ ID NO: 5468394 - DNA, 25 bp, Homo sapien
tctgagggattgaaacagttgccat

SEQ ID NO: 5468395 - DNA, 25 bp, Homo sapien
gcagccaaggtcctatcatcgctaa

SEQ ID NO: 5468396 - DNA, 25 bp, Homo sapien
cgtgccataactcatcatgcttttt

SEQ ID NO: 5468397 - DNA, 25 bp, Homo sapien
ttttcgttggagctgtttgggctct

SEQ ID NO: 5468398 - DNA, 25 bp, Homo sapien
ctaggggaagttttcgttggagctg

SEQ ID NO: 5468399 - DNA, 25 bp, Homo sapien
tgtttgggctcttcctcttttacca

SEQ ID NO: 5468400 - DNA, 25 bp, Homo sapien
aatgacaagacagtatataaaccaa

SEQ ID NO: 5468401 - DNA, 25 bp, Homo sapien
aaatgacaagacagtatataaacca

SEQ ID NO: 5468402 - DNA, 25 bp, Homo sapien
tttgaaactgatacaaagccaaaat

SEQ ID NO: 5468403 - DNA, 25 bp, Homo sapien
gtagattttgaaactgatacaaagc

SEQ ID NO: 5468404 - DNA, 25 bp, Homo sapien
tgcccaacttcagattacctaatat

SEQ ID NO: 5468405 - DNA, 25 bp, Homo sapien
caggaagctgcatccaaatccctct

SEQ ID NO: 5468406 - DNA, 25 bp, Homo sapien
gctctcttcaagcatatgtagcaga

SEQ ID NO: 5468407 - DNA, 25 bp, Homo sapien
tcttcaagcatatgtagcagacact

SEQ ID NO: 5468408 - DNA, 25 bp, Homo sapien
acaagaacagtttcaaagtttatga

SEQ ID NO: 5468409 - DNA, 25 bp, Homo sapien
caagaacagtttcaaagtttatgaa

SEQ ID NO: 5468410 - DNA, 25 bp, Homo sapien
acacaagaacagtttcaaagtttat

SEQ ID NO: 5468411 - DNA, 25 bp, Homo sapien
cacaagaacagtttcaaagtttatg

SEQ ID NO: 5468412 - DNA, 25 bp, Homo sapien
catattgtatgagtctttgtccaaa

SEQ ID NO: 5468413 - DNA, 25 bp, Homo sapien
atattgtatgagtctttgtccaaat

SEQ ID NO: 5468414 - DNA, 25 bp, Homo sapien
tattgtatgagtctttgtccaaata

SEQ ID NO: 5468415 - DNA, 25 bp, Homo sapien
attgtatgagtctttgtccaaatac

SEQ ID NO: 5468416 - DNA, 25 bp, Homo sapien
tgttatacggcagcaaatgttctcc

SEQ ID NO: 5468417 - DNA, 25 bp, Homo sapien
taaactgccgtactgcctgatacac

SEQ ID NO: 5468418 - DNA, 25 bp, Homo sapien
ctgatacacagtcatgttatacggc

SEQ ID NO: 5468419 - DNA, 25 bp, Homo sapien
tcttcagcctgtatactaaactgcc

SEQ ID NO: 5468420 - DNA, 25 bp, Homo sapien
tctgatccatcgtcatcgctgtctt

SEQ ID NO: 5468421 - DNA, 25 bp, Homo sapien
ctcatctgatccatcgtcatcgctg

SEQ ID NO: 5468422 - DNA, 25 bp, Homo sapien
gatccatcgtcatcgctgtcttcat

SEQ ID NO: 5468423 - DNA, 25 bp, Homo sapien
catcgtcatcgctgtcttcatcatc

SEQ ID NO: 5468424 - DNA, 25 bp, Homo sapien
tttgcacagtctggatgcctttgta

SEQ ID NO: 5468425 - DNA, 25 bp, Homo sapien
taactacaaggtatctctcgatggc

SEQ ID NO: 5468426 - DNA, 25 bp, Homo sapien
aaagccagagggtcaatcttgacag

SEQ ID NO: 5468427 - DNA, 25 bp, Homo sapien
tctcgatggcttgtaccaaagccag

SEQ ID NO: 5468428 - DNA, 25 bp, Homo sapien
gcattttaattgatgtgtgttgaaa

SEQ ID NO: 5468429 - DNA, 25 bp, Homo sapien
taattgatgtgtgttgaaaaatttt

SEQ ID NO: 5468430 - DNA, 25 bp, Homo sapien
ctggcattttaattgatgtgtgttg

SEQ ID NO: 5468431 - DNA, 25 bp, Homo sapien
tgaaaaattttaaagcctgtgatcc

SEQ ID NO: 5468432 - DNA, 25 bp, Homo sapien
gaaaagaaaccctagtccatgatgt

SEQ ID NO: 5468433 - DNA, 25 bp, Homo sapien
tttggacacaaaaagcttcatgatt

SEQ ID NO: 5468434 - DNA, 25 bp, Homo sapien
aaatagggatgtggagaatattcca

SEQ ID NO: 5468435 - DNA, 25 bp, Homo sapien
tgattttctcaagcacaggtcaaaa

SEQ ID NO: 5468436 - DNA, 25 bp, Homo sapien
caaagttatagccactaatattaca

SEQ ID NO: 5468437 - DNA, 25 bp, Homo sapien
agttttgtatgctgaagtgtatcaa

SEQ ID NO: 5468438 - DNA, 25 bp, Homo sapien
tacatataaatcatatcgctcaaaa

SEQ ID NO: 5468439 - DNA, 25 bp, Homo sapien
tgattcattctttagagtgcttaat

SEQ ID NO: 5468440 - DNA, 25 bp, Homo sapien
catgtactttgactggaaattgttc

SEQ ID NO: 5468441 - DNA, 25 bp, Homo sapien
tgccaacaaaggtgcattacccact

SEQ ID NO: 5468442 - DNA, 25 bp, Homo sapien
atttccactagggaaatcatgtact

SEQ ID NO: 5468443 - DNA, 25 bp, Homo sapien
ccaacaaaggtgcattacccactgg

SEQ ID NO: 5468444 - DNA, 25 bp, Homo sapien
atgaagaaatcgctttaatctgatc

SEQ ID NO: 5468445 - DNA, 25 bp, Homo sapien
gaagaaatcgctttaatctgatctc

SEQ ID NO: 5468446 - DNA, 25 bp, Homo sapien
aagaaatcgctttaatctgatctct

SEQ ID NO: 5468447 - DNA, 25 bp, Homo sapien
tacatgaagaaatcgctttaatctg

SEQ ID NO: 5468448 - DNA, 25 bp, Homo sapien
gcaacagctgcttcacaaatccact

SEQ ID NO: 5468449 - DNA, 25 bp, Homo sapien
gactctgagactatgctacggattt

SEQ ID NO: 5468450 - DNA, 25 bp, Homo sapien
tacggatttctacaaggcactcagc

SEQ ID NO: 5468451 - DNA, 25 bp, Homo sapien
aaacatctgactctgagactatgct

SEQ ID NO: 5468452 - DNA, 25 bp, Homo sapien
ggaggttgagttgttcggttgcagc

SEQ ID NO: 5468453 - DNA, 25 bp, Homo sapien
tgagttgttcggttgcagcacaaag

SEQ ID NO: 5468454 - DNA, 25 bp, Homo sapien
gttgttcggttgcagcacaaagtct

SEQ ID NO: 5468455 - DNA, 25 bp, Homo sapien
ggttgagttgttcggttgcagcaca

SEQ ID NO: 5468456 - DNA, 25 bp, Homo sapien
tgttggactgtgtacttaaccttcc

SEQ ID NO: 5468457 - DNA, 25 bp, Homo sapien
gagatggtatcctttgaggcagccc

SEQ ID NO: 5468458 - DNA, 25 bp, Homo sapien
gcagtccgtgctggctcaatgttgt

SEQ ID NO: 5468459 - DNA, 25 bp, Homo sapien
ccatgtttttggattcaagcttgcc

SEQ ID NO: 5468460 - DNA, 25 bp, Homo sapien
ctccccatagtttcatcaaaggggt

SEQ ID NO: 5468461 - DNA, 25 bp, Homo sapien
gtctactttgtcatcatctcttgga

SEQ ID NO: 5468462 - DNA, 25 bp, Homo sapien
tgtctactttgtcatcatctcttgg

SEQ ID NO: 5468463 - DNA, 25 bp, Homo sapien
ttgtctactttgtcatcatctcttg

SEQ ID NO: 5468464 - DNA, 25 bp, Homo sapien
tctactttgtcatcatctcttggag

SEQ ID NO: 5468465 - DNA, 25 bp, Homo sapien
tggcagtcgttttctctttagaaca

SEQ ID NO: 5468466 - DNA, 25 bp, Homo sapien
cttcttggccctcgttttggcagtc

SEQ ID NO: 5468467 - DNA, 25 bp, Homo sapien
cctcgttttggcagtcgttttctct

SEQ ID NO: 5468468 - DNA, 25 bp, Homo sapien
tcttggccctcgttttggcagtcgt

SEQ ID NO: 5468469 - DNA, 25 bp, Homo sapien
caagctgggtgatcccaagtcagct

SEQ ID NO: 5468470 - DNA, 25 bp, Homo sapien
gatctaaagaatcatccctgctgtg

SEQ ID NO: 5468471 - DNA, 25 bp, Homo sapien
gatccattcgtacatgcctttggtg

SEQ ID NO: 5468472 - DNA, 25 bp, Homo sapien
actgaagttgtggatcccatggatc

SEQ ID NO: 5468473 - DNA, 25 bp, Homo sapien
atttctgccatctgaagtgctccca

SEQ ID NO: 5468474 - DNA, 25 bp, Homo sapien
aggtcttggcttgacagcatggaag

SEQ ID NO: 5468475 - DNA, 25 bp, Homo sapien
aatatcaggtaacttctgcattaaa

SEQ ID NO: 5468476 - DNA, 25 bp, Homo sapien
tgctcccactactatcttcaggtct

SEQ ID NO: 5468477 - DNA, 25 bp, Homo sapien
tccttcagaagttcagcatccgcaa

SEQ ID NO: 5468478 - DNA, 25 bp, Homo sapien
taaggcacttatgtctgaccgcagg

SEQ ID NO: 5468479 - DNA, 25 bp, Homo sapien
cataagctgtgctcgagcatcatcc

SEQ ID NO: 5468480 - DNA, 25 bp, Homo sapien
aaagacttagccagttccggatcct

SEQ ID NO: 5468481 - DNA, 25 bp, Homo sapien
ctgttcccgtgtcctcattgatttg

SEQ ID NO: 5468482 - DNA, 25 bp, Homo sapien
tatctcatcctcaccgacctgatgg

SEQ ID NO: 5468483 - DNA, 25 bp, Homo sapien
cagagtggacaagcttatctcatcc

SEQ ID NO: 5468484 - DNA, 25 bp, Homo sapien
taaaatcaatagtataaactcgtcc

SEQ ID NO: 5468485 - DNA, 25 bp, Homo sapien
tcatcctcaccgacctgatgggctg

SEQ ID NO: 5468486 - DNA, 25 bp, Homo sapien
taattagacataggttacatgcctc

SEQ ID NO: 5468487 - DNA, 25 bp, Homo sapien
gatggtgaagttaacagaagatgga

SEQ ID NO: 5468488 - DNA, 25 bp, Homo sapien
tacatgcctcaagccttatcaggga

SEQ ID NO: 5468489 - DNA, 25 bp, Homo sapien
agggacccttagacataaatgcagg

SEQ ID NO: 5468490 - DNA, 25 bp, Homo sapien
gccatatcgcaccatctgtgttctg

SEQ ID NO: 5468491 - DNA, 25 bp, Homo sapien
cttttggtaaacatggcataagttc

SEQ ID NO: 5468492 - DNA, 25 bp, Homo sapien
tcctgttatatggatgccagaggcc

SEQ ID NO: 5468493 - DNA, 25 bp, Homo sapien
tcaatgatccggctgtcaatcctgt

SEQ ID NO: 5468494 - DNA, 25 bp, Homo sapien
tgtcagttcatacaactcttgaggg

SEQ ID NO: 5468495 - DNA, 25 bp, Homo sapien
ttggaggcaccacacaggagaaagt

SEQ ID NO: 5468496 - DNA, 25 bp, Homo sapien
tgttcctgacaacttccattggagg

SEQ ID NO: 5468497 - DNA, 25 bp, Homo sapien
gcttcgtggaacaagatcaatctgt

SEQ ID NO: 5468498 - DNA, 25 bp, Homo sapien
ttgaacagctaaagttggacagttg

SEQ ID NO: 5468499 - DNA, 25 bp, Homo sapien
tggagtcactaccaacagctgttga

SEQ ID NO: 5468500 - DNA, 25 bp, Homo sapien
gaacatttgtaagcagatctttgga

SEQ ID NO: 5468501 - DNA, 25 bp, Homo sapien
aacatgcgaaccaccattataaaca

SEQ ID NO: 5468502 - DNA, 25 bp, Homo sapien
tgtccactaggcgtgcaaaacaaag

SEQ ID NO: 5468503 - DNA, 25 bp, Homo sapien
tggaagttgtccactaggcgtgcaa

SEQ ID NO: 5468504 - DNA, 25 bp, Homo sapien
agttgtccactaggcgtgcaaaaca

SEQ ID NO: 5468505 - DNA, 25 bp, Homo sapien
cactaggcgtgcaaaacaaaggcaa

SEQ ID NO: 5468506 - DNA, 25 bp, Homo sapien
tatgctgaagaattctaggtacagc

SEQ ID NO: 5468507 - DNA, 25 bp, Homo sapien
tcatctggcgtgatactctggcagc

SEQ ID NO: 5468508 - DNA, 25 bp, Homo sapien
tagcctttgggttagcaatgggagt

SEQ ID NO: 5468509 - DNA, 25 bp, Homo sapien
tctggcagcaattagctgcaattgc

SEQ ID NO: 5468510 - DNA, 25 bp, Homo sapien
gaatggctttactatgtctccgtga

SEQ ID NO: 5468511 - DNA, 25 bp, Homo sapien
gctttactatgtctccgtgacaaca

SEQ ID NO: 5468512 - DNA, 25 bp, Homo sapien
cgcctgtagaatggctttactatgt

SEQ ID NO: 5468513 - DNA, 25 bp, Homo sapien
tatgtctccgtgacaacatctccaa

SEQ ID NO: 5468514 - DNA, 25 bp, Homo sapien
gaagatcgaggaagtgcttccatca

SEQ ID NO: 5468515 - DNA, 25 bp, Homo sapien
aaaaagacaggaatagcatctacta

SEQ ID NO: 5468516 - DNA, 25 bp, Homo sapien
gaggaagtgcttccatcatgtatgt

SEQ ID NO: 5468517 - DNA, 25 bp, Homo sapien
catgtatgttaaggctcgacaagca

SEQ ID NO: 5468518 - DNA, 25 bp, Homo sapien
atatcaaaattgtgctccatctgaa

SEQ ID NO: 5468519 - DNA, 25 bp, Homo sapien
aattgtgctccatctgaagtaacgt

SEQ ID NO: 5468520 - DNA, 25 bp, Homo sapien
tgtgctccatctgaagtaacgtaat

SEQ ID NO: 5468521 - DNA, 25 bp, Homo sapien
aatatcaaaattgtgctccatctga

SEQ ID NO: 5468522 - DNA, 25 bp, Homo sapien
caagaagtgggtgactattcatcaa

SEQ ID NO: 5468523 - DNA, 25 bp, Homo sapien
tgctccgtggatcaccaggctaaaa

SEQ ID NO: 5468524 - DNA, 25 bp, Homo sapien
caaggttactgatgaggtgaacaac

SEQ ID NO: 5468525 - DNA, 25 bp, Homo sapien
gcttccctggcctattgctccgtgg

SEQ ID NO: 5468526 - DNA, 25 bp, Homo sapien
catcactggcttgcaatccttgtag

SEQ ID NO: 5468527 - DNA, 25 bp, Homo sapien
tcaataactgcctgaagctgttgac

SEQ ID NO: 5468528 - DNA, 25 bp, Homo sapien
gaacaacactcttgacaggaaaccc

SEQ ID NO: 5468529 - DNA, 25 bp, Homo sapien
tgtagtagctgctgggccttagaac

SEQ ID NO: 5468530 - DNA, 25 bp, Homo sapien
ttttgatccaattcaaggaaacagg

SEQ ID NO: 5468531 - DNA, 25 bp, Homo sapien
ggttacaagtaacaatagcagttgg

SEQ ID NO: 5468532 - DNA, 25 bp, Homo sapien
gaatcaatctcgctacaaaatctgg

SEQ ID NO: 5468533 - DNA, 25 bp, Homo sapien
tagcagttggctaattattgaggga

SEQ ID NO: 5468534 - DNA, 25 bp, Homo sapien
tgagggggaagaccccttgcctcta

SEQ ID NO: 5468535 - DNA, 25 bp, Homo sapien
gaaaagctgtgacatccgaggacca

SEQ ID NO: 5468536 - DNA, 25 bp, Homo sapien
tccacttccaattgttctatggaaa

SEQ ID NO: 5468537 - DNA, 25 bp, Homo sapien
accaagaggaccaaataggtgaggg

SEQ ID NO: 5468538 - DNA, 25 bp, Homo sapien
tgttcctgagagtccgagtcctaga

SEQ ID NO: 5468539 - DNA, 25 bp, Homo sapien
gaaaagtccgaccttggtgatggcc

SEQ ID NO: 5468540 - DNA, 25 bp, Homo sapien
aatatattaaatcagtgccagcagg

SEQ ID NO: 5468541 - DNA, 25 bp, Homo sapien
taaacacgaagaggcggacagctca

SEQ ID NO: 5468542 - DNA, 25 bp, Homo sapien
cgtcccatctcggaatcatctgatt

SEQ ID NO: 5468543 - DNA, 25 bp, Homo sapien
ttgcaaacgtcccatctcggaatca

SEQ ID NO: 5468544 - DNA, 25 bp, Homo sapien
aaacgtcccatctcggaatcatctg

SEQ ID NO: 5468545 - DNA, 25 bp, Homo sapien
tcccatctcggaatcatctgattca

SEQ ID NO: 5468546 - DNA, 25 bp, Homo sapien
tgtcttgctactgtacactcagctg

SEQ ID NO: 5468547 - DNA, 25 bp, Homo sapien
cacattatgtctggcttaccttaga

SEQ ID NO: 5468548 - DNA, 25 bp, Homo sapien
caaagttttgcggactacaattgaa

SEQ ID NO: 5468549 - DNA, 25 bp, Homo sapien
caaatttcttgtgccgttgaaactg

SEQ ID NO: 5468550 - DNA, 25 bp, Homo sapien
caacactttgcggaccatggcagaa

SEQ ID NO: 5468551 - DNA, 25 bp, Homo sapien
gaaatgttgtatgtagacgtctgcc

SEQ ID NO: 5468552 - DNA, 25 bp, Homo sapien
taagccctatatactgcacagattg

SEQ ID NO: 5468553 - DNA, 25 bp, Homo sapien
ccagctactgagttgggcatgcctg

SEQ ID NO: 5468554 - DNA, 25 bp, Homo sapien
gaaaacgcttaccatacaacacagg

SEQ ID NO: 5468555 - DNA, 25 bp, Homo sapien
catttacaagtctgtggccgctttc

SEQ ID NO: 5468556 - DNA, 25 bp, Homo sapien
ttgtataaaggctgggcaaaaccca

SEQ ID NO: 5468557 - DNA, 25 bp, Homo sapien
taatgctacttacaggtaggcagca

SEQ ID NO: 5468558 - DNA, 25 bp, Homo sapien
gccatacctctgatagcaagtatta

SEQ ID NO: 5468559 - DNA, 25 bp, Homo sapien
gtgtgagctactgccagaagtctga

SEQ ID NO: 5468560 - DNA, 25 bp, Homo sapien
tgacagaaattggaaactaattgtg

SEQ ID NO: 5468561 - DNA, 25 bp, Homo sapien
tctgattatcagtagagggtagggt

SEQ ID NO: 5468562 - DNA, 25 bp, Homo sapien
tagaagacttaaaccagccaagcct

SEQ ID NO: 5468563 - DNA, 25 bp, Homo sapien
gcataggccagatttgttcccagag

SEQ ID NO: 5468564 - DNA, 25 bp, Homo sapien
cagtcagctacagttctttcgtcaa

SEQ ID NO: 5468565 - DNA, 25 bp, Homo sapien
gatagctgttctgtaaggtcatgca

SEQ ID NO: 5468566 - DNA, 25 bp, Homo sapien
cctggttgctttcagggtctgccat

SEQ ID NO: 5468567 - DNA, 25 bp, Homo sapien
cattttctcctgtcgacgagcttca

SEQ ID NO: 5468568 - DNA, 25 bp, Homo sapien
tcctgtcgacgagcttcagctgctc

SEQ ID NO: 5468569 - DNA, 25 bp, Homo sapien
gagcttcatctgtccgagcagctga

SEQ ID NO: 5468570 - DNA, 25 bp, Homo sapien
ctctggcttacctgagagcactgga

SEQ ID NO: 5468571 - DNA, 25 bp, Homo sapien
caactgacctacaaaggaaggctct

SEQ ID NO: 5468572 - DNA, 25 bp, Homo sapien
aggcagaaacctgttactaaagaca

SEQ ID NO: 5468573 - DNA, 25 bp, Homo sapien
gatagcatttaaacaaaagctcccc

SEQ ID NO: 5468574 - DNA, 25 bp, Homo sapien
ttggcgtgtgctccgcctcaaactg

SEQ ID NO: 5468575 - DNA, 25 bp, Homo sapien
agcccgtggtcttttggcgtgtgct

SEQ ID NO: 5468576 - DNA, 25 bp, Homo sapien
caggtggagactcactgcgtttctt

SEQ ID NO: 5468577 - DNA, 25 bp, Homo sapien
gagactcactgcgtttcttcgtaga

SEQ ID NO: 5468578 - DNA, 25 bp, Homo sapien
tttatttcctagtcaatgcacagca

SEQ ID NO: 5468579 - DNA, 25 bp, Homo sapien
tgacttaacaaggaaagagtggtgt

SEQ ID NO: 5468580 - DNA, 25 bp, Homo sapien
gaaactagaaaggagctagatgccc

SEQ ID NO: 5468581 - DNA, 25 bp, Homo sapien
cagctggtgggaattcatgtatttc

SEQ ID NO: 5468582 - DNA, 25 bp, Homo sapien
taatttggcctgtaatccagaaggt

SEQ ID NO: 5468583 - DNA, 25 bp, Homo sapien
gctaatttggcctgtaatccagaag

SEQ ID NO: 5468584 - DNA, 25 bp, Homo sapien
ttggcctgtaatccagaaggtccag

SEQ ID NO: 5468585 - DNA, 25 bp, Homo sapien
tgtaatccagaaggtccaggttttg

SEQ ID NO: 5468586 - DNA, 25 bp, Homo sapien
cgagcagcccaatcaaattttgaag

SEQ ID NO: 5468587 - DNA, 25 bp, Homo sapien
taactttagggctgaaacgagcagc

SEQ ID NO: 5468588 - DNA, 25 bp, Homo sapien
tcaaattttgaagagccaccagttt

SEQ ID NO: 5468589 - DNA, 25 bp, Homo sapien
ttaggaaggctaactttagggctga

SEQ ID NO: 5468590 - DNA, 25 bp, Homo sapien
tggtgctacacccagctttggctga

SEQ ID NO: 5468591 - DNA, 25 bp, Homo sapien
aagccagcttggtaggtttcgcaga

SEQ ID NO: 5468592 - DNA, 25 bp, Homo sapien
tagtctggactagcactgcgcttca

SEQ ID NO: 5468593 - DNA, 25 bp, Homo sapien
tgcaccagttgattcagacccggag

SEQ ID NO: 5468594 - DNA, 25 bp, Homo sapien
caggagggctatatcccttatgttt

SEQ ID NO: 5468595 - DNA, 25 bp, Homo sapien
cactttgggtgccttagaattagat

SEQ ID NO: 5468596 - DNA, 25 bp, Homo sapien
cagttcagaagtagtattagactgc

SEQ ID NO: 5468597 - DNA, 25 bp, Homo sapien
agggctatatcccttatgttttgcc

SEQ ID NO: 5468598 - DNA, 25 bp, Homo sapien
gaagagtttattatcaccagtagtc

SEQ ID NO: 5468599 - DNA, 25 bp, Homo sapien
cccgcaataccgaagagtttattat

SEQ ID NO: 5468600 - DNA, 25 bp, Homo sapien
cgccccgcaataccgaagagtttat

SEQ ID NO: 5468601 - DNA, 25 bp, Homo sapien
agagtttattatcaccagtagtcat

SEQ ID NO: 5468602 - DNA, 25 bp, Homo sapien
caaatcctttacagtagtccacaga

SEQ ID NO: 5468603 - DNA, 25 bp, Homo sapien
tgggaaaaactgcttatgaaccaac

SEQ ID NO: 5468604 - DNA, 25 bp, Homo sapien
gttatgaagcctcaaatgcctctga

SEQ ID NO: 5468605 - DNA, 25 bp, Homo sapien
tgtatgggccaattcacattaaaga

SEQ ID NO: 5468606 - DNA, 25 bp, Homo sapien
ttgagtcgtcttgtggttgggcccc

SEQ ID NO: 5468607 - DNA, 25 bp, Homo sapien
gcagtgacccccctggattgttatt

SEQ ID NO: 5468608 - DNA, 25 bp, Homo sapien
ggattgttattaggccggttggaca

SEQ ID NO: 5468609 - DNA, 25 bp, Homo sapien
tcctctgtgaacgtcgcagtgaccc

SEQ ID NO: 5468610 - DNA, 25 bp, Homo sapien
cacctctctcttgaagggacatacc

SEQ ID NO: 5468611 - DNA, 25 bp, Homo sapien
cctctctcttgaagggacataccct

SEQ ID NO: 5468612 - DNA, 25 bp, Homo sapien
tggcacctctctcttgaagggacat

SEQ ID NO: 5468613 - DNA, 25 bp, Homo sapien
tctcttgaagggacataccctttct

SEQ ID NO: 5468614 - DNA, 25 bp, Homo sapien
cgtgagaaccacttgctgcttagaa

SEQ ID NO: 5468615 - DNA, 25 bp, Homo sapien
gacagccattcagtaaccgtgagaa

SEQ ID NO: 5468616 - DNA, 25 bp, Homo sapien
tatacagggagacaggctaggcatc

SEQ ID NO: 5468617 - DNA, 25 bp, Homo sapien
ggaaccactgtgcaaacgaaccatg

SEQ ID NO: 5468618 - DNA, 25 bp, Homo sapien
catgctcaaggtcaaacaaggaaaa

SEQ ID NO: 5468619 - DNA, 25 bp, Homo sapien
cagctaaggcgagaggaccacttga

SEQ ID NO: 5468620 - DNA, 25 bp, Homo sapien
ggcaccatttaggagaactattaac

SEQ ID NO: 5468621 - DNA, 25 bp, Homo sapien
tttgatcactcaactgggaaccagg

SEQ ID NO: 5468622 - DNA, 25 bp, Homo sapien
caccagactcgatgcttaggctaaa

SEQ ID NO: 5468623 - DNA, 25 bp, Homo sapien
cagcaggagagcagttagacgtcca

SEQ ID NO: 5468624 - DNA, 25 bp, Homo sapien
ggattcactgcgctattaaccgtac

SEQ ID NO: 5468625 - DNA, 25 bp, Homo sapien
tgtcttaagggtttggaagctgccc

SEQ ID NO: 5468626 - DNA, 25 bp, Homo sapien
tgcacttccggccccccactttctc

SEQ ID NO: 5468627 - DNA, 25 bp, Homo sapien
cgagctccccaacacccgcaagcct

SEQ ID NO: 5468628 - DNA, 25 bp, Homo sapien
agctccccaacacccgcaagcctta

SEQ ID NO: 5468629 - DNA, 25 bp, Homo sapien
cgccgagctccccaacacccgcaag

SEQ ID NO: 5468630 - DNA, 25 bp, Homo sapien
ctcctcattgcgggaagccggagga

SEQ ID NO: 5468631 - DNA, 25 bp, Homo sapien
ccctcctcattgcgggaagccggag

SEQ ID NO: 5468632 - DNA, 25 bp, Homo sapien
gccctcctcattgcgggaagccgga

SEQ ID NO: 5468633 - DNA, 25 bp, Homo sapien
gggccctcctcattgcgggaagccg

SEQ ID NO: 5468634 - DNA, 25 bp, Homo sapien
gactcggtggcgcggcagtaacttc

SEQ ID NO: 5468635 - DNA, 25 bp, Homo sapien
ggtggcgcggcagtaacttccacta

SEQ ID NO: 5468636 - DNA, 25 bp, Homo sapien
gcgcggcagtaacttccactagctc

SEQ ID NO: 5468637 - DNA, 25 bp, Homo sapien
caaagtctccggtccggactcggtg

SEQ ID NO: 5468638 - DNA, 25 bp, Homo sapien
tgctctccccgagcccggctagtcc

SEQ ID NO: 5468639 - DNA, 25 bp, Homo sapien
cctcctcggtccgacggcccgcgtg

SEQ ID NO: 5468640 - DNA, 25 bp, Homo sapien
cccgcgtgtccctgctctccccgag

SEQ ID NO: 5468641 - DNA, 25 bp, Homo sapien
tcctcggtccgacggcccgcgtgtc

SEQ ID NO: 5468642 - DNA, 25 bp, Homo sapien
atctctgtatcgtttcaatttttag

SEQ ID NO: 5468643 - DNA, 25 bp, Homo sapien
agtatatgtgctggtgaagcgagca

SEQ ID NO: 5468644 - DNA, 25 bp, Homo sapien
agggtgtctcttcttgctcaggggc

SEQ ID NO: 5468645 - DNA, 25 bp, Homo sapien
catgctaatctctgtatcgtttcaa

SEQ ID NO: 5468646 - DNA, 25 bp, Homo sapien
ggacatggactcatcatttttatgg

SEQ ID NO: 5468647 - DNA, 25 bp, Homo sapien
acatggactcatcatttttatggct

SEQ ID NO: 5468648 - DNA, 25 bp, Homo sapien
gacatggactcatcatttttatggc

SEQ ID NO: 5468649 - DNA, 25 bp, Homo sapien
cgttcacccatggtttggctctctg

SEQ ID NO: 5468650 - DNA, 25 bp, Homo sapien
aatgggcgttcacccatggtttggc

SEQ ID NO: 5468651 - DNA, 25 bp, Homo sapien
tgtgaatgggcgttcacccatggtt

SEQ ID NO: 5468652 - DNA, 25 bp, Homo sapien
attgtgaatgggcgttcacccatgg

SEQ ID NO: 5468653 - DNA, 25 bp, Homo sapien
gcgtgaaacgctcttgccctgtaac

SEQ ID NO: 5468654 - DNA, 25 bp, Homo sapien
aattccaggattagtgaaacgctca

SEQ ID NO: 5468655 - DNA, 25 bp, Homo sapien
gactgtacttgactacctgccctct

SEQ ID NO: 5468656 - DNA, 25 bp, Homo sapien
ctccctgactgtacttgactacctg

SEQ ID NO: 5468657 - DNA, 25 bp, Homo sapien
gatgtccacccgacgggcgatttat

SEQ ID NO: 5468658 - DNA, 25 bp, Homo sapien
cacccgacgggcgatttatgtcctc

SEQ ID NO: 5468659 - DNA, 25 bp, Homo sapien
ggatgtccacccgacgggcgattta

SEQ ID NO: 5468660 - DNA, 25 bp, Homo sapien
cgacgggcgatttatgtcctcttcc

SEQ ID NO: 5468661 - DNA, 25 bp, Homo sapien
gctgctggtgaatccaaggccatcc

SEQ ID NO: 5468662 - DNA, 25 bp, Homo sapien
gcagctgttcctttactgaccagca

SEQ ID NO: 5468663 - DNA, 25 bp, Homo sapien
tactgaccagcagagtaggtcctaa

SEQ ID NO: 5468664 - DNA, 25 bp, Homo sapien
agtaggtcctaaagggctgctggtg

SEQ ID NO: 5468665 - DNA, 25 bp, Homo sapien
ggtctgtgttttcacccatgttgtt

SEQ ID NO: 5468666 - DNA, 25 bp, Homo sapien
tgttttcacccatgttgttctcccc

SEQ ID NO: 5468667 - DNA, 25 bp, Homo sapien
gtgttttcacccatgttgttctccc

SEQ ID NO: 5468668 - DNA, 25 bp, Homo sapien
ctgtgttttcacccatgttgttctc

SEQ ID NO: 5468669 - DNA, 25 bp, Homo sapien
caactgtacaaactgaacgtgagca

SEQ ID NO: 5468670 - DNA, 25 bp, Homo sapien
tgggaacttccactcattcggtaga

SEQ ID NO: 5468671 - DNA, 25 bp, Homo sapien
gatgatacacaaccagcagtgcaag

SEQ ID NO: 5468672 - DNA, 25 bp, Homo sapien
tgtcaacatgaatactgcaagcagg

SEQ ID NO: 5468673 - DNA, 25 bp, Homo sapien
ggcaattcccgagtcattggaggta

SEQ ID NO: 5468674 - DNA, 25 bp, Homo sapien
gagtcacaatccctagctgcagaat

SEQ ID NO: 5468675 - DNA, 25 bp, Homo sapien
ttttaaaactgtgccacgctcaggc

SEQ ID NO: 5468676 - DNA, 25 bp, Homo sapien
tacctgtggaattagagcttgcctt

SEQ ID NO: 5468677 - DNA, 25 bp, Homo sapien
tcatctctagaatgtatgtagtcct

SEQ ID NO: 5468678 - DNA, 25 bp, Homo sapien
gaacaacactgtcatctctagaatg

SEQ ID NO: 5468679 - DNA, 25 bp, Homo sapien
tagaatgtatgtagtccttaagatc

SEQ ID NO: 5468680 - DNA, 25 bp, Homo sapien
tgtatgtagtccttaagatcttcca

SEQ ID NO: 5468681 - DNA, 25 bp, Homo sapien
tctccccaaacagagaggcagtgct

SEQ ID NO: 5468682 - DNA, 25 bp, Homo sapien
acatctccccaaacagagaggcagt

SEQ ID NO: 5468683 - DNA, 25 bp, Homo sapien
tccccaaacagagaggcagtgctgc

SEQ ID NO: 5468684 - DNA, 25 bp, Homo sapien
tacatctccccaaacagagaggcag

SEQ ID NO: 5468685 - DNA, 25 bp, Homo sapien
tattacaatgaaacctacacggaac

SEQ ID NO: 5468686 - DNA, 25 bp, Homo sapien
cagtgccagttaccgtacaaaatgc

SEQ ID NO: 5468687 - DNA, 25 bp, Homo sapien
tttcccacgtcctgtcataggtgcc

SEQ ID NO: 5468688 - DNA, 25 bp, Homo sapien
tcacagcaaccatgcgaggtaggca

SEQ ID NO: 5468689 - DNA, 25 bp, Homo sapien
ttttgcgtgatgtcatagatccacc

SEQ ID NO: 5468690 - DNA, 25 bp, Homo sapien
tgcacggctgaataagtaaaaagag

SEQ ID NO: 5468691 - DNA, 25 bp, Homo sapien
ctggattgttctataattcgaatgc

SEQ ID NO: 5468692 - DNA, 25 bp, Homo sapien
aaagagtattcctatcatgtaaagc

SEQ ID NO: 5468693 - DNA, 25 bp, Homo sapien
cagtgttccccgtgcctacggagga

SEQ ID NO: 5468694 - DNA, 25 bp, Homo sapien
ggaggactgcattcgttaagccact

SEQ ID NO: 5468695 - DNA, 25 bp, Homo sapien
gccagcagtgaaatgcgaatccaat

SEQ ID NO: 5468696 - DNA, 25 bp, Homo sapien
tagtgtgtatcaaaagaggctgggc

SEQ ID NO: 5468697 - DNA, 25 bp, Homo sapien
cacttgcagataatgcagagtgatc

SEQ ID NO: 5468698 - DNA, 25 bp, Homo sapien
cgttaaaaggtatgaattctggatc

SEQ ID NO: 5468699 - DNA, 25 bp, Homo sapien
ctgtggaccattgtgaattaggaca

SEQ ID NO: 5468700 - DNA, 25 bp, Homo sapien
gaattggaaaggcacattgacactg

SEQ ID NO: 5468701 - DNA, 25 bp, Homo sapien
caccctcagagcaccctaggatccc

SEQ ID NO: 5468702 - DNA, 25 bp, Homo sapien
tcagagcaccctaggatcccctttt

SEQ ID NO: 5468703 - DNA, 25 bp, Homo sapien
tctcttggctccttgtctgaacatg

SEQ ID NO: 5468704 - DNA, 25 bp, Homo sapien
atctctcccccgctcatcagcacaa

SEQ ID NO: 5468705 - DNA, 25 bp, Homo sapien
tagtgcaaattgtaggagtagtcct

SEQ ID NO: 5468706 - DNA, 25 bp, Homo sapien
gcccaagcttcaaacataactcatg

SEQ ID NO: 5468707 - DNA, 25 bp, Homo sapien
cactgaacaatttaacatagtgcaa

SEQ ID NO: 5468708 - DNA, 25 bp, Homo sapien
actgttcccggccaaattcattatt

SEQ ID NO: 5468709 - DNA, 25 bp, Homo sapien
tattggtcggtcaaatctgatggct

SEQ ID NO: 5468710 - DNA, 25 bp, Homo sapien
aaccctggattcttggcaaccctca

SEQ ID NO: 5468711 - DNA, 25 bp, Homo sapien
cccgggattcttggcaaccctggat

SEQ ID NO: 5468712 - DNA, 25 bp, Homo sapien
attaattaaataaaggctcccagct

SEQ ID NO: 5468713 - DNA, 25 bp, Homo sapien
ccttcacccactggggagagatatt

SEQ ID NO: 5468714 - DNA, 25 bp, Homo sapien
gagggctttgtcctgtacccatggg

SEQ ID NO: 5468715 - DNA, 25 bp, Homo sapien
cccactggggagagatattcctgcc

SEQ ID NO: 5468716 - DNA, 25 bp, Homo sapien
cctgccagaaggtattagaataaag

SEQ ID NO: 5468717 - DNA, 25 bp, Homo sapien
atctgggactttataacataacgca

SEQ ID NO: 5468718 - DNA, 25 bp, Homo sapien
tttatctgggactttataacataac

SEQ ID NO: 5468719 - DNA, 25 bp, Homo sapien
tatctgggactttataacataacgc

SEQ ID NO: 5468720 - DNA, 25 bp, Homo sapien
tctgggactttataacataacgcac

SEQ ID NO: 5468721 - DNA, 25 bp, Homo sapien
tgagctcttaaaacctcagagagtt

SEQ ID NO: 5468722 - DNA, 25 bp, Homo sapien
catatgtacatgcactctgagctct

SEQ ID NO: 5468723 - DNA, 25 bp, Homo sapien
tctgagctcttaaaacctcagagag

SEQ ID NO: 5468724 - DNA, 25 bp, Homo sapien
gctcttaaaacctcagagagtttac

SEQ ID NO: 5468725 - DNA, 25 bp, Homo sapien
taatgcaaggcaagtcggctatgac

SEQ ID NO: 5468726 - DNA, 25 bp, Homo sapien
cagtcttcagaatccggagggcaca

SEQ ID NO: 5468727 - DNA, 25 bp, Homo sapien
ggaaaaccctatcagcgcacagatg

SEQ ID NO: 5468728 - DNA, 25 bp, Homo sapien
gagaggctgtcccaaagtagcccga

SEQ ID NO: 5468729 - DNA, 25 bp, Homo sapien
accgaatccggtccccgtggtgctg

SEQ ID NO: 5468730 - DNA, 25 bp, Homo sapien
aatccggtccccgtggtgctgaggc

SEQ ID NO: 5468731 - DNA, 25 bp, Homo sapien
cgaatccggtccccgtggtgctgag

SEQ ID NO: 5468732 - DNA, 25 bp, Homo sapien
gtgctgaggccctgggcgagggcgc

SEQ ID NO: 5468733 - DNA, 25 bp, Homo sapien
tcttctggaaatacctgcccaccat

SEQ ID NO: 5468734 - DNA, 25 bp, Homo sapien
ctggaaatacctgcccaccatgacc

SEQ ID NO: 5468735 - DNA, 25 bp, Homo sapien
ccaccgctggcaggtaggccatccc

SEQ ID NO: 5468736 - DNA, 25 bp, Homo sapien
ttctggaaatacctgcccaccatga

SEQ ID NO: 5468737 - DNA, 25 bp, Homo sapien
agaaaagacacagtgcaacatcagt

SEQ ID NO: 5468738 - DNA, 25 bp, Homo sapien
gacacagtgcaacatcagtggccat

SEQ ID NO: 5468739 - DNA, 25 bp, Homo sapien
aagacacagtgcaacatcagtggcc

SEQ ID NO: 5468740 - DNA, 25 bp, Homo sapien
aaaagacacagtgcaacatcagtgg

SEQ ID NO: 5468741 - DNA, 25 bp, Homo sapien
ccctccaatgatcgcagtctggcgg

SEQ ID NO: 5468742 - DNA, 25 bp, Homo sapien
agccctccaatgatcgcagtctggc

SEQ ID NO: 5468743 - DNA, 25 bp, Homo sapien
ctccaatgatcgcagtctggcggca

SEQ ID NO: 5468744 - DNA, 25 bp, Homo sapien
ccaatgatcgcagtctggcggcacc

SEQ ID NO: 5468745 - DNA, 25 bp, Homo sapien
actatccgtattaattcccttccag

SEQ ID NO: 5468746 - DNA, 25 bp, Homo sapien
catgtgccacacaacttgagaaata

SEQ ID NO: 5468747 - DNA, 25 bp, Homo sapien
tgtccttgttgtctatcattaggac

SEQ ID NO: 5468748 - DNA, 25 bp, Homo sapien
attttctgacatacataatggtgcc

SEQ ID NO: 5468749 - DNA, 25 bp, Homo sapien
tatttcaaattgaaaacatcagaac

SEQ ID NO: 5468750 - DNA, 25 bp, Homo sapien
tcaaattgaaaacatcagaactcag

SEQ ID NO: 5468751 - DNA, 25 bp, Homo sapien
tttcaaattgaaaacatcagaactc

SEQ ID NO: 5468752 - DNA, 25 bp, Homo sapien
caaattgaaaacatcagaactcagg

SEQ ID NO: 5468753 - DNA, 25 bp, Homo sapien
agttaaatttagcagtcaggggttg

SEQ ID NO: 5468754 - DNA, 25 bp, Homo sapien
tgataatccactaccactggaccag

SEQ ID NO: 5468755 - DNA, 25 bp, Homo sapien
gccagttaaatttagcagtcagggg

SEQ ID NO: 5468756 - DNA, 25 bp, Homo sapien
gataatccactaccactggaccagc

SEQ ID NO: 5468757 - DNA, 25 bp, Homo sapien
tacgacaggtcacacatgaacatac

SEQ ID NO: 5468758 - DNA, 25 bp, Homo sapien
ttacgacaggtcacacatgaacata

SEQ ID NO: 5468759 - DNA, 25 bp, Homo sapien
aagcccatccgccatcaatgtttgg

SEQ ID NO: 5468760 - DNA, 25 bp, Homo sapien
caggccgcggctctggtggaattct

SEQ ID NO: 5468761 - DNA, 25 bp, Homo sapien
catctgggagcccatgatgaggatg

SEQ ID NO: 5468762 - DNA, 25 bp, Homo sapien
gccattccacgttgaggacacccag

SEQ ID NO: 5468763 - DNA, 25 bp, Homo sapien
catacatgtaaaatgacgatatgca

SEQ ID NO: 5468764 - DNA, 25 bp, Homo sapien
ttgaccaccatagggccttcaagct

SEQ ID NO: 5468765 - DNA, 25 bp, Homo sapien
tgtctttgaccaccatagggccttc

SEQ ID NO: 5468766 - DNA, 25 bp, Homo sapien
tctacatcctgacatacatgtaaaa

SEQ ID NO: 5468767 - DNA, 25 bp, Homo sapien
tattacattgcatgtggtgagctca

SEQ ID NO: 5468768 - DNA, 25 bp, Homo sapien
cgggaagcacgaagctaaaattgaa

SEQ ID NO: 5468769 - DNA, 25 bp, Homo sapien
tccccaaagctacgcagagcgtggt

SEQ ID NO: 5468770 - DNA, 25 bp, Homo sapien
tacacataaggaaagcgggaagcac

SEQ ID NO: 5468771 - DNA, 25 bp, Homo sapien
ttaattctgctctgcaggcgcttcc

SEQ ID NO: 5468772 - DNA, 25 bp, Homo sapien
cgcttccgcgctcttcacctggtgt

SEQ ID NO: 5468773 - DNA, 25 bp, Homo sapien
ttagagggcgcacttgcggccagca

SEQ ID NO: 5468774 - DNA, 25 bp, Homo sapien
catttggggcctttagagggcgcac

SEQ ID NO: 5468775 - DNA, 25 bp, Homo sapien
atgcccccggcgtcgctccattccc

SEQ ID NO: 5468776 - DNA, 25 bp, Homo sapien
cgatgcccccggcgtcgctccattc

SEQ ID NO: 5468777 - DNA, 25 bp, Homo sapien
ccccggcgtcgctccattccccagg

SEQ ID NO: 5468778 - DNA, 25 bp, Homo sapien
ctaggctccgatgcccccggcgtcg

SEQ ID NO: 5468779 - DNA, 25 bp, Homo sapien
tgtcgcctatcatcctggagacgcg

SEQ ID NO: 5468780 - DNA, 25 bp, Homo sapien
gcaatgtcgcctatcatcctggaga

SEQ ID NO: 5468781 - DNA, 25 bp, Homo sapien
gcctatcatcctggagacgcgggtg

SEQ ID NO: 5468782 - DNA, 25 bp, Homo sapien
ttgcaatgtcgcctatcatcctgga

SEQ ID NO: 5468783 - DNA, 25 bp, Homo sapien
gtgcgtttggaggtgcccaaaccta

SEQ ID NO: 5468784 - DNA, 25 bp, Homo sapien
tgcgtttggaggtgcccaaacctaa

SEQ ID NO: 5468785 - DNA, 25 bp, Homo sapien
tttggctgaggttccgctaaggcgc

SEQ ID NO: 5468786 - DNA, 25 bp, Homo sapien
tatcactggcggaaaggtcctgaaa

SEQ ID NO: 5468787 - DNA, 25 bp, Homo sapien
gcacactcttgtggccggttgaagt

SEQ ID NO: 5468788 - DNA, 25 bp, Homo sapien
tgggcttccttccaatcggagcaat

SEQ ID NO: 5468789 - DNA, 25 bp, Homo sapien
tcctctgcctcagcagggaaacctg

SEQ ID NO: 5468790 - DNA, 25 bp, Homo sapien
cctctgcctcagcagggaaacctgc

SEQ ID NO: 5468791 - DNA, 25 bp, Homo sapien
ggataagaggaccaaattattgtgt

SEQ ID NO: 5468792 - DNA, 25 bp, Homo sapien
cttgggataagaggaccaaattatt

SEQ ID NO: 5468793 - DNA, 25 bp, Homo sapien
gactggacagctcctaataaaacat

SEQ ID NO: 5468794 - DNA, 25 bp, Homo sapien
tttgttggtgactggacagctccta

SEQ ID NO: 5468795 - DNA, 25 bp, Homo sapien
cagcttgagggatttaaagcagacg

SEQ ID NO: 5468796 - DNA, 25 bp, Homo sapien
cagacgtgttggcaaacaggaaaca

SEQ ID NO: 5468797 - DNA, 25 bp, Homo sapien
ttacatttttgacaacaagcatata

SEQ ID NO: 5468798 - DNA, 25 bp, Homo sapien
gaaaagctggtatataacactagca

SEQ ID NO: 5468799 - DNA, 25 bp, Homo sapien
tttcaggaagtggtcaccccagtgg

SEQ ID NO: 5468800 - DNA, 25 bp, Homo sapien
tcctcttggacagaagacgctgagc

SEQ ID NO: 5468801 - DNA, 25 bp, Homo sapien
taccaacggtgccttgcagaagctt

SEQ ID NO: 5468802 - DNA, 25 bp, Homo sapien
aaactaccagtttcagcggcttgca

SEQ ID NO: 5468803 - DNA, 25 bp, Homo sapien
ctacacagtgaatcacagtgagaca

SEQ ID NO: 5468804 - DNA, 25 bp, Homo sapien
taatagaattcgctgtgataggtcg

SEQ ID NO: 5468805 - DNA, 25 bp, Homo sapien
aaatagtaatagaattcgctgtgat

SEQ ID NO: 5468806 - DNA, 25 bp, Homo sapien
gaattcgctgtgataggtcggctta

SEQ ID NO: 5468807 - DNA, 25 bp, Homo sapien
cgctgtgataggtcggcttataact

SEQ ID NO: 5468808 - DNA, 25 bp, Homo sapien
agtagggtctggctttgggttattg

SEQ ID NO: 5468809 - DNA, 25 bp, Homo sapien
tagggtctggctttgggttattgga

SEQ ID NO: 5468810 - DNA, 25 bp, Homo sapien
tgggttattggaaacgacctgtcca

SEQ ID NO: 5468811 - DNA, 25 bp, Homo sapien
tctggctttgggttattggaaacga

SEQ ID NO: 5468812 - DNA, 25 bp, Homo sapien
gctcgtgctactagctgtgtccaca

SEQ ID NO: 5468813 - DNA, 25 bp, Homo sapien
tgccccacaaggcactcaatcccca

SEQ ID NO: 5468814 - DNA, 25 bp, Homo sapien
ggacaatgggacaggcccaagtgcc

SEQ ID NO: 5468815 - DNA, 25 bp, Homo sapien
cgaccacggctcgtgctactagctg

SEQ ID NO: 5468816 - DNA, 25 bp, Homo sapien
aatttcacactggatcccttaatgg

SEQ ID NO: 5468817 - DNA, 25 bp, Homo sapien
acaggacggtctatgagccaagcca

SEQ ID NO: 5468818 - DNA, 25 bp, Homo sapien
tggatcccttcaggcaccaatactg

SEQ ID NO: 5468819 - DNA, 25 bp, Homo sapien
gcattgatctgtgtctgctctttga

SEQ ID NO: 5468820 - DNA, 25 bp, Homo sapien
aggaagtcctgtctcagggcgtcct

SEQ ID NO: 5468821 - DNA, 25 bp, Homo sapien
agtcctgtctcagggcgtcctctgg

SEQ ID NO: 5468822 - DNA, 25 bp, Homo sapien
gtcctgtctcagggcgtcctctggc

SEQ ID NO: 5468823 - DNA, 25 bp, Homo sapien
gaagtcctgtctcagggcgtcctct

SEQ ID NO: 5468824 - DNA, 25 bp, Homo sapien
catctgcatgaaataggagccactg

SEQ ID NO: 5468825 - DNA, 25 bp, Homo sapien
atctggagaggacctggcgcatgct

SEQ ID NO: 5468826 - DNA, 25 bp, Homo sapien
agccttcactacttctttctgctag

SEQ ID NO: 5468827 - DNA, 25 bp, Homo sapien
ctaaacgtgactgcctgctgcttcg

SEQ ID NO: 5468828 - DNA, 25 bp, Homo sapien
tggcccggggtctgaatgctgcaac

SEQ ID NO: 5468829 - DNA, 25 bp, Homo sapien
aaggctggaaacctcgctgttgccc

SEQ ID NO: 5468830 - DNA, 25 bp, Homo sapien
tcaatcccggccttgatagctgggc

SEQ ID NO: 5468831 - DNA, 25 bp, Homo sapien
gcactttcataggcccgtgagtcaa

SEQ ID NO: 5468832 - DNA, 25 bp, Homo sapien
cagaacagtgtgtcagatgcttcag

SEQ ID NO: 5468833 - DNA, 25 bp, Homo sapien
tctgtttcagaacagtgtgtcagat

SEQ ID NO: 5468834 - DNA, 25 bp, Homo sapien
atccaacagactctgtttcagaaca

SEQ ID NO: 5468835 - DNA, 25 bp, Homo sapien
tgtcagatgcttcagtatcagctga

SEQ ID NO: 5468836 - DNA, 25 bp, Homo sapien
tctgctcatacttgggccttgtgtc

SEQ ID NO: 5468837 - DNA, 25 bp, Homo sapien
tggacgtgtaaccacccctttctgc

SEQ ID NO: 5468838 - DNA, 25 bp, Homo sapien
gtccaggtctgggtgactgtcctca

SEQ ID NO: 5468839 - DNA, 25 bp, Homo sapien
tgagtttttgcttgaggccccgggc

SEQ ID NO: 5468840 - DNA, 25 bp, Homo sapien
aacgcattgccttaagtatgtgaca

SEQ ID NO: 5468841 - DNA, 25 bp, Homo sapien
gaataagggagctgagaggtatcaa

SEQ ID NO: 5468842 - DNA, 25 bp, Homo sapien
ttggaactaaaagccgttacgatgc

SEQ ID NO: 5468843 - DNA, 25 bp, Homo sapien
aatgcattgggaaaacttatgggta

SEQ ID NO: 5468844 - DNA, 25 bp, Homo sapien
tccagtgaactctgggtcacacact

SEQ ID NO: 5468845 - DNA, 25 bp, Homo sapien
tcttcatagcctgaaaaccgtaaag

SEQ ID NO: 5468846 - DNA, 25 bp, Homo sapien
ccccgtttgaatggaagtgtctata

SEQ ID NO: 5468847 - DNA, 25 bp, Homo sapien
tgcgcctggcagaccacctatatta

SEQ ID NO: 5468848 - DNA, 25 bp, Homo sapien
tgtgcccagcccgaagaagctttat

SEQ ID NO: 5468849 - DNA, 25 bp, Homo sapien
ggctgataacacgtgcacctgctgc

SEQ ID NO: 5468850 - DNA, 25 bp, Homo sapien
gaaagatgtgaactactgtggccag

SEQ ID NO: 5468851 - DNA, 25 bp, Homo sapien
tgtgaagcctgcatgtgccccaaaa

SEQ ID NO: 5468852 - DNA, 25 bp, Homo sapien
aggaagagtccagaaaccgccgtca

SEQ ID NO: 5468853 - DNA, 25 bp, Homo sapien
gagcacgtctttgagatctttttca

SEQ ID NO: 5468854 - DNA, 25 bp, Homo sapien
gaaaccgccgtcattggcttcatga

SEQ ID NO: 5468855 - DNA, 25 bp, Homo sapien
ggcttcatgaaaaccgagcacgtct

SEQ ID NO: 5468856 - DNA, 25 bp, Homo sapien
tgaaggatgaaggattacagccatc

SEQ ID NO: 5468857 - DNA, 25 bp, Homo sapien
tacagccatcaaatcactcatactt

SEQ ID NO: 5468858 - DNA, 25 bp, Homo sapien
ggattacagccatcaaatcactcat

SEQ ID NO: 5468859 - DNA, 25 bp, Homo sapien
tgaaggattacagccatcaaatcac

SEQ ID NO: 5468860 - DNA, 25 bp, Homo sapien
ttttatggttgcgaaacatcaggcg

SEQ ID NO: 5468861 - DNA, 25 bp, Homo sapien
accgtgtacatttccgtaatcagcc

SEQ ID NO: 5468862 - DNA, 25 bp, Homo sapien
aggcgcatgtctcgcacaaaccatg

SEQ ID NO: 5468863 - DNA, 25 bp, Homo sapien
tacatttccgtaatcagcctttcct

SEQ ID NO: 5468864 - DNA, 25 bp, Homo sapien
gctgtcatcactggaatggatccaa

SEQ ID NO: 5468865 - DNA, 25 bp, Homo sapien
ccaccagaggtgacgttagcacagc

SEQ ID NO: 5468866 - DNA, 25 bp, Homo sapien
agctgtcatcactggaatggatcca

SEQ ID NO: 5468867 - DNA, 25 bp, Homo sapien
caaagccaccagaggtgacgttagc

SEQ ID NO: 5468868 - DNA, 25 bp, Homo sapien
aatgataataccatttgacctcttt

SEQ ID NO: 5468869 - DNA, 25 bp, Homo sapien
gataataccatttgacctctttaag

SEQ ID NO: 5468870 - DNA, 25 bp, Homo sapien
taataccatttgacctctttaagcc

SEQ ID NO: 5468871 - DNA, 25 bp, Homo sapien
ataccatttgacctctttaagccag

SEQ ID NO: 5468872 - DNA, 25 bp, Homo sapien
tagtccctctccagagtgtgcagca

SEQ ID NO: 5468873 - DNA, 25 bp, Homo sapien
tttgaaccaggtagtccctctccag

SEQ ID NO: 5468874 - DNA, 25 bp, Homo sapien
tccagagtgtgcagcaaaatccctg

SEQ ID NO: 5468875 - DNA, 25 bp, Homo sapien
tggagtttgaaccaggtagtccctc

SEQ ID NO: 5468876 - DNA, 25 bp, Homo sapien
aaaaaaggagctttgtggatgacag

SEQ ID NO: 5468877 - DNA, 25 bp, Homo sapien
aaaggagctttgtggatgacagtag

SEQ ID NO: 5468878 - DNA, 25 bp, Homo sapien
aggagctttgtggatgacagtaggc

SEQ ID NO: 5468879 - DNA, 25 bp, Homo sapien
aaaaggagctttgtggatgacagta

SEQ ID NO: 5468880 - DNA, 25 bp, Homo sapien
tgcagaaggtgcaactccacagcat

SEQ ID NO: 5468881 - DNA, 25 bp, Homo sapien
gggtcttagatacatgatggcactg

SEQ ID NO: 5468882 - DNA, 25 bp, Homo sapien
gcagaaggtgcaactccacagcatc

SEQ ID NO: 5468883 - DNA, 25 bp, Homo sapien
cttagatacatgatggcactgttgg

SEQ ID NO: 5468884 - DNA, 25 bp, Homo sapien
tgagaggttggacacaaggtgagca

SEQ ID NO: 5468885 - DNA, 25 bp, Homo sapien
ctgagaggttggacacaaggtgagc

SEQ ID NO: 5468886 - DNA, 25 bp, Homo sapien
gcacacctcgcattcatccgagttt

SEQ ID NO: 5468887 - DNA, 25 bp, Homo sapien
gaagttgtcccccttgacagcacac

SEQ ID NO: 5468888 - DNA, 25 bp, Homo sapien
ctcatggaagactcgtggacaagta

SEQ ID NO: 5468889 - DNA, 25 bp, Homo sapien
agtaccgcagcagagaagttgtccc

SEQ ID NO: 5468890 - DNA, 25 bp, Homo sapien
gcaagggcagataacgtgggcaccg

SEQ ID NO: 5468891 - DNA, 25 bp, Homo sapien
tgcaagggcagataacgtgggcacc

SEQ ID NO: 5468892 - DNA, 25 bp, Homo sapien
ctgcaagggcagataacgtgggcac

SEQ ID NO: 5468893 - DNA, 25 bp, Homo sapien
ggcatggatgctatgacccagtaaa

SEQ ID NO: 5468894 - DNA, 25 bp, Homo sapien
caaatggcacaacaagcagagagtc

SEQ ID NO: 5468895 - DNA, 25 bp, Homo sapien
taggaccatggagacccacgaatgc

SEQ ID NO: 5468896 - DNA, 25 bp, Homo sapien
tggtcgtaacataacatggccctaa

SEQ ID NO: 5468897 - DNA, 25 bp, Homo sapien
cctgtgatggcccaatgttattgaa

SEQ ID NO: 5468898 - DNA, 25 bp, Homo sapien
gcttggaaagaatgaatggtgcctc

SEQ ID NO: 5468899 - DNA, 25 bp, Homo sapien
agtggtaaatactctgcaggcatag

SEQ ID NO: 5468900 - DNA, 25 bp, Homo sapien
ggtgcctctcggtgaattactacaa

SEQ ID NO: 5468901 - DNA, 25 bp, Homo sapien
ctcattctcagtcgggtaaaccttc

SEQ ID NO: 5468902 - DNA, 25 bp, Homo sapien
cattaggagagttagagggtattac

SEQ ID NO: 5468903 - DNA, 25 bp, Homo sapien
ggctgggtcaagcatgcccctggct

SEQ ID NO: 5468904 - DNA, 25 bp, Homo sapien
gcccctggctattatgagctgacat

SEQ ID NO: 5468905 - DNA, 25 bp, Homo sapien
tataatacagaaggcatatgtccct

SEQ ID NO: 5468906 - DNA, 25 bp, Homo sapien
gattctcagggtatttcagaccagc

SEQ ID NO: 5468907 - DNA, 25 bp, Homo sapien
gcattgggagaccagtgccttaaac

SEQ ID NO: 5468908 - DNA, 25 bp, Homo sapien
tattatgatgttacactgagcaccc

SEQ ID NO: 5468909 - DNA, 25 bp, Homo sapien
agccatccaaatatccagatctttt

SEQ ID NO: 5468910 - DNA, 25 bp, Homo sapien
agatctttttctaaaacacatggac

SEQ ID NO: 5468911 - DNA, 25 bp, Homo sapien
ctttttctaaaacacatggacatga

SEQ ID NO: 5468912 - DNA, 25 bp, Homo sapien
gccatccaaatatccagatcttttt

SEQ ID NO: 5468913 - DNA, 25 bp, Homo sapien
aactcagaagctctaaggtgagcct

SEQ ID NO: 5468914 - DNA, 25 bp, Homo sapien
gcttccccatcccaaattaactatg

SEQ ID NO: 5468915 - DNA, 25 bp, Homo sapien
gagcctccagacagggaaagtctgc

SEQ ID NO: 5468916 - DNA, 25 bp, Homo sapien
ttaattgttttgaagatgccatgcc

SEQ ID NO: 5468917 - DNA, 25 bp, Homo sapien
cacttgctatttaactctctcttga

SEQ ID NO: 5468918 - DNA, 25 bp, Homo sapien
ttgctatttaactctctcttgagat

SEQ ID NO: 5468919 - DNA, 25 bp, Homo sapien
tcacttgctatttaactctctcttg

SEQ ID NO: 5468920 - DNA, 25 bp, Homo sapien
acttgctatttaactctctcttgag

SEQ ID NO: 5468921 - DNA, 25 bp, Homo sapien
ttattcttggaggacagagcaaaag

SEQ ID NO: 5468922 - DNA, 25 bp, Homo sapien
ttcttggaggacagagcaaaagtcc

SEQ ID NO: 5468923 - DNA, 25 bp, Homo sapien
cttggaggacagagcaaaagtccac

SEQ ID NO: 5468924 - DNA, 25 bp, Homo sapien
tattcttggaggacagagcaaaagt

SEQ ID NO: 5468925 - DNA, 25 bp, Homo sapien
tctgtacccagacatcacactggat

SEQ ID NO: 5468926 - DNA, 25 bp, Homo sapien
ttcttttgtagatactggccttccc

SEQ ID NO: 5468927 - DNA, 25 bp, Homo sapien
agtttttcttctggacctcacttag

SEQ ID NO: 5468928 - DNA, 25 bp, Homo sapien
ttcccacttcctagtgaatgtctgt

SEQ ID NO: 5468929 - DNA, 25 bp, Homo sapien
tagacactagttgttctcaggacag

SEQ ID NO: 5468930 - DNA, 25 bp, Homo sapien
tgggtcctgtcatcatagacactag

SEQ ID NO: 5468931 - DNA, 25 bp, Homo sapien
tttcttgagtgttgctgagagaggc

SEQ ID NO: 5468932 - DNA, 25 bp, Homo sapien
cagcggagagacagaccacggactg

SEQ ID NO: 5468933 - DNA, 25 bp, Homo sapien
taaacctgtcacctatctgtcccgt

SEQ ID NO: 5468934 - DNA, 25 bp, Homo sapien
tcctaacgggagctcttcacatttc

SEQ ID NO: 5468935 - DNA, 25 bp, Homo sapien
aatcatgctgttgaatcctaacggg

SEQ ID NO: 5468936 - DNA, 25 bp, Homo sapien
tctccttcaaggatttaaacctgtc

SEQ ID NO: 5468937 - DNA, 25 bp, Homo sapien
gggtcattccttcacaacgtatatt

SEQ ID NO: 5468938 - DNA, 25 bp, Homo sapien
cacaacgtatattccgtttccagtt

SEQ ID NO: 5468939 - DNA, 25 bp, Homo sapien
tcctagggtcattccttcacaacgt

SEQ ID NO: 5468940 - DNA, 25 bp, Homo sapien
agcagctctcctagggtcattcctt

SEQ ID NO: 5468941 - DNA, 25 bp, Homo sapien
ggtgttaaccaagttccatcctcat

SEQ ID NO: 5468942 - DNA, 25 bp, Homo sapien
agttccatcctcattccgaatgcac

SEQ ID NO: 5468943 - DNA, 25 bp, Homo sapien
caagttccatcctcattccgaatgc

SEQ ID NO: 5468944 - DNA, 25 bp, Homo sapien
accaagttccatcctcattccgaat

SEQ ID NO: 5468945 - DNA, 25 bp, Homo sapien
caggggagtctgcgggcctcttctc

SEQ ID NO: 5468946 - DNA, 25 bp, Homo sapien
cctcttctcttggactgaagccagc

SEQ ID NO: 5468947 - DNA, 25 bp, Homo sapien
gacagaatgtgcattcgtgtagtgc

SEQ ID NO: 5468948 - DNA, 25 bp, Homo sapien
gggtgggacagaatgtgcattcgtg

SEQ ID NO: 5468949 - DNA, 25 bp, Homo sapien
tatataaaatccctttcgcctcacc

SEQ ID NO: 5468950 - DNA, 25 bp, Homo sapien
cacggggagcttagaacagtgaaaa

SEQ ID NO: 5468951 - DNA, 25 bp, Homo sapien
ctcaccacaggtcacggggagctta

SEQ ID NO: 5468952 - DNA, 25 bp, Homo sapien
caggtcacggggagcttagaacagt

SEQ ID NO: 5468953 - DNA, 25 bp, Homo sapien
cagctccaccatttgtctctagact

SEQ ID NO: 5468954 - DNA, 25 bp, Homo sapien
tctagactcaactcagtaaatatgg

SEQ ID NO: 5468955 - DNA, 25 bp, Homo sapien
gaacagcagatgagagcgtggcctt

SEQ ID NO: 5468956 - DNA, 25 bp, Homo sapien
atatggaacagcagatgagagcgtg

SEQ ID NO: 5468957 - DNA, 25 bp, Homo sapien
tgcttggggctctctaacggcagct

SEQ ID NO: 5468958 - DNA, 25 bp, Homo sapien
taggaagcatgagcaaacaatgagg

SEQ ID NO: 5468959 - DNA, 25 bp, Homo sapien
cagcggtgagtttaggtccccatta

SEQ ID NO: 5468960 - DNA, 25 bp, Homo sapien
ctaacggcagctggcttgtttgaaa

SEQ ID NO: 5468961 - DNA, 25 bp, Homo sapien
ccaggaattcctacagaacatgagg

SEQ ID NO: 5468962 - DNA, 25 bp, Homo sapien
ctaatcgagatgaggaatagcggca

SEQ ID NO: 5468963 - DNA, 25 bp, Homo sapien
tagcggcatggtaaaaaacgaattc

SEQ ID NO: 5468964 - DNA, 25 bp, Homo sapien
cggtggtcaccatattacatgaggt

SEQ ID NO: 5468965 - DNA, 25 bp, Homo sapien
tgggtagcacctattatactttgat

SEQ ID NO: 5468966 - DNA, 25 bp, Homo sapien
gccaagcagcatgcttgtagatggc

SEQ ID NO: 5468967 - DNA, 25 bp, Homo sapien
catgcttgtagatggcaccagtctg

SEQ ID NO: 5468968 - DNA, 25 bp, Homo sapien
cccaccttgggtagcacctattata

SEQ ID NO: 5468969 - DNA, 25 bp, Homo sapien
ttttgagcttgaacagatatctttc

SEQ ID NO: 5468970 - DNA, 25 bp, Homo sapien
ctcttcggtgaatatttttctgaaa

SEQ ID NO: 5468971 - DNA, 25 bp, Homo sapien
tcctttttgagcttgaacagatatc

SEQ ID NO: 5468972 - DNA, 25 bp, Homo sapien
gagcttgaacagatatctttctcct

SEQ ID NO: 5468973 - DNA, 25 bp, Homo sapien
gagtcaccttatccaccacttggag

SEQ ID NO: 5468974 - DNA, 25 bp, Homo sapien
gcttctcttggatgccatgcccagg

SEQ ID NO: 5468975 - DNA, 25 bp, Homo sapien
gagttccaggttgagtcgtctttcc

SEQ ID NO: 5468976 - DNA, 25 bp, Homo sapien
caatctggactttcgggcacattta

SEQ ID NO: 5468977 - DNA, 25 bp, Homo sapien
ccaaatagacttgtgaatagtttag

SEQ ID NO: 5468978 - DNA, 25 bp, Homo sapien
gtgaatagtttagtgagctcccttc

SEQ ID NO: 5468979 - DNA, 25 bp, Homo sapien
tagacttgtgaatagtttagtgagc

SEQ ID NO: 5468980 - DNA, 25 bp, Homo sapien
ctggaccaaatagacttgtgaatag

SEQ ID NO: 5468981 - DNA, 25 bp, Homo sapien
ttcccaggacctaggacagatacct

SEQ ID NO: 5468982 - DNA, 25 bp, Homo sapien
gcactcttcgtctgagtagtgtaca

SEQ ID NO: 5468983 - DNA, 25 bp, Homo sapien
taccctttcaggagttatcttgcca

SEQ ID NO: 5468984 - DNA, 25 bp, Homo sapien
gaatgcaagctccactagtgtaggg

SEQ ID NO: 5468985 - DNA, 25 bp, Homo sapien
ggttactctggctaatgttctatca

SEQ ID NO: 5468986 - DNA, 25 bp, Homo sapien
tgatcatataatcagggaacagtga

SEQ ID NO: 5468987 - DNA, 25 bp, Homo sapien
gatgggctgctggattcaatctcac

SEQ ID NO: 5468988 - DNA, 25 bp, Homo sapien
ccacattattgacttgcatgtgtta

SEQ ID NO: 5468989 - DNA, 25 bp, Homo sapien
gcctgttcactctatttctagtttc

SEQ ID NO: 5468990 - DNA, 25 bp, Homo sapien
tgctgtagctgtttagtttaattaa

SEQ ID NO: 5468991 - DNA, 25 bp, Homo sapien
aattaattcccatttgtcaatcttg

SEQ ID NO: 5468992 - DNA, 25 bp, Homo sapien
taattcccatttgtcaatcttggct

SEQ ID NO: 5468993 - DNA, 25 bp, Homo sapien
tgttgaacattaatatcaagatgtg

SEQ ID NO: 5468994 - DNA, 25 bp, Homo sapien
ttaggcccatttatgttgaacatta

SEQ ID NO: 5468995 - DNA, 25 bp, Homo sapien
cattaatatcaagatgtgaggtact

SEQ ID NO: 5468996 - DNA, 25 bp, Homo sapien
ccttgaatttatatgggtccttgtg

SEQ ID NO: 5468997 - DNA, 25 bp, Homo sapien
agtcattggtagtgaacactcagca

SEQ ID NO: 5468998 - DNA, 25 bp, Homo sapien
atgacagagagtatgtttcctccag

SEQ ID NO: 5468999 - DNA, 25 bp, Homo sapien
aaaccccaagattgaggcatgctgg

SEQ ID NO: 5469000 - DNA, 25 bp, Homo sapien
gcacagtatttgttgggagcaaaga

SEQ ID NO: 5469001 - DNA, 25 bp, Homo sapien
cttatttgccagagctagtatagca

SEQ ID NO: 5469002 - DNA, 25 bp, Homo sapien
tggcttatttgccagagctagtata

SEQ ID NO: 5469003 - DNA, 25 bp, Homo sapien
tttgccagagctagtatagcagagc

SEQ ID NO: 5469004 - DNA, 25 bp, Homo sapien
agagctagtatagcagagctgcctc

SEQ ID NO: 5469005 - DNA, 25 bp, Homo sapien
gggggatgataatggagctttccaa

SEQ ID NO: 5469006 - DNA, 25 bp, Homo sapien
gatgataatggagctttccaagtgt

SEQ ID NO: 5469007 - DNA, 25 bp, Homo sapien
gggatgataatggagctttccaagt

SEQ ID NO: 5469008 - DNA, 25 bp, Homo sapien
ctgcaagggggatgataatggagct

SEQ ID NO: 5469009 - DNA, 25 bp, Homo sapien
agtgtatgacaccagctcttgacca

SEQ ID NO: 5469010 - DNA, 25 bp, Homo sapien
ttagctggaacatagacatgctggc

SEQ ID NO: 5469011 - DNA, 25 bp, Homo sapien
caagcaagaataagcccaggaccct

SEQ ID NO: 5469012 - DNA, 25 bp, Homo sapien
caaattactatctgtgaccggaagc

SEQ ID NO: 5469013 - DNA, 25 bp, Homo sapien
cagggtttcatcatgctggccaggc

SEQ ID NO: 5469014 - DNA, 25 bp, Homo sapien
acctaggctagagtgtagtggtgtg

SEQ ID NO: 5469015 - DNA, 25 bp, Homo sapien
gctgcaacctctgcctcctgggttc

SEQ ID NO: 5469016 - DNA, 25 bp, Homo sapien
atcttggctcgctgcaacctctgcc

SEQ ID NO: 5469017 - DNA, 25 bp, Homo sapien
tcctttctatggagaacgatggctc

SEQ ID NO: 5469018 - DNA, 25 bp, Homo sapien
tattttgggcaatagtgaattgaca

SEQ ID NO: 5469019 - DNA, 25 bp, Homo sapien
aatagtgaattgacaaaggtttgac

SEQ ID NO: 5469020 - DNA, 25 bp, Homo sapien
tccattatccataggatcttggaag

SEQ ID NO: 5469021 - DNA, 25 bp, Homo sapien
gatccatgggttggatcaagctgca

SEQ ID NO: 5469022 - DNA, 25 bp, Homo sapien
gaattctaggaaaaagcttgatcca

SEQ ID NO: 5469023 - DNA, 25 bp, Homo sapien
taagccagtgcaatataggagaaac

SEQ ID NO: 5469024 - DNA, 25 bp, Homo sapien
tccaccagttgtacatgctcagtca

SEQ ID NO: 5469025 - DNA, 25 bp, Homo sapien
gctctgaatttagattcctggtgac

SEQ ID NO: 5469026 - DNA, 25 bp, Homo sapien
ctggtgactgtactctgagaccagc

SEQ ID NO: 5469027 - DNA, 25 bp, Homo sapien
cagctctgaatttagattcctggtg

SEQ ID NO: 5469028 - DNA, 25 bp, Homo sapien
agattcctggtgactgtactctgag

SEQ ID NO: 5469029 - DNA, 25 bp, Homo sapien
tgtactaggcgtcttctgggacctc

SEQ ID NO: 5469030 - DNA, 25 bp, Homo sapien
catttctgaagtgccatcaatgatc

SEQ ID NO: 5469031 - DNA, 25 bp, Homo sapien
cttgtgtgacccttcgtggtgtact

SEQ ID NO: 5469032 - DNA, 25 bp, Homo sapien
attcatttctgaagtgccatcaatg

SEQ ID NO: 5469033 - DNA, 25 bp, Homo sapien
aaatgaaagatcttagtaaatgccc

SEQ ID NO: 5469034 - DNA, 25 bp, Homo sapien
tgttcctcttgttataccccatcct

SEQ ID NO: 5469035 - DNA, 25 bp, Homo sapien
taatttctaatcaggtacatgtaga

SEQ ID NO: 5469036 - DNA, 25 bp, Homo sapien
ctcccacactgagccattcaaatgg

SEQ ID NO: 5469037 - DNA, 25 bp, Homo sapien
tacttaactctgtacctgcttcagg

SEQ ID NO: 5469038 - DNA, 25 bp, Homo sapien
tcttttgaggaacctgatccaccct

SEQ ID NO: 5469039 - DNA, 25 bp, Homo sapien
tttgggcccttgtctctaccgtgga

SEQ ID NO: 5469040 - DNA, 25 bp, Homo sapien
taccgtggagttacaagttgagtca

SEQ ID NO: 5469041 - DNA, 25 bp, Homo sapien
tggattccgtgtctagatgaggctg

SEQ ID NO: 5469042 - DNA, 25 bp, Homo sapien
ttcttatgtctcctttttggagttg

SEQ ID NO: 5469043 - DNA, 25 bp, Homo sapien
ctttttggagttgaccagatacatc

SEQ ID NO: 5469044 - DNA, 25 bp, Homo sapien
ttttggagttgaccagatacatctt

SEQ ID NO: 5469045 - DNA, 25 bp, Homo sapien
tcctttttggagttgaccagataca

SEQ ID NO: 5469046 - DNA, 25 bp, Homo sapien
gaaggtgtgctggacacctcctggg

SEQ ID NO: 5469047 - DNA, 25 bp, Homo sapien
ctttcttgtctgaaggtgtgctgga

SEQ ID NO: 5469048 - DNA, 25 bp, Homo sapien
gtcatttggttctggagaattatct

SEQ ID NO: 5469049 - DNA, 25 bp, Homo sapien
tgggtcatttggttctggagaatta

SEQ ID NO: 5469050 - DNA, 25 bp, Homo sapien
tttgggggatcaggttgtcactggc

SEQ ID NO: 5469051 - DNA, 25 bp, Homo sapien
tgggggatcaggttgtcactggcca

SEQ ID NO: 5469052 - DNA, 25 bp, Homo sapien
ttgggggatcaggttgtcactggcc

SEQ ID NO: 5469053 - DNA, 25 bp, Homo sapien
cttgcacagtgctagtgaggaggct

SEQ ID NO: 5469054 - DNA, 25 bp, Homo sapien
ttggatgttaacttgtcattggtca

SEQ ID NO: 5469055 - DNA, 25 bp, Homo sapien
tttggatgttaacttgtcattggtc

SEQ ID NO: 5469056 - DNA, 25 bp, Homo sapien
gactcttggcgcacagggtgaacag

SEQ ID NO: 5469057 - DNA, 25 bp, Homo sapien
aggatctcatcgctttgctgggagg

SEQ ID NO: 5469058 - DNA, 25 bp, Homo sapien
gctctgccattcataggaagcacca

SEQ ID NO: 5469059 - DNA, 25 bp, Homo sapien
gctgggcgactcactcaggatctca

SEQ ID NO: 5469060 - DNA, 25 bp, Homo sapien
ctgggattggtgaagggacacacat

SEQ ID NO: 5469061 - DNA, 25 bp, Homo sapien
taaatgcaaaaagcacttgagaaat

SEQ ID NO: 5469062 - DNA, 25 bp, Homo sapien
gcaaaaagcacttgagaaatctcat

SEQ ID NO: 5469063 - DNA, 25 bp, Homo sapien
ttaccatagcaactttttaaatgca

SEQ ID NO: 5469064 - DNA, 25 bp, Homo sapien
aatgcaaaaagcacttgagaaatct

SEQ ID NO: 5469065 - DNA, 25 bp, Homo sapien
tattcacgcaggttaatttgactga

SEQ ID NO: 5469066 - DNA, 25 bp, Homo sapien
tgtgcaccactctggatacagggat

SEQ ID NO: 5469067 - DNA, 25 bp, Homo sapien
ttctgtaaatcgtcaccagattggg

SEQ ID NO: 5469068 - DNA, 25 bp, Homo sapien
ccagttgggtgagaatgttgtgcac

SEQ ID NO: 5469069 - DNA, 25 bp, Homo sapien
gataagcctgaatggattccagcca

SEQ ID NO: 5469070 - DNA, 25 bp, Homo sapien
cagccacagagaagtcaccctgaga

SEQ ID NO: 5469071 - DNA, 25 bp, Homo sapien
cagcaatggttctagtgatggtcac

SEQ ID NO: 5469072 - DNA, 25 bp, Homo sapien
tggtcacagaggcaattctgctggt

SEQ ID NO: 5469073 - DNA, 25 bp, Homo sapien
aaagaagggaaatggcttgtgtatg

SEQ ID NO: 5469074 - DNA, 25 bp, Homo sapien
tgtgtatggcataggcgatccccag

SEQ ID NO: 5469075 - DNA, 25 bp, Homo sapien
tggagttgtctaggaggccttcaaa

SEQ ID NO: 5469076 - DNA, 25 bp, Homo sapien
ttctcttagtgatgatggagttgtc

SEQ ID NO: 5469077 - DNA, 25 bp, Homo sapien
caccaagagcgaagaataaagcagc

SEQ ID NO: 5469078 - DNA, 25 bp, Homo sapien
cgcgaagttaactctaagagctgca

SEQ ID NO: 5469079 - DNA, 25 bp, Homo sapien
gctgctgccgcgaagttaactctaa

SEQ ID NO: 5469080 - DNA, 25 bp, Homo sapien
cagtcaccaagagcgaagaataaag

SEQ ID NO: 5469081 - DNA, 25 bp, Homo sapien
ctggactttgagtttgtcgttcctg

SEQ ID NO: 5469082 - DNA, 25 bp, Homo sapien
gactttgagtttgtcgttcctgccc

SEQ ID NO: 5469083 - DNA, 25 bp, Homo sapien
tgagtttgtcgttcctgcccctttc

SEQ ID NO: 5469084 - DNA, 25 bp, Homo sapien
ctttgagtttgtcgttcctgcccct

SEQ ID NO: 5469085 - DNA, 25 bp, Homo sapien
tgggacagggatcactcctcaagat

SEQ ID NO: 5469086 - DNA, 25 bp, Homo sapien
tgtgctttgacaaacgcagtaaggg

SEQ ID NO: 5469087 - DNA, 25 bp, Homo sapien
tgaaagttttcggagtttgccaagc

SEQ ID NO: 5469088 - DNA, 25 bp, Homo sapien
cagggagatgctagcaggcaaaaca

SEQ ID NO: 5469089 - DNA, 25 bp, Homo sapien
gcagtacccctgaagtaccaatctt

SEQ ID NO: 5469090 - DNA, 25 bp, Homo sapien
gtagggctttctagtagtagcagca

SEQ ID NO: 5469091 - DNA, 25 bp, Homo sapien
catggtgttgcaaagtagggctttc

SEQ ID NO: 5469092 - DNA, 25 bp, Homo sapien
ctgggctaatgcatggtgttgcaaa

SEQ ID NO: 5469093 - DNA, 25 bp, Homo sapien
ttggtgtcctgggtctgcctactgc

SEQ ID NO: 5469094 - DNA, 25 bp, Homo sapien
ccaatggccttgtgcttataagcaa

SEQ ID NO: 5469095 - DNA, 25 bp, Homo sapien
aaaatgtccagttcattggtgtcct

SEQ ID NO: 5469096 - DNA, 25 bp, Homo sapien
tccagttcattggtgtcctgggtct

SEQ ID NO: 5469097 - DNA, 25 bp, Homo sapien
catcagccccctgtctttgacccat

SEQ ID NO: 5469098 - DNA, 25 bp, Homo sapien
tggctctcatcagccccctgtcttt

SEQ ID NO: 5469099 - DNA, 25 bp, Homo sapien
cctggctctcatcagccccctgtct

SEQ ID NO: 5469100 - DNA, 25 bp, Homo sapien
tctcatcagccccctgtctttgacc

SEQ ID NO: 5469101 - DNA, 25 bp, Homo sapien
actcatggggaacttatggccaaga

SEQ ID NO: 5469102 - DNA, 25 bp, Homo sapien
taggaatccctaactaggccctctc

SEQ ID NO: 5469103 - DNA, 25 bp, Homo sapien
gaatatgggatgtggtgatatctca

SEQ ID NO: 5469104 - DNA, 25 bp, Homo sapien
tccaggcacaaaacgtacagtctag

SEQ ID NO: 5469105 - DNA, 25 bp, Homo sapien
tattcatacaagacaggaagcacga

SEQ ID NO: 5469106 - DNA, 25 bp, Homo sapien
tgtccatgcaggttcacacaaaggc

SEQ ID NO: 5469107 - DNA, 25 bp, Homo sapien
gaatcttgcggttcccagtgacgtg

SEQ ID NO: 5469108 - DNA, 25 bp, Homo sapien
caggttcatcgggtactgggaccca

SEQ ID NO: 5469109 - DNA, 25 bp, Homo sapien
tcccaccacacagcgtctggctggc

SEQ ID NO: 5469110 - DNA, 25 bp, Homo sapien
gctcacgggccagcattgtgatgaa

SEQ ID NO: 5469111 - DNA, 25 bp, Homo sapien
ctcacgggccagcattgtgatgaac

SEQ ID NO: 5469112 - DNA, 25 bp, Homo sapien
cttcactcaagagtccaactcccac

SEQ ID NO: 5469113 - DNA, 25 bp, Homo sapien
acccagaagggagagctccttcacc

SEQ ID NO: 5469114 - DNA, 25 bp, Homo sapien
tgccaagttccttgggtccatggga

SEQ ID NO: 5469115 - DNA, 25 bp, Homo sapien
tccatgggaccaggtaactgtttcc

SEQ ID NO: 5469116 - DNA, 25 bp, Homo sapien
gcaattccaggccagtcagagaggc

SEQ ID NO: 5469117 - DNA, 25 bp, Homo sapien
ctcaaggcctggaccactgctgtct

SEQ ID NO: 5469118 - DNA, 25 bp, Homo sapien
cagtgtttcctggagatctggacag

SEQ ID NO: 5469119 - DNA, 25 bp, Homo sapien
tctggacaggtcagctggtagcatc

SEQ ID NO: 5469120 - DNA, 25 bp, Homo sapien
ggtagcatccatgaatagtcacagt

SEQ ID NO: 5469121 - DNA, 25 bp, Homo sapien
tggaaagccctttagtagtcagtgt

SEQ ID NO: 5469122 - DNA, 25 bp, Homo sapien
cagataacagcaaagccgatggcca

SEQ ID NO: 5469123 - DNA, 25 bp, Homo sapien
gaaggcgaacatgaatctgaaagac

SEQ ID NO: 5469124 - DNA, 25 bp, Homo sapien
agataaagttggtaccacttttcat

SEQ ID NO: 5469125 - DNA, 25 bp, Homo sapien
gccagctggtctcgagtgaaaagaa

SEQ ID NO: 5469126 - DNA, 25 bp, Homo sapien
cctgggcaagccttagtctggaaca

SEQ ID NO: 5469127 - DNA, 25 bp, Homo sapien
cagtaattgagagtctttctgacca

SEQ ID NO: 5469128 - DNA, 25 bp, Homo sapien
tgtcctgagcaagccctatcgcttt

SEQ ID NO: 5469129 - DNA, 25 bp, Homo sapien
attaaaactccaatgtcctccccag

SEQ ID NO: 5469130 - DNA, 25 bp, Homo sapien
tgcaagtggttgatgcacaatcact

SEQ ID NO: 5469131 - DNA, 25 bp, Homo sapien
cactagctctttcttccgtgagatg

SEQ ID NO: 5469132 - DNA, 25 bp, Homo sapien
ctgacaggtgcagccgtgaaatgac

SEQ ID NO: 5469133 - DNA, 25 bp, Homo sapien
tccgtgagatgctttcatcaagtcc

SEQ ID NO: 5469134 - DNA, 25 bp, Homo sapien
tccaccaactctttctatggtccca

SEQ ID NO: 5469135 - DNA, 25 bp, Homo sapien
ttctatggtcccataggtggactgg

SEQ ID NO: 5469136 - DNA, 25 bp, Homo sapien
ccaactctttctatggtcccatagg

SEQ ID NO: 5469137 - DNA, 25 bp, Homo sapien
tctttctatggtcccataggtggac

SEQ ID NO: 5469138 - DNA, 25 bp, Homo sapien
aagcagctgctaatctattttctgc

SEQ ID NO: 5469139 - DNA, 25 bp, Homo sapien
cagtagctgcactattctatattcc

SEQ ID NO: 5469140 - DNA, 25 bp, Homo sapien
caccagaaatgtatgaaggctccca

SEQ ID NO: 5469141 - DNA, 25 bp, Homo sapien
gaaaaccccatgtcaattagtagtc

SEQ ID NO: 5469142 - DNA, 25 bp, Homo sapien
gatacacagaattctttctcaatgg

SEQ ID NO: 5469143 - DNA, 25 bp, Homo sapien
caaacgtattttacaggaggagctg

SEQ ID NO: 5469144 - DNA, 25 bp, Homo sapien
tacacagaattctttctcaatggga

SEQ ID NO: 5469145 - DNA, 25 bp, Homo sapien
tctccagaggcaaacgtattttaca

SEQ ID NO: 5469146 - DNA, 25 bp, Homo sapien
ccttcacttaagaacgcaacaaaca

SEQ ID NO: 5469147 - DNA, 25 bp, Homo sapien
gggactgtgcagacctgctttttat

SEQ ID NO: 5469148 - DNA, 25 bp, Homo sapien
tgtagattcaggacaaggtgatggt

SEQ ID NO: 5469149 - DNA, 25 bp, Homo sapien
caaataggttaagtgcagtgtagat

SEQ ID NO: 5469150 - DNA, 25 bp, Homo sapien
caactcagggactcacgaatggtta

SEQ ID NO: 5469151 - DNA, 25 bp, Homo sapien
cttgacatggaggtttatgtctcac

SEQ ID NO: 5469152 - DNA, 25 bp, Homo sapien
caatcagatttaggtcttttccaca

SEQ ID NO: 5469153 - DNA, 25 bp, Homo sapien
cagtgtttgcgtggctgattttgta

SEQ ID NO: 5469154 - DNA, 25 bp, Homo sapien
gagctgttctgttgcgacacttgtt

SEQ ID NO: 5469155 - DNA, 25 bp, Homo sapien
gttgcgacacttgttcaagagtctt

SEQ ID NO: 5469156 - DNA, 25 bp, Homo sapien
tgttctgttgcgacacttgttcaag

SEQ ID NO: 5469157 - DNA, 25 bp, Homo sapien
tctgttgcgacacttgttcaagagt

SEQ ID NO: 5469158 - DNA, 25 bp, Homo sapien
ggagtctccgggaagccaacagtgt

SEQ ID NO: 5469159 - DNA, 25 bp, Homo sapien
aacagtgttgtcaggaatctgaggt

SEQ ID NO: 5469160 - DNA, 25 bp, Homo sapien
gaccccgtggaattgcatcttctgc

SEQ ID NO: 5469161 - DNA, 25 bp, Homo sapien
caatctctcaggaccccgtggaatt

SEQ ID NO: 5469162 - DNA, 25 bp, Homo sapien
ggaacagttggtaaatcagatgcaa

SEQ ID NO: 5469163 - DNA, 25 bp, Homo sapien
aaccatgaacaagcgcaagggcagg

SEQ ID NO: 5469164 - DNA, 25 bp, Homo sapien
ccctcacacgtgagaaccatgaaca

SEQ ID NO: 5469165 - DNA, 25 bp, Homo sapien
actgaaaggagcctgctcttccgcg

SEQ ID NO: 5469166 - DNA, 25 bp, Homo sapien
ataactcagccatgacatgtctgtt

SEQ ID NO: 5469167 - DNA, 25 bp, Homo sapien
tgtgtctcatgcatgtgggctcatt

SEQ ID NO: 5469168 - DNA, 25 bp, Homo sapien
gctgcttttcatttacggcctcttt

SEQ ID NO: 5469169 - DNA, 25 bp, Homo sapien
ttccaagagccacacatgttagaga

SEQ ID NO: 5469170 - DNA, 25 bp, Homo sapien
tgctgcacaaggactgagggcgtcc

SEQ ID NO: 5469171 - DNA, 25 bp, Homo sapien
ctgtgctgtccgtcagttaccaggg

SEQ ID NO: 5469172 - DNA, 25 bp, Homo sapien
gcggatgttcatctgcggatacaac

SEQ ID NO: 5469173 - DNA, 25 bp, Homo sapien
gaccctgcgtgatgatgcggactca

SEQ ID NO: 5469174 - DNA, 25 bp, Homo sapien
gatgtgaaccatccctttatccagg

SEQ ID NO: 5469175 - DNA, 25 bp, Homo sapien
cagtaccacgctgccatagtgatgg

SEQ ID NO: 5469176 - DNA, 25 bp, Homo sapien
tatccagggtatccacagtgtagac

SEQ ID NO: 5469177 - DNA, 25 bp, Homo sapien
tcgactgtcctggtataacagagct

SEQ ID NO: 5469178 - DNA, 25 bp, Homo sapien
cattgctaataagaaacctgatgcc

SEQ ID NO: 5469179 - DNA, 25 bp, Homo sapien
tccagtagcctcctgactaagagtt

SEQ ID NO: 5469180 - DNA, 25 bp, Homo sapien
ccttactgggattcaattgagagac

SEQ ID NO: 5469181 - DNA, 25 bp, Homo sapien
cagggccctttcaaatggacaactt

SEQ ID NO: 5469182 - DNA, 25 bp, Homo sapien
aaggaaagaaagacgcaggaatatg

SEQ ID NO: 5469183 - DNA, 25 bp, Homo sapien
taaggcaaggaagtccactctcatc

SEQ ID NO: 5469184 - DNA, 25 bp, Homo sapien
caaactcctaaccagtgaaatgaga

SEQ ID NO: 5469185 - DNA, 25 bp, Homo sapien
tactacatgaatttagcaatgccat

SEQ ID NO: 5469186 - DNA, 25 bp, Homo sapien
taatacaaagtagaatcaggcattc

SEQ ID NO: 5469187 - DNA, 25 bp, Homo sapien
tatttgtgaattaatgatgtaggat

SEQ ID NO: 5469188 - DNA, 25 bp, Homo sapien
gaaattctcaataatgtggtctcat

SEQ ID NO: 5469189 - DNA, 25 bp, Homo sapien
acaaagtagaatcaggcattctagg

SEQ ID NO: 5469190 - DNA, 25 bp, Homo sapien
gacataataggtaaggctgactggg

SEQ ID NO: 5469191 - DNA, 25 bp, Homo sapien
tgagtcacaggttaccaggtaaggg

SEQ ID NO: 5469192 - DNA, 25 bp, Homo sapien
cctgttctgtgcgactggtggatat

SEQ ID NO: 5469193 - DNA, 25 bp, Homo sapien
agggacttcatcacggaccatcggg

SEQ ID NO: 5469194 - DNA, 25 bp, Homo sapien
ccagaactggattcactagaaggag

SEQ ID NO: 5469195 - DNA, 25 bp, Homo sapien
tatgaccctgaacctccagaactgg

SEQ ID NO: 5469196 - DNA, 25 bp, Homo sapien
cacacagaggattatggagagagct

SEQ ID NO: 5469197 - DNA, 25 bp, Homo sapien
aaactttgttattggcagggcacga

SEQ ID NO: 5469198 - DNA, 25 bp, Homo sapien
taaactcatgtttaacagaaagagt

SEQ ID NO: 5469199 - DNA, 25 bp, Homo sapien
aaagaggcaggaaattatgataaac

SEQ ID NO: 5469200 - DNA, 25 bp, Homo sapien
tttccagacgctttttattctgagc

SEQ ID NO: 5469201 - DNA, 25 bp, Homo sapien
ttctgagcaccttcactaccttgta

SEQ ID NO: 5469202 - DNA, 25 bp, Homo sapien
gagctcctccaatgaatacacaaag

SEQ ID NO: 5469203 - DNA, 25 bp, Homo sapien
tcagaagagatgcagcccattagct

SEQ ID NO: 5469204 - DNA, 25 bp, Homo sapien
cattagcttgtgatggagaagccga

SEQ ID NO: 5469205 - DNA, 25 bp, Homo sapien
gacttgtgcacagactcgggctgct

SEQ ID NO: 5469206 - DNA, 25 bp, Homo sapien
gatgtctacgtattggagtgcccca

SEQ ID NO: 5469207 - DNA, 25 bp, Homo sapien
tgtagaaggtgtgcttgatttccct

SEQ ID NO: 5469208 - DNA, 25 bp, Homo sapien
tctctcctcaactgcgaagtcataa

SEQ ID NO: 5469209 - DNA, 25 bp, Homo sapien
agtgccccacggattggacctgagt

SEQ ID NO: 5469210 - DNA, 25 bp, Homo sapien
tactcccatataggaaagctactca

SEQ ID NO: 5469211 - DNA, 25 bp, Homo sapien
cacttagtctgagctttggtggcag

SEQ ID NO: 5469212 - DNA, 25 bp, Homo sapien
gcttgttctaacttttccgaggcat

SEQ ID NO: 5469213 - DNA, 25 bp, Homo sapien
tccgaggcatatgtttaattcaact

SEQ ID NO: 5469214 - DNA, 25 bp, Homo sapien
acaagttgaagtgctcttatagcag

SEQ ID NO: 5469215 - DNA, 25 bp, Homo sapien
ttgaagtgctcttatagcagaggtc

SEQ ID NO: 5469216 - DNA, 25 bp, Homo sapien
gaagtgctcttatagcagaggtccc

SEQ ID NO: 5469217 - DNA, 25 bp, Homo sapien
agttgaagtgctcttatagcagagg

SEQ ID NO: 5469218 - DNA, 25 bp, Homo sapien
gggcccacttgcagtgtactttata

SEQ ID NO: 5469219 - DNA, 25 bp, Homo sapien
gtatcagaaaccttgacccagcagc

SEQ ID NO: 5469220 - DNA, 25 bp, Homo sapien
cccagcagcctaaaaatagtggtca

SEQ ID NO: 5469221 - DNA, 25 bp, Homo sapien
tactttataggatgatgtatcagaa

SEQ ID NO: 5469222 - DNA, 25 bp, Homo sapien
aagatatgtttcaactattcataga

SEQ ID NO: 5469223 - DNA, 25 bp, Homo sapien
gaagatatgtttcaactattcatag

SEQ ID NO: 5469224 - DNA, 25 bp, Homo sapien
cacgtaacaagactaggggcacccg

SEQ ID NO: 5469225 - DNA, 25 bp, Homo sapien
cagacgcatctcaccagcagaggtt

SEQ ID NO: 5469226 - DNA, 25 bp, Homo sapien
aactcaggagtaggaccaggcccac

SEQ ID NO: 5469227 - DNA, 25 bp, Homo sapien
gacaccgccctggtgtgactctcag

SEQ ID NO: 5469228 - DNA, 25 bp, Homo sapien
ccttcctgcttgtctacacatctct

SEQ ID NO: 5469229 - DNA, 25 bp, Homo sapien
ctgcttgtctacacatctcttctga

SEQ ID NO: 5469230 - DNA, 25 bp, Homo sapien
tcctgcttgtctacacatctcttct

SEQ ID NO: 5469231 - DNA, 25 bp, Homo sapien
gcttgtctacacatctcttctgact

SEQ ID NO: 5469232 - DNA, 25 bp, Homo sapien
tgattgattaaatcccttgccactg

SEQ ID NO: 5469233 - DNA, 25 bp, Homo sapien
ttattcttcactctcgcattcgcag

SEQ ID NO: 5469234 - DNA, 25 bp, Homo sapien
gaagaaccaaatatagcacaaggtg

SEQ ID NO: 5469235 - DNA, 25 bp, Homo sapien
ttgccactggcaatcgacctcgatc

SEQ ID NO: 5469236 - DNA, 25 bp, Homo sapien
ttttaccatggtaaagcaggagaga

SEQ ID NO: 5469237 - DNA, 25 bp, Homo sapien
gaaaagcggtctaattgacttatag

SEQ ID NO: 5469238 - DNA, 25 bp, Homo sapien
gttccacaggctataaagaaggcat

SEQ ID NO: 5469239 - DNA, 25 bp, Homo sapien
agtaggcctgatcacctgtgtatta

SEQ ID NO: 5469240 - DNA, 25 bp, Homo sapien
cagtggcaaaaacacgatctttgtt

SEQ ID NO: 5469241 - DNA, 25 bp, Homo sapien
tcattcaggtcaatcagagtctggt

SEQ ID NO: 5469242 - DNA, 25 bp, Homo sapien
tcagcaaactcagcactggtctctg

SEQ ID NO: 5469243 - DNA, 25 bp, Homo sapien
ggtgcgtttcagtttatcttccaag

SEQ ID NO: 5469244 - DNA, 25 bp, Homo sapien
tgctcctctttggtgcgtttcagtt

SEQ ID NO: 5469245 - DNA, 25 bp, Homo sapien
catctcttggcaacgggactctccc

SEQ ID NO: 5469246 - DNA, 25 bp, Homo sapien
ttcatcttttaaggcccgattttca

SEQ ID NO: 5469247 - DNA, 25 bp, Homo sapien
cctggagttccatcttttcttcatc

SEQ ID NO: 5469248 - DNA, 25 bp, Homo sapien
ggcccgattttcaacaaccttcata

SEQ ID NO: 5469249 - DNA, 25 bp, Homo sapien
cttggagttagatttcctggagttc

SEQ ID NO: 5469250 - DNA, 25 bp, Homo sapien
caaggcagtggccaggtactcctga

SEQ ID NO: 5469251 - DNA, 25 bp, Homo sapien
agtggccaggtactcctgagcatgg

SEQ ID NO: 5469252 - DNA, 25 bp, Homo sapien
cagtggccaggtactcctgagcatg

SEQ ID NO: 5469253 - DNA, 25 bp, Homo sapien
gtggccaggtactcctgagcatggt

SEQ ID NO: 5469254 - DNA, 25 bp, Homo sapien
ctcagcctcttcccgggcctgcctt

SEQ ID NO: 5469255 - DNA, 25 bp, Homo sapien
ctccctcaacttctcgctggaggtg

SEQ ID NO: 5469256 - DNA, 25 bp, Homo sapien
cgctggaggtgctcagctcgctcct

SEQ ID NO: 5469257 - DNA, 25 bp, Homo sapien
agcctcttcccgggcctgcctttct

SEQ ID NO: 5469258 - DNA, 25 bp, Homo sapien
gctactgctcgtgctctggttcctg

SEQ ID NO: 5469259 - DNA, 25 bp, Homo sapien
acccagctactgctcgtgctctggt

SEQ ID NO: 5469260 - DNA, 25 bp, Homo sapien
cagctactgctcgtgctctggttcc

SEQ ID NO: 5469261 - DNA, 25 bp, Homo sapien
ctactgctcgtgctctggttcctgc

SEQ ID NO: 5469262 - DNA, 25 bp, Homo sapien
catattcaatgaaggttgcctctcc

SEQ ID NO: 5469263 - DNA, 25 bp, Homo sapien
taacctaatgtcaataccagagcac

SEQ ID NO: 5469264 - DNA, 25 bp, Homo sapien
ggtacatcatcacatggtgaggcag

SEQ ID NO: 5469265 - DNA, 25 bp, Homo sapien
taactgcatcatggctatggagtgc

SEQ ID NO: 5469266 - DNA, 25 bp, Homo sapien
gttacacgccttccttgccatctgg

SEQ ID NO: 5469267 - DNA, 25 bp, Homo sapien
tttttggatctggatagctttgccc

SEQ ID NO: 5469268 - DNA, 25 bp, Homo sapien
ggttgcacccaatttttggatctgg

SEQ ID NO: 5469269 - DNA, 25 bp, Homo sapien
cttccgggagcacaaaactaggttg

SEQ ID NO: 5469270 - DNA, 25 bp, Homo sapien
acaaatagtgatccttgaagaattt

SEQ ID NO: 5469271 - DNA, 25 bp, Homo sapien
tcttgcttgagaaaacttgacagta

SEQ ID NO: 5469272 - DNA, 25 bp, Homo sapien
agtaatggccattttaccagaaagg

SEQ ID NO: 5469273 - DNA, 25 bp, Homo sapien
ctgaatttcttgcttgagaaaactt

SEQ ID NO: 5469274 - DNA, 25 bp, Homo sapien
aaacttgacagtaatggccatttta

SEQ ID NO: 5469275 - DNA, 25 bp, Homo sapien
agtgagtgcctctcacagtgttgca

SEQ ID NO: 5469276 - DNA, 25 bp, Homo sapien
gtgttgcagcccgcgcacatcacat

SEQ ID NO: 5469277 - DNA, 25 bp, Homo sapien
tgtactctcggggtcctgccagtga

SEQ ID NO: 5469278 - DNA, 25 bp, Homo sapien
ctgcctggaagacttagggcatgta

SEQ ID NO: 5469279 - DNA, 25 bp, Homo sapien
ccttttttacttggagagcctcgag

SEQ ID NO: 5469280 - DNA, 25 bp, Homo sapien
catgtggcagtctgctgggcatctc

SEQ ID NO: 5469281 - DNA, 25 bp, Homo sapien
tttttacttggagagcctcgagttc

SEQ ID NO: 5469282 - DNA, 25 bp, Homo sapien
tttacttggagagcctcgagttccc

SEQ ID NO: 5469283 - DNA, 25 bp, Homo sapien
gttgaaagctgggcatttttgttgt

SEQ ID NO: 5469284 - DNA, 25 bp, Homo sapien
ggttgaaagctgggcatttttgttg

SEQ ID NO: 5469285 - DNA, 25 bp, Homo sapien
ttgaaagctgggcatttttgttgtc

SEQ ID NO: 5469286 - DNA, 25 bp, Homo sapien
tggcagagaacctgatacacaactc

SEQ ID NO: 5469287 - DNA, 25 bp, Homo sapien
caactctctgtataggaatcgagtt

SEQ ID NO: 5469288 - DNA, 25 bp, Homo sapien
aattaaatcgggatactccttcagg

SEQ ID NO: 5469289 - DNA, 25 bp, Homo sapien
gaatcgagtttatacgggcttcttg

SEQ ID NO: 5469290 - DNA, 25 bp, Homo sapien
ggaagagtacaatcacacactgaag

SEQ ID NO: 5469291 - DNA, 25 bp, Homo sapien
aacaggctcccagagatagggagat

SEQ ID NO: 5469292 - DNA, 25 bp, Homo sapien
ttccccctgtggtatgagaagtcct

SEQ ID NO: 5469293 - DNA, 25 bp, Homo sapien
gatggttcttcccttgccataaaga

SEQ ID NO: 5469294 - DNA, 25 bp, Homo sapien
gcatttgctatctccaccttattct

SEQ ID NO: 5469295 - DNA, 25 bp, Homo sapien
ttttcagtgataaaggaattgtctc

SEQ ID NO: 5469296 - DNA, 25 bp, Homo sapien
aaaggaattgtctctgaggctttca

SEQ ID NO: 5469297 - DNA, 25 bp, Homo sapien
tggctttgttattgcatttgctatc

SEQ ID NO: 5469298 - DNA, 25 bp, Homo sapien
cttgaagtgattggaaaagatctca

SEQ ID NO: 5469299 - DNA, 25 bp, Homo sapien
tctccttcttctggaccactgcaaa

SEQ ID NO: 5469300 - DNA, 25 bp, Homo sapien
tgaagtgattggaaaagatctcaca

SEQ ID NO: 5469301 - DNA, 25 bp, Homo sapien
ttggaaaagatctcacaggaaatct

SEQ ID NO: 5469302 - DNA, 25 bp, Homo sapien
ctgctctctggagcgtggggacaga

SEQ ID NO: 5469303 - DNA, 25 bp, Homo sapien
gggacagacaatagcgctgagcata

SEQ ID NO: 5469304 - DNA, 25 bp, Homo sapien
tggggacagacaatagcgctgagca

SEQ ID NO: 5469305 - DNA, 25 bp, Homo sapien
ggacagacaatagcgctgagcataa

SEQ ID NO: 5469306 - DNA, 25 bp, Homo sapien
aagtcagctgctatcacaagtgcag

SEQ ID NO: 5469307 - DNA, 25 bp, Homo sapien
agtcagctgctatcacaagtgcagc

SEQ ID NO: 5469308 - DNA, 25 bp, Homo sapien
cagctgctatcacaagtgcagccac

SEQ ID NO: 5469309 - DNA, 25 bp, Homo sapien
tcagctgctatcacaagtgcagcca

SEQ ID NO: 5469310 - DNA, 25 bp, Homo sapien
tcaaatgttcatgatcagtactctt

SEQ ID NO: 5469311 - DNA, 25 bp, Homo sapien
caaatgttcatgatcagtactcttt

SEQ ID NO: 5469312 - DNA, 25 bp, Homo sapien
aaatgttcatgatcagtactctttt

SEQ ID NO: 5469313 - DNA, 25 bp, Homo sapien
caccgctgctgagtgtcacacagcg

SEQ ID NO: 5469314 - DNA, 25 bp, Homo sapien
acttcggaccgcagtgcttcacctt

SEQ ID NO: 5469315 - DNA, 25 bp, Homo sapien
gcctttttgaagaatgttgacttcg

SEQ ID NO: 5469316 - DNA, 25 bp, Homo sapien
cgctgctgagtgtcacacagcgtca

SEQ ID NO: 5469317 - DNA, 25 bp, Homo sapien
gggccataactgttgggagtttctc

SEQ ID NO: 5469318 - DNA, 25 bp, Homo sapien
gggagggcctatcccgcctctgatg

SEQ ID NO: 5469319 - DNA, 25 bp, Homo sapien
gcacttgggaaggatgttgccggat

SEQ ID NO: 5469320 - DNA, 25 bp, Homo sapien
tgccggatgttggagacctccacag

SEQ ID NO: 5469321 - DNA, 25 bp, Homo sapien
gccagagatgggctcgctgaaagga

SEQ ID NO: 5469322 - DNA, 25 bp, Homo sapien
aatacaggaagagacatgacggtgg

SEQ ID NO: 5469323 - DNA, 25 bp, Homo sapien
tgacggtggtggaaagggcctgcac

SEQ ID NO: 5469324 - DNA, 25 bp, Homo sapien
cctgcttggcaaatacaggaagaga

SEQ ID NO: 5469325 - DNA, 25 bp, Homo sapien
caggagaacttgctgcaagtaaagc

SEQ ID NO: 5469326 - DNA, 25 bp, Homo sapien
gcaagtaaagcaggggaatgaacca

SEQ ID NO: 5469327 - DNA, 25 bp, Homo sapien
ccagaaagcagggaccctgcattgg

SEQ ID NO: 5469328 - DNA, 25 bp, Homo sapien
aaagcagggaccctgcattggtgat

SEQ ID NO: 5469329 - DNA, 25 bp, Homo sapien
ctctcttcccctgcccactctagtc

SEQ ID NO: 5469330 - DNA, 25 bp, Homo sapien
ttccaaggatgttcccatcaaatcc

SEQ ID NO: 5469331 - DNA, 25 bp, Homo sapien
ggatgttcccatcaaatccttccct

SEQ ID NO: 5469332 - DNA, 25 bp, Homo sapien
ctgacttgcaagctgccttctactt

SEQ ID NO: 5469333 - DNA, 25 bp, Homo sapien
tggcagtagtaataatccctgactt

SEQ ID NO: 5469334 - DNA, 25 bp, Homo sapien
gtccaggaagttgcccatccaagcc

SEQ ID NO: 5469335 - DNA, 25 bp, Homo sapien
tggggcttgccgtgctgtgtctctg

SEQ ID NO: 5469336 - DNA, 25 bp, Homo sapien
aacagggtaaagtgggtgaggatga

SEQ ID NO: 5469337 - DNA, 25 bp, Homo sapien
ccagtgtccaggaagttgcccatcc

SEQ ID NO: 5469338 - DNA, 25 bp, Homo sapien
gtgatgacaagttccaggatttgaa

SEQ ID NO: 5469339 - DNA, 25 bp, Homo sapien
gatgacaagttccaggatttgaatg

SEQ ID NO: 5469340 - DNA, 25 bp, Homo sapien
tgatgacaagttccaggatttgaat

SEQ ID NO: 5469341 - DNA, 25 bp, Homo sapien
tcagggtcctcgtacgaaggcgaaa

SEQ ID NO: 5469342 - DNA, 25 bp, Homo sapien
tctagagcgttgatattcgggccag

SEQ ID NO: 5469343 - DNA, 25 bp, Homo sapien
gctgcatggaactaaatcagggtcc

SEQ ID NO: 5469344 - DNA, 25 bp, Homo sapien
caaagtcttgtcctgctctagagcg

SEQ ID NO: 5469345 - DNA, 25 bp, Homo sapien
tatctttggactgggtccagaaatg

SEQ ID NO: 5469346 - DNA, 25 bp, Homo sapien
gcaccaagattgtgactgtacacag

SEQ ID NO: 5469347 - DNA, 25 bp, Homo sapien
tggtatgactggatgcaccagggtc

SEQ ID NO: 5469348 - DNA, 25 bp, Homo sapien
tacacagagatcttcagcctgaaag

SEQ ID NO: 5469349 - DNA, 25 bp, Homo sapien
cttatgtactgtgatgtactgttcc

SEQ ID NO: 5469350 - DNA, 25 bp, Homo sapien
tagctggagatatcgcagctccttc

SEQ ID NO: 5469351 - DNA, 25 bp, Homo sapien
aatagctggagatatcgcagctcct

SEQ ID NO: 5469352 - DNA, 25 bp, Homo sapien
cttctgcattggtcctaaaatagct

SEQ ID NO: 5469353 - DNA, 25 bp, Homo sapien
tcttctgcattggtcctaaaatagc

SEQ ID NO: 5469354 - DNA, 25 bp, Homo sapien
catcgtagctgcagcagtccaggcg

SEQ ID NO: 5469355 - DNA, 25 bp, Homo sapien
tgggacgaaaccaagtagctggcag

SEQ ID NO: 5469356 - DNA, 25 bp, Homo sapien
caagtggaggccagttgctaagccc

SEQ ID NO: 5469357 - DNA, 25 bp, Homo sapien
ccagaccatgcgtggaccagaaaga

SEQ ID NO: 5469358 - DNA, 25 bp, Homo sapien
gcatggccctgacccctggatcctt

SEQ ID NO: 5469359 - DNA, 25 bp, Homo sapien
tcctgcatggccctgacccctggat

SEQ ID NO: 5469360 - DNA, 25 bp, Homo sapien
cccatttcctgcatggccctgaccc

SEQ ID NO: 5469361 - DNA, 25 bp, Homo sapien
ccatttcctgcatggccctgacccc

SEQ ID NO: 5469362 - DNA, 25 bp, Homo sapien
gatctgactacctgtggaaccgcga

SEQ ID NO: 5469363 - DNA, 25 bp, Homo sapien
tgaactcagggacacaccagtatgg

SEQ ID NO: 5469364 - DNA, 25 bp, Homo sapien
tgaaacttggcatcagaggtccctg

SEQ ID NO: 5469365 - DNA, 25 bp, Homo sapien
tgacaccactttgagccaggaaaac

SEQ ID NO: 5469366 - DNA, 25 bp, Homo sapien
tggctgcccttatgagagttcgtcg

SEQ ID NO: 5469367 - DNA, 25 bp, Homo sapien
tgagatgttgaaagggcggctgtcc

SEQ ID NO: 5469368 - DNA, 25 bp, Homo sapien
cagtcaggggcgaagtgctggctgc

SEQ ID NO: 5469369 - DNA, 25 bp, Homo sapien
tcagcacagatggttgtcactccag

SEQ ID NO: 5469370 - DNA, 25 bp, Homo sapien
tggcactgtgacagacgaaattcac

SEQ ID NO: 5469371 - DNA, 25 bp, Homo sapien
ggcaccctggagtctatgggagtca

SEQ ID NO: 5469372 - DNA, 25 bp, Homo sapien
tgctcattaatgagggacatctcaa

SEQ ID NO: 5469373 - DNA, 25 bp, Homo sapien
gctagtgccatgaagagaatgctca

SEQ ID NO: 5469374 - DNA, 25 bp, Homo sapien
tcaagatgaatattcccgatcactg

SEQ ID NO: 5469375 - DNA, 25 bp, Homo sapien
ttgttggtgctgttcccgtgaaacc

SEQ ID NO: 5469376 - DNA, 25 bp, Homo sapien
aacagactctcttacattcttgttg

SEQ ID NO: 5469377 - DNA, 25 bp, Homo sapien
tgaagcagggcctaatgaacagact

SEQ ID NO: 5469378 - DNA, 25 bp, Homo sapien
gaattcatggtatcctgaagggctg

SEQ ID NO: 5469379 - DNA, 25 bp, Homo sapien
tttatgccaaatcgctaagcctcag

SEQ ID NO: 5469380 - DNA, 25 bp, Homo sapien
tcttggcacttgtcacgaaagggca

SEQ ID NO: 5469381 - DNA, 25 bp, Homo sapien
cgaaagggcatacatggcctgagca

SEQ ID NO: 5469382 - DNA, 25 bp, Homo sapien
agtcaacataaaccagagaaggttc

SEQ ID NO: 5469383 - DNA, 25 bp, Homo sapien
aaaaatcaaggacatcttaaagtca

SEQ ID NO: 5469384 - DNA, 25 bp, Homo sapien
aaatcaaggacatcttaaagtcaac

SEQ ID NO: 5469385 - DNA, 25 bp, Homo sapien
taaagtcaacataaaccagagaagg

SEQ ID NO: 5469386 - DNA, 25 bp, Homo sapien
ctgggcttggttgggatggacttta

SEQ ID NO: 5469387 - DNA, 25 bp, Homo sapien
cttctcggcgtaacggctgggcttg

SEQ ID NO: 5469388 - DNA, 25 bp, Homo sapien
gggatggactttaaacgtgctgaca

SEQ ID NO: 5469389 - DNA, 25 bp, Homo sapien
taggcctccttctcggcgtaacggc

SEQ ID NO: 5469390 - DNA, 25 bp, Homo sapien
gaggaagtggtcgttgaaagtgggc

SEQ ID NO: 5469391 - DNA, 25 bp, Homo sapien
ttcccgcagtaagagcgctcaggcg

SEQ ID NO: 5469392 - DNA, 25 bp, Homo sapien
cgccttggaagctgcggcggaggaa

SEQ ID NO: 5469393 - DNA, 25 bp, Homo sapien
tgaaagtgggcgtgcgattcccgca

SEQ ID NO: 5469394 - DNA, 25 bp, Homo sapien
tcggcggctgcgcagtgcgcacgtc

SEQ ID NO: 5469395 - DNA, 25 bp, Homo sapien
ctgcgcagtgcgcacgtcaaagccg

SEQ ID NO: 5469396 - DNA, 25 bp, Homo sapien
agtgcgcacgtcaaagccgggctcg

SEQ ID NO: 5469397 - DNA, 25 bp, Homo sapien
gcccgacgtcgcgtcctcggcggct

SEQ ID NO: 5469398 - DNA, 25 bp, Homo sapien
ctctccccccgtggttctctggcgg

SEQ ID NO: 5469399 - DNA, 25 bp, Homo sapien
gacgctccctttgccttcgccggcg

SEQ ID NO: 5469400 - DNA, 25 bp, Homo sapien
cggtccctcgctgagacgctccctt

SEQ ID NO: 5469401 - DNA, 25 bp, Homo sapien
tcgctgagacgctccctttgccttc

SEQ ID NO: 5469402 - DNA, 25 bp, Homo sapien
tgtagaagaactgctaagaaagtcc

SEQ ID NO: 5469403 - DNA, 25 bp, Homo sapien
cacagtttagccatctgccatgaaa

SEQ ID NO: 5469404 - DNA, 25 bp, Homo sapien
tgcaaatacgtatgccacacagggt

SEQ ID NO: 5469405 - DNA, 25 bp, Homo sapien
agttattgccatactttcccaagag

SEQ ID NO: 5469406 - DNA, 25 bp, Homo sapien
aggggacagcagaattgtggtttat

SEQ ID NO: 5469407 - DNA, 25 bp, Homo sapien
ttgtggtttatagcagctgtgatgt

SEQ ID NO: 5469408 - DNA, 25 bp, Homo sapien
gaattgtggtttatagcagctgtga

SEQ ID NO: 5469409 - DNA, 25 bp, Homo sapien
gtttatagcagctgtgatgttaagc

SEQ ID NO: 5469410 - DNA, 25 bp, Homo sapien
acgggggaggcatgcaagagcgaga

SEQ ID NO: 5469411 - DNA, 25 bp, Homo sapien
ccaaatggtatcaaacggattgaaa

SEQ ID NO: 5469412 - DNA, 25 bp, Homo sapien
gaggagtccctactcggctgcaaac

SEQ ID NO: 5469413 - DNA, 25 bp, Homo sapien
ggtatcaaacggattgaaagtgagg

SEQ ID NO: 5469414 - DNA, 25 bp, Homo sapien
gactgcttggcgctggcgccacaag

SEQ ID NO: 5469415 - DNA, 25 bp, Homo sapien
gtctttcagccattcccggtagagg

SEQ ID NO: 5469416 - DNA, 25 bp, Homo sapien
agccattcccggtagaggtcttcat

SEQ ID NO: 5469417 - DNA, 25 bp, Homo sapien
actctcgaaggcagtcccgggactg

SEQ ID NO: 5469418 - DNA, 25 bp, Homo sapien
agaaactggccaaggacaacgtagg

SEQ ID NO: 5469419 - DNA, 25 bp, Homo sapien
gaaactggccaaggacaacgtaggc

SEQ ID NO: 5469420 - DNA, 25 bp, Homo sapien
cagaaactggccaaggacaacgtag

SEQ ID NO: 5469421 - DNA, 25 bp, Homo sapien
tcctccagcttcttgcccaggactt

SEQ ID NO: 5469422 - DNA, 25 bp, Homo sapien
tccagcttcttgcccaggacttcac

SEQ ID NO: 5469423 - DNA, 25 bp, Homo sapien
cttgtcaaagcccctttcctccagc

SEQ ID NO: 5469424 - DNA, 25 bp, Homo sapien
ttgtcaaagcccctttcctccagct

SEQ ID NO: 5469425 - DNA, 25 bp, Homo sapien
ggctctgccacgaagtctcggtgct

SEQ ID NO: 5469426 - DNA, 25 bp, Homo sapien
catgggctctgccacgaagtctcgg

SEQ ID NO: 5469427 - DNA, 25 bp, Homo sapien
tctgccacgaagtctcggtgctttt

SEQ ID NO: 5469428 - DNA, 25 bp, Homo sapien
cacgaagtctcggtgcttttgggag

SEQ ID NO: 5469429 - DNA, 25 bp, Homo sapien
atcaggcttaatccgcaacttcagt

SEQ ID NO: 5469430 - DNA, 25 bp, Homo sapien
cttgatcaggcttaatccgcaactt

SEQ ID NO: 5469431 - DNA, 25 bp, Homo sapien
atccgcaacttcagttcccgtaacg

SEQ ID NO: 5469432 - DNA, 25 bp, Homo sapien
ttaatccgcaacttcagttcccgta

SEQ ID NO: 5469433 - DNA, 25 bp, Homo sapien
ttagtcctcatgttagtcttaaatg

SEQ ID NO: 5469434 - DNA, 25 bp, Homo sapien
tgtaggccctgctttagggcttttg

SEQ ID NO: 5469435 - DNA, 25 bp, Homo sapien
gacgaaggagtcactgcacttacat

SEQ ID NO: 5469436 - DNA, 25 bp, Homo sapien
agaggcattccaccccgacgaagga

SEQ ID NO: 5469437 - DNA, 25 bp, Homo sapien
ggaggaactggaatatgtgccccac

SEQ ID NO: 5469438 - DNA, 25 bp, Homo sapien
gggaggaactggaatatgtgcccca

SEQ ID NO: 5469439 - DNA, 25 bp, Homo sapien
tacattgtgctctttgctggtcgcc

SEQ ID NO: 5469440 - DNA, 25 bp, Homo sapien
ccgggtggaacactgttctgcatta

SEQ ID NO: 5469441 - DNA, 25 bp, Homo sapien
cattttggcttatctcatcggcttg

SEQ ID NO: 5469442 - DNA, 25 bp, Homo sapien
gccctgataccccttgaattcttgt

SEQ ID NO: 5469443 - DNA, 25 bp, Homo sapien
accactccataaagtgtggaatgtt

SEQ ID NO: 5469444 - DNA, 25 bp, Homo sapien
gcaccactccataaagtgtggaatg

SEQ ID NO: 5469445 - DNA, 25 bp, Homo sapien
caccactccataaagtgtggaatgt

SEQ ID NO: 5469446 - DNA, 25 bp, Homo sapien
gcctgctttttcacccgatacttta

SEQ ID NO: 5469447 - DNA, 25 bp, Homo sapien
tgcctgctttttcacccgatacttt

SEQ ID NO: 5469448 - DNA, 25 bp, Homo sapien
cctgctttttcacccgatactttat

SEQ ID NO: 5469449 - DNA, 25 bp, Homo sapien
tgctttttcacccgatactttatta

SEQ ID NO: 5469450 - DNA, 25 bp, Homo sapien
tctataacaactgcatggtacactg

SEQ ID NO: 5469451 - DNA, 25 bp, Homo sapien
tggtacactgaaatcaccacagtaa

SEQ ID NO: 5469452 - DNA, 25 bp, Homo sapien
tgttgctccaatgaagaatgaacct

SEQ ID NO: 5469453 - DNA, 25 bp, Homo sapien
gaatgaaccttagcattacagcata

SEQ ID NO: 5469454 - DNA, 25 bp, Homo sapien
ttctggcctctggctcctttctgca

SEQ ID NO: 5469455 - DNA, 25 bp, Homo sapien
cttggttctggcctctggctccttt

SEQ ID NO: 5469456 - DNA, 25 bp, Homo sapien
ggttctggcctctggctcctttctg

SEQ ID NO: 5469457 - DNA, 25 bp, Homo sapien
tggttctggcctctggctcctttct

SEQ ID NO: 5469458 - DNA, 25 bp, Homo sapien
tctgtgctgtgctcttttggagcct

SEQ ID NO: 5469459 - DNA, 25 bp, Homo sapien
ctgtgctgtgctcttttggagcctc

SEQ ID NO: 5469460 - DNA, 25 bp, Homo sapien
tgtgctgtgctcttttggagcctcc

SEQ ID NO: 5469461 - DNA, 25 bp, Homo sapien
cacactcccaccacatacggctgct

SEQ ID NO: 5469462 - DNA, 25 bp, Homo sapien
cacttctcagaagccataaggaaac

SEQ ID NO: 5469463 - DNA, 25 bp, Homo sapien
gcagtaagggatgatccgcatctct

SEQ ID NO: 5469464 - DNA, 25 bp, Homo sapien
tccctcccagacgagtcagcagtaa

SEQ ID NO: 5469465 - DNA, 25 bp, Homo sapien
taaggaaacagctaagaactgaaac

SEQ ID NO: 5469466 - DNA, 25 bp, Homo sapien
actgaaataaggtcacagctgctgt

SEQ ID NO: 5469467 - DNA, 25 bp, Homo sapien
ctgaaataaggtcacagctgctgta

SEQ ID NO: 5469468 - DNA, 25 bp, Homo sapien
tataatgcatcggtggaagggtatg

SEQ ID NO: 5469469 - DNA, 25 bp, Homo sapien
cagacctgccatgaagggcggtgta

SEQ ID NO: 5469470 - DNA, 25 bp, Homo sapien
tgtagcagcaccatgtgtcaaagag

SEQ ID NO: 5469471 - DNA, 25 bp, Homo sapien
tcggtggaagggtatgtcccattca

SEQ ID NO: 5469472 - DNA, 25 bp, Homo sapien
tcctctcctgtcttgctgctagtct

SEQ ID NO: 5469473 - DNA, 25 bp, Homo sapien
ctcctgtcttgctgctagtctcctg

SEQ ID NO: 5469474 - DNA, 25 bp, Homo sapien
ctgcacaccagaggcgctgacaagg

SEQ ID NO: 5469475 - DNA, 25 bp, Homo sapien
caaggagggacacgttgctgctcct

SEQ ID NO: 5469476 - DNA, 25 bp, Homo sapien
aaagaagaatagatctatggttcat

SEQ ID NO: 5469477 - DNA, 25 bp, Homo sapien
gaaaagaagaatagatctatggttc

SEQ ID NO: 5469478 - DNA, 25 bp, Homo sapien
tggaaaagaagaatagatctatggt

SEQ ID NO: 5469479 - DNA, 25 bp, Homo sapien
taatggaaaagaagaatagatctat

SEQ ID NO: 5469480 - DNA, 25 bp, Homo sapien
tcctttgataggaacactccaccgt

SEQ ID NO: 5469481 - DNA, 25 bp, Homo sapien
gcagttaagaagtgcataccctcca

SEQ ID NO: 5469482 - DNA, 25 bp, Homo sapien
ggtgtctggaccgataatgaccaag

SEQ ID NO: 5469483 - DNA, 25 bp, Homo sapien
aattaagtagatgcctcagagaccc

SEQ ID NO: 5469484 - DNA, 25 bp, Homo sapien
cagtagagctagcaatgacaccttg

SEQ ID NO: 5469485 - DNA, 25 bp, Homo sapien
taattgaaatacttcagatcacatg

SEQ ID NO: 5469486 - DNA, 25 bp, Homo sapien
gcagaggaatgttattgtagtagta

SEQ ID NO: 5469487 - DNA, 25 bp, Homo sapien
tatgtaactattacctaatactgag

SEQ ID NO: 5469488 - DNA, 25 bp, Homo sapien
tatactggccagtaaaatgggcctc

SEQ ID NO: 5469489 - DNA, 25 bp, Homo sapien
ggcagtctacatcataattggcatt

SEQ ID NO: 5469490 - DNA, 25 bp, Homo sapien
tgtgaccacggcagaacaatgtctt

SEQ ID NO: 5469491 - DNA, 25 bp, Homo sapien
aagacttggccgtgatgtggtgtcc

SEQ ID NO: 5469492 - DNA, 25 bp, Homo sapien
gcagcgtgtcagacacaacattcat

SEQ ID NO: 5469493 - DNA, 25 bp, Homo sapien
tgaggtcgtagccttttaggtggaa

SEQ ID NO: 5469494 - DNA, 25 bp, Homo sapien
agcttccactttggcagtgaggtcg

SEQ ID NO: 5469495 - DNA, 25 bp, Homo sapien
tgagggtgcagcgtgtcagacacaa

SEQ ID NO: 5469496 - DNA, 25 bp, Homo sapien
gcaccaaaatatatccgatatcaag

SEQ ID NO: 5469497 - DNA, 25 bp, Homo sapien
gacagctggcattgcaagaaacatt

SEQ ID NO: 5469498 - DNA, 25 bp, Homo sapien
tttagaagatgcaccaaaatatatc

SEQ ID NO: 5469499 - DNA, 25 bp, Homo sapien
gctggcattgcaagaaacattcagt

SEQ ID NO: 5469500 - DNA, 25 bp, Homo sapien
ttcagctagctcctcagtggaaaag

SEQ ID NO: 5469501 - DNA, 25 bp, Homo sapien
tcagctagctcctcagtggaaaaga

SEQ ID NO: 5469502 - DNA, 25 bp, Homo sapien
agctagctcctcagtggaaaagagg

SEQ ID NO: 5469503 - DNA, 25 bp, Homo sapien
cagctagctcctcagtggaaaagag

SEQ ID NO: 5469504 - DNA, 25 bp, Homo sapien
gacataagccacctaaagccatggc

SEQ ID NO: 5469505 - DNA, 25 bp, Homo sapien
acataagccacctaaagccatggct

SEQ ID NO: 5469506 - DNA, 25 bp, Homo sapien
agacataagccacctaaagccatgg

SEQ ID NO: 5469507 - DNA, 25 bp, Homo sapien
agaggaggtagcatgctggtcccaa

SEQ ID NO: 5469508 - DNA, 25 bp, Homo sapien
gggaccgctttgcatggctgccacc

SEQ ID NO: 5469509 - DNA, 25 bp, Homo sapien
tcccaaggggcatgatggtatcact

SEQ ID NO: 5469510 - DNA, 25 bp, Homo sapien
tgcccctccaagaggaggtagcatg

SEQ ID NO: 5469511 - DNA, 25 bp, Homo sapien
taaggagaggcccgagggggatgtg

SEQ ID NO: 5469512 - DNA, 25 bp, Homo sapien
cgtaaggagaggcccgagggggatg

SEQ ID NO: 5469513 - DNA, 25 bp, Homo sapien
aggagaggcccgagggggatgtgca

SEQ ID NO: 5469514 - DNA, 25 bp, Homo sapien
gagaggcccgagggggatgtgcaca

SEQ ID NO: 5469515 - DNA, 25 bp, Homo sapien
gagcaggtgatgagcggtagtccat

SEQ ID NO: 5469516 - DNA, 25 bp, Homo sapien
agcaggtgatgagcggtagtccata

SEQ ID NO: 5469517 - DNA, 25 bp, Homo sapien
ggtgatgagcggtagtccataacac

SEQ ID NO: 5469518 - DNA, 25 bp, Homo sapien
caggtgatgagcggtagtccataac

SEQ ID NO: 5469519 - DNA, 25 bp, Homo sapien
tctgtcctcaaggttgctaggttca

SEQ ID NO: 5469520 - DNA, 25 bp, Homo sapien
tgtgccaaaccagattcctcctcgt

SEQ ID NO: 5469521 - DNA, 25 bp, Homo sapien
ccccaggctggtggccttagcatca

SEQ ID NO: 5469522 - DNA, 25 bp, Homo sapien
gctaggttcatccaagatctgagcc

SEQ ID NO: 5469523 - DNA, 25 bp, Homo sapien
agtcttgagtggaacccgagcctct

SEQ ID NO: 5469524 - DNA, 25 bp, Homo sapien
agcagagtcttgagtggaacccgag

SEQ ID NO: 5469525 - DNA, 25 bp, Homo sapien
aggagcagagtcttgagtggaaccc

SEQ ID NO: 5469526 - DNA, 25 bp, Homo sapien
tgagtggaacccgagcctctgacac

SEQ ID NO: 5469527 - DNA, 25 bp, Homo sapien
gcctgcagagctcggagcggcggag

SEQ ID NO: 5469528 - DNA, 25 bp, Homo sapien
gcgagcgggatccaaacttccggtg

SEQ ID NO: 5469529 - DNA, 25 bp, Homo sapien
gaagtctcgaatggttgcttatccc

SEQ ID NO: 5469530 - DNA, 25 bp, Homo sapien
gcagggttgggaagtctcgaatggt

SEQ ID NO: 5469531 - DNA, 25 bp, Homo sapien
gttgggaagtctcgaatggttgctt

SEQ ID NO: 5469532 - DNA, 25 bp, Homo sapien
gtctcgaatggttgcttatcccaga

SEQ ID NO: 5469533 - DNA, 25 bp, Homo sapien
tcaactgggaaagccgcgagtcgag

SEQ ID NO: 5469534 - DNA, 25 bp, Homo sapien
tacgcgtctggttccaatcaactgg

SEQ ID NO: 5469535 - DNA, 25 bp, Homo sapien
cgtctggttctggtcttcaggtgga

SEQ ID NO: 5469536 - DNA, 25 bp, Homo sapien
caaaagctgaagtccgaagagtggg

SEQ ID NO: 5469537 - DNA, 25 bp, Homo sapien
acgccctgccgtctgggcctccctg

SEQ ID NO: 5469538 - DNA, 25 bp, Homo sapien
ccacgccctgccgtctgggcctccc

SEQ ID NO: 5469539 - DNA, 25 bp, Homo sapien
tctccattcccagcctctcgctggg

SEQ ID NO: 5469540 - DNA, 25 bp, Homo sapien
gggagggctcccaactgccccagtg

SEQ ID NO: 5469541 - DNA, 25 bp, Homo sapien
agagaaggcatttccgccgtggaaa

SEQ ID NO: 5469542 - DNA, 25 bp, Homo sapien
ttttattgtgcctggcaaaggtgtc

SEQ ID NO: 5469543 - DNA, 25 bp, Homo sapien
aaaactgtctgagctgcgtgccttg

SEQ ID NO: 5469544 - DNA, 25 bp, Homo sapien
caaaggtgtctacgtgggcgccgcc

SEQ ID NO: 5469545 - DNA, 25 bp, Homo sapien
tcttggagggtacactttcttcact

SEQ ID NO: 5469546 - DNA, 25 bp, Homo sapien
caactgttctctgagtggaaccaaa

SEQ ID NO: 5469547 - DNA, 25 bp, Homo sapien
gacccaccagagcacaagagaaggt

SEQ ID NO: 5469548 - DNA, 25 bp, Homo sapien
caaagaagcaaggagctaggacccc

SEQ ID NO: 5469549 - DNA, 25 bp, Homo sapien
tcactgctcagtcacgtccacgggg

SEQ ID NO: 5469550 - DNA, 25 bp, Homo sapien
ctgagtaggtggagctcattgcttt

SEQ ID NO: 5469551 - DNA, 25 bp, Homo sapien
cagtcacgtccacgggggacgagcc

SEQ ID NO: 5469552 - DNA, 25 bp, Homo sapien
ttctgctgagtaggtggagctcatt

SEQ ID NO: 5469553 - DNA, 25 bp, Homo sapien
gcatgtttttactgatcattcgata

SEQ ID NO: 5469554 - DNA, 25 bp, Homo sapien
gaggagggctgtaacgccttcagtc

SEQ ID NO: 5469555 - DNA, 25 bp, Homo sapien
tatgctaaccgttctcagccctgag

SEQ ID NO: 5469556 - DNA, 25 bp, Homo sapien
ttgaaagataacacagagggaaagg

SEQ ID NO: 5469557 - DNA, 25 bp, Homo sapien
gtgctccgggcagggtcgaggagct

SEQ ID NO: 5469558 - DNA, 25 bp, Homo sapien
ggtgctccgggcagggtcgaggagc

SEQ ID NO: 5469559 - DNA, 25 bp, Homo sapien
tccgggcagggtcgaggagctggac

SEQ ID NO: 5469560 - DNA, 25 bp, Homo sapien
gctccgggcagggtcgaggagctgg

SEQ ID NO: 5469561 - DNA, 25 bp, Homo sapien
tgacatctggcccctaaagagctgg

SEQ ID NO: 5469562 - DNA, 25 bp, Homo sapien
ttgacatctggcccctaaagagctg

SEQ ID NO: 5469563 - DNA, 25 bp, Homo sapien
gtctggacaatttgtaaccattcct

SEQ ID NO: 5469564 - DNA, 25 bp, Homo sapien
ggcagatgacatcattattgcatgt

SEQ ID NO: 5469565 - DNA, 25 bp, Homo sapien
gtccttaagcacaagggcggtgtcc

SEQ ID NO: 5469566 - DNA, 25 bp, Homo sapien
gtgtcctattctccaccacgtctgg

SEQ ID NO: 5469567 - DNA, 25 bp, Homo sapien
agtcctagaagggtcggcagtcacg

SEQ ID NO: 5469568 - DNA, 25 bp, Homo sapien
tgccagagcacggaggcagagacgt

SEQ ID NO: 5469569 - DNA, 25 bp, Homo sapien
atctccgtatccttgctgcatgctg

SEQ ID NO: 5469570 - DNA, 25 bp, Homo sapien
cagagacgtgggagccgatgaaggt

SEQ ID NO: 5469571 - DNA, 25 bp, Homo sapien
gtccacagggctcccttccaaatta

SEQ ID NO: 5469572 - DNA, 25 bp, Homo sapien
agcagtctcagtgaagcccctctca

SEQ ID NO: 5469573 - DNA, 25 bp, Homo sapien
tgctccaagcaacaagcaggcagct

SEQ ID NO: 5469574 - DNA, 25 bp, Homo sapien
ttccaaattactcccaggccccatg

SEQ ID NO: 5469575 - DNA, 25 bp, Homo sapien
ggagtctgaacctgaggccacctgc

SEQ ID NO: 5469576 - DNA, 25 bp, Homo sapien
gcagctggttctaagtggaggaggg

SEQ ID NO: 5469577 - DNA, 25 bp, Homo sapien
ccacggggagtctgaacctgaggcc

SEQ ID NO: 5469578 - DNA, 25 bp, Homo sapien
gggcagctggttctaagtggaggag

SEQ ID NO: 5469579 - DNA, 25 bp, Homo sapien
gctagctgcacctcaatgcaggtga

SEQ ID NO: 5469580 - DNA, 25 bp, Homo sapien
tcaccgctagctgcacctcaatgca

SEQ ID NO: 5469581 - DNA, 25 bp, Homo sapien
tggtccccgtcctcaccgctagctg

SEQ ID NO: 5469582 - DNA, 25 bp, Homo sapien
tctctggtccccgtcctcaccgcta

SEQ ID NO: 5469583 - DNA, 25 bp, Homo sapien
gtccctgaactcctgattccggtcc

SEQ ID NO: 5469584 - DNA, 25 bp, Homo sapien
ctgattccggtccactgttaccggg

SEQ ID NO: 5469585 - DNA, 25 bp, Homo sapien
tcctgattccggtccactgttaccg

SEQ ID NO: 5469586 - DNA, 25 bp, Homo sapien
gaactcctgattccggtccactgtt

SEQ ID NO: 5469587 - DNA, 25 bp, Homo sapien
gcttccagttggatcgcttctgact

SEQ ID NO: 5469588 - DNA, 25 bp, Homo sapien
ttccagttggatcgcttctgacttt

SEQ ID NO: 5469589 - DNA, 25 bp, Homo sapien
agttggatcgcttctgactttgtct

SEQ ID NO: 5469590 - DNA, 25 bp, Homo sapien
ccagttggatcgcttctgactttgt

SEQ ID NO: 5469591 - DNA, 25 bp, Homo sapien
cagaaggtggtgtcacagttttcca

SEQ ID NO: 5469592 - DNA, 25 bp, Homo sapien
acagcatttcggtgactggtgccaa

SEQ ID NO: 5469593 - DNA, 25 bp, Homo sapien
gcatgacattgttcagctcacccag

SEQ ID NO: 5469594 - DNA, 25 bp, Homo sapien
gagggctgcgttcaccagtttcaca

SEQ ID NO: 5469595 - DNA, 25 bp, Homo sapien
ctgggtggacatggttcctccgtga

SEQ ID NO: 5469596 - DNA, 25 bp, Homo sapien
caaggacacggtaagctggacagac

SEQ ID NO: 5469597 - DNA, 25 bp, Homo sapien
ggacagactcctgcacggtgtaggc

SEQ ID NO: 5469598 - DNA, 25 bp, Homo sapien
caaaccacgctgattgaccttggag

SEQ ID NO: 5469599 - DNA, 25 bp, Homo sapien
tgataatctctttgtgcaaacacca

SEQ ID NO: 5469600 - DNA, 25 bp, Homo sapien
aagccctggttagaggtgtggacac

SEQ ID NO: 5469601 - DNA, 25 bp, Homo sapien
tcctggccacctgataatctctttg

SEQ ID NO: 5469602 - DNA, 25 bp, Homo sapien
gactgctccagtctgatcgttcctg

SEQ ID NO: 5469603 - DNA, 25 bp, Homo sapien
cttgaggaggacagtggtgactcag

SEQ ID NO: 5469604 - DNA, 25 bp, Homo sapien
ggaggacagtggtgactcagtttta

SEQ ID NO: 5469605 - DNA, 25 bp, Homo sapien
cagtggtgactcagttttatctgac

SEQ ID NO: 5469606 - DNA, 25 bp, Homo sapien
gacagtggtgactcagttttatctg

SEQ ID NO: 5469607 - DNA, 25 bp, Homo sapien
tcctccgccgtggttgactggacca

SEQ ID NO: 5469608 - DNA, 25 bp, Homo sapien
tcacaggtagcccatcctcaggctg

SEQ ID NO: 5469609 - DNA, 25 bp, Homo sapien
gctgccagtgatggacacgggtgga

SEQ ID NO: 5469610 - DNA, 25 bp, Homo sapien
gaggagcacgtgattcacaggtagc

SEQ ID NO: 5469611 - DNA, 25 bp, Homo sapien
tgtcagatgccgatgaatcaagcag

SEQ ID NO: 5469612 - DNA, 25 bp, Homo sapien
ccatgggatcacagaggagggaccc

SEQ ID NO: 5469613 - DNA, 25 bp, Homo sapien
cagcgtccttagacagggccttgca

SEQ ID NO: 5469614 - DNA, 25 bp, Homo sapien
agcaagggccaacatctgaccaggt

SEQ ID NO: 5469615 - DNA, 25 bp, Homo sapien
aagggaagaatctgcacgtggctcc

SEQ ID NO: 5469616 - DNA, 25 bp, Homo sapien
caggaaagggaagaatctgcacgtg

SEQ ID NO: 5469617 - DNA, 25 bp, Homo sapien
ctgcctgcaccacccgagttttcat

SEQ ID NO: 5469618 - DNA, 25 bp, Homo sapien
tgcaccacccgagttttcatccaag

SEQ ID NO: 5469619 - DNA, 25 bp, Homo sapien
tatgagaatcttcttaactggtgat

SEQ ID NO: 5469620 - DNA, 25 bp, Homo sapien
gaaatatgagaatcttcttaactgg

SEQ ID NO: 5469621 - DNA, 25 bp, Homo sapien
tgagaatcttcttaactggtgattg

SEQ ID NO: 5469622 - DNA, 25 bp, Homo sapien
cttcttaactggtgattggggcaca

SEQ ID NO: 5469623 - DNA, 25 bp, Homo sapien
caggaaccccggcattatcatcaat

SEQ ID NO: 5469624 - DNA, 25 bp, Homo sapien
ggagcaagcccctagctgtctgtta

SEQ ID NO: 5469625 - DNA, 25 bp, Homo sapien
tgttattattagctggtgctatggg

SEQ ID NO: 5469626 - DNA, 25 bp, Homo sapien
aatcctaccagagggcttctgcaca

SEQ ID NO: 5469627 - DNA, 25 bp, Homo sapien
catagtcgtagaaactgccaaattc

SEQ ID NO: 5469628 - DNA, 25 bp, Homo sapien
ggaactgtcctccacgtgtatctga

SEQ ID NO: 5469629 - DNA, 25 bp, Homo sapien
gcatctcccatcatagtcgtagaaa

SEQ ID NO: 5469630 - DNA, 25 bp, Homo sapien
cattcagtgggaaccctagcatctc

SEQ ID NO: 5469631 - DNA, 25 bp, Homo sapien
gacactgttgcagcttggtgtctca

SEQ ID NO: 5469632 - DNA, 25 bp, Homo sapien
ggcttaagactcttcttagttatca

SEQ ID NO: 5469633 - DNA, 25 bp, Homo sapien
tggttgaggttcaggcttaagactc

SEQ ID NO: 5469634 - DNA, 25 bp, Homo sapien
caaggagggacgctgctgccccaga

SEQ ID NO: 5469635 - DNA, 25 bp, Homo sapien
gagactgctgataccctccaaggac

SEQ ID NO: 5469636 - DNA, 25 bp, Homo sapien
tggtagacccaagtgcacatgacgg

SEQ ID NO: 5469637 - DNA, 25 bp, Homo sapien
cgttgcatgtgaaagtctggctccc

SEQ ID NO: 5469638 - DNA, 25 bp, Homo sapien
tccctcagagtatcacgggtgggtc

SEQ ID NO: 5469639 - DNA, 25 bp, Homo sapien
tacagggtgccacttgaacacagca

SEQ ID NO: 5469640 - DNA, 25 bp, Homo sapien
tgctcctgagaaggcgactcctgtc

SEQ ID NO: 5469641 - DNA, 25 bp, Homo sapien
gaacacagcaacagcgggagctgct

SEQ ID NO: 5469642 - DNA, 25 bp, Homo sapien
cagctgggaaagctctcaggcagga

SEQ ID NO: 5469643 - DNA, 25 bp, Homo sapien
tcaaaaccctggaacgcgatatccg

SEQ ID NO: 5469644 - DNA, 25 bp, Homo sapien
ggtataatgagcaaagctggcactc

SEQ ID NO: 5469645 - DNA, 25 bp, Homo sapien
cgttaccagaattcagggccagggc

SEQ ID NO: 5469646 - DNA, 25 bp, Homo sapien
cagagatccctgaacactgggtggt

SEQ ID NO: 5469647 - DNA, 25 bp, Homo sapien
aggaaggagaccacgaagacagcca

SEQ ID NO: 5469648 - DNA, 25 bp, Homo sapien
ggctctgcactctacgataaagctg

SEQ ID NO: 5469649 - DNA, 25 bp, Homo sapien
gcagcagttgacgttggagaaacac

SEQ ID NO: 5469650 - DNA, 25 bp, Homo sapien
catggacaattgcaagaagaagctg

SEQ ID NO: 5469651 - DNA, 25 bp, Homo sapien
cctgggtgtggtctcggcggcccag

SEQ ID NO: 5469652 - DNA, 25 bp, Homo sapien
caaacacctccagcgggaagaagac

SEQ ID NO: 5469653 - DNA, 25 bp, Homo sapien
gaagccaaacacctccagcgggaag

SEQ ID NO: 5469654 - DNA, 25 bp, Homo sapien
tgggtgtggtctcggcggcccagca

SEQ ID NO: 5469655 - DNA, 25 bp, Homo sapien
tagatagggatgcttccggtccaca

SEQ ID NO: 5469656 - DNA, 25 bp, Homo sapien
tagcgggtaacggatggccaagaac

SEQ ID NO: 5469657 - DNA, 25 bp, Homo sapien
aagaaccggtccatgctgatgaagc

SEQ ID NO: 5469658 - DNA, 25 bp, Homo sapien
gaagacgcttccgtacatgctgacg

SEQ ID NO: 5469659 - DNA, 25 bp, Homo sapien
gttgacaccgtcaaacaggcagtcc

SEQ ID NO: 5469660 - DNA, 25 bp, Homo sapien
tcgttgacaccgtcaaacaggcagt

SEQ ID NO: 5469661 - DNA, 25 bp, Homo sapien
tcagctcgttgacaccgtcaaacag

SEQ ID NO: 5469662 - DNA, 25 bp, Homo sapien
tttcatcagctcgttgacaccgtca

SEQ ID NO: 5469663 - DNA, 25 bp, Homo sapien
atcacacagcaattcatgcccattg

SEQ ID NO: 5469664 - DNA, 25 bp, Homo sapien
ctacaacaccaacagatcagacggg

SEQ ID NO: 5469665 - DNA, 25 bp, Homo sapien
gcaattcatgcccattgaatcacaa

SEQ ID NO: 5469666 - DNA, 25 bp, Homo sapien
tgactttgtcaagaatcacaaacac

SEQ ID NO: 5469667 - DNA, 25 bp, Homo sapien
ggacaaaccaggtctgcctgccgct

SEQ ID NO: 5469668 - DNA, 25 bp, Homo sapien
acacctgggactgctcgctgagttg

SEQ ID NO: 5469669 - DNA, 25 bp, Homo sapien
gccccactgatcttaggagagttac

SEQ ID NO: 5469670 - DNA, 25 bp, Homo sapien
ttgggacaggtgtgcacaaagccca

SEQ ID NO: 5469671 - DNA, 25 bp, Homo sapien
ctgttggtggtccggtgcagctgag

SEQ ID NO: 5469672 - DNA, 25 bp, Homo sapien
gttggtggtccggtgcagctgagag

SEQ ID NO: 5469673 - DNA, 25 bp, Homo sapien
cagctgagagggctgagagatgtca

SEQ ID NO: 5469674 - DNA, 25 bp, Homo sapien
agagggctgagagatgtcatttctc

SEQ ID NO: 5469675 - DNA, 25 bp, Homo sapien
gggcttgtgcgatgggcagtgccaa

SEQ ID NO: 5469676 - DNA, 25 bp, Homo sapien
gcgatgggcagtgccaagtccactg

SEQ ID NO: 5469677 - DNA, 25 bp, Homo sapien
ttgtgcgatgggcagtgccaagtcc

SEQ ID NO: 5469678 - DNA, 25 bp, Homo sapien
tgcgatgggcagtgccaagtccact

SEQ ID NO: 5469679 - DNA, 25 bp, Homo sapien
gccccttctcaaagggagccttgtc

SEQ ID NO: 5469680 - DNA, 25 bp, Homo sapien
agcctgcaatgtgaggccccaggaa

SEQ ID NO: 5469681 - DNA, 25 bp, Homo sapien
agagcctgcaatgtgaggccccagg

SEQ ID NO: 5469682 - DNA, 25 bp, Homo sapien
gagcctgcaatgtgaggccccagga

SEQ ID NO: 5469683 - DNA, 25 bp, Homo sapien
agatagaagactacagaagacagac

SEQ ID NO: 5469684 - DNA, 25 bp, Homo sapien
gtaacaaattctggtggtggacaaa

SEQ ID NO: 5469685 - DNA, 25 bp, Homo sapien
cctcggtagtaacaaattctggtgg

SEQ ID NO: 5469686 - DNA, 25 bp, Homo sapien
ctggccctcctcggtagtaacaaat

SEQ ID NO: 5469687 - DNA, 25 bp, Homo sapien
tattaggccaagatgccacgaggtc

SEQ ID NO: 5469688 - DNA, 25 bp, Homo sapien
tggaagcagggtgtcccagtagcat

SEQ ID NO: 5469689 - DNA, 25 bp, Homo sapien
gagatgcaccctgtagtattaggcc

SEQ ID NO: 5469690 - DNA, 25 bp, Homo sapien
tcagtgaaatgacgctggcagaagc

SEQ ID NO: 5469691 - DNA, 25 bp, Homo sapien
atgtgggcaaaccctcctgcaggca

SEQ ID NO: 5469692 - DNA, 25 bp, Homo sapien
acatgtgggcaaaccctcctgcagg

SEQ ID NO: 5469693 - DNA, 25 bp, Homo sapien
catgtgggcaaaccctcctgcaggc

SEQ ID NO: 5469694 - DNA, 25 bp, Homo sapien
catgggcgtttctgaagctcaggga

SEQ ID NO: 5469695 - DNA, 25 bp, Homo sapien
tcatgggcgtttctgaagctcaggg

SEQ ID NO: 5469696 - DNA, 25 bp, Homo sapien
tggccgatgtctgcgtcctctgctc

SEQ ID NO: 5469697 - DNA, 25 bp, Homo sapien
gtgctggccgatgtctgcgtcctct

SEQ ID NO: 5469698 - DNA, 25 bp, Homo sapien
tgctggccgatgtctgcgtcctctg

SEQ ID NO: 5469699 - DNA, 25 bp, Homo sapien
aggtgctggccgatgtctgcgtcct

SEQ ID NO: 5469700 - DNA, 25 bp, Homo sapien
agtctgcacacggccaggagatgaa

SEQ ID NO: 5469701 - DNA, 25 bp, Homo sapien
gtctgcacacggccaggagatgaag

SEQ ID NO: 5469702 - DNA, 25 bp, Homo sapien
ggatccccaaggcgagtcctcagcc

SEQ ID NO: 5469703 - DNA, 25 bp, Homo sapien
tgagtaggtgtgagtctgcacacgg

SEQ ID NO: 5469704 - DNA, 25 bp, Homo sapien
gggcttctgagcaagttccgagatg

SEQ ID NO: 5469705 - DNA, 25 bp, Homo sapien
gcccaggaagccaaatcgtaacaga

SEQ ID NO: 5469706 - DNA, 25 bp, Homo sapien
tggctatgcagccccgtaatcgtgc

SEQ ID NO: 5469707 - DNA, 25 bp, Homo sapien
ttccgagatgcaaaggtttcacagc

SEQ ID NO: 5469708 - DNA, 25 bp, Homo sapien
ccaggcttcaggcaacaggagagga

SEQ ID NO: 5469709 - DNA, 25 bp, Homo sapien
catggtacctgacgaattgctggag

SEQ ID NO: 5469710 - DNA, 25 bp, Homo sapien
caggagccggcaacttgtaggagca

SEQ ID NO: 5469711 - DNA, 25 bp, Homo sapien
tgtagtagggaagccccacattttc

SEQ ID NO: 5469712 - DNA, 25 bp, Homo sapien
gggccaccattagacgcactacagt

SEQ ID NO: 5469713 - DNA, 25 bp, Homo sapien
gccactcatactggaactgtgctga

SEQ ID NO: 5469714 - DNA, 25 bp, Homo sapien
ttctgagaaatgctagtgggcccca

SEQ ID NO: 5469715 - DNA, 25 bp, Homo sapien
gagtcctatgaccttgagccttgat

SEQ ID NO: 5469716 - DNA, 25 bp, Homo sapien
tcatttggcaattaatcctactctc

SEQ ID NO: 5469717 - DNA, 25 bp, Homo sapien
catttggcaattaatcctactctca

SEQ ID NO: 5469718 - DNA, 25 bp, Homo sapien
atttggcaattaatcctactctcac

SEQ ID NO: 5469719 - DNA, 25 bp, Homo sapien
gctaacaagcctctcgtcaaaacca

SEQ ID NO: 5469720 - DNA, 25 bp, Homo sapien
ttcaaaagcgtagagaagctaacaa

SEQ ID NO: 5469721 - DNA, 25 bp, Homo sapien
tctcgtcaaaaccaccctcaaagat

SEQ ID NO: 5469722 - DNA, 25 bp, Homo sapien
agtgggcgtttcaaaagcgtagaga

SEQ ID NO: 5469723 - DNA, 25 bp, Homo sapien
cttcaggtcttcaacagagggagca

SEQ ID NO: 5469724 - DNA, 25 bp, Homo sapien
tgatgctgcagttctagtcccaaag

SEQ ID NO: 5469725 - DNA, 25 bp, Homo sapien
gccagtaagcccacatctgcagggt

SEQ ID NO: 5469726 - DNA, 25 bp, Homo sapien
taaggaaccggctcactgatcgtgg

SEQ ID NO: 5469727 - DNA, 25 bp, Homo sapien
ctgtctacttggaggaaagggaccg

SEQ ID NO: 5469728 - DNA, 25 bp, Homo sapien
gagccgatgaggagatgcctcctgt

SEQ ID NO: 5469729 - DNA, 25 bp, Homo sapien
taactcatccggagtcacgcggttc

SEQ ID NO: 5469730 - DNA, 25 bp, Homo sapien
gaattccacctttgcactcggctct

SEQ ID NO: 5469731 - DNA, 25 bp, Homo sapien
gattccttgagtccacgtggatccg

SEQ ID NO: 5469732 - DNA, 25 bp, Homo sapien
cggagattccttgagtccacgtgga

SEQ ID NO: 5469733 - DNA, 25 bp, Homo sapien
ccccggagattccttgagtccacgt

SEQ ID NO: 5469734 - DNA, 25 bp, Homo sapien
ccttgagtccacgtggatccgagag

SEQ ID NO: 5469735 - DNA, 25 bp, Homo sapien
tctggtggccggtgacgctcagcca

SEQ ID NO: 5469736 - DNA, 25 bp, Homo sapien
ccctctggtggccggtgacgctcag

SEQ ID NO: 5469737 - DNA, 25 bp, Homo sapien
gacgctcagccagcgccgggaatcg

SEQ ID NO: 5469738 - DNA, 25 bp, Homo sapien
gctgtgatccccgggcgaccggacc

SEQ ID NO: 5469739 - DNA, 25 bp, Homo sapien
tagatgacctatgtacccagcacct

SEQ ID NO: 5469740 - DNA, 25 bp, Homo sapien
gccagcgcgggaggcagatttatcc

SEQ ID NO: 5469741 - DNA, 25 bp, Homo sapien
tgaacaagacgcttaactctccgag

SEQ ID NO: 5469742 - DNA, 25 bp, Homo sapien
gcctgatcgcccaagcagagactgt

SEQ ID NO: 5469743 - DNA, 25 bp, Homo sapien
agtgtccctcctgtgtgacgtgaag

SEQ ID NO: 5469744 - DNA, 25 bp, Homo sapien
tcaggtacccaaggtctgccactct

SEQ ID NO: 5469745 - DNA, 25 bp, Homo sapien
tggtgaccagagcaggcatcctctc

SEQ ID NO: 5469746 - DNA, 25 bp, Homo sapien
ccctcctgtgtgacgtgaaggtgaa

SEQ ID NO: 5469747 - DNA, 25 bp, Homo sapien
caaatggtgacacacttattctagg

SEQ ID NO: 5469748 - DNA, 25 bp, Homo sapien
tgacacacttattctaggtgcccag

SEQ ID NO: 5469749 - DNA, 25 bp, Homo sapien
cttcaggacaaatggtgacacactt

SEQ ID NO: 5469750 - DNA, 25 bp, Homo sapien
tcaggacaaatggtgacacacttat

SEQ ID NO: 5469751 - DNA, 25 bp, Homo sapien
ttgcattaagcccctactctggact

SEQ ID NO: 5469752 - DNA, 25 bp, Homo sapien
cttgcattaagcccctactctggac

SEQ ID NO: 5469753 - DNA, 25 bp, Homo sapien
gcttgcattaagcccctactctgga

SEQ ID NO: 5469754 - DNA, 25 bp, Homo sapien
tgttgcagtcacagtatgagcttca

SEQ ID NO: 5469755 - DNA, 25 bp, Homo sapien
tcacagtatgagcttcagattgtct

SEQ ID NO: 5469756 - DNA, 25 bp, Homo sapien
gaaagcagtctcctcaggtgaacac

SEQ ID NO: 5469757 - DNA, 25 bp, Homo sapien
cactggcgatgaaagcagtctcctc

SEQ ID NO: 5469758 - DNA, 25 bp, Homo sapien
tgggccatggtaaagccttcgaaga

SEQ ID NO: 5469759 - DNA, 25 bp, Homo sapien
tactctgagatggtagcaggctctg

SEQ ID NO: 5469760 - DNA, 25 bp, Homo sapien
taaagccttcgaagaagctccaaat

SEQ ID NO: 5469761 - DNA, 25 bp, Homo sapien
ctactctgagatggtagcaggctct

SEQ ID NO: 5469762 - DNA, 25 bp, Homo sapien
gccagtgacagagctgagcgtcaca

SEQ ID NO: 5469763 - DNA, 25 bp, Homo sapien
gaagccagtgacagagctgagcgtc

SEQ ID NO: 5469764 - DNA, 25 bp, Homo sapien
tgacagagctgagcgtcacatccag

SEQ ID NO: 5469765 - DNA, 25 bp, Homo sapien
cagtgacagagctgagcgtcacatc

SEQ ID NO: 5469766 - DNA, 25 bp, Homo sapien
atggacccaggaacacgccagcaga

SEQ ID NO: 5469767 - DNA, 25 bp, Homo sapien
tctggctgtcaccagccccgtagcc

SEQ ID NO: 5469768 - DNA, 25 bp, Homo sapien
aaggcagcgctcaggtcgcagaagc

SEQ ID NO: 5469769 - DNA, 25 bp, Homo sapien
tcaggtcgcagaagcatgaggatct

SEQ ID NO: 5469770 - DNA, 25 bp, Homo sapien
aaggaggacaccaggctggtgtctg

SEQ ID NO: 5469771 - DNA, 25 bp, Homo sapien
atgaaggaggacaccaggctggtgt

SEQ ID NO: 5469772 - DNA, 25 bp, Homo sapien
tgggatgaaggaggacaccaggctg

SEQ ID NO: 5469773 - DNA, 25 bp, Homo sapien
ctgggatgaaggaggacaccaggct

SEQ ID NO: 5469774 - DNA, 25 bp, Homo sapien
agcatgctagctccaattccacctc

SEQ ID NO: 5469775 - DNA, 25 bp, Homo sapien
aaggtcagaggccagacgccaccga

SEQ ID NO: 5469776 - DNA, 25 bp, Homo sapien
catgtaggtccacgtttaggttggg

SEQ ID NO: 5469777 - DNA, 25 bp, Homo sapien
tgggaggatctaccatgaagaaggt

SEQ ID NO: 5469778 - DNA, 25 bp, Homo sapien
tctgtcaagaagacgcagggctaca

SEQ ID NO: 5469779 - DNA, 25 bp, Homo sapien
tatctccagatgctaacgtgaaggc

SEQ ID NO: 5469780 - DNA, 25 bp, Homo sapien
tctgtaatctactccccaaaagggc

SEQ ID NO: 5469781 - DNA, 25 bp, Homo sapien
cattccgggaaagtacgtgtcgtgg

SEQ ID NO: 5469782 - DNA, 25 bp, Homo sapien
gccattttcccatgcggtcagtctt

SEQ ID NO: 5469783 - DNA, 25 bp, Homo sapien
tttcccatgcggtcagtcttctctt

SEQ ID NO: 5469784 - DNA, 25 bp, Homo sapien
attttcccatgcggtcagtcttctc

SEQ ID NO: 5469785 - DNA, 25 bp, Homo sapien
gttgtcgtcgctgttgctactccca

SEQ ID NO: 5469786 - DNA, 25 bp, Homo sapien
gtccatcacccataaagcccccttc

SEQ ID NO: 5469787 - DNA, 25 bp, Homo sapien
catcacccataaagcccccttcttc

SEQ ID NO: 5469788 - DNA, 25 bp, Homo sapien
ccatcacccataaagcccccttctt

SEQ ID NO: 5469789 - DNA, 25 bp, Homo sapien
cagtccatcacccataaagccccct

SEQ ID NO: 5469790 - DNA, 25 bp, Homo sapien
catagggatccctcttgaagagtgg

SEQ ID NO: 5469791 - DNA, 25 bp, Homo sapien
gcagtggtgaaaactagccttccat

SEQ ID NO: 5469792 - DNA, 25 bp, Homo sapien
tgctaaacgaccacatgccggagtc

SEQ ID NO: 5469793 - DNA, 25 bp, Homo sapien
cagaatgaatgctcaagtggccagg

SEQ ID NO: 5469794 - DNA, 25 bp, Homo sapien
ggtattatgtacagaagattcccaa

SEQ ID NO: 5469795 - DNA, 25 bp, Homo sapien
cagggaactaggtgagtccccgtag

SEQ ID NO: 5469796 - DNA, 25 bp, Homo sapien
aggtgagtccccgtagctgaacaga

SEQ ID NO: 5469797 - DNA, 25 bp, Homo sapien
tgaaagagacttgggctactgccag

SEQ ID NO: 5469798 - DNA, 25 bp, Homo sapien
ccaagtgttgttcctaggagcagag

SEQ ID NO: 5469799 - DNA, 25 bp, Homo sapien
cacagaattatataccggaagggat

SEQ ID NO: 5469800 - DNA, 25 bp, Homo sapien
ttcgccatcaaagtcagatccaggg

SEQ ID NO: 5469801 - DNA, 25 bp, Homo sapien
gatgctattcaggtaaggttcccca

SEQ ID NO: 5469802 - DNA, 25 bp, Homo sapien
tcaggcacctcatgaacgatgatca

SEQ ID NO: 5469803 - DNA, 25 bp, Homo sapien
atgatcatgaagtcacccactgccc

SEQ ID NO: 5469804 - DNA, 25 bp, Homo sapien
attttttcatcagccggggaccgag

SEQ ID NO: 5469805 - DNA, 25 bp, Homo sapien
tgttctatatcaggcacctcatgaa

SEQ ID NO: 5469806 - DNA, 25 bp, Homo sapien
cagcttgggtgcagttggtgcagcc

SEQ ID NO: 5469807 - DNA, 25 bp, Homo sapien
tttgctccactttaacctcaatggg

SEQ ID NO: 5469808 - DNA, 25 bp, Homo sapien
gggaggaataaggttgcctccagta

SEQ ID NO: 5469809 - DNA, 25 bp, Homo sapien
taaggttgcctccagtaataactgc

SEQ ID NO: 5469810 - DNA, 25 bp, Homo sapien
aaattgagtggcttcgaagtcacca

SEQ ID NO: 5469811 - DNA, 25 bp, Homo sapien
tttgaaaggaggcccaaattgagtg

SEQ ID NO: 5469812 - DNA, 25 bp, Homo sapien
aattgagtggcttcgaagtcaccat

SEQ ID NO: 5469813 - DNA, 25 bp, Homo sapien
gaaaggaggcccaaattgagtggct

SEQ ID NO: 5469814 - DNA, 25 bp, Homo sapien
ctcagcaggagcatgataggcactg

SEQ ID NO: 5469815 - DNA, 25 bp, Homo sapien
cagcaggagcatgataggcactgaa

SEQ ID NO: 5469816 - DNA, 25 bp, Homo sapien
ggctcagcaggagcatgataggcac

SEQ ID NO: 5469817 - DNA, 25 bp, Homo sapien
caggagcatgataggcactgaagcc

SEQ ID NO: 5469818 - DNA, 25 bp, Homo sapien
cacccccctctgatccatcccgcat

SEQ ID NO: 5469819 - DNA, 25 bp, Homo sapien
cattccacccccctctgatccatcc

SEQ ID NO: 5469820 - DNA, 25 bp, Homo sapien
tttaacattccacccccctctgatc

SEQ ID NO: 5469821 - DNA, 25 bp, Homo sapien
aacattccacccccctctgatccat

SEQ ID NO: 5469822 - DNA, 25 bp, Homo sapien
gagccggaggaagaaccaggatgtt

SEQ ID NO: 5469823 - DNA, 25 bp, Homo sapien
gaggaagaaccaggatgttgctgcc

SEQ ID NO: 5469824 - DNA, 25 bp, Homo sapien
gtccctggagccggaggaagaacca

SEQ ID NO: 5469825 - DNA, 25 bp, Homo sapien
gaaccaggatgttgctgcctgcaga

SEQ ID NO: 5469826 - DNA, 25 bp, Homo sapien
tttcccaatggagactgtgatgacc

SEQ ID NO: 5469827 - DNA, 25 bp, Homo sapien
tccctggctctaacctacagactgg

SEQ ID NO: 5469828 - DNA, 25 bp, Homo sapien
gcccaccggagactcaagatgaagg

SEQ ID NO: 5469829 - DNA, 25 bp, Homo sapien
caaaagcctgtgatggagtcgtaca

SEQ ID NO: 5469830 - DNA, 25 bp, Homo sapien
aaatccagagtcttcggaatggcaa

SEQ ID NO: 5469831 - DNA, 25 bp, Homo sapien
gagggaagtagctcccttcattcat

SEQ ID NO: 5469832 - DNA, 25 bp, Homo sapien
gctgagggaagtagctcccttcatt

SEQ ID NO: 5469833 - DNA, 25 bp, Homo sapien
tcttcggaatggcaaaggcagctcc

SEQ ID NO: 5469834 - DNA, 25 bp, Homo sapien
gattcagccttgctggagaagacga

SEQ ID NO: 5469835 - DNA, 25 bp, Homo sapien
taaagtgtagcaaagcaaagctgca

SEQ ID NO: 5469836 - DNA, 25 bp, Homo sapien
tggttaacttgaaagcagcctgtac

SEQ ID NO: 5469837 - DNA, 25 bp, Homo sapien
gagaagacgaaggactgcctggtta

SEQ ID NO: 5469838 - DNA, 25 bp, Homo sapien
acatggacccttcagatgcctttgg

SEQ ID NO: 5469839 - DNA, 25 bp, Homo sapien
acagacgtggaatttggcctgggca

SEQ ID NO: 5469840 - DNA, 25 bp, Homo sapien
gtacccaagggctgcataaccgctt

SEQ ID NO: 5469841 - DNA, 25 bp, Homo sapien
agcctgccacttgtgtaaccttgga

SEQ ID NO: 5469842 - DNA, 25 bp, Homo sapien
tgtggcacgccagagccacactcca

SEQ ID NO: 5469843 - DNA, 25 bp, Homo sapien
agtgtggcacgccagagccacactc

SEQ ID NO: 5469844 - DNA, 25 bp, Homo sapien
gtgtggcacgccagagccacactcc

SEQ ID NO: 5469845 - DNA, 25 bp, Homo sapien
gtggcacgccagagccacactccag

SEQ ID NO: 5469846 - DNA, 25 bp, Homo sapien
caaggctgtaggaggctgtcgtggt

SEQ ID NO: 5469847 - DNA, 25 bp, Homo sapien
ctggaggagaaagtcgtgctcctgt

SEQ ID NO: 5469848 - DNA, 25 bp, Homo sapien
ttctggggctgtaagcaggaagtca

SEQ ID NO: 5469849 - DNA, 25 bp, Homo sapien
ggagaaagtcgtgctcctgttggtt

SEQ ID NO: 5469850 - DNA, 25 bp, Homo sapien
tggagatgttgcatgaaattctgat

SEQ ID NO: 5469851 - DNA, 25 bp, Homo sapien
gaattagtagccaacatgtaaaatt

SEQ ID NO: 5469852 - DNA, 25 bp, Homo sapien
agatgttgcatgaaattctgatttc

SEQ ID NO: 5469853 - DNA, 25 bp, Homo sapien
ttagtagccaacatgtaaaattctg

SEQ ID NO: 5469854 - DNA, 25 bp, Homo sapien
ctgacagatacactgcgcagctgga

SEQ ID NO: 5469855 - DNA, 25 bp, Homo sapien
aaggaggcgcggtgaactgagcggc

SEQ ID NO: 5469856 - DNA, 25 bp, Homo sapien
gaggcgactgactgagcagcgcacc

SEQ ID NO: 5469857 - DNA, 25 bp, Homo sapien
tataccgccgcgcagaagacgcagg

SEQ ID NO: 5469858 - DNA, 25 bp, Homo sapien
tagccaatacatttcttaaggcaat

SEQ ID NO: 5469859 - DNA, 25 bp, Homo sapien
tccgtagccaatacatttcttaagg

SEQ ID NO: 5469860 - DNA, 25 bp, Homo sapien
ttatacactgagattctccgtagcc

SEQ ID NO: 5469861 - DNA, 25 bp, Homo sapien
gagattctccgtagccaatacattt

SEQ ID NO: 5469862 - DNA, 25 bp, Homo sapien
tcattcttagcacaactttgcatat

SEQ ID NO: 5469863 - DNA, 25 bp, Homo sapien
ctttgcatataattagaaaccaaat

SEQ ID NO: 5469864 - DNA, 25 bp, Homo sapien
tgtttgatgacaactgccagttctg

SEQ ID NO: 5469865 - DNA, 25 bp, Homo sapien
taaccagagtgctggattgttttca

SEQ ID NO: 5469866 - DNA, 25 bp, Homo sapien
tcctcatggaataatcttgtccaaa

SEQ ID NO: 5469867 - DNA, 25 bp, Homo sapien
catcatcttactcatcattatgttt

SEQ ID NO: 5469868 - DNA, 25 bp, Homo sapien
gtgagccaaagagcatgaaatcgcc

SEQ ID NO: 5469869 - DNA, 25 bp, Homo sapien
tttccggtgacgagcaaggtgtttc

SEQ ID NO: 5469870 - DNA, 25 bp, Homo sapien
tgatatatcggccaaatgcatcccg

SEQ ID NO: 5469871 - DNA, 25 bp, Homo sapien
cctttaatagggactggaatggcaa

SEQ ID NO: 5469872 - DNA, 25 bp, Homo sapien
cagacctggtattctcctagccaag

SEQ ID NO: 5469873 - DNA, 25 bp, Homo sapien
cctggtattctcctagccaagtgga

SEQ ID NO: 5469874 - DNA, 25 bp, Homo sapien
ttctcctagccaagtggaaccaaag

SEQ ID NO: 5469875 - DNA, 25 bp, Homo sapien
tggtattctcctagccaagtggaac

SEQ ID NO: 5469876 - DNA, 25 bp, Homo sapien
cacaccactgtaatcttgatgaatg

SEQ ID NO: 5469877 - DNA, 25 bp, Homo sapien
tgatgaatgctgtagcccgtgagtt

SEQ ID NO: 5469878 - DNA, 25 bp, Homo sapien
ggcctggattggctttttgatggct

SEQ ID NO: 5469879 - DNA, 25 bp, Homo sapien
agcccgtgagttatattgattggcc

SEQ ID NO: 5469880 - DNA, 25 bp, Homo sapien
gaaataaccaggcaggacatagaac

SEQ ID NO: 5469881 - DNA, 25 bp, Homo sapien
tgcggttgaaaagagaacgtcaaga

SEQ ID NO: 5469882 - DNA, 25 bp, Homo sapien
caggcaggacatagaacaagtggga

SEQ ID NO: 5469883 - DNA, 25 bp, Homo sapien
agagaacgtcaagaaataaccaggc

SEQ ID NO: 5469884 - DNA, 25 bp, Homo sapien
tgatggcacaaacaaagtgaaatac

SEQ ID NO: 5469885 - DNA, 25 bp, Homo sapien
caagggactgtttacttgccgtatc

SEQ ID NO: 5469886 - DNA, 25 bp, Homo sapien
tagagaatgatataaaacaagggac

SEQ ID NO: 5469887 - DNA, 25 bp, Homo sapien
taaaactgctgatcaaccatagaga

SEQ ID NO: 5469888 - DNA, 25 bp, Homo sapien
gaaacagccagaataacaagggtat

SEQ ID NO: 5469889 - DNA, 25 bp, Homo sapien
tcagccaccgccaaggacattagaa

SEQ ID NO: 5469890 - DNA, 25 bp, Homo sapien
ttgtcaagagggcaattggcatcac

SEQ ID NO: 5469891 - DNA, 25 bp, Homo sapien
tcaccatgagtatcagaagagctgc

SEQ ID NO: 5469892 - DNA, 25 bp, Homo sapien
tctgtctgtaatccagaccagttag

SEQ ID NO: 5469893 - DNA, 25 bp, Homo sapien
cagacactctgtaagagagagccat

SEQ ID NO: 5469894 - DNA, 25 bp, Homo sapien
agagataacgtgaacaaaggtgctc

SEQ ID NO: 5469895 - DNA, 25 bp, Homo sapien
aatccagaccagttagaagagataa

SEQ ID NO: 5469896 - DNA, 25 bp, Homo sapien
cgtgtttgaacttgcatgccagaga

SEQ ID NO: 5469897 - DNA, 25 bp, Homo sapien
cagtggtcagcatggttagtagcta

SEQ ID NO: 5469898 - DNA, 25 bp, Homo sapien
taaaatgagcgcatacacacatctg

SEQ ID NO: 5469899 - DNA, 25 bp, Homo sapien
gattcaatcccgttccgaacagtgg

SEQ ID NO: 5469900 - DNA, 25 bp, Homo sapien
cagcacaggcggttgaaagcagtga

SEQ ID NO: 5469901 - DNA, 25 bp, Homo sapien
ccattgacttattctgagcctccag

SEQ ID NO: 5469902 - DNA, 25 bp, Homo sapien
tgctgtgactgaaatcctcctccca

SEQ ID NO: 5469903 - DNA, 25 bp, Homo sapien
ctctggtttcgttgttattttgctg

SEQ ID NO: 5469904 - DNA, 25 bp, Homo sapien
aagtgtatgattttagactacaccc

SEQ ID NO: 5469905 - DNA, 25 bp, Homo sapien
tggtggtgagtatttaaaacaacat

SEQ ID NO: 5469906 - DNA, 25 bp, Homo sapien
actacctgtagggtagccctgctct

SEQ ID NO: 5469907 - DNA, 25 bp, Homo sapien
tagggataacattttactgctctgt

SEQ ID NO: 5469908 - DNA, 25 bp, Homo sapien
gaccaatcaagttttggtgcttctt

SEQ ID NO: 5469909 - DNA, 25 bp, Homo sapien
tcgtggaccaatcaagttttggtgc

SEQ ID NO: 5469910 - DNA, 25 bp, Homo sapien
tggggggggccaattctgtcaccca

SEQ ID NO: 5469911 - DNA, 25 bp, Homo sapien
gggggggccaattctgtcacccagc

SEQ ID NO: 5469912 - DNA, 25 bp, Homo sapien
gattcagtctcttccgggagaaaag

SEQ ID NO: 5469913 - DNA, 25 bp, Homo sapien
tcttccgggagaaaagccgaagata

SEQ ID NO: 5469914 - DNA, 25 bp, Homo sapien
gggcaacttcaagggaaggaatgaa

SEQ ID NO: 5469915 - DNA, 25 bp, Homo sapien
gccgaagataaagaagttgattgaa

SEQ ID NO: 5469916 - DNA, 25 bp, Homo sapien
ccaggtgtggcggcccgcacatgta

SEQ ID NO: 5469917 - DNA, 25 bp, Homo sapien
cacttgggtgcagtgtttcactctg

SEQ ID NO: 5469918 - DNA, 25 bp, Homo sapien
gtggcggcccgcacatgtagtccta

SEQ ID NO: 5469919 - DNA, 25 bp, Homo sapien
tgctgctgcacttgggtgcagtgtt

SEQ ID NO: 5469920 - DNA, 25 bp, Homo sapien
gaggctttatataccactctgatga

SEQ ID NO: 5469921 - DNA, 25 bp, Homo sapien
gcctgggaactgtcgaaggatttca

SEQ ID NO: 5469922 - DNA, 25 bp, Homo sapien
gaaagatctttctggtatcagtgga

SEQ ID NO: 5469923 - DNA, 25 bp, Homo sapien
tatttaccgcccacttgcaaggatt

SEQ ID NO: 5469924 - DNA, 25 bp, Homo sapien
agaaatttaaggcactgcgtgccct

SEQ ID NO: 5469925 - DNA, 25 bp, Homo sapien
gcactgcgtgccctgtcatcacatt

SEQ ID NO: 5469926 - DNA, 25 bp, Homo sapien
aatgtaactgctgacttaagtcaga

SEQ ID NO: 5469927 - DNA, 25 bp, Homo sapien
taaggcactgcgtgccctgtcatca

SEQ ID NO: 5469928 - DNA, 25 bp, Homo sapien
tattgtcagaacaagaatcccttgg

SEQ ID NO: 5469929 - DNA, 25 bp, Homo sapien
tgtttcggtattaaaactgctcaca

SEQ ID NO: 5469930 - DNA, 25 bp, Homo sapien
tcaatgcagattgggtaaatagaga

SEQ ID NO: 5469931 - DNA, 25 bp, Homo sapien
tgtaattaaacatcctgtataacct

SEQ ID NO: 5469932 - DNA, 25 bp, Homo sapien
tttccgcataaaggagagcactggt

SEQ ID NO: 5469933 - DNA, 25 bp, Homo sapien
tataggaattcaaaagctgccgctg

SEQ ID NO: 5469934 - DNA, 25 bp, Homo sapien
gcgtgctatgcagattcggcttcca

SEQ ID NO: 5469935 - DNA, 25 bp, Homo sapien
tgaggcacccagttgaagtccagac

SEQ ID NO: 5469936 - DNA, 25 bp, Homo sapien
ttgacacttagaagctcactggttg

SEQ ID NO: 5469937 - DNA, 25 bp, Homo sapien
gaacgcaggtggaaagttggtcaca

SEQ ID NO: 5469938 - DNA, 25 bp, Homo sapien
aatgcaagcggttctttcaaggacc

SEQ ID NO: 5469939 - DNA, 25 bp, Homo sapien
gagctttgccacacgagtttccatg

SEQ ID NO: 5469940 - DNA, 25 bp, Homo sapien
aggagcggagttgacacgtcttctc

SEQ ID NO: 5469941 - DNA, 25 bp, Homo sapien
cggcatggaggagcggagttgacac

SEQ ID NO: 5469942 - DNA, 25 bp, Homo sapien
gttgacacgtcttctctggtgggct

SEQ ID NO: 5469943 - DNA, 25 bp, Homo sapien
catgagggcggcatggaggagcgga

SEQ ID NO: 5469944 - DNA, 25 bp, Homo sapien
gcgccgccatcatggacaccagccg

SEQ ID NO: 5469945 - DNA, 25 bp, Homo sapien
cgccatcatggacaccagccgtgtg

SEQ ID NO: 5469946 - DNA, 25 bp, Homo sapien
ccatcatggacaccagccgtgtgca

SEQ ID NO: 5469947 - DNA, 25 bp, Homo sapien
gccgcgccgccatcatggacaccag

SEQ ID NO: 5469948 - DNA, 25 bp, Homo sapien
gcctccctagcagatgtcttcatct

SEQ ID NO: 5469949 - DNA, 25 bp, Homo sapien
cagcctccctagcagatgtcttcat

SEQ ID NO: 5469950 - DNA, 25 bp, Homo sapien
agcctccctagcagatgtcttcatc

SEQ ID NO: 5469951 - DNA, 25 bp, Homo sapien
tcaggaggaaagctgcacacgtggc

SEQ ID NO: 5469952 - DNA, 25 bp, Homo sapien
tgaatgtagagggagacttctccgc

SEQ ID NO: 5469953 - DNA, 25 bp, Homo sapien
tcaaggatcccggacgtgcttccat

SEQ ID NO: 5469954 - DNA, 25 bp, Homo sapien
tccatctgcagtcgtgggcacgtgc

SEQ ID NO: 5469955 - DNA, 25 bp, Homo sapien
catctgcctggcactgattgagaaa

SEQ ID NO: 5469956 - DNA, 25 bp, Homo sapien
tcatctgcctggcactgattgagaa

SEQ ID NO: 5469957 - DNA, 25 bp, Homo sapien
ttcatctgcctggcactgattgaga

SEQ ID NO: 5469958 - DNA, 25 bp, Homo sapien
attaaaacaaaacgagctgggtgca

SEQ ID NO: 5469959 - DNA, 25 bp, Homo sapien
acaaaattagtagtggcgcctgcct

SEQ ID NO: 5469960 - DNA, 25 bp, Homo sapien
gcctataaccctagctattcagagg

SEQ ID NO: 5469961 - DNA, 25 bp, Homo sapien
aaaatgaagacaggtacagtgactc

SEQ ID NO: 5469962 - DNA, 25 bp, Homo sapien
gggaagtagtgtctcaccaatacct

SEQ ID NO: 5469963 - DNA, 25 bp, Homo sapien
ggtgaaactgtgattccaatgccca

SEQ ID NO: 5469964 - DNA, 25 bp, Homo sapien
gaaacacttttgctggcattgactg

SEQ ID NO: 5469965 - DNA, 25 bp, Homo sapien
cctggagaagaggtgaaacactact

SEQ ID NO: 5469966 - DNA, 25 bp, Homo sapien
caaggtggaactgtctggcaagagc

SEQ ID NO: 5469967 - DNA, 25 bp, Homo sapien
cacagagagggatctttggaccttc

SEQ ID NO: 5469968 - DNA, 25 bp, Homo sapien
gagatccaagcagatggcgcctaag

SEQ ID NO: 5469969 - DNA, 25 bp, Homo sapien
taaggccccaggtagattatggctc

SEQ ID NO: 5469970 - DNA, 25 bp, Homo sapien
caaaaagggcatgaagtagtggtca

SEQ ID NO: 5469971 - DNA, 25 bp, Homo sapien
cacctgggccctgttgggatgacta

SEQ ID NO: 5469972 - DNA, 25 bp, Homo sapien
ccccagggtctgaggataggccaat

SEQ ID NO: 5469973 - DNA, 25 bp, Homo sapien
gcaaaccagcaaggaggcggctgct

SEQ ID NO: 5469974 - DNA, 25 bp, Homo sapien
gaagagtcactcagacagcagtatg

SEQ ID NO: 5469975 - DNA, 25 bp, Homo sapien
tggccccgaggctaatgtttcagtg

SEQ ID NO: 5469976 - DNA, 25 bp, Homo sapien
ctgaaatagcttatggccctgtgcc

SEQ ID NO: 5469977 - DNA, 25 bp, Homo sapien
actgctatggaatgagaccaccact

SEQ ID NO: 5469978 - DNA, 25 bp, Homo sapien
ggaacagcgggcctgcacagtcctg

SEQ ID NO: 5469979 - DNA, 25 bp, Homo sapien
cagcgggcctgcacagtcctgtggc

SEQ ID NO: 5469980 - DNA, 25 bp, Homo sapien
ctgtggaacagcgggcctgcacagt

SEQ ID NO: 5469981 - DNA, 25 bp, Homo sapien
cacacaggggcgctgtggaacagcg

SEQ ID NO: 5469982 - DNA, 25 bp, Homo sapien
cacggtgcccaaaccgagccatttt

SEQ ID NO: 5469983 - DNA, 25 bp, Homo sapien
ccaaaccgagccattttcattggca

SEQ ID NO: 5469984 - DNA, 25 bp, Homo sapien
agccacggtgcccaaaccgagccat

SEQ ID NO: 5469985 - DNA, 25 bp, Homo sapien
ggtgcccaaaccgagccattttcat

SEQ ID NO: 5469986 - DNA, 25 bp, Homo sapien
cttcataggagtcttttcttttttg

SEQ ID NO: 5469987 - DNA, 25 bp, Homo sapien
cataggagtcttttcttttttggtg

SEQ ID NO: 5469988 - DNA, 25 bp, Homo sapien
ttatagacctgcattgctgaatatg

SEQ ID NO: 5469989 - DNA, 25 bp, Homo sapien
cataatttgaaatttctttgatcaa

SEQ ID NO: 5469990 - DNA, 25 bp, Homo sapien
aatttgaaatttctttgatcaatac

SEQ ID NO: 5469991 - DNA, 25 bp, Homo sapien
tttgaaatttctttgatcaatacta

SEQ ID NO: 5469992 - DNA, 25 bp, Homo sapien
tgaaatttctttgatcaatactaag

SEQ ID NO: 5469993 - DNA, 25 bp, Homo sapien
tgaacttataaagccattcatccaa

SEQ ID NO: 5469994 - DNA, 25 bp, Homo sapien
ctgaacttataaagccattcatcca

SEQ ID NO: 5469995 - DNA, 25 bp, Homo sapien
ctgtaagtcatttccttgggtttct

SEQ ID NO: 5469996 - DNA, 25 bp, Homo sapien
tgtaagtcatttccttgggtttcta

SEQ ID NO: 5469997 - DNA, 25 bp, Homo sapien
tgcgtgtaactgcacatccgccgta

SEQ ID NO: 5469998 - DNA, 25 bp, Homo sapien
tgtaactgcacatccgccgtatgat

SEQ ID NO: 5469999 - DNA, 25 bp, Homo sapien
tgcacatccgccgtatgatccaaat

SEQ ID NO: 5470000 - DNA, 25 bp, Homo sapien
gcacatccgccgtatgatccaaata

SEQ ID NO: 5470001 - DNA, 25 bp, Homo sapien
ttcctattgactggcggatacttgg

SEQ ID NO: 5470002 - DNA, 25 bp, Homo sapien
gactggcggatacttggccttgatc

SEQ ID NO: 5470003 - DNA, 25 bp, Homo sapien
tattgactggcggatacttggcctt

SEQ ID NO: 5470004 - DNA, 25 bp, Homo sapien
cttcctattgactggcggatacttg

SEQ ID NO: 5470005 - DNA, 25 bp, Homo sapien
acagcgatccgggtgcgtgtcatga

SEQ ID NO: 5470006 - DNA, 25 bp, Homo sapien
ctgtgaagccctggacagcgatccg

SEQ ID NO: 5470007 - DNA, 25 bp, Homo sapien
agacttcatagcagttgtgactaga

SEQ ID NO: 5470008 - DNA, 25 bp, Homo sapien
ttcatagcagttgtgactagaccca

SEQ ID NO: 5470009 - DNA, 25 bp, Homo sapien
agtagaggccgtaggtgagggcggt

SEQ ID NO: 5470010 - DNA, 25 bp, Homo sapien
ggccgtaggtgagggcggtcgccat

SEQ ID NO: 5470011 - DNA, 25 bp, Homo sapien
cctggtggaagcagtagaggccgta

SEQ ID NO: 5470012 - DNA, 25 bp, Homo sapien
tggccctggtggaagcagtagaggc

SEQ ID NO: 5470013 - DNA, 25 bp, Homo sapien
tcatcgtagttacaaccctggctgg

SEQ ID NO: 5470014 - DNA, 25 bp, Homo sapien
gagggtcttggaactggattgtcac

SEQ ID NO: 5470015 - DNA, 25 bp, Homo sapien
taggcttgcctcataggagaccctc

SEQ ID NO: 5470016 - DNA, 25 bp, Homo sapien
gacaagcagtaggtgataagcccaa

SEQ ID NO: 5470017 - DNA, 25 bp, Homo sapien
taaagccgctgaagcaaaaaccatg

SEQ ID NO: 5470018 - DNA, 25 bp, Homo sapien
agccgctgaagcaaaaaccatgata

SEQ ID NO: 5470019 - DNA, 25 bp, Homo sapien
tcctaaagccgctgaagcaaaaacc

SEQ ID NO: 5470020 - DNA, 25 bp, Homo sapien
ctaaagccgctgaagcaaaaaccat

SEQ ID NO: 5470021 - DNA, 25 bp, Homo sapien
taagggttagctctatcactcaact

SEQ ID NO: 5470022 - DNA, 25 bp, Homo sapien
agaccacaggactgtatactgtctt

SEQ ID NO: 5470023 - DNA, 25 bp, Homo sapien
aatgttaactagacggatttccaag

SEQ ID NO: 5470024 - DNA, 25 bp, Homo sapien
gaaggctctgtcattgatcaggtaa

SEQ ID NO: 5470025 - DNA, 25 bp, Homo sapien
ccttgtggcttgtggtcacctcctc

SEQ ID NO: 5470026 - DNA, 25 bp, Homo sapien
attcaaacttcgtcttctttccttg

SEQ ID NO: 5470027 - DNA, 25 bp, Homo sapien
ctattcaaacttcgtcttctttcct

SEQ ID NO: 5470028 - DNA, 25 bp, Homo sapien
ctttccttgtggcttgtggtcacct

SEQ ID NO: 5470029 - DNA, 25 bp, Homo sapien
gaggaaggcaagacactgttaaaag

SEQ ID NO: 5470030 - DNA, 25 bp, Homo sapien
tgattaggaaccgtgacagggcaca

SEQ ID NO: 5470031 - DNA, 25 bp, Homo sapien
aagaatgggtacaaagctcctcctc

SEQ ID NO: 5470032 - DNA, 25 bp, Homo sapien
ggtgtcattatctctgcgtgcctta

SEQ ID NO: 5470033 - DNA, 25 bp, Homo sapien
cccggcctctgccaccaaatcctcc

SEQ ID NO: 5470034 - DNA, 25 bp, Homo sapien
ctccaaagcctccccggcctctgcc

SEQ ID NO: 5470035 - DNA, 25 bp, Homo sapien
gcctccccggcctctgccaccaaat

SEQ ID NO: 5470036 - DNA, 25 bp, Homo sapien
tctgccaccaaatcctcctcggcct

SEQ ID NO: 5470037 - DNA, 25 bp, Homo sapien
tcgtcctccaaagccgcctctgcct

SEQ ID NO: 5470038 - DNA, 25 bp, Homo sapien
agccgcctctgcctccaccacgacc

SEQ ID NO: 5470039 - DNA, 25 bp, Homo sapien
tctgcctccaccacgacccccgaag

SEQ ID NO: 5470040 - DNA, 25 bp, Homo sapien
ctcgtcctccaaagccgcctctgcc

SEQ ID NO: 5470041 - DNA, 25 bp, Homo sapien
tttatttccatcaatttcaccgtct

SEQ ID NO: 5470042 - DNA, 25 bp, Homo sapien
tttccatcaatttcaccgtcttcca

SEQ ID NO: 5470043 - DNA, 25 bp, Homo sapien
cagtccaaggtaactttatttccat

SEQ ID NO: 5470044 - DNA, 25 bp, Homo sapien
ccatcaatttcaccgtcttccatgg

SEQ ID NO: 5470045 - DNA, 25 bp, Homo sapien
cctcctcactgttgaagtctacaaa

SEQ ID NO: 5470046 - DNA, 25 bp, Homo sapien
ctcactgttgaagtctacaaaacca

SEQ ID NO: 5470047 - DNA, 25 bp, Homo sapien
cctcactgttgaagtctacaaaacc

SEQ ID NO: 5470048 - DNA, 25 bp, Homo sapien
tcctcactgttgaagtctacaaaac

SEQ ID NO: 5470049 - DNA, 25 bp, Homo sapien
tgcccattataaaaagcacctacta

SEQ ID NO: 5470050 - DNA, 25 bp, Homo sapien
tcccacagaaagtagccttgtttat

SEQ ID NO: 5470051 - DNA, 25 bp, Homo sapien
cagagtagctctctatggaaaacta

SEQ ID NO: 5470052 - DNA, 25 bp, Homo sapien
gaaaagataccagtgacagagtagc

SEQ ID NO: 5470053 - DNA, 25 bp, Homo sapien
tctcttcttctcgtgcgaatccata

SEQ ID NO: 5470054 - DNA, 25 bp, Homo sapien
ttcttctcgtgcgaatccataaact

SEQ ID NO: 5470055 - DNA, 25 bp, Homo sapien
tcttcttctcgtgcgaatccataaa

SEQ ID NO: 5470056 - DNA, 25 bp, Homo sapien
ctgccactgatagacagaaaggagc

SEQ ID NO: 5470057 - DNA, 25 bp, Homo sapien
gagccgtcaaatgactcctttaatg

SEQ ID NO: 5470058 - DNA, 25 bp, Homo sapien
gacaggcctttgacaaacagagttt

SEQ ID NO: 5470059 - DNA, 25 bp, Homo sapien
tcagtaactatccttgcccgaacgg

SEQ ID NO: 5470060 - DNA, 25 bp, Homo sapien
ctttaatgtctcttcagtggtatcc

SEQ ID NO: 5470061 - DNA, 25 bp, Homo sapien
actatctagaggaattttcttgaga

SEQ ID NO: 5470062 - DNA, 25 bp, Homo sapien
tatctagaggaattttcttgagatt

SEQ ID NO: 5470063 - DNA, 25 bp, Homo sapien
gactatctagaggaattttcttgag

SEQ ID NO: 5470064 - DNA, 25 bp, Homo sapien
tctcaggtaatcagtcatcatatcc

SEQ ID NO: 5470065 - DNA, 25 bp, Homo sapien
tagcgtcttcgaatgaagcaaactc

SEQ ID NO: 5470066 - DNA, 25 bp, Homo sapien
gcctgattgctctgccctcaatttc

SEQ ID NO: 5470067 - DNA, 25 bp, Homo sapien
ggcttctggcattaggtgatcccct

SEQ ID NO: 5470068 - DNA, 25 bp, Homo sapien
acaggaatttaaagcttctttagcg

SEQ ID NO: 5470069 - DNA, 25 bp, Homo sapien
tgcactgtaggagaggttgcttaaa

SEQ ID NO: 5470070 - DNA, 25 bp, Homo sapien
ttctgttgcactgtaggagaggttg

SEQ ID NO: 5470071 - DNA, 25 bp, Homo sapien
tgaagagtttcttctgttgcactgt

SEQ ID NO: 5470072 - DNA, 25 bp, Homo sapien
taggagaggttgcttaaaaccagag

SEQ ID NO: 5470073 - DNA, 25 bp, Homo sapien
cagcttcggtcacaacagtaatatc

SEQ ID NO: 5470074 - DNA, 25 bp, Homo sapien
gtacctagtacgtgttgcaatgtcc

SEQ ID NO: 5470075 - DNA, 25 bp, Homo sapien
caatgtcctgctggttgttcttaca

SEQ ID NO: 5470076 - DNA, 25 bp, Homo sapien
tacataggctgatgactggtctgtt

SEQ ID NO: 5470077 - DNA, 25 bp, Homo sapien
tctgaaaccttgtaacaagcctaat

SEQ ID NO: 5470078 - DNA, 25 bp, Homo sapien
agagctctcattcaagattggaaat

SEQ ID NO: 5470079 - DNA, 25 bp, Homo sapien
tcttcacctacatttgagtaacttt

SEQ ID NO: 5470080 - DNA, 25 bp, Homo sapien
gacttggggtatcatgtccttgatc

SEQ ID NO: 5470081 - DNA, 25 bp, Homo sapien
tctttccacctctatagtcttgatt

SEQ ID NO: 5470082 - DNA, 25 bp, Homo sapien
ttctttccacctctatagtcttgat

SEQ ID NO: 5470083 - DNA, 25 bp, Homo sapien
tttctctccagtatagtacagggaa

SEQ ID NO: 5470084 - DNA, 25 bp, Homo sapien
ggttactgaggcacaaacttacagg

SEQ ID NO: 5470085 - DNA, 25 bp, Homo sapien
ctgtccaagattacacgcctaagga

SEQ ID NO: 5470086 - DNA, 25 bp, Homo sapien
tcagatctgagtacaataaatgccc

SEQ ID NO: 5470087 - DNA, 25 bp, Homo sapien
tatgagtacattatccccatggtac

SEQ ID NO: 5470088 - DNA, 25 bp, Homo sapien
taatctgatctccgcagcatcttca

SEQ ID NO: 5470089 - DNA, 25 bp, Homo sapien
atctgatctccgcagcatcttcaaa

SEQ ID NO: 5470090 - DNA, 25 bp, Homo sapien
actaatctgatctccgcagcatctt

SEQ ID NO: 5470091 - DNA, 25 bp, Homo sapien
ctgatctccgcagcatcttcaaaca

SEQ ID NO: 5470092 - DNA, 25 bp, Homo sapien
tctgttaggtacactggagttcaac

SEQ ID NO: 5470093 - DNA, 25 bp, Homo sapien
tcctataatgtacaaggctcggtgc

SEQ ID NO: 5470094 - DNA, 25 bp, Homo sapien
tagcagtgtcaacacacaagtggtc

SEQ ID NO: 5470095 - DNA, 25 bp, Homo sapien
gagttcaacctagagtagacgcgca

SEQ ID NO: 5470096 - DNA, 25 bp, Homo sapien
aaaccagtgagttccaacgctttct

SEQ ID NO: 5470097 - DNA, 25 bp, Homo sapien
ccagtgagttccaacgctttctcca

SEQ ID NO: 5470098 - DNA, 25 bp, Homo sapien
gttccaacgctttctccaggtcttc

SEQ ID NO: 5470099 - DNA, 25 bp, Homo sapien
tgagttccaacgctttctccaggtc

SEQ ID NO: 5470100 - DNA, 25 bp, Homo sapien
gacaaatgtgatggtgcaaacaaag

SEQ ID NO: 5470101 - DNA, 25 bp, Homo sapien
caatatgtattctagacaaatgtga

SEQ ID NO: 5470102 - DNA, 25 bp, Homo sapien
aaatccacaatatgtattctagaca

SEQ ID NO: 5470103 - DNA, 25 bp, Homo sapien
tggtgcaaacaaagatcacatttta

SEQ ID NO: 5470104 - DNA, 25 bp, Homo sapien
aagagattgaaagccgtagtcggtt

SEQ ID NO: 5470105 - DNA, 25 bp, Homo sapien
ttagcaaaaacatcgctgataccag

SEQ ID NO: 5470106 - DNA, 25 bp, Homo sapien
caaagagattgaaagccgtagtcgg

SEQ ID NO: 5470107 - DNA, 25 bp, Homo sapien
aacatcgctgataccagtttttaat

SEQ ID NO: 5470108 - DNA, 25 bp, Homo sapien
agtccctttgttattcatcatttgt

SEQ ID NO: 5470109 - DNA, 25 bp, Homo sapien
cactacaatgtaacatcaggtttca

SEQ ID NO: 5470110 - DNA, 25 bp, Homo sapien
caggtttcagtattaagtccctttg

SEQ ID NO: 5470111 - DNA, 25 bp, Homo sapien
acatcagcacactacaatgtaacat

SEQ ID NO: 5470112 - DNA, 25 bp, Homo sapien
tttccaggtgcttctttgacaggct

SEQ ID NO: 5470113 - DNA, 25 bp, Homo sapien
atcttcatcatcttcgtcgtcgtcg

SEQ ID NO: 5470114 - DNA, 25 bp, Homo sapien
tcttcgtcgtcgtcgtcatcctcgt

SEQ ID NO: 5470115 - DNA, 25 bp, Homo sapien
atcttcgtcgtcgtcgtcatcctcg

SEQ ID NO: 5470116 - DNA, 25 bp, Homo sapien
ttcatcatcttcgtcgtcgtcgtca

SEQ ID NO: 5470117 - DNA, 25 bp, Homo sapien
cttcttcatcttcatcctcagccac

SEQ ID NO: 5470118 - DNA, 25 bp, Homo sapien
ctcttcttcatcttcatcctcagcc

SEQ ID NO: 5470119 - DNA, 25 bp, Homo sapien
tcttcttcatcttcatcctcagcca

SEQ ID NO: 5470120 - DNA, 25 bp, Homo sapien
tcttggctttcacaggaacaacttt

SEQ ID NO: 5470121 - DNA, 25 bp, Homo sapien
caggaacaacttttgcagctttctt

SEQ ID NO: 5470122 - DNA, 25 bp, Homo sapien
tttggctggtgtagtctccatagct

SEQ ID NO: 5470123 - DNA, 25 bp, Homo sapien
tggtgtagtctccatagcttcttct

SEQ ID NO: 5470124 - DNA, 25 bp, Homo sapien
catcttcctcatcgtcatcgtcatc

SEQ ID NO: 5470125 - DNA, 25 bp, Homo sapien
atcgctgctggttcaatttcatctt

SEQ ID NO: 5470126 - DNA, 25 bp, Homo sapien
ttcatcgctgctggttcaatttcat

SEQ ID NO: 5470127 - DNA, 25 bp, Homo sapien
tcatcgctgctggttcaatttcatc

SEQ ID NO: 5470128 - DNA, 25 bp, Homo sapien
ctttcatcgctgctggttcaatttc

SEQ ID NO: 5470129 - DNA, 25 bp, Homo sapien
gttgctaccaatgctttgcctggtg

SEQ ID NO: 5470130 - DNA, 25 bp, Homo sapien
agttgctaccaatgctttgcctggt

SEQ ID NO: 5470131 - DNA, 25 bp, Homo sapien
ttgctaccaatgctttgcctggtgt

SEQ ID NO: 5470132 - DNA, 25 bp, Homo sapien
cctttttgcctggagtgacagctgc

SEQ ID NO: 5470133 - DNA, 25 bp, Homo sapien
tgcctttttgcctggagtgacagct

SEQ ID NO: 5470134 - DNA, 25 bp, Homo sapien
ttggcaggtgttgctgctgcctttt

SEQ ID NO: 5470135 - DNA, 25 bp, Homo sapien
gctgctgcctttttgcctggagtga

SEQ ID NO: 5470136 - DNA, 25 bp, Homo sapien
gggaaacgaccaccttctttgctga

SEQ ID NO: 5470137 - DNA, 25 bp, Homo sapien
ttgctgaggttgcagcagccttctt

SEQ ID NO: 5470138 - DNA, 25 bp, Homo sapien
tgcctttcttctgaggtatgacgac

SEQ ID NO: 5470139 - DNA, 25 bp, Homo sapien
cttgcctttcttctgaggtatgacg

SEQ ID NO: 5470140 - DNA, 25 bp, Homo sapien
gatatccaatttcatgtcttaactc

SEQ ID NO: 5470141 - DNA, 25 bp, Homo sapien
agcttgtgaaacactcaaccactac

SEQ ID NO: 5470142 - DNA, 25 bp, Homo sapien
ttgacatgtcaatgaagagcttgtg

SEQ ID NO: 5470143 - DNA, 25 bp, Homo sapien
cataattctgcattaagttggataa

SEQ ID NO: 5470144 - DNA, 25 bp, Homo sapien
atcttcttcatcttctgacatttcc

SEQ ID NO: 5470145 - DNA, 25 bp, Homo sapien
cttcttctacctcctttggaggagg

SEQ ID NO: 5470146 - DNA, 25 bp, Homo sapien
cctttggaggaggagccattttctt

SEQ ID NO: 5470147 - DNA, 25 bp, Homo sapien
atcttcactatcttcttctacctcc

SEQ ID NO: 5470148 - DNA, 25 bp, Homo sapien
tttggaggaggagccattttcttgg

SEQ ID NO: 5470149 - DNA, 25 bp, Homo sapien
accacgtgtcggcttgccaggccgg

SEQ ID NO: 5470150 - DNA, 25 bp, Homo sapien
agccgggactccgactagggccgat

SEQ ID NO: 5470151 - DNA, 25 bp, Homo sapien
acgtgcccgaaacacagcgcaaaag

SEQ ID NO: 5470152 - DNA, 25 bp, Homo sapien
aaaggcacgcggcagagccaccttc

SEQ ID NO: 5470153 - DNA, 25 bp, Homo sapien
ggtgctgaagatcccggagcacgta

SEQ ID NO: 5470154 - DNA, 25 bp, Homo sapien
gcggcggagtgtgaagcggacaagt

SEQ ID NO: 5470155 - DNA, 25 bp, Homo sapien
cagaagaagccaagcgacggcgatg

SEQ ID NO: 5470156 - DNA, 25 bp, Homo sapien
gacaagtggcgcagatgagtccaga

SEQ ID NO: 5470157 - DNA, 25 bp, Homo sapien
tggccctggagcgaggagtccgcca

SEQ ID NO: 5470158 - DNA, 25 bp, Homo sapien
cccttttggaggcacagcttatccc

SEQ ID NO: 5470159 - DNA, 25 bp, Homo sapien
ttatccctgcttgcccgcgagcatg

SEQ ID NO: 5470160 - DNA, 25 bp, Homo sapien
agtccgccagcaccggaagttcagg

SEQ ID NO: 5470161 - DNA, 25 bp, Homo sapien
cccttaagagggtggctattactgt

SEQ ID NO: 5470162 - DNA, 25 bp, Homo sapien
gctccagaattttaaccggtctcaa

SEQ ID NO: 5470163 - DNA, 25 bp, Homo sapien
gaaatacagctctcactggaccagg

SEQ ID NO: 5470164 - DNA, 25 bp, Homo sapien
tgctctccacgaagggttcgggcct

SEQ ID NO: 5470165 - DNA, 25 bp, Homo sapien
gtacccatcagccagctgggaccac

SEQ ID NO: 5470166 - DNA, 25 bp, Homo sapien
aacctcttcaacgcccagcttagag

SEQ ID NO: 5470167 - DNA, 25 bp, Homo sapien
gagctgctggtctcacgaagaagct

SEQ ID NO: 5470168 - DNA, 25 bp, Homo sapien
gaagaagctgccacgaacacacagc

SEQ ID NO: 5470169 - DNA, 25 bp, Homo sapien
gcttagagctgctggtctcacgaag

SEQ ID NO: 5470170 - DNA, 25 bp, Homo sapien
ctgtagtggggggtcatcatctcta

SEQ ID NO: 5470171 - DNA, 25 bp, Homo sapien
ttgcccactccacacaaggtccttc

SEQ ID NO: 5470172 - DNA, 25 bp, Homo sapien
tgctgtagccgatgtgaactccctc

SEQ ID NO: 5470173 - DNA, 25 bp, Homo sapien
tcttctgtgaaggtgaggtccgggc

SEQ ID NO: 5470174 - DNA, 25 bp, Homo sapien
tcaagagcgacagtaacgtgctgcc

SEQ ID NO: 5470175 - DNA, 25 bp, Homo sapien
cgcggcagcccgggtttggcatagc

SEQ ID NO: 5470176 - DNA, 25 bp, Homo sapien
gcggcagcccgggtttggcatagct

SEQ ID NO: 5470177 - DNA, 25 bp, Homo sapien
catcttgacgtctgagttactgctg

SEQ ID NO: 5470178 - DNA, 25 bp, Homo sapien
tgggtggaagctctgctgtcgccat

SEQ ID NO: 5470179 - DNA, 25 bp, Homo sapien
cattttcattttgcgccaggcctct

SEQ ID NO: 5470180 - DNA, 25 bp, Homo sapien
tttacttcccagaaatgcgctgagc

SEQ ID NO: 5470181 - DNA, 25 bp, Homo sapien
cacaaaaaagtccaatggctctgac

SEQ ID NO: 5470182 - DNA, 25 bp, Homo sapien
tcgaaagaagtgtgtaaatccaaat

SEQ ID NO: 5470183 - DNA, 25 bp, Homo sapien
caacaatgttggaacttcgaaagaa

SEQ ID NO: 5470184 - DNA, 25 bp, Homo sapien
acaaaaaagtccaatggctctgaca

SEQ ID NO: 5470185 - DNA, 25 bp, Homo sapien
ttagggcccaagatatcaatcagca

SEQ ID NO: 5470186 - DNA, 25 bp, Homo sapien
gaaaatagctgctcataaacatagg

SEQ ID NO: 5470187 - DNA, 25 bp, Homo sapien
gggattcgcacatcatcatatttag

SEQ ID NO: 5470188 - DNA, 25 bp, Homo sapien
tgaatcttgcatagcaacgtgcagc

SEQ ID NO: 5470189 - DNA, 25 bp, Homo sapien
tgttcccatgagctgcgatagagaa

SEQ ID NO: 5470190 - DNA, 25 bp, Homo sapien
cagaacaggcttccatattgtgcat

SEQ ID NO: 5470191 - DNA, 25 bp, Homo sapien
ccatgggaatgtatccaggttatgc

SEQ ID NO: 5470192 - DNA, 25 bp, Homo sapien
tagcacaaagtgattcctggagaat

SEQ ID NO: 5470193 - DNA, 25 bp, Homo sapien
tcttatatttgcaaatgcttgtctc

SEQ ID NO: 5470194 - DNA, 25 bp, Homo sapien
catgctgagcaataatgttaccagt

SEQ ID NO: 5470195 - DNA, 25 bp, Homo sapien
gttttcagccatatcatcaacatgc

SEQ ID NO: 5470196 - DNA, 25 bp, Homo sapien
tatataactacactccatagcagca

SEQ ID NO: 5470197 - DNA, 25 bp, Homo sapien
gactttgcatattcaacatgtagga

SEQ ID NO: 5470198 - DNA, 25 bp, Homo sapien
ctttcaacacagacagactttgcat

SEQ ID NO: 5470199 - DNA, 25 bp, Homo sapien
tatatccatcgtggttcttgctatg

SEQ ID NO: 5470200 - DNA, 25 bp, Homo sapien
gtgtcttagggtatgctctttcaac

SEQ ID NO: 5470201 - DNA, 25 bp, Homo sapien
tatggtcgagaactacggcaagccc

SEQ ID NO: 5470202 - DNA, 25 bp, Homo sapien
tctttctatctctagtttcttggcc

SEQ ID NO: 5470203 - DNA, 25 bp, Homo sapien
gaactacggcaagcccatcaatctc

SEQ ID NO: 5470204 - DNA, 25 bp, Homo sapien
agtttcttggccctggcttttctct

SEQ ID NO: 5470205 - DNA, 25 bp, Homo sapien
tgtattgtccccgaaagtacccatc

SEQ ID NO: 5470206 - DNA, 25 bp, Homo sapien
taagagaatttctagaccatatggc

SEQ ID NO: 5470207 - DNA, 25 bp, Homo sapien
catatgcctcgtttggagaaacgtc

SEQ ID NO: 5470208 - DNA, 25 bp, Homo sapien
tagatttggctatactggacatgtc

SEQ ID NO: 5470209 - DNA, 25 bp, Homo sapien
attacaggcgctcaccgccgcgcct

SEQ ID NO: 5470210 - DNA, 25 bp, Homo sapien
gattacaggcgctcaccgccgcgcc

SEQ ID NO: 5470211 - DNA, 25 bp, Homo sapien
ccgcgcctggctaattttgtatttt

SEQ ID NO: 5470212 - DNA, 25 bp, Homo sapien
ttacaggcgctcaccgccgcgcctg

SEQ ID NO: 5470213 - DNA, 25 bp, Homo sapien
acgcccggcccagtctacagatttt

SEQ ID NO: 5470214 - DNA, 25 bp, Homo sapien
ggcccagtctacagattttcttttg

SEQ ID NO: 5470215 - DNA, 25 bp, Homo sapien
gcccggcccagtctacagattttct

SEQ ID NO: 5470216 - DNA, 25 bp, Homo sapien
aatatggcctttgaaacacaaacat

SEQ ID NO: 5470217 - DNA, 25 bp, Homo sapien
gcctctggtgcacttttatatcagt

SEQ ID NO: 5470218 - DNA, 25 bp, Homo sapien
cacttttatatcagtaaaaccagtc

SEQ ID NO: 5470219 - DNA, 25 bp, Homo sapien
aaaccagtcttcagttttgatgagt

SEQ ID NO: 5470220 - DNA, 25 bp, Homo sapien
cctggcctctggtgcacttttatat

SEQ ID NO: 5470221 - DNA, 25 bp, Homo sapien
gaaaggtatgaataaggacatatcg

SEQ ID NO: 5470222 - DNA, 25 bp, Homo sapien
aatctctaatgaacctgtaatttaa

SEQ ID NO: 5470223 - DNA, 25 bp, Homo sapien
tgtgcctagccaaatttatataact

SEQ ID NO: 5470224 - DNA, 25 bp, Homo sapien
tccaggattgtgtcatacttcaaaa

SEQ ID NO: 5470225 - DNA, 25 bp, Homo sapien
cacttgatcttagccaaaaggctga

SEQ ID NO: 5470226 - DNA, 25 bp, Homo sapien
tcttagccaaaaggctgagaagtga

SEQ ID NO: 5470227 - DNA, 25 bp, Homo sapien
tattaaactgaaaaaacagatacta

SEQ ID NO: 5470228 - DNA, 25 bp, Homo sapien
aatttaggacatatcagatattaaa

SEQ ID NO: 5470229 - DNA, 25 bp, Homo sapien
tatcatggctttccaggtcaataca

SEQ ID NO: 5470230 - DNA, 25 bp, Homo sapien
aaattatatagcttttggcaggaac

SEQ ID NO: 5470231 - DNA, 25 bp, Homo sapien
tagtaaacactgctaacaatttgga

SEQ ID NO: 5470232 - DNA, 25 bp, Homo sapien
gactataggcagagtgctcccaaat

SEQ ID NO: 5470233 - DNA, 25 bp, Homo sapien
tgctcactaatctgatttgaaaagc

SEQ ID NO: 5470234 - DNA, 25 bp, Homo sapien
tggagtgactttgtcaggcaggttc

SEQ ID NO: 5470235 - DNA, 25 bp, Homo sapien
catcccatctttgctcactaatctg

SEQ ID NO: 5470236 - DNA, 25 bp, Homo sapien
gtgactttgtcaggcaggttcttga

SEQ ID NO: 5470237 - DNA, 25 bp, Homo sapien
ttaaaagcaaggctccacaaactgg

SEQ ID NO: 5470238 - DNA, 25 bp, Homo sapien
caagagacctcgttctagagcaagg

SEQ ID NO: 5470239 - DNA, 25 bp, Homo sapien
aaattagcactaagtcacgagcagc

SEQ ID NO: 5470240 - DNA, 25 bp, Homo sapien
gaactggacagccaccataacatag

SEQ ID NO: 5470241 - DNA, 25 bp, Homo sapien
caaacagttggaatgctacacgtgg

SEQ ID NO: 5470242 - DNA, 25 bp, Homo sapien
acttttagttcagcagcagttttgc

SEQ ID NO: 5470243 - DNA, 25 bp, Homo sapien
tcactgaggccaacttttagttcag

SEQ ID NO: 5470244 - DNA, 25 bp, Homo sapien
tggacaagccaactttgacaccaac

SEQ ID NO: 5470245 - DNA, 25 bp, Homo sapien
tgctttttggctccaggggactctt

SEQ ID NO: 5470246 - DNA, 25 bp, Homo sapien
ccactgccactgtcgtcatcctgtt

SEQ ID NO: 5470247 - DNA, 25 bp, Homo sapien
aatgaggcccatcccgaagaatcag

SEQ ID NO: 5470248 - DNA, 25 bp, Homo sapien
gttacacagactccatcaagacaga

SEQ ID NO: 5470249 - DNA, 25 bp, Homo sapien
gaatcagccgggaattgccaaggca

SEQ ID NO: 5470250 - DNA, 25 bp, Homo sapien
gacctacctgcgtggatcataagca

SEQ ID NO: 5470251 - DNA, 25 bp, Homo sapien
cacagcagcttgtctctaactcaca

SEQ ID NO: 5470252 - DNA, 25 bp, Homo sapien
agaacctctccccaagtgctgtaga

SEQ ID NO: 5470253 - DNA, 25 bp, Homo sapien
gtgctgtagaatggcacacacagca

SEQ ID NO: 5470254 - DNA, 25 bp, Homo sapien
gcagcttgtctctaactcacagcca

SEQ ID NO: 5470255 - DNA, 25 bp, Homo sapien
tcttcctcatcctggtccaactcac

SEQ ID NO: 5470256 - DNA, 25 bp, Homo sapien
ctacagaaggattctttatcttcct

SEQ ID NO: 5470257 - DNA, 25 bp, Homo sapien
cccctacagaaggattctttatctt

SEQ ID NO: 5470258 - DNA, 25 bp, Homo sapien
tatcttcctcatcctggtccaactc

SEQ ID NO: 5470259 - DNA, 25 bp, Homo sapien
tcattctcctggtggctctcacggt

SEQ ID NO: 5470260 - DNA, 25 bp, Homo sapien
tcccgggacagtggtattcttcctg

SEQ ID NO: 5470261 - DNA, 25 bp, Homo sapien
ggtgatattaacttctcagcaaaca

SEQ ID NO: 5470262 - DNA, 25 bp, Homo sapien
tctcacggtccttgagcttggctcc

SEQ ID NO: 5470263 - DNA, 25 bp, Homo sapien
tttttgctttgagaccgactctgtc

SEQ ID NO: 5470264 - DNA, 25 bp, Homo sapien
cctcctgggccataaatgaatggat

SEQ ID NO: 5470265 - DNA, 25 bp, Homo sapien
gagatttaaaccagtattaccagaa

SEQ ID NO: 5470266 - DNA, 25 bp, Homo sapien
ccacacttggtcacgatacattatg

SEQ ID NO: 5470267 - DNA, 25 bp, Homo sapien
tctactgccattgtccttagcttct

SEQ ID NO: 5470268 - DNA, 25 bp, Homo sapien
catctctactgccattgtccttagc

SEQ ID NO: 5470269 - DNA, 25 bp, Homo sapien
ctcatctctactgccattgtcctta

SEQ ID NO: 5470270 - DNA, 25 bp, Homo sapien
tctctactgccattgtccttagctt

SEQ ID NO: 5470271 - DNA, 25 bp, Homo sapien
catcttctacctcctttggggaaag

SEQ ID NO: 5470272 - DNA, 25 bp, Homo sapien
aagacttattttcttcagttcacct

SEQ ID NO: 5470273 - DNA, 25 bp, Homo sapien
attttcttcagttcaccttgacctt

SEQ ID NO: 5470274 - DNA, 25 bp, Homo sapien
atcttccccatcttctacctccttt

SEQ ID NO: 5470275 - DNA, 25 bp, Homo sapien
tgaactgggtcagcgtccatcacta

SEQ ID NO: 5470276 - DNA, 25 bp, Homo sapien
ttcctttaaggctgtcgcggtgcgc

SEQ ID NO: 5470277 - DNA, 25 bp, Homo sapien
acatgagtctataaccctcgctgcc

SEQ ID NO: 5470278 - DNA, 25 bp, Homo sapien
aagtacctttacttcgccagtcaga

SEQ ID NO: 5470279 - DNA, 25 bp, Homo sapien
ccagcctactcattaaattgaaggg

SEQ ID NO: 5470280 - DNA, 25 bp, Homo sapien
cgcgcccagcctactcattaaattg

SEQ ID NO: 5470281 - DNA, 25 bp, Homo sapien
ttgccagaatgttaacagcagttaa

SEQ ID NO: 5470282 - DNA, 25 bp, Homo sapien
taacagcagttaatttgggtgttgg

SEQ ID NO: 5470283 - DNA, 25 bp, Homo sapien
agaatgcagccccagcatgaccggt

SEQ ID NO: 5470284 - DNA, 25 bp, Homo sapien
agccccagcatgaccggtgtttttg

SEQ ID NO: 5470285 - DNA, 25 bp, Homo sapien
aaggagaatgcagccccagcatgac

SEQ ID NO: 5470286 - DNA, 25 bp, Homo sapien
cagcatgaccggtgtttttgccagg

SEQ ID NO: 5470287 - DNA, 25 bp, Homo sapien
cactttctcggcagggagcatgagc

SEQ ID NO: 5470288 - DNA, 25 bp, Homo sapien
tcctggctgagcaatgacttggcct

SEQ ID NO: 5470289 - DNA, 25 bp, Homo sapien
cattccctggcaagagaggttttac

SEQ ID NO: 5470290 - DNA, 25 bp, Homo sapien
cagcctgcacgtatgtgaggacgga

SEQ ID NO: 5470291 - DNA, 25 bp, Homo sapien
ggtagactgatatgcttgatggtgc

SEQ ID NO: 5470292 - DNA, 25 bp, Homo sapien
cgtttcagaaactggcagtggtggc

SEQ ID NO: 5470293 - DNA, 25 bp, Homo sapien
tgatggtgcatgacaaggtggtgac

SEQ ID NO: 5470294 - DNA, 25 bp, Homo sapien
agaaaggtagactgatatgcttgat

SEQ ID NO: 5470295 - DNA, 25 bp, Homo sapien
ctagggacagtacgtgaaggcatcc

SEQ ID NO: 5470296 - DNA, 25 bp, Homo sapien
tggcagtggacagataagaagcaca

SEQ ID NO: 5470297 - DNA, 25 bp, Homo sapien
gaatttctaggctgaactagggaca

SEQ ID NO: 5470298 - DNA, 25 bp, Homo sapien
tggcgtctggtcagtgtgagtcctc

SEQ ID NO: 5470299 - DNA, 25 bp, Homo sapien
caggatggatcggtctcttgctgcg

SEQ ID NO: 5470300 - DNA, 25 bp, Homo sapien
gatggatcggtctcttgctgcgcct

SEQ ID NO: 5470301 - DNA, 25 bp, Homo sapien
tggatcggtctcttgctgcgcctct

SEQ ID NO: 5470302 - DNA, 25 bp, Homo sapien
atcggtctcttgctgcgcctctggg

SEQ ID NO: 5470303 - DNA, 25 bp, Homo sapien
ctggacatgaggctatagagcacgg

SEQ ID NO: 5470304 - DNA, 25 bp, Homo sapien
agaagatgccggagatgacgtgcac

SEQ ID NO: 5470305 - DNA, 25 bp, Homo sapien
ggtgctgcctgtggtcatcctgctg

SEQ ID NO: 5470306 - DNA, 25 bp, Homo sapien
aaggtctctcggaagcggctggaca

SEQ ID NO: 5470307 - DNA, 25 bp, Homo sapien
ctgggaggcatgcacatagctctgg

SEQ ID NO: 5470308 - DNA, 25 bp, Homo sapien
ggctgtttagacaaatggtctctcc

SEQ ID NO: 5470309 - DNA, 25 bp, Homo sapien
ttagctggctctgtccaaagtctca

SEQ ID NO: 5470310 - DNA, 25 bp, Homo sapien
cggatctttgatcggcttagtatca

SEQ ID NO: 5470311 - DNA, 25 bp, Homo sapien
tagggtaatctaaaagagtacacag

SEQ ID NO: 5470312 - DNA, 25 bp, Homo sapien
cacacacgagactagaggagttcct

SEQ ID NO: 5470313 - DNA, 25 bp, Homo sapien
gagtacacaggagtgcaactcagac

SEQ ID NO: 5470314 - DNA, 25 bp, Homo sapien
aatcttaccgttagccattaacagg

SEQ ID NO: 5470315 - DNA, 25 bp, Homo sapien
cactaccatgttgtagagggcccgt

SEQ ID NO: 5470316 - DNA, 25 bp, Homo sapien
cgaagatcagcaggtatgtggcaca

SEQ ID NO: 5470317 - DNA, 25 bp, Homo sapien
catctcaaacagtagcgtgcggaaa

SEQ ID NO: 5470318 - DNA, 25 bp, Homo sapien
ccttgtggcgcaggatgaccagaca

SEQ ID NO: 5470319 - DNA, 25 bp, Homo sapien
cccctggccgcactgccattgcaag

SEQ ID NO: 5470320 - DNA, 25 bp, Homo sapien
ccgcactgccattgcaagccatggg

SEQ ID NO: 5470321 - DNA, 25 bp, Homo sapien
catggggttccttgcaccccctggg

SEQ ID NO: 5470322 - DNA, 25 bp, Homo sapien
tggccgcactgccattgcaagccat

SEQ ID NO: 5470323 - DNA, 25 bp, Homo sapien
cgccctagcccacgccggcgcctgc

SEQ ID NO: 5470324 - DNA, 25 bp, Homo sapien
ccctagcccacgccggcgcctgcgc

SEQ ID NO: 5470325 - DNA, 25 bp, Homo sapien
cccggcccagctgccgcgccctagc

SEQ ID NO: 5470326 - DNA, 25 bp, Homo sapien
cgcgccctagcccacgccggcgcct

SEQ ID NO: 5470327 - DNA, 25 bp, Homo sapien
ctccgagcgacggacacagacgcgg

SEQ ID NO: 5470328 - DNA, 25 bp, Homo sapien
gtggactgactgacagcggccccag

SEQ ID NO: 5470329 - DNA, 25 bp, Homo sapien
acgcggcgcgggagccagtggactg

SEQ ID NO: 5470330 - DNA, 25 bp, Homo sapien
ggcttccaccctccgagcgacggac

SEQ ID NO: 5470331 - DNA, 25 bp, Homo sapien
cccttgaagtcgacatgccccggtg

SEQ ID NO: 5470332 - DNA, 25 bp, Homo sapien
tgaagtcgacatgccccggtgcggt

SEQ ID NO: 5470333 - DNA, 25 bp, Homo sapien
cttgaagtcgacatgccccggtgcg

SEQ ID NO: 5470334 - DNA, 25 bp, Homo sapien
cagccccttgaagtcgacatgcccc

SEQ ID NO: 5470335 - DNA, 25 bp, Homo sapien
cattagggctctgaccacgtgtcct

SEQ ID NO: 5470336 - DNA, 25 bp, Homo sapien
tctgacacctcagggcgtttgcatg

SEQ ID NO: 5470337 - DNA, 25 bp, Homo sapien
gagatgagcctgttctcctacaaca

SEQ ID NO: 5470338 - DNA, 25 bp, Homo sapien
tacaacagtaggagagatgagcatc

SEQ ID NO: 5470339 - DNA, 25 bp, Homo sapien
cacctggttcactatgtggccatag

SEQ ID NO: 5470340 - DNA, 25 bp, Homo sapien
ggtgtttgagccctgcttccagagt

SEQ ID NO: 5470341 - DNA, 25 bp, Homo sapien
tcactatgtggccatagctggcagg

SEQ ID NO: 5470342 - DNA, 25 bp, Homo sapien
ctggtctcacctggttcactatgtg

SEQ ID NO: 5470343 - DNA, 25 bp, Homo sapien
caggcctccttcaagacggccaccc

SEQ ID NO: 5470344 - DNA, 25 bp, Homo sapien
tagatcaggcctccttcaagacggc

SEQ ID NO: 5470345 - DNA, 25 bp, Homo sapien
atagatcaggcctccttcaagacgg

SEQ ID NO: 5470346 - DNA, 25 bp, Homo sapien
gatcaggcctccttcaagacggcca

SEQ ID NO: 5470347 - DNA, 25 bp, Homo sapien
gctctatgaggagatggtccagacc

SEQ ID NO: 5470348 - DNA, 25 bp, Homo sapien
gatggtccagacctatggaactcag

SEQ ID NO: 5470349 - DNA, 25 bp, Homo sapien
tggtgatggtgccaccttcgtgcag

SEQ ID NO: 5470350 - DNA, 25 bp, Homo sapien
ggctgctctatgaggagatggtcca

SEQ ID NO: 5470351 - DNA, 25 bp, Homo sapien
tctatcagggaaaagagtgtctcca

SEQ ID NO: 5470352 - DNA, 25 bp, Homo sapien
caaagttcacacataggacagtccc

SEQ ID NO: 5470353 - DNA, 25 bp, Homo sapien
aagacctccccaggctaagaggtag

SEQ ID NO: 5470354 - DNA, 25 bp, Homo sapien
taagaggtagccctatttcctagac

SEQ ID NO: 5470355 - DNA, 25 bp, Homo sapien
aatgggctcaccacactgaacttga

SEQ ID NO: 5470356 - DNA, 25 bp, Homo sapien
acttgaacaaggcactcagggtccc

SEQ ID NO: 5470357 - DNA, 25 bp, Homo sapien
ctcccaccaatgggctcaccacact

SEQ ID NO: 5470358 - DNA, 25 bp, Homo sapien
tcacctcctgtattttattagtact

SEQ ID NO: 5470359 - DNA, 25 bp, Homo sapien
ttatattctgctgcggcgggaacag

SEQ ID NO: 5470360 - DNA, 25 bp, Homo sapien
tgggccttgcgtcccagtctgggtt

SEQ ID NO: 5470361 - DNA, 25 bp, Homo sapien
cagcagatgggtaagtcgaggcaca

SEQ ID NO: 5470362 - DNA, 25 bp, Homo sapien
tgggttctggcttcagcactttata

SEQ ID NO: 5470363 - DNA, 25 bp, Homo sapien
agtgcagacccttctggccccaatg

SEQ ID NO: 5470364 - DNA, 25 bp, Homo sapien
gtggtcagtgcagacccttctggcc

SEQ ID NO: 5470365 - DNA, 25 bp, Homo sapien
tgcagacccttctggccccaatgcc

SEQ ID NO: 5470366 - DNA, 25 bp, Homo sapien
ggtggtcagtgcagacccttctggc

SEQ ID NO: 5470367 - DNA, 25 bp, Homo sapien
acaatggggctttctccggccacag

SEQ ID NO: 5470368 - DNA, 25 bp, Homo sapien
gggtgaggcgaacaaaggcctctct

SEQ ID NO: 5470369 - DNA, 25 bp, Homo sapien
tctctgcgagagaaatcccgactgg

SEQ ID NO: 5470370 - DNA, 25 bp, Homo sapien
gctgcggggcgcactcaggccacaa

SEQ ID NO: 5470371 - DNA, 25 bp, Homo sapien
aatacctgctgttcggcacatgagc

SEQ ID NO: 5470372 - DNA, 25 bp, Homo sapien
caagccatcactggcggtcagacag

SEQ ID NO: 5470373 - DNA, 25 bp, Homo sapien
tcactggcggtcagacagaaaatga

SEQ ID NO: 5470374 - DNA, 25 bp, Homo sapien
tcacatgaaatacctgctgttcggc

SEQ ID NO: 5470375 - DNA, 25 bp, Homo sapien
cacataatcagggttagacttgcct

SEQ ID NO: 5470376 - DNA, 25 bp, Homo sapien
ggtaaagctcttctcaggctggcaa

SEQ ID NO: 5470377 - DNA, 25 bp, Homo sapien
cattccagggcattctgtgggaaga

SEQ ID NO: 5470378 - DNA, 25 bp, Homo sapien
tggcaacagtgaaaccgtgggcaga

SEQ ID NO: 5470379 - DNA, 25 bp, Homo sapien
cgctcctcaagagcccctcgcccat

SEQ ID NO: 5470380 - DNA, 25 bp, Homo sapien
gcagtccaacctccaggtcgctcct

SEQ ID NO: 5470381 - DNA, 25 bp, Homo sapien
caacctccaggtcgctcctcaagag

SEQ ID NO: 5470382 - DNA, 25 bp, Homo sapien
acctccaggtcgctcctcaagagcc

SEQ ID NO: 5470383 - DNA, 25 bp, Homo sapien
gcagctcctgccacaactgcggtga

SEQ ID NO: 5470384 - DNA, 25 bp, Homo sapien
gcgtgtcccatctaacagcagctca

SEQ ID NO: 5470385 - DNA, 25 bp, Homo sapien
gctcatccaggaggtgtttcatcgc

SEQ ID NO: 5470386 - DNA, 25 bp, Homo sapien
tctgggttgtgcactagcaggctct

SEQ ID NO: 5470387 - DNA, 25 bp, Homo sapien
gttcggcatacagcattaacaccct

SEQ ID NO: 5470388 - DNA, 25 bp, Homo sapien
aaacttactgtgaacacctgttcgg

SEQ ID NO: 5470389 - DNA, 25 bp, Homo sapien
cagtaggatgatcacttaggcaacc

SEQ ID NO: 5470390 - DNA, 25 bp, Homo sapien
gtggctacgcacaggctccgttcta

SEQ ID NO: 5470391 - DNA, 25 bp, Homo sapien
cttgaaaggtaattgtgacctgcga

SEQ ID NO: 5470392 - DNA, 25 bp, Homo sapien
gaatgtgctactgactactgagacc

SEQ ID NO: 5470393 - DNA, 25 bp, Homo sapien
cctcaaatgagctgcggaaacttga

SEQ ID NO: 5470394 - DNA, 25 bp, Homo sapien
gcaaaaatgccgttcctcataatcc

SEQ ID NO: 5470395 - DNA, 25 bp, Homo sapien
ccggccacacaggttgcagatttga

SEQ ID NO: 5470396 - DNA, 25 bp, Homo sapien
ctgaacttgtagtccaaaggcagaa

SEQ ID NO: 5470397 - DNA, 25 bp, Homo sapien
tccagactatcccaggaaggaactg

SEQ ID NO: 5470398 - DNA, 25 bp, Homo sapien
gcagaaggagtgagatccagactat

SEQ ID NO: 5470399 - DNA, 25 bp, Homo sapien
actgcttctccgaatgtgacgggga

SEQ ID NO: 5470400 - DNA, 25 bp, Homo sapien
cactgcttctccgaatgtgacgggg

SEQ ID NO: 5470401 - DNA, 25 bp, Homo sapien
tgcttctccgaatgtgacggggaga

SEQ ID NO: 5470402 - DNA, 25 bp, Homo sapien
tcactgcttctccgaatgtgacggg

SEQ ID NO: 5470403 - DNA, 25 bp, Homo sapien
acatccacgtcttttgagccctcct

SEQ ID NO: 5470404 - DNA, 25 bp, Homo sapien
cgccccatgggtgcccgtttctcca

SEQ ID NO: 5470405 - DNA, 25 bp, Homo sapien
gctccacatccacgtcttttgagcc

SEQ ID NO: 5470406 - DNA, 25 bp, Homo sapien
tcttctccgccccatgggtgcccgt

SEQ ID NO: 5470407 - DNA, 25 bp, Homo sapien
gcacagcaggcgctccgcaattgca

SEQ ID NO: 5470408 - DNA, 25 bp, Homo sapien
cacagcaggcgctccgcaattgcag

SEQ ID NO: 5470409 - DNA, 25 bp, Homo sapien
tggcacaagagcaccgcagctggcg

SEQ ID NO: 5470410 - DNA, 25 bp, Homo sapien
gatggcacaagagcaccgcagctgg

SEQ ID NO: 5470411 - DNA, 25 bp, Homo sapien
caagagcaccgcagctggcgcagca

SEQ ID NO: 5470412 - DNA, 25 bp, Homo sapien
ggaagggggagtcgggatgagcctg

SEQ ID NO: 5470413 - DNA, 25 bp, Homo sapien
tgggcacatgctcgcatctgcacac

SEQ ID NO: 5470414 - DNA, 25 bp, Homo sapien
aacggttggtggtatcatgggcaca

SEQ ID NO: 5470415 - DNA, 25 bp, Homo sapien
tccgtgttcatggttgtacagacat

SEQ ID NO: 5470416 - DNA, 25 bp, Homo sapien
catgtacatgcacaccgagagactg

SEQ ID NO: 5470417 - DNA, 25 bp, Homo sapien
cctccctgatgaggcttcacttctg

SEQ ID NO: 5470418 - DNA, 25 bp, Homo sapien
tcacatgtgcatgggactcgagctt

SEQ ID NO: 5470419 - DNA, 25 bp, Homo sapien
ctctcggtccaggtgctgactggca

SEQ ID NO: 5470420 - DNA, 25 bp, Homo sapien
cttgggaagctctcggtccaggtgc

SEQ ID NO: 5470421 - DNA, 25 bp, Homo sapien
tcttcaggctaaactaccgggatcc

SEQ ID NO: 5470422 - DNA, 25 bp, Homo sapien
taactggaacttaatggatgcgccg

SEQ ID NO: 5470423 - DNA, 25 bp, Homo sapien
cgtagtcctcgggaacagcactgtg

SEQ ID NO: 5470424 - DNA, 25 bp, Homo sapien
caaagagttgagacgcgtagtcctc

SEQ ID NO: 5470425 - DNA, 25 bp, Homo sapien
tcaggtagtccccaaagattagccc

SEQ ID NO: 5470426 - DNA, 25 bp, Homo sapien
gttgttctcggatcgcccacgtgag

SEQ ID NO: 5470427 - DNA, 25 bp, Homo sapien
gagacgatgatttttcccgaggaac

SEQ ID NO: 5470428 - DNA, 25 bp, Homo sapien
tagttcgacagctaagtgcggtggc

SEQ ID NO: 5470429 - DNA, 25 bp, Homo sapien
ctccggcagctttatcgccagagtc

SEQ ID NO: 5470430 - DNA, 25 bp, Homo sapien
ggactccggcagctttatcgccaga

SEQ ID NO: 5470431 - DNA, 25 bp, Homo sapien
gcggactccggcagctttatcgcca

SEQ ID NO: 5470432 - DNA, 25 bp, Homo sapien
gccgcggactccggcagctttatcg

SEQ ID NO: 5470433 - DNA, 25 bp, Homo sapien
agccgtagacaccagctccgaaatc

SEQ ID NO: 5470434 - DNA, 25 bp, Homo sapien
acaccagctccgaaatcaccaccaa

SEQ ID NO: 5470435 - DNA, 25 bp, Homo sapien
tcagacgcagccgtagacaccagct

SEQ ID NO: 5470436 - DNA, 25 bp, Homo sapien
gtcagacgcagccgtagacaccagc

SEQ ID NO: 5470437 - DNA, 25 bp, Homo sapien
gattggcgcgagtcaccttggcgtc

SEQ ID NO: 5470438 - DNA, 25 bp, Homo sapien
gcgacttcttggcagagcggagctc

SEQ ID NO: 5470439 - DNA, 25 bp, Homo sapien
tgaccccttctggactcagtccggg

SEQ ID NO: 5470440 - DNA, 25 bp, Homo sapien
gcaccaaaaggtgacttcccgcgag

SEQ ID NO: 5470441 - DNA, 25 bp, Homo sapien
aagagacgcccctgctaacgggaat

SEQ ID NO: 5470442 - DNA, 25 bp, Homo sapien
gagacgcccctgctaacgggaatgc

SEQ ID NO: 5470443 - DNA, 25 bp, Homo sapien
agagacgcccctgctaacgggaatg

SEQ ID NO: 5470444 - DNA, 25 bp, Homo sapien
agacgcccctgctaacgggaatgct

SEQ ID NO: 5470445 - DNA, 25 bp, Homo sapien
tgacaatgaggtagacgaagaagag

SEQ ID NO: 5470446 - DNA, 25 bp, Homo sapien
caatgaggtagacgaagaagaggaa

SEQ ID NO: 5470447 - DNA, 25 bp, Homo sapien
aggctgacaatgaggtagacgaaga

SEQ ID NO: 5470448 - DNA, 25 bp, Homo sapien
gctgacaatgaggtagacgaagaag

SEQ ID NO: 5470449 - DNA, 25 bp, Homo sapien
gaggaagctgagtcagctacgggca

SEQ ID NO: 5470450 - DNA, 25 bp, Homo sapien
aagctgagtcagctacgggcaagcg

SEQ ID NO: 5470451 - DNA, 25 bp, Homo sapien
gatgaggaagctgagtcagctacgg

SEQ ID NO: 5470452 - DNA, 25 bp, Homo sapien
tcagctacgggcaagcgggcagctg

SEQ ID NO: 5470453 - DNA, 25 bp, Homo sapien
tcccgtctcagaatctaaacgtggt

SEQ ID NO: 5470454 - DNA, 25 bp, Homo sapien
taaacgtggtcaccttcgagtagag

SEQ ID NO: 5470455 - DNA, 25 bp, Homo sapien
tccacttcccgtctcagaatctaaa

SEQ ID NO: 5470456 - DNA, 25 bp, Homo sapien
ccatgagaatttgcaacaggggagg

SEQ ID NO: 5470457 - DNA, 25 bp, Homo sapien
tcaggccgcttgttcagcatgtccc

SEQ ID NO: 5470458 - DNA, 25 bp, Homo sapien
ggccgcttgttcagcatgtccccag

SEQ ID NO: 5470459 - DNA, 25 bp, Homo sapien
caggccgcttgttcagcatgtcccc

SEQ ID NO: 5470460 - DNA, 25 bp, Homo sapien
aggccgcttgttcagcatgtcccca

SEQ ID NO: 5470461 - DNA, 25 bp, Homo sapien
taaaccatgtcatcaggaacccgtc

SEQ ID NO: 5470462 - DNA, 25 bp, Homo sapien
cagcaatctgcacatccgttaggtc

SEQ ID NO: 5470463 - DNA, 25 bp, Homo sapien
gcttcaggtacagcaggattcaggt

SEQ ID NO: 5470464 - DNA, 25 bp, Homo sapien
gaatatggtgactactgttcgcagc

SEQ ID NO: 5470465 - DNA, 25 bp, Homo sapien
tgactacacagggaggcgtcaagcc

SEQ ID NO: 5470466 - DNA, 25 bp, Homo sapien
cataagtgacctcatgggctggcag

SEQ ID NO: 5470467 - DNA, 25 bp, Homo sapien
ttcagagacgtgaccacagtgggag

SEQ ID NO: 5470468 - DNA, 25 bp, Homo sapien
gagagacgatttagacataagtgac

SEQ ID NO: 5470469 - DNA, 25 bp, Homo sapien
tggatgccaacatagaatgcctgtg

SEQ ID NO: 5470470 - DNA, 25 bp, Homo sapien
ggaactatacgctcatccctgctct

SEQ ID NO: 5470471 - DNA, 25 bp, Homo sapien
gccaccagcatctgaggaactatac

SEQ ID NO: 5470472 - DNA, 25 bp, Homo sapien
gtcttggggtgccaagccaccagca

SEQ ID NO: 5470473 - DNA, 25 bp, Homo sapien
ccagggcaccttgtgacccataaaa

SEQ ID NO: 5470474 - DNA, 25 bp, Homo sapien
gaagccattctaagatatctgacta

SEQ ID NO: 5470475 - DNA, 25 bp, Homo sapien
tgtaaacaagtagaccaatcatctc

SEQ ID NO: 5470476 - DNA, 25 bp, Homo sapien
gactagatgccttttccgttgaatg

SEQ ID NO: 5470477 - DNA, 25 bp, Homo sapien
tagcagggctggtgatcagattgca

SEQ ID NO: 5470478 - DNA, 25 bp, Homo sapien
agcagggctggtgatcagattgcac

SEQ ID NO: 5470479 - DNA, 25 bp, Homo sapien
ctagcagggctggtgatcagattgc

SEQ ID NO: 5470480 - DNA, 25 bp, Homo sapien
ctgagatggttacaggacctgaggt

SEQ ID NO: 5470481 - DNA, 25 bp, Homo sapien
ttatgaagtgaggtcaacgggctag

SEQ ID NO: 5470482 - DNA, 25 bp, Homo sapien
tggcgaggacccgaacaagatgttt

SEQ ID NO: 5470483 - DNA, 25 bp, Homo sapien
aagggaggcccgtgctgcagtcctg

SEQ ID NO: 5470484 - DNA, 25 bp, Homo sapien
caatgacgacagtcttaaaggcctc

SEQ ID NO: 5470485 - DNA, 25 bp, Homo sapien
tagtagctcagaggtaagaacactt

SEQ ID NO: 5470486 - DNA, 25 bp, Homo sapien
tgttctctcttatgtcggacctgaa

SEQ ID NO: 5470487 - DNA, 25 bp, Homo sapien
cattctccagttaggttcatgcaga

SEQ ID NO: 5470488 - DNA, 25 bp, Homo sapien
gagtttagtctggtcagctggaaga

SEQ ID NO: 5470489 - DNA, 25 bp, Homo sapien
aaaagagccatctggttacctacac

SEQ ID NO: 5470490 - DNA, 25 bp, Homo sapien
tgacaggtacagttaccggtttgtg

SEQ ID NO: 5470491 - DNA, 25 bp, Homo sapien
ttacctacacagagctggtcccctg

SEQ ID NO: 5470492 - DNA, 25 bp, Homo sapien
agaagatcgtcgtcaaaaaactttg

SEQ ID NO: 5470493 - DNA, 25 bp, Homo sapien
tgcattcatggacacctctggctgg

SEQ ID NO: 5470494 - DNA, 25 bp, Homo sapien
tgcctttgggtaacagcaccttgct

SEQ ID NO: 5470495 - DNA, 25 bp, Homo sapien
taaagcccttagtagagtgctctgc

SEQ ID NO: 5470496 - DNA, 25 bp, Homo sapien
tactcacaatagtcgaaaggtgggc

SEQ ID NO: 5470497 - DNA, 25 bp, Homo sapien
ctaaactactctgtactttcccagg

SEQ ID NO: 5470498 - DNA, 25 bp, Homo sapien
ttcatcttatgataggtttgagaca

SEQ ID NO: 5470499 - DNA, 25 bp, Homo sapien
ttcccagggtaattaataaccagca

SEQ ID NO: 5470500 - DNA, 25 bp, Homo sapien
aatcacgcctcgtgaagaagaagtc

SEQ ID NO: 5470501 - DNA, 25 bp, Homo sapien
gcctgtttctagacacacttcataa

SEQ ID NO: 5470502 - DNA, 25 bp, Homo sapien
gagctctctgcccactgaatggcac

SEQ ID NO: 5470503 - DNA, 25 bp, Homo sapien
tcaggaacctggaaacctagatacc

SEQ ID NO: 5470504 - DNA, 25 bp, Homo sapien
gatacccttggatactcttttactc

SEQ ID NO: 5470505 - DNA, 25 bp, Homo sapien
gactcgggtgctgcctctatcaagg

SEQ ID NO: 5470506 - DNA, 25 bp, Homo sapien
tgctggcatcatctgggactcgggt

SEQ ID NO: 5470507 - DNA, 25 bp, Homo sapien
tctatcaaggactgccaggtatttg

SEQ ID NO: 5470508 - DNA, 25 bp, Homo sapien
tgtggagttagggatcacaaagcca

SEQ ID NO: 5470509 - DNA, 25 bp, Homo sapien
gaagaaggaaaagccggggtgagca

SEQ ID NO: 5470510 - DNA, 25 bp, Homo sapien
caggtgccccagtataaagtttaag

SEQ ID NO: 5470511 - DNA, 25 bp, Homo sapien
aggaaaagccggggtgagcaggtgc

SEQ ID NO: 5470512 - DNA, 25 bp, Homo sapien
agcaggtgccccagtataaagttta

SEQ ID NO: 5470513 - DNA, 25 bp, Homo sapien
tgatttcaggcatgtaggcagcaga

SEQ ID NO: 5470514 - DNA, 25 bp, Homo sapien
tacaacgtcagtgcctaaaccaggc

SEQ ID NO: 5470515 - DNA, 25 bp, Homo sapien
tctaaaggactaggaccagcgagca

SEQ ID NO: 5470516 - DNA, 25 bp, Homo sapien
cagtcttgcagagtgtaggaatcct

SEQ ID NO: 5470517 - DNA, 25 bp, Homo sapien
catttgttctgtcgaagaaaaatta

SEQ ID NO: 5470518 - DNA, 25 bp, Homo sapien
ttaagttctcgagacactgccttgc

SEQ ID NO: 5470519 - DNA, 25 bp, Homo sapien
aaaaattaagttctcgagacactgc

SEQ ID NO: 5470520 - DNA, 25 bp, Homo sapien
tttccatttgttctgtcgaagaaaa

SEQ ID NO: 5470521 - DNA, 25 bp, Homo sapien
tgttccttgccagagtatcttccct

SEQ ID NO: 5470522 - DNA, 25 bp, Homo sapien
ttgccagagtatcttccctgtctca

SEQ ID NO: 5470523 - DNA, 25 bp, Homo sapien
ctgttccttgccagagtatcttccc

SEQ ID NO: 5470524 - DNA, 25 bp, Homo sapien
gttccttgccagagtatcttccctg

SEQ ID NO: 5470525 - DNA, 25 bp, Homo sapien
tgtgtggtctttgctacagaccctg

SEQ ID NO: 5470526 - DNA, 25 bp, Homo sapien
cactatattttaccctctggagaga

SEQ ID NO: 5470527 - DNA, 25 bp, Homo sapien
tgaagaaccctaaacaacacagctg

SEQ ID NO: 5470528 - DNA, 25 bp, Homo sapien
tatacgagaaaagtctcggctgggc

SEQ ID NO: 5470529 - DNA, 25 bp, Homo sapien
cacttaccacctcgtgtggctaatt

SEQ ID NO: 5470530 - DNA, 25 bp, Homo sapien
ggcacttaccacctcgtgtggctaa

SEQ ID NO: 5470531 - DNA, 25 bp, Homo sapien
acttaccacctcgtgtggctaattt

SEQ ID NO: 5470532 - DNA, 25 bp, Homo sapien
tatgaattacttggaattatacact

SEQ ID NO: 5470533 - DNA, 25 bp, Homo sapien
cttccttgagggataaataactata

SEQ ID NO: 5470534 - DNA, 25 bp, Homo sapien
gaattatacactggagatttatctc

SEQ ID NO: 5470535 - DNA, 25 bp, Homo sapien
taactatatgaattacttggaatta

SEQ ID NO: 5470536 - DNA, 25 bp, Homo sapien
ttcaataggttttcactgttcagag

SEQ ID NO: 5470537 - DNA, 25 bp, Homo sapien
tactatgcacatatgcccctctatg

SEQ ID NO: 5470538 - DNA, 25 bp, Homo sapien
cattgtgaccagagtgccagtccta

SEQ ID NO: 5470539 - DNA, 25 bp, Homo sapien
gaaagtttacattgtggctcaaaga

SEQ ID NO: 5470540 - DNA, 25 bp, Homo sapien
aaacctgaacatgctggtacgctga

SEQ ID NO: 5470541 - DNA, 25 bp, Homo sapien
tagactggttaagtgccctggccaa

SEQ ID NO: 5470542 - DNA, 25 bp, Homo sapien
gagaaaacagtagtctgcaacctgg

SEQ ID NO: 5470543 - DNA, 25 bp, Homo sapien
gatcagtgacctacaaaagggaccc

SEQ ID NO: 5470544 - DNA, 25 bp, Homo sapien
gagcaaaaggtgatttacaacaggg

SEQ ID NO: 5470545 - DNA, 25 bp, Homo sapien
tgattcctggacctgacctttcaga

SEQ ID NO: 5470546 - DNA, 25 bp, Homo sapien
gaatcatgtacaacagtgcttctca

SEQ ID NO: 5470547 - DNA, 25 bp, Homo sapien
taatccctgacccttgagcaaaagg

SEQ ID NO: 5470548 - DNA, 25 bp, Homo sapien
tttggggtggaagcagctgcaatga

SEQ ID NO: 5470549 - DNA, 25 bp, Homo sapien
ttttcacacagagtagtcacctagg

SEQ ID NO: 5470550 - DNA, 25 bp, Homo sapien
cacctaggtagcagtgccacacatg

SEQ ID NO: 5470551 - DNA, 25 bp, Homo sapien
gcactatgaccagaacgcagctttt

SEQ ID NO: 5470552 - DNA, 25 bp, Homo sapien
tgtctttgctccttaggcagaagat

SEQ ID NO: 5470553 - DNA, 25 bp, Homo sapien
taaacattagctacattagaaggct

SEQ ID NO: 5470554 - DNA, 25 bp, Homo sapien
ccttctaaacagacataaagctggt

SEQ ID NO: 5470555 - DNA, 25 bp, Homo sapien
cactctaggtggctggcgtttgtaa

SEQ ID NO: 5470556 - DNA, 25 bp, Homo sapien
gtaagttacaaagtgatatttacaa

SEQ ID NO: 5470557 - DNA, 25 bp, Homo sapien
taaaggctaccagaggatgagcacg

SEQ ID NO: 5470558 - DNA, 25 bp, Homo sapien
tccaatcagatgaaaacgttgcttc

SEQ ID NO: 5470559 - DNA, 25 bp, Homo sapien
caaaagcctgtttctggatgcacta

SEQ ID NO: 5470560 - DNA, 25 bp, Homo sapien
tgattcgcttttccttccagtgggc

SEQ ID NO: 5470561 - DNA, 25 bp, Homo sapien
tggcccgctcgtccttggctgacat

SEQ ID NO: 5470562 - DNA, 25 bp, Homo sapien
ccctcaggatctccctggcccgctc

SEQ ID NO: 5470563 - DNA, 25 bp, Homo sapien
tcaggatctccctggcccgctcgtc

SEQ ID NO: 5470564 - DNA, 25 bp, Homo sapien
agtttgaagcccctcaggatctccc

SEQ ID NO: 5470565 - DNA, 25 bp, Homo sapien
ccggcttggagacctcgggctagca

SEQ ID NO: 5470566 - DNA, 25 bp, Homo sapien
ctcgcagacggtgcccaggagccga

SEQ ID NO: 5470567 - DNA, 25 bp, Homo sapien
tttctcactctggtcggcggagcct

SEQ ID NO: 5470568 - DNA, 25 bp, Homo sapien
caggagccgaggatggagccgcagc

SEQ ID NO: 5470569 - DNA, 25 bp, Homo sapien
ccgcagagagttaacttctgtttac

SEQ ID NO: 5470570 - DNA, 25 bp, Homo sapien
cctcaaaagaagatgacagcccgca

SEQ ID NO: 5470571 - DNA, 25 bp, Homo sapien
aaaagaagatgacagcccgcagaga

SEQ ID NO: 5470572 - DNA, 25 bp, Homo sapien
tttacatggaactcagacatctgca

SEQ ID NO: 5470573 - DNA, 25 bp, Homo sapien
caatatgagagagttctaggtgcct

SEQ ID NO: 5470574 - DNA, 25 bp, Homo sapien
gaacgtcctctttcgtgaagtgcct

SEQ ID NO: 5470575 - DNA, 25 bp, Homo sapien
gcttgttggctagttgaacgtcctc

SEQ ID NO: 5470576 - DNA, 25 bp, Homo sapien
ccgttctggctgaatgtggtatctc

SEQ ID NO: 5470577 - DNA, 25 bp, Homo sapien
gcttaatgtatctcggtgcccaggg

SEQ ID NO: 5470578 - DNA, 25 bp, Homo sapien
catggtaaaacgctcaataagtggt

SEQ ID NO: 5470579 - DNA, 25 bp, Homo sapien
gctgcagtaccgtctaggccgcatt

SEQ ID NO: 5470580 - DNA, 25 bp, Homo sapien
gcccgggatggcgatggcgacggtt

SEQ ID NO: 5470581 - DNA, 25 bp, Homo sapien
cttgtgtgggcggaacgcgagtgca

SEQ ID NO: 5470582 - DNA, 25 bp, Homo sapien
ggaggtcgaaggctgtaaacgcggc

SEQ ID NO: 5470583 - DNA, 25 bp, Homo sapien
gagccagcgactaagaggaccgaga

SEQ ID NO: 5470584 - DNA, 25 bp, Homo sapien
tggacgcttgacaacctgcgggcag

SEQ ID NO: 5470585 - DNA, 25 bp, Homo sapien
aaaggtaccagtggctcagccctca

SEQ ID NO: 5470586 - DNA, 25 bp, Homo sapien
ccaacgtgcaggaggtaagaacggt

SEQ ID NO: 5470587 - DNA, 25 bp, Homo sapien
taagccaggtcttagaggctcccgg

SEQ ID NO: 5470588 - DNA, 25 bp, Homo sapien
gaaaccctcaagtaatctcctggag

SEQ ID NO: 5470589 - DNA, 25 bp, Homo sapien
gaccctgacaactccttttcactat

SEQ ID NO: 5470590 - DNA, 25 bp, Homo sapien
tgactgttgagaacttttgaccctg

SEQ ID NO: 5470591 - DNA, 25 bp, Homo sapien
caagctcataatattctgactgttg

SEQ ID NO: 5470592 - DNA, 25 bp, Homo sapien
atttggactgtctcttaccctcaag

SEQ ID NO: 5470593 - DNA, 25 bp, Homo sapien
gaaagtttgcctccaatagcacagg

SEQ ID NO: 5470594 - DNA, 25 bp, Homo sapien
caatgctatcactgccctgaggatg

SEQ ID NO: 5470595 - DNA, 25 bp, Homo sapien
ccccgaaagtttgcctccaatagca

SEQ ID NO: 5470596 - DNA, 25 bp, Homo sapien
acatgatcatctgcaagaccaatgc

SEQ ID NO: 5470597 - DNA, 25 bp, Homo sapien
ggtggtgacatctgagtacttggac

SEQ ID NO: 5470598 - DNA, 25 bp, Homo sapien
ggaggtgagggcaatactcccttca

SEQ ID NO: 5470599 - DNA, 25 bp, Homo sapien
aggaggtgagggcaatactcccttc

SEQ ID NO: 5470600 - DNA, 25 bp, Homo sapien
gaggtgagggcaatactcccttcag

SEQ ID NO: 5470601 - DNA, 25 bp, Homo sapien
ccaggtctccttctacagtgggtac

SEQ ID NO: 5470602 - DNA, 25 bp, Homo sapien
cttctacagtgggtacgcgtcatac

SEQ ID NO: 5470603 - DNA, 25 bp, Homo sapien
ggtctccttctacagtgggtacgcg

SEQ ID NO: 5470604 - DNA, 25 bp, Homo sapien
tccttctacagtgggtacgcgtcat

SEQ ID NO: 5470605 - DNA, 25 bp, Homo sapien
ccatcaaagcgaccacctggcaggg

SEQ ID NO: 5470606 - DNA, 25 bp, Homo sapien
aggatcccatcaaagcgaccacctg

SEQ ID NO: 5470607 - DNA, 25 bp, Homo sapien
gcaggggagcgccacctccttccac

SEQ ID NO: 5470608 - DNA, 25 bp, Homo sapien
tcccatcaaagcgaccacctggcag

SEQ ID NO: 5470609 - DNA, 25 bp, Homo sapien
gcactccatgatccagtgttcctgg

SEQ ID NO: 5470610 - DNA, 25 bp, Homo sapien
gccgaagcccacctctaagactcgg

SEQ ID NO: 5470611 - DNA, 25 bp, Homo sapien
gtggccatgccgaagcccacctcta

SEQ ID NO: 5470612 - DNA, 25 bp, Homo sapien
cctgcaccttccatattcttgtggc

SEQ ID NO: 5470613 - DNA, 25 bp, Homo sapien
aggtggtgaaggcagcgaagggggt

SEQ ID NO: 5470614 - DNA, 25 bp, Homo sapien
gaaggcagcgaagggggttgcagta

SEQ ID NO: 5470615 - DNA, 25 bp, Homo sapien
cgaagggggttgcagtaggggcgct

SEQ ID NO: 5470616 - DNA, 25 bp, Homo sapien
aagggggttgcagtaggggcgctct

SEQ ID NO: 5470617 - DNA, 25 bp, Homo sapien
gttcagatgagaggcattatggttc

SEQ ID NO: 5470618 - DNA, 25 bp, Homo sapien
ctgaggttgaggctcttctggaagg

SEQ ID NO: 5470619 - DNA, 25 bp, Homo sapien
ctgtaccagcgtgaaggcaaaagct

SEQ ID NO: 5470620 - DNA, 25 bp, Homo sapien
gcggaatgttggggttttccactca

SEQ ID NO: 5470621 - DNA, 25 bp, Homo sapien
cggaatgttggggttttccactcag

SEQ ID NO: 5470622 - DNA, 25 bp, Homo sapien
ccatccactctcgtcattttaaaaa

SEQ ID NO: 5470623 - DNA, 25 bp, Homo sapien
ttaaccgacatacacacctgttcct

SEQ ID NO: 5470624 - DNA, 25 bp, Homo sapien
tacaaagacatcaggattcacacag

SEQ ID NO: 5470625 - DNA, 25 bp, Homo sapien
gagagacagtagaatcaagagatgg

SEQ ID NO: 5470626 - DNA, 25 bp, Homo sapien
tcccatggatccagttctaaaggtg

SEQ ID NO: 5470627 - DNA, 25 bp, Homo sapien
tgagcagctcaaagggagacctttc

SEQ ID NO: 5470628 - DNA, 25 bp, Homo sapien
tcattttctcctgacgttctaccag

SEQ ID NO: 5470629 - DNA, 25 bp, Homo sapien
tcaaagggagacctttccaaggtga

SEQ ID NO: 5470630 - DNA, 25 bp, Homo sapien
tttctcctgacgttctaccagaagc

SEQ ID NO: 5470631 - DNA, 25 bp, Homo sapien
agcagccggcgagagcacggacttc

SEQ ID NO: 5470632 - DNA, 25 bp, Homo sapien
cgtgcgaatgcaccgcacagaagct

SEQ ID NO: 5470633 - DNA, 25 bp, Homo sapien
ttctgaccgccaggcggcgccttgg

SEQ ID NO: 5470634 - DNA, 25 bp, Homo sapien
aggccggcgcttacagtcccaggga

SEQ ID NO: 5470635 - DNA, 25 bp, Homo sapien
tttctgatctacatcctgggaggtg

SEQ ID NO: 5470636 - DNA, 25 bp, Homo sapien
cattgacaagcacaaggacccgtgt

SEQ ID NO: 5470637 - DNA, 25 bp, Homo sapien
gtgtgttgggtagggaatgagaaca

SEQ ID NO: 5470638 - DNA, 25 bp, Homo sapien
tcacggctcttcgtaggcattgaca

SEQ ID NO: 5470639 - DNA, 25 bp, Homo sapien
acaaggacccgtgttgcttggctgg

SEQ ID NO: 5470640 - DNA, 25 bp, Homo sapien
ttgcttgcacccagaattcacacca

SEQ ID NO: 5470641 - DNA, 25 bp, Homo sapien
ggaaggaagcccgtgctatgtccac

SEQ ID NO: 5470642 - DNA, 25 bp, Homo sapien
ggaagcccgtgctatgtccacagac

SEQ ID NO: 5470643 - DNA, 25 bp, Homo sapien
gactctctttgcttgcacccagaat

SEQ ID NO: 5470644 - DNA, 25 bp, Homo sapien
ccaaactcacaacactccagagtga

SEQ ID NO: 5470645 - DNA, 25 bp, Homo sapien
agactagaaggagccgtagaggaac

SEQ ID NO: 5470646 - DNA, 25 bp, Homo sapien
ggaactgagactagaaggagccgta

SEQ ID NO: 5470647 - DNA, 25 bp, Homo sapien
catgcagggaggcatcgatgtggac

SEQ ID NO: 5470648 - DNA, 25 bp, Homo sapien
catggaccaaatgcctcaatgagga

SEQ ID NO: 5470649 - DNA, 25 bp, Homo sapien
ccatctgatattctgccattttccc

SEQ ID NO: 5470650 - DNA, 25 bp, Homo sapien
tggaccaaatgcctcaatgaggaat

SEQ ID NO: 5470651 - DNA, 25 bp, Homo sapien
ggttcatggaccaaatgcctcaatg

SEQ ID NO: 5470652 - DNA, 25 bp, Homo sapien
aagcacacagattgcaaatcacaaa

SEQ ID NO: 5470653 - DNA, 25 bp, Homo sapien
taagcacacagattgcaaatcacaa

SEQ ID NO: 5470654 - DNA, 25 bp, Homo sapien
ctaagcacacagattgcaaatcaca

SEQ ID NO: 5470655 - DNA, 25 bp, Homo sapien
ctacattcgatgttggatgcgggag

SEQ ID NO: 5470656 - DNA, 25 bp, Homo sapien
gaggacgtggactctgtgaatcagg

SEQ ID NO: 5470657 - DNA, 25 bp, Homo sapien
tgcgggaggacgtggactctgtgaa

SEQ ID NO: 5470658 - DNA, 25 bp, Homo sapien
gaaagtctcagtaaactgctacatt

SEQ ID NO: 5470659 - DNA, 25 bp, Homo sapien
ggccatctctggaggtgtcaaaaca

SEQ ID NO: 5470660 - DNA, 25 bp, Homo sapien
gaaatccctggctgggacaacatat

SEQ ID NO: 5470661 - DNA, 25 bp, Homo sapien
ttctgggctttcctgcggaaatccc

SEQ ID NO: 5470662 - DNA, 25 bp, Homo sapien
tattgaatatttgtcactccttctg

SEQ ID NO: 5470663 - DNA, 25 bp, Homo sapien
tgatgcgggcccataatcttccagc

SEQ ID NO: 5470664 - DNA, 25 bp, Homo sapien
agtcctcagcgtcagtgatgcgggc

SEQ ID NO: 5470665 - DNA, 25 bp, Homo sapien
taatcttccagccaccgaggtggga

SEQ ID NO: 5470666 - DNA, 25 bp, Homo sapien
agcgtcagtgatgcgggcccataat

SEQ ID NO: 5470667 - DNA, 25 bp, Homo sapien
gtgttgtgtattcccagtaccagga

SEQ ID NO: 5470668 - DNA, 25 bp, Homo sapien
cagctggttctgtcagtctcttaaa

SEQ ID NO: 5470669 - DNA, 25 bp, Homo sapien
tgtaaaagccacattgcgttggagg

SEQ ID NO: 5470670 - DNA, 25 bp, Homo sapien
cttgtcatcaagtcggtgtaggtgt

SEQ ID NO: 5470671 - DNA, 25 bp, Homo sapien
tgaccacagacatccaggcccaaga

SEQ ID NO: 5470672 - DNA, 25 bp, Homo sapien
cgtttggccatcacttggtgaccac

SEQ ID NO: 5470673 - DNA, 25 bp, Homo sapien
tcaccacccgtttggccatcacttg

SEQ ID NO: 5470674 - DNA, 25 bp, Homo sapien
ggtgaccacagacatccaggcccaa

SEQ ID NO: 5470675 - DNA, 25 bp, Homo sapien
gtgcgcacagccctcccctgtgaca

SEQ ID NO: 5470676 - DNA, 25 bp, Homo sapien
tgtcacaggggagggctgtgcgcac

SEQ ID NO: 5470677 - DNA, 25 bp, Homo sapien
gctcctttgtatttgcgcgcgttgg

SEQ ID NO: 5470678 - DNA, 25 bp, Homo sapien
gaccggtcgcccttgagattggcgc

SEQ ID NO: 5470679 - DNA, 25 bp, Homo sapien
gagccgattcggtccagcttgaggc

SEQ ID NO: 5470680 - DNA, 25 bp, Homo sapien
tcccaggccgctcatggagccgatt

SEQ ID NO: 5470681 - DNA, 25 bp, Homo sapien
cgggcttggcttcggagggccggag

SEQ ID NO: 5470682 - DNA, 25 bp, Homo sapien
gcttggcttcggagggccggaggga

SEQ ID NO: 5470683 - DNA, 25 bp, Homo sapien
gctggggtcgaggggcgcacacggg

SEQ ID NO: 5470684 - DNA, 25 bp, Homo sapien
caggtcggcgggcagaccagcaggg

SEQ ID NO: 5470685 - DNA, 25 bp, Homo sapien
gcaggtcggcgggcagaccagcagg

SEQ ID NO: 5470686 - DNA, 25 bp, Homo sapien
acacgggcggcagcgagggcgcgca

SEQ ID NO: 5470687 - DNA, 25 bp, Homo sapien
ggggagcgcaagtcttccacactgg

SEQ ID NO: 5470688 - DNA, 25 bp, Homo sapien
caggggggagcgcaagtcttccaca

SEQ ID NO: 5470689 - DNA, 25 bp, Homo sapien
cgggagcgcagaccacagcgacgtc

SEQ ID NO: 5470690 - DNA, 25 bp, Homo sapien
accacagcgacgtcgttaggttggg

SEQ ID NO: 5470691 - DNA, 25 bp, Homo sapien
aacgtcccggggtctgactccgctg

SEQ ID NO: 5470692 - DNA, 25 bp, Homo sapien
gccggtttcggccacacagaacgtc

SEQ ID NO: 5470693 - DNA, 25 bp, Homo sapien
acgttcagccggtttcggccacaca

SEQ ID NO: 5470694 - DNA, 25 bp, Homo sapien
gtctgactccgctggtgaactccct

SEQ ID NO: 5470695 - DNA, 25 bp, Homo sapien
gaaatctggtgagctgccactcctg

SEQ ID NO: 5470696 - DNA, 25 bp, Homo sapien
ggtcatctgcagagggaggcttccc

SEQ ID NO: 5470697 - DNA, 25 bp, Homo sapien
tgtggagcagcttctgcttagctgg

SEQ ID NO: 5470698 - DNA, 25 bp, Homo sapien
cactcctgaccactgggcggtggtc

SEQ ID NO: 5470699 - DNA, 25 bp, Homo sapien
gggaatcaacagctctccatctggc

SEQ ID NO: 5470700 - DNA, 25 bp, Homo sapien
acaggtcctccacaaataggctcac

SEQ ID NO: 5470701 - DNA, 25 bp, Homo sapien
tccacaaataggctcacttccctgg

SEQ ID NO: 5470702 - DNA, 25 bp, Homo sapien
gcagtccatgacgtcagagttcatt

SEQ ID NO: 5470703 - DNA, 25 bp, Homo sapien
ttcagatttgataggggccacagtc

SEQ ID NO: 5470704 - DNA, 25 bp, Homo sapien
gataggggccacagtcttcaaggag

SEQ ID NO: 5470705 - DNA, 25 bp, Homo sapien
aggagaatgtctattgtctggtctt

SEQ ID NO: 5470706 - DNA, 25 bp, Homo sapien
agaatgtctattgtctggtcttgga

SEQ ID NO: 5470707 - DNA, 25 bp, Homo sapien
gtgagtgtgtcatcacccgctgcct

SEQ ID NO: 5470708 - DNA, 25 bp, Homo sapien
gctgcctcctggtgagcggtcaatt

SEQ ID NO: 5470709 - DNA, 25 bp, Homo sapien
tcaagggagccgtgtctctggattt

SEQ ID NO: 5470710 - DNA, 25 bp, Homo sapien
cttctgccccgtgagtgtgtcatca

SEQ ID NO: 5470711 - DNA, 25 bp, Homo sapien
gaagcagctgattaaggatgtcgat

SEQ ID NO: 5470712 - DNA, 25 bp, Homo sapien
tgtgacgtgagcacgtgtccatcca

SEQ ID NO: 5470713 - DNA, 25 bp, Homo sapien
tcgatgtccacagaggtggtaagga

SEQ ID NO: 5470714 - DNA, 25 bp, Homo sapien
gagtagaggcgagtgtccatgtgac

SEQ ID NO: 5470715 - DNA, 25 bp, Homo sapien
ggtttcagggttgctgcagattctg

SEQ ID NO: 5470716 - DNA, 25 bp, Homo sapien
ggagatggcctctggtttcagggtt

SEQ ID NO: 5470717 - DNA, 25 bp, Homo sapien
ctggtttcagggttgctgcagattc

SEQ ID NO: 5470718 - DNA, 25 bp, Homo sapien
gagatggcctctggtttcagggttg

SEQ ID NO: 5470719 - DNA, 25 bp, Homo sapien
gacagaaacaagacagcagttcagc

SEQ ID NO: 5470720 - DNA, 25 bp, Homo sapien
ggggtccacctggtcacagactgag

SEQ ID NO: 5470721 - DNA, 25 bp, Homo sapien
gggtccacctggtcacagactgagg

SEQ ID NO: 5470722 - DNA, 25 bp, Homo sapien
cagagccgtagggactgtttctgag

SEQ ID NO: 5470723 - DNA, 25 bp, Homo sapien
tagggactgtttctgaggctcccgg

SEQ ID NO: 5470724 - DNA, 25 bp, Homo sapien
agtgagcagcaccagagccgtaggg

SEQ ID NO: 5470725 - DNA, 25 bp, Homo sapien
agcaccagagccgtagggactgttt

SEQ ID NO: 5470726 - DNA, 25 bp, Homo sapien
gagaaaattcgagtttccctcaaga

SEQ ID NO: 5470727 - DNA, 25 bp, Homo sapien
tcatgagaaaattcgagtttccctc

SEQ ID NO: 5470728 - DNA, 25 bp, Homo sapien
ttcttcatgagaaaattcgagtttc

SEQ ID NO: 5470729 - DNA, 25 bp, Homo sapien
agtcaacgccttggataagtttcta

SEQ ID NO: 5470730 - DNA, 25 bp, Homo sapien
gaggattctaggtcagcagcaagag

SEQ ID NO: 5470731 - DNA, 25 bp, Homo sapien
gggaggtgacgtggaggattctagg

SEQ ID NO: 5470732 - DNA, 25 bp, Homo sapien
tgacgtggaggattctaggtcagca

SEQ ID NO: 5470733 - DNA, 25 bp, Homo sapien
cgtggaggattctaggtcagcagca

SEQ ID NO: 5470734 - DNA, 25 bp, Homo sapien
gtccatctatctctgggcagtaaaa

SEQ ID NO: 5470735 - DNA, 25 bp, Homo sapien
taagtgtatcatctaagttatttcg

SEQ ID NO: 5470736 - DNA, 25 bp, Homo sapien
tactagtactggaaaatagaataaa

SEQ ID NO: 5470737 - DNA, 25 bp, Homo sapien
atctgcctacctatctgtttatctg

SEQ ID NO: 5470738 - DNA, 25 bp, Homo sapien
taaaaggttgaatgcaaaactctag

SEQ ID NO: 5470739 - DNA, 25 bp, Homo sapien
cagttataccaagaaggagctatta

SEQ ID NO: 5470740 - DNA, 25 bp, Homo sapien
cagtattaaacaaggtcagaaattt

SEQ ID NO: 5470741 - DNA, 25 bp, Homo sapien
tttagggaccagctttccacatggg

SEQ ID NO: 5470742 - DNA, 25 bp, Homo sapien
tctcacttgcctgccgccgccgtgt

SEQ ID NO: 5470743 - DNA, 25 bp, Homo sapien
tgttctcacatgctctctcacttgc

SEQ ID NO: 5470744 - DNA, 25 bp, Homo sapien
ttctcacatgctctctcacttgcct

SEQ ID NO: 5470745 - DNA, 25 bp, Homo sapien
tcacttgcctgccgccgccgtgtaa

SEQ ID NO: 5470746 - DNA, 25 bp, Homo sapien
tcctcttttacctcgccttgggcag

SEQ ID NO: 5470747 - DNA, 25 bp, Homo sapien
aagaaaccagtctcctttaaggcat

SEQ ID NO: 5470748 - DNA, 25 bp, Homo sapien
ctggaacccattgcagaggagctct

SEQ ID NO: 5470749 - DNA, 25 bp, Homo sapien
ctcctcaaataggtgtggcccagtg

SEQ ID NO: 5470750 - DNA, 25 bp, Homo sapien
taccatctgaagtaatatgaaatac

SEQ ID NO: 5470751 - DNA, 25 bp, Homo sapien
tcacatctgggttaatgaagcgtgc

SEQ ID NO: 5470752 - DNA, 25 bp, Homo sapien
gtttccgtgggaatcataacattgg

SEQ ID NO: 5470753 - DNA, 25 bp, Homo sapien
tgtgtatgggtttgccaagattgca

SEQ ID NO: 5470754 - DNA, 25 bp, Homo sapien
ctggaggcagcaaggtcttagtgat

SEQ ID NO: 5470755 - DNA, 25 bp, Homo sapien
cagcaaggtcttagtgatgtagttt

SEQ ID NO: 5470756 - DNA, 25 bp, Homo sapien
ggcagcaaggtcttagtgatgtagt

SEQ ID NO: 5470757 - DNA, 25 bp, Homo sapien
gaggcagcaaggtcttagtgatgta

SEQ ID NO: 5470758 - DNA, 25 bp, Homo sapien
caggtccaccagtgccacgtgctta

SEQ ID NO: 5470759 - DNA, 25 bp, Homo sapien
aggtccaccagtgccacgtgcttag

SEQ ID NO: 5470760 - DNA, 25 bp, Homo sapien
tcaggtccaccagtgccacgtgctt

SEQ ID NO: 5470761 - DNA, 25 bp, Homo sapien
cagtcctgagagtagtaggcattgt

SEQ ID NO: 5470762 - DNA, 25 bp, Homo sapien
caatactttcccaagactaaggcca

SEQ ID NO: 5470763 - DNA, 25 bp, Homo sapien
gaaagtctgttggtagtaacttcca

SEQ ID NO: 5470764 - DNA, 25 bp, Homo sapien
gcattgttgtagcaatactttccca

SEQ ID NO: 5470765 - DNA, 25 bp, Homo sapien
cattcatctatgtcaatgacaggtt

SEQ ID NO: 5470766 - DNA, 25 bp, Homo sapien
tcattcatctatgtcaatgacaggt

SEQ ID NO: 5470767 - DNA, 25 bp, Homo sapien
gatttttatcaaggcccagtctggc

SEQ ID NO: 5470768 - DNA, 25 bp, Homo sapien
taatttagctccctctggcagtgga

SEQ ID NO: 5470769 - DNA, 25 bp, Homo sapien
ttcaatgtgtcagggtaggagtgcc

SEQ ID NO: 5470770 - DNA, 25 bp, Homo sapien
tagtacaagtgggtctggcctgcct

SEQ ID NO: 5470771 - DNA, 25 bp, Homo sapien
cttctgcctgaatcaggattgacat

SEQ ID NO: 5470772 - DNA, 25 bp, Homo sapien
atcaggattgacatgtagtgcccca

SEQ ID NO: 5470773 - DNA, 25 bp, Homo sapien
tcaggattgacatgtagtgccccat

SEQ ID NO: 5470774 - DNA, 25 bp, Homo sapien
caggacttctacagggataataggc

SEQ ID NO: 5470775 - DNA, 25 bp, Homo sapien
tagtcactagtggtagcataccctg

SEQ ID NO: 5470776 - DNA, 25 bp, Homo sapien
gttgccctaacccagattttgtcag

SEQ ID NO: 5470777 - DNA, 25 bp, Homo sapien
tcagggtaagagtgcccaggacttc

SEQ ID NO: 5470778 - DNA, 25 bp, Homo sapien
tgtccaaggaggatgtttcagaagg

SEQ ID NO: 5470779 - DNA, 25 bp, Homo sapien
gtccaaggaggatgtttcagaaggc

SEQ ID NO: 5470780 - DNA, 25 bp, Homo sapien
atgtccaaggaggatgtttcagaag

SEQ ID NO: 5470781 - DNA, 25 bp, Homo sapien
tccaaggaggatgtttcagaaggct

SEQ ID NO: 5470782 - DNA, 25 bp, Homo sapien
agagcaggtataggtgctgactggt

SEQ ID NO: 5470783 - DNA, 25 bp, Homo sapien
gggtgggtgtagagcagaccagagc

SEQ ID NO: 5470784 - DNA, 25 bp, Homo sapien
gctgactggttgtacagtaggcatg

SEQ ID NO: 5470785 - DNA, 25 bp, Homo sapien
catggaaagcatacagtagagcacc

SEQ ID NO: 5470786 - DNA, 25 bp, Homo sapien
tagcgttcagcaagggaataataga

SEQ ID NO: 5470787 - DNA, 25 bp, Homo sapien
gagcaaagtctatacatgatttaag

SEQ ID NO: 5470788 - DNA, 25 bp, Homo sapien
agatgtataggtgagtgtttcggaa

SEQ ID NO: 5470789 - DNA, 25 bp, Homo sapien
acatgatttaaggaagtagcgttca

SEQ ID NO: 5470790 - DNA, 25 bp, Homo sapien
cagaaaaaggataggattgtttatt

SEQ ID NO: 5470791 - DNA, 25 bp, Homo sapien
cagtaggcagggaatagatactttt

SEQ ID NO: 5470792 - DNA, 25 bp, Homo sapien
gcatacagtaggcagggaatagata

SEQ ID NO: 5470793 - DNA, 25 bp, Homo sapien
gataggattgtttattgtgatgtaa

SEQ ID NO: 5470794 - DNA, 25 bp, Homo sapien
ctgccctcttccctgttgggcaact

SEQ ID NO: 5470795 - DNA, 25 bp, Homo sapien
ttccctgttgggcaactctgtttcc

SEQ ID NO: 5470796 - DNA, 25 bp, Homo sapien
cctcttccctgttgggcaactctgt

SEQ ID NO: 5470797 - DNA, 25 bp, Homo sapien
cctgttgggcaactctgtttccttt

SEQ ID NO: 5470798 - DNA, 25 bp, Homo sapien
tcttgggcaccacatacagaaggtc

SEQ ID NO: 5470799 - DNA, 25 bp, Homo sapien
taatcttgggcaccacatacagaag

SEQ ID NO: 5470800 - DNA, 25 bp, Homo sapien
cttaatcttgggcaccacatacaga

SEQ ID NO: 5470801 - DNA, 25 bp, Homo sapien
aatcttgggcaccacatacagaagg

SEQ ID NO: 5470802 - DNA, 25 bp, Homo sapien
ttaagtcctattacctcaggagtct

SEQ ID NO: 5470803 - DNA, 25 bp, Homo sapien
attctcgtaggagcatgaactctac

SEQ ID NO: 5470804 - DNA, 25 bp, Homo sapien
agtgagcattaccgcttgagccccg

SEQ ID NO: 5470805 - DNA, 25 bp, Homo sapien
agcatgaactctactatgaactgtg

SEQ ID NO: 5470806 - DNA, 25 bp, Homo sapien
tgagataccatctcagaatggttat

SEQ ID NO: 5470807 - DNA, 25 bp, Homo sapien
atgcatgtggccaacatttgtaaaa

SEQ ID NO: 5470808 - DNA, 25 bp, Homo sapien
aggcaaaggacgtgaacagaccctt

SEQ ID NO: 5470809 - DNA, 25 bp, Homo sapien
tacaagaaaacacatccccattaaa

SEQ ID NO: 5470810 - DNA, 25 bp, Homo sapien
gcggaccaccatggtcaccatgtga

SEQ ID NO: 5470811 - DNA, 25 bp, Homo sapien
tacagcggaccaccatggtcaccat

SEQ ID NO: 5470812 - DNA, 25 bp, Homo sapien
ggtcaccatgtgaccaaacatggca

SEQ ID NO: 5470813 - DNA, 25 bp, Homo sapien
atctgtacagcggaccaccatggtc

SEQ ID NO: 5470814 - DNA, 25 bp, Homo sapien
ccatcaaccgcccgagacctcgatg

SEQ ID NO: 5470815 - DNA, 25 bp, Homo sapien
acccatcaaccgcccgagacctcga

SEQ ID NO: 5470816 - DNA, 25 bp, Homo sapien
cattgacccatcaaccgcccgagac

SEQ ID NO: 5470817 - DNA, 25 bp, Homo sapien
ttgacccatcaaccgcccgagacct

SEQ ID NO: 5470818 - DNA, 25 bp, Homo sapien
tcataattaggttgcaggcggagga

SEQ ID NO: 5470819 - DNA, 25 bp, Homo sapien
tgagcattacccagcaatgtagagt

SEQ ID NO: 5470820 - DNA, 25 bp, Homo sapien
tagagttcagatgtactcccaggac

SEQ ID NO: 5470821 - DNA, 25 bp, Homo sapien
gagggtgccacctatcttcatgaaa

SEQ ID NO: 5470822 - DNA, 25 bp, Homo sapien
tcgggcccctatagaacaaatctag

SEQ ID NO: 5470823 - DNA, 25 bp, Homo sapien
ttatgaggtgtgagcccatctccca

SEQ ID NO: 5470824 - DNA, 25 bp, Homo sapien
catggctacctgtatccagactgcg

SEQ ID NO: 5470825 - DNA, 25 bp, Homo sapien
gcttttcgttgattcaggctcccag

SEQ ID NO: 5470826 - DNA, 25 bp, Homo sapien
tcagtgcaccttgttaaaccgaatt

SEQ ID NO: 5470827 - DNA, 25 bp, Homo sapien
gactgttgtgtgttcatcagcttcc

SEQ ID NO: 5470828 - DNA, 25 bp, Homo sapien
tccttgctcatgaaagccaagataa

SEQ ID NO: 5470829 - DNA, 25 bp, Homo sapien
caccagtcaggcatcctcaagtatc

SEQ ID NO: 5470830 - DNA, 25 bp, Homo sapien
gattgttgaaaagggtgcagtggtt

SEQ ID NO: 5470831 - DNA, 25 bp, Homo sapien
taagattgttgaaaagggtgcagtg

SEQ ID NO: 5470832 - DNA, 25 bp, Homo sapien
ttgttgaaaagggtgcagtggttca

SEQ ID NO: 5470833 - DNA, 25 bp, Homo sapien
ttaagattgttgaaaagggtgcagt

SEQ ID NO: 5470834 - DNA, 25 bp, Homo sapien
tctgttctatctgtcaaggtgtcca

SEQ ID NO: 5470835 - DNA, 25 bp, Homo sapien
tgtttttgttcagtatgactgcaga

SEQ ID NO: 5470836 - DNA, 25 bp, Homo sapien
tcaaggtgtccagcaggttgtactt

SEQ ID NO: 5470837 - DNA, 25 bp, Homo sapien
tgtacttctgattgtggtcttgagg

SEQ ID NO: 5470838 - DNA, 25 bp, Homo sapien
tttgaaagcagttcttgacccatgg

SEQ ID NO: 5470839 - DNA, 25 bp, Homo sapien
agcagttcttgacccatggcttatg

SEQ ID NO: 5470840 - DNA, 25 bp, Homo sapien
ttgaaagcagttcttgacccatggc

SEQ ID NO: 5470841 - DNA, 25 bp, Homo sapien
gcagttcttgacccatggcttatgt

SEQ ID NO: 5470842 - DNA, 25 bp, Homo sapien
cattgttgcaggttgaagccagggt

SEQ ID NO: 5470843 - DNA, 25 bp, Homo sapien
tatgttatccagatatttggccttg

SEQ ID NO: 5470844 - DNA, 25 bp, Homo sapien
agtgtagttctggaatatgttatcc

SEQ ID NO: 5470845 - DNA, 25 bp, Homo sapien
ggaaggaggtagattggctgcccca

SEQ ID NO: 5470846 - DNA, 25 bp, Homo sapien
tctgctgggagggtcgccttgctgt

SEQ ID NO: 5470847 - DNA, 25 bp, Homo sapien
catctgctgggagggtcgccttgct

SEQ ID NO: 5470848 - DNA, 25 bp, Homo sapien
tgctgggagggtcgccttgctgtct

SEQ ID NO: 5470849 - DNA, 25 bp, Homo sapien
tgggagggtcgccttgctgtctcca

SEQ ID NO: 5470850 - DNA, 25 bp, Homo sapien
gatggccgtggctctctatgctctg

SEQ ID NO: 5470851 - DNA, 25 bp, Homo sapien
ttgtctgccaacaagcagtgcttca

SEQ ID NO: 5470852 - DNA, 25 bp, Homo sapien
tagtgttcagcgaagggagtgtctc

SEQ ID NO: 5470853 - DNA, 25 bp, Homo sapien
cactgctggattcgggtagtgttca

SEQ ID NO: 5470854 - DNA, 25 bp, Homo sapien
ggaagcctctagagcctgaaggaat

SEQ ID NO: 5470855 - DNA, 25 bp, Homo sapien
tcaatggctataaatcgcctagtgg

SEQ ID NO: 5470856 - DNA, 25 bp, Homo sapien
gctgcttcacgtattgaagaagaac

SEQ ID NO: 5470857 - DNA, 25 bp, Homo sapien
gacaggcacaggctatcaatggcta

SEQ ID NO: 5470858 - DNA, 25 bp, Homo sapien
cttccgcatcccactgctgccgtgg

SEQ ID NO: 5470859 - DNA, 25 bp, Homo sapien
tcacccaggggccatgatgtcatgt

SEQ ID NO: 5470860 - DNA, 25 bp, Homo sapien
ctgccctcctgacccggaggcccag

SEQ ID NO: 5470861 - DNA, 25 bp, Homo sapien
catgatgtcatgtgggccaaggcat

SEQ ID NO: 5470862 - DNA, 25 bp, Homo sapien
cctcagagggttcagagcaaatgat

SEQ ID NO: 5470863 - DNA, 25 bp, Homo sapien
tcagagggttcagagcaaatgatgc

SEQ ID NO: 5470864 - DNA, 25 bp, Homo sapien
gggtgggctctgtattgagttccca

SEQ ID NO: 5470865 - DNA, 25 bp, Homo sapien
cagagggttcagagcaaatgatgca

SEQ ID NO: 5470866 - DNA, 25 bp, Homo sapien
tgctcgccggcaccttcagggtgaa

SEQ ID NO: 5470867 - DNA, 25 bp, Homo sapien
aggaatgcggcacccagtggctggc

SEQ ID NO: 5470868 - DNA, 25 bp, Homo sapien
tctgcagtcttgatgctcgccggca

SEQ ID NO: 5470869 - DNA, 25 bp, Homo sapien
agtcttgatgctcgccggcaccttc

SEQ ID NO: 5470870 - DNA, 25 bp, Homo sapien
ttttctttagaggaacgtttgtgca

SEQ ID NO: 5470871 - DNA, 25 bp, Homo sapien
ggaacgtttgtgcactgtgggaacc

SEQ ID NO: 5470872 - DNA, 25 bp, Homo sapien
gagccctgcgtttcatatattgatg

SEQ ID NO: 5470873 - DNA, 25 bp, Homo sapien
tgtcgtaaacgcatgaagagccctg

SEQ ID NO: 5470874 - DNA, 25 bp, Homo sapien
tggtgcaggttccagacgcttggct

SEQ ID NO: 5470875 - DNA, 25 bp, Homo sapien
agacgcttggctgatgccaggcctg

SEQ ID NO: 5470876 - DNA, 25 bp, Homo sapien
gttccagacgcttggctgatgccag

SEQ ID NO: 5470877 - DNA, 25 bp, Homo sapien
tgcaggttccagacgcttggctgat

SEQ ID NO: 5470878 - DNA, 25 bp, Homo sapien
ctgcaccgtccagctcagttctctg

SEQ ID NO: 5470879 - DNA, 25 bp, Homo sapien
tgcaccgtccagctcagttctctga

SEQ ID NO: 5470880 - DNA, 25 bp, Homo sapien
cctgcaccgtccagctcagttctct

SEQ ID NO: 5470881 - DNA, 25 bp, Homo sapien
gcaccgtccagctcagttctctgac

SEQ ID NO: 5470882 - DNA, 25 bp, Homo sapien
gcgaatactgaactcggtgcaactc

SEQ ID NO: 5470883 - DNA, 25 bp, Homo sapien
caggtcccatttgcaatggcgaata

SEQ ID NO: 5470884 - DNA, 25 bp, Homo sapien
caatggcgaatactgaactcggtgc

SEQ ID NO: 5470885 - DNA, 25 bp, Homo sapien
gaactcggtgcaactctggctgctg

SEQ ID NO: 5470886 - DNA, 25 bp, Homo sapien
ataaaatcaagtgtggagtgccatc

SEQ ID NO: 5470887 - DNA, 25 bp, Homo sapien
aatgggggggtttcagcaactcagt

SEQ ID NO: 5470888 - DNA, 25 bp, Homo sapien
tgcagctcaacttttaaacaaactg

SEQ ID NO: 5470889 - DNA, 25 bp, Homo sapien
ccatctggtgtgtagggcgcctctg

SEQ ID NO: 5470890 - DNA, 25 bp, Homo sapien
taatctcagcgtctgtgcagtccag

SEQ ID NO: 5470891 - DNA, 25 bp, Homo sapien
aactctaatctcagcgtctgtgcag

SEQ ID NO: 5470892 - DNA, 25 bp, Homo sapien
tcagcgtctgtgcagtccagctcct

SEQ ID NO: 5470893 - DNA, 25 bp, Homo sapien
ttaaactctaatctcagcgtctgtg

SEQ ID NO: 5470894 - DNA, 25 bp, Homo sapien
cttggcagtcgagaagtgttcatgt

SEQ ID NO: 5470895 - DNA, 25 bp, Homo sapien
tggcagtcgagaagtgttcatgtac

SEQ ID NO: 5470896 - DNA, 25 bp, Homo sapien
ttggcagtcgagaagtgttcatgta

SEQ ID NO: 5470897 - DNA, 25 bp, Homo sapien
gagggcaccaagtgccataccaaag

SEQ ID NO: 5470898 - DNA, 25 bp, Homo sapien
caagtgccataccaaagtggtggtt

SEQ ID NO: 5470899 - DNA, 25 bp, Homo sapien
aaagagggcaccaagtgccatacca

SEQ ID NO: 5470900 - DNA, 25 bp, Homo sapien
ggcaccaagtgccataccaaagtgg

SEQ ID NO: 5470901 - DNA, 25 bp, Homo sapien
ctgcagtgcctcatggaatggcagg

SEQ ID NO: 5470902 - DNA, 25 bp, Homo sapien
ccacactaggtagttgtgcaggatc

SEQ ID NO: 5470903 - DNA, 25 bp, Homo sapien
caccacgcgccacactaggtagttg

SEQ ID NO: 5470904 - DNA, 25 bp, Homo sapien
gaatggcagggacaggtgctcactc

SEQ ID NO: 5470905 - DNA, 25 bp, Homo sapien
tctgagaaccagtaaaactcctggc

SEQ ID NO: 5470906 - DNA, 25 bp, Homo sapien
tcctctgagaaccagtaaaactcct

SEQ ID NO: 5470907 - DNA, 25 bp, Homo sapien
cctctgagaaccagtaaaactcctg

SEQ ID NO: 5470908 - DNA, 25 bp, Homo sapien
ctctgagaaccagtaaaactcctgg

SEQ ID NO: 5470909 - DNA, 25 bp, Homo sapien
cgccgcccgccgcgaccggtccagg

SEQ ID NO: 5470910 - DNA, 25 bp, Homo sapien
aggcgccgccgcccgccgcgaccgg

SEQ ID NO: 5470911 - DNA, 25 bp, Homo sapien
gccgccgcccgccgcgaccggtcca

SEQ ID NO: 5470912 - DNA, 25 bp, Homo sapien
cttgcactcggggcaggcgccgccg

SEQ ID NO: 5470913 - DNA, 25 bp, Homo sapien
ctgagcgccagcaaagcccccagga

SEQ ID NO: 5470914 - DNA, 25 bp, Homo sapien
ctcgcgcgggttccagagctgcagc

SEQ ID NO: 5470915 - DNA, 25 bp, Homo sapien
ccccggtggcgctgcttcccgagag

SEQ ID NO: 5470916 - DNA, 25 bp, Homo sapien
ccggtggcgctgcttcccgagagaa

SEQ ID NO: 5470917 - DNA, 25 bp, Homo sapien
cccggtggcgctgcttcccgagaga

SEQ ID NO: 5470918 - DNA, 25 bp, Homo sapien
cagagaggccccgcacaggccccca

SEQ ID NO: 5470919 - DNA, 25 bp, Homo sapien
ggcagagaggccccgcacaggcccc

SEQ ID NO: 5470920 - DNA, 25 bp, Homo sapien
agaggccccgcacaggcccccagtg

SEQ ID NO: 5470921 - DNA, 25 bp, Homo sapien
gggcagagaggccccgcacaggccc

SEQ ID NO: 5470922 - DNA, 25 bp, Homo sapien
actcgtggtagtgcgccctcagcga

SEQ ID NO: 5470923 - DNA, 25 bp, Homo sapien
tggaactcgtggtagtgcgccctca

SEQ ID NO: 5470924 - DNA, 25 bp, Homo sapien
tcctggaactcgtggtagtgcgccc

SEQ ID NO: 5470925 - DNA, 25 bp, Homo sapien
gaactcgtggtagtgcgccctcagc

SEQ ID NO: 5470926 - DNA, 25 bp, Homo sapien
tgggccacctgggctacgggatgcg

SEQ ID NO: 5470927 - DNA, 25 bp, Homo sapien
ctgggccacctgggctacgggatgc

SEQ ID NO: 5470928 - DNA, 25 bp, Homo sapien
gggccacctgggctacgggatgcgc

SEQ ID NO: 5470929 - DNA, 25 bp, Homo sapien
ggccacctgggctacgggatgcgcg

SEQ ID NO: 5470930 - DNA, 25 bp, Homo sapien
atcccaggtccccactcggagccgc

SEQ ID NO: 5470931 - DNA, 25 bp, Homo sapien
acgcgatggcggctccacccttctt

SEQ ID NO: 5470932 - DNA, 25 bp, Homo sapien
acaagtgaaggcagcgggtagtccc

SEQ ID NO: 5470933 - DNA, 25 bp, Homo sapien
tgcgcgggttgcagtcggtgactcg

SEQ ID NO: 5470934 - DNA, 25 bp, Homo sapien
gccctgatggagtgcccgggctgcc

SEQ ID NO: 5470935 - DNA, 25 bp, Homo sapien
ggccctgatggagtgcccgggctgc

SEQ ID NO: 5470936 - DNA, 25 bp, Homo sapien
gggccctgatggagtgcccgggctg

SEQ ID NO: 5470937 - DNA, 25 bp, Homo sapien
ggggccctgatggagtgcccgggct

SEQ ID NO: 5470938 - DNA, 25 bp, Homo sapien
ttgtcctcctgggaaaccttgtcca

SEQ ID NO: 5470939 - DNA, 25 bp, Homo sapien
accttgtccaggatcagctctcccc

SEQ ID NO: 5470940 - DNA, 25 bp, Homo sapien
acggagagccctgccagaagaaggc

SEQ ID NO: 5470941 - DNA, 25 bp, Homo sapien
tgggaaaccttgtccaggatcagct

SEQ ID NO: 5470942 - DNA, 25 bp, Homo sapien
tgtgctcgggcactctgcttctgag

SEQ ID NO: 5470943 - DNA, 25 bp, Homo sapien
cgtaaaggtggccgccacctgcgct

SEQ ID NO: 5470944 - DNA, 25 bp, Homo sapien
acacggcaggtcccgcgtaaaggtg

SEQ ID NO: 5470945 - DNA, 25 bp, Homo sapien
tcaatttccggccactaagaacacg

SEQ ID NO: 5470946 - DNA, 25 bp, Homo sapien
gggtccctgcttgatgtggcccaac

SEQ ID NO: 5470947 - DNA, 25 bp, Homo sapien
caggcgctgtcccgacccccagccc

SEQ ID NO: 5470948 - DNA, 25 bp, Homo sapien
cgaagcccccgtttctattgggcat

SEQ ID NO: 5470949 - DNA, 25 bp, Homo sapien
tcatggccttcgccgcctgcctgga

SEQ ID NO: 5470950 - DNA, 25 bp, Homo sapien
ccgcctgcctggagccctacaccgc

SEQ ID NO: 5470951 - DNA, 25 bp, Homo sapien
gccgcctgcctggagccctacaccg

SEQ ID NO: 5470952 - DNA, 25 bp, Homo sapien
gtcatggccttcgccgcctgcctgg

SEQ ID NO: 5470953 - DNA, 25 bp, Homo sapien
tcacctgtgggacttgaggactcgg

SEQ ID NO: 5470954 - DNA, 25 bp, Homo sapien
tccttgaatcacctgtgggacttga

SEQ ID NO: 5470955 - DNA, 25 bp, Homo sapien
tgaggactcgggatcttcaggacgc

SEQ ID NO: 5470956 - DNA, 25 bp, Homo sapien
caggcaggctcccttcctggggaaa

SEQ ID NO: 5470957 - DNA, 25 bp, Homo sapien
tacggccttgtaaaagcactcagac

SEQ ID NO: 5470958 - DNA, 25 bp, Homo sapien
taagcttgaatatattgccgcgcac

SEQ ID NO: 5470959 - DNA, 25 bp, Homo sapien
cccaaatgcgtatgtttaacccaga

SEQ ID NO: 5470960 - DNA, 25 bp, Homo sapien
aaattacttatgacctcctcccgcg

SEQ ID NO: 5470961 - DNA, 25 bp, Homo sapien
ggacgacgtagcgcaaagagttcct

SEQ ID NO: 5470962 - DNA, 25 bp, Homo sapien
gacgacgtagcgcaaagagttcctg

SEQ ID NO: 5470963 - DNA, 25 bp, Homo sapien
acggacgacgtagcgcaaagagttc

SEQ ID NO: 5470964 - DNA, 25 bp, Homo sapien
cgacgtagcgcaaagagttcctgtc

SEQ ID NO: 5470965 - DNA, 25 bp, Homo sapien
gcagcgggttcagtcgttcgatctc

SEQ ID NO: 5470966 - DNA, 25 bp, Homo sapien
ggttcagtcgttcgatctcgcgcat

SEQ ID NO: 5470967 - DNA, 25 bp, Homo sapien
gcgggttcagtcgttcgatctcgcg

SEQ ID NO: 5470968 - DNA, 25 bp, Homo sapien
cagcgggttcagtcgttcgatctcg

SEQ ID NO: 5470969 - DNA, 25 bp, Homo sapien
ggcacaagcggaagaaggagcgcac

SEQ ID NO: 5470970 - DNA, 25 bp, Homo sapien
ctcgaggcacaagcggaagaaggag

SEQ ID NO: 5470971 - DNA, 25 bp, Homo sapien
tcgaggcacaagcggaagaaggagc

SEQ ID NO: 5470972 - DNA, 25 bp, Homo sapien
gaggcacaagcggaagaaggagcgc

SEQ ID NO: 5470973 - DNA, 25 bp, Homo sapien
ttgggccgagccagcaggcgccgca

SEQ ID NO: 5470974 - DNA, 25 bp, Homo sapien
cgggtccacccttgggccgagccag

SEQ ID NO: 5470975 - DNA, 25 bp, Homo sapien
ctagtgctgggcagcgccgccgggt

SEQ ID NO: 5470976 - DNA, 25 bp, Homo sapien
cagcgccgccgggtccacccttggg

SEQ ID NO: 5470977 - DNA, 25 bp, Homo sapien
agtataagtcctggcatgggtcgat

SEQ ID NO: 5470978 - DNA, 25 bp, Homo sapien
gccgccgcaggcgaacgagtataag

SEQ ID NO: 5470979 - DNA, 25 bp, Homo sapien
ggcgaacgagtataagtcctggcat

SEQ ID NO: 5470980 - DNA, 25 bp, Homo sapien
tggtgccgtaggtgagcttgtcgtc

SEQ ID NO: 5470981 - DNA, 25 bp, Homo sapien
ccaagaagcgagcggtgcacgcgaa

SEQ ID NO: 5470982 - DNA, 25 bp, Homo sapien
cggccaagaagcgagcggtgcacgc

SEQ ID NO: 5470983 - DNA, 25 bp, Homo sapien
tggcggccaagaagcgagcggtgca

SEQ ID NO: 5470984 - DNA, 25 bp, Homo sapien
gccaagaagcgagcggtgcacgcga

SEQ ID NO: 5470985 - DNA, 25 bp, Homo sapien
ggagcagaggccggctgcaaacacc

SEQ ID NO: 5470986 - DNA, 25 bp, Homo sapien
atggagcagaggccggctgcaaaca

SEQ ID NO: 5470987 - DNA, 25 bp, Homo sapien
aggatggagcagaggccggctgcaa

SEQ ID NO: 5470988 - DNA, 25 bp, Homo sapien
ggatggagcagaggccggctgcaaa

SEQ ID NO: 5470989 - DNA, 25 bp, Homo sapien
cctgggcccggtggcctgcgggcag

SEQ ID NO: 5470990 - DNA, 25 bp, Homo sapien
tggcctgcgggcagaaagtccccgc

SEQ ID NO: 5470991 - DNA, 25 bp, Homo sapien
gcgggcagaaagtccccgcaagcgc

SEQ ID NO: 5470992 - DNA, 25 bp, Homo sapien
gcccggtggcctgcgggcagaaagt

SEQ ID NO: 5470993 - DNA, 25 bp, Homo sapien
ctggaactcatcgtagtgcgccatc

SEQ ID NO: 5470994 - DNA, 25 bp, Homo sapien
gccatcagcgaataccaggactcca

SEQ ID NO: 5470995 - DNA, 25 bp, Homo sapien
tgcgccatcagcgaataccaggact

SEQ ID NO: 5470996 - DNA, 25 bp, Homo sapien
actcatcgtagtgcgccatcagcga

SEQ ID NO: 5470997 - DNA, 25 bp, Homo sapien
ggccacctgggctacgggatgcgcg

SEQ ID NO: 5470998 - DNA, 25 bp, Homo sapien
gggccacctgggctacgggatgcgc

SEQ ID NO: 5470999 - DNA, 25 bp, Homo sapien
ctgggccacctgggctacgggatgc

SEQ ID NO: 5471000 - DNA, 25 bp, Homo sapien
tgggccacctgggctacgggatgcg

SEQ ID NO: 5471001 - DNA, 25 bp, Homo sapien
gccttcattgaaaggctgtccctct

SEQ ID NO: 5471002 - DNA, 25 bp, Homo sapien
tagtgggccttcattgaaaggctgt

SEQ ID NO: 5471003 - DNA, 25 bp, Homo sapien
cacgtagtgggccttcattgaaagg

SEQ ID NO: 5471004 - DNA, 25 bp, Homo sapien
tcccttcgcctttctggtccaggac

SEQ ID NO: 5471005 - DNA, 25 bp, Homo sapien
ccagccaaggccgggcagaatgggg

SEQ ID NO: 5471006 - DNA, 25 bp, Homo sapien
cagccaaggccgggcagaatggggg

SEQ ID NO: 5471007 - DNA, 25 bp, Homo sapien
cccagccaaggccgggcagaatggg

SEQ ID NO: 5471008 - DNA, 25 bp, Homo sapien
gcaaggagacgaagccgggaggctc

SEQ ID NO: 5471009 - DNA, 25 bp, Homo sapien
gctgcagggattcggcgccatttac

SEQ ID NO: 5471010 - DNA, 25 bp, Homo sapien
gggcgcaaggagacgaagccgggag

SEQ ID NO: 5471011 - DNA, 25 bp, Homo sapien
agcggccgcgatggcggcaacggct

SEQ ID NO: 5471012 - DNA, 25 bp, Homo sapien
gggcccgctcgaaaccagagcctga

SEQ ID NO: 5471013 - DNA, 25 bp, Homo sapien
cctgagcagaactgcgtgggcagcc

SEQ ID NO: 5471014 - DNA, 25 bp, Homo sapien
aggaccaggactagcgggcccgctc

SEQ ID NO: 5471015 - DNA, 25 bp, Homo sapien
ccgcaggtgcgcactcgagcaggac

SEQ ID NO: 5471016 - DNA, 25 bp, Homo sapien
gttggcctcgctcacttcccccagt

SEQ ID NO: 5471017 - DNA, 25 bp, Homo sapien
ttccttgtactcctgggaacgcctg

SEQ ID NO: 5471018 - DNA, 25 bp, Homo sapien
ccttgtactcctgggaacgcctgtc

SEQ ID NO: 5471019 - DNA, 25 bp, Homo sapien
tgtactcctgggaacgcctgtccag

SEQ ID NO: 5471020 - DNA, 25 bp, Homo sapien
tgaacatcttctgatcatcccacag

SEQ ID NO: 5471021 - DNA, 25 bp, Homo sapien
cacacgtacacacggtgagggtcgg

SEQ ID NO: 5471022 - DNA, 25 bp, Homo sapien
tctggtgtaaagagcagtgcccttc

SEQ ID NO: 5471023 - DNA, 25 bp, Homo sapien
ttctgtccatgaggcaagtctttcc

SEQ ID NO: 5471024 - DNA, 25 bp, Homo sapien
gttcctcttgatagaagcttgccac

SEQ ID NO: 5471025 - DNA, 25 bp, Homo sapien
agttcctcttgatagaagcttgcca

SEQ ID NO: 5471026 - DNA, 25 bp, Homo sapien
ggttcttgctgcgtagatagaaggc

SEQ ID NO: 5471027 - DNA, 25 bp, Homo sapien
ctggttcttgctgcgtagatagaag

SEQ ID NO: 5471028 - DNA, 25 bp, Homo sapien
cttgctgcgtagatagaaggcaatg

SEQ ID NO: 5471029 - DNA, 25 bp, Homo sapien
ttcttgctgcgtagatagaaggcaa

SEQ ID NO: 5471030 - DNA, 25 bp, Homo sapien
tactgcctcatgaccctcctctgac

SEQ ID NO: 5471031 - DNA, 25 bp, Homo sapien
tgcctcatgaccctcctctgacacc

SEQ ID NO: 5471032 - DNA, 25 bp, Homo sapien
actgcctcatgaccctcctctgaca

SEQ ID NO: 5471033 - DNA, 25 bp, Homo sapien
taataggtcttcccatggaccttaa

SEQ ID NO: 5471034 - DNA, 25 bp, Homo sapien
ttgtaataggtcttcccatggacct

SEQ ID NO: 5471035 - DNA, 25 bp, Homo sapien
gatgttcttgtaataggtcttccca

SEQ ID NO: 5471036 - DNA, 25 bp, Homo sapien
agatgttcttgtaataggtcttccc

SEQ ID NO: 5471037 - DNA, 25 bp, Homo sapien
ggccccagtagctgttctggtctcc

SEQ ID NO: 5471038 - DNA, 25 bp, Homo sapien
cggccccagtagctgttctggtctc

SEQ ID NO: 5471039 - DNA, 25 bp, Homo sapien
cacggccccagtagctgttctggtc

SEQ ID NO: 5471040 - DNA, 25 bp, Homo sapien
acggccccagtagctgttctggtct

SEQ ID NO: 5471041 - DNA, 25 bp, Homo sapien
cttggtagctgacaagtgttcatgt

SEQ ID NO: 5471042 - DNA, 25 bp, Homo sapien
ggcacgaagcgccatgccatagtgg

SEQ ID NO: 5471043 - DNA, 25 bp, Homo sapien
cccacacgaggtagttatgcaggac

SEQ ID NO: 5471044 - DNA, 25 bp, Homo sapien
acgtcccacacgaggtagttatgca

SEQ ID NO: 5471045 - DNA, 25 bp, Homo sapien
tcctgtgccagcttgtgcagcacct

SEQ ID NO: 5471046 - DNA, 25 bp, Homo sapien
tcctccccatggtggatagatacca

SEQ ID NO: 5471047 - DNA, 25 bp, Homo sapien
agacagcgtctgtccttgagggtga

SEQ ID NO: 5471048 - DNA, 25 bp, Homo sapien
gcgtctgtccttgagggtgactgtc

SEQ ID NO: 5471049 - DNA, 25 bp, Homo sapien
acgaggctctcccaagggtggccca

SEQ ID NO: 5471050 - DNA, 25 bp, Homo sapien
ggcaggggaggggcctgggccatac

SEQ ID NO: 5471051 - DNA, 25 bp, Homo sapien
gggcaggggaggggcctgggccata

SEQ ID NO: 5471052 - DNA, 25 bp, Homo sapien
ccagccagcaagtccagggggcagg

SEQ ID NO: 5471053 - DNA, 25 bp, Homo sapien
gccagcaagtccagggggcagggga

SEQ ID NO: 5471054 - DNA, 25 bp, Homo sapien
ctgacatctcgctggaaatcatcat

SEQ ID NO: 5471055 - DNA, 25 bp, Homo sapien
tgcagctgtcccagcgtcatctttc

SEQ ID NO: 5471056 - DNA, 25 bp, Homo sapien
ctgtcccagcgtcatctttctgtac

SEQ ID NO: 5471057 - DNA, 25 bp, Homo sapien
tctcgctggaaatcatcatactctg

SEQ ID NO: 5471058 - DNA, 25 bp, Homo sapien
agggtctccttagccttctgctcca

SEQ ID NO: 5471059 - DNA, 25 bp, Homo sapien
gggtctccttagccttctgctccac

SEQ ID NO: 5471060 - DNA, 25 bp, Homo sapien
ggaggctgagcactcgctccatgaa

SEQ ID NO: 5471061 - DNA, 25 bp, Homo sapien
tccatgaacaccctgtgtgctgcca

SEQ ID NO: 5471062 - DNA, 25 bp, Homo sapien
actcgctccatgaacaccctgtgtg

SEQ ID NO: 5471063 - DNA, 25 bp, Homo sapien
gcactcgctccatgaacaccctgtg

SEQ ID NO: 5471064 - DNA, 25 bp, Homo sapien
agtcctctctagcagattgagccca

SEQ ID NO: 5471065 - DNA, 25 bp, Homo sapien
gagtcctctctagcagattgagccc

SEQ ID NO: 5471066 - DNA, 25 bp, Homo sapien
cctctctagcagattgagcccatcc

SEQ ID NO: 5471067 - DNA, 25 bp, Homo sapien
gtcctctctagcagattgagcccat

SEQ ID NO: 5471068 - DNA, 25 bp, Homo sapien
tggttgaggtcccagctggttgagg

SEQ ID NO: 5471069 - DNA, 25 bp, Homo sapien
ttgaggtcccagctggttgaggtcc

SEQ ID NO: 5471070 - DNA, 25 bp, Homo sapien
cttgtacagcagctggttgaggtcc

SEQ ID NO: 5471071 - DNA, 25 bp, Homo sapien
tcccagctggttgaggtcccgcgac

SEQ ID NO: 5471072 - DNA, 25 bp, Homo sapien
tcagtagctctatctcgcgcatgtc

SEQ ID NO: 5471073 - DNA, 25 bp, Homo sapien
gaggcacgaacggaaaaaggcgctc

SEQ ID NO: 5471074 - DNA, 25 bp, Homo sapien
ggcacgaacggaaaaaggcgctcac

SEQ ID NO: 5471075 - DNA, 25 bp, Homo sapien
gcatgggccgaggactcagtagctc

SEQ ID NO: 5471076 - DNA, 25 bp, Homo sapien
ctcctctttctgctcgccgaaggcc

SEQ ID NO: 5471077 - DNA, 25 bp, Homo sapien
tttctgctcgccgaaggccgcgatg

SEQ ID NO: 5471078 - DNA, 25 bp, Homo sapien
gcccatccctgggccgtgccagcag

SEQ ID NO: 5471079 - DNA, 25 bp, Homo sapien
ctgggccgtgccagcaggcgcctca

SEQ ID NO: 5471080 - DNA, 25 bp, Homo sapien
atggcgcagagatcagcggcgaaca

SEQ ID NO: 5471081 - DNA, 25 bp, Homo sapien
gcagccgcagacgaaaaagtagaag

SEQ ID NO: 5471082 - DNA, 25 bp, Homo sapien
tagaagttctggtacgagtccatgc

SEQ ID NO: 5471083 - DNA, 25 bp, Homo sapien
gtacgagtccatgctggcgtccagg

SEQ ID NO: 5471084 - DNA, 25 bp, Homo sapien
ccaggtcctggtggcgctgctcctt

SEQ ID NO: 5471085 - DNA, 25 bp, Homo sapien
ctggtggcgctgctccttgagagaa

SEQ ID NO: 5471086 - DNA, 25 bp, Homo sapien
gcagggttccagcgcggcagcccag

SEQ ID NO: 5471087 - DNA, 25 bp, Homo sapien
gtcctggtggcgctgctccttgaga

SEQ ID NO: 5471088 - DNA, 25 bp, Homo sapien
ctggaacgcgtcgtagtgcgccgtc

SEQ ID NO: 5471089 - DNA, 25 bp, Homo sapien
gcgccacagcagcttaggtacttga

SEQ ID NO: 5471090 - DNA, 25 bp, Homo sapien
gcagaaaggcccttgcacgatcccc

SEQ ID NO: 5471091 - DNA, 25 bp, Homo sapien
aataccgggctccatggcaccgagg

SEQ ID NO: 5471092 - DNA, 25 bp, Homo sapien
ggagcgggtcgggccgaagccgctg

SEQ ID NO: 5471093 - DNA, 25 bp, Homo sapien
gagcgggtcgggccgaagccgctgc

SEQ ID NO: 5471094 - DNA, 25 bp, Homo sapien
gcggagcgggtcgggccgaagccgc

SEQ ID NO: 5471095 - DNA, 25 bp, Homo sapien
cggagcgggtcgggccgaagccgct

SEQ ID NO: 5471096 - DNA, 25 bp, Homo sapien
cggccggtgtctccccgctcccgct

SEQ ID NO: 5471097 - DNA, 25 bp, Homo sapien
agcgaagcggcgctagcggccggtg

SEQ ID NO: 5471098 - DNA, 25 bp, Homo sapien
gaagcggcgctagcggccggtgtct

SEQ ID NO: 5471099 - DNA, 25 bp, Homo sapien
aggagcgaagcggcgctagcggccg

SEQ ID NO: 5471100 - DNA, 25 bp, Homo sapien
taggggactccggatccagtcgcat

SEQ ID NO: 5471101 - DNA, 25 bp, Homo sapien
tgcggtaggggactccggatccagt

SEQ ID NO: 5471102 - DNA, 25 bp, Homo sapien
ctccggatccagtcgcatcccggga

SEQ ID NO: 5471103 - DNA, 25 bp, Homo sapien
ggactccggatccagtcgcatcccg

SEQ ID NO: 5471104 - DNA, 25 bp, Homo sapien
tgagggtagcgggtacacccggcag

SEQ ID NO: 5471105 - DNA, 25 bp, Homo sapien
tagcgggtacacccggcaggagtcc

SEQ ID NO: 5471106 - DNA, 25 bp, Homo sapien
gtagcgggtacacccggcaggagtc

SEQ ID NO: 5471107 - DNA, 25 bp, Homo sapien
ctagtgagggtagcgggtacacccg

SEQ ID NO: 5471108 - DNA, 25 bp, Homo sapien
tctgatccacggagagcaacgcaga

SEQ ID NO: 5471109 - DNA, 25 bp, Homo sapien
ccaataggcggttgtcccagagaac

SEQ ID NO: 5471110 - DNA, 25 bp, Homo sapien
tcccaataggcggttgtcccagaga

SEQ ID NO: 5471111 - DNA, 25 bp, Homo sapien
catggtcccaataggcggttgtccc

SEQ ID NO: 5471112 - DNA, 25 bp, Homo sapien
ccccatggtcccaataggcggttgt

SEQ ID NO: 5471113 - DNA, 25 bp, Homo sapien
gggccatgatgtcacgtgggccaag

SEQ ID NO: 5471114 - DNA, 25 bp, Homo sapien
tgtcacgtgggccaaggcatctgag

SEQ ID NO: 5471115 - DNA, 25 bp, Homo sapien
catgatgtcacgtgggccaaggcat

SEQ ID NO: 5471116 - DNA, 25 bp, Homo sapien
gcacccaggggccatgatgtcacgt

SEQ ID NO: 5471117 - DNA, 25 bp, Homo sapien
agggctctggagcttacagggagca

SEQ ID NO: 5471118 - DNA, 25 bp, Homo sapien
gcccggccatggagaacgggccatg

SEQ ID NO: 5471119 - DNA, 25 bp, Homo sapien
cagggctctggagcttacagggagc

SEQ ID NO: 5471120 - DNA, 25 bp, Homo sapien
gctgcccggccatggagaacgggcc

SEQ ID NO: 5471121 - DNA, 25 bp, Homo sapien
tggcctgcttgggaatgagctccct

SEQ ID NO: 5471122 - DNA, 25 bp, Homo sapien
ggcggagcttgacagtatccacacg

SEQ ID NO: 5471123 - DNA, 25 bp, Homo sapien
atcatcagaaacacgcagcccagag

SEQ ID NO: 5471124 - DNA, 25 bp, Homo sapien
cttgggaatgagctccctcaggcgg

SEQ ID NO: 5471125 - DNA, 25 bp, Homo sapien
aagatgtgacagcaacaggtcccac

SEQ ID NO: 5471126 - DNA, 25 bp, Homo sapien
ttaagatgtgacagcaacaggtccc

SEQ ID NO: 5471127 - DNA, 25 bp, Homo sapien
taagatgtgacagcaacaggtccca

SEQ ID NO: 5471128 - DNA, 25 bp, Homo sapien
aggaacgcggcacccagtgctgcct

SEQ ID NO: 5471129 - DNA, 25 bp, Homo sapien
ctgcacaggcccgatgcttgctgga

SEQ ID NO: 5471130 - DNA, 25 bp, Homo sapien
ttgagacagcaggaacgcggcaccc

SEQ ID NO: 5471131 - DNA, 25 bp, Homo sapien
ctctgcacaggcccgatgcttgctg

SEQ ID NO: 5471132 - DNA, 25 bp, Homo sapien
ggaacgtttgtgcactgtgggaacc

SEQ ID NO: 5471133 - DNA, 25 bp, Homo sapien
tgtcgtaaacgcatgaagagccctg

SEQ ID NO: 5471134 - DNA, 25 bp, Homo sapien
aagagccctgcgtttcatatattga

SEQ ID NO: 5471135 - DNA, 25 bp, Homo sapien
tctgcagtcttgatgctcgccggca

SEQ ID NO: 5471136 - DNA, 25 bp, Homo sapien
tctggtggcacaagctccagaagct

SEQ ID NO: 5471137 - DNA, 25 bp, Homo sapien
caagctccagaagcttggtcgatgc

SEQ ID NO: 5471138 - DNA, 25 bp, Homo sapien
tcgtgggactctggtggcacaagct

SEQ ID NO: 5471139 - DNA, 25 bp, Homo sapien
agaagcttggtcgatgccaggtctg

SEQ ID NO: 5471140 - DNA, 25 bp, Homo sapien
ccttctctggattgggtgggctgct

SEQ ID NO: 5471141 - DNA, 25 bp, Homo sapien
gggctgctgccgtgaattatttaat

SEQ ID NO: 5471142 - DNA, 25 bp, Homo sapien
aacgctcaagtacagcaaagctgga

SEQ ID NO: 5471143 - DNA, 25 bp, Homo sapien
agcatggtgccctcttacagcctgg

SEQ ID NO: 5471144 - DNA, 25 bp, Homo sapien
agatgacaagtactcactggcctgg

SEQ ID NO: 5471145 - DNA, 25 bp, Homo sapien
ggtgacctctacgtgcaagcacagg

SEQ ID NO: 5471146 - DNA, 25 bp, Homo sapien
cagtccccatgcaggtaaggagggc

SEQ ID NO: 5471147 - DNA, 25 bp, Homo sapien
tgcttccggcccatgcagataagga

SEQ ID NO: 5471148 - DNA, 25 bp, Homo sapien
tgaatctgtacagaggtggaaccca

SEQ ID NO: 5471149 - DNA, 25 bp, Homo sapien
tctgaggcaagctcgcagccgaggc

SEQ ID NO: 5471150 - DNA, 25 bp, Homo sapien
cctgagaactctgaggcaagctcgc

SEQ ID NO: 5471151 - DNA, 25 bp, Homo sapien
tgtacagaggtggaacccacagggc

SEQ ID NO: 5471152 - DNA, 25 bp, Homo sapien
cacaggagggattggtggtgggtaa

SEQ ID NO: 5471153 - DNA, 25 bp, Homo sapien
caggagggattggtggtgggtaaag

SEQ ID NO: 5471154 - DNA, 25 bp, Homo sapien
gctgaggcctcccctaagccggtgt

SEQ ID NO: 5471155 - DNA, 25 bp, Homo sapien
gaggcctcccctaagccggtgtgga

SEQ ID NO: 5471156 - DNA, 25 bp, Homo sapien
ctggcccccttagagcagaatctgg

SEQ ID NO: 5471157 - DNA, 25 bp, Homo sapien
gcccgtacaatccagcctggcagag

SEQ ID NO: 5471158 - DNA, 25 bp, Homo sapien
aacagtgcagtgatttattgaccag

SEQ ID NO: 5471159 - DNA, 25 bp, Homo sapien
gggtgcatgcctgccccggtagcca

SEQ ID NO: 5471160 - DNA, 25 bp, Homo sapien
cacacggaacacttgtgggcagggt

SEQ ID NO: 5471161 - DNA, 25 bp, Homo sapien
gaacacttgtgggcagggttcatgg

SEQ ID NO: 5471162 - DNA, 25 bp, Homo sapien
gacagtggaaagcccggccaaactc

SEQ ID NO: 5471163 - DNA, 25 bp, Homo sapien
gatggactgcgaccgccgcttgatg

SEQ ID NO: 5471164 - DNA, 25 bp, Homo sapien
gcacctgcaggtagatggactgcga

SEQ ID NO: 5471165 - DNA, 25 bp, Homo sapien
caggggcatgcttgtcagtcagcac

SEQ ID NO: 5471166 - DNA, 25 bp, Homo sapien
gcgaccgccgcttgatgcaccagtt

SEQ ID NO: 5471167 - DNA, 25 bp, Homo sapien
gggaagtgggtgctctgggccgtgc

SEQ ID NO: 5471168 - DNA, 25 bp, Homo sapien
tgctcccgcacccacttctgatagg

SEQ ID NO: 5471169 - DNA, 25 bp, Homo sapien
aagaagagctggtcatgtgtgtact

SEQ ID NO: 5471170 - DNA, 25 bp, Homo sapien
gaagagctggtcatgtgtgtacttg

SEQ ID NO: 5471171 - DNA, 25 bp, Homo sapien
aggccagcttgaggccgcccatatc

SEQ ID NO: 5471172 - DNA, 25 bp, Homo sapien
tccccaagcgtgtgtttcccgttca

SEQ ID NO: 5471173 - DNA, 25 bp, Homo sapien
tgaggccgcccatatctgcgatgtt

SEQ ID NO: 5471174 - DNA, 25 bp, Homo sapien
ctgcgatgttctccccaagcgtgtg

SEQ ID NO: 5471175 - DNA, 25 bp, Homo sapien
tagagacggacgatgcactcagcct

SEQ ID NO: 5471176 - DNA, 25 bp, Homo sapien
gcagcaggttccctgagcggtcata

SEQ ID NO: 5471177 - DNA, 25 bp, Homo sapien
tgaagttgtcatagagacggacgat

SEQ ID NO: 5471178 - DNA, 25 bp, Homo sapien
agcctttcgcaggaagcggctgtag

SEQ ID NO: 5471179 - DNA, 25 bp, Homo sapien
cccagtcgtcgtagccgtgggtcag

SEQ ID NO: 5471180 - DNA, 25 bp, Homo sapien
gccgatgcccccgtagttgagagac

SEQ ID NO: 5471181 - DNA, 25 bp, Homo sapien
aatgatggtgccgatgcccccgtag

SEQ ID NO: 5471182 - DNA, 25 bp, Homo sapien
ggtcagctcatgtccaatgatggtg

SEQ ID NO: 5471183 - DNA, 25 bp, Homo sapien
gtgggctgcaggatgcccgcgggga

SEQ ID NO: 5471184 - DNA, 25 bp, Homo sapien
gggtgggctgcaggatgcccgcggg

SEQ ID NO: 5471185 - DNA, 25 bp, Homo sapien
agggtgggctgcaggatgcccgcgg

SEQ ID NO: 5471186 - DNA, 25 bp, Homo sapien
gggctgcaggatgcccgcggggaac

SEQ ID NO: 5471187 - DNA, 25 bp, Homo sapien
tgggtagatagtaggcattgagcgc

SEQ ID NO: 5471188 - DNA, 25 bp, Homo sapien
ttgttgggtagatagtaggcattga

SEQ ID NO: 5471189 - DNA, 25 bp, Homo sapien
gttcttgttgggtagatagtaggca

SEQ ID NO: 5471190 - DNA, 25 bp, Homo sapien
tcttgttgggtagatagtaggcatt

SEQ ID NO: 5471191 - DNA, 25 bp, Homo sapien
ccccagctctgggccaggcacccac

SEQ ID NO: 5471192 - DNA, 25 bp, Homo sapien
ctcctgccgaatcttcttaactgag

SEQ ID NO: 5471193 - DNA, 25 bp, Homo sapien
cctcctgccgaatcttcttaactga

SEQ ID NO: 5471194 - DNA, 25 bp, Homo sapien
tcctgccgaatcttcttaactgaga

SEQ ID NO: 5471195 - DNA, 25 bp, Homo sapien
aggaagtccgggtagccgaccatca

SEQ ID NO: 5471196 - DNA, 25 bp, Homo sapien
cttgtccacagcatcgggtttcagc

SEQ ID NO: 5471197 - DNA, 25 bp, Homo sapien
cgggtagccgaccatcaccatcatg

SEQ ID NO: 5471198 - DNA, 25 bp, Homo sapien
ccacagcatcgggtttcagcaggaa

SEQ ID NO: 5471199 - DNA, 25 bp, Homo sapien
tggtctcggcgtccatccagtccag

SEQ ID NO: 5471200 - DNA, 25 bp, Homo sapien
tgatgtcttccactagctgctgcac

SEQ ID NO: 5471201 - DNA, 25 bp, Homo sapien
agcagccctggtctcggcgtccatc

SEQ ID NO: 5471202 - DNA, 25 bp, Homo sapien
cctggtctcggcgtccatccagtcc

SEQ ID NO: 5471203 - DNA, 25 bp, Homo sapien
cagctcgtgcagtgcctcacggaat

SEQ ID NO: 5471204 - DNA, 25 bp, Homo sapien
ccatgccaaagtggcgattggcctg

SEQ ID NO: 5471205 - DNA, 25 bp, Homo sapien
tgtggcttgtcgctgccctccatct

SEQ ID NO: 5471206 - DNA, 25 bp, Homo sapien
tggcagctgagaagtgctcatgtac

SEQ ID NO: 5471207 - DNA, 25 bp, Homo sapien
acctagtgaccgctgggcagaaaat

SEQ ID NO: 5471208 - DNA, 25 bp, Homo sapien
tgaccgctgggcagaaaatgccaga

SEQ ID NO: 5471209 - DNA, 25 bp, Homo sapien
ggaaggacctagtgaccgctgggca

SEQ ID NO: 5471210 - DNA, 25 bp, Homo sapien
ctagtgaccgctgggcagaaaatgc

SEQ ID NO: 5471211 - DNA, 25 bp, Homo sapien
gcatgtagtctgtcgccagcagcac

SEQ ID NO: 5471212 - DNA, 25 bp, Homo sapien
gatctggtctagcagccacttccac

SEQ ID NO: 5471213 - DNA, 25 bp, Homo sapien
tggaagatctggtctagcagccact

SEQ ID NO: 5471214 - DNA, 25 bp, Homo sapien
gagcggatgagctgcgacacctgct

SEQ ID NO: 5471215 - DNA, 25 bp, Homo sapien
ggtcgtcatgctctgacacagtgat

SEQ ID NO: 5471216 - DNA, 25 bp, Homo sapien
ccagcgtcaccttgttgtacatgga

SEQ ID NO: 5471217 - DNA, 25 bp, Homo sapien
gagctgacatctcgccgtaggtcgt

SEQ ID NO: 5471218 - DNA, 25 bp, Homo sapien
gccccagcgtcaccttgttgtacat

SEQ ID NO: 5471219 - DNA, 25 bp, Homo sapien
cctgctccatgatgccctccctcaa

SEQ ID NO: 5471220 - DNA, 25 bp, Homo sapien
ctgctccatgatgccctccctcaag

SEQ ID NO: 5471221 - DNA, 25 bp, Homo sapien
tgctccatgatgccctccctcaagc

SEQ ID NO: 5471222 - DNA, 25 bp, Homo sapien
ccttctgttccacagcgtctgcacc

SEQ ID NO: 5471223 - DNA, 25 bp, Homo sapien
ctccacttgcaggatctcttgggcc

SEQ ID NO: 5471224 - DNA, 25 bp, Homo sapien
gctccacttgcaggatctcttgggc

SEQ ID NO: 5471225 - DNA, 25 bp, Homo sapien
caccaggggagggggctcacccagg

SEQ ID NO: 5471226 - DNA, 25 bp, Homo sapien
ggctcacccagggacagggacaggc

SEQ ID NO: 5471227 - DNA, 25 bp, Homo sapien
ctgcaccaggggagggggctcaccc

SEQ ID NO: 5471228 - DNA, 25 bp, Homo sapien
gagggggctcacccagggacaggga

SEQ ID NO: 5471229 - DNA, 25 bp, Homo sapien
ctagcctggatccacccctcctggg

SEQ ID NO: 5471230 - DNA, 25 bp, Homo sapien
ctctggcagggtgagcccatcctgg

SEQ ID NO: 5471231 - DNA, 25 bp, Homo sapien
gcagggtgagcccatcctggtcaat

SEQ ID NO: 5471232 - DNA, 25 bp, Homo sapien
actgtcctcatcctgagcgaggtac

SEQ ID NO: 5471233 - DNA, 25 bp, Homo sapien
gtcctcatcctgagcgaggtacagg

SEQ ID NO: 5471234 - DNA, 25 bp, Homo sapien
tgacgtagcgcgaggagttcctgtc

SEQ ID NO: 5471235 - DNA, 25 bp, Homo sapien
gcggatgacgtagcgcgaggagttc

SEQ ID NO: 5471236 - DNA, 25 bp, Homo sapien
ccagtcgctcgatctcgcgcatgtc

SEQ ID NO: 5471237 - DNA, 25 bp, Homo sapien
gacctctagcatgggtcgcgggccc

SEQ ID NO: 5471238 - DNA, 25 bp, Homo sapien
caggcccacccccgggccgcgccag

SEQ ID NO: 5471239 - DNA, 25 bp, Homo sapien
ctgggccgcgccgccaggcccaccc

SEQ ID NO: 5471240 - DNA, 25 bp, Homo sapien
tgggccgcgccgccaggcccacccc

SEQ ID NO: 5471241 - DNA, 25 bp, Homo sapien
taggcgctcctcgttttgctcgccg

SEQ ID NO: 5471242 - DNA, 25 bp, Homo sapien
cgtaggcgctcctcgttttgctcgc

SEQ ID NO: 5471243 - DNA, 25 bp, Homo sapien
ccgtaggcgctcctcgttttgctcg

SEQ ID NO: 5471244 - DNA, 25 bp, Homo sapien
gccgtaggcgctcctcgttttgctc

SEQ ID NO: 5471245 - DNA, 25 bp, Homo sapien
tcgggacaggcgccgccgccggccg

SEQ ID NO: 5471246 - DNA, 25 bp, Homo sapien
ctcgggacaggcgccgccgccggcc

SEQ ID NO: 5471247 - DNA, 25 bp, Homo sapien
cgccgccggccgcgaccgggcccag

SEQ ID NO: 5471248 - DNA, 25 bp, Homo sapien
caggcgccgccgccggccgcgaccg

SEQ ID NO: 5471249 - DNA, 25 bp, Homo sapien
ggccggcggcgaacaccagccccga

SEQ ID NO: 5471250 - DNA, 25 bp, Homo sapien
ccagaatggcgcagaggccggcggc

SEQ ID NO: 5471251 - DNA, 25 bp, Homo sapien
agccgccagaatggcgcagaggccg

SEQ ID NO: 5471252 - DNA, 25 bp, Homo sapien
cggcgaacaccagccccgacagcag

SEQ ID NO: 5471253 - DNA, 25 bp, Homo sapien
ctcgcgccggttccagcgcggcagc

SEQ ID NO: 5471254 - DNA, 25 bp, Homo sapien
cagcgcggcagcccggaccgggccc

SEQ ID NO: 5471255 - DNA, 25 bp, Homo sapien
tccagcgcggcagcccggaccgggc

SEQ ID NO: 5471256 - DNA, 25 bp, Homo sapien
cgcgccggttccagcgcggcagccc

SEQ ID NO: 5471257 - DNA, 25 bp, Homo sapien
ctgcgcgcagcgcccaacgggaagc

SEQ ID NO: 5471258 - DNA, 25 bp, Homo sapien
tgcgcgcagcgcccaacgggaagcc

SEQ ID NO: 5471259 - DNA, 25 bp, Homo sapien
tcttggaactcatcgtagtgcgccg

SEQ ID NO: 5471260 - DNA, 25 bp, Homo sapien
ttgacctcttggaactcatcgtagt

SEQ ID NO: 5471261 - DNA, 25 bp, Homo sapien
ctcttggaactcatcgtagtgcgcc

SEQ ID NO: 5471262 - DNA, 25 bp, Homo sapien
acctcttggaactcatcgtagtgcg

SEQ ID NO: 5471263 - DNA, 25 bp, Homo sapien
gcgccgaggccgccgcggtgcagac

SEQ ID NO: 5471264 - DNA, 25 bp, Homo sapien
ggcgccgaggccgccgcggtgcaga

SEQ ID NO: 5471265 - DNA, 25 bp, Homo sapien
gggccacctgggctacgggatgcgc

SEQ ID NO: 5471266 - DNA, 25 bp, Homo sapien
ggccacctgggctacgggatgcgcg

SEQ ID NO: 5471267 - DNA, 25 bp, Homo sapien
ctgggccacctgggctacgggatgc

SEQ ID NO: 5471268 - DNA, 25 bp, Homo sapien
tgggccacctgggctacgggatgcg

SEQ ID NO: 5471269 - DNA, 25 bp, Homo sapien
ctgcgggaagggcggaagcaggctc

SEQ ID NO: 5471270 - DNA, 25 bp, Homo sapien
tggggctcagggtcaccgcgaggag

SEQ ID NO: 5471271 - DNA, 25 bp, Homo sapien
gggaagggcggaagcaggctcagga

SEQ ID NO: 5471272 - DNA, 25 bp, Homo sapien
cagggtcaccgcgaggagggacaca

SEQ ID NO: 5471273 - DNA, 25 bp, Homo sapien
tggctccttctgctcggtggcccga

SEQ ID NO: 5471274 - DNA, 25 bp, Homo sapien
aagtccgcgggatcgaccacgccaa

SEQ ID NO: 5471275 - DNA, 25 bp, Homo sapien
tcctcgcggaagtccgcgggatcga

SEQ ID NO: 5471276 - DNA, 25 bp, Homo sapien
cgcaaagcggccaaagaaccaaact

SEQ ID NO: 5471277 - DNA, 25 bp, Homo sapien
gcccgagccggcggtgaccgagcgg

SEQ ID NO: 5471278 - DNA, 25 bp, Homo sapien
ccgagccggcggtgaccgagcgggt

SEQ ID NO: 5471279 - DNA, 25 bp, Homo sapien
gagccggcggtgaccgagcgggtcg

SEQ ID NO: 5471280 - DNA, 25 bp, Homo sapien
agccggcggtgaccgagcgggtcgg

SEQ ID NO: 5471281 - DNA, 25 bp, Homo sapien
ccgagcgggcgtccggtgtctccca

SEQ ID NO: 5471282 - DNA, 25 bp, Homo sapien
agcgggcgtccggtgtctcccagcg

SEQ ID NO: 5471283 - DNA, 25 bp, Homo sapien
gggcgtccggtgtctcccagcgccc

SEQ ID NO: 5471284 - DNA, 25 bp, Homo sapien
gccgagcgggcgtccggtgtctccc

SEQ ID NO: 5471285 - DNA, 25 bp, Homo sapien
ctggcagtggggcggcagcgcggac

SEQ ID NO: 5471286 - DNA, 25 bp, Homo sapien
gactccgggtccagccgcgttccga

SEQ ID NO: 5471287 - DNA, 25 bp, Homo sapien
gtgaagggtcccctccgatccagtg

SEQ ID NO: 5471288 - DNA, 25 bp, Homo sapien
gcagcgagtactcccgtgaagggtc

SEQ ID NO: 5471289 - DNA, 25 bp, Homo sapien
ccgagacgagtgagggcagcgagta

SEQ ID NO: 5471290 - DNA, 25 bp, Homo sapien
gagcgcaccttcactaaccggcttt

SEQ ID NO: 5471291 - DNA, 25 bp, Homo sapien
gatgggctctccactagggcttctg

SEQ ID NO: 5471292 - DNA, 25 bp, Homo sapien
tgtgtctgccggcacagtccctggc

SEQ ID NO: 5471293 - DNA, 25 bp, Homo sapien
gatgaggagccgaggactcctccga

SEQ ID NO: 5471294 - DNA, 25 bp, Homo sapien
ccagccacagcctcggtgtagccat

SEQ ID NO: 5471295 - DNA, 25 bp, Homo sapien
cagttctgcctgttcccagccacag

SEQ ID NO: 5471296 - DNA, 25 bp, Homo sapien
ctgctgcagttctgcctgttcccag

SEQ ID NO: 5471297 - DNA, 25 bp, Homo sapien
tgggtgctgctgcagttctgcctgt

SEQ ID NO: 5471298 - DNA, 25 bp, Homo sapien
aggcctcctgggtgtggtcccctca

SEQ ID NO: 5471299 - DNA, 25 bp, Homo sapien
tctgaggcctcctgggtgtggtccc

SEQ ID NO: 5471300 - DNA, 25 bp, Homo sapien
ctgaggcctcctgggtgtggtcccc

SEQ ID NO: 5471301 - DNA, 25 bp, Homo sapien
ggccactgtggcttctgaggcctcc

SEQ ID NO: 5471302 - DNA, 25 bp, Homo sapien
gacaactgagtggaggcttgcagac

SEQ ID NO: 5471303 - DNA, 25 bp, Homo sapien
agacaactgagtggaggcttgcaga

SEQ ID NO: 5471304 - DNA, 25 bp, Homo sapien
tagacaactgagtggaggcttgcag

SEQ ID NO: 5471305 - DNA, 25 bp, Homo sapien
cgggggtggtcgtgcgtgtctgtgg

SEQ ID NO: 5471306 - DNA, 25 bp, Homo sapien
gcccgggggtggtcgtgcgtgtctg

SEQ ID NO: 5471307 - DNA, 25 bp, Homo sapien
ccgggggtggtcgtgcgtgtctgtg

SEQ ID NO: 5471308 - DNA, 25 bp, Homo sapien
cccgggggtggtcgtgcgtgtctgt

SEQ ID NO: 5471309 - DNA, 25 bp, Homo sapien
agacccatgcaccagtccatgcctg

SEQ ID NO: 5471310 - DNA, 25 bp, Homo sapien
tcaagacccatgcaccagtccatgc

SEQ ID NO: 5471311 - DNA, 25 bp, Homo sapien
aagacccatgcaccagtccatgcct

SEQ ID NO: 5471312 - DNA, 25 bp, Homo sapien
gacccatgcaccagtccatgcctgc

SEQ ID NO: 5471313 - DNA, 25 bp, Homo sapien
ctgacaggtcctttgggtctggaga

SEQ ID NO: 5471314 - DNA, 25 bp, Homo sapien
gacaggtcctttgggtctggagaac

SEQ ID NO: 5471315 - DNA, 25 bp, Homo sapien
ctgctgacaggtcctttgggtctgg

SEQ ID NO: 5471316 - DNA, 25 bp, Homo sapien
tgctgacaggtcctttgggtctgga

SEQ ID NO: 5471317 - DNA, 25 bp, Homo sapien
aggacttgtggatgcttcccaaaga

SEQ ID NO: 5471318 - DNA, 25 bp, Homo sapien
tcggccaccaggacttgtggatgct

SEQ ID NO: 5471319 - DNA, 25 bp, Homo sapien
caccaggacttgtggatgcttccca

SEQ ID NO: 5471320 - DNA, 25 bp, Homo sapien
atcggccaccaggacttgtggatgc

SEQ ID NO: 5471321 - DNA, 25 bp, Homo sapien
tctgggttccagatggcacatgtcc

SEQ ID NO: 5471322 - DNA, 25 bp, Homo sapien
gagaaggctccaggtaggttccaca

SEQ ID NO: 5471323 - DNA, 25 bp, Homo sapien
agaaggctccaggtaggttccacat

SEQ ID NO: 5471324 - DNA, 25 bp, Homo sapien
agctctgggttccagatggcacatg

SEQ ID NO: 5471325 - DNA, 25 bp, Homo sapien
gattcctgatcaaggaattcaaatt

SEQ ID NO: 5471326 - DNA, 25 bp, Homo sapien
tcctgatcaaggaattcaaattcca

SEQ ID NO: 5471327 - DNA, 25 bp, Homo sapien
ttcctgatcaaggaattcaaattcc

SEQ ID NO: 5471328 - DNA, 25 bp, Homo sapien
cctgatcaaggaattcaaattccat

SEQ ID NO: 5471329 - DNA, 25 bp, Homo sapien
cctcctgctgctgctggctgtctgc

SEQ ID NO: 5471330 - DNA, 25 bp, Homo sapien
catgcatgggggccaggggccgctg

SEQ ID NO: 5471331 - DNA, 25 bp, Homo sapien
tcctcctgctgctgctggctgtctg

SEQ ID NO: 5471332 - DNA, 25 bp, Homo sapien
tgctcctcctgctgctgctggctgt

SEQ ID NO: 5471333 - DNA, 25 bp, Homo sapien
gcaagagtgcaatagcattgtctaa

SEQ ID NO: 5471334 - DNA, 25 bp, Homo sapien
cagcaagagtgcaatagcattgtct

SEQ ID NO: 5471335 - DNA, 25 bp, Homo sapien
caagagtgcaatagcattgtctaat

SEQ ID NO: 5471336 - DNA, 25 bp, Homo sapien
ccagcaagagtgcaatagcattgtc

SEQ ID NO: 5471337 - DNA, 25 bp, Homo sapien
gaagcttttcgcatgagttgactct

SEQ ID NO: 5471338 - DNA, 25 bp, Homo sapien
tgagccttcggtgagtcgtactctt

SEQ ID NO: 5471339 - DNA, 25 bp, Homo sapien
tatagcacgggtagagtagatttag

SEQ ID NO: 5471340 - DNA, 25 bp, Homo sapien
tcctaaaataagacatcggtgaagc

SEQ ID NO: 5471341 - DNA, 25 bp, Homo sapien
aatggcgctgatacaattgctggac

SEQ ID NO: 5471342 - DNA, 25 bp, Homo sapien
gaatgccctatctgcgaagcgtaat

SEQ ID NO: 5471343 - DNA, 25 bp, Homo sapien
ttttaccaagcagcgagtccagagc

SEQ ID NO: 5471344 - DNA, 25 bp, Homo sapien
taaaagacgctgtatgtggcacccc

SEQ ID NO: 5471345 - DNA, 25 bp, Homo sapien
gaggatgaacaacaagttcgacgcg

SEQ ID NO: 5471346 - DNA, 25 bp, Homo sapien
actccctgaggcagtggcgacagcg

SEQ ID NO: 5471347 - DNA, 25 bp, Homo sapien
cggtggagcggaagtcactccctga

SEQ ID NO: 5471348 - DNA, 25 bp, Homo sapien
gaacaacaagttcgacgcgtgagtg

SEQ ID NO: 5471349 - DNA, 25 bp, Homo sapien
aagcagaatctttggcacattgcag

SEQ ID NO: 5471350 - DNA, 25 bp, Homo sapien
gaatctcatagaggaggcagtgctt

SEQ ID NO: 5471351 - DNA, 25 bp, Homo sapien
tatgagggagaaagttacaaaggcc

SEQ ID NO: 5471352 - DNA, 25 bp, Homo sapien
tcagtctcagaccacgtgacaaatg

SEQ ID NO: 5471353 - DNA, 25 bp, Homo sapien
caggccaggcacagtagctaatgcc

SEQ ID NO: 5471354 - DNA, 25 bp, Homo sapien
caggcacagtagctaatgcctgtag

SEQ ID NO: 5471355 - DNA, 25 bp, Homo sapien
cacagtagctaatgcctgtagtccc

SEQ ID NO: 5471356 - DNA, 25 bp, Homo sapien
taaagtttaataatatttctcaggc

SEQ ID NO: 5471357 - DNA, 25 bp, Homo sapien
gggaactggagatggttgacatact

SEQ ID NO: 5471358 - DNA, 25 bp, Homo sapien
tcagttccttattcacaatgagcca

SEQ ID NO: 5471359 - DNA, 25 bp, Homo sapien
actgttaaagcgattattgactggg

SEQ ID NO: 5471360 - DNA, 25 bp, Homo sapien
ccactagtgggtgtacttggttcta

SEQ ID NO: 5471361 - DNA, 25 bp, Homo sapien
gcgtgctacctggaagatccttctg

SEQ ID NO: 5471362 - DNA, 25 bp, Homo sapien
tctcttgttctgttggcgtgctacc

SEQ ID NO: 5471363 - DNA, 25 bp, Homo sapien
gaagctggcgtcatcggagtctctt

SEQ ID NO: 5471364 - DNA, 25 bp, Homo sapien
ctggaagccgcggttgaatgtgcca

SEQ ID NO: 5471365 - DNA, 25 bp, Homo sapien
cccaatgtccttcttcaaccgttgg

SEQ ID NO: 5471366 - DNA, 25 bp, Homo sapien
ccaatgtccttcttcaaccgttggg

SEQ ID NO: 5471367 - DNA, 25 bp, Homo sapien
caatgtccttcttcaaccgttgggt

SEQ ID NO: 5471368 - DNA, 25 bp, Homo sapien
tcagctgaccgccatcatggaggag

SEQ ID NO: 5471369 - DNA, 25 bp, Homo sapien
agcctgagttcacctataccagctc

SEQ ID NO: 5471370 - DNA, 25 bp, Homo sapien
ggtcactgtcagctgaccgccatca

SEQ ID NO: 5471371 - DNA, 25 bp, Homo sapien
tctctttgtgtagtcgggggctgtt

SEQ ID NO: 5471372 - DNA, 25 bp, Homo sapien
gagtacacaagctggcaataatcct

SEQ ID NO: 5471373 - DNA, 25 bp, Homo sapien
ttttgcactcattcctggaggacgg

SEQ ID NO: 5471374 - DNA, 25 bp, Homo sapien
tttgtccgaaatggatgggaggcct

SEQ ID NO: 5471375 - DNA, 25 bp, Homo sapien
gaagggtaccgtggccacgtgtaca

SEQ ID NO: 5471376 - DNA, 25 bp, Homo sapien
cagtattatgaatgtctgtgcatcc

SEQ ID NO: 5471377 - DNA, 25 bp, Homo sapien
gccattaaattattgggacattttg

SEQ ID NO: 5471378 - DNA, 25 bp, Homo sapien
gtgttctgttggagagtcccaaaat

SEQ ID NO: 5471379 - DNA, 25 bp, Homo sapien
tctgttggagagtcccaaaatagct

SEQ ID NO: 5471380 - DNA, 25 bp, Homo sapien
tgggtgatctgactccagaaggact

SEQ ID NO: 5471381 - DNA, 25 bp, Homo sapien
agagaagctgggtgatctgactcca

SEQ ID NO: 5471382 - DNA, 25 bp, Homo sapien
caaatgtgtgctgattgtgatgccc

SEQ ID NO: 5471383 - DNA, 25 bp, Homo sapien
gaaacctcttgaagactgctgcagg

SEQ ID NO: 5471384 - DNA, 25 bp, Homo sapien
gatttgccgtgaaaattccaaagag

SEQ ID NO: 5471385 - DNA, 25 bp, Homo sapien
atctacctgactgttgtgtgtgtgg

SEQ ID NO: 5471386 - DNA, 25 bp, Homo sapien
tgtgtagagtgtgcttaggagtgag

SEQ ID NO: 5471387 - DNA, 25 bp, Homo sapien
ctcctttgggcatctacctgactgt

SEQ ID NO: 5471388 - DNA, 25 bp, Homo sapien
tgtgtgtgttccctatgatactggc

SEQ ID NO: 5471389 - DNA, 25 bp, Homo sapien
tgtggtccacaatgctcgaagaatg

SEQ ID NO: 5471390 - DNA, 25 bp, Homo sapien
tactggcagtggcaataattttcca

SEQ ID NO: 5471391 - DNA, 25 bp, Homo sapien
tatttgccagtggaaacggagcaga

SEQ ID NO: 5471392 - DNA, 25 bp, Homo sapien
cctgggtctttgagcccatcatgaa

SEQ ID NO: 5471393 - DNA, 25 bp, Homo sapien
tgccagctgcgaagcagagatgttt

SEQ ID NO: 5471394 - DNA, 25 bp, Homo sapien
ccatcatgaagctggttctgagcag

SEQ ID NO: 5471395 - DNA, 25 bp, Homo sapien
gaaaaatccaacaggatgccagctg

SEQ ID NO: 5471396 - DNA, 25 bp, Homo sapien
ccccggctacctggatggtcacatt

SEQ ID NO: 5471397 - DNA, 25 bp, Homo sapien
tctcatcccatgtgattgcccgtgg

SEQ ID NO: 5471398 - DNA, 25 bp, Homo sapien
ccaggtctgctttcccttgattgca

SEQ ID NO: 5471399 - DNA, 25 bp, Homo sapien
ttcctccaatggagctaatccagca

SEQ ID NO: 5471400 - DNA, 25 bp, Homo sapien
ggactccagaagtacagacatgagg

SEQ ID NO: 5471401 - DNA, 25 bp, Homo sapien
cagacatgaggccagtgggcttcat

SEQ ID NO: 5471402 - DNA, 25 bp, Homo sapien
ctggactccagaagtacagacatga

SEQ ID NO: 5471403 - DNA, 25 bp, Homo sapien
gtacagacatgaggccagtgggctt

SEQ ID NO: 5471404 - DNA, 25 bp, Homo sapien
cacgaaggcagggaggtatgggtcc

SEQ ID NO: 5471405 - DNA, 25 bp, Homo sapien
tggtaggccggatgctttaggccaa

SEQ ID NO: 5471406 - DNA, 25 bp, Homo sapien
agaggatggctggtaggccggatgc

SEQ ID NO: 5471407 - DNA, 25 bp, Homo sapien
gtatgggtccgggatgtctcccagg

SEQ ID NO: 5471408 - DNA, 25 bp, Homo sapien
ctgtgaggcatgatcgcaccacaca

SEQ ID NO: 5471409 - DNA, 25 bp, Homo sapien
tgtgaggcatgatcgcaccacacac

SEQ ID NO: 5471410 - DNA, 25 bp, Homo sapien
ggggacaccaggagccatctgccat

SEQ ID NO: 5471411 - DNA, 25 bp, Homo sapien
cttccaggggacaccaggagccatc

SEQ ID NO: 5471412 - DNA, 25 bp, Homo sapien
caggggacaccaggagccatctgcc

SEQ ID NO: 5471413 - DNA, 25 bp, Homo sapien
tccaggggacaccaggagccatctg

SEQ ID NO: 5471414 - DNA, 25 bp, Homo sapien
tgttgcccccgacttgtgcaggttc

SEQ ID NO: 5471415 - DNA, 25 bp, Homo sapien
cccgacttgtgcaggttcccacagg

SEQ ID NO: 5471416 - DNA, 25 bp, Homo sapien
catgttgcccccgacttgtgcaggt

SEQ ID NO: 5471417 - DNA, 25 bp, Homo sapien
ctgggaccatgttgcccccgacttg

SEQ ID NO: 5471418 - DNA, 25 bp, Homo sapien
ggaaagtgaacataaagcccttctg

SEQ ID NO: 5471419 - DNA, 25 bp, Homo sapien
aaactagaattttgggccgagcatg

SEQ ID NO: 5471420 - DNA, 25 bp, Homo sapien
gctgcagatgaaagtctgttagtca

SEQ ID NO: 5471421 - DNA, 25 bp, Homo sapien
acagctgacaatccatggctattca

SEQ ID NO: 5471422 - DNA, 25 bp, Homo sapien
tacaagattctcaacgcctggctga

SEQ ID NO: 5471423 - DNA, 25 bp, Homo sapien
tcagagcagcgtcgttctcaagtgg

SEQ ID NO: 5471424 - DNA, 25 bp, Homo sapien
ggacagacccgtgtttacaagattc

SEQ ID NO: 5471425 - DNA, 25 bp, Homo sapien
ggatgtgagtctccgcgccaggttt

SEQ ID NO: 5471426 - DNA, 25 bp, Homo sapien
ttaattagggcacttatgttccagc

SEQ ID NO: 5471427 - DNA, 25 bp, Homo sapien
cacttatgttccagcccagtgttct

SEQ ID NO: 5471428 - DNA, 25 bp, Homo sapien
ggcacttatgttccagcccagtgtt

SEQ ID NO: 5471429 - DNA, 25 bp, Homo sapien
ttagggcacttatgttccagcccag

SEQ ID NO: 5471430 - DNA, 25 bp, Homo sapien
ctttgggcccctcgaccactctgca

SEQ ID NO: 5471431 - DNA, 25 bp, Homo sapien
gggcccctcgaccactctgcaaggc

SEQ ID NO: 5471432 - DNA, 25 bp, Homo sapien
ttgggcccctcgaccactctgcaag

SEQ ID NO: 5471433 - DNA, 25 bp, Homo sapien
tcctttgggcccctcgaccactctg

SEQ ID NO: 5471434 - DNA, 25 bp, Homo sapien
cgacgtgtcggccatcttgtgttgt

SEQ ID NO: 5471435 - DNA, 25 bp, Homo sapien
gacgtgcgtggcgacgtgtcggcca

SEQ ID NO: 5471436 - DNA, 25 bp, Homo sapien
cgtggcgacgtgtcggccatcttgt

SEQ ID NO: 5471437 - DNA, 25 bp, Homo sapien
tgtcggccatcttgtgttgttgagg

SEQ ID NO: 5471438 - DNA, 25 bp, Homo sapien
tagccaattgatgctagcacagtgt

SEQ ID NO: 5471439 - DNA, 25 bp, Homo sapien
gaacttaggctctagtgccagtagc

SEQ ID NO: 5471440 - DNA, 25 bp, Homo sapien
aatttggctggttgaacttggttcg

SEQ ID NO: 5471441 - DNA, 25 bp, Homo sapien
acttggttcggttctttgtcattga

SEQ ID NO: 5471442 - DNA, 25 bp, Homo sapien
gctggcctcacatgtaagattcctg

SEQ ID NO: 5471443 - DNA, 25 bp, Homo sapien
tattcccagagcttacttcgcatag

SEQ ID NO: 5471444 - DNA, 25 bp, Homo sapien
tgttggtaacctttcatgtcggtga

SEQ ID NO: 5471445 - DNA, 25 bp, Homo sapien
gacttttgtgatgtagccactgctt

SEQ ID NO: 5471446 - DNA, 25 bp, Homo sapien
cttagtaagcacatagttagctctc

SEQ ID NO: 5471447 - DNA, 25 bp, Homo sapien
catggactgcacatagtcttcaaaa

SEQ ID NO: 5471448 - DNA, 25 bp, Homo sapien
cttctccagcttatctgttccaact

SEQ ID NO: 5471449 - DNA, 25 bp, Homo sapien
ctgcttctccagcttatctgttcca

SEQ ID NO: 5471450 - DNA, 25 bp, Homo sapien
agtcttcaaaagcagtgatctgctt

SEQ ID NO: 5471451 - DNA, 25 bp, Homo sapien
ctctgatgcactcctctaattttgc

SEQ ID NO: 5471452 - DNA, 25 bp, Homo sapien
cctctgatgcactcctctaattttg

SEQ ID NO: 5471453 - DNA, 25 bp, Homo sapien
tggctttcttcgattcatattgtgg

SEQ ID NO: 5471454 - DNA, 25 bp, Homo sapien
gacttggcaacgagtgcaggttttt

SEQ ID NO: 5471455 - DNA, 25 bp, Homo sapien
tcatattgtggaaggtgttcttccc

SEQ ID NO: 5471456 - DNA, 25 bp, Homo sapien
cttggcaacgagtgcaggttttttg

SEQ ID NO: 5471457 - DNA, 25 bp, Homo sapien
tcctcccatcagctccaaagagatc

SEQ ID NO: 5471458 - DNA, 25 bp, Homo sapien
tagcctcttcgtttcttcacttttc

SEQ ID NO: 5471459 - DNA, 25 bp, Homo sapien
tcccatcagctccaaagagatcaat

SEQ ID NO: 5471460 - DNA, 25 bp, Homo sapien
tttctcctcccatcagctccaaaga

SEQ ID NO: 5471461 - DNA, 25 bp, Homo sapien
cacaggaccatacttgaccaaagcc

SEQ ID NO: 5471462 - DNA, 25 bp, Homo sapien
tccacaggaccatacttgaccaaag

SEQ ID NO: 5471463 - DNA, 25 bp, Homo sapien
tatccacaggaccatacttgaccaa

SEQ ID NO: 5471464 - DNA, 25 bp, Homo sapien
catatccacaggaccatacttgacc

SEQ ID NO: 5471465 - DNA, 25 bp, Homo sapien
cgaagggcataacacaagtcagcag

SEQ ID NO: 5471466 - DNA, 25 bp, Homo sapien
caacgaagggcataacacaagtcag

SEQ ID NO: 5471467 - DNA, 25 bp, Homo sapien
gaagggcataacacaagtcagcagg

SEQ ID NO: 5471468 - DNA, 25 bp, Homo sapien
tgggccagatgctgcttcaaatact

SEQ ID NO: 5471469 - DNA, 25 bp, Homo sapien
tgtggtctctacagctctagttgat

SEQ ID NO: 5471470 - DNA, 25 bp, Homo sapien
aattgatgtggtctctacagctcta

SEQ ID NO: 5471471 - DNA, 25 bp, Homo sapien
tggtctctacagctctagttgatgt

SEQ ID NO: 5471472 - DNA, 25 bp, Homo sapien
tgatgtggtctctacagctctagtt

SEQ ID NO: 5471473 - DNA, 25 bp, Homo sapien
tgggcccaagccgtctgcctggctt

SEQ ID NO: 5471474 - DNA, 25 bp, Homo sapien
taaaagaagcagtaggctcgagagg

SEQ ID NO: 5471475 - DNA, 25 bp, Homo sapien
aaagaagcagtaggctcgagaggct

SEQ ID NO: 5471476 - DNA, 25 bp, Homo sapien
gcccagttgatctttaacatttctt

SEQ ID NO: 5471477 - DNA, 25 bp, Homo sapien
tgtgcctcgctgaaaacaatgtgtt

SEQ ID NO: 5471478 - DNA, 25 bp, Homo sapien
taaagtatttgacaggtgctaggtg

SEQ ID NO: 5471479 - DNA, 25 bp, Homo sapien
taaaaatacggaaaagaatggcagc

SEQ ID NO: 5471480 - DNA, 25 bp, Homo sapien
gaaacttttgctttatgtgcctcgc

SEQ ID NO: 5471481 - DNA, 25 bp, Homo sapien
aatgatgcagacttcctgtagtaac

SEQ ID NO: 5471482 - DNA, 25 bp, Homo sapien
tgttcaggtgggagtggttcaataa

SEQ ID NO: 5471483 - DNA, 25 bp, Homo sapien
cgatggaactcctgtattttgagag

SEQ ID NO: 5471484 - DNA, 25 bp, Homo sapien
aaaatgggatcatactgtaccttca

SEQ ID NO: 5471485 - DNA, 25 bp, Homo sapien
gaaatgcatagatcgcagagctggg

SEQ ID NO: 5471486 - DNA, 25 bp, Homo sapien
cctgccttgtatagagatagaactt

SEQ ID NO: 5471487 - DNA, 25 bp, Homo sapien
cagaggtgaatgtggtttctaccaa

SEQ ID NO: 5471488 - DNA, 25 bp, Homo sapien
tcaagatcatcaggcctcgttcagt

SEQ ID NO: 5471489 - DNA, 25 bp, Homo sapien
cacctctccagtagatggggctgca

SEQ ID NO: 5471490 - DNA, 25 bp, Homo sapien
ctgcacctctccagtagatggggct

SEQ ID NO: 5471491 - DNA, 25 bp, Homo sapien
tcctgcatttaaacttccacggtta

SEQ ID NO: 5471492 - DNA, 25 bp, Homo sapien
acttccacggttatttgaagtctct

SEQ ID NO: 5471493 - DNA, 25 bp, Homo sapien
catatgtaaaactaggcccctgaga

SEQ ID NO: 5471494 - DNA, 25 bp, Homo sapien
tgataccggttcactcagcccagtg

SEQ ID NO: 5471495 - DNA, 25 bp, Homo sapien
taggtaacgacatgcctccagtttg

SEQ ID NO: 5471496 - DNA, 25 bp, Homo sapien
tcccagatgatccaggttagtgagc

SEQ ID NO: 5471497 - DNA, 25 bp, Homo sapien
ttgggcagcttcacttaacaagcga

SEQ ID NO: 5471498 - DNA, 25 bp, Homo sapien
gcttcacttaacaagcgagagggtg

SEQ ID NO: 5471499 - DNA, 25 bp, Homo sapien
cgagagggtgaactgtgtaagtgat

SEQ ID NO: 5471500 - DNA, 25 bp, Homo sapien
gtaagtgatgtagtgcctttaggaa

SEQ ID NO: 5471501 - DNA, 25 bp, Homo sapien
ctgtttgaaacctgatagggtgact

SEQ ID NO: 5471502 - DNA, 25 bp, Homo sapien
gattcctgcctaggtcatcaccagt

SEQ ID NO: 5471503 - DNA, 25 bp, Homo sapien
tgtgttacaatagtcttgggttggg

SEQ ID NO: 5471504 - DNA, 25 bp, Homo sapien
tcagtcttagaccactccagagttc

SEQ ID NO: 5471505 - DNA, 25 bp, Homo sapien
ggctggagcttatctgatcaccttc

SEQ ID NO: 5471506 - DNA, 25 bp, Homo sapien
aaattttgcgtctccttgcaatgca

SEQ ID NO: 5471507 - DNA, 25 bp, Homo sapien
cctcctactggtgaataaacactga

SEQ ID NO: 5471508 - DNA, 25 bp, Homo sapien
aactggacataagggaaagggctca

SEQ ID NO: 5471509 - DNA, 25 bp, Homo sapien
tgaagtcgtcattccacccagggag

SEQ ID NO: 5471510 - DNA, 25 bp, Homo sapien
tatgtaggcataggcatgattaccg

SEQ ID NO: 5471511 - DNA, 25 bp, Homo sapien
gattaccgtgatgtagagagctata

SEQ ID NO: 5471512 - DNA, 25 bp, Homo sapien
cattgatttcagcaggtaacaaact

SEQ ID NO: 5471513 - DNA, 25 bp, Homo sapien
tggaacctcgggtcaacagagatgc

SEQ ID NO: 5471514 - DNA, 25 bp, Homo sapien
gacccggacactggttagagggcta

SEQ ID NO: 5471515 - DNA, 25 bp, Homo sapien
tcagacggtaggtaggatgtcctcc

SEQ ID NO: 5471516 - DNA, 25 bp, Homo sapien
tctttcctgatagagtacagctgag

SEQ ID NO: 5471517 - DNA, 25 bp, Homo sapien
ttctgaatgacaagtgtatatcaaa

SEQ ID NO: 5471518 - DNA, 25 bp, Homo sapien
ttttagaatgaagactttaaatatc

SEQ ID NO: 5471519 - DNA, 25 bp, Homo sapien
atatcaatactttttctgaatgaca

SEQ ID NO: 5471520 - DNA, 25 bp, Homo sapien
actttttctgaatgacaagtgtata

SEQ ID NO: 5471521 - DNA, 25 bp, Homo sapien
gacattacctgctatcaatatagat

SEQ ID NO: 5471522 - DNA, 25 bp, Homo sapien
gattagcttcagtgaaaacctcctt

SEQ ID NO: 5471523 - DNA, 25 bp, Homo sapien
tgactataccctttccaaacacctg

SEQ ID NO: 5471524 - DNA, 25 bp, Homo sapien
gacaggttccttatgcatttctcct

SEQ ID NO: 5471525 - DNA, 25 bp, Homo sapien
gtaaggcgattgcacttggacagtc

SEQ ID NO: 5471526 - DNA, 25 bp, Homo sapien
caattgtgagttgtgtctccaggga

SEQ ID NO: 5471527 - DNA, 25 bp, Homo sapien
tagcatgaggcctaggagcatttgt

SEQ ID NO: 5471528 - DNA, 25 bp, Homo sapien
gagaatgcagctgtgaaactggtga

SEQ ID NO: 5471529 - DNA, 25 bp, Homo sapien
taggattccccaagcatctcgaaga

SEQ ID NO: 5471530 - DNA, 25 bp, Homo sapien
caacgccagcgcatgtccattagga

SEQ ID NO: 5471531 - DNA, 25 bp, Homo sapien
gatatgcaagacctctttgagcgcc

SEQ ID NO: 5471532 - DNA, 25 bp, Homo sapien
aaagaccaacatcatccaacgccag

SEQ ID NO: 5471533 - DNA, 25 bp, Homo sapien
ctttgacttaggagaggagcaataa

SEQ ID NO: 5471534 - DNA, 25 bp, Homo sapien
cttaggagaggagcaataactttgc

SEQ ID NO: 5471535 - DNA, 25 bp, Homo sapien
taactttgcaattactgctgtccat

SEQ ID NO: 5471536 - DNA, 25 bp, Homo sapien
cctccggtatctttgacttaggaga

SEQ ID NO: 5471537 - DNA, 25 bp, Homo sapien
caagtctagtttgtaggttctcttc

SEQ ID NO: 5471538 - DNA, 25 bp, Homo sapien
ttaatctacaagtctagtttgtagg

SEQ ID NO: 5471539 - DNA, 25 bp, Homo sapien
gataattttaatctacaagtctagt

SEQ ID NO: 5471540 - DNA, 25 bp, Homo sapien
tatgccaaggtaggtcttaaggaaa

SEQ ID NO: 5471541 - DNA, 25 bp, Homo sapien
tgtgcagtgccttagtgaacagtac

SEQ ID NO: 5471542 - DNA, 25 bp, Homo sapien
tgttggaaccctgaaacgtgctgtg

SEQ ID NO: 5471543 - DNA, 25 bp, Homo sapien
tcctgatcagtgtgatgaagtatag

SEQ ID NO: 5471544 - DNA, 25 bp, Homo sapien
gaccaatataatgctacttagaaag

SEQ ID NO: 5471545 - DNA, 25 bp, Homo sapien
caacaaattctcataaatcacccag

SEQ ID NO: 5471546 - DNA, 25 bp, Homo sapien
ccagcaataatttctaacgtaatga

SEQ ID NO: 5471547 - DNA, 25 bp, Homo sapien
gtgcccggccatcacccagcaataa

SEQ ID NO: 5471548 - DNA, 25 bp, Homo sapien
aattctcataaatcacccagcaata

SEQ ID NO: 5471549 - DNA, 25 bp, Homo sapien
accaggtagtgtgcttgaagtcatc

SEQ ID NO: 5471550 - DNA, 25 bp, Homo sapien
agttgtcatttttggatctgggtca

SEQ ID NO: 5471551 - DNA, 25 bp, Homo sapien
gatatgatttgaggtagagcagtca

SEQ ID NO: 5471552 - DNA, 25 bp, Homo sapien
taggagggctttggatacacaagga

SEQ ID NO: 5471553 - DNA, 25 bp, Homo sapien
ttctgagcaagctgatctcccctgg

SEQ ID NO: 5471554 - DNA, 25 bp, Homo sapien
tctcccggtctgaaagttgcattgc

SEQ ID NO: 5471555 - DNA, 25 bp, Homo sapien
tatccaacaggcagtcagagctctc

SEQ ID NO: 5471556 - DNA, 25 bp, Homo sapien
aaaacaccccatggactgtgactcg

SEQ ID NO: 5471557 - DNA, 25 bp, Homo sapien
ccatggaatctactatacaggagga

SEQ ID NO: 5471558 - DNA, 25 bp, Homo sapien
atctactatacaggaggatgcagtg

SEQ ID NO: 5471559 - DNA, 25 bp, Homo sapien
ctttaagaccttcatccatggaatc

SEQ ID NO: 5471560 - DNA, 25 bp, Homo sapien
gtccatctttaagaccttcatccat

SEQ ID NO: 5471561 - DNA, 25 bp, Homo sapien
gcacccaagacatggaggcagccat

SEQ ID NO: 5471562 - DNA, 25 bp, Homo sapien
cctcttggtaccatggaaaagctcc

SEQ ID NO: 5471563 - DNA, 25 bp, Homo sapien
tggtaccatggaaaagctccaagca

SEQ ID NO: 5471564 - DNA, 25 bp, Homo sapien
gagttctgcactaaactgttcctct

SEQ ID NO: 5471565 - DNA, 25 bp, Homo sapien
gcatatgaaatcagagtaaacacct

SEQ ID NO: 5471566 - DNA, 25 bp, Homo sapien
gctgcacgtaagtactagcctcatt

SEQ ID NO: 5471567 - DNA, 25 bp, Homo sapien
aagaagtaacccttaggcaatgtgg

SEQ ID NO: 5471568 - DNA, 25 bp, Homo sapien
attcgtgggcacatacgtagatgca

SEQ ID NO: 5471569 - DNA, 25 bp, Homo sapien
ctccttgtgcaagatgcttgacagc

SEQ ID NO: 5471570 - DNA, 25 bp, Homo sapien
tccttgtgcaagatgcttgacagca

SEQ ID NO: 5471571 - DNA, 25 bp, Homo sapien
ccttgtgcaagatgcttgacagcat

SEQ ID NO: 5471572 - DNA, 25 bp, Homo sapien
gacgcgtgcaggaaatcgtgtcaat

SEQ ID NO: 5471573 - DNA, 25 bp, Homo sapien
ggccaagacacatgagcactcactg

SEQ ID NO: 5471574 - DNA, 25 bp, Homo sapien
taatcgatacaagatgcagtgacca

SEQ ID NO: 5471575 - DNA, 25 bp, Homo sapien
atcaagctccgtcaggcaagggcgg

SEQ ID NO: 5471576 - DNA, 25 bp, Homo sapien
cagcttcctgcggtccttgttctgg

SEQ ID NO: 5471577 - DNA, 25 bp, Homo sapien
tcatccatcttgtggacacggaaac

SEQ ID NO: 5471578 - DNA, 25 bp, Homo sapien
tggctgcgctgagggtcatccatct

SEQ ID NO: 5471579 - DNA, 25 bp, Homo sapien
cattccttgaggttctgggaccgga

SEQ ID NO: 5471580 - DNA, 25 bp, Homo sapien
tcggcgagctccagcgtcagctcgt

SEQ ID NO: 5471581 - DNA, 25 bp, Homo sapien
agccacgtatgggtgcacgcactgg

SEQ ID NO: 5471582 - DNA, 25 bp, Homo sapien
gctgctgagccacgtatgggtgcac

SEQ ID NO: 5471583 - DNA, 25 bp, Homo sapien
gatgtcggcgagctccagcgtcagc

SEQ ID NO: 5471584 - DNA, 25 bp, Homo sapien
gcacactcccaccaagcccgcagct

SEQ ID NO: 5471585 - DNA, 25 bp, Homo sapien
cactcccaccaagcccgcagctgag

SEQ ID NO: 5471586 - DNA, 25 bp, Homo sapien
ctgcacactcccaccaagcccgcag

SEQ ID NO: 5471587 - DNA, 25 bp, Homo sapien
acactcccaccaagcccgcagctga

SEQ ID NO: 5471588 - DNA, 25 bp, Homo sapien
gggccagtgaggtcatccaacgctt

SEQ ID NO: 5471589 - DNA, 25 bp, Homo sapien
ttgggggccagtgaggtcatccaac

SEQ ID NO: 5471590 - DNA, 25 bp, Homo sapien
agccgggatgtgaacgaaacaaact

SEQ ID NO: 5471591 - DNA, 25 bp, Homo sapien
gaggtcatccaacgcttcatctcac

SEQ ID NO: 5471592 - DNA, 25 bp, Homo sapien
tgagaggacgcctttagcatgtagg

SEQ ID NO: 5471593 - DNA, 25 bp, Homo sapien
cggagctgagtcaaatacctggtac

SEQ ID NO: 5471594 - DNA, 25 bp, Homo sapien
gatgaacacgttggccagcgtctgg

SEQ ID NO: 5471595 - DNA, 25 bp, Homo sapien
gtggcctcccggtcatctgcgttct

SEQ ID NO: 5471596 - DNA, 25 bp, Homo sapien
gaggtaaatttcgtggaagagcttc

SEQ ID NO: 5471597 - DNA, 25 bp, Homo sapien
agatcaccagcaggtcgttgaacag

SEQ ID NO: 5471598 - DNA, 25 bp, Homo sapien
tggaatctgccggcagatcaccagc

SEQ ID NO: 5471599 - DNA, 25 bp, Homo sapien
caggaagaggtaaatttcgtggaag

SEQ ID NO: 5471600 - DNA, 25 bp, Homo sapien
ggctgtgcccacaatgtccctcccc

SEQ ID NO: 5471601 - DNA, 25 bp, Homo sapien
cagggctgcgtctgtcacattccct

SEQ ID NO: 5471602 - DNA, 25 bp, Homo sapien
ctgtgcccacaatgtccctccccag

SEQ ID NO: 5471603 - DNA, 25 bp, Homo sapien
ctgcagcggggaaagggcatcaggc

SEQ ID NO: 5471604 - DNA, 25 bp, Homo sapien
tgtatggactgtgttgtgtacccac

SEQ ID NO: 5471605 - DNA, 25 bp, Homo sapien
acccctgtgggcatgagtgtgctat

SEQ ID NO: 5471606 - DNA, 25 bp, Homo sapien
tgagcttaaagttatgtgcacgtgc

SEQ ID NO: 5471607 - DNA, 25 bp, Homo sapien
agctagtgtctgtcatcattgcccc

SEQ ID NO: 5471608 - DNA, 25 bp, Homo sapien
cggctcattttcctgacgccctcgt

SEQ ID NO: 5471609 - DNA, 25 bp, Homo sapien
catctgttccgtgcggctcattttc

SEQ ID NO: 5471610 - DNA, 25 bp, Homo sapien
atcatctgttccgtgcggctcattt

SEQ ID NO: 5471611 - DNA, 25 bp, Homo sapien
tgacgccctcgttgcatgccttcac

SEQ ID NO: 5471612 - DNA, 25 bp, Homo sapien
tccagctccttgtgagcatccaaag

SEQ ID NO: 5471613 - DNA, 25 bp, Homo sapien
gagcatccaaagcagtgcactcccg

SEQ ID NO: 5471614 - DNA, 25 bp, Homo sapien
gtgcactcccgctcagacctctctt

SEQ ID NO: 5471615 - DNA, 25 bp, Homo sapien
actcccgctcagacctctcttctac

SEQ ID NO: 5471616 - DNA, 25 bp, Homo sapien
tctataccgtccacttcaccagccc

SEQ ID NO: 5471617 - DNA, 25 bp, Homo sapien
agggcatcagtagacagggccccag

SEQ ID NO: 5471618 - DNA, 25 bp, Homo sapien
gggccacagctgcactctataccgt

SEQ ID NO: 5471619 - DNA, 25 bp, Homo sapien
ccagggcatcagtagacagggcccc

SEQ ID NO: 5471620 - DNA, 25 bp, Homo sapien
tgcgcgatcagctcccggaaagctg

SEQ ID NO: 5471621 - DNA, 25 bp, Homo sapien
gaccaacagcttgaggcgtgtgatc

SEQ ID NO: 5471622 - DNA, 25 bp, Homo sapien
cctgcacttggggtcgagctctagc

SEQ ID NO: 5471623 - DNA, 25 bp, Homo sapien
tggaccaacagcttgaggcgtgtga

SEQ ID NO: 5471624 - DNA, 25 bp, Homo sapien
tcagagatgacgatgttctcctcca

SEQ ID NO: 5471625 - DNA, 25 bp, Homo sapien
tagacagagaagtggtcggccgcat

SEQ ID NO: 5471626 - DNA, 25 bp, Homo sapien
gctcctggtaggtctgattgctgac

SEQ ID NO: 5471627 - DNA, 25 bp, Homo sapien
gctgcttataggtccgctcctggta

SEQ ID NO: 5471628 - DNA, 25 bp, Homo sapien
cagaaggcgctgccacgaaggggtg

SEQ ID NO: 5471629 - DNA, 25 bp, Homo sapien
gcgctgccacgaaggggtgaggggg

SEQ ID NO: 5471630 - DNA, 25 bp, Homo sapien
aggcgctgccacgaaggggtgaggg

SEQ ID NO: 5471631 - DNA, 25 bp, Homo sapien
gaaggcgctgccacgaaggggtgag

SEQ ID NO: 5471632 - DNA, 25 bp, Homo sapien
ggacgccgggggacgtgactggcca

SEQ ID NO: 5471633 - DNA, 25 bp, Homo sapien
ggatgctcagcgcagagctttgtgt

SEQ ID NO: 5471634 - DNA, 25 bp, Homo sapien
atgctcagcgcagagctttgtgtgg

SEQ ID NO: 5471635 - DNA, 25 bp, Homo sapien
agcaggatgctcagcgcagagcttt

SEQ ID NO: 5471636 - DNA, 25 bp, Homo sapien
ggttcagactcttgtagtaggacgc

SEQ ID NO: 5471637 - DNA, 25 bp, Homo sapien
tagtaggacgcctcggaagtgacca

SEQ ID NO: 5471638 - DNA, 25 bp, Homo sapien
catgaagtgggacacgagcaggttc

SEQ ID NO: 5471639 - DNA, 25 bp, Homo sapien
cggacgggtgcaggatcttccttat

SEQ ID NO: 5471640 - DNA, 25 bp, Homo sapien
agttggccttccacgaaggcgctag

SEQ ID NO: 5471641 - DNA, 25 bp, Homo sapien
ggccttccacgaaggcgctagcctt

SEQ ID NO: 5471642 - DNA, 25 bp, Homo sapien
ttggccttccacgaaggcgctagcc

SEQ ID NO: 5471643 - DNA, 25 bp, Homo sapien
gccttccacgaaggcgctagccttg

SEQ ID NO: 5471644 - DNA, 25 bp, Homo sapien
cacagctgccaagggtggcttggcc

SEQ ID NO: 5471645 - DNA, 25 bp, Homo sapien
ctgagcccgcacagctgccaagggt

SEQ ID NO: 5471646 - DNA, 25 bp, Homo sapien
agctgccaagggtggcttggcccat

SEQ ID NO: 5471647 - DNA, 25 bp, Homo sapien
gcacagctgccaagggtggcttggc

SEQ ID NO: 5471648 - DNA, 25 bp, Homo sapien
ttgagacagcgacggtcagagacga

SEQ ID NO: 5471649 - DNA, 25 bp, Homo sapien
acagcgacggtcagagacgagacgc

SEQ ID NO: 5471650 - DNA, 25 bp, Homo sapien
gacgagacgctgaaatgagcctgtg

SEQ ID NO: 5471651 - DNA, 25 bp, Homo sapien
gacggtcagagacgagacgctgaaa

SEQ ID NO: 5471652 - DNA, 25 bp, Homo sapien
ctctgggccgtgcattccagcctga

SEQ ID NO: 5471653 - DNA, 25 bp, Homo sapien
tatgatccagggttcgccgtggacc

SEQ ID NO: 5471654 - DNA, 25 bp, Homo sapien
gccgtggacctctgggccgtgcatt

SEQ ID NO: 5471655 - DNA, 25 bp, Homo sapien
cacggtctccttatgatccagggtt

SEQ ID NO: 5471656 - DNA, 25 bp, Homo sapien
tatctccagatttgatgtgcttatg

SEQ ID NO: 5471657 - DNA, 25 bp, Homo sapien
cctagcagtatgaaattttggcccc

SEQ ID NO: 5471658 - DNA, 25 bp, Homo sapien
tatctagatggtaatagtgtactcc

SEQ ID NO: 5471659 - DNA, 25 bp, Homo sapien
taccttaattcacggtgagacagat

SEQ ID NO: 5471660 - DNA, 25 bp, Homo sapien
ctgagggacttccttcagagacccc

SEQ ID NO: 5471661 - DNA, 25 bp, Homo sapien
aaagagatatggcagacctccgcca

SEQ ID NO: 5471662 - DNA, 25 bp, Homo sapien
ggccagagacacgaatcccagattt

SEQ ID NO: 5471663 - DNA, 25 bp, Homo sapien
cgaagttcagacagccccaaaagaa

SEQ ID NO: 5471664 - DNA, 25 bp, Homo sapien
cctcgggctgtaggatctcaagcac

SEQ ID NO: 5471665 - DNA, 25 bp, Homo sapien
ccgctgctccggatctcgggaagat

SEQ ID NO: 5471666 - DNA, 25 bp, Homo sapien
cccgctgctccggatctcgggaaga

SEQ ID NO: 5471667 - DNA, 25 bp, Homo sapien
gtaggatctcaagcaccccgctgct

SEQ ID NO: 5471668 - DNA, 25 bp, Homo sapien
gagtgggggttactgagcaggcaga

SEQ ID NO: 5471669 - DNA, 25 bp, Homo sapien
tgggggttactgagcaggcagatct

SEQ ID NO: 5471670 - DNA, 25 bp, Homo sapien
aaccttgagtgggggttactgagca

SEQ ID NO: 5471671 - DNA, 25 bp, Homo sapien
gggttactgagcaggcagatctggg

SEQ ID NO: 5471672 - DNA, 25 bp, Homo sapien
ttcttcctcctccggggtgtcctca

SEQ ID NO: 5471673 - DNA, 25 bp, Homo sapien
tcctcctcttcttcttcctcctccg

SEQ ID NO: 5471674 - DNA, 25 bp, Homo sapien
tcttcctcctccggggtgtcctcac

SEQ ID NO: 5471675 - DNA, 25 bp, Homo sapien
ctcttcttcttcctcctccggggtg

SEQ ID NO: 5471676 - DNA, 25 bp, Homo sapien
ggagagtcgatttatctcggtattc

SEQ ID NO: 5471677 - DNA, 25 bp, Homo sapien
tctcggtattcctgatacaggagcc

SEQ ID NO: 5471678 - DNA, 25 bp, Homo sapien
tatctcggtattcctgatacaggag

SEQ ID NO: 5471679 - DNA, 25 bp, Homo sapien
gatttcttggagagtcgatttatct

SEQ ID NO: 5471680 - DNA, 25 bp, Homo sapien
tgtaaaggcttgcacttgcaattac

SEQ ID NO: 5471681 - DNA, 25 bp, Homo sapien
ggaactggcaggctccacttggagc

SEQ ID NO: 5471682 - DNA, 25 bp, Homo sapien
ccattaatcatcttaggaagctgcc

SEQ ID NO: 5471683 - DNA, 25 bp, Homo sapien
aagaattgctgaactcacagagctg

SEQ ID NO: 5471684 - DNA, 25 bp, Homo sapien
gatccgcttagcacagacctcaagt

SEQ ID NO: 5471685 - DNA, 25 bp, Homo sapien
ctttccctgtgcaaagttggccacc

SEQ ID NO: 5471686 - DNA, 25 bp, Homo sapien
cctgtgcaaagttggccaccgcctc

SEQ ID NO: 5471687 - DNA, 25 bp, Homo sapien
tgcaaagttggccaccgcctcctct

SEQ ID NO: 5471688 - DNA, 25 bp, Homo sapien
ttccctgtgcaaagttggccaccgc

SEQ ID NO: 5471689 - DNA, 25 bp, Homo sapien
actctgctcccaacagccggtttgg

SEQ ID NO: 5471690 - DNA, 25 bp, Homo sapien
tccttgatgggggatagtggagtcc

SEQ ID NO: 5471691 - DNA, 25 bp, Homo sapien
ccaacagccggtttggcttccaggt

SEQ ID NO: 5471692 - DNA, 25 bp, Homo sapien
tgatgggggatagtggagtcctccc

SEQ ID NO: 5471693 - DNA, 25 bp, Homo sapien
gtatgaaacacaacggcatcccatg

SEQ ID NO: 5471694 - DNA, 25 bp, Homo sapien
acacaacggcatcccatgagcagga

SEQ ID NO: 5471695 - DNA, 25 bp, Homo sapien
ccatgtcagacgcagtccttcgtat

SEQ ID NO: 5471696 - DNA, 25 bp, Homo sapien
cagtccttcgtatgaaacacaacgg

SEQ ID NO: 5471697 - DNA, 25 bp, Homo sapien
atccgcagggcctcggtgagcgtgg

SEQ ID NO: 5471698 - DNA, 25 bp, Homo sapien
cgtggtggggctgtcggccagggcc

SEQ ID NO: 5471699 - DNA, 25 bp, Homo sapien
tttctccaggagtcggcgggaatgg

SEQ ID NO: 5471700 - DNA, 25 bp, Homo sapien
agggccggccactcctcgggcgtgg

SEQ ID NO: 5471701 - DNA, 25 bp, Homo sapien
tttaagcaaggattcacctcggctg

SEQ ID NO: 5471702 - DNA, 25 bp, Homo sapien
ttaagcaaggattcacctcggctgg

SEQ ID NO: 5471703 - DNA, 25 bp, Homo sapien
ttttaagcaaggattcacctcggct

SEQ ID NO: 5471704 - DNA, 25 bp, Homo sapien
ctcccgggcaggcggtggaaacttg

SEQ ID NO: 5471705 - DNA, 25 bp, Homo sapien
ggcaggcggtggaaacttggcgcac

SEQ ID NO: 5471706 - DNA, 25 bp, Homo sapien
cagcccgcccaaacctccatggttt

SEQ ID NO: 5471707 - DNA, 25 bp, Homo sapien
agctcccgggcaggcggtggaaact

SEQ ID NO: 5471708 - DNA, 25 bp, Homo sapien
gcgcccctcgccgtcactcgacccc

SEQ ID NO: 5471709 - DNA, 25 bp, Homo sapien
gcgccgctccgacagcccgacgggt

SEQ ID NO: 5471710 - DNA, 25 bp, Homo sapien
ccacacggcgcggaaaggggatgcc

SEQ ID NO: 5471711 - DNA, 25 bp, Homo sapien
ccaggaagccactcggcgcccctcg

SEQ ID NO: 5471712 - DNA, 25 bp, Homo sapien
aactgtcgtggtccacggcgcaggc

SEQ ID NO: 5471713 - DNA, 25 bp, Homo sapien
cgagtcgcgcgcgtcgctttccgag

SEQ ID NO: 5471714 - DNA, 25 bp, Homo sapien
ttccgaggtggaactgtcgtggtcc

SEQ ID NO: 5471715 - DNA, 25 bp, Homo sapien
cgcgcgtcgctttccgaggtggaac

SEQ ID NO: 5471716 - DNA, 25 bp, Homo sapien
ggggtcgcagcgcgcgcggctcgac

SEQ ID NO: 5471717 - DNA, 25 bp, Homo sapien
gggtcgggggcgactagcgggctgc

SEQ ID NO: 5471718 - DNA, 25 bp, Homo sapien
gcgactagcgggctgcggagcgggg

SEQ ID NO: 5471719 - DNA, 25 bp, Homo sapien
agcgcgcgcggctcgaccggagctg

SEQ ID NO: 5471720 - DNA, 25 bp, Homo sapien
caaaactggattcggtgttttagtg

SEQ ID NO: 5471721 - DNA, 25 bp, Homo sapien
ggtggacagtcatgcttttggttaa

SEQ ID NO: 5471722 - DNA, 25 bp, Homo sapien
tttagtgaagtgaagagtgttttgt

SEQ ID NO: 5471723 - DNA, 25 bp, Homo sapien
tggtggacagtcatgcttttggtta

SEQ ID NO: 5471724 - DNA, 25 bp, Homo sapien
gataactcgtggataagatgctgcg

SEQ ID NO: 5471725 - DNA, 25 bp, Homo sapien
tcaatagaagcatcctgaagcaagg

SEQ ID NO: 5471726 - DNA, 25 bp, Homo sapien
tagccttcatggaaacgaattgcct

SEQ ID NO: 5471727 - DNA, 25 bp, Homo sapien
gatcttaggatacatagggtctggg

SEQ ID NO: 5471728 - DNA, 25 bp, Homo sapien
ttagaggccggcaccttcagctttt

SEQ ID NO: 5471729 - DNA, 25 bp, Homo sapien
tagaggccggcaccttcagcttttt

SEQ ID NO: 5471730 - DNA, 25 bp, Homo sapien
agaggccggcaccttcagctttttg

SEQ ID NO: 5471731 - DNA, 25 bp, Homo sapien
acaacagctcccagatggacagaca

SEQ ID NO: 5471732 - DNA, 25 bp, Homo sapien
gctcccagatggacagacaccagga

SEQ ID NO: 5471733 - DNA, 25 bp, Homo sapien
ctcccagatggacagacaccaggac

SEQ ID NO: 5471734 - DNA, 25 bp, Homo sapien
cggaacaacagctcccagatggaca

SEQ ID NO: 5471735 - DNA, 25 bp, Homo sapien
taacatgacaccctcgtaaccctgt

SEQ ID NO: 5471736 - DNA, 25 bp, Homo sapien
tagcacgggcaaccaaaagttatta

SEQ ID NO: 5471737 - DNA, 25 bp, Homo sapien
tttcccagaccagcattcctcatga

SEQ ID NO: 5471738 - DNA, 25 bp, Homo sapien
tgcagcaatgacctctgatgcatct

SEQ ID NO: 5471739 - DNA, 25 bp, Homo sapien
tgctccaggggatattcaaggtcag

SEQ ID NO: 5471740 - DNA, 25 bp, Homo sapien
attctgctccaggggatattcaagg

SEQ ID NO: 5471741 - DNA, 25 bp, Homo sapien
ctccaggggatattcaaggtcaggg

SEQ ID NO: 5471742 - DNA, 25 bp, Homo sapien
tctgctccaggggatattcaaggtc

SEQ ID NO: 5471743 - DNA, 25 bp, Homo sapien
cgtgacagctgtccctgatactgac

SEQ ID NO: 5471744 - DNA, 25 bp, Homo sapien
actgatgactccagttggatgtaag

SEQ ID NO: 5471745 - DNA, 25 bp, Homo sapien
tgtaagggaacagccgtgacagctg

SEQ ID NO: 5471746 - DNA, 25 bp, Homo sapien
ccagttggatgtaagggaacagccg

SEQ ID NO: 5471747 - DNA, 25 bp, Homo sapien
taattgggatgtggcaatgaggctc

SEQ ID NO: 5471748 - DNA, 25 bp, Homo sapien
tcaggtttcaccttggctggttcat

SEQ ID NO: 5471749 - DNA, 25 bp, Homo sapien
cttttgcgtcttatggagcgattga

SEQ ID NO: 5471750 - DNA, 25 bp, Homo sapien
ggctctttgtcttggatatcctggt

SEQ ID NO: 5471751 - DNA, 25 bp, Homo sapien
cgactggaggtcaatgactttccca

SEQ ID NO: 5471752 - DNA, 25 bp, Homo sapien
actttcccaagcttcactggtttga

SEQ ID NO: 5471753 - DNA, 25 bp, Homo sapien
ttcccaagcttcactggtttgagtg

SEQ ID NO: 5471754 - DNA, 25 bp, Homo sapien
tttctcagcagaacgactggaggtc

SEQ ID NO: 5471755 - DNA, 25 bp, Homo sapien
cacagggcatccgtggagattgtgg

SEQ ID NO: 5471756 - DNA, 25 bp, Homo sapien
ggacacagggcatccgtggagattg

SEQ ID NO: 5471757 - DNA, 25 bp, Homo sapien
gacacagggcatccgtggagattgt

SEQ ID NO: 5471758 - DNA, 25 bp, Homo sapien
agggcatccgtggagattgtggggt

SEQ ID NO: 5471759 - DNA, 25 bp, Homo sapien
gatgggctgcatgaggtactctcca

SEQ ID NO: 5471760 - DNA, 25 bp, Homo sapien
aaagactgatacaagcaggttgcac

SEQ ID NO: 5471761 - DNA, 25 bp, Homo sapien
ggagttcactgtcatgtagcctgaa

SEQ ID NO: 5471762 - DNA, 25 bp, Homo sapien
ggcccagagagcaattgcatccagc

SEQ ID NO: 5471763 - DNA, 25 bp, Homo sapien
tgttcttagaaggtgccccggcttg

SEQ ID NO: 5471764 - DNA, 25 bp, Homo sapien
tgatatgatcatagcccaccgcatg

SEQ ID NO: 5471765 - DNA, 25 bp, Homo sapien
catttttatattgcacagggccctg

SEQ ID NO: 5471766 - DNA, 25 bp, Homo sapien
catggcacacaggaatcagggcact

SEQ ID NO: 5471767 - DNA, 25 bp, Homo sapien
tgtgtccccggctaaatccacaggc

SEQ ID NO: 5471768 - DNA, 25 bp, Homo sapien
tcagagagtgttcctccctcgtccc

SEQ ID NO: 5471769 - DNA, 25 bp, Homo sapien
aggagctcataggagttgggcttcc

SEQ ID NO: 5471770 - DNA, 25 bp, Homo sapien
gcacctgcgagcaggatggtgtgtc

SEQ ID NO: 5471771 - DNA, 25 bp, Homo sapien
cctgccatgtaaataggaagcactt

SEQ ID NO: 5471772 - DNA, 25 bp, Homo sapien
tgggacttggcccaggatctttctc

SEQ ID NO: 5471773 - DNA, 25 bp, Homo sapien
ctgtttcttgcgtgttggtctttcc

SEQ ID NO: 5471774 - DNA, 25 bp, Homo sapien
gccatgtaaataggaagcacttgga

SEQ ID NO: 5471775 - DNA, 25 bp, Homo sapien
tggaaggacccctggacaagaagct

SEQ ID NO: 5471776 - DNA, 25 bp, Homo sapien
tctgtttcttgtccacggtggaagg

SEQ ID NO: 5471777 - DNA, 25 bp, Homo sapien
gtggaaggacccctggacaagaagc

SEQ ID NO: 5471778 - DNA, 25 bp, Homo sapien
ggctcacaccagaaagccggccaag

SEQ ID NO: 5471779 - DNA, 25 bp, Homo sapien
ccaaggggctttatccaaggctgac

SEQ ID NO: 5471780 - DNA, 25 bp, Homo sapien
tggcccaggtcgtagccagagctac

SEQ ID NO: 5471781 - DNA, 25 bp, Homo sapien
ttcatatctgatattgacagtcagt

SEQ ID NO: 5471782 - DNA, 25 bp, Homo sapien
cagaagcagaggagtacaggaccca

SEQ ID NO: 5471783 - DNA, 25 bp, Homo sapien
tcagaagcagaggagtacaggaccc

SEQ ID NO: 5471784 - DNA, 25 bp, Homo sapien
agaagcagaggagtacaggacccat

SEQ ID NO: 5471785 - DNA, 25 bp, Homo sapien
tggtgcctcgcttcagccaaacctg

SEQ ID NO: 5471786 - DNA, 25 bp, Homo sapien
tcgcttcagccaaacctgggtaaag

SEQ ID NO: 5471787 - DNA, 25 bp, Homo sapien
tcagccaaacctgggtaaagcagcc

SEQ ID NO: 5471788 - DNA, 25 bp, Homo sapien
cccggagatttgctggctgcacagg

SEQ ID NO: 5471789 - DNA, 25 bp, Homo sapien
tgtcagacgaggaatagcccgctgg

SEQ ID NO: 5471790 - DNA, 25 bp, Homo sapien
aatagcccgctggaccctcaagctg

SEQ ID NO: 5471791 - DNA, 25 bp, Homo sapien
ccagctcccaataatactcggccag

SEQ ID NO: 5471792 - DNA, 25 bp, Homo sapien
tgggtcttgtctttgagtagctgtc

SEQ ID NO: 5471793 - DNA, 25 bp, Homo sapien
tgttccgtcacaagcatccgggagg

SEQ ID NO: 5471794 - DNA, 25 bp, Homo sapien
tatctccgggcgacatggcttttgg

SEQ ID NO: 5471795 - DNA, 25 bp, Homo sapien
gagccattccggtgagttctaaaga

SEQ ID NO: 5471796 - DNA, 25 bp, Homo sapien
gacggtggctgtcacgtatctccgg

SEQ ID NO: 5471797 - DNA, 25 bp, Homo sapien
tcatgtctgatcagctcttctataa

SEQ ID NO: 5471798 - DNA, 25 bp, Homo sapien
cttgagttgaggacttgacggtgaa

SEQ ID NO: 5471799 - DNA, 25 bp, Homo sapien
tgatcagctcttctataaagttggg

SEQ ID NO: 5471800 - DNA, 25 bp, Homo sapien
tgaatcgtttggtcagctgttgagg

SEQ ID NO: 5471801 - DNA, 25 bp, Homo sapien
tggagagcattgtcatccttgtccc

SEQ ID NO: 5471802 - DNA, 25 bp, Homo sapien
ctgatggagagcattgtcatccttg

SEQ ID NO: 5471803 - DNA, 25 bp, Homo sapien
catccaaatacccagagcacctgct

SEQ ID NO: 5471804 - DNA, 25 bp, Homo sapien
tggattcttaattgtggacctgagt

SEQ ID NO: 5471805 - DNA, 25 bp, Homo sapien
tggttctctgtaattgaccttttta

SEQ ID NO: 5471806 - DNA, 25 bp, Homo sapien
tatttgggcatcgtaggtgtttcca

SEQ ID NO: 5471807 - DNA, 25 bp, Homo sapien
tcaccctcgtctatgcgcgttgctg

SEQ ID NO: 5471808 - DNA, 25 bp, Homo sapien
tattattggcgtgggcattgttgca

SEQ ID NO: 5471809 - DNA, 25 bp, Homo sapien
tttaatagagacgagttctcattat

SEQ ID NO: 5471810 - DNA, 25 bp, Homo sapien
taatagagacgagttctcattatgt

SEQ ID NO: 5471811 - DNA, 25 bp, Homo sapien
acctcagtgtcccaaagggctgaga

SEQ ID NO: 5471812 - DNA, 25 bp, Homo sapien
cagtgtcccaaagggctgagattgt

SEQ ID NO: 5471813 - DNA, 25 bp, Homo sapien
acccacgtggggccctatgattctt

SEQ ID NO: 5471814 - DNA, 25 bp, Homo sapien
cttcacccacgtggggccctatgat

SEQ ID NO: 5471815 - DNA, 25 bp, Homo sapien
gagaggaggtggttaaaggttgaga

SEQ ID NO: 5471816 - DNA, 25 bp, Homo sapien
gaggtggttaaaggttgagaccatc

SEQ ID NO: 5471817 - DNA, 25 bp, Homo sapien
atcatgtcccggctgacttgggcct

SEQ ID NO: 5471818 - DNA, 25 bp, Homo sapien
tgctaacgggcggaggcgttcactc

SEQ ID NO: 5471819 - DNA, 25 bp, Homo sapien
acggcagaaatccacgtgtccgagg

SEQ ID NO: 5471820 - DNA, 25 bp, Homo sapien
cgccggtaaccattgcggggatcat

SEQ ID NO: 5471821 - DNA, 25 bp, Homo sapien
cagaacactatgtgatgcagccaaa

SEQ ID NO: 5471822 - DNA, 25 bp, Homo sapien
agtaaatagaaggccgggcctagtg

SEQ ID NO: 5471823 - DNA, 25 bp, Homo sapien
cagagtggagtaatcaaaccactgc

SEQ ID NO: 5471824 - DNA, 25 bp, Homo sapien
tcaaaccactgcatatcagaacact

SEQ ID NO: 5471825 - DNA, 25 bp, Homo sapien
ggctctttgggccacacaactgtca

SEQ ID NO: 5471826 - DNA, 25 bp, Homo sapien
tgtattggacagagcaggttctcac

SEQ ID NO: 5471827 - DNA, 25 bp, Homo sapien
caagcgttttccatagaaggccaga

SEQ ID NO: 5471828 - DNA, 25 bp, Homo sapien
caatccagaagtcaataggcatggc

SEQ ID NO: 5471829 - DNA, 25 bp, Homo sapien
ctgaaaagctactgattagttccca

SEQ ID NO: 5471830 - DNA, 25 bp, Homo sapien
cattacttacgaagtgagaccttaa

SEQ ID NO: 5471831 - DNA, 25 bp, Homo sapien
gcctgaatgcttattctgaaaagct

SEQ ID NO: 5471832 - DNA, 25 bp, Homo sapien
ttttaaaacactgcgaattcccaca

SEQ ID NO: 5471833 - DNA, 25 bp, Homo sapien
tccttctccaactgaggtgggccca

SEQ ID NO: 5471834 - DNA, 25 bp, Homo sapien
ccagcagggtcaaagcggttcgaaa

SEQ ID NO: 5471835 - DNA, 25 bp, Homo sapien
tgctagagcggcctttgtcactgag

SEQ ID NO: 5471836 - DNA, 25 bp, Homo sapien
caaaagggcattttgtgagggcctg

SEQ ID NO: 5471837 - DNA, 25 bp, Homo sapien
tgcgctgcgccacacgtgggttcgt

SEQ ID NO: 5471838 - DNA, 25 bp, Homo sapien
aactgctccatgagaagggagagtc

SEQ ID NO: 5471839 - DNA, 25 bp, Homo sapien
cacacatgcgagtgatggtcctggg

SEQ ID NO: 5471840 - DNA, 25 bp, Homo sapien
aacttagtctagtgtcagtcccaga

SEQ ID NO: 5471841 - DNA, 25 bp, Homo sapien
cagctcgctcttggtacttgggacc

SEQ ID NO: 5471842 - DNA, 25 bp, Homo sapien
cgttgagggcgccattctgaagaaa

SEQ ID NO: 5471843 - DNA, 25 bp, Homo sapien
tcactgcctgtgagacttagcacca

SEQ ID NO: 5471844 - DNA, 25 bp, Homo sapien
gaaaggaactgcagcgccgatttga

SEQ ID NO: 5471845 - DNA, 25 bp, Homo sapien
ttccggcatggctaggctgagagca

SEQ ID NO: 5471846 - DNA, 25 bp, Homo sapien
taatgtagggagctaaatccagtgg

SEQ ID NO: 5471847 - DNA, 25 bp, Homo sapien
tttgctgttgctcccgaaagccgtg

SEQ ID NO: 5471848 - DNA, 25 bp, Homo sapien
gtgaatgcagaagggaatgcacccc

SEQ ID NO: 5471849 - DNA, 25 bp, Homo sapien
ccttaatcggggtggggatcatgtt

SEQ ID NO: 5471850 - DNA, 25 bp, Homo sapien
aaccttaatcggggtggggatcatg

SEQ ID NO: 5471851 - DNA, 25 bp, Homo sapien
gatcatgttggtcaccaaggagatg

SEQ ID NO: 5471852 - DNA, 25 bp, Homo sapien
ggatcatgttggtcaccaaggagat

SEQ ID NO: 5471853 - DNA, 25 bp, Homo sapien
tatttctttacctcgaggatgggag

SEQ ID NO: 5471854 - DNA, 25 bp, Homo sapien
gaggagctttcagaggagctatttc

SEQ ID NO: 5471855 - DNA, 25 bp, Homo sapien
tctgtttggctgcttgtgtgtactg

SEQ ID NO: 5471856 - DNA, 25 bp, Homo sapien
tgggagaaccgcgaaacacaaatgg

SEQ ID NO: 5471857 - DNA, 25 bp, Homo sapien
cagggcctgtgaacacacctgaagc

SEQ ID NO: 5471858 - DNA, 25 bp, Homo sapien
tgaagcctccccatcactgactttg

SEQ ID NO: 5471859 - DNA, 25 bp, Homo sapien
tcccctcagggcctgtgaacacacc

SEQ ID NO: 5471860 - DNA, 25 bp, Homo sapien
ccatcactgactttgctcttcacca

SEQ ID NO: 5471861 - DNA, 25 bp, Homo sapien
gacgcttccggctacaggctggcgt

SEQ ID NO: 5471862 - DNA, 25 bp, Homo sapien
ggtcttccggccctctcgaaaatca

SEQ ID NO: 5471863 - DNA, 25 bp, Homo sapien
gttgcttcatgctgcaggctgcggc

SEQ ID NO: 5471864 - DNA, 25 bp, Homo sapien
tcgaaaatcatttccggcatgagcc

SEQ ID NO: 5471865 - DNA, 25 bp, Homo sapien
gcagcaagtgacatgtcgtcgggcc

SEQ ID NO: 5471866 - DNA, 25 bp, Homo sapien
gcaagtgacatgtcgtcgggcctcc

SEQ ID NO: 5471867 - DNA, 25 bp, Homo sapien
aagtgacatgtcgtcgggcctccgc

SEQ ID NO: 5471868 - DNA, 25 bp, Homo sapien
ccggggcagcaagtgacatgtcgtc

SEQ ID NO: 5471869 - DNA, 25 bp, Homo sapien
agcgccacatctcggagcaactgag

SEQ ID NO: 5471870 - DNA, 25 bp, Homo sapien
catctcggagcaactgaggcgccgg

SEQ ID NO: 5471871 - DNA, 25 bp, Homo sapien
ctggaagcgccacatctcggagcaa

SEQ ID NO: 5471872 - DNA, 25 bp, Homo sapien
cagagacaggcgttcgaggagatca

SEQ ID NO: 5471873 - DNA, 25 bp, Homo sapien
gaaacggtcgttgactttcagtcgc

SEQ ID NO: 5471874 - DNA, 25 bp, Homo sapien
tctcaatgcactggaacgggtggcc

SEQ ID NO: 5471875 - DNA, 25 bp, Homo sapien
taaatcccagtagctcatacaatgc

SEQ ID NO: 5471876 - DNA, 25 bp, Homo sapien
tttcagtcgcagaattaacattgcc

SEQ ID NO: 5471877 - DNA, 25 bp, Homo sapien
actctgttattccttctgcatggcc

SEQ ID NO: 5471878 - DNA, 25 bp, Homo sapien
agactctgttattccttctgcatgg

SEQ ID NO: 5471879 - DNA, 25 bp, Homo sapien
caaaagactctgttattccttctgc

SEQ ID NO: 5471880 - DNA, 25 bp, Homo sapien
aaagactctgttattccttctgcat

SEQ ID NO: 5471881 - DNA, 25 bp, Homo sapien
ctttagtgcaagaagcctaggctca

SEQ ID NO: 5471882 - DNA, 25 bp, Homo sapien
ttttccagggaaatgggttcgctgc

SEQ ID NO: 5471883 - DNA, 25 bp, Homo sapien
tgtatcgatctgcagacacccagaa

SEQ ID NO: 5471884 - DNA, 25 bp, Homo sapien
gcagcgccatctttccgtttcaggg

SEQ ID NO: 5471885 - DNA, 25 bp, Homo sapien
cagcagagaggcattcacttgtggt

SEQ ID NO: 5471886 - DNA, 25 bp, Homo sapien
tggtggctcagattcctgacacaca

SEQ ID NO: 5471887 - DNA, 25 bp, Homo sapien
acttgtggtggctcagattcctgac

SEQ ID NO: 5471888 - DNA, 25 bp, Homo sapien
aactgccgcagcagagaggcattca

SEQ ID NO: 5471889 - DNA, 25 bp, Homo sapien
gttgctgagtgtaccaaatcctgca

SEQ ID NO: 5471890 - DNA, 25 bp, Homo sapien
cacaggacgttttgtgtggacacgg

SEQ ID NO: 5471891 - DNA, 25 bp, Homo sapien
gatgaagaaggtgctcttaggctcc

SEQ ID NO: 5471892 - DNA, 25 bp, Homo sapien
caaatcctgcagaactacctgagtg

SEQ ID NO: 5471893 - DNA, 25 bp, Homo sapien
ttccatcgtctaacgtggatggcac

SEQ ID NO: 5471894 - DNA, 25 bp, Homo sapien
gttccatcgtctaacgtggatggca

SEQ ID NO: 5471895 - DNA, 25 bp, Homo sapien
aaaatcttgatcaggatcctcctgc

SEQ ID NO: 5471896 - DNA, 25 bp, Homo sapien
tcttgatcaggatcctcctgcacaa

SEQ ID NO: 5471897 - DNA, 25 bp, Homo sapien
cctgcacaagacttgaccttctgaa

SEQ ID NO: 5471898 - DNA, 25 bp, Homo sapien
aatcttgatcaggatcctcctgcac

SEQ ID NO: 5471899 - DNA, 25 bp, Homo sapien
aagatagtcacttgaggagatgtca

SEQ ID NO: 5471900 - DNA, 25 bp, Homo sapien
tctatattggtagtgaaatgccgtt

SEQ ID NO: 5471901 - DNA, 25 bp, Homo sapien
gccgtttaaacattagaatgagccc

SEQ ID NO: 5471902 - DNA, 25 bp, Homo sapien
catggtgtgggattaagatgctttc

SEQ ID NO: 5471903 - DNA, 25 bp, Homo sapien
cctctgcaaggctgatggtcccgct

SEQ ID NO: 5471904 - DNA, 25 bp, Homo sapien
aaggctgatggtcccgcttagtgta

SEQ ID NO: 5471905 - DNA, 25 bp, Homo sapien
cttagtgtaatttcttcgctgagca

SEQ ID NO: 5471906 - DNA, 25 bp, Homo sapien
gatggtcccgcttagtgtaatttct

SEQ ID NO: 5471907 - DNA, 25 bp, Homo sapien
tcagctttggctgggaggatcaaca

SEQ ID NO: 5471908 - DNA, 25 bp, Homo sapien
atacgttcccagctctgcgtctctt

SEQ ID NO: 5471909 - DNA, 25 bp, Homo sapien
ctccagggcggctcttcatgcagct

SEQ ID NO: 5471910 - DNA, 25 bp, Homo sapien
ggagaatccaactggctcagctttg

SEQ ID NO: 5471911 - DNA, 25 bp, Homo sapien
tggagatgcataggctctggtccat

SEQ ID NO: 5471912 - DNA, 25 bp, Homo sapien
tgctgctgatggcacagatactgaa

SEQ ID NO: 5471913 - DNA, 25 bp, Homo sapien
catgagtagggtacatttgccacac

SEQ ID NO: 5471914 - DNA, 25 bp, Homo sapien
aattgacgctctcggttctggtggc

SEQ ID NO: 5471915 - DNA, 25 bp, Homo sapien
tatttgtgctatccagcgtggcagc

SEQ ID NO: 5471916 - DNA, 25 bp, Homo sapien
ggatcccatctaggaacccacgtga

SEQ ID NO: 5471917 - DNA, 25 bp, Homo sapien
tcagccgttcccttcaccgtgggag

SEQ ID NO: 5471918 - DNA, 25 bp, Homo sapien
gtcagcctttgatacctgcgatggg

SEQ ID NO: 5471919 - DNA, 25 bp, Homo sapien
gcagctctggcagatccggttggca

SEQ ID NO: 5471920 - DNA, 25 bp, Homo sapien
tgctgcagtgcgcttttcctccggg

SEQ ID NO: 5471921 - DNA, 25 bp, Homo sapien
ggctctgctgcatgctatcctggaa

SEQ ID NO: 5471922 - DNA, 25 bp, Homo sapien
gaagccatgtaggtctcactgaacc

SEQ ID NO: 5471923 - DNA, 25 bp, Homo sapien
gaggatggttcatctgagcccgaga

SEQ ID NO: 5471924 - DNA, 25 bp, Homo sapien
tcactgaacccagatagggcctcct

SEQ ID NO: 5471925 - DNA, 25 bp, Homo sapien
attcatgtgcaatggccccattttc

SEQ ID NO: 5471926 - DNA, 25 bp, Homo sapien
cttgaattcatgtgcaatggcccca

SEQ ID NO: 5471927 - DNA, 25 bp, Homo sapien
gcaatggccccattttccgtgtcca

SEQ ID NO: 5471928 - DNA, 25 bp, Homo sapien
tgaattcatgtgcaatggccccatt

SEQ ID NO: 5471929 - DNA, 25 bp, Homo sapien
tgttgagtgcctgtctccccgttgc

SEQ ID NO: 5471930 - DNA, 25 bp, Homo sapien
ccccgttgccatagaagcagaatgt

SEQ ID NO: 5471931 - DNA, 25 bp, Homo sapien
taggagtgggcttgctagatcagaa

SEQ ID NO: 5471932 - DNA, 25 bp, Homo sapien
cagggccatcccgttttgcagtcgt

SEQ ID NO: 5471933 - DNA, 25 bp, Homo sapien
tgtagcccagcctggttggcagtgt

SEQ ID NO: 5471934 - DNA, 25 bp, Homo sapien
cagcctggttggcagtgtgagaacc

SEQ ID NO: 5471935 - DNA, 25 bp, Homo sapien
tagcccagcctggttggcagtgtga

SEQ ID NO: 5471936 - DNA, 25 bp, Homo sapien
gttggcagtgtgagaacctgtttca

SEQ ID NO: 5471937 - DNA, 25 bp, Homo sapien
gttgggatgaaatcctcccgttgag

SEQ ID NO: 5471938 - DNA, 25 bp, Homo sapien
agcttgtcaggtaattgtagtggca

SEQ ID NO: 5471939 - DNA, 25 bp, Homo sapien
tgtgcttaggaaccacctgggctct

SEQ ID NO: 5471940 - DNA, 25 bp, Homo sapien
tcccgttgagagaattgtggcagca

SEQ ID NO: 5471941 - DNA, 25 bp, Homo sapien
agaatggggtagagaatagagcaag

SEQ ID NO: 5471942 - DNA, 25 bp, Homo sapien
tgaaccatcgtttgagatagctcac

SEQ ID NO: 5471943 - DNA, 25 bp, Homo sapien
gtgaaccatcgtttgagatagctca

SEQ ID NO: 5471944 - DNA, 25 bp, Homo sapien
tgtgaaccatcgtttgagatagctc

SEQ ID NO: 5471945 - DNA, 25 bp, Homo sapien
gctttggcataggagctttgggaca

SEQ ID NO: 5471946 - DNA, 25 bp, Homo sapien
tcagagttagcaccagactcagggc

SEQ ID NO: 5471947 - DNA, 25 bp, Homo sapien
tcctggtggcagtgcattgaaaacc

SEQ ID NO: 5471948 - DNA, 25 bp, Homo sapien
tcctgctggccgttggtgtcatgaa

SEQ ID NO: 5471949 - DNA, 25 bp, Homo sapien
aggtggtgggtaagttgcaggtagt

SEQ ID NO: 5471950 - DNA, 25 bp, Homo sapien
gggtaagttgcaggtagttcctgaa

SEQ ID NO: 5471951 - DNA, 25 bp, Homo sapien
aggatgaatctgtgggtagtgtttt

SEQ ID NO: 5471952 - DNA, 25 bp, Homo sapien
tggtgggtaagttgcaggtagttcc

SEQ ID NO: 5471953 - DNA, 25 bp, Homo sapien
tgtctctgcggtcctgtacttttgc

SEQ ID NO: 5471954 - DNA, 25 bp, Homo sapien
gttttttcaagaagtgcaatagtag

SEQ ID NO: 5471955 - DNA, 25 bp, Homo sapien
caggaccttgtctctgcggtcctgt

SEQ ID NO: 5471956 - DNA, 25 bp, Homo sapien
gcaatagtagtgtgtttatagatgt

SEQ ID NO: 5471957 - DNA, 25 bp, Homo sapien
tttctctagcgagaagtccagcagc

SEQ ID NO: 5471958 - DNA, 25 bp, Homo sapien
ggtttgtttctctagcgagaagtcc

SEQ ID NO: 5471959 - DNA, 25 bp, Homo sapien
tttgtttctctagcgagaagtccag

SEQ ID NO: 5471960 - DNA, 25 bp, Homo sapien
tgtttctctagcgagaagtccagca

SEQ ID NO: 5471961 - DNA, 25 bp, Homo sapien
ccctcctgacatagaggacctggtc

SEQ ID NO: 5471962 - DNA, 25 bp, Homo sapien
ccaaaggtgtgtcggctgtgtccac

SEQ ID NO: 5471963 - DNA, 25 bp, Homo sapien
tttctttgagaatgtgtaccaaagg

SEQ ID NO: 5471964 - DNA, 25 bp, Homo sapien
gaatgtgtaccaaaggtgtgtcggc

SEQ ID NO: 5471965 - DNA, 25 bp, Homo sapien
tagcctgcctcaggattctgtgaga

SEQ ID NO: 5471966 - DNA, 25 bp, Homo sapien
ctcttggtgggacgtcctgcagcct

SEQ ID NO: 5471967 - DNA, 25 bp, Homo sapien
tgttaccctcaagagaattccagca

SEQ ID NO: 5471968 - DNA, 25 bp, Homo sapien
cagcctggccttttgaatccctggg

SEQ ID NO: 5471969 - DNA, 25 bp, Homo sapien
aaagccttaagcctcaactctcaga

SEQ ID NO: 5471970 - DNA, 25 bp, Homo sapien
ctgatgagggaacccgagggaccat

SEQ ID NO: 5471971 - DNA, 25 bp, Homo sapien
ggaccatcccgtgcttctagcgtgg

SEQ ID NO: 5471972 - DNA, 25 bp, Homo sapien
ggccgcctggagcattccttgatat

SEQ ID NO: 5471973 - DNA, 25 bp, Homo sapien
ggcagtgttacctccgtgcatctca

SEQ ID NO: 5471974 - DNA, 25 bp, Homo sapien
gccgccgatggctgtcaagagcaga

SEQ ID NO: 5471975 - DNA, 25 bp, Homo sapien
tataaagagtgcatcacagagtgag

SEQ ID NO: 5471976 - DNA, 25 bp, Homo sapien
cgtaatactaagaatcaaagcccag

SEQ ID NO: 5471977 - DNA, 25 bp, Homo sapien
ccgcgtgtgtttctggccgtccacg

SEQ ID NO: 5471978 - DNA, 25 bp, Homo sapien
caaagaagctcacagtagcctggga

SEQ ID NO: 5471979 - DNA, 25 bp, Homo sapien
gtacctgcctctctcccgcgtgtgt

SEQ ID NO: 5471980 - DNA, 25 bp, Homo sapien
gcagtggtaaattccgcctcgtgac

SEQ ID NO: 5471981 - DNA, 25 bp, Homo sapien
ttgggagtatctgccggcgctgtcc

SEQ ID NO: 5471982 - DNA, 25 bp, Homo sapien
ccatctgatgtgcagaagctgggct

SEQ ID NO: 5471983 - DNA, 25 bp, Homo sapien
tgtccaggtcctttagtcagcgtca

SEQ ID NO: 5471984 - DNA, 25 bp, Homo sapien
gaggtgcttgtaaatgtcttgggaa

SEQ ID NO: 5471985 - DNA, 25 bp, Homo sapien
aaacaagcctgtttttgatcttcca

SEQ ID NO: 5471986 - DNA, 25 bp, Homo sapien
tagtccatacctgagtgctgtacat

SEQ ID NO: 5471987 - DNA, 25 bp, Homo sapien
cataaagtgttggttgccggaatct

SEQ ID NO: 5471988 - DNA, 25 bp, Homo sapien
tcttccatcgccagagtctttgtca

SEQ ID NO: 5471989 - DNA, 25 bp, Homo sapien
tttgtagaaagaggcacttggtggc

SEQ ID NO: 5471990 - DNA, 25 bp, Homo sapien
tggctgcctcgtgtgatggagctgc

SEQ ID NO: 5471991 - DNA, 25 bp, Homo sapien
ttcactggtttgtagaaagaggcac

SEQ ID NO: 5471992 - DNA, 25 bp, Homo sapien
atcacccacttagggcccagggctt

SEQ ID NO: 5471993 - DNA, 25 bp, Homo sapien
aacaaaatcgtacagctttctcaat

SEQ ID NO: 5471994 - DNA, 25 bp, Homo sapien
tctttaacaaaatcgtacagctttc

SEQ ID NO: 5471995 - DNA, 25 bp, Homo sapien
taacaaaatcgtacagctttctcaa

SEQ ID NO: 5471996 - DNA, 25 bp, Homo sapien
tttaacaaaatcgtacagctttctc

SEQ ID NO: 5471997 - DNA, 25 bp, Homo sapien
agacattccgcgaggcttctggcct

SEQ ID NO: 5471998 - DNA, 25 bp, Homo sapien
tgctggacggcacttcagggcacaa

SEQ ID NO: 5471999 - DNA, 25 bp, Homo sapien
tctggcctctcgaaggcaaagcttt

SEQ ID NO: 5472000 - DNA, 25 bp, Homo sapien
ccacacgcgtctttggacttgcaga

SEQ ID NO: 5472001 - DNA, 25 bp, Homo sapien
catcagcttgttggaaaagggtcac

SEQ ID NO: 5472002 - DNA, 25 bp, Homo sapien
tgcttcacggaaacgcacagacgtc

SEQ ID NO: 5472003 - DNA, 25 bp, Homo sapien
tatggcagacgctctcagacacgtg

SEQ ID NO: 5472004 - DNA, 25 bp, Homo sapien
gctgctagtcagagttgggtcctta

SEQ ID NO: 5472005 - DNA, 25 bp, Homo sapien
aggacatgcgacaccgtcttcggga

SEQ ID NO: 5472006 - DNA, 25 bp, Homo sapien
caccgtcttcgggatgctgctttcc

SEQ ID NO: 5472007 - DNA, 25 bp, Homo sapien
ctttccgctaagctgctgtctggga

SEQ ID NO: 5472008 - DNA, 25 bp, Homo sapien
gtgacaagcaggctcaggacatgcg

SEQ ID NO: 5472009 - DNA, 25 bp, Homo sapien
agctgcagtcctcgggatccaagga

SEQ ID NO: 5472010 - DNA, 25 bp, Homo sapien
tcctcgtggaaagagctcgcacttt

SEQ ID NO: 5472011 - DNA, 25 bp, Homo sapien
ttgcttagcagagcgactcaccctc

SEQ ID NO: 5472012 - DNA, 25 bp, Homo sapien
cacccaggataagctggacccttgg

SEQ ID NO: 5472013 - DNA, 25 bp, Homo sapien
aatgaagtcctgaaagcagacccca

SEQ ID NO: 5472014 - DNA, 25 bp, Homo sapien
gaaatgaagtcctgaaagcagaccc

SEQ ID NO: 5472015 - DNA, 25 bp, Homo sapien
agacgtggagcatgcggggccggaa

SEQ ID NO: 5472016 - DNA, 25 bp, Homo sapien
tgaagtcctgaaagcagaccccact

SEQ ID NO: 5472017 - DNA, 25 bp, Homo sapien
cggtcagggcgaacgagagtcatct

SEQ ID NO: 5472018 - DNA, 25 bp, Homo sapien
gaacgagagtcatctgaacacggag

SEQ ID NO: 5472019 - DNA, 25 bp, Homo sapien
gagagtcatctgaacacggaggaaa

SEQ ID NO: 5472020 - DNA, 25 bp, Homo sapien
tgtgagaagccggtcagggcgaacg

SEQ ID NO: 5472021 - DNA, 25 bp, Homo sapien
acagcggagcaacggcatgccgctg

SEQ ID NO: 5472022 - DNA, 25 bp, Homo sapien
ctcccacagcggagcaacggcatgc

SEQ ID NO: 5472023 - DNA, 25 bp, Homo sapien
ccacagcggagcaacggcatgccgc

SEQ ID NO: 5472024 - DNA, 25 bp, Homo sapien
gcggagcaacggcatgccgctgcct

SEQ ID NO: 5472025 - DNA, 25 bp, Homo sapien
ctgcggttcacgcacacgttgtgca

SEQ ID NO: 5472026 - DNA, 25 bp, Homo sapien
gcggttcacgcacacgttgtgcatt

SEQ ID NO: 5472027 - DNA, 25 bp, Homo sapien
tgcggttcacgcacacgttgtgcat

SEQ ID NO: 5472028 - DNA, 25 bp, Homo sapien
ggttcacgcacacgttgtgcatttt

SEQ ID NO: 5472029 - DNA, 25 bp, Homo sapien
ggagccgtccctgtgctcaaaggaa

SEQ ID NO: 5472030 - DNA, 25 bp, Homo sapien
gccacgtgttgcagagctaagtgac

SEQ ID NO: 5472031 - DNA, 25 bp, Homo sapien
tggcatcagccggagagttcatcgg

SEQ ID NO: 5472032 - DNA, 25 bp, Homo sapien
ttcatcgggagtagagccgtgcagc

SEQ ID NO: 5472033 - DNA, 25 bp, Homo sapien
tctgaagctccccacgtggatggag

SEQ ID NO: 5472034 - DNA, 25 bp, Homo sapien
gaggatgtagctgctctgctcatgg

SEQ ID NO: 5472035 - DNA, 25 bp, Homo sapien
caggcgtctctgcactggagaggat

SEQ ID NO: 5472036 - DNA, 25 bp, Homo sapien
ttatctgaagctccccacgtggatg

SEQ ID NO: 5472037 - DNA, 25 bp, Homo sapien
aattttataggccacaaggacgtgc

SEQ ID NO: 5472038 - DNA, 25 bp, Homo sapien
ttgactcatggatgcagtgggtgtc

SEQ ID NO: 5472039 - DNA, 25 bp, Homo sapien
tccaattttataggccacaaggacg

SEQ ID NO: 5472040 - DNA, 25 bp, Homo sapien
actgtcattgactcatggatgcagt

SEQ ID NO: 5472041 - DNA, 25 bp, Homo sapien
agggcaccaggacctgagggctgca

SEQ ID NO: 5472042 - DNA, 25 bp, Homo sapien
gtctctgagggcaccaggacctgag

SEQ ID NO: 5472043 - DNA, 25 bp, Homo sapien
agcccctctcccatatcccaggtct

SEQ ID NO: 5472044 - DNA, 25 bp, Homo sapien
acaggaaaacccccgaagcagccag

SEQ ID NO: 5472045 - DNA, 25 bp, Homo sapien
tccacctgggacctctcttccccag

SEQ ID NO: 5472046 - DNA, 25 bp, Homo sapien
ctccacctgggacctctcttcccca

SEQ ID NO: 5472047 - DNA, 25 bp, Homo sapien
tgcttcctccagtggcagtaagtgc

SEQ ID NO: 5472048 - DNA, 25 bp, Homo sapien
agtggcagtaagtgcagagccagac

SEQ ID NO: 5472049 - DNA, 25 bp, Homo sapien
ccagacaacggcaggcggcgccaga

SEQ ID NO: 5472050 - DNA, 25 bp, Homo sapien
cccagttccgggtgtgtggcctgga

SEQ ID NO: 5472051 - DNA, 25 bp, Homo sapien
gtactgaaatcatcatcgtcgtcaa

SEQ ID NO: 5472052 - DNA, 25 bp, Homo sapien
catcatcgtcgtcaatcaggagatt

SEQ ID NO: 5472053 - DNA, 25 bp, Homo sapien
tgtcatctctgattgtactgaaatc

SEQ ID NO: 5472054 - DNA, 25 bp, Homo sapien
gattgtactgaaatcatcatcgtcg

SEQ ID NO: 5472055 - DNA, 25 bp, Homo sapien
gaagcttccactgcgagtggccaaa

SEQ ID NO: 5472056 - DNA, 25 bp, Homo sapien
gcttccactgcgagtggccaaacag

SEQ ID NO: 5472057 - DNA, 25 bp, Homo sapien
ttccactgcgagtggccaaacaggg

SEQ ID NO: 5472058 - DNA, 25 bp, Homo sapien
agaagcttccactgcgagtggccaa

SEQ ID NO: 5472059 - DNA, 25 bp, Homo sapien
cttaacaccaatagtatctccgtct

SEQ ID NO: 5472060 - DNA, 25 bp, Homo sapien
tccgtctttcaagtaatacggtgcc

SEQ ID NO: 5472061 - DNA, 25 bp, Homo sapien
cggtgccccttgcaaataatcttgt

SEQ ID NO: 5472062 - DNA, 25 bp, Homo sapien
caagtaatacggtgccccttgcaaa

SEQ ID NO: 5472063 - DNA, 25 bp, Homo sapien
tctccacgggaagacgatagaaatc

SEQ ID NO: 5472064 - DNA, 25 bp, Homo sapien
ctctcaccagggatgcgcacctgtg

SEQ ID NO: 5472065 - DNA, 25 bp, Homo sapien
gatagaaatcggcaactctctgcct

SEQ ID NO: 5472066 - DNA, 25 bp, Homo sapien
tatcggaagccactcgaacttttcg

SEQ ID NO: 5472067 - DNA, 25 bp, Homo sapien
cgtggtaacttgaggcataatgggc

SEQ ID NO: 5472068 - DNA, 25 bp, Homo sapien
accgtcaagcgccagatccaaacaa

SEQ ID NO: 5472069 - DNA, 25 bp, Homo sapien
ctgtaccagaaaaccgtcaagcgcc

SEQ ID NO: 5472070 - DNA, 25 bp, Homo sapien
caaaaccacgtggtaacttgaggca

SEQ ID NO: 5472071 - DNA, 25 bp, Homo sapien
gatgctgagacaatgaatgattttt

SEQ ID NO: 5472072 - DNA, 25 bp, Homo sapien
tgaagactggttcttaggatgctga

SEQ ID NO: 5472073 - DNA, 25 bp, Homo sapien
ggaaaccttagcaggaggagcagaa

SEQ ID NO: 5472074 - DNA, 25 bp, Homo sapien
ggaacagggacgtgcagaggtcagc

SEQ ID NO: 5472075 - DNA, 25 bp, Homo sapien
cagagcgacgggagcaatgatgaat

SEQ ID NO: 5472076 - DNA, 25 bp, Homo sapien
gatggcagactgtccgaacacactg

SEQ ID NO: 5472077 - DNA, 25 bp, Homo sapien
cacactgacaacagctgcgggtggg

SEQ ID NO: 5472078 - DNA, 25 bp, Homo sapien
taagtacagatatgtcaggtgatac

SEQ ID NO: 5472079 - DNA, 25 bp, Homo sapien
gggctctaagcagatctcaattctc

SEQ ID NO: 5472080 - DNA, 25 bp, Homo sapien
aggggctctaagcagatctcaattc

SEQ ID NO: 5472081 - DNA, 25 bp, Homo sapien
agatctcaattctccgtcctagttt

SEQ ID NO: 5472082 - DNA, 25 bp, Homo sapien
caattctccgtcctagtttatattc

SEQ ID NO: 5472083 - DNA, 25 bp, Homo sapien
cagttcgtaaaagcctgcctgggcg

SEQ ID NO: 5472084 - DNA, 25 bp, Homo sapien
ctggggacgggacaccgaactccag

SEQ ID NO: 5472085 - DNA, 25 bp, Homo sapien
gagtggctgccggtcagttcgtaaa

SEQ ID NO: 5472086 - DNA, 25 bp, Homo sapien
gtaaaagcctgcctgggcgcttcct

SEQ ID NO: 5472087 - DNA, 25 bp, Homo sapien
tacacagtggcatctcaaggaaaga

SEQ ID NO: 5472088 - DNA, 25 bp, Homo sapien
aatgaagcactacacagtggcatct

SEQ ID NO: 5472089 - DNA, 25 bp, Homo sapien
gtatctcaagtaatgataacatcat

SEQ ID NO: 5472090 - DNA, 25 bp, Homo sapien
tctcaaggaaagagtatctcaagta

SEQ ID NO: 5472091 - DNA, 25 bp, Homo sapien
tttggaattaacttccatgggagta

SEQ ID NO: 5472092 - DNA, 25 bp, Homo sapien
aaagaagtgagttccctctctctaa

SEQ ID NO: 5472093 - DNA, 25 bp, Homo sapien
tctctctaaatctgagtcaaaagct

SEQ ID NO: 5472094 - DNA, 25 bp, Homo sapien
attaacttccatgggagtagaattc

SEQ ID NO: 5472095 - DNA, 25 bp, Homo sapien
cagtaggcggatgctgcttcaacac

SEQ ID NO: 5472096 - DNA, 25 bp, Homo sapien
ttcatatactgagggcgcacaaaag

SEQ ID NO: 5472097 - DNA, 25 bp, Homo sapien
tagcatcctaacataaaagctggag

SEQ ID NO: 5472098 - DNA, 25 bp, Homo sapien
ctcatttcagtccaacagtaggcgg

SEQ ID NO: 5472099 - DNA, 25 bp, Homo sapien
cgggtacttaccactgaacatggca

SEQ ID NO: 5472100 - DNA, 25 bp, Homo sapien
gagccgtctgcaccatgggcgtgta

SEQ ID NO: 5472101 - DNA, 25 bp, Homo sapien
ttaatatctcactggaagaagccac

SEQ ID NO: 5472102 - DNA, 25 bp, Homo sapien
gattgaaacaaaagcacagcatgcc

SEQ ID NO: 5472103 - DNA, 25 bp, Homo sapien
aggagagaaacttgcgcaggctcgt

SEQ ID NO: 5472104 - DNA, 25 bp, Homo sapien
tctgagatctctatgtctcccaagt

SEQ ID NO: 5472105 - DNA, 25 bp, Homo sapien
ttgcgcaggctcgttcccagaagca

SEQ ID NO: 5472106 - DNA, 25 bp, Homo sapien
tcttctgagatctctatgtctccca

SEQ ID NO: 5472107 - DNA, 25 bp, Homo sapien
aaaggacagagcgggatgtttacaa

SEQ ID NO: 5472108 - DNA, 25 bp, Homo sapien
aggacagagcgggatgtttacaagg

SEQ ID NO: 5472109 - DNA, 25 bp, Homo sapien
caaggaacttgaaacttattttgtg

SEQ ID NO: 5472110 - DNA, 25 bp, Homo sapien
ggacagagcgggatgtttacaagga

SEQ ID NO: 5472111 - DNA, 25 bp, Homo sapien
aagaggactttttgggtaggatatg

SEQ ID NO: 5472112 - DNA, 25 bp, Homo sapien
tttttgggtaggatatgctggctgc

SEQ ID NO: 5472113 - DNA, 25 bp, Homo sapien
gactttttgggtaggatatgctggc

SEQ ID NO: 5472114 - DNA, 25 bp, Homo sapien
tttgggtaggatatgctggctgcat

SEQ ID NO: 5472115 - DNA, 25 bp, Homo sapien
gctttacagaggttacagagcacgt

SEQ ID NO: 5472116 - DNA, 25 bp, Homo sapien
cccatcgtgatgtgtgcggctgagt

SEQ ID NO: 5472117 - DNA, 25 bp, Homo sapien
cagagcacgtacagaaatggcacag

SEQ ID NO: 5472118 - DNA, 25 bp, Homo sapien
tgagtgctgagtaagacaacatgct

SEQ ID NO: 5472119 - DNA, 25 bp, Homo sapien
tctgccccaagacgaagtacagttg

SEQ ID NO: 5472120 - DNA, 25 bp, Homo sapien
caaactctgccccaagacgaagtac

SEQ ID NO: 5472121 - DNA, 25 bp, Homo sapien
tggtctggtcctgatgactctccca

SEQ ID NO: 5472122 - DNA, 25 bp, Homo sapien
agacgaagtacagttggtctggtcc

SEQ ID NO: 5472123 - DNA, 25 bp, Homo sapien
tttggacttaggaattccacattta

SEQ ID NO: 5472124 - DNA, 25 bp, Homo sapien
tggacttaggaattccacatttaga

SEQ ID NO: 5472125 - DNA, 25 bp, Homo sapien
ctttggacttaggaattccacattt

SEQ ID NO: 5472126 - DNA, 25 bp, Homo sapien
ttggacttaggaattccacatttag

SEQ ID NO: 5472127 - DNA, 25 bp, Homo sapien
ggaagttgtccttcaattaaaagca

SEQ ID NO: 5472128 - DNA, 25 bp, Homo sapien
taaaagcaaagtatctccagaacat

SEQ ID NO: 5472129 - DNA, 25 bp, Homo sapien
tcagaagttctttcagtgttgcatc

SEQ ID NO: 5472130 - DNA, 25 bp, Homo sapien
tatctccagaacatatcagaagttc

SEQ ID NO: 5472131 - DNA, 25 bp, Homo sapien
ctccctaaatcaaccttctgctggc

SEQ ID NO: 5472132 - DNA, 25 bp, Homo sapien
aggccccagcatacctccctaaatc

SEQ ID NO: 5472133 - DNA, 25 bp, Homo sapien
gcatacctccctaaatcaaccttct

SEQ ID NO: 5472134 - DNA, 25 bp, Homo sapien
ccctaaatcaaccttctgctggcat

SEQ ID NO: 5472135 - DNA, 25 bp, Homo sapien
gcaccaatccatttttcgtaaatgc

SEQ ID NO: 5472136 - DNA, 25 bp, Homo sapien
catttttcgtaaatgccaggcatct

SEQ ID NO: 5472137 - DNA, 25 bp, Homo sapien
catagcaccaatccatttttcgtaa

SEQ ID NO: 5472138 - DNA, 25 bp, Homo sapien
aatccatttttcgtaaatgccaggc

SEQ ID NO: 5472139 - DNA, 25 bp, Homo sapien
cttgtaggccagatttcttcagcat

SEQ ID NO: 5472140 - DNA, 25 bp, Homo sapien
tgtaggccagatttcttcagcatta

SEQ ID NO: 5472141 - DNA, 25 bp, Homo sapien
gatttcttcagcattaactttaaac

SEQ ID NO: 5472142 - DNA, 25 bp, Homo sapien
cagatttcttcagcattaactttaa

SEQ ID NO: 5472143 - DNA, 25 bp, Homo sapien
ttctactacgatttccatttctgtc

SEQ ID NO: 5472144 - DNA, 25 bp, Homo sapien
acagatattgtttcttctactacga

SEQ ID NO: 5472145 - DNA, 25 bp, Homo sapien
catttctgtcccaggttgaacgtca

SEQ ID NO: 5472146 - DNA, 25 bp, Homo sapien
ggttgaacgtcactccccattgcaa

SEQ ID NO: 5472147 - DNA, 25 bp, Homo sapien
aagacacagtcccaatgaacttccc

SEQ ID NO: 5472148 - DNA, 25 bp, Homo sapien
agacacagtcccaatgaacttccca

SEQ ID NO: 5472149 - DNA, 25 bp, Homo sapien
gacacagtcccaatgaacttcccat

SEQ ID NO: 5472150 - DNA, 25 bp, Homo sapien
ggttattaattcctagctctctaag

SEQ ID NO: 5472151 - DNA, 25 bp, Homo sapien
aatataactagatcaaacccgtgag

SEQ ID NO: 5472152 - DNA, 25 bp, Homo sapien
tcggataatcagaaagaatggtgtt

SEQ ID NO: 5472153 - DNA, 25 bp, Homo sapien
caataattaggctcatccatgacta

SEQ ID NO: 5472154 - DNA, 25 bp, Homo sapien
ccatttctatcaataggtctcaaac

SEQ ID NO: 5472155 - DNA, 25 bp, Homo sapien
atttctatcaataggtctcaaacag

SEQ ID NO: 5472156 - DNA, 25 bp, Homo sapien
ttcccatttctatcaataggtctca

SEQ ID NO: 5472157 - DNA, 25 bp, Homo sapien
ctggacaaagaagcttcccatttct

SEQ ID NO: 5472158 - DNA, 25 bp, Homo sapien
ggtgggtttagcactacaacacaac

SEQ ID NO: 5472159 - DNA, 25 bp, Homo sapien
cctgtcctgtggcaaactgtcatac

SEQ ID NO: 5472160 - DNA, 25 bp, Homo sapien
ggatcagcttccaatatctagagtc

SEQ ID NO: 5472161 - DNA, 25 bp, Homo sapien
tgaagtgtacatgcagtgacaaacc

SEQ ID NO: 5472162 - DNA, 25 bp, Homo sapien
ggtaggtatgtgagttctccctaaa

SEQ ID NO: 5472163 - DNA, 25 bp, Homo sapien
tgtccattttgggtggtaggtatgt

SEQ ID NO: 5472164 - DNA, 25 bp, Homo sapien
tatgtgagttctccctaaactgttt

SEQ ID NO: 5472165 - DNA, 25 bp, Homo sapien
tccattttgggtggtaggtatgtga

SEQ ID NO: 5472166 - DNA, 25 bp, Homo sapien
cctttatggctttaattcgaatatc

SEQ ID NO: 5472167 - DNA, 25 bp, Homo sapien
gctttaattcgaatatcaaacacca

SEQ ID NO: 5472168 - DNA, 25 bp, Homo sapien
tatggctttaattcgaatatcaaac

SEQ ID NO: 5472169 - DNA, 25 bp, Homo sapien
tcctttatggctttaattcgaatat

SEQ ID NO: 5472170 - DNA, 25 bp, Homo sapien
tctcttcagattctaactggcataa

SEQ ID NO: 5472171 - DNA, 25 bp, Homo sapien
ggcataaatttttaacgtggagcca

SEQ ID NO: 5472172 - DNA, 25 bp, Homo sapien
cttcagattctaactggcataaatt

SEQ ID NO: 5472173 - DNA, 25 bp, Homo sapien
ttttaacgtggagccagtcaatctc

SEQ ID NO: 5472174 - DNA, 25 bp, Homo sapien
actagtgacccatttctcttccttg

SEQ ID NO: 5472175 - DNA, 25 bp, Homo sapien
gacccatttctcttccttggtcaac

SEQ ID NO: 5472176 - DNA, 25 bp, Homo sapien
ccatttctcttccttggtcaacaag

SEQ ID NO: 5472177 - DNA, 25 bp, Homo sapien
tagtgacccatttctcttccttggt

SEQ ID NO: 5472178 - DNA, 25 bp, Homo sapien
catttaaaagtagaggttcgcagtc

SEQ ID NO: 5472179 - DNA, 25 bp, Homo sapien
cctggacatccagcactgttgatga

SEQ ID NO: 5472180 - DNA, 25 bp, Homo sapien
taccagtttgaatgtggactccacc

SEQ ID NO: 5472181 - DNA, 25 bp, Homo sapien
cacttctgcattagctggaaagaca

SEQ ID NO: 5472182 - DNA, 25 bp, Homo sapien
accccattccacacaaagatgtctt

SEQ ID NO: 5472183 - DNA, 25 bp, Homo sapien
cttccccatcagcaatttcagtttc

SEQ ID NO: 5472184 - DNA, 25 bp, Homo sapien
gtttcacacagtgtcagttcatccc

SEQ ID NO: 5472185 - DNA, 25 bp, Homo sapien
aatttcagtttcacacagtgtcagt

SEQ ID NO: 5472186 - DNA, 25 bp, Homo sapien
tagaaagagatcaccagtgagacca

SEQ ID NO: 5472187 - DNA, 25 bp, Homo sapien
gtgagaccattcatcatgaccatca

SEQ ID NO: 5472188 - DNA, 25 bp, Homo sapien
aagagatcaccagtgagaccattca

SEQ ID NO: 5472189 - DNA, 25 bp, Homo sapien
atcatgaccatcagaaacaactgag

SEQ ID NO: 5472190 - DNA, 25 bp, Homo sapien
cgccaagtgactggtaaatgtgaag

SEQ ID NO: 5472191 - DNA, 25 bp, Homo sapien
gactggtaaatgtgaagtcctgctg

SEQ ID NO: 5472192 - DNA, 25 bp, Homo sapien
tgaagtcctgctggtacaagctttg

SEQ ID NO: 5472193 - DNA, 25 bp, Homo sapien
caagctttgcaacactaagaaccat

SEQ ID NO: 5472194 - DNA, 25 bp, Homo sapien
ccacacgctttctgtttgagagact

SEQ ID NO: 5472195 - DNA, 25 bp, Homo sapien
tttatcaaaggtcaaatcccacacg

SEQ ID NO: 5472196 - DNA, 25 bp, Homo sapien
gaaatattgactgccggagatctcc

SEQ ID NO: 5472197 - DNA, 25 bp, Homo sapien
tgagagactactgggtgcagagccc

SEQ ID NO: 5472198 - DNA, 25 bp, Homo sapien
ttcagtaaatgacatggaaccccat

SEQ ID NO: 5472199 - DNA, 25 bp, Homo sapien
aatgacatggaaccccatatcttgg

SEQ ID NO: 5472200 - DNA, 25 bp, Homo sapien
tttgcagttcaatgttagctgcatc

SEQ ID NO: 5472201 - DNA, 25 bp, Homo sapien
gtaaatgacatggaaccccatatct

SEQ ID NO: 5472202 - DNA, 25 bp, Homo sapien
tatctgaagagctaccttaccacgg

SEQ ID NO: 5472203 - DNA, 25 bp, Homo sapien
aaatatgcttagatcaactcctggg

SEQ ID NO: 5472204 - DNA, 25 bp, Homo sapien
tgtattccatacctaccagctctgg

SEQ ID NO: 5472205 - DNA, 25 bp, Homo sapien
tgtcacctgttgaaacccaagagtc

SEQ ID NO: 5472206 - DNA, 25 bp, Homo sapien
tgggatttccgataaaacaacatgt

SEQ ID NO: 5472207 - DNA, 25 bp, Homo sapien
ctgattggctggactttagaatcat

SEQ ID NO: 5472208 - DNA, 25 bp, Homo sapien
gattggctggactttagaatcattt

SEQ ID NO: 5472209 - DNA, 25 bp, Homo sapien
gataaaacaacatgtaggcactttc

SEQ ID NO: 5472210 - DNA, 25 bp, Homo sapien
atatctgagaatggagctgtaagaa

SEQ ID NO: 5472211 - DNA, 25 bp, Homo sapien
gcctggagagaactattcttcaaga

SEQ ID NO: 5472212 - DNA, 25 bp, Homo sapien
aaatttgctggtcattcctttggaa

SEQ ID NO: 5472213 - DNA, 25 bp, Homo sapien
tcaagagacgaactgtactttcatc

SEQ ID NO: 5472214 - DNA, 25 bp, Homo sapien
ggaattcatgttgttgcgatcataa

SEQ ID NO: 5472215 - DNA, 25 bp, Homo sapien
tgaaatttcttgggactaggacttc

SEQ ID NO: 5472216 - DNA, 25 bp, Homo sapien
gacttcccaaaacgatgccatgtat

SEQ ID NO: 5472217 - DNA, 25 bp, Homo sapien
gttgttgcgatcataatgaaatttc

SEQ ID NO: 5472218 - DNA, 25 bp, Homo sapien
gctgatcaacaggaattagattatt

SEQ ID NO: 5472219 - DNA, 25 bp, Homo sapien
tgatcaacaggaattagattattct

SEQ ID NO: 5472220 - DNA, 25 bp, Homo sapien
gatcaacaggaattagattattctc

SEQ ID NO: 5472221 - DNA, 25 bp, Homo sapien
ctgatcaacaggaattagattattc

SEQ ID NO: 5472222 - DNA, 25 bp, Homo sapien
atcagtggatgatcaatctcttctt

SEQ ID NO: 5472223 - DNA, 25 bp, Homo sapien
cagattcacatctggtttacttttt

SEQ ID NO: 5472224 - DNA, 25 bp, Homo sapien
aatcatcagtggatgatcaatctct

SEQ ID NO: 5472225 - DNA, 25 bp, Homo sapien
tcatcagtggatgatcaatctcttc

SEQ ID NO: 5472226 - DNA, 25 bp, Homo sapien
ctggctacgattagaatatttggga

SEQ ID NO: 5472227 - DNA, 25 bp, Homo sapien
ggctacgattagaatatttgggacc

SEQ ID NO: 5472228 - DNA, 25 bp, Homo sapien
ctacgattagaatatttgggaccct

SEQ ID NO: 5472229 - DNA, 25 bp, Homo sapien
gctacgattagaatatttgggaccc

SEQ ID NO: 5472230 - DNA, 25 bp, Homo sapien
cagccacctttgtgtataataactg

SEQ ID NO: 5472231 - DNA, 25 bp, Homo sapien
tatacatggtaatggcctccgtagc

SEQ ID NO: 5472232 - DNA, 25 bp, Homo sapien
gtaatggcctccgtagcagccacct

SEQ ID NO: 5472233 - DNA, 25 bp, Homo sapien
gtagcagccacctttgtgtataata

SEQ ID NO: 5472234 - DNA, 25 bp, Homo sapien
caaaagggcttgagattaatccgga

SEQ ID NO: 5472235 - DNA, 25 bp, Homo sapien
gaggcagcttacgtaatttggccga

SEQ ID NO: 5472236 - DNA, 25 bp, Homo sapien
tagtttccttgtagcgttcgcattt

SEQ ID NO: 5472237 - DNA, 25 bp, Homo sapien
ttaatccggagagggaatgtataac

SEQ ID NO: 5472238 - DNA, 25 bp, Homo sapien
ggaaaaagcagttatctgtctttac

SEQ ID NO: 5472239 - DNA, 25 bp, Homo sapien
ctgggaaaaagcagttatctgtctt

SEQ ID NO: 5472240 - DNA, 25 bp, Homo sapien
gaccctgggaaaaagcagttatctg

SEQ ID NO: 5472241 - DNA, 25 bp, Homo sapien
cctgggaaaaagcagttatctgtct

SEQ ID NO: 5472242 - DNA, 25 bp, Homo sapien
cctgtcacaagttccacagtggtac

SEQ ID NO: 5472243 - DNA, 25 bp, Homo sapien
gagagcatcttccaaaccggataca

SEQ ID NO: 5472244 - DNA, 25 bp, Homo sapien
acagtggtacaagttgtcacaatca

SEQ ID NO: 5472245 - DNA, 25 bp, Homo sapien
ccggatacatttttgactgctactg

SEQ ID NO: 5472246 - DNA, 25 bp, Homo sapien
aatttcagaggtttacaaacacatc

SEQ ID NO: 5472247 - DNA, 25 bp, Homo sapien
gaagttcataacactaaattatcct

SEQ ID NO: 5472248 - DNA, 25 bp, Homo sapien
cacaataagacacgtatctgaattc

SEQ ID NO: 5472249 - DNA, 25 bp, Homo sapien
gatgtagatctcctgattagatgtt

SEQ ID NO: 5472250 - DNA, 25 bp, Homo sapien
tcagcatcctgaaaatcacatattt

SEQ ID NO: 5472251 - DNA, 25 bp, Homo sapien
aaaatgctaattttgggccaggcgc

SEQ ID NO: 5472252 - DNA, 25 bp, Homo sapien
tcaagaaagcaattaacacctttga

SEQ ID NO: 5472253 - DNA, 25 bp, Homo sapien
tatatacacatctattttcaagaaa

SEQ ID NO: 5472254 - DNA, 25 bp, Homo sapien
caatggttccatggtacagacgata

SEQ ID NO: 5472255 - DNA, 25 bp, Homo sapien
gacgatagatgaggtcatgaccgga

SEQ ID NO: 5472256 - DNA, 25 bp, Homo sapien
tttccaaagcgctgaagaggattcg

SEQ ID NO: 5472257 - DNA, 25 bp, Homo sapien
gaggattcgattcagttcctgcaca

SEQ ID NO: 5472258 - DNA, 25 bp, Homo sapien
attactggtccacccaaagctgtca

SEQ ID NO: 5472259 - DNA, 25 bp, Homo sapien
caaagctgtcagtgaggtctgctgt

SEQ ID NO: 5472260 - DNA, 25 bp, Homo sapien
tctgctgtggatgcagcttcctggt

SEQ ID NO: 5472261 - DNA, 25 bp, Homo sapien
ctcattactggtccacccaaagctg

SEQ ID NO: 5472262 - DNA, 25 bp, Homo sapien
gctgagcaaacaagcgctgtaactg

SEQ ID NO: 5472263 - DNA, 25 bp, Homo sapien
gaagctgagcaaacaagcgctgtaa

SEQ ID NO: 5472264 - DNA, 25 bp, Homo sapien
tgtaactgtaaagggatgattcgaa

SEQ ID NO: 5472265 - DNA, 25 bp, Homo sapien
caagcgctgtaactgtaaagggatg

SEQ ID NO: 5472266 - DNA, 25 bp, Homo sapien
ctttgcatcgggtttatccttatct

SEQ ID NO: 5472267 - DNA, 25 bp, Homo sapien
tatccttatcttcaaacaaaccaag

SEQ ID NO: 5472268 - DNA, 25 bp, Homo sapien
tccttatcttcaaacaaaccaagct

SEQ ID NO: 5472269 - DNA, 25 bp, Homo sapien
tttatccttatcttcaaacaaacca

SEQ ID NO: 5472270 - DNA, 25 bp, Homo sapien
aatgcaggtgagatttcatggggat

SEQ ID NO: 5472271 - DNA, 25 bp, Homo sapien
tcatcctaatgcaggtgagatttca

SEQ ID NO: 5472272 - DNA, 25 bp, Homo sapien
tcctaatgcaggtgagatttcatgg

SEQ ID NO: 5472273 - DNA, 25 bp, Homo sapien
cctaatgcaggtgagatttcatggg

SEQ ID NO: 5472274 - DNA, 25 bp, Homo sapien
gcatagtccacgatccataaatcac

SEQ ID NO: 5472275 - DNA, 25 bp, Homo sapien
agaagagttacatttcccataaggc

SEQ ID NO: 5472276 - DNA, 25 bp, Homo sapien
tgggaagcatagtccacgatccata

SEQ ID NO: 5472277 - DNA, 25 bp, Homo sapien
catttcccataaggccccgtgcgag

SEQ ID NO: 5472278 - DNA, 25 bp, Homo sapien
ggagacccgccctcgccaacatggc

SEQ ID NO: 5472279 - DNA, 25 bp, Homo sapien
ttcgcttcgcgttttggccagggcg

SEQ ID NO: 5472280 - DNA, 25 bp, Homo sapien
ttaggcagtaagtgcggctggcgcc

SEQ ID NO: 5472281 - DNA, 25 bp, Homo sapien
gggtctgggctttaggcagtaagtg

SEQ ID NO: 5472282 - DNA, 25 bp, Homo sapien
gtgggaagcgtagggacagtgttgg

SEQ ID NO: 5472283 - DNA, 25 bp, Homo sapien
gagggacgtgggaagcgtagggaca

SEQ ID NO: 5472284 - DNA, 25 bp, Homo sapien
agggacgtgggaagcgtagggacag

SEQ ID NO: 5472285 - DNA, 25 bp, Homo sapien
gacgtgggaagcgtagggacagtgt

SEQ ID NO: 5472286 - DNA, 25 bp, Homo sapien
ctggtagtgcccatggatgggagcc

SEQ ID NO: 5472287 - DNA, 25 bp, Homo sapien
agaaactcattctcagggggcatga

SEQ ID NO: 5472288 - DNA, 25 bp, Homo sapien
gtgtcagaggtcaagtgtggattac

SEQ ID NO: 5472289 - DNA, 25 bp, Homo sapien
aatccctggtgtcagaggtcaagtg

SEQ ID NO: 5472290 - DNA, 25 bp, Homo sapien
caagtgtggattactgctgcttccc

SEQ ID NO: 5472291 - DNA, 25 bp, Homo sapien
tgtggctttctggaatccctggtgt

SEQ ID NO: 5472292 - DNA, 25 bp, Homo sapien
aggcccccaccagctatcacggtcc

SEQ ID NO: 5472293 - DNA, 25 bp, Homo sapien
ctcaagggggcattttggtgatgcc

SEQ ID NO: 5472294 - DNA, 25 bp, Homo sapien
actgcctctttggcccactcaaggg

SEQ ID NO: 5472295 - DNA, 25 bp, Homo sapien
taccccacaggatacactgcctctt

SEQ ID NO: 5472296 - DNA, 25 bp, Homo sapien
tcaaggagagagtacggaaccacat

SEQ ID NO: 5472297 - DNA, 25 bp, Homo sapien
tggcaactgggaagatcactgaatt

SEQ ID NO: 5472298 - DNA, 25 bp, Homo sapien
tactttgccactatcttgaagaagg

SEQ ID NO: 5472299 - DNA, 25 bp, Homo sapien
cagatgccatgactttcaaggagag

SEQ ID NO: 5472300 - DNA, 25 bp, Homo sapien
tgactttttcccaacgagtggccaa

SEQ ID NO: 5472301 - DNA, 25 bp, Homo sapien
tcgcatcagctgtcctcaagagaga

SEQ ID NO: 5472302 - DNA, 25 bp, Homo sapien
gtgcttgaatatcctaggccggtca

SEQ ID NO: 5472303 - DNA, 25 bp, Homo sapien
tcctggctgagtatttgggcctacc

SEQ ID NO: 5472304 - DNA, 25 bp, Homo sapien
ggcagcatagtgagattccttcact

SEQ ID NO: 5472305 - DNA, 25 bp, Homo sapien
gtagacctaactactcggaaggctg

SEQ ID NO: 5472306 - DNA, 25 bp, Homo sapien
agcgtgtgcctgtagacctaactac

SEQ ID NO: 5472307 - DNA, 25 bp, Homo sapien
gaattgatgcaactggctgagcgtg

SEQ ID NO: 5472308 - DNA, 25 bp, Homo sapien
tgctgaactgaacattctgtcctac

SEQ ID NO: 5472309 - DNA, 25 bp, Homo sapien
tctgtcctaccactagcaaataatc

SEQ ID NO: 5472310 - DNA, 25 bp, Homo sapien
tcccaacggaaaaaggtaatgctca

SEQ ID NO: 5472311 - DNA, 25 bp, Homo sapien
aatgatttagagcaaaccacctggc

SEQ ID NO: 5472312 - DNA, 25 bp, Homo sapien
ttttacaacgattgaaagacaaaca

SEQ ID NO: 5472313 - DNA, 25 bp, Homo sapien
gtgtcaatgcggagtaactgctctt

SEQ ID NO: 5472314 - DNA, 25 bp, Homo sapien
tatccgtgtagtcccaacgataaga

SEQ ID NO: 5472315 - DNA, 25 bp, Homo sapien
cgataagaacaggtgttggcatgaa

SEQ ID NO: 5472316 - DNA, 25 bp, Homo sapien
ggccattctcaatgattctcttggt

SEQ ID NO: 5472317 - DNA, 25 bp, Homo sapien
actatttcagtggaagtcgacatgg

SEQ ID NO: 5472318 - DNA, 25 bp, Homo sapien
tgcctgtcccatcactaccgtagga

SEQ ID NO: 5472319 - DNA, 25 bp, Homo sapien
cacttcccagggagccaaaggaacg

SEQ ID NO: 5472320 - DNA, 25 bp, Homo sapien
aaaaggggtgcagacgctctgcttc

SEQ ID NO: 5472321 - DNA, 25 bp, Homo sapien
cagagaaaaggggtgcagacgctct

SEQ ID NO: 5472322 - DNA, 25 bp, Homo sapien
aggcagagaaaaggggtgcagacgc

SEQ ID NO: 5472323 - DNA, 25 bp, Homo sapien
tgaaggcagagaaaaggggtgcaga

SEQ ID NO: 5472324 - DNA, 25 bp, Homo sapien
aatattctccagcgggtttcccaag

SEQ ID NO: 5472325 - DNA, 25 bp, Homo sapien
ttcccaagaggtcaaaggagaatgg

SEQ ID NO: 5472326 - DNA, 25 bp, Homo sapien
caagaggtcaaaggagaatgggtcc

SEQ ID NO: 5472327 - DNA, 25 bp, Homo sapien
tctccagcgggtttcccaagaggtc

SEQ ID NO: 5472328 - DNA, 25 bp, Homo sapien
ttcttgatggcctcggatgaggcct

SEQ ID NO: 5472329 - DNA, 25 bp, Homo sapien
atggcctcggatgaggcctgccggg

SEQ ID NO: 5472330 - DNA, 25 bp, Homo sapien
cttcttgatggcctcggatgaggcc

SEQ ID NO: 5472331 - DNA, 25 bp, Homo sapien
ttgatggcctcggatgaggcctgcc

SEQ ID NO: 5472332 - DNA, 25 bp, Homo sapien
tgggccgcctggagagacgcccctt

SEQ ID NO: 5472333 - DNA, 25 bp, Homo sapien
agtgctcggagacctgggccgcctg

SEQ ID NO: 5472334 - DNA, 25 bp, Homo sapien
agagacgccccttatgacgcagcca

SEQ ID NO: 5472335 - DNA, 25 bp, Homo sapien
aggcgcaggcccgagtgctcggaga

SEQ ID NO: 5472336 - DNA, 25 bp, Homo sapien
gctctatgccgtttattatgaagga

SEQ ID NO: 5472337 - DNA, 25 bp, Homo sapien
taaagacaggcattggcataaagtg

SEQ ID NO: 5472338 - DNA, 25 bp, Homo sapien
tatccgtgcagtcccaacaataaag

SEQ ID NO: 5472339 - DNA, 25 bp, Homo sapien
cagatatttacaatgatcgaaagac

SEQ ID NO: 5472340 - DNA, 25 bp, Homo sapien
tgcctgtcccatcactaccgtagga

SEQ ID NO: 5472341 - DNA, 25 bp, Homo sapien
ggccattctcaatgattctcttggt

SEQ ID NO: 5472342 - DNA, 25 bp, Homo sapien
actatttcagtggaagtcgacatgg

SEQ ID NO: 5472343 - DNA, 25 bp, Homo sapien
cacttcccagggagccaaaggaacg

SEQ ID NO: 5472344 - DNA, 25 bp, Homo sapien
accaccctcaaaagctggaaattca

SEQ ID NO: 5472345 - DNA, 25 bp, Homo sapien
aatattctccagcgggtttcccaag

SEQ ID NO: 5472346 - DNA, 25 bp, Homo sapien
ttcccaagaggtcaaaggagaatgg

SEQ ID NO: 5472347 - DNA, 25 bp, Homo sapien
caagaggtcaaaggagaatgggtcc

SEQ ID NO: 5472348 - DNA, 25 bp, Homo sapien
tctccagcgggtttcccaagaggtc

SEQ ID NO: 5472349 - DNA, 25 bp, Homo sapien
tcggcggggtcacggaagctgaaga

SEQ ID NO: 5472350 - DNA, 25 bp, Homo sapien
tgaagacctcggcggggtcacggaa

SEQ ID NO: 5472351 - DNA, 25 bp, Homo sapien
gacctcggcggggtcacggaagctg

SEQ ID NO: 5472352 - DNA, 25 bp, Homo sapien
ctgaagacctcggcggggtcacgga

SEQ ID NO: 5472353 - DNA, 25 bp, Homo sapien
gccatagcggtcatagatatcgcgt

SEQ ID NO: 5472354 - DNA, 25 bp, Homo sapien
ctcgccatagcggtcatagatatcg

SEQ ID NO: 5472355 - DNA, 25 bp, Homo sapien
cgcctcgccatagcggtcatagata

SEQ ID NO: 5472356 - DNA, 25 bp, Homo sapien
tagcggtcatagatatcgcgtttct

SEQ ID NO: 5472357 - DNA, 25 bp, Homo sapien
cctcagccacctgcttgaatcttct

SEQ ID NO: 5472358 - DNA, 25 bp, Homo sapien
ggcctcagccacctgcttgaatctt

SEQ ID NO: 5472359 - DNA, 25 bp, Homo sapien
cagccacctgcttgaatcttctcac

SEQ ID NO: 5472360 - DNA, 25 bp, Homo sapien
tcagccacctgcttgaatcttctca

SEQ ID NO: 5472361 - DNA, 25 bp, Homo sapien
gtttttgtcggggtgccacttgagc

SEQ ID NO: 5472362 - DNA, 25 bp, Homo sapien
ttgtcggggtgccacttgagcgcca

SEQ ID NO: 5472363 - DNA, 25 bp, Homo sapien
cgccagcttgcggtacgccttcttg

SEQ ID NO: 5472364 - DNA, 25 bp, Homo sapien
ttttgtcggggtgccacttgagcgc

SEQ ID NO: 5472365 - DNA, 25 bp, Homo sapien
agtccactatgctggactgccaaag

SEQ ID NO: 5472366 - DNA, 25 bp, Homo sapien
ctatgctggactgccaaagagcctg

SEQ ID NO: 5472367 - DNA, 25 bp, Homo sapien
tagtagtccactatgctggactgcc

SEQ ID NO: 5472368 - DNA, 25 bp, Homo sapien
tccactatgctggactgccaaagag

SEQ ID NO: 5472369 - DNA, 25 bp, Homo sapien
ctggcacagcgagcggcaaggctgc

SEQ ID NO: 5472370 - DNA, 25 bp, Homo sapien
gactgtccaggacctattgagctct

SEQ ID NO: 5472371 - DNA, 25 bp, Homo sapien
gaatttgaggctacccagtgcccca

SEQ ID NO: 5472372 - DNA, 25 bp, Homo sapien
gatgtcatgctgacggaccctttcc

SEQ ID NO: 5472373 - DNA, 25 bp, Homo sapien
gcagcgggtgaagaacatgctcatt

SEQ ID NO: 5472374 - DNA, 25 bp, Homo sapien
cacctcccacgttcaagcagttctg

SEQ ID NO: 5472375 - DNA, 25 bp, Homo sapien
acctcccacgttcaagcagttctgc

SEQ ID NO: 5472376 - DNA, 25 bp, Homo sapien
ctcccacgttcaagcagttctgcct

SEQ ID NO: 5472377 - DNA, 25 bp, Homo sapien
tcccacgttcaagcagttctgcctc

SEQ ID NO: 5472378 - DNA, 25 bp, Homo sapien
aagaaggttccaagaaaattcatct

SEQ ID NO: 5472379 - DNA, 25 bp, Homo sapien
taagaaagcccacaaatccaagacc

SEQ ID NO: 5472380 - DNA, 25 bp, Homo sapien
tgtgcttatggctaccggaaatgct

SEQ ID NO: 5472381 - DNA, 25 bp, Homo sapien
gacgtgattggtttcctcttggccg

SEQ ID NO: 5472382 - DNA, 25 bp, Homo sapien
cataaattaatcagccccagagtgc

SEQ ID NO: 5472383 - DNA, 25 bp, Homo sapien
catttttcagaggacgtgcagacag

SEQ ID NO: 5472384 - DNA, 25 bp, Homo sapien
cctgtttgggagtgcgggattcaaa

SEQ ID NO: 5472385 - DNA, 25 bp, Homo sapien
ggctggcattctagattacttttct

SEQ ID NO: 5472386 - DNA, 25 bp, Homo sapien
tctttgatcaggatgacatgtgcca

SEQ ID NO: 5472387 - DNA, 25 bp, Homo sapien
gactcagaagtcctgagctgccgca

SEQ ID NO: 5472388 - DNA, 25 bp, Homo sapien
aagtcctgagctgccgcatcagcag

SEQ ID NO: 5472389 - DNA, 25 bp, Homo sapien
tcagaagtcctgagctgccgcatca

SEQ ID NO: 5472390 - DNA, 25 bp, Homo sapien
ggcatggactcagaagtcctgagct

SEQ ID NO: 5472391 - DNA, 25 bp, Homo sapien
tgaagtgctgcagggttacacatgg

SEQ ID NO: 5472392 - DNA, 25 bp, Homo sapien
cagaatcgctgcttgcaacttggca

SEQ ID NO: 5472393 - DNA, 25 bp, Homo sapien
gatgggaacacgcttgatgaatgac

SEQ ID NO: 5472394 - DNA, 25 bp, Homo sapien
tttgcagactcggaaaaagccggct

SEQ ID NO: 5472395 - DNA, 25 bp, Homo sapien
ccaagtacgtttgtctgacagccca

SEQ ID NO: 5472396 - DNA, 25 bp, Homo sapien
cggagttcatccacacgcatgctga

SEQ ID NO: 5472397 - DNA, 25 bp, Homo sapien
atgctgacagcgtgcctaaggccag

SEQ ID NO: 5472398 - DNA, 25 bp, Homo sapien
gaggcctagagtgtcccatctgtct

SEQ ID NO: 5472399 - DNA, 25 bp, Homo sapien
aatggtgacttgatttcctgcccag

SEQ ID NO: 5472400 - DNA, 25 bp, Homo sapien
tcctgcccagtgataaagagtattg

SEQ ID NO: 5472401 - DNA, 25 bp, Homo sapien
gagtattgctgctaaacaagcttga

SEQ ID NO: 5472402 - DNA, 25 bp, Homo sapien
ttcgatagagtacaaggaggcagct

SEQ ID NO: 5472403 - DNA, 25 bp, Homo sapien
tcaagggtcattgcatgcagggctc

SEQ ID NO: 5472404 - DNA, 25 bp, Homo sapien
gaaaaacaggcctatcaaagagaac

SEQ ID NO: 5472405 - DNA, 25 bp, Homo sapien
gagcgtctgggaccaccaggactgt

SEQ ID NO: 5472406 - DNA, 25 bp, Homo sapien
ggctcgaacttacgtctcacaagca

SEQ ID NO: 5472407 - DNA, 25 bp, Homo sapien
aactttattcacataatttctacac

SEQ ID NO: 5472408 - DNA, 25 bp, Homo sapien
tttattcacataatttctacaccaa

SEQ ID NO: 5472409 - DNA, 25 bp, Homo sapien
ttattcacataatttctacaccaag

SEQ ID NO: 5472410 - DNA, 25 bp, Homo sapien
aattgagcaactttattcacataat

SEQ ID NO: 5472411 - DNA, 25 bp, Homo sapien
aagggcagagaagtcaaccaagtcc

SEQ ID NO: 5472412 - DNA, 25 bp, Homo sapien
gatggaaccaatttcactaatattt

SEQ ID NO: 5472413 - DNA, 25 bp, Homo sapien
tatctctgatggaaccaatttcact

SEQ ID NO: 5472414 - DNA, 25 bp, Homo sapien
tttaagggcagagaagtcaaccaag

SEQ ID NO: 5472415 - DNA, 25 bp, Homo sapien
gaagataaataacactccgaaataa

SEQ ID NO: 5472416 - DNA, 25 bp, Homo sapien
acaaaaatacaaacagagagcaagt

SEQ ID NO: 5472417 - DNA, 25 bp, Homo sapien
ggaagataaataacactccgaaata

SEQ ID NO: 5472418 - DNA, 25 bp, Homo sapien
ccatcctgtaagacgtgttctctcc

SEQ ID NO: 5472419 - DNA, 25 bp, Homo sapien
tccatcctgtaagacgtgttctctc

SEQ ID NO: 5472420 - DNA, 25 bp, Homo sapien
catcctgtaagacgtgttctctcct

SEQ ID NO: 5472421 - DNA, 25 bp, Homo sapien
ggcgggactgcaggcttcgaaggca

SEQ ID NO: 5472422 - DNA, 25 bp, Homo sapien
gaaggaacaaggcataccagacctt

SEQ ID NO: 5472423 - DNA, 25 bp, Homo sapien
tctgccatgcacaggcgggactgca

SEQ ID NO: 5472424 - DNA, 25 bp, Homo sapien
aacaaggcataccagaccttggttc

SEQ ID NO: 5472425 - DNA, 25 bp, Homo sapien
tctgaggcacccagggaattgccct

SEQ ID NO: 5472426 - DNA, 25 bp, Homo sapien
tgatggcacgagcaacacatgtaga

SEQ ID NO: 5472427 - DNA, 25 bp, Homo sapien
caattgcagttgagcccagtagact

SEQ ID NO: 5472428 - DNA, 25 bp, Homo sapien
tctttttgcagggaactgatggtcc

SEQ ID NO: 5472429 - DNA, 25 bp, Homo sapien
ctcagagcagggtatgaagttctcc

SEQ ID NO: 5472430 - DNA, 25 bp, Homo sapien
cagcctgcgggtttctaagccctga

SEQ ID NO: 5472431 - DNA, 25 bp, Homo sapien
taacgattccttccgtggcctggca

SEQ ID NO: 5472432 - DNA, 25 bp, Homo sapien
gatgaatcgctcttgggcaggcacc

SEQ ID NO: 5472433 - DNA, 25 bp, Homo sapien
ttttgcatgatgaacgttttggtgg

SEQ ID NO: 5472434 - DNA, 25 bp, Homo sapien
gatgatgcttgatggctttgtgctc

SEQ ID NO: 5472435 - DNA, 25 bp, Homo sapien
catgatgaacgttttggtggagatg

SEQ ID NO: 5472436 - DNA, 25 bp, Homo sapien
tcaacagccggctcatggagtgcag

SEQ ID NO: 5472437 - DNA, 25 bp, Homo sapien
ccctgcgtacaggtcactgatggtc

SEQ ID NO: 5472438 - DNA, 25 bp, Homo sapien
tggtcacattgcaaatgtcatcatc

SEQ ID NO: 5472439 - DNA, 25 bp, Homo sapien
gatggtcacattgcaaatgtcatca

SEQ ID NO: 5472440 - DNA, 25 bp, Homo sapien
tgatggtcacattgcaaatgtcatc

SEQ ID NO: 5472441 - DNA, 25 bp, Homo sapien
tagggagaggctgtcatttctaggt

SEQ ID NO: 5472442 - DNA, 25 bp, Homo sapien
gactctttctggagatacgactgca

SEQ ID NO: 5472443 - DNA, 25 bp, Homo sapien
gctggtttcgctgggtcaccaggac

SEQ ID NO: 5472444 - DNA, 25 bp, Homo sapien
ggaaggatgcaaaggatcccattct

SEQ ID NO: 5472445 - DNA, 25 bp, Homo sapien
gatgaagctggtttcgctgggtcac

SEQ ID NO: 5472446 - DNA, 25 bp, Homo sapien
ggagtcacacgtacatcccttccag

SEQ ID NO: 5472447 - DNA, 25 bp, Homo sapien
aggcagcggagtcacacgtacatcc

SEQ ID NO: 5472448 - DNA, 25 bp, Homo sapien
agcggagtcacacgtacatcccttc

SEQ ID NO: 5472449 - DNA, 25 bp, Homo sapien
gcagcggagtcacacgtacatccct

SEQ ID NO: 5472450 - DNA, 25 bp, Homo sapien
ttgtagcagtatatccacttgggtc

SEQ ID NO: 5472451 - DNA, 25 bp, Homo sapien
gcaccttgtagcagtatatccactt

SEQ ID NO: 5472452 - DNA, 25 bp, Homo sapien
ccttgtagcagtatatccacttggg

SEQ ID NO: 5472453 - DNA, 25 bp, Homo sapien
tctgcaccttgtagcagtatatcca

SEQ ID NO: 5472454 - DNA, 25 bp, Homo sapien
aaccatgtctagagaagtttatgac

SEQ ID NO: 5472455 - DNA, 25 bp, Homo sapien
gaacaaactggcaagctcattaatg

SEQ ID NO: 5472456 - DNA, 25 bp, Homo sapien
ttctgagtatagctgaccttttggc

SEQ ID NO: 5472457 - DNA, 25 bp, Homo sapien
cacttcctgctatgttaataatcca

SEQ ID NO: 5472458 - DNA, 25 bp, Homo sapien
caaccaaggaggataagaagcacat

SEQ ID NO: 5472459 - DNA, 25 bp, Homo sapien
taccgctgaagggaatcgacacgag

SEQ ID NO: 5472460 - DNA, 25 bp, Homo sapien
gacacgaggaaatccgagacttgga

SEQ ID NO: 5472461 - DNA, 25 bp, Homo sapien
tactgtttgggttagtgacggctgc

SEQ ID NO: 5472462 - DNA, 25 bp, Homo sapien
tgctaaggcccaagcaactgactct

SEQ ID NO: 5472463 - DNA, 25 bp, Homo sapien
ggtctgacgtggcatcgacctcacc

SEQ ID NO: 5472464 - DNA, 25 bp, Homo sapien
ggcatcgacctcaccgctttttgaa

SEQ ID NO: 5472465 - DNA, 25 bp, Homo sapien
actgactcttcctggtctgacgtgg

SEQ ID NO: 5472466 - DNA, 25 bp, Homo sapien
catctgtcctgtccgcgggcttcat

SEQ ID NO: 5472467 - DNA, 25 bp, Homo sapien
caggctgcagcttgcacggagccat

SEQ ID NO: 5472468 - DNA, 25 bp, Homo sapien
caggactgtgcggtgcgagggaagc

SEQ ID NO: 5472469 - DNA, 25 bp, Homo sapien
gtgcgagggaagctcaggaccccag

SEQ ID NO: 5472470 - DNA, 25 bp, Homo sapien
ttaagcccaagctaacgcacagagg

SEQ ID NO: 5472471 - DNA, 25 bp, Homo sapien
tcctgaggtcatcagcgagaacaga

SEQ ID NO: 5472472 - DNA, 25 bp, Homo sapien
gaacagagaaataggcaagtggccc

SEQ ID NO: 5472473 - DNA, 25 bp, Homo sapien
tgtcctgaccaggagctcatacctg

SEQ ID NO: 5472474 - DNA, 25 bp, Homo sapien
agtcttccaccccaaattctcaatc

SEQ ID NO: 5472475 - DNA, 25 bp, Homo sapien
tattagtcttccaccccaaattctc

SEQ ID NO: 5472476 - DNA, 25 bp, Homo sapien
tagtcttccaccccaaattctcaat

SEQ ID NO: 5472477 - DNA, 25 bp, Homo sapien
ttagtcttccaccccaaattctcaa

SEQ ID NO: 5472478 - DNA, 25 bp, Homo sapien
acactcttcacccgaatactcagaa

SEQ ID NO: 5472479 - DNA, 25 bp, Homo sapien
tcacactcttcacccgaatactcag

SEQ ID NO: 5472480 - DNA, 25 bp, Homo sapien
ctcttcacccgaatactcagaaggt

SEQ ID NO: 5472481 - DNA, 25 bp, Homo sapien
cattcacactcttcacccgaatact

SEQ ID NO: 5472482 - DNA, 25 bp, Homo sapien
cctgtggcgtctcgtaggtcagcgt

SEQ ID NO: 5472483 - DNA, 25 bp, Homo sapien
gggtgtcctcgaagggctggttgta

SEQ ID NO: 5472484 - DNA, 25 bp, Homo sapien
cagcgtggccatttgcaccaccggg

SEQ ID NO: 5472485 - DNA, 25 bp, Homo sapien
gtcagcgtggccatttgcaccaccg

SEQ ID NO: 5472486 - DNA, 25 bp, Homo sapien
tatcagccgctgcatgcgcctctgg

SEQ ID NO: 5472487 - DNA, 25 bp, Homo sapien
agcggcggcgactggccctgagctt

SEQ ID NO: 5472488 - DNA, 25 bp, Homo sapien
tgcagcagctggtcgtcttccacgt

SEQ ID NO: 5472489 - DNA, 25 bp, Homo sapien
cgctgcatgcgcctctggaagcggc

SEQ ID NO: 5472490 - DNA, 25 bp, Homo sapien
aagcgccaacccggactgcagggcc

SEQ ID NO: 5472491 - DNA, 25 bp, Homo sapien
cccagccagtacccaagcgccaacc

SEQ ID NO: 5472492 - DNA, 25 bp, Homo sapien
cccaagcgccaacccggactgcagg

SEQ ID NO: 5472493 - DNA, 25 bp, Homo sapien
cgccaacccggactgcagggcctcg

SEQ ID NO: 5472494 - DNA, 25 bp, Homo sapien
caatttgtgggctagcacctaagga

SEQ ID NO: 5472495 - DNA, 25 bp, Homo sapien
caatttggactagcacagttcaagc

SEQ ID NO: 5472496 - DNA, 25 bp, Homo sapien
ttcagatattgtgggtggcacgtca

SEQ ID NO: 5472497 - DNA, 25 bp, Homo sapien
tctggacacttacgggttttgctca

SEQ ID NO: 5472498 - DNA, 25 bp, Homo sapien
caagagaggctttatttagatcacc

SEQ ID NO: 5472499 - DNA, 25 bp, Homo sapien
tttcaaacaagagaggctttattta

SEQ ID NO: 5472500 - DNA, 25 bp, Homo sapien
aaacaagagaggctttatttagatc

SEQ ID NO: 5472501 - DNA, 25 bp, Homo sapien
ttcaaacaagagaggctttatttag

SEQ ID NO: 5472502 - DNA, 25 bp, Homo sapien
ggaaccgtcagaagcaaattatagc

SEQ ID NO: 5472503 - DNA, 25 bp, Homo sapien
ggaactcaaacaacagggcacacct

SEQ ID NO: 5472504 - DNA, 25 bp, Homo sapien
tttgtgctctggataaaaacccacc

SEQ ID NO: 5472505 - DNA, 25 bp, Homo sapien
caaagtagcaagtgtcatgtcagaa

SEQ ID NO: 5472506 - DNA, 25 bp, Homo sapien
gggaagaagtcatcgtggtattctg

SEQ ID NO: 5472507 - DNA, 25 bp, Homo sapien
aagtcatcgtggtattctgctaaaa

SEQ ID NO: 5472508 - DNA, 25 bp, Homo sapien
gaagtcatcgtggtattctgctaaa

SEQ ID NO: 5472509 - DNA, 25 bp, Homo sapien
actctgggaagaagtcatcgtggta

SEQ ID NO: 5472510 - DNA, 25 bp, Homo sapien
ctggtgggtaattgtcaggtacgag

SEQ ID NO: 5472511 - DNA, 25 bp, Homo sapien
attgtcaggtacgagcttccaggag

SEQ ID NO: 5472512 - DNA, 25 bp, Homo sapien
tgggtaattgtcaggtacgagcttc

SEQ ID NO: 5472513 - DNA, 25 bp, Homo sapien
tgtcaggtacgagcttccaggagag

SEQ ID NO: 5472514 - DNA, 25 bp, Homo sapien
ggtgaggtgctgctcttagaaagcc

SEQ ID NO: 5472515 - DNA, 25 bp, Homo sapien
cagagactgcactgcttgcggctcg

SEQ ID NO: 5472516 - DNA, 25 bp, Homo sapien
gatggattcaacaaacgtaagctgg

SEQ ID NO: 5472517 - DNA, 25 bp, Homo sapien
gaaaaaccttagatgcagtcacctt

SEQ ID NO: 5472518 - DNA, 25 bp, Homo sapien
catccttgtcttcactactgtcaga

SEQ ID NO: 5472519 - DNA, 25 bp, Homo sapien
gaagctccggttcttctttcacttc

SEQ ID NO: 5472520 - DNA, 25 bp, Homo sapien
ggaactgcttaatgagttttcatca

SEQ ID NO: 5472521 - DNA, 25 bp, Homo sapien
tcatttttttcttcgatggagaggc

SEQ ID NO: 5472522 - DNA, 25 bp, Homo sapien
ttgctcctcaggtgagctacagcat

SEQ ID NO: 5472523 - DNA, 25 bp, Homo sapien
cttgctcctcaggtgagctacagca

SEQ ID NO: 5472524 - DNA, 25 bp, Homo sapien
gcgcgcgacgctgccgacggcgcat

SEQ ID NO: 5472525 - DNA, 25 bp, Homo sapien
tccgtcggcggcttgcgtccgcgtc

SEQ ID NO: 5472526 - DNA, 25 bp, Homo sapien
gtagcgccggctgcgcgacagggcg

SEQ ID NO: 5472527 - DNA, 25 bp, Homo sapien
tgccgacggcgcatgcgcggtccgg

SEQ ID NO: 5472528 - DNA, 25 bp, Homo sapien
agaaaaatgtgtgtcctcagtgtcc

SEQ ID NO: 5472529 - DNA, 25 bp, Homo sapien
tttgggaacatcattgttgtgcagc

SEQ ID NO: 5472530 - DNA, 25 bp, Homo sapien
tgaagtttgggaacatcattgttgt

SEQ ID NO: 5472531 - DNA, 25 bp, Homo sapien
agtttgggaacatcattgttgtgca

SEQ ID NO: 5472532 - DNA, 25 bp, Homo sapien
aagtttgggaacatcattgttgtgc

SEQ ID NO: 5472533 - DNA, 25 bp, Homo sapien
tcagtttgtgatccctgctctgcag

SEQ ID NO: 5472534 - DNA, 25 bp, Homo sapien
gatcatttagttcagctgcacagaa

SEQ ID NO: 5472535 - DNA, 25 bp, Homo sapien
gcaacacagaggtaattgatcccca

SEQ ID NO: 5472536 - DNA, 25 bp, Homo sapien
gatctcaggccaattggaaacctca

SEQ ID NO: 5472537 - DNA, 25 bp, Homo sapien
catagggagtgggttgtcatagacc

SEQ ID NO: 5472538 - DNA, 25 bp, Homo sapien
gaagtgcgttgttggagatcatcat

SEQ ID NO: 5472539 - DNA, 25 bp, Homo sapien
ccaccatagggagtgggttgttgca

SEQ ID NO: 5472540 - DNA, 25 bp, Homo sapien
gagtgggttgttgtaaaccaccata

SEQ ID NO: 5472541 - DNA, 25 bp, Homo sapien
acagtttctatggaaccgtgtgttc

SEQ ID NO: 5472542 - DNA, 25 bp, Homo sapien
tatggatctctatgttaacttgcac

SEQ ID NO: 5472543 - DNA, 25 bp, Homo sapien
tgctgttgacataggaagtgtagcc

SEQ ID NO: 5472544 - DNA, 25 bp, Homo sapien
gaagttgaggtacaggccacagttt

SEQ ID NO: 5472545 - DNA, 25 bp, Homo sapien
gaccagggtcttggcaacagattca

SEQ ID NO: 5472546 - DNA, 25 bp, Homo sapien
gattcattgcatatttgcgcctctg

SEQ ID NO: 5472547 - DNA, 25 bp, Homo sapien
tgcgcctctggtgccatggtaacct

SEQ ID NO: 5472548 - DNA, 25 bp, Homo sapien
gatgacctacacctatattaaagtt

SEQ ID NO: 5472549 - DNA, 25 bp, Homo sapien
caataccagtttccataagcaggct

SEQ ID NO: 5472550 - DNA, 25 bp, Homo sapien
tgcttatcagggagaatgtgtgcaa

SEQ ID NO: 5472551 - DNA, 25 bp, Homo sapien
gtctatttaagctaacaataccagt

SEQ ID NO: 5472552 - DNA, 25 bp, Homo sapien
cataagcaggctcaatgaaatcctt

SEQ ID NO: 5472553 - DNA, 25 bp, Homo sapien
catgctaaaggcaatgataaatacg

SEQ ID NO: 5472554 - DNA, 25 bp, Homo sapien
tgccagggtcaatgtggtatgtacc

SEQ ID NO: 5472555 - DNA, 25 bp, Homo sapien
tccaacacatcaggaatgcttctgc

SEQ ID NO: 5472556 - DNA, 25 bp, Homo sapien
tttgttagtatcaaaagctggctgt

SEQ ID NO: 5472557 - DNA, 25 bp, Homo sapien
tgaagcttctgctggagtggaacca

SEQ ID NO: 5472558 - DNA, 25 bp, Homo sapien
ggaaccagctggacttagccaatga

SEQ ID NO: 5472559 - DNA, 25 bp, Homo sapien
tttcaccaatgaccgccgatgggag

SEQ ID NO: 5472560 - DNA, 25 bp, Homo sapien
cgatgggaggtaagcacgaagctct

SEQ ID NO: 5472561 - DNA, 25 bp, Homo sapien
cagggtgagagcaagccatttgttt

SEQ ID NO: 5472562 - DNA, 25 bp, Homo sapien
tttgacctaggcgaggagctgaccc

SEQ ID NO: 5472563 - DNA, 25 bp, Homo sapien
taaaagaatctaggctgttccttgg

SEQ ID NO: 5472564 - DNA, 25 bp, Homo sapien
tgggcaccctccctgaagactatgg

SEQ ID NO: 5472565 - DNA, 25 bp, Homo sapien
tatgtgaaaagtcgcccaaaatgca

SEQ ID NO: 5472566 - DNA, 25 bp, Homo sapien
gatgcttcttacctgtcagaggagg

SEQ ID NO: 5472567 - DNA, 25 bp, Homo sapien
caggctcctattgaaggaaccaccc

SEQ ID NO: 5472568 - DNA, 25 bp, Homo sapien
agaggaccccgctctcttcaggaaa

SEQ ID NO: 5472569 - DNA, 25 bp, Homo sapien
cattgaaggctatctccagttgatc

SEQ ID NO: 5472570 - DNA, 25 bp, Homo sapien
gagcatctttgtgcatgaatcctat

SEQ ID NO: 5472571 - DNA, 25 bp, Homo sapien
ccagttgatcattgggatgagcatc

SEQ ID NO: 5472572 - DNA, 25 bp, Homo sapien
gcataataggcaacctctagcgatt

SEQ ID NO: 5472573 - DNA, 25 bp, Homo sapien
tgttgattgtccacaaaccacttga

SEQ ID NO: 5472574 - DNA, 25 bp, Homo sapien
ggacatgattcccttgttgtaggca

SEQ ID NO: 5472575 - DNA, 25 bp, Homo sapien
cacttgacaatggagcttcgggccc

SEQ ID NO: 5472576 - DNA, 25 bp, Homo sapien
tcccttgttgtaggcattgtctcca

SEQ ID NO: 5472577 - DNA, 25 bp, Homo sapien
ctgcctagatcccaaacttcgaaga

SEQ ID NO: 5472578 - DNA, 25 bp, Homo sapien
aacttcgaagacagccgtctgggca

SEQ ID NO: 5472579 - DNA, 25 bp, Homo sapien
tctgcagatgcatcctagagtcctc

SEQ ID NO: 5472580 - DNA, 25 bp, Homo sapien
gacttcatgccaactgccagtgtgg

SEQ ID NO: 5472581 - DNA, 25 bp, Homo sapien
ggctgtgtcttgtttccctcaaagg

SEQ ID NO: 5472582 - DNA, 25 bp, Homo sapien
gaggtctgctaatccttgctccgaa

SEQ ID NO: 5472583 - DNA, 25 bp, Homo sapien
tcacccagttggtcaccgaggtctg

SEQ ID NO: 5472584 - DNA, 25 bp, Homo sapien
gatgagctccctcagagtgtgagcc

SEQ ID NO: 5472585 - DNA, 25 bp, Homo sapien
gctctagtgtctggtatcatcggat

SEQ ID NO: 5472586 - DNA, 25 bp, Homo sapien
ccctttatgagagatttgagcttcc

SEQ ID NO: 5472587 - DNA, 25 bp, Homo sapien
gatggcgtatcctgatctccagccc

SEQ ID NO: 5472588 - DNA, 25 bp, Homo sapien
aatgtgaacgcatgccacggtggtc

SEQ ID NO: 5472589 - DNA, 25 bp, Homo sapien
tccttgggcattagcagaccagtag

SEQ ID NO: 5472590 - DNA, 25 bp, Homo sapien
catgatctacttccttcaagccgga

SEQ ID NO: 5472591 - DNA, 25 bp, Homo sapien
gaacacggctgtaggcagcaacaga

SEQ ID NO: 5472592 - DNA, 25 bp, Homo sapien
caacagagacgtcatggaagatgca

SEQ ID NO: 5472593 - DNA, 25 bp, Homo sapien
ttggtggataaacaggcttctcgga

SEQ ID NO: 5472594 - DNA, 25 bp, Homo sapien
aaacacgctgcgctttggtggataa

SEQ ID NO: 5472595 - DNA, 25 bp, Homo sapien
tttctaaacacgctgcgctttggtg

SEQ ID NO: 5472596 - DNA, 25 bp, Homo sapien
ctgcgctttggtggataaacaggct

SEQ ID NO: 5472597 - DNA, 25 bp, Homo sapien
catttgccgttgtacgttccttggt

SEQ ID NO: 5472598 - DNA, 25 bp, Homo sapien
tgccgttgtacgttccttggtctac

SEQ ID NO: 5472599 - DNA, 25 bp, Homo sapien
tgagcatttgccgttgtacgttcct

SEQ ID NO: 5472600 - DNA, 25 bp, Homo sapien
gctgagcatttgccgttgtacgttc

SEQ ID NO: 5472601 - DNA, 25 bp, Homo sapien
tgtcatgtaagagtgggccttgggc

SEQ ID NO: 5472602 - DNA, 25 bp, Homo sapien
tcatgtaagagtgggccttgggcat

SEQ ID NO: 5472603 - DNA, 25 bp, Homo sapien
ctgtcatgtaagagtgggccttggg

SEQ ID NO: 5472604 - DNA, 25 bp, Homo sapien
gtcatgtaagagtgggccttgggca

SEQ ID NO: 5472605 - DNA, 25 bp, Homo sapien
acctcagtagaggaactgttgatgg

SEQ ID NO: 5472606 - DNA, 25 bp, Homo sapien
ctggcggaggtgtgatgctggatca

SEQ ID NO: 5472607 - DNA, 25 bp, Homo sapien
gggacttgccactgagttgcatatc

SEQ ID NO: 5472608 - DNA, 25 bp, Homo sapien
cacaggtacctggactcagagttaa

SEQ ID NO: 5472609 - DNA, 25 bp, Homo sapien
tatttcaactcttcaactgggaagg

SEQ ID NO: 5472610 - DNA, 25 bp, Homo sapien
gtgacacggcagattaacatttaag

SEQ ID NO: 5472611 - DNA, 25 bp, Homo sapien
gatttctgcaacaacatcaagggtt

SEQ ID NO: 5472612 - DNA, 25 bp, Homo sapien
taagattaagtcattcttgtcccgg

SEQ ID NO: 5472613 - DNA, 25 bp, Homo sapien
taaagcataagccttactccctgac

SEQ ID NO: 5472614 - DNA, 25 bp, Homo sapien
gagtatagactccactgacacatct

SEQ ID NO: 5472615 - DNA, 25 bp, Homo sapien
gcactaatggagaaagaccaggtga

SEQ ID NO: 5472616 - DNA, 25 bp, Homo sapien
gacatctgctgtccaacaggtgtgg

SEQ ID NO: 5472617 - DNA, 25 bp, Homo sapien
tcattcgtgattccacacatagtcg

SEQ ID NO: 5472618 - DNA, 25 bp, Homo sapien
cacatagtcgtgaagcttctggaca

SEQ ID NO: 5472619 - DNA, 25 bp, Homo sapien
tctggacacagtcgtgaagctcctg

SEQ ID NO: 5472620 - DNA, 25 bp, Homo sapien
tgaagcttctggacacagtcgtgaa

SEQ ID NO: 5472621 - DNA, 25 bp, Homo sapien
tttactcaaactcccaatacagtgc

SEQ ID NO: 5472622 - DNA, 25 bp, Homo sapien
ttcaaacaagcagtagactacgtta

SEQ ID NO: 5472623 - DNA, 25 bp, Homo sapien
ccccacaacttgaggagctgttctc

SEQ ID NO: 5472624 - DNA, 25 bp, Homo sapien
gactacgttagagcctttactcaaa

SEQ ID NO: 5472625 - DNA, 25 bp, Homo sapien
gaactggcgtagcttcacttctgca

SEQ ID NO: 5472626 - DNA, 25 bp, Homo sapien
gagcatcatggtcacaggtagttct

SEQ ID NO: 5472627 - DNA, 25 bp, Homo sapien
gattgacgtttaagcccagaactgg

SEQ ID NO: 5472628 - DNA, 25 bp, Homo sapien
tctgcacatagttaggctggcttct

SEQ ID NO: 5472629 - DNA, 25 bp, Homo sapien
agatgttgtgatgtgggcccccgat

SEQ ID NO: 5472630 - DNA, 25 bp, Homo sapien
aagggtcctggatccggcagcagga

SEQ ID NO: 5472631 - DNA, 25 bp, Homo sapien
tgggcccccgatgacatgccaggga

SEQ ID NO: 5472632 - DNA, 25 bp, Homo sapien
tctccctcccagtaagggtcctgga

SEQ ID NO: 5472633 - DNA, 25 bp, Homo sapien
agatgaagggcacttaactgtgtct

SEQ ID NO: 5472634 - DNA, 25 bp, Homo sapien
ttcccatattgagttttgctaaatc

SEQ ID NO: 5472635 - DNA, 25 bp, Homo sapien
cttcccatattgagttttgctaaat

SEQ ID NO: 5472636 - DNA, 25 bp, Homo sapien
ccatctctccatctccatggccacc

SEQ ID NO: 5472637 - DNA, 25 bp, Homo sapien
tctcaacttgttgccatctctccat

SEQ ID NO: 5472638 - DNA, 25 bp, Homo sapien
tgccatctctccatctccatggcca

SEQ ID NO: 5472639 - DNA, 25 bp, Homo sapien
atctctccatctccatggccaccat

SEQ ID NO: 5472640 - DNA, 25 bp, Homo sapien
ctcctccaagtcaacaaatttgatc

SEQ ID NO: 5472641 - DNA, 25 bp, Homo sapien
cctccaagtcaacaaatttgatcaa

SEQ ID NO: 5472642 - DNA, 25 bp, Homo sapien
caaatttgatcaattttaaccccag

SEQ ID NO: 5472643 - DNA, 25 bp, Homo sapien
gatcaattttaaccccagggactgc

SEQ ID NO: 5472644 - DNA, 25 bp, Homo sapien
ttagttagtcagcatatcacatttc

SEQ ID NO: 5472645 - DNA, 25 bp, Homo sapien
gtcagcatatcacatttcacgttga

SEQ ID NO: 5472646 - DNA, 25 bp, Homo sapien
gttagtcagcatatcacatttcacg

SEQ ID NO: 5472647 - DNA, 25 bp, Homo sapien
ttcacgttgataaactggtttgtgt

SEQ ID NO: 5472648 - DNA, 25 bp, Homo sapien
agcccgcgtacgtgtctttctgcag

SEQ ID NO: 5472649 - DNA, 25 bp, Homo sapien
tcaaggacctgtagcccgcgtacgt

SEQ ID NO: 5472650 - DNA, 25 bp, Homo sapien
gcaagggtgcatcaaggacctgtag

SEQ ID NO: 5472651 - DNA, 25 bp, Homo sapien
tgtagcccgcgtacgtgtctttctg

SEQ ID NO: 5472652 - DNA, 25 bp, Homo sapien
gttgagagcacagttcagttgacct

SEQ ID NO: 5472653 - DNA, 25 bp, Homo sapien
ggtccattctatcagtgcaaggagg

SEQ ID NO: 5472654 - DNA, 25 bp, Homo sapien
cacttgtccagagctcaagctttga

SEQ ID NO: 5472655 - DNA, 25 bp, Homo sapien
tcttagtggaccaaaccacagggca

SEQ ID NO: 5472656 - DNA, 25 bp, Homo sapien
ggatatctggaccaagtttgaagat

SEQ ID NO: 5472657 - DNA, 25 bp, Homo sapien
caggatatctggaccaagtttgaag

SEQ ID NO: 5472658 - DNA, 25 bp, Homo sapien
aggatatctggaccaagtttgaaga

SEQ ID NO: 5472659 - DNA, 25 bp, Homo sapien
cagtgagctgacaggcgggcacata

SEQ ID NO: 5472660 - DNA, 25 bp, Homo sapien
agaagtttgaggtattgctggattc

SEQ ID NO: 5472661 - DNA, 25 bp, Homo sapien
tagagggaaaaaccttaatcagaga

SEQ ID NO: 5472662 - DNA, 25 bp, Homo sapien
tcttggggtaaagaagtcatgagca

SEQ ID NO: 5472663 - DNA, 25 bp, Homo sapien
cgtgcaggcattcggtacccagact

SEQ ID NO: 5472664 - DNA, 25 bp, Homo sapien
tgagacgcattctccaccttgtacg

SEQ ID NO: 5472665 - DNA, 25 bp, Homo sapien
gacttctgctatgtggttctggcca

SEQ ID NO: 5472666 - DNA, 25 bp, Homo sapien
ggccacttgagtttggtaactgcac

SEQ ID NO: 5472667 - DNA, 25 bp, Homo sapien
gaatcggacaaaatgcactaagaaa

SEQ ID NO: 5472668 - DNA, 25 bp, Homo sapien
cagtgtcttcatgttttagatgtgg

SEQ ID NO: 5472669 - DNA, 25 bp, Homo sapien
tagatgtggctcgtttaaatagtag

SEQ ID NO: 5472670 - DNA, 25 bp, Homo sapien
gtagtaaccattcttatcccgaata

SEQ ID NO: 5472671 - DNA, 25 bp, Homo sapien
caaaatgagtttcactgaagagaag

SEQ ID NO: 5472672 - DNA, 25 bp, Homo sapien
cttgcaaaatgagtttcactgaaga

SEQ ID NO: 5472673 - DNA, 25 bp, Homo sapien
gcaaaatgagtttcactgaagagaa

SEQ ID NO: 5472674 - DNA, 25 bp, Homo sapien
tgcaaaatgagtttcactgaagaga

SEQ ID NO: 5472675 - DNA, 25 bp, Homo sapien
ccttgctgagattagtgtatatgcc

SEQ ID NO: 5472676 - DNA, 25 bp, Homo sapien
gaaaccagacggcttgttccacagc

SEQ ID NO: 5472677 - DNA, 25 bp, Homo sapien
ccctgtgctgttgttaatggctatg

SEQ ID NO: 5472678 - DNA, 25 bp, Homo sapien
caaacaaaccgaaacaggatgccca

SEQ ID NO: 5472679 - DNA, 25 bp, Homo sapien
agtttggagatccaggaatctggga

SEQ ID NO: 5472680 - DNA, 25 bp, Homo sapien
ctagtttggagatccaggaatctgg

SEQ ID NO: 5472681 - DNA, 25 bp, Homo sapien
tttggagatccaggaatctgggagt

SEQ ID NO: 5472682 - DNA, 25 bp, Homo sapien
ttggagatccaggaatctgggagtt

SEQ ID NO: 5472683 - DNA, 25 bp, Homo sapien
gtgatgtgttctgtgtagtcctgtc

SEQ ID NO: 5472684 - DNA, 25 bp, Homo sapien
ttgaatgagagggtgctagtgggct

SEQ ID NO: 5472685 - DNA, 25 bp, Homo sapien
ttctgtgtagtcctgtccacactgc

SEQ ID NO: 5472686 - DNA, 25 bp, Homo sapien
ctagtgggctattgtgtggcacagc

SEQ ID NO: 5472687 - DNA, 25 bp, Homo sapien
tctgtggcatctgttaagtcttcaa

SEQ ID NO: 5472688 - DNA, 25 bp, Homo sapien
tcaaacacataggactctctccaag

SEQ ID NO: 5472689 - DNA, 25 bp, Homo sapien
gcttaacctcggagagagcatttct

SEQ ID NO: 5472690 - DNA, 25 bp, Homo sapien
gtcaagcgacgagaaagtgcatttt

SEQ ID NO: 5472691 - DNA, 25 bp, Homo sapien
gggattctgtggctcggagcacatg

SEQ ID NO: 5472692 - DNA, 25 bp, Homo sapien
ggattctgtggctcggagcacatgt

SEQ ID NO: 5472693 - DNA, 25 bp, Homo sapien
acacattcactgtgggattctgtgg

SEQ ID NO: 5472694 - DNA, 25 bp, Homo sapien
ttctgctgtatctccttccacttct

SEQ ID NO: 5472695 - DNA, 25 bp, Homo sapien
cacactgggtacctcattctgctgt

SEQ ID NO: 5472696 - DNA, 25 bp, Homo sapien
cactgggtacctcattctgctgtat

SEQ ID NO: 5472697 - DNA, 25 bp, Homo sapien
ctgggtacctcattctgctgtatct

SEQ ID NO: 5472698 - DNA, 25 bp, Homo sapien
cagattcgtctggatttttacccaa

SEQ ID NO: 5472699 - DNA, 25 bp, Homo sapien
tcttcagattcgtctggatttttac

SEQ ID NO: 5472700 - DNA, 25 bp, Homo sapien
ggtttcttcagattcgtctggattt

SEQ ID NO: 5472701 - DNA, 25 bp, Homo sapien
tcgtctggatttttacccaactgga

SEQ ID NO: 5472702 - DNA, 25 bp, Homo sapien
ctgaagaggcatctggctgatccaa

SEQ ID NO: 5472703 - DNA, 25 bp, Homo sapien
agcaagaccttgaacttttgagttc

SEQ ID NO: 5472704 - DNA, 25 bp, Homo sapien
gaagaggcatctggctgatccaacc

SEQ ID NO: 5472705 - DNA, 25 bp, Homo sapien
aacttttgagttctccctattctct

SEQ ID NO: 5472706 - DNA, 25 bp, Homo sapien
tccgtgagctgttctctcttgtaac

SEQ ID NO: 5472707 - DNA, 25 bp, Homo sapien
ttgtgtttgaagactagccagttcc

SEQ ID NO: 5472708 - DNA, 25 bp, Homo sapien
tgcaggtcatttctagcgttctgtt

SEQ ID NO: 5472709 - DNA, 25 bp, Homo sapien
tgaagactagccagttcctccgtga

SEQ ID NO: 5472710 - DNA, 25 bp, Homo sapien
cagctgtcagtccagcgaagtcagc

SEQ ID NO: 5472711 - DNA, 25 bp, Homo sapien
gttttgggaaccacatgcctgcagg

SEQ ID NO: 5472712 - DNA, 25 bp, Homo sapien
tctgttttgggaaccacatgcctgc

SEQ ID NO: 5472713 - DNA, 25 bp, Homo sapien
cctgcaggagcgatccacctctgct

SEQ ID NO: 5472714 - DNA, 25 bp, Homo sapien
tattccttggcctgccgggcgggga

SEQ ID NO: 5472715 - DNA, 25 bp, Homo sapien
gacatctgaacactaaaaggttcac

SEQ ID NO: 5472716 - DNA, 25 bp, Homo sapien
ctgccgggcggggaaggacatctga

SEQ ID NO: 5472717 - DNA, 25 bp, Homo sapien
aaggacatctgaacactaaaaggtt

SEQ ID NO: 5472718 - DNA, 25 bp, Homo sapien
tgctgtaaaagcctgctggactctg

SEQ ID NO: 5472719 - DNA, 25 bp, Homo sapien
ctgtctgctgtaaaagcctgctgga

SEQ ID NO: 5472720 - DNA, 25 bp, Homo sapien
gactcagtttgaccagctggctggg

SEQ ID NO: 5472721 - DNA, 25 bp, Homo sapien
ggactctgctcctgactcagtttga

SEQ ID NO: 5472722 - DNA, 25 bp, Homo sapien
gaaagtgtcttggaaacaggatacc

SEQ ID NO: 5472723 - DNA, 25 bp, Homo sapien
atttccaggtagcactgagaaagtg

SEQ ID NO: 5472724 - DNA, 25 bp, Homo sapien
tgtttctgagtttcctggtaaccaa

SEQ ID NO: 5472725 - DNA, 25 bp, Homo sapien
caggataccatatttgtttctgagt

SEQ ID NO: 5472726 - DNA, 25 bp, Homo sapien
agccctgctctggtgtctgtgacat

SEQ ID NO: 5472727 - DNA, 25 bp, Homo sapien
cagagccctgctctggtgtctgtga

SEQ ID NO: 5472728 - DNA, 25 bp, Homo sapien
ggtggccgcatggcccagaggcaca

SEQ ID NO: 5472729 - DNA, 25 bp, Homo sapien
ttaaggggtggccgcatggcccaga

SEQ ID NO: 5472730 - DNA, 25 bp, Homo sapien
ctcgctgaggaacaagttggccagg

SEQ ID NO: 5472731 - DNA, 25 bp, Homo sapien
tctcgctgaggaacaagttggccag

SEQ ID NO: 5472732 - DNA, 25 bp, Homo sapien
atggtttccagatgggaatccacaa

SEQ ID NO: 5472733 - DNA, 25 bp, Homo sapien
ggtttccagatgggaatccacaagc

SEQ ID NO: 5472734 - DNA, 25 bp, Homo sapien
gatggtttccagatgggaatccaca

SEQ ID NO: 5472735 - DNA, 25 bp, Homo sapien
cagccccacggatgtaatgctcctg

SEQ ID NO: 5472736 - DNA, 25 bp, Homo sapien
ggcagccccacggatgtaatgctcc

SEQ ID NO: 5472737 - DNA, 25 bp, Homo sapien
cccacggatgtaatgctcctggcct

SEQ ID NO: 5472738 - DNA, 25 bp, Homo sapien
cggatgtaatgctcctggcctctgc

SEQ ID NO: 5472739 - DNA, 25 bp, Homo sapien
tcatgcctgcccctttatgaaggac

SEQ ID NO: 5472740 - DNA, 25 bp, Homo sapien
tatgaaggacagagcgcgggtctcc

SEQ ID NO: 5472741 - DNA, 25 bp, Homo sapien
ggctgcttagatggctgggcccctt

SEQ ID NO: 5472742 - DNA, 25 bp, Homo sapien
tcagttgttccaaactcagggtgca

SEQ ID NO: 5472743 - DNA, 25 bp, Homo sapien
tattaacgggacagccaccttctaa

SEQ ID NO: 5472744 - DNA, 25 bp, Homo sapien
agtccaggtcttctgttcacatgga

SEQ ID NO: 5472745 - DNA, 25 bp, Homo sapien
gccaccttctaaacagggacagagt

SEQ ID NO: 5472746 - DNA, 25 bp, Homo sapien
gacagagttctataggcacaaaggg

SEQ ID NO: 5472747 - DNA, 25 bp, Homo sapien
cagtgagcccatccattcgggacca

SEQ ID NO: 5472748 - DNA, 25 bp, Homo sapien
actaccagtcttccgcatcttgatg

SEQ ID NO: 5472749 - DNA, 25 bp, Homo sapien
ttgatggtagtagtcctccaggccc

SEQ ID NO: 5472750 - DNA, 25 bp, Homo sapien
aataaatatcagtgagcccatccat

SEQ ID NO: 5472751 - DNA, 25 bp, Homo sapien
gccggctggcggctgttactgtgga

SEQ ID NO: 5472752 - DNA, 25 bp, Homo sapien
tggcggctgttactgtggaggttgt

SEQ ID NO: 5472753 - DNA, 25 bp, Homo sapien
gaatcctcatgctcacggacacctg

SEQ ID NO: 5472754 - DNA, 25 bp, Homo sapien
gaatctttccagtgagctttgaatc

SEQ ID NO: 5472755 - DNA, 25 bp, Homo sapien
gatgatttaggactctggtcacctc

SEQ ID NO: 5472756 - DNA, 25 bp, Homo sapien
tcttgatgatttaggactctggtca

SEQ ID NO: 5472757 - DNA, 25 bp, Homo sapien
ttctgctcccaagaaaaacccttca

SEQ ID NO: 5472758 - DNA, 25 bp, Homo sapien
ccatcctgtcttgatgatttaggac

SEQ ID NO: 5472759 - DNA, 25 bp, Homo sapien
gagtgtggttgctttactttctaca

SEQ ID NO: 5472760 - DNA, 25 bp, Homo sapien
cccagctctagcgtgcgtggagaga

SEQ ID NO: 5472761 - DNA, 25 bp, Homo sapien
caaaagttccgaaagcaggagccca

SEQ ID NO: 5472762 - DNA, 25 bp, Homo sapien
cgtggagagaggtcatggagtgtgg

SEQ ID NO: 5472763 - DNA, 25 bp, Homo sapien
agtccccaggagaggtgaacaagga

SEQ ID NO: 5472764 - DNA, 25 bp, Homo sapien
tcctcacgtttctggaagttccctg

SEQ ID NO: 5472765 - DNA, 25 bp, Homo sapien
gaggtgaacaaggaaggaatgctct

SEQ ID NO: 5472766 - DNA, 25 bp, Homo sapien
tgataggtgagacccaggtgcagca

SEQ ID NO: 5472767 - DNA, 25 bp, Homo sapien
gcataggttgttgggcctcttggaa

SEQ ID NO: 5472768 - DNA, 25 bp, Homo sapien
ttggaatgatgaccccagtataagc

SEQ ID NO: 5472769 - DNA, 25 bp, Homo sapien
cctcttggaatgatgaccccagtat

SEQ ID NO: 5472770 - DNA, 25 bp, Homo sapien
cttctcctgtgcataggttgttggg

SEQ ID NO: 5472771 - DNA, 25 bp, Homo sapien
tggccaggatcagcacactaggttg

SEQ ID NO: 5472772 - DNA, 25 bp, Homo sapien
gaaagtcatgtcctctctgatggcc

SEQ ID NO: 5472773 - DNA, 25 bp, Homo sapien
gcagaaccccttggcgacaagctct

SEQ ID NO: 5472774 - DNA, 25 bp, Homo sapien
agaatgccaccaacacgagccagca

SEQ ID NO: 5472775 - DNA, 25 bp, Homo sapien
aaggtcaaaaaagacccatcctctg

SEQ ID NO: 5472776 - DNA, 25 bp, Homo sapien
caagtgtaattactaggtgctttcc

SEQ ID NO: 5472777 - DNA, 25 bp, Homo sapien
ggtcaaaaaagacccatcctctgtc

SEQ ID NO: 5472778 - DNA, 25 bp, Homo sapien
tgtccttcaaagtcccaacttcaag

SEQ ID NO: 5472779 - DNA, 25 bp, Homo sapien
gacaactgtcgagggtccttgatcg

SEQ ID NO: 5472780 - DNA, 25 bp, Homo sapien
aactgtcgagggtccttgatcgtca

SEQ ID NO: 5472781 - DNA, 25 bp, Homo sapien
tcgagggtccttgatcgtcatccat

SEQ ID NO: 5472782 - DNA, 25 bp, Homo sapien
tgtcgagggtccttgatcgtcatcc

SEQ ID NO: 5472783 - DNA, 25 bp, Homo sapien
ctctgagatgttttcctaaacccaa

SEQ ID NO: 5472784 - DNA, 25 bp, Homo sapien
tctctgagatgttttcctaaaccca

SEQ ID NO: 5472785 - DNA, 25 bp, Homo sapien
tgctttcaaagctccagttccaggg

SEQ ID NO: 5472786 - DNA, 25 bp, Homo sapien
ctgacccatgggttgaggctaagag

SEQ ID NO: 5472787 - DNA, 25 bp, Homo sapien
ctttcaaagctccagttccagggat

SEQ ID NO: 5472788 - DNA, 25 bp, Homo sapien
attcctcattcgcttctctgcatag

SEQ ID NO: 5472789 - DNA, 25 bp, Homo sapien
tgatagtagtatggccaaccacccc

SEQ ID NO: 5472790 - DNA, 25 bp, Homo sapien
tagacaacaggtaagctccgtgagg

SEQ ID NO: 5472791 - DNA, 25 bp, Homo sapien
gaccagttttcgcttttagacaaca

SEQ ID NO: 5472792 - DNA, 25 bp, Homo sapien
cacgatattaacatcagacggagag

SEQ ID NO: 5472793 - DNA, 25 bp, Homo sapien
cctgtccagatgtcatagccattag

SEQ ID NO: 5472794 - DNA, 25 bp, Homo sapien
tctcctgtccagatgtcatagccat

SEQ ID NO: 5472795 - DNA, 25 bp, Homo sapien
gtccagatgtcatagccattagtac

SEQ ID NO: 5472796 - DNA, 25 bp, Homo sapien
tttgtctcctgtccagatgtcatag

SEQ ID NO: 5472797 - DNA, 25 bp, Homo sapien
caacaaatactctgtcaaagagtag

SEQ ID NO: 5472798 - DNA, 25 bp, Homo sapien
tgacttcctcaaccgcagactcata

SEQ ID NO: 5472799 - DNA, 25 bp, Homo sapien
caacagctactccttttgcttgcaa

SEQ ID NO: 5472800 - DNA, 25 bp, Homo sapien
cagttgtggtggcaatcctttcaac

SEQ ID NO: 5472801 - DNA, 25 bp, Homo sapien
tactgtgctccgaatgtttgccaaa

SEQ ID NO: 5472802 - DNA, 25 bp, Homo sapien
tatcacagcagtgatatctctgtgg

SEQ ID NO: 5472803 - DNA, 25 bp, Homo sapien
cgttctgcggcacgggaggcttatt

SEQ ID NO: 5472804 - DNA, 25 bp, Homo sapien
tattattcacgtgcatttccaccgt

SEQ ID NO: 5472805 - DNA, 25 bp, Homo sapien
catgggttggagaggctccgctgat

SEQ ID NO: 5472806 - DNA, 25 bp, Homo sapien
tggccccacgggcacggactgtctt

SEQ ID NO: 5472807 - DNA, 25 bp, Homo sapien
cgggcacggactgtcttcgtgccat

SEQ ID NO: 5472808 - DNA, 25 bp, Homo sapien
ttcataacttcaccatgggttggag

SEQ ID NO: 5472809 - DNA, 25 bp, Homo sapien
gctcagcaagctgcgggcagacact

SEQ ID NO: 5472810 - DNA, 25 bp, Homo sapien
aagtatcgattaaattctagtctgg

SEQ ID NO: 5472811 - DNA, 25 bp, Homo sapien
cttgccctcataagtaagtatcgat

SEQ ID NO: 5472812 - DNA, 25 bp, Homo sapien
ctagtctggaatcaggacgcataat

SEQ ID NO: 5472813 - DNA, 25 bp, Homo sapien
aattgaagagctctcatgatagaag

SEQ ID NO: 5472814 - DNA, 25 bp, Homo sapien
ttcactatatgaagacctttccact

SEQ ID NO: 5472815 - DNA, 25 bp, Homo sapien
gtgctttttcactatatgaagacct

SEQ ID NO: 5472816 - DNA, 25 bp, Homo sapien
ctagaatttttcgaagtggacaatt

SEQ ID NO: 5472817 - DNA, 25 bp, Homo sapien
tccttggcagtaattgtcaaaccag

SEQ ID NO: 5472818 - DNA, 25 bp, Homo sapien
gcttctctcacatggcagctcttgt

SEQ ID NO: 5472819 - DNA, 25 bp, Homo sapien
gatggtgtctgaaggatagctgaaa

SEQ ID NO: 5472820 - DNA, 25 bp, Homo sapien
tactctgaattacactcttgtggcc

SEQ ID NO: 5472821 - DNA, 25 bp, Homo sapien
agccatcatgctgatcatgatgatc

SEQ ID NO: 5472822 - DNA, 25 bp, Homo sapien
atcatgctgatcatgatgatcagct

SEQ ID NO: 5472823 - DNA, 25 bp, Homo sapien
gccatcatgctgatcatgatgatca

SEQ ID NO: 5472824 - DNA, 25 bp, Homo sapien
cgaaggccagttcccacaagaatga

SEQ ID NO: 5472825 - DNA, 25 bp, Homo sapien
tttccaaagctcacggagggaggcc

SEQ ID NO: 5472826 - DNA, 25 bp, Homo sapien
tagtagttgatacaccacagggctt

SEQ ID NO: 5472827 - DNA, 25 bp, Homo sapien
tttaattccatgcaacgaggtcagc

SEQ ID NO: 5472828 - DNA, 25 bp, Homo sapien
tatcacgcggttagtattacaagag

SEQ ID NO: 5472829 - DNA, 25 bp, Homo sapien
tccaaaccaatcagtaggctaagag

SEQ ID NO: 5472830 - DNA, 25 bp, Homo sapien
cagctggtgtgctcatccaaaccaa

SEQ ID NO: 5472831 - DNA, 25 bp, Homo sapien
acacagtacagagggaggtccctat

SEQ ID NO: 5472832 - DNA, 25 bp, Homo sapien
gggcctgccctgtgaccgaaaatta

SEQ ID NO: 5472833 - DNA, 25 bp, Homo sapien
aacaaaactggtcttctgcagccac

SEQ ID NO: 5472834 - DNA, 25 bp, Homo sapien
gataatgacctacacatggacaggg

SEQ ID NO: 5472835 - DNA, 25 bp, Homo sapien
cccctgaatgcaaggagaggtggtc

SEQ ID NO: 5472836 - DNA, 25 bp, Homo sapien
cacaggtgcgatcccccagtggagg

SEQ ID NO: 5472837 - DNA, 25 bp, Homo sapien
cgcttttgtctttccgacaactgag

SEQ ID NO: 5472838 - DNA, 25 bp, Homo sapien
gtctttccgacaactgagccttcca

SEQ ID NO: 5472839 - DNA, 25 bp, Homo sapien
gaagaaatcgcttttgtctttccga

SEQ ID NO: 5472840 - DNA, 25 bp, Homo sapien
agtgggaagaaatcgcttttgtctt

SEQ ID NO: 5472841 - DNA, 25 bp, Homo sapien
agggcggacagcaggaccggctctt

SEQ ID NO: 5472842 - DNA, 25 bp, Homo sapien
gggcggacagcaggaccggctcttc

SEQ ID NO: 5472843 - DNA, 25 bp, Homo sapien
ctggtcagtagctctggcgttcaga

SEQ ID NO: 5472844 - DNA, 25 bp, Homo sapien
caggtcgagagtaggccggtaaatc

SEQ ID NO: 5472845 - DNA, 25 bp, Homo sapien
tctggcgttcagacaaaaggtcccc

SEQ ID NO: 5472846 - DNA, 25 bp, Homo sapien
aatcagacttcgcagctccttaagt

SEQ ID NO: 5472847 - DNA, 25 bp, Homo sapien
cgggcgcgggttctcgctcatccat

SEQ ID NO: 5472848 - DNA, 25 bp, Homo sapien
tggttcgctctttgttcgcgggcgc

SEQ ID NO: 5472849 - DNA, 25 bp, Homo sapien
cgttttaaaaattcgaagcatcgct

SEQ ID NO: 5472850 - DNA, 25 bp, Homo sapien
cattctttcttgacgcactcgctcg

SEQ ID NO: 5472851 - DNA, 25 bp, Homo sapien
tcgttgaacttgagccggtagagca

SEQ ID NO: 5472852 - DNA, 25 bp, Homo sapien
gagcttgtccatgccctcggtgagg

SEQ ID NO: 5472853 - DNA, 25 bp, Homo sapien
tggccgtgccgttgctcagcttgat

SEQ ID NO: 5472854 - DNA, 25 bp, Homo sapien
tagatgatgccgtccgtgcagcggc

SEQ ID NO: 5472855 - DNA, 25 bp, Homo sapien
gggactggaaggccgagatgttaga

SEQ ID NO: 5472856 - DNA, 25 bp, Homo sapien
agatgttagaggagatgttgcccat

SEQ ID NO: 5472857 - DNA, 25 bp, Homo sapien
gcttggcgcgctcagacgccgcagt

SEQ ID NO: 5472858 - DNA, 25 bp, Homo sapien
ggagtcgctgtccgctcggcagcct

SEQ ID NO: 5472859 - DNA, 25 bp, Homo sapien
gcgatcggcgggcatcgcgtctcta

SEQ ID NO: 5472860 - DNA, 25 bp, Homo sapien
tcgcctctggcctgggacggcgctg

SEQ ID NO: 5472861 - DNA, 25 bp, Homo sapien
ccagaaggaaattccactaaactct

SEQ ID NO: 5472862 - DNA, 25 bp, Homo sapien
tatggaacatgaagacgtgacctct

SEQ ID NO: 5472863 - DNA, 25 bp, Homo sapien
tgacctctaggctacaacgagaaaa

SEQ ID NO: 5472864 - DNA, 25 bp, Homo sapien
actctttggcatccaatatggaaca

SEQ ID NO: 5472865 - DNA, 25 bp, Homo sapien
catccagaagacaggtcttctgctc

SEQ ID NO: 5472866 - DNA, 25 bp, Homo sapien
ccagaagacaggtcttctgctccat

SEQ ID NO: 5472867 - DNA, 25 bp, Homo sapien
atccagaagacaggtcttctgctcc

SEQ ID NO: 5472868 - DNA, 25 bp, Homo sapien
tccagaagacaggtcttctgctcca

SEQ ID NO: 5472869 - DNA, 25 bp, Homo sapien
caagcatgactgagatgtgcggctg

SEQ ID NO: 5472870 - DNA, 25 bp, Homo sapien
taaaggtagccttcaagcatgactg

SEQ ID NO: 5472871 - DNA, 25 bp, Homo sapien
agcatccaggggcaaattgatggag

SEQ ID NO: 5472872 - DNA, 25 bp, Homo sapien
gatccataaaggtagccttcaagca

SEQ ID NO: 5472873 - DNA, 25 bp, Homo sapien
cctcccattcttgcacgtatggact

SEQ ID NO: 5472874 - DNA, 25 bp, Homo sapien
tgcaggcctcaacccaaactcctac

SEQ ID NO: 5472875 - DNA, 25 bp, Homo sapien
tcttgcacgtatggactcctgtgct

SEQ ID NO: 5472876 - DNA, 25 bp, Homo sapien
cattcttgcacgtatggactcctgt

SEQ ID NO: 5472877 - DNA, 25 bp, Homo sapien
caggccggggtgctgagacacgagc

SEQ ID NO: 5472878 - DNA, 25 bp, Homo sapien
gtgctgagacacgagctgagcatgc

SEQ ID NO: 5472879 - DNA, 25 bp, Homo sapien
gctgagacacgagctgagcatgcag

SEQ ID NO: 5472880 - DNA, 25 bp, Homo sapien
gccggggtgctgagacacgagctga

SEQ ID NO: 5472881 - DNA, 25 bp, Homo sapien
aaacggatgatctgggctaagcccc

SEQ ID NO: 5472882 - DNA, 25 bp, Homo sapien
caaacaagcaactgctttgcaggct

SEQ ID NO: 5472883 - DNA, 25 bp, Homo sapien
taataattgcactgagtcagcagca

SEQ ID NO: 5472884 - DNA, 25 bp, Homo sapien
tctgtttacgtggaaatgcaaaccc

SEQ ID NO: 5472885 - DNA, 25 bp, Homo sapien
tcagtgaaactgaagtactcctctt

SEQ ID NO: 5472886 - DNA, 25 bp, Homo sapien
taatctagtcctgccagacaactct

SEQ ID NO: 5472887 - DNA, 25 bp, Homo sapien
tctgccctgtgtcaattctcgatgc

SEQ ID NO: 5472888 - DNA, 25 bp, Homo sapien
gacaactctgccatgtagtccctct

SEQ ID NO: 5472889 - DNA, 25 bp, Homo sapien
gaccacagcgtccaaagctcgtggc

SEQ ID NO: 5472890 - DNA, 25 bp, Homo sapien
acagcgtccaaagctcgtggcctct

SEQ ID NO: 5472891 - DNA, 25 bp, Homo sapien
ctgaccacagcgtccaaagctcgtg

SEQ ID NO: 5472892 - DNA, 25 bp, Homo sapien
ccacagcgtccaaagctcgtggcct

SEQ ID NO: 5472893 - DNA, 25 bp, Homo sapien
catagcgaaggtgttcagtttcacc

SEQ ID NO: 5472894 - DNA, 25 bp, Homo sapien
gacgctgctctcatagcgaaggtgt

SEQ ID NO: 5472895 - DNA, 25 bp, Homo sapien
tgctctcatagcgaaggtgttcagt

SEQ ID NO: 5472896 - DNA, 25 bp, Homo sapien
ccgaacgacgctgctctcatagcga

SEQ ID NO: 5472897 - DNA, 25 bp, Homo sapien
gttatggacatcacaccggcagagg

SEQ ID NO: 5472898 - DNA, 25 bp, Homo sapien
agatggccccacgaggcatcctgca

SEQ ID NO: 5472899 - DNA, 25 bp, Homo sapien
ctcagtggccagctcggaaggaaaa

SEQ ID NO: 5472900 - DNA, 25 bp, Homo sapien
cctttttcagatggccccacgaggc

SEQ ID NO: 5472901 - DNA, 25 bp, Homo sapien
gatcgaagctgccatgaactcttgg

SEQ ID NO: 5472902 - DNA, 25 bp, Homo sapien
aactgctaataacgctcttcctctg

SEQ ID NO: 5472903 - DNA, 25 bp, Homo sapien
tcctctgagtcttggtctcttggag

SEQ ID NO: 5472904 - DNA, 25 bp, Homo sapien
ctcttggagatctgactgaggatac

SEQ ID NO: 5472905 - DNA, 25 bp, Homo sapien
ctgaaattatcaaacaggaaaaggt

SEQ ID NO: 5472906 - DNA, 25 bp, Homo sapien
aattatcaaacaggaaaaggtgatg

SEQ ID NO: 5472907 - DNA, 25 bp, Homo sapien
gaaattatcaaacaggaaaaggtga

SEQ ID NO: 5472908 - DNA, 25 bp, Homo sapien
attatcaaacaggaaaaggtgatgc

SEQ ID NO: 5472909 - DNA, 25 bp, Homo sapien
gatgtgcttccgatggagacgctct

SEQ ID NO: 5472910 - DNA, 25 bp, Homo sapien
cccactgatttcagagggaggatgt

SEQ ID NO: 5472911 - DNA, 25 bp, Homo sapien
tctgtagcagctccttcgtcgagtg

SEQ ID NO: 5472912 - DNA, 25 bp, Homo sapien
tcgtcgagtgatggaatgcagccac

SEQ ID NO: 5472913 - DNA, 25 bp, Homo sapien
aaaccacaggaacctcatagaagca

SEQ ID NO: 5472914 - DNA, 25 bp, Homo sapien
cctcatagaagcaggtgagtcccat

SEQ ID NO: 5472915 - DNA, 25 bp, Homo sapien
acctcatagaagcaggtgagtccca

SEQ ID NO: 5472916 - DNA, 25 bp, Homo sapien
gcaaagccgccaccaatataatctg

SEQ ID NO: 5472917 - DNA, 25 bp, Homo sapien
taatctgctgggttcgtagctatgt

SEQ ID NO: 5472918 - DNA, 25 bp, Homo sapien
ttcgtagctatgttgacggcttcta

SEQ ID NO: 5472919 - DNA, 25 bp, Homo sapien
aatgtatgcaaagccgccaccaata

SEQ ID NO: 5472920 - DNA, 25 bp, Homo sapien
gactgacctgggaaagatcctctcc

SEQ ID NO: 5472921 - DNA, 25 bp, Homo sapien
tcctctcccagaaagcggtgccagt

SEQ ID NO: 5472922 - DNA, 25 bp, Homo sapien
cagttgggccttctaaactttctgg

SEQ ID NO: 5472923 - DNA, 25 bp, Homo sapien
atgcactgagggtggatgaacgact

SEQ ID NO: 5472924 - DNA, 25 bp, Homo sapien
gttgtgatctttctcacgattgcag

SEQ ID NO: 5472925 - DNA, 25 bp, Homo sapien
cacgattgcagttggtggtcagaga

SEQ ID NO: 5472926 - DNA, 25 bp, Homo sapien
gcagttggtggtcagagatttgata

SEQ ID NO: 5472927 - DNA, 25 bp, Homo sapien
taaaatcagcttgttgtgatctttc

SEQ ID NO: 5472928 - DNA, 25 bp, Homo sapien
agagccctttagatcccttcaagca

SEQ ID NO: 5472929 - DNA, 25 bp, Homo sapien
gaatcactggttaggtcacttctaa

SEQ ID NO: 5472930 - DNA, 25 bp, Homo sapien
tctggagaatcactggttaggtcac

SEQ ID NO: 5472931 - DNA, 25 bp, Homo sapien
tcaagcaccgatgttctggagaatc

SEQ ID NO: 5472932 - DNA, 25 bp, Homo sapien
cctagggtagctgtcagcatactca

SEQ ID NO: 5472933 - DNA, 25 bp, Homo sapien
gggtagctgtcagcatactcactcc

SEQ ID NO: 5472934 - DNA, 25 bp, Homo sapien
tcaacctagggtagctgtcagcata

SEQ ID NO: 5472935 - DNA, 25 bp, Homo sapien
caacctagggtagctgtcagcatac

SEQ ID NO: 5472936 - DNA, 25 bp, Homo sapien
taggtgctgcccctctgatagccat

SEQ ID NO: 5472937 - DNA, 25 bp, Homo sapien
tgttcccatcagtgaaggttccaag

SEQ ID NO: 5472938 - DNA, 25 bp, Homo sapien
gatgctttcttgatgtccaacaagg

SEQ ID NO: 5472939 - DNA, 25 bp, Homo sapien
gagcacctcggtcacacttcagaga

SEQ ID NO: 5472940 - DNA, 25 bp, Homo sapien
ctgctgtatggaccttgctgctgac

SEQ ID NO: 5472941 - DNA, 25 bp, Homo sapien
ggaccttgctgctgactggttccca

SEQ ID NO: 5472942 - DNA, 25 bp, Homo sapien
ccttgctgctgactggttcccaggc

SEQ ID NO: 5472943 - DNA, 25 bp, Homo sapien
cctgctgtatggaccttgctgctga

SEQ ID NO: 5472944 - DNA, 25 bp, Homo sapien
caagcttctgattggtccaacccga

SEQ ID NO: 5472945 - DNA, 25 bp, Homo sapien
ctcttgcttccacagtaggttgctg

SEQ ID NO: 5472946 - DNA, 25 bp, Homo sapien
tcactaacatactcagggacctcgt

SEQ ID NO: 5472947 - DNA, 25 bp, Homo sapien
agagttattgtaggcaccatgtgct

SEQ ID NO: 5472948 - DNA, 25 bp, Homo sapien
tgactttcttcccggtgtgttccat

SEQ ID NO: 5472949 - DNA, 25 bp, Homo sapien
caatggctgtggtcttttagcggcc

SEQ ID NO: 5472950 - DNA, 25 bp, Homo sapien
gcaaaatcttctacattccccaaac

SEQ ID NO: 5472951 - DNA, 25 bp, Homo sapien
gatggagcttcttaggattttctgc

SEQ ID NO: 5472952 - DNA, 25 bp, Homo sapien
gaccatgagctgaataatgagctga

SEQ ID NO: 5472953 - DNA, 25 bp, Homo sapien
tgcttgtggcaaaactgactacttc

SEQ ID NO: 5472954 - DNA, 25 bp, Homo sapien
aaaactgactacttcctgcaaatgg

SEQ ID NO: 5472955 - DNA, 25 bp, Homo sapien
tcctgcaaatggtacccgtgaagag

SEQ ID NO: 5472956 - DNA, 25 bp, Homo sapien
atggtacccgtgaagagaaccaaca

SEQ ID NO: 5472957 - DNA, 25 bp, Homo sapien
caggcacatatcactctgggtagga

SEQ ID NO: 5472958 - DNA, 25 bp, Homo sapien
gctgtctctgcgcaccaatggtcac

SEQ ID NO: 5472959 - DNA, 25 bp, Homo sapien
taactaggcttgtaaaagatctggc

SEQ ID NO: 5472960 - DNA, 25 bp, Homo sapien
cattggatgctgacgctgacgtgaa

SEQ ID NO: 5472961 - DNA, 25 bp, Homo sapien
tcctaatggttagcgtctagaagca

SEQ ID NO: 5472962 - DNA, 25 bp, Homo sapien
gtcatgttgaaacccgcctctgcaa

SEQ ID NO: 5472963 - DNA, 25 bp, Homo sapien
tagaagcattagcaccaaagtcaag

SEQ ID NO: 5472964 - DNA, 25 bp, Homo sapien
gaaggatggcctctgtcgtcatgtt

SEQ ID NO: 5472965 - DNA, 25 bp, Homo sapien
acctgacgtctcatttttggtgtca

SEQ ID NO: 5472966 - DNA, 25 bp, Homo sapien
ttctccttatagaccatcgtgttgg

SEQ ID NO: 5472967 - DNA, 25 bp, Homo sapien
gttggtggtgggaacaacacagtag

SEQ ID NO: 5472968 - DNA, 25 bp, Homo sapien
aaatggcaacctgacgtctcatttt

SEQ ID NO: 5472969 - DNA, 25 bp, Homo sapien
aatccaggagtagggattctgccct

SEQ ID NO: 5472970 - DNA, 25 bp, Homo sapien
ccaggagtagggattctgccctcat

SEQ ID NO: 5472971 - DNA, 25 bp, Homo sapien
taaatccaggagtagggattctgcc

SEQ ID NO: 5472972 - DNA, 25 bp, Homo sapien
acaggtaaatccaggagtagggatt

SEQ ID NO: 5472973 - DNA, 25 bp, Homo sapien
gccctatacaagatgtgttaaatga

SEQ ID NO: 5472974 - DNA, 25 bp, Homo sapien
tctgcagccctatacaagatgtgtt

SEQ ID NO: 5472975 - DNA, 25 bp, Homo sapien
tctcccatgacctaagtctcaattc

SEQ ID NO: 5472976 - DNA, 25 bp, Homo sapien
tttctcccatgacctaagtctcaat

SEQ ID NO: 5472977 - DNA, 25 bp, Homo sapien
ccttctccaagtcgtatttggtgtg

SEQ ID NO: 5472978 - DNA, 25 bp, Homo sapien
atttggtgtgggacagtccactttc

SEQ ID NO: 5472979 - DNA, 25 bp, Homo sapien
tgaaatcctgagcataggtctcctt

SEQ ID NO: 5472980 - DNA, 25 bp, Homo sapien
aatcctgagcataggtctccttctc

SEQ ID NO: 5472981 - DNA, 25 bp, Homo sapien
cttagacagaatccaatagtaccat

SEQ ID NO: 5472982 - DNA, 25 bp, Homo sapien
tgagccccgatgttgctgaaatcag

SEQ ID NO: 5472983 - DNA, 25 bp, Homo sapien
aaagtcatcagaaatcttgcaaatg

SEQ ID NO: 5472984 - DNA, 25 bp, Homo sapien
ttaattgctgagagaggtaaaagtc

SEQ ID NO: 5472985 - DNA, 25 bp, Homo sapien
tgcagtgaggtacacattgctagaa

SEQ ID NO: 5472986 - DNA, 25 bp, Homo sapien
ggaagctggataggctgttcctgcc

SEQ ID NO: 5472987 - DNA, 25 bp, Homo sapien
ctagaagtaggattggaagctggat

SEQ ID NO: 5472988 - DNA, 25 bp, Homo sapien
acacattgctagaagtaggattgga

SEQ ID NO: 5472989 - DNA, 25 bp, Homo sapien
ctggaacagccgcaccctgcagtag

SEQ ID NO: 5472990 - DNA, 25 bp, Homo sapien
tcctgacaagccctgagtcctggaa

SEQ ID NO: 5472991 - DNA, 25 bp, Homo sapien
cggagcagcctttaggccctgatgc

SEQ ID NO: 5472992 - DNA, 25 bp, Homo sapien
tgcagtagcacccacggagcagcct

SEQ ID NO: 5472993 - DNA, 25 bp, Homo sapien
ctgtgggccagagccgtccataggg

SEQ ID NO: 5472994 - DNA, 25 bp, Homo sapien
gagccgtccatagggcctttgagag

SEQ ID NO: 5472995 - DNA, 25 bp, Homo sapien
gccagagccgtccatagggcctttg

SEQ ID NO: 5472996 - DNA, 25 bp, Homo sapien
tgggccagagccgtccatagggcct

SEQ ID NO: 5472997 - DNA, 25 bp, Homo sapien
tgtcccctggcacagttagatgtgt

SEQ ID NO: 5472998 - DNA, 25 bp, Homo sapien
tcacgctttgactataggatgctct

SEQ ID NO: 5472999 - DNA, 25 bp, Homo sapien
gatgctcttatgtgtccacacttca

SEQ ID NO: 5473000 - DNA, 25 bp, Homo sapien
ccccgcaacttccactatatgaatt

SEQ ID NO: 5473001 - DNA, 25 bp, Homo sapien
agcaggacagccagcagtaagctgc

SEQ ID NO: 5473002 - DNA, 25 bp, Homo sapien
caggacagccagcagtaagctgcag

SEQ ID NO: 5473003 - DNA, 25 bp, Homo sapien
cgctgcctctaggcagcaggacagc

SEQ ID NO: 5473004 - DNA, 25 bp, Homo sapien
ggacagccagcagtaagctgcagac

SEQ ID NO: 5473005 - DNA, 25 bp, Homo sapien
gcaaatatgtcatgggacaccaggt

SEQ ID NO: 5473006 - DNA, 25 bp, Homo sapien
tgtaggttagcaaatatgtcatggg

SEQ ID NO: 5473007 - DNA, 25 bp, Homo sapien
ccaggtaagcgtgactttgttgagg

SEQ ID NO: 5473008 - DNA, 25 bp, Homo sapien
catgggacaccaggtaagcgtgact

SEQ ID NO: 5473009 - DNA, 25 bp, Homo sapien
cagccattccgagagccagtgaggt

SEQ ID NO: 5473010 - DNA, 25 bp, Homo sapien
tcagccattccgagagccagtgagg

SEQ ID NO: 5473011 - DNA, 25 bp, Homo sapien
ccattccgagagccagtgaggtgat

SEQ ID NO: 5473012 - DNA, 25 bp, Homo sapien
gccattccgagagccagtgaggtga

SEQ ID NO: 5473013 - DNA, 25 bp, Homo sapien
gctgggaacaatggcggaaactgcc

SEQ ID NO: 5473014 - DNA, 25 bp, Homo sapien
tgaactgaacacagctgggaacaat

SEQ ID NO: 5473015 - DNA, 25 bp, Homo sapien
agaaactcctgttctcagtagactg

SEQ ID NO: 5473016 - DNA, 25 bp, Homo sapien
tatagaaactcctgttctcagtaga

SEQ ID NO: 5473017 - DNA, 25 bp, Homo sapien
aaactcctgttctcagtagactgac

SEQ ID NO: 5473018 - DNA, 25 bp, Homo sapien
ttttttatagaaactcctgttctca

SEQ ID NO: 5473019 - DNA, 25 bp, Homo sapien
tgattgcattgtacttgtcttgaag

SEQ ID NO: 5473020 - DNA, 25 bp, Homo sapien
tcttgtccagccagttgatgattgc

SEQ ID NO: 5473021 - DNA, 25 bp, Homo sapien
cagccagttgatgattgcattgtac

SEQ ID NO: 5473022 - DNA, 25 bp, Homo sapien
gatgattgcattgtacttgtcttga

SEQ ID NO: 5473023 - DNA, 25 bp, Homo sapien
catagtttagatcaacttgaagaat

SEQ ID NO: 5473024 - DNA, 25 bp, Homo sapien
ctcagagtcatagtttagatcaact

SEQ ID NO: 5473025 - DNA, 25 bp, Homo sapien
aggcctcagagtcatagtttagatc

SEQ ID NO: 5473026 - DNA, 25 bp, Homo sapien
gagtcatagtttagatcaacttgaa

SEQ ID NO: 5473027 - DNA, 25 bp, Homo sapien
ttgtgcacctgcttatgtgtgcgtc

SEQ ID NO: 5473028 - DNA, 25 bp, Homo sapien
ggcagacctacaagagccctgacat

SEQ ID NO: 5473029 - DNA, 25 bp, Homo sapien
agacctacaagagccctgacattgt

SEQ ID NO: 5473030 - DNA, 25 bp, Homo sapien
acctgcttatgtgtgcgtcgtctcc

SEQ ID NO: 5473031 - DNA, 25 bp, Homo sapien
tgccagagcaatcaacacagatgta

SEQ ID NO: 5473032 - DNA, 25 bp, Homo sapien
tgccttgccagagcaatcaacacag

SEQ ID NO: 5473033 - DNA, 25 bp, Homo sapien
tgtaagtgtcagtgggattaaccat

SEQ ID NO: 5473034 - DNA, 25 bp, Homo sapien
caatcaacacagatgtaagtgtcag

SEQ ID NO: 5473035 - DNA, 25 bp, Homo sapien
agggacactgacagattcctgctgt

SEQ ID NO: 5473036 - DNA, 25 bp, Homo sapien
tcagggacactgacagattcctgct

SEQ ID NO: 5473037 - DNA, 25 bp, Homo sapien
cagggacactgacagattcctgctg

SEQ ID NO: 5473038 - DNA, 25 bp, Homo sapien
tggctggtgaacaactgtggcctct

SEQ ID NO: 5473039 - DNA, 25 bp, Homo sapien
cctgttttgaaagctgtggctggtg

SEQ ID NO: 5473040 - DNA, 25 bp, Homo sapien
ttaatagtcacatgatagtcatgga

SEQ ID NO: 5473041 - DNA, 25 bp, Homo sapien
tcacatgatagtcatggatgtgcat

SEQ ID NO: 5473042 - DNA, 25 bp, Homo sapien
gttgatgccataacctgaatcccca

SEQ ID NO: 5473043 - DNA, 25 bp, Homo sapien
tggttgatgccataacctgaatccc

SEQ ID NO: 5473044 - DNA, 25 bp, Homo sapien
tctggttgatgccataacctgaatc

SEQ ID NO: 5473045 - DNA, 25 bp, Homo sapien
tgatgccataacctgaatccccaag

SEQ ID NO: 5473046 - DNA, 25 bp, Homo sapien
gaaactctggcccacaaatatggaa

SEQ ID NO: 5473047 - DNA, 25 bp, Homo sapien
tggaaaatgactcagacgctcccgc

SEQ ID NO: 5473048 - DNA, 25 bp, Homo sapien
aaatatggaaccacaggatgctgac

SEQ ID NO: 5473049 - DNA, 25 bp, Homo sapien
gatgctgacacgcaaagcaagccgc

SEQ ID NO: 5473050 - DNA, 25 bp, Homo sapien
cgtgcttcacctctttcttctttct

SEQ ID NO: 5473051 - DNA, 25 bp, Homo sapien
cttcacctctttcttctttctccat

SEQ ID NO: 5473052 - DNA, 25 bp, Homo sapien
ccggtccgtgcttcacctctttctt

SEQ ID NO: 5473053 - DNA, 25 bp, Homo sapien
gtgcttcacctctttcttctttctc

SEQ ID NO: 5473054 - DNA, 25 bp, Homo sapien
ggctcaacccatgcctggtacaggg

SEQ ID NO: 5473055 - DNA, 25 bp, Homo sapien
gctgcccaataagccaggactatcc

SEQ ID NO: 5473056 - DNA, 25 bp, Homo sapien
ggaccttcacaatcctcactagcag

SEQ ID NO: 5473057 - DNA, 25 bp, Homo sapien
gggacagctttcctgccaaggctgc

SEQ ID NO: 5473058 - DNA, 25 bp, Homo sapien
gcactggctggcattccataggatg

SEQ ID NO: 5473059 - DNA, 25 bp, Homo sapien
cgaagaaggattcgttttcagttgg

SEQ ID NO: 5473060 - DNA, 25 bp, Homo sapien
ttttcagttgggacctccaacagag

SEQ ID NO: 5473061 - DNA, 25 bp, Homo sapien
tcgaagaaggattcgttttcagttg

SEQ ID NO: 5473062 - DNA, 25 bp, Homo sapien
tcgttttcagttgggacctccaaca

SEQ ID NO: 5473063 - DNA, 25 bp, Homo sapien
ccaggacagtgtattatcaacacaa

SEQ ID NO: 5473064 - DNA, 25 bp, Homo sapien
tgaccagagtgtggttcttaaccca

SEQ ID NO: 5473065 - DNA, 25 bp, Homo sapien
gtattatcaacacaatcctttttca

SEQ ID NO: 5473066 - DNA, 25 bp, Homo sapien
tggttcttaacccaggacagtgtat

SEQ ID NO: 5473067 - DNA, 25 bp, Homo sapien
ggttctggcttaggatcactcacac

SEQ ID NO: 5473068 - DNA, 25 bp, Homo sapien
gaattcatctctgcgagtacacgct

SEQ ID NO: 5473069 - DNA, 25 bp, Homo sapien
taaacatctattacagtgtctgtgg

SEQ ID NO: 5473070 - DNA, 25 bp, Homo sapien
ccatttccaggatgattcactcaca

SEQ ID NO: 5473071 - DNA, 25 bp, Homo sapien
gttaattcagacagagcacaccgca

SEQ ID NO: 5473072 - DNA, 25 bp, Homo sapien
cagaatccagtcctttgtggtgaat

SEQ ID NO: 5473073 - DNA, 25 bp, Homo sapien
gatagacaacaagggataaaagggc

SEQ ID NO: 5473074 - DNA, 25 bp, Homo sapien
catcactggtgatggcatattctgc

SEQ ID NO: 5473075 - DNA, 25 bp, Homo sapien
cagagatcaccattagtgccctgca

SEQ ID NO: 5473076 - DNA, 25 bp, Homo sapien
gattatgagtctacacatccggtca

SEQ ID NO: 5473077 - DNA, 25 bp, Homo sapien
gcatgtcacccgcagaatccagtaa

SEQ ID NO: 5473078 - DNA, 25 bp, Homo sapien
aatccagtaatctggccactgccag

SEQ ID NO: 5473079 - DNA, 25 bp, Homo sapien
aattccacctatgaagatttggccc

SEQ ID NO: 5473080 - DNA, 25 bp, Homo sapien
gatctgtgtaaaagggtgtatcccc

SEQ ID NO: 5473081 - DNA, 25 bp, Homo sapien
tgcttaggagcggtgaaacttcttt

SEQ ID NO: 5473082 - DNA, 25 bp, Homo sapien
gtttggatcatcagtggacccctta

SEQ ID NO: 5473083 - DNA, 25 bp, Homo sapien
taagccatggcgtagggtcagaatt

SEQ ID NO: 5473084 - DNA, 25 bp, Homo sapien
gacccaaggaggattcactccggga

SEQ ID NO: 5473085 - DNA, 25 bp, Homo sapien
ttatggcccgaaagagttcagtgcg

SEQ ID NO: 5473086 - DNA, 25 bp, Homo sapien
tcagtgcggttgatttgttcccaag

SEQ ID NO: 5473087 - DNA, 25 bp, Homo sapien
caacagtgctcaacttggcttgaag

SEQ ID NO: 5473088 - DNA, 25 bp, Homo sapien
gaatgtgacacaagccactcacgaa

SEQ ID NO: 5473089 - DNA, 25 bp, Homo sapien
cctcagatgaagtggagctccccaa

SEQ ID NO: 5473090 - DNA, 25 bp, Homo sapien
agtcagcagagagctcaccaggaaa

SEQ ID NO: 5473091 - DNA, 25 bp, Homo sapien
tggaagaagccaaagggattacact

SEQ ID NO: 5473092 - DNA, 25 bp, Homo sapien
tcggcatgctgttcctactgcaaaa

SEQ ID NO: 5473093 - DNA, 25 bp, Homo sapien
tgcctctgctgataactgaagaact

SEQ ID NO: 5473094 - DNA, 25 bp, Homo sapien
aatttgctgtgacactcaaagaccc

SEQ ID NO: 5473095 - DNA, 25 bp, Homo sapien
gtgccaacggagtccagattttctg

SEQ ID NO: 5473096 - DNA, 25 bp, Homo sapien
gggtgccaacggagtccagattttc

SEQ ID NO: 5473097 - DNA, 25 bp, Homo sapien
ggtgccaacggagtccagattttct

SEQ ID NO: 5473098 - DNA, 25 bp, Homo sapien
cctcacaccctgattcctcacaggt

SEQ ID NO: 5473099 - DNA, 25 bp, Homo sapien
tttcccatgcccacgaccacaacca

SEQ ID NO: 5473100 - DNA, 25 bp, Homo sapien
acaaccacatgcctctcctcacacc

SEQ ID NO: 5473101 - DNA, 25 bp, Homo sapien
cctcacaggtctgcctggtcacagc

SEQ ID NO: 5473102 - DNA, 25 bp, Homo sapien
tgtaaaatttcgtaagcctctggga

SEQ ID NO: 5473103 - DNA, 25 bp, Homo sapien
ccatctgcaaactgaaggagaggct

SEQ ID NO: 5473104 - DNA, 25 bp, Homo sapien
tgcaggtctaaggatgcgctctgta

SEQ ID NO: 5473105 - DNA, 25 bp, Homo sapien
cagtggtgactgtcttaaaagcgac

SEQ ID NO: 5473106 - DNA, 25 bp, Homo sapien
tggaagacatgtcctgtcttgcatt

SEQ ID NO: 5473107 - DNA, 25 bp, Homo sapien
acacaatgagccacgctgacaccag

SEQ ID NO: 5473108 - DNA, 25 bp, Homo sapien
cctgtcttgcattgtcccataggac

SEQ ID NO: 5473109 - DNA, 25 bp, Homo sapien
acatgtcctgtcttgcattgtccca

SEQ ID NO: 5473110 - DNA, 25 bp, Homo sapien
catccaggaatgtcccctacggaca

SEQ ID NO: 5473111 - DNA, 25 bp, Homo sapien
atctccactgcaactccaggatgca

SEQ ID NO: 5473112 - DNA, 25 bp, Homo sapien
gaccacacatccaggaatgtcccct

SEQ ID NO: 5473113 - DNA, 25 bp, Homo sapien
acacatccaggaatgtcccctacgg

SEQ ID NO: 5473114 - DNA, 25 bp, Homo sapien
gaaagtagccaccacctgatttgag

SEQ ID NO: 5473115 - DNA, 25 bp, Homo sapien
tgacagagtcccttggtaattcacg

SEQ ID NO: 5473116 - DNA, 25 bp, Homo sapien
gttagctggcatagctctgaagcct

SEQ ID NO: 5473117 - DNA, 25 bp, Homo sapien
gacatgtgcccaaggacatcggagc

SEQ ID NO: 5473118 - DNA, 25 bp, Homo sapien
cccagccgaggtgttcttttaagag

SEQ ID NO: 5473119 - DNA, 25 bp, Homo sapien
tgaggctgccgtcaaccaaagaagg

SEQ ID NO: 5473120 - DNA, 25 bp, Homo sapien
tccttcgggtcttcagaatgggccc

SEQ ID NO: 5473121 - DNA, 25 bp, Homo sapien
cctaggactgccagacgctggaaga

SEQ ID NO: 5473122 - DNA, 25 bp, Homo sapien
tgttgaggactgcagagatcaagtc

SEQ ID NO: 5473123 - DNA, 25 bp, Homo sapien
ttgaggactgcagagatcaagtcaa

SEQ ID NO: 5473124 - DNA, 25 bp, Homo sapien
catgttgaggactgcagagatcaag

SEQ ID NO: 5473125 - DNA, 25 bp, Homo sapien
gagatcaagtcaaaagtgtctctac

SEQ ID NO: 5473126 - DNA, 25 bp, Homo sapien
gcgcaccacgagattacatcccgca

SEQ ID NO: 5473127 - DNA, 25 bp, Homo sapien
gattacatcccgcacctggctccga

SEQ ID NO: 5473128 - DNA, 25 bp, Homo sapien
gcaccacgagattacatcccgcacc

SEQ ID NO: 5473129 - DNA, 25 bp, Homo sapien
gagattacatcccgcacctggctcc

SEQ ID NO: 5473130 - DNA, 25 bp, Homo sapien
gcttatcacaggtggcaaagtgtgc

SEQ ID NO: 5473131 - DNA, 25 bp, Homo sapien
gagcggcactgactgcaagcttgca

SEQ ID NO: 5473132 - DNA, 25 bp, Homo sapien
agaactggctgttattggaaagctg

SEQ ID NO: 5473133 - DNA, 25 bp, Homo sapien
caagcttgcagtttcgtaaggctac

SEQ ID NO: 5473134 - DNA, 25 bp, Homo sapien
actccagcctggtgacagagcaaga

SEQ ID NO: 5473135 - DNA, 25 bp, Homo sapien
aactgcttgaaactgggaggtagag

SEQ ID NO: 5473136 - DNA, 25 bp, Homo sapien
cagccgagatctcaccactgcactc

SEQ ID NO: 5473137 - DNA, 25 bp, Homo sapien
gttgcagtcagccgagatctcacca

SEQ ID NO: 5473138 - DNA, 25 bp, Homo sapien
aatgacactgatgccccctaaatag

SEQ ID NO: 5473139 - DNA, 25 bp, Homo sapien
tgggtttacgctaatgaaatgacac

SEQ ID NO: 5473140 - DNA, 25 bp, Homo sapien
ggaggaaccacccatgcaatgagaa

SEQ ID NO: 5473141 - DNA, 25 bp, Homo sapien
aatagcttcaagaccggaggaacca

SEQ ID NO: 5473142 - DNA, 25 bp, Homo sapien
ttgaaagcctttctagccagcctac

SEQ ID NO: 5473143 - DNA, 25 bp, Homo sapien
gaaaggaccattgtgcaaggctcag

SEQ ID NO: 5473144 - DNA, 25 bp, Homo sapien
caggcaggatgtccctgaactcccg

SEQ ID NO: 5473145 - DNA, 25 bp, Homo sapien
gctgtacatgagcaggtccaccaag

SEQ ID NO: 5473146 - DNA, 25 bp, Homo sapien
tggaatgcatcaatttgcaaaaatg

SEQ ID NO: 5473147 - DNA, 25 bp, Homo sapien
agtagtatgtttccagtagggctgg

SEQ ID NO: 5473148 - DNA, 25 bp, Homo sapien
agggctggaatgcatcaatttgcaa

SEQ ID NO: 5473149 - DNA, 25 bp, Homo sapien
caaaagtagtatgtttccagtaggg

SEQ ID NO: 5473150 - DNA, 25 bp, Homo sapien
tccagatcctggacgtagattccca

SEQ ID NO: 5473151 - DNA, 25 bp, Homo sapien
tagattcccagcttgcctgagcagg

SEQ ID NO: 5473152 - DNA, 25 bp, Homo sapien
gaagcccagctgcattgctaaggcc

SEQ ID NO: 5473153 - DNA, 25 bp, Homo sapien
gcatcatcgcattcccattagtggt

SEQ ID NO: 5473154 - DNA, 25 bp, Homo sapien
tgcagtgagccgagctggcgacatt

SEQ ID NO: 5473155 - DNA, 25 bp, Homo sapien
ttgcagtgagccgagctggcgacat

SEQ ID NO: 5473156 - DNA, 25 bp, Homo sapien
agtgagccgagctggcgacattgca

SEQ ID NO: 5473157 - DNA, 25 bp, Homo sapien
ctccagcctggatgacagagcaaga

SEQ ID NO: 5473158 - DNA, 25 bp, Homo sapien
ggtcaccctgctggtgctcatgcat

SEQ ID NO: 5473159 - DNA, 25 bp, Homo sapien
acttcttcttgtaaagtcatgactg

SEQ ID NO: 5473160 - DNA, 25 bp, Homo sapien
ttcttcttgtaaagtcatgactgat

SEQ ID NO: 5473161 - DNA, 25 bp, Homo sapien
cttcttcttgtaaagtcatgactga

SEQ ID NO: 5473162 - DNA, 25 bp, Homo sapien
tcttcttgtaaagtcatgactgatc

SEQ ID NO: 5473163 - DNA, 25 bp, Homo sapien
tgctgaggaatgtgcgcaggagctc

SEQ ID NO: 5473164 - DNA, 25 bp, Homo sapien
gctgaggaatgtgcgcaggagctcc

SEQ ID NO: 5473165 - DNA, 25 bp, Homo sapien
tgaggaatgtgcgcaggagctccat

SEQ ID NO: 5473166 - DNA, 25 bp, Homo sapien
ctgaggaatgtgcgcaggagctcca

SEQ ID NO: 5473167 - DNA, 25 bp, Homo sapien
gggcacgtgtcctacactgatgagg

SEQ ID NO: 5473168 - DNA, 25 bp, Homo sapien
ttgtttggctttggttgcttctgct

SEQ ID NO: 5473169 - DNA, 25 bp, Homo sapien
cacgtgtcctacactgatgaggtcc

SEQ ID NO: 5473170 - DNA, 25 bp, Homo sapien
catcttccccccaacaggtctgtcc

SEQ ID NO: 5473171 - DNA, 25 bp, Homo sapien
tgtctgttgtccccctaggcagggc

SEQ ID NO: 5473172 - DNA, 25 bp, Homo sapien
tgttgtccccctaggcagggcgctg

SEQ ID NO: 5473173 - DNA, 25 bp, Homo sapien
gtccccctaggcagggcgctgcttg

SEQ ID NO: 5473174 - DNA, 25 bp, Homo sapien
ctctgcatcctccatacacaggagc

SEQ ID NO: 5473175 - DNA, 25 bp, Homo sapien
ggatctggcatctggtaaaagcaca

SEQ ID NO: 5473176 - DNA, 25 bp, Homo sapien
tgcggtctggtgtcgcaagccttct

SEQ ID NO: 5473177 - DNA, 25 bp, Homo sapien
taatttggatcttgactgcggtctg

SEQ ID NO: 5473178 - DNA, 25 bp, Homo sapien
tgtcatggctcctgctgatcgcaag

SEQ ID NO: 5473179 - DNA, 25 bp, Homo sapien
ggtgactctaaagtatggccagcca

SEQ ID NO: 5473180 - DNA, 25 bp, Homo sapien
tgcagattgttgagagtgaatgtag

SEQ ID NO: 5473181 - DNA, 25 bp, Homo sapien
taggttgtgttgaaaaacacgtgca

SEQ ID NO: 5473182 - DNA, 25 bp, Homo sapien
gacctgagggctgagactcaagcct

SEQ ID NO: 5473183 - DNA, 25 bp, Homo sapien
tgcggcatggttctctttgggcccc

SEQ ID NO: 5473184 - DNA, 25 bp, Homo sapien
tagataaactggagagacaccaggg

SEQ ID NO: 5473185 - DNA, 25 bp, Homo sapien
ggactggcctcgctggactttgcat

SEQ ID NO: 5473186 - DNA, 25 bp, Homo sapien
tcaaaggcgagcactgcagcttggt

SEQ ID NO: 5473187 - DNA, 25 bp, Homo sapien
accctgtgccagagttactggggca

SEQ ID NO: 5473188 - DNA, 25 bp, Homo sapien
gttactggggcagcaagacatctgg

SEQ ID NO: 5473189 - DNA, 25 bp, Homo sapien
ggcggcacgcatgtggtttgctttt

SEQ ID NO: 5473190 - DNA, 25 bp, Homo sapien
ccttgggcggcacgcatgtggtttg

SEQ ID NO: 5473191 - DNA, 25 bp, Homo sapien
cttttcattaagtacagatactctt

SEQ ID NO: 5473192 - DNA, 25 bp, Homo sapien
gcttttcattaagtacagatactct

SEQ ID NO: 5473193 - DNA, 25 bp, Homo sapien
tgcttttcattaagtacagatactc

SEQ ID NO: 5473194 - DNA, 25 bp, Homo sapien
tgtgcttttcattaagtacagatac

SEQ ID NO: 5473195 - DNA, 25 bp, Homo sapien
aatttggtcttattctgaacaatgc

SEQ ID NO: 5473196 - DNA, 25 bp, Homo sapien
ctgaacaatgcctgaacgtcgaagg

SEQ ID NO: 5473197 - DNA, 25 bp, Homo sapien
aacaatgcctgaacgtcgaaggtgc

SEQ ID NO: 5473198 - DNA, 25 bp, Homo sapien
atgcctgaacgtcgaaggtgctccc

SEQ ID NO: 5473199 - DNA, 25 bp, Homo sapien
taggttaatagaaacccacagtcca

SEQ ID NO: 5473200 - DNA, 25 bp, Homo sapien
gataggttaatagaaacccacagtc

SEQ ID NO: 5473201 - DNA, 25 bp, Homo sapien
aggttaatagaaacccacagtccag

SEQ ID NO: 5473202 - DNA, 25 bp, Homo sapien
taggcttctgatcgaataagcccag

SEQ ID NO: 5473203 - DNA, 25 bp, Homo sapien
cacgtgaataggcttctgatcgaat

SEQ ID NO: 5473204 - DNA, 25 bp, Homo sapien
tcacacgtgaataggcttctgatcg

SEQ ID NO: 5473205 - DNA, 25 bp, Homo sapien
tctgatcgaataagcccagggcttc

SEQ ID NO: 5473206 - DNA, 25 bp, Homo sapien
gcagggacccaggaagcagtaccca

SEQ ID NO: 5473207 - DNA, 25 bp, Homo sapien
agggacccaggaagcagtacccaag

SEQ ID NO: 5473208 - DNA, 25 bp, Homo sapien
tggcagggacccaggaagcagtacc

SEQ ID NO: 5473209 - DNA, 25 bp, Homo sapien
gtggcagggacccaggaagcagtac

SEQ ID NO: 5473210 - DNA, 25 bp, Homo sapien
agggtcattcgaaggatagagtgtc

SEQ ID NO: 5473211 - DNA, 25 bp, Homo sapien
tttgccagcacctgtgtgtagcctg

SEQ ID NO: 5473212 - DNA, 25 bp, Homo sapien
cgaaggatagagtgtctgtttactg

SEQ ID NO: 5473213 - DNA, 25 bp, Homo sapien
tggactctggaactaaactctctgg

SEQ ID NO: 5473214 - DNA, 25 bp, Homo sapien
tgtagaataatgctccttaggtact

SEQ ID NO: 5473215 - DNA, 25 bp, Homo sapien
cttgtaccgcttctccttgtaggtg

SEQ ID NO: 5473216 - DNA, 25 bp, Homo sapien
ctcattctctttttggtaccctttg

SEQ ID NO: 5473217 - DNA, 25 bp, Homo sapien
tggtaccctttgtgtagaataatgc

SEQ ID NO: 5473218 - DNA, 25 bp, Homo sapien
gtaccctatgttggcatgtccagga

SEQ ID NO: 5473219 - DNA, 25 bp, Homo sapien
tgctcctcacgtgggtaccctatgt

SEQ ID NO: 5473220 - DNA, 25 bp, Homo sapien
cactgccagagccatgtgtttgctc

SEQ ID NO: 5473221 - DNA, 25 bp, Homo sapien
gagccatgtgtttgctcctcacgtg

SEQ ID NO: 5473222 - DNA, 25 bp, Homo sapien
caagcactttatctacgtctttgat

SEQ ID NO: 5473223 - DNA, 25 bp, Homo sapien
agcactttatctacgtctttgattt

SEQ ID NO: 5473224 - DNA, 25 bp, Homo sapien
aagcactttatctacgtctttgatt

SEQ ID NO: 5473225 - DNA, 25 bp, Homo sapien
gcactttatctacgtctttgatttc

SEQ ID NO: 5473226 - DNA, 25 bp, Homo sapien
tctgtgggagacaatccaagcttgg

SEQ ID NO: 5473227 - DNA, 25 bp, Homo sapien
tggcaccaagcaccaagcttcggag

SEQ ID NO: 5473228 - DNA, 25 bp, Homo sapien
gatgctgaattaatgtctgagcgca

SEQ ID NO: 5473229 - DNA, 25 bp, Homo sapien
aacagtcatccgtgccacagatggc

SEQ ID NO: 5473230 - DNA, 25 bp, Homo sapien
cctgccaagccacgcccagaagcat

SEQ ID NO: 5473231 - DNA, 25 bp, Homo sapien
tggtcctcgccctgagtcgtagcct

SEQ ID NO: 5473232 - DNA, 25 bp, Homo sapien
ctgagtcgtagccttgcattccctg

SEQ ID NO: 5473233 - DNA, 25 bp, Homo sapien
ctcgccctgagtcgtagccttgcat

SEQ ID NO: 5473234 - DNA, 25 bp, Homo sapien
ttttagggtcctccggaatgcactc

SEQ ID NO: 5473235 - DNA, 25 bp, Homo sapien
tgtcaggccgtcagtaacaggagga

SEQ ID NO: 5473236 - DNA, 25 bp, Homo sapien
cagatgtgatgagtttccatcgaca

SEQ ID NO: 5473237 - DNA, 25 bp, Homo sapien
gaatgcactcttgctcgcggaggga

SEQ ID NO: 5473238 - DNA, 25 bp, Homo sapien
gccactggcagcgaaggcctgagca

SEQ ID NO: 5473239 - DNA, 25 bp, Homo sapien
actggcagcgaaggcctgagcaact

SEQ ID NO: 5473240 - DNA, 25 bp, Homo sapien
gcagccactggcagcgaaggcctga

SEQ ID NO: 5473241 - DNA, 25 bp, Homo sapien
aggtggatggtgaggagcttgagga

SEQ ID NO: 5473242 - DNA, 25 bp, Homo sapien
gtgcccgtgggaacatgatggcttc

SEQ ID NO: 5473243 - DNA, 25 bp, Homo sapien
cctgggagtgggacttccctgcttg

SEQ ID NO: 5473244 - DNA, 25 bp, Homo sapien
agtgagctcagtggtgcccgtggga

SEQ ID NO: 5473245 - DNA, 25 bp, Homo sapien
ggccctgggagtgggacttccctgc

SEQ ID NO: 5473246 - DNA, 25 bp, Homo sapien
gtgcatctccagaaagcacgtgtgc

SEQ ID NO: 5473247 - DNA, 25 bp, Homo sapien
aaagaaaacgacattgctgcttcca

SEQ ID NO: 5473248 - DNA, 25 bp, Homo sapien
gccatatgtcagtagttttcaaaga

SEQ ID NO: 5473249 - DNA, 25 bp, Homo sapien
gcgctggaggccatatgtcagtagt

SEQ ID NO: 5473250 - DNA, 25 bp, Homo sapien
ctctctgggccccactaggtggcca

SEQ ID NO: 5473251 - DNA, 25 bp, Homo sapien
tggccagtcgtgctctccaggtaac

SEQ ID NO: 5473252 - DNA, 25 bp, Homo sapien
tcgtgctctccaggtaacagttcct

SEQ ID NO: 5473253 - DNA, 25 bp, Homo sapien
gccccactaggtggccagtcgtgct

SEQ ID NO: 5473254 - DNA, 25 bp, Homo sapien
ggcagagtgaagtcccgcattagca

SEQ ID NO: 5473255 - DNA, 25 bp, Homo sapien
gagttgacagtctttagggcccctg

SEQ ID NO: 5473256 - DNA, 25 bp, Homo sapien
cactccctgcgtgtaagaaggtgaa

SEQ ID NO: 5473257 - DNA, 25 bp, Homo sapien
tcagcccggaaagatgctcgttcgg

SEQ ID NO: 5473258 - DNA, 25 bp, Homo sapien
ccagcttggaggtcattgtgggtcc

SEQ ID NO: 5473259 - DNA, 25 bp, Homo sapien
attgtgggtcccgatgaagctttca

SEQ ID NO: 5473260 - DNA, 25 bp, Homo sapien
ggtcccgatgaagctttcactggta

SEQ ID NO: 5473261 - DNA, 25 bp, Homo sapien
cttggaggtcattgtgggtcccgat

SEQ ID NO: 5473262 - DNA, 25 bp, Homo sapien
gttctctctgaacagtcccctgaca

SEQ ID NO: 5473263 - DNA, 25 bp, Homo sapien
agtgtgggtacgcttggtggacatc

SEQ ID NO: 5473264 - DNA, 25 bp, Homo sapien
gacatctgtagcctcaggtgagctt

SEQ ID NO: 5473265 - DNA, 25 bp, Homo sapien
tgtagacgatcccacgtaggagaga

SEQ ID NO: 5473266 - DNA, 25 bp, Homo sapien
caatcattgttggacttgcagtcac

SEQ ID NO: 5473267 - DNA, 25 bp, Homo sapien
gcttccaatcattgttggacttgca

SEQ ID NO: 5473268 - DNA, 25 bp, Homo sapien
tccaatcattgttggacttgcagtc

SEQ ID NO: 5473269 - DNA, 25 bp, Homo sapien
cctggcttccaatcattgttggact

SEQ ID NO: 5473270 - DNA, 25 bp, Homo sapien
gcttgatgcagaccacgtgactggg

SEQ ID NO: 5473271 - DNA, 25 bp, Homo sapien
aatccaggcagtcgtgttcagggag

SEQ ID NO: 5473272 - DNA, 25 bp, Homo sapien
gcagaccacgtgactgggacctgtt

SEQ ID NO: 5473273 - DNA, 25 bp, Homo sapien
tcagggagcctgcttgatgcagacc

SEQ ID NO: 5473274 - DNA, 25 bp, Homo sapien
tatcttgaggcatcctgcgaacagc

SEQ ID NO: 5473275 - DNA, 25 bp, Homo sapien
gctttcgagtatcttgaggcatcct

SEQ ID NO: 5473276 - DNA, 25 bp, Homo sapien
cacgtagtctgatgctttcgagtat

SEQ ID NO: 5473277 - DNA, 25 bp, Homo sapien
gaggcatcctgcgaacagcttgtaa

SEQ ID NO: 5473278 - DNA, 25 bp, Homo sapien
ggtgcgctgaacatcgagtaggaaa

SEQ ID NO: 5473279 - DNA, 25 bp, Homo sapien
cgctgaacatcgagtaggaaagaag

SEQ ID NO: 5473280 - DNA, 25 bp, Homo sapien
gggttggtgcgctgaacatcgagta

SEQ ID NO: 5473281 - DNA, 25 bp, Homo sapien
tataggggttggtgcgctgaacatc

SEQ ID NO: 5473282 - DNA, 25 bp, Homo sapien
catttgatcttaaggaggagctgcc

SEQ ID NO: 5473283 - DNA, 25 bp, Homo sapien
tcccagtgacagttagtgatgacat

SEQ ID NO: 5473284 - DNA, 25 bp, Homo sapien
tttggcgtagcattgtagtggcacc

SEQ ID NO: 5473285 - DNA, 25 bp, Homo sapien
caaccaagagtcagtggatcccaag

SEQ ID NO: 5473286 - DNA, 25 bp, Homo sapien
agcctcaggtagagaaatgcaggag

SEQ ID NO: 5473287 - DNA, 25 bp, Homo sapien
tcaggcgatgattagcctcaggtag

SEQ ID NO: 5473288 - DNA, 25 bp, Homo sapien
tgcttgagggtatggacgatgtgcg

SEQ ID NO: 5473289 - DNA, 25 bp, Homo sapien
tatggacgatgtgcgggatggaggc

SEQ ID NO: 5473290 - DNA, 25 bp, Homo sapien
ctcgagtccatctgcgttgctgctt

SEQ ID NO: 5473291 - DNA, 25 bp, Homo sapien
cgttgctgcttgagggtatggacga

SEQ ID NO: 5473292 - DNA, 25 bp, Homo sapien
tctgttcaaagatgaacccactgtg

SEQ ID NO: 5473293 - DNA, 25 bp, Homo sapien
ttcatcctgtgggattttgacctca

SEQ ID NO: 5473294 - DNA, 25 bp, Homo sapien
tgttcatcctgtgggattttgacct

SEQ ID NO: 5473295 - DNA, 25 bp, Homo sapien
gttcatcctgtgggattttgacctc

SEQ ID NO: 5473296 - DNA, 25 bp, Homo sapien
tgcgcgagcgaattctccccttgaa

SEQ ID NO: 5473297 - DNA, 25 bp, Homo sapien
tttgaactggcagaatgcgcgagcg

SEQ ID NO: 5473298 - DNA, 25 bp, Homo sapien
cattctcgtagattaagatgctagc

SEQ ID NO: 5473299 - DNA, 25 bp, Homo sapien
tgttcagccgcttgcgtgcaacctg

SEQ ID NO: 5473300 - DNA, 25 bp, Homo sapien
ccagatcagggaggttggccacgat

SEQ ID NO: 5473301 - DNA, 25 bp, Homo sapien
ggagatgatggaagcgcccagagag

SEQ ID NO: 5473302 - DNA, 25 bp, Homo sapien
cccagagaggttggtatttcctgga

SEQ ID NO: 5473303 - DNA, 25 bp, Homo sapien
ccagcctcgaatatgggagatgatg

SEQ ID NO: 5473304 - DNA, 25 bp, Homo sapien
cacagagcagggacggcggtgcctg

SEQ ID NO: 5473305 - DNA, 25 bp, Homo sapien
cacacagagcagggacggcggtgcc

SEQ ID NO: 5473306 - DNA, 25 bp, Homo sapien
tgcctccctggccttgtaggagcct

SEQ ID NO: 5473307 - DNA, 25 bp, Homo sapien
cctccctggccttgtaggagccttc

SEQ ID NO: 5473308 - DNA, 25 bp, Homo sapien
ggtttccatgatgctcttgcccgaa

SEQ ID NO: 5473309 - DNA, 25 bp, Homo sapien
atggaggacgtggtttccatgatgc

SEQ ID NO: 5473310 - DNA, 25 bp, Homo sapien
gtttccatgatgctcttgcccgaac

SEQ ID NO: 5473311 - DNA, 25 bp, Homo sapien
atttcatcaactaattggccatcta

SEQ ID NO: 5473312 - DNA, 25 bp, Homo sapien
taattggccatctaagtcactgtag

SEQ ID NO: 5473313 - DNA, 25 bp, Homo sapien
tctaagtcactgtagataattagac

SEQ ID NO: 5473314 - DNA, 25 bp, Homo sapien
ctacagagatggagcgctgagctct

SEQ ID NO: 5473315 - DNA, 25 bp, Homo sapien
cagttataatgtgatgccccatgaa

SEQ ID NO: 5473316 - DNA, 25 bp, Homo sapien
gcttcagttataatgtgatgcccca

SEQ ID NO: 5473317 - DNA, 25 bp, Homo sapien
ggttgtggcttcagttataatgtga

SEQ ID NO: 5473318 - DNA, 25 bp, Homo sapien
tgtggcttcagttataatgtgatgc

SEQ ID NO: 5473319 - DNA, 25 bp, Homo sapien
aagttagcgccacggctggagcaag

SEQ ID NO: 5473320 - DNA, 25 bp, Homo sapien
gaggtcaaagttagcgccacggctg

SEQ ID NO: 5473321 - DNA, 25 bp, Homo sapien
tagaagagcacggctttcaagggca

SEQ ID NO: 5473322 - DNA, 25 bp, Homo sapien
gatctggaactggatgaggttctca

SEQ ID NO: 5473323 - DNA, 25 bp, Homo sapien
gctttctcgtggacgctgcagccca

SEQ ID NO: 5473324 - DNA, 25 bp, Homo sapien
gctgtgctttctcgtggacgctgca

SEQ ID NO: 5473325 - DNA, 25 bp, Homo sapien
tgtgctttctcgtggacgctgcagc

SEQ ID NO: 5473326 - DNA, 25 bp, Homo sapien
ctgctgtgctttctcgtggacgctg

SEQ ID NO: 5473327 - DNA, 25 bp, Homo sapien
tgccagtggtactccttttcaccct

SEQ ID NO: 5473328 - DNA, 25 bp, Homo sapien
gtgccagtggtactccttttcaccc

SEQ ID NO: 5473329 - DNA, 25 bp, Homo sapien
tcctccactatctgttgtaaattca

SEQ ID NO: 5473330 - DNA, 25 bp, Homo sapien
tgttgtaaattcacctcaccctgca

SEQ ID NO: 5473331 - DNA, 25 bp, Homo sapien
taaggccgtggccataacacagagg

SEQ ID NO: 5473332 - DNA, 25 bp, Homo sapien
tcttcaggaaacagacttagaccca

SEQ ID NO: 5473333 - DNA, 25 bp, Homo sapien
cccaggaacatgtcggtgatgacat

SEQ ID NO: 5473334 - DNA, 25 bp, Homo sapien
tttagccctcaggtggacggggtca

SEQ ID NO: 5473335 - DNA, 25 bp, Homo sapien
tcagccatggctggaaagactctaa

SEQ ID NO: 5473336 - DNA, 25 bp, Homo sapien
ccacaagtccttcagccatggctgg

SEQ ID NO: 5473337 - DNA, 25 bp, Homo sapien
cagccatggctggaaagactctaac

SEQ ID NO: 5473338 - DNA, 25 bp, Homo sapien
cccaacccacaagtccttcagccat

SEQ ID NO: 5473339 - DNA, 25 bp, Homo sapien
tgtctcctggttgacagatctcagt

SEQ ID NO: 5473340 - DNA, 25 bp, Homo sapien
cagatctcagtgaagcctcctcgct

SEQ ID NO: 5473341 - DNA, 25 bp, Homo sapien
ggttgacagatctcagtgaagcctc

SEQ ID NO: 5473342 - DNA, 25 bp, Homo sapien
cctcctcgcttctcactgcttttgt

SEQ ID NO: 5473343 - DNA, 25 bp, Homo sapien
catcctgactgagcggtccttgcct

SEQ ID NO: 5473344 - DNA, 25 bp, Homo sapien
agggtacttctcatgcggctggtgc

SEQ ID NO: 5473345 - DNA, 25 bp, Homo sapien
gatctagcctcggatccagtctcgc

SEQ ID NO: 5473346 - DNA, 25 bp, Homo sapien
gaactcggtctggatgtcaccatga

SEQ ID NO: 5473347 - DNA, 25 bp, Homo sapien
gcttctcccattgtggtgagccaca

SEQ ID NO: 5473348 - DNA, 25 bp, Homo sapien
acccttgagggtgacgccagatctt

SEQ ID NO: 5473349 - DNA, 25 bp, Homo sapien
cccagcattggagcccatgtgtatc

SEQ ID NO: 5473350 - DNA, 25 bp, Homo sapien
tgtatctgctgaagaacgcagacat

SEQ ID NO: 5473351 - DNA, 25 bp, Homo sapien
agaagctccctcaggcccccagaca

SEQ ID NO: 5473352 - DNA, 25 bp, Homo sapien
ggcctcagggagaagctccctcagg

SEQ ID NO: 5473353 - DNA, 25 bp, Homo sapien
ctgcccactgggccttcaaagccca

SEQ ID NO: 5473354 - DNA, 25 bp, Homo sapien
tgggccttcaaagcccaggcctcag

SEQ ID NO: 5473355 - DNA, 25 bp, Homo sapien
gtccatgagtccatgccttatattg

SEQ ID NO: 5473356 - DNA, 25 bp, Homo sapien
gcttgctcttcccataattggcact

SEQ ID NO: 5473357 - DNA, 25 bp, Homo sapien
gtgcaatttcatacacttctgagag

SEQ ID NO: 5473358 - DNA, 25 bp, Homo sapien
ttctgagagttccattcctgacggg

SEQ ID NO: 5473359 - DNA, 25 bp, Homo sapien
aatgcttcaactgcttctgtagaat

SEQ ID NO: 5473360 - DNA, 25 bp, Homo sapien
aactgcttctgtagaatcagttgca

SEQ ID NO: 5473361 - DNA, 25 bp, Homo sapien
ctgcttctgtagaatcagttgcatg

SEQ ID NO: 5473362 - DNA, 25 bp, Homo sapien
gcttcaactgcttctgtagaatcag

SEQ ID NO: 5473363 - DNA, 25 bp, Homo sapien
tattgaagagtctagacagagcagc

SEQ ID NO: 5473364 - DNA, 25 bp, Homo sapien
caatattattacaccatccagaggg

SEQ ID NO: 5473365 - DNA, 25 bp, Homo sapien
gaataaaattcctgcaccccgacaa

SEQ ID NO: 5473366 - DNA, 25 bp, Homo sapien
caaaaacggagatcaatatctcgac

SEQ ID NO: 5473367 - DNA, 25 bp, Homo sapien
ctttatgtaccctgtgcaacgtgat

SEQ ID NO: 5473368 - DNA, 25 bp, Homo sapien
ctcagcatatactaaacagtactca

SEQ ID NO: 5473369 - DNA, 25 bp, Homo sapien
agtgagtgagtagagatcgcgccgc

SEQ ID NO: 5473370 - DNA, 25 bp, Homo sapien
caaagctccaggtatactcagcata

SEQ ID NO: 5473371 - DNA, 25 bp, Homo sapien
tgcctggttaattggttggtgggag

SEQ ID NO: 5473372 - DNA, 25 bp, Homo sapien
tggctggttagttagttggttagtg

SEQ ID NO: 5473373 - DNA, 25 bp, Homo sapien
aacaacagctttggttatgtgcaac

SEQ ID NO: 5473374 - DNA, 25 bp, Homo sapien
gcaaccaaaagctgtttgtataggg

SEQ ID NO: 5473375 - DNA, 25 bp, Homo sapien
agtgccagtgaccatcatacactca

SEQ ID NO: 5473376 - DNA, 25 bp, Homo sapien
tagtgccagtgaccatcatacactc

SEQ ID NO: 5473377 - DNA, 25 bp, Homo sapien
tcagtcaatcatagtgccagtgacc

SEQ ID NO: 5473378 - DNA, 25 bp, Homo sapien
gtgccagtgaccatcatacactcac

SEQ ID NO: 5473379 - DNA, 25 bp, Homo sapien
tcaatgactagtgccttgagatggc

SEQ ID NO: 5473380 - DNA, 25 bp, Homo sapien
tagtgccttgagatggccttctgct

SEQ ID NO: 5473381 - DNA, 25 bp, Homo sapien
cattatcactaatgttcacgccctg

SEQ ID NO: 5473382 - DNA, 25 bp, Homo sapien
gttcccatgaactgacgtggtgctg

SEQ ID NO: 5473383 - DNA, 25 bp, Homo sapien
tgctttcacagacacgtcatctgcc

SEQ ID NO: 5473384 - DNA, 25 bp, Homo sapien
gctttcacagacacgtcatctgcca

SEQ ID NO: 5473385 - DNA, 25 bp, Homo sapien
tttcacagacacgtcatctgccagc

SEQ ID NO: 5473386 - DNA, 25 bp, Homo sapien
ttgctttcacagacacgtcatctgc

SEQ ID NO: 5473387 - DNA, 25 bp, Homo sapien
caaaccgctgcgtgttctagcattt

SEQ ID NO: 5473388 - DNA, 25 bp, Homo sapien
ttccacagagtaaggaggaaaatca

SEQ ID NO: 5473389 - DNA, 25 bp, Homo sapien
tctagcatttggtgggccagatttc

SEQ ID NO: 5473390 - DNA, 25 bp, Homo sapien
ggaaaatcagcaaaccgctgcgtgt

SEQ ID NO: 5473391 - DNA, 25 bp, Homo sapien
cgtgacagtcttctcctccgacaag

SEQ ID NO: 5473392 - DNA, 25 bp, Homo sapien
aaataacaaagctcgcgaagcaaac

SEQ ID NO: 5473393 - DNA, 25 bp, Homo sapien
tctcctccgacaagccgtagatttc

SEQ ID NO: 5473394 - DNA, 25 bp, Homo sapien
aagcaaactgctccctaacgtgaca

SEQ ID NO: 5473395 - DNA, 25 bp, Homo sapien
ggaaggcagacaattagcaacatcc

SEQ ID NO: 5473396 - DNA, 25 bp, Homo sapien
aggaaggcagacaattagcaacatc

SEQ ID NO: 5473397 - DNA, 25 bp, Homo sapien
tgctgccttgctagaggtgcctcgt

SEQ ID NO: 5473398 - DNA, 25 bp, Homo sapien
ccttgccgctgggtgacattctcag

SEQ ID NO: 5473399 - DNA, 25 bp, Homo sapien
taagataccacgatgcactggagaa

SEQ ID NO: 5473400 - DNA, 25 bp, Homo sapien
cattctcagttgttaacccggcggc

SEQ ID NO: 5473401 - DNA, 25 bp, Homo sapien
gggctttcctgtgagaggacattgg

SEQ ID NO: 5473402 - DNA, 25 bp, Homo sapien
ggctttcctgtgagaggacattggc

SEQ ID NO: 5473403 - DNA, 25 bp, Homo sapien
gtcaaagggaagctcaggtgccacg

SEQ ID NO: 5473404 - DNA, 25 bp, Homo sapien
gcaactccagctcatcatgcccatg

SEQ ID NO: 5473405 - DNA, 25 bp, Homo sapien
gccacggagtaataaacacatgaac

SEQ ID NO: 5473406 - DNA, 25 bp, Homo sapien
ggaagctcaggtgccacggagtaat

SEQ ID NO: 5473407 - DNA, 25 bp, Homo sapien
gttcttgggatatatccaaaacgtc

SEQ ID NO: 5473408 - DNA, 25 bp, Homo sapien
tatatccaaaacgtcggccagcctg

SEQ ID NO: 5473409 - DNA, 25 bp, Homo sapien
gatatatccaaaacgtcggccagcc

SEQ ID NO: 5473410 - DNA, 25 bp, Homo sapien
ttgggatatatccaaaacgtcggcc

SEQ ID NO: 5473411 - DNA, 25 bp, Homo sapien
ttccacccagcggtaaaatttctgc

SEQ ID NO: 5473412 - DNA, 25 bp, Homo sapien
taaaatttctgcatcgcctcttcct

SEQ ID NO: 5473413 - DNA, 25 bp, Homo sapien
ctctgcggaaaccttgtaggaaagc

SEQ ID NO: 5473414 - DNA, 25 bp, Homo sapien
tctgcggaaaccttgtaggaaagca

SEQ ID NO: 5473415 - DNA, 25 bp, Homo sapien
tgacgccaccagtcttgggggctgc

SEQ ID NO: 5473416 - DNA, 25 bp, Homo sapien
ggctgcagccggttgaggtccaccc

SEQ ID NO: 5473417 - DNA, 25 bp, Homo sapien
gggggctgcagccggttgaggtcca

SEQ ID NO: 5473418 - DNA, 25 bp, Homo sapien
ctgacgccaccagtcttgggggctg

SEQ ID NO: 5473419 - DNA, 25 bp, Homo sapien
tcagctactgttatagacactggaa

SEQ ID NO: 5473420 - DNA, 25 bp, Homo sapien
gggacacaaaccatacacaagataa

SEQ ID NO: 5473421 - DNA, 25 bp, Homo sapien
ttgcattataatgctccaagccctg

SEQ ID NO: 5473422 - DNA, 25 bp, Homo sapien
aaaattaatcctggcccttgtggag

SEQ ID NO: 5473423 - DNA, 25 bp, Homo sapien
taaggcctcctgtgattacactggg

SEQ ID NO: 5473424 - DNA, 25 bp, Homo sapien
taatcagacctgtaaagtcctttgc

SEQ ID NO: 5473425 - DNA, 25 bp, Homo sapien
tcttcaaagtcagcccagcggcatc

SEQ ID NO: 5473426 - DNA, 25 bp, Homo sapien
tagagaagatgttagggaaagtcgc

SEQ ID NO: 5473427 - DNA, 25 bp, Homo sapien
gaccatggccagaagtgggtatcgt

SEQ ID NO: 5473428 - DNA, 25 bp, Homo sapien
cagggcttttctggtcacaagagac

SEQ ID NO: 5473429 - DNA, 25 bp, Homo sapien
ttccagggcttttctggtcacaaga

SEQ ID NO: 5473430 - DNA, 25 bp, Homo sapien
gtcacaagagaccatggccagaagt

SEQ ID NO: 5473431 - DNA, 25 bp, Homo sapien
catcctgtttgtgcgttgagctgcc

SEQ ID NO: 5473432 - DNA, 25 bp, Homo sapien
gatggtacccttcagcaggattggt

SEQ ID NO: 5473433 - DNA, 25 bp, Homo sapien
tcctgttctgacgagactgctcctg

SEQ ID NO: 5473434 - DNA, 25 bp, Homo sapien
gccgggatcgcgtatctgctcctgt

SEQ ID NO: 5473435 - DNA, 25 bp, Homo sapien
tgtcccctgtggttttatgaagacg

SEQ ID NO: 5473436 - DNA, 25 bp, Homo sapien
gtaagtgacaccgttgcctgcaggc

SEQ ID NO: 5473437 - DNA, 25 bp, Homo sapien
cagccggtgcggttttgccttgtaa

SEQ ID NO: 5473438 - DNA, 25 bp, Homo sapien
taagtgagaagctagcaagagtctg

SEQ ID NO: 5473439 - DNA, 25 bp, Homo sapien
gatggctcctgctggcgattccagg

SEQ ID NO: 5473440 - DNA, 25 bp, Homo sapien
aaccccggtgtctcatccaggactg

SEQ ID NO: 5473441 - DNA, 25 bp, Homo sapien
cactttgctgtgacgtgggctgcac

SEQ ID NO: 5473442 - DNA, 25 bp, Homo sapien
gggctcaaggtgctcaggaaccaaa

SEQ ID NO: 5473443 - DNA, 25 bp, Homo sapien
tcgagctgttctgtcaacacggagt

SEQ ID NO: 5473444 - DNA, 25 bp, Homo sapien
gcgtagatactgagctggcaataac

SEQ ID NO: 5473445 - DNA, 25 bp, Homo sapien
gcaataacagcgctgatccactgga

SEQ ID NO: 5473446 - DNA, 25 bp, Homo sapien
acacggagttgtttgtcaggcgtca

SEQ ID NO: 5473447 - DNA, 25 bp, Homo sapien
atgtgcagatatatcatgtgcaaac

SEQ ID NO: 5473448 - DNA, 25 bp, Homo sapien
aaggaaattaaacacgcacagagct

SEQ ID NO: 5473449 - DNA, 25 bp, Homo sapien
ctagaggatggtgttgccttttgca

SEQ ID NO: 5473450 - DNA, 25 bp, Homo sapien
tagaggatggtgttgccttttgcat

SEQ ID NO: 5473451 - DNA, 25 bp, Homo sapien
acagcgacttaagggcctgctagga

SEQ ID NO: 5473452 - DNA, 25 bp, Homo sapien
ggtgtgcggcctctgtagcccagtc

SEQ ID NO: 5473453 - DNA, 25 bp, Homo sapien
tcctccgagtatcgtgacaggtggc

SEQ ID NO: 5473454 - DNA, 25 bp, Homo sapien
tcagcaacagcgacttaagggcctg

SEQ ID NO: 5473455 - DNA, 25 bp, Homo sapien
atgagtgagtgcatgcgggtccact

SEQ ID NO: 5473456 - DNA, 25 bp, Homo sapien
ggagaccctgggacaaatgcctgtg

SEQ ID NO: 5473457 - DNA, 25 bp, Homo sapien
tctggaagtaagtggcgtcgctgcc

SEQ ID NO: 5473458 - DNA, 25 bp, Homo sapien
gcccagtttaggagagtgccatgtg

SEQ ID NO: 5473459 - DNA, 25 bp, Homo sapien
gtgatgatgcgtgtgccccaccctg

SEQ ID NO: 5473460 - DNA, 25 bp, Homo sapien
tttcatagaaattccttggatttcc

SEQ ID NO: 5473461 - DNA, 25 bp, Homo sapien
gactttttgtgatgatgcgtgtgcc

SEQ ID NO: 5473462 - DNA, 25 bp, Homo sapien
cttctgagactttttgtgatgatgc

SEQ ID NO: 5473463 - DNA, 25 bp, Homo sapien
cttgactggcaggcttgcctcgcgg

SEQ ID NO: 5473464 - DNA, 25 bp, Homo sapien
tgcacttcgtgaatgcccgctgctc

SEQ ID NO: 5473465 - DNA, 25 bp, Homo sapien
cagcggaagagtctcctgtccttgg

SEQ ID NO: 5473466 - DNA, 25 bp, Homo sapien
tcctgcagcggaagagtctcctgtc

SEQ ID NO: 5473467 - DNA, 25 bp, Homo sapien
ctgtgctgcatggtgattgttgtga

SEQ ID NO: 5473468 - DNA, 25 bp, Homo sapien
tgcttcccatcggtgcctgagtcaa

SEQ ID NO: 5473469 - DNA, 25 bp, Homo sapien
gcctaggacttgatggatggtgcct

SEQ ID NO: 5473470 - DNA, 25 bp, Homo sapien
gctgcttggtgcaggttcctgtgcc

SEQ ID NO: 5473471 - DNA, 25 bp, Homo sapien
aacacccagggacttgggctgtgat

SEQ ID NO: 5473472 - DNA, 25 bp, Homo sapien
gggcgtccgtgggccaccattgtct

SEQ ID NO: 5473473 - DNA, 25 bp, Homo sapien
acccagggacttgggctgtgatcag

SEQ ID NO: 5473474 - DNA, 25 bp, Homo sapien
cgggcgtccgtgggccaccattgtc

SEQ ID NO: 5473475 - DNA, 25 bp, Homo sapien
tcttgtgtgcatttgtatgtggggt

SEQ ID NO: 5473476 - DNA, 25 bp, Homo sapien
ctccagccttctcttgtgtgcattt

SEQ ID NO: 5473477 - DNA, 25 bp, Homo sapien
ggattttactgtgttggtcagctgg

SEQ ID NO: 5473478 - DNA, 25 bp, Homo sapien
tgcatttgtatgtggggttaatttt

SEQ ID NO: 5473479 - DNA, 25 bp, Homo sapien
cttccagggaactagtcttacagta

SEQ ID NO: 5473480 - DNA, 25 bp, Homo sapien
tcttacagtatatgctggaggctac

SEQ ID NO: 5473481 - DNA, 25 bp, Homo sapien
caagtgttgccttggcgctggtcct

SEQ ID NO: 5473482 - DNA, 25 bp, Homo sapien
ttgctgcgttgtgacagagcccctg

SEQ ID NO: 5473483 - DNA, 25 bp, Homo sapien
tctttgccaaatgggaccgatagcg

SEQ ID NO: 5473484 - DNA, 25 bp, Homo sapien
aaatgggaccgatagcgtgcgcatg

SEQ ID NO: 5473485 - DNA, 25 bp, Homo sapien
caaagggcttgccagatggtcggtg

SEQ ID NO: 5473486 - DNA, 25 bp, Homo sapien
tgccaaatgggaccgatagcgtgcg

SEQ ID NO: 5473487 - DNA, 25 bp, Homo sapien
gaatagtagcagtctacatctttag

SEQ ID NO: 5473488 - DNA, 25 bp, Homo sapien
ccttggatgagttatcagttgtagt

SEQ ID NO: 5473489 - DNA, 25 bp, Homo sapien
gccatccgtggaagagccaacggca

SEQ ID NO: 5473490 - DNA, 25 bp, Homo sapien
tatctcgttgtagcctcatcctgcc

SEQ ID NO: 5473491 - DNA, 25 bp, Homo sapien
tgcagatgtaaaacgacctgctccc

SEQ ID NO: 5473492 - DNA, 25 bp, Homo sapien
ggtgaatggattctcgccagggcca

SEQ ID NO: 5473493 - DNA, 25 bp, Homo sapien
tcgctggagttggagcacacatgtc

SEQ ID NO: 5473494 - DNA, 25 bp, Homo sapien
ccagggccaatacttatccgcaggg

SEQ ID NO: 5473495 - DNA, 25 bp, Homo sapien
ctctttcacctcctctcccatattt

SEQ ID NO: 5473496 - DNA, 25 bp, Homo sapien
tttttctctttcacctcctctccca

SEQ ID NO: 5473497 - DNA, 25 bp, Homo sapien
ttttctctttcacctcctctcccat

SEQ ID NO: 5473498 - DNA, 25 bp, Homo sapien
ttctctttcacctcctctcccatat

SEQ ID NO: 5473499 - DNA, 25 bp, Homo sapien
tgagaagagaggcttcgaggagaga

SEQ ID NO: 5473500 - DNA, 25 bp, Homo sapien
cggtaaggggttgctgtgggtcctg

SEQ ID NO: 5473501 - DNA, 25 bp, Homo sapien
cttcgaggagagacgcttcggtaag

SEQ ID NO: 5473502 - DNA, 25 bp, Homo sapien
gagaggcttcgaggagagacgcttc

SEQ ID NO: 5473503 - DNA, 25 bp, Homo sapien
tatctggtgaagcaccaggcatcgt

SEQ ID NO: 5473504 - DNA, 25 bp, Homo sapien
ccgatatctggtgaagcaccaggca

SEQ ID NO: 5473505 - DNA, 25 bp, Homo sapien
ggtgaagcaccaggcatcgtaggca

SEQ ID NO: 5473506 - DNA, 25 bp, Homo sapien
ctccgatatctggtgaagcaccagg

SEQ ID NO: 5473507 - DNA, 25 bp, Homo sapien
tctggtagtctcacataactctttg

SEQ ID NO: 5473508 - DNA, 25 bp, Homo sapien
gcggcctaacatccccgggagcatg

SEQ ID NO: 5473509 - DNA, 25 bp, Homo sapien
tggagtgagtgggaggactcgccct

SEQ ID NO: 5473510 - DNA, 25 bp, Homo sapien
cgttttcggatgaccacaggtgtga

SEQ ID NO: 5473511 - DNA, 25 bp, Homo sapien
tccagtggtgtgagttggttgcttg

SEQ ID NO: 5473512 - DNA, 25 bp, Homo sapien
tgtgagttggttgcttgatgtcatc

SEQ ID NO: 5473513 - DNA, 25 bp, Homo sapien
ccagtggtgtgagttggttgcttga

SEQ ID NO: 5473514 - DNA, 25 bp, Homo sapien
gagttggttgcttgatgtcatctga

SEQ ID NO: 5473515 - DNA, 25 bp, Homo sapien
cttcttggatcaggatttccaggcc

SEQ ID NO: 5473516 - DNA, 25 bp, Homo sapien
ggcctctgcatctcttgagttgatt

SEQ ID NO: 5473517 - DNA, 25 bp, Homo sapien
caggcctctgcatctcttgagttga

SEQ ID NO: 5473518 - DNA, 25 bp, Homo sapien
ttgtatgccttcttggatcaggatt

SEQ ID NO: 5473519 - DNA, 25 bp, Homo sapien
caaactgagcgttgctgggcctcag

SEQ ID NO: 5473520 - DNA, 25 bp, Homo sapien
tgggcctcaggagcttctagtgatg

SEQ ID NO: 5473521 - DNA, 25 bp, Homo sapien
gagggtcctctggagaacacaaact

SEQ ID NO: 5473522 - DNA, 25 bp, Homo sapien
cctgaaggcgtagaaagagggtcct

SEQ ID NO: 5473523 - DNA, 25 bp, Homo sapien
tggaggcggccactgctgtctttca

SEQ ID NO: 5473524 - DNA, 25 bp, Homo sapien
ggaggcggccactgctgtctttcag

SEQ ID NO: 5473525 - DNA, 25 bp, Homo sapien
ctggaggcggccactgctgtctttc

SEQ ID NO: 5473526 - DNA, 25 bp, Homo sapien
attgccccgtaactctggccgcggt

SEQ ID NO: 5473527 - DNA, 25 bp, Homo sapien
actctggccgcggtagtctggacag

SEQ ID NO: 5473528 - DNA, 25 bp, Homo sapien
ccgcggtactgccacccgctggaag

SEQ ID NO: 5473529 - DNA, 25 bp, Homo sapien
tgttgtgtgcttggtgttcattgcc

SEQ ID NO: 5473530 - DNA, 25 bp, Homo sapien
tttacgtctggagccagcatttgga

SEQ ID NO: 5473531 - DNA, 25 bp, Homo sapien
ttgtgcgtgaagtggagcctggtcc

SEQ ID NO: 5473532 - DNA, 25 bp, Homo sapien
tgacccaggtacagtttacgtctgg

SEQ ID NO: 5473533 - DNA, 25 bp, Homo sapien
gcatttggaaagttgcctccagggc

SEQ ID NO: 5473534 - DNA, 25 bp, Homo sapien
cattctggggctaccctttgctcca

SEQ ID NO: 5473535 - DNA, 25 bp, Homo sapien
ctgcattctggggctaccctttgct

SEQ ID NO: 5473536 - DNA, 25 bp, Homo sapien
ctggggctaccctttgctccagtgg

SEQ ID NO: 5473537 - DNA, 25 bp, Homo sapien
tctggggctaccctttgctccagtg

SEQ ID NO: 5473538 - DNA, 25 bp, Homo sapien
ctcctgcttgcttccatagcagagc

SEQ ID NO: 5473539 - DNA, 25 bp, Homo sapien
acgtgaaccaccattcatgatcctg

SEQ ID NO: 5473540 - DNA, 25 bp, Homo sapien
gggacgtgaaccaccattcatgatc

SEQ ID NO: 5473541 - DNA, 25 bp, Homo sapien
tgggacgtgaaccaccattcatgat

SEQ ID NO: 5473542 - DNA, 25 bp, Homo sapien
tgtgggacgtgaaccaccattcatg

SEQ ID NO: 5473543 - DNA, 25 bp, Homo sapien
aaggctggaactgagctgggctggc

SEQ ID NO: 5473544 - DNA, 25 bp, Homo sapien
aatgagaggggaaggctggaactga

SEQ ID NO: 5473545 - DNA, 25 bp, Homo sapien
gagaggggaaggctggaactgagct

SEQ ID NO: 5473546 - DNA, 25 bp, Homo sapien
gggaaggctggaactgagctgggct

SEQ ID NO: 5473547 - DNA, 25 bp, Homo sapien
attgatttcttgaggagccccaagg

SEQ ID NO: 5473548 - DNA, 25 bp, Homo sapien
cacatacacatgtgagtgctgtgaa

SEQ ID NO: 5473549 - DNA, 25 bp, Homo sapien
gaaatcattaccatagcctcagaca

SEQ ID NO: 5473550 - DNA, 25 bp, Homo sapien
tgccctcagccataaacacattgtg

SEQ ID NO: 5473551 - DNA, 25 bp, Homo sapien
acccacggccaggtgtgagccagga

SEQ ID NO: 5473552 - DNA, 25 bp, Homo sapien
accacccacggccaggtgtgagcca

SEQ ID NO: 5473553 - DNA, 25 bp, Homo sapien
cccacggccaggtgtgagccaggag

SEQ ID NO: 5473554 - DNA, 25 bp, Homo sapien
cacccacggccaggtgtgagccagg

SEQ ID NO: 5473555 - DNA, 25 bp, Homo sapien
tgacattgagaataaagagatggtg

SEQ ID NO: 5473556 - DNA, 25 bp, Homo sapien
aaaagacaccaaaggtgtgagttca

SEQ ID NO: 5473557 - DNA, 25 bp, Homo sapien
tgtagcttgatatgatgagtgtttc

SEQ ID NO: 5473558 - DNA, 25 bp, Homo sapien
tttccagctgctcaatagttgtaca

SEQ ID NO: 5473559 - DNA, 25 bp, Homo sapien
ggtgtttgacactagtatccagaga

SEQ ID NO: 5473560 - DNA, 25 bp, Homo sapien
aaaagctgagccgaggaaactggaa

SEQ ID NO: 5473561 - DNA, 25 bp, Homo sapien
ccgtagggaaaggtgtgaacgcaca

SEQ ID NO: 5473562 - DNA, 25 bp, Homo sapien
gagacaaactcagacatgcgccctg

SEQ ID NO: 5473563 - DNA, 25 bp, Homo sapien
gctcattattttgcgcggacccgaa

SEQ ID NO: 5473564 - DNA, 25 bp, Homo sapien
agagcacaggtgagttgttaaaaac

SEQ ID NO: 5473565 - DNA, 25 bp, Homo sapien
aatgaaggctgtctcgtcctttctg

SEQ ID NO: 5473566 - DNA, 25 bp, Homo sapien
tctgtttaattggagcgcctggaga

SEQ ID NO: 5473567 - DNA, 25 bp, Homo sapien
tctgagttggggtagccagaattca

SEQ ID NO: 5473568 - DNA, 25 bp, Homo sapien
gtgagatgcgtaaacaaactgtccc

SEQ ID NO: 5473569 - DNA, 25 bp, Homo sapien
taaatcccctgctgatatggcacaa

SEQ ID NO: 5473570 - DNA, 25 bp, Homo sapien
ggttgtgaaaatcgcagccctgtga

SEQ ID NO: 5473571 - DNA, 25 bp, Homo sapien
tgtgaattgtgtgccctaagagcca

SEQ ID NO: 5473572 - DNA, 25 bp, Homo sapien
agacaccccagggtacgcagccagt

SEQ ID NO: 5473573 - DNA, 25 bp, Homo sapien
tgacgccaacaaagaaatttctagc

SEQ ID NO: 5473574 - DNA, 25 bp, Homo sapien
gaatgctgcgagaacccacacagct

SEQ ID NO: 5473575 - DNA, 25 bp, Homo sapien
tttctagctgcttgtagaagacacc

SEQ ID NO: 5473576 - DNA, 25 bp, Homo sapien
gctgtatccttatgatacctcgtca

SEQ ID NO: 5473577 - DNA, 25 bp, Homo sapien
ggctctagcttcttcgttggccaga

SEQ ID NO: 5473578 - DNA, 25 bp, Homo sapien
gagtctgcaccgaacatggctctag

SEQ ID NO: 5473579 - DNA, 25 bp, Homo sapien
tcttcgttggccagacaggatctgc

SEQ ID NO: 5473580 - DNA, 25 bp, Homo sapien
tcacagtggaatagactgtcagcag

SEQ ID NO: 5473581 - DNA, 25 bp, Homo sapien
caggtcctgagatgtgactctggac

SEQ ID NO: 5473582 - DNA, 25 bp, Homo sapien
tggctttgtagaatgctcacagtgg

SEQ ID NO: 5473583 - DNA, 25 bp, Homo sapien
tgagatgtgactctggacagccagt

SEQ ID NO: 5473584 - DNA, 25 bp, Homo sapien
atgaatggatctagacctggtgcct

SEQ ID NO: 5473585 - DNA, 25 bp, Homo sapien
tgaatggatctagacctggtgcctg

SEQ ID NO: 5473586 - DNA, 25 bp, Homo sapien
gcactagagccctccgtgagaccat

SEQ ID NO: 5473587 - DNA, 25 bp, Homo sapien
gggagcactagagccctccgtgaga

SEQ ID NO: 5473588 - DNA, 25 bp, Homo sapien
gagaagggggagcactagagccctc

SEQ ID NO: 5473589 - DNA, 25 bp, Homo sapien
aagggggagcactagagccctccgt

SEQ ID NO: 5473590 - DNA, 25 bp, Homo sapien
tgtgcttgttcctgtccccatggag

SEQ ID NO: 5473591 - DNA, 25 bp, Homo sapien
ccccatggaggagcactggacttgt

SEQ ID NO: 5473592 - DNA, 25 bp, Homo sapien
ctgtgagctgctccacttggtggag

SEQ ID NO: 5473593 - DNA, 25 bp, Homo sapien
gggcagaggatactgagcctgacca

SEQ ID NO: 5473594 - DNA, 25 bp, Homo sapien
tgagtcggcctgaccaagtcgtcgt

SEQ ID NO: 5473595 - DNA, 25 bp, Homo sapien
gcccagaggtgagtcggcctgacca

SEQ ID NO: 5473596 - DNA, 25 bp, Homo sapien
cggcctgaccaagtcgtcgtgtcat

SEQ ID NO: 5473597 - DNA, 25 bp, Homo sapien
aggtgagtcggcctgaccaagtcgt

SEQ ID NO: 5473598 - DNA, 25 bp, Homo sapien
aaagtgcagcagtgcactctgtccc

SEQ ID NO: 5473599 - DNA, 25 bp, Homo sapien
tctgtccctgcaacaggctctgcgg

SEQ ID NO: 5473600 - DNA, 25 bp, Homo sapien
ttgtttaggattgtgaaagtgcagc

SEQ ID NO: 5473601 - DNA, 25 bp, Homo sapien
cggtgggctagctccagtgttgcat

SEQ ID NO: 5473602 - DNA, 25 bp, Homo sapien
ctagaccatatcgaagggggcaaac

SEQ ID NO: 5473603 - DNA, 25 bp, Homo sapien
gaccatatcgaagggggcaaactta

SEQ ID NO: 5473604 - DNA, 25 bp, Homo sapien
agaccatatcgaagggggcaaactt

SEQ ID NO: 5473605 - DNA, 25 bp, Homo sapien
catatcgaagggggcaaacttaatt

SEQ ID NO: 5473606 - DNA, 25 bp, Homo sapien
gacatctttgacaggaacaccaatt

SEQ ID NO: 5473607 - DNA, 25 bp, Homo sapien
cagctggggatgcttaactgtgtaa

SEQ ID NO: 5473608 - DNA, 25 bp, Homo sapien
tcctctgtgctcaataatgtcttca

SEQ ID NO: 5473609 - DNA, 25 bp, Homo sapien
aggaacaccaattgattcctctgtg

SEQ ID NO: 5473610 - DNA, 25 bp, Homo sapien
ttctattagcaaaatgtcttctatt

SEQ ID NO: 5473611 - DNA, 25 bp, Homo sapien
ctattagcaaaatgtcttctattac

SEQ ID NO: 5473612 - DNA, 25 bp, Homo sapien
tcttctattagcaaaatgtcttcta

SEQ ID NO: 5473613 - DNA, 25 bp, Homo sapien
cttcttctattagcaaaatgtcttc

SEQ ID NO: 5473614 - DNA, 25 bp, Homo sapien
gctttagaaataacggtgctgctat

SEQ ID NO: 5473615 - DNA, 25 bp, Homo sapien
gcccaggcctttgtactgctctaat

SEQ ID NO: 5473616 - DNA, 25 bp, Homo sapien
taagcgatttttccaaggcccaggc

SEQ ID NO: 5473617 - DNA, 25 bp, Homo sapien
cctgcgaaaggtctggatgtgttca

SEQ ID NO: 5473618 - DNA, 25 bp, Homo sapien
agaagttgtccttaactgaaggagg

SEQ ID NO: 5473619 - DNA, 25 bp, Homo sapien
taagtcaaccatcaagcagcattta

SEQ ID NO: 5473620 - DNA, 25 bp, Homo sapien
cttgagggtgagagaagttgtcctt

SEQ ID NO: 5473621 - DNA, 25 bp, Homo sapien
tagaacattgataagggcttgaggg

SEQ ID NO: 5473622 - DNA, 25 bp, Homo sapien
aggagccagggacaggtggggccat

SEQ ID NO: 5473623 - DNA, 25 bp, Homo sapien
cctgctcagtgctcctggccactgc

SEQ ID NO: 5473624 - DNA, 25 bp, Homo sapien
tcctggccactgctgactggtgcat

SEQ ID NO: 5473625 - DNA, 25 bp, Homo sapien
gctcctggccactgctgactggtgc

SEQ ID NO: 5473626 - DNA, 25 bp, Homo sapien
gctcagtgctcctggccactgctga

SEQ ID NO: 5473627 - DNA, 25 bp, Homo sapien
cgtgatattcgttcctactccagga

SEQ ID NO: 5473628 - DNA, 25 bp, Homo sapien
aatccgacttccctgtgctttgaga

SEQ ID NO: 5473629 - DNA, 25 bp, Homo sapien
cagatggcgatattagaagagttcc

SEQ ID NO: 5473630 - DNA, 25 bp, Homo sapien
gaaaagcttggtaaacatccagatg

SEQ ID NO: 5473631 - DNA, 25 bp, Homo sapien
acccaatactaggaagattagataa

SEQ ID NO: 5473632 - DNA, 25 bp, Homo sapien
gctgtctgatagacagctgcagtgt

SEQ ID NO: 5473633 - DNA, 25 bp, Homo sapien
ataatgtgtagggatttcttggttt

SEQ ID NO: 5473634 - DNA, 25 bp, Homo sapien
ctttgaggctgtctgatagacagct

SEQ ID NO: 5473635 - DNA, 25 bp, Homo sapien
tgagctcgaaggctgaatggtcgat

SEQ ID NO: 5473636 - DNA, 25 bp, Homo sapien
tgtccctgagctcgaaggctgaatg

SEQ ID NO: 5473637 - DNA, 25 bp, Homo sapien
tcgatgggagctcctttggtgactc

SEQ ID NO: 5473638 - DNA, 25 bp, Homo sapien
cctttggtgactccgtagctgtggc

SEQ ID NO: 5473639 - DNA, 25 bp, Homo sapien
gagtgcggccctcgcggtcagcggg

SEQ ID NO: 5473640 - DNA, 25 bp, Homo sapien
gtgggccacactcccggcccgcctg

SEQ ID NO: 5473641 - DNA, 25 bp, Homo sapien
agcctgagtgcggccctcgcggtca

SEQ ID NO: 5473642 - DNA, 25 bp, Homo sapien
cggaccccggcactcgggcggcgcg

SEQ ID NO: 5473643 - DNA, 25 bp, Homo sapien
cccatcgttgatacttgcattcacg

SEQ ID NO: 5473644 - DNA, 25 bp, Homo sapien
tggtgatagccctagaactgtgttt

SEQ ID NO: 5473645 - DNA, 25 bp, Homo sapien
tccgctgtggtgttgattgttcctt

SEQ ID NO: 5473646 - DNA, 25 bp, Homo sapien
cagcccaaattagaatccgctgtgg

SEQ ID NO: 5473647 - DNA, 25 bp, Homo sapien
ttaccagacagcacgcttccctggg

SEQ ID NO: 5473648 - DNA, 25 bp, Homo sapien
tgtgaagggattgtttcggcgactc

SEQ ID NO: 5473649 - DNA, 25 bp, Homo sapien
ctctctcattcagtaccagggtgta

SEQ ID NO: 5473650 - DNA, 25 bp, Homo sapien
tcggcgactccttatctaagaaatg

SEQ ID NO: 5473651 - DNA, 25 bp, Homo sapien
ctgaccgtcaggcacttgagattga

SEQ ID NO: 5473652 - DNA, 25 bp, Homo sapien
gattgactcggtgaacaatgccgcc

SEQ ID NO: 5473653 - DNA, 25 bp, Homo sapien
tctctgtacggcctttgggtgcatc

SEQ ID NO: 5473654 - DNA, 25 bp, Homo sapien
cgttaggtccaagatttcacgtgac

SEQ ID NO: 5473655 - DNA, 25 bp, Homo sapien
gatcagaatcactcagatatcactt

SEQ ID NO: 5473656 - DNA, 25 bp, Homo sapien
tggtggaggcgagagaagaatattt

SEQ ID NO: 5473657 - DNA, 25 bp, Homo sapien
acaggatcagaatcactcagatatc

SEQ ID NO: 5473658 - DNA, 25 bp, Homo sapien
ctacacaggatcagaatcactcaga

SEQ ID NO: 5473659 - DNA, 25 bp, Homo sapien
ctgagacgtagtaagagttctgcct

SEQ ID NO: 5473660 - DNA, 25 bp, Homo sapien
gcaaggtgctgggtggaaggtccct

SEQ ID NO: 5473661 - DNA, 25 bp, Homo sapien
tgggcatgatcttaatcggattctc

SEQ ID NO: 5473662 - DNA, 25 bp, Homo sapien
catgtagcccctctcgataccgatg

SEQ ID NO: 5473663 - DNA, 25 bp, Homo sapien
ccttaggcagatcctcattttcagg

SEQ ID NO: 5473664 - DNA, 25 bp, Homo sapien
gtccttaggcagatcctcattttca

SEQ ID NO: 5473665 - DNA, 25 bp, Homo sapien
caggagcatcctggcgcgggtctcc

SEQ ID NO: 5473666 - DNA, 25 bp, Homo sapien
ctgtccttaggcagatcctcatttt

SEQ ID NO: 5473667 - DNA, 25 bp, Homo sapien
gttgctggggactcacgccttgtga

SEQ ID NO: 5473668 - DNA, 25 bp, Homo sapien
actgtggcatacaagtcaccatggc

SEQ ID NO: 5473669 - DNA, 25 bp, Homo sapien
ggtgcccagagggttcttctttgcc

SEQ ID NO: 5473670 - DNA, 25 bp, Homo sapien
ccgaggttgagtgggctggttgcag

SEQ ID NO: 5473671 - DNA, 25 bp, Homo sapien
ttgtccgtttccaaaatacacagga

SEQ ID NO: 5473672 - DNA, 25 bp, Homo sapien
gcaggaatgccaccttcgttcagat

SEQ ID NO: 5473673 - DNA, 25 bp, Homo sapien
gatcagacttatcttcttcgcagga

SEQ ID NO: 5473674 - DNA, 25 bp, Homo sapien
tcttcttcgcaggatgtggccagag

SEQ ID NO: 5473675 - DNA, 25 bp, Homo sapien
acatttcagtgtgaagggcgggtcg

SEQ ID NO: 5473676 - DNA, 25 bp, Homo sapien
aaccaagagtcgtgtgaggtcccag

SEQ ID NO: 5473677 - DNA, 25 bp, Homo sapien
cagtgacaggggaaccaagagtcgt

SEQ ID NO: 5473678 - DNA, 25 bp, Homo sapien
tgtgaagggcgggtcgggtgcccca

SEQ ID NO: 5473679 - DNA, 25 bp, Homo sapien
ctcccaggaggctgattagatttgc

SEQ ID NO: 5473680 - DNA, 25 bp, Homo sapien
gagagatggtccgtgtgggtcagcc

SEQ ID NO: 5473681 - DNA, 25 bp, Homo sapien
ggtcagccggctcaacagaccttct

SEQ ID NO: 5473682 - DNA, 25 bp, Homo sapien
ggccacagaccaagctcacagggat

SEQ ID NO: 5473683 - DNA, 25 bp, Homo sapien
tccctgcatctgtgaacaagcttgt

SEQ ID NO: 5473684 - DNA, 25 bp, Homo sapien
tgtagcttgggatgaacttcttccc

SEQ ID NO: 5473685 - DNA, 25 bp, Homo sapien
atctgtgaacaagcttgtactcagc

SEQ ID NO: 5473686 - DNA, 25 bp, Homo sapien
tctgtagcttgggatgaacttcttc

SEQ ID NO: 5473687 - DNA, 25 bp, Homo sapien
ttggtggccaggtgttcgtcaccct

SEQ ID NO: 5473688 - DNA, 25 bp, Homo sapien
ggtggccaggtgttcgtcaccctgc

SEQ ID NO: 5473689 - DNA, 25 bp, Homo sapien
gccaggtgttcgtcaccctgcactg

SEQ ID NO: 5473690 - DNA, 25 bp, Homo sapien
gtgttcgtcaccctgcactgagagg

SEQ ID NO: 5473691 - DNA, 25 bp, Homo sapien
gttttgtctggaatgcgtatttgtg

SEQ ID NO: 5473692 - DNA, 25 bp, Homo sapien
tttgtctggaatgcgtatttgtggt

SEQ ID NO: 5473693 - DNA, 25 bp, Homo sapien
tgtctggaatgcgtatttgtggttc

SEQ ID NO: 5473694 - DNA, 25 bp, Homo sapien
ttttgtctggaatgcgtatttgtgg

SEQ ID NO: 5473695 - DNA, 25 bp, Homo sapien
ggtcctggctcccttgtctaatgaa

SEQ ID NO: 5473696 - DNA, 25 bp, Homo sapien
tgaaagttctcttccttgaccatag

SEQ ID NO: 5473697 - DNA, 25 bp, Homo sapien
tctgaaatcccgaggaaggacgcag

SEQ ID NO: 5473698 - DNA, 25 bp, Homo sapien
ttgaccatagtccttgggccctgtt

SEQ ID NO: 5473699 - DNA, 25 bp, Homo sapien
atctagctgagtgtcgtgaactggg

SEQ ID NO: 5473700 - DNA, 25 bp, Homo sapien
cgtgaactgggacaaactgatcttt

SEQ ID NO: 5473701 - DNA, 25 bp, Homo sapien
ttcagtgaccttcggatgtgaaaat

SEQ ID NO: 5473702 - DNA, 25 bp, Homo sapien
tcggatgtgaaaatggcccattgga

SEQ ID NO: 5473703 - DNA, 25 bp, Homo sapien
aagtggtgagtggttccctctggcc

SEQ ID NO: 5473704 - DNA, 25 bp, Homo sapien
tttttcagatgccttcgtgaacagc

SEQ ID NO: 5473705 - DNA, 25 bp, Homo sapien
tgagtcgatctgtcccggagctcaa

SEQ ID NO: 5473706 - DNA, 25 bp, Homo sapien
gccaggaatggacgctgagtcgatc

SEQ ID NO: 5473707 - DNA, 25 bp, Homo sapien
aacttgtgctctgccggtattttga

SEQ ID NO: 5473708 - DNA, 25 bp, Homo sapien
tgtgctctgccggtattttgaaagc

SEQ ID NO: 5473709 - DNA, 25 bp, Homo sapien
tctgccggtattttgaaagcatatg

SEQ ID NO: 5473710 - DNA, 25 bp, Homo sapien
caccaaaaacttgtgctctgccggt

SEQ ID NO: 5473711 - DNA, 25 bp, Homo sapien
aatgaaattttctctccgtgtaact

SEQ ID NO: 5473712 - DNA, 25 bp, Homo sapien
ggctgttccattctttgcagatatg

SEQ ID NO: 5473713 - DNA, 25 bp, Homo sapien
cagatatggatgcaggtaactattc

SEQ ID NO: 5473714 - DNA, 25 bp, Homo sapien
aagcatttagctcccgtgtccccta

SEQ ID NO: 5473715 - DNA, 25 bp, Homo sapien
tcatcggctggcagtgaccttcaca

SEQ ID NO: 5473716 - DNA, 25 bp, Homo sapien
tctgaggacaatttcacagctgccg

SEQ ID NO: 5473717 - DNA, 25 bp, Homo sapien
tgaccttcacacctctgaggacaat

SEQ ID NO: 5473718 - DNA, 25 bp, Homo sapien
caatttcacagctgccgttcacttc

SEQ ID NO: 5473719 - DNA, 25 bp, Homo sapien
gctgggacttacacccggtctggga

SEQ ID NO: 5473720 - DNA, 25 bp, Homo sapien
catactgggcctgcattggagcctg

SEQ ID NO: 5473721 - DNA, 25 bp, Homo sapien
attggagcctgtgttccagagaaaa

SEQ ID NO: 5473722 - DNA, 25 bp, Homo sapien
ccgctggcttctgtggggagtcact

SEQ ID NO: 5473723 - DNA, 25 bp, Homo sapien
agctcgttccaagatgttccagagg

SEQ ID NO: 5473724 - DNA, 25 bp, Homo sapien
gtggcagatgcagctcgttccaaga

SEQ ID NO: 5473725 - DNA, 25 bp, Homo sapien
ggcagtacctcagtggcagatgcag

SEQ ID NO: 5473726 - DNA, 25 bp, Homo sapien
gcagccacttcaacttgggcagcat

SEQ ID NO: 5473727 - DNA, 25 bp, Homo sapien
ggctggaccgggtcttggtgctttc

SEQ ID NO: 5473728 - DNA, 25 bp, Homo sapien
tcagggcgttggtccacttggttat

SEQ ID NO: 5473729 - DNA, 25 bp, Homo sapien
gatgagaggctggaccgggtcttgg

SEQ ID NO: 5473730 - DNA, 25 bp, Homo sapien
cagggcgttggtccacttggttatt

SEQ ID NO: 5473731 - DNA, 25 bp, Homo sapien
cctccggagagcctttgccggccat

SEQ ID NO: 5473732 - DNA, 25 bp, Homo sapien
tccagtaacgaggaaacgtcagccc

SEQ ID NO: 5473733 - DNA, 25 bp, Homo sapien
tagccaaggactgcacgaatgttca

SEQ ID NO: 5473734 - DNA, 25 bp, Homo sapien
gagattcccgtggtgcacctttgaa

SEQ ID NO: 5473735 - DNA, 25 bp, Homo sapien
tgacagaaaccaagcgagcatgccg

SEQ ID NO: 5473736 - DNA, 25 bp, Homo sapien
caagagggtcacatacttgtggatg

SEQ ID NO: 5473737 - DNA, 25 bp, Homo sapien
tggatgatcatagcgccagacgtcg

SEQ ID NO: 5473738 - DNA, 25 bp, Homo sapien
tctcctaggagagcatgaggttctg

SEQ ID NO: 5473739 - DNA, 25 bp, Homo sapien
cgtcgtctatgagagaggagcctgt

SEQ ID NO: 5473740 - DNA, 25 bp, Homo sapien
gagccgcttcaaggtgatggaggac

SEQ ID NO: 5473741 - DNA, 25 bp, Homo sapien
ctctccccttctggtttaaatccat

SEQ ID NO: 5473742 - DNA, 25 bp, Homo sapien
gagagtgctggagccgcttcaaggt

SEQ ID NO: 5473743 - DNA, 25 bp, Homo sapien
tgatggaggactcgccgcgctctga

SEQ ID NO: 5473744 - DNA, 25 bp, Homo sapien
tgaggatcagcacaaagtcgctggg

SEQ ID NO: 5473745 - DNA, 25 bp, Homo sapien
tccagtgccaatgctgaagaagcgc

SEQ ID NO: 5473746 - DNA, 25 bp, Homo sapien
cacgttggtcctagttactgcttca

SEQ ID NO: 5473747 - DNA, 25 bp, Homo sapien
cactaacgtatatctcgggcacctc

SEQ ID NO: 5473748 - DNA, 25 bp, Homo sapien
gccgaggcccctgtgaatgttgaag

SEQ ID NO: 5473749 - DNA, 25 bp, Homo sapien
taaacctcatttcaagccgtgctgg

SEQ ID NO: 5473750 - DNA, 25 bp, Homo sapien
taaagcgtcgtagatgaagggtccc

SEQ ID NO: 5473751 - DNA, 25 bp, Homo sapien
gagaggtgcaccctaatggagcaag

SEQ ID NO: 5473752 - DNA, 25 bp, Homo sapien
tctgcttgacctgggcagctgagcc

SEQ ID NO: 5473753 - DNA, 25 bp, Homo sapien
gagcgttctcgctcctgctcacagg

SEQ ID NO: 5473754 - DNA, 25 bp, Homo sapien
tcacaggcgagtttgtgtggcttgc

SEQ ID NO: 5473755 - DNA, 25 bp, Homo sapien
ggtgagctggttccacaagatggtt

SEQ ID NO: 5473756 - DNA, 25 bp, Homo sapien
ggggctggggcgggctggatgtgcg

SEQ ID NO: 5473757 - DNA, 25 bp, Homo sapien
ctgggggctggggcgggctggatgt

SEQ ID NO: 5473758 - DNA, 25 bp, Homo sapien
gctggggcgggctggatgtgcggac

SEQ ID NO: 5473759 - DNA, 25 bp, Homo sapien
ctggggaagggaggcactgggggct

SEQ ID NO: 5473760 - DNA, 25 bp, Homo sapien
ttgcttcacagccagcggctctgtg

SEQ ID NO: 5473761 - DNA, 25 bp, Homo sapien
actgcacagggctctcgttcctaga

SEQ ID NO: 5473762 - DNA, 25 bp, Homo sapien
cacagggctctcgttcctagattgc

SEQ ID NO: 5473763 - DNA, 25 bp, Homo sapien
gctctcgttcctagattgcttcaca

SEQ ID NO: 5473764 - DNA, 25 bp, Homo sapien
tgagccagcttgaattagcgtgatg

SEQ ID NO: 5473765 - DNA, 25 bp, Homo sapien
tctgcactgcggtatcatagctgtg

SEQ ID NO: 5473766 - DNA, 25 bp, Homo sapien
gcgtgatgtatcattaatgcataca

SEQ ID NO: 5473767 - DNA, 25 bp, Homo sapien
catagctgtgttttgccccaggact

SEQ ID NO: 5473768 - DNA, 25 bp, Homo sapien
taggagtctccctgatataagcaaa

SEQ ID NO: 5473769 - DNA, 25 bp, Homo sapien
tgcagagcctcatcgaagcgttgtg

SEQ ID NO: 5473770 - DNA, 25 bp, Homo sapien
gcatccctaaaggttgggttctgga

SEQ ID NO: 5473771 - DNA, 25 bp, Homo sapien
agcgatgcactgacggccttaggag

SEQ ID NO: 5473772 - DNA, 25 bp, Homo sapien
aaaggtgtactcctgaggatgacac

SEQ ID NO: 5473773 - DNA, 25 bp, Homo sapien
taggtaggaaaggtgtactcctgag

SEQ ID NO: 5473774 - DNA, 25 bp, Homo sapien
cttgctgctcttacagatgcgcgct

SEQ ID NO: 5473775 - DNA, 25 bp, Homo sapien
gctcttacagatgcgcgcttttggg

SEQ ID NO: 5473776 - DNA, 25 bp, Homo sapien
gggcgtatctgggagcgtccgtggg

SEQ ID NO: 5473777 - DNA, 25 bp, Homo sapien
gtgggcgtatctgggagcgtccgtg

SEQ ID NO: 5473778 - DNA, 25 bp, Homo sapien
ggtgggcgtatctgggagcgtccgt

SEQ ID NO: 5473779 - DNA, 25 bp, Homo sapien
gggggcatctgggagcatccgtggg

SEQ ID NO: 5473780 - DNA, 25 bp, Homo sapien
tgggagcgtccgtggggtgggggca

SEQ ID NO: 5473781 - DNA, 25 bp, Homo sapien
gtaaattaatcagcagcagtccagc

SEQ ID NO: 5473782 - DNA, 25 bp, Homo sapien
tgcgagcgcccgtggcagctgcttt

SEQ ID NO: 5473783 - DNA, 25 bp, Homo sapien
catgggtggtagtctcacgctgccc

SEQ ID NO: 5473784 - DNA, 25 bp, Homo sapien
tgtgcctgcactttttagtcgaaca

SEQ ID NO: 5473785 - DNA, 25 bp, Homo sapien
cgtctgcagccttgaatcgggaggc

SEQ ID NO: 5473786 - DNA, 25 bp, Homo sapien
tgcaccctggcctgatacttcttta

SEQ ID NO: 5473787 - DNA, 25 bp, Homo sapien
tctcttaacagaatgcaccaagagt

SEQ ID NO: 5473788 - DNA, 25 bp, Homo sapien
tgattggccaggcacctcacgttag

SEQ ID NO: 5473789 - DNA, 25 bp, Homo sapien
ggctctgcgggctgggggtccggcc

SEQ ID NO: 5473790 - DNA, 25 bp, Homo sapien
tgctttttccgttgaccaaagccat

SEQ ID NO: 5473791 - DNA, 25 bp, Homo sapien
accatcagcctctgtgcagccgttg

SEQ ID NO: 5473792 - DNA, 25 bp, Homo sapien
gcgagcacccgggccaagcgtggag

SEQ ID NO: 5473793 - DNA, 25 bp, Homo sapien
ctttatgcagtcgtgttcagagaga

SEQ ID NO: 5473794 - DNA, 25 bp, Homo sapien
tttatgcagtcgtgttcagagagag

SEQ ID NO: 5473795 - DNA, 25 bp, Homo sapien
ttatgcagtcgtgttcagagagaga

SEQ ID NO: 5473796 - DNA, 25 bp, Homo sapien
gatattccgtttacaaatctaagca

SEQ ID NO: 5473797 - DNA, 25 bp, Homo sapien
ggagcatgacgggagttgatcattt

SEQ ID NO: 5473798 - DNA, 25 bp, Homo sapien
tctaagcaccgttaccaagagtggt

SEQ ID NO: 5473799 - DNA, 25 bp, Homo sapien
ggaaatgtagatattccgtttacaa

SEQ ID NO: 5473800 - DNA, 25 bp, Homo sapien
acctttccagaggattagcagctgc

SEQ ID NO: 5473801 - DNA, 25 bp, Homo sapien
aggacctttccagaggattagcagc

SEQ ID NO: 5473802 - DNA, 25 bp, Homo sapien
gcacagcacggatgggattgtaatg

SEQ ID NO: 5473803 - DNA, 25 bp, Homo sapien
cagcacggatgggattgtaatgtat

SEQ ID NO: 5473804 - DNA, 25 bp, Homo sapien
cacggatgggattgtaatgtatacc

SEQ ID NO: 5473805 - DNA, 25 bp, Homo sapien
cggatgggattgtaatgtataccat

SEQ ID NO: 5473806 - DNA, 25 bp, Homo sapien
ttcatcagagcggagagccacattc

SEQ ID NO: 5473807 - DNA, 25 bp, Homo sapien
caaagtagtcttttagtgccaaagg

SEQ ID NO: 5473808 - DNA, 25 bp, Homo sapien
ccttaggagggtagctttctcaaag

SEQ ID NO: 5473809 - DNA, 25 bp, Homo sapien
gaaaatttggcagaaagtcatgaga

SEQ ID NO: 5473810 - DNA, 25 bp, Homo sapien
ggtgttgcagtcgaatcagtaaact

SEQ ID NO: 5473811 - DNA, 25 bp, Homo sapien
gttgcagtcgaatcagtaaactccg

SEQ ID NO: 5473812 - DNA, 25 bp, Homo sapien
aatcagtaaactccggcggcatcca

SEQ ID NO: 5473813 - DNA, 25 bp, Homo sapien
cagtcgaatcagtaaactccggcgg

SEQ ID NO: 5473814 - DNA, 25 bp, Homo sapien
tgctcccagcactgttagcggttga

SEQ ID NO: 5473815 - DNA, 25 bp, Homo sapien
cgagttcccagatctgtttcttaca

SEQ ID NO: 5473816 - DNA, 25 bp, Homo sapien
tttgtagagagggtaggcacagccg

SEQ ID NO: 5473817 - DNA, 25 bp, Homo sapien
agccgccgtgggatgaagcctgctc

SEQ ID NO: 5473818 - DNA, 25 bp, Homo sapien
acgggcgtggcttttcaactggaga

SEQ ID NO: 5473819 - DNA, 25 bp, Homo sapien
tccaggctgcgccataggtgcagaa

SEQ ID NO: 5473820 - DNA, 25 bp, Homo sapien
cctaaggcatgtgggcgtgcaaaga

SEQ ID NO: 5473821 - DNA, 25 bp, Homo sapien
gactttggcgtccagaactttgaga

SEQ ID NO: 5473822 - DNA, 25 bp, Homo sapien
tggtcttccccgaagagtgatcccc

SEQ ID NO: 5473823 - DNA, 25 bp, Homo sapien
ctgtctggtcttccccgaagagtga

SEQ ID NO: 5473824 - DNA, 25 bp, Homo sapien
ccctgtctggtcttccccgaagagt

SEQ ID NO: 5473825 - DNA, 25 bp, Homo sapien
tctggtcttccccgaagagtgatcc

SEQ ID NO: 5473826 - DNA, 25 bp, Homo sapien
gagatattttacgtttgaagacaat

SEQ ID NO: 5473827 - DNA, 25 bp, Homo sapien
aactcttcatctcacctgctggtcc

SEQ ID NO: 5473828 - DNA, 25 bp, Homo sapien
tattttacgtttgaagacaatcaac

SEQ ID NO: 5473829 - DNA, 25 bp, Homo sapien
tttacgtttgaagacaatcaactct

SEQ ID NO: 5473830 - DNA, 25 bp, Homo sapien
cagcccagggctgggaagatagagg

SEQ ID NO: 5473831 - DNA, 25 bp, Homo sapien
gcccagggctgggaagatagaggtg

SEQ ID NO: 5473832 - DNA, 25 bp, Homo sapien
cagggctgggaagatagaggtgctg

SEQ ID NO: 5473833 - DNA, 25 bp, Homo sapien
gggaagatagaggtgctgctgcaga

SEQ ID NO: 5473834 - DNA, 25 bp, Homo sapien
cacttttcccaagtcagcgtggact

SEQ ID NO: 5473835 - DNA, 25 bp, Homo sapien
agtcacttttcccaagtcagcgtgg

SEQ ID NO: 5473836 - DNA, 25 bp, Homo sapien
tgagtctgtcgggttgagtacttcc

SEQ ID NO: 5473837 - DNA, 25 bp, Homo sapien
ttcccttccatcacggcaggcagtc

SEQ ID NO: 5473838 - DNA, 25 bp, Homo sapien
gaagagattcccctgtaaattctgg

SEQ ID NO: 5473839 - DNA, 25 bp, Homo sapien
ccaaccagtgatgagcagtaaccaa

SEQ ID NO: 5473840 - DNA, 25 bp, Homo sapien
aaaggaggtttgcatcggtatagcc

SEQ ID NO: 5473841 - DNA, 25 bp, Homo sapien
ggtgtgtcaccctcaacgaaaggag

SEQ ID NO: 5473842 - DNA, 25 bp, Homo sapien
tttagtaatgatgatactttgctgt

SEQ ID NO: 5473843 - DNA, 25 bp, Homo sapien
ctggtcacgctctaatttagtaatg

SEQ ID NO: 5473844 - DNA, 25 bp, Homo sapien
aattctatgtacgtgtaattaatca

SEQ ID NO: 5473845 - DNA, 25 bp, Homo sapien
ttgtcttaaattctatgtacgtgta

SEQ ID NO: 5473846 - DNA, 25 bp, Homo sapien
ccttatgtgcaaccgccagcttctg

SEQ ID NO: 5473847 - DNA, 25 bp, Homo sapien
aggttgtgcagaattggtaaagaga

SEQ ID NO: 5473848 - DNA, 25 bp, Homo sapien
tgagtatgaagatggcctgttgatt

SEQ ID NO: 5473849 - DNA, 25 bp, Homo sapien
taagtttttccgtgcctgggattgc

SEQ ID NO: 5473850 - DNA, 25 bp, Homo sapien
gctgtgaacccctcttgtcgagggt

SEQ ID NO: 5473851 - DNA, 25 bp, Homo sapien
ggctgtgaacccctcttgtcgaggg

SEQ ID NO: 5473852 - DNA, 25 bp, Homo sapien
ttggctgtgaacccctcttgtcgag

SEQ ID NO: 5473853 - DNA, 25 bp, Homo sapien
gtgaacccctcttgtcgagggtctc

SEQ ID NO: 5473854 - DNA, 25 bp, Homo sapien
tacatggtgagttcccagcacgttt

SEQ ID NO: 5473855 - DNA, 25 bp, Homo sapien
cctttgctgagtacatggtgagttc

SEQ ID NO: 5473856 - DNA, 25 bp, Homo sapien
tgctgagtacatggtgagttcccag

SEQ ID NO: 5473857 - DNA, 25 bp, Homo sapien
gagtacatggtgagttcccagcacg

SEQ ID NO: 5473858 - DNA, 25 bp, Homo sapien
catgtgagcgtctgctcttgagagg

SEQ ID NO: 5473859 - DNA, 25 bp, Homo sapien
gtgagcgtctgctcttgagaggcca

SEQ ID NO: 5473860 - DNA, 25 bp, Homo sapien
tgtgagcgtctgctcttgagaggcc

SEQ ID NO: 5473861 - DNA, 25 bp, Homo sapien
tcatgtgagcgtctgctcttgagag

SEQ ID NO: 5473862 - DNA, 25 bp, Homo sapien
tgcctctgggagcagaaaccgttgt

SEQ ID NO: 5473863 - DNA, 25 bp, Homo sapien
gttgtttcaccagcaaattacgctg

SEQ ID NO: 5473864 - DNA, 25 bp, Homo sapien
tgcctcctcgttatcagcaggcagc

SEQ ID NO: 5473865 - DNA, 25 bp, Homo sapien
aggcagccttgcgtctgcctctggg

SEQ ID NO: 5473866 - DNA, 25 bp, Homo sapien
acgacccttgccatcagagccctgg

SEQ ID NO: 5473867 - DNA, 25 bp, Homo sapien
ttgtacgacccttgccatcagagcc

SEQ ID NO: 5473868 - DNA, 25 bp, Homo sapien
cttgtacgacccttgccatcagagc

SEQ ID NO: 5473869 - DNA, 25 bp, Homo sapien
acccttgccatcagagccctggccc

SEQ ID NO: 5473870 - DNA, 25 bp, Homo sapien
tagatgtatgcttaatgttctaaaa

SEQ ID NO: 5473871 - DNA, 25 bp, Homo sapien
gcttaatgttctaaaagctctttgt

SEQ ID NO: 5473872 - DNA, 25 bp, Homo sapien
tatgcttaatgttctaaaagctctt

SEQ ID NO: 5473873 - DNA, 25 bp, Homo sapien
aaatttagatgtatgcttaatgttc

SEQ ID NO: 5473874 - DNA, 25 bp, Homo sapien
ttctttgtggtaggacatcaccatg

SEQ ID NO: 5473875 - DNA, 25 bp, Homo sapien
gctttctttgtggtaggacatcacc

SEQ ID NO: 5473876 - DNA, 25 bp, Homo sapien
tggtaggacatcaccatgttctcat

SEQ ID NO: 5473877 - DNA, 25 bp, Homo sapien
tttgtggtaggacatcaccatgttc

SEQ ID NO: 5473878 - DNA, 25 bp, Homo sapien
aagcagaggacggactgctgtgtgt

SEQ ID NO: 5473879 - DNA, 25 bp, Homo sapien
gcagaggacggactgctgtgtgtca

SEQ ID NO: 5473880 - DNA, 25 bp, Homo sapien
ctgttaggaagcagaggacggactg

SEQ ID NO: 5473881 - DNA, 25 bp, Homo sapien
ggaagcagaggacggactgctgtgt

SEQ ID NO: 5473882 - DNA, 25 bp, Homo sapien
gaagaattgccgggtgagccttcac

SEQ ID NO: 5473883 - DNA, 25 bp, Homo sapien
tgcagattgaagaattgccgggtga

SEQ ID NO: 5473884 - DNA, 25 bp, Homo sapien
gtgcagattgaagaattgccgggtg

SEQ ID NO: 5473885 - DNA, 25 bp, Homo sapien
gattgaagaattgccgggtgagcct

SEQ ID NO: 5473886 - DNA, 25 bp, Homo sapien
tcatcaactttctctgcgagacagc

SEQ ID NO: 5473887 - DNA, 25 bp, Homo sapien
tttctctgcgagacagcttgatgag

SEQ ID NO: 5473888 - DNA, 25 bp, Homo sapien
gcgagacagcttgatgagttgagaa

SEQ ID NO: 5473889 - DNA, 25 bp, Homo sapien
tcaactttctctgcgagacagcttg

SEQ ID NO: 5473890 - DNA, 25 bp, Homo sapien
tctaagcgccggtccaacctgttca

SEQ ID NO: 5473891 - DNA, 25 bp, Homo sapien
aacctgttcaccgtgagtgtcaacc

SEQ ID NO: 5473892 - DNA, 25 bp, Homo sapien
acgcccgttcgcaagcagtctaagc

SEQ ID NO: 5473893 - DNA, 25 bp, Homo sapien
gaacttcggatcgatgttcctccca

SEQ ID NO: 5473894 - DNA, 25 bp, Homo sapien
gcttttcattgtagcagtggacacc

SEQ ID NO: 5473895 - DNA, 25 bp, Homo sapien
cacagttattaaggaggacgagtct

SEQ ID NO: 5473896 - DNA, 25 bp, Homo sapien
tcatctcagatttgaaaagcacgtg

SEQ ID NO: 5473897 - DNA, 25 bp, Homo sapien
gaagttgtcacttgtcagcacagtt

SEQ ID NO: 5473898 - DNA, 25 bp, Homo sapien
ataaatcttgttaagtcaatggcag

SEQ ID NO: 5473899 - DNA, 25 bp, Homo sapien
tatggtgccatttgcataaatcttg

SEQ ID NO: 5473900 - DNA, 25 bp, Homo sapien
aatggcagttaatgaagtacaaatg

SEQ ID NO: 5473901 - DNA, 25 bp, Homo sapien
agaaggtgacatgcaaatcgtgggt

SEQ ID NO: 5473902 - DNA, 25 bp, Homo sapien
ggtagctaccagtgtaattaaatat

SEQ ID NO: 5473903 - DNA, 25 bp, Homo sapien
tgtgggtcttgcaaattggtaactg

SEQ ID NO: 5473904 - DNA, 25 bp, Homo sapien
tgttgtacagccaatcaaaaagaga

SEQ ID NO: 5473905 - DNA, 25 bp, Homo sapien
gcacttggctacagtagcattgaac

SEQ ID NO: 5473906 - DNA, 25 bp, Homo sapien
tggctccgcgtgttggagaattcag

SEQ ID NO: 5473907 - DNA, 25 bp, Homo sapien
agaattcagtaccagatccatggct

SEQ ID NO: 5473908 - DNA, 25 bp, Homo sapien
cagatacggtggctccgcgtgttgg

SEQ ID NO: 5473909 - DNA, 25 bp, Homo sapien
gttggagaattcagtaccagatcca

SEQ ID NO: 5473910 - DNA, 25 bp, Homo sapien
tctggaatgctttgcgcctgctggg

SEQ ID NO: 5473911 - DNA, 25 bp, Homo sapien
aaaagctgtcagaatactggagaaa

SEQ ID NO: 5473912 - DNA, 25 bp, Homo sapien
tactggagaaatgtaggccttgaag

SEQ ID NO: 5473913 - DNA, 25 bp, Homo sapien
gccttgaagatagaggggtgttttc

SEQ ID NO: 5473914 - DNA, 25 bp, Homo sapien
aaccacacgaagataatgggtgtca

SEQ ID NO: 5473915 - DNA, 25 bp, Homo sapien
catgagatgtccctggttgacacgt

SEQ ID NO: 5473916 - DNA, 25 bp, Homo sapien
ttgggtccacatgttgctcggatgt

SEQ ID NO: 5473917 - DNA, 25 bp, Homo sapien
gttgaggacacgctaaaccacacga

SEQ ID NO: 5473918 - DNA, 25 bp, Homo sapien
aactggcaatagagagtgggtgtca

SEQ ID NO: 5473919 - DNA, 25 bp, Homo sapien
gtgggtgtcagtgggccgggacagg

SEQ ID NO: 5473920 - DNA, 25 bp, Homo sapien
tggtgtgaagaactggcaatagaga

SEQ ID NO: 5473921 - DNA, 25 bp, Homo sapien
caagtagtctctggggaccggcaca

SEQ ID NO: 5473922 - DNA, 25 bp, Homo sapien
cgatacctgggaagccgttgtacgg

SEQ ID NO: 5473923 - DNA, 25 bp, Homo sapien
ctgtgtgtcgcaggtgtaggcgata

SEQ ID NO: 5473924 - DNA, 25 bp, Homo sapien
tgtaggcgatacctgggaagccgtt

SEQ ID NO: 5473925 - DNA, 25 bp, Homo sapien
tgtgtcgcaggtgtaggcgatacct

SEQ ID NO: 5473926 - DNA, 25 bp, Homo sapien
ctacttttgctctccccgattgcac

SEQ ID NO: 5473927 - DNA, 25 bp, Homo sapien
ttgctctccccgattgcacagtagc

SEQ ID NO: 5473928 - DNA, 25 bp, Homo sapien
tttgctctccccgattgcacagtag

SEQ ID NO: 5473929 - DNA, 25 bp, Homo sapien
cttttgctctccccgattgcacagt

SEQ ID NO: 5473930 - DNA, 25 bp, Homo sapien
gggcatgcgtttcccacgctgagct

SEQ ID NO: 5473931 - DNA, 25 bp, Homo sapien
cacagtgtatcttgtgctgccacac

SEQ ID NO: 5473932 - DNA, 25 bp, Homo sapien
tggtctcagatagtctccccagagc

SEQ ID NO: 5473933 - DNA, 25 bp, Homo sapien
tccttcagttgcaatcttcagtggc

SEQ ID NO: 5473934 - DNA, 25 bp, Homo sapien
tacagcatgtccattggcttgtggg

SEQ ID NO: 5473935 - DNA, 25 bp, Homo sapien
gggtctttgatgacatcagggaaat

SEQ ID NO: 5473936 - DNA, 25 bp, Homo sapien
catgtccattggcttgtgggatgga

SEQ ID NO: 5473937 - DNA, 25 bp, Homo sapien
atgatggagcagaagcggcggcagg

SEQ ID NO: 5473938 - DNA, 25 bp, Homo sapien
caccagggttataaagtcctatgtt

SEQ ID NO: 5473939 - DNA, 25 bp, Homo sapien
cacaccagggttataaagtcctatg

SEQ ID NO: 5473940 - DNA, 25 bp, Homo sapien
acttctcacaccagggttataaagt

SEQ ID NO: 5473941 - DNA, 25 bp, Homo sapien
tctcacaccagggttataaagtcct

SEQ ID NO: 5473942 - DNA, 25 bp, Homo sapien
tttctaggcactgcttggtttctgg

SEQ ID NO: 5473943 - DNA, 25 bp, Homo sapien
ctcgccatcatcctgaggatgctgt

SEQ ID NO: 5473944 - DNA, 25 bp, Homo sapien
gtatcccaccggttacactctctgt

SEQ ID NO: 5473945 - DNA, 25 bp, Homo sapien
ctgtcactcgccatcatcctgagga

SEQ ID NO: 5473946 - DNA, 25 bp, Homo sapien
cagcacttatctcaggcctgctgga

SEQ ID NO: 5473947 - DNA, 25 bp, Homo sapien
actgacagccagcacttatctcagg

SEQ ID NO: 5473948 - DNA, 25 bp, Homo sapien
gagcccgtgcccgtcagtcctcccc

SEQ ID NO: 5473949 - DNA, 25 bp, Homo sapien
gacagccagcacttatctcaggcct

SEQ ID NO: 5473950 - DNA, 25 bp, Homo sapien
gtctcgatctttattaatggtgctc

SEQ ID NO: 5473951 - DNA, 25 bp, Homo sapien
cagttttgttgctactggcaacttt

SEQ ID NO: 5473952 - DNA, 25 bp, Homo sapien
gctcggcggctgctgacagttttgt

SEQ ID NO: 5473953 - DNA, 25 bp, Homo sapien
ccctttgtactggtgccgggcacta

SEQ ID NO: 5473954 - DNA, 25 bp, Homo sapien
ggcggtggtagtaatagcagtataa

SEQ ID NO: 5473955 - DNA, 25 bp, Homo sapien
cagtggtagcggtccttgtcatcgt

SEQ ID NO: 5473956 - DNA, 25 bp, Homo sapien
gtgctgctcgtaatgaaacgtgcac

SEQ ID NO: 5473957 - DNA, 25 bp, Homo sapien
catcgtcatcaaagtggcggtggta

SEQ ID NO: 5473958 - DNA, 25 bp, Homo sapien
tctctggtgagatctctgtgtgcat

SEQ ID NO: 5473959 - DNA, 25 bp, Homo sapien
aatagggcacccacagtaacacgtg

SEQ ID NO: 5473960 - DNA, 25 bp, Homo sapien
cagccttgggttccgcaaatagggc

SEQ ID NO: 5473961 - DNA, 25 bp, Homo sapien
tgtgggtgattagctcctggccgaa

SEQ ID NO: 5473962 - DNA, 25 bp, Homo sapien
gaatagacgcggctaatgacaggaa

SEQ ID NO: 5473963 - DNA, 25 bp, Homo sapien
gaaatgttccctctgtgtaacgatg

SEQ ID NO: 5473964 - DNA, 25 bp, Homo sapien
taatctgatcttgacatggcgccgc

SEQ ID NO: 5473965 - DNA, 25 bp, Homo sapien
taaagccgatgaggaatgctgcccg

SEQ ID NO: 5473966 - DNA, 25 bp, Homo sapien
tcaccccgtaggagcttagccatga

SEQ ID NO: 5473967 - DNA, 25 bp, Homo sapien
gaatcgtcgtggatatcagttgtga

SEQ ID NO: 5473968 - DNA, 25 bp, Homo sapien
ccacgctggctgtgcatgttgggca

SEQ ID NO: 5473969 - DNA, 25 bp, Homo sapien
cacgaagtgtggttcaatgggagcc

SEQ ID NO: 5473970 - DNA, 25 bp, Homo sapien
cagggacaccagtgccacgaagtgt

SEQ ID NO: 5473971 - DNA, 25 bp, Homo sapien
tgtagaaggaagttggcttaactgg

SEQ ID NO: 5473972 - DNA, 25 bp, Homo sapien
gtgatgtagaaggaagttggcttaa

SEQ ID NO: 5473973 - DNA, 25 bp, Homo sapien
gttggcttaactgggggcgctgcag

SEQ ID NO: 5473974 - DNA, 25 bp, Homo sapien
ctggtgatgtagaaggaagttggct

SEQ ID NO: 5473975 - DNA, 25 bp, Homo sapien
catcgtgctgtctgctgagagatct

SEQ ID NO: 5473976 - DNA, 25 bp, Homo sapien
cactcgatgattgtcagggctgaga

SEQ ID NO: 5473977 - DNA, 25 bp, Homo sapien
tcagggccaggtcggttttgagtca

SEQ ID NO: 5473978 - DNA, 25 bp, Homo sapien
tctgtgatgcccacgaggctgtgcg

SEQ ID NO: 5473979 - DNA, 25 bp, Homo sapien
cgtggggagcaggtcaccgcccatc

SEQ ID NO: 5473980 - DNA, 25 bp, Homo sapien
caggtcaccgcccatcagtaggaac

SEQ ID NO: 5473981 - DNA, 25 bp, Homo sapien
ccatcagtaggaacaggagactttg

SEQ ID NO: 5473982 - DNA, 25 bp, Homo sapien
acaggagactttggcagcccagcag

SEQ ID NO: 5473983 - DNA, 25 bp, Homo sapien
ccccgagggtgtgcgccgtggccag

SEQ ID NO: 5473984 - DNA, 25 bp, Homo sapien
tggtgcaaatccatccgcgtggagc

SEQ ID NO: 5473985 - DNA, 25 bp, Homo sapien
ccagccagaagagtggtgcaaatcc

SEQ ID NO: 5473986 - DNA, 25 bp, Homo sapien
tccatccgcgtggagccccgagggt

SEQ ID NO: 5473987 - DNA, 25 bp, Homo sapien
gtgacaccagagaccgtggccctgg

SEQ ID NO: 5473988 - DNA, 25 bp, Homo sapien
atgaagcctggagcatctgtaatct

SEQ ID NO: 5473989 - DNA, 25 bp, Homo sapien
cgtggccctggcattgttgaaattc

SEQ ID NO: 5473990 - DNA, 25 bp, Homo sapien
gtaatctcctggtgacaccagagac

SEQ ID NO: 5473991 - DNA, 25 bp, Homo sapien
tcttctcctgcgtctccgttttctt

SEQ ID NO: 5473992 - DNA, 25 bp, Homo sapien
cagggtgttcttctcctgcgtctcc

SEQ ID NO: 5473993 - DNA, 25 bp, Homo sapien
ttggtcggcagggtgttcttctcct

SEQ ID NO: 5473994 - DNA, 25 bp, Homo sapien
gtgttcttctcctgcgtctccgttt

SEQ ID NO: 5473995 - DNA, 25 bp, Homo sapien
ttgatgctgagttcgcttgctggcg

SEQ ID NO: 5473996 - DNA, 25 bp, Homo sapien
ccttgtcttttagcgtagctatacc

SEQ ID NO: 5473997 - DNA, 25 bp, Homo sapien
ttcagaaccacgcagcaaagcaggt

SEQ ID NO: 5473998 - DNA, 25 bp, Homo sapien
tagcacatgggaaccttgatgctga

SEQ ID NO: 5473999 - DNA, 25 bp, Homo sapien
cctcataagggtgcgccatgtctgt

SEQ ID NO: 5474000 - DNA, 25 bp, Homo sapien
ggtgtggcgtgggtgtgccatgtcc

SEQ ID NO: 5474001 - DNA, 25 bp, Homo sapien
gggagcgctgtgtctttggcgcggg

SEQ ID NO: 5474002 - DNA, 25 bp, Homo sapien
accgtgtccatcataagggagcgct

SEQ ID NO: 5474003 - DNA, 25 bp, Homo sapien
gcgccgtgtctgtagcgtgggtgta

SEQ ID NO: 5474004 - DNA, 25 bp, Homo sapien
agcaccatgtctgtagcgcgggtgt

SEQ ID NO: 5474005 - DNA, 25 bp, Homo sapien
gaagcgccgtgtctgtagcgtgggt

SEQ ID NO: 5474006 - DNA, 25 bp, Homo sapien
ccatgtccatcataaggaagcgccg

SEQ ID NO: 5474007 - DNA, 25 bp, Homo sapien
ggcgtgggtgtagcgtgtctttggt

SEQ ID NO: 5474008 - DNA, 25 bp, Homo sapien
tgtggcgcaggtgtgccgtgtctgt

SEQ ID NO: 5474009 - DNA, 25 bp, Homo sapien
ctgtggcgcaggtgtgccgtgtctg

SEQ ID NO: 5474010 - DNA, 25 bp, Homo sapien
gccgtgtccatcataaggaagagct

SEQ ID NO: 5474011 - DNA, 25 bp, Homo sapien
catggtacatttgctgggcccagtc

SEQ ID NO: 5474012 - DNA, 25 bp, Homo sapien
cagcactctggtcatggtacatttg

SEQ ID NO: 5474013 - DNA, 25 bp, Homo sapien
cagtcctgaccacagtgaactgtgc

SEQ ID NO: 5474014 - DNA, 25 bp, Homo sapien
tctggtcatggtacatttgctgggc

SEQ ID NO: 5474015 - DNA, 25 bp, Homo sapien
tgcaccaagacttccgtcctcaggg

SEQ ID NO: 5474016 - DNA, 25 bp, Homo sapien
ctccatgtggcagcctgtaagtcat

SEQ ID NO: 5474017 - DNA, 25 bp, Homo sapien
tctgaccctggtgttttgagctttc

SEQ ID NO: 5474018 - DNA, 25 bp, Homo sapien
cgtcctgccgttgagaattcctgca

SEQ ID NO: 5474019 - DNA, 25 bp, Homo sapien
aagccgcacggaggattggatccct

SEQ ID NO: 5474020 - DNA, 25 bp, Homo sapien
aaactggtggctgtaaattcctgtc

SEQ ID NO: 5474021 - DNA, 25 bp, Homo sapien
tcttgagcctctgcattgaaaaagg

SEQ ID NO: 5474022 - DNA, 25 bp, Homo sapien
tgaaaaaggccgttccaggagtaca

SEQ ID NO: 5474023 - DNA, 25 bp, Homo sapien
catgtcagatcctgttgtggtttaa

SEQ ID NO: 5474024 - DNA, 25 bp, Homo sapien
tatcactgtaatggcagtagtgagc

SEQ ID NO: 5474025 - DNA, 25 bp, Homo sapien
ccaacttataatcctgggtgaaaga

SEQ ID NO: 5474026 - DNA, 25 bp, Homo sapien
gtgagcccgtgaccaccaacttata

SEQ ID NO: 5474027 - DNA, 25 bp, Homo sapien
acattcttgttcgactcctacccag

SEQ ID NO: 5474028 - DNA, 25 bp, Homo sapien
cactttcttgactacctggagctgt

SEQ ID NO: 5474029 - DNA, 25 bp, Homo sapien
cctgtttgcttatgtgtcttctgca

SEQ ID NO: 5474030 - DNA, 25 bp, Homo sapien
agtcacaagtggtcatcctgcccct

SEQ ID NO: 5474031 - DNA, 25 bp, Homo sapien
gggccctcgacagccatgtttgcac

SEQ ID NO: 5474032 - DNA, 25 bp, Homo sapien
gaatgataattgtctggaaaagctg

SEQ ID NO: 5474033 - DNA, 25 bp, Homo sapien
gaggtcctgcgttttaactgtgtga

SEQ ID NO: 5474034 - DNA, 25 bp, Homo sapien
aactgtgtgaatgataattgtctgg

SEQ ID NO: 5474035 - DNA, 25 bp, Homo sapien
tctccatcagcacgtgggcagggtg

SEQ ID NO: 5474036 - DNA, 25 bp, Homo sapien
tctgcttccttcttgtaccctgggt

SEQ ID NO: 5474037 - DNA, 25 bp, Homo sapien
ccatcctgaggagcggggacctctc

SEQ ID NO: 5474038 - DNA, 25 bp, Homo sapien
cctgggtgcgggccatcctgaggag

SEQ ID NO: 5474039 - DNA, 25 bp, Homo sapien
gtcggctccagcgacacacagcttg

SEQ ID NO: 5474040 - DNA, 25 bp, Homo sapien
cggctccagcgacacacagcttgga

SEQ ID NO: 5474041 - DNA, 25 bp, Homo sapien
ggctccagcgacacacagcttggac

SEQ ID NO: 5474042 - DNA, 25 bp, Homo sapien
ctccagcgacacacagcttggacat

SEQ ID NO: 5474043 - DNA, 25 bp, Homo sapien
cgttgaacattgatgcccgattggg

SEQ ID NO: 5474044 - DNA, 25 bp, Homo sapien
cccgattgggaagaactaatggctg

SEQ ID NO: 5474045 - DNA, 25 bp, Homo sapien
tcacgttccgaagctcggagagact

SEQ ID NO: 5474046 - DNA, 25 bp, Homo sapien
taatggctgacattgaatgtgcggg

SEQ ID NO: 5474047 - DNA, 25 bp, Homo sapien
tcccgtgtctgctccttgtttaaca

SEQ ID NO: 5474048 - DNA, 25 bp, Homo sapien
tgtctgctccttgtttaacattggc

SEQ ID NO: 5474049 - DNA, 25 bp, Homo sapien
acctcccgtgtctgctccttgttta

SEQ ID NO: 5474050 - DNA, 25 bp, Homo sapien
ccgtgtctgctccttgtttaacatt

SEQ ID NO: 5474051 - DNA, 25 bp, Homo sapien
caaagatgagtcgatcacagcaggg

SEQ ID NO: 5474052 - DNA, 25 bp, Homo sapien
gattgggcacagttgactcaaaagc

SEQ ID NO: 5474053 - DNA, 25 bp, Homo sapien
gggcagccagaacggaagattccca

SEQ ID NO: 5474054 - DNA, 25 bp, Homo sapien
tgtggaagccagcaggtcggaaata

SEQ ID NO: 5474055 - DNA, 25 bp, Homo sapien
taatcaaatgcctgtctcgcctggc

SEQ ID NO: 5474056 - DNA, 25 bp, Homo sapien
aagggcctcttgtgcacgtgggaca

SEQ ID NO: 5474057 - DNA, 25 bp, Homo sapien
tgcacggacacacaacttcacaagg

SEQ ID NO: 5474058 - DNA, 25 bp, Homo sapien
tcagacataccataggcaccaaggt

SEQ ID NO: 5474059 - DNA, 25 bp, Homo sapien
ttaaaagtgcctttctagttgccac

SEQ ID NO: 5474060 - DNA, 25 bp, Homo sapien
gcacacatgttgagcgtcgaggaca

SEQ ID NO: 5474061 - DNA, 25 bp, Homo sapien
cgcatttgccgctgagcacacatgt

SEQ ID NO: 5474062 - DNA, 25 bp, Homo sapien
caggttcaattatgtggccactgtg

SEQ ID NO: 5474063 - DNA, 25 bp, Homo sapien
cactgtgttcaggttcccggattga

SEQ ID NO: 5474064 - DNA, 25 bp, Homo sapien
aatacttgcccagtccgttcgtgga

SEQ ID NO: 5474065 - DNA, 25 bp, Homo sapien
tgccctgagtggttccagaatgtca

SEQ ID NO: 5474066 - DNA, 25 bp, Homo sapien
gaacatagagaaggtttaggccctg

SEQ ID NO: 5474067 - DNA, 25 bp, Homo sapien
tggaaggaaagaaccgaagccagcc

SEQ ID NO: 5474068 - DNA, 25 bp, Homo sapien
agcttgttgtctgtggtgtcttcct

SEQ ID NO: 5474069 - DNA, 25 bp, Homo sapien
gcaagacgtaggcaataccaggtct

SEQ ID NO: 5474070 - DNA, 25 bp, Homo sapien
ttaaaactgcaagacgtaggcaata

SEQ ID NO: 5474071 - DNA, 25 bp, Homo sapien
cttgttgtctgtggtgtcttccttc

SEQ ID NO: 5474072 - DNA, 25 bp, Homo sapien
ccgaggagagcgtagcctcctgtta

SEQ ID NO: 5474073 - DNA, 25 bp, Homo sapien
gtagaccagccgtttccacgcacag

SEQ ID NO: 5474074 - DNA, 25 bp, Homo sapien
caagaatatcgtggccgctgaggtc

SEQ ID NO: 5474075 - DNA, 25 bp, Homo sapien
cctgttaacgtagcctcctgctgct

SEQ ID NO: 5474076 - DNA, 25 bp, Homo sapien
tgttcattggcggtctttggccttt

SEQ ID NO: 5474077 - DNA, 25 bp, Homo sapien
ttgagagtggaactctgcatcttct

SEQ ID NO: 5474078 - DNA, 25 bp, Homo sapien
ttcctgttcattggcggtctttggc

SEQ ID NO: 5474079 - DNA, 25 bp, Homo sapien
cctgttcattggcggtctttggcct

SEQ ID NO: 5474080 - DNA, 25 bp, Homo sapien
ctctgtgtgtggtcgcacgtcctcc

SEQ ID NO: 5474081 - DNA, 25 bp, Homo sapien
tgtgtgtggtcgcacgtcctcctca

SEQ ID NO: 5474082 - DNA, 25 bp, Homo sapien
tgtgtggtcgcacgtcctcctcatg

SEQ ID NO: 5474083 - DNA, 25 bp, Homo sapien
tgtggtcgcacgtcctcctcatggc

SEQ ID NO: 5474084 - DNA, 25 bp, Homo sapien
cgcttcacagagcagcgagccagtc

SEQ ID NO: 5474085 - DNA, 25 bp, Homo sapien
gctatccgcttcacagagcagcgag

SEQ ID NO: 5474086 - DNA, 25 bp, Homo sapien
ccccagcctgctatccgcttcacag

SEQ ID NO: 5474087 - DNA, 25 bp, Homo sapien
agccttcccctctcggcatcaccag

SEQ ID NO: 5474088 - DNA, 25 bp, Homo sapien
ttctggccaccagaacttggtgcac

SEQ ID NO: 5474089 - DNA, 25 bp, Homo sapien
ccacagcctcagctgtagtgttcga

SEQ ID NO: 5474090 - DNA, 25 bp, Homo sapien
acttggtgcacacgccgaacctaca

SEQ ID NO: 5474091 - DNA, 25 bp, Homo sapien
cagctgtagtgttcgaaatggagaa

SEQ ID NO: 5474092 - DNA, 25 bp, Homo sapien
cacgttggggttgattagggagctg

SEQ ID NO: 5474093 - DNA, 25 bp, Homo sapien
cgttggggttgattagggagctgac

SEQ ID NO: 5474094 - DNA, 25 bp, Homo sapien
tgtcgtaagtcaggaacacgttggg

SEQ ID NO: 5474095 - DNA, 25 bp, Homo sapien
acacgttggggttgattagggagct

SEQ ID NO: 5474096 - DNA, 25 bp, Homo sapien
ctggctgcctgctttgcgggcttaa

SEQ ID NO: 5474097 - DNA, 25 bp, Homo sapien
tttgcgggcttaagacctgcctctg

SEQ ID NO: 5474098 - DNA, 25 bp, Homo sapien
cctgcccgtccagataagtgctgct

SEQ ID NO: 5474099 - DNA, 25 bp, Homo sapien
gcccgtccagataagtgctgctcac

SEQ ID NO: 5474100 - DNA, 25 bp, Homo sapien
gcattaaacaaacggccacacagag

SEQ ID NO: 5474101 - DNA, 25 bp, Homo sapien
ctgcattaaacaaacggccacacag

SEQ ID NO: 5474102 - DNA, 25 bp, Homo sapien
ttaaacaaacggccacacagagccc

SEQ ID NO: 5474103 - DNA, 25 bp, Homo sapien
cattaaacaaacggccacacagagc

SEQ ID NO: 5474104 - DNA, 25 bp, Homo sapien
tgcgttgcttttttcaccgaagaca

SEQ ID NO: 5474105 - DNA, 25 bp, Homo sapien
tgttgtgtttctaaaggtcgtctgg

SEQ ID NO: 5474106 - DNA, 25 bp, Homo sapien
tttctaaaggtcgtctggtgccaaa

SEQ ID NO: 5474107 - DNA, 25 bp, Homo sapien
ttttttcaccgaagacagccgtcat

SEQ ID NO: 5474108 - DNA, 25 bp, Homo sapien
aaacagatgacattatcatccgctg

SEQ ID NO: 5474109 - DNA, 25 bp, Homo sapien
gctaaacagatgacattatcatccg

SEQ ID NO: 5474110 - DNA, 25 bp, Homo sapien
gatgacattatcatccgctgtgagt

SEQ ID NO: 5474111 - DNA, 25 bp, Homo sapien
cagatgacattatcatccgctgtga

SEQ ID NO: 5474112 - DNA, 25 bp, Homo sapien
tggagggtgccgctgaagattcctg

SEQ ID NO: 5474113 - DNA, 25 bp, Homo sapien
tgaagattcctggtaagcccgggtc

SEQ ID NO: 5474114 - DNA, 25 bp, Homo sapien
gccgctgaagattcctggtaagccc

SEQ ID NO: 5474115 - DNA, 25 bp, Homo sapien
ggtgccgctgaagattcctggtaag

SEQ ID NO: 5474116 - DNA, 25 bp, Homo sapien
agccttcactttcactgggagcctc

SEQ ID NO: 5474117 - DNA, 25 bp, Homo sapien
ttcactttcactgggagcctcgttc

SEQ ID NO: 5474118 - DNA, 25 bp, Homo sapien
tcgttctgggcctgccgttcactgc

SEQ ID NO: 5474119 - DNA, 25 bp, Homo sapien
ttcactgggagcctcgttctgggcc

SEQ ID NO: 5474120 - DNA, 25 bp, Homo sapien
gagaactgccgttcaaacttgagca

SEQ ID NO: 5474121 - DNA, 25 bp, Homo sapien
tattcgtgcggccagttaggacagc

SEQ ID NO: 5474122 - DNA, 25 bp, Homo sapien
gagcagcatcatgatcaatggaagc

SEQ ID NO: 5474123 - DNA, 25 bp, Homo sapien
tgattagggcagcttcggacggctt

SEQ ID NO: 5474124 - DNA, 25 bp, Homo sapien
gctcttgctacttcggggccttgga

SEQ ID NO: 5474125 - DNA, 25 bp, Homo sapien
gggccttggaattcctcatgtgagt

SEQ ID NO: 5474126 - DNA, 25 bp, Homo sapien
aattcctcatgtgagtgaaaccggg

SEQ ID NO: 5474127 - DNA, 25 bp, Homo sapien
tggaacacatgtcaggtgctcttgc

SEQ ID NO: 5474128 - DNA, 25 bp, Homo sapien
tggcccgttgttctttattgttgtc

SEQ ID NO: 5474129 - DNA, 25 bp, Homo sapien
agccgtctcagtaaacccgtccacg

SEQ ID NO: 5474130 - DNA, 25 bp, Homo sapien
acggcagcgccctggcccgttgttc

SEQ ID NO: 5474131 - DNA, 25 bp, Homo sapien
cctcgcggtacagcagtgtttccgg

SEQ ID NO: 5474132 - DNA, 25 bp, Homo sapien
aatacggccgtcgtgacaattaagg

SEQ ID NO: 5474133 - DNA, 25 bp, Homo sapien
cggccgtcgtgacaattaaggagtt

SEQ ID NO: 5474134 - DNA, 25 bp, Homo sapien
gttctgaaatacggccgtcgtgaca

SEQ ID NO: 5474135 - DNA, 25 bp, Homo sapien
tgatgcttaagaatttttactgccc

SEQ ID NO: 5474136 - DNA, 25 bp, Homo sapien
tatgtccaggggagcaagtgagcct

SEQ ID NO: 5474137 - DNA, 25 bp, Homo sapien
gagcctgaatcagcgatcatcacca

SEQ ID NO: 5474138 - DNA, 25 bp, Homo sapien
gagcaagtgagcctgaatcagcgat

SEQ ID NO: 5474139 - DNA, 25 bp, Homo sapien
cctgccctgcggacggcccacaggg

SEQ ID NO: 5474140 - DNA, 25 bp, Homo sapien
tggaatccgcacagcaaaccaatgc

SEQ ID NO: 5474141 - DNA, 25 bp, Homo sapien
agagatcaggcacttgacaagccct

SEQ ID NO: 5474142 - DNA, 25 bp, Homo sapien
tgcctcttggaatccgcacagcaaa

SEQ ID NO: 5474143 - DNA, 25 bp, Homo sapien
gctaggaaactcaggcctgtgtctc

SEQ ID NO: 5474144 - DNA, 25 bp, Homo sapien
tgtgaatgcaggacgggccagaacc

SEQ ID NO: 5474145 - DNA, 25 bp, Homo sapien
tgaatgcaggacgggccagaaccca

SEQ ID NO: 5474146 - DNA, 25 bp, Homo sapien
aatgcaggacgggccagaacccacc

SEQ ID NO: 5474147 - DNA, 25 bp, Homo sapien
ctgtgaatgcaggacgggccagaac

SEQ ID NO: 5474148 - DNA, 25 bp, Homo sapien
tcctcaaggacctcgaagagctgcc

SEQ ID NO: 5474149 - DNA, 25 bp, Homo sapien
tctcctcaaggacctcgaagagctg

SEQ ID NO: 5474150 - DNA, 25 bp, Homo sapien
cgaagagctgccacaatgtcttcat

SEQ ID NO: 5474151 - DNA, 25 bp, Homo sapien
aggacctcgaagagctgccacaatg

SEQ ID NO: 5474152 - DNA, 25 bp, Homo sapien
cctgacgttcccacttgtggttttg

SEQ ID NO: 5474153 - DNA, 25 bp, Homo sapien
ttcaataacttattcgcacacaggg

SEQ ID NO: 5474154 - DNA, 25 bp, Homo sapien
tcacgggcttcgtcaaaacctctgg

SEQ ID NO: 5474155 - DNA, 25 bp, Homo sapien
ccattggctttgagttaggagtgtc

SEQ ID NO: 5474156 - DNA, 25 bp, Homo sapien
tagaggagatcatgtttctgagacc

SEQ ID NO: 5474157 - DNA, 25 bp, Homo sapien
ctttgccggcatggagtgagaagat

SEQ ID NO: 5474158 - DNA, 25 bp, Homo sapien
tcagtggccttagccccgaataatc

SEQ ID NO: 5474159 - DNA, 25 bp, Homo sapien
ttctgagaccgttaaggaagcccac

SEQ ID NO: 5474160 - DNA, 25 bp, Homo sapien
tgccagcctcacagcgatagggctc

SEQ ID NO: 5474161 - DNA, 25 bp, Homo sapien
tcactgccagcctcacagcgatagg

SEQ ID NO: 5474162 - DNA, 25 bp, Homo sapien
ctcacagcgatagggctctgcttca

SEQ ID NO: 5474163 - DNA, 25 bp, Homo sapien
tctgcttcaattgggtctttgctct

SEQ ID NO: 5474164 - DNA, 25 bp, Homo sapien
tccatgggccgcctcaggatgtggc

SEQ ID NO: 5474165 - DNA, 25 bp, Homo sapien
ctgagtcccattgcccagggcatga

SEQ ID NO: 5474166 - DNA, 25 bp, Homo sapien
gggctgatggcagcaacgctgacca

SEQ ID NO: 5474167 - DNA, 25 bp, Homo sapien
gtccatcagtgatagcaaattccag

SEQ ID NO: 5474168 - DNA, 25 bp, Homo sapien
ggcgtccattaaactagattgatta

SEQ ID NO: 5474169 - DNA, 25 bp, Homo sapien
tgaagcaccaaataagaagttggcg

SEQ ID NO: 5474170 - DNA, 25 bp, Homo sapien
taatatcacaaggcttttgaatggg

SEQ ID NO: 5474171 - DNA, 25 bp, Homo sapien
taagaagttggcgtccattaaacta

SEQ ID NO: 5474172 - DNA, 25 bp, Homo sapien
tctggttccatatagagttcatgct

SEQ ID NO: 5474173 - DNA, 25 bp, Homo sapien
gatggcctgcgcctgttgccgttga

SEQ ID NO: 5474174 - DNA, 25 bp, Homo sapien
gcagaagagagtgagcgtagcaact

SEQ ID NO: 5474175 - DNA, 25 bp, Homo sapien
caaagtctggaacgaatctggttcc

SEQ ID NO: 5474176 - DNA, 25 bp, Homo sapien
tggaattcatcttggctggagtgag

SEQ ID NO: 5474177 - DNA, 25 bp, Homo sapien
taccctggatggaattcatcttggc

SEQ ID NO: 5474178 - DNA, 25 bp, Homo sapien
tcattaccctggatggaattcatct

SEQ ID NO: 5474179 - DNA, 25 bp, Homo sapien
ggaattcatcttggctggagtgagt

SEQ ID NO: 5474180 - DNA, 25 bp, Homo sapien
tttagaactttgattgaagcctaag

SEQ ID NO: 5474181 - DNA, 25 bp, Homo sapien
cctaaggaccgttggtccatctgca

SEQ ID NO: 5474182 - DNA, 25 bp, Homo sapien
gctggagctggagaggaccttggtt

SEQ ID NO: 5474183 - DNA, 25 bp, Homo sapien
ggcctttcctagcatgtcatccaag

SEQ ID NO: 5474184 - DNA, 25 bp, Homo sapien
caggtctcgcaggagtaggtcaaga

SEQ ID NO: 5474185 - DNA, 25 bp, Homo sapien
gggtctgcaggtctcgcaggagtag

SEQ ID NO: 5474186 - DNA, 25 bp, Homo sapien
tcgcaggagtaggtcaagaggacca

SEQ ID NO: 5474187 - DNA, 25 bp, Homo sapien
taggtcaagaggaccaggcaaggtc

SEQ ID NO: 5474188 - DNA, 25 bp, Homo sapien
aagtggcgggcacacagacgcaaat

SEQ ID NO: 5474189 - DNA, 25 bp, Homo sapien
gagggtgttcctccacgccagcccg

SEQ ID NO: 5474190 - DNA, 25 bp, Homo sapien
ggaaagactgtgacaagtggcgggc

SEQ ID NO: 5474191 - DNA, 25 bp, Homo sapien
acacagacgcaaattcttcttttgg

SEQ ID NO: 5474192 - DNA, 25 bp, Homo sapien
gctgatggtggctgtgtgagacctc

SEQ ID NO: 5474193 - DNA, 25 bp, Homo sapien
caggaccaaaacacagctgatggtg

SEQ ID NO: 5474194 - DNA, 25 bp, Homo sapien
ggttgttgccttttgattggagtca

SEQ ID NO: 5474195 - DNA, 25 bp, Homo sapien
agtcatcggcagtgttgtcacgcga

SEQ ID NO: 5474196 - DNA, 25 bp, Homo sapien
gtgttgtcacgcgactggtcttgct

SEQ ID NO: 5474197 - DNA, 25 bp, Homo sapien
agtgacggctcccacgtggtcttcc

SEQ ID NO: 5474198 - DNA, 25 bp, Homo sapien
cacacgtgccgcttccacgggtgag

SEQ ID NO: 5474199 - DNA, 25 bp, Homo sapien
ccgcttccacgggtgagctcctgtg

SEQ ID NO: 5474200 - DNA, 25 bp, Homo sapien
acgtgccgcttccacgggtgagctc

SEQ ID NO: 5474201 - DNA, 25 bp, Homo sapien
gtgccgcttccacgggtgagctcct

SEQ ID NO: 5474202 - DNA, 25 bp, Homo sapien
gttttcttcagtcgtgacagccgct

SEQ ID NO: 5474203 - DNA, 25 bp, Homo sapien
gacagccgctgtttgcaggggaacc

SEQ ID NO: 5474204 - DNA, 25 bp, Homo sapien
ataacattgaattatcagagaggtt

SEQ ID NO: 5474205 - DNA, 25 bp, Homo sapien
cattgaattatcagagaggttgttt

SEQ ID NO: 5474206 - DNA, 25 bp, Homo sapien
cagccgagttcttcccgcattactg

SEQ ID NO: 5474207 - DNA, 25 bp, Homo sapien
gccgagttcttcccgcattactgct

SEQ ID NO: 5474208 - DNA, 25 bp, Homo sapien
agccgagttcttcccgcattactgc

SEQ ID NO: 5474209 - DNA, 25 bp, Homo sapien
acagccgagttcttcccgcattact

SEQ ID NO: 5474210 - DNA, 25 bp, Homo sapien
aggctgttttttccgactgtaagag

SEQ ID NO: 5474211 - DNA, 25 bp, Homo sapien
tcgagtatatttcgtaaactaagga

SEQ ID NO: 5474212 - DNA, 25 bp, Homo sapien
ccttttgccgaggtggatgtgttag

SEQ ID NO: 5474213 - DNA, 25 bp, Homo sapien
tatttgactccggtctccttggtgc

SEQ ID NO: 5474214 - DNA, 25 bp, Homo sapien
gatgcggtatgatcaggcctcagca

SEQ ID NO: 5474215 - DNA, 25 bp, Homo sapien
caatgtgccgtaggcgctctaggtc

SEQ ID NO: 5474216 - DNA, 25 bp, Homo sapien
gcaacgatgtagcttcccctgagat

SEQ ID NO: 5474217 - DNA, 25 bp, Homo sapien
aagagtggcctgctcaacctgcagc

SEQ ID NO: 5474218 - DNA, 25 bp, Homo sapien
tgctcaggttggcacgagggacctc

SEQ ID NO: 5474219 - DNA, 25 bp, Homo sapien
cagttgcatggtgggtggcaaagtg

SEQ ID NO: 5474220 - DNA, 25 bp, Homo sapien
tcaggttggcacgagggacctcccc

SEQ ID NO: 5474221 - DNA, 25 bp, Homo sapien
gggcagttgcatggtgggtggcaaa

SEQ ID NO: 5474222 - DNA, 25 bp, Homo sapien
tgcttgttatttcatatgatcttgt

SEQ ID NO: 5474223 - DNA, 25 bp, Homo sapien
cgctgtacagtattctaagggaaaa

SEQ ID NO: 5474224 - DNA, 25 bp, Homo sapien
tttgtgtccgctgtacagtattcta

SEQ ID NO: 5474225 - DNA, 25 bp, Homo sapien
gatttttttgtgtccgctgtacagt

SEQ ID NO: 5474226 - DNA, 25 bp, Homo sapien
gtatgagccatcgcgcccagtcctg

SEQ ID NO: 5474227 - DNA, 25 bp, Homo sapien
ggtatgagccatcgcgcccagtcct

SEQ ID NO: 5474228 - DNA, 25 bp, Homo sapien
atgagccatcgcgcccagtcctgat

SEQ ID NO: 5474229 - DNA, 25 bp, Homo sapien
gagccatcgcgcccagtcctgattg

SEQ ID NO: 5474230 - DNA, 25 bp, Homo sapien
caagggaagcagtcataatggagaa

SEQ ID NO: 5474231 - DNA, 25 bp, Homo sapien
cagtgcccacagtcccggtggtaaa

SEQ ID NO: 5474232 - DNA, 25 bp, Homo sapien
ctgtatggctgccacccactcggga

SEQ ID NO: 5474233 - DNA, 25 bp, Homo sapien
taaaaccctgcctgtaggtggtgtg

SEQ ID NO: 5474234 - DNA, 25 bp, Homo sapien
ggtaaccagaggacagcccccgatc

SEQ ID NO: 5474235 - DNA, 25 bp, Homo sapien
gcatgacaaaggccgccagggaccc

SEQ ID NO: 5474236 - DNA, 25 bp, Homo sapien
cggcatgacaaaggccgccagggac

SEQ ID NO: 5474237 - DNA, 25 bp, Homo sapien
tgacaaaggccgccagggacccagt

SEQ ID NO: 5474238 - DNA, 25 bp, Homo sapien
atgacaaaggccgccagggacccag

SEQ ID NO: 5474239 - DNA, 25 bp, Homo sapien
ccgaccgcggcacgaagcgggtggg

SEQ ID NO: 5474240 - DNA, 25 bp, Homo sapien
cactggcgtccttcggtgcctgttc

SEQ ID NO: 5474241 - DNA, 25 bp, Homo sapien
acactggcgtccttcggtgcctgtt

SEQ ID NO: 5474242 - DNA, 25 bp, Homo sapien
ggatgagggtgtacccgaccgcggc

SEQ ID NO: 5474243 - DNA, 25 bp, Homo sapien
tgacggccatgatgacagcggccat

SEQ ID NO: 5474244 - DNA, 25 bp, Homo sapien
gcccgggcgattgacaatttttctc

SEQ ID NO: 5474245 - DNA, 25 bp, Homo sapien
tgtgactcattaggcagccaaatga

SEQ ID NO: 5474246 - DNA, 25 bp, Homo sapien
aaattcattagggcccgggcgattg

SEQ ID NO: 5474247 - DNA, 25 bp, Homo sapien
cttctctcgcgcttcgggctgctgg

SEQ ID NO: 5474248 - DNA, 25 bp, Homo sapien
gccgcagtatctggcggcgcgcttc

SEQ ID NO: 5474249 - DNA, 25 bp, Homo sapien
ctgggcctgtccgccgcagtatctg

SEQ ID NO: 5474250 - DNA, 25 bp, Homo sapien
gctgctggcttggtggcaccacgct

SEQ ID NO: 5474251 - DNA, 25 bp, Homo sapien
caggcacgccccaccgagatgggga

SEQ ID NO: 5474252 - DNA, 25 bp, Homo sapien
cagggccggggttgggacaggagtg

SEQ ID NO: 5474253 - DNA, 25 bp, Homo sapien
ttggggaccaggcacgccccaccga

SEQ ID NO: 5474254 - DNA, 25 bp, Homo sapien
ggaccaggcacgccccaccgagatg

SEQ ID NO: 5474255 - DNA, 25 bp, Homo sapien
caccgcttcttttcgggccggagat

SEQ ID NO: 5474256 - DNA, 25 bp, Homo sapien
tcctgtcgccagataacgcccggag

SEQ ID NO: 5474257 - DNA, 25 bp, Homo sapien
cccggagcctgatttatggaccctc

SEQ ID NO: 5474258 - DNA, 25 bp, Homo sapien
ccctggctgtagtcgatttggagca

SEQ ID NO: 5474259 - DNA, 25 bp, Homo sapien
gcttcaaacacagtggagtccacca

SEQ ID NO: 5474260 - DNA, 25 bp, Homo sapien
tggctcagataggataggcaacccc

SEQ ID NO: 5474261 - DNA, 25 bp, Homo sapien
ttctcaatttgcttgggatggccac

SEQ ID NO: 5474262 - DNA, 25 bp, Homo sapien
gcaaagcaaagcgaatttccaggct

SEQ ID NO: 5474263 - DNA, 25 bp, Homo sapien
tcttgcccgtagacgtggtgctgcc

SEQ ID NO: 5474264 - DNA, 25 bp, Homo sapien
gattgtcatccgagctgtagtccac

SEQ ID NO: 5474265 - DNA, 25 bp, Homo sapien
gatagcgaacctgctgacgtggaca

SEQ ID NO: 5474266 - DNA, 25 bp, Homo sapien
agattttcacctgcacctcgctgag

SEQ ID NO: 5474267 - DNA, 25 bp, Homo sapien
catcgtcagatagatatgtggccca

SEQ ID NO: 5474268 - DNA, 25 bp, Homo sapien
agcagctggtcgccgggcgctaaac

SEQ ID NO: 5474269 - DNA, 25 bp, Homo sapien
ccgagaccccgcttgttgggtggct

SEQ ID NO: 5474270 - DNA, 25 bp, Homo sapien
aggtcaccgcggagcggcagaggcg

SEQ ID NO: 5474271 - DNA, 25 bp, Homo sapien
ctcgtcccggctgcgcgcgccgccg

SEQ ID NO: 5474272 - DNA, 25 bp, Homo sapien
gccccctcgtcccggctgcgcgcgc

SEQ ID NO: 5474273 - DNA, 25 bp, Homo sapien
ctcccgccccctcgtcccggctgcg

SEQ ID NO: 5474274 - DNA, 25 bp, Homo sapien
ccctcgtcccggctgcgcgcgccgc

SEQ ID NO: 5474275 - DNA, 25 bp, Homo sapien
ccatgagcgtagaggtgagcgccat

SEQ ID NO: 5474276 - DNA, 25 bp, Homo sapien
agcagcgagccctctttggccagga

SEQ ID NO: 5474277 - DNA, 25 bp, Homo sapien
gtctcggccgcggagaaggcgagca

SEQ ID NO: 5474278 - DNA, 25 bp, Homo sapien
agcgcctccgccttgtcgaagttac

SEQ ID NO: 5474279 - DNA, 25 bp, Homo sapien
gtgagggtgtgcgggcggcagcgct

SEQ ID NO: 5474280 - DNA, 25 bp, Homo sapien
ctggtggtgagggtgtgcgggcggc

SEQ ID NO: 5474281 - DNA, 25 bp, Homo sapien
gagggtgtgcgggcggcagcgctgg

SEQ ID NO: 5474282 - DNA, 25 bp, Homo sapien
ggtggtgagggtgtgcgggcggcag

SEQ ID NO: 5474283 - DNA, 25 bp, Homo sapien
ggggcagcgcgggcggcggcggcgg

SEQ ID NO: 5474284 - DNA, 25 bp, Homo sapien
tggggcagcgcgggcggcggcggcg

SEQ ID NO: 5474285 - DNA, 25 bp, Homo sapien
ctggggcagcgcgggcggcggcggc

SEQ ID NO: 5474286 - DNA, 25 bp, Homo sapien
gggcagcgcgggcggcggcggcggc

SEQ ID NO: 5474287 - DNA, 25 bp, Homo sapien
tcagcgagtctatgctgaaggcggt

SEQ ID NO: 5474288 - DNA, 25 bp, Homo sapien
gcgggctgccgatcagcgagtctat

SEQ ID NO: 5474289 - DNA, 25 bp, Homo sapien
ggtagccggtgtagacgaaatggcc

SEQ ID NO: 5474290 - DNA, 25 bp, Homo sapien
aaggcggtgctactccccagcgggc

SEQ ID NO: 5474291 - DNA, 25 bp, Homo sapien
gcgagaggcgaaaagtccccgcgcc

SEQ ID NO: 5474292 - DNA, 25 bp, Homo sapien
agacgcgctcggtagaggccagcga

SEQ ID NO: 5474293 - DNA, 25 bp, Homo sapien
ggacccggagagcagacgcctccgc

SEQ ID NO: 5474294 - DNA, 25 bp, Homo sapien
cgcgctcggtagaggccagcgagag

SEQ ID NO: 5474295 - DNA, 25 bp, Homo sapien
tgcgccccggagtggagagggcgcc

SEQ ID NO: 5474296 - DNA, 25 bp, Homo sapien
tgggcccgctgcatgccgggcgggt

SEQ ID NO: 5474297 - DNA, 25 bp, Homo sapien
gcgaagccggcgtacttatctccgg

SEQ ID NO: 5474298 - DNA, 25 bp, Homo sapien
gagcccgcgcgcttcgcgggtttgg

SEQ ID NO: 5474299 - DNA, 25 bp, Homo sapien
aaaggatccttgtgtttcggcgtga

SEQ ID NO: 5474300 - DNA, 25 bp, Homo sapien
gcgtgattaacaagatgcattcggg

SEQ ID NO: 5474301 - DNA, 25 bp, Homo sapien
gctgcttagaaaacgactgttcgtg

SEQ ID NO: 5474302 - DNA, 25 bp, Homo sapien
tgttcgtgtcataaaaggatccttg

SEQ ID NO: 5474303 - DNA, 25 bp, Homo sapien
gccctctccactccagcgacgagga

SEQ ID NO: 5474304 - DNA, 25 bp, Homo sapien
agccacagccgctcggcccgcgagg

SEQ ID NO: 5474305 - DNA, 25 bp, Homo sapien
cccgcgaggcgagccctcgtggcat

SEQ ID NO: 5474306 - DNA, 25 bp, Homo sapien
ccactccagcgacgaggaacaggag

SEQ ID NO: 5474307 - DNA, 25 bp, Homo sapien
tccagatgtccgagggcgcttgcgg

SEQ ID NO: 5474308 - DNA, 25 bp, Homo sapien
tcagagcagccgtaacgattgaggc

SEQ ID NO: 5474309 - DNA, 25 bp, Homo sapien
agaccactgggggtaactgatcgcc

SEQ ID NO: 5474310 - DNA, 25 bp, Homo sapien
ctcaccgcgcgtctctccgggagca

SEQ ID NO: 5474311 - DNA, 25 bp, Homo sapien
ccaaatgagcagtgattgctgtagc

SEQ ID NO: 5474312 - DNA, 25 bp, Homo sapien
tgaatttcctctggttatttcctcc

SEQ ID NO: 5474313 - DNA, 25 bp, Homo sapien
gattgctgtagcaagaactgtttct

SEQ ID NO: 5474314 - DNA, 25 bp, Homo sapien
ctttagcttcttccgggaccaaatg

SEQ ID NO: 5474315 - DNA, 25 bp, Homo sapien
ttctgattgggatcgctctgccgcc

SEQ ID NO: 5474316 - DNA, 25 bp, Homo sapien
tgttcacgcaatcaagttcattagg

SEQ ID NO: 5474317 - DNA, 25 bp, Homo sapien
tcattaggacttcaaatcgcatttc

SEQ ID NO: 5474318 - DNA, 25 bp, Homo sapien
accccagcgcttggctttcaaaaca

SEQ ID NO: 5474319 - DNA, 25 bp, Homo sapien
taagaccgtttgcttatggcgccac

SEQ ID NO: 5474320 - DNA, 25 bp, Homo sapien
tctgtagttttcgtaggctcccctc

SEQ ID NO: 5474321 - DNA, 25 bp, Homo sapien
cgcagggttctagattcctcaggct

SEQ ID NO: 5474322 - DNA, 25 bp, Homo sapien
caatttcaacgcaaatcccggagtt

SEQ ID NO: 5474323 - DNA, 25 bp, Homo sapien
tgagcaccctgcgatggaatagcac

SEQ ID NO: 5474324 - DNA, 25 bp, Homo sapien
tggcaaggtctgtgcttcacccggt

SEQ ID NO: 5474325 - DNA, 25 bp, Homo sapien
ggattttcacaagcgaccctgagag

SEQ ID NO: 5474326 - DNA, 25 bp, Homo sapien
catggaaggtcagcgaggagaacaa

SEQ ID NO: 5474327 - DNA, 25 bp, Homo sapien
ccttttgccaaacagtctgcgaaga

SEQ ID NO: 5474328 - DNA, 25 bp, Homo sapien
agagcacagcggcaaagatgctgca

SEQ ID NO: 5474329 - DNA, 25 bp, Homo sapien
ggatgaggtcaaagcaccttttgcc

SEQ ID NO: 5474330 - DNA, 25 bp, Homo sapien
caaagagggactggtagaacggctt

SEQ ID NO: 5474331 - DNA, 25 bp, Homo sapien
aaagcacagttcctgccgagtgaga

SEQ ID NO: 5474332 - DNA, 25 bp, Homo sapien
tgctccaggtggtctccccgaattc

SEQ ID NO: 5474333 - DNA, 25 bp, Homo sapien
ccaggggcttgtgtgctctcccaaa

SEQ ID NO: 5474334 - DNA, 25 bp, Homo sapien
cgaattccgttttgctccatcctct

SEQ ID NO: 5474335 - DNA, 25 bp, Homo sapien
ctttgtcgtggatagatgtaatccc

SEQ ID NO: 5474336 - DNA, 25 bp, Homo sapien
ctgtggactttgtcgtggatagatg

SEQ ID NO: 5474337 - DNA, 25 bp, Homo sapien
ttgtcgtggatagatgtaatcccca

SEQ ID NO: 5474338 - DNA, 25 bp, Homo sapien
tggactttgtcgtggatagatgtaa

SEQ ID NO: 5474339 - DNA, 25 bp, Homo sapien
aagatgggcagaaaggcagccctct

SEQ ID NO: 5474340 - DNA, 25 bp, Homo sapien
atgggcagaaaggcagccctcttgc

SEQ ID NO: 5474341 - DNA, 25 bp, Homo sapien
taaagatgggcagaaaggcagccct

SEQ ID NO: 5474342 - DNA, 25 bp, Homo sapien
gatgggcagaaaggcagccctcttg

SEQ ID NO: 5474343 - DNA, 25 bp, Homo sapien
ggacagatgcacaggtcttcagcac

SEQ ID NO: 5474344 - DNA, 25 bp, Homo sapien
tgagggtaggagttgaaaagcacct

SEQ ID NO: 5474345 - DNA, 25 bp, Homo sapien
gactctgacaagcagagctgagggt

SEQ ID NO: 5474346 - DNA, 25 bp, Homo sapien
cacctcgatgactgcggggacagat

SEQ ID NO: 5474347 - DNA, 25 bp, Homo sapien
atttataattcaagtccattagctt

SEQ ID NO: 5474348 - DNA, 25 bp, Homo sapien
tataattcaagtccattagcttcac

SEQ ID NO: 5474349 - DNA, 25 bp, Homo sapien
tcaggaaattgagaattggggaaga

SEQ ID NO: 5474350 - DNA, 25 bp, Homo sapien
tccccactggcaaagattcctattg

SEQ ID NO: 5474351 - DNA, 25 bp, Homo sapien
tgatgtcattagtgtccacgcacac

SEQ ID NO: 5474352 - DNA, 25 bp, Homo sapien
catgctgatgtcattagtgtccacg

SEQ ID NO: 5474353 - DNA, 25 bp, Homo sapien
gatgtcattagtgtccacgcacacc

SEQ ID NO: 5474354 - DNA, 25 bp, Homo sapien
gctgatgtcattagtgtccacgcac

SEQ ID NO: 5474355 - DNA, 25 bp, Homo sapien
tgcaatccataagtctcaccctgag

SEQ ID NO: 5474356 - DNA, 25 bp, Homo sapien
tgcgggtcatcagacccggaatgca

SEQ ID NO: 5474357 - DNA, 25 bp, Homo sapien
ggtaaagtagaaatgcagtccctct

SEQ ID NO: 5474358 - DNA, 25 bp, Homo sapien
agtttctcatatctgggaaaaccgt

SEQ ID NO: 5474359 - DNA, 25 bp, Homo sapien
gacagtgctggtgactctacgctcg

SEQ ID NO: 5474360 - DNA, 25 bp, Homo sapien
tctattcacagtacggctgctgccc

SEQ ID NO: 5474361 - DNA, 25 bp, Homo sapien
tgatgtcgcacatgattagatgccg

SEQ ID NO: 5474362 - DNA, 25 bp, Homo sapien
taattctgcgctccatgggtgtctc

SEQ ID NO: 5474363 - DNA, 25 bp, Homo sapien
gccacacggtgggagagccgtggtt

SEQ ID NO: 5474364 - DNA, 25 bp, Homo sapien
tgcaccgtgcgctgcggtgaggcct

SEQ ID NO: 5474365 - DNA, 25 bp, Homo sapien
tgaggcctggagagcgcaggatgcg

SEQ ID NO: 5474366 - DNA, 25 bp, Homo sapien
cgtggttgagcagcgcctgcaccgt

SEQ ID NO: 5474367 - DNA, 25 bp, Homo sapien
ggccccgccatagtcgagcgcgccc

SEQ ID NO: 5474368 - DNA, 25 bp, Homo sapien
ggaggcgcgccaggctgtggctcgc

SEQ ID NO: 5474369 - DNA, 25 bp, Homo sapien
cgtcggcgccgtgccgcagtaggag

SEQ ID NO: 5474370 - DNA, 25 bp, Homo sapien
ctcgcgtggccgcaggctttgtgca

SEQ ID NO: 5474371 - DNA, 25 bp, Homo sapien
gcgctcgtcctcgtcgcgcgcgtcc

SEQ ID NO: 5474372 - DNA, 25 bp, Homo sapien
tgcgctcgtcctcgtcgcgcgcgtc

SEQ ID NO: 5474373 - DNA, 25 bp, Homo sapien
cgctcgtcctcgtcgcgcgcgtccg

SEQ ID NO: 5474374 - DNA, 25 bp, Homo sapien
ctgcgctcgtcctcgtcgcgcgcgt

SEQ ID NO: 5474375 - DNA, 25 bp, Homo sapien
ccgcaggccgcgctcagagccgtct

SEQ ID NO: 5474376 - DNA, 25 bp, Homo sapien
gcaggccgcgctcagagccgtctct

SEQ ID NO: 5474377 - DNA, 25 bp, Homo sapien
aggccgcgctcagagccgtctctcc

SEQ ID NO: 5474378 - DNA, 25 bp, Homo sapien
gccgcaccgcaggccgcgctcagag

SEQ ID NO: 5474379 - DNA, 25 bp, Homo sapien
cgccccgcggcccaggtacaggcgc

SEQ ID NO: 5474380 - DNA, 25 bp, Homo sapien
ctcgcgtccacgtgcgccccgcggc

SEQ ID NO: 5474381 - DNA, 25 bp, Homo sapien
ccccgcggcccaggtacaggcgcgc

SEQ ID NO: 5474382 - DNA, 25 bp, Homo sapien
cgcggcccaggtacaggcgcgcgtg

SEQ ID NO: 5474383 - DNA, 25 bp, Homo sapien
gccacgtgcagcggcgtgtcccggc

SEQ ID NO: 5474384 - DNA, 25 bp, Homo sapien
ccgtgccgcccacgcgctgcaccga

SEQ ID NO: 5474385 - DNA, 25 bp, Homo sapien
acgtgcagcggcgtgtcccggcccg

SEQ ID NO: 5474386 - DNA, 25 bp, Homo sapien
gccgcccacgcgctgcaccgaggcc

SEQ ID NO: 5474387 - DNA, 25 bp, Homo sapien
tcttccccagagacgagtgtcttcc

SEQ ID NO: 5474388 - DNA, 25 bp, Homo sapien
agactggatattggctgcacctgaa

SEQ ID NO: 5474389 - DNA, 25 bp, Homo sapien
ggagcttctagacccccatgggagc

SEQ ID NO: 5474390 - DNA, 25 bp, Homo sapien
catgggagcctgcggtcttccccag

SEQ ID NO: 5474391 - DNA, 25 bp, Homo sapien
tgaccaggtatggtgctgagagcac

SEQ ID NO: 5474392 - DNA, 25 bp, Homo sapien
agagcacactctgccgtgccatgcc

SEQ ID NO: 5474393 - DNA, 25 bp, Homo sapien
ttcacctcctgaggcgccgcctctc

SEQ ID NO: 5474394 - DNA, 25 bp, Homo sapien
aggcgccgcctctccatgcttcaat

SEQ ID NO: 5474395 - DNA, 25 bp, Homo sapien
tcctgtgcccatggcgaattgccaa

SEQ ID NO: 5474396 - DNA, 25 bp, Homo sapien
aaagtcctgtgcccatggcgaattg

SEQ ID NO: 5474397 - DNA, 25 bp, Homo sapien
ttaaagtcctgtgcccatggcgaat

SEQ ID NO: 5474398 - DNA, 25 bp, Homo sapien
agtcctgtgcccatggcgaattgcc

SEQ ID NO: 5474399 - DNA, 25 bp, Homo sapien
cgtcttggtagaacacctggatact

SEQ ID NO: 5474400 - DNA, 25 bp, Homo sapien
tggacaacataacccaggaagctat

SEQ ID NO: 5474401 - DNA, 25 bp, Homo sapien
gatactcctgggttggaagcttgta

SEQ ID NO: 5474402 - DNA, 25 bp, Homo sapien
tcccctaggaggctgctatgagatg

SEQ ID NO: 5474403 - DNA, 25 bp, Homo sapien
tttgacagtcggtggagaagcagca

SEQ ID NO: 5474404 - DNA, 25 bp, Homo sapien
ggcaggacatccaggcaactttgac

SEQ ID NO: 5474405 - DNA, 25 bp, Homo sapien
tcaaatgacctttcttaggtgggtc

SEQ ID NO: 5474406 - DNA, 25 bp, Homo sapien
ccctctgaactcaaatgacctttct

SEQ ID NO: 5474407 - DNA, 25 bp, Homo sapien
cagaggtgcagaggcgccaggccct

SEQ ID NO: 5474408 - DNA, 25 bp, Homo sapien
ccgagcgaggcggccgtgcggcaga

SEQ ID NO: 5474409 - DNA, 25 bp, Homo sapien
agcgaggcggccgtgcggcagaggt

SEQ ID NO: 5474410 - DNA, 25 bp, Homo sapien
gcggcagaggtgcagaggcgccagg

SEQ ID NO: 5474411 - DNA, 25 bp, Homo sapien
acgcaggcggtgtggcccccgaggc

SEQ ID NO: 5474412 - DNA, 25 bp, Homo sapien
tggcccccgaggcaggcctcgtgca

SEQ ID NO: 5474413 - DNA, 25 bp, Homo sapien
tgtggcccccgaggcaggcctcgtg

SEQ ID NO: 5474414 - DNA, 25 bp, Homo sapien
gcggtgtggcccccgaggcaggcct

SEQ ID NO: 5474415 - DNA, 25 bp, Homo sapien
tctgcgccgcggccgagcaggtgtc

SEQ ID NO: 5474416 - DNA, 25 bp, Homo sapien
gcgccgcggccgagcaggtgtcgca

SEQ ID NO: 5474417 - DNA, 25 bp, Homo sapien
tgggtctgcgccgcggccgagcagg

SEQ ID NO: 5474418 - DNA, 25 bp, Homo sapien
ggtctgcgccgcggccgagcaggtg

SEQ ID NO: 5474419 - DNA, 25 bp, Homo sapien
gccgcggcgatgcacaggggcgtgg

SEQ ID NO: 5474420 - DNA, 25 bp, Homo sapien
ggtgagctcacgcttgtactccagg

SEQ ID NO: 5474421 - DNA, 25 bp, Homo sapien
agctcacgcttgtactccagggtcc

SEQ ID NO: 5474422 - DNA, 25 bp, Homo sapien
cgtggtgagctcacgcttgtactcc

SEQ ID NO: 5474423 - DNA, 25 bp, Homo sapien
tcagggacatgggacactggccgcc

SEQ ID NO: 5474424 - DNA, 25 bp, Homo sapien
tgcctgccagagcttaagagtcagg

SEQ ID NO: 5474425 - DNA, 25 bp, Homo sapien
cagattctcaaatcccatggtctgg

SEQ ID NO: 5474426 - DNA, 25 bp, Homo sapien
tgtagattccaacgcatgtgaaact

SEQ ID NO: 5474427 - DNA, 25 bp, Homo sapien
aaagcagggtgccatccgagaaagc

SEQ ID NO: 5474428 - DNA, 25 bp, Homo sapien
agcagggtgccatccgagaaagccc

SEQ ID NO: 5474429 - DNA, 25 bp, Homo sapien
gccatccgagaaagccccagatgca

SEQ ID NO: 5474430 - DNA, 25 bp, Homo sapien
gggtgccatccgagaaagccccaga

SEQ ID NO: 5474431 - DNA, 25 bp, Homo sapien
gatagtccaaacgtggctggagatt

SEQ ID NO: 5474432 - DNA, 25 bp, Homo sapien
tagtccaaacgtggctggagatttc

SEQ ID NO: 5474433 - DNA, 25 bp, Homo sapien
gtccaaacgtggctggagatttcac

SEQ ID NO: 5474434 - DNA, 25 bp, Homo sapien
ctgatagtccaaacgtggctggaga

SEQ ID NO: 5474435 - DNA, 25 bp, Homo sapien
gaggggcttcagatggtcgaggtcc

SEQ ID NO: 5474436 - DNA, 25 bp, Homo sapien
tgccattccatctcatccttattga

SEQ ID NO: 5474437 - DNA, 25 bp, Homo sapien
ttgatctcaaacaccacgttggcat

SEQ ID NO: 5474438 - DNA, 25 bp, Homo sapien
tcctggaagaactggtccatgaggg

SEQ ID NO: 5474439 - DNA, 25 bp, Homo sapien
gcgaccagggcagtgtggtactcct

SEQ ID NO: 5474440 - DNA, 25 bp, Homo sapien
tgcgaccagggcagtgtggtactcc

SEQ ID NO: 5474441 - DNA, 25 bp, Homo sapien
gaccagggcagtgtggtactcctgc

SEQ ID NO: 5474442 - DNA, 25 bp, Homo sapien
ctgcgaccagggcagtgtggtactc

SEQ ID NO: 5474443 - DNA, 25 bp, Homo sapien
ctctgtcttttgaaatatttgaagt

SEQ ID NO: 5474444 - DNA, 25 bp, Homo sapien
ctagcttgaggatccttctctgtct

SEQ ID NO: 5474445 - DNA, 25 bp, Homo sapien
gttttcctctcactggccctggctg

SEQ ID NO: 5474446 - DNA, 25 bp, Homo sapien
ttcctctcactggccctggctgtct

SEQ ID NO: 5474447 - DNA, 25 bp, Homo sapien
agatgccgtcgatttcagaagagtt

SEQ ID NO: 5474448 - DNA, 25 bp, Homo sapien
gagatgccgtcgatttcagaagagt

SEQ ID NO: 5474449 - DNA, 25 bp, Homo sapien
tgagatgccgtcgatttcagaagag

SEQ ID NO: 5474450 - DNA, 25 bp, Homo sapien
tggtcttatggagtgtgagctattt

SEQ ID NO: 5474451 - DNA, 25 bp, Homo sapien
gatggtcttatggagtgtgagctat

SEQ ID NO: 5474452 - DNA, 25 bp, Homo sapien
atggtcttatggagtgtgagctatt

SEQ ID NO: 5474453 - DNA, 25 bp, Homo sapien
agatggtcttatggagtgtgagcta

SEQ ID NO: 5474454 - DNA, 25 bp, Homo sapien
gtctttctcggtttgaagagtgtct

SEQ ID NO: 5474455 - DNA, 25 bp, Homo sapien
gaagcttgtctttctcggtttgaag

SEQ ID NO: 5474456 - DNA, 25 bp, Homo sapien
tctcggtttgaagagtgtcttttag

SEQ ID NO: 5474457 - DNA, 25 bp, Homo sapien
gcttgtctttctcggtttgaagagt

SEQ ID NO: 5474458 - DNA, 25 bp, Homo sapien
ggatgtgtgaaggaggccccactgg

SEQ ID NO: 5474459 - DNA, 25 bp, Homo sapien
atgtgtgaaggaggccccactggac

SEQ ID NO: 5474460 - DNA, 25 bp, Homo sapien
gaggatgtgtgaaggaggccccact

SEQ ID NO: 5474461 - DNA, 25 bp, Homo sapien
ctgaggatgtgtgaaggaggcccca

SEQ ID NO: 5474462 - DNA, 25 bp, Homo sapien
gacttggccatgacccaaattggtt

SEQ ID NO: 5474463 - DNA, 25 bp, Homo sapien
ttggccatgacccaaattggttgcc

SEQ ID NO: 5474464 - DNA, 25 bp, Homo sapien
gggagacttggccatgacccaaatt

SEQ ID NO: 5474465 - DNA, 25 bp, Homo sapien
atgggtgagagtcaacctcagctgg

SEQ ID NO: 5474466 - DNA, 25 bp, Homo sapien
caatatgaagctctttgggtctttc

SEQ ID NO: 5474467 - DNA, 25 bp, Homo sapien
gtctttcctttctctaagcatagcc

SEQ ID NO: 5474468 - DNA, 25 bp, Homo sapien
tatgaagctctttgggtctttcctt

SEQ ID NO: 5474469 - DNA, 25 bp, Homo sapien
ctttcctttctctaagcatagccat

SEQ ID NO: 5474470 - DNA, 25 bp, Homo sapien
aataatacacgtgatgccccaacag

SEQ ID NO: 5474471 - DNA, 25 bp, Homo sapien
aatatgccagcgcacgttgttgacc

SEQ ID NO: 5474472 - DNA, 25 bp, Homo sapien
gaatttttgaggctgcaggacaccc

SEQ ID NO: 5474473 - DNA, 25 bp, Homo sapien
caagtcactaggaacacgtcagggt

SEQ ID NO: 5474474 - DNA, 25 bp, Homo sapien
ggtgaatcaattcaggcagcgcata

SEQ ID NO: 5474475 - DNA, 25 bp, Homo sapien
tcagcgttaattaagaagatgggac

SEQ ID NO: 5474476 - DNA, 25 bp, Homo sapien
tgtgtgtctcgtagaaagcaaagaa

SEQ ID NO: 5474477 - DNA, 25 bp, Homo sapien
cagcgcataattgagtctgttagca

SEQ ID NO: 5474478 - DNA, 25 bp, Homo sapien
ggctctggatataatcgagtgttag

SEQ ID NO: 5474479 - DNA, 25 bp, Homo sapien
ttctctcagggttaataccctgtgc

SEQ ID NO: 5474480 - DNA, 25 bp, Homo sapien
agggttaataccctgtgctaggctc

SEQ ID NO: 5474481 - DNA, 25 bp, Homo sapien
taatcgagtgttaggcgaggttctg

SEQ ID NO: 5474482 - DNA, 25 bp, Homo sapien
acaggccgatgagcatggtgattgc

SEQ ID NO: 5474483 - DNA, 25 bp, Homo sapien
cacaggccgatgagcatggtgattg

SEQ ID NO: 5474484 - DNA, 25 bp, Homo sapien
caggccgatgagcatggtgattgca

SEQ ID NO: 5474485 - DNA, 25 bp, Homo sapien
tcacaggccgatgagcatggtgatt

SEQ ID NO: 5474486 - DNA, 25 bp, Homo sapien
gcagcagccacagcggatggccatt

SEQ ID NO: 5474487 - DNA, 25 bp, Homo sapien
gccacagcggatggccattcctaac

SEQ ID NO: 5474488 - DNA, 25 bp, Homo sapien
ggccattcctaaccctgtacctgat

SEQ ID NO: 5474489 - DNA, 25 bp, Homo sapien
attcctaaccctgtacctgataggg

SEQ ID NO: 5474490 - DNA, 25 bp, Homo sapien
atcccagatgcagcaggctcgttct

SEQ ID NO: 5474491 - DNA, 25 bp, Homo sapien
ttaaatcccagatgcagcaggctcg

SEQ ID NO: 5474492 - DNA, 25 bp, Homo sapien
gatgcagcaggctcgttctggttac

SEQ ID NO: 5474493 - DNA, 25 bp, Homo sapien
aaatcccagatgcagcaggctcgtt

SEQ ID NO: 5474494 - DNA, 25 bp, Homo sapien
tggcatccagggcagactttaatct

SEQ ID NO: 5474495 - DNA, 25 bp, Homo sapien
cattggccagttctatcacagcgtc

SEQ ID NO: 5474496 - DNA, 25 bp, Homo sapien
gggtctttcatccagtcgtcattgg

SEQ ID NO: 5474497 - DNA, 25 bp, Homo sapien
cgtccacaggcgtgatttcagtgca

SEQ ID NO: 5474498 - DNA, 25 bp, Homo sapien
ccctggttgtgagcctttttcacta

SEQ ID NO: 5474499 - DNA, 25 bp, Homo sapien
ctgacatttgctccctggttgtgag

SEQ ID NO: 5474500 - DNA, 25 bp, Homo sapien
cactatatacttgctattctgccct

SEQ ID NO: 5474501 - DNA, 25 bp, Homo sapien
tacttgctattctgcccttgtacca

SEQ ID NO: 5474502 - DNA, 25 bp, Homo sapien
tcatgtcgctggctctctggttctg

SEQ ID NO: 5474503 - DNA, 25 bp, Homo sapien
atgtgacatctgcttcatgtcgctg

SEQ ID NO: 5474504 - DNA, 25 bp, Homo sapien
tgacatctgcttcatgtcgctggct

SEQ ID NO: 5474505 - DNA, 25 bp, Homo sapien
tctgcttcatgtcgctggctctctg

SEQ ID NO: 5474506 - DNA, 25 bp, Homo sapien
taggaaggtgaatctggcataattt

SEQ ID NO: 5474507 - DNA, 25 bp, Homo sapien
ttaggaaggtgaatctggcataatt

SEQ ID NO: 5474508 - DNA, 25 bp, Homo sapien
gctgtgactgattcttcatgtagcc

SEQ ID NO: 5474509 - DNA, 25 bp, Homo sapien
tgactgattcttcatgtagcccgcc

SEQ ID NO: 5474510 - DNA, 25 bp, Homo sapien
tctttgagaggtggccattgctgga

SEQ ID NO: 5474511 - DNA, 25 bp, Homo sapien
gattcttcatgtagcccgcccaagt

SEQ ID NO: 5474512 - DNA, 25 bp, Homo sapien
ctgttccaccagtgggacaaagcca

SEQ ID NO: 5474513 - DNA, 25 bp, Homo sapien
ggaaatatgtgctcaggaggaagag

SEQ ID NO: 5474514 - DNA, 25 bp, Homo sapien
gaagaggggctcactctcctggtac

SEQ ID NO: 5474515 - DNA, 25 bp, Homo sapien
gggaaatatgtgctcaggaggaaga

SEQ ID NO: 5474516 - DNA, 25 bp, Homo sapien
gctcactctcctggtaccttccaga

SEQ ID NO: 5474517 - DNA, 25 bp, Homo sapien
cttggataaggcgacatctgagcaa

SEQ ID NO: 5474518 - DNA, 25 bp, Homo sapien
tcagttagtaatcccctgttccagg

SEQ ID NO: 5474519 - DNA, 25 bp, Homo sapien
gaaaaggtccccatgctccaatggg

SEQ ID NO: 5474520 - DNA, 25 bp, Homo sapien
ctccaatgggcgacagtgaacaaat

SEQ ID NO: 5474521 - DNA, 25 bp, Homo sapien
gacacttagggagctactgcaacag

SEQ ID NO: 5474522 - DNA, 25 bp, Homo sapien
cagggtgactctaggcttttgggct

SEQ ID NO: 5474523 - DNA, 25 bp, Homo sapien
taaacccagggcatcaaatttggac

SEQ ID NO: 5474524 - DNA, 25 bp, Homo sapien
tgagccaccagagcttggagtgtcc

SEQ ID NO: 5474525 - DNA, 25 bp, Homo sapien
ggtctatttttgtgcaatgtgttgg

SEQ ID NO: 5474526 - DNA, 25 bp, Homo sapien
tgctgtggtctatttttgtgcaatg

SEQ ID NO: 5474527 - DNA, 25 bp, Homo sapien
actgctgtggtctatttttgtgcaa

SEQ ID NO: 5474528 - DNA, 25 bp, Homo sapien
ctgtggtctatttttgtgcaatgtg

SEQ ID NO: 5474529 - DNA, 25 bp, Homo sapien
ccggctgccgaagactgagtgtagc

SEQ ID NO: 5474530 - DNA, 25 bp, Homo sapien
cggctgccgaagactgagtgtagca

SEQ ID NO: 5474531 - DNA, 25 bp, Homo sapien
tgagtgtagcagtcagcattcgcaa

SEQ ID NO: 5474532 - DNA, 25 bp, Homo sapien
gcagtcagcattcgcaaaaattctg

SEQ ID NO: 5474533 - DNA, 25 bp, Homo sapien
ttcccgagtaggagtctggttcagg

SEQ ID NO: 5474534 - DNA, 25 bp, Homo sapien
gaggcgtgaatgtgacactgtacac

SEQ ID NO: 5474535 - DNA, 25 bp, Homo sapien
catgaacggtgctggctcatggcaa

SEQ ID NO: 5474536 - DNA, 25 bp, Homo sapien
ctgtggccgtgggtgtaacctttgt

SEQ ID NO: 5474537 - DNA, 25 bp, Homo sapien
catggcaaggactcggtcaatgctc

SEQ ID NO: 5474538 - DNA, 25 bp, Homo sapien
ccccttcaaacaggcatagacggtg

SEQ ID NO: 5474539 - DNA, 25 bp, Homo sapien
gagcattgcacaggaatattcttct

SEQ ID NO: 5474540 - DNA, 25 bp, Homo sapien
tgacctgtggaagagcattgcacag

SEQ ID NO: 5474541 - DNA, 25 bp, Homo sapien
caggcatagacggtgacctgtggaa

SEQ ID NO: 5474542 - DNA, 25 bp, Homo sapien
actgctgcagataggcaggaggctg

SEQ ID NO: 5474543 - DNA, 25 bp, Homo sapien
gctgcagataggcaggaggctggac

SEQ ID NO: 5474544 - DNA, 25 bp, Homo sapien
cttgacagagcggggccccgaaaga

SEQ ID NO: 5474545 - DNA, 25 bp, Homo sapien
ggaggctggacagacgagggcccag

SEQ ID NO: 5474546 - DNA, 25 bp, Homo sapien
cccagtcagtttctttaagcccaat

SEQ ID NO: 5474547 - DNA, 25 bp, Homo sapien
ccaatccggatcttccatccttttt

SEQ ID NO: 5474548 - DNA, 25 bp, Homo sapien
ctcttcgtggtgtctcctgatgaca

SEQ ID NO: 5474549 - DNA, 25 bp, Homo sapien
actgctgtctcttcgtggtgtctcc

SEQ ID NO: 5474550 - DNA, 25 bp, Homo sapien
tctctgggaggtcgcaacataaggc

SEQ ID NO: 5474551 - DNA, 25 bp, Homo sapien
ggctctctgggaggtcgcaacataa

SEQ ID NO: 5474552 - DNA, 25 bp, Homo sapien
gggaggtcgcaacataaggccacat

SEQ ID NO: 5474553 - DNA, 25 bp, Homo sapien
tctgggaggtcgcaacataaggcca

SEQ ID NO: 5474554 - DNA, 25 bp, Homo sapien
ttcccacagtcagtagaagtcatta

SEQ ID NO: 5474555 - DNA, 25 bp, Homo sapien
tcccacagtcagtagaagtcattag

SEQ ID NO: 5474556 - DNA, 25 bp, Homo sapien
agaagtcattaggatgtcacatttc

SEQ ID NO: 5474557 - DNA, 25 bp, Homo sapien
ccacagtcagtagaagtcattagga

SEQ ID NO: 5474558 - DNA, 25 bp, Homo sapien
cgggaacatacccagtagacacaga

SEQ ID NO: 5474559 - DNA, 25 bp, Homo sapien
aggccgtgtcccctggtctgtgatt

SEQ ID NO: 5474560 - DNA, 25 bp, Homo sapien
ggccgtgtcccctggtctgtgattt

SEQ ID NO: 5474561 - DNA, 25 bp, Homo sapien
ccactttcgggaacatacccagtag

SEQ ID NO: 5474562 - DNA, 25 bp, Homo sapien
tggtagcagagggtggtcccagtga

SEQ ID NO: 5474563 - DNA, 25 bp, Homo sapien
tttcttaggatcctggaggtctgct

SEQ ID NO: 5474564 - DNA, 25 bp, Homo sapien
ctggaggtctgctggttactgtggt

SEQ ID NO: 5474565 - DNA, 25 bp, Homo sapien
tattcctgttttcttaggatcctgg

SEQ ID NO: 5474566 - DNA, 25 bp, Homo sapien
ttggtttacagcccacagtcttggt

SEQ ID NO: 5474567 - DNA, 25 bp, Homo sapien
agcttggtttacagcccacagtctt

SEQ ID NO: 5474568 - DNA, 25 bp, Homo sapien
ggtttacagcccacagtcttggtct

SEQ ID NO: 5474569 - DNA, 25 bp, Homo sapien
gcttggtttacagcccacagtcttg

SEQ ID NO: 5474570 - DNA, 25 bp, Homo sapien
aaggacaacacctttatttcattat

SEQ ID NO: 5474571 - DNA, 25 bp, Homo sapien
ggacaacacctttatttcattatat

SEQ ID NO: 5474572 - DNA, 25 bp, Homo sapien
aggacaacacctttatttcattata

SEQ ID NO: 5474573 - DNA, 25 bp, Homo sapien
agctagtgtactgatgatatactca

SEQ ID NO: 5474574 - DNA, 25 bp, Homo sapien
ccaacttggaaagactgtggagggt

SEQ ID NO: 5474575 - DNA, 25 bp, Homo sapien
tagtactgatgagaggaagagtcca

SEQ ID NO: 5474576 - DNA, 25 bp, Homo sapien
gatgcaagatactatacagtgtaca

SEQ ID NO: 5474577 - DNA, 25 bp, Homo sapien
cacatgcagtggttagcgggtttgc

SEQ ID NO: 5474578 - DNA, 25 bp, Homo sapien
ggaaagttatgatgaacacccagct

SEQ ID NO: 5474579 - DNA, 25 bp, Homo sapien
tcttcaggcgggcaatggtgaatct

SEQ ID NO: 5474580 - DNA, 25 bp, Homo sapien
actgctaagttccttcccctgaggg

SEQ ID NO: 5474581 - DNA, 25 bp, Homo sapien
gcctcctgttatcgccaaggcacgt

SEQ ID NO: 5474582 - DNA, 25 bp, Homo sapien
gctgcctcctgttatcgccaaggca

SEQ ID NO: 5474583 - DNA, 25 bp, Homo sapien
tgcctcctgttatcgccaaggcacg

SEQ ID NO: 5474584 - DNA, 25 bp, Homo sapien
cctcctgttatcgccaaggcacgtt

SEQ ID NO: 5474585 - DNA, 25 bp, Homo sapien
ccagaggagttttggcataccagtt

SEQ ID NO: 5474586 - DNA, 25 bp, Homo sapien
cagacaatttattcactgagttatt

SEQ ID NO: 5474587 - DNA, 25 bp, Homo sapien
aaacccacggaactgcagagggagg

SEQ ID NO: 5474588 - DNA, 25 bp, Homo sapien
ggaagatacatgctttactgccaaa

SEQ ID NO: 5474589 - DNA, 25 bp, Homo sapien
tttcactgtatatggccgagttcca

SEQ ID NO: 5474590 - DNA, 25 bp, Homo sapien
gctgctaagacttggtcatcagggt

SEQ ID NO: 5474591 - DNA, 25 bp, Homo sapien
gaggtttatgaatttgccgccggat

SEQ ID NO: 5474592 - DNA, 25 bp, Homo sapien
tatgtccttgggtgaagccgtcagt

SEQ ID NO: 5474593 - DNA, 25 bp, Homo sapien
tgtgagcacgcctttaaccacttcg

SEQ ID NO: 5474594 - DNA, 25 bp, Homo sapien
cactggattcatgctggttatcgcc

SEQ ID NO: 5474595 - DNA, 25 bp, Homo sapien
aacacgcattggttgactagagtcc

SEQ ID NO: 5474596 - DNA, 25 bp, Homo sapien
ttttgggccacgagctattgcagca

SEQ ID NO: 5474597 - DNA, 25 bp, Homo sapien
cattgtcaggcctggtaagcggtta

SEQ ID NO: 5474598 - DNA, 25 bp, Homo sapien
tgaggtctatagatccacaagtgcc

SEQ ID NO: 5474599 - DNA, 25 bp, Homo sapien
cttggggcctgccaatttctctgag

SEQ ID NO: 5474600 - DNA, 25 bp, Homo sapien
gcataggcatccagggtttggagat

SEQ ID NO: 5474601 - DNA, 25 bp, Homo sapien
gagcttgagccccaaactagtctta

SEQ ID NO: 5474602 - DNA, 25 bp, Homo sapien
gatggcagccggtgaagattatcct

SEQ ID NO: 5474603 - DNA, 25 bp, Homo sapien
taaagcgcttggaagtgcagcagcc

SEQ ID NO: 5474604 - DNA, 25 bp, Homo sapien
tatccgtaaaacaggcatagaagga

SEQ ID NO: 5474605 - DNA, 25 bp, Homo sapien
cactcgatgagtagagattcattag

SEQ ID NO: 5474606 - DNA, 25 bp, Homo sapien
ctgggaaagggtgaactgtaccgtg

SEQ ID NO: 5474607 - DNA, 25 bp, Homo sapien
tagtaacggtgtacagttactgtac

SEQ ID NO: 5474608 - DNA, 25 bp, Homo sapien
tcttgcaggagtaatcactcgatga

SEQ ID NO: 5474609 - DNA, 25 bp, Homo sapien
gaggaatttgaggagtggggccgcg

SEQ ID NO: 5474610 - DNA, 25 bp, Homo sapien
ggaggaatttgaggagtggggccgc

SEQ ID NO: 5474611 - DNA, 25 bp, Homo sapien
cggaggaatttgaggagtggggccg

SEQ ID NO: 5474612 - DNA, 25 bp, Homo sapien
aggaatttgaggagtggggccgcgg

SEQ ID NO: 5474613 - DNA, 25 bp, Homo sapien
tatggactggaagatactacttttg

SEQ ID NO: 5474614 - DNA, 25 bp, Homo sapien
gacaactaagccaccgtctatgtta

SEQ ID NO: 5474615 - DNA, 25 bp, Homo sapien
tatgttacggattggcagcccttgc

SEQ ID NO: 5474616 - DNA, 25 bp, Homo sapien
tgcgggtggagagacaactaagcca

SEQ ID NO: 5474617 - DNA, 25 bp, Homo sapien
tcagctatcatgcatgggaaggggc

SEQ ID NO: 5474618 - DNA, 25 bp, Homo sapien
agctatcatgcatgggaaggggctg

SEQ ID NO: 5474619 - DNA, 25 bp, Homo sapien
cagctatcatgcatgggaaggggct

SEQ ID NO: 5474620 - DNA, 25 bp, Homo sapien
ctggaagcatagtctggtctgggca

SEQ ID NO: 5474621 - DNA, 25 bp, Homo sapien
aactttgcagaaagattggagttca

SEQ ID NO: 5474622 - DNA, 25 bp, Homo sapien
gaagggacgccgtgtggtccccaca

SEQ ID NO: 5474623 - DNA, 25 bp, Homo sapien
tcagaatccggtcatctggtttcag

SEQ ID NO: 5474624 - DNA, 25 bp, Homo sapien
agaagcacaccaggggcaatggtga

SEQ ID NO: 5474625 - DNA, 25 bp, Homo sapien
cagagacttcccaagcacagtcgag

SEQ ID NO: 5474626 - DNA, 25 bp, Homo sapien
acttcccaagcacagtcgaggccat

SEQ ID NO: 5474627 - DNA, 25 bp, Homo sapien
gagacttcccaagcacagtcgaggc

SEQ ID NO: 5474628 - DNA, 25 bp, Homo sapien
agtgtgatccctgccctttctgagg

SEQ ID NO: 5474629 - DNA, 25 bp, Homo sapien
ccatggtgatggcagtgtgatccct

SEQ ID NO: 5474630 - DNA, 25 bp, Homo sapien
tcagcaacccagttgccatggtgat

SEQ ID NO: 5474631 - DNA, 25 bp, Homo sapien
gagatgacactgttacctttctgtc

SEQ ID NO: 5474632 - DNA, 25 bp, Homo sapien
gaatgtggacgtccaatgctcatgg

SEQ ID NO: 5474633 - DNA, 25 bp, Homo sapien
tttggtcaccttcagaatgtggacg

SEQ ID NO: 5474634 - DNA, 25 bp, Homo sapien
gtcaccttcagaatgtggacgtcca

SEQ ID NO: 5474635 - DNA, 25 bp, Homo sapien
ccttcagaatgtggacgtccaatgc

SEQ ID NO: 5474636 - DNA, 25 bp, Homo sapien
tgggtgagacacagagtctcagagg

SEQ ID NO: 5474637 - DNA, 25 bp, Homo sapien
ttgggtgagacacagagtctcagag

SEQ ID NO: 5474638 - DNA, 25 bp, Homo sapien
cttgggtgagacacagagtctcaga

SEQ ID NO: 5474639 - DNA, 25 bp, Homo sapien
caacacacgacggactcctctaatg

SEQ ID NO: 5474640 - DNA, 25 bp, Homo sapien
gacggactcctctaatgggaagtga

SEQ ID NO: 5474641 - DNA, 25 bp, Homo sapien
agtgaacagagaaaacgtccagttc

SEQ ID NO: 5474642 - DNA, 25 bp, Homo sapien
cacgacggactcctctaatgggaag

SEQ ID NO: 5474643 - DNA, 25 bp, Homo sapien
ttctgcaatgcagcaacttcgccag

SEQ ID NO: 5474644 - DNA, 25 bp, Homo sapien
atgcagcaacttcgccagcagaggg

SEQ ID NO: 5474645 - DNA, 25 bp, Homo sapien
tgcaatgcagcaacttcgccagcag

SEQ ID NO: 5474646 - DNA, 25 bp, Homo sapien
agcaacttcgccagcagagggagtg

SEQ ID NO: 5474647 - DNA, 25 bp, Homo sapien
cttcaatccacaccacggagggctg

SEQ ID NO: 5474648 - DNA, 25 bp, Homo sapien
tcttcaatccacaccacggagggct

SEQ ID NO: 5474649 - DNA, 25 bp, Homo sapien
tgtcttcaatccacaccacggaggg

SEQ ID NO: 5474650 - DNA, 25 bp, Homo sapien
tctgcgttgggaacttttttgtaga

SEQ ID NO: 5474651 - DNA, 25 bp, Homo sapien
tgtaaatgcgcttccctctggggtg

SEQ ID NO: 5474652 - DNA, 25 bp, Homo sapien
ctggttgtaaatgcgcttccctctg

SEQ ID NO: 5474653 - DNA, 25 bp, Homo sapien
agagccctggttgtaaacgtgcttc

SEQ ID NO: 5474654 - DNA, 25 bp, Homo sapien
cctggttgtaaatgcgcttccctct

SEQ ID NO: 5474655 - DNA, 25 bp, Homo sapien
cctgggcccatgaataattgctgta

SEQ ID NO: 5474656 - DNA, 25 bp, Homo sapien
tacacctaacaatctcttcaaagca

SEQ ID NO: 5474657 - DNA, 25 bp, Homo sapien
gggcccatgaataattgctgtacac

SEQ ID NO: 5474658 - DNA, 25 bp, Homo sapien
taattgctgtacacctaacaatctc

SEQ ID NO: 5474659 - DNA, 25 bp, Homo sapien
taaaacctgtttgtgtttcggcatg

SEQ ID NO: 5474660 - DNA, 25 bp, Homo sapien
ttcggcatgcatgggttatgaagat

SEQ ID NO: 5474661 - DNA, 25 bp, Homo sapien
gatcctattttgcttgccaaggaga

SEQ ID NO: 5474662 - DNA, 25 bp, Homo sapien
ggataatggctcaattaaaacctgt

SEQ ID NO: 5474663 - DNA, 25 bp, Homo sapien
ggatattcccagcagacccgctggc

SEQ ID NO: 5474664 - DNA, 25 bp, Homo sapien
atgcggagccgatgcttccccagag

SEQ ID NO: 5474665 - DNA, 25 bp, Homo sapien
gtgtcttgtggagggcacatcctcc

SEQ ID NO: 5474666 - DNA, 25 bp, Homo sapien
aagaagcaggatggccttcagttgc

SEQ ID NO: 5474667 - DNA, 25 bp, Homo sapien
aggttggctcccgtttcggtgcaga

SEQ ID NO: 5474668 - DNA, 25 bp, Homo sapien
gtttcggtgcagatggcatggacca

SEQ ID NO: 5474669 - DNA, 25 bp, Homo sapien
tttcccagcaatgttagaggaggac

SEQ ID NO: 5474670 - DNA, 25 bp, Homo sapien
gccatttttgccagggtatttccca

SEQ ID NO: 5474671 - DNA, 25 bp, Homo sapien
cagacggcccggctaacagtagcga

SEQ ID NO: 5474672 - DNA, 25 bp, Homo sapien
cggctaacagtagcgatttcaccaa

SEQ ID NO: 5474673 - DNA, 25 bp, Homo sapien
ggcccggctaacagtagcgatttca

SEQ ID NO: 5474674 - DNA, 25 bp, Homo sapien
taacagtagcgatttcaccaaagga

SEQ ID NO: 5474675 - DNA, 25 bp, Homo sapien
taacctgacgcttgataatgaagtg

SEQ ID NO: 5474676 - DNA, 25 bp, Homo sapien
cagtagcggcagagttaacctgacg

SEQ ID NO: 5474677 - DNA, 25 bp, Homo sapien
gagtcattcagaggttcatgccgtg

SEQ ID NO: 5474678 - DNA, 25 bp, Homo sapien
tgtcggcagcagcattaaattcttt

SEQ ID NO: 5474679 - DNA, 25 bp, Homo sapien
tgagcaaattctctttaccacgtaa

SEQ ID NO: 5474680 - DNA, 25 bp, Homo sapien
tttaccacgtaactcaatgagcatg

SEQ ID NO: 5474681 - DNA, 25 bp, Homo sapien
tctctttaccacgtaactcaatgag

SEQ ID NO: 5474682 - DNA, 25 bp, Homo sapien
taactcaatgagcatgccttttttg

SEQ ID NO: 5474683 - DNA, 25 bp, Homo sapien
ctatgcctggctcactggtgctttc

SEQ ID NO: 5474684 - DNA, 25 bp, Homo sapien
tgttgaccacaaattatgttgcccc

SEQ ID NO: 5474685 - DNA, 25 bp, Homo sapien
tgcttcatggaagtgtgaggtctcc

SEQ ID NO: 5474686 - DNA, 25 bp, Homo sapien
aagggtttgaactactcccatctca

SEQ ID NO: 5474687 - DNA, 25 bp, Homo sapien
taggaaaagttaaggagcactgtac

SEQ ID NO: 5474688 - DNA, 25 bp, Homo sapien
tcagtaggaaaagttaaggagcact

SEQ ID NO: 5474689 - DNA, 25 bp, Homo sapien
gtaggaaaagttaaggagcactgta

SEQ ID NO: 5474690 - DNA, 25 bp, Homo sapien
cagtaggaaaagttaaggagcactg

SEQ ID NO: 5474691 - DNA, 25 bp, Homo sapien
tgatgacaaacaggaacacactgtc

SEQ ID NO: 5474692 - DNA, 25 bp, Homo sapien
gacaaacaggaacacactgtccaaa

SEQ ID NO: 5474693 - DNA, 25 bp, Homo sapien
gatgacaaacaggaacacactgtcc

SEQ ID NO: 5474694 - DNA, 25 bp, Homo sapien
ttttgatgacaaacaggaacacact

SEQ ID NO: 5474695 - DNA, 25 bp, Homo sapien
gctttggaaaaggcacatccgcgca

SEQ ID NO: 5474696 - DNA, 25 bp, Homo sapien
agcaagcggtgcaagctgctttgga

SEQ ID NO: 5474697 - DNA, 25 bp, Homo sapien
ttggaaaaggcacatccgcgcacgc

SEQ ID NO: 5474698 - DNA, 25 bp, Homo sapien
cacatccgcgcacgccgagtcttta

SEQ ID NO: 5474699 - DNA, 25 bp, Homo sapien
gagggcatgggttctatggacacct

SEQ ID NO: 5474700 - DNA, 25 bp, Homo sapien
ggcgaagagtagtccccaggtagct

SEQ ID NO: 5474701 - DNA, 25 bp, Homo sapien
taatggccagattccgtacaatgtg

SEQ ID NO: 5474702 - DNA, 25 bp, Homo sapien
gtgatgagctgtctgacatccagga

SEQ ID NO: 5474703 - DNA, 25 bp, Homo sapien
ttccttatacagagactcgatggtc

SEQ ID NO: 5474704 - DNA, 25 bp, Homo sapien
agttccttatacagagactcgatgg

SEQ ID NO: 5474705 - DNA, 25 bp, Homo sapien
caccagttccttatacagagactcg

SEQ ID NO: 5474706 - DNA, 25 bp, Homo sapien
ttccaccagttccttatacagagac

SEQ ID NO: 5474707 - DNA, 25 bp, Homo sapien
gcacacacacagaaatcggcggtat

SEQ ID NO: 5474708 - DNA, 25 bp, Homo sapien
ctgttccagaggcacacacacagaa

SEQ ID NO: 5474709 - DNA, 25 bp, Homo sapien
acacacacagaaatcggcggtattt

SEQ ID NO: 5474710 - DNA, 25 bp, Homo sapien
aggcacacacacagaaatcggcggt

SEQ ID NO: 5474711 - DNA, 25 bp, Homo sapien
agcatctcgacctggaactgcttct

SEQ ID NO: 5474712 - DNA, 25 bp, Homo sapien
cagcatctcgacctggaactgcttc

SEQ ID NO: 5474713 - DNA, 25 bp, Homo sapien
gcatctcgacctggaactgcttctc

SEQ ID NO: 5474714 - DNA, 25 bp, Homo sapien
acagcatctcgacctggaactgctt

SEQ ID NO: 5474715 - DNA, 25 bp, Homo sapien
gagtggagaaacctgcagcccctcc

SEQ ID NO: 5474716 - DNA, 25 bp, Homo sapien
gtggagaaacctgcagcccctcccc

SEQ ID NO: 5474717 - DNA, 25 bp, Homo sapien
cttgagtggagaaacctgcagcccc

SEQ ID NO: 5474718 - DNA, 25 bp, Homo sapien
ttgagtggagaaacctgcagcccct

SEQ ID NO: 5474719 - DNA, 25 bp, Homo sapien
ctgtcagctgtcagatctttatcct

SEQ ID NO: 5474720 - DNA, 25 bp, Homo sapien
cctgctttcactgggcgctcccttt

SEQ ID NO: 5474721 - DNA, 25 bp, Homo sapien
ctgctttcactgggcgctccctttc

SEQ ID NO: 5474722 - DNA, 25 bp, Homo sapien
taagttcctgtctcatcaactcatc

SEQ ID NO: 5474723 - DNA, 25 bp, Homo sapien
taagtttttaagttcctgtctcatc

SEQ ID NO: 5474724 - DNA, 25 bp, Homo sapien
gttcctgtctcatcaactcatcaac

SEQ ID NO: 5474725 - DNA, 25 bp, Homo sapien
aagtttttaagttcctgtctcatca

SEQ ID NO: 5474726 - DNA, 25 bp, Homo sapien
agttctggatcatagtcctgagaga

SEQ ID NO: 5474727 - DNA, 25 bp, Homo sapien
ccagcaaaccgaagggcagggctgt

SEQ ID NO: 5474728 - DNA, 25 bp, Homo sapien
ctcctaccagcaaaccgaagggcag

SEQ ID NO: 5474729 - DNA, 25 bp, Homo sapien
gtgtgtgtattgctggctgagcacc

SEQ ID NO: 5474730 - DNA, 25 bp, Homo sapien
tgtgtgtattgctggctgagcacca

SEQ ID NO: 5474731 - DNA, 25 bp, Homo sapien
ctttgtatgcgttacatccttcctt

SEQ ID NO: 5474732 - DNA, 25 bp, Homo sapien
ttgtatgcgttacatccttccttca

SEQ ID NO: 5474733 - DNA, 25 bp, Homo sapien
tttgtatgcgttacatccttccttc

SEQ ID NO: 5474734 - DNA, 25 bp, Homo sapien
cccgctgtttggtctcagccagcaa

SEQ ID NO: 5474735 - DNA, 25 bp, Homo sapien
ttaagctccgtcttctactgcaatt

SEQ ID NO: 5474736 - DNA, 25 bp, Homo sapien
ctggcattaagctccgtcttctact

SEQ ID NO: 5474737 - DNA, 25 bp, Homo sapien
gctgtttggtctcagccagcaaaga

SEQ ID NO: 5474738 - DNA, 25 bp, Homo sapien
tattcttgtcaggaaggtcatggtc

SEQ ID NO: 5474739 - DNA, 25 bp, Homo sapien
gatattcttgtcaggaaggtcatgg

SEQ ID NO: 5474740 - DNA, 25 bp, Homo sapien
attcttgtcaggaaggtcatggtca

SEQ ID NO: 5474741 - DNA, 25 bp, Homo sapien
ttgatattcttgtcaggaaggtcat

SEQ ID NO: 5474742 - DNA, 25 bp, Homo sapien
cttagagatcaatcttcttgtgatc

SEQ ID NO: 5474743 - DNA, 25 bp, Homo sapien
ggccaccttgcgcaagcctcagtgg

SEQ ID NO: 5474744 - DNA, 25 bp, Homo sapien
cagggtagcttcttggtgtgtcaat

SEQ ID NO: 5474745 - DNA, 25 bp, Homo sapien
tcttggtgtgtcaatgacttgtgac

SEQ ID NO: 5474746 - DNA, 25 bp, Homo sapien
aagcctcagtgggtcttgcagggta

SEQ ID NO: 5474747 - DNA, 25 bp, Homo sapien
ctttgtagtctttgcccttggtcac

SEQ ID NO: 5474748 - DNA, 25 bp, Homo sapien
cctttgtagtctttgcccttggtca

SEQ ID NO: 5474749 - DNA, 25 bp, Homo sapien
cttggccacggtgcctctgttcacc

SEQ ID NO: 5474750 - DNA, 25 bp, Homo sapien
tcttggccacggtgcctctgttcac

SEQ ID NO: 5474751 - DNA, 25 bp, Homo sapien
ttcttggccacggtgcctctgttca

SEQ ID NO: 5474752 - DNA, 25 bp, Homo sapien
gtggaggaagcaggtatatgtgggt

SEQ ID NO: 5474753 - DNA, 25 bp, Homo sapien
cgtggaggaagcaggtatatgtggg

SEQ ID NO: 5474754 - DNA, 25 bp, Homo sapien
gccagttgttagagaagtgcttttt

SEQ ID NO: 5474755 - DNA, 25 bp, Homo sapien
agttgttagagaagtgctttttgca

SEQ ID NO: 5474756 - DNA, 25 bp, Homo sapien
gttagagaagtgctttttgcactca

SEQ ID NO: 5474757 - DNA, 25 bp, Homo sapien
tgttagagaagtgctttttgcactc

SEQ ID NO: 5474758 - DNA, 25 bp, Homo sapien
ctgagcgaagatggtcttgaaggtc

SEQ ID NO: 5474759 - DNA, 25 bp, Homo sapien
agcgaagatggtcttgaaggtctgg

SEQ ID NO: 5474760 - DNA, 25 bp, Homo sapien
gaagatggtcttgaaggtctggagg

SEQ ID NO: 5474761 - DNA, 25 bp, Homo sapien
tgagcgaagatggtcttgaaggtct

SEQ ID NO: 5474762 - DNA, 25 bp, Homo sapien
tggcagtgtctccacaatagtcaca

SEQ ID NO: 5474763 - DNA, 25 bp, Homo sapien
acaatgcccatagccaccatggcag

SEQ ID NO: 5474764 - DNA, 25 bp, Homo sapien
cttgaggtttgaggggtttccacat

SEQ ID NO: 5474765 - DNA, 25 bp, Homo sapien
accatggcagtgtctccacaatagt

SEQ ID NO: 5474766 - DNA, 25 bp, Homo sapien
gcctgttgacttcttgcacgatgtg

SEQ ID NO: 5474767 - DNA, 25 bp, Homo sapien
ttgacttcttgcacgatgtgggtca

SEQ ID NO: 5474768 - DNA, 25 bp, Homo sapien
cgttggatcctagcctgttgacttc

SEQ ID NO: 5474769 - DNA, 25 bp, Homo sapien
cacgttggatcctagcctgttgact

SEQ ID NO: 5474770 - DNA, 25 bp, Homo sapien
accttcccacgatgcgtgctgtgca

SEQ ID NO: 5474771 - DNA, 25 bp, Homo sapien
gctgcgaagtggaccggcttggaag

SEQ ID NO: 5474772 - DNA, 25 bp, Homo sapien
tgcgaagtggaccggcttggaaggg

SEQ ID NO: 5474773 - DNA, 25 bp, Homo sapien
ggctgcgaagtggaccggcttggaa

SEQ ID NO: 5474774 - DNA, 25 bp, Homo sapien
tccgaggcaggaagccgagggaccc

SEQ ID NO: 5474775 - DNA, 25 bp, Homo sapien
aggcaggaagccgagggacccatgt

SEQ ID NO: 5474776 - DNA, 25 bp, Homo sapien
cgaggcaggaagccgagggacccat

SEQ ID NO: 5474777 - DNA, 25 bp, Homo sapien
cttccgaggcaggaagccgagggac

SEQ ID NO: 5474778 - DNA, 25 bp, Homo sapien
ctgggagtggaggacttcttgtgag

SEQ ID NO: 5474779 - DNA, 25 bp, Homo sapien
gagtggaggacttcttgtgagacat

SEQ ID NO: 5474780 - DNA, 25 bp, Homo sapien
ggagtggaggacttcttgtgagaca

SEQ ID NO: 5474781 - DNA, 25 bp, Homo sapien
gggagtggaggacttcttgtgagac

SEQ ID NO: 5474782 - DNA, 25 bp, Homo sapien
tgttccttcccatgaaagtttacaa

SEQ ID NO: 5474783 - DNA, 25 bp, Homo sapien
cttggtttgctatgatatcctcaat

SEQ ID NO: 5474784 - DNA, 25 bp, Homo sapien
ggtttgctatgatatcctcaataac

SEQ ID NO: 5474785 - DNA, 25 bp, Homo sapien
ctcttggtttgctatgatatcctca

SEQ ID NO: 5474786 - DNA, 25 bp, Homo sapien
cctcttggtttgctatgatatcctc

SEQ ID NO: 5474787 - DNA, 25 bp, Homo sapien
caggtcttcattgtactggagcact

SEQ ID NO: 5474788 - DNA, 25 bp, Homo sapien
aggtcttcattgtactggagcactt

SEQ ID NO: 5474789 - DNA, 25 bp, Homo sapien
ggtcttcattgtactggagcacttg

SEQ ID NO: 5474790 - DNA, 25 bp, Homo sapien
gcttgcatatgcataattgcagagg

SEQ ID NO: 5474791 - DNA, 25 bp, Homo sapien
catatgcataattgcagaggccagc

SEQ ID NO: 5474792 - DNA, 25 bp, Homo sapien
atcaacaccatctgcatgcatgggc

SEQ ID NO: 5474793 - DNA, 25 bp, Homo sapien
catgcatgggcatctttaggctgag

SEQ ID NO: 5474794 - DNA, 25 bp, Homo sapien
aataatagctgaccctccttcttca

SEQ ID NO: 5474795 - DNA, 25 bp, Homo sapien
ctgttgtatggtcttgtcagaaaaa

SEQ ID NO: 5474796 - DNA, 25 bp, Homo sapien
tgtatggtcttgtcagaaaaaataa

SEQ ID NO: 5474797 - DNA, 25 bp, Homo sapien
aaaaataatagctgaccctccttct

SEQ ID NO: 5474798 - DNA, 25 bp, Homo sapien
tctccctccctcgattttcagctgt

SEQ ID NO: 5474799 - DNA, 25 bp, Homo sapien
caccttggctgttggatttctccct

SEQ ID NO: 5474800 - DNA, 25 bp, Homo sapien
tccctccctcgattttcagctgtgt

SEQ ID NO: 5474801 - DNA, 25 bp, Homo sapien
tggatttctccctccctcgattttc

SEQ ID NO: 5474802 - DNA, 25 bp, Homo sapien
gaccacgtgatgagttccattttct

SEQ ID NO: 5474803 - DNA, 25 bp, Homo sapien
aaatcagcatccacttcccgcactt

SEQ ID NO: 5474804 - DNA, 25 bp, Homo sapien
tatttttcatgtgaccacgtgatga

SEQ ID NO: 5474805 - DNA, 25 bp, Homo sapien
gagtcctcacacagatagtccaggt

SEQ ID NO: 5474806 - DNA, 25 bp, Homo sapien
gagtcggcttggaccttgcctgttg

SEQ ID NO: 5474807 - DNA, 25 bp, Homo sapien
caatcgaggagtcggcttggacctt

SEQ ID NO: 5474808 - DNA, 25 bp, Homo sapien
tttggtggtttggatgcccaatcga

SEQ ID NO: 5474809 - DNA, 25 bp, Homo sapien
ggatgcccaatcgaggagtcggctt

SEQ ID NO: 5474810 - DNA, 25 bp, Homo sapien
cccgagccccacagtccggaggcgg

SEQ ID NO: 5474811 - DNA, 25 bp, Homo sapien
ccacccgagccccacagtccggagg

SEQ ID NO: 5474812 - DNA, 25 bp, Homo sapien
acccgagccccacagtccggaggcg

SEQ ID NO: 5474813 - DNA, 25 bp, Homo sapien
ttccacccgagccccacagtccgga

SEQ ID NO: 5474814 - DNA, 25 bp, Homo sapien
tgtgaccatcagtctccctctgtct

SEQ ID NO: 5474815 - DNA, 25 bp, Homo sapien
gcatgtgaccatcagtctccctctg

SEQ ID NO: 5474816 - DNA, 25 bp, Homo sapien
tctgcatgtgaccatcagtctccct

SEQ ID NO: 5474817 - DNA, 25 bp, Homo sapien
ctctctgcatgtgaccatcagtctc

SEQ ID NO: 5474818 - DNA, 25 bp, Homo sapien
taactacacagaaccatcactatgc

SEQ ID NO: 5474819 - DNA, 25 bp, Homo sapien
tgtccttagaagtcctcagagagaa

SEQ ID NO: 5474820 - DNA, 25 bp, Homo sapien
gatatctattgtgaaccttcaggtg

SEQ ID NO: 5474821 - DNA, 25 bp, Homo sapien
cagtaactaggcaggtttttagcca

SEQ ID NO: 5474822 - DNA, 25 bp, Homo sapien
aaaatgggcaatgggctgctgggga

SEQ ID NO: 5474823 - DNA, 25 bp, Homo sapien
gaagtgatgcccaggtgctcccagc

SEQ ID NO: 5474824 - DNA, 25 bp, Homo sapien
tttgaccccacagcatcagagaagt

SEQ ID NO: 5474825 - DNA, 25 bp, Homo sapien
ggcattcgctggcagaaaatgggca

SEQ ID NO: 5474826 - DNA, 25 bp, Homo sapien
cagataagtgtaatccaattaagga

SEQ ID NO: 5474827 - DNA, 25 bp, Homo sapien
gataagtgtaatccaattaaggaaa

SEQ ID NO: 5474828 - DNA, 25 bp, Homo sapien
agataagtgtaatccaattaaggaa

SEQ ID NO: 5474829 - DNA, 25 bp, Homo sapien
agggctggatcttcaaagggcgtcc

SEQ ID NO: 5474830 - DNA, 25 bp, Homo sapien
tggactccaaactgtcaggtcaagg

SEQ ID NO: 5474831 - DNA, 25 bp, Homo sapien
gaggacgactctaactggactccaa

SEQ ID NO: 5474832 - DNA, 25 bp, Homo sapien
aaagtgttctcaagggacaggccgg

SEQ ID NO: 5474833 - DNA, 25 bp, Homo sapien
tgggacaacggagagcgtgctccca

SEQ ID NO: 5474834 - DNA, 25 bp, Homo sapien
ctgggacaacggagagcgtgctccc

SEQ ID NO: 5474835 - DNA, 25 bp, Homo sapien
acctcaggtggggaagcaactcaca

SEQ ID NO: 5474836 - DNA, 25 bp, Homo sapien
cttttgtcaaaagatggttgccacg

SEQ ID NO: 5474837 - DNA, 25 bp, Homo sapien
ggaagcaactcacatccacggccag

SEQ ID NO: 5474838 - DNA, 25 bp, Homo sapien
cccttttgtcaaaagatggttgcca

SEQ ID NO: 5474839 - DNA, 25 bp, Homo sapien
atggaggggacctgctggataggcc

SEQ ID NO: 5474840 - DNA, 25 bp, Homo sapien
acctgctggataggcccctgagacc

SEQ ID NO: 5474841 - DNA, 25 bp, Homo sapien
gggctgatggtagcaaaatggaggg

SEQ ID NO: 5474842 - DNA, 25 bp, Homo sapien
gggacctgctggataggcccctgag

SEQ ID NO: 5474843 - DNA, 25 bp, Homo sapien
ttcgatgaaccaatgccggatctgg

SEQ ID NO: 5474844 - DNA, 25 bp, Homo sapien
gcactgacttcattaaagagaggag

SEQ ID NO: 5474845 - DNA, 25 bp, Homo sapien
cttttcagcctggattactgtagca

SEQ ID NO: 5474846 - DNA, 25 bp, Homo sapien
ggttctccttgatatccacgccttc

SEQ ID NO: 5474847 - DNA, 25 bp, Homo sapien
cttacgttgatggaaacgtcgccaa

SEQ ID NO: 5474848 - DNA, 25 bp, Homo sapien
tacgttgatggaaacgtcgccaaac

SEQ ID NO: 5474849 - DNA, 25 bp, Homo sapien
ccttacgttgatggaaacgtcgcca

SEQ ID NO: 5474850 - DNA, 25 bp, Homo sapien
ttccttacgttgatggaaacgtcgc

SEQ ID NO: 5474851 - DNA, 25 bp, Homo sapien
ttctgaatgcggagtgcagcagccc

SEQ ID NO: 5474852 - DNA, 25 bp, Homo sapien
cttctgaatgcggagtgcagcagcc

SEQ ID NO: 5474853 - DNA, 25 bp, Homo sapien
gcagcccaggtatctgtcactttct

SEQ ID NO: 5474854 - DNA, 25 bp, Homo sapien
tgcagcagcccaggtatctgtcact

SEQ ID NO: 5474855 - DNA, 25 bp, Homo sapien
taatttaacagcctcatcgaaaggg

SEQ ID NO: 5474856 - DNA, 25 bp, Homo sapien
gcagatagatttgcttcatgaataa

SEQ ID NO: 5474857 - DNA, 25 bp, Homo sapien
ggattgctttgctctatattcttgc

SEQ ID NO: 5474858 - DNA, 25 bp, Homo sapien
gaataaagcccttaggcgaccttgc

SEQ ID NO: 5474859 - DNA, 25 bp, Homo sapien
ctaatatttgagcaagaattttctc

SEQ ID NO: 5474860 - DNA, 25 bp, Homo sapien
cagatgtatctattccgctgtccgc

SEQ ID NO: 5474861 - DNA, 25 bp, Homo sapien
gtccgctaatatttgagcaagaatt

SEQ ID NO: 5474862 - DNA, 25 bp, Homo sapien
catgtcagatgtatctattccgctg

SEQ ID NO: 5474863 - DNA, 25 bp, Homo sapien
tcactgctcttggtgcttggtggcc

SEQ ID NO: 5474864 - DNA, 25 bp, Homo sapien
tggccccatccccacggcaacaatg

SEQ ID NO: 5474865 - DNA, 25 bp, Homo sapien
ttgtcactgctcttggtgcttggtg

SEQ ID NO: 5474866 - DNA, 25 bp, Homo sapien
ctgctcttggtgcttggtggcccca

SEQ ID NO: 5474867 - DNA, 25 bp, Homo sapien
gaactggtcgtagacattctctagg

SEQ ID NO: 5474868 - DNA, 25 bp, Homo sapien
catactttacgtagaaggtggctaa

SEQ ID NO: 5474869 - DNA, 25 bp, Homo sapien
catcgaaataatggaactccgtgag

SEQ ID NO: 5474870 - DNA, 25 bp, Homo sapien
tttatcgagtaaagcaccgagggct

SEQ ID NO: 5474871 - DNA, 25 bp, Homo sapien
gcctggcgtcctgagtccaggttgg

SEQ ID NO: 5474872 - DNA, 25 bp, Homo sapien
agaaccatccaggggagcccagtcg

SEQ ID NO: 5474873 - DNA, 25 bp, Homo sapien
gccctcattggcttcagttgggtca

SEQ ID NO: 5474874 - DNA, 25 bp, Homo sapien
ttcagttgggtcagagaagcaggac

SEQ ID NO: 5474875 - DNA, 25 bp, Homo sapien
tcattggcttcagttgggtcagaga

SEQ ID NO: 5474876 - DNA, 25 bp, Homo sapien
tcctggtggcttgagccttccgggt

SEQ ID NO: 5474877 - DNA, 25 bp, Homo sapien
ggagctgacccataactggaatttt

SEQ ID NO: 5474878 - DNA, 25 bp, Homo sapien
gctgacccataactggaatttttgg

SEQ ID NO: 5474879 - DNA, 25 bp, Homo sapien
ccaactgcagtctgtctggggaatc

SEQ ID NO: 5474880 - DNA, 25 bp, Homo sapien
tgggggagaccaggcaaagattccc

SEQ ID NO: 5474881 - DNA, 25 bp, Homo sapien
ctgggggagaccaggcaaagattcc

SEQ ID NO: 5474882 - DNA, 25 bp, Homo sapien
gagagacggcgtcatctccttccac

SEQ ID NO: 5474883 - DNA, 25 bp, Homo sapien
gaccctcttccctcgagactgtctc

SEQ ID NO: 5474884 - DNA, 25 bp, Homo sapien
acactggaccgccagggacctgggc

SEQ ID NO: 5474885 - DNA, 25 bp, Homo sapien
ctgttttcctcagcgctgagagacg

SEQ ID NO: 5474886 - DNA, 25 bp, Homo sapien
gaagcagatactctatcccgaggca

SEQ ID NO: 5474887 - DNA, 25 bp, Homo sapien
tcacaagaagcagatactctatccc

SEQ ID NO: 5474888 - DNA, 25 bp, Homo sapien
gcagatactctatcccgaggcatat

SEQ ID NO: 5474889 - DNA, 25 bp, Homo sapien
tactctatcccgaggcatatttgaa

SEQ ID NO: 5474890 - DNA, 25 bp, Homo sapien
ctcgccctccgggaagctcttccgt

SEQ ID NO: 5474891 - DNA, 25 bp, Homo sapien
ccctccgggaagctcttccgttgct

SEQ ID NO: 5474892 - DNA, 25 bp, Homo sapien
cgccctccgggaagctcttccgttg

SEQ ID NO: 5474893 - DNA, 25 bp, Homo sapien
ttcctcgccctccgggaagctcttc

SEQ ID NO: 5474894 - DNA, 25 bp, Homo sapien
agggcactaccaggagctacagagg

SEQ ID NO: 5474895 - DNA, 25 bp, Homo sapien
ggagaaaccaggactgcgagaatct

SEQ ID NO: 5474896 - DNA, 25 bp, Homo sapien
caggcgcagagaggtgtttcactcc

SEQ ID NO: 5474897 - DNA, 25 bp, Homo sapien
agaatcttctgcttcgggcaggaaa

SEQ ID NO: 5474898 - DNA, 25 bp, Homo sapien
gacgcggccctagcaacggaaacgc

SEQ ID NO: 5474899 - DNA, 25 bp, Homo sapien
tcaggtgggcgcgacgcggccctag

SEQ ID NO: 5474900 - DNA, 25 bp, Homo sapien
tagcaacggaaacgccgcgcctgcg

SEQ ID NO: 5474901 - DNA, 25 bp, Homo sapien
ttcggccactcaggtgggcgcgacg

SEQ ID NO: 5474902 - DNA, 25 bp, Homo sapien
agttccaacacgttcctcaggtagg

SEQ ID NO: 5474903 - DNA, 25 bp, Homo sapien
cacgttcctcaggtaggcctgcaga

SEQ ID NO: 5474904 - DNA, 25 bp, Homo sapien
ctaggcacagtgaaagggaagtgga

SEQ ID NO: 5474905 - DNA, 25 bp, Homo sapien
gattcagttccaacacgttcctcag

SEQ ID NO: 5474906 - DNA, 25 bp, Homo sapien
tctgaggtaagcagatgtctgcagc

SEQ ID NO: 5474907 - DNA, 25 bp, Homo sapien
tacagctccacaaaggtagaccctg

SEQ ID NO: 5474908 - DNA, 25 bp, Homo sapien
cagctgtgtgttagatacagctcca

SEQ ID NO: 5474909 - DNA, 25 bp, Homo sapien
gaggtaagcagatgtctgcagctgt

SEQ ID NO: 5474910 - DNA, 25 bp, Homo sapien
ctttccatcggaagcatttgcaggt

SEQ ID NO: 5474911 - DNA, 25 bp, Homo sapien
caggttgtaacacttctcatcccac

SEQ ID NO: 5474912 - DNA, 25 bp, Homo sapien
gcccaaaggctctttccatcggaag

SEQ ID NO: 5474913 - DNA, 25 bp, Homo sapien
agacagcctggttgggcgagcactc

SEQ ID NO: 5474914 - DNA, 25 bp, Homo sapien
aactctgaacagtcgtacagtggcc

SEQ ID NO: 5474915 - DNA, 25 bp, Homo sapien
gaatcttctagcgtgtggtccatgg

SEQ ID NO: 5474916 - DNA, 25 bp, Homo sapien
gatcagatttaaaggcaccaaactc

SEQ ID NO: 5474917 - DNA, 25 bp, Homo sapien
tggagatgcacagccctacaggaaa

SEQ ID NO: 5474918 - DNA, 25 bp, Homo sapien
gacgggaacaagaaaggcttctgca

SEQ ID NO: 5474919 - DNA, 25 bp, Homo sapien
agagctctgtgatatgacgggaaca

SEQ ID NO: 5474920 - DNA, 25 bp, Homo sapien
cgttgagttcaagcagagagctctg

SEQ ID NO: 5474921 - DNA, 25 bp, Homo sapien
gatgagaagccgtgacgttgagttc

SEQ ID NO: 5474922 - DNA, 25 bp, Homo sapien
tatgcatcgtatgatcagtggcttc

SEQ ID NO: 5474923 - DNA, 25 bp, Homo sapien
gaaaatgactgctaggtctggaggc

SEQ ID NO: 5474924 - DNA, 25 bp, Homo sapien
gcagaatgaagacggtccccgggat

SEQ ID NO: 5474925 - DNA, 25 bp, Homo sapien
cctgaaggcctgagtcgatgggaat

SEQ ID NO: 5474926 - DNA, 25 bp, Homo sapien
taaagtctgcgagaaaggaaatgaa

SEQ ID NO: 5474927 - DNA, 25 bp, Homo sapien
aaaacatacggcgtaatgagaattg

SEQ ID NO: 5474928 - DNA, 25 bp, Homo sapien
tttaaagtctgcgagaaaggaaatg

SEQ ID NO: 5474929 - DNA, 25 bp, Homo sapien
tgagaattgaaaagccccaacttta

SEQ ID NO: 5474930 - DNA, 25 bp, Homo sapien
gcagagagtgcgcagagcaccagag

SEQ ID NO: 5474931 - DNA, 25 bp, Homo sapien
agcagagagtgcgcagagcaccaga

SEQ ID NO: 5474932 - DNA, 25 bp, Homo sapien
cagcagagagtgcgcagagcaccag

SEQ ID NO: 5474933 - DNA, 25 bp, Homo sapien
gcagcagagagtgcgcagagcacca

SEQ ID NO: 5474934 - DNA, 25 bp, Homo sapien
tcatacgatcattctggagtgtcat

SEQ ID NO: 5474935 - DNA, 25 bp, Homo sapien
tagcttattaaaagctcgtgcacat

SEQ ID NO: 5474936 - DNA, 25 bp, Homo sapien
taaagaggtcatacgatcattctgg

SEQ ID NO: 5474937 - DNA, 25 bp, Homo sapien
ggatgagtttcttgccaactagctt

SEQ ID NO: 5474938 - DNA, 25 bp, Homo sapien
attgccacagccaaactgcagcaac

SEQ ID NO: 5474939 - DNA, 25 bp, Homo sapien
tattgccacagccaaactgcagcaa

SEQ ID NO: 5474940 - DNA, 25 bp, Homo sapien
ctattgccacagccaaactgcagca

SEQ ID NO: 5474941 - DNA, 25 bp, Homo sapien
cacgtaatgtggcagtatggctttg

SEQ ID NO: 5474942 - DNA, 25 bp, Homo sapien
ttccatccctaaggccatgcgaggg

SEQ ID NO: 5474943 - DNA, 25 bp, Homo sapien
tggccattctgcacagtgaaggcgg

SEQ ID NO: 5474944 - DNA, 25 bp, Homo sapien
tatggctttgcaagacgaggtccgc

SEQ ID NO: 5474945 - DNA, 25 bp, Homo sapien
tcttcacgtcatcgggcagtaaaat

SEQ ID NO: 5474946 - DNA, 25 bp, Homo sapien
cacgtcatcgggcagtaaaatacat

SEQ ID NO: 5474947 - DNA, 25 bp, Homo sapien
ctgatgtgtcaacattcttcacgtc

SEQ ID NO: 5474948 - DNA, 25 bp, Homo sapien
caacattcttcacgtcatcgggcag

SEQ ID NO: 5474949 - DNA, 25 bp, Homo sapien
aaggaagctcccaattccctggcca

SEQ ID NO: 5474950 - DNA, 25 bp, Homo sapien
ccctggccacggttgaaggcaccca

SEQ ID NO: 5474951 - DNA, 25 bp, Homo sapien
aagctcccaattccctggccacggt

SEQ ID NO: 5474952 - DNA, 25 bp, Homo sapien
cctggccacggttgaaggcacccat

SEQ ID NO: 5474953 - DNA, 25 bp, Homo sapien
tgggcgagctcacgtgcaaagtcac

SEQ ID NO: 5474954 - DNA, 25 bp, Homo sapien
tgaacctggccattgccgacctgtg

SEQ ID NO: 5474955 - DNA, 25 bp, Homo sapien
tccgtggtggtctgggtgaatatcc

SEQ ID NO: 5474956 - DNA, 25 bp, Homo sapien
aagatcatcttctcctacgtggtgg

SEQ ID NO: 5474957 - DNA, 25 bp, Homo sapien
taccggcacgggatatggaacgaaa

SEQ ID NO: 5474958 - DNA, 25 bp, Homo sapien
tgttctggactgcaaatctgcacac

SEQ ID NO: 5474959 - DNA, 25 bp, Homo sapien
gaggcatagtgctgacatatattca

SEQ ID NO: 5474960 - DNA, 25 bp, Homo sapien
cacaacgaacagttgcatttcagag

SEQ ID NO: 5474961 - DNA, 25 bp, Homo sapien
tgctgcttttgcctcgctggatggt

SEQ ID NO: 5474962 - DNA, 25 bp, Homo sapien
tcaggcttgtgtgtctacgtggatg

SEQ ID NO: 5474963 - DNA, 25 bp, Homo sapien
gaggacctgtcgatccttctgcagg

SEQ ID NO: 5474964 - DNA, 25 bp, Homo sapien
cctcgctggatggtgagactggtct

SEQ ID NO: 5474965 - DNA, 25 bp, Homo sapien
gggcaccgtggcctactgtcccaga

SEQ ID NO: 5474966 - DNA, 25 bp, Homo sapien
cctactgtcccagaccctccgacgt

SEQ ID NO: 5474967 - DNA, 25 bp, Homo sapien
tgtcccagaccctccgacgtccctg

SEQ ID NO: 5474968 - DNA, 25 bp, Homo sapien
agggcaccgtggcctactgtcccag

SEQ ID NO: 5474969 - DNA, 25 bp, Homo sapien
ttgcgtttctcagggccgttgttaa

SEQ ID NO: 5474970 - DNA, 25 bp, Homo sapien
cgttgcgtttctcagggccgttgtt

SEQ ID NO: 5474971 - DNA, 25 bp, Homo sapien
tctcagggccgttgttaaaagtgtg

SEQ ID NO: 5474972 - DNA, 25 bp, Homo sapien
gccgttgttaaaagtgtgaattgtg

SEQ ID NO: 5474973 - DNA, 25 bp, Homo sapien
gttgacaaacactgatgttgtcatc

SEQ ID NO: 5474974 - DNA, 25 bp, Homo sapien
aagttgacaaacactgatgttgtca

SEQ ID NO: 5474975 - DNA, 25 bp, Homo sapien
tcagaagttgacaaacactgatgtt

SEQ ID NO: 5474976 - DNA, 25 bp, Homo sapien
tgttgtcatcattgtgcggtaagag

SEQ ID NO: 5474977 - DNA, 25 bp, Homo sapien
gtcacccttcacacgaaggctggag

SEQ ID NO: 5474978 - DNA, 25 bp, Homo sapien
tctgacctcgtcttgtccatccaag

SEQ ID NO: 5474979 - DNA, 25 bp, Homo sapien
tgtctctctcgtgtctcctcgtcag

SEQ ID NO: 5474980 - DNA, 25 bp, Homo sapien
tagttctcccgaaagtgcagcactg

SEQ ID NO: 5474981 - DNA, 25 bp, Homo sapien
agaggctcttgcacctaataagcaa

SEQ ID NO: 5474982 - DNA, 25 bp, Homo sapien
atgatggctgtttttgttaacccct

SEQ ID NO: 5474983 - DNA, 25 bp, Homo sapien
gggcctatccctttcaacacagtag

SEQ ID NO: 5474984 - DNA, 25 bp, Homo sapien
aattgaatggatgcagggagatgat

SEQ ID NO: 5474985 - DNA, 25 bp, Homo sapien
ttgtccactgcttgtccggcaacct

SEQ ID NO: 5474986 - DNA, 25 bp, Homo sapien
ctgagcgactttttgacctgactgt

SEQ ID NO: 5474987 - DNA, 25 bp, Homo sapien
gccgagaagagatgggaaccaagtt

SEQ ID NO: 5474988 - DNA, 25 bp, Homo sapien
gactttttgacctgactgtccctgg

SEQ ID NO: 5474989 - DNA, 25 bp, Homo sapien
ctttggcaacgccaggacagggaag

SEQ ID NO: 5474990 - DNA, 25 bp, Homo sapien
tggtcgtgacaatacagaagcgagg

SEQ ID NO: 5474991 - DNA, 25 bp, Homo sapien
cacaatgtgttggtcgtgacaatac

SEQ ID NO: 5474992 - DNA, 25 bp, Homo sapien
tggaaagtgaagctccacaatgtgt

SEQ ID NO: 5474993 - DNA, 25 bp, Homo sapien
gctccacaatgtgttggtcgtgaca

SEQ ID NO: 5474994 - DNA, 25 bp, Homo sapien
tcactttgccatttagtccagtagg

SEQ ID NO: 5474995 - DNA, 25 bp, Homo sapien
cttttaacacagtggtcacagaagc

SEQ ID NO: 5474996 - DNA, 25 bp, Homo sapien
cagtaggttcagctcgaaatccttt

SEQ ID NO: 5474997 - DNA, 25 bp, Homo sapien
ttatctgtcgttgttcactttgcca

SEQ ID NO: 5474998 - DNA, 25 bp, Homo sapien
ccttccaaggttggcgttggctgag

SEQ ID NO: 5474999 - DNA, 25 bp, Homo sapien
ttctcttgaagtccttccaaggttg

SEQ ID NO: 5475000 - DNA, 25 bp, Homo sapien
atctggctgtggccacattgcccct

SEQ ID NO: 5475001 - DNA, 25 bp, Homo sapien
tgaagtccttccaaggttggcgttg

SEQ ID NO: 5475002 - DNA, 25 bp, Homo sapien
ttagtgtaaattgccccagactttc

SEQ ID NO: 5475003 - DNA, 25 bp, Homo sapien
cagatttattgcaactttcttagtg

SEQ ID NO: 5475004 - DNA, 25 bp, Homo sapien
tccgtggttttcagatttattgcaa

SEQ ID NO: 5475005 - DNA, 25 bp, Homo sapien
gtattcctgcttccgtggttttcag

SEQ ID NO: 5475006 - DNA, 25 bp, Homo sapien
tctgggcctctagataggtgagggt

SEQ ID NO: 5475007 - DNA, 25 bp, Homo sapien
gtgagggtgaggaacgccttaacca

SEQ ID NO: 5475008 - DNA, 25 bp, Homo sapien
gtgaggaacgccttaaccagtgctt

SEQ ID NO: 5475009 - DNA, 25 bp, Homo sapien
ctagataggtgagggtgaggaacgc

SEQ ID NO: 5475010 - DNA, 25 bp, Homo sapien
tttgtgtagccctatctgcctttcc

SEQ ID NO: 5475011 - DNA, 25 bp, Homo sapien
cttctgctctaacccgattctgttg

SEQ ID NO: 5475012 - DNA, 25 bp, Homo sapien
gagggctggtgcgtcccttgtcttc

SEQ ID NO: 5475013 - DNA, 25 bp, Homo sapien
ttgtcttctcgtcaccatcccacag

SEQ ID NO: 5475014 - DNA, 25 bp, Homo sapien
tgttttgtagcccactaactctggg

SEQ ID NO: 5475015 - DNA, 25 bp, Homo sapien
gcttcacgaagtccaagtaaggagc

SEQ ID NO: 5475016 - DNA, 25 bp, Homo sapien
tcatcagccattctagagtgagtgc

SEQ ID NO: 5475017 - DNA, 25 bp, Homo sapien
gaaactgattacacatgtgaccagg

SEQ ID NO: 5475018 - DNA, 25 bp, Homo sapien
tgttgcccttgtgactggatccatg

SEQ ID NO: 5475019 - DNA, 25 bp, Homo sapien
gttgcccttgtgactggatccatgt

SEQ ID NO: 5475020 - DNA, 25 bp, Homo sapien
gcccttgtgactggatccatgtcca

SEQ ID NO: 5475021 - DNA, 25 bp, Homo sapien
cttgttgcccttgtgactggatcca

SEQ ID NO: 5475022 - DNA, 25 bp, Homo sapien
ctgggtgttcaccattatggacttc

SEQ ID NO: 5475023 - DNA, 25 bp, Homo sapien
gcaatgtagcctgggtgttcaccat

SEQ ID NO: 5475024 - DNA, 25 bp, Homo sapien
ctggaaccaggactgcaatgtagcc

SEQ ID NO: 5475025 - DNA, 25 bp, Homo sapien
ctgcggaaggagtgtagaggtgtga

SEQ ID NO: 5475026 - DNA, 25 bp, Homo sapien
gggaccaggccatttcagggatgtc

SEQ ID NO: 5475027 - DNA, 25 bp, Homo sapien
ggaccaggccatttcagggatgtcc

SEQ ID NO: 5475028 - DNA, 25 bp, Homo sapien
gagggaccaggccatttcagggatg

SEQ ID NO: 5475029 - DNA, 25 bp, Homo sapien
agggaccaggccatttcagggatgt

SEQ ID NO: 5475030 - DNA, 25 bp, Homo sapien
ggcttctagaatagaccgtgcatct

SEQ ID NO: 5475031 - DNA, 25 bp, Homo sapien
tagtctcggcttctagaatagaccg

SEQ ID NO: 5475032 - DNA, 25 bp, Homo sapien
cgctgtgggacagtagtggccggga

SEQ ID NO: 5475033 - DNA, 25 bp, Homo sapien
tagtggccgggatagtctcggcttc

SEQ ID NO: 5475034 - DNA, 25 bp, Homo sapien
cctggtcccacaatcaatgatgatg

SEQ ID NO: 5475035 - DNA, 25 bp, Homo sapien
cagggacaaggccagtgcacactgg

SEQ ID NO: 5475036 - DNA, 25 bp, Homo sapien
aggccctggtcccacaatcaatgat

SEQ ID NO: 5475037 - DNA, 25 bp, Homo sapien
gccctggtcccacaatcaatgatga

SEQ ID NO: 5475038 - DNA, 25 bp, Homo sapien
tgtgagtccacgttcattcccaagt

SEQ ID NO: 5475039 - DNA, 25 bp, Homo sapien
ggcaggccggaagcctcctttttga

SEQ ID NO: 5475040 - DNA, 25 bp, Homo sapien
tctccacaagatccctgttcagcgg

SEQ ID NO: 5475041 - DNA, 25 bp, Homo sapien
cagtcagggagctaggtggcttccc

SEQ ID NO: 5475042 - DNA, 25 bp, Homo sapien
tggcccagaaatacgtcttctccat

SEQ ID NO: 5475043 - DNA, 25 bp, Homo sapien
ttggcccagaaatacgtcttctcca

SEQ ID NO: 5475044 - DNA, 25 bp, Homo sapien
acttggcccagaaatacgtcttctc

SEQ ID NO: 5475045 - DNA, 25 bp, Homo sapien
acacttggcccagaaatacgtcttc

SEQ ID NO: 5475046 - DNA, 25 bp, Homo sapien
aggtcactgccccaggaggtactgc

SEQ ID NO: 5475047 - DNA, 25 bp, Homo sapien
tccaggtcactgccccaggaggtac

SEQ ID NO: 5475048 - DNA, 25 bp, Homo sapien
caggtcactgccccaggaggtactg

SEQ ID NO: 5475049 - DNA, 25 bp, Homo sapien
ccaggtcactgccccaggaggtact

SEQ ID NO: 5475050 - DNA, 25 bp, Homo sapien
tttctttggcaatgctggctgtgct

SEQ ID NO: 5475051 - DNA, 25 bp, Homo sapien
ttaaggagtgaatgccatgctgctc

SEQ ID NO: 5475052 - DNA, 25 bp, Homo sapien
ggtgtctttctgtaggagattccca

SEQ ID NO: 5475053 - DNA, 25 bp, Homo sapien
tgaatgccatgctgctctgactatc

SEQ ID NO: 5475054 - DNA, 25 bp, Homo sapien
gaaactgcccctgtcattctgctgg

SEQ ID NO: 5475055 - DNA, 25 bp, Homo sapien
gccacacaagttggtggtgtttaaa

SEQ ID NO: 5475056 - DNA, 25 bp, Homo sapien
tggtggtgtttaaattcactgtgtt

SEQ ID NO: 5475057 - DNA, 25 bp, Homo sapien
ggtgataacttctccgatattccat

SEQ ID NO: 5475058 - DNA, 25 bp, Homo sapien
ccctgtcattgattcgtctcccatg

SEQ ID NO: 5475059 - DNA, 25 bp, Homo sapien
caagaacgaaagcataaatgggttc

SEQ ID NO: 5475060 - DNA, 25 bp, Homo sapien
cccatgcgcatagctcctgggtgac

SEQ ID NO: 5475061 - DNA, 25 bp, Homo sapien
tttataattaattccacaagaacga

SEQ ID NO: 5475062 - DNA, 25 bp, Homo sapien
ctcctccggtttgattgtctttgca

SEQ ID NO: 5475063 - DNA, 25 bp, Homo sapien
ctccggtttgattgtctttgcacca

SEQ ID NO: 5475064 - DNA, 25 bp, Homo sapien
ccggtttgattgtctttgcaccaaa

SEQ ID NO: 5475065 - DNA, 25 bp, Homo sapien
cctcctccggtttgattgtctttgc

SEQ ID NO: 5475066 - DNA, 25 bp, Homo sapien
tcacatgtgtgtataggaggcaggt

SEQ ID NO: 5475067 - DNA, 25 bp, Homo sapien
cggtggtcacacttggggctgagga

SEQ ID NO: 5475068 - DNA, 25 bp, Homo sapien
gtctttcccacgggcacaggagccc

SEQ ID NO: 5475069 - DNA, 25 bp, Homo sapien
tgctgaatgagcccatgctgagtgt

SEQ ID NO: 5475070 - DNA, 25 bp, Homo sapien
aacaccaagcgtggcctgaggatct

SEQ ID NO: 5475071 - DNA, 25 bp, Homo sapien
cagggaagaagacacggccacaaac

SEQ ID NO: 5475072 - DNA, 25 bp, Homo sapien
acacggccacaaacaccaagcgtgg

SEQ ID NO: 5475073 - DNA, 25 bp, Homo sapien
ccacaaacaccaagcgtggcctgag

SEQ ID NO: 5475074 - DNA, 25 bp, Homo sapien
cagtggggctcccaaatcgccggct

SEQ ID NO: 5475075 - DNA, 25 bp, Homo sapien
gggctcccaaatcgccggctctggg

SEQ ID NO: 5475076 - DNA, 25 bp, Homo sapien
ccaaatcgccggctctggggcatgt

SEQ ID NO: 5475077 - DNA, 25 bp, Homo sapien
tgaccagtggggctcccaaatcgcc

SEQ ID NO: 5475078 - DNA, 25 bp, Homo sapien
caaagttctgctcgccattgggctg

SEQ ID NO: 5475079 - DNA, 25 bp, Homo sapien
tcacttgccggagaaggcatcggca

SEQ ID NO: 5475080 - DNA, 25 bp, Homo sapien
attgggctgctgagacccgaccggc

SEQ ID NO: 5475081 - DNA, 25 bp, Homo sapien
gagcttctgaccaaggggctgacaa

SEQ ID NO: 5475082 - DNA, 25 bp, Homo sapien
ggaaagtcagccatcccatcagcct

SEQ ID NO: 5475083 - DNA, 25 bp, Homo sapien
cctccaggcttaaatgggaagccat

SEQ ID NO: 5475084 - DNA, 25 bp, Homo sapien
ttgtcagtgcttggatggggtccca

SEQ ID NO: 5475085 - DNA, 25 bp, Homo sapien
cttcctcagcctgcatggaagctcc

SEQ ID NO: 5475086 - DNA, 25 bp, Homo sapien
agtcgggccgatggtcaacatgagc

SEQ ID NO: 5475087 - DNA, 25 bp, Homo sapien
cccttgtctgtgacatttctgctgt

SEQ ID NO: 5475088 - DNA, 25 bp, Homo sapien
tgcagtcgggccgatggtcaacatg

SEQ ID NO: 5475089 - DNA, 25 bp, Homo sapien
ggcccttgtctgtgacatttctgct

SEQ ID NO: 5475090 - DNA, 25 bp, Homo sapien
ccctcagtgtggaggttttctggag

SEQ ID NO: 5475091 - DNA, 25 bp, Homo sapien
gacgacagctctccttgtctgcagc

SEQ ID NO: 5475092 - DNA, 25 bp, Homo sapien
catgacccacgtctgcttgttctct

SEQ ID NO: 5475093 - DNA, 25 bp, Homo sapien
cagacagacgacagctctccttgtc

SEQ ID NO: 5475094 - DNA, 25 bp, Homo sapien
gcagcccagtctgaaatccgctggt

SEQ ID NO: 5475095 - DNA, 25 bp, Homo sapien
cccagtctgaaatccgctggtggcc

SEQ ID NO: 5475096 - DNA, 25 bp, Homo sapien
cggcagcccagtctgaaatccgctg

SEQ ID NO: 5475097 - DNA, 25 bp, Homo sapien
acccggcagcccagtctgaaatccg

SEQ ID NO: 5475098 - DNA, 25 bp, Homo sapien
aatggcctcgatcccatcgcctcgc

SEQ ID NO: 5475099 - DNA, 25 bp, Homo sapien
ggaaggcaccaccaatggcctcgat

SEQ ID NO: 5475100 - DNA, 25 bp, Homo sapien
gggacaggaaggcaccaccaatggc

SEQ ID NO: 5475101 - DNA, 25 bp, Homo sapien
ccaatggcctcgatcccatcgcctc

SEQ ID NO: 5475102 - DNA, 25 bp, Homo sapien
ttgctgctgccgtgaagcccagttc

SEQ ID NO: 5475103 - DNA, 25 bp, Homo sapien
ccagttccccagctgaattgggcat

SEQ ID NO: 5475104 - DNA, 25 bp, Homo sapien
tgtgctcggttgctgctgccgtgaa

SEQ ID NO: 5475105 - DNA, 25 bp, Homo sapien
tgattttgctgtgctcggttgctgc

SEQ ID NO: 5475106 - DNA, 25 bp, Homo sapien
tttgcttattagtgttagttgacac

SEQ ID NO: 5475107 - DNA, 25 bp, Homo sapien
agttccctccttgagcaaggttgtc

SEQ ID NO: 5475108 - DNA, 25 bp, Homo sapien
agcaaaagtgttagttccctccttg

SEQ ID NO: 5475109 - DNA, 25 bp, Homo sapien
tagttgacacttacaggtcagagca

SEQ ID NO: 5475110 - DNA, 25 bp, Homo sapien
catagcccggatcagagagcaaggc

SEQ ID NO: 5475111 - DNA, 25 bp, Homo sapien
cttcaggaagtcatagcccggatca

SEQ ID NO: 5475112 - DNA, 25 bp, Homo sapien
aggctgggtccatgcgtctgcgaat

SEQ ID NO: 5475113 - DNA, 25 bp, Homo sapien
caaggcagacaccacggctatgatg

SEQ ID NO: 5475114 - DNA, 25 bp, Homo sapien
ctggaaaatagaaaggctgccatca

SEQ ID NO: 5475115 - DNA, 25 bp, Homo sapien
tctgcagatcagagggactaagatg

SEQ ID NO: 5475116 - DNA, 25 bp, Homo sapien
gatcaaagaaacgtgagaaaaggaa

SEQ ID NO: 5475117 - DNA, 25 bp, Homo sapien
aatagaaaggctgccatcaacaggc

SEQ ID NO: 5475118 - DNA, 25 bp, Homo sapien
cacaggcacaaatccgcaggcatgg

SEQ ID NO: 5475119 - DNA, 25 bp, Homo sapien
acaggcacaaatccgcaggcatgga

SEQ ID NO: 5475120 - DNA, 25 bp, Homo sapien
aaccacaggcacaaatccgcaggca

SEQ ID NO: 5475121 - DNA, 25 bp, Homo sapien
gcctgtctgagcatgaggacctcca

SEQ ID NO: 5475122 - DNA, 25 bp, Homo sapien
tccttgatggcttgagggacagctt

SEQ ID NO: 5475123 - DNA, 25 bp, Homo sapien
tgatggcttgagggacagcttggca

SEQ ID NO: 5475124 - DNA, 25 bp, Homo sapien
ccttgatggcttgagggacagcttg

SEQ ID NO: 5475125 - DNA, 25 bp, Homo sapien
ttgatggcttgagggacagcttggc

SEQ ID NO: 5475126 - DNA, 25 bp, Homo sapien
tctctggcagaacacaagctgttta

SEQ ID NO: 5475127 - DNA, 25 bp, Homo sapien
cactgggccatcactgtgtccagaa

SEQ ID NO: 5475128 - DNA, 25 bp, Homo sapien
ggcagccactgggccatcactgtgt

SEQ ID NO: 5475129 - DNA, 25 bp, Homo sapien
tgtccagaattggggctccttctct

SEQ ID NO: 5475130 - DNA, 25 bp, Homo sapien
acgtctgaggtgagctgttgtagca

SEQ ID NO: 5475131 - DNA, 25 bp, Homo sapien
cagatgcggcatagtgcaggacgtc

SEQ ID NO: 5475132 - DNA, 25 bp, Homo sapien
cacagagcagatgcggcatagtgca

SEQ ID NO: 5475133 - DNA, 25 bp, Homo sapien
gcaacatcgccagcgggaaatccat

SEQ ID NO: 5475134 - DNA, 25 bp, Homo sapien
tctgagtaacttccgtggagtccca

SEQ ID NO: 5475135 - DNA, 25 bp, Homo sapien
ccaggatgaggataaacaggtatac

SEQ ID NO: 5475136 - DNA, 25 bp, Homo sapien
taaacaggtatacacagtccctgcg

SEQ ID NO: 5475137 - DNA, 25 bp, Homo sapien
cctttgtgaacagagggcgtttgca

SEQ ID NO: 5475138 - DNA, 25 bp, Homo sapien
ggccggctggagttctctgggtcac

SEQ ID NO: 5475139 - DNA, 25 bp, Homo sapien
acagcaggccggctggagttctctg

SEQ ID NO: 5475140 - DNA, 25 bp, Homo sapien
ctggcttctctctgcggcagggaag

SEQ ID NO: 5475141 - DNA, 25 bp, Homo sapien
gcttctctctgcggcagggaaggct

SEQ ID NO: 5475142 - DNA, 25 bp, Homo sapien
tgtcccgtgaagtcacaggagctgt

SEQ ID NO: 5475143 - DNA, 25 bp, Homo sapien
cctgctaaatctgcgctgaggcttc

SEQ ID NO: 5475144 - DNA, 25 bp, Homo sapien
caggagctgtatgcccagccactct

SEQ ID NO: 5475145 - DNA, 25 bp, Homo sapien
atccccgggcactgtcccgtgaagt

SEQ ID NO: 5475146 - DNA, 25 bp, Homo sapien
ttttattggaatgccaccgtgccca

SEQ ID NO: 5475147 - DNA, 25 bp, Homo sapien
ggtggctacatcaggcagactgctt

SEQ ID NO: 5475148 - DNA, 25 bp, Homo sapien
cctattcaggacagtcatgcgggag

SEQ ID NO: 5475149 - DNA, 25 bp, Homo sapien
aatctaagcatctaggactcccagg

SEQ ID NO: 5475150 - DNA, 25 bp, Homo sapien
acaggaccgggcacgtcacctgctg

SEQ ID NO: 5475151 - DNA, 25 bp, Homo sapien
ggataaagggcatgagtcacaggac

SEQ ID NO: 5475152 - DNA, 25 bp, Homo sapien
caggaccgggcacgtcacctgctgg

SEQ ID NO: 5475153 - DNA, 25 bp, Homo sapien
taaagggcatgagtcacaggaccgg

SEQ ID NO: 5475154 - DNA, 25 bp, Homo sapien
gccctgcaactttcttctctcatcc

SEQ ID NO: 5475155 - DNA, 25 bp, Homo sapien
cactcagactcagcccagtacagag

SEQ ID NO: 5475156 - DNA, 25 bp, Homo sapien
gagccctgcaactttcttctctcat

SEQ ID NO: 5475157 - DNA, 25 bp, Homo sapien
cagagccctgcaactttcttctctc

SEQ ID NO: 5475158 - DNA, 25 bp, Homo sapien
ttcagatgaaagcatttgctgggtt

SEQ ID NO: 5475159 - DNA, 25 bp, Homo sapien
accttgctggttagtcgtgtgggct

SEQ ID NO: 5475160 - DNA, 25 bp, Homo sapien
gctgggttttagcattgttcctgcc

SEQ ID NO: 5475161 - DNA, 25 bp, Homo sapien
gggaagcccaccttgctggttagtc

SEQ ID NO: 5475162 - DNA, 25 bp, Homo sapien
gctgcaggaagtgctatctgaggcc

SEQ ID NO: 5475163 - DNA, 25 bp, Homo sapien
tgctgcaggaagtgctatctgaggc

SEQ ID NO: 5475164 - DNA, 25 bp, Homo sapien
cccgctggaccgtgctgcaggaagt

SEQ ID NO: 5475165 - DNA, 25 bp, Homo sapien
tgcaggaagtgctatctgaggcctc

SEQ ID NO: 5475166 - DNA, 25 bp, Homo sapien
gtctggtactgactacttccacctt

SEQ ID NO: 5475167 - DNA, 25 bp, Homo sapien
tgtctggtactgactacttccacct

SEQ ID NO: 5475168 - DNA, 25 bp, Homo sapien
ctgtctggtactgactacttccacc

SEQ ID NO: 5475169 - DNA, 25 bp, Homo sapien
tctggtactgactacttccaccttg

SEQ ID NO: 5475170 - DNA, 25 bp, Homo sapien
cagctccagctgtagccccaggatg

SEQ ID NO: 5475171 - DNA, 25 bp, Homo sapien
gctccagctgtagccccaggatgag

SEQ ID NO: 5475172 - DNA, 25 bp, Homo sapien
ctgtagccccaggatgagtggcact

SEQ ID NO: 5475173 - DNA, 25 bp, Homo sapien
cagctgtagccccaggatgagtggc

SEQ ID NO: 5475174 - DNA, 25 bp, Homo sapien
gcctgggttcagatatagagtattg

SEQ ID NO: 5475175 - DNA, 25 bp, Homo sapien
actccctcaatacccctttggatgg

SEQ ID NO: 5475176 - DNA, 25 bp, Homo sapien
tcctgacagcgtgtgcattccagct

SEQ ID NO: 5475177 - DNA, 25 bp, Homo sapien
atatagagtattggccacctccagg

SEQ ID NO: 5475178 - DNA, 25 bp, Homo sapien
gatggacaggcttctgatatcaggc

SEQ ID NO: 5475179 - DNA, 25 bp, Homo sapien
catgttgccagctgcggatggacag

SEQ ID NO: 5475180 - DNA, 25 bp, Homo sapien
tcagtgttgtcatcacgaagcctct

SEQ ID NO: 5475181 - DNA, 25 bp, Homo sapien
ctttgatgacgtggcaatggctgga

SEQ ID NO: 5475182 - DNA, 25 bp, Homo sapien
tccgtctgcatggattgcatgccat

SEQ ID NO: 5475183 - DNA, 25 bp, Homo sapien
catccgtctgcatggattgcatgcc

SEQ ID NO: 5475184 - DNA, 25 bp, Homo sapien
gcatccgtctgcatggattgcatgc

SEQ ID NO: 5475185 - DNA, 25 bp, Homo sapien
agcatccgtctgcatggattgcatg

SEQ ID NO: 5475186 - DNA, 25 bp, Homo sapien
cagcccctgaaccaactgatgaatg

SEQ ID NO: 5475187 - DNA, 25 bp, Homo sapien
ttgcccagcccctgaaccaactgat

SEQ ID NO: 5475188 - DNA, 25 bp, Homo sapien
cttcccttcgtcaccccaggtgcag

SEQ ID NO: 5475189 - DNA, 25 bp, Homo sapien
gtggtgaagtcttcccttcgtcacc

SEQ ID NO: 5475190 - DNA, 25 bp, Homo sapien
ctaaggtgggctgcatggcaaggta

SEQ ID NO: 5475191 - DNA, 25 bp, Homo sapien
aaggtgggctgcatggcaaggtatc

SEQ ID NO: 5475192 - DNA, 25 bp, Homo sapien
gtgggctgcatggcaaggtatccac

SEQ ID NO: 5475193 - DNA, 25 bp, Homo sapien
ggtgggctgcatggcaaggtatcca

SEQ ID NO: 5475194 - DNA, 25 bp, Homo sapien
gactagggggtgcttcgttggcagc

SEQ ID NO: 5475195 - DNA, 25 bp, Homo sapien
cttcgatggagcagttttcataaga

SEQ ID NO: 5475196 - DNA, 25 bp, Homo sapien
gggtgcttcgttggcagcagctttt

SEQ ID NO: 5475197 - DNA, 25 bp, Homo sapien
tggagcagttttcataagactaggg

SEQ ID NO: 5475198 - DNA, 25 bp, Homo sapien
tctccgagggatgaacagccttcag

SEQ ID NO: 5475199 - DNA, 25 bp, Homo sapien
acagtgcgagggacgtccacatctg

SEQ ID NO: 5475200 - DNA, 25 bp, Homo sapien
tgacttctccggttgccacaccact

SEQ ID NO: 5475201 - DNA, 25 bp, Homo sapien
cactgaaagactgccccacagtgcg

SEQ ID NO: 5475202 - DNA, 25 bp, Homo sapien
ttttccaccatcataatcactgcca

SEQ ID NO: 5475203 - DNA, 25 bp, Homo sapien
catcataatcactgccactacctca

SEQ ID NO: 5475204 - DNA, 25 bp, Homo sapien
gccactacctcactgagatcctggc

SEQ ID NO: 5475205 - DNA, 25 bp, Homo sapien
cactacctcactgagatcctggcgt

SEQ ID NO: 5475206 - DNA, 25 bp, Homo sapien
tggccacaggtatcgttgacaaatc

SEQ ID NO: 5475207 - DNA, 25 bp, Homo sapien
cttaagccacatggtcggcatccgt

SEQ ID NO: 5475208 - DNA, 25 bp, Homo sapien
catccgtgaatgcttggccacaggt

SEQ ID NO: 5475209 - DNA, 25 bp, Homo sapien
catggtcggcatccgtgaatgcttg

SEQ ID NO: 5475210 - DNA, 25 bp, Homo sapien
catgaccgtgggatgtacctgaccc

SEQ ID NO: 5475211 - DNA, 25 bp, Homo sapien
tgtggggaacagttgagtacctgct

SEQ ID NO: 5475212 - DNA, 25 bp, Homo sapien
gagtacctgctatcacacagggcag

SEQ ID NO: 5475213 - DNA, 25 bp, Homo sapien
cagggccagctatccattcgcaagt

SEQ ID NO: 5475214 - DNA, 25 bp, Homo sapien
cagttatccctgcaaagcttgccag

SEQ ID NO: 5475215 - DNA, 25 bp, Homo sapien
cagagctcagtttggtgctgccatc

SEQ ID NO: 5475216 - DNA, 25 bp, Homo sapien
ttggccgcgaaggtccccacgagct

SEQ ID NO: 5475217 - DNA, 25 bp, Homo sapien
tcttggcaataaggacagagctcag

SEQ ID NO: 5475218 - DNA, 25 bp, Homo sapien
cttcttgtctttccctcctctccca

SEQ ID NO: 5475219 - DNA, 25 bp, Homo sapien
tttcttcttgtctttccctcctctc

SEQ ID NO: 5475220 - DNA, 25 bp, Homo sapien
ctccttggtcatgcatttttgtctc

SEQ ID NO: 5475221 - DNA, 25 bp, Homo sapien
cttggtcatgcatttttgtctcttt

SEQ ID NO: 5475222 - DNA, 25 bp, Homo sapien
tggtctcatggcctcacaggtggtc

SEQ ID NO: 5475223 - DNA, 25 bp, Homo sapien
ggtctcatggcctcacaggtggtca

SEQ ID NO: 5475224 - DNA, 25 bp, Homo sapien
gtctcatggcctcacaggtggtcat

SEQ ID NO: 5475225 - DNA, 25 bp, Homo sapien
cgatgggtgccaggtgatacccaag

SEQ ID NO: 5475226 - DNA, 25 bp, Homo sapien
accaggcttgttaggtgtgcagtca

SEQ ID NO: 5475227 - DNA, 25 bp, Homo sapien
tgtgcagtcatagaggctgtgcttg

SEQ ID NO: 5475228 - DNA, 25 bp, Homo sapien
taaagggagaatcccgatgggtgcc

SEQ ID NO: 5475229 - DNA, 25 bp, Homo sapien
tgcaatggggattccattgcactgt

SEQ ID NO: 5475230 - DNA, 25 bp, Homo sapien
caatggggattccattgcactgtag

SEQ ID NO: 5475231 - DNA, 25 bp, Homo sapien
tacaaaatgcaatggggattccatt

SEQ ID NO: 5475232 - DNA, 25 bp, Homo sapien
atggggattccattgcactgtagtt

SEQ ID NO: 5475233 - DNA, 25 bp, Homo sapien
cctaccaacaagtacttagatcctg

SEQ ID NO: 5475234 - DNA, 25 bp, Homo sapien
atcctggctggctggtcccacagtt

SEQ ID NO: 5475235 - DNA, 25 bp, Homo sapien
cacagttcttacgttgatggcattg

SEQ ID NO: 5475236 - DNA, 25 bp, Homo sapien
gatggcattgattctgtgcaacagc

SEQ ID NO: 5475237 - DNA, 25 bp, Homo sapien
tgcgccaagggtgagatcgtgagag

SEQ ID NO: 5475238 - DNA, 25 bp, Homo sapien
taagggcatagctccggggacctcc

SEQ ID NO: 5475239 - DNA, 25 bp, Homo sapien
tgcccattgagacatttgcctccat

SEQ ID NO: 5475240 - DNA, 25 bp, Homo sapien
gcccaagtgcccattgagacatttg

SEQ ID NO: 5475241 - DNA, 25 bp, Homo sapien
tttgaaggaaataggcactaaggtc

SEQ ID NO: 5475242 - DNA, 25 bp, Homo sapien
tccagaaaacggaagtagcaattca

SEQ ID NO: 5475243 - DNA, 25 bp, Homo sapien
tgaatacatggagacgaggagaaac

SEQ ID NO: 5475244 - DNA, 25 bp, Homo sapien
tgtggttggcgatcccctgggtatt

SEQ ID NO: 5475245 - DNA, 25 bp, Homo sapien
gttgctatggcaacaatagtgatga

SEQ ID NO: 5475246 - DNA, 25 bp, Homo sapien
caaggcgctgggagatcaagtggct

SEQ ID NO: 5475247 - DNA, 25 bp, Homo sapien
gtggctgtggcacttagttgctatg

SEQ ID NO: 5475248 - DNA, 25 bp, Homo sapien
caagattacggtgtcgtccagctcc

SEQ ID NO: 5475249 - DNA, 25 bp, Homo sapien
tcaaaagaccccagcgcataaatgc

SEQ ID NO: 5475250 - DNA, 25 bp, Homo sapien
tggcctggccgttccactggtggcc

SEQ ID NO: 5475251 - DNA, 25 bp, Homo sapien
cgtggcgcgcgtccataattctatt

SEQ ID NO: 5475252 - DNA, 25 bp, Homo sapien
gtagcagccgcttccacacttgcgt

SEQ ID NO: 5475253 - DNA, 25 bp, Homo sapien
gacaaactgcccttgccagcagtgt

SEQ ID NO: 5475254 - DNA, 25 bp, Homo sapien
cgctggtgtccgatgtgggctccat

SEQ ID NO: 5475255 - DNA, 25 bp, Homo sapien
ggacaaactgcccttgccagcagtg

SEQ ID NO: 5475256 - DNA, 25 bp, Homo sapien
cctccgctggtgtccgatgtgggct

SEQ ID NO: 5475257 - DNA, 25 bp, Homo sapien
acttgaagcagttggcaggcacctc

SEQ ID NO: 5475258 - DNA, 25 bp, Homo sapien
tccactctggagctcacttgaagca

SEQ ID NO: 5475259 - DNA, 25 bp, Homo sapien
gagcaggaaacaagcagtcatgcct

SEQ ID NO: 5475260 - DNA, 25 bp, Homo sapien
catgcctcttatgacgcagcctagg

SEQ ID NO: 5475261 - DNA, 25 bp, Homo sapien
aatggcattgggaatctctgtgctg

SEQ ID NO: 5475262 - DNA, 25 bp, Homo sapien
tcaaatggcattgggaatctctgtg

SEQ ID NO: 5475263 - DNA, 25 bp, Homo sapien
ggcattgggaatctctgtgctggaa

SEQ ID NO: 5475264 - DNA, 25 bp, Homo sapien
cattgggaatctctgtgctggaagc

SEQ ID NO: 5475265 - DNA, 25 bp, Homo sapien
ggagctaggacaggctgatgtgaga

SEQ ID NO: 5475266 - DNA, 25 bp, Homo sapien
cagcctttgttatcctccgtgcagc

SEQ ID NO: 5475267 - DNA, 25 bp, Homo sapien
tcagatcagaacagcagcctttgtt

SEQ ID NO: 5475268 - DNA, 25 bp, Homo sapien
cctgttgtagccccaatctcaggag

SEQ ID NO: 5475269 - DNA, 25 bp, Homo sapien
gatcagcaagggtcgcaaacatgca

SEQ ID NO: 5475270 - DNA, 25 bp, Homo sapien
tttccatggcttattgaatccaggt

SEQ ID NO: 5475271 - DNA, 25 bp, Homo sapien
ggtaatcaggtagaggagttttgct

SEQ ID NO: 5475272 - DNA, 25 bp, Homo sapien
ttttcctgaatccacatttcgaagg

SEQ ID NO: 5475273 - DNA, 25 bp, Homo sapien
cgctcaggattgcaaaactgcatgt

SEQ ID NO: 5475274 - DNA, 25 bp, Homo sapien
catttggcatcaggctgagaggctc

SEQ ID NO: 5475275 - DNA, 25 bp, Homo sapien
gaaacagaagctgacgtcgatccca

SEQ ID NO: 5475276 - DNA, 25 bp, Homo sapien
gaggtgaggacttcccgctcaggat

SEQ ID NO: 5475277 - DNA, 25 bp, Homo sapien
ccatggctatggtgcttttgtccaa

SEQ ID NO: 5475278 - DNA, 25 bp, Homo sapien
ccctccctaaggttggctccagatg

SEQ ID NO: 5475279 - DNA, 25 bp, Homo sapien
tggccaaggtccatcatagccatgg

SEQ ID NO: 5475280 - DNA, 25 bp, Homo sapien
actcagcacagtccactgcggtggg

SEQ ID NO: 5475281 - DNA, 25 bp, Homo sapien
ggatcaggaattgtggatgattcag

SEQ ID NO: 5475282 - DNA, 25 bp, Homo sapien
atcaggaattgtggatgattcagcc

SEQ ID NO: 5475283 - DNA, 25 bp, Homo sapien
caggatcaggaattgtggatgattc

SEQ ID NO: 5475284 - DNA, 25 bp, Homo sapien
gatcaggaattgtggatgattcagc

SEQ ID NO: 5475285 - DNA, 25 bp, Homo sapien
gcatgttccacgtcaccttgctcat

SEQ ID NO: 5475286 - DNA, 25 bp, Homo sapien
tcacagcacttcacatgcatgttcc

SEQ ID NO: 5475287 - DNA, 25 bp, Homo sapien
atccactctgatccactggcgcaag

SEQ ID NO: 5475288 - DNA, 25 bp, Homo sapien
cactctgatccactggcgcaagggc

SEQ ID NO: 5475289 - DNA, 25 bp, Homo sapien
agcccatagtggaaggctcagcacc

SEQ ID NO: 5475290 - DNA, 25 bp, Homo sapien
tgaccacagcccatagtggaaggct

SEQ ID NO: 5475291 - DNA, 25 bp, Homo sapien
tagtggcccgagagtgaccacagcc

SEQ ID NO: 5475292 - DNA, 25 bp, Homo sapien
tggatgtgtagtggcccgagagtga

SEQ ID NO: 5475293 - DNA, 25 bp, Homo sapien
caagatggatccacaaacagaacca

SEQ ID NO: 5475294 - DNA, 25 bp, Homo sapien
tcctgttttcagattatccgtggct

SEQ ID NO: 5475295 - DNA, 25 bp, Homo sapien
agatgctggtaaaaccgactgcaag

SEQ ID NO: 5475296 - DNA, 25 bp, Homo sapien
ttagagatatctcaagccctgccct

SEQ ID NO: 5475297 - DNA, 25 bp, Homo sapien
aatgtaatcgcagattttggaggcc

SEQ ID NO: 5475298 - DNA, 25 bp, Homo sapien
tgtctgcaggatgacaatgagttgc

SEQ ID NO: 5475299 - DNA, 25 bp, Homo sapien
accccatcctgtggtttaatccatg

SEQ ID NO: 5475300 - DNA, 25 bp, Homo sapien
gccatttacgagaaatgtaatcgca

SEQ ID NO: 5475301 - DNA, 25 bp, Homo sapien
cacttttccacggtggaatccacat

SEQ ID NO: 5475302 - DNA, 25 bp, Homo sapien
ccacttttccacggtggaatccaca

SEQ ID NO: 5475303 - DNA, 25 bp, Homo sapien
catggcttttactcacaattttccc

SEQ ID NO: 5475304 - DNA, 25 bp, Homo sapien
tgcaaacgcgtctccatgaggaaga

SEQ ID NO: 5475305 - DNA, 25 bp, Homo sapien
tgtagtcatggcttttactcacaat

SEQ ID NO: 5475306 - DNA, 25 bp, Homo sapien
cctctagatgcaaacgcgtctccat

SEQ ID NO: 5475307 - DNA, 25 bp, Homo sapien
cagagtcaagaagcccacccagact

SEQ ID NO: 5475308 - DNA, 25 bp, Homo sapien
caggtggtcttattctggggtcttt

SEQ ID NO: 5475309 - DNA, 25 bp, Homo sapien
aacccggggctcatagcctgcagag

SEQ ID NO: 5475310 - DNA, 25 bp, Homo sapien
ggagggggatgctttgagaccacca

SEQ ID NO: 5475311 - DNA, 25 bp, Homo sapien
tgctcctcataatctgaaaccagaa

SEQ ID NO: 5475312 - DNA, 25 bp, Homo sapien
gcgggaagagcttcctgttctagga

SEQ ID NO: 5475313 - DNA, 25 bp, Homo sapien
taggaggaggcctactcagtaattt

SEQ ID NO: 5475314 - DNA, 25 bp, Homo sapien
ttgttttgaaatcattcctgctgcc

SEQ ID NO: 5475315 - DNA, 25 bp, Homo sapien
tctgcggcaaagtgtcccagcaaca

SEQ ID NO: 5475316 - DNA, 25 bp, Homo sapien
gcattggctgcaaaactgagggacc

SEQ ID NO: 5475317 - DNA, 25 bp, Homo sapien
gtatacaataggctgctcgggctgc

SEQ ID NO: 5475318 - DNA, 25 bp, Homo sapien
cacgggcgccattgtcagcattagg

SEQ ID NO: 5475319 - DNA, 25 bp, Homo sapien
tttcaagctagaagacactagctcc

SEQ ID NO: 5475320 - DNA, 25 bp, Homo sapien
ccttttcaggagtcacttcatccag

SEQ ID NO: 5475321 - DNA, 25 bp, Homo sapien
gctctgagcttgacgcacatttttg

SEQ ID NO: 5475322 - DNA, 25 bp, Homo sapien
gctgtcataatcaaacgtcaccttc

SEQ ID NO: 5475323 - DNA, 25 bp, Homo sapien
tgcgtctacacagggaagtgacccc

SEQ ID NO: 5475324 - DNA, 25 bp, Homo sapien
tcagatctggcatgacggctaacca

SEQ ID NO: 5475325 - DNA, 25 bp, Homo sapien
aaagttcccttgtgcagctcagcgc

SEQ ID NO: 5475326 - DNA, 25 bp, Homo sapien
gatgtgagacacgttagaagctgca

SEQ ID NO: 5475327 - DNA, 25 bp, Homo sapien
ctttcgtacaactcaataaccttgc

SEQ ID NO: 5475328 - DNA, 25 bp, Homo sapien
tgtaaagccctcttgagctaattct

SEQ ID NO: 5475329 - DNA, 25 bp, Homo sapien
taaccttgcaggaggattagtgtag

SEQ ID NO: 5475330 - DNA, 25 bp, Homo sapien
taagtaaatagtgtttaggctcatt

SEQ ID NO: 5475331 - DNA, 25 bp, Homo sapien
gaagttgaacccagacatggagtcc

SEQ ID NO: 5475332 - DNA, 25 bp, Homo sapien
aaccacaatcagcaagggtgcctgg

SEQ ID NO: 5475333 - DNA, 25 bp, Homo sapien
tcaccgggaataccagcttcaagct

SEQ ID NO: 5475334 - DNA, 25 bp, Homo sapien
gccagctgccagattcgaatagaga

SEQ ID NO: 5475335 - DNA, 25 bp, Homo sapien
aacgcagggcaggacattgttccaa

SEQ ID NO: 5475336 - DNA, 25 bp, Homo sapien
ggcattgaagtgacaaacgcagggc

SEQ ID NO: 5475337 - DNA, 25 bp, Homo sapien
tcggcgtctgcactgaacaattaca

SEQ ID NO: 5475338 - DNA, 25 bp, Homo sapien
ggcacgatttgctttccggtatcag

SEQ ID NO: 5475339 - DNA, 25 bp, Homo sapien
gggccgtgctcatcttctctgcatt

SEQ ID NO: 5475340 - DNA, 25 bp, Homo sapien
gaatttgtatgttatcctgtgcagg

SEQ ID NO: 5475341 - DNA, 25 bp, Homo sapien
catgaatttgtatgttatcctgtgc

SEQ ID NO: 5475342 - DNA, 25 bp, Homo sapien
tttgtatgttatcctgtgcaggggc

SEQ ID NO: 5475343 - DNA, 25 bp, Homo sapien
tatcggtgccgagaagtcaccagag

SEQ ID NO: 5475344 - DNA, 25 bp, Homo sapien
aatggatgagcagagtatcggtgcc

SEQ ID NO: 5475345 - DNA, 25 bp, Homo sapien
cctcattgggaatggagaccaggtg

SEQ ID NO: 5475346 - DNA, 25 bp, Homo sapien
tgtgtctaccagaagtgccgagcgg

SEQ ID NO: 5475347 - DNA, 25 bp, Homo sapien
ctgccatctgcccacttccatgagc

SEQ ID NO: 5475348 - DNA, 25 bp, Homo sapien
cttccatgagctccatgagtgagcc

SEQ ID NO: 5475349 - DNA, 25 bp, Homo sapien
acttccatgagctccatgagtgagc

SEQ ID NO: 5475350 - DNA, 25 bp, Homo sapien
catctgcccacttccatgagctcca

SEQ ID NO: 5475351 - DNA, 25 bp, Homo sapien
ttcaaggtccgcttcgaggtgatgg

SEQ ID NO: 5475352 - DNA, 25 bp, Homo sapien
tgctttcttcaaggtccgcttcgag

SEQ ID NO: 5475353 - DNA, 25 bp, Homo sapien
ccaggaggttgttgccgcagggctc

SEQ ID NO: 5475354 - DNA, 25 bp, Homo sapien
cagccaggaggttgttgccgcaggg

SEQ ID NO: 5475355 - DNA, 25 bp, Homo sapien
agcagtcccgtggatggattctggg

SEQ ID NO: 5475356 - DNA, 25 bp, Homo sapien
tggctcttgttccatgtcctggccc

SEQ ID NO: 5475357 - DNA, 25 bp, Homo sapien
gaggtggctcttgttccatgtcctg

SEQ ID NO: 5475358 - DNA, 25 bp, Homo sapien
ggtggctcttgttccatgtcctggc

SEQ ID NO: 5475359 - DNA, 25 bp, Homo sapien
ccattagtgctagcaaaggtttcct

SEQ ID NO: 5475360 - DNA, 25 bp, Homo sapien
caaaggtttcctgaagttgcaaagc

SEQ ID NO: 5475361 - DNA, 25 bp, Homo sapien
gcaaagctgattcttgcagcctcat

SEQ ID NO: 5475362 - DNA, 25 bp, Homo sapien
tttgtccattagtgctagcaaaggt

SEQ ID NO: 5475363 - DNA, 25 bp, Homo sapien
cattatgttgacaggccaatcattt

SEQ ID NO: 5475364 - DNA, 25 bp, Homo sapien
actgccaatccattatgttgacagg

SEQ ID NO: 5475365 - DNA, 25 bp, Homo sapien
ttttaactgccaatccattatgttg

SEQ ID NO: 5475366 - DNA, 25 bp, Homo sapien
tgtcattgaatgagaacttctttgt

SEQ ID NO: 5475367 - DNA, 25 bp, Homo sapien
tgagaactgactgttgcaattgctt

SEQ ID NO: 5475368 - DNA, 25 bp, Homo sapien
ttgcttctgaggaagtatatgatgt

SEQ ID NO: 5475369 - DNA, 25 bp, Homo sapien
tgaggaagtatatgatgttgggatc

SEQ ID NO: 5475370 - DNA, 25 bp, Homo sapien
acactgactgagaactgactgttgc

SEQ ID NO: 5475371 - DNA, 25 bp, Homo sapien
tcacagataatgcagcctcggcgtc

SEQ ID NO: 5475372 - DNA, 25 bp, Homo sapien
gacgtgaactttgcgagggacacta

SEQ ID NO: 5475373 - DNA, 25 bp, Homo sapien
aaaccacagcggtcacattcacggg

SEQ ID NO: 5475374 - DNA, 25 bp, Homo sapien
tttcttaagcgacacagtccagtcg

SEQ ID NO: 5475375 - DNA, 25 bp, Homo sapien
caggaacttaaaacatgtttgaaga

SEQ ID NO: 5475376 - DNA, 25 bp, Homo sapien
acttaaaacatgtttgaagagtcac

SEQ ID NO: 5475377 - DNA, 25 bp, Homo sapien
ttttgaggagataaaagccatcaaa

SEQ ID NO: 5475378 - DNA, 25 bp, Homo sapien
aaagccatcaaaagccaggaactta

SEQ ID NO: 5475379 - DNA, 25 bp, Homo sapien
gcatatttcttgttaagtggagtca

SEQ ID NO: 5475380 - DNA, 25 bp, Homo sapien
tttgaaaccctcagtcagctcacta

SEQ ID NO: 5475381 - DNA, 25 bp, Homo sapien
gagaaaaaggcctgggaatacactg

SEQ ID NO: 5475382 - DNA, 25 bp, Homo sapien
ggcctgggaatacactgcatatttc

SEQ ID NO: 5475383 - DNA, 25 bp, Homo sapien
caatttggttagtatgtgctttcgt

SEQ ID NO: 5475384 - DNA, 25 bp, Homo sapien
taatatattcacttgatggaattgc

SEQ ID NO: 5475385 - DNA, 25 bp, Homo sapien
cagctccaatggcttctcacttgca

SEQ ID NO: 5475386 - DNA, 25 bp, Homo sapien
cacatcttcctatacttaaggttct

SEQ ID NO: 5475387 - DNA, 25 bp, Homo sapien
cccactgattaagggaaggctctct

SEQ ID NO: 5475388 - DNA, 25 bp, Homo sapien
tggaaccctcagtggtgaccctctg

SEQ ID NO: 5475389 - DNA, 25 bp, Homo sapien
ttcagtctggctaatagaaacaggc

SEQ ID NO: 5475390 - DNA, 25 bp, Homo sapien
gacagactgagcaattggaggcctc

SEQ ID NO: 5475391 - DNA, 25 bp, Homo sapien
tcaaggataacaggaatagagaacc

SEQ ID NO: 5475392 - DNA, 25 bp, Homo sapien
ctcttgatgagagtgagtagtccca

SEQ ID NO: 5475393 - DNA, 25 bp, Homo sapien
ggctagtctacacccctgtgagaag

SEQ ID NO: 5475394 - DNA, 25 bp, Homo sapien
gatttgtaggctccactctcagggt

SEQ ID NO: 5475395 - DNA, 25 bp, Homo sapien
acagttctgcaaggcgtcttcctga

SEQ ID NO: 5475396 - DNA, 25 bp, Homo sapien
caaggcgtcttcctgacacttcctg

SEQ ID NO: 5475397 - DNA, 25 bp, Homo sapien
ctttctaactccaaactctcttggg

SEQ ID NO: 5475398 - DNA, 25 bp, Homo sapien
tctcttggggaaacaactccacagg

SEQ ID NO: 5475399 - DNA, 25 bp, Homo sapien
tatgagcttaaatgtatagaggccc

SEQ ID NO: 5475400 - DNA, 25 bp, Homo sapien
taaatgtatagaggccctgctctct

SEQ ID NO: 5475401 - DNA, 25 bp, Homo sapien
catatgctctgtatctctatgagct

SEQ ID NO: 5475402 - DNA, 25 bp, Homo sapien
tacatttctgttggacggaactctt

SEQ ID NO: 5475403 - DNA, 25 bp, Homo sapien
gcgattgtgcctgtctagaagctaa

SEQ ID NO: 5475404 - DNA, 25 bp, Homo sapien
gcctgggagcaatccatgtatgaga

SEQ ID NO: 5475405 - DNA, 25 bp, Homo sapien
cacgtatctcaatggtgtgcaccgt

SEQ ID NO: 5475406 - DNA, 25 bp, Homo sapien
gcgggctggatgagacacgtatctc

SEQ ID NO: 5475407 - DNA, 25 bp, Homo sapien
cccattaagctgcaaaatcatgaag

SEQ ID NO: 5475408 - DNA, 25 bp, Homo sapien
acagcaactgttggaatggcatgga

SEQ ID NO: 5475409 - DNA, 25 bp, Homo sapien
tccatcccattaagctgcaaaatca

SEQ ID NO: 5475410 - DNA, 25 bp, Homo sapien
aatggcatggaatgaggtgcacatg

SEQ ID NO: 5475411 - DNA, 25 bp, Homo sapien
agttcccaggctgcccgaatatgag

SEQ ID NO: 5475412 - DNA, 25 bp, Homo sapien
atatgagggcgcctcccttcttcat

SEQ ID NO: 5475413 - DNA, 25 bp, Homo sapien
tcatggcttcagagcgctgggagct

SEQ ID NO: 5475414 - DNA, 25 bp, Homo sapien
tgtcactgcatggaacacatcccag

SEQ ID NO: 5475415 - DNA, 25 bp, Homo sapien
ttgatcttgaaacccttgaggagca

SEQ ID NO: 5475416 - DNA, 25 bp, Homo sapien
tgcgtgtcgcctatgaaacatgggt

SEQ ID NO: 5475417 - DNA, 25 bp, Homo sapien
catactggaaaagcaacccttggcc

SEQ ID NO: 5475418 - DNA, 25 bp, Homo sapien
aaatcctgcatttggaggccagaac

SEQ ID NO: 5475419 - DNA, 25 bp, Homo sapien
cacccctagtctataatcacagtcg

SEQ ID NO: 5475420 - DNA, 25 bp, Homo sapien
cctagtctataatcacagtcgactt

SEQ ID NO: 5475421 - DNA, 25 bp, Homo sapien
tcacagtcgacttcaaccacaaaca

SEQ ID NO: 5475422 - DNA, 25 bp, Homo sapien
atcacagtcgacttcaaccacaaac

SEQ ID NO: 5475423 - DNA, 25 bp, Homo sapien
ggagcacggaaagcgctgccccacc

SEQ ID NO: 5475424 - DNA, 25 bp, Homo sapien
agcacggaaagcgctgccccaccca

SEQ ID NO: 5475425 - DNA, 25 bp, Homo sapien
tggagcacggaaagcgctgccccac

SEQ ID NO: 5475426 - DNA, 25 bp, Homo sapien
ctggagcacggaaagcgctgcccca

SEQ ID NO: 5475427 - DNA, 25 bp, Homo sapien
gtgaaaaccaatatctcagtctttt

SEQ ID NO: 5475428 - DNA, 25 bp, Homo sapien
catgtgtttgcccatctttcttgtg

SEQ ID NO: 5475429 - DNA, 25 bp, Homo sapien
catggaatagtaccatgttgctctc

SEQ ID NO: 5475430 - DNA, 25 bp, Homo sapien
tagccacagtaatgcaacttgtggt

SEQ ID NO: 5475431 - DNA, 25 bp, Homo sapien
gggctgatcacgacctttctcccag

SEQ ID NO: 5475432 - DNA, 25 bp, Homo sapien
tactctcccgggaacttcatccagt

SEQ ID NO: 5475433 - DNA, 25 bp, Homo sapien
gacgaggtccactcggattggacaa

SEQ ID NO: 5475434 - DNA, 25 bp, Homo sapien
tttttccacggatgcttcgggctga

SEQ ID NO: 5475435 - DNA, 25 bp, Homo sapien
ggatgacattgccaagagatccatt

SEQ ID NO: 5475436 - DNA, 25 bp, Homo sapien
tccaaacgggtagcatctactgcca

SEQ ID NO: 5475437 - DNA, 25 bp, Homo sapien
gatccattggaaaattcgctggtca

SEQ ID NO: 5475438 - DNA, 25 bp, Homo sapien
ctggctttccaaacgggtagcatct

SEQ ID NO: 5475439 - DNA, 25 bp, Homo sapien
aatggcaatggtccaatggcagcat

SEQ ID NO: 5475440 - DNA, 25 bp, Homo sapien
gcactggatagaacctgtagtacac

SEQ ID NO: 5475441 - DNA, 25 bp, Homo sapien
tcttcctcctgatcatagagaaaag

SEQ ID NO: 5475442 - DNA, 25 bp, Homo sapien
gagaaaagccatcagtcattgacca

SEQ ID NO: 5475443 - DNA, 25 bp, Homo sapien
cactgattggtttttggatgccaga

SEQ ID NO: 5475444 - DNA, 25 bp, Homo sapien
acagagggaggagatatcgtgctct

SEQ ID NO: 5475445 - DNA, 25 bp, Homo sapien
cgtgaactgctagagtgaaaactca

SEQ ID NO: 5475446 - DNA, 25 bp, Homo sapien
gccattcgtgaaagatccatctcca

SEQ ID NO: 5475447 - DNA, 25 bp, Homo sapien
tacaggaggcatagtgccggcttct

SEQ ID NO: 5475448 - DNA, 25 bp, Homo sapien
catctagattaacagtgggtcgaac

SEQ ID NO: 5475449 - DNA, 25 bp, Homo sapien
gaacgtttcgtgagcacctacggta

SEQ ID NO: 5475450 - DNA, 25 bp, Homo sapien
gctgcggttccgagaatagcctgga

SEQ ID NO: 5475451 - DNA, 25 bp, Homo sapien
caacaagcaggtttgcggagactca

SEQ ID NO: 5475452 - DNA, 25 bp, Homo sapien
gtccataaacgttatgctgaatagt

SEQ ID NO: 5475453 - DNA, 25 bp, Homo sapien
agcctgtcagtattacagttagttt

SEQ ID NO: 5475454 - DNA, 25 bp, Homo sapien
cgttatgctgaatagttgttgaaac

SEQ ID NO: 5475455 - DNA, 25 bp, Homo sapien
cagttagttttctagtgactcataa

SEQ ID NO: 5475456 - DNA, 25 bp, Homo sapien
aatgaaaccataccagtactagaag

SEQ ID NO: 5475457 - DNA, 25 bp, Homo sapien
aactgtttatcgcacatgtacccct

SEQ ID NO: 5475458 - DNA, 25 bp, Homo sapien
gatgccaaaatatcctgcaaagctg

SEQ ID NO: 5475459 - DNA, 25 bp, Homo sapien
tctctggctcccaatctggatttaa

SEQ ID NO: 5475460 - DNA, 25 bp, Homo sapien
atgttttgatgctgcgtctggtgtc

SEQ ID NO: 5475461 - DNA, 25 bp, Homo sapien
gctgcgtctggtgtctttcatgtga

SEQ ID NO: 5475462 - DNA, 25 bp, Homo sapien
tttgatgctgcgtctggtgtctttc

SEQ ID NO: 5475463 - DNA, 25 bp, Homo sapien
tgtgactggagctgtggatgtagat

SEQ ID NO: 5475464 - DNA, 25 bp, Homo sapien
cagggatatgggagtataagggtcg

SEQ ID NO: 5475465 - DNA, 25 bp, Homo sapien
ccagggatatgggagtataagggtc

SEQ ID NO: 5475466 - DNA, 25 bp, Homo sapien
agggatatgggagtataagggtcgt

SEQ ID NO: 5475467 - DNA, 25 bp, Homo sapien
taaataagcactgtacctaaggtgg

SEQ ID NO: 5475468 - DNA, 25 bp, Homo sapien
tccgataacagtttgactgggctga

SEQ ID NO: 5475469 - DNA, 25 bp, Homo sapien
ctttgtcacaagctctcgtagtaga

SEQ ID NO: 5475470 - DNA, 25 bp, Homo sapien
tcttgcagacgacaatagttacaca

SEQ ID NO: 5475471 - DNA, 25 bp, Homo sapien
gtgcccgcagtgagatgacagcttt

SEQ ID NO: 5475472 - DNA, 25 bp, Homo sapien
tgggtgccgcgtccagacggtttcc

SEQ ID NO: 5475473 - DNA, 25 bp, Homo sapien
gaaaacatgaatcaggagggccccg

SEQ ID NO: 5475474 - DNA, 25 bp, Homo sapien
tccaagctgatcagcgcagcgtgag

SEQ ID NO: 5475475 - DNA, 25 bp, Homo sapien
cgatggccacagagatgcgagtgct

SEQ ID NO: 5475476 - DNA, 25 bp, Homo sapien
gtatgccgcacacgtcccagcttct

SEQ ID NO: 5475477 - DNA, 25 bp, Homo sapien
ccagcttcttccggtggcgatggcc

SEQ ID NO: 5475478 - DNA, 25 bp, Homo sapien
agttcccaaacggccgtatgccgca

SEQ ID NO: 5475479 - DNA, 25 bp, Homo sapien
ctgggcacacagaagtatgtggcca

SEQ ID NO: 5475480 - DNA, 25 bp, Homo sapien
gacaattctctctaatgcaagagca

SEQ ID NO: 5475481 - DNA, 25 bp, Homo sapien
acagaagtatgtggccaccttggaa

SEQ ID NO: 5475482 - DNA, 25 bp, Homo sapien
caccttggaaaaggcgatgaagaca

SEQ ID NO: 5475483 - DNA, 25 bp, Homo sapien
gtgccggggagtcccaggggagtga

SEQ ID NO: 5475484 - DNA, 25 bp, Homo sapien
agtcccaggggagtgagggaggagg

SEQ ID NO: 5475485 - DNA, 25 bp, Homo sapien
gggaggaggagaatgctgtctgcat

SEQ ID NO: 5475486 - DNA, 25 bp, Homo sapien
agggaggaggagaatgctgtctgca

SEQ ID NO: 5475487 - DNA, 25 bp, Homo sapien
gcactcagggggtacggccaagacc

SEQ ID NO: 5475488 - DNA, 25 bp, Homo sapien
cactcagggggtacggccaagacca

SEQ ID NO: 5475489 - DNA, 25 bp, Homo sapien
ctcagggggtacggccaagaccagg

SEQ ID NO: 5475490 - DNA, 25 bp, Homo sapien
actcagggggtacggccaagaccag

SEQ ID NO: 5475491 - DNA, 25 bp, Homo sapien
tgtggctctgcgacgtggacagcag

SEQ ID NO: 5475492 - DNA, 25 bp, Homo sapien
cttctgtggctctgcgacgtggaca

SEQ ID NO: 5475493 - DNA, 25 bp, Homo sapien
ttctgtggctctgcgacgtggacag

SEQ ID NO: 5475494 - DNA, 25 bp, Homo sapien
ctgtggctctgcgacgtggacagca

SEQ ID NO: 5475495 - DNA, 25 bp, Homo sapien
gacaagctgttgttgagcccagtgg

SEQ ID NO: 5475496 - DNA, 25 bp, Homo sapien
cagtagtagccttctgacaagctgt

SEQ ID NO: 5475497 - DNA, 25 bp, Homo sapien
ccagtgggtggcaagagaccagaat

SEQ ID NO: 5475498 - DNA, 25 bp, Homo sapien
catccatggaggcagtaagttctgg

SEQ ID NO: 5475499 - DNA, 25 bp, Homo sapien
cacaagcagctggaacgtccaggat

SEQ ID NO: 5475500 - DNA, 25 bp, Homo sapien
catagccgcatgtgtgcagcacaag

SEQ ID NO: 5475501 - DNA, 25 bp, Homo sapien
tctacatgggaacgactgtgcctca

SEQ ID NO: 5475502 - DNA, 25 bp, Homo sapien
gaacatgctccgaggccagtcgtgt

SEQ ID NO: 5475503 - DNA, 25 bp, Homo sapien
catctgctcacaggactgactgttc

SEQ ID NO: 5475504 - DNA, 25 bp, Homo sapien
ggagcacaacccttgaaaggcgtca

SEQ ID NO: 5475505 - DNA, 25 bp, Homo sapien
cgtcaggtcgcagtatgaaaatgcc

SEQ ID NO: 5475506 - DNA, 25 bp, Homo sapien
gaaaatgcctgtagggttcggctgc

SEQ ID NO: 5475507 - DNA, 25 bp, Homo sapien
gttcggctgcctggaaaagtccctg

SEQ ID NO: 5475508 - DNA, 25 bp, Homo sapien
aggtttttgcccaagctctggcagg

SEQ ID NO: 5475509 - DNA, 25 bp, Homo sapien
tcccagatggtcttcgaggtgcatg

SEQ ID NO: 5475510 - DNA, 25 bp, Homo sapien
cagcatgtgggcactctctacaggt

SEQ ID NO: 5475511 - DNA, 25 bp, Homo sapien
tgtcctaaagacgttgcactcaggg

SEQ ID NO: 5475512 - DNA, 25 bp, Homo sapien
ctcgctggggcgagcagaccccatc

SEQ ID NO: 5475513 - DNA, 25 bp, Homo sapien
catcctccaggcttgggtagaggag

SEQ ID NO: 5475514 - DNA, 25 bp, Homo sapien
agaccccatcctccaggcttgggta

SEQ ID NO: 5475515 - DNA, 25 bp, Homo sapien
ttcactcctcgctggggcgagcaga

SEQ ID NO: 5475516 - DNA, 25 bp, Homo sapien
gaagcgtggctaactgcatctcact

SEQ ID NO: 5475517 - DNA, 25 bp, Homo sapien
tcactgtacgaagcctgggagttca

SEQ ID NO: 5475518 - DNA, 25 bp, Homo sapien
atctcactgtacgaagcctgggagt

SEQ ID NO: 5475519 - DNA, 25 bp, Homo sapien
cgtgctgttgggacgaagaagcgtg

SEQ ID NO: 5475520 - DNA, 25 bp, Homo sapien
gagcactgccattgtgacgcagcag

SEQ ID NO: 5475521 - DNA, 25 bp, Homo sapien
tgggagcactgccattgtgacgcag

SEQ ID NO: 5475522 - DNA, 25 bp, Homo sapien
attcagctttgggcatgggagcact

SEQ ID NO: 5475523 - DNA, 25 bp, Homo sapien
ggcatgggagcactgccattgtgac

SEQ ID NO: 5475524 - DNA, 25 bp, Homo sapien
caaaataacgtttgtccaaatgtct

SEQ ID NO: 5475525 - DNA, 25 bp, Homo sapien
cacaggtccactgttgtcaacttga

SEQ ID NO: 5475526 - DNA, 25 bp, Homo sapien
acaaggtcataattctgcctgacat

SEQ ID NO: 5475527 - DNA, 25 bp, Homo sapien
tgcctgacatagtacaattatcctg

SEQ ID NO: 5475528 - DNA, 25 bp, Homo sapien
tagccaggaggatccaatgtccatt

SEQ ID NO: 5475529 - DNA, 25 bp, Homo sapien
tacacctgcctatgggatgcattgg

SEQ ID NO: 5475530 - DNA, 25 bp, Homo sapien
aaacaaaggtgacgaggtgccctgc

SEQ ID NO: 5475531 - DNA, 25 bp, Homo sapien
tgcagagcccatttatagccaggag

SEQ ID NO: 5475532 - DNA, 25 bp, Homo sapien
tgttaaattttccaccatgcatctc

SEQ ID NO: 5475533 - DNA, 25 bp, Homo sapien
tatggatcatagaccttattgctgt

SEQ ID NO: 5475534 - DNA, 25 bp, Homo sapien
tattcagaacacacgatttctactg

SEQ ID NO: 5475535 - DNA, 25 bp, Homo sapien
caagactcccttttatgaacttgcc

SEQ ID NO: 5475536 - DNA, 25 bp, Homo sapien
tgagtcctgatgaggctccgcagac

SEQ ID NO: 5475537 - DNA, 25 bp, Homo sapien
gaggcctaagccttgtgctcaggga

SEQ ID NO: 5475538 - DNA, 25 bp, Homo sapien
gcaatgcgttccatgtgtgcaggct

SEQ ID NO: 5475539 - DNA, 25 bp, Homo sapien
tcacaaagggagtgaccccgagagg

SEQ ID NO: 5475540 - DNA, 25 bp, Homo sapien
ggaaaagatagaagccagcctgact

SEQ ID NO: 5475541 - DNA, 25 bp, Homo sapien
atcagaaacactgccgggacccaac

SEQ ID NO: 5475542 - DNA, 25 bp, Homo sapien
acactgccgggacccaacagcagga

SEQ ID NO: 5475543 - DNA, 25 bp, Homo sapien
aggaaaagatagaagccagcctgac

SEQ ID NO: 5475544 - DNA, 25 bp, Homo sapien
gcacactggctgataaagctctttt

SEQ ID NO: 5475545 - DNA, 25 bp, Homo sapien
gctgaatccacaaagcgggggatgc

SEQ ID NO: 5475546 - DNA, 25 bp, Homo sapien
tccagccggtctctttgcacactgg

SEQ ID NO: 5475547 - DNA, 25 bp, Homo sapien
gggatgcttgtctccagccggtctc

SEQ ID NO: 5475548 - DNA, 25 bp, Homo sapien
acgaaaggctgttgcacagctccat

SEQ ID NO: 5475549 - DNA, 25 bp, Homo sapien
ctggaaacgaaaggctgttgcacag

SEQ ID NO: 5475550 - DNA, 25 bp, Homo sapien
aaacgaaaggctgttgcacagctcc

SEQ ID NO: 5475551 - DNA, 25 bp, Homo sapien
ggaaacgaaaggctgttgcacagct

SEQ ID NO: 5475552 - DNA, 25 bp, Homo sapien
aacacacaacattagaggaatgcca

SEQ ID NO: 5475553 - DNA, 25 bp, Homo sapien
aattaaggcattggtcccaacggtg

SEQ ID NO: 5475554 - DNA, 25 bp, Homo sapien
ggtcccaacggtgcacatagattaa

SEQ ID NO: 5475555 - DNA, 25 bp, Homo sapien
cattggtcccaacggtgcacataga

SEQ ID NO: 5475556 - DNA, 25 bp, Homo sapien
cggtgcacatagattaagggatttt

SEQ ID NO: 5475557 - DNA, 25 bp, Homo sapien
ggcagggaatgaaaaagttggtctc

SEQ ID NO: 5475558 - DNA, 25 bp, Homo sapien
tgcaacaggcataacatgaaactcc

SEQ ID NO: 5475559 - DNA, 25 bp, Homo sapien
caaaagtatatagagtagccgtgac

SEQ ID NO: 5475560 - DNA, 25 bp, Homo sapien
tgtttctccacgatacacaggcttc

SEQ ID NO: 5475561 - DNA, 25 bp, Homo sapien
gacacattagcaccatactgatagg

SEQ ID NO: 5475562 - DNA, 25 bp, Homo sapien
caggatgttccctcccgagttcgag

SEQ ID NO: 5475563 - DNA, 25 bp, Homo sapien
gacaagttggcgatggctgactcct

SEQ ID NO: 5475564 - DNA, 25 bp, Homo sapien
tgcaagggaatctacacccggagct

SEQ ID NO: 5475565 - DNA, 25 bp, Homo sapien
tcccatcacactgatgactccgggt

SEQ ID NO: 5475566 - DNA, 25 bp, Homo sapien
ttaggttcccatcacactgatgact

SEQ ID NO: 5475567 - DNA, 25 bp, Homo sapien
cacactgatgactccgggtttggcg

SEQ ID NO: 5475568 - DNA, 25 bp, Homo sapien
acactgatgactccgggtttggcga

SEQ ID NO: 5475569 - DNA, 25 bp, Homo sapien
ctccataccagaatcttgcacagct

SEQ ID NO: 5475570 - DNA, 25 bp, Homo sapien
ccctgcaagttccttcgtctttcgg

SEQ ID NO: 5475571 - DNA, 25 bp, Homo sapien
gtgtttggatcatagtaccatttta

SEQ ID NO: 5475572 - DNA, 25 bp, Homo sapien
tccttcgtctttcggcaacttgcat

SEQ ID NO: 5475573 - DNA, 25 bp, Homo sapien
tcctgagtggttgctaacgatgccc

SEQ ID NO: 5475574 - DNA, 25 bp, Homo sapien
gatggctggccctcgttgaacttaa

SEQ ID NO: 5475575 - DNA, 25 bp, Homo sapien
tatattagtgaggtgagaacccggc

SEQ ID NO: 5475576 - DNA, 25 bp, Homo sapien
tattattgagaacctagtgggagcc

SEQ ID NO: 5475577 - DNA, 25 bp, Homo sapien
caactcgagtcccagtatgaggcac

SEQ ID NO: 5475578 - DNA, 25 bp, Homo sapien
acagagctgacgtggaccttttccc

SEQ ID NO: 5475579 - DNA, 25 bp, Homo sapien
tacgtgaattctagtgatagcccca

SEQ ID NO: 5475580 - DNA, 25 bp, Homo sapien
tcatgcctgggctaagacttagaac

SEQ ID NO: 5475581 - DNA, 25 bp, Homo sapien
gctcaccattagattgatggttgaa

SEQ ID NO: 5475582 - DNA, 25 bp, Homo sapien
tctgtgctcaccattagattgatgg

SEQ ID NO: 5475583 - DNA, 25 bp, Homo sapien
ttctgtgctcaccattagattgatg

SEQ ID NO: 5475584 - DNA, 25 bp, Homo sapien
tgtgctcaccattagattgatggtt

SEQ ID NO: 5475585 - DNA, 25 bp, Homo sapien
aagctgaccttgctggctgtggagg

SEQ ID NO: 5475586 - DNA, 25 bp, Homo sapien
ctagaagctgaccttgctggctgtg

SEQ ID NO: 5475587 - DNA, 25 bp, Homo sapien
agaagctgaccttgctggctgtgga

SEQ ID NO: 5475588 - DNA, 25 bp, Homo sapien
tgtggaggtgggggctgagatttct

SEQ ID NO: 5475589 - DNA, 25 bp, Homo sapien
actgaaacttccgtggtaggtggct

SEQ ID NO: 5475590 - DNA, 25 bp, Homo sapien
aaacacctggacttcacgggacatc

SEQ ID NO: 5475591 - DNA, 25 bp, Homo sapien
cacatggtatgtctgcccagcgagc

SEQ ID NO: 5475592 - DNA, 25 bp, Homo sapien
cccagtggagtttggcgctgttctc

SEQ ID NO: 5475593 - DNA, 25 bp, Homo sapien
gggtctaacagtggccatctttgtg

SEQ ID NO: 5475594 - DNA, 25 bp, Homo sapien
tacaggcttcgctgccgttgctggc

SEQ ID NO: 5475595 - DNA, 25 bp, Homo sapien
cctcaggcttggtcgccactggttt

SEQ ID NO: 5475596 - DNA, 25 bp, Homo sapien
cgttgctggcttcaccgccactggg

SEQ ID NO: 5475597 - DNA, 25 bp, Homo sapien
ggtggtcaccggcttcgtcgtagtc

SEQ ID NO: 5475598 - DNA, 25 bp, Homo sapien
tggctgatttataatagtcacaggc

SEQ ID NO: 5475599 - DNA, 25 bp, Homo sapien
gcttcgttgtcgtcactgggttgga

SEQ ID NO: 5475600 - DNA, 25 bp, Homo sapien
cttgaagtaacgttattcggaacat

SEQ ID NO: 5475601 - DNA, 25 bp, Homo sapien
gttggtccccttggaaccaatcaca

SEQ ID NO: 5475602 - DNA, 25 bp, Homo sapien
tgaccaaacttcacaaggttctttg

SEQ ID NO: 5475603 - DNA, 25 bp, Homo sapien
tatctggggacaagtaaaaagcatt

SEQ ID NO: 5475604 - DNA, 25 bp, Homo sapien
acttgtttgtgaccaaacttcacaa

SEQ ID NO: 5475605 - DNA, 25 bp, Homo sapien
agaagacgtcgtttggctcactggc

SEQ ID NO: 5475606 - DNA, 25 bp, Homo sapien
attgtccacggactcagagggcgcg

SEQ ID NO: 5475607 - DNA, 25 bp, Homo sapien
gaagcgcatcaaaggctcctcgttg

SEQ ID NO: 5475608 - DNA, 25 bp, Homo sapien
gctcactggcgaaggtgtatacctc

SEQ ID NO: 5475609 - DNA, 25 bp, Homo sapien
ccaaatccacaggatgggtcgatgt

SEQ ID NO: 5475610 - DNA, 25 bp, Homo sapien
tcgatgtccacatcgctccctgccg

SEQ ID NO: 5475611 - DNA, 25 bp, Homo sapien
gaaggcctccaactgccaaatccac

SEQ ID NO: 5475612 - DNA, 25 bp, Homo sapien
cacaggatgggtcgatgttgcagat

SEQ ID NO: 5475613 - DNA, 25 bp, Homo sapien
tagaaagaagcatggcagcctattt

SEQ ID NO: 5475614 - DNA, 25 bp, Homo sapien
aaagaagcatggcagcctatttgtt

SEQ ID NO: 5475615 - DNA, 25 bp, Homo sapien
agaaagaagcatggcagcctatttg

SEQ ID NO: 5475616 - DNA, 25 bp, Homo sapien
ctagaaagaagcatggcagcctatt

SEQ ID NO: 5475617 - DNA, 25 bp, Homo sapien
caaacatgacacgtgaggacattct

SEQ ID NO: 5475618 - DNA, 25 bp, Homo sapien
atgacacgtgaggacattctccagg

SEQ ID NO: 5475619 - DNA, 25 bp, Homo sapien
ccaagcaaacatgacacgtgaggac

SEQ ID NO: 5475620 - DNA, 25 bp, Homo sapien
ggacaagcgcatgccccactgctgt

SEQ ID NO: 5475621 - DNA, 25 bp, Homo sapien
caaatcatcctgtgttcggcagaac

SEQ ID NO: 5475622 - DNA, 25 bp, Homo sapien
gaaaaatctgagacgcagggacgct

SEQ ID NO: 5475623 - DNA, 25 bp, Homo sapien
caaagagtcctgtctatcgccgtac

SEQ ID NO: 5475624 - DNA, 25 bp, Homo sapien
tgtctttcgccgacacaggctgtgg

SEQ ID NO: 5475625 - DNA, 25 bp, Homo sapien
gccacaaaggagcatggacgtgtct

SEQ ID NO: 5475626 - DNA, 25 bp, Homo sapien
ggtatcatcagcacatgggtttcag

SEQ ID NO: 5475627 - DNA, 25 bp, Homo sapien
taaccggcaagagctgtcaacatgt

SEQ ID NO: 5475628 - DNA, 25 bp, Homo sapien
tattcaccttcagggccgattggga

SEQ ID NO: 5475629 - DNA, 25 bp, Homo sapien
aaagggagatgccaacagcacgcac

SEQ ID NO: 5475630 - DNA, 25 bp, Homo sapien
gagccccagaagaaagggagatgcc

SEQ ID NO: 5475631 - DNA, 25 bp, Homo sapien
agaaagggagatgccaacagcacgc

SEQ ID NO: 5475632 - DNA, 25 bp, Homo sapien
agaagaaagggagatgccaacagca

SEQ ID NO: 5475633 - DNA, 25 bp, Homo sapien
tcgcatccggccgaaagtgtcttgg

SEQ ID NO: 5475634 - DNA, 25 bp, Homo sapien
cttaatcttgtccaggaggaccgac

SEQ ID NO: 5475635 - DNA, 25 bp, Homo sapien
tccctcagaggtgtctaaagcaaag

SEQ ID NO: 5475636 - DNA, 25 bp, Homo sapien
tgatccccgcatctgagagcttgag

SEQ ID NO: 5475637 - DNA, 25 bp, Homo sapien
tttgatgctttggatgagggcacat

SEQ ID NO: 5475638 - DNA, 25 bp, Homo sapien
tttatctttgatgctttggatgagg

SEQ ID NO: 5475639 - DNA, 25 bp, Homo sapien
tatctttgatgctttggatgagggc

SEQ ID NO: 5475640 - DNA, 25 bp, Homo sapien
tctttgatgctttggatgagggcac

SEQ ID NO: 5475641 - DNA, 25 bp, Homo sapien
tggagtcgcccctgttgcccttggg

SEQ ID NO: 5475642 - DNA, 25 bp, Homo sapien
gatggagtcgcccctgttgcccttg

SEQ ID NO: 5475643 - DNA, 25 bp, Homo sapien
gagtcgcccctgttgcccttgggac

SEQ ID NO: 5475644 - DNA, 25 bp, Homo sapien
atcgatggagtcgcccctgttgccc

SEQ ID NO: 5475645 - DNA, 25 bp, Homo sapien
tgaacctgggtctagattctgcttc

SEQ ID NO: 5475646 - DNA, 25 bp, Homo sapien
tgtaaagcccacgagtgaacctggg

SEQ ID NO: 5475647 - DNA, 25 bp, Homo sapien
tttcacacgcttgatacgctgtccc

SEQ ID NO: 5475648 - DNA, 25 bp, Homo sapien
accaatccatgtaaagcccacgagt

SEQ ID NO: 5475649 - DNA, 25 bp, Homo sapien
tcccttctgtccaactatccctgga

SEQ ID NO: 5475650 - DNA, 25 bp, Homo sapien
ttctgtccaactatccctggaggtc

SEQ ID NO: 5475651 - DNA, 25 bp, Homo sapien
cttctgtccaactatccctggaggt

SEQ ID NO: 5475652 - DNA, 25 bp, Homo sapien
ccttctgtccaactatccctggagg

SEQ ID NO: 5475653 - DNA, 25 bp, Homo sapien
tccatttagcccaggttcacctggg

SEQ ID NO: 5475654 - DNA, 25 bp, Homo sapien
ctttgggtcctgttgttccatttag

SEQ ID NO: 5475655 - DNA, 25 bp, Homo sapien
tgttgttccatttagcccaggttca

SEQ ID NO: 5475656 - DNA, 25 bp, Homo sapien
ggtcctgttgttccatttagcccag

SEQ ID NO: 5475657 - DNA, 25 bp, Homo sapien
cagagccatcccaaaatcatgatga

SEQ ID NO: 5475658 - DNA, 25 bp, Homo sapien
tcatgatgatgcttcaccgaccagg

SEQ ID NO: 5475659 - DNA, 25 bp, Homo sapien
gcttcaccgaccagggattatttac

SEQ ID NO: 5475660 - DNA, 25 bp, Homo sapien
gagccatcccaaaatcatgatgatg

SEQ ID NO: 5475661 - DNA, 25 bp, Homo sapien
cctgggtatccagggaatcctcttt

SEQ ID NO: 5475662 - DNA, 25 bp, Homo sapien
ggtatccagggaatcctctttctcc

SEQ ID NO: 5475663 - DNA, 25 bp, Homo sapien
ctttggtcctgggtatccagggaat

SEQ ID NO: 5475664 - DNA, 25 bp, Homo sapien
tgggtatccagggaatcctctttct

SEQ ID NO: 5475665 - DNA, 25 bp, Homo sapien
tttgcctctgcgtccttcactgcca

SEQ ID NO: 5475666 - DNA, 25 bp, Homo sapien
tctgcgtccttcactgccaactccg

SEQ ID NO: 5475667 - DNA, 25 bp, Homo sapien
gcgtccttcactgccaactccgtct

SEQ ID NO: 5475668 - DNA, 25 bp, Homo sapien
gcctctgcgtccttcactgccaact

SEQ ID NO: 5475669 - DNA, 25 bp, Homo sapien
ccgattcctccttttggtcctggct

SEQ ID NO: 5475670 - DNA, 25 bp, Homo sapien
ttggtcctggctctccgggctcacc

SEQ ID NO: 5475671 - DNA, 25 bp, Homo sapien
cctccttttggtcctggctctccgg

SEQ ID NO: 5475672 - DNA, 25 bp, Homo sapien
ttttggtcctggctctccgggctca

SEQ ID NO: 5475673 - DNA, 25 bp, Homo sapien
ggttctgcctcgttctccaggagca

SEQ ID NO: 5475674 - DNA, 25 bp, Homo sapien
agtggaccggttctgcctcgttctc

SEQ ID NO: 5475675 - DNA, 25 bp, Homo sapien
tcttcccagtggaccggttctgcct

SEQ ID NO: 5475676 - DNA, 25 bp, Homo sapien
gagcaccagcggcacctccgcttcc

SEQ ID NO: 5475677 - DNA, 25 bp, Homo sapien
tgcaaggcctgaggttaaatctggg

SEQ ID NO: 5475678 - DNA, 25 bp, Homo sapien
ttcttggggtgaagtagccagtcac

SEQ ID NO: 5475679 - DNA, 25 bp, Homo sapien
cagtcactgcaaggcctgaggttaa

SEQ ID NO: 5475680 - DNA, 25 bp, Homo sapien
agtagccagtcactgcaaggcctga

SEQ ID NO: 5475681 - DNA, 25 bp, Homo sapien
gttctcctatcagccctggaggacc

SEQ ID NO: 5475682 - DNA, 25 bp, Homo sapien
aaatgccttgttctcctatcagccc

SEQ ID NO: 5475683 - DNA, 25 bp, Homo sapien
tgccttgttctcctatcagccctgg

SEQ ID NO: 5475684 - DNA, 25 bp, Homo sapien
ttgttctcctatcagccctggagga

SEQ ID NO: 5475685 - DNA, 25 bp, Homo sapien
agcccggctggccaggaccgccctt

SEQ ID NO: 5475686 - DNA, 25 bp, Homo sapien
cctgctctccctcaaagcccggctg

SEQ ID NO: 5475687 - DNA, 25 bp, Homo sapien
ggctggccaggaccgcccttgttgc

SEQ ID NO: 5475688 - DNA, 25 bp, Homo sapien
ctggtcccctgctctccctcaaagc

SEQ ID NO: 5475689 - DNA, 25 bp, Homo sapien
gagagtgtttttcactcctgggctg

SEQ ID NO: 5475690 - DNA, 25 bp, Homo sapien
taaattgattggtatctgtctccga

SEQ ID NO: 5475691 - DNA, 25 bp, Homo sapien
ctgtgtcacgggcatgtctttaacc

SEQ ID NO: 5475692 - DNA, 25 bp, Homo sapien
ctttgggttcacaggagagagtgtt

SEQ ID NO: 5475693 - DNA, 25 bp, Homo sapien
gactttatgaatgtcccaggcggtc

SEQ ID NO: 5475694 - DNA, 25 bp, Homo sapien
taatgactccttttggctgcacgat

SEQ ID NO: 5475695 - DNA, 25 bp, Homo sapien
cttaggtagggctcacgacttggca

SEQ ID NO: 5475696 - DNA, 25 bp, Homo sapien
aggttctccaagtgatcccggccaa

SEQ ID NO: 5475697 - DNA, 25 bp, Homo sapien
gaagaactgagtcctcaagagcccg

SEQ ID NO: 5475698 - DNA, 25 bp, Homo sapien
gaagggatagcaggccattagacca

SEQ ID NO: 5475699 - DNA, 25 bp, Homo sapien
gttttggctctgctcacacgctgag

SEQ ID NO: 5475700 - DNA, 25 bp, Homo sapien
agagcccgtgactgaaaccgaattc

SEQ ID NO: 5475701 - DNA, 25 bp, Homo sapien
gactgaggattaggcatacaaggag

SEQ ID NO: 5475702 - DNA, 25 bp, Homo sapien
acctggcccgatatttgaaagtagc

SEQ ID NO: 5475703 - DNA, 25 bp, Homo sapien
tagattggagtaacaaccgtttcag

SEQ ID NO: 5475704 - DNA, 25 bp, Homo sapien
atatttagttggatcaaacctggcc

SEQ ID NO: 5475705 - DNA, 25 bp, Homo sapien
aggtcctccaggtactccatctctc

SEQ ID NO: 5475706 - DNA, 25 bp, Homo sapien
cctccaggtactccatctctccctg

SEQ ID NO: 5475707 - DNA, 25 bp, Homo sapien
tccaggtcctccaggtactccatct

SEQ ID NO: 5475708 - DNA, 25 bp, Homo sapien
attcttcccagtttctccaggtcct

SEQ ID NO: 5475709 - DNA, 25 bp, Homo sapien
gggactctgctgctaatcttaggct

SEQ ID NO: 5475710 - DNA, 25 bp, Homo sapien
tgctgatgagccgagaagtgtgtcc

SEQ ID NO: 5475711 - DNA, 25 bp, Homo sapien
taggctacgttgcagtgttaaaggc

SEQ ID NO: 5475712 - DNA, 25 bp, Homo sapien
ggagagtctaggaatgtgcagcacc

SEQ ID NO: 5475713 - DNA, 25 bp, Homo sapien
ttctcctttgggtcctctctcctgg

SEQ ID NO: 5475714 - DNA, 25 bp, Homo sapien
catggggccgaggtcaccggtttct

SEQ ID NO: 5475715 - DNA, 25 bp, Homo sapien
cctggctgtcttgtcctgggttacc

SEQ ID NO: 5475716 - DNA, 25 bp, Homo sapien
tctctcctggctgtcttgtcctggg

SEQ ID NO: 5475717 - DNA, 25 bp, Homo sapien
cgggtcccctcgaatcccaacatct

SEQ ID NO: 5475718 - DNA, 25 bp, Homo sapien
tttctctcctcgaggtcctttatca

SEQ ID NO: 5475719 - DNA, 25 bp, Homo sapien
ccctcgaatcccaacatctcctctt

SEQ ID NO: 5475720 - DNA, 25 bp, Homo sapien
ctttctctcctcgaggtcctttatc

SEQ ID NO: 5475721 - DNA, 25 bp, Homo sapien
gaagaaccaggcaatcctttgtctc

SEQ ID NO: 5475722 - DNA, 25 bp, Homo sapien
tccagaagaaccaggcaatcctttg

SEQ ID NO: 5475723 - DNA, 25 bp, Homo sapien
tctccagaagaaccaggcaatcctt

SEQ ID NO: 5475724 - DNA, 25 bp, Homo sapien
ccagaagaaccaggcaatcctttgt

SEQ ID NO: 5475725 - DNA, 25 bp, Homo sapien
accatccagaccatccagtccaatt

SEQ ID NO: 5475726 - DNA, 25 bp, Homo sapien
tccagaccatccagtccaatttctc

SEQ ID NO: 5475727 - DNA, 25 bp, Homo sapien
atccagaccatccagtccaatttct

SEQ ID NO: 5475728 - DNA, 25 bp, Homo sapien
catccagaccatccagtccaatttc

SEQ ID NO: 5475729 - DNA, 25 bp, Homo sapien
ttctctcctgggaatccccgagagc

SEQ ID NO: 5475730 - DNA, 25 bp, Homo sapien
cttctctcctgggaatccccgagag

SEQ ID NO: 5475731 - DNA, 25 bp, Homo sapien
tctctcctgggaatccccgagagcc

SEQ ID NO: 5475732 - DNA, 25 bp, Homo sapien
cgggcagccctggaaaccttgagtg

SEQ ID NO: 5475733 - DNA, 25 bp, Homo sapien
ccctggaaaccttgagtgccgttca

SEQ ID NO: 5475734 - DNA, 25 bp, Homo sapien
gaaaccttgagtgccgttcacacca

SEQ ID NO: 5475735 - DNA, 25 bp, Homo sapien
gcccgggcagccctggaaaccttga

SEQ ID NO: 5475736 - DNA, 25 bp, Homo sapien
gagagacaaaggcattttgcaagct

SEQ ID NO: 5475737 - DNA, 25 bp, Homo sapien
tttcaccatggggaacgccgatcga

SEQ ID NO: 5475738 - DNA, 25 bp, Homo sapien
gggtactgtgaacagcatgcagcag

SEQ ID NO: 5475739 - DNA, 25 bp, Homo sapien
ttctctgccgggcttgcagcagcgt

SEQ ID NO: 5475740 - DNA, 25 bp, Homo sapien
cctcatcaccaggatagcctcggta

SEQ ID NO: 5475741 - DNA, 25 bp, Homo sapien
atcaccaggatagcctcggtagccg

SEQ ID NO: 5475742 - DNA, 25 bp, Homo sapien
ggatagcctcggtagccgtcttctc

SEQ ID NO: 5475743 - DNA, 25 bp, Homo sapien
gggtccaccctcatcaccaggatag

SEQ ID NO: 5475744 - DNA, 25 bp, Homo sapien
gatgggcccgcggtctcccctctgc

SEQ ID NO: 5475745 - DNA, 25 bp, Homo sapien
ctttggcccgatgctgccgatgggc

SEQ ID NO: 5475746 - DNA, 25 bp, Homo sapien
agcaagctttctcggcaatgttgtc

SEQ ID NO: 5475747 - DNA, 25 bp, Homo sapien
atgctgccgatgggcccgcggtctc

SEQ ID NO: 5475748 - DNA, 25 bp, Homo sapien
tccagatgcattagccgctccaagt

SEQ ID NO: 5475749 - DNA, 25 bp, Homo sapien
aagttgaccactcgttcaaggccca

SEQ ID NO: 5475750 - DNA, 25 bp, Homo sapien
gggcctgtcatacataaaccctcgc

SEQ ID NO: 5475751 - DNA, 25 bp, Homo sapien
ccgctagttcataatccaagtccag

SEQ ID NO: 5475752 - DNA, 25 bp, Homo sapien
cttcttggcggaggttctcagatgc

SEQ ID NO: 5475753 - DNA, 25 bp, Homo sapien
atcagccagatctccgtctgctcca

SEQ ID NO: 5475754 - DNA, 25 bp, Homo sapien
ttggcggaggttctcagatgctctg

SEQ ID NO: 5475755 - DNA, 25 bp, Homo sapien
cagatctccgtctgctccatcagta

SEQ ID NO: 5475756 - DNA, 25 bp, Homo sapien
tccggcgaggactgtctgaacttgt

SEQ ID NO: 5475757 - DNA, 25 bp, Homo sapien
tccggaacttctcgagcatctctgg

SEQ ID NO: 5475758 - DNA, 25 bp, Homo sapien
tgctggctgcgcatgttccggaact

SEQ ID NO: 5475759 - DNA, 25 bp, Homo sapien
gattctgttcaagatggcgtccacc

SEQ ID NO: 5475760 - DNA, 25 bp, Homo sapien
caaagtggtttacccgcaggtgctc

SEQ ID NO: 5475761 - DNA, 25 bp, Homo sapien
tcacaaaggcaatctgagggacccg

SEQ ID NO: 5475762 - DNA, 25 bp, Homo sapien
ggcagcatcagttacaccagggcaa

SEQ ID NO: 5475763 - DNA, 25 bp, Homo sapien
tgtactggacaagccccacttggat

SEQ ID NO: 5475764 - DNA, 25 bp, Homo sapien
ggtgtccacccctggaggtgcagga

SEQ ID NO: 5475765 - DNA, 25 bp, Homo sapien
ggagtggctgcggagggtccaaacg

SEQ ID NO: 5475766 - DNA, 25 bp, Homo sapien
gcggagggtccaaacgagttcatga

SEQ ID NO: 5475767 - DNA, 25 bp, Homo sapien
gctgcggagggtccaaacgagttca

SEQ ID NO: 5475768 - DNA, 25 bp, Homo sapien
caaaatctcgaatatgtgcaaagcc

SEQ ID NO: 5475769 - DNA, 25 bp, Homo sapien
acctgggcgaacctggacacatcgt

SEQ ID NO: 5475770 - DNA, 25 bp, Homo sapien
gccacaaattcgagagccttgccag

SEQ ID NO: 5475771 - DNA, 25 bp, Homo sapien
taaactcacaatgcccgaggaacgg

SEQ ID NO: 5475772 - DNA, 25 bp, Homo sapien
taccatggcctttgagcctgttatt

SEQ ID NO: 5475773 - DNA, 25 bp, Homo sapien
aatttattatgagtaccatggcctt

SEQ ID NO: 5475774 - DNA, 25 bp, Homo sapien
gagtaccatggcctttgagcctgtt

SEQ ID NO: 5475775 - DNA, 25 bp, Homo sapien
ttatgagtaccatggcctttgagcc

SEQ ID NO: 5475776 - DNA, 25 bp, Homo sapien
ctctctatgagggtgcgaacgtact

SEQ ID NO: 5475777 - DNA, 25 bp, Homo sapien
gtcaaagcccacgtccaggtagtca

SEQ ID NO: 5475778 - DNA, 25 bp, Homo sapien
gactttccagacgagatgaggacca

SEQ ID NO: 5475779 - DNA, 25 bp, Homo sapien
gacccatcgatgagaaagaccacgt

SEQ ID NO: 5475780 - DNA, 25 bp, Homo sapien
tcggtagaggctgcaacaccggctg

SEQ ID NO: 5475781 - DNA, 25 bp, Homo sapien
aactctttcaacagagggaagccgc

SEQ ID NO: 5475782 - DNA, 25 bp, Homo sapien
gatgtcagcgttcccgatgccaatg

SEQ ID NO: 5475783 - DNA, 25 bp, Homo sapien
gagatgacctgttggacggtcccca

SEQ ID NO: 5475784 - DNA, 25 bp, Homo sapien
tgctggtgctccgttgtgcactgat

SEQ ID NO: 5475785 - DNA, 25 bp, Homo sapien
gtgctccgttgtgcactgattttaa

SEQ ID NO: 5475786 - DNA, 25 bp, Homo sapien
ctggtgctggtgctccgttgtgcac

SEQ ID NO: 5475787 - DNA, 25 bp, Homo sapien
tggtgctccgttgtgcactgatttt

SEQ ID NO: 5475788 - DNA, 25 bp, Homo sapien
caatcttgggaagcgactctgcagc

SEQ ID NO: 5475789 - DNA, 25 bp, Homo sapien
taatcttgtagagaaagtcacggac

SEQ ID NO: 5475790 - DNA, 25 bp, Homo sapien
tctggtgctcatcaaaacgggactc

SEQ ID NO: 5475791 - DNA, 25 bp, Homo sapien
tgtactgagccaccgcaattcgggt

SEQ ID NO: 5475792 - DNA, 25 bp, Homo sapien
catagacatagcttagggctgagcc

SEQ ID NO: 5475793 - DNA, 25 bp, Homo sapien
ggcagcttgcaaataggagtcctca

SEQ ID NO: 5475794 - DNA, 25 bp, Homo sapien
tacaaagtcgcgcacataagggaaa

SEQ ID NO: 5475795 - DNA, 25 bp, Homo sapien
tacaccaggcttgggttaaaagcaa

SEQ ID NO: 5475796 - DNA, 25 bp, Homo sapien
tcggaactcagctgggatgaacacc

SEQ ID NO: 5475797 - DNA, 25 bp, Homo sapien
aaaagcttaggaatcccctcggcag

SEQ ID NO: 5475798 - DNA, 25 bp, Homo sapien
cggtagccggctgaactcgtgaata

SEQ ID NO: 5475799 - DNA, 25 bp, Homo sapien
aaagtctagagcagagcccgtgtac

SEQ ID NO: 5475800 - DNA, 25 bp, Homo sapien
tggttgcagatgataatcagagtct

SEQ ID NO: 5475801 - DNA, 25 bp, Homo sapien
agtcttataggagcctcggtatcca

SEQ ID NO: 5475802 - DNA, 25 bp, Homo sapien
tgataatcagagtcttataggagcc

SEQ ID NO: 5475803 - DNA, 25 bp, Homo sapien
aaatttagatgattggttgcagatg

SEQ ID NO: 5475804 - DNA, 25 bp, Homo sapien
caccaattttcattgagcccatact

SEQ ID NO: 5475805 - DNA, 25 bp, Homo sapien
tcaccaattttcattgagcccatac

SEQ ID NO: 5475806 - DNA, 25 bp, Homo sapien
cgaatctcgtcactagaaggcccgg

SEQ ID NO: 5475807 - DNA, 25 bp, Homo sapien
tccaaggccgaatgagaacacgcta

SEQ ID NO: 5475808 - DNA, 25 bp, Homo sapien
ctggaggtccccaaagctacggaat

SEQ ID NO: 5475809 - DNA, 25 bp, Homo sapien
tccaccacgaaatcaagggcgaggc

SEQ ID NO: 5475810 - DNA, 25 bp, Homo sapien
gagtttctcaaggagatttacaagg

SEQ ID NO: 5475811 - DNA, 25 bp, Homo sapien
caaggaagtcgagaatgactgcgaa

SEQ ID NO: 5475812 - DNA, 25 bp, Homo sapien
gactgcgaaattgacacttccggtg

SEQ ID NO: 5475813 - DNA, 25 bp, Homo sapien
aaaataatgtcagcagagtcttgtg

SEQ ID NO: 5475814 - DNA, 25 bp, Homo sapien
tgcaaaaaatgtgaaagcattagaa

SEQ ID NO: 5475815 - DNA, 25 bp, Homo sapien
caaaaaatgtgaaagcattagaaca

SEQ ID NO: 5475816 - DNA, 25 bp, Homo sapien
aaatgtgaaagcattagaacaagtg

SEQ ID NO: 5475817 - DNA, 25 bp, Homo sapien
tgtgaaagcattagaacaagtgacc

SEQ ID NO: 5475818 - DNA, 25 bp, Homo sapien
taagcagagtgatatgaaaccggtc

SEQ ID NO: 5475819 - DNA, 25 bp, Homo sapien
ctcaaatgcaggtctgggattgggc

SEQ ID NO: 5475820 - DNA, 25 bp, Homo sapien
gagaattcccaacctgatgctgaga

SEQ ID NO: 5475821 - DNA, 25 bp, Homo sapien
gaccatgagcatcgaataaaccctg

SEQ ID NO: 5475822 - DNA, 25 bp, Homo sapien
cagggcgtagcttggtggcgttgcc

SEQ ID NO: 5475823 - DNA, 25 bp, Homo sapien
gcagggcagggcgtagcttggtggc

SEQ ID NO: 5475824 - DNA, 25 bp, Homo sapien
gcgtagcttggtggcgttgccatta

SEQ ID NO: 5475825 - DNA, 25 bp, Homo sapien
gggcagggcgtagcttggtggcgtt

SEQ ID NO: 5475826 - DNA, 25 bp, Homo sapien
ggccatccttcgagtgtccatcagt

SEQ ID NO: 5475827 - DNA, 25 bp, Homo sapien
cagacttaagttccgctgagggcag

SEQ ID NO: 5475828 - DNA, 25 bp, Homo sapien
ggatgaatgcacacaggacactaag

SEQ ID NO: 5475829 - DNA, 25 bp, Homo sapien
taacactacgataacctgagggact

SEQ ID NO: 5475830 - DNA, 25 bp, Homo sapien
tcagcagccgcaccatttttgacat

SEQ ID NO: 5475831 - DNA, 25 bp, Homo sapien
tattatatcagcagccgcaccattt

SEQ ID NO: 5475832 - DNA, 25 bp, Homo sapien
tatcagcagccgcaccatttttgac

SEQ ID NO: 5475833 - DNA, 25 bp, Homo sapien
agaaatattatatcagcagccgcac

SEQ ID NO: 5475834 - DNA, 25 bp, Homo sapien
tagactcacttacctgggaaccagg

SEQ ID NO: 5475835 - DNA, 25 bp, Homo sapien
gaccatcatgaatgggccagtagca

SEQ ID NO: 5475836 - DNA, 25 bp, Homo sapien
gataatacaggaaggtagactcact

SEQ ID NO: 5475837 - DNA, 25 bp, Homo sapien
tggaatacaaaaccgggccttgaca

SEQ ID NO: 5475838 - DNA, 25 bp, Homo sapien
tgctgggcatgagttgtaggaaagc

SEQ ID NO: 5475839 - DNA, 25 bp, Homo sapien
gcaaaagacggccactaagggcaag

SEQ ID NO: 5475840 - DNA, 25 bp, Homo sapien
agaaagaggcaaaagacggccacta

SEQ ID NO: 5475841 - DNA, 25 bp, Homo sapien
gacggccactaagggcaagtgccga

SEQ ID NO: 5475842 - DNA, 25 bp, Homo sapien
agggcaagtgccgatgtttcctcat

SEQ ID NO: 5475843 - DNA, 25 bp, Homo sapien
aatttgtctaagcaccaaatatgaa

SEQ ID NO: 5475844 - DNA, 25 bp, Homo sapien
tttgaatttgtctaagcaccaaata

SEQ ID NO: 5475845 - DNA, 25 bp, Homo sapien
atttgtctaagcaccaaatatgaac

SEQ ID NO: 5475846 - DNA, 25 bp, Homo sapien
tgaatttgtctaagcaccaaatatg

SEQ ID NO: 5475847 - DNA, 25 bp, Homo sapien
ttcatgacactagttaatattgtca

SEQ ID NO: 5475848 - DNA, 25 bp, Homo sapien
actttcatgacactagttaatattg

SEQ ID NO: 5475849 - DNA, 25 bp, Homo sapien
caggggaaggaccagactcaatctc

SEQ ID NO: 5475850 - DNA, 25 bp, Homo sapien
gaaggaccagactcaatctcattat

SEQ ID NO: 5475851 - DNA, 25 bp, Homo sapien
cattcggctttgtaatccaggtgga

SEQ ID NO: 5475852 - DNA, 25 bp, Homo sapien
gggagcattgacaaagagcacaagt

SEQ ID NO: 5475853 - DNA, 25 bp, Homo sapien
taaaatccgggaagtctaagacatc

SEQ ID NO: 5475854 - DNA, 25 bp, Homo sapien
tagaggctctttgtaaagcattcgg

SEQ ID NO: 5475855 - DNA, 25 bp, Homo sapien
tcattgaaaatcatatgtaaagatt

SEQ ID NO: 5475856 - DNA, 25 bp, Homo sapien
tagttcattgaaaatcatatgtaaa

SEQ ID NO: 5475857 - DNA, 25 bp, Homo sapien
tctgagtaaaatgaacttttagttc

SEQ ID NO: 5475858 - DNA, 25 bp, Homo sapien
cttttagttcattgaaaatcatatg

SEQ ID NO: 5475859 - DNA, 25 bp, Homo sapien
gactcaaactgaatgtgtatcctgt

SEQ ID NO: 5475860 - DNA, 25 bp, Homo sapien
gaacaataatctgtttgactcaaac

SEQ ID NO: 5475861 - DNA, 25 bp, Homo sapien
gtatcctgtgatagcaacattttaa

SEQ ID NO: 5475862 - DNA, 25 bp, Homo sapien
tttctattctatgaaaatactctag

SEQ ID NO: 5475863 - DNA, 25 bp, Homo sapien
ttaaagtggctgaaaggtgctctct

SEQ ID NO: 5475864 - DNA, 25 bp, Homo sapien
cctctgtcagcaatggtcggccaat

SEQ ID NO: 5475865 - DNA, 25 bp, Homo sapien
ggccctgggctgctgaatcaactaa

SEQ ID NO: 5475866 - DNA, 25 bp, Homo sapien
tgttgctcgaacaggccatagtcct

SEQ ID NO: 5475867 - DNA, 25 bp, Homo sapien
catgatgcacaataggtcttgttaa

SEQ ID NO: 5475868 - DNA, 25 bp, Homo sapien
ttagcattagggatatatcccctcc

SEQ ID NO: 5475869 - DNA, 25 bp, Homo sapien
aaacttaagtaaacatgagaacaca

SEQ ID NO: 5475870 - DNA, 25 bp, Homo sapien
ctcagggctcaaggccatgatgcac

SEQ ID NO: 5475871 - DNA, 25 bp, Homo sapien
cagaccaggatgaacgtgctaactc

SEQ ID NO: 5475872 - DNA, 25 bp, Homo sapien
aggacctgtggaatactccctggaa

SEQ ID NO: 5475873 - DNA, 25 bp, Homo sapien
taaaactgcccgcaagctctgctga

SEQ ID NO: 5475874 - DNA, 25 bp, Homo sapien
tctgaagctcgcagagatacacctc

SEQ ID NO: 5475875 - DNA, 25 bp, Homo sapien
tggagcccaggagaactgaacggcc

SEQ ID NO: 5475876 - DNA, 25 bp, Homo sapien
tgaacggcctttggtggaagactga

SEQ ID NO: 5475877 - DNA, 25 bp, Homo sapien
tccctgggctcctcgattcaattag

SEQ ID NO: 5475878 - DNA, 25 bp, Homo sapien
agagctgcggaggaaaactcttgca

SEQ ID NO: 5475879 - DNA, 25 bp, Homo sapien
tgggcccttggcgtcaaaaagaata

SEQ ID NO: 5475880 - DNA, 25 bp, Homo sapien
gaatttcttcgtgggtatccatggt

SEQ ID NO: 5475881 - DNA, 25 bp, Homo sapien
tttggaatttcttcgtgggtatcca

SEQ ID NO: 5475882 - DNA, 25 bp, Homo sapien
tggaatttcttcgtgggtatccatg

SEQ ID NO: 5475883 - DNA, 25 bp, Homo sapien
gttattttccaagactgagctgagg

SEQ ID NO: 5475884 - DNA, 25 bp, Homo sapien
tggaggtgacgccaaaatgaagcag

SEQ ID NO: 5475885 - DNA, 25 bp, Homo sapien
gccctgaggaacgtgtaaactggaa

SEQ ID NO: 5475886 - DNA, 25 bp, Homo sapien
aagcaggcgtggacctcgaggatct

SEQ ID NO: 5475887 - DNA, 25 bp, Homo sapien
gctgtaacaacgtgctacaaacagg

SEQ ID NO: 5475888 - DNA, 25 bp, Homo sapien
tgtaacaacgtgctacaaacagggt

SEQ ID NO: 5475889 - DNA, 25 bp, Homo sapien
taacaacgtgctacaaacagggtca

SEQ ID NO: 5475890 - DNA, 25 bp, Homo sapien
tgctgtaacaacgtgctacaaacag

SEQ ID NO: 5475891 - DNA, 25 bp, Homo sapien
agtagaaggaaattgtgtgcagtct

SEQ ID NO: 5475892 - DNA, 25 bp, Homo sapien
gcagtagaaggaaattgtgtgcagt

SEQ ID NO: 5475893 - DNA, 25 bp, Homo sapien
acagcagtagaaggaaattgtgtgc

SEQ ID NO: 5475894 - DNA, 25 bp, Homo sapien
tcaaaacagcagtagaaggaaattg

SEQ ID NO: 5475895 - DNA, 25 bp, Homo sapien
tgcatcttgtgcattgacccagcaa

SEQ ID NO: 5475896 - DNA, 25 bp, Homo sapien
gattgttggctactccatctgacct

SEQ ID NO: 5475897 - DNA, 25 bp, Homo sapien
tctgtggtgaaatgacaataatgcc

SEQ ID NO: 5475898 - DNA, 25 bp, Homo sapien
aacctcagaaacattacgccaagtg

SEQ ID NO: 5475899 - DNA, 25 bp, Homo sapien
gctggctctctggggtagataaaga

SEQ ID NO: 5475900 - DNA, 25 bp, Homo sapien
ctctcgcagacaggacatgagcttt

SEQ ID NO: 5475901 - DNA, 25 bp, Homo sapien
tggctctctggggtagataaagaag

SEQ ID NO: 5475902 - DNA, 25 bp, Homo sapien
ctctctggggtagataaagaaggtt

SEQ ID NO: 5475903 - DNA, 25 bp, Homo sapien
ggaaatggcacagacgcacattgtt

SEQ ID NO: 5475904 - DNA, 25 bp, Homo sapien
acattgttccagctaccccccatcc

SEQ ID NO: 5475905 - DNA, 25 bp, Homo sapien
ggaggggtcggagcactgcgttggg

SEQ ID NO: 5475906 - DNA, 25 bp, Homo sapien
gggttgatgagcagacgactgccag

SEQ ID NO: 5475907 - DNA, 25 bp, Homo sapien
gcaaaggcggacactgattcatggt

SEQ ID NO: 5475908 - DNA, 25 bp, Homo sapien
gctgcagccacgaatggccgagaag

SEQ ID NO: 5475909 - DNA, 25 bp, Homo sapien
tggctgcagccacgaatggccgaga

SEQ ID NO: 5475910 - DNA, 25 bp, Homo sapien
ggaagccgttagcaaaggcggacac

SEQ ID NO: 5475911 - DNA, 25 bp, Homo sapien
gatgccagtaatgaccatattcagg

SEQ ID NO: 5475912 - DNA, 25 bp, Homo sapien
ttccttatgccccacgtgctcccac

SEQ ID NO: 5475913 - DNA, 25 bp, Homo sapien
ccttatgccccacgtgctcccacat

SEQ ID NO: 5475914 - DNA, 25 bp, Homo sapien
tattcaggggtgctcccgagccctc

SEQ ID NO: 5475915 - DNA, 25 bp, Homo sapien
tcgttcatggggtggggcgtgtggc

SEQ ID NO: 5475916 - DNA, 25 bp, Homo sapien
ggtggggcgtgtggccatgccagat

SEQ ID NO: 5475917 - DNA, 25 bp, Homo sapien
caggagggggcaccgaattcctgct

SEQ ID NO: 5475918 - DNA, 25 bp, Homo sapien
ggcaccgaattcctgctttgtcacc

SEQ ID NO: 5475919 - DNA, 25 bp, Homo sapien
aagtctcccttgccaaccaggcagt

SEQ ID NO: 5475920 - DNA, 25 bp, Homo sapien
agtctcccttgccaaccaggcagtg

SEQ ID NO: 5475921 - DNA, 25 bp, Homo sapien
agagggctacgctggtgaagaaggg

SEQ ID NO: 5475922 - DNA, 25 bp, Homo sapien
aacagtgacgacagtgtccacggga

SEQ ID NO: 5475923 - DNA, 25 bp, Homo sapien
tcaacagtgacgacagtgtccacgg

SEQ ID NO: 5475924 - DNA, 25 bp, Homo sapien
cagtgacgacagtgtccacgggaga

SEQ ID NO: 5475925 - DNA, 25 bp, Homo sapien
agaccaaaggaaccagaggacacct

SEQ ID NO: 5475926 - DNA, 25 bp, Homo sapien
catcccaatgtatacagccagcagc

SEQ ID NO: 5475927 - DNA, 25 bp, Homo sapien
agcccacacatcccaatgtatacag

SEQ ID NO: 5475928 - DNA, 25 bp, Homo sapien
gaccaaaggaaccagaggacacctg

SEQ ID NO: 5475929 - DNA, 25 bp, Homo sapien
tggaacgtggccttgcctgacccct

SEQ ID NO: 5475930 - DNA, 25 bp, Homo sapien
caggcttcctgtggaacgtggcctt

SEQ ID NO: 5475931 - DNA, 25 bp, Homo sapien
tcgcactgcaaaggcttgaaagcca

SEQ ID NO: 5475932 - DNA, 25 bp, Homo sapien
gagcgtggcgccttcgcgggataaa

SEQ ID NO: 5475933 - DNA, 25 bp, Homo sapien
tcccagaaacgctgcttcccaggct

SEQ ID NO: 5475934 - DNA, 25 bp, Homo sapien
ttcccaggctctgctagcagcggca

SEQ ID NO: 5475935 - DNA, 25 bp, Homo sapien
tcccaggctctgctagcagcggcat

SEQ ID NO: 5475936 - DNA, 25 bp, Homo sapien
gatttttcccagaaacgctgcttcc

SEQ ID NO: 5475937 - DNA, 25 bp, Homo sapien
gttgtcctgttacctgaaacttctg

SEQ ID NO: 5475938 - DNA, 25 bp, Homo sapien
tccagaagacgttcactctccctgc

SEQ ID NO: 5475939 - DNA, 25 bp, Homo sapien
tcctgttacctgaaacttctgagtc

SEQ ID NO: 5475940 - DNA, 25 bp, Homo sapien
ccagttgtcctgttacctgaaactt

SEQ ID NO: 5475941 - DNA, 25 bp, Homo sapien
gcatgtgtttacagaagtcagctca

SEQ ID NO: 5475942 - DNA, 25 bp, Homo sapien
tgagggcaagtctgatctgcggcct

SEQ ID NO: 5475943 - DNA, 25 bp, Homo sapien
tcagctcagaaggaagtgcggtcca

SEQ ID NO: 5475944 - DNA, 25 bp, Homo sapien
tttgcataaatgacaccagatcctg

SEQ ID NO: 5475945 - DNA, 25 bp, Homo sapien
ctgctatggatccaactggttcttc

SEQ ID NO: 5475946 - DNA, 25 bp, Homo sapien
gggaacacatcgtcctgcctgcttt

SEQ ID NO: 5475947 - DNA, 25 bp, Homo sapien
ctgctttctgctatggatccaactg

SEQ ID NO: 5475948 - DNA, 25 bp, Homo sapien
caagggaacacatcgtcctgcctgc

SEQ ID NO: 5475949 - DNA, 25 bp, Homo sapien
ctgcctttaaaagcccttgcttgta

SEQ ID NO: 5475950 - DNA, 25 bp, Homo sapien
aaccatatcaacctccatgtattga

SEQ ID NO: 5475951 - DNA, 25 bp, Homo sapien
aagcccttgcttgtaagccattgag

SEQ ID NO: 5475952 - DNA, 25 bp, Homo sapien
tgcttgtaagccattgaggacatag

SEQ ID NO: 5475953 - DNA, 25 bp, Homo sapien
gctccagcgggagcaagccctcccc

SEQ ID NO: 5475954 - DNA, 25 bp, Homo sapien
ccgctccagcgggagcaagccctcc

SEQ ID NO: 5475955 - DNA, 25 bp, Homo sapien
caccgctccagcgggagcaagccct

SEQ ID NO: 5475956 - DNA, 25 bp, Homo sapien
gcaagccctcccccgcctgcaacac

SEQ ID NO: 5475957 - DNA, 25 bp, Homo sapien
ggcgcatcatcaaattgggactcag

SEQ ID NO: 5475958 - DNA, 25 bp, Homo sapien
gcccaagggtctggcgcatcatcaa

SEQ ID NO: 5475959 - DNA, 25 bp, Homo sapien
ctgcagggaccccagttgcctggtg

SEQ ID NO: 5475960 - DNA, 25 bp, Homo sapien
cttgtcctggtgcatgaagcagcca

SEQ ID NO: 5475961 - DNA, 25 bp, Homo sapien
actgggaacaccaccgggctgggca

SEQ ID NO: 5475962 - DNA, 25 bp, Homo sapien
gatgtcgggatcagccttggaggat

SEQ ID NO: 5475963 - DNA, 25 bp, Homo sapien
tctggaggccgtacgtcagtcccgg

SEQ ID NO: 5475964 - DNA, 25 bp, Homo sapien
tcacggcgggaaacagcccgaagcc

SEQ ID NO: 5475965 - DNA, 25 bp, Homo sapien
gagaggatactgacatcggtctgga

SEQ ID NO: 5475966 - DNA, 25 bp, Homo sapien
ctggggtggtttcagccaagccctg

SEQ ID NO: 5475967 - DNA, 25 bp, Homo sapien
tggggtggtttcagccaagccctgt

SEQ ID NO: 5475968 - DNA, 25 bp, Homo sapien
cggtagcagctcgagcgagagatct

SEQ ID NO: 5475969 - DNA, 25 bp, Homo sapien
gcgagagatcttgtaacagctttca

SEQ ID NO: 5475970 - DNA, 25 bp, Homo sapien
ctgagaggtgcaggcggtagcagct

SEQ ID NO: 5475971 - DNA, 25 bp, Homo sapien
cagctcgagcgagagatcttgtaac

SEQ ID NO: 5475972 - DNA, 25 bp, Homo sapien
gattcacctacagtgttcccctggg

SEQ ID NO: 5475973 - DNA, 25 bp, Homo sapien
gaaatttcgacgatgtgccgcgcgc

SEQ ID NO: 5475974 - DNA, 25 bp, Homo sapien
ggctcagcaggcaacaacattcttt

SEQ ID NO: 5475975 - DNA, 25 bp, Homo sapien
agtacatagcgctttccctgcagag

SEQ ID NO: 5475976 - DNA, 25 bp, Homo sapien
gtgtccgttccgttccgccctctgc

SEQ ID NO: 5475977 - DNA, 25 bp, Homo sapien
gggaatcgcagctgtgtgctcaact

SEQ ID NO: 5475978 - DNA, 25 bp, Homo sapien
gcagctgtgtgctcaactttcccct

SEQ ID NO: 5475979 - DNA, 25 bp, Homo sapien
gggcatccagaggtgtccgcgctcc

SEQ ID NO: 5475980 - DNA, 25 bp, Homo sapien
tgacgccctggcctgacgccctgct

SEQ ID NO: 5475981 - DNA, 25 bp, Homo sapien
ccccggagagggtccggtgagtgca

SEQ ID NO: 5475982 - DNA, 25 bp, Homo sapien
agggactgagcgtcccccggagagg

SEQ ID NO: 5475983 - DNA, 25 bp, Homo sapien
gccctgcttcgtcgcctcctttctc

SEQ ID NO: 5475984 - DNA, 25 bp, Homo sapien
tgcagacccactggtgtgaaaacgc

SEQ ID NO: 5475985 - DNA, 25 bp, Homo sapien
ctcccggcctcggtccaggctggtg

SEQ ID NO: 5475986 - DNA, 25 bp, Homo sapien
ctggtgaggacagcgcgttcccagc

SEQ ID NO: 5475987 - DNA, 25 bp, Homo sapien
gcgcggtgtcgcgtgcagacccact

SEQ ID NO: 5475988 - DNA, 25 bp, Homo sapien
tggattctttgagcagactgctctg

SEQ ID NO: 5475989 - DNA, 25 bp, Homo sapien
ttaatcagaagctccattgcctcca

SEQ ID NO: 5475990 - DNA, 25 bp, Homo sapien
tgggtgcaggcacgggtgggagtgg

SEQ ID NO: 5475991 - DNA, 25 bp, Homo sapien
tggcgggggatccccattttgggca

SEQ ID NO: 5475992 - DNA, 25 bp, Homo sapien
tactggccccatgcacaagtgagaa

SEQ ID NO: 5475993 - DNA, 25 bp, Homo sapien
tacgtcgtgtgttggagtctagtcc

SEQ ID NO: 5475994 - DNA, 25 bp, Homo sapien
cattcgcgggtctatctgcagtgag

SEQ ID NO: 5475995 - DNA, 25 bp, Homo sapien
tgttagtgtcttatccctgccggca

SEQ ID NO: 5475996 - DNA, 25 bp, Homo sapien
agctccctcgtggtaattcccgaca

SEQ ID NO: 5475997 - DNA, 25 bp, Homo sapien
ttcccgacacgcgttcccaggatga

SEQ ID NO: 5475998 - DNA, 25 bp, Homo sapien
cagccgttagccctgacgtgaggtt

SEQ ID NO: 5475999 - DNA, 25 bp, Homo sapien
ctcagcaatgctgccgtctttccgt

SEQ ID NO: 5476000 - DNA, 25 bp, Homo sapien
gtctcctcccttatctggaacaata

SEQ ID NO: 5476001 - DNA, 25 bp, Homo sapien
tctggaacaatagaagatgggtgaa

SEQ ID NO: 5476002 - DNA, 25 bp, Homo sapien
gggctacatgcacctgcaccagtaa

SEQ ID NO: 5476003 - DNA, 25 bp, Homo sapien
tagaagatgggtgaattctccactt

SEQ ID NO: 5476004 - DNA, 25 bp, Homo sapien
caccagggtgcttgttaatactaca

SEQ ID NO: 5476005 - DNA, 25 bp, Homo sapien
caatgtgttcgcctgtaagatcccc

SEQ ID NO: 5476006 - DNA, 25 bp, Homo sapien
tttgaagggagctaacccatcagtg

SEQ ID NO: 5476007 - DNA, 25 bp, Homo sapien
tcctttttatgtgaggtgcaaacct

SEQ ID NO: 5476008 - DNA, 25 bp, Homo sapien
tgaggtctccatctcgcaggaggct

SEQ ID NO: 5476009 - DNA, 25 bp, Homo sapien
tgcgtcggtgattgattgagtacat

SEQ ID NO: 5476010 - DNA, 25 bp, Homo sapien
aagctggtgtggacatcacggagga

SEQ ID NO: 5476011 - DNA, 25 bp, Homo sapien
ggcccagtcgatggtagaattgtaa

SEQ ID NO: 5476012 - DNA, 25 bp, Homo sapien
aatgctcgccaggtgccgggtcctg

SEQ ID NO: 5476013 - DNA, 25 bp, Homo sapien
ccgccgaatgctcgccaggtgccgg

SEQ ID NO: 5476014 - DNA, 25 bp, Homo sapien
gaatgctcgccaggtgccgggtcct

SEQ ID NO: 5476015 - DNA, 25 bp, Homo sapien
ccgaatgctcgccaggtgccgggtc

SEQ ID NO: 5476016 - DNA, 25 bp, Homo sapien
cagcaaatgctatgagcctgcaggt

SEQ ID NO: 5476017 - DNA, 25 bp, Homo sapien
agcctgcaggtgaaaccatgtgttt

SEQ ID NO: 5476018 - DNA, 25 bp, Homo sapien
caaatgctatgagcctgcaggtgaa

SEQ ID NO: 5476019 - DNA, 25 bp, Homo sapien
tatgagcctgcaggtgaaaccatgt

SEQ ID NO: 5476020 - DNA, 25 bp, Homo sapien
cccaataagcacaatcctgcagaca

SEQ ID NO: 5476021 - DNA, 25 bp, Homo sapien
ccaataagcacaatcctgcagacat

SEQ ID NO: 5476022 - DNA, 25 bp, Homo sapien
tgcaccaatgtttttagttcccaag

SEQ ID NO: 5476023 - DNA, 25 bp, Homo sapien
gttgcaccaatgtttttagttccca

SEQ ID NO: 5476024 - DNA, 25 bp, Homo sapien
caagaccaacggtaactctaatcct

SEQ ID NO: 5476025 - DNA, 25 bp, Homo sapien
gcaccaatgtttttagttcccaaga

SEQ ID NO: 5476026 - DNA, 25 bp, Homo sapien
gttagacacaggggcatgagttagc

SEQ ID NO: 5476027 - DNA, 25 bp, Homo sapien
catgttgttagacacaggggcatga

SEQ ID NO: 5476028 - DNA, 25 bp, Homo sapien
aagccatgttgttagacacaggggc

SEQ ID NO: 5476029 - DNA, 25 bp, Homo sapien
ttgttagacacaggggcatgagtta

SEQ ID NO: 5476030 - DNA, 25 bp, Homo sapien
gcaggcttctattgttaggtccaca

SEQ ID NO: 5476031 - DNA, 25 bp, Homo sapien
gttgcaggcttctattgttaggtcc

SEQ ID NO: 5476032 - DNA, 25 bp, Homo sapien
caggcttctattgttaggtccacaa

SEQ ID NO: 5476033 - DNA, 25 bp, Homo sapien
gcttctattgttaggtccacaatct

SEQ ID NO: 5476034 - DNA, 25 bp, Homo sapien
gactgaatattgctcttgccgtggc

SEQ ID NO: 5476035 - DNA, 25 bp, Homo sapien
tcagaagccatctacagcagaaaca

SEQ ID NO: 5476036 - DNA, 25 bp, Homo sapien
aaacagcttttctggtgactgaata

SEQ ID NO: 5476037 - DNA, 25 bp, Homo sapien
tgttccacagctgcaactcgatggc

SEQ ID NO: 5476038 - DNA, 25 bp, Homo sapien
aagtgcctgctacaggctgcacatt

SEQ ID NO: 5476039 - DNA, 25 bp, Homo sapien
caagtgcctgctacaggctgcacat

SEQ ID NO: 5476040 - DNA, 25 bp, Homo sapien
tgcctgctacaggctgcacatttac

SEQ ID NO: 5476041 - DNA, 25 bp, Homo sapien
ctgctacaggctgcacatttaccat

SEQ ID NO: 5476042 - DNA, 25 bp, Homo sapien
tcttctctcaggtgtgcccaccttt

SEQ ID NO: 5476043 - DNA, 25 bp, Homo sapien
gtcttctctcaggtgtgcccacctt

SEQ ID NO: 5476044 - DNA, 25 bp, Homo sapien
tttgttgtatgcactaatatttttc

SEQ ID NO: 5476045 - DNA, 25 bp, Homo sapien
gttgtatgcactaatatttttccaa

SEQ ID NO: 5476046 - DNA, 25 bp, Homo sapien
tattttgttgtatgcactaatattt

SEQ ID NO: 5476047 - DNA, 25 bp, Homo sapien
ctattttgttgtatgcactaatatt

SEQ ID NO: 5476048 - DNA, 25 bp, Homo sapien
cactagggactcacacttcatgttc

SEQ ID NO: 5476049 - DNA, 25 bp, Homo sapien
aatgctggcatagtcacaggaggtc

SEQ ID NO: 5476050 - DNA, 25 bp, Homo sapien
cagtcagacctacaggcatcctaca

SEQ ID NO: 5476051 - DNA, 25 bp, Homo sapien
agcgccatctggtggccacgggcaa

SEQ ID NO: 5476052 - DNA, 25 bp, Homo sapien
tagggcacagcactttcctgggagc

SEQ ID NO: 5476053 - DNA, 25 bp, Homo sapien
acttccaggaacatctagggctcgg

SEQ ID NO: 5476054 - DNA, 25 bp, Homo sapien
gggagcaacccagcattgacagtga

SEQ ID NO: 5476055 - DNA, 25 bp, Homo sapien
tgggagccatgtgacgccagatctt

SEQ ID NO: 5476056 - DNA, 25 bp, Homo sapien
tcgcttctctgcagtagctcttggg

SEQ ID NO: 5476057 - DNA, 25 bp, Homo sapien
gcagcatttggcctgcctcgcgggc

SEQ ID NO: 5476058 - DNA, 25 bp, Homo sapien
agcctggccctcctcgtcgcttctc

SEQ ID NO: 5476059 - DNA, 25 bp, Homo sapien
tcctcgtcgcttctctgcagtagct

SEQ ID NO: 5476060 - DNA, 25 bp, Homo sapien
tggttcagtttggccgaagtttcca

SEQ ID NO: 5476061 - DNA, 25 bp, Homo sapien
acacctccgacacctggtggttcag

SEQ ID NO: 5476062 - DNA, 25 bp, Homo sapien
aacacctccgacacctggtggttca

SEQ ID NO: 5476063 - DNA, 25 bp, Homo sapien
cagtttggccgaagtttccatgaac

SEQ ID NO: 5476064 - DNA, 25 bp, Homo sapien
tccacgtttcgtgtccaagttgtgt

SEQ ID NO: 5476065 - DNA, 25 bp, Homo sapien
ccagcgctgtttataagagagtttc

SEQ ID NO: 5476066 - DNA, 25 bp, Homo sapien
taaggacacctggttcacttccaac

SEQ ID NO: 5476067 - DNA, 25 bp, Homo sapien
taagatccgagaaagctgcagccgt

SEQ ID NO: 5476068 - DNA, 25 bp, Homo sapien
cctgtgggctttgatgctgggcaaa

SEQ ID NO: 5476069 - DNA, 25 bp, Homo sapien
gagggaggcccctggacggcaccca

SEQ ID NO: 5476070 - DNA, 25 bp, Homo sapien
tcccatcatgcctgttggcacctgt

SEQ ID NO: 5476071 - DNA, 25 bp, Homo sapien
tgggcaaagaaccaactgagaaccc

SEQ ID NO: 5476072 - DNA, 25 bp, Homo sapien
tctggggaaccctcattttccaaca

SEQ ID NO: 5476073 - DNA, 25 bp, Homo sapien
ccctcattttccaacacagctctcc

SEQ ID NO: 5476074 - DNA, 25 bp, Homo sapien
tcttctggggaaccctcattttcca

SEQ ID NO: 5476075 - DNA, 25 bp, Homo sapien
ggaaccctcattttccaacacagct

SEQ ID NO: 5476076 - DNA, 25 bp, Homo sapien
acagcaggcttgcaacgggtgacca

SEQ ID NO: 5476077 - DNA, 25 bp, Homo sapien
cctgtggtggatcccagagggcaca

SEQ ID NO: 5476078 - DNA, 25 bp, Homo sapien
caagccttgagtaacctcgtgccca

SEQ ID NO: 5476079 - DNA, 25 bp, Homo sapien
ttgcaacgagggctcagactgacgc

SEQ ID NO: 5476080 - DNA, 25 bp, Homo sapien
ggtctccccatcagccacttgtctg

SEQ ID NO: 5476081 - DNA, 25 bp, Homo sapien
agttgggtcttcccctgcgccagcc

SEQ ID NO: 5476082 - DNA, 25 bp, Homo sapien
tgtctgcagctgtttacacggtctt

SEQ ID NO: 5476083 - DNA, 25 bp, Homo sapien
tgcagctgtttacacggtcttcgtc

SEQ ID NO: 5476084 - DNA, 25 bp, Homo sapien
cgctcctggctgaggtccgtcttgt

SEQ ID NO: 5476085 - DNA, 25 bp, Homo sapien
ctcctggctgaggtccgtcttgttg

SEQ ID NO: 5476086 - DNA, 25 bp, Homo sapien
gctcctggctgaggtccgtcttgtt

SEQ ID NO: 5476087 - DNA, 25 bp, Homo sapien
cagccactgctgagccttgaggaag

SEQ ID NO: 5476088 - DNA, 25 bp, Homo sapien
ccttcagccactgctgagccttgag

SEQ ID NO: 5476089 - DNA, 25 bp, Homo sapien
caccaggacttctcctgggtgcagc

SEQ ID NO: 5476090 - DNA, 25 bp, Homo sapien
cactgctgagccttgaggaaggaat

SEQ ID NO: 5476091 - DNA, 25 bp, Homo sapien
ggtatttcaggtcaggcctcgagct

SEQ ID NO: 5476092 - DNA, 25 bp, Homo sapien
tgtgcggccaggcagaaaactgcta

SEQ ID NO: 5476093 - DNA, 25 bp, Homo sapien
tgttccttgtgattacgccatggca

SEQ ID NO: 5476094 - DNA, 25 bp, Homo sapien
cggcatgttctttgtggaccacgga

SEQ ID NO: 5476095 - DNA, 25 bp, Homo sapien
gcgcagcgttggcacccctgaagta

SEQ ID NO: 5476096 - DNA, 25 bp, Homo sapien
gatgtcgtacaccagaagcgcagcg

SEQ ID NO: 5476097 - DNA, 25 bp, Homo sapien
ccctgaagtagaggtggcagacgct

SEQ ID NO: 5476098 - DNA, 25 bp, Homo sapien
tccaccacctttgtgaagaacgcac

SEQ ID NO: 5476099 - DNA, 25 bp, Homo sapien
caggaggttgagcaaacagttcttc

SEQ ID NO: 5476100 - DNA, 25 bp, Homo sapien
tacatatgccgtgaaagggatctcc

SEQ ID NO: 5476101 - DNA, 25 bp, Homo sapien
gatggagccttccacatcgagcaaa

SEQ ID NO: 5476102 - DNA, 25 bp, Homo sapien
cttactcagaggacgaggttgccac

SEQ ID NO: 5476103 - DNA, 25 bp, Homo sapien
taatcgcctctttacgggtgggaga

SEQ ID NO: 5476104 - DNA, 25 bp, Homo sapien
ttgcacccactagacagagaacagg

SEQ ID NO: 5476105 - DNA, 25 bp, Homo sapien
ataaggtcgcactcacaggttccgg

SEQ ID NO: 5476106 - DNA, 25 bp, Homo sapien
ggactgaaccggctataaacctctg

SEQ ID NO: 5476107 - DNA, 25 bp, Homo sapien
caagcactagatgtcaccatccttc

SEQ ID NO: 5476108 - DNA, 25 bp, Homo sapien
cacacaagcactagatgtcaccatc

SEQ ID NO: 5476109 - DNA, 25 bp, Homo sapien
gtgcacacaagcactagatgtcacc

SEQ ID NO: 5476110 - DNA, 25 bp, Homo sapien
agcccaacaagtctggggttagttg

SEQ ID NO: 5476111 - DNA, 25 bp, Homo sapien
tcatctgaaagctgccggcaggggg

SEQ ID NO: 5476112 - DNA, 25 bp, Homo sapien
aaagctgccggcagggggatggccc

SEQ ID NO: 5476113 - DNA, 25 bp, Homo sapien
tgaaagctgccggcagggggatggc

SEQ ID NO: 5476114 - DNA, 25 bp, Homo sapien
tctgaaagctgccggcagggggatg

SEQ ID NO: 5476115 - DNA, 25 bp, Homo sapien
cgtaggcaggatactcttgaagtcg

SEQ ID NO: 5476116 - DNA, 25 bp, Homo sapien
actcttgaagtcgttcttcacgtac

SEQ ID NO: 5476117 - DNA, 25 bp, Homo sapien
caccgtaggcaggatactcttgaag

SEQ ID NO: 5476118 - DNA, 25 bp, Homo sapien
gcccaccgtaggcaggatactcttg

SEQ ID NO: 5476119 - DNA, 25 bp, Homo sapien
agaaccagcttgaacacacggggct

SEQ ID NO: 5476120 - DNA, 25 bp, Homo sapien
aggagaaccagcttgaacacacggg

SEQ ID NO: 5476121 - DNA, 25 bp, Homo sapien
ccagcttgaacacacggggctggct

SEQ ID NO: 5476122 - DNA, 25 bp, Homo sapien
aaccagcttgaacacacggggctgg

SEQ ID NO: 5476123 - DNA, 25 bp, Homo sapien
tcactgccgccagtaaggagccatg

SEQ ID NO: 5476124 - DNA, 25 bp, Homo sapien
ctgccgccagtaaggagccatggcc

SEQ ID NO: 5476125 - DNA, 25 bp, Homo sapien
tggccacagactggtctggtctgcc

SEQ ID NO: 5476126 - DNA, 25 bp, Homo sapien
gtaaggagccatggccacagactgg

SEQ ID NO: 5476127 - DNA, 25 bp, Homo sapien
tactccaatggaaaacagccgcaga

SEQ ID NO: 5476128 - DNA, 25 bp, Homo sapien
gaaaaaccaacagcccagaagagaa

SEQ ID NO: 5476129 - DNA, 25 bp, Homo sapien
gagctgtatggaatctttgttgcac

SEQ ID NO: 5476130 - DNA, 25 bp, Homo sapien
gcacccaactggagcccgtttttca

SEQ ID NO: 5476131 - DNA, 25 bp, Homo sapien
tttgggtctcatcccgcggggctgc

SEQ ID NO: 5476132 - DNA, 25 bp, Homo sapien
tgggaaataagctccgccaccacag

SEQ ID NO: 5476133 - DNA, 25 bp, Homo sapien
tcgtttgggtctcatcccgcggggc

SEQ ID NO: 5476134 - DNA, 25 bp, Homo sapien
ataagctccgccaccacagtggttc

SEQ ID NO: 5476135 - DNA, 25 bp, Homo sapien
tttacgttactgtaggacagcagat

SEQ ID NO: 5476136 - DNA, 25 bp, Homo sapien
ctggtgatcctttacgttactgtag

SEQ ID NO: 5476137 - DNA, 25 bp, Homo sapien
gatcctttacgttactgtaggacag

SEQ ID NO: 5476138 - DNA, 25 bp, Homo sapien
cctttacgttactgtaggacagcag

SEQ ID NO: 5476139 - DNA, 25 bp, Homo sapien
cacatagatgtggtatcgtgcacaa

SEQ ID NO: 5476140 - DNA, 25 bp, Homo sapien
cagtatccataatgccacatagatg

SEQ ID NO: 5476141 - DNA, 25 bp, Homo sapien
cgcccagacagtatccataatgcca

SEQ ID NO: 5476142 - DNA, 25 bp, Homo sapien
catagatgtggtatcgtgcacaatc

SEQ ID NO: 5476143 - DNA, 25 bp, Homo sapien
gaggcacgagaagcccacgtggcag

SEQ ID NO: 5476144 - DNA, 25 bp, Homo sapien
gcacgagaagcccacgtggcagcca

SEQ ID NO: 5476145 - DNA, 25 bp, Homo sapien
acgagaagcccacgtggcagccaag

SEQ ID NO: 5476146 - DNA, 25 bp, Homo sapien
agaagcccacgtggcagccaagaag

SEQ ID NO: 5476147 - DNA, 25 bp, Homo sapien
cctgggccccggaagcacaatgcca

SEQ ID NO: 5476148 - DNA, 25 bp, Homo sapien
agtaaacacagtcccgtgtggtgtc

SEQ ID NO: 5476149 - DNA, 25 bp, Homo sapien
gacagtaaacacagtcccgtgtggt

SEQ ID NO: 5476150 - DNA, 25 bp, Homo sapien
ggcagacagtaaacacagtcccgtg

SEQ ID NO: 5476151 - DNA, 25 bp, Homo sapien
gtggtgtcggccggctggagctcat

SEQ ID NO: 5476152 - DNA, 25 bp, Homo sapien
ctttgcagtcactgtcaatcgtcat

SEQ ID NO: 5476153 - DNA, 25 bp, Homo sapien
cagcatggaggtcagattggcaaag

SEQ ID NO: 5476154 - DNA, 25 bp, Homo sapien
agcatggaggtcagattggcaaagc

SEQ ID NO: 5476155 - DNA, 25 bp, Homo sapien
caggagccggtcagcatggaggtca

SEQ ID NO: 5476156 - DNA, 25 bp, Homo sapien
tgcaggagccggtcagcatggaggt

SEQ ID NO: 5476157 - DNA, 25 bp, Homo sapien
tatcgtcgagtcctgatgatactca

SEQ ID NO: 5476158 - DNA, 25 bp, Homo sapien
atcgtcgagtcctgatgatactcac

SEQ ID NO: 5476159 - DNA, 25 bp, Homo sapien
ttatcgtcgagtcctgatgatactc

SEQ ID NO: 5476160 - DNA, 25 bp, Homo sapien
accgaatgccatgggtatctgaggc

SEQ ID NO: 5476161 - DNA, 25 bp, Homo sapien
ttctgtaggagaaccgaatgccatg

SEQ ID NO: 5476162 - DNA, 25 bp, Homo sapien
taggagaaccgaatgccatgggtat

SEQ ID NO: 5476163 - DNA, 25 bp, Homo sapien
gaaccgaatgccatgggtatctgag

SEQ ID NO: 5476164 - DNA, 25 bp, Homo sapien
ctgcttttaccctccagaactgctg

SEQ ID NO: 5476165 - DNA, 25 bp, Homo sapien
gctgcagcagccgccctagagccat

SEQ ID NO: 5476166 - DNA, 25 bp, Homo sapien
gcttttaccctccagaactgctgca

SEQ ID NO: 5476167 - DNA, 25 bp, Homo sapien
tgcttttaccctccagaactgctgc

SEQ ID NO: 5476168 - DNA, 25 bp, Homo sapien
tgattgagctactgaaagatgcacc

SEQ ID NO: 5476169 - DNA, 25 bp, Homo sapien
cctgaaaacgtccagcaggacaaag

SEQ ID NO: 5476170 - DNA, 25 bp, Homo sapien
gattgtctcagacaccctaccctgg

SEQ ID NO: 5476171 - DNA, 25 bp, Homo sapien
tggtatcagcaaacatgccaaagga

SEQ ID NO: 5476172 - DNA, 25 bp, Homo sapien
aaagcagggctttccatcctctggg

SEQ ID NO: 5476173 - DNA, 25 bp, Homo sapien
cagagtgagtcacgttatggcccac

SEQ ID NO: 5476174 - DNA, 25 bp, Homo sapien
cacgcggatgatgctctcaatggac

SEQ ID NO: 5476175 - DNA, 25 bp, Homo sapien
tgaaagaggtttgaggtaggcccac

SEQ ID NO: 5476176 - DNA, 25 bp, Homo sapien
cccaagttgactcgtgggcctgcgg

SEQ ID NO: 5476177 - DNA, 25 bp, Homo sapien
cgggtgctgttggttcaggcctcac

SEQ ID NO: 5476178 - DNA, 25 bp, Homo sapien
cacacaggagtccagttgcggagaa

SEQ ID NO: 5476179 - DNA, 25 bp, Homo sapien
tttcacttgagccacggccacacag

SEQ ID NO: 5476180 - DNA, 25 bp, Homo sapien
gggtctggactcatacaccagctcc

SEQ ID NO: 5476181 - DNA, 25 bp, Homo sapien
gaactctaggttttcgattctaggc

SEQ ID NO: 5476182 - DNA, 25 bp, Homo sapien
gcagggtctggactcatacaccagc

SEQ ID NO: 5476183 - DNA, 25 bp, Homo sapien
aggttttcgattctaggctccaggt

SEQ ID NO: 5476184 - DNA, 25 bp, Homo sapien
ccagcagtgacaaaggaggtgccag

SEQ ID NO: 5476185 - DNA, 25 bp, Homo sapien
cttgccaccgccaaagccagcagtg

SEQ ID NO: 5476186 - DNA, 25 bp, Homo sapien
aggagctctctctgtactccggacc

SEQ ID NO: 5476187 - DNA, 25 bp, Homo sapien
ccctctcctccgacttgccaccgcc

SEQ ID NO: 5476188 - DNA, 25 bp, Homo sapien
ttcttcgatattctaaataatcagt

SEQ ID NO: 5476189 - DNA, 25 bp, Homo sapien
taaataatcagtacagcttccgaca

SEQ ID NO: 5476190 - DNA, 25 bp, Homo sapien
aataatcagtacagcttccgacagc

SEQ ID NO: 5476191 - DNA, 25 bp, Homo sapien
tgtttcttcgatattctaaataatc

SEQ ID NO: 5476192 - DNA, 25 bp, Homo sapien
cttgcttgctttacttggattctga

SEQ ID NO: 5476193 - DNA, 25 bp, Homo sapien
tggattctgacactccactcgcgtg

SEQ ID NO: 5476194 - DNA, 25 bp, Homo sapien
tgagtccacgagtctttttgcttgg

SEQ ID NO: 5476195 - DNA, 25 bp, Homo sapien
aatagaggcagtgtatgagtccacg

SEQ ID NO: 5476196 - DNA, 25 bp, Homo sapien
gggaggccctcagtggtcgtcccat

SEQ ID NO: 5476197 - DNA, 25 bp, Homo sapien
actgggaggccctcagtggtcgtcc

SEQ ID NO: 5476198 - DNA, 25 bp, Homo sapien
ctgggaggccctcagtggtcgtccc

SEQ ID NO: 5476199 - DNA, 25 bp, Homo sapien
gtgcaggtggtgacggcggatcttt

SEQ ID NO: 5476200 - DNA, 25 bp, Homo sapien
ttagtgaaaagtaggtgcaggtggt

SEQ ID NO: 5476201 - DNA, 25 bp, Homo sapien
taggtgcaggtggtgacggcggatc

SEQ ID NO: 5476202 - DNA, 25 bp, Homo sapien
gtttagtgaaaagtaggtgcaggtg

SEQ ID NO: 5476203 - DNA, 25 bp, Homo sapien
ggtccatcagcaaatgacggggcct

SEQ ID NO: 5476204 - DNA, 25 bp, Homo sapien
atcagcaaatgacggggcctcggcg

SEQ ID NO: 5476205 - DNA, 25 bp, Homo sapien
tgtggcagtgtgttcagctgctggc

SEQ ID NO: 5476206 - DNA, 25 bp, Homo sapien
ggtgtggcagtgtgttcagctgctg

SEQ ID NO: 5476207 - DNA, 25 bp, Homo sapien
tgcggtgaatagcattgcagtgaac

SEQ ID NO: 5476208 - DNA, 25 bp, Homo sapien
aactggcagctaactgattcttagg

SEQ ID NO: 5476209 - DNA, 25 bp, Homo sapien
caaacacggttaaggacctggagct

SEQ ID NO: 5476210 - DNA, 25 bp, Homo sapien
tgagagtgtcttgttcatcacagga

SEQ ID NO: 5476211 - DNA, 25 bp, Homo sapien
gtttccattcttcacgaagcatgag

SEQ ID NO: 5476212 - DNA, 25 bp, Homo sapien
tttaggcgaagaacagacttaccac

SEQ ID NO: 5476213 - DNA, 25 bp, Homo sapien
tttacaatacgatgaccgtgctccg

SEQ ID NO: 5476214 - DNA, 25 bp, Homo sapien
caggtattgctatagctaagccaca

SEQ ID NO: 5476215 - DNA, 25 bp, Homo sapien
gagatgggacaatgcggggacagcg

SEQ ID NO: 5476216 - DNA, 25 bp, Homo sapien
caatgcggggacagcgctgggaggg

SEQ ID NO: 5476217 - DNA, 25 bp, Homo sapien
ggacaatgcggggacagcgctggga

SEQ ID NO: 5476218 - DNA, 25 bp, Homo sapien
tgtaggagatgggacaatgcgggga

SEQ ID NO: 5476219 - DNA, 25 bp, Homo sapien
aagacggacagctgcctgaaagacg

SEQ ID NO: 5476220 - DNA, 25 bp, Homo sapien
ttaaacctagtccaagctaactgag

SEQ ID NO: 5476221 - DNA, 25 bp, Homo sapien
cgcaacttctctaacctggatgtaa

SEQ ID NO: 5476222 - DNA, 25 bp, Homo sapien
aactgagtgatgctagaccttcccg

SEQ ID NO: 5476223 - DNA, 25 bp, Homo sapien
gagccaaggttgtatgtagtgagcc

SEQ ID NO: 5476224 - DNA, 25 bp, Homo sapien
gctactgtgtatagaggaggttact

SEQ ID NO: 5476225 - DNA, 25 bp, Homo sapien
gatagcttgagacaaggttgcagtg

SEQ ID NO: 5476226 - DNA, 25 bp, Homo sapien
gctttactggaggtgtttgtggcca

SEQ ID NO: 5476227 - DNA, 25 bp, Homo sapien
aactaatcggtagtgtgtgctgagg

SEQ ID NO: 5476228 - DNA, 25 bp, Homo sapien
tgtggcttccaggagatgtctctat

SEQ ID NO: 5476229 - DNA, 25 bp, Homo sapien
tcccatgtaagtgtctcaaggttcc

SEQ ID NO: 5476230 - DNA, 25 bp, Homo sapien
ggtgcctgttagactcctccactga

SEQ ID NO: 5476231 - DNA, 25 bp, Homo sapien
gctcgttccgaggtcaatggcaggc

SEQ ID NO: 5476232 - DNA, 25 bp, Homo sapien
atacagcatcaaggaccgggtggcc

SEQ ID NO: 5476233 - DNA, 25 bp, Homo sapien
cctcatgcgctaggaagcacgcttt

SEQ ID NO: 5476234 - DNA, 25 bp, Homo sapien
aaactttctttcgtgactgcggcgg

SEQ ID NO: 5476235 - DNA, 25 bp, Homo sapien
gaacatccgccactgagagcggtgg

SEQ ID NO: 5476236 - DNA, 25 bp, Homo sapien
ggtcaagatatctcgccctgttgca

SEQ ID NO: 5476237 - DNA, 25 bp, Homo sapien
gccctgttgcaaattcggcggaaca

SEQ ID NO: 5476238 - DNA, 25 bp, Homo sapien
gtcacaggggtcaagatatctcgcc

SEQ ID NO: 5476239 - DNA, 25 bp, Homo sapien
tcttccctcacgaccgtggcttgcg

SEQ ID NO: 5476240 - DNA, 25 bp, Homo sapien
ggcttcctcatcaccgatgcctgca

SEQ ID NO: 5476241 - DNA, 25 bp, Homo sapien
tggatctgcagtctcggcttcctca

SEQ ID NO: 5476242 - DNA, 25 bp, Homo sapien
tcaccttttgcacggtcctctgtgg

SEQ ID NO: 5476243 - DNA, 25 bp, Homo sapien
ctgtgacacagggcgggcgtcgtgg

SEQ ID NO: 5476244 - DNA, 25 bp, Homo sapien
cacagggcgggcgtcgtgggcgcgg

SEQ ID NO: 5476245 - DNA, 25 bp, Homo sapien
gggttggtcacggaccaggagccag

SEQ ID NO: 5476246 - DNA, 25 bp, Homo sapien
tcgtgggcgcggctgtggactcctg

SEQ ID NO: 5476247 - DNA, 25 bp, Homo sapien
tggacatggcagacaggaagctgcc

SEQ ID NO: 5476248 - DNA, 25 bp, Homo sapien
gggaagccactccttgtggcagcag

SEQ ID NO: 5476249 - DNA, 25 bp, Homo sapien
gagaaatgaacgtggccaagatggt

SEQ ID NO: 5476250 - DNA, 25 bp, Homo sapien
tgaggacaccgagtgaagcagctct

SEQ ID NO: 5476251 - DNA, 25 bp, Homo sapien
gcatgcaggcgtttctgagcaggct

SEQ ID NO: 5476252 - DNA, 25 bp, Homo sapien
tgcatgcaggcgtttctgagcaggc

SEQ ID NO: 5476253 - DNA, 25 bp, Homo sapien
ctgcatgcaggcgtttctgagcagg

SEQ ID NO: 5476254 - DNA, 25 bp, Homo sapien
cagtagccgttctgaatctgctttt

SEQ ID NO: 5476255 - DNA, 25 bp, Homo sapien
tttgggattccctgattgagtggca

SEQ ID NO: 5476256 - DNA, 25 bp, Homo sapien
gagtggcagcagtagccgttctgaa

SEQ ID NO: 5476257 - DNA, 25 bp, Homo sapien
tccctgattgagtggcagcagtagc

SEQ ID NO: 5476258 - DNA, 25 bp, Homo sapien
gggaggatctctcttcacagctcac

SEQ ID NO: 5476259 - DNA, 25 bp, Homo sapien
gaagcttcgtcctgggctctcttgc

SEQ ID NO: 5476260 - DNA, 25 bp, Homo sapien
ctgctgggccggctttactgtcctg

SEQ ID NO: 5476261 - DNA, 25 bp, Homo sapien
caacaccggaatggctctgagcttc

SEQ ID NO: 5476262 - DNA, 25 bp, Homo sapien
cctgaaggactttacctaaaagcag

SEQ ID NO: 5476263 - DNA, 25 bp, Homo sapien
gaatcaatagtagcatacatctgca

SEQ ID NO: 5476264 - DNA, 25 bp, Homo sapien
tgtcagtgttatacttcaaggaaga

SEQ ID NO: 5476265 - DNA, 25 bp, Homo sapien
tatgctttctaaaagtctgtcagtg

SEQ ID NO: 5476266 - DNA, 25 bp, Homo sapien
gaaattgctttgcaggctttcctgc

SEQ ID NO: 5476267 - DNA, 25 bp, Homo sapien
tggaaattgctttgcaggctttcct

SEQ ID NO: 5476268 - DNA, 25 bp, Homo sapien
catggaaattgctttgcaggctttc

SEQ ID NO: 5476269 - DNA, 25 bp, Homo sapien
tcatggaaattgctttgcaggcttt

SEQ ID NO: 5476270 - DNA, 25 bp, Homo sapien
ttttctgtcccgagagctggttttg

SEQ ID NO: 5476271 - DNA, 25 bp, Homo sapien
tctgtcccgagagctggttttgtct

SEQ ID NO: 5476272 - DNA, 25 bp, Homo sapien
gatggcgtctccttccatttttacc

SEQ ID NO: 5476273 - DNA, 25 bp, Homo sapien
tttgtctctgatgcttgacagctct

SEQ ID NO: 5476274 - DNA, 25 bp, Homo sapien
tgaaaaataaagtaggagggctgga

SEQ ID NO: 5476275 - DNA, 25 bp, Homo sapien
aaactagtatagaggatatacccca

SEQ ID NO: 5476276 - DNA, 25 bp, Homo sapien
cacgatgaacttttgcgtttaacta

SEQ ID NO: 5476277 - DNA, 25 bp, Homo sapien
gcgtttaactatagattgactagaa

SEQ ID NO: 5476278 - DNA, 25 bp, Homo sapien
acaccagctcgaatgtgaattgtgg

SEQ ID NO: 5476279 - DNA, 25 bp, Homo sapien
cagtgtgctgcgtttgaccacacca

SEQ ID NO: 5476280 - DNA, 25 bp, Homo sapien
tgtgctgcgtttgaccacaccagct

SEQ ID NO: 5476281 - DNA, 25 bp, Homo sapien
tgaccacaccagctcgaatgtgaat

SEQ ID NO: 5476282 - DNA, 25 bp, Homo sapien
caaccccttcatgtccagggagact

SEQ ID NO: 5476283 - DNA, 25 bp, Homo sapien
ccttcatgtccagggagactgcaga

SEQ ID NO: 5476284 - DNA, 25 bp, Homo sapien
aaccccttcatgtccagggagactg

SEQ ID NO: 5476285 - DNA, 25 bp, Homo sapien
catgtccagggagactgcagaaggt

SEQ ID NO: 5476286 - DNA, 25 bp, Homo sapien
aggtcatgctcctggcacgtgtcag

SEQ ID NO: 5476287 - DNA, 25 bp, Homo sapien
tgacaacgactaaaaccggtctctc

SEQ ID NO: 5476288 - DNA, 25 bp, Homo sapien
tgtcgcactctgcaaccctttgaag

SEQ ID NO: 5476289 - DNA, 25 bp, Homo sapien
gctggaaaggtggttctcagcctcc

SEQ ID NO: 5476290 - DNA, 25 bp, Homo sapien
gacgaatttgcgtgtcccagggacc

SEQ ID NO: 5476291 - DNA, 25 bp, Homo sapien
gtgctaaccggtgctccctggcggt

SEQ ID NO: 5476292 - DNA, 25 bp, Homo sapien
gaaacggagcgttcagtgctaaccg

SEQ ID NO: 5476293 - DNA, 25 bp, Homo sapien
cattctcgtccctggatagttgagg

SEQ ID NO: 5476294 - DNA, 25 bp, Homo sapien
aaataacagggctcaatatagtcac

SEQ ID NO: 5476295 - DNA, 25 bp, Homo sapien
tggttccagtgagacatgacaattg

SEQ ID NO: 5476296 - DNA, 25 bp, Homo sapien
catacgaaattgaccgaagagactg

SEQ ID NO: 5476297 - DNA, 25 bp, Homo sapien
tactttcagtgaatcccaaacacgc

SEQ ID NO: 5476298 - DNA, 25 bp, Homo sapien
tctagctgggcacataaacttcttg

SEQ ID NO: 5476299 - DNA, 25 bp, Homo sapien
gaacccgggttcagatgtcacagct

SEQ ID NO: 5476300 - DNA, 25 bp, Homo sapien
cctgggagacagaactaagctagct

SEQ ID NO: 5476301 - DNA, 25 bp, Homo sapien
tagaaagacggtgagcacaggcagc

SEQ ID NO: 5476302 - DNA, 25 bp, Homo sapien
caccgaggcatccatcagggaaatc

SEQ ID NO: 5476303 - DNA, 25 bp, Homo sapien
tcgacaccgaggcatccatcaggga

SEQ ID NO: 5476304 - DNA, 25 bp, Homo sapien
gacaccgaggcatccatcagggaaa

SEQ ID NO: 5476305 - DNA, 25 bp, Homo sapien
accgaggcatccatcagggaaatca

SEQ ID NO: 5476306 - DNA, 25 bp, Homo sapien
cctggttcataagccagagtagggc

SEQ ID NO: 5476307 - DNA, 25 bp, Homo sapien
tgtctttccaggacctacccagtga

SEQ ID NO: 5476308 - DNA, 25 bp, Homo sapien
ggctctttcacaagggctggtcaca

SEQ ID NO: 5476309 - DNA, 25 bp, Homo sapien
gaatgttaacaataggctgcgtgca

SEQ ID NO: 5476310 - DNA, 25 bp, Homo sapien
gaacccttagatatgaaagagcccg

SEQ ID NO: 5476311 - DNA, 25 bp, Homo sapien
tgacaaatgtatggtagaggtcccc

SEQ ID NO: 5476312 - DNA, 25 bp, Homo sapien
gaggttccagcgcacagtacagaag

SEQ ID NO: 5476313 - DNA, 25 bp, Homo sapien
gagcccgatgaagaaaagagtgacc

SEQ ID NO: 5476314 - DNA, 25 bp, Homo sapien
tgcagtatttgagcagggacagtca

SEQ ID NO: 5476315 - DNA, 25 bp, Homo sapien
gactgtaccatgtcctaagctgagg

SEQ ID NO: 5476316 - DNA, 25 bp, Homo sapien
gaacgatgacttgtcggcaccagga

SEQ ID NO: 5476317 - DNA, 25 bp, Homo sapien
gagagcattccagtagtatcaaaca

SEQ ID NO: 5476318 - DNA, 25 bp, Homo sapien
caagggctctataggacttcacagg

SEQ ID NO: 5476319 - DNA, 25 bp, Homo sapien
tgctaggaaataagtccaagggctc

SEQ ID NO: 5476320 - DNA, 25 bp, Homo sapien
gaactgagacgattgtcacgcacca

SEQ ID NO: 5476321 - DNA, 25 bp, Homo sapien
tgttattcaccagcaccctgcagga

SEQ ID NO: 5476322 - DNA, 25 bp, Homo sapien
taagaagactctttacaggcaacaa

SEQ ID NO: 5476323 - DNA, 25 bp, Homo sapien
tgggacttcctttcatggcagaatc

SEQ ID NO: 5476324 - DNA, 25 bp, Homo sapien
caatttgagcgacttcagtagtatc

SEQ ID NO: 5476325 - DNA, 25 bp, Homo sapien
ttaggcaatagcttcactgaaaatg

SEQ ID NO: 5476326 - DNA, 25 bp, Homo sapien
tggaacacgtcctgggtccaaggtc

SEQ ID NO: 5476327 - DNA, 25 bp, Homo sapien
gccgtaccataatctaagcccaggg

SEQ ID NO: 5476328 - DNA, 25 bp, Homo sapien
caaggtctaaaacccctcatggcct

SEQ ID NO: 5476329 - DNA, 25 bp, Homo sapien
gtgctaaagagtggaaggctgccct

SEQ ID NO: 5476330 - DNA, 25 bp, Homo sapien
ggccgctggtgactgttacccaaca

SEQ ID NO: 5476331 - DNA, 25 bp, Homo sapien
ttcatactgcccgacaggcggtggg

SEQ ID NO: 5476332 - DNA, 25 bp, Homo sapien
ttccttgggcggcactggagttccg

SEQ ID NO: 5476333 - DNA, 25 bp, Homo sapien
tttctagcggatccgaggtgcgacg

SEQ ID NO: 5476334 - DNA, 25 bp, Homo sapien
ccatggtttgataggaattgatata

SEQ ID NO: 5476335 - DNA, 25 bp, Homo sapien
ctccatggtttgataggaattgata

SEQ ID NO: 5476336 - DNA, 25 bp, Homo sapien
tgctccatggtttgataggaattga

SEQ ID NO: 5476337 - DNA, 25 bp, Homo sapien
ctttgctccatggtttgataggaat

SEQ ID NO: 5476338 - DNA, 25 bp, Homo sapien
tataatctgaaagcggatcttgcca

SEQ ID NO: 5476339 - DNA, 25 bp, Homo sapien
acaagacctctttggcgctggcact

SEQ ID NO: 5476340 - DNA, 25 bp, Homo sapien
gttacgtggaaagcagaatctcgca

SEQ ID NO: 5476341 - DNA, 25 bp, Homo sapien
taggttactggcgtgggagaaccca

SEQ ID NO: 5476342 - DNA, 25 bp, Homo sapien
gggctccgagaatggcgtacctggg

SEQ ID NO: 5476343 - DNA, 25 bp, Homo sapien
ctagatcgagctcatggggtacaca

SEQ ID NO: 5476344 - DNA, 25 bp, Homo sapien
aacgtttgagatgggtgtctgtccc

SEQ ID NO: 5476345 - DNA, 25 bp, Homo sapien
tgggaatcctgcccaagagcctcct

SEQ ID NO: 5476346 - DNA, 25 bp, Homo sapien
aggactgtcttgagtctgacaccac

SEQ ID NO: 5476347 - DNA, 25 bp, Homo sapien
tgttctcccggaccacgtatcccca

SEQ ID NO: 5476348 - DNA, 25 bp, Homo sapien
tcaggaaggactgtcttgagtctga

SEQ ID NO: 5476349 - DNA, 25 bp, Homo sapien
tatccccacacgagtctcaggaagg

SEQ ID NO: 5476350 - DNA, 25 bp, Homo sapien
ttagcacgtgaattgtttggaagca

SEQ ID NO: 5476351 - DNA, 25 bp, Homo sapien
ggtttctctcccgatactcattgct

SEQ ID NO: 5476352 - DNA, 25 bp, Homo sapien
gctggcgtgggaatgaaacgtcatc

SEQ ID NO: 5476353 - DNA, 25 bp, Homo sapien
gctggatcccctgagtttgcctctg

SEQ ID NO: 5476354 - DNA, 25 bp, Homo sapien
gcgggaaccacaaccatgacttagt

SEQ ID NO: 5476355 - DNA, 25 bp, Homo sapien
aaccacaaccatgacttagtgtgca

SEQ ID NO: 5476356 - DNA, 25 bp, Homo sapien
gggcagagcgggaaccacaaccatg

SEQ ID NO: 5476357 - DNA, 25 bp, Homo sapien
cagagcgggaaccacaaccatgact

SEQ ID NO: 5476358 - DNA, 25 bp, Homo sapien
ttggagctcatctaacatcttattt

SEQ ID NO: 5476359 - DNA, 25 bp, Homo sapien
ttacagaggcttccgactttttctc

SEQ ID NO: 5476360 - DNA, 25 bp, Homo sapien
cttacagaggcttccgactttttct

SEQ ID NO: 5476361 - DNA, 25 bp, Homo sapien
ttctggctttaagaagtatgcttgg

SEQ ID NO: 5476362 - DNA, 25 bp, Homo sapien
agggacagatcgtggcaactgaagg

SEQ ID NO: 5476363 - DNA, 25 bp, Homo sapien
tcgcaacccaccagggacagatcgt

SEQ ID NO: 5476364 - DNA, 25 bp, Homo sapien
ggggacagaggcctcgcaacccacc

SEQ ID NO: 5476365 - DNA, 25 bp, Homo sapien
acagatcgtggcaactgaaggggcc

SEQ ID NO: 5476366 - DNA, 25 bp, Homo sapien
tgcccagtgagagcccccgaagcct

SEQ ID NO: 5476367 - DNA, 25 bp, Homo sapien
tcaggagctcccagtacagcatctg

SEQ ID NO: 5476368 - DNA, 25 bp, Homo sapien
cctcgtgggtttgttcatggcggtg

SEQ ID NO: 5476369 - DNA, 25 bp, Homo sapien
catggcggtgtccgccctggaactt

SEQ ID NO: 5476370 - DNA, 25 bp, Homo sapien
tccctgaggcctgtcgtgagcatca

SEQ ID NO: 5476371 - DNA, 25 bp, Homo sapien
tcgctgaaggctcgtgaagcccggc

SEQ ID NO: 5476372 - DNA, 25 bp, Homo sapien
ggatgcccgaacagggaccagcatg

SEQ ID NO: 5476373 - DNA, 25 bp, Homo sapien
ctaccccgatggaggcggccagttg

SEQ ID NO: 5476374 - DNA, 25 bp, Homo sapien
tcttgtacagagagggtgagtatgc

SEQ ID NO: 5476375 - DNA, 25 bp, Homo sapien
tgtggcactcagctatcatgaggtg

SEQ ID NO: 5476376 - DNA, 25 bp, Homo sapien
ctcccgtgtggcactcagctatcat

SEQ ID NO: 5476377 - DNA, 25 bp, Homo sapien
catgaggtgtgcatccgtccaggtg

SEQ ID NO: 5476378 - DNA, 25 bp, Homo sapien
tcagctatcatgaggtgtgcatccg

SEQ ID NO: 5476379 - DNA, 25 bp, Homo sapien
tagccgaggctctggtattaacctg

SEQ ID NO: 5476380 - DNA, 25 bp, Homo sapien
gcttaccccatagccacatttgtgg

SEQ ID NO: 5476381 - DNA, 25 bp, Homo sapien
gcagggacgtgaccttgacttacct

SEQ ID NO: 5476382 - DNA, 25 bp, Homo sapien
tggaaagggtcccagcctagactgc

SEQ ID NO: 5476383 - DNA, 25 bp, Homo sapien
gcagcaggggcttgtcatcccgctt

SEQ ID NO: 5476384 - DNA, 25 bp, Homo sapien
ttcccaagcaggtgcattcacgggc

SEQ ID NO: 5476385 - DNA, 25 bp, Homo sapien
gcacatcatggcacgttctcattgt

SEQ ID NO: 5476386 - DNA, 25 bp, Homo sapien
tcacgggcattggtgaaaggcagca

SEQ ID NO: 5476387 - DNA, 25 bp, Homo sapien
ccagccaggacaagttgtgggaaaa

SEQ ID NO: 5476388 - DNA, 25 bp, Homo sapien
ggatggagtcctgccctggcccgct

SEQ ID NO: 5476389 - DNA, 25 bp, Homo sapien
tggcccgctgttccccaggaaggct

SEQ ID NO: 5476390 - DNA, 25 bp, Homo sapien
ccccagccaggacaagttgtgggaa

SEQ ID NO: 5476391 - DNA, 25 bp, Homo sapien
tgcccagcgcgatgacacgggaccg

SEQ ID NO: 5476392 - DNA, 25 bp, Homo sapien
aggggcgcagcttgccctgtggacc

SEQ ID NO: 5476393 - DNA, 25 bp, Homo sapien
caactaggctcgctggagggcaggg

SEQ ID NO: 5476394 - DNA, 25 bp, Homo sapien
gaaaacaggggcgcagcttgccctg

SEQ ID NO: 5476395 - DNA, 25 bp, Homo sapien
caggggagccacgagggccctgcgg

SEQ ID NO: 5476396 - DNA, 25 bp, Homo sapien
gggcgcgcgcgagccaggggagcca

SEQ ID NO: 5476397 - DNA, 25 bp, Homo sapien
gagggccctgcggggagcgagcccg

SEQ ID NO: 5476398 - DNA, 25 bp, Homo sapien
cgcgagccaggggagccacgagggc

SEQ ID NO: 5476399 - DNA, 25 bp, Homo sapien
aggcctgcacttgagtgtcctgggc

SEQ ID NO: 5476400 - DNA, 25 bp, Homo sapien
caacgacactcagcccttgacaggt

SEQ ID NO: 5476401 - DNA, 25 bp, Homo sapien
tgaagtagatttgagaaggctccac

SEQ ID NO: 5476402 - DNA, 25 bp, Homo sapien
caggaacaccagatgaagccggagg

SEQ ID NO: 5476403 - DNA, 25 bp, Homo sapien
atctctatccagcagatgtgtttta

SEQ ID NO: 5476404 - DNA, 25 bp, Homo sapien
cagcgcatgcaatctctatccagca

SEQ ID NO: 5476405 - DNA, 25 bp, Homo sapien
tgccgccagcgcatgcaatctctat

SEQ ID NO: 5476406 - DNA, 25 bp, Homo sapien
accaggactcatgccgccagcgcat

SEQ ID NO: 5476407 - DNA, 25 bp, Homo sapien
catgttccaggatgggaaagggggt

SEQ ID NO: 5476408 - DNA, 25 bp, Homo sapien
caggatgggaaagggggtggcagga

SEQ ID NO: 5476409 - DNA, 25 bp, Homo sapien
gcatgttccaggatgggaaaggggg

SEQ ID NO: 5476410 - DNA, 25 bp, Homo sapien
ttccaggatgggaaagggggtggca

SEQ ID NO: 5476411 - DNA, 25 bp, Homo sapien
tcagggaaggatagcccgggctcct

SEQ ID NO: 5476412 - DNA, 25 bp, Homo sapien
tcctttgcactccaggtgcggcgct

SEQ ID NO: 5476413 - DNA, 25 bp, Homo sapien
tgcggcgctggacagcgggagctcc

SEQ ID NO: 5476414 - DNA, 25 bp, Homo sapien
cacggaggccgctccttcagggaag

SEQ ID NO: 5476415 - DNA, 25 bp, Homo sapien
ctgcctgccttgtacggaggaagcg

SEQ ID NO: 5476416 - DNA, 25 bp, Homo sapien
gcagaaaccgggactggactcccga

SEQ ID NO: 5476417 - DNA, 25 bp, Homo sapien
tcgcgggatcggctgcctgccttgt

SEQ ID NO: 5476418 - DNA, 25 bp, Homo sapien
ggagtgacaactcgcgcccggtcct

SEQ ID NO: 5476419 - DNA, 25 bp, Homo sapien
cactggcattctgtagaagagtggg

SEQ ID NO: 5476420 - DNA, 25 bp, Homo sapien
aaccagcgtactcctgtgccgagca

SEQ ID NO: 5476421 - DNA, 25 bp, Homo sapien
ctgggctccaaagatggtcggtcaa

SEQ ID NO: 5476422 - DNA, 25 bp, Homo sapien
tactgctgaacgtaaaaggggctgg

SEQ ID NO: 5476423 - DNA, 25 bp, Homo sapien
agtgacccgcagtcccatcctttat

SEQ ID NO: 5476424 - DNA, 25 bp, Homo sapien
cgtctccattcggaaggaattgtaa

SEQ ID NO: 5476425 - DNA, 25 bp, Homo sapien
tcctttatgcttggattgagacgtc

SEQ ID NO: 5476426 - DNA, 25 bp, Homo sapien
ggaagttgagtgtcccctagtgacc

SEQ ID NO: 5476427 - DNA, 25 bp, Homo sapien
acaagtgacatggcctggttttgcc

SEQ ID NO: 5476428 - DNA, 25 bp, Homo sapien
aagtgacatggcctggttttgccat

SEQ ID NO: 5476429 - DNA, 25 bp, Homo sapien
caagtgacatggcctggttttgcca

SEQ ID NO: 5476430 - DNA, 25 bp, Homo sapien
tcacttgatggcactagtaagttgc

SEQ ID NO: 5476431 - DNA, 25 bp, Homo sapien
tgatggcactagtaagttgcacacc

SEQ ID NO: 5476432 - DNA, 25 bp, Homo sapien
gagtaaatatcacttgatggcacta

SEQ ID NO: 5476433 - DNA, 25 bp, Homo sapien
tgctgagtaaatatcacttgatggc

SEQ ID NO: 5476434 - DNA, 25 bp, Homo sapien
tgtggaacccattggtgagggcatg

SEQ ID NO: 5476435 - DNA, 25 bp, Homo sapien
gaacccattggtgagggcatgctgg

SEQ ID NO: 5476436 - DNA, 25 bp, Homo sapien
acccattggtgagggcatgctggtt

SEQ ID NO: 5476437 - DNA, 25 bp, Homo sapien
tggaacccattggtgagggcatgct

SEQ ID NO: 5476438 - DNA, 25 bp, Homo sapien
tggtccttaaccctgctttcattgc

SEQ ID NO: 5476439 - DNA, 25 bp, Homo sapien
tggtctcaaagggtcccggacggca

SEQ ID NO: 5476440 - DNA, 25 bp, Homo sapien
taaactgaagcgtgacgatggtctc

SEQ ID NO: 5476441 - DNA, 25 bp, Homo sapien
gctaacgctagcaagtaaactgaag

SEQ ID NO: 5476442 - DNA, 25 bp, Homo sapien
tgcttcagtgcctgaggagttgcag

SEQ ID NO: 5476443 - DNA, 25 bp, Homo sapien
gttgctgtacttggagtagacagtg

SEQ ID NO: 5476444 - DNA, 25 bp, Homo sapien
tgtcttctcagattccgggctccat

SEQ ID NO: 5476445 - DNA, 25 bp, Homo sapien
cttggagtagacagtgagtgcttca

SEQ ID NO: 5476446 - DNA, 25 bp, Homo sapien
cagatggcagtagggctgagcttat

SEQ ID NO: 5476447 - DNA, 25 bp, Homo sapien
tgatgtggtgcagatggcagtaggg

SEQ ID NO: 5476448 - DNA, 25 bp, Homo sapien
ggctgagcttataggaggcaggagc

SEQ ID NO: 5476449 - DNA, 25 bp, Homo sapien
tagggctgagcttataggaggcagg

SEQ ID NO: 5476450 - DNA, 25 bp, Homo sapien
cctcttgaaccttttgcttgtgtca

SEQ ID NO: 5476451 - DNA, 25 bp, Homo sapien
tgtcactagactgtcctcttgaacc

SEQ ID NO: 5476452 - DNA, 25 bp, Homo sapien
tagactgtcctcttgaaccttttgc

SEQ ID NO: 5476453 - DNA, 25 bp, Homo sapien
ctcttcccttgtcactagactgtcc

SEQ ID NO: 5476454 - DNA, 25 bp, Homo sapien
tgttgggtggtgtggtccgaggttc

SEQ ID NO: 5476455 - DNA, 25 bp, Homo sapien
acctgtgagatgtgaccagtgttgg

SEQ ID NO: 5476456 - DNA, 25 bp, Homo sapien
tcacacctgtgagatgtgaccagtg

SEQ ID NO: 5476457 - DNA, 25 bp, Homo sapien
gtccgaggttctgttgtctttctcc

SEQ ID NO: 5476458 - DNA, 25 bp, Homo sapien
acttccatttgccgtggtgactgtg

SEQ ID NO: 5476459 - DNA, 25 bp, Homo sapien
catgtttagttcaccaccagtggtg

SEQ ID NO: 5476460 - DNA, 25 bp, Homo sapien
tggatgtctgtggtgctaagagaac

SEQ ID NO: 5476461 - DNA, 25 bp, Homo sapien
tgaactgagaagtttagcataggcc

SEQ ID NO: 5476462 - DNA, 25 bp, Homo sapien
caaacagcgaattataaaggctgcc

SEQ ID NO: 5476463 - DNA, 25 bp, Homo sapien
tcagctaacagtaaccccaggtaat

SEQ ID NO: 5476464 - DNA, 25 bp, Homo sapien
tgtaaagtgcattttcctgatccaa

SEQ ID NO: 5476465 - DNA, 25 bp, Homo sapien
tcactgccagaccttcctgatgtgc

SEQ ID NO: 5476466 - DNA, 25 bp, Homo sapien
ctcccatagtactgggattccagcc

SEQ ID NO: 5476467 - DNA, 25 bp, Homo sapien
tcccatagtactgggattccagcca

SEQ ID NO: 5476468 - DNA, 25 bp, Homo sapien
tagtactgggattccagccatgagc

SEQ ID NO: 5476469 - DNA, 25 bp, Homo sapien
catagtactgggattccagccatga

SEQ ID NO: 5476470 - DNA, 25 bp, Homo sapien
tctttcacgaatgttggccctgcct

SEQ ID NO: 5476471 - DNA, 25 bp, Homo sapien
aatcagctcttgctttcgggtccgg

SEQ ID NO: 5476472 - DNA, 25 bp, Homo sapien
cctgcctagatgttgtgaagcctcc

SEQ ID NO: 5476473 - DNA, 25 bp, Homo sapien
gattggcaataagatacccgctaca

SEQ ID NO: 5476474 - DNA, 25 bp, Homo sapien
gaggtgaagcggggaacggatcact

SEQ ID NO: 5476475 - DNA, 25 bp, Homo sapien
atttgttgttaagtttgcagggagc

SEQ ID NO: 5476476 - DNA, 25 bp, Homo sapien
ggtgaagcggggaacggatcacttg

SEQ ID NO: 5476477 - DNA, 25 bp, Homo sapien
ttgttgttaagtttgcagggagctg

SEQ ID NO: 5476478 - DNA, 25 bp, Homo sapien
cctgctagctatcttgtaagagcac

SEQ ID NO: 5476479 - DNA, 25 bp, Homo sapien
agcccaagatccctgaacaagacac

SEQ ID NO: 5476480 - DNA, 25 bp, Homo sapien
tgaatgtatctgacccttgccacct

SEQ ID NO: 5476481 - DNA, 25 bp, Homo sapien
cacatgggtctcctgtagattctct

SEQ ID NO: 5476482 - DNA, 25 bp, Homo sapien
ctgggtaacagagtttgcatgagct

SEQ ID NO: 5476483 - DNA, 25 bp, Homo sapien
caatattcaaaatgcgatctagagc

SEQ ID NO: 5476484 - DNA, 25 bp, Homo sapien
gtgaaatctcgcctctattacaaat

SEQ ID NO: 5476485 - DNA, 25 bp, Homo sapien
tctagagccgggagtggtagctcat

SEQ ID NO: 5476486 - DNA, 25 bp, Homo sapien
tcccagactgacctgtcatctgagg

SEQ ID NO: 5476487 - DNA, 25 bp, Homo sapien
tgatggaggatctgttttgcgcccc

SEQ ID NO: 5476488 - DNA, 25 bp, Homo sapien
gcgccactcagtagcaatctcttga

SEQ ID NO: 5476489 - DNA, 25 bp, Homo sapien
ttggcaagcagtgctgttccccgag

SEQ ID NO: 5476490 - DNA, 25 bp, Homo sapien
ccaagctcggaaagcctctgctgac

SEQ ID NO: 5476491 - DNA, 25 bp, Homo sapien
ggaccccaagctcggaaagcctctg

SEQ ID NO: 5476492 - DNA, 25 bp, Homo sapien
caccatggaccccaagctcggaaag

SEQ ID NO: 5476493 - DNA, 25 bp, Homo sapien
atggaccccaagctcggaaagcctc

SEQ ID NO: 5476494 - DNA, 25 bp, Homo sapien
aagaggacacataggtgccgctgac

SEQ ID NO: 5476495 - DNA, 25 bp, Homo sapien
ttcatgataatcacgttttcccacg

SEQ ID NO: 5476496 - DNA, 25 bp, Homo sapien
cacgtgacaacagaacaagaggaca

SEQ ID NO: 5476497 - DNA, 25 bp, Homo sapien
catcaacagcgagggcagcacctgt

SEQ ID NO: 5476498 - DNA, 25 bp, Homo sapien
tttgtcatttccatgcgtggcgttc

SEQ ID NO: 5476499 - DNA, 25 bp, Homo sapien
gctgcccgggccagattcttggcct

SEQ ID NO: 5476500 - DNA, 25 bp, Homo sapien
catttccatgcgtggcgttcccacg

SEQ ID NO: 5476501 - DNA, 25 bp, Homo sapien
ggctgcccgggccagattcttggcc

SEQ ID NO: 5476502 - DNA, 25 bp, Homo sapien
taaggagagtttcacgacggcctct

SEQ ID NO: 5476503 - DNA, 25 bp, Homo sapien
caaagtagccaaaagggcggcgtgc

SEQ ID NO: 5476504 - DNA, 25 bp, Homo sapien
catcttctctattcaggcagggaca

SEQ ID NO: 5476505 - DNA, 25 bp, Homo sapien
cttgagagctttgcacgaagggaca

SEQ ID NO: 5476506 - DNA, 25 bp, Homo sapien
ccctgccaccgtgagtggaagcttc

SEQ ID NO: 5476507 - DNA, 25 bp, Homo sapien
cccctgccaccgtgagtggaagctt

SEQ ID NO: 5476508 - DNA, 25 bp, Homo sapien
caatggcttaaggagagagggcaca

SEQ ID NO: 5476509 - DNA, 25 bp, Homo sapien
tgcaaattagatgacgtcgtgggct

SEQ ID NO: 5476510 - DNA, 25 bp, Homo sapien
tagactaggacaggaatctccatgg

SEQ ID NO: 5476511 - DNA, 25 bp, Homo sapien
tggaggccacacaacaagctgactt

SEQ ID NO: 5476512 - DNA, 25 bp, Homo sapien
cccgggccgtgacatgagggcccaa

SEQ ID NO: 5476513 - DNA, 25 bp, Homo sapien
aaaggtccttcctctggaggaagag

SEQ ID NO: 5476514 - DNA, 25 bp, Homo sapien
gagggcccaagaatgaggattagat

SEQ ID NO: 5476515 - DNA, 25 bp, Homo sapien
acttcatcggcaaaggtccttcctc

SEQ ID NO: 5476516 - DNA, 25 bp, Homo sapien
tctgctgctccttgatctgcgcaat

SEQ ID NO: 5476517 - DNA, 25 bp, Homo sapien
gcgcaattctttgctaagctccacc

SEQ ID NO: 5476518 - DNA, 25 bp, Homo sapien
actttgaaatgtgaacgcagacaca

SEQ ID NO: 5476519 - DNA, 25 bp, Homo sapien
agtgatccccgttctgtggccattc

SEQ ID NO: 5476520 - DNA, 25 bp, Homo sapien
tcctgtcctcaatgctggcctgaaa

SEQ ID NO: 5476521 - DNA, 25 bp, Homo sapien
cagaaccgattggatttgggcctct

SEQ ID NO: 5476522 - DNA, 25 bp, Homo sapien
ggatagtgttacaggaggctgcccc

SEQ ID NO: 5476523 - DNA, 25 bp, Homo sapien
taactttttcacatggcaacggctc

SEQ ID NO: 5476524 - DNA, 25 bp, Homo sapien
ggacttacccctgccgggcagattc

SEQ ID NO: 5476525 - DNA, 25 bp, Homo sapien
gtaagtccatgggacttacccctgc

SEQ ID NO: 5476526 - DNA, 25 bp, Homo sapien
cccatatcctatgggaaaaggggtg

SEQ ID NO: 5476527 - DNA, 25 bp, Homo sapien
aactctacaccattcccatatccta

SEQ ID NO: 5476528 - DNA, 25 bp, Homo sapien
gaaggtagagctactccccgagtta

SEQ ID NO: 5476529 - DNA, 25 bp, Homo sapien
catgaccacgtttggagcagccagg

SEQ ID NO: 5476530 - DNA, 25 bp, Homo sapien
agccctgcagctgagaaacctgttg

SEQ ID NO: 5476531 - DNA, 25 bp, Homo sapien
tagagtgctggtttcacggaaggct

SEQ ID NO: 5476532 - DNA, 25 bp, Homo sapien
ccaaatgaatggttctatttcctga

SEQ ID NO: 5476533 - DNA, 25 bp, Homo sapien
ttaccaaatgaatggttctatttcc

SEQ ID NO: 5476534 - DNA, 25 bp, Homo sapien
caatgtcccagtcctcaaactgaaa

SEQ ID NO: 5476535 - DNA, 25 bp, Homo sapien
actgtacaatgtcccagtcctcaaa

SEQ ID NO: 5476536 - DNA, 25 bp, Homo sapien
gtgggaagcagaatttccgggccat

SEQ ID NO: 5476537 - DNA, 25 bp, Homo sapien
cgtgggaagcagaatttccgggcca

SEQ ID NO: 5476538 - DNA, 25 bp, Homo sapien
ctcacgtgggaagcagaatttccgg

SEQ ID NO: 5476539 - DNA, 25 bp, Homo sapien
cacgtgggaagcagaatttccgggc

SEQ ID NO: 5476540 - DNA, 25 bp, Homo sapien
ccttttaagtcaataccatgcgtgc

SEQ ID NO: 5476541 - DNA, 25 bp, Homo sapien
agtcccacaggagtacacaaaacac

SEQ ID NO: 5476542 - DNA, 25 bp, Homo sapien
accatgcgtgctcctggccgcgcgc

SEQ ID NO: 5476543 - DNA, 25 bp, Homo sapien
ttatttacaaccatgggagtcccac

SEQ ID NO: 5476544 - DNA, 25 bp, Homo sapien
gttgcaggctgcttcgtagcgggcg

SEQ ID NO: 5476545 - DNA, 25 bp, Homo sapien
caccatcacagtgacgttgtcggcc

SEQ ID NO: 5476546 - DNA, 25 bp, Homo sapien
atcacagtgacgttgtcggccgagc

SEQ ID NO: 5476547 - DNA, 25 bp, Homo sapien
gggcgtcggctgcggacttcccttc

SEQ ID NO: 5476548 - DNA, 25 bp, Homo sapien
gaatgagtgaatggagtgaccccgc

SEQ ID NO: 5476549 - DNA, 25 bp, Homo sapien
gcacaagggctgtcccacaatggga

SEQ ID NO: 5476550 - DNA, 25 bp, Homo sapien
ggctggcaggacaaactgaccagtg

SEQ ID NO: 5476551 - DNA, 25 bp, Homo sapien
agacacaattgggacaaccaccacc

SEQ ID NO: 5476552 - DNA, 25 bp, Homo sapien
caagatgaagttcacggcttcttct

SEQ ID NO: 5476553 - DNA, 25 bp, Homo sapien
agatgaagttcacggcttcttctgg

SEQ ID NO: 5476554 - DNA, 25 bp, Homo sapien
gacaggacaagatgaagttcacggc

SEQ ID NO: 5476555 - DNA, 25 bp, Homo sapien
ggacaagatgaagttcacggcttct

SEQ ID NO: 5476556 - DNA, 25 bp, Homo sapien
tgtccaactattcaaaggctaaggt

SEQ ID NO: 5476557 - DNA, 25 bp, Homo sapien
tatacatcaaaactgagactatcct

SEQ ID NO: 5476558 - DNA, 25 bp, Homo sapien
gactatccttctcttcgccaattaa

SEQ ID NO: 5476559 - DNA, 25 bp, Homo sapien
tacttacaagtatttgtggatagga

SEQ ID NO: 5476560 - DNA, 25 bp, Homo sapien
cttgtactgcccgtccccaatggag

SEQ ID NO: 5476561 - DNA, 25 bp, Homo sapien
caatggagcgtgacacctctagcac

SEQ ID NO: 5476562 - DNA, 25 bp, Homo sapien
ctggcagcgtctgatgtcgggcaca

SEQ ID NO: 5476563 - DNA, 25 bp, Homo sapien
acaccgcagcgcttgtactgcccgt

SEQ ID NO: 5476564 - DNA, 25 bp, Homo sapien
tacctgacagattatgggtccacag

SEQ ID NO: 5476565 - DNA, 25 bp, Homo sapien
gtgctgcccagcttaaccttcgaca

SEQ ID NO: 5476566 - DNA, 25 bp, Homo sapien
gggtccacagtacttagaatctcac

SEQ ID NO: 5476567 - DNA, 25 bp, Homo sapien
gaagtgtgaaagatacagactgtgg

SEQ ID NO: 5476568 - DNA, 25 bp, Homo sapien
tcctttgcatcaagtacaggtacgg

SEQ ID NO: 5476569 - DNA, 25 bp, Homo sapien
tttggaaaatccctgaaagtggcta

SEQ ID NO: 5476570 - DNA, 25 bp, Homo sapien
gaagagacatctaagggacagtcct

SEQ ID NO: 5476571 - DNA, 25 bp, Homo sapien
gcatagcatcatagtttcacccatt

SEQ ID NO: 5476572 - DNA, 25 bp, Homo sapien
acaaagtacctctcccatgaccagg

SEQ ID NO: 5476573 - DNA, 25 bp, Homo sapien
gaagcagctcacagtgtaagtacta

SEQ ID NO: 5476574 - DNA, 25 bp, Homo sapien
cagcaacttctggtactgcacaaca

SEQ ID NO: 5476575 - DNA, 25 bp, Homo sapien
tgtctggtgtggcttccggccatcc

SEQ ID NO: 5476576 - DNA, 25 bp, Homo sapien
agtagtggcattttaagtctcagcc

SEQ ID NO: 5476577 - DNA, 25 bp, Homo sapien
caagtagtggcattttaagtctcag

SEQ ID NO: 5476578 - DNA, 25 bp, Homo sapien
gccaagtagtggcattttaagtctc

SEQ ID NO: 5476579 - DNA, 25 bp, Homo sapien
tctcagcctaccaagccaatctgcc

SEQ ID NO: 5476580 - DNA, 25 bp, Homo sapien
tgagactgagacatcctactacttg

SEQ ID NO: 5476581 - DNA, 25 bp, Homo sapien
caaagactggtggatgcctaaatcc

SEQ ID NO: 5476582 - DNA, 25 bp, Homo sapien
tacaatgagtgctacagagataacc

SEQ ID NO: 5476583 - DNA, 25 bp, Homo sapien
ttaaggctaatctggctgctaaagg

SEQ ID NO: 5476584 - DNA, 25 bp, Homo sapien
gaacttgactggtacctcctatgag

SEQ ID NO: 5476585 - DNA, 25 bp, Homo sapien
ccaacagtactgctttagtgaggta

SEQ ID NO: 5476586 - DNA, 25 bp, Homo sapien
tatttcacttttgcgcacagtgcca

SEQ ID NO: 5476587 - DNA, 25 bp, Homo sapien
tgggtatatacgcagaggtggaact

SEQ ID NO: 5476588 - DNA, 25 bp, Homo sapien
ggtaccagtgaacctccccagatta

SEQ ID NO: 5476589 - DNA, 25 bp, Homo sapien
gagcagcagaaaaccccatgactgt

SEQ ID NO: 5476590 - DNA, 25 bp, Homo sapien
atgacgcaaggcaacaggagcatcc

SEQ ID NO: 5476591 - DNA, 25 bp, Homo sapien
cagaatgcccgctaatacatgtgaa

SEQ ID NO: 5476592 - DNA, 25 bp, Homo sapien
cctggtctaattcataatgcaatgt

SEQ ID NO: 5476593 - DNA, 25 bp, Homo sapien
cctcctttagctgccttggatagaa

SEQ ID NO: 5476594 - DNA, 25 bp, Homo sapien
acaaaccagaaaatactcctggtct

SEQ ID NO: 5476595 - DNA, 25 bp, Homo sapien
agcagataataaaaccagagcagac

SEQ ID NO: 5476596 - DNA, 25 bp, Homo sapien
ggaggcaagtttccttccacgtgga

SEQ ID NO: 5476597 - DNA, 25 bp, Homo sapien
tcaccagtgttagatctcagacaga

SEQ ID NO: 5476598 - DNA, 25 bp, Homo sapien
gacagagcctcgtcacactgaagac

SEQ ID NO: 5476599 - DNA, 25 bp, Homo sapien
gcccgccaccacgaaaagtgacagt

SEQ ID NO: 5476600 - DNA, 25 bp, Homo sapien
tgacgtttcctccagccttctgtat

SEQ ID NO: 5476601 - DNA, 25 bp, Homo sapien
tcatccgctcttcatactgagttgg

SEQ ID NO: 5476602 - DNA, 25 bp, Homo sapien
tctttgctgaggcttaaggctgcat

SEQ ID NO: 5476603 - DNA, 25 bp, Homo sapien
gactctcctcattataacgacacaa

SEQ ID NO: 5476604 - DNA, 25 bp, Homo sapien
ccgactatctccgaggttggcaata

SEQ ID NO: 5476605 - DNA, 25 bp, Homo sapien
gaatgttgtctacagccagaacaca

SEQ ID NO: 5476606 - DNA, 25 bp, Homo sapien
tggcagtggacccatctttccaggc

SEQ ID NO: 5476607 - DNA, 25 bp, Homo sapien
ggttggcaatataaagaatgttgtc

SEQ ID NO: 5476608 - DNA, 25 bp, Homo sapien
aagtgtccaaaaggcatctcttcac

SEQ ID NO: 5476609 - DNA, 25 bp, Homo sapien
gaactcttcatcagtatgcttgaaa

SEQ ID NO: 5476610 - DNA, 25 bp, Homo sapien
catctcttcacggttttctctacac

SEQ ID NO: 5476611 - DNA, 25 bp, Homo sapien
aggaactcttcatcagtatgcttga

SEQ ID NO: 5476612 - DNA, 25 bp, Homo sapien
tggaagccttggcatccactcctca

SEQ ID NO: 5476613 - DNA, 25 bp, Homo sapien
attctaagtcacacctgcatggccg

SEQ ID NO: 5476614 - DNA, 25 bp, Homo sapien
ccaaagacgattgacaaaaggtgcc

SEQ ID NO: 5476615 - DNA, 25 bp, Homo sapien
catggccgctactcctggaagcctt

SEQ ID NO: 5476616 - DNA, 25 bp, Homo sapien
gttttgatgcaaattctgtgcagca

SEQ ID NO: 5476617 - DNA, 25 bp, Homo sapien
cagcaaattttgaggctcgaattcc

SEQ ID NO: 5476618 - DNA, 25 bp, Homo sapien
attttgaggctcgaattcctccatg

SEQ ID NO: 5476619 - DNA, 25 bp, Homo sapien
tcctccatgtccatcaaaaacagca

SEQ ID NO: 5476620 - DNA, 25 bp, Homo sapien
tttacagaaactaacacggcgcagc

SEQ ID NO: 5476621 - DNA, 25 bp, Homo sapien
caaggcatgatgtagtgttcccaat

SEQ ID NO: 5476622 - DNA, 25 bp, Homo sapien
aaaatacttgtgtgtgggccaggtg

SEQ ID NO: 5476623 - DNA, 25 bp, Homo sapien
taaatttacactcaatggatctgcc

SEQ ID NO: 5476624 - DNA, 25 bp, Homo sapien
gggcctacactcctcggtgatgtcg

SEQ ID NO: 5476625 - DNA, 25 bp, Homo sapien
tgtcgttcaggatgacgtgggcatc

SEQ ID NO: 5476626 - DNA, 25 bp, Homo sapien
gccacatagcccttcagaccaaaga

SEQ ID NO: 5476627 - DNA, 25 bp, Homo sapien
ttcagaccaaagatcaccgaagagg

SEQ ID NO: 5476628 - DNA, 25 bp, Homo sapien
cctagtcccagagcaaatgagaggg

SEQ ID NO: 5476629 - DNA, 25 bp, Homo sapien
cactgttggacagggtgagctctaa

SEQ ID NO: 5476630 - DNA, 25 bp, Homo sapien
tctagggtgtaagtcaaagcatcag

SEQ ID NO: 5476631 - DNA, 25 bp, Homo sapien
gactcagcaatatcctaatggcgca

SEQ ID NO: 5476632 - DNA, 25 bp, Homo sapien
gaggtaatctgtgacaaaggacaat

SEQ ID NO: 5476633 - DNA, 25 bp, Homo sapien
tgaggtaatctgtgacaaaggacaa

SEQ ID NO: 5476634 - DNA, 25 bp, Homo sapien
gaatactttagtaccacaactgaag

SEQ ID NO: 5476635 - DNA, 25 bp, Homo sapien
tagtaccacaactgaagtattctct

SEQ ID NO: 5476636 - DNA, 25 bp, Homo sapien
cagctcaagaatactttagtaccac

SEQ ID NO: 5476637 - DNA, 25 bp, Homo sapien
cccacagctcaagaatactttagta

SEQ ID NO: 5476638 - DNA, 25 bp, Homo sapien
caaaaaactaaccattcactgcaga

SEQ ID NO: 5476639 - DNA, 25 bp, Homo sapien
tttccaggcttagggaagctgccta

SEQ ID NO: 5476640 - DNA, 25 bp, Homo sapien
ttgacaaactgcaaacaaagattgg

SEQ ID NO: 5476641 - DNA, 25 bp, Homo sapien
taactcttgaggaacaaatgtaggt

SEQ ID NO: 5476642 - DNA, 25 bp, Homo sapien
ctttcccttcagtctttaccatctg

SEQ ID NO: 5476643 - DNA, 25 bp, Homo sapien
cttcagtctttaccatctgggatat

SEQ ID NO: 5476644 - DNA, 25 bp, Homo sapien
tcccttcagtctttaccatctggga

SEQ ID NO: 5476645 - DNA, 25 bp, Homo sapien
cagtctttaccatctgggatattga

SEQ ID NO: 5476646 - DNA, 25 bp, Homo sapien
ggtcccacagtgagagaacataaag

SEQ ID NO: 5476647 - DNA, 25 bp, Homo sapien
gaacataaagttaagatccaggccc

SEQ ID NO: 5476648 - DNA, 25 bp, Homo sapien
gaatctgtactcaaagctaagggaa

SEQ ID NO: 5476649 - DNA, 25 bp, Homo sapien
gtaacaagtactcgaaaaggctcaa

SEQ ID NO: 5476650 - DNA, 25 bp, Homo sapien
cgggtgggagatcatcaaaaagcaa

SEQ ID NO: 5476651 - DNA, 25 bp, Homo sapien
gctagcgggtgggagatcatcaaaa

SEQ ID NO: 5476652 - DNA, 25 bp, Homo sapien
cactgctagcgggtgggagatcatc

SEQ ID NO: 5476653 - DNA, 25 bp, Homo sapien
ctgaatcgccactgctagcgggtgg

SEQ ID NO: 5476654 - DNA, 25 bp, Homo sapien
ccaccaggacacctatgtaggttac

SEQ ID NO: 5476655 - DNA, 25 bp, Homo sapien
aaaactttgcgtcaatccagtggca

SEQ ID NO: 5476656 - DNA, 25 bp, Homo sapien
catttcctcgcagtacttctcaggg

SEQ ID NO: 5476657 - DNA, 25 bp, Homo sapien
tccagtggcaactcatactgcaatg

SEQ ID NO: 5476658 - DNA, 25 bp, Homo sapien
ctagcgactagcagatttttctgcc

SEQ ID NO: 5476659 - DNA, 25 bp, Homo sapien
ttcaaaacttaaagacagtccaaca

SEQ ID NO: 5476660 - DNA, 25 bp, Homo sapien
aaagacagtccaacacctaaaacat

SEQ ID NO: 5476661 - DNA, 25 bp, Homo sapien
taaagacagtccaacacctaaaaca

SEQ ID NO: 5476662 - DNA, 25 bp, Homo sapien
tcaaaacttaaagacagtccaacac

SEQ ID NO: 5476663 - DNA, 25 bp, Homo sapien
aggatgagtagagacgttgacacac

SEQ ID NO: 5476664 - DNA, 25 bp, Homo sapien
aactacaatcccaggatgagtagag

SEQ ID NO: 5476665 - DNA, 25 bp, Homo sapien
aaaagattgagacaactacaatccc

SEQ ID NO: 5476666 - DNA, 25 bp, Homo sapien
gatgagtagagacgttgacacacac

SEQ ID NO: 5476667 - DNA, 25 bp, Homo sapien
gtcagtactgctggccggagggagg

SEQ ID NO: 5476668 - DNA, 25 bp, Homo sapien
tggccggagggaggtcatcaaagag

SEQ ID NO: 5476669 - DNA, 25 bp, Homo sapien
tactgctggccggagggaggtcatc

SEQ ID NO: 5476670 - DNA, 25 bp, Homo sapien
agtcagtactgctggccggagggag

SEQ ID NO: 5476671 - DNA, 25 bp, Homo sapien
ctgcaaagttcaacacaccaaccaa

SEQ ID NO: 5476672 - DNA, 25 bp, Homo sapien
tatacacgttcacctcctgcaaagt

SEQ ID NO: 5476673 - DNA, 25 bp, Homo sapien
tcagagttcaagtataaaaacgtgc

SEQ ID NO: 5476674 - DNA, 25 bp, Homo sapien
tgaactggcacacaagaatccaagt

SEQ ID NO: 5476675 - DNA, 25 bp, Homo sapien
tatgggtatgacataggaaagttcc

SEQ ID NO: 5476676 - DNA, 25 bp, Homo sapien
tgaaatcaagttactggcgaagcaa

SEQ ID NO: 5476677 - DNA, 25 bp, Homo sapien
catcaggtcggcacttttatgggta

SEQ ID NO: 5476678 - DNA, 25 bp, Homo sapien
gacaccttcaactgacatacatgga

SEQ ID NO: 5476679 - DNA, 25 bp, Homo sapien
catttaagactgcgtttttccactt

SEQ ID NO: 5476680 - DNA, 25 bp, Homo sapien
attcatttaagactgcgtttttcca

SEQ ID NO: 5476681 - DNA, 25 bp, Homo sapien
tcatttaagactgcgtttttccact

SEQ ID NO: 5476682 - DNA, 25 bp, Homo sapien
ttcatttaagactgcgtttttccac

SEQ ID NO: 5476683 - DNA, 25 bp, Homo sapien
tcgggctccggcaggtccccgaaga

SEQ ID NO: 5476684 - DNA, 25 bp, Homo sapien
cgctcgggctccggcaggtccccga

SEQ ID NO: 5476685 - DNA, 25 bp, Homo sapien
gccgggcgcggcgagcgctcgggct

SEQ ID NO: 5476686 - DNA, 25 bp, Homo sapien
gcggcgagcgctcgggctccggcag

SEQ ID NO: 5476687 - DNA, 25 bp, Homo sapien
gcggcagcagcgacagacactcagc

SEQ ID NO: 5476688 - DNA, 25 bp, Homo sapien
gggagagtcccggacgccaccaatc

SEQ ID NO: 5476689 - DNA, 25 bp, Homo sapien
cactcagcccgcgagcagcggccgg

SEQ ID NO: 5476690 - DNA, 25 bp, Homo sapien
gcggccggcgccgtcagtcacctgc

SEQ ID NO: 5476691 - DNA, 25 bp, Homo sapien
ggcccacagagggtactgccgttga

SEQ ID NO: 5476692 - DNA, 25 bp, Homo sapien
cattaggtactactccaagcccagt

SEQ ID NO: 5476693 - DNA, 25 bp, Homo sapien
tatgtaggcaacagaccatttggtc

SEQ ID NO: 5476694 - DNA, 25 bp, Homo sapien
tggttcttgcccgatgcctgctata

SEQ ID NO: 5476695 - DNA, 25 bp, Homo sapien
tcctgttgagtgttcatctctcagc

SEQ ID NO: 5476696 - DNA, 25 bp, Homo sapien
tctctgcaaccggtagtcccaaggt

SEQ ID NO: 5476697 - DNA, 25 bp, Homo sapien
tctgtaagcaagtcgtcctgttgag

SEQ ID NO: 5476698 - DNA, 25 bp, Homo sapien
tattgactgttagaacagcctgaag

SEQ ID NO: 5476699 - DNA, 25 bp, Homo sapien
atgagaagctttttaatactaccag

SEQ ID NO: 5476700 - DNA, 25 bp, Homo sapien
gaggtgtgatcacctagctaatttt

SEQ ID NO: 5476701 - DNA, 25 bp, Homo sapien
caaacaatcttctggtcctggcctc

SEQ ID NO: 5476702 - DNA, 25 bp, Homo sapien
ctgcacccagcatgagaagcttttt

SEQ ID NO: 5476703 - DNA, 25 bp, Homo sapien
agcagggaggattaactagatgtga

SEQ ID NO: 5476704 - DNA, 25 bp, Homo sapien
gtccagtaacatgtgaatggcacac

SEQ ID NO: 5476705 - DNA, 25 bp, Homo sapien
taactagatgtgacaaagtccagta

SEQ ID NO: 5476706 - DNA, 25 bp, Homo sapien
ggaggattaactagatgtgacaaag

SEQ ID NO: 5476707 - DNA, 25 bp, Homo sapien
gctgagagccggcaaatgtccgtcg

SEQ ID NO: 5476708 - DNA, 25 bp, Homo sapien
gcaaatgtccgtcgccaggtgttgg

SEQ ID NO: 5476709 - DNA, 25 bp, Homo sapien
gcaatgtaaaattcccgcatcgctg

SEQ ID NO: 5476710 - DNA, 25 bp, Homo sapien
ggtgggtgtatatccagacgcgcaa

SEQ ID NO: 5476711 - DNA, 25 bp, Homo sapien
ggcggctggggtaaaacacagtatc

SEQ ID NO: 5476712 - DNA, 25 bp, Homo sapien
cccgcgacccctcggaggctctcca

SEQ ID NO: 5476713 - DNA, 25 bp, Homo sapien
tgggcggctggggtaaaacacagta

SEQ ID NO: 5476714 - DNA, 25 bp, Homo sapien
ggagcgcccgcgacccctcggaggc

SEQ ID NO: 5476715 - DNA, 25 bp, Homo sapien
gatggatcaagttgtggaaagaagg

SEQ ID NO: 5476716 - DNA, 25 bp, Homo sapien
aagtggccaagccttacgggggatg

SEQ ID NO: 5476717 - DNA, 25 bp, Homo sapien
ctgggcgaggggagacacggagcgt

SEQ ID NO: 5476718 - DNA, 25 bp, Homo sapien
cacggagcgtcctcaaaacaggggg

SEQ ID NO: 5476719 - DNA, 25 bp, Homo sapien
agggcaatgcccaaaagtgaccaca

SEQ ID NO: 5476720 - DNA, 25 bp, Homo sapien
cagccacgctaagtgcccaaggtga

SEQ ID NO: 5476721 - DNA, 25 bp, Homo sapien
cagctgtggcccatgtggatacgtg

SEQ ID NO: 5476722 - DNA, 25 bp, Homo sapien
tgacggccacatggatgacaggaca

SEQ ID NO: 5476723 - DNA, 25 bp, Homo sapien
tgtttgaaggcactaaactgcgggc

SEQ ID NO: 5476724 - DNA, 25 bp, Homo sapien
gacagagtgaagagagcgctgccct

SEQ ID NO: 5476725 - DNA, 25 bp, Homo sapien
tgcagcagagaactgagcgaggcct

SEQ ID NO: 5476726 - DNA, 25 bp, Homo sapien
gggagaattcccttcggctgcagga

SEQ ID NO: 5476727 - DNA, 25 bp, Homo sapien
agcgaggtcgggcatgcacgagctc

SEQ ID NO: 5476728 - DNA, 25 bp, Homo sapien
cagggagccgtgaggagcgaggtcg

SEQ ID NO: 5476729 - DNA, 25 bp, Homo sapien
gggctgcgtggactctgataagcct

SEQ ID NO: 5476730 - DNA, 25 bp, Homo sapien
gctgcgtggactctgataagccttc

SEQ ID NO: 5476731 - DNA, 25 bp, Homo sapien
ccttggtgcagactgggtcttaggc

SEQ ID NO: 5476732 - DNA, 25 bp, Homo sapien
ccagaggacaggatctgcacggact

SEQ ID NO: 5476733 - DNA, 25 bp, Homo sapien
cacacactgtacttgtagggcacaa

SEQ ID NO: 5476734 - DNA, 25 bp, Homo sapien
tgccacagaacctgtgcagggccca

SEQ ID NO: 5476735 - DNA, 25 bp, Homo sapien
ccattccccggctgtcctcctgctg

SEQ ID NO: 5476736 - DNA, 25 bp, Homo sapien
aagtgcgggcccattccccggctgt

SEQ ID NO: 5476737 - DNA, 25 bp, Homo sapien
cattccccggctgtcctcctgctgt

SEQ ID NO: 5476738 - DNA, 25 bp, Homo sapien
ctgggcaagtgcgggcccattcccc

SEQ ID NO: 5476739 - DNA, 25 bp, Homo sapien
tctgcatgagggaggtgctcagacc

SEQ ID NO: 5476740 - DNA, 25 bp, Homo sapien
ggtgaacatgggagccggggctctg

SEQ ID NO: 5476741 - DNA, 25 bp, Homo sapien
gccggggctctgtctgcatgaggga

SEQ ID NO: 5476742 - DNA, 25 bp, Homo sapien
ctctgtctgcatgagggaggtgctc

SEQ ID NO: 5476743 - DNA, 25 bp, Homo sapien
gcagggcgggaacaaggtggaggaa

SEQ ID NO: 5476744 - DNA, 25 bp, Homo sapien
tgggattcctgagaggcgacagcca

SEQ ID NO: 5476745 - DNA, 25 bp, Homo sapien
gatccagaacatgaagggaggagca

SEQ ID NO: 5476746 - DNA, 25 bp, Homo sapien
cagggaggtgtctccatggaccgtc

SEQ ID NO: 5476747 - DNA, 25 bp, Homo sapien
tcatacagattacagcctagaagct

SEQ ID NO: 5476748 - DNA, 25 bp, Homo sapien
gtgctcaacacattcgcgaggggag

SEQ ID NO: 5476749 - DNA, 25 bp, Homo sapien
ggggagcgctgagcaaagcggaggc

SEQ ID NO: 5476750 - DNA, 25 bp, Homo sapien
ggcctcaagcgtccgctccttcact

SEQ ID NO: 5476751 - DNA, 25 bp, Homo sapien
ccctccaaggcctcaagcgtccgct

SEQ ID NO: 5476752 - DNA, 25 bp, Homo sapien
tgcttaacgggcagcgcgagtccct

SEQ ID NO: 5476753 - DNA, 25 bp, Homo sapien
tcaatcgttgatttcggctgcactt

SEQ ID NO: 5476754 - DNA, 25 bp, Homo sapien
cctccgtcccgggatgtcggagaga

SEQ ID NO: 5476755 - DNA, 25 bp, Homo sapien
ttctcaagcgtaaatcgggcggcgg

SEQ ID NO: 5476756 - DNA, 25 bp, Homo sapien
tcatctccccgctgaagtggcaagt

SEQ ID NO: 5476757 - DNA, 25 bp, Homo sapien
caaactcaagtgtgctacaaacaag

SEQ ID NO: 5476758 - DNA, 25 bp, Homo sapien
cacatttgatgtcaatggaatacac

SEQ ID NO: 5476759 - DNA, 25 bp, Homo sapien
gcgctggcagctctacaaaattctt

SEQ ID NO: 5476760 - DNA, 25 bp, Homo sapien
ctgcccgtagctccctccctccacc

SEQ ID NO: 5476761 - DNA, 25 bp, Homo sapien
gagctgcagggtccctaaaagtttc

SEQ ID NO: 5476762 - DNA, 25 bp, Homo sapien
cagagctgcagggtccctaaaagtt

SEQ ID NO: 5476763 - DNA, 25 bp, Homo sapien
tccagagctgcagggtccctaaaag

SEQ ID NO: 5476764 - DNA, 25 bp, Homo sapien
accacatctgaacccctgggaggag

SEQ ID NO: 5476765 - DNA, 25 bp, Homo sapien
ccctgcaagccatccatcagaggag

SEQ ID NO: 5476766 - DNA, 25 bp, Homo sapien
gacctgggagacttccagggcccta

SEQ ID NO: 5476767 - DNA, 25 bp, Homo sapien
ggaagacctgggagacttccagggc

SEQ ID NO: 5476768 - DNA, 25 bp, Homo sapien
ctccgggcaatttgggctgtggtca

SEQ ID NO: 5476769 - DNA, 25 bp, Homo sapien
tcggagcacaggtcgtccccaggac

SEQ ID NO: 5476770 - DNA, 25 bp, Homo sapien
ctcacgcagcggcatggactcgagc

SEQ ID NO: 5476771 - DNA, 25 bp, Homo sapien
gactcgagcagatggttcaggagct

SEQ ID NO: 5476772 - DNA, 25 bp, Homo sapien
gacacgaacgtgtgcacctcgtgca

SEQ ID NO: 5476773 - DNA, 25 bp, Homo sapien
tggacacgaacgtgtgcacctcgtg

SEQ ID NO: 5476774 - DNA, 25 bp, Homo sapien
cacgtggacacgaacgtgtgcacct

SEQ ID NO: 5476775 - DNA, 25 bp, Homo sapien
ctggcacgtggacacgaacgtgtgc

SEQ ID NO: 5476776 - DNA, 25 bp, Homo sapien
gcagcgaagcgctcgctcgcttccg

SEQ ID NO: 5476777 - DNA, 25 bp, Homo sapien
gaagcgctcgctcgcttccgcctgc

SEQ ID NO: 5476778 - DNA, 25 bp, Homo sapien
tagccggcagcgaagcgctcgctcg

SEQ ID NO: 5476779 - DNA, 25 bp, Homo sapien
gcgaagcgctcgctcgcttccgcct

SEQ ID NO: 5476780 - DNA, 25 bp, Homo sapien
gggcgcaccctgctccggtgggagc

SEQ ID NO: 5476781 - DNA, 25 bp, Homo sapien
ggtgagcggcgactgcgtggcccag

SEQ ID NO: 5476782 - DNA, 25 bp, Homo sapien
ggagagagccgcgtcccgcgcggtg

SEQ ID NO: 5476783 - DNA, 25 bp, Homo sapien
acgcggctcacccaggagacgcggg

SEQ ID NO: 5476784 - DNA, 25 bp, Homo sapien
cgtcagctccagcacttcggcgttc

SEQ ID NO: 5476785 - DNA, 25 bp, Homo sapien
gcacttcggcgttctccagcttggc

SEQ ID NO: 5476786 - DNA, 25 bp, Homo sapien
gctccagcacttcggcgttctccag

SEQ ID NO: 5476787 - DNA, 25 bp, Homo sapien
agcacttcggcgttctccagcttgg

SEQ ID NO: 5476788 - DNA, 25 bp, Homo sapien
ccgcgcgcgccgcttcttctccacc

SEQ ID NO: 5476789 - DNA, 25 bp, Homo sapien
tcctgcaggctctcgttgatccgcg

SEQ ID NO: 5476790 - DNA, 25 bp, Homo sapien
cgcgcgcgccgcttcttctccacca

SEQ ID NO: 5476791 - DNA, 25 bp, Homo sapien
gcaggctctcgttgatccgcgcgcg

SEQ ID NO: 5476792 - DNA, 25 bp, Homo sapien
ggcactgaatcccagccccgcacgg

SEQ ID NO: 5476793 - DNA, 25 bp, Homo sapien
cccgcttgctcgcccatggccccgg

SEQ ID NO: 5476794 - DNA, 25 bp, Homo sapien
cggggagcggggcactgaatcccag

SEQ ID NO: 5476795 - DNA, 25 bp, Homo sapien
ggagcggggcactgaatcccagccc

SEQ ID NO: 5476796 - DNA, 25 bp, Homo sapien
ggccaggcgccgcgggtggcgccat

SEQ ID NO: 5476797 - DNA, 25 bp, Homo sapien
tcccggccaggcgccgcgggtggcg

SEQ ID NO: 5476798 - DNA, 25 bp, Homo sapien
ccggccaggcgccgcgggtggcgcc

SEQ ID NO: 5476799 - DNA, 25 bp, Homo sapien
cggtcccggccaggcgccgcgggtg

SEQ ID NO: 5476800 - DNA, 25 bp, Homo sapien
gcccgctccgccggggacgcggcag

SEQ ID NO: 5476801 - DNA, 25 bp, Homo sapien
cccgctccgccggggacgcggcagg

SEQ ID NO: 5476802 - DNA, 25 bp, Homo sapien
ccgctccgccggggacgcggcaggg

SEQ ID NO: 5476803 - DNA, 25 bp, Homo sapien
cgctccgccggggacgcggcagggg

SEQ ID NO: 5476804 - DNA, 25 bp, Homo sapien
gcttatttgcatctcaatgcgccga

SEQ ID NO: 5476805 - DNA, 25 bp, Homo sapien
tttatagccgcttatttgcatctca

SEQ ID NO: 5476806 - DNA, 25 bp, Homo sapien
cgccccttttatagccgcttatttg

SEQ ID NO: 5476807 - DNA, 25 bp, Homo sapien
ttgcatctcaatgcgccgattggcc

SEQ ID NO: 5476808 - DNA, 25 bp, Homo sapien
tttgatctgatccaaacaccctggg

SEQ ID NO: 5476809 - DNA, 25 bp, Homo sapien
cattcatccgatggagttggccaca

SEQ ID NO: 5476810 - DNA, 25 bp, Homo sapien
tgaaatattgaccacaccagaagcc

SEQ ID NO: 5476811 - DNA, 25 bp, Homo sapien
gacagaggtctcgtcacagtcacag

SEQ ID NO: 5476812 - DNA, 25 bp, Homo sapien
tcttctttggtgtccgacacttcgc

SEQ ID NO: 5476813 - DNA, 25 bp, Homo sapien
tcaagggggatccattttcgtcttc

SEQ ID NO: 5476814 - DNA, 25 bp, Homo sapien
gtctgctcttcgatcctgtgattca

SEQ ID NO: 5476815 - DNA, 25 bp, Homo sapien
ccgacacttcgctgagtcccagaga

SEQ ID NO: 5476816 - DNA, 25 bp, Homo sapien
tctgactctccgtgaacctgggctg

SEQ ID NO: 5476817 - DNA, 25 bp, Homo sapien
tgtcctccttcaaaaccgcttctaa

SEQ ID NO: 5476818 - DNA, 25 bp, Homo sapien
atccactggtggacctcgcgcagct

SEQ ID NO: 5476819 - DNA, 25 bp, Homo sapien
tgccacgtcgatggctgcgggcagg

SEQ ID NO: 5476820 - DNA, 25 bp, Homo sapien
aaggcagctggtacgtcatcatgac

SEQ ID NO: 5476821 - DNA, 25 bp, Homo sapien
gtcatcatgacgctgctgtccgcat

SEQ ID NO: 5476822 - DNA, 25 bp, Homo sapien
cgggaaggcagctggtacgtcatca

SEQ ID NO: 5476823 - DNA, 25 bp, Homo sapien
tggtacgtcatcatgacgctgctgt

SEQ ID NO: 5476824 - DNA, 25 bp, Homo sapien
ttctctgaggagtcaatgcttccaa

SEQ ID NO: 5476825 - DNA, 25 bp, Homo sapien
ctgcaggacgcacttaatgaaatgc

SEQ ID NO: 5476826 - DNA, 25 bp, Homo sapien
ccagatgggatcctgcaggacgcac

SEQ ID NO: 5476827 - DNA, 25 bp, Homo sapien
tatttgctggtatgacttgtgtcac

SEQ ID NO: 5476828 - DNA, 25 bp, Homo sapien
tcagcaggaggtttaggaggccgct

SEQ ID NO: 5476829 - DNA, 25 bp, Homo sapien
gaaagggcgtcactgttctgtgtgt

SEQ ID NO: 5476830 - DNA, 25 bp, Homo sapien
tttaggaggccgcttgacgtggaaa

SEQ ID NO: 5476831 - DNA, 25 bp, Homo sapien
agactccgaagcagcagagcccgag

SEQ ID NO: 5476832 - DNA, 25 bp, Homo sapien
tcggctgctggtcccgagaagtgcc

SEQ ID NO: 5476833 - DNA, 25 bp, Homo sapien
gggcgagctgctgcgggactgaaag

SEQ ID NO: 5476834 - DNA, 25 bp, Homo sapien
gctggtcccgagaagtgccaggttt

SEQ ID NO: 5476835 - DNA, 25 bp, Homo sapien
tgctgcgggactgaaagagcggtgg

SEQ ID NO: 5476836 - DNA, 25 bp, Homo sapien
tggctgtctggggatcgaggtccgg

SEQ ID NO: 5476837 - DNA, 25 bp, Homo sapien
ggtggcccgggtggctggacaagca

SEQ ID NO: 5476838 - DNA, 25 bp, Homo sapien
tgtctggggatcgaggtccggctgg

SEQ ID NO: 5476839 - DNA, 25 bp, Homo sapien
ccgggtggctggacaagcacatggc

SEQ ID NO: 5476840 - DNA, 25 bp, Homo sapien
cagaggccatctcggatgtgagtgt

SEQ ID NO: 5476841 - DNA, 25 bp, Homo sapien
ggctggactgcaaactggtgctgga

SEQ ID NO: 5476842 - DNA, 25 bp, Homo sapien
gccacagtccctggcgctggaaaca

SEQ ID NO: 5476843 - DNA, 25 bp, Homo sapien
gaataactgggtagcatgaatgcca

SEQ ID NO: 5476844 - DNA, 25 bp, Homo sapien
ttgacccgcttggacttcaattttc

SEQ ID NO: 5476845 - DNA, 25 bp, Homo sapien
ccagatccggtgctctcagatgagt

SEQ ID NO: 5476846 - DNA, 25 bp, Homo sapien
cagatgagtctcgaggtttgacccg

SEQ ID NO: 5476847 - DNA, 25 bp, Homo sapien
ccaaggtgaatctattccggaagta

SEQ ID NO: 5476848 - DNA, 25 bp, Homo sapien
ccccttggatctttcttgcaagtag

SEQ ID NO: 5476849 - DNA, 25 bp, Homo sapien
tgcaagtagtaatggcagtgggact

SEQ ID NO: 5476850 - DNA, 25 bp, Homo sapien
tgtgtgtgcagcgagtacctccttg

SEQ ID NO: 5476851 - DNA, 25 bp, Homo sapien
tccagggattctggcccactcgcag

SEQ ID NO: 5476852 - DNA, 25 bp, Homo sapien
agtgctctccgcaccaattaaaggg

SEQ ID NO: 5476853 - DNA, 25 bp, Homo sapien
ttgatgccagaacagacaactgcca

SEQ ID NO: 5476854 - DNA, 25 bp, Homo sapien
ctcctgcgttgatgccagaacagac

SEQ ID NO: 5476855 - DNA, 25 bp, Homo sapien
tgcgttgatgccagaacagacaact

SEQ ID NO: 5476856 - DNA, 25 bp, Homo sapien
gtacctactcccgtgcggctgttca

SEQ ID NO: 5476857 - DNA, 25 bp, Homo sapien
agcgaggtcaggtgcgtacctactc

SEQ ID NO: 5476858 - DNA, 25 bp, Homo sapien
ctaactccggctgcggcttcttgtc

SEQ ID NO: 5476859 - DNA, 25 bp, Homo sapien
ctgcactggctggtgagcgacgcca

SEQ ID NO: 5476860 - DNA, 25 bp, Homo sapien
aaacattagtgtgtcattacaatgc

SEQ ID NO: 5476861 - DNA, 25 bp, Homo sapien
acaaacattagtgtgtcattacaat

SEQ ID NO: 5476862 - DNA, 25 bp, Homo sapien
aacattagtgtgtcattacaatgca

SEQ ID NO: 5476863 - DNA, 25 bp, Homo sapien
caaacattagtgtgtcattacaatg

SEQ ID NO: 5476864 - DNA, 25 bp, Homo sapien
tgtggccttccgcttatcactggac

SEQ ID NO: 5476865 - DNA, 25 bp, Homo sapien
ctgggacgtttgctgggaactcgca

SEQ ID NO: 5476866 - DNA, 25 bp, Homo sapien
ggaactcgcatttcctcttcagggt

SEQ ID NO: 5476867 - DNA, 25 bp, Homo sapien
atcactggaccttagcgctgggacg

SEQ ID NO: 5476868 - DNA, 25 bp, Homo sapien
gatgacgctgtccaagcagctgatc

SEQ ID NO: 5476869 - DNA, 25 bp, Homo sapien
caggccaactcctcggggaagctga

SEQ ID NO: 5476870 - DNA, 25 bp, Homo sapien
tggttcttgcaggccaactcctcgg

SEQ ID NO: 5476871 - DNA, 25 bp, Homo sapien
ctgatgacgctgtccaagcagctga

SEQ ID NO: 5476872 - DNA, 25 bp, Homo sapien
gccctgtgggcacgagcaccacagt

SEQ ID NO: 5476873 - DNA, 25 bp, Homo sapien
cagccctgtgggcacgagcaccaca

SEQ ID NO: 5476874 - DNA, 25 bp, Homo sapien
cttcatgagtatggaagcctgggga

SEQ ID NO: 5476875 - DNA, 25 bp, Homo sapien
ttcatgagtatggaagcctggggac

SEQ ID NO: 5476876 - DNA, 25 bp, Homo sapien
gcatcaggtgcccagtgtggacatc

SEQ ID NO: 5476877 - DNA, 25 bp, Homo sapien
gggcatcaggtgcccagtgtggaca

SEQ ID NO: 5476878 - DNA, 25 bp, Homo sapien
agggcatcaggtgcccagtgtggac

SEQ ID NO: 5476879 - DNA, 25 bp, Homo sapien
ggcatcaggtgcccagtgtggacat

SEQ ID NO: 5476880 - DNA, 25 bp, Homo sapien
cagattcatgagaataatgacttct

SEQ ID NO: 5476881 - DNA, 25 bp, Homo sapien
aagcaaaacggcacattacattttt

SEQ ID NO: 5476882 - DNA, 25 bp, Homo sapien
aaacctatttgatgatcctaaagaa

SEQ ID NO: 5476883 - DNA, 25 bp, Homo sapien
ggcgcgccaccatgcaaggcaattt

SEQ ID NO: 5476884 - DNA, 25 bp, Homo sapien
ttattcattctaggagacctccttc

SEQ ID NO: 5476885 - DNA, 25 bp, Homo sapien
tatggtttctagctctttcaactct

SEQ ID NO: 5476886 - DNA, 25 bp, Homo sapien
ggaagcagcaacagctgcaatcagg

SEQ ID NO: 5476887 - DNA, 25 bp, Homo sapien
tgccaaaggttgtcttgagtgtgct

SEQ ID NO: 5476888 - DNA, 25 bp, Homo sapien
tttcaaccaacacttagctatggtt

SEQ ID NO: 5476889 - DNA, 25 bp, Homo sapien
tctcctccggcgtgagtcctcatgg

SEQ ID NO: 5476890 - DNA, 25 bp, Homo sapien
taaggtgctcgtgggacccgttgct

SEQ ID NO: 5476891 - DNA, 25 bp, Homo sapien
ccgttgctgtcgctggaggaggtct

SEQ ID NO: 5476892 - DNA, 25 bp, Homo sapien
aggaggtctggctcataaggtgctc

SEQ ID NO: 5476893 - DNA, 25 bp, Homo sapien
gcaggagccggtggatctgctctgt

SEQ ID NO: 5476894 - DNA, 25 bp, Homo sapien
ggagccggtggatctgctctgtgag

SEQ ID NO: 5476895 - DNA, 25 bp, Homo sapien
cagcaggagccggtggatctgctct

SEQ ID NO: 5476896 - DNA, 25 bp, Homo sapien
gcaggggtgggctgcaaacacgtcc

SEQ ID NO: 5476897 - DNA, 25 bp, Homo sapien
tctggggctccagattggtggcagg

SEQ ID NO: 5476898 - DNA, 25 bp, Homo sapien
cacctcgggcccttggagcactcac

SEQ ID NO: 5476899 - DNA, 25 bp, Homo sapien
ccctatgccatctgttgctgggagg

SEQ ID NO: 5476900 - DNA, 25 bp, Homo sapien
gggaggtgaggacagcccgagaccc

SEQ ID NO: 5476901 - DNA, 25 bp, Homo sapien
atgtactctccgttccgggcgcgaa

SEQ ID NO: 5476902 - DNA, 25 bp, Homo sapien
ctttgtgcctcccaatgatgaagga

SEQ ID NO: 5476903 - DNA, 25 bp, Homo sapien
gagattttcctgctccatgggttga

SEQ ID NO: 5476904 - DNA, 25 bp, Homo sapien
gctggtgtccaacgtgatgtactct

SEQ ID NO: 5476905 - DNA, 25 bp, Homo sapien
tatagtagagagagacaagtcaaga

SEQ ID NO: 5476906 - DNA, 25 bp, Homo sapien
tgctgtagattaccaggaggctgtt

SEQ ID NO: 5476907 - DNA, 25 bp, Homo sapien
caagtcaagagtcactcaggcccag

SEQ ID NO: 5476908 - DNA, 25 bp, Homo sapien
ttcacctctgctagtgtcacttgca

SEQ ID NO: 5476909 - DNA, 25 bp, Homo sapien
tttgtggatggccagcatcaagggc

SEQ ID NO: 5476910 - DNA, 25 bp, Homo sapien
tgcacgagcactggggtttcaatca

SEQ ID NO: 5476911 - DNA, 25 bp, Homo sapien
tcactagggtggagctgcacgagca

SEQ ID NO: 5476912 - DNA, 25 bp, Homo sapien
agcactggggtttcaatcaggtcct

SEQ ID NO: 5476913 - DNA, 25 bp, Homo sapien
gagaagcctctagcacacaggctgg

SEQ ID NO: 5476914 - DNA, 25 bp, Homo sapien
tgggtgctcccaaatctcactggga

SEQ ID NO: 5476915 - DNA, 25 bp, Homo sapien
gggactgttcgcacctgctacagca

SEQ ID NO: 5476916 - DNA, 25 bp, Homo sapien
cagaagccactcagaacatgggtgc

SEQ ID NO: 5476917 - DNA, 25 bp, Homo sapien
atcctggaacaaacaatttggtgta

SEQ ID NO: 5476918 - DNA, 25 bp, Homo sapien
caaacaatttggtgtatgggtggtt

SEQ ID NO: 5476919 - DNA, 25 bp, Homo sapien
aacaaacaatttggtgtatgggtgg

SEQ ID NO: 5476920 - DNA, 25 bp, Homo sapien
tggaacaaacaatttggtgtatggg

SEQ ID NO: 5476921 - DNA, 25 bp, Homo sapien
tgagttacatacttggattcaaatt

SEQ ID NO: 5476922 - DNA, 25 bp, Homo sapien
gcaaatgtcactatactggagaact

SEQ ID NO: 5476923 - DNA, 25 bp, Homo sapien
ttaggaaaatgagttacatacttgg

SEQ ID NO: 5476924 - DNA, 25 bp, Homo sapien
ttcttagcaaatgtcactatactgg

SEQ ID NO: 5476925 - DNA, 25 bp, Homo sapien
cgcaccttgaccaggtagggcgtca

SEQ ID NO: 5476926 - DNA, 25 bp, Homo sapien
taaccagagtgcactctctctgcca

SEQ ID NO: 5476927 - DNA, 25 bp, Homo sapien
gactctcagcaccttgttggtcccg

SEQ ID NO: 5476928 - DNA, 25 bp, Homo sapien
gatttcattctcgtggcttttccgg

SEQ ID NO: 5476929 - DNA, 25 bp, Homo sapien
ctccatgcattcttgagtaaaagaa

SEQ ID NO: 5476930 - DNA, 25 bp, Homo sapien
tccatgcattcttgagtaaaagaat

SEQ ID NO: 5476931 - DNA, 25 bp, Homo sapien
aactgaacacactcacggtgcactg

SEQ ID NO: 5476932 - DNA, 25 bp, Homo sapien
gcaaacacaccaacctgcaactgaa

SEQ ID NO: 5476933 - DNA, 25 bp, Homo sapien
actgaacacactcacggtgcactgc

SEQ ID NO: 5476934 - DNA, 25 bp, Homo sapien
caaacacaccaacctgcaactgaac

SEQ ID NO: 5476935 - DNA, 25 bp, Homo sapien
agagcaggcagctggcggcccccac

SEQ ID NO: 5476936 - DNA, 25 bp, Homo sapien
ctttgccagagcaggcagctggcgg

SEQ ID NO: 5476937 - DNA, 25 bp, Homo sapien
aggcagctggcggcccccacaggtg

SEQ ID NO: 5476938 - DNA, 25 bp, Homo sapien
agcaggcagctggcggcccccacag

SEQ ID NO: 5476939 - DNA, 25 bp, Homo sapien
cacaaacttggcatcgctgaaggca

SEQ ID NO: 5476940 - DNA, 25 bp, Homo sapien
tggaacacgcccacatcgtgaggcg

SEQ ID NO: 5476941 - DNA, 25 bp, Homo sapien
agtgaaatatggatgcaacctggtc

SEQ ID NO: 5476942 - DNA, 25 bp, Homo sapien
gtacaggatcttcccagacaccagg

SEQ ID NO: 5476943 - DNA, 25 bp, Homo sapien
tcacaatgtgctcagaggtaacgct

SEQ ID NO: 5476944 - DNA, 25 bp, Homo sapien
tgtaggagggcacgtctgctccaca

SEQ ID NO: 5476945 - DNA, 25 bp, Homo sapien
ggtgaccctcgctggacatcagcag

SEQ ID NO: 5476946 - DNA, 25 bp, Homo sapien
agcagctggtaatactcttcattgg

SEQ ID NO: 5476947 - DNA, 25 bp, Homo sapien
cctagaaagtctttaatcatgatgg

SEQ ID NO: 5476948 - DNA, 25 bp, Homo sapien
gaaagtctttaatcatgatggtata

SEQ ID NO: 5476949 - DNA, 25 bp, Homo sapien
tctttaatcatgatggtatattcac

SEQ ID NO: 5476950 - DNA, 25 bp, Homo sapien
cggcccctagaaagtctttaatcat

SEQ ID NO: 5476951 - DNA, 25 bp, Homo sapien
tgcggtatctttagacctgaccagc

SEQ ID NO: 5476952 - DNA, 25 bp, Homo sapien
gacataatcactggagaacagagca

SEQ ID NO: 5476953 - DNA, 25 bp, Homo sapien
gagcagcccaactgatcagaacgaa

SEQ ID NO: 5476954 - DNA, 25 bp, Homo sapien
ctgtgaagttactgtagaggccaac

SEQ ID NO: 5476955 - DNA, 25 bp, Homo sapien
tgtgtgtccactttcgaagactggt

SEQ ID NO: 5476956 - DNA, 25 bp, Homo sapien
ggccagcgtactggccttgcccttg

SEQ ID NO: 5476957 - DNA, 25 bp, Homo sapien
tcctgagggcgtacttcaaggtggc

SEQ ID NO: 5476958 - DNA, 25 bp, Homo sapien
tttcacctgcttcacgctcctgagg

SEQ ID NO: 5476959 - DNA, 25 bp, Homo sapien
atgggttgtgttcagattttgccat

SEQ ID NO: 5476960 - DNA, 25 bp, Homo sapien
gatgggttgtgttcagattttgcca

SEQ ID NO: 5476961 - DNA, 25 bp, Homo sapien
gtagatgggttgtgttcagattttg

SEQ ID NO: 5476962 - DNA, 25 bp, Homo sapien
agatgggttgtgttcagattttgcc

SEQ ID NO: 5476963 - DNA, 25 bp, Homo sapien
gctgggcggaaattccgcgtatcca

SEQ ID NO: 5476964 - DNA, 25 bp, Homo sapien
gttggtctcatgtccactggagcca

SEQ ID NO: 5476965 - DNA, 25 bp, Homo sapien
tgctcatgtccacatcttcctgcag

SEQ ID NO: 5476966 - DNA, 25 bp, Homo sapien
ccgccccgtggagcagttttcgttg

SEQ ID NO: 5476967 - DNA, 25 bp, Homo sapien
gatgctgtcacgcattaacaagcac

SEQ ID NO: 5476968 - DNA, 25 bp, Homo sapien
tgtcacgcattaacaagcacacgca

SEQ ID NO: 5476969 - DNA, 25 bp, Homo sapien
gagggatgctgtcacgcattaacaa

SEQ ID NO: 5476970 - DNA, 25 bp, Homo sapien
acagagggatgctgtcacgcattaa

SEQ ID NO: 5476971 - DNA, 25 bp, Homo sapien
gtcgagcccattcgccggtgagcca

SEQ ID NO: 5476972 - DNA, 25 bp, Homo sapien
ggccccaggaactgaatggctaagc

SEQ ID NO: 5476973 - DNA, 25 bp, Homo sapien
gctaagctccaacaagagccttcag

SEQ ID NO: 5476974 - DNA, 25 bp, Homo sapien
agggtgccggattccaacagctggc

SEQ ID NO: 5476975 - DNA, 25 bp, Homo sapien
ttaacaggactgatcacactcagcg

SEQ ID NO: 5476976 - DNA, 25 bp, Homo sapien
ccaggaatccattgcagagaagtgc

SEQ ID NO: 5476977 - DNA, 25 bp, Homo sapien
tgggaagaaccatcaacagggaggc

SEQ ID NO: 5476978 - DNA, 25 bp, Homo sapien
ggttatcttgcccatcaggttgcca

SEQ ID NO: 5476979 - DNA, 25 bp, Homo sapien
tattcgcttagcactgagggctggc

SEQ ID NO: 5476980 - DNA, 25 bp, Homo sapien
tctctcaggcttgcagccacgtgct

SEQ ID NO: 5476981 - DNA, 25 bp, Homo sapien
acgagccctcgtgtgtgaactgact

SEQ ID NO: 5476982 - DNA, 25 bp, Homo sapien
gtgtaggtggcatttgacaaggacc

SEQ ID NO: 5476983 - DNA, 25 bp, Homo sapien
cagggctgcgttagttctgtaccaa

SEQ ID NO: 5476984 - DNA, 25 bp, Homo sapien
gaaagccagggctgcgttagttctg

SEQ ID NO: 5476985 - DNA, 25 bp, Homo sapien
ggcgacagtgacagataactgcaaa

SEQ ID NO: 5476986 - DNA, 25 bp, Homo sapien
tcataccaaggcgacagtgacagat

SEQ ID NO: 5476987 - DNA, 25 bp, Homo sapien
aaccctcggtgtcaccgcagttcaa

SEQ ID NO: 5476988 - DNA, 25 bp, Homo sapien
gcagttcaaacgagcgcaccctgcg

SEQ ID NO: 5476989 - DNA, 25 bp, Homo sapien
tcaggctcctgagctgcgaagcggg

SEQ ID NO: 5476990 - DNA, 25 bp, Homo sapien
tgtcaccgcagttcaaacgagcgca

SEQ ID NO: 5476991 - DNA, 25 bp, Homo sapien
ctccgccgactcgcggctctgtccg

SEQ ID NO: 5476992 - DNA, 25 bp, Homo sapien
gcgtcagcccgtccgccggtccctc

SEQ ID NO: 5476993 - DNA, 25 bp, Homo sapien
cgcccacagctgcacgtatcccctc

SEQ ID NO: 5476994 - DNA, 25 bp, Homo sapien
ggccgcgcccgcgtcagcccgtccg

SEQ ID NO: 5476995 - DNA, 25 bp, Homo sapien
cctcccattgacgtcaatggggagc

SEQ ID NO: 5476996 - DNA, 25 bp, Homo sapien
gacgtcaatggggagctccattgtt

SEQ ID NO: 5476997 - DNA, 25 bp, Homo sapien
ttgacgtcaatggggagctccattg

SEQ ID NO: 5476998 - DNA, 25 bp, Homo sapien
tccctcccattgacgtcaatgggga

SEQ ID NO: 5476999 - DNA, 25 bp, Homo sapien
tgggcagccagtacccctcactgtc

SEQ ID NO: 5477000 - DNA, 25 bp, Homo sapien
aacttgtggactaatctgtggatca

SEQ ID NO: 5477001 - DNA, 25 bp, Homo sapien
ttgtggactaatctgtggatcaggt

SEQ ID NO: 5477002 - DNA, 25 bp, Homo sapien
gaacttgtggactaatctgtggatc

SEQ ID NO: 5477003 - DNA, 25 bp, Homo sapien
gcacctccaaccatggacatcttgg

SEQ ID NO: 5477004 - DNA, 25 bp, Homo sapien
tggacatcttggagtcaggaacggg

SEQ ID NO: 5477005 - DNA, 25 bp, Homo sapien
ttggcacctccaaccatggacatct

SEQ ID NO: 5477006 - DNA, 25 bp, Homo sapien
gcccagttggcacctccaaccatgg

SEQ ID NO: 5477007 - DNA, 25 bp, Homo sapien
gtgaagcctcaagtccctggcctca

SEQ ID NO: 5477008 - DNA, 25 bp, Homo sapien
tccctggcctcaaatcgtccccctg

SEQ ID NO: 5477009 - DNA, 25 bp, Homo sapien
atagctcagtgaagcctcaagtccc

SEQ ID NO: 5477010 - DNA, 25 bp, Homo sapien
cagtgaagcctcaagtccctggcct

SEQ ID NO: 5477011 - DNA, 25 bp, Homo sapien
ggagcgaagactgcccgtgtactca

SEQ ID NO: 5477012 - DNA, 25 bp, Homo sapien
aggcatcccctcgagcggtgagtga

SEQ ID NO: 5477013 - DNA, 25 bp, Homo sapien
ggtgagtgaccgctttcctggctga

SEQ ID NO: 5477014 - DNA, 25 bp, Homo sapien
gcaggagcccgagtgacttagacct

SEQ ID NO: 5477015 - DNA, 25 bp, Homo sapien
cgatgaggaggaagggaaattggga

SEQ ID NO: 5477016 - DNA, 25 bp, Homo sapien
ctgcgatgaggaggaagggaaattg

SEQ ID NO: 5477017 - DNA, 25 bp, Homo sapien
tgaggaggaagggaaattgggagac

SEQ ID NO: 5477018 - DNA, 25 bp, Homo sapien
tgcgatgaggaggaagggaaattgg

SEQ ID NO: 5477019 - DNA, 25 bp, Homo sapien
ggaagccatgtgtaggtggactgtt

SEQ ID NO: 5477020 - DNA, 25 bp, Homo sapien
agccatgtgtaggtggactgttggg

SEQ ID NO: 5477021 - DNA, 25 bp, Homo sapien
tgcacagaggaaaaacgggctccct

SEQ ID NO: 5477022 - DNA, 25 bp, Homo sapien
gctttgctacagggaggaagccatg

SEQ ID NO: 5477023 - DNA, 25 bp, Homo sapien
caagcacggatggtttgtttgcatg

SEQ ID NO: 5477024 - DNA, 25 bp, Homo sapien
tctttgcaagcacggatggtttgtt

SEQ ID NO: 5477025 - DNA, 25 bp, Homo sapien
tgaatgaagcaaatggtaggtcagg

SEQ ID NO: 5477026 - DNA, 25 bp, Homo sapien
ccggggaactctttgcaagcacgga

SEQ ID NO: 5477027 - DNA, 25 bp, Homo sapien
cacttctcgcagtgggtgcttgatg

SEQ ID NO: 5477028 - DNA, 25 bp, Homo sapien
acggacacgggcagacattcccggg

SEQ ID NO: 5477029 - DNA, 25 bp, Homo sapien
gtgcttgatgaccacggtgtggcgg

SEQ ID NO: 5477030 - DNA, 25 bp, Homo sapien
ccctgagaccttgagcataaaccca

SEQ ID NO: 5477031 - DNA, 25 bp, Homo sapien
ctgggctcacgtggttgatgagaac

SEQ ID NO: 5477032 - DNA, 25 bp, Homo sapien
cacgtggttgatgagaacgcagaga

SEQ ID NO: 5477033 - DNA, 25 bp, Homo sapien
ggctcacgtggttgatgagaacgca

SEQ ID NO: 5477034 - DNA, 25 bp, Homo sapien
agcttgctgggctcacgtggttgat

SEQ ID NO: 5477035 - DNA, 25 bp, Homo sapien
ctgtttcagagtcacagggtctcca

SEQ ID NO: 5477036 - DNA, 25 bp, Homo sapien
acctctggtaagtgggattgtaatg

SEQ ID NO: 5477037 - DNA, 25 bp, Homo sapien
tctggtaagtgggattgtaatgacc

SEQ ID NO: 5477038 - DNA, 25 bp, Homo sapien
cagggtctccatacctctggtaagt

SEQ ID NO: 5477039 - DNA, 25 bp, Homo sapien
cctgggtagggcagcgtagctctcc

SEQ ID NO: 5477040 - DNA, 25 bp, Homo sapien
taaatcattagggttccagtggaag

SEQ ID NO: 5477041 - DNA, 25 bp, Homo sapien
tattgatgtaaatcattagggttcc

SEQ ID NO: 5477042 - DNA, 25 bp, Homo sapien
gcgtagctctcccacatattgatgt

SEQ ID NO: 5477043 - DNA, 25 bp, Homo sapien
tcccaattgtttcctggatgcagga

SEQ ID NO: 5477044 - DNA, 25 bp, Homo sapien
tgagaccctgctgatctttgtgcct

SEQ ID NO: 5477045 - DNA, 25 bp, Homo sapien
ttgtcagccatggacttggtgggca

SEQ ID NO: 5477046 - DNA, 25 bp, Homo sapien
attccaactcttgaggtcaaaggcc

SEQ ID NO: 5477047 - DNA, 25 bp, Homo sapien
tggatatagttagcagcatgaggag

SEQ ID NO: 5477048 - DNA, 25 bp, Homo sapien
ttggtcctggatatagttagcagca

SEQ ID NO: 5477049 - DNA, 25 bp, Homo sapien
ttagcagcatgaggagtgatgttcc

SEQ ID NO: 5477050 - DNA, 25 bp, Homo sapien
gttagcagcatgaggagtgatgttc

SEQ ID NO: 5477051 - DNA, 25 bp, Homo sapien
ggcctttggtgcacgctcagcatgg

SEQ ID NO: 5477052 - DNA, 25 bp, Homo sapien
ggcttgggcctttggtgcacgctca

SEQ ID NO: 5477053 - DNA, 25 bp, Homo sapien
ggtccccttagcatgtggtggtggc

SEQ ID NO: 5477054 - DNA, 25 bp, Homo sapien
gtggctgtgacagctcttgctcctc

SEQ ID NO: 5477055 - DNA, 25 bp, Homo sapien
gaatatattctaggatcgaaactct

SEQ ID NO: 5477056 - DNA, 25 bp, Homo sapien
ttccttcttcatgtagccatggcca

SEQ ID NO: 5477057 - DNA, 25 bp, Homo sapien
tatttgtgactagttcccttagtag

SEQ ID NO: 5477058 - DNA, 25 bp, Homo sapien
gaatcctaaaactctatggctagaa

SEQ ID NO: 5477059 - DNA, 25 bp, Homo sapien
tgtgcataccgagagacaggcagct

SEQ ID NO: 5477060 - DNA, 25 bp, Homo sapien
ggtctcgctctgcaaagcattggcg

SEQ ID NO: 5477061 - DNA, 25 bp, Homo sapien
catttaaagtgtgaggattgcctga

SEQ ID NO: 5477062 - DNA, 25 bp, Homo sapien
tgttctccttaagagggtctcgctc

SEQ ID NO: 5477063 - DNA, 25 bp, Homo sapien
attctgtactcaggttgttatatga

SEQ ID NO: 5477064 - DNA, 25 bp, Homo sapien
gcagattattaagatctgccattct

SEQ ID NO: 5477065 - DNA, 25 bp, Homo sapien
tgccattctgaaacgctggtctttt

SEQ ID NO: 5477066 - DNA, 25 bp, Homo sapien
tagcacaaatggcaccgttgggttt

SEQ ID NO: 5477067 - DNA, 25 bp, Homo sapien
tgttcatggcgcctctacgtagacc

SEQ ID NO: 5477068 - DNA, 25 bp, Homo sapien
tagtcagtgtattaacgagtgcccc

SEQ ID NO: 5477069 - DNA, 25 bp, Homo sapien
ggaagacactaaacacccagacctg

SEQ ID NO: 5477070 - DNA, 25 bp, Homo sapien
aggctcagcatgtcaccgtcaggga

SEQ ID NO: 5477071 - DNA, 25 bp, Homo sapien
ttccttcaaagcaggagatccttca

SEQ ID NO: 5477072 - DNA, 25 bp, Homo sapien
ttatgtgaggaaaccacagcgcggc

SEQ ID NO: 5477073 - DNA, 25 bp, Homo sapien
tattcaatgaacttcgcgtcagcca

SEQ ID NO: 5477074 - DNA, 25 bp, Homo sapien
gcatccagagagtcggttagccgcg

SEQ ID NO: 5477075 - DNA, 25 bp, Homo sapien
taccgacctgattgagggcttcatg

SEQ ID NO: 5477076 - DNA, 25 bp, Homo sapien
gatatgacccaaccgcaaaagtagg

SEQ ID NO: 5477077 - DNA, 25 bp, Homo sapien
cccgttagccgatacagatttgata

SEQ ID NO: 5477078 - DNA, 25 bp, Homo sapien
tctgagcgcacggatcaggaaagcc

SEQ ID NO: 5477079 - DNA, 25 bp, Homo sapien
gcgctagattttctttccggtggaa

SEQ ID NO: 5477080 - DNA, 25 bp, Homo sapien
cgtcagtgacacaacatgtccaggg

SEQ ID NO: 5477081 - DNA, 25 bp, Homo sapien
gggacgccgtctccagcgagctcgt

SEQ ID NO: 5477082 - DNA, 25 bp, Homo sapien
cccacggcgtgtccggtggtacagc

SEQ ID NO: 5477083 - DNA, 25 bp, Homo sapien
gagggcaggcactttttcaccattc

SEQ ID NO: 5477084 - DNA, 25 bp, Homo sapien
tgcattaaacatggtcgagttgtga

SEQ ID NO: 5477085 - DNA, 25 bp, Homo sapien
agcagatgccctgggttaacgaggc

SEQ ID NO: 5477086 - DNA, 25 bp, Homo sapien
acatggtcgagttgtgatccaggga

SEQ ID NO: 5477087 - DNA, 25 bp, Homo sapien
tgccctgggttaacgaggctggaaa

SEQ ID NO: 5477088 - DNA, 25 bp, Homo sapien
gggccgctgaacagtccttgggtca

SEQ ID NO: 5477089 - DNA, 25 bp, Homo sapien
gcatattaatgtaacgggccatggg

SEQ ID NO: 5477090 - DNA, 25 bp, Homo sapien
tgttgctgcagaagatgtcctcgta

SEQ ID NO: 5477091 - DNA, 25 bp, Homo sapien
caagtgctgcggttgattccagtga

SEQ ID NO: 5477092 - DNA, 25 bp, Homo sapien
gtagggaagactcccagcacttctg

SEQ ID NO: 5477093 - DNA, 25 bp, Homo sapien
tgaggttggaggcctactaatttcc

SEQ ID NO: 5477094 - DNA, 25 bp, Homo sapien
tcaatttgatggttcgattaaagcc

SEQ ID NO: 5477095 - DNA, 25 bp, Homo sapien
tttccctgtagggaagactcccagc

SEQ ID NO: 5477096 - DNA, 25 bp, Homo sapien
tggttatgagcctccaggcgcatgc

SEQ ID NO: 5477097 - DNA, 25 bp, Homo sapien
aaaatgcagcgagtcctctgggtgg

SEQ ID NO: 5477098 - DNA, 25 bp, Homo sapien
gacagaacatctggcggttggttga

SEQ ID NO: 5477099 - DNA, 25 bp, Homo sapien
tcttttgtcttggtcgctgcttcta

SEQ ID NO: 5477100 - DNA, 25 bp, Homo sapien
ccagtgaatcacatttcgtcatttg

SEQ ID NO: 5477101 - DNA, 25 bp, Homo sapien
tcacatttcgtcatttgaagcccat

SEQ ID NO: 5477102 - DNA, 25 bp, Homo sapien
gagggtcaccggcaggtgggctggt

SEQ ID NO: 5477103 - DNA, 25 bp, Homo sapien
gtgtgagggtcaccggcaggtgggc

SEQ ID NO: 5477104 - DNA, 25 bp, Homo sapien
caatgtgttacgcaagcagtctcca

SEQ ID NO: 5477105 - DNA, 25 bp, Homo sapien
acagagcgctctatgcaggtgaggc

SEQ ID NO: 5477106 - DNA, 25 bp, Homo sapien
tacagcagacataggactgagccaa

SEQ ID NO: 5477107 - DNA, 25 bp, Homo sapien
acagggctggatgaacgtgtgaccc

SEQ ID NO: 5477108 - DNA, 25 bp, Homo sapien
ttaggaagtgccaacacccgtggtg

SEQ ID NO: 5477109 - DNA, 25 bp, Homo sapien
gatccatgggacacactcacaggaa

SEQ ID NO: 5477110 - DNA, 25 bp, Homo sapien
tgaggactgcaccttaacctgggca

SEQ ID NO: 5477111 - DNA, 25 bp, Homo sapien
tgctcatggccaagaacgagtctgg

SEQ ID NO: 5477112 - DNA, 25 bp, Homo sapien
tagaaattctcagcagacagtggga

SEQ ID NO: 5477113 - DNA, 25 bp, Homo sapien
gagttgtgcccctaaaagtgtttga

SEQ ID NO: 5477114 - DNA, 25 bp, Homo sapien
gacatgtcgttgctcagtgcctgga

SEQ ID NO: 5477115 - DNA, 25 bp, Homo sapien
caacacgtgtttgcctgcagtggcc

SEQ ID NO: 5477116 - DNA, 25 bp, Homo sapien
tgttgcgtaagacctgggaatgact

SEQ ID NO: 5477117 - DNA, 25 bp, Homo sapien
catagtgcaggaatactaggtctga

SEQ ID NO: 5477118 - DNA, 25 bp, Homo sapien
gtaggacagtcccagcacgtcttgg

SEQ ID NO: 5477119 - DNA, 25 bp, Homo sapien
tgtcattgatggtaagacttgctgg

SEQ ID NO: 5477120 - DNA, 25 bp, Homo sapien
ttacactggggcctggatggttctt

SEQ ID NO: 5477121 - DNA, 25 bp, Homo sapien
actggggcctggatggttctttggc

SEQ ID NO: 5477122 - DNA, 25 bp, Homo sapien
tacactggggcctggatggttcttt

SEQ ID NO: 5477123 - DNA, 25 bp, Homo sapien
acactggggcctggatggttctttg

SEQ ID NO: 5477124 - DNA, 25 bp, Homo sapien
gacgcccgccttccctgtgcattgg

SEQ ID NO: 5477125 - DNA, 25 bp, Homo sapien
cacagtgagcctgccggagcggaga

SEQ ID NO: 5477126 - DNA, 25 bp, Homo sapien
gagcggagacggtcctgctcagcct

SEQ ID NO: 5477127 - DNA, 25 bp, Homo sapien
tgggcttgcagacctccacgtggag

SEQ ID NO: 5477128 - DNA, 25 bp, Homo sapien
aaagcagatgagtattacgtaccag

SEQ ID NO: 5477129 - DNA, 25 bp, Homo sapien
gagtattacgtaccagtttcttcca

SEQ ID NO: 5477130 - DNA, 25 bp, Homo sapien
gagcaaaagcagatgagtattacgt

SEQ ID NO: 5477131 - DNA, 25 bp, Homo sapien
tgcatgtccatgtccgcttcctcct

SEQ ID NO: 5477132 - DNA, 25 bp, Homo sapien
ggtctctatgaggaccctttgggga

SEQ ID NO: 5477133 - DNA, 25 bp, Homo sapien
aggtctctatgaggaccctttgggg

SEQ ID NO: 5477134 - DNA, 25 bp, Homo sapien
gtctctatgaggaccctttggggag

SEQ ID NO: 5477135 - DNA, 25 bp, Homo sapien
tctctatgaggaccctttggggagg

SEQ ID NO: 5477136 - DNA, 25 bp, Homo sapien
ggactggacggcaaagcagacagaa

SEQ ID NO: 5477137 - DNA, 25 bp, Homo sapien
gcgtgcgggtcctgctgtgatgccc

SEQ ID NO: 5477138 - DNA, 25 bp, Homo sapien
agaaggttctggactggacggcaaa

SEQ ID NO: 5477139 - DNA, 25 bp, Homo sapien
gcccgtgggacatctgggtgcctct

SEQ ID NO: 5477140 - DNA, 25 bp, Homo sapien
agtgaggctagcgtgtggatttttt

SEQ ID NO: 5477141 - DNA, 25 bp, Homo sapien
gggcagtgaggctagcgtgtggatt

SEQ ID NO: 5477142 - DNA, 25 bp, Homo sapien
tcgagaaccgggtgagcttattgac

SEQ ID NO: 5477143 - DNA, 25 bp, Homo sapien
ttgtgtggcatcgagaaccgggtga

SEQ ID NO: 5477144 - DNA, 25 bp, Homo sapien
catcttgggaacaggtgagttgctt

SEQ ID NO: 5477145 - DNA, 25 bp, Homo sapien
acaggtgagttgcttctccacgcag

SEQ ID NO: 5477146 - DNA, 25 bp, Homo sapien
gctcgctggcatcttgggaacaggt

SEQ ID NO: 5477147 - DNA, 25 bp, Homo sapien
ggaacaggtgagttgcttctccacg

SEQ ID NO: 5477148 - DNA, 25 bp, Homo sapien
tggacccagttaccagcaggggcag

SEQ ID NO: 5477149 - DNA, 25 bp, Homo sapien
tctggacccagttaccagcaggggc

SEQ ID NO: 5477150 - DNA, 25 bp, Homo sapien
cttctggacccagttaccagcaggg

SEQ ID NO: 5477151 - DNA, 25 bp, Homo sapien
ggacccagttaccagcaggggcagg

SEQ ID NO: 5477152 - DNA, 25 bp, Homo sapien
ctggggggtgaatatggagctgagt

SEQ ID NO: 5477153 - DNA, 25 bp, Homo sapien
ggggggtgaatatggagctgagtgt

SEQ ID NO: 5477154 - DNA, 25 bp, Homo sapien
tggggggtgaatatggagctgagtg

SEQ ID NO: 5477155 - DNA, 25 bp, Homo sapien
tgcctcaggaagaaagcgggtctcc

SEQ ID NO: 5477156 - DNA, 25 bp, Homo sapien
ctcaggaagaaagcgggtctccctt

SEQ ID NO: 5477157 - DNA, 25 bp, Homo sapien
gaagaaagcgggtctcccttcgctc

SEQ ID NO: 5477158 - DNA, 25 bp, Homo sapien
ctcctgcacgagggttcttgcctca

SEQ ID NO: 5477159 - DNA, 25 bp, Homo sapien
tatgtttcctggtgagccgtctttc

SEQ ID NO: 5477160 - DNA, 25 bp, Homo sapien
agcttgaccctcctgcaaaccttac

SEQ ID NO: 5477161 - DNA, 25 bp, Homo sapien
gtttcctggtgagccgtctttctcc

SEQ ID NO: 5477162 - DNA, 25 bp, Homo sapien
ctggtgtatgtttcctggtgagccg

SEQ ID NO: 5477163 - DNA, 25 bp, Homo sapien
cctttgacatcattaggggatgagc

SEQ ID NO: 5477164 - DNA, 25 bp, Homo sapien
ttgtgagtaagattccttttctcgg

SEQ ID NO: 5477165 - DNA, 25 bp, Homo sapien
ccttttctcggtgcgtggtctgtgt

SEQ ID NO: 5477166 - DNA, 25 bp, Homo sapien
atgagcaaggcggaagcagcccagc

SEQ ID NO: 5477167 - DNA, 25 bp, Homo sapien
gcagattgcccagtttgtccacaga

SEQ ID NO: 5477168 - DNA, 25 bp, Homo sapien
agctgcctaaaagaaaacgcctggg

SEQ ID NO: 5477169 - DNA, 25 bp, Homo sapien
cagatgaaccctcctgctaacgctg

SEQ ID NO: 5477170 - DNA, 25 bp, Homo sapien
ggacctgcactgatcccaaagctgc

SEQ ID NO: 5477171 - DNA, 25 bp, Homo sapien
gccgatgggaaacacctgttctccg

SEQ ID NO: 5477172 - DNA, 25 bp, Homo sapien
caagggcgcgcagcagactgccgat

SEQ ID NO: 5477173 - DNA, 25 bp, Homo sapien
tctatttgcgtgttttgctttcagc

SEQ ID NO: 5477174 - DNA, 25 bp, Homo sapien
tcaaactcaatatagtggtgaaatt

SEQ ID NO: 5477175 - DNA, 25 bp, Homo sapien
gacgtgagcccccaaagccggctgt

SEQ ID NO: 5477176 - DNA, 25 bp, Homo sapien
caaagccggctgtcatcatgcgggc

SEQ ID NO: 5477177 - DNA, 25 bp, Homo sapien
aagccggctgtcatcatgcgggccg

SEQ ID NO: 5477178 - DNA, 25 bp, Homo sapien
cccaaagccggctgtcatcatgcgg

SEQ ID NO: 5477179 - DNA, 25 bp, Homo sapien
cccagaccccgcagtgactgggtgg

SEQ ID NO: 5477180 - DNA, 25 bp, Homo sapien
tgaccaccttcagcctaaaatggct

SEQ ID NO: 5477181 - DNA, 25 bp, Homo sapien
gaaggtgtggaaatttgacacaaac

SEQ ID NO: 5477182 - DNA, 25 bp, Homo sapien
tggtcttgcagttgaaaattctccc

SEQ ID NO: 5477183 - DNA, 25 bp, Homo sapien
gtccagacaccatacgcagggaatg

SEQ ID NO: 5477184 - DNA, 25 bp, Homo sapien
agggtctcacctcccaaggtaacag

SEQ ID NO: 5477185 - DNA, 25 bp, Homo sapien
cgtcgaggttcccatctggagggtc

SEQ ID NO: 5477186 - DNA, 25 bp, Homo sapien
ccgaattccgggaacacaccagctc

SEQ ID NO: 5477187 - DNA, 25 bp, Homo sapien
ccatggagctgtgtgcgagctgctc

SEQ ID NO: 5477188 - DNA, 25 bp, Homo sapien
gagactcggagctggcctttcctgt

SEQ ID NO: 5477189 - DNA, 25 bp, Homo sapien
ccacattcagacgtgacagcaccgg

SEQ ID NO: 5477190 - DNA, 25 bp, Homo sapien
acagcaccggggagggccacaccgt

SEQ ID NO: 5477191 - DNA, 25 bp, Homo sapien
ggctggcagatggttccatactcca

SEQ ID NO: 5477192 - DNA, 25 bp, Homo sapien
tccactctcatcagcacctctcggg

SEQ ID NO: 5477193 - DNA, 25 bp, Homo sapien
tggcagatggttccatactccactc

SEQ ID NO: 5477194 - DNA, 25 bp, Homo sapien
ggttggctggcagatggttccatac

SEQ ID NO: 5477195 - DNA, 25 bp, Homo sapien
tcttgcgttcgagcaagaccccagg

SEQ ID NO: 5477196 - DNA, 25 bp, Homo sapien
aggagccctcaacgagacccgtgtt

SEQ ID NO: 5477197 - DNA, 25 bp, Homo sapien
caaacagtgaagtggctgcgcctgc

SEQ ID NO: 5477198 - DNA, 25 bp, Homo sapien
tgcaacgtcagactggccttccaga

SEQ ID NO: 5477199 - DNA, 25 bp, Homo sapien
cggccccgagagtgatgtgtatcca

SEQ ID NO: 5477200 - DNA, 25 bp, Homo sapien
gcacttctgggcatagaggacgcct

SEQ ID NO: 5477201 - DNA, 25 bp, Homo sapien
agagcttctaggtccagactgccgc

SEQ ID NO: 5477202 - DNA, 25 bp, Homo sapien
gcccctctgaaggtcggagtgtgat

SEQ ID NO: 5477203 - DNA, 25 bp, Homo sapien
ttattgaaaggataaccagtgcatg

SEQ ID NO: 5477204 - DNA, 25 bp, Homo sapien
tattgaaaggataaccagtgcatgt

SEQ ID NO: 5477205 - DNA, 25 bp, Homo sapien
ttttattgaaaggataaccagtgca

SEQ ID NO: 5477206 - DNA, 25 bp, Homo sapien
attgaaaggataaccagtgcatgtg

SEQ ID NO: 5477207 - DNA, 25 bp, Homo sapien
catcatcatggtaccatttgaagct

SEQ ID NO: 5477208 - DNA, 25 bp, Homo sapien
catgtgtgtccctcaatcagagaca

SEQ ID NO: 5477209 - DNA, 25 bp, Homo sapien
ccatttgaagctcccctctgtgctg

SEQ ID NO: 5477210 - DNA, 25 bp, Homo sapien
tccctcaatcagagacatggataag

SEQ ID NO: 5477211 - DNA, 25 bp, Homo sapien
tcatacggagctaaaggaacctacg

SEQ ID NO: 5477212 - DNA, 25 bp, Homo sapien
gcacagagccaagggatttcaggat

SEQ ID NO: 5477213 - DNA, 25 bp, Homo sapien
caccgcgggtttgaaggagatctaa

SEQ ID NO: 5477214 - DNA, 25 bp, Homo sapien
gaagtgtcacattaatcagcgctct

SEQ ID NO: 5477215 - DNA, 25 bp, Homo sapien
tggtggcttacacgtggtcttggac

SEQ ID NO: 5477216 - DNA, 25 bp, Homo sapien
gatttggtgatagtgagttccagct

SEQ ID NO: 5477217 - DNA, 25 bp, Homo sapien
gcctagggccttgctgctttgtgta

SEQ ID NO: 5477218 - DNA, 25 bp, Homo sapien
acctgtgggtgtacaggagtcaaga

SEQ ID NO: 5477219 - DNA, 25 bp, Homo sapien
cataggcgaaggaatttgccttgtc

SEQ ID NO: 5477220 - DNA, 25 bp, Homo sapien
ttgtccaatgcctgtatctccattg

SEQ ID NO: 5477221 - DNA, 25 bp, Homo sapien
acaggctcataggcgaaggaatttg

SEQ ID NO: 5477222 - DNA, 25 bp, Homo sapien
gaaatgtgaggacatattttaaagg

SEQ ID NO: 5477223 - DNA, 25 bp, Homo sapien
tcacacctcaggaatgatccaagac

SEQ ID NO: 5477224 - DNA, 25 bp, Homo sapien
cgaggcacccttaggtgcagtgctc

SEQ ID NO: 5477225 - DNA, 25 bp, Homo sapien
ttctgatgatgtgctcacacctcag

SEQ ID NO: 5477226 - DNA, 25 bp, Homo sapien
tgcatctcagggatgatccgaggca

SEQ ID NO: 5477227 - DNA, 25 bp, Homo sapien
agtatgatgcgtggaatctcacaag

SEQ ID NO: 5477228 - DNA, 25 bp, Homo sapien
ctagtatgatgcgtggaatctcaca

SEQ ID NO: 5477229 - DNA, 25 bp, Homo sapien
gtatgatgcgtggaatctcacaagc

SEQ ID NO: 5477230 - DNA, 25 bp, Homo sapien
ctctagtatgatgcgtggaatctca

SEQ ID NO: 5477231 - DNA, 25 bp, Homo sapien
tgatgagcctgatcccgttcgtgag

SEQ ID NO: 5477232 - DNA, 25 bp, Homo sapien
cgtacacggcgtggcttaggagcat

SEQ ID NO: 5477233 - DNA, 25 bp, Homo sapien
cagcttcggtgtctggtgcggaacc

SEQ ID NO: 5477234 - DNA, 25 bp, Homo sapien
tccagctggtaggtgtcgtctctca

SEQ ID NO: 5477235 - DNA, 25 bp, Homo sapien
tggttttccgggtgctggaagccca

SEQ ID NO: 5477236 - DNA, 25 bp, Homo sapien
gcagagcctccatgtgaagtgtgga

SEQ ID NO: 5477237 - DNA, 25 bp, Homo sapien
acactgcattctcgggaagacagca

SEQ ID NO: 5477238 - DNA, 25 bp, Homo sapien
taggactattgcaacagcctcgaag

SEQ ID NO: 5477239 - DNA, 25 bp, Homo sapien
attcttgattcagcagatgcagggc

SEQ ID NO: 5477240 - DNA, 25 bp, Homo sapien
tcattcttgattcagcagatgcagg

SEQ ID NO: 5477241 - DNA, 25 bp, Homo sapien
tgattcagcagatgcagggcagcag

SEQ ID NO: 5477242 - DNA, 25 bp, Homo sapien
tcttgattcagcagatgcagggcag

SEQ ID NO: 5477243 - DNA, 25 bp, Homo sapien
tgctgtatctcggggggtgctgtgc

SEQ ID NO: 5477244 - DNA, 25 bp, Homo sapien
gctgcgtctggggggtgctgcatct

SEQ ID NO: 5477245 - DNA, 25 bp, Homo sapien
tctggggggtgctgtatctcggggg

SEQ ID NO: 5477246 - DNA, 25 bp, Homo sapien
catggcccgggggtgctgcgtctgg

SEQ ID NO: 5477247 - DNA, 25 bp, Homo sapien
gcgtctcggggggtgctgcgcctgg

SEQ ID NO: 5477248 - DNA, 25 bp, Homo sapien
tgcatcttgggcggtgctgtatctg

SEQ ID NO: 5477249 - DNA, 25 bp, Homo sapien
gtgctgcatcttgggcggtgctgta

SEQ ID NO: 5477250 - DNA, 25 bp, Homo sapien
catcttgggcggtgctgtatctggg

SEQ ID NO: 5477251 - DNA, 25 bp, Homo sapien
tgagctctgcctttcgcacggtctc

SEQ ID NO: 5477252 - DNA, 25 bp, Homo sapien
gagctctgcctttcgcacggtctct

SEQ ID NO: 5477253 - DNA, 25 bp, Homo sapien
aggtggagaggggatgctggtggct

SEQ ID NO: 5477254 - DNA, 25 bp, Homo sapien
ctagcaggtggagaggggatgctgg

SEQ ID NO: 5477255 - DNA, 25 bp, Homo sapien
gagaggggatgctggtggctgagaa

SEQ ID NO: 5477256 - DNA, 25 bp, Homo sapien
agaggggatgctggtggctgagaac

SEQ ID NO: 5477257 - DNA, 25 bp, Homo sapien
aggggtggcagccagctcttggcgg

SEQ ID NO: 5477258 - DNA, 25 bp, Homo sapien
ctcgaggggtggcagccagctcttg

SEQ ID NO: 5477259 - DNA, 25 bp, Homo sapien
gggtggcagccagctcttggcggcc

SEQ ID NO: 5477260 - DNA, 25 bp, Homo sapien
gtggcagccagctcttggcggccca

SEQ ID NO: 5477261 - DNA, 25 bp, Homo sapien
actgcctggactgtcgctgagcaaa

SEQ ID NO: 5477262 - DNA, 25 bp, Homo sapien
ctggactgtcgctgagcaaatgcca

SEQ ID NO: 5477263 - DNA, 25 bp, Homo sapien
ctgagcaaatgccagggcccgaaga

SEQ ID NO: 5477264 - DNA, 25 bp, Homo sapien
tgagcaaatgccagggcccgaagag

SEQ ID NO: 5477265 - DNA, 25 bp, Homo sapien
agctgggaaccgcagaccggtgtca

SEQ ID NO: 5477266 - DNA, 25 bp, Homo sapien
ctggaccagagtttcccgatagcct

SEQ ID NO: 5477267 - DNA, 25 bp, Homo sapien
tggatgatcccatcttgacgacgag

SEQ ID NO: 5477268 - DNA, 25 bp, Homo sapien
cccatcttgacgacgagctgggaac

SEQ ID NO: 5477269 - DNA, 25 bp, Homo sapien
gggacgcctgcatcgtggcaggacc

SEQ ID NO: 5477270 - DNA, 25 bp, Homo sapien
cgcctgcatcgtggcaggaccaagc

SEQ ID NO: 5477271 - DNA, 25 bp, Homo sapien
gacgcctgcatcgtggcaggaccaa

SEQ ID NO: 5477272 - DNA, 25 bp, Homo sapien
tgggggacgcctgcatcgtggcagg

SEQ ID NO: 5477273 - DNA, 25 bp, Homo sapien
gcacaggcttagtagtggatcctct

SEQ ID NO: 5477274 - DNA, 25 bp, Homo sapien
ccagtgactatggattgctgtgagc

SEQ ID NO: 5477275 - DNA, 25 bp, Homo sapien
caacagcgggcagtgtatctgctgg

SEQ ID NO: 5477276 - DNA, 25 bp, Homo sapien
tggtctggcccatgggatatcgact

SEQ ID NO: 5477277 - DNA, 25 bp, Homo sapien
tctgcactgagggccaatggcttgc

SEQ ID NO: 5477278 - DNA, 25 bp, Homo sapien
gcactgagggccaatggcttgcacc

SEQ ID NO: 5477279 - DNA, 25 bp, Homo sapien
tgcactgagggccaatggcttgcac

SEQ ID NO: 5477280 - DNA, 25 bp, Homo sapien
aggtctgcactgagggccaatggct

SEQ ID NO: 5477281 - DNA, 25 bp, Homo sapien
gagccacagtcggtcccttttctta

SEQ ID NO: 5477282 - DNA, 25 bp, Homo sapien
aagcctgatcctcccgggcctatga

SEQ ID NO: 5477283 - DNA, 25 bp, Homo sapien
gtcagctctgggcaacgggacccag

SEQ ID NO: 5477284 - DNA, 25 bp, Homo sapien
tcccgggcctatgagggtcagctct

SEQ ID NO: 5477285 - DNA, 25 bp, Homo sapien
tgcaggggtcgggcagaatttcctt

SEQ ID NO: 5477286 - DNA, 25 bp, Homo sapien
ttcccgggacgccagctgtccagga

SEQ ID NO: 5477287 - DNA, 25 bp, Homo sapien
tcttctaggtcagtgccccatactg

SEQ ID NO: 5477288 - DNA, 25 bp, Homo sapien
ctggtctgaggggatccgcattccc

SEQ ID NO: 5477289 - DNA, 25 bp, Homo sapien
tcagtgccccatactggtctgaggg

SEQ ID NO: 5477290 - DNA, 25 bp, Homo sapien
atgcctgcttgcaccccggtggcca

SEQ ID NO: 5477291 - DNA, 25 bp, Homo sapien
ttgcaccccggtggccaaagccagt

SEQ ID NO: 5477292 - DNA, 25 bp, Homo sapien
atgtactcctccacggatgagtgga

SEQ ID NO: 5477293 - DNA, 25 bp, Homo sapien
ctctgctaccctcatgcctgcttgc

SEQ ID NO: 5477294 - DNA, 25 bp, Homo sapien
tgcatcacctgcagtggagatggtt

SEQ ID NO: 5477295 - DNA, 25 bp, Homo sapien
cccgtttttgggtttgcctgcatca

SEQ ID NO: 5477296 - DNA, 25 bp, Homo sapien
gaagccaagaaccaactcaggctga

SEQ ID NO: 5477297 - DNA, 25 bp, Homo sapien
cacggcctgacgactggattgtcca

SEQ ID NO: 5477298 - DNA, 25 bp, Homo sapien
gtttttcaaagctcaagtcagcagg

SEQ ID NO: 5477299 - DNA, 25 bp, Homo sapien
tgccaaagcgccaggaacaatccat

SEQ ID NO: 5477300 - DNA, 25 bp, Homo sapien
tcagcataactcatcactttgaaga

SEQ ID NO: 5477301 - DNA, 25 bp, Homo sapien
agatgggtccaaacttttgttcaca

SEQ ID NO: 5477302 - DNA, 25 bp, Homo sapien
tccccaccaatgctgtagcgatggg

SEQ ID NO: 5477303 - DNA, 25 bp, Homo sapien
accaatgctgtagcgatgggctgcc

SEQ ID NO: 5477304 - DNA, 25 bp, Homo sapien
cccaccaatgctgtagcgatgggct

SEQ ID NO: 5477305 - DNA, 25 bp, Homo sapien
aatgctgtagcgatgggctgccacg

SEQ ID NO: 5477306 - DNA, 25 bp, Homo sapien
tggtgcgtagcgtcctgctctctgg

SEQ ID NO: 5477307 - DNA, 25 bp, Homo sapien
ttttcctggtgcgtagcgtcctgct

SEQ ID NO: 5477308 - DNA, 25 bp, Homo sapien
ttcctggtgcgtagcgtcctgctct

SEQ ID NO: 5477309 - DNA, 25 bp, Homo sapien
ctcttttcctggtgcgtagcgtcct

SEQ ID NO: 5477310 - DNA, 25 bp, Homo sapien
cttggcccaaatagaggtggtgtca

SEQ ID NO: 5477311 - DNA, 25 bp, Homo sapien
tggcccaaatagaggtggtgtcacc

SEQ ID NO: 5477312 - DNA, 25 bp, Homo sapien
aatagaggtggtgtcacccaggcct

SEQ ID NO: 5477313 - DNA, 25 bp, Homo sapien
cccaaatagaggtggtgtcacccag

SEQ ID NO: 5477314 - DNA, 25 bp, Homo sapien
tgtggacaccgccttttccttcctc

SEQ ID NO: 5477315 - DNA, 25 bp, Homo sapien
ccccgagtccatcggcaggtgtgga

SEQ ID NO: 5477316 - DNA, 25 bp, Homo sapien
cgagtccatcggcaggtgtggacac

SEQ ID NO: 5477317 - DNA, 25 bp, Homo sapien
acgtttccccgagtccatcggcagg

SEQ ID NO: 5477318 - DNA, 25 bp, Homo sapien
tgtctgtgggccgacaggaagttct

SEQ ID NO: 5477319 - DNA, 25 bp, Homo sapien
tgtgggccgacaggaagttcttcat

SEQ ID NO: 5477320 - DNA, 25 bp, Homo sapien
ctgtctgtgggccgacaggaagttc

SEQ ID NO: 5477321 - DNA, 25 bp, Homo sapien
tctgtgggccgacaggaagttcttc

SEQ ID NO: 5477322 - DNA, 25 bp, Homo sapien
cactaccagaacaattgtcacttgg

SEQ ID NO: 5477323 - DNA, 25 bp, Homo sapien
gtcacttggttcagttcagcctcac

SEQ ID NO: 5477324 - DNA, 25 bp, Homo sapien
caatgccatgctcattcactaccag

SEQ ID NO: 5477325 - DNA, 25 bp, Homo sapien
aagttctgtagtctttcataaaaag

SEQ ID NO: 5477326 - DNA, 25 bp, Homo sapien
gcggcctttctggacgctgcccata

SEQ ID NO: 5477327 - DNA, 25 bp, Homo sapien
gagagcggcctttctggacgctgcc

SEQ ID NO: 5477328 - DNA, 25 bp, Homo sapien
gagcggcctttctggacgctgccca

SEQ ID NO: 5477329 - DNA, 25 bp, Homo sapien
aggagagcggcctttctggacgctg

SEQ ID NO: 5477330 - DNA, 25 bp, Homo sapien
ggtgctggccgtgccgagggtgagg

SEQ ID NO: 5477331 - DNA, 25 bp, Homo sapien
ttccggtgaacagcggtggtgctgg

SEQ ID NO: 5477332 - DNA, 25 bp, Homo sapien
cgctcttccggtgaacagcggtggt

SEQ ID NO: 5477333 - DNA, 25 bp, Homo sapien
gggagctccacgctcttccggtgaa

SEQ ID NO: 5477334 - DNA, 25 bp, Homo sapien
caggtgggatctcaggtagacatct

SEQ ID NO: 5477335 - DNA, 25 bp, Homo sapien
gacaccttcttcaggtgggatctca

SEQ ID NO: 5477336 - DNA, 25 bp, Homo sapien
ggtcatgcccaaaggaggtccctct

SEQ ID NO: 5477337 - DNA, 25 bp, Homo sapien
gggaccacttcatgtggccacagga

SEQ ID NO: 5477338 - DNA, 25 bp, Homo sapien
aagtacagagtgaggggctggagcc

SEQ ID NO: 5477339 - DNA, 25 bp, Homo sapien
acagagtgaggggctggagccccat

SEQ ID NO: 5477340 - DNA, 25 bp, Homo sapien
agtacagagtgaggggctggagccc

SEQ ID NO: 5477341 - DNA, 25 bp, Homo sapien
cttgaagtacagagtgaggggctgg

SEQ ID NO: 5477342 - DNA, 25 bp, Homo sapien
ggtgtcgcttcttatctgggggcca

SEQ ID NO: 5477343 - DNA, 25 bp, Homo sapien
tggcccaggaactcaactggtccca

SEQ ID NO: 5477344 - DNA, 25 bp, Homo sapien
tgtcgcttcttatctgggggccact

SEQ ID NO: 5477345 - DNA, 25 bp, Homo sapien
ctgcagggtgtcgcttcttatctgg

SEQ ID NO: 5477346 - DNA, 25 bp, Homo sapien
gtcatgtctcccagcttgtcccatt

SEQ ID NO: 5477347 - DNA, 25 bp, Homo sapien
cctccaatgagagtcatgtctccca

SEQ ID NO: 5477348 - DNA, 25 bp, Homo sapien
ccctccaatgagagtcatgtctccc

SEQ ID NO: 5477349 - DNA, 25 bp, Homo sapien
tgagagtcatgtctcccagcttgtc

SEQ ID NO: 5477350 - DNA, 25 bp, Homo sapien
tcacttggacacgtgacagtcgtgt

SEQ ID NO: 5477351 - DNA, 25 bp, Homo sapien
ggcagccgtgaaatatcaggagaca

SEQ ID NO: 5477352 - DNA, 25 bp, Homo sapien
ttgataggttcaatggtctgcagct

SEQ ID NO: 5477353 - DNA, 25 bp, Homo sapien
cctcggtggcctttgaacgtcttct

SEQ ID NO: 5477354 - DNA, 25 bp, Homo sapien
cgtggtgagtccatgcacagatgca

SEQ ID NO: 5477355 - DNA, 25 bp, Homo sapien
agagcagcgtttgccaagggtcacg

SEQ ID NO: 5477356 - DNA, 25 bp, Homo sapien
acagatgcagtgtcgctggtgccgc

SEQ ID NO: 5477357 - DNA, 25 bp, Homo sapien
tgccgcacagcaaaggaaggcgttc

SEQ ID NO: 5477358 - DNA, 25 bp, Homo sapien
ctgaggcaactcacgggtgctggtg

SEQ ID NO: 5477359 - DNA, 25 bp, Homo sapien
gcaactcacgggtgctggtggttcc

SEQ ID NO: 5477360 - DNA, 25 bp, Homo sapien
tcacgggtgctggtggttccagaat

SEQ ID NO: 5477361 - DNA, 25 bp, Homo sapien
tccagaatggctatgcggcgacact

SEQ ID NO: 5477362 - DNA, 25 bp, Homo sapien
gcatcgccaggtggcttaagcaaga

SEQ ID NO: 5477363 - DNA, 25 bp, Homo sapien
aaactgcatcgccaggtggcttaag

SEQ ID NO: 5477364 - DNA, 25 bp, Homo sapien
cgccaggtggcttaagcaagaaaag

SEQ ID NO: 5477365 - DNA, 25 bp, Homo sapien
tgaaacaaactgcatcgccaggtgg

SEQ ID NO: 5477366 - DNA, 25 bp, Homo sapien
gaagcacagctttcccattcttttg

SEQ ID NO: 5477367 - DNA, 25 bp, Homo sapien
cacagctttcccattcttttgagaa

SEQ ID NO: 5477368 - DNA, 25 bp, Homo sapien
ttctgtccccactggaagcacagct

SEQ ID NO: 5477369 - DNA, 25 bp, Homo sapien
cattcttttgagaagctccgagcat

SEQ ID NO: 5477370 - DNA, 25 bp, Homo sapien
tacttgatctcactcagaggtgaat

SEQ ID NO: 5477371 - DNA, 25 bp, Homo sapien
ttctatacttgatctcactcagagg

SEQ ID NO: 5477372 - DNA, 25 bp, Homo sapien
cctctggcaaatcttcccttcgagg

SEQ ID NO: 5477373 - DNA, 25 bp, Homo sapien
cttcgaggctcacattttctatact

SEQ ID NO: 5477374 - DNA, 25 bp, Homo sapien
ctgtttggcttgtagcaaacttgca

SEQ ID NO: 5477375 - DNA, 25 bp, Homo sapien
tcagctttatcttccgggtagtggg

SEQ ID NO: 5477376 - DNA, 25 bp, Homo sapien
tctcagctttatcttccgggtagtg

SEQ ID NO: 5477377 - DNA, 25 bp, Homo sapien
tgccatgtgaaggagtctcagcttt

SEQ ID NO: 5477378 - DNA, 25 bp, Homo sapien
catgtgaaggagtctcagctttatc

SEQ ID NO: 5477379 - DNA, 25 bp, Homo sapien
tggccaaagcttgggcaacagcgtg

SEQ ID NO: 5477380 - DNA, 25 bp, Homo sapien
ctggccaaagcttgggcaacagcgt

SEQ ID NO: 5477381 - DNA, 25 bp, Homo sapien
gcttgtcctgcgaatgcactccact

SEQ ID NO: 5477382 - DNA, 25 bp, Homo sapien
ggcagcctgagaggcgtcagcactc

SEQ ID NO: 5477383 - DNA, 25 bp, Homo sapien
gcactctcggctttcttgtgcttgt

SEQ ID NO: 5477384 - DNA, 25 bp, Homo sapien
tagcaggtggttcgcggtggcagtg

SEQ ID NO: 5477385 - DNA, 25 bp, Homo sapien
tccggagaacaaagctctgtgggtg

SEQ ID NO: 5477386 - DNA, 25 bp, Homo sapien
cccatagtcaaattgggttgaacaa

SEQ ID NO: 5477387 - DNA, 25 bp, Homo sapien
caaacatgactcttgatccggagaa

SEQ ID NO: 5477388 - DNA, 25 bp, Homo sapien
tgaatataatcttgctgcccatagt

SEQ ID NO: 5477389 - DNA, 25 bp, Homo sapien
cctggtcagtggctggtgcaatgtc

SEQ ID NO: 5477390 - DNA, 25 bp, Homo sapien
tggatgtgacacgttcccacacgtt

SEQ ID NO: 5477391 - DNA, 25 bp, Homo sapien
tctgcaggcctgttcttgagggctc

SEQ ID NO: 5477392 - DNA, 25 bp, Homo sapien
tgtcgccgcccataagcatagggat

SEQ ID NO: 5477393 - DNA, 25 bp, Homo sapien
tcctcctcctgccacagcaaagatt

SEQ ID NO: 5477394 - DNA, 25 bp, Homo sapien
ctgaatggggctggcctcctcctcc

SEQ ID NO: 5477395 - DNA, 25 bp, Homo sapien
ggcctcctcctcctgccacagcaaa

SEQ ID NO: 5477396 - DNA, 25 bp, Homo sapien
cctcctcctcctgccacagcaaaga

SEQ ID NO: 5477397 - DNA, 25 bp, Homo sapien
catataggcacatgatgcatgtctg

SEQ ID NO: 5477398 - DNA, 25 bp, Homo sapien
tgtctgtgaatatgcagaatatgca

SEQ ID NO: 5477399 - DNA, 25 bp, Homo sapien
tgtgtacatgtagatgacgcaggca

SEQ ID NO: 5477400 - DNA, 25 bp, Homo sapien
gcatatccgtgtacatgtagatgta

SEQ ID NO: 5477401 - DNA, 25 bp, Homo sapien
tacacgcgcgttccaggcttcatgt

SEQ ID NO: 5477402 - DNA, 25 bp, Homo sapien
ggcttcatgtgcgtcttccactctg

SEQ ID NO: 5477403 - DNA, 25 bp, Homo sapien
tgtttgagaggatgtttacacgcgc

SEQ ID NO: 5477404 - DNA, 25 bp, Homo sapien
ccatttccctcgagctctgggtact

SEQ ID NO: 5477405 - DNA, 25 bp, Homo sapien
tctctatccagaggattggcgtcct

SEQ ID NO: 5477406 - DNA, 25 bp, Homo sapien
gtctctctatccagaggattggcgt

SEQ ID NO: 5477407 - DNA, 25 bp, Homo sapien
accgctccagttttcccccacatga

SEQ ID NO: 5477408 - DNA, 25 bp, Homo sapien
tctatccagaggattggcgtcctgg

SEQ ID NO: 5477409 - DNA, 25 bp, Homo sapien
cctgctcgtagcctgcaaagccctc

SEQ ID NO: 5477410 - DNA, 25 bp, Homo sapien
tgctcgtagcctgcaaagccctcca

SEQ ID NO: 5477411 - DNA, 25 bp, Homo sapien
aagccctccacatgcatcccaggca

SEQ ID NO: 5477412 - DNA, 25 bp, Homo sapien
aggcagcgctggcattcctgcctgg

SEQ ID NO: 5477413 - DNA, 25 bp, Homo sapien
gttctccctgtggacagacaggctg

SEQ ID NO: 5477414 - DNA, 25 bp, Homo sapien
tctccctgtggacagacaggctgtc

SEQ ID NO: 5477415 - DNA, 25 bp, Homo sapien
cctgtggacagacaggctgtcttca

SEQ ID NO: 5477416 - DNA, 25 bp, Homo sapien
tggttctccctgtggacagacaggc

SEQ ID NO: 5477417 - DNA, 25 bp, Homo sapien
ttcccatttcgagaagtaggagcca

SEQ ID NO: 5477418 - DNA, 25 bp, Homo sapien
tcgattgctaagctcagggtctggc

SEQ ID NO: 5477419 - DNA, 25 bp, Homo sapien
gaggtcgcattgacccctttccaga

SEQ ID NO: 5477420 - DNA, 25 bp, Homo sapien
gagagttatgactcagaacccactg

SEQ ID NO: 5477421 - DNA, 25 bp, Homo sapien
tgtctgagttctagggggttttcca

SEQ ID NO: 5477422 - DNA, 25 bp, Homo sapien
ttccaagcttgtctgatcggatgcg

SEQ ID NO: 5477423 - DNA, 25 bp, Homo sapien
ctgatcggatgcgtcgtctaggtct

SEQ ID NO: 5477424 - DNA, 25 bp, Homo sapien
cttgtctgatcggatgcgtcgtcta

SEQ ID NO: 5477425 - DNA, 25 bp, Homo sapien
agcacgttgtcacctgtcagtaccg

SEQ ID NO: 5477426 - DNA, 25 bp, Homo sapien
caagtcggatttatcgctcagcgtc

SEQ ID NO: 5477427 - DNA, 25 bp, Homo sapien
cagtgccctccagcattgaagacca

SEQ ID NO: 5477428 - DNA, 25 bp, Homo sapien
tgtgatgggtaaggaagcacctgcc

SEQ ID NO: 5477429 - DNA, 25 bp, Homo sapien
agaagatgctggcaagagtaaggag

SEQ ID NO: 5477430 - DNA, 25 bp, Homo sapien
ggtattcaggcaatatttggaggcc

SEQ ID NO: 5477431 - DNA, 25 bp, Homo sapien
ctggtattcaggcaatatttggagg

SEQ ID NO: 5477432 - DNA, 25 bp, Homo sapien
gatgctggcaagagtaaggagggca

SEQ ID NO: 5477433 - DNA, 25 bp, Homo sapien
gcaagtcgcttagtgccacattctc

SEQ ID NO: 5477434 - DNA, 25 bp, Homo sapien
gatacggatgaatctcagcaaaatc

SEQ ID NO: 5477435 - DNA, 25 bp, Homo sapien
ccacattctcttcggaagatacgga

SEQ ID NO: 5477436 - DNA, 25 bp, Homo sapien
tctcttcggaagatacggatgaatc

SEQ ID NO: 5477437 - DNA, 25 bp, Homo sapien
tgcatgtggataagaactgggtgtt

SEQ ID NO: 5477438 - DNA, 25 bp, Homo sapien
ggtattgtatatagtaggcacccaa

SEQ ID NO: 5477439 - DNA, 25 bp, Homo sapien
tgtgcttccgcaacaggctgtgggc

SEQ ID NO: 5477440 - DNA, 25 bp, Homo sapien
tcatagctctgaccttgttgccaag

SEQ ID NO: 5477441 - DNA, 25 bp, Homo sapien
gattccccatctcaaggtgctgcat

SEQ ID NO: 5477442 - DNA, 25 bp, Homo sapien
ttggattccccatctcaaggtgctg

SEQ ID NO: 5477443 - DNA, 25 bp, Homo sapien
cattggattccccatctcaaggtgc

SEQ ID NO: 5477444 - DNA, 25 bp, Homo sapien
tcaacaaccaaatcggccacagccc

SEQ ID NO: 5477445 - DNA, 25 bp, Homo sapien
gcctgtcgagtaagccctgaggaag

SEQ ID NO: 5477446 - DNA, 25 bp, Homo sapien
aaggcggctgctcatgagaagggga

SEQ ID NO: 5477447 - DNA, 25 bp, Homo sapien
ctggggcctgtcgagtaagccctga

SEQ ID NO: 5477448 - DNA, 25 bp, Homo sapien
ggctgctcatgagaaggggagtggc

SEQ ID NO: 5477449 - DNA, 25 bp, Homo sapien
agcaggcgggaacgggaaaagcgca

SEQ ID NO: 5477450 - DNA, 25 bp, Homo sapien
gtaagatcccgccaggccctcgagg

SEQ ID NO: 5477451 - DNA, 25 bp, Homo sapien
cgggaaaagcgcacgtaagatcccg

SEQ ID NO: 5477452 - DNA, 25 bp, Homo sapien
aaagcgcacgtaagatcccgccagg

SEQ ID NO: 5477453 - DNA, 25 bp, Homo sapien
atgcctgtgtttccggccaaggtgg

SEQ ID NO: 5477454 - DNA, 25 bp, Homo sapien
acaaatgagcccgagtcgctccact

SEQ ID NO: 5477455 - DNA, 25 bp, Homo sapien
ctgatgaagaacatgcctgtgtttc

SEQ ID NO: 5477456 - DNA, 25 bp, Homo sapien
actttccctgggcccacatagctgg

SEQ ID NO: 5477457 - DNA, 25 bp, Homo sapien
accagcgcagtgttgtagatacagc

SEQ ID NO: 5477458 - DNA, 25 bp, Homo sapien
attgcttcaccagcgcagtgttgta

SEQ ID NO: 5477459 - DNA, 25 bp, Homo sapien
gcttcaccagcgcagtgttgtagat

SEQ ID NO: 5477460 - DNA, 25 bp, Homo sapien
tcaccagcgcagtgttgtagataca

SEQ ID NO: 5477461 - DNA, 25 bp, Homo sapien
attggattcagaaggatcgggaacc

SEQ ID NO: 5477462 - DNA, 25 bp, Homo sapien
tgaaagtcaacgtcctttcggttga

SEQ ID NO: 5477463 - DNA, 25 bp, Homo sapien
ctgtagccaggatcggatgctgttt

SEQ ID NO: 5477464 - DNA, 25 bp, Homo sapien
ccaggatcggatgctgttttaaatt

SEQ ID NO: 5477465 - DNA, 25 bp, Homo sapien
aaattcgcagccaaagaacgcatcg

SEQ ID NO: 5477466 - DNA, 25 bp, Homo sapien
agaacgcatcgaacagaaatagcat

SEQ ID NO: 5477467 - DNA, 25 bp, Homo sapien
cagaaatagcattagagggagtgcg

SEQ ID NO: 5477468 - DNA, 25 bp, Homo sapien
tgccaaaaaggcagttctcaaattc

SEQ ID NO: 5477469 - DNA, 25 bp, Homo sapien
tgtgcgtccgttgtaaacacagctt

SEQ ID NO: 5477470 - DNA, 25 bp, Homo sapien
gcaacagcattcatacacgccaggc

SEQ ID NO: 5477471 - DNA, 25 bp, Homo sapien
gaattttcgctgatgctcaagtgct

SEQ ID NO: 5477472 - DNA, 25 bp, Homo sapien
taaatgttctaacgctgtcgctcca

SEQ ID NO: 5477473 - DNA, 25 bp, Homo sapien
gaggagaactggtgtcccagtgttc

SEQ ID NO: 5477474 - DNA, 25 bp, Homo sapien
ttggaggagaactggtgtcccagtg

SEQ ID NO: 5477475 - DNA, 25 bp, Homo sapien
ggaggagaactggtgtcccagtgtt

SEQ ID NO: 5477476 - DNA, 25 bp, Homo sapien
tggaggagaactggtgtcccagtgt

SEQ ID NO: 5477477 - DNA, 25 bp, Homo sapien
catttgtgcagtggctacacctggc

SEQ ID NO: 5477478 - DNA, 25 bp, Homo sapien
cacacgagcgtgattctatcctgca

SEQ ID NO: 5477479 - DNA, 25 bp, Homo sapien
catgtggaagcaggcgacatcgtct

SEQ ID NO: 5477480 - DNA, 25 bp, Homo sapien
ttttatcatacgagagtgttcccac

SEQ ID NO: 5477481 - DNA, 25 bp, Homo sapien
aacacaaaatgcggcaaatgcttcc

SEQ ID NO: 5477482 - DNA, 25 bp, Homo sapien
aatcaacacaaaatgcggcaaatgc

SEQ ID NO: 5477483 - DNA, 25 bp, Homo sapien
tcaacacaaaatgcggcaaatgctt

SEQ ID NO: 5477484 - DNA, 25 bp, Homo sapien
caatcaacacaaaatgcggcaaatg

SEQ ID NO: 5477485 - DNA, 25 bp, Homo sapien
agctcctcagcctccgggctctttg

SEQ ID NO: 5477486 - DNA, 25 bp, Homo sapien
tccattctgagaactgtcatcaagc

SEQ ID NO: 5477487 - DNA, 25 bp, Homo sapien
gctctttgagcttaaaaacactact

SEQ ID NO: 5477488 - DNA, 25 bp, Homo sapien
ttctgagaactgtcatcaagctcct

SEQ ID NO: 5477489 - DNA, 25 bp, Homo sapien
cttcattgtcggcttgttctctctg

SEQ ID NO: 5477490 - DNA, 25 bp, Homo sapien
cagatgccaggtgtgaggtcgcttc

SEQ ID NO: 5477491 - DNA, 25 bp, Homo sapien
gcaaggaccgtgttgccccattttc

SEQ ID NO: 5477492 - DNA, 25 bp, Homo sapien
tctctggagctagggttgttctcac

SEQ ID NO: 5477493 - DNA, 25 bp, Homo sapien
ccgaatgtcggcgtgcagggaaatt

SEQ ID NO: 5477494 - DNA, 25 bp, Homo sapien
aatgtcggcgtgcagggaaattata

SEQ ID NO: 5477495 - DNA, 25 bp, Homo sapien
cagtaaggccgaatgtcggcgtgca

SEQ ID NO: 5477496 - DNA, 25 bp, Homo sapien
tcagtaaggccgaatgtcggcgtgc

SEQ ID NO: 5477497 - DNA, 25 bp, Homo sapien
gatccaaggacagacagacttcaca

SEQ ID NO: 5477498 - DNA, 25 bp, Homo sapien
tgatccaaggacagacagacttcac

SEQ ID NO: 5477499 - DNA, 25 bp, Homo sapien
gacctgcagtttgcatggtgcttta

SEQ ID NO: 5477500 - DNA, 25 bp, Homo sapien
gagaaaggcagcacacgttgccctg

SEQ ID NO: 5477501 - DNA, 25 bp, Homo sapien
gcagcacacgttgccctgggatcct

SEQ ID NO: 5477502 - DNA, 25 bp, Homo sapien
gcatggtgctttagagaaaggcagc

SEQ ID NO: 5477503 - DNA, 25 bp, Homo sapien
gggcatggccatgtctaagcccgcc

SEQ ID NO: 5477504 - DNA, 25 bp, Homo sapien
ggagctcagcgttgactctttgaac

SEQ ID NO: 5477505 - DNA, 25 bp, Homo sapien
atgtgagatcctgcgtccctcggag

SEQ ID NO: 5477506 - DNA, 25 bp, Homo sapien
cccctgtagatgtgagatcctgcgt

SEQ ID NO: 5477507 - DNA, 25 bp, Homo sapien
caggtagacataggcttccagccaa

SEQ ID NO: 5477508 - DNA, 25 bp, Homo sapien
aggcaaaccagagtgctcccacatg

SEQ ID NO: 5477509 - DNA, 25 bp, Homo sapien
agaaggcaaaccagagtgctcccac

SEQ ID NO: 5477510 - DNA, 25 bp, Homo sapien
cagccaagaaggcaaaccagagtgc

SEQ ID NO: 5477511 - DNA, 25 bp, Homo sapien
ctccagcccgcatctgccagtctgt

SEQ ID NO: 5477512 - DNA, 25 bp, Homo sapien
gtggaaacagcctaggatcactcca

SEQ ID NO: 5477513 - DNA, 25 bp, Homo sapien
atgatacctttgcagctttacaggt

SEQ ID NO: 5477514 - DNA, 25 bp, Homo sapien
tgctctgttcctgcaagattcccac

SEQ ID NO: 5477515 - DNA, 25 bp, Homo sapien
tcatcaatacccttgtccccaaaca

SEQ ID NO: 5477516 - DNA, 25 bp, Homo sapien
ttgggaggacgtgaacatgcccttg

SEQ ID NO: 5477517 - DNA, 25 bp, Homo sapien
atcaatacccttgtccccaaacaag

SEQ ID NO: 5477518 - DNA, 25 bp, Homo sapien
atcatcaatacccttgtccccaaac

SEQ ID NO: 5477519 - DNA, 25 bp, Homo sapien
ccagggctgcttccaagggcagagt

SEQ ID NO: 5477520 - DNA, 25 bp, Homo sapien
gaagggccctggagactggaggagc

SEQ ID NO: 5477521 - DNA, 25 bp, Homo sapien
agggctgcttccaagggcagagtca

SEQ ID NO: 5477522 - DNA, 25 bp, Homo sapien
ggagctgagcaggaggctccccagg

SEQ ID NO: 5477523 - DNA, 25 bp, Homo sapien
ctccaggaaccggatgtgcagacca

SEQ ID NO: 5477524 - DNA, 25 bp, Homo sapien
gctcctgctatacgtctctccagga

SEQ ID NO: 5477525 - DNA, 25 bp, Homo sapien
gagctgcagcgctcctgctatacgt

SEQ ID NO: 5477526 - DNA, 25 bp, Homo sapien
tctggacatctggtgcctggacacc

SEQ ID NO: 5477527 - DNA, 25 bp, Homo sapien
tggttatgatagctccagggcgccc

SEQ ID NO: 5477528 - DNA, 25 bp, Homo sapien
tttaggcaccgaactgaagccgcgg

SEQ ID NO: 5477529 - DNA, 25 bp, Homo sapien
tgttaagcaaggttttccgcaggca

SEQ ID NO: 5477530 - DNA, 25 bp, Homo sapien
tcagtaaaagccctccgcatctggg

SEQ ID NO: 5477531 - DNA, 25 bp, Homo sapien
gggtaccgggcgctcccgcagaggc

SEQ ID NO: 5477532 - DNA, 25 bp, Homo sapien
gaggctcgctgtggcgttgttttaa

SEQ ID NO: 5477533 - DNA, 25 bp, Homo sapien
aagcgaaggcggagcgcagaggctg

SEQ ID NO: 5477534 - DNA, 25 bp, Homo sapien
ctgacccgcgaagcgaaggcggagc

SEQ ID NO: 5477535 - DNA, 25 bp, Homo sapien
cgaagggtggcatctccacggatct

SEQ ID NO: 5477536 - DNA, 25 bp, Homo sapien
gggtggcatctccacggatcttggc

SEQ ID NO: 5477537 - DNA, 25 bp, Homo sapien
gctggccgaagggtggcatctccac

SEQ ID NO: 5477538 - DNA, 25 bp, Homo sapien
gcatctccacggatcttggcggcat

SEQ ID NO: 5477539 - DNA, 25 bp, Homo sapien
tccttgggcacgggcgtctccaggg

SEQ ID NO: 5477540 - DNA, 25 bp, Homo sapien
gtccttgggcacgggcgtctccagg

SEQ ID NO: 5477541 - DNA, 25 bp, Homo sapien
ccttgggcacgggcgtctccagggg

SEQ ID NO: 5477542 - DNA, 25 bp, Homo sapien
ggtattccctgctctcccaagcatg

SEQ ID NO: 5477543 - DNA, 25 bp, Homo sapien
catggcattcatttgtgccaccacc

SEQ ID NO: 5477544 - DNA, 25 bp, Homo sapien
tctctgaacgagtcaccgtctgctc

SEQ ID NO: 5477545 - DNA, 25 bp, Homo sapien
catgttgaccatgagctcaccaggc

SEQ ID NO: 5477546 - DNA, 25 bp, Homo sapien
gactgagagtcaccaggtcactacc

SEQ ID NO: 5477547 - DNA, 25 bp, Homo sapien
tggagactgagagtcaccaggtcac

SEQ ID NO: 5477548 - DNA, 25 bp, Homo sapien
ctctggagactgagagtcaccaggt

SEQ ID NO: 5477549 - DNA, 25 bp, Homo sapien
gagtcaccaggtcactaccctgagc

SEQ ID NO: 5477550 - DNA, 25 bp, Homo sapien
ggacatctggtaccggggtctgctg

SEQ ID NO: 5477551 - DNA, 25 bp, Homo sapien
catctggtaccggggtctgctgggt

SEQ ID NO: 5477552 - DNA, 25 bp, Homo sapien
gacatctggtaccggggtctgctgg

SEQ ID NO: 5477553 - DNA, 25 bp, Homo sapien
atctggtaccggggtctgctgggtg

SEQ ID NO: 5477554 - DNA, 25 bp, Homo sapien
cagatgccttcaacccacaggctaa

SEQ ID NO: 5477555 - DNA, 25 bp, Homo sapien
aggctaagatgccacgtcgtctggg

SEQ ID NO: 5477556 - DNA, 25 bp, Homo sapien
atgggtatgcctgtgggccgccaca

SEQ ID NO: 5477557 - DNA, 25 bp, Homo sapien
taggggccaacgtgtacagaggcaa

SEQ ID NO: 5477558 - DNA, 25 bp, Homo sapien
tgccgccccatccaaggctgagtgg

SEQ ID NO: 5477559 - DNA, 25 bp, Homo sapien
aaggctgagtggactcgcccatcct

SEQ ID NO: 5477560 - DNA, 25 bp, Homo sapien
ttccagcaggtctcatcactcgctg

SEQ ID NO: 5477561 - DNA, 25 bp, Homo sapien
cgctgactcagtgacccaggaaaca

SEQ ID NO: 5477562 - DNA, 25 bp, Homo sapien
tttaatggtcgttgtgtggtaataa

SEQ ID NO: 5477563 - DNA, 25 bp, Homo sapien
gagattttaatggtcgttgtgtggt

SEQ ID NO: 5477564 - DNA, 25 bp, Homo sapien
tatcagttttaccatggggcccttc

SEQ ID NO: 5477565 - DNA, 25 bp, Homo sapien
aatggtcgttgtgtggtaataaaga

SEQ ID NO: 5477566 - DNA, 25 bp, Homo sapien
tcagtctcgtctgccgggacaattt

SEQ ID NO: 5477567 - DNA, 25 bp, Homo sapien
gctgtgaagttggatccatcggtca

SEQ ID NO: 5477568 - DNA, 25 bp, Homo sapien
gggacaatttcccagcgccacgtcc

SEQ ID NO: 5477569 - DNA, 25 bp, Homo sapien
tcaggagagactgactccttaggtg

SEQ ID NO: 5477570 - DNA, 25 bp, Homo sapien
cacaggcatgacttgatgtgaaaag

SEQ ID NO: 5477571 - DNA, 25 bp, Homo sapien
ggcacaggcatgacttgatgtgaaa

SEQ ID NO: 5477572 - DNA, 25 bp, Homo sapien
tgggcacaggcatgacttgatgtga

SEQ ID NO: 5477573 - DNA, 25 bp, Homo sapien
gagtagggggctgtgattccagtgg

SEQ ID NO: 5477574 - DNA, 25 bp, Homo sapien
cttggcttagcccgtggcagcacgt

SEQ ID NO: 5477575 - DNA, 25 bp, Homo sapien
tggcttagcccgtggcagcacgtac

SEQ ID NO: 5477576 - DNA, 25 bp, Homo sapien
ttcttggcttagcccgtggcagcac

SEQ ID NO: 5477577 - DNA, 25 bp, Homo sapien
cttcttggcttagcccgtggcagca

SEQ ID NO: 5477578 - DNA, 25 bp, Homo sapien
cttcaacctgcgttttagtgaccca

SEQ ID NO: 5477579 - DNA, 25 bp, Homo sapien
ttcaacctgcgttttagtgacccac

SEQ ID NO: 5477580 - DNA, 25 bp, Homo sapien
atctgcttcaatatcccctttgctg

SEQ ID NO: 5477581 - DNA, 25 bp, Homo sapien
ccatctgcttcaatatcccctttgc

SEQ ID NO: 5477582 - DNA, 25 bp, Homo sapien
atcatctccactttggacggtggtg

SEQ ID NO: 5477583 - DNA, 25 bp, Homo sapien
ctgcttcaatatcccctttgctgac

SEQ ID NO: 5477584 - DNA, 25 bp, Homo sapien
tgctggctcagtgcctggacttgca

SEQ ID NO: 5477585 - DNA, 25 bp, Homo sapien
gggcggtggattctgcctttgctgg

SEQ ID NO: 5477586 - DNA, 25 bp, Homo sapien
ctgggggcggtggattctgcctttg

SEQ ID NO: 5477587 - DNA, 25 bp, Homo sapien
ctttgctggctcagtgcctggactt

SEQ ID NO: 5477588 - DNA, 25 bp, Homo sapien
ggtggagaagttgggacagggtgag

SEQ ID NO: 5477589 - DNA, 25 bp, Homo sapien
ttctagatgagattagccttcgagt

SEQ ID NO: 5477590 - DNA, 25 bp, Homo sapien
ccttcgagtaaagcaggtggctctc

SEQ ID NO: 5477591 - DNA, 25 bp, Homo sapien
gagattagccttcgagtaaagcagg

SEQ ID NO: 5477592 - DNA, 25 bp, Homo sapien
aagcaggtggctctcgtcaaaaggg

SEQ ID NO: 5477593 - DNA, 25 bp, Homo sapien
acaggcaggtgctaagctcaaggca

SEQ ID NO: 5477594 - DNA, 25 bp, Homo sapien
tagtacagttagtgtcttcatgaag

SEQ ID NO: 5477595 - DNA, 25 bp, Homo sapien
tgctcctctggagaacacgcactag

SEQ ID NO: 5477596 - DNA, 25 bp, Homo sapien
ggacacggttgacgtctatcctggg

SEQ ID NO: 5477597 - DNA, 25 bp, Homo sapien
ccatcaggtctgtaatgggctgaag

SEQ ID NO: 5477598 - DNA, 25 bp, Homo sapien
gcttacagcactcaggaggtgccca

SEQ ID NO: 5477599 - DNA, 25 bp, Homo sapien
gctttaggctttatccgcaagaggc

SEQ ID NO: 5477600 - DNA, 25 bp, Homo sapien
ggcctccgtcttgatgatgcatggg

SEQ ID NO: 5477601 - DNA, 25 bp, Homo sapien
ggcgatcatttgataaccagacaga

SEQ ID NO: 5477602 - DNA, 25 bp, Homo sapien
cgggaaggtgccagcaatgaagaca

SEQ ID NO: 5477603 - DNA, 25 bp, Homo sapien
tgctggcactcagcatagagtaaaa

SEQ ID NO: 5477604 - DNA, 25 bp, Homo sapien
tgccatgaggccaatgatggcgatc

SEQ ID NO: 5477605 - DNA, 25 bp, Homo sapien
tgagcacatcctctgtggagacttg

SEQ ID NO: 5477606 - DNA, 25 bp, Homo sapien
ttttgagcacatcctctgtggagac

SEQ ID NO: 5477607 - DNA, 25 bp, Homo sapien
gcacatcctctgtggagacttggag

SEQ ID NO: 5477608 - DNA, 25 bp, Homo sapien
gagcacatcctctgtggagacttgg

SEQ ID NO: 5477609 - DNA, 25 bp, Homo sapien
gggcccgtcagctcatctaaatata

SEQ ID NO: 5477610 - DNA, 25 bp, Homo sapien
taattttgagtctgctacctccagg

SEQ ID NO: 5477611 - DNA, 25 bp, Homo sapien
aatgtctgattgcagggccatggca

SEQ ID NO: 5477612 - DNA, 25 bp, Homo sapien
aaaagcataatgtggctgggcacga

SEQ ID NO: 5477613 - DNA, 25 bp, Homo sapien
cttctggcctctccatcatgcccga

SEQ ID NO: 5477614 - DNA, 25 bp, Homo sapien
ttctggcctctccatcatgcccgac

SEQ ID NO: 5477615 - DNA, 25 bp, Homo sapien
caagagaatcggctcatcccagaag

SEQ ID NO: 5477616 - DNA, 25 bp, Homo sapien
gagaatcggctcatcccagaaggat

SEQ ID NO: 5477617 - DNA, 25 bp, Homo sapien
gctcatcccagaaggatacttggca

SEQ ID NO: 5477618 - DNA, 25 bp, Homo sapien
ctgggacaagagaatcggctcatcc

SEQ ID NO: 5477619 - DNA, 25 bp, Homo sapien
gccttccctttgagcgcggctgaaa

SEQ ID NO: 5477620 - DNA, 25 bp, Homo sapien
ttccagggcttacagcgaggagcca

SEQ ID NO: 5477621 - DNA, 25 bp, Homo sapien
ggcctttgcatagccaccctgggag

SEQ ID NO: 5477622 - DNA, 25 bp, Homo sapien
ccgctgcaagcatagatgggaacca

SEQ ID NO: 5477623 - DNA, 25 bp, Homo sapien
gggaaccgcccagcaaaccttcgca

SEQ ID NO: 5477624 - DNA, 25 bp, Homo sapien
cgcccagcaaaccttcgcagagcct

SEQ ID NO: 5477625 - DNA, 25 bp, Homo sapien
ctttgttgtagcccggcgtgcgggg

SEQ ID NO: 5477626 - DNA, 25 bp, Homo sapien
acctgtggaggacggggccttccat

SEQ ID NO: 5477627 - DNA, 25 bp, Homo sapien
tcctcccaggtacacagaagacgct

SEQ ID NO: 5477628 - DNA, 25 bp, Homo sapien
tcccaggtacacagaagacgctttg

SEQ ID NO: 5477629 - DNA, 25 bp, Homo sapien
ggtacacagaagacgctttgcggag

SEQ ID NO: 5477630 - DNA, 25 bp, Homo sapien
caggtacacagaagacgctttgcgg

SEQ ID NO: 5477631 - DNA, 25 bp, Homo sapien
actcagcctgttctaccacatcggg

SEQ ID NO: 5477632 - DNA, 25 bp, Homo sapien
gtgcatttggtccacgtttccagca

SEQ ID NO: 5477633 - DNA, 25 bp, Homo sapien
gcatactcagcctgttctaccacat

SEQ ID NO: 5477634 - DNA, 25 bp, Homo sapien
cacgtttccagcatactcagcctgt

SEQ ID NO: 5477635 - DNA, 25 bp, Homo sapien
cagaaagaaagggcgaggacaccat

SEQ ID NO: 5477636 - DNA, 25 bp, Homo sapien
ccagcccttgctctggcgtagatgg

SEQ ID NO: 5477637 - DNA, 25 bp, Homo sapien
gcgtagatggtggagcttgcacaca

SEQ ID NO: 5477638 - DNA, 25 bp, Homo sapien
tggagcttgcacacagcgggacccg

SEQ ID NO: 5477639 - DNA, 25 bp, Homo sapien
tttcttacccaccatcgccttacca

SEQ ID NO: 5477640 - DNA, 25 bp, Homo sapien
ggctgttccgccgtgacccaggtga

SEQ ID NO: 5477641 - DNA, 25 bp, Homo sapien
gctgttccaccgtggttctggaagg

SEQ ID NO: 5477642 - DNA, 25 bp, Homo sapien
cgcagggctgttccgccgtgacccg

SEQ ID NO: 5477643 - DNA, 25 bp, Homo sapien
aggaagccataggccctgtgccaag

SEQ ID NO: 5477644 - DNA, 25 bp, Homo sapien
ctgatggttcgaagccccggtcagc

SEQ ID NO: 5477645 - DNA, 25 bp, Homo sapien
tggtgagtggtcagccaggacgtgg

SEQ ID NO: 5477646 - DNA, 25 bp, Homo sapien
gccatccctaaactagtgacttcca

SEQ ID NO: 5477647 - DNA, 25 bp, Homo sapien
tagtgacttccacttgcgttctccc

SEQ ID NO: 5477648 - DNA, 25 bp, Homo sapien
tcttggtttaacgaaggctctagcc

SEQ ID NO: 5477649 - DNA, 25 bp, Homo sapien
tcctcttggtttaacgaaggctcta

SEQ ID NO: 5477650 - DNA, 25 bp, Homo sapien
gttccggagcccaccaagacgctga

SEQ ID NO: 5477651 - DNA, 25 bp, Homo sapien
gaagccatcagttcttggcttgcat

SEQ ID NO: 5477652 - DNA, 25 bp, Homo sapien
acgttgtgtcgtgcatgtgccctgg

SEQ ID NO: 5477653 - DNA, 25 bp, Homo sapien
gtgactgagttctctcgtccaccca

SEQ ID NO: 5477654 - DNA, 25 bp, Homo sapien
cacaggcgcggcccatgtgtgtctg

SEQ ID NO: 5477655 - DNA, 25 bp, Homo sapien
gggagatgtctgctcgtcacccaca

SEQ ID NO: 5477656 - DNA, 25 bp, Homo sapien
tccaaacggaaaatggctccagcag

SEQ ID NO: 5477657 - DNA, 25 bp, Homo sapien
ggctgtgctgttctaaactcgctga

SEQ ID NO: 5477658 - DNA, 25 bp, Homo sapien
gctgacccgcattctcctatcagga

SEQ ID NO: 5477659 - DNA, 25 bp, Homo sapien
cttgcagggcagctgcgtctgcgat

SEQ ID NO: 5477660 - DNA, 25 bp, Homo sapien
cagggctgggctccatggaggtcat

SEQ ID NO: 5477661 - DNA, 25 bp, Homo sapien
tgcagatcttcccacagctgggagg

SEQ ID NO: 5477662 - DNA, 25 bp, Homo sapien
agatgcagatcttcccacagctggg

SEQ ID NO: 5477663 - DNA, 25 bp, Homo sapien
gatgcagatcttcccacagctggga

SEQ ID NO: 5477664 - DNA, 25 bp, Homo sapien
ggcagatgcagatcttcccacagct

SEQ ID NO: 5477665 - DNA, 25 bp, Homo sapien
aaggccagaggcaggtggaaagaag

SEQ ID NO: 5477666 - DNA, 25 bp, Homo sapien
ccagaggcaggtggaaagaagccca

SEQ ID NO: 5477667 - DNA, 25 bp, Homo sapien
ggccagaggcaggtggaaagaagcc

SEQ ID NO: 5477668 - DNA, 25 bp, Homo sapien
cagaggcaggtggaaagaagcccat

SEQ ID NO: 5477669 - DNA, 25 bp, Homo sapien
tgtcctcttcaggtggaaacagggc

SEQ ID NO: 5477670 - DNA, 25 bp, Homo sapien
gacgctcacttgtggcctcaggaga

SEQ ID NO: 5477671 - DNA, 25 bp, Homo sapien
tgccgcagttctctaagtgcacctg

SEQ ID NO: 5477672 - DNA, 25 bp, Homo sapien
gaaacagggccagtctgacactccc

SEQ ID NO: 5477673 - DNA, 25 bp, Homo sapien
agagaaagccagcaagcgtcctttg

SEQ ID NO: 5477674 - DNA, 25 bp, Homo sapien
catctattcctagggtgggcaggcc

SEQ ID NO: 5477675 - DNA, 25 bp, Homo sapien
ggtcagccaggcgtttaaaagagaa

SEQ ID NO: 5477676 - DNA, 25 bp, Homo sapien
caggcaagatgcaaggcgtaagctc

SEQ ID NO: 5477677 - DNA, 25 bp, Homo sapien
taatggcaggaagagtgtggaatcc

SEQ ID NO: 5477678 - DNA, 25 bp, Homo sapien
tactgtgaagtcctctgcgtggaga

SEQ ID NO: 5477679 - DNA, 25 bp, Homo sapien
tacaactggctccacgtctgcaggg

SEQ ID NO: 5477680 - DNA, 25 bp, Homo sapien
tgtggaatccgcagctacaactggc

SEQ ID NO: 5477681 - DNA, 25 bp, Homo sapien
tcctctcacctcctggtccttgaat

SEQ ID NO: 5477682 - DNA, 25 bp, Homo sapien
gacaggaggctgcttcctctcacct

SEQ ID NO: 5477683 - DNA, 25 bp, Homo sapien
ctgggtcctggacaggaggctgctt

SEQ ID NO: 5477684 - DNA, 25 bp, Homo sapien
ttcctctcacctcctggtccttgaa

SEQ ID NO: 5477685 - DNA, 25 bp, Homo sapien
aacagctggcagtcaccacgtccag

SEQ ID NO: 5477686 - DNA, 25 bp, Homo sapien
tgccattctgagaagggccaattct

SEQ ID NO: 5477687 - DNA, 25 bp, Homo sapien
ccacgtccagaagccggcgatgtgg

SEQ ID NO: 5477688 - DNA, 25 bp, Homo sapien
ttaagagctggcgaatgaatgggct

SEQ ID NO: 5477689 - DNA, 25 bp, Homo sapien
ttttgcagcaatgccgggtccgtgc

SEQ ID NO: 5477690 - DNA, 25 bp, Homo sapien
gaagcctcgcattttgcagcaatgc

SEQ ID NO: 5477691 - DNA, 25 bp, Homo sapien
gcctcgcattttgcagcaatgccgg

SEQ ID NO: 5477692 - DNA, 25 bp, Homo sapien
tcgcattttgcagcaatgccgggtc

SEQ ID NO: 5477693 - DNA, 25 bp, Homo sapien
tcgcgaactctgcagggactcctgg

SEQ ID NO: 5477694 - DNA, 25 bp, Homo sapien
tctgtgttctccatgtgagagggcg

SEQ ID NO: 5477695 - DNA, 25 bp, Homo sapien
gccgaccagggctgttgaggctcag

SEQ ID NO: 5477696 - DNA, 25 bp, Homo sapien
catcgtctgtcctggttgtgtctct

SEQ ID NO: 5477697 - DNA, 25 bp, Homo sapien
catgcacggtgctagaaagagttcc

SEQ ID NO: 5477698 - DNA, 25 bp, Homo sapien
ctcagggtgcagacggaatcatcgc

SEQ ID NO: 5477699 - DNA, 25 bp, Homo sapien
ttttattccagtcagccatgcacgg

SEQ ID NO: 5477700 - DNA, 25 bp, Homo sapien
tcagctgaacctagaactccgtgag

SEQ ID NO: 5477701 - DNA, 25 bp, Homo sapien
ccaaccgcagggccggaggccttgt

SEQ ID NO: 5477702 - DNA, 25 bp, Homo sapien
cccctgaaccatccaaccgcagggc

SEQ ID NO: 5477703 - DNA, 25 bp, Homo sapien
cttcccgctcacagggtcagaggcg

SEQ ID NO: 5477704 - DNA, 25 bp, Homo sapien
cacagggtcagaggcggtggcccct

SEQ ID NO: 5477705 - DNA, 25 bp, Homo sapien
ccccacagcgcctctttctgtgcag

SEQ ID NO: 5477706 - DNA, 25 bp, Homo sapien
tcgcacttccccacagcgcctcttt

SEQ ID NO: 5477707 - DNA, 25 bp, Homo sapien
catttctgattgttcattgggccca

SEQ ID NO: 5477708 - DNA, 25 bp, Homo sapien
tgggcccagctgttgctcgcacttc

SEQ ID NO: 5477709 - DNA, 25 bp, Homo sapien
ccagaatccaggaccaccaccggag

SEQ ID NO: 5477710 - DNA, 25 bp, Homo sapien
aggaccaccaccggaggcagctact

SEQ ID NO: 5477711 - DNA, 25 bp, Homo sapien
aatccaggaccaccaccggaggcag

SEQ ID NO: 5477712 - DNA, 25 bp, Homo sapien
accaccaccggaggcagctactcac

SEQ ID NO: 5477713 - DNA, 25 bp, Homo sapien
cacggacccatagggaggaaagatc

SEQ ID NO: 5477714 - DNA, 25 bp, Homo sapien
aaagatccccgaggatttggggctg

SEQ ID NO: 5477715 - DNA, 25 bp, Homo sapien
tcaccgtgacaaccgtggacccacg

SEQ ID NO: 5477716 - DNA, 25 bp, Homo sapien
cacatatcgagcagacatcaaggat

SEQ ID NO: 5477717 - DNA, 25 bp, Homo sapien
tgacccaagtgtcgggaagcttaag

SEQ ID NO: 5477718 - DNA, 25 bp, Homo sapien
aagggtcggtgaagactggacagcc

SEQ ID NO: 5477719 - DNA, 25 bp, Homo sapien
acttctgagcagtgaccctgtggcc

SEQ ID NO: 5477720 - DNA, 25 bp, Homo sapien
cacatgttgtggccaatgacatcac

SEQ ID NO: 5477721 - DNA, 25 bp, Homo sapien
tgtgcgtggcactgactgtccagag

SEQ ID NO: 5477722 - DNA, 25 bp, Homo sapien
tgttggcaaatggatgaaacaaccc

SEQ ID NO: 5477723 - DNA, 25 bp, Homo sapien
tctgacagtttggagtaacttggcc

SEQ ID NO: 5477724 - DNA, 25 bp, Homo sapien
gaaacaacccagagcttgtgcgtgg

SEQ ID NO: 5477725 - DNA, 25 bp, Homo sapien
tagtgaggtctccatttggggatgt

SEQ ID NO: 5477726 - DNA, 25 bp, Homo sapien
tttggggatgtaactcctggggctg

SEQ ID NO: 5477727 - DNA, 25 bp, Homo sapien
gaggagggtctgacggcagcagacg

SEQ ID NO: 5477728 - DNA, 25 bp, Homo sapien
ggtggggagtccgtacagacacaca

SEQ ID NO: 5477729 - DNA, 25 bp, Homo sapien
aactgtacagaatcacttggtgtgc

SEQ ID NO: 5477730 - DNA, 25 bp, Homo sapien
acagaatcacttggtgtgcatctgg

SEQ ID NO: 5477731 - DNA, 25 bp, Homo sapien
tctcttttgattcttggcttcatct

SEQ ID NO: 5477732 - DNA, 25 bp, Homo sapien
ctagcaactgtacagaatcacttgg

SEQ ID NO: 5477733 - DNA, 25 bp, Homo sapien
tcatagtgtctatctcattgatggg

SEQ ID NO: 5477734 - DNA, 25 bp, Homo sapien
ttcttcaccccaatttcactcatag

SEQ ID NO: 5477735 - DNA, 25 bp, Homo sapien
tcaccccaatttcactcatagtgtc

SEQ ID NO: 5477736 - DNA, 25 bp, Homo sapien
gatgggtagtgccataaaatctggg

SEQ ID NO: 5477737 - DNA, 25 bp, Homo sapien
tggccatgattagggtgtcagctgc

SEQ ID NO: 5477738 - DNA, 25 bp, Homo sapien
cccttggtggccatgattagggtgt

SEQ ID NO: 5477739 - DNA, 25 bp, Homo sapien
cttggtggccatgattagggtgtca

SEQ ID NO: 5477740 - DNA, 25 bp, Homo sapien
ggtggccatgattagggtgtcagct

SEQ ID NO: 5477741 - DNA, 25 bp, Homo sapien
gggactgcatccacgcttctgctgt

SEQ ID NO: 5477742 - DNA, 25 bp, Homo sapien
tgtgccctctgacgtggcttcacct

SEQ ID NO: 5477743 - DNA, 25 bp, Homo sapien
ggaccagggcccctcgcgttgtgcc

SEQ ID NO: 5477744 - DNA, 25 bp, Homo sapien
tctgctgttccgctgggaccagggc

SEQ ID NO: 5477745 - DNA, 25 bp, Homo sapien
ggggagacggagggtccgcagcagc

SEQ ID NO: 5477746 - DNA, 25 bp, Homo sapien
ttgccttaaaggcttcctgggtaca

SEQ ID NO: 5477747 - DNA, 25 bp, Homo sapien
cctgggtacatgacggatgtcctcg

SEQ ID NO: 5477748 - DNA, 25 bp, Homo sapien
tagttccaagcatgagttattctgg

SEQ ID NO: 5477749 - DNA, 25 bp, Homo sapien
cggatgtcctcgtagttccaagcat

SEQ ID NO: 5477750 - DNA, 25 bp, Homo sapien
tcagtgcattcctgggggccgttcc

SEQ ID NO: 5477751 - DNA, 25 bp, Homo sapien
gccgttcctggaagttgtcagcaac

SEQ ID NO: 5477752 - DNA, 25 bp, Homo sapien
ggggccgttcctggaagttgtcagc

SEQ ID NO: 5477753 - DNA, 25 bp, Homo sapien
tcctggaagttgtcagcaacaggaa

SEQ ID NO: 5477754 - DNA, 25 bp, Homo sapien
ggcctcgtctgcctgaggacccagg

SEQ ID NO: 5477755 - DNA, 25 bp, Homo sapien
ggaccaggcgtcacagccctcagag

SEQ ID NO: 5477756 - DNA, 25 bp, Homo sapien
tcagagcccgtgacgatgctggcct

SEQ ID NO: 5477757 - DNA, 25 bp, Homo sapien
cttggcagtgctgcatgaggaccag

SEQ ID NO: 5477758 - DNA, 25 bp, Homo sapien
gtgtctatgccacgtgtcagccctg

SEQ ID NO: 5477759 - DNA, 25 bp, Homo sapien
gataagaggatgttctccccaccgc

SEQ ID NO: 5477760 - DNA, 25 bp, Homo sapien
agaggatgttctccccaccgctaat

SEQ ID NO: 5477761 - DNA, 25 bp, Homo sapien
tccaggcctgcgtgtctatgccacg

SEQ ID NO: 5477762 - DNA, 25 bp, Homo sapien
ccaggtggcgatggagtccacgagc

SEQ ID NO: 5477763 - DNA, 25 bp, Homo sapien
tggggtggggcctccggatgaggcc

SEQ ID NO: 5477764 - DNA, 25 bp, Homo sapien
tggcgatggagtccacgagcctccc

SEQ ID NO: 5477765 - DNA, 25 bp, Homo sapien
gatgaggccgcggttccaggcagca

SEQ ID NO: 5477766 - DNA, 25 bp, Homo sapien
tcccagggtaggatgtgaacacagc

SEQ ID NO: 5477767 - DNA, 25 bp, Homo sapien
gcttttggacggaggctgccattca

SEQ ID NO: 5477768 - DNA, 25 bp, Homo sapien
cactactgcccttctcagtgagaag

SEQ ID NO: 5477769 - DNA, 25 bp, Homo sapien
gatgtgaacacagcttttggacgga

SEQ ID NO: 5477770 - DNA, 25 bp, Homo sapien
tcagcctcaggccttgaagtacctg

SEQ ID NO: 5477771 - DNA, 25 bp, Homo sapien
ccggttactcccttacagactcaga

SEQ ID NO: 5477772 - DNA, 25 bp, Homo sapien
taacttcggggaccatcaggctcag

SEQ ID NO: 5477773 - DNA, 25 bp, Homo sapien
caaggatgttgctaacttcggggac

SEQ ID NO: 5477774 - DNA, 25 bp, Homo sapien
gtggcgtccataacaacagtgacaa

SEQ ID NO: 5477775 - DNA, 25 bp, Homo sapien
gactgctgttaactatcttccaaac

SEQ ID NO: 5477776 - DNA, 25 bp, Homo sapien
aacaaagcacgcattgtggcgtcca

SEQ ID NO: 5477777 - DNA, 25 bp, Homo sapien
gaaactgaacttagtgcctttatac

SEQ ID NO: 5477778 - DNA, 25 bp, Homo sapien
agctattgattccttgaggaaaccg

SEQ ID NO: 5477779 - DNA, 25 bp, Homo sapien
tattgattccttgaggaaaccgtgt

SEQ ID NO: 5477780 - DNA, 25 bp, Homo sapien
ttctttggggcagctattgattcct

SEQ ID NO: 5477781 - DNA, 25 bp, Homo sapien
ttttctttggggcagctattgattc

SEQ ID NO: 5477782 - DNA, 25 bp, Homo sapien
cgaaggtagtggcaagactgccact

SEQ ID NO: 5477783 - DNA, 25 bp, Homo sapien
tgccactgtcaccatatgggccctg

SEQ ID NO: 5477784 - DNA, 25 bp, Homo sapien
tagcctctcatctccgggtgtagtg

SEQ ID NO: 5477785 - DNA, 25 bp, Homo sapien
tgttgggtctgtcactagcctctca

SEQ ID NO: 5477786 - DNA, 25 bp, Homo sapien
ggaccaagttagagaggcgccgctt

SEQ ID NO: 5477787 - DNA, 25 bp, Homo sapien
tagagagctgcccactgtgacgctt

SEQ ID NO: 5477788 - DNA, 25 bp, Homo sapien
agtcgctgccagctgggaccaagtt

SEQ ID NO: 5477789 - DNA, 25 bp, Homo sapien
tgtgacgcttcatccgttccctctt

SEQ ID NO: 5477790 - DNA, 25 bp, Homo sapien
tagaatgtggttgtaagggccggcc

SEQ ID NO: 5477791 - DNA, 25 bp, Homo sapien
gaacctccgattggctagaatgtgg

SEQ ID NO: 5477792 - DNA, 25 bp, Homo sapien
ggccggccacccttgctggtatcat

SEQ ID NO: 5477793 - DNA, 25 bp, Homo sapien
ggctcccacgattgcttctaggaaa

SEQ ID NO: 5477794 - DNA, 25 bp, Homo sapien
tgccacagggctatgccttggggcc

SEQ ID NO: 5477795 - DNA, 25 bp, Homo sapien
ttgccacagggctatgccttggggc

SEQ ID NO: 5477796 - DNA, 25 bp, Homo sapien
ctggggccgactgagccccccttgc

SEQ ID NO: 5477797 - DNA, 25 bp, Homo sapien
actggggccgactgagccccccttg

SEQ ID NO: 5477798 - DNA, 25 bp, Homo sapien
cttcagtgtgcaaggtggttgaggt

SEQ ID NO: 5477799 - DNA, 25 bp, Homo sapien
tgggatgcagactgggtgggcttca

SEQ ID NO: 5477800 - DNA, 25 bp, Homo sapien
caaggtggttgaggtgtccttgggt

SEQ ID NO: 5477801 - DNA, 25 bp, Homo sapien
gggatgcagactgggtgggcttcag

SEQ ID NO: 5477802 - DNA, 25 bp, Homo sapien
cactatggagcacacacggcaaaaa

SEQ ID NO: 5477803 - DNA, 25 bp, Homo sapien
tcattggtcggtgaaaatccaccca

SEQ ID NO: 5477804 - DNA, 25 bp, Homo sapien
caggcatcaggtaggttacagtgtc

SEQ ID NO: 5477805 - DNA, 25 bp, Homo sapien
ggaaaatagcgcctccactatggag

SEQ ID NO: 5477806 - DNA, 25 bp, Homo sapien
tataattgtaaaccacagtgctcgc

SEQ ID NO: 5477807 - DNA, 25 bp, Homo sapien
gacttttaatcaatgccagagacaa

SEQ ID NO: 5477808 - DNA, 25 bp, Homo sapien
tcagaataaaccgtcacaaggccag

SEQ ID NO: 5477809 - DNA, 25 bp, Homo sapien
aagtgaggccgagctaagaacacgc

SEQ ID NO: 5477810 - DNA, 25 bp, Homo sapien
catgcaacctccaggtgtaggaaac

SEQ ID NO: 5477811 - DNA, 25 bp, Homo sapien
tatcaatgcccataaaacacgtggg

SEQ ID NO: 5477812 - DNA, 25 bp, Homo sapien
tgagcacgtggctgtgaccagtaaa

SEQ ID NO: 5477813 - DNA, 25 bp, Homo sapien
caatataaagtcatgccggtcgtac

SEQ ID NO: 5477814 - DNA, 25 bp, Homo sapien
acgtgggcacgctgcggcacggcgg

SEQ ID NO: 5477815 - DNA, 25 bp, Homo sapien
gccgcgagggcagggcagacgccaa

SEQ ID NO: 5477816 - DNA, 25 bp, Homo sapien
cacgctgcggcacggcgggaagccg

SEQ ID NO: 5477817 - DNA, 25 bp, Homo sapien
tgggcacgtgggcacgctgcggcac

SEQ ID NO: 5477818 - DNA, 25 bp, Homo sapien
tggtgtcactccgaaaagacctacg

SEQ ID NO: 5477819 - DNA, 25 bp, Homo sapien
agctgacagatgaaacgtgcctccc

SEQ ID NO: 5477820 - DNA, 25 bp, Homo sapien
gcccagtgaccaagtgaatccaaga

SEQ ID NO: 5477821 - DNA, 25 bp, Homo sapien
cgctatggttcacagaggcgggcca

SEQ ID NO: 5477822 - DNA, 25 bp, Homo sapien
tctgtcccgtgttccctgtgaggct

SEQ ID NO: 5477823 - DNA, 25 bp, Homo sapien
caggcgtgcatgtgcgtctcgagac

SEQ ID NO: 5477824 - DNA, 25 bp, Homo sapien
gaaaggcttcccgtggctgttgcac

SEQ ID NO: 5477825 - DNA, 25 bp, Homo sapien
tgtcaactgaattcggcagctcggc

SEQ ID NO: 5477826 - DNA, 25 bp, Homo sapien
caagagaacagcagcttcgagggag

SEQ ID NO: 5477827 - DNA, 25 bp, Homo sapien
agacaagagaacagcagcttcgagg

SEQ ID NO: 5477828 - DNA, 25 bp, Homo sapien
agagaacagcagcttcgagggagtg

SEQ ID NO: 5477829 - DNA, 25 bp, Homo sapien
gacagacaagagaacagcagcttcg

SEQ ID NO: 5477830 - DNA, 25 bp, Homo sapien
ctcttccatgggctcctcatctggt

SEQ ID NO: 5477831 - DNA, 25 bp, Homo sapien
ctacaggggcggctcctcttccatg

SEQ ID NO: 5477832 - DNA, 25 bp, Homo sapien
acaggggcggctcctcttccatggg

SEQ ID NO: 5477833 - DNA, 25 bp, Homo sapien
tcctcttccatgggctcctcatctg

SEQ ID NO: 5477834 - DNA, 25 bp, Homo sapien
gcaagtctgagcctcgatcagagaa

SEQ ID NO: 5477835 - DNA, 25 bp, Homo sapien
ggcttcttcgttctcgcaagtctga

SEQ ID NO: 5477836 - DNA, 25 bp, Homo sapien
tggcggtgaccgtctcggcttcttc

SEQ ID NO: 5477837 - DNA, 25 bp, Homo sapien
tttcggcgggcttcacgcccacgga

SEQ ID NO: 5477838 - DNA, 25 bp, Homo sapien
ttctccatggaacggacagcgtttg

SEQ ID NO: 5477839 - DNA, 25 bp, Homo sapien
tccatggaacggacagcgtttgcat

SEQ ID NO: 5477840 - DNA, 25 bp, Homo sapien
actttctccatggaacggacagcgt

SEQ ID NO: 5477841 - DNA, 25 bp, Homo sapien
acagcgtttgcattgggtctttgct

SEQ ID NO: 5477842 - DNA, 25 bp, Homo sapien
tgaacttggtatctgccatcgacgc

SEQ ID NO: 5477843 - DNA, 25 bp, Homo sapien
ctgcacgtgaacttggtatctgcca

SEQ ID NO: 5477844 - DNA, 25 bp, Homo sapien
ttggtatctgccatcgacgccacag

SEQ ID NO: 5477845 - DNA, 25 bp, Homo sapien
atctgccatcgacgccacagggttc

SEQ ID NO: 5477846 - DNA, 25 bp, Homo sapien
tggaggcccgactcggtgctgcgcc

SEQ ID NO: 5477847 - DNA, 25 bp, Homo sapien
ccgtctggtgcagggtctttgatgg

SEQ ID NO: 5477848 - DNA, 25 bp, Homo sapien
tctttgatggaagttggctggaggc

SEQ ID NO: 5477849 - DNA, 25 bp, Homo sapien
gtgctgcgcccacacgactccacgg

SEQ ID NO: 5477850 - DNA, 25 bp, Homo sapien
aaggggctccccttggcgatgcaag

SEQ ID NO: 5477851 - DNA, 25 bp, Homo sapien
tccccttggcgatgcaaggtcctga

SEQ ID NO: 5477852 - DNA, 25 bp, Homo sapien
ccttggcgatgcaaggtcctgaccc

SEQ ID NO: 5477853 - DNA, 25 bp, Homo sapien
gctccccttggcgatgcaaggtcct

SEQ ID NO: 5477854 - DNA, 25 bp, Homo sapien
gctggtgtgcttggccttcaggcct

SEQ ID NO: 5477855 - DNA, 25 bp, Homo sapien
tcctgtgcggcctgacgtttcccca

SEQ ID NO: 5477856 - DNA, 25 bp, Homo sapien
tgggcgctgcccttagttgcacggc

SEQ ID NO: 5477857 - DNA, 25 bp, Homo sapien
acggcacccggaccgtcctggagtg

SEQ ID NO: 5477858 - DNA, 25 bp, Homo sapien
gtgacctcgagtgcctctgggcgct

SEQ ID NO: 5477859 - DNA, 25 bp, Homo sapien
tcggatggtagagtgctgccttttc

SEQ ID NO: 5477860 - DNA, 25 bp, Homo sapien
ttgtaaagacaggtgaggtcggatg

SEQ ID NO: 5477861 - DNA, 25 bp, Homo sapien
agccagcactgacccgagggcatct

SEQ ID NO: 5477862 - DNA, 25 bp, Homo sapien
ctgacccgagggcatctgagctgct

SEQ ID NO: 5477863 - DNA, 25 bp, Homo sapien
gctgttctccggacctgcactggac

SEQ ID NO: 5477864 - DNA, 25 bp, Homo sapien
gtgatctggacacatggcccttgag

SEQ ID NO: 5477865 - DNA, 25 bp, Homo sapien
tctgcatctggtgtgctggagcctc

SEQ ID NO: 5477866 - DNA, 25 bp, Homo sapien
ggaagccaccgactgagtcgtgtct

SEQ ID NO: 5477867 - DNA, 25 bp, Homo sapien
cccagcgtcatgctggaatggaacg

SEQ ID NO: 5477868 - DNA, 25 bp, Homo sapien
aatggaacgctgcaggtggcgctct

SEQ ID NO: 5477869 - DNA, 25 bp, Homo sapien
gaaacccacatgaggactccctaga

SEQ ID NO: 5477870 - DNA, 25 bp, Homo sapien
gtctctgactccctccggcggtgtt

SEQ ID NO: 5477871 - DNA, 25 bp, Homo sapien
ccccgagcctgtcagtgtggagcat

SEQ ID NO: 5477872 - DNA, 25 bp, Homo sapien
ctgtcagtgtggagcatcctgtggg

SEQ ID NO: 5477873 - DNA, 25 bp, Homo sapien
acaaccccgagcctgtcagtgtgga

SEQ ID NO: 5477874 - DNA, 25 bp, Homo sapien
agccaggccacaaccccgagcctgt

SEQ ID NO: 5477875 - DNA, 25 bp, Homo sapien
tcaggtcgtggcctccctcgagggc

SEQ ID NO: 5477876 - DNA, 25 bp, Homo sapien
ctcgagggccaggacaatccggccg

SEQ ID NO: 5477877 - DNA, 25 bp, Homo sapien
tccgaggcgtcgcaaatggcggtca

SEQ ID NO: 5477878 - DNA, 25 bp, Homo sapien
tcagctgcttcgtcaggtacccgaa

SEQ ID NO: 5477879 - DNA, 25 bp, Homo sapien
cagaaacgcgtctcatggcatcgta

SEQ ID NO: 5477880 - DNA, 25 bp, Homo sapien
tcatggcatcgtaagaagactgggg

SEQ ID NO: 5477881 - DNA, 25 bp, Homo sapien
cacagcccagaaacgcgtctcatgg

SEQ ID NO: 5477882 - DNA, 25 bp, Homo sapien
gcccagaaacgcgtctcatggcatc

SEQ ID NO: 5477883 - DNA, 25 bp, Homo sapien
cccagcgggctctggttatctgaca

SEQ ID NO: 5477884 - DNA, 25 bp, Homo sapien
tgagcgtttggctttgatcaagagc

SEQ ID NO: 5477885 - DNA, 25 bp, Homo sapien
tgctgattagagagcccggaaccac

SEQ ID NO: 5477886 - DNA, 25 bp, Homo sapien
agcgttctcccacgtccaggtctga

SEQ ID NO: 5477887 - DNA, 25 bp, Homo sapien
caaagcctcggttcatcccatctga

SEQ ID NO: 5477888 - DNA, 25 bp, Homo sapien
gttgggcacagtggaagctctttgc

SEQ ID NO: 5477889 - DNA, 25 bp, Homo sapien
ccatctgatggaaacagtgacaggg

SEQ ID NO: 5477890 - DNA, 25 bp, Homo sapien
ggtcactttgctggccactaggctg

SEQ ID NO: 5477891 - DNA, 25 bp, Homo sapien
ctttgtgtgcgccaggttttcatct

SEQ ID NO: 5477892 - DNA, 25 bp, Homo sapien
ttgagggcatcaccagggctaggac

SEQ ID NO: 5477893 - DNA, 25 bp, Homo sapien
tctccaggatcctcggggactccag

SEQ ID NO: 5477894 - DNA, 25 bp, Homo sapien
cacaggatgcttgggcctcgggagg

SEQ ID NO: 5477895 - DNA, 25 bp, Homo sapien
tcccagtacggtcagaaccttggtc

SEQ ID NO: 5477896 - DNA, 25 bp, Homo sapien
cagaaccttggtcattagtaaaaag

SEQ ID NO: 5477897 - DNA, 25 bp, Homo sapien
gcctcgtgtgccctaggcccttcct

SEQ ID NO: 5477898 - DNA, 25 bp, Homo sapien
ccaaatggactggttcccagtacgg

SEQ ID NO: 5477899 - DNA, 25 bp, Homo sapien
gctggcgatcggcatgaccaccgtt

SEQ ID NO: 5477900 - DNA, 25 bp, Homo sapien
ctggcggagaggttgtagcccccaa

SEQ ID NO: 5477901 - DNA, 25 bp, Homo sapien
gggcaaactcgctggcgatcggcat

SEQ ID NO: 5477902 - DNA, 25 bp, Homo sapien
gcatcgaagcctgatgacaccagca

SEQ ID NO: 5477903 - DNA, 25 bp, Homo sapien
aggacaggagaaggcgttactgggt

SEQ ID NO: 5477904 - DNA, 25 bp, Homo sapien
acaggagaaggcgttactgggtcag

SEQ ID NO: 5477905 - DNA, 25 bp, Homo sapien
ctgcaaaggacaggagaaggcgtta

SEQ ID NO: 5477906 - DNA, 25 bp, Homo sapien
caaaggacaggagaaggcgttactg

SEQ ID NO: 5477907 - DNA, 25 bp, Homo sapien
gctgctcttgctgcgacaatgcact

SEQ ID NO: 5477908 - DNA, 25 bp, Homo sapien
tcttgctgcgacaatgcactttcca

SEQ ID NO: 5477909 - DNA, 25 bp, Homo sapien
tgggtcagctccactcgccccatca

SEQ ID NO: 5477910 - DNA, 25 bp, Homo sapien
caggctgctcttgctgcgacaatgc

SEQ ID NO: 5477911 - DNA, 25 bp, Homo sapien
gacctcatgagacaggtggtctggt

SEQ ID NO: 5477912 - DNA, 25 bp, Homo sapien
tcatgagacaggtggtctggtgtct

SEQ ID NO: 5477913 - DNA, 25 bp, Homo sapien
acagcaaggacctcatgagacaggt

SEQ ID NO: 5477914 - DNA, 25 bp, Homo sapien
caaggacctcatgagacaggtggtc

SEQ ID NO: 5477915 - DNA, 25 bp, Homo sapien
ctggtatttccaccatgaagcctag

SEQ ID NO: 5477916 - DNA, 25 bp, Homo sapien
atgaagcctagtttgcacgattccc

SEQ ID NO: 5477917 - DNA, 25 bp, Homo sapien
tgcacgattcccacttgtgctgtga

SEQ ID NO: 5477918 - DNA, 25 bp, Homo sapien
tttgaaacccatgcagtttttttca

SEQ ID NO: 5477919 - DNA, 25 bp, Homo sapien
gtgtgggccaagtgcatcacccgat

SEQ ID NO: 5477920 - DNA, 25 bp, Homo sapien
ccgatgggcgcctcccttcatatgg

SEQ ID NO: 5477921 - DNA, 25 bp, Homo sapien
tgtcctgcaccgaagcacacttctg

SEQ ID NO: 5477922 - DNA, 25 bp, Homo sapien
gcagccaaaaatgcactcaccgggc

SEQ ID NO: 5477923 - DNA, 25 bp, Homo sapien
gaaagtatcaactttgaccagaaga

SEQ ID NO: 5477924 - DNA, 25 bp, Homo sapien
tcccgcgggctactctctagagggc

SEQ ID NO: 5477925 - DNA, 25 bp, Homo sapien
gggatgaccgcagatcagaatctta

SEQ ID NO: 5477926 - DNA, 25 bp, Homo sapien
tctagagggccagcagtcatgagtc

SEQ ID NO: 5477927 - DNA, 25 bp, Homo sapien
ttctgagcagtctgcttctgttctt

SEQ ID NO: 5477928 - DNA, 25 bp, Homo sapien
cctctgcggcagctgtagaaagtgc

SEQ ID NO: 5477929 - DNA, 25 bp, Homo sapien
tctggaacttagatgggagtcacag

SEQ ID NO: 5477930 - DNA, 25 bp, Homo sapien
gccagtccacacaatttcccctaga

SEQ ID NO: 5477931 - DNA, 25 bp, Homo sapien
ggcgatttcgcaaacatggtgtaca

SEQ ID NO: 5477932 - DNA, 25 bp, Homo sapien
aggaaacaccgcactggcctcagag

SEQ ID NO: 5477933 - DNA, 25 bp, Homo sapien
gcctcagagcgtgcgtggagttggt

SEQ ID NO: 5477934 - DNA, 25 bp, Homo sapien
tggagttggtgtcggcactcccgcc

SEQ ID NO: 5477935 - DNA, 25 bp, Homo sapien
tcctttgactcttgctggacccagg

SEQ ID NO: 5477936 - DNA, 25 bp, Homo sapien
tggaaggcactggccccacagtcct

SEQ ID NO: 5477937 - DNA, 25 bp, Homo sapien
gaggggagaaatcagtctagtcagt

SEQ ID NO: 5477938 - DNA, 25 bp, Homo sapien
aggcactggccccacagtcctttct

SEQ ID NO: 5477939 - DNA, 25 bp, Homo sapien
cagcacccgtttgtggcgcgactaa

SEQ ID NO: 5477940 - DNA, 25 bp, Homo sapien
cgtttgtggcgcgactaagaaacgt

SEQ ID NO: 5477941 - DNA, 25 bp, Homo sapien
gcgcgactaagaaacgtcccttctc

SEQ ID NO: 5477942 - DNA, 25 bp, Homo sapien
tgtggcgcgactaagaaacgtccct

SEQ ID NO: 5477943 - DNA, 25 bp, Homo sapien
ggaagctgagcatggcactccctgt

SEQ ID NO: 5477944 - DNA, 25 bp, Homo sapien
tcaggactgtgcttaccctccacga

SEQ ID NO: 5477945 - DNA, 25 bp, Homo sapien
ttcaggactgtgcttaccctccacg

SEQ ID NO: 5477946 - DNA, 25 bp, Homo sapien
agctgagcatggcactccctgtgtc

SEQ ID NO: 5477947 - DNA, 25 bp, Homo sapien
tccatgaggtcacttttggcctttc

SEQ ID NO: 5477948 - DNA, 25 bp, Homo sapien
agtatttccatgaggtcacttttgg

SEQ ID NO: 5477949 - DNA, 25 bp, Homo sapien
catgaggtcacttttggcctttctt

SEQ ID NO: 5477950 - DNA, 25 bp, Homo sapien
tatttccatgaggtcacttttggcc

SEQ ID NO: 5477951 - DNA, 25 bp, Homo sapien
ccagggaagccatgactgtggtgcc

SEQ ID NO: 5477952 - DNA, 25 bp, Homo sapien
tggacaaatgcctgtaaggtgcacc

SEQ ID NO: 5477953 - DNA, 25 bp, Homo sapien
ttagagaaggtggacaaatgcctgt

SEQ ID NO: 5477954 - DNA, 25 bp, Homo sapien
aaatgcctgtaaggtgcacccctgg

SEQ ID NO: 5477955 - DNA, 25 bp, Homo sapien
ctcccagctgtgctctgcgcaaggg

SEQ ID NO: 5477956 - DNA, 25 bp, Homo sapien
gcttcctcgaaaggccatcgctcgt

SEQ ID NO: 5477957 - DNA, 25 bp, Homo sapien
gcgtgccagcgaactctccttggct

SEQ ID NO: 5477958 - DNA, 25 bp, Homo sapien
ggatagcagtagcaggcgggtgcca

SEQ ID NO: 5477959 - DNA, 25 bp, Homo sapien
ttttcttcgtcttaggcttgatccc

SEQ ID NO: 5477960 - DNA, 25 bp, Homo sapien
tcagcaacttcaaagccgcgtctgg

SEQ ID NO: 5477961 - DNA, 25 bp, Homo sapien
tttctcctacgagtctccgggcctg

SEQ ID NO: 5477962 - DNA, 25 bp, Homo sapien
tcttatcttttcttcgtcttaggct

SEQ ID NO: 5477963 - DNA, 25 bp, Homo sapien
tccccatcatcggatgcccagggaa

SEQ ID NO: 5477964 - DNA, 25 bp, Homo sapien
caggcaacgggtctgaataacaagg

SEQ ID NO: 5477965 - DNA, 25 bp, Homo sapien
tgcccagggaaccataaattgtaaa

SEQ ID NO: 5477966 - DNA, 25 bp, Homo sapien
aatgcaatgtggcaggcaacgggtc

SEQ ID NO: 5477967 - DNA, 25 bp, Homo sapien
ctcacgtggctctgggaaccgatgt

SEQ ID NO: 5477968 - DNA, 25 bp, Homo sapien
gagaaaagcgctgaagactgtatgg

SEQ ID NO: 5477969 - DNA, 25 bp, Homo sapien
catactgacagcgttttctaacaga

SEQ ID NO: 5477970 - DNA, 25 bp, Homo sapien
gagacacggcatgtcaggctcagcc

SEQ ID NO: 5477971 - DNA, 25 bp, Homo sapien
agctgccattttaaaacgatgacaa

SEQ ID NO: 5477972 - DNA, 25 bp, Homo sapien
ctgccattttaaaacgatgacaaga

SEQ ID NO: 5477973 - DNA, 25 bp, Homo sapien
gctgccattttaaaacgatgacaag

SEQ ID NO: 5477974 - DNA, 25 bp, Homo sapien
tgccattttaaaacgatgacaagaa

SEQ ID NO: 5477975 - DNA, 25 bp, Homo sapien
ctgcgtctttaaacggcgcgccctg

SEQ ID NO: 5477976 - DNA, 25 bp, Homo sapien
aaaggagaaggaaccgcttgatgac

SEQ ID NO: 5477977 - DNA, 25 bp, Homo sapien
gggtcacagccacacgaaggaaatg

SEQ ID NO: 5477978 - DNA, 25 bp, Homo sapien
cgcgccctgcggctaaatgctgaag

SEQ ID NO: 5477979 - DNA, 25 bp, Homo sapien
caagattccacgcttggcactgaag

SEQ ID NO: 5477980 - DNA, 25 bp, Homo sapien
aaagggagcactaagagctgatggt

SEQ ID NO: 5477981 - DNA, 25 bp, Homo sapien
agctgatggtaagaagatagtcgcc

SEQ ID NO: 5477982 - DNA, 25 bp, Homo sapien
tgagctcctggttttatttcatgca

SEQ ID NO: 5477983 - DNA, 25 bp, Homo sapien
caggtgtcatgtgaagccgggaggc

SEQ ID NO: 5477984 - DNA, 25 bp, Homo sapien
tacttcaggtgtcatgtgaagccgg

SEQ ID NO: 5477985 - DNA, 25 bp, Homo sapien
ggtgtcatgtgaagccgggaggctc

SEQ ID NO: 5477986 - DNA, 25 bp, Homo sapien
cttcaggtgtcatgtgaagccggga

SEQ ID NO: 5477987 - DNA, 25 bp, Homo sapien
ggtccaggccgccggtgaaagccat

SEQ ID NO: 5477988 - DNA, 25 bp, Homo sapien
gaaggccgccaagtactcagcgtct

SEQ ID NO: 5477989 - DNA, 25 bp, Homo sapien
ctgaaggccgccaagtactcagcgt

SEQ ID NO: 5477990 - DNA, 25 bp, Homo sapien
atgttgacgttgaaacccacgccgg

SEQ ID NO: 5477991 - DNA, 25 bp, Homo sapien
tgtctgacaggaacgcctgatgcag

SEQ ID NO: 5477992 - DNA, 25 bp, Homo sapien
caccgggatgggctcggccttggtg

SEQ ID NO: 5477993 - DNA, 25 bp, Homo sapien
gaccccgagcgggacctgtctgaca

SEQ ID NO: 5477994 - DNA, 25 bp, Homo sapien
cctgatgcaggtggcaccgggatgg

SEQ ID NO: 5477995 - DNA, 25 bp, Homo sapien
cagcggctccccgcagtcccccttt

SEQ ID NO: 5477996 - DNA, 25 bp, Homo sapien
agctgtggaccgtctgccccgtgcc

SEQ ID NO: 5477997 - DNA, 25 bp, Homo sapien
cccacagcggctccccgcagtcccc

SEQ ID NO: 5477998 - DNA, 25 bp, Homo sapien
ctgtggaccgtctgccccgtgcccc

SEQ ID NO: 5477999 - DNA, 25 bp, Homo sapien
acgctggggtcgctgtagaaagcct

SEQ ID NO: 5478000 - DNA, 25 bp, Homo sapien
agttcccatcgtcgtagcggtggag

SEQ ID NO: 5478001 - DNA, 25 bp, Homo sapien
tgcctgggaagaagttcccatcgtc

SEQ ID NO: 5478002 - DNA, 25 bp, Homo sapien
tagaaagcctgctgggtcccgtttc

SEQ ID NO: 5478003 - DNA, 25 bp, Homo sapien
gttctaagggccaatgttcgcgtct

SEQ ID NO: 5478004 - DNA, 25 bp, Homo sapien
tcctgactccagcagccgatggggc

SEQ ID NO: 5478005 - DNA, 25 bp, Homo sapien
agcactgtttccctcgcccttagcg

SEQ ID NO: 5478006 - DNA, 25 bp, Homo sapien
ttagcgccatggcacaatcctgact

SEQ ID NO: 5478007 - DNA, 25 bp, Homo sapien
ccctgatgttcccagcacgagaact

SEQ ID NO: 5478008 - DNA, 25 bp, Homo sapien
gcacgagaacttgctgctccgttat

SEQ ID NO: 5478009 - DNA, 25 bp, Homo sapien
tggctgttctgccccgggccacagg

SEQ ID NO: 5478010 - DNA, 25 bp, Homo sapien
tgttcccagcacgagaacttgctgc

SEQ ID NO: 5478011 - DNA, 25 bp, Homo sapien
ggaggctttcccgacatgtggcttc

SEQ ID NO: 5478012 - DNA, 25 bp, Homo sapien
aggctttcccgacatgtggcttcac

SEQ ID NO: 5478013 - DNA, 25 bp, Homo sapien
gaggctttcccgacatgtggcttca

SEQ ID NO: 5478014 - DNA, 25 bp, Homo sapien
atggaggctttcccgacatgtggct

SEQ ID NO: 5478015 - DNA, 25 bp, Homo sapien
aagagatgactcttttgggggcagt

SEQ ID NO: 5478016 - DNA, 25 bp, Homo sapien
aaaagagatgactcttttgggggca

SEQ ID NO: 5478017 - DNA, 25 bp, Homo sapien
tatttaaaaagagatgactcttttg

SEQ ID NO: 5478018 - DNA, 25 bp, Homo sapien
atgactcttttgggggcagtggcac

SEQ ID NO: 5478019 - DNA, 25 bp, Homo sapien
gcacatttttagacacgccaggacc

SEQ ID NO: 5478020 - DNA, 25 bp, Homo sapien
tcttccaagaagatctcgtcgaggg

SEQ ID NO: 5478021 - DNA, 25 bp, Homo sapien
cacgcaaagtagatgtggacacagc

SEQ ID NO: 5478022 - DNA, 25 bp, Homo sapien
cattcgccagggtcggctgacggaa

SEQ ID NO: 5478023 - DNA, 25 bp, Homo sapien
ttacttctccgcatctttgagaccg

SEQ ID NO: 5478024 - DNA, 25 bp, Homo sapien
agcaacctgagctgcgctggccaag

SEQ ID NO: 5478025 - DNA, 25 bp, Homo sapien
ggacggcaaaggagcaacctgagct

SEQ ID NO: 5478026 - DNA, 25 bp, Homo sapien
gcatctttgagaccgtttccagaaa

SEQ ID NO: 5478027 - DNA, 25 bp, Homo sapien
cacggagttgaagtagcaaaagccc

SEQ ID NO: 5478028 - DNA, 25 bp, Homo sapien
tcttgctcacgctcaacctctgctg

SEQ ID NO: 5478029 - DNA, 25 bp, Homo sapien
ggccacggagttgaagtagcaaaag

SEQ ID NO: 5478030 - DNA, 25 bp, Homo sapien
atcttgctcacgctcaacctctgct

SEQ ID NO: 5478031 - DNA, 25 bp, Homo sapien
gccccaggacatcctagacgctgag

SEQ ID NO: 5478032 - DNA, 25 bp, Homo sapien
acatcctagacgctgagctcctgca

SEQ ID NO: 5478033 - DNA, 25 bp, Homo sapien
ggacatcctagacgctgagctcctg

SEQ ID NO: 5478034 - DNA, 25 bp, Homo sapien
ctgagctcctgcagcggctcacggg

SEQ ID NO: 5478035 - DNA, 25 bp, Homo sapien
tacaaagattccaacaagcatccct

SEQ ID NO: 5478036 - DNA, 25 bp, Homo sapien
agcatccctccctggcggttacaat

SEQ ID NO: 5478037 - DNA, 25 bp, Homo sapien
tggttttcaggtaaagctacaaaga

SEQ ID NO: 5478038 - DNA, 25 bp, Homo sapien
taacacgcggatctgactatctctc

SEQ ID NO: 5478039 - DNA, 25 bp, Homo sapien
gactctgctctaacacgcggatctg

SEQ ID NO: 5478040 - DNA, 25 bp, Homo sapien
taacacgcggatctgactatctcgc

SEQ ID NO: 5478041 - DNA, 25 bp, Homo sapien
ctgtacacgaaggagactctgctct

SEQ ID NO: 5478042 - DNA, 25 bp, Homo sapien
gactatctcgcacgtacagtctctt

SEQ ID NO: 5478043 - DNA, 25 bp, Homo sapien
ggatctgactatctcgcacgtacag

SEQ ID NO: 5478044 - DNA, 25 bp, Homo sapien
gagactctgctctaacacgcggatc

SEQ ID NO: 5478045 - DNA, 25 bp, Homo sapien
tccctgcacatgaaggagactctgc

SEQ ID NO: 5478046 - DNA, 25 bp, Homo sapien
tctgctctaacacgcggatctgact

SEQ ID NO: 5478047 - DNA, 25 bp, Homo sapien
ggatctgactatctcgcacgtacag

SEQ ID NO: 5478048 - DNA, 25 bp, Homo sapien
gagactctgctctaacacgcggatc

SEQ ID NO: 5478049 - DNA, 25 bp, Homo sapien
tctgctctaacacgcggatctgact

SEQ ID NO: 5478050 - DNA, 25 bp, Homo sapien
tccctgcacatgaaggagactctgc

SEQ ID NO: 5478051 - DNA, 25 bp, Homo sapien
tctcctccccgtacatgaaggagaa

SEQ ID NO: 5478052 - DNA, 25 bp, Homo sapien
tctaacacgcggatctgactgtctc

SEQ ID NO: 5478053 - DNA, 25 bp, Homo sapien
ctgctctaacacgcggatctgactg

SEQ ID NO: 5478054 - DNA, 25 bp, Homo sapien
ctctaacacgcggatctgactgtct

SEQ ID NO: 5478055 - DNA, 25 bp, Homo sapien
gggagacgctctttctagcaccacc

SEQ ID NO: 5478056 - DNA, 25 bp, Homo sapien
gcaagatcaggcacgccttctccat

SEQ ID NO: 5478057 - DNA, 25 bp, Homo sapien
gaagctggcaagatcaggcacgcct

SEQ ID NO: 5478058 - DNA, 25 bp, Homo sapien
agagcggctaccgtcccaggagaca

SEQ ID NO: 5478059 - DNA, 25 bp, Homo sapien
acagggatggatccgggaggaccca

SEQ ID NO: 5478060 - DNA, 25 bp, Homo sapien
tccacagacagctgcgggtctgtcc

SEQ ID NO: 5478061 - DNA, 25 bp, Homo sapien
ctctggacacacagggatggatccg

SEQ ID NO: 5478062 - DNA, 25 bp, Homo sapien
gacagctgcgggtctgtcctgccac

SEQ ID NO: 5478063 - DNA, 25 bp, Homo sapien
gatcctcagctgtatggaccgtcgg

SEQ ID NO: 5478064 - DNA, 25 bp, Homo sapien
gaaacagcatcaggatagctgcctg

SEQ ID NO: 5478065 - DNA, 25 bp, Homo sapien
gtcagtaccaggcattcggcaggca

SEQ ID NO: 5478066 - DNA, 25 bp, Homo sapien
agtctctgaaagacccgaaacagca

SEQ ID NO: 5478067 - DNA, 25 bp, Homo sapien
cagtgatgctcgcagactttggcat

SEQ ID NO: 5478068 - DNA, 25 bp, Homo sapien
tgatctgtctccgtcataaccgagc

SEQ ID NO: 5478069 - DNA, 25 bp, Homo sapien
taaccgagcagtgatgctcgcagac

SEQ ID NO: 5478070 - DNA, 25 bp, Homo sapien
tccgtcataaccgagcagtgatgct

SEQ ID NO: 5478071 - DNA, 25 bp, Homo sapien
gagccaagccggcatgcggcacatc

SEQ ID NO: 5478072 - DNA, 25 bp, Homo sapien
ggagccaagccggcatgcggcacat

SEQ ID NO: 5478073 - DNA, 25 bp, Homo sapien
ctggagccaagccggcatgcggcac

SEQ ID NO: 5478074 - DNA, 25 bp, Homo sapien
tggagccaagccggcatgcggcaca

SEQ ID NO: 5478075 - DNA, 25 bp, Homo sapien
caggggggcggaccacagcaaagcc

SEQ ID NO: 5478076 - DNA, 25 bp, Homo sapien
ggtgtccaggggggcggaccacagc

SEQ ID NO: 5478077 - DNA, 25 bp, Homo sapien
atgggcgtgctctcctccgcatggt

SEQ ID NO: 5478078 - DNA, 25 bp, Homo sapien
gggcgtgctctcctccgcatggtgt

SEQ ID NO: 5478079 - DNA, 25 bp, Homo sapien
tctttgattcaatagcgaggctgtg

SEQ ID NO: 5478080 - DNA, 25 bp, Homo sapien
ctcccagcctgatgagagggagacg

SEQ ID NO: 5478081 - DNA, 25 bp, Homo sapien
tgcacataccctatcacaaatgtgg

SEQ ID NO: 5478082 - DNA, 25 bp, Homo sapien
cactgggaatctatggcaggcctcc

SEQ ID NO: 5478083 - DNA, 25 bp, Homo sapien
cgccgagtgcacctcgttccatatg

SEQ ID NO: 5478084 - DNA, 25 bp, Homo sapien
cctcgttccatatggtgtcactgtc

SEQ ID NO: 5478085 - DNA, 25 bp, Homo sapien
ttgaagaccagctctaccacgcagc

SEQ ID NO: 5478086 - DNA, 25 bp, Homo sapien
cgagtgcacctcgttccatatggtg

SEQ ID NO: 5478087 - DNA, 25 bp, Homo sapien
cctcaattgcttcagtatacttcca

SEQ ID NO: 5478088 - DNA, 25 bp, Homo sapien
ttccctcaattgcttcagtatactt

SEQ ID NO: 5478089 - DNA, 25 bp, Homo sapien
ctttccctcaattgcttcagtatac

SEQ ID NO: 5478090 - DNA, 25 bp, Homo sapien
ctgttctgaggcatcctcctttccc

SEQ ID NO: 5478091 - DNA, 25 bp, Homo sapien
tgctctgccctagtgacggtacacg

SEQ ID NO: 5478092 - DNA, 25 bp, Homo sapien
ctcctgtgccgagtttaactggaag

SEQ ID NO: 5478093 - DNA, 25 bp, Homo sapien
tgttgaccagcgtagctaagcggga

SEQ ID NO: 5478094 - DNA, 25 bp, Homo sapien
tggacaccagcaagtcagcccgctg

SEQ ID NO: 5478095 - DNA, 25 bp, Homo sapien
tcaggaggaaagtcgacagacagag

SEQ ID NO: 5478096 - DNA, 25 bp, Homo sapien
acagccctggctcaattcaggagga

SEQ ID NO: 5478097 - DNA, 25 bp, Homo sapien
ttcaggaggaaagtcgacagacaga

SEQ ID NO: 5478098 - DNA, 25 bp, Homo sapien
gccctggctcaattcaggaggaaag

SEQ ID NO: 5478099 - DNA, 25 bp, Homo sapien
gcacagagcagtctcctatgggagt

SEQ ID NO: 5478100 - DNA, 25 bp, Homo sapien
gccagttctgcacagagcagtctcc

SEQ ID NO: 5478101 - DNA, 25 bp, Homo sapien
tgcacagagcagtctcctatgggag

SEQ ID NO: 5478102 - DNA, 25 bp, Homo sapien
ctggacagccagttctgcacagagc

SEQ ID NO: 5478103 - DNA, 25 bp, Homo sapien
gatgaaatacacagcccttgggctg

SEQ ID NO: 5478104 - DNA, 25 bp, Homo sapien
gagggaggtgttaagatgaaataca

SEQ ID NO: 5478105 - DNA, 25 bp, Homo sapien
ccccagggaacctgagcatctgtcc

SEQ ID NO: 5478106 - DNA, 25 bp, Homo sapien
gcatctgtccccaagtgtgtccctt

SEQ ID NO: 5478107 - DNA, 25 bp, Homo sapien
gaagccgtgtcataggttgctcagc

SEQ ID NO: 5478108 - DNA, 25 bp, Homo sapien
ccagcccggtggaggtcttagaagc

SEQ ID NO: 5478109 - DNA, 25 bp, Homo sapien
cgtgtcataggttgctcagcttcca

SEQ ID NO: 5478110 - DNA, 25 bp, Homo sapien
ggaggtcttagaagccgtgtcatag

SEQ ID NO: 5478111 - DNA, 25 bp, Homo sapien
gacttgccacttgatagacaccgct

SEQ ID NO: 5478112 - DNA, 25 bp, Homo sapien
cagggcgattgcaggtccattgcag

SEQ ID NO: 5478113 - DNA, 25 bp, Homo sapien
caggtccattgcaggacgcctcctt

SEQ ID NO: 5478114 - DNA, 25 bp, Homo sapien
ggagccaggcgtgtccaccctgcct

SEQ ID NO: 5478115 - DNA, 25 bp, Homo sapien
tatgtggggagggaggatttctttc

SEQ ID NO: 5478116 - DNA, 25 bp, Homo sapien
gatttctttccaggcggtcttgaag

SEQ ID NO: 5478117 - DNA, 25 bp, Homo sapien
gaggatttctttccaggcggtcttg

SEQ ID NO: 5478118 - DNA, 25 bp, Homo sapien
tgtggggagggaggatttctttcca

SEQ ID NO: 5478119 - DNA, 25 bp, Homo sapien
aatgcattttcaaggggctgaagac

SEQ ID NO: 5478120 - DNA, 25 bp, Homo sapien
gaagtgtattcggtgatggttttct

SEQ ID NO: 5478121 - DNA, 25 bp, Homo sapien
tcaaagcaaggtgagttaaaatgca

SEQ ID NO: 5478122 - DNA, 25 bp, Homo sapien
acatttcctgaagtgtattcggtga

SEQ ID NO: 5478123 - DNA, 25 bp, Homo sapien
agcagaggcggggtcccagacaggc

SEQ ID NO: 5478124 - DNA, 25 bp, Homo sapien
gcagaggcggggtcccagacaggcc

SEQ ID NO: 5478125 - DNA, 25 bp, Homo sapien
ctgctctgtgtcagccagcagaggc

SEQ ID NO: 5478126 - DNA, 25 bp, Homo sapien
tgtcagccagcagaggcggggtccc

SEQ ID NO: 5478127 - DNA, 25 bp, Homo sapien
ggagcctggctcaggcgtgcagcgc

SEQ ID NO: 5478128 - DNA, 25 bp, Homo sapien
gccaaggagctgctcggtctaccag

SEQ ID NO: 5478129 - DNA, 25 bp, Homo sapien
gtccccagagaactcaagagaccct

SEQ ID NO: 5478130 - DNA, 25 bp, Homo sapien
gcgccaccactgagcaatagcctgg

SEQ ID NO: 5478131 - DNA, 25 bp, Homo sapien
tctctctttcgcaataaagacagga

SEQ ID NO: 5478132 - DNA, 25 bp, Homo sapien
cacggataatcccatggagtctaaa

SEQ ID NO: 5478133 - DNA, 25 bp, Homo sapien
tctaaaagggacatgccgagggctg

SEQ ID NO: 5478134 - DNA, 25 bp, Homo sapien
gggcgtacgagagcaggccaggact

SEQ ID NO: 5478135 - DNA, 25 bp, Homo sapien
ccagttgaaacttgcggtcactgga

SEQ ID NO: 5478136 - DNA, 25 bp, Homo sapien
cactggagaggagcaacgcaggagc

SEQ ID NO: 5478137 - DNA, 25 bp, Homo sapien
cagttgaaacttgcggtcactggag

SEQ ID NO: 5478138 - DNA, 25 bp, Homo sapien
agaggagcaacgcaggagctgatct

SEQ ID NO: 5478139 - DNA, 25 bp, Homo sapien
tgagttttccgtgttccaagcccca

SEQ ID NO: 5478140 - DNA, 25 bp, Homo sapien
ttcccagcgccgaggagtggtgagt

SEQ ID NO: 5478141 - DNA, 25 bp, Homo sapien
tgctgtgtgcccacacttcggctcc

SEQ ID NO: 5478142 - DNA, 25 bp, Homo sapien
cactgttctgcctccgggagagttt

SEQ ID NO: 5478143 - DNA, 25 bp, Homo sapien
gagctgcatctgtgccagcgacagc

SEQ ID NO: 5478144 - DNA, 25 bp, Homo sapien
gagagctgcatctgtgccagcgaca

SEQ ID NO: 5478145 - DNA, 25 bp, Homo sapien
agagctgcatctgtgccagcgacag

SEQ ID NO: 5478146 - DNA, 25 bp, Homo sapien
tctctgcccgcgtccacgtggggag

SEQ ID NO: 5478147 - DNA, 25 bp, Homo sapien
tgcccgcgtccacgtggggagcttt

SEQ ID NO: 5478148 - DNA, 25 bp, Homo sapien
aacaggctaccctctctgcccgcgt

SEQ ID NO: 5478149 - DNA, 25 bp, Homo sapien
tgcccatgccaacaggctaccctct

SEQ ID NO: 5478150 - DNA, 25 bp, Homo sapien
gctgtgcctcagatctggatttaac

SEQ ID NO: 5478151 - DNA, 25 bp, Homo sapien
tgccccaaattaagagattgcagcc

SEQ ID NO: 5478152 - DNA, 25 bp, Homo sapien
taaattctgccttgcacaggcgtgc

SEQ ID NO: 5478153 - DNA, 25 bp, Homo sapien
tcaagtctggccaaaaacatgcccc

SEQ ID NO: 5478154 - DNA, 25 bp, Homo sapien
tgagcttcaccctgcgatcagtgat

SEQ ID NO: 5478155 - DNA, 25 bp, Homo sapien
taaccgtctgtggtgattcgcggca

SEQ ID NO: 5478156 - DNA, 25 bp, Homo sapien
atgatggcccggatctgctcggacg

SEQ ID NO: 5478157 - DNA, 25 bp, Homo sapien
ttcgcggcactgcaggaccatgatg

SEQ ID NO: 5478158 - DNA, 25 bp, Homo sapien
ccaggggagaactcttttgttattg

SEQ ID NO: 5478159 - DNA, 25 bp, Homo sapien
ggagaactcttttgttattgagaag

SEQ ID NO: 5478160 - DNA, 25 bp, Homo sapien
ttattgagaagtttgattgcaagac

SEQ ID NO: 5478161 - DNA, 25 bp, Homo sapien
tttgttattgagaagtttgattgca

SEQ ID NO: 5478162 - DNA, 25 bp, Homo sapien
ttgtgaacttatgcgcccaggccag

SEQ ID NO: 5478163 - DNA, 25 bp, Homo sapien
ggccaggtccatatcatcagttcgt

SEQ ID NO: 5478164 - DNA, 25 bp, Homo sapien
tgtgtggacggatgggcagatgccc

SEQ ID NO: 5478165 - DNA, 25 bp, Homo sapien
gactggaaagtccttgtgaacttat

SEQ ID NO: 5478166 - DNA, 25 bp, Homo sapien
ggcccatgagtatcacggtcactgc

SEQ ID NO: 5478167 - DNA, 25 bp, Homo sapien
ccagcgagtagccctacagactcca

SEQ ID NO: 5478168 - DNA, 25 bp, Homo sapien
cctacagactccacgtggcccatga

SEQ ID NO: 5478169 - DNA, 25 bp, Homo sapien
cacgtggcccatgagtatcacggtc

SEQ ID NO: 5478170 - DNA, 25 bp, Homo sapien
gatgctggctgcatacaggatcctg

SEQ ID NO: 5478171 - DNA, 25 bp, Homo sapien
cctttgaagccgcacatgggcagcc

SEQ ID NO: 5478172 - DNA, 25 bp, Homo sapien
tagcttcgggtggaaactaggtaca

SEQ ID NO: 5478173 - DNA, 25 bp, Homo sapien
cctgtttcttaaagcgagagccact

SEQ ID NO: 5478174 - DNA, 25 bp, Homo sapien
ccaacaccaccgcaagggagccgga

SEQ ID NO: 5478175 - DNA, 25 bp, Homo sapien
caccgcaagggagccggacgaacac

SEQ ID NO: 5478176 - DNA, 25 bp, Homo sapien
acaccaccgcaagggagccggacga

SEQ ID NO: 5478177 - DNA, 25 bp, Homo sapien
cggacgaacacggaggcgagcgagc

SEQ ID NO: 5478178 - DNA, 25 bp, Homo sapien
ttgggcatttgtgggacaacgaggg

SEQ ID NO: 5478179 - DNA, 25 bp, Homo sapien
ggcccttagaggtgccttgactcct

SEQ ID NO: 5478180 - DNA, 25 bp, Homo sapien
gggacacctcaaattgttgtggcat

SEQ ID NO: 5478181 - DNA, 25 bp, Homo sapien
catttgtgggacaacgaggggccac

SEQ ID NO: 5478182 - DNA, 25 bp, Homo sapien
cctgtttgacccagtgctggctgaa

SEQ ID NO: 5478183 - DNA, 25 bp, Homo sapien
gcctgctccggcagtgaaagtgctc

SEQ ID NO: 5478184 - DNA, 25 bp, Homo sapien
ggacaggggtgctgtctttttcctg

SEQ ID NO: 5478185 - DNA, 25 bp, Homo sapien
tgaatgcacgtcaccagcttaaaac

SEQ ID NO: 5478186 - DNA, 25 bp, Homo sapien
tccagggagactggcttgatgtaac

SEQ ID NO: 5478187 - DNA, 25 bp, Homo sapien
gaccccactttctggcctcagctgg

SEQ ID NO: 5478188 - DNA, 25 bp, Homo sapien
agctgggctgtaccccccgctgtgg

SEQ ID NO: 5478189 - DNA, 25 bp, Homo sapien
caggctcctttatccaacgtgggac

SEQ ID NO: 5478190 - DNA, 25 bp, Homo sapien
tgcagatgctgtgacgttttccaga

SEQ ID NO: 5478191 - DNA, 25 bp, Homo sapien
aaggcctacgtgctcggaggagcca

SEQ ID NO: 5478192 - DNA, 25 bp, Homo sapien
gttttccagacaaaggcctacgtgc

SEQ ID NO: 5478193 - DNA, 25 bp, Homo sapien
cccatctgctaggagggcccggcca

SEQ ID NO: 5478194 - DNA, 25 bp, Homo sapien
ctgcacgccggacccctttgggagg

SEQ ID NO: 5478195 - DNA, 25 bp, Homo sapien
gcttgctgcccgtcgtctgtagtgg

SEQ ID NO: 5478196 - DNA, 25 bp, Homo sapien
tgcgcaggtggaacgagactgaaaa

SEQ ID NO: 5478197 - DNA, 25 bp, Homo sapien
tgactactccaacgcacgggaaaga

SEQ ID NO: 5478198 - DNA, 25 bp, Homo sapien
tgtccaggtatctgcaagagactga

SEQ ID NO: 5478199 - DNA, 25 bp, Homo sapien
agtcatccgactgttttgagtttgc

SEQ ID NO: 5478200 - DNA, 25 bp, Homo sapien
tgtctacattaaaaccacaagtcat

SEQ ID NO: 5478201 - DNA, 25 bp, Homo sapien
gaaatcatagccaaccatgtctaca

SEQ ID NO: 5478202 - DNA, 25 bp, Homo sapien
tacttgtctgtttgccgcgggctgg

SEQ ID NO: 5478203 - DNA, 25 bp, Homo sapien
gcgggctggcagacaggcgttctgt

SEQ ID NO: 5478204 - DNA, 25 bp, Homo sapien
ggcagacaggcgttctgtgcctggg

SEQ ID NO: 5478205 - DNA, 25 bp, Homo sapien
acttgtctgtttgccgcgggctggc

SEQ ID NO: 5478206 - DNA, 25 bp, Homo sapien
cgatgcatggcctttgtccacccag

SEQ ID NO: 5478207 - DNA, 25 bp, Homo sapien
taggtactccacaatccatgcgcca

SEQ ID NO: 5478208 - DNA, 25 bp, Homo sapien
ggcaaagatcttgtcccctcatggg

SEQ ID NO: 5478209 - DNA, 25 bp, Homo sapien
ccccggtgacatcgaggcaaagatc

SEQ ID NO: 5478210 - DNA, 25 bp, Homo sapien
tctctgccttcctagggtcctgctc

SEQ ID NO: 5478211 - DNA, 25 bp, Homo sapien
gcagtgactgtcctggttcagggtg

SEQ ID NO: 5478212 - DNA, 25 bp, Homo sapien
tgccttcctagggtcctgctcaggg

SEQ ID NO: 5478213 - DNA, 25 bp, Homo sapien
gggaagaaaaccagtgggcagtgac

SEQ ID NO: 5478214 - DNA, 25 bp, Homo sapien
cagagggtgaaaggttccctttcag

SEQ ID NO: 5478215 - DNA, 25 bp, Homo sapien
tcaacaaccagtggcttgtgaacag

SEQ ID NO: 5478216 - DNA, 25 bp, Homo sapien
tcatcaacaaccagtggcttgtgaa

SEQ ID NO: 5478217 - DNA, 25 bp, Homo sapien
tacctggcacgttcatcaacaacca

SEQ ID NO: 5478218 - DNA, 25 bp, Homo sapien
gccggttgagggggttcgtgccata

SEQ ID NO: 5478219 - DNA, 25 bp, Homo sapien
tgccggttgagggggttcgtgccat

SEQ ID NO: 5478220 - DNA, 25 bp, Homo sapien
ctgccggttgagggggttcgtgcca

SEQ ID NO: 5478221 - DNA, 25 bp, Homo sapien
gggtggccttgcgtccgcggatgca

SEQ ID NO: 5478222 - DNA, 25 bp, Homo sapien
tgggcttccgagtgcaccgtctgta

SEQ ID NO: 5478223 - DNA, 25 bp, Homo sapien
gagtgcaccgtctgtagctcctcca

SEQ ID NO: 5478224 - DNA, 25 bp, Homo sapien
tccagggtggccttgcgtccgcgga

SEQ ID NO: 5478225 - DNA, 25 bp, Homo sapien
gctgcttcagctccacagacagaaa

SEQ ID NO: 5478226 - DNA, 25 bp, Homo sapien
cacagacagaaactccaactgaaac

SEQ ID NO: 5478227 - DNA, 25 bp, Homo sapien
ctccacagacagaaactccaactga

SEQ ID NO: 5478228 - DNA, 25 bp, Homo sapien
tgctgcttcagctccacagacagaa

SEQ ID NO: 5478229 - DNA, 25 bp, Homo sapien
taatttgatacaaaaacaagcatgt

SEQ ID NO: 5478230 - DNA, 25 bp, Homo sapien
caaaaacaagcatgttatttggtta

SEQ ID NO: 5478231 - DNA, 25 bp, Homo sapien
ttgatacaaaaacaagcatgttatt

SEQ ID NO: 5478232 - DNA, 25 bp, Homo sapien
gatacaaaaacaagcatgttatttg

SEQ ID NO: 5478233 - DNA, 25 bp, Homo sapien
taaaatagaggtgagctgctgagct

SEQ ID NO: 5478234 - DNA, 25 bp, Homo sapien
caggatgaagcagccttccttggac

SEQ ID NO: 5478235 - DNA, 25 bp, Homo sapien
gctgcgtctctctgaggtttggaaa

SEQ ID NO: 5478236 - DNA, 25 bp, Homo sapien
atctgtcctggatggctagctggca

SEQ ID NO: 5478237 - DNA, 25 bp, Homo sapien
tgggcgaagctcgagggctctctat

SEQ ID NO: 5478238 - DNA, 25 bp, Homo sapien
tctcagaccaccaggagccgtagca

SEQ ID NO: 5478239 - DNA, 25 bp, Homo sapien
gtccaccctgtatgtgagacctgtg

SEQ ID NO: 5478240 - DNA, 25 bp, Homo sapien
gagggctctctatgccagcccagca

SEQ ID NO: 5478241 - DNA, 25 bp, Homo sapien
ggtgttaatcggctgatccttcttg

SEQ ID NO: 5478242 - DNA, 25 bp, Homo sapien
gccctccttgtatgagaacaagtga

SEQ ID NO: 5478243 - DNA, 25 bp, Homo sapien
cttgtatgagaacaagtgaggccgc

SEQ ID NO: 5478244 - DNA, 25 bp, Homo sapien
ccgtcctgccctcaggtgttaatcg

SEQ ID NO: 5478245 - DNA, 25 bp, Homo sapien
caaatgcagacagtgaagatgcttg

SEQ ID NO: 5478246 - DNA, 25 bp, Homo sapien
aaaaccaacaccctgaatcacgcgg

SEQ ID NO: 5478247 - DNA, 25 bp, Homo sapien
tagctgcccgcccaaatgcagacag

SEQ ID NO: 5478248 - DNA, 25 bp, Homo sapien
ggtcccctctaatggtgcccaaagc

SEQ ID NO: 5478249 - DNA, 25 bp, Homo sapien
gcgtgctcggggtggctgctgctac

SEQ ID NO: 5478250 - DNA, 25 bp, Homo sapien
tgctactcccgcaggtgcactggtg

SEQ ID NO: 5478251 - DNA, 25 bp, Homo sapien
atgctctggatcctcccggcgtgct

SEQ ID NO: 5478252 - DNA, 25 bp, Homo sapien
atttgccccggaggcccgtctcctg

SEQ ID NO: 5478253 - DNA, 25 bp, Homo sapien
gattcgagctctgcctttagaaact

SEQ ID NO: 5478254 - DNA, 25 bp, Homo sapien
gtcctggaccaatagtaactccagt

SEQ ID NO: 5478255 - DNA, 25 bp, Homo sapien
ccaaggtacttgagattccaaagaa

SEQ ID NO: 5478256 - DNA, 25 bp, Homo sapien
cagttctgctggacggagaactgtc

SEQ ID NO: 5478257 - DNA, 25 bp, Homo sapien
tgaaaagaggccagccatgtgctca

SEQ ID NO: 5478258 - DNA, 25 bp, Homo sapien
gtgaaaagaggccagccatgtgctc

SEQ ID NO: 5478259 - DNA, 25 bp, Homo sapien
gaaaagaggccagccatgtgctcac

SEQ ID NO: 5478260 - DNA, 25 bp, Homo sapien
tgtgaaaagaggccagccatgtgct

SEQ ID NO: 5478261 - DNA, 25 bp, Homo sapien
gctcagcatggacgggcccccaggg

SEQ ID NO: 5478262 - DNA, 25 bp, Homo sapien
gagctcagcatggacgggcccccag

SEQ ID NO: 5478263 - DNA, 25 bp, Homo sapien
agctcagcatggacgggcccccagg

SEQ ID NO: 5478264 - DNA, 25 bp, Homo sapien
tgagctcagcatggacgggccccca

SEQ ID NO: 5478265 - DNA, 25 bp, Homo sapien
cttggcccctggtgacacctggcag

SEQ ID NO: 5478266 - DNA, 25 bp, Homo sapien
aggccttggcccctggtgacacctg

SEQ ID NO: 5478267 - DNA, 25 bp, Homo sapien
tggcccctggtgacacctggcagga

SEQ ID NO: 5478268 - DNA, 25 bp, Homo sapien
ctgccccgaggccctgccgggacat

SEQ ID NO: 5478269 - DNA, 25 bp, Homo sapien
gggcacctgtgctaatgtgggttca

SEQ ID NO: 5478270 - DNA, 25 bp, Homo sapien
ctattgcttcagtgtgctggcccag

SEQ ID NO: 5478271 - DNA, 25 bp, Homo sapien
tgggttcatccaggctgataagggc

SEQ ID NO: 5478272 - DNA, 25 bp, Homo sapien
gtgaacagacgccttccgcaggcag

SEQ ID NO: 5478273 - DNA, 25 bp, Homo sapien
gagattcaaggtggtccagtgtttg

SEQ ID NO: 5478274 - DNA, 25 bp, Homo sapien
gctgagattcaaggtggtccagtgt

SEQ ID NO: 5478275 - DNA, 25 bp, Homo sapien
gagctgagattcaaggtggtccagt

SEQ ID NO: 5478276 - DNA, 25 bp, Homo sapien
ggagctgagattcaaggtggtccag

SEQ ID NO: 5478277 - DNA, 25 bp, Homo sapien
taggtgcaggcttacaggagtcaat

SEQ ID NO: 5478278 - DNA, 25 bp, Homo sapien
cataggcaatgacggacactgcccc

SEQ ID NO: 5478279 - DNA, 25 bp, Homo sapien
caaccagttgctcacggatacaagg

SEQ ID NO: 5478280 - DNA, 25 bp, Homo sapien
taatggcaacacagacacataggca

SEQ ID NO: 5478281 - DNA, 25 bp, Homo sapien
ccaggacttgtggagtgggtcatct

SEQ ID NO: 5478282 - DNA, 25 bp, Homo sapien
gaacacacttattgcagtcagctgc

SEQ ID NO: 5478283 - DNA, 25 bp, Homo sapien
agctgcccaggacttgtggagtggg

SEQ ID NO: 5478284 - DNA, 25 bp, Homo sapien
tctttcaagaacacacttattgcag

SEQ ID NO: 5478285 - DNA, 25 bp, Homo sapien
gaagtgtgagggagtaagcggagaa

SEQ ID NO: 5478286 - DNA, 25 bp, Homo sapien
gagtaagcggagaagcgtgggctca

SEQ ID NO: 5478287 - DNA, 25 bp, Homo sapien
tgggctcatgattcctgagccggac

SEQ ID NO: 5478288 - DNA, 25 bp, Homo sapien
tcaacgctgtggacgtgggcgaagt

SEQ ID NO: 5478289 - DNA, 25 bp, Homo sapien
tgggctgtggactgttcttggagga

SEQ ID NO: 5478290 - DNA, 25 bp, Homo sapien
tctcatggccccacgggcatgggct

SEQ ID NO: 5478291 - DNA, 25 bp, Homo sapien
tgttcttggaggagaccatgggtct

SEQ ID NO: 5478292 - DNA, 25 bp, Homo sapien
cagaagctgtaggttctcatggccc

SEQ ID NO: 5478293 - DNA, 25 bp, Homo sapien
ctcaggctgcacaaaggccacgtgt

SEQ ID NO: 5478294 - DNA, 25 bp, Homo sapien
aggctgcacaaaggccacgtgttac

SEQ ID NO: 5478295 - DNA, 25 bp, Homo sapien
tgtggcccgcgttgcaccctcaggc

SEQ ID NO: 5478296 - DNA, 25 bp, Homo sapien
gttgcaccctcaggctgcacaaagg

SEQ ID NO: 5478297 - DNA, 25 bp, Homo sapien
acagaggcctgtggccgccgaagga

SEQ ID NO: 5478298 - DNA, 25 bp, Homo sapien
ctgtcgtgaacctcggcttggtggg

SEQ ID NO: 5478299 - DNA, 25 bp, Homo sapien
tccatggacgcctggtagttcctca

SEQ ID NO: 5478300 - DNA, 25 bp, Homo sapien
tggcagacgcgggtgaggactgcgc

SEQ ID NO: 5478301 - DNA, 25 bp, Homo sapien
agaaacggccgtgttggcggttgcg

SEQ ID NO: 5478302 - DNA, 25 bp, Homo sapien
gttgcggatgtctcccgcccctggg

SEQ ID NO: 5478303 - DNA, 25 bp, Homo sapien
tgggcccagagccaagaacgaggcc

SEQ ID NO: 5478304 - DNA, 25 bp, Homo sapien
cgtccacgcacaggccatacatggg

SEQ ID NO: 5478305 - DNA, 25 bp, Homo sapien
tgaaagtgccaactgggcttcatct

SEQ ID NO: 5478306 - DNA, 25 bp, Homo sapien
attgaatctgcatgccaaacttggg

SEQ ID NO: 5478307 - DNA, 25 bp, Homo sapien
gggtcttagttctgaccaacagcat

SEQ ID NO: 5478308 - DNA, 25 bp, Homo sapien
caaacttgggcgagaaagcaccatc

SEQ ID NO: 5478309 - DNA, 25 bp, Homo sapien
gctctgcgccaatcctgtcttagtt

SEQ ID NO: 5478310 - DNA, 25 bp, Homo sapien
gagctctgcgccaatcctgtcttag

SEQ ID NO: 5478311 - DNA, 25 bp, Homo sapien
ctctgcgccaatcctgtcttagttt

SEQ ID NO: 5478312 - DNA, 25 bp, Homo sapien
gagatgaggtcacagctgccaagcc

SEQ ID NO: 5478313 - DNA, 25 bp, Homo sapien
gggttctgcctattactctccagag

SEQ ID NO: 5478314 - DNA, 25 bp, Homo sapien
ctcggcaaattgctccgtgtactac

SEQ ID NO: 5478315 - DNA, 25 bp, Homo sapien
gtgtactacgacgtttccctgataa

SEQ ID NO: 5478316 - DNA, 25 bp, Homo sapien
ttctgcctattactctccagagaga

SEQ ID NO: 5478317 - DNA, 25 bp, Homo sapien
tggacgagtgttcaccatgaagcac

SEQ ID NO: 5478318 - DNA, 25 bp, Homo sapien
atgaagcaccgtgtgtgtgccagag

SEQ ID NO: 5478319 - DNA, 25 bp, Homo sapien
acaggacctgtggacgagtgttcac

SEQ ID NO: 5478320 - DNA, 25 bp, Homo sapien
ttgccaagcgttagttctgctgggc

SEQ ID NO: 5478321 - DNA, 25 bp, Homo sapien
agcactgatcccgtgtgtggcaggc

SEQ ID NO: 5478322 - DNA, 25 bp, Homo sapien
gcactgatcccgtgtgtggcaggct

SEQ ID NO: 5478323 - DNA, 25 bp, Homo sapien
ggcaggcttgggtctaggtgctcca

SEQ ID NO: 5478324 - DNA, 25 bp, Homo sapien
aagggagggaacgagccagtggctc

SEQ ID NO: 5478325 - DNA, 25 bp, Homo sapien
tagaatcaaatcctacagagctgtg

SEQ ID NO: 5478326 - DNA, 25 bp, Homo sapien
agccactttcctgagggcactctag

SEQ ID NO: 5478327 - DNA, 25 bp, Homo sapien
tgctcaacggcacggccggcatgga

SEQ ID NO: 5478328 - DNA, 25 bp, Homo sapien
gtgagacactggacagtgaccgcgc

SEQ ID NO: 5478329 - DNA, 25 bp, Homo sapien
agcccccgtgatcaccacagaagat

SEQ ID NO: 5478330 - DNA, 25 bp, Homo sapien
gtggctgtgcgtgccagccttctgg

SEQ ID NO: 5478331 - DNA, 25 bp, Homo sapien
gtgaccgcgcaaggatgccctgcag

SEQ ID NO: 5478332 - DNA, 25 bp, Homo sapien
agccggtccaggtagggctcgtcca

SEQ ID NO: 5478333 - DNA, 25 bp, Homo sapien
tgcacgccggcctgtgcgtgcgcct

SEQ ID NO: 5478334 - DNA, 25 bp, Homo sapien
tcttcctcatcgctctcaatgggct

SEQ ID NO: 5478335 - DNA, 25 bp, Homo sapien
tctcctccgggtggctctccggctg

SEQ ID NO: 5478336 - DNA, 25 bp, Homo sapien
ctgcaaggcggaggtaacacatgaa

SEQ ID NO: 5478337 - DNA, 25 bp, Homo sapien
cagcgtcaacgctttgcaatcttct

SEQ ID NO: 5478338 - DNA, 25 bp, Homo sapien
ctgaagagcccctccatcgtgtggc

SEQ ID NO: 5478339 - DNA, 25 bp, Homo sapien
gcaatcttcttcatgtagcagtgag

SEQ ID NO: 5478340 - DNA, 25 bp, Homo sapien
agtgagggcacgctttcaaacgggc

SEQ ID NO: 5478341 - DNA, 25 bp, Homo sapien
tgattttgaggtctgtgattgcttc

SEQ ID NO: 5478342 - DNA, 25 bp, Homo sapien
acttgatgattttgaggtctgtgat

SEQ ID NO: 5478343 - DNA, 25 bp, Homo sapien
gattttgaggtctgtgattgcttct

SEQ ID NO: 5478344 - DNA, 25 bp, Homo sapien
atgattttgaggtctgtgattgctt

SEQ ID NO: 5478345 - DNA, 25 bp, Homo sapien
ccccactgttccaagggctcttgga

SEQ ID NO: 5478346 - DNA, 25 bp, Homo sapien
ttcctccctttcacgaggatgaagc

SEQ ID NO: 5478347 - DNA, 25 bp, Homo sapien
ttagtgacaacattcccaggtcttt

SEQ ID NO: 5478348 - DNA, 25 bp, Homo sapien
ggatgaagcctctgaagtgtccccc

SEQ ID NO: 5478349 - DNA, 25 bp, Homo sapien
gacacactcgtaattagaccaccca

SEQ ID NO: 5478350 - DNA, 25 bp, Homo sapien
tcaggctggagttcacggccaaaac

SEQ ID NO: 5478351 - DNA, 25 bp, Homo sapien
cggacgcgggcaaacaattgaagca

SEQ ID NO: 5478352 - DNA, 25 bp, Homo sapien
gagagcccctttcatcaattcagga

SEQ ID NO: 5478353 - DNA, 25 bp, Homo sapien
gcagagttccaaggtccactcgccc

SEQ ID NO: 5478354 - DNA, 25 bp, Homo sapien
ttcatgcagcaaacccttataaaca

SEQ ID NO: 5478355 - DNA, 25 bp, Homo sapien
tcatgcagcaaacccttataaacac

SEQ ID NO: 5478356 - DNA, 25 bp, Homo sapien
ccactcgccctctgatggtgtgcgt

SEQ ID NO: 5478357 - DNA, 25 bp, Homo sapien
acatctgccaccatcccgaccacag

SEQ ID NO: 5478358 - DNA, 25 bp, Homo sapien
agctgacacagttggaaaacatctg

SEQ ID NO: 5478359 - DNA, 25 bp, Homo sapien
tgcatacaaggcacgggcaacagaa

SEQ ID NO: 5478360 - DNA, 25 bp, Homo sapien
tgacacagttggaaaacatctgcca

SEQ ID NO: 5478361 - DNA, 25 bp, Homo sapien
gaatgcctgagtgagtttacgtgta

SEQ ID NO: 5478362 - DNA, 25 bp, Homo sapien
tcttatgaatcacgcagtctgaggt

SEQ ID NO: 5478363 - DNA, 25 bp, Homo sapien
gaaacagggactcaggttgctgtga

SEQ ID NO: 5478364 - DNA, 25 bp, Homo sapien
catgtggtggctgtgtccaaccttt

SEQ ID NO: 5478365 - DNA, 25 bp, Homo sapien
gagttctgcacctgtacaactgcac

SEQ ID NO: 5478366 - DNA, 25 bp, Homo sapien
tgtacgctgcttaccctgtacgctg

SEQ ID NO: 5478367 - DNA, 25 bp, Homo sapien
agttctgcacctgtacaactgcacc

SEQ ID NO: 5478368 - DNA, 25 bp, Homo sapien
cccggccctgtacgctgcttaccct

SEQ ID NO: 5478369 - DNA, 25 bp, Homo sapien
caacggaactcacacgggctggtgg

SEQ ID NO: 5478370 - DNA, 25 bp, Homo sapien
gagagggcactggtccaacggaact

SEQ ID NO: 5478371 - DNA, 25 bp, Homo sapien
actggtccaacggaactcacacggg

SEQ ID NO: 5478372 - DNA, 25 bp, Homo sapien
agggcactggtccaacggaactcac

SEQ ID NO: 5478373 - DNA, 25 bp, Homo sapien
tgcccagctctgtgctgtgggccag

SEQ ID NO: 5478374 - DNA, 25 bp, Homo sapien
cagctctgtgctgtgggccagagca

SEQ ID NO: 5478375 - DNA, 25 bp, Homo sapien
agctctgtgctgtgggccagagcat

SEQ ID NO: 5478376 - DNA, 25 bp, Homo sapien
cccagctctgtgctgtgggccagag

SEQ ID NO: 5478377 - DNA, 25 bp, Homo sapien
ttctccagaaactgctgatgctgct

SEQ ID NO: 5478378 - DNA, 25 bp, Homo sapien
gcttgtgtttctccagaaactgctg

SEQ ID NO: 5478379 - DNA, 25 bp, Homo sapien
gctggaactgctgcttgtgtttctc

SEQ ID NO: 5478380 - DNA, 25 bp, Homo sapien
gtttctccagaaactgctgatgctg

SEQ ID NO: 5478381 - DNA, 25 bp, Homo sapien
accaaccaaggactgtgcgtggagg

SEQ ID NO: 5478382 - DNA, 25 bp, Homo sapien
gggacacccggtctgcaccaaccaa

SEQ ID NO: 5478383 - DNA, 25 bp, Homo sapien
ctgcaccaaccaaggactgtgcgtg

SEQ ID NO: 5478384 - DNA, 25 bp, Homo sapien
gccccagtgggcggtgctgccgcag

SEQ ID NO: 5478385 - DNA, 25 bp, Homo sapien
ttataggacatgaaccacggccagc

SEQ ID NO: 5478386 - DNA, 25 bp, Homo sapien
acagcctcgcgtgccaattatagga

SEQ ID NO: 5478387 - DNA, 25 bp, Homo sapien
tccattgagaagcaaaccaggcaag

SEQ ID NO: 5478388 - DNA, 25 bp, Homo sapien
ggtgctctggattcgcttggaccaa

SEQ ID NO: 5478389 - DNA, 25 bp, Homo sapien
cagtgaccacgtgcggagtgccgca

SEQ ID NO: 5478390 - DNA, 25 bp, Homo sapien
tcagctagttatgcggagactaatc

SEQ ID NO: 5478391 - DNA, 25 bp, Homo sapien
ctaatctccgaggatgtaccagaca

SEQ ID NO: 5478392 - DNA, 25 bp, Homo sapien
ggagcagcacatgaacagggacata

SEQ ID NO: 5478393 - DNA, 25 bp, Homo sapien
gctgttctagctttgatatcctata

SEQ ID NO: 5478394 - DNA, 25 bp, Homo sapien
tcacccctctggtctctgacagtga

SEQ ID NO: 5478395 - DNA, 25 bp, Homo sapien
ttcaaagcatttgtggctggagggc

SEQ ID NO: 5478396 - DNA, 25 bp, Homo sapien
tatgtggcgtgtaggaggcagctct

SEQ ID NO: 5478397 - DNA, 25 bp, Homo sapien
gctgcggtctggtccagcattgagc

SEQ ID NO: 5478398 - DNA, 25 bp, Homo sapien
gtccagcattgagccggctggcctg

SEQ ID NO: 5478399 - DNA, 25 bp, Homo sapien
gctggctgcggtctggtccagcatt

SEQ ID NO: 5478400 - DNA, 25 bp, Homo sapien
tggctgcggtctggtccagcattga

SEQ ID NO: 5478401 - DNA, 25 bp, Homo sapien
cgccgagttcagtgcgtttctcaga

SEQ ID NO: 5478402 - DNA, 25 bp, Homo sapien
acagggaagaagcaacgccgagttc

SEQ ID NO: 5478403 - DNA, 25 bp, Homo sapien
catgcacactcgatatccaggttct

SEQ ID NO: 5478404 - DNA, 25 bp, Homo sapien
tccaggttctatcaaaaaggctgtt

SEQ ID NO: 5478405 - DNA, 25 bp, Homo sapien
ccagtaagaccatgtgctgcagaag

SEQ ID NO: 5478406 - DNA, 25 bp, Homo sapien
gagggctgtgcgctgcccctccgtc

SEQ ID NO: 5478407 - DNA, 25 bp, Homo sapien
aagggtgagtctctcggcgtcctgc

SEQ ID NO: 5478408 - DNA, 25 bp, Homo sapien
cgtcccgctccaagggcgaggtgct

SEQ ID NO: 5478409 - DNA, 25 bp, Homo sapien
ggccgagccttctcgtgccacaagt

SEQ ID NO: 5478410 - DNA, 25 bp, Homo sapien
ccacaagtctgtgcgccaaactcgt

SEQ ID NO: 5478411 - DNA, 25 bp, Homo sapien
caggcccagcgtgatgttgggcaag

SEQ ID NO: 5478412 - DNA, 25 bp, Homo sapien
tgttgggcaaggatggcgatgtgta

SEQ ID NO: 5478413 - DNA, 25 bp, Homo sapien
gacagaacacacgatgaccatcaca

SEQ ID NO: 5478414 - DNA, 25 bp, Homo sapien
ggggacagaacacacgatgaccatc

SEQ ID NO: 5478415 - DNA, 25 bp, Homo sapien
gggacagaacacacgatgaccatca

SEQ ID NO: 5478416 - DNA, 25 bp, Homo sapien
cagaacacacgatgaccatcacagt

SEQ ID NO: 5478417 - DNA, 25 bp, Homo sapien
gttccttggagatgccgactggtcc

SEQ ID NO: 5478418 - DNA, 25 bp, Homo sapien
tctggaactaaaggaggcttctgag

SEQ ID NO: 5478419 - DNA, 25 bp, Homo sapien
ggagacgttctaatgtttgcaaagt

SEQ ID NO: 5478420 - DNA, 25 bp, Homo sapien
tgtagaggaaatgcttgtgttatca

SEQ ID NO: 5478421 - DNA, 25 bp, Homo sapien
gccctgcgggaggcattctgaggct

SEQ ID NO: 5478422 - DNA, 25 bp, Homo sapien
ccctgcgggaggcattctgaggctg

SEQ ID NO: 5478423 - DNA, 25 bp, Homo sapien
ctgagaaatcgcagggcgttctggc

SEQ ID NO: 5478424 - DNA, 25 bp, Homo sapien
gtgctcagagggaaagtccgcgggc

SEQ ID NO: 5478425 - DNA, 25 bp, Homo sapien
ctccctgtagaggaggtgccggcac

SEQ ID NO: 5478426 - DNA, 25 bp, Homo sapien
gcctccctggcactgtagaggagga

SEQ ID NO: 5478427 - DNA, 25 bp, Homo sapien
tccagggggccttcaaggtacagta

SEQ ID NO: 5478428 - DNA, 25 bp, Homo sapien
tagaggaggaggtgcccggcacact

SEQ ID NO: 5478429 - DNA, 25 bp, Homo sapien
gccatgaagcacaggtgttctcaca

SEQ ID NO: 5478430 - DNA, 25 bp, Homo sapien
aagggcgcctgggtgtgatccaaca

SEQ ID NO: 5478431 - DNA, 25 bp, Homo sapien
gacccgtccaactctagagatactg

SEQ ID NO: 5478432 - DNA, 25 bp, Homo sapien
tctgcaccacgtgagaacggagagc

SEQ ID NO: 5478433 - DNA, 25 bp, Homo sapien
tatggtcagtgtgcgactcggccag

SEQ ID NO: 5478434 - DNA, 25 bp, Homo sapien
ctgccctggaaagcctccgagtatg

SEQ ID NO: 5478435 - DNA, 25 bp, Homo sapien
ggcgctcgggacacgtgtgggataa

SEQ ID NO: 5478436 - DNA, 25 bp, Homo sapien
tcaaggaacacggagcgaggtcctc

SEQ ID NO: 5478437 - DNA, 25 bp, Homo sapien
ctcccagactgtggcaccacttggg

SEQ ID NO: 5478438 - DNA, 25 bp, Homo sapien
agcttgccaatgtccctcccagact

SEQ ID NO: 5478439 - DNA, 25 bp, Homo sapien
tctgagatgcctggttcccgtgatg

SEQ ID NO: 5478440 - DNA, 25 bp, Homo sapien
tgccatgctgaccacgggtgacgct

SEQ ID NO: 5478441 - DNA, 25 bp, Homo sapien
tctccgcgctgacgctcccggagct

SEQ ID NO: 5478442 - DNA, 25 bp, Homo sapien
gacggcgggcgcgataccgttctcc

SEQ ID NO: 5478443 - DNA, 25 bp, Homo sapien
cctggggcgctgctgcacgcggagt

SEQ ID NO: 5478444 - DNA, 25 bp, Homo sapien
tcccggagctgttgttgggtgagct

SEQ ID NO: 5478445 - DNA, 25 bp, Homo sapien
tgagtcactaatgccaggagcaggg

SEQ ID NO: 5478446 - DNA, 25 bp, Homo sapien
ttgacagcgtgaggcagacacgtgg

SEQ ID NO: 5478447 - DNA, 25 bp, Homo sapien
cctggcacttccagcgccatgggaa

SEQ ID NO: 5478448 - DNA, 25 bp, Homo sapien
tagacatgccggagtcatcaaacct

SEQ ID NO: 5478449 - DNA, 25 bp, Homo sapien
tctgctttagcctggaccgtaattt

SEQ ID NO: 5478450 - DNA, 25 bp, Homo sapien
cgtaatttcagattcggttcagaag

SEQ ID NO: 5478451 - DNA, 25 bp, Homo sapien
ccaacggacgcttttttagagcagt

SEQ ID NO: 5478452 - DNA, 25 bp, Homo sapien
gagcagtgaccactggcccgtcttt

SEQ ID NO: 5478453 - DNA, 25 bp, Homo sapien
ctgatgcaatgtccagcggccagcg

SEQ ID NO: 5478454 - DNA, 25 bp, Homo sapien
tgcacgcaatatcgccgtgggacag

SEQ ID NO: 5478455 - DNA, 25 bp, Homo sapien
tgatgtagcatcagagaatgcacgc

SEQ ID NO: 5478456 - DNA, 25 bp, Homo sapien
gaggaaagaacccattgatgtagca

SEQ ID NO: 5478457 - DNA, 25 bp, Homo sapien
agtgcaggaaagatccagcgtccta

SEQ ID NO: 5478458 - DNA, 25 bp, Homo sapien
catctgacacccacacagtgcagga

SEQ ID NO: 5478459 - DNA, 25 bp, Homo sapien
aaatacacatttggcggcttcacaa

SEQ ID NO: 5478460 - DNA, 25 bp, Homo sapien
ttcacaagtctgcagaaacccaaag

SEQ ID NO: 5478461 - DNA, 25 bp, Homo sapien
acctgaggccctgggtagaggtctc

SEQ ID NO: 5478462 - DNA, 25 bp, Homo sapien
ctctcaagcccagcggtggaggctc

SEQ ID NO: 5478463 - DNA, 25 bp, Homo sapien
gaggtgaagacctctgaagtggaga

SEQ ID NO: 5478464 - DNA, 25 bp, Homo sapien
cactcaggtgaaggcaagccaggag

SEQ ID NO: 5478465 - DNA, 25 bp, Homo sapien
ctggccagattttgggtataaatct

SEQ ID NO: 5478466 - DNA, 25 bp, Homo sapien
cttgtggtccttctctaagtggagg

SEQ ID NO: 5478467 - DNA, 25 bp, Homo sapien
ccaacagagcaagatgggcccttct

SEQ ID NO: 5478468 - DNA, 25 bp, Homo sapien
tcttggtgttcccatccttgtggtc

SEQ ID NO: 5478469 - DNA, 25 bp, Homo sapien
tagaagcatcagtaagaaccacagg

SEQ ID NO: 5478470 - DNA, 25 bp, Homo sapien
tgtcaagctttagggcgctctccag

SEQ ID NO: 5478471 - DNA, 25 bp, Homo sapien
gaaatgcgcccatgtttgcagggtt

SEQ ID NO: 5478472 - DNA, 25 bp, Homo sapien
gattaataatagcatcagtccccag

SEQ ID NO: 5478473 - DNA, 25 bp, Homo sapien
gtcatctttggcgtcgtacattccc

SEQ ID NO: 5478474 - DNA, 25 bp, Homo sapien
tctggtcaagggaactgtgctgcgt

SEQ ID NO: 5478475 - DNA, 25 bp, Homo sapien
ttggcgtcgtacattcccaggaccg

SEQ ID NO: 5478476 - DNA, 25 bp, Homo sapien
gttataggaggtcgacactccgctc

SEQ ID NO: 5478477 - DNA, 25 bp, Homo sapien
tcgcttgctcggctgcctcacaggg

SEQ ID NO: 5478478 - DNA, 25 bp, Homo sapien
gtccactgtccactgactcctgggc

SEQ ID NO: 5478479 - DNA, 25 bp, Homo sapien
cctgtgctcaccgtgacccctgctt

SEQ ID NO: 5478480 - DNA, 25 bp, Homo sapien
gtgcttgccccactcctatcactgt

SEQ ID NO: 5478481 - DNA, 25 bp, Homo sapien
tgctggaaacaccttttgggatgtg

SEQ ID NO: 5478482 - DNA, 25 bp, Homo sapien
aatccagacggtgtgtctgccgtga

SEQ ID NO: 5478483 - DNA, 25 bp, Homo sapien
tgccgtgagtgcagcttatgtgcca

SEQ ID NO: 5478484 - DNA, 25 bp, Homo sapien
tttgtgtgtccctggtcgagttacc

SEQ ID NO: 5478485 - DNA, 25 bp, Homo sapien
tgatatttcgatttacaaaaactcc

SEQ ID NO: 5478486 - DNA, 25 bp, Homo sapien
gggtctcactacacatagctgtcca

SEQ ID NO: 5478487 - DNA, 25 bp, Homo sapien
tgtccattttgaggcttgagaatag

SEQ ID NO: 5478488 - DNA, 25 bp, Homo sapien
tttccaacgaaattactgatatttc

SEQ ID NO: 5478489 - DNA, 25 bp, Homo sapien
tcttttgcatggcaggtcggctctc

SEQ ID NO: 5478490 - DNA, 25 bp, Homo sapien
tcagtcctcagacgaacaagccttt

SEQ ID NO: 5478491 - DNA, 25 bp, Homo sapien
tctgtcaattgcgtgggccctggca

SEQ ID NO: 5478492 - DNA, 25 bp, Homo sapien
gcaggtcggctctcttcagtcctca

SEQ ID NO: 5478493 - DNA, 25 bp, Homo sapien
gtaccacgggggcttcctgactagc

SEQ ID NO: 5478494 - DNA, 25 bp, Homo sapien
ttagtataaaataatagaagtacca

SEQ ID NO: 5478495 - DNA, 25 bp, Homo sapien
atagaagtaccacgggggcttcctg

SEQ ID NO: 5478496 - DNA, 25 bp, Homo sapien
agtataaaataatagaagtaccacg

SEQ ID NO: 5478497 - DNA, 25 bp, Homo sapien
catgaggacggccaccgtgtgagtg

SEQ ID NO: 5478498 - DNA, 25 bp, Homo sapien
cgtgtgagtggacccccagaccacg

SEQ ID NO: 5478499 - DNA, 25 bp, Homo sapien
gagcactgctcggtccctctgcagg

SEQ ID NO: 5478500 - DNA, 25 bp, Homo sapien
gcaggggggcccactcccatgagga

SEQ ID NO: 5478501 - DNA, 25 bp, Homo sapien
ggctgctgtggaagtgtacccccag

SEQ ID NO: 5478502 - DNA, 25 bp, Homo sapien
tgtggaagtgtacccccagaccacg

SEQ ID NO: 5478503 - DNA, 25 bp, Homo sapien
agaccacgtcactatggaggtgggt

SEQ ID NO: 5478504 - DNA, 25 bp, Homo sapien
cacgtcactatggaggtgggtcccc

SEQ ID NO: 5478505 - DNA, 25 bp, Homo sapien
taccagtagcgagggtcgctggaaa

SEQ ID NO: 5478506 - DNA, 25 bp, Homo sapien
gaaatgcagtggttcagattccggt

SEQ ID NO: 5478507 - DNA, 25 bp, Homo sapien
tattgaggacaaattcttgtaactt

SEQ ID NO: 5478508 - DNA, 25 bp, Homo sapien
gccagcgccttctttttattgagga

SEQ ID NO: 5478509 - DNA, 25 bp, Homo sapien
tcctgagcgcttcctcaaagaacca

SEQ ID NO: 5478510 - DNA, 25 bp, Homo sapien
gggacggctatgcaccttcaggacg

SEQ ID NO: 5478511 - DNA, 25 bp, Homo sapien
tgtggcctcctgagcgcttcctcaa

SEQ ID NO: 5478512 - DNA, 25 bp, Homo sapien
tatgcaccttcaggacgctgtggcc

SEQ ID NO: 5478513 - DNA, 25 bp, Homo sapien
catggaggcttctacagaggctcta

SEQ ID NO: 5478514 - DNA, 25 bp, Homo sapien
cctaaggaatgagcgagcaacagct

SEQ ID NO: 5478515 - DNA, 25 bp, Homo sapien
tggcgagtccagacgacagagctgt

SEQ ID NO: 5478516 - DNA, 25 bp, Homo sapien
agagtgcacccgagacctaaggaat

SEQ ID NO: 5478517 - DNA, 25 bp, Homo sapien
ccactaccgagagggcccggatctg

SEQ ID NO: 5478518 - DNA, 25 bp, Homo sapien
gcacagccgtccactaccgagaggg

SEQ ID NO: 5478519 - DNA, 25 bp, Homo sapien
cgtccactaccgagagggcccggat

SEQ ID NO: 5478520 - DNA, 25 bp, Homo sapien
agcacagccgtccactaccgagagg

SEQ ID NO: 5478521 - DNA, 25 bp, Homo sapien
ggaccccaataaacctcatgagctt

SEQ ID NO: 5478522 - DNA, 25 bp, Homo sapien
gaagaggcccttgatagggccacaa

SEQ ID NO: 5478523 - DNA, 25 bp, Homo sapien
tgatagggccacaaaaactgaggaa

SEQ ID NO: 5478524 - DNA, 25 bp, Homo sapien
gcttgtgcgtaggacctcaaaggga

SEQ ID NO: 5478525 - DNA, 25 bp, Homo sapien
gctcctgctggtgcttcatggccag

SEQ ID NO: 5478526 - DNA, 25 bp, Homo sapien
gcagcttctgctcccggtgctgctt

SEQ ID NO: 5478527 - DNA, 25 bp, Homo sapien
agctcctgctcctggcggtgcctct

SEQ ID NO: 5478528 - DNA, 25 bp, Homo sapien
tccagcttccgctggtgttccagca

SEQ ID NO: 5478529 - DNA, 25 bp, Homo sapien
acattaaaaacaaaagccattggct

SEQ ID NO: 5478530 - DNA, 25 bp, Homo sapien
cattaaaaacaaaagccattggctt

SEQ ID NO: 5478531 - DNA, 25 bp, Homo sapien
attaaaaacaaaagccattggcttg

SEQ ID NO: 5478532 - DNA, 25 bp, Homo sapien
acgttgggcagaaaagaacaagatg

SEQ ID NO: 5478533 - DNA, 25 bp, Homo sapien
taaatggttgttatccattaatgag

SEQ ID NO: 5478534 - DNA, 25 bp, Homo sapien
acatgacaggcagcccactaaaacg

SEQ ID NO: 5478535 - DNA, 25 bp, Homo sapien
atccattaatgagaacatgacaggc

SEQ ID NO: 5478536 - DNA, 25 bp, Homo sapien
gagggactcccgcaaacccagagca

SEQ ID NO: 5478537 - DNA, 25 bp, Homo sapien
gcctggcgctgacgagtgtgggaag

SEQ ID NO: 5478538 - DNA, 25 bp, Homo sapien
aggtgcaactgaccagacgccctga

SEQ ID NO: 5478539 - DNA, 25 bp, Homo sapien
aaaaggaacaatttggcctggcgct

SEQ ID NO: 5478540 - DNA, 25 bp, Homo sapien
tacgagcgtgagctgcctcacccgg

SEQ ID NO: 5478541 - DNA, 25 bp, Homo sapien
attacgagcgtgagctgcctcaccc

SEQ ID NO: 5478542 - DNA, 25 bp, Homo sapien
cccgccttagcttcctaaagctctg

SEQ ID NO: 5478543 - DNA, 25 bp, Homo sapien
cgccttagcttcctaaagctctggg

SEQ ID NO: 5478544 - DNA, 25 bp, Homo sapien
tgttggtcttgctccccttatggag

SEQ ID NO: 5478545 - DNA, 25 bp, Homo sapien
tctgtggaggaaatttagtgaatca

SEQ ID NO: 5478546 - DNA, 25 bp, Homo sapien
caaccagagtggcccgaggaacttt

SEQ ID NO: 5478547 - DNA, 25 bp, Homo sapien
taagcaggcatcctggcaaccagag

SEQ ID NO: 5478548 - DNA, 25 bp, Homo sapien
gaggatgaggctcaggccagggaaa

SEQ ID NO: 5478549 - DNA, 25 bp, Homo sapien
ggaggatgaggctcaggccagggaa

SEQ ID NO: 5478550 - DNA, 25 bp, Homo sapien
tggaggatgaggctcaggccaggga

SEQ ID NO: 5478551 - DNA, 25 bp, Homo sapien
ctggaggatgaggctcaggccaggg

SEQ ID NO: 5478552 - DNA, 25 bp, Homo sapien
aggactggcgcccatgggatgccac

SEQ ID NO: 5478553 - DNA, 25 bp, Homo sapien
tcacactgtcgtccctgtgtattct

SEQ ID NO: 5478554 - DNA, 25 bp, Homo sapien
tgccacccacgtcacactgtcgtcc

SEQ ID NO: 5478555 - DNA, 25 bp, Homo sapien
ctccatgagtggctgcgctggcaca

SEQ ID NO: 5478556 - DNA, 25 bp, Homo sapien
gtgtgtgtccgggaacatctcctgc

SEQ ID NO: 5478557 - DNA, 25 bp, Homo sapien
cctttcatggtcacaggcggtgcag

SEQ ID NO: 5478558 - DNA, 25 bp, Homo sapien
gctgaggactcagccggtttccacg

SEQ ID NO: 5478559 - DNA, 25 bp, Homo sapien
tccttcttcacatgagaggcccgag

SEQ ID NO: 5478560 - DNA, 25 bp, Homo sapien
ccactgtcccatggcagcggaagtg

SEQ ID NO: 5478561 - DNA, 25 bp, Homo sapien
cactgtcccatggcagcggaagtgg

SEQ ID NO: 5478562 - DNA, 25 bp, Homo sapien
actgtcccatggcagcggaagtggc

SEQ ID NO: 5478563 - DNA, 25 bp, Homo sapien
ccacaggaatcgcttggagtccagg

SEQ ID NO: 5478564 - DNA, 25 bp, Homo sapien
tgggacctcgggctctaggcaggtc

SEQ ID NO: 5478565 - DNA, 25 bp, Homo sapien
caggaatcgcttggagtccagggca

SEQ ID NO: 5478566 - DNA, 25 bp, Homo sapien
tctaggcaggtctgcccagtcacac

SEQ ID NO: 5478567 - DNA, 25 bp, Homo sapien
tgcaagcaaagtccctctaccagga

SEQ ID NO: 5478568 - DNA, 25 bp, Homo sapien
tcaaggctagggagatactacctgg

SEQ ID NO: 5478569 - DNA, 25 bp, Homo sapien
tgggcatgtacagattcaggactct

SEQ ID NO: 5478570 - DNA, 25 bp, Homo sapien
aacatacaacccacagggcttcggg

SEQ ID NO: 5478571 - DNA, 25 bp, Homo sapien
tatctacttgtcagccagaacccag

SEQ ID NO: 5478572 - DNA, 25 bp, Homo sapien
aaaactcccagaaacatgactgtgg

SEQ ID NO: 5478573 - DNA, 25 bp, Homo sapien
gatgcagcctaatgcagtctcacag

SEQ ID NO: 5478574 - DNA, 25 bp, Homo sapien
cggaaacgcagagcggacagatgca

SEQ ID NO: 5478575 - DNA, 25 bp, Homo sapien
tattagatttataacagattatctg

SEQ ID NO: 5478576 - DNA, 25 bp, Homo sapien
tgatctcggcttcgctacttgtagg

SEQ ID NO: 5478577 - DNA, 25 bp, Homo sapien
cggcaacgctgtgtgatctcggctt

SEQ ID NO: 5478578 - DNA, 25 bp, Homo sapien
gggaggcattccaccttattagatt

SEQ ID NO: 5478579 - DNA, 25 bp, Homo sapien
tctgccctcggcatgctcggaaaat

SEQ ID NO: 5478580 - DNA, 25 bp, Homo sapien
ggatttcaacactccctgttcatag

SEQ ID NO: 5478581 - DNA, 25 bp, Homo sapien
tcatagcacaagctgagacgtcagg

SEQ ID NO: 5478582 - DNA, 25 bp, Homo sapien
caagctgagacgtcaggcctgtttc

SEQ ID NO: 5478583 - DNA, 25 bp, Homo sapien
cacatcctagcatcgtgaataggta

SEQ ID NO: 5478584 - DNA, 25 bp, Homo sapien
catgggaaccctcagttggcttctg

SEQ ID NO: 5478585 - DNA, 25 bp, Homo sapien
tgaataggtacttattctccatggg

SEQ ID NO: 5478586 - DNA, 25 bp, Homo sapien
ggcaggtgcgtcactggaataccaa

SEQ ID NO: 5478587 - DNA, 25 bp, Homo sapien
gctaaaattgtctgcaactagtccc

SEQ ID NO: 5478588 - DNA, 25 bp, Homo sapien
taagttagctaaaattgtctgcaac

SEQ ID NO: 5478589 - DNA, 25 bp, Homo sapien
tagctaaaattgtctgcaactagtc

SEQ ID NO: 5478590 - DNA, 25 bp, Homo sapien
gttagctaaaattgtctgcaactag

SEQ ID NO: 5478591 - DNA, 25 bp, Homo sapien
tataggagccccagaatttagctgc

SEQ ID NO: 5478592 - DNA, 25 bp, Homo sapien
ggaacaccaggtgcagaccagctgg

SEQ ID NO: 5478593 - DNA, 25 bp, Homo sapien
taagctgccgcccatggatgggaac

SEQ ID NO: 5478594 - DNA, 25 bp, Homo sapien
agaatggacgccacggacggtaagc

SEQ ID NO: 5478595 - DNA, 25 bp, Homo sapien
catggttctaaggtctctggccatc

SEQ ID NO: 5478596 - DNA, 25 bp, Homo sapien
tcagagggtgatggggtgggctttc

SEQ ID NO: 5478597 - DNA, 25 bp, Homo sapien
ccaggaatgaggagcatggcctgaa

SEQ ID NO: 5478598 - DNA, 25 bp, Homo sapien
agggacccctccaggaatgaggagc

SEQ ID NO: 5478599 - DNA, 25 bp, Homo sapien
gagggtgatggggtgggctttccca

SEQ ID NO: 5478600 - DNA, 25 bp, Homo sapien
aggagcgacgtgaggactggggtcg

SEQ ID NO: 5478601 - DNA, 25 bp, Homo sapien
gtaggagcgacgtgaggactggggt

SEQ ID NO: 5478602 - DNA, 25 bp, Homo sapien
gagcgacgtgaggactggggtcggg

SEQ ID NO: 5478603 - DNA, 25 bp, Homo sapien
ctgtaggagcgacgtgaggactggg

SEQ ID NO: 5478604 - DNA, 25 bp, Homo sapien
gtgagacctggcctcaccctgagat

SEQ ID NO: 5478605 - DNA, 25 bp, Homo sapien
tgagacctggcctcaccctgagatg

SEQ ID NO: 5478606 - DNA, 25 bp, Homo sapien
cagaggggttctggaggtgagacct

SEQ ID NO: 5478607 - DNA, 25 bp, Homo sapien
aggtgagacctggcctcaccctgag

SEQ ID NO: 5478608 - DNA, 25 bp, Homo sapien
cagtcaaacacacggggcttaggct

SEQ ID NO: 5478609 - DNA, 25 bp, Homo sapien
gccccagtcaaacacacggggctta

SEQ ID NO: 5478610 - DNA, 25 bp, Homo sapien
cccagtcaaacacacggggcttagg

SEQ ID NO: 5478611 - DNA, 25 bp, Homo sapien
gaggagccccagtcaaacacacggg

SEQ ID NO: 5478612 - DNA, 25 bp, Homo sapien
gcttctcatctacgtcgtcttcttg

SEQ ID NO: 5478613 - DNA, 25 bp, Homo sapien
catctacgtcgtcttcttgtaaaag

SEQ ID NO: 5478614 - DNA, 25 bp, Homo sapien
agcttctcatctacgtcgtcttctt

SEQ ID NO: 5478615 - DNA, 25 bp, Homo sapien
tctcatctacgtcgtcttcttgtaa

SEQ ID NO: 5478616 - DNA, 25 bp, Homo sapien
gggtcctaatcatgcactgtgaatg

SEQ ID NO: 5478617 - DNA, 25 bp, Homo sapien
gaatgctccaggtggatcaacggca

SEQ ID NO: 5478618 - DNA, 25 bp, Homo sapien
caaattcaaccagcacggaatgaga

SEQ ID NO: 5478619 - DNA, 25 bp, Homo sapien
ccagcacggaatgagacatcagcaa

SEQ ID NO: 5478620 - DNA, 25 bp, Homo sapien
aaaaatggaattcagcaggagcccc

SEQ ID NO: 5478621 - DNA, 25 bp, Homo sapien
caggagcccctgaggccatcctcag

SEQ ID NO: 5478622 - DNA, 25 bp, Homo sapien
cagggtgcagtgacaacaggaaaaa

SEQ ID NO: 5478623 - DNA, 25 bp, Homo sapien
ggaaaaatggaattcagcaggagcc

SEQ ID NO: 5478624 - DNA, 25 bp, Homo sapien
cagggaagccggagtgagtgagtgg

SEQ ID NO: 5478625 - DNA, 25 bp, Homo sapien
gggttgccaacatgcagaatacgaa

SEQ ID NO: 5478626 - DNA, 25 bp, Homo sapien
actgctgtcagggagtcctcgggct

SEQ ID NO: 5478627 - DNA, 25 bp, Homo sapien
cagtgcctgggtcaagactgctgtc

SEQ ID NO: 5478628 - DNA, 25 bp, Homo sapien
gtcctccacaatacacgcaagtgct

SEQ ID NO: 5478629 - DNA, 25 bp, Homo sapien
tgctgcccgcggtttgttgcctggt

SEQ ID NO: 5478630 - DNA, 25 bp, Homo sapien
tttggaatatgcttccactcaatga

SEQ ID NO: 5478631 - DNA, 25 bp, Homo sapien
tcaatgactttggaccgccgttccc

SEQ ID NO: 5478632 - DNA, 25 bp, Homo sapien
cgggagttgagggtgccggaggcct

SEQ ID NO: 5478633 - DNA, 25 bp, Homo sapien
caccgggagttgagggtgccggagg

SEQ ID NO: 5478634 - DNA, 25 bp, Homo sapien
gagttgagggtgccggaggcctggc

SEQ ID NO: 5478635 - DNA, 25 bp, Homo sapien
tcaccgggagttgagggtgccggag

SEQ ID NO: 5478636 - DNA, 25 bp, Homo sapien
ttgatgtgctcgtggagctgcgcct

SEQ ID NO: 5478637 - DNA, 25 bp, Homo sapien
cttgatgtgctcgtggagctgcgcc

SEQ ID NO: 5478638 - DNA, 25 bp, Homo sapien
cgggagagctgctcgtgctgcctct

SEQ ID NO: 5478639 - DNA, 25 bp, Homo sapien
gggagagctgctcgtgctgcctctg

SEQ ID NO: 5478640 - DNA, 25 bp, Homo sapien
cacaggcagtgagaactggtggtcc

SEQ ID NO: 5478641 - DNA, 25 bp, Homo sapien
caggcagtgagaactggtggtccag

SEQ ID NO: 5478642 - DNA, 25 bp, Homo sapien
acaggcagtgagaactggtggtcca

SEQ ID NO: 5478643 - DNA, 25 bp, Homo sapien
ccacaggcagtgagaactggtggtc

SEQ ID NO: 5478644 - DNA, 25 bp, Homo sapien
tgggcgtgaccttgtccaggtgcat

SEQ ID NO: 5478645 - DNA, 25 bp, Homo sapien
ctttgggcgtgaccttgtccaggtg

SEQ ID NO: 5478646 - DNA, 25 bp, Homo sapien
ttgggcgtgaccttgtccaggtgca

SEQ ID NO: 5478647 - DNA, 25 bp, Homo sapien
tttgggcgtgaccttgtccaggtgc

SEQ ID NO: 5478648 - DNA, 25 bp, Homo sapien
ctggggcgccgaggagcacaggagc

SEQ ID NO: 5478649 - DNA, 25 bp, Homo sapien
caaaaacatgacatgcccgcatttc

SEQ ID NO: 5478650 - DNA, 25 bp, Homo sapien
gctggggcgccgaggagcacaggag

SEQ ID NO: 5478651 - DNA, 25 bp, Homo sapien
aaacatgacatgcccgcatttccac

SEQ ID NO: 5478652 - DNA, 25 bp, Homo sapien
gctgcctgagcaaggacccagaggt

SEQ ID NO: 5478653 - DNA, 25 bp, Homo sapien
acccagaggtctgggtgcaggtgga

SEQ ID NO: 5478654 - DNA, 25 bp, Homo sapien
aggggctgcctgagcaaggacccag

SEQ ID NO: 5478655 - DNA, 25 bp, Homo sapien
ggtctgggtgcaggtggagggtcat

SEQ ID NO: 5478656 - DNA, 25 bp, Homo sapien
gctggccgagtggaattttctttct

SEQ ID NO: 5478657 - DNA, 25 bp, Homo sapien
gacactaacatgatcttgatgcaaa

SEQ ID NO: 5478658 - DNA, 25 bp, Homo sapien
tctgcaatcctagagtgtcactcag

SEQ ID NO: 5478659 - DNA, 25 bp, Homo sapien
cacacccaaggttggctggccgagt

SEQ ID NO: 5478660 - DNA, 25 bp, Homo sapien
caaaattcagtgtactgaaattccc

SEQ ID NO: 5478661 - DNA, 25 bp, Homo sapien
gaaattcccatcacaacgcaggcac

SEQ ID NO: 5478662 - DNA, 25 bp, Homo sapien
attcagtgtactgaaattcccatca

SEQ ID NO: 5478663 - DNA, 25 bp, Homo sapien
agaggcaaaattcagtgtactgaaa

SEQ ID NO: 5478664 - DNA, 25 bp, Homo sapien
caggcagcgccctctgaaggtaaga

SEQ ID NO: 5478665 - DNA, 25 bp, Homo sapien
tgtgcgtgcatcacctgaacggtca

SEQ ID NO: 5478666 - DNA, 25 bp, Homo sapien
tgatcacaaggttcctcacagggat

SEQ ID NO: 5478667 - DNA, 25 bp, Homo sapien
tctgaagcttgggtgacgctcctgc

SEQ ID NO: 5478668 - DNA, 25 bp, Homo sapien
tgagagaggcaagttactcctcgca

SEQ ID NO: 5478669 - DNA, 25 bp, Homo sapien
aggtgctggcgctgatccgcccctg

SEQ ID NO: 5478670 - DNA, 25 bp, Homo sapien
cagtttagcgcatgctggaaggtgc

SEQ ID NO: 5478671 - DNA, 25 bp, Homo sapien
tcggtgcgcgtctccctacggacat

SEQ ID NO: 5478672 - DNA, 25 bp, Homo sapien
ctcaccaatgcgcagaatgctgtcg

SEQ ID NO: 5478673 - DNA, 25 bp, Homo sapien
tgtcgctgttctcactacggcacct

SEQ ID NO: 5478674 - DNA, 25 bp, Homo sapien
gcagaatgctgtcgctgttctcact

SEQ ID NO: 5478675 - DNA, 25 bp, Homo sapien
ccaatgcgcagaatgctgtcgctgt

SEQ ID NO: 5478676 - DNA, 25 bp, Homo sapien
gaagggatgttcacactgccttggt

SEQ ID NO: 5478677 - DNA, 25 bp, Homo sapien
ctatctgctaaagtaagctaagagc

SEQ ID NO: 5478678 - DNA, 25 bp, Homo sapien
tgccttggtttaccggactgccacg

SEQ ID NO: 5478679 - DNA, 25 bp, Homo sapien
cggactgccacgtgaaactccacta

SEQ ID NO: 5478680 - DNA, 25 bp, Homo sapien
gctcctgagggcttcctaatgagga

SEQ ID NO: 5478681 - DNA, 25 bp, Homo sapien
gctcacctctgaagacaatgctgca

SEQ ID NO: 5478682 - DNA, 25 bp, Homo sapien
caaatggagcgttcacagggcaagg

SEQ ID NO: 5478683 - DNA, 25 bp, Homo sapien
aatgctgcatttatgttggattcaa

SEQ ID NO: 5478684 - DNA, 25 bp, Homo sapien
cagagatgagaaccacaatcgcatt

SEQ ID NO: 5478685 - DNA, 25 bp, Homo sapien
ctgcagagatgagaaccacaatcgc

SEQ ID NO: 5478686 - DNA, 25 bp, Homo sapien
gagaaccacaatcgcattcacgcat

SEQ ID NO: 5478687 - DNA, 25 bp, Homo sapien
gatgagaaccacaatcgcattcacg

SEQ ID NO: 5478688 - DNA, 25 bp, Homo sapien
gctgaaccgctttaactgaaacaga

SEQ ID NO: 5478689 - DNA, 25 bp, Homo sapien
aaaacatgcatgaactgaacgtcca

SEQ ID NO: 5478690 - DNA, 25 bp, Homo sapien
tcctgtggtctcgaagctgaaccgc

SEQ ID NO: 5478691 - DNA, 25 bp, Homo sapien
gaactgaacgtccacggtctgactg

SEQ ID NO: 5478692 - DNA, 25 bp, Homo sapien
tccccagaatatgagacggccacga

SEQ ID NO: 5478693 - DNA, 25 bp, Homo sapien
tctggtcccgccagtacccagagct

SEQ ID NO: 5478694 - DNA, 25 bp, Homo sapien
ggaggtgtggcatctgggttgctct

SEQ ID NO: 5478695 - DNA, 25 bp, Homo sapien
tgcaatcgcccaggaaaacgcaaag

SEQ ID NO: 5478696 - DNA, 25 bp, Homo sapien
gggacacaggtgctcactgtccaca

SEQ ID NO: 5478697 - DNA, 25 bp, Homo sapien
ctgctgcgctgcagaccactaacaa

SEQ ID NO: 5478698 - DNA, 25 bp, Homo sapien
tgcagaccactaacaaccaaaacct

SEQ ID NO: 5478699 - DNA, 25 bp, Homo sapien
tgcgctgcagaccactaacaaccaa

SEQ ID NO: 5478700 - DNA, 25 bp, Homo sapien
cacagcacaggcggtagcagggtct

SEQ ID NO: 5478701 - DNA, 25 bp, Homo sapien
gctccaaaggggacccgctggtggc

SEQ ID NO: 5478702 - DNA, 25 bp, Homo sapien
ggggacccgctggtggcagagcctg

SEQ ID NO: 5478703 - DNA, 25 bp, Homo sapien
cagcacaggcggtagcagggtctcc

SEQ ID NO: 5478704 - DNA, 25 bp, Homo sapien
tgtgcaatcgagatatcggtatcac

SEQ ID NO: 5478705 - DNA, 25 bp, Homo sapien
aattgaaatgtgcaatcgagatatc

SEQ ID NO: 5478706 - DNA, 25 bp, Homo sapien
tatcggtatcacaaagattgaatcc

SEQ ID NO: 5478707 - DNA, 25 bp, Homo sapien
aagattgaatccaacactaaatatc

SEQ ID NO: 5478708 - DNA, 25 bp, Homo sapien
tcttacttcagccaacagataggcc

SEQ ID NO: 5478709 - DNA, 25 bp, Homo sapien
taagccatgtatgccttttgctgca

SEQ ID NO: 5478710 - DNA, 25 bp, Homo sapien
cacaggaggtgtgcatacagaggat

SEQ ID NO: 5478711 - DNA, 25 bp, Homo sapien
tcttgtacactcacggcagagcaaa

SEQ ID NO: 5478712 - DNA, 25 bp, Homo sapien
cccctaaatgtatgacaaactcaaa

SEQ ID NO: 5478713 - DNA, 25 bp, Homo sapien
ccagtcatcgtggacgagagccatt

SEQ ID NO: 5478714 - DNA, 25 bp, Homo sapien
gccatttttataatgcacacacaac

SEQ ID NO: 5478715 - DNA, 25 bp, Homo sapien
ggtcccctaaatgtatgacaaactc

SEQ ID NO: 5478716 - DNA, 25 bp, Homo sapien
tgcggctgtaaacttgctgccataa

SEQ ID NO: 5478717 - DNA, 25 bp, Homo sapien
tgattcgaacagaaaataaagtcct

SEQ ID NO: 5478718 - DNA, 25 bp, Homo sapien
tccaaatttgattcgaacagaaaat

SEQ ID NO: 5478719 - DNA, 25 bp, Homo sapien
ctgtgccagcgcaaggccagaaaca

SEQ ID NO: 5478720 - DNA, 25 bp, Homo sapien
cttcgcttccctggcttttacggca

SEQ ID NO: 5478721 - DNA, 25 bp, Homo sapien
gctggccgtaccagccagggctgta

SEQ ID NO: 5478722 - DNA, 25 bp, Homo sapien
tccgtgtgcagagtccctgggtgct

SEQ ID NO: 5478723 - DNA, 25 bp, Homo sapien
cagcccgtgatgttattctcgtgga

SEQ ID NO: 5478724 - DNA, 25 bp, Homo sapien
gataaaaagtgacttacgcctccca

SEQ ID NO: 5478725 - DNA, 25 bp, Homo sapien
ctttcaagggcgctgcgggtcactg

SEQ ID NO: 5478726 - DNA, 25 bp, Homo sapien
gctgggccgaagtaggaaccactat

SEQ ID NO: 5478727 - DNA, 25 bp, Homo sapien
ttccaggcagcaacgtacattccgc

SEQ ID NO: 5478728 - DNA, 25 bp, Homo sapien
ggcattaaatgccaatgaacacacg

SEQ ID NO: 5478729 - DNA, 25 bp, Homo sapien
cacggtacgtagctgagtgacagat

SEQ ID NO: 5478730 - DNA, 25 bp, Homo sapien
tgccaatgaacacacggtacgtagc

SEQ ID NO: 5478731 - DNA, 25 bp, Homo sapien
tgtccccaggggcattaaatgccaa

SEQ ID NO: 5478732 - DNA, 25 bp, Homo sapien
tgtggaggctgtgcgctcacactct

SEQ ID NO: 5478733 - DNA, 25 bp, Homo sapien
gcaaccacgagtcccactttgagca

SEQ ID NO: 5478734 - DNA, 25 bp, Homo sapien
gtaattaggagcaaccacgagtccc

SEQ ID NO: 5478735 - DNA, 25 bp, Homo sapien
gctgtggaggctgtgcgctcacact

SEQ ID NO: 5478736 - DNA, 25 bp, Homo sapien
cagagggcctgagtttggttctgca

SEQ ID NO: 5478737 - DNA, 25 bp, Homo sapien
agagggcctgagtttggttctgcat

SEQ ID NO: 5478738 - DNA, 25 bp, Homo sapien
cctaggcagactgaaaggttttctg

SEQ ID NO: 5478739 - DNA, 25 bp, Homo sapien
ttctcgttatgtggatgaggcctcc

SEQ ID NO: 5478740 - DNA, 25 bp, Homo sapien
atcttgaagaagtagggtgaggacc

SEQ ID NO: 5478741 - DNA, 25 bp, Homo sapien
gaggacctcacagatcctaggcaga

SEQ ID NO: 5478742 - DNA, 25 bp, Homo sapien
cgtgctgggcatgtggttcacgcgg

SEQ ID NO: 5478743 - DNA, 25 bp, Homo sapien
ttcacgcgggcaggattcagcagct

SEQ ID NO: 5478744 - DNA, 25 bp, Homo sapien
agctccactggctggtctcggccag

SEQ ID NO: 5478745 - DNA, 25 bp, Homo sapien
catgtggttcacgcgggcaggattc

SEQ ID NO: 5478746 - DNA, 25 bp, Homo sapien
agagcaccagtttcgcagggcagcc

SEQ ID NO: 5478747 - DNA, 25 bp, Homo sapien
taagcgaaggagagcaccagtttcg

SEQ ID NO: 5478748 - DNA, 25 bp, Homo sapien
cgaaggagagcaccagtttcgcagg

SEQ ID NO: 5478749 - DNA, 25 bp, Homo sapien
gagagcaccagtttcgcagggcagc

SEQ ID NO: 5478750 - DNA, 25 bp, Homo sapien
acttcatgggcaacggcagagttcc

SEQ ID NO: 5478751 - DNA, 25 bp, Homo sapien
tgaacacctaagcaagggctgacgt

SEQ ID NO: 5478752 - DNA, 25 bp, Homo sapien
gattggccatgaggaaaacagcctc

SEQ ID NO: 5478753 - DNA, 25 bp, Homo sapien
tgtcatgacagaaaaagcccggact

SEQ ID NO: 5478754 - DNA, 25 bp, Homo sapien
agcagaaccggcaacccacactggc

SEQ ID NO: 5478755 - DNA, 25 bp, Homo sapien
gccctgagcgtctgggaacgtgaga

SEQ ID NO: 5478756 - DNA, 25 bp, Homo sapien
tgcctgcgtccagtcccgccatggg

SEQ ID NO: 5478757 - DNA, 25 bp, Homo sapien
aacgtgagagtgagcaacgcagagg

SEQ ID NO: 5478758 - DNA, 25 bp, Homo sapien
gctcaccaaacgtgactcagcaacg

SEQ ID NO: 5478759 - DNA, 25 bp, Homo sapien
tatacagacgaaccattctcccaga

SEQ ID NO: 5478760 - DNA, 25 bp, Homo sapien
gcatctgagccgaacaagctgctca

SEQ ID NO: 5478761 - DNA, 25 bp, Homo sapien
tgaacatcacaaactcgctaaaggt

SEQ ID NO: 5478762 - DNA, 25 bp, Homo sapien
gacctgaaagcaccgctcattctct

SEQ ID NO: 5478763 - DNA, 25 bp, Homo sapien
gcagaaaaaggatcctttgatgcca

SEQ ID NO: 5478764 - DNA, 25 bp, Homo sapien
ctgaaagcaccgctcattctctgtg

SEQ ID NO: 5478765 - DNA, 25 bp, Homo sapien
agacctgaaagcaccgctcattctc

SEQ ID NO: 5478766 - DNA, 25 bp, Homo sapien
cgcgtcatccaaggggaagctctgc

SEQ ID NO: 5478767 - DNA, 25 bp, Homo sapien
agcatcctccgtgatggccaccgcg

SEQ ID NO: 5478768 - DNA, 25 bp, Homo sapien
tccgtgatggccaccgcggcctctc

SEQ ID NO: 5478769 - DNA, 25 bp, Homo sapien
ctccttcctgctgtgacgcgtcatc

SEQ ID NO: 5478770 - DNA, 25 bp, Homo sapien
cggaattgcagggaataccccgctc

SEQ ID NO: 5478771 - DNA, 25 bp, Homo sapien
aattgcagggaataccccgctccac

SEQ ID NO: 5478772 - DNA, 25 bp, Homo sapien
ttgcagggaataccccgctccacat

SEQ ID NO: 5478773 - DNA, 25 bp, Homo sapien
ggaattgcagggaataccccgctcc

SEQ ID NO: 5478774 - DNA, 25 bp, Homo sapien
tggaaagagactcgtcagctggcac

SEQ ID NO: 5478775 - DNA, 25 bp, Homo sapien
cctggccctgtgggcgccgtcagct

SEQ ID NO: 5478776 - DNA, 25 bp, Homo sapien
agccagcacgtctggaaagagactc

SEQ ID NO: 5478777 - DNA, 25 bp, Homo sapien
tggccctgtgggcgccgtcagctcc

SEQ ID NO: 5478778 - DNA, 25 bp, Homo sapien
tagaggatgacgtggggtggaaagg

SEQ ID NO: 5478779 - DNA, 25 bp, Homo sapien
cttagaggatgacgtggggtggaaa

SEQ ID NO: 5478780 - DNA, 25 bp, Homo sapien
ttagaggatgacgtggggtggaaag

SEQ ID NO: 5478781 - DNA, 25 bp, Homo sapien
cgcactgcacacttcctagcaggct

SEQ ID NO: 5478782 - DNA, 25 bp, Homo sapien
gttttgcaacggagagcccgctggc

SEQ ID NO: 5478783 - DNA, 25 bp, Homo sapien
cggccaccggttttgcaacggagag

SEQ ID NO: 5478784 - DNA, 25 bp, Homo sapien
ttcctagcaggcttcctgtgtagct

SEQ ID NO: 5478785 - DNA, 25 bp, Homo sapien
tcacacagagggcatctgacagcca

SEQ ID NO: 5478786 - DNA, 25 bp, Homo sapien
cacacagagggcatctgacagccag

SEQ ID NO: 5478787 - DNA, 25 bp, Homo sapien
cctgggagtaccgcttctctgtggc

SEQ ID NO: 5478788 - DNA, 25 bp, Homo sapien
ctgggagtaccgcttctctgtggcc

SEQ ID NO: 5478789 - DNA, 25 bp, Homo sapien
tgggagtaccgcttctctgtggccc

SEQ ID NO: 5478790 - DNA, 25 bp, Homo sapien
tcctgggagtaccgcttctctgtgg

SEQ ID NO: 5478791 - DNA, 25 bp, Homo sapien
atgtgaggggatgtgaggtccccct

SEQ ID NO: 5478792 - DNA, 25 bp, Homo sapien
tgtgaggggatgtgaggtccccctg

SEQ ID NO: 5478793 - DNA, 25 bp, Homo sapien
gtgaggggatgtgaggtccccctgc

SEQ ID NO: 5478794 - DNA, 25 bp, Homo sapien
cacaggtgtggaggcgtccacgtct

SEQ ID NO: 5478795 - DNA, 25 bp, Homo sapien
cttggcactgatgcccaacgggtat

SEQ ID NO: 5478796 - DNA, 25 bp, Homo sapien
ggaggcgtccacgtctacaccacca

SEQ ID NO: 5478797 - DNA, 25 bp, Homo sapien
ctcttggcactgatgcccaacgggt

SEQ ID NO: 5478798 - DNA, 25 bp, Homo sapien
ggcagggaagtgaggctctacacac

SEQ ID NO: 5478799 - DNA, 25 bp, Homo sapien
ctgtcaaggacaggggcaagggcag

SEQ ID NO: 5478800 - DNA, 25 bp, Homo sapien
aagggcagggaagtgaggctctaca

SEQ ID NO: 5478801 - DNA, 25 bp, Homo sapien
gcaagggcagggaagtgaggctcta

SEQ ID NO: 5478802 - DNA, 25 bp, Homo sapien
ttcatgccttgcctgagagtatgtt

SEQ ID NO: 5478803 - DNA, 25 bp, Homo sapien
gtgggggccatcctcgagcgggggc

SEQ ID NO: 5478804 - DNA, 25 bp, Homo sapien
ccatcctcgagcgggggctcaatga

SEQ ID NO: 5478805 - DNA, 25 bp, Homo sapien
tgggggccatcctcgagcgggggct

SEQ ID NO: 5478806 - DNA, 25 bp, Homo sapien
gggccatcctcgagcgggggctcaa

SEQ ID NO: 5478807 - DNA, 25 bp, Homo sapien
agcgccggcaccaacacaggcaccc

SEQ ID NO: 5478808 - DNA, 25 bp, Homo sapien
ctgggtgcaggctcaaggtcagcca

SEQ ID NO: 5478809 - DNA, 25 bp, Homo sapien
ggccacagcgccggcaccaacacag

SEQ ID NO: 5478810 - DNA, 25 bp, Homo sapien
acagcgccggcaccaacacaggcac

SEQ ID NO: 5478811 - DNA, 25 bp, Homo sapien
caggatcccaaacaacagtgtcaga

SEQ ID NO: 5478812 - DNA, 25 bp, Homo sapien
taaggttatgcatgagctcaagcat

SEQ ID NO: 5478813 - DNA, 25 bp, Homo sapien
caaacaccattttaaggttatgcat

SEQ ID NO: 5478814 - DNA, 25 bp, Homo sapien
ctgcaggatcccaaacaacagtgtc

SEQ ID NO: 5478815 - DNA, 25 bp, Homo sapien
tcctcatacaccaaccgtatggcag

SEQ ID NO: 5478816 - DNA, 25 bp, Homo sapien
ccaaccgtatggcaggagcgtggcc

SEQ ID NO: 5478817 - DNA, 25 bp, Homo sapien
gtccatcctcatacaccaaccgtat

SEQ ID NO: 5478818 - DNA, 25 bp, Homo sapien
tacaccaaccgtatggcaggagcgt

SEQ ID NO: 5478819 - DNA, 25 bp, Homo sapien
ccagaggtgaaccataaggccaagg

SEQ ID NO: 5478820 - DNA, 25 bp, Homo sapien
gaccagaggtgaaccataaggccaa

SEQ ID NO: 5478821 - DNA, 25 bp, Homo sapien
gagaccagaggtgaaccataaggcc

SEQ ID NO: 5478822 - DNA, 25 bp, Homo sapien
gagcccctaagcctgcgcagaggct

SEQ ID NO: 5478823 - DNA, 25 bp, Homo sapien
gcagcacagattcacagcccacctg

SEQ ID NO: 5478824 - DNA, 25 bp, Homo sapien
tgcagcacagattcacagcccacct

SEQ ID NO: 5478825 - DNA, 25 bp, Homo sapien
cctgcagcacagattcacagcccac

SEQ ID NO: 5478826 - DNA, 25 bp, Homo sapien
agcacagattcacagcccacctgcc

SEQ ID NO: 5478827 - DNA, 25 bp, Homo sapien
ctctgcatcccctcgcaggcttctc

SEQ ID NO: 5478828 - DNA, 25 bp, Homo sapien
tggttagtttccacccaaagccagc

SEQ ID NO: 5478829 - DNA, 25 bp, Homo sapien
gcaggtcctctgcatcccctcgcag

SEQ ID NO: 5478830 - DNA, 25 bp, Homo sapien
ctccagccagctggttagtttccac

SEQ ID NO: 5478831 - DNA, 25 bp, Homo sapien
tctggaactttggttttcatgggtg

SEQ ID NO: 5478832 - DNA, 25 bp, Homo sapien
ctaggtcgcccctctggaactttgg

SEQ ID NO: 5478833 - DNA, 25 bp, Homo sapien
cagcaacccacggtagggcccgaag

SEQ ID NO: 5478834 - DNA, 25 bp, Homo sapien
gttttcatgggtgtcaatgcgcagc

SEQ ID NO: 5478835 - DNA, 25 bp, Homo sapien
aagggcaatatctatgtaagagctt

SEQ ID NO: 5478836 - DNA, 25 bp, Homo sapien
cacagatatcataaagaagatttcc

SEQ ID NO: 5478837 - DNA, 25 bp, Homo sapien
gtaagagcttcttatttggttcttc

SEQ ID NO: 5478838 - DNA, 25 bp, Homo sapien
ctaagtccacacagatatcataaag

SEQ ID NO: 5478839 - DNA, 25 bp, Homo sapien
gctcaggacggccacgccaggggct

SEQ ID NO: 5478840 - DNA, 25 bp, Homo sapien
caaatccaggcttgacgacagactg

SEQ ID NO: 5478841 - DNA, 25 bp, Homo sapien
tgccctggacaagcggtggcttcca

SEQ ID NO: 5478842 - DNA, 25 bp, Homo sapien
agcagaggcccgtctcggtattccg

SEQ ID NO: 5478843 - DNA, 25 bp, Homo sapien
gaagcagccagacctaagatcaaat

SEQ ID NO: 5478844 - DNA, 25 bp, Homo sapien
ggtccatcctgtacaataggtttat

SEQ ID NO: 5478845 - DNA, 25 bp, Homo sapien
aatgcctcatgattggtccatcctg

SEQ ID NO: 5478846 - DNA, 25 bp, Homo sapien
tctcaatgtcaacacatccactgcc

SEQ ID NO: 5478847 - DNA, 25 bp, Homo sapien
ccggcctgtcatagcctaccttatt

SEQ ID NO: 5478848 - DNA, 25 bp, Homo sapien
tctgctcccggcatgtcacagggga

SEQ ID NO: 5478849 - DNA, 25 bp, Homo sapien
gactggcacagctgttccgctctgc

SEQ ID NO: 5478850 - DNA, 25 bp, Homo sapien
agcagctctcatagaccctggaccc

SEQ ID NO: 5478851 - DNA, 25 bp, Homo sapien
gttccgctctgctcccggcatgtca

SEQ ID NO: 5478852 - DNA, 25 bp, Homo sapien
atgaagccaggctgagcttccctgc

SEQ ID NO: 5478853 - DNA, 25 bp, Homo sapien
gaacaggaatgaagacacagaagtg

SEQ ID NO: 5478854 - DNA, 25 bp, Homo sapien
tgagcttccctgcagaacaggaatg

SEQ ID NO: 5478855 - DNA, 25 bp, Homo sapien
gaagacacagaagtggaaatagcac

SEQ ID NO: 5478856 - DNA, 25 bp, Homo sapien
cttacagaatttttccgactgctct

SEQ ID NO: 5478857 - DNA, 25 bp, Homo sapien
cagaatttttccgactgctctttcc

SEQ ID NO: 5478858 - DNA, 25 bp, Homo sapien
tacagaatttttccgactgctcttt

SEQ ID NO: 5478859 - DNA, 25 bp, Homo sapien
tcttacagaatttttccgactgctc

SEQ ID NO: 5478860 - DNA, 25 bp, Homo sapien
atcgtgtccacgcagtgccaggaag

SEQ ID NO: 5478861 - DNA, 25 bp, Homo sapien
tttcctcattccgtacatcgtgtcc

SEQ ID NO: 5478862 - DNA, 25 bp, Homo sapien
atgtgggacccctccctagggcaag

SEQ ID NO: 5478863 - DNA, 25 bp, Homo sapien
ggctgcccgtccagaaggacaagcc

SEQ ID NO: 5478864 - DNA, 25 bp, Homo sapien
gaagaaccatcgctgctcaaggcag

SEQ ID NO: 5478865 - DNA, 25 bp, Homo sapien
tgtaaacaacgtcgggcagcaactg

SEQ ID NO: 5478866 - DNA, 25 bp, Homo sapien
gaatccccgacagcttgacaatgtg

SEQ ID NO: 5478867 - DNA, 25 bp, Homo sapien
gttaggctctcacccataggaggga

SEQ ID NO: 5478868 - DNA, 25 bp, Homo sapien
gaatgacacgctatggacgctgact

SEQ ID NO: 5478869 - DNA, 25 bp, Homo sapien
caggagctctcaacgaaggtgtgac

SEQ ID NO: 5478870 - DNA, 25 bp, Homo sapien
gctgactgtccaagcagaaacaagg

SEQ ID NO: 5478871 - DNA, 25 bp, Homo sapien
tgccaggtcctgtaaacactaccgt

SEQ ID NO: 5478872 - DNA, 25 bp, Homo sapien
gcagggcctgtactgcaggctctgt

SEQ ID NO: 5478873 - DNA, 25 bp, Homo sapien
gttagcatcacagagtccagccgtc

SEQ ID NO: 5478874 - DNA, 25 bp, Homo sapien
taggagaacgcgaatgactgggcac

SEQ ID NO: 5478875 - DNA, 25 bp, Homo sapien
cgtcaataggacagtcccgcgcttt

SEQ ID NO: 5478876 - DNA, 25 bp, Homo sapien
tttcatccaggttggtagtcaggtt

SEQ ID NO: 5478877 - DNA, 25 bp, Homo sapien
gcagcttgagtaacacaaatacggc

SEQ ID NO: 5478878 - DNA, 25 bp, Homo sapien
taactgcatggccatgaccaagcag

SEQ ID NO: 5478879 - DNA, 25 bp, Homo sapien
aatgcagatgacaaagcagcttgag

SEQ ID NO: 5478880 - DNA, 25 bp, Homo sapien
ttccagtggacacgaggacctcaga

SEQ ID NO: 5478881 - DNA, 25 bp, Homo sapien
ctaaacacgactgggaacgaggctg

SEQ ID NO: 5478882 - DNA, 25 bp, Homo sapien
tccctagactgatggccacgaaacg

SEQ ID NO: 5478883 - DNA, 25 bp, Homo sapien
ctcaaggtcccaaagaatgctgccc

SEQ ID NO: 5478884 - DNA, 25 bp, Homo sapien
aagctatcctgtgtcccatactcgg

SEQ ID NO: 5478885 - DNA, 25 bp, Homo sapien
tactcggcccgtagagccatcaaat

SEQ ID NO: 5478886 - DNA, 25 bp, Homo sapien
tgacccagggccaagctatcctgtg

SEQ ID NO: 5478887 - DNA, 25 bp, Homo sapien
tgtttcgtacctttcccggtcatga

SEQ ID NO: 5478888 - DNA, 25 bp, Homo sapien
aaacaaggtcaaacacaggcactac

SEQ ID NO: 5478889 - DNA, 25 bp, Homo sapien
ccaggtgatggcagaacccaggtcc

SEQ ID NO: 5478890 - DNA, 25 bp, Homo sapien
ggcactacatcaggcaccccatgtt

SEQ ID NO: 5478891 - DNA, 25 bp, Homo sapien
gacaggatcgagagaaccttctgga

SEQ ID NO: 5478892 - DNA, 25 bp, Homo sapien
agccgcaggaccataggggccaccg

SEQ ID NO: 5478893 - DNA, 25 bp, Homo sapien
cgcaggaccataggggccaccggca

SEQ ID NO: 5478894 - DNA, 25 bp, Homo sapien
ggagccgcaggaccataggggccac

SEQ ID NO: 5478895 - DNA, 25 bp, Homo sapien
cataggggccaccggcagggtgggt

SEQ ID NO: 5478896 - DNA, 25 bp, Homo sapien
gggcaggctccgtgccccaatggtc

SEQ ID NO: 5478897 - DNA, 25 bp, Homo sapien
tgtgcctgccgtccatcctgggtgc

SEQ ID NO: 5478898 - DNA, 25 bp, Homo sapien
ccttcattcagcactctggtgagcc

SEQ ID NO: 5478899 - DNA, 25 bp, Homo sapien
ggcccgagtcgtccggatggcccat

SEQ ID NO: 5478900 - DNA, 25 bp, Homo sapien
gccacatcacgttttgccactatct

SEQ ID NO: 5478901 - DNA, 25 bp, Homo sapien
cgagccacatcacgttttgccacta

SEQ ID NO: 5478902 - DNA, 25 bp, Homo sapien
atcacgttttgccactatctcagaa

SEQ ID NO: 5478903 - DNA, 25 bp, Homo sapien
ttttgccactatctcagaattcctg

SEQ ID NO: 5478904 - DNA, 25 bp, Homo sapien
ccgaatctgctaacgtgaagtgcca

SEQ ID NO: 5478905 - DNA, 25 bp, Homo sapien
tagcaggaggctcacgttccgagtc

SEQ ID NO: 5478906 - DNA, 25 bp, Homo sapien
tgtcacaggcgaaagacgggttccc

SEQ ID NO: 5478907 - DNA, 25 bp, Homo sapien
tgaagtgccaagactgctgtccgcc

SEQ ID NO: 5478908 - DNA, 25 bp, Homo sapien
taatcccggaaactgctccaaaggc

SEQ ID NO: 5478909 - DNA, 25 bp, Homo sapien
gttcggcgccgtaactcaggagaaa

SEQ ID NO: 5478910 - DNA, 25 bp, Homo sapien
ctccaaaggcgtttttctcagggcg

SEQ ID NO: 5478911 - DNA, 25 bp, Homo sapien
ctttcgcttaatcccggaaactgct

SEQ ID NO: 5478912 - DNA, 25 bp, Homo sapien
tcctctcactggctgccgacgggag

SEQ ID NO: 5478913 - DNA, 25 bp, Homo sapien
cagactagcctggtacacggagagg

SEQ ID NO: 5478914 - DNA, 25 bp, Homo sapien
cctgctgactgtgggtaggccacgt

SEQ ID NO: 5478915 - DNA, 25 bp, Homo sapien
actgcaccacagcactgagggcaga

SEQ ID NO: 5478916 - DNA, 25 bp, Homo sapien
ccgtgacccggcactcccattccca

SEQ ID NO: 5478917 - DNA, 25 bp, Homo sapien
cgacagggacgggagccaaagaaca

SEQ ID NO: 5478918 - DNA, 25 bp, Homo sapien
gggcgtgggcgaggtgctgctgtag

SEQ ID NO: 5478919 - DNA, 25 bp, Homo sapien
tgttgttaaactcgccatcccttgg

SEQ ID NO: 5478920 - DNA, 25 bp, Homo sapien
ctgtagggacgcagcgacagggacg

SEQ ID NO: 5478921 - DNA, 25 bp, Homo sapien
cacgggtaccccagatgaaaaatgt

SEQ ID NO: 5478922 - DNA, 25 bp, Homo sapien
ttctggcctcttcacgggtacccca

SEQ ID NO: 5478923 - DNA, 25 bp, Homo sapien
tggcccaagtgtgctccccggtaac

SEQ ID NO: 5478924 - DNA, 25 bp, Homo sapien
gcctcttcacgggtaccccagatga

SEQ ID NO: 5478925 - DNA, 25 bp, Homo sapien
gggcctggatcagcggccacagagc

SEQ ID NO: 5478926 - DNA, 25 bp, Homo sapien
gagatgacggggcagaatcaaactt

SEQ ID NO: 5478927 - DNA, 25 bp, Homo sapien
gccgatggccggaggccgtatgcag

SEQ ID NO: 5478928 - DNA, 25 bp, Homo sapien
caaacttgtaggggcctggatcagc

SEQ ID NO: 5478929 - DNA, 25 bp, Homo sapien
ggagcatcgggaaggggaggtccaa

SEQ ID NO: 5478930 - DNA, 25 bp, Homo sapien
catcgggaaggggaggtccaaccag

SEQ ID NO: 5478931 - DNA, 25 bp, Homo sapien
acactgggagtggtgccaagtggcc

SEQ ID NO: 5478932 - DNA, 25 bp, Homo sapien
agctttccataggagcatcgggaag

SEQ ID NO: 5478933 - DNA, 25 bp, Homo sapien
tggccccaccgaacactggcctgga

SEQ ID NO: 5478934 - DNA, 25 bp, Homo sapien
tctggccccaccgaacactggcctg

SEQ ID NO: 5478935 - DNA, 25 bp, Homo sapien
gaactctggccccaccgaacactgg

SEQ ID NO: 5478936 - DNA, 25 bp, Homo sapien
ccaccgaacactggcctggacttcc

SEQ ID NO: 5478937 - DNA, 25 bp, Homo sapien
tgcccgaaattcggagtggggagga

SEQ ID NO: 5478938 - DNA, 25 bp, Homo sapien
atgcctgaatacagcccagaggaca

SEQ ID NO: 5478939 - DNA, 25 bp, Homo sapien
cttggctgcccgaaattcggagtgg

SEQ ID NO: 5478940 - DNA, 25 bp, Homo sapien
tatgcctgaatacagcccagaggac

SEQ ID NO: 5478941 - DNA, 25 bp, Homo sapien
agcggccaagtgaagctctcagcct

SEQ ID NO: 5478942 - DNA, 25 bp, Homo sapien
tgagagagcggccaagtgaagctct

SEQ ID NO: 5478943 - DNA, 25 bp, Homo sapien
agagagcggccaagtgaagctctca

SEQ ID NO: 5478944 - DNA, 25 bp, Homo sapien
agagcggccaagtgaagctctcagc

SEQ ID NO: 5478945 - DNA, 25 bp, Homo sapien
gccaggtaaacctcagcttccactc

SEQ ID NO: 5478946 - DNA, 25 bp, Homo sapien
tgccaggtaaacctcagcttccact

SEQ ID NO: 5478947 - DNA, 25 bp, Homo sapien
cttccactctgggctacagcgggcc

SEQ ID NO: 5478948 - DNA, 25 bp, Homo sapien
tccactctgggctacagcgggccat

SEQ ID NO: 5478949 - DNA, 25 bp, Homo sapien
aaagcctacgttgcaggacagggcc

SEQ ID NO: 5478950 - DNA, 25 bp, Homo sapien
caactgggacacaaaaaagcctacg

SEQ ID NO: 5478951 - DNA, 25 bp, Homo sapien
caaagagaaggatgctaagtggcca

SEQ ID NO: 5478952 - DNA, 25 bp, Homo sapien
tctaaggaccggcaaagagagctca

SEQ ID NO: 5478953 - DNA, 25 bp, Homo sapien
tgggtggccaagtaacaacgtctgc

SEQ ID NO: 5478954 - DNA, 25 bp, Homo sapien
tagaagggcacttcatcagcagggc

SEQ ID NO: 5478955 - DNA, 25 bp, Homo sapien
tctaggcacgaacattccggaaggg

SEQ ID NO: 5478956 - DNA, 25 bp, Homo sapien
taagcagctttgacgtcagagaacc

SEQ ID NO: 5478957 - DNA, 25 bp, Homo sapien
tgagccaggtaacccacaagttgaa

SEQ ID NO: 5478958 - DNA, 25 bp, Homo sapien
gctgggtcacagacgttcaagcgcc

SEQ ID NO: 5478959 - DNA, 25 bp, Homo sapien
caacacatacaagtaccgggacggt

SEQ ID NO: 5478960 - DNA, 25 bp, Homo sapien
aagttgaacagaggcgtccgctggc

SEQ ID NO: 5478961 - DNA, 25 bp, Homo sapien
tgagggtcattcctcgaaggaaaac

SEQ ID NO: 5478962 - DNA, 25 bp, Homo sapien
ccaatgtgggaccaatgggaatgag

SEQ ID NO: 5478963 - DNA, 25 bp, Homo sapien
aggcagcgccgccaatgtgggacca

SEQ ID NO: 5478964 - DNA, 25 bp, Homo sapien
acagacgccacagacagccgcaagg

SEQ ID NO: 5478965 - DNA, 25 bp, Homo sapien
acgtgtggcactgggggacacacgc

SEQ ID NO: 5478966 - DNA, 25 bp, Homo sapien
gacacgcatgcacagatcagggtca

SEQ ID NO: 5478967 - DNA, 25 bp, Homo sapien
cacgtgtggcactgggggacacacg

SEQ ID NO: 5478968 - DNA, 25 bp, Homo sapien
gggtcacgcgtgtggcactggcgga

SEQ ID NO: 5478969 - DNA, 25 bp, Homo sapien
ggtcgtcagggtcacgcgtgtggca

SEQ ID NO: 5478970 - DNA, 25 bp, Homo sapien
acgcgtgtggcactggcggacacac

SEQ ID NO: 5478971 - DNA, 25 bp, Homo sapien
atgcacagagcagggtcgtcagggt

SEQ ID NO: 5478972 - DNA, 25 bp, Homo sapien
acgcgtgtggcactggcggacacaa

SEQ ID NO: 5478973 - DNA, 25 bp, Homo sapien
cgcgtgtggcactggcggacacaaa

SEQ ID NO: 5478974 - DNA, 25 bp, Homo sapien
cgtgtggcactggcggacacagaca

SEQ ID NO: 5478975 - DNA, 25 bp, Homo sapien
taactgtccgttagcagcaacagag

SEQ ID NO: 5478976 - DNA, 25 bp, Homo sapien
cagacacacagatgaacgcacaaga

SEQ ID NO: 5478977 - DNA, 25 bp, Homo sapien
ggcactggcggacacacacaaacat

SEQ ID NO: 5478978 - DNA, 25 bp, Homo sapien
tcggcatcgacagctgaggctgccc

SEQ ID NO: 5478979 - DNA, 25 bp, Homo sapien
ttattcacagccgtcagagagccct

SEQ ID NO: 5478980 - DNA, 25 bp, Homo sapien
tgggaacccgcagacaatcctggta

SEQ ID NO: 5478981 - DNA, 25 bp, Homo sapien
tactcaaaactatcgatgtcggcat

SEQ ID NO: 5478982 - DNA, 25 bp, Homo sapien
gaatgccaaccccacgggtgacaca

SEQ ID NO: 5478983 - DNA, 25 bp, Homo sapien
ggtgaatgccaaccccacgggtgac

SEQ ID NO: 5478984 - DNA, 25 bp, Homo sapien
gaggtgaatgccaaccccacgggtg

SEQ ID NO: 5478985 - DNA, 25 bp, Homo sapien
tggggggaggtgaatgccaacccca

SEQ ID NO: 5478986 - DNA, 25 bp, Homo sapien
agagcctcacgtcctggggtctgtg

SEQ ID NO: 5478987 - DNA, 25 bp, Homo sapien
actgcaagagactgccgggtgcaaa

SEQ ID NO: 5478988 - DNA, 25 bp, Homo sapien
ctgcaagagactgccgggtgcaaag

SEQ ID NO: 5478989 - DNA, 25 bp, Homo sapien
tgcaaagagcctcacgtcctggggt

SEQ ID NO: 5478990 - DNA, 25 bp, Homo sapien
catgcccgacactgctgcggcctct

SEQ ID NO: 5478991 - DNA, 25 bp, Homo sapien
catcctcccttgtaatggacaccat

SEQ ID NO: 5478992 - DNA, 25 bp, Homo sapien
ctacatcctcccttgtaatggacac

SEQ ID NO: 5478993 - DNA, 25 bp, Homo sapien
tgctgcggcctctacatcctccctt

SEQ ID NO: 5478994 - DNA, 25 bp, Homo sapien
gaacttcagccggtgaacagcagaa

SEQ ID NO: 5478995 - DNA, 25 bp, Homo sapien
gatgctatggcgtccgcagaacagg

SEQ ID NO: 5478996 - DNA, 25 bp, Homo sapien
gatgcaaagcagaggcgatcaggca

SEQ ID NO: 5478997 - DNA, 25 bp, Homo sapien
cctctaaggagggacactgagaaca

SEQ ID NO: 5478998 - DNA, 25 bp, Homo sapien
taactcatgtgtgctaaatgggata

SEQ ID NO: 5478999 - DNA, 25 bp, Homo sapien
aaattaagttaactcatgtgtgcta

SEQ ID NO: 5479000 - DNA, 25 bp, Homo sapien
aaaaattaagttaactcatgtgtgc

SEQ ID NO: 5479001 - DNA, 25 bp, Homo sapien
taagttaactcatgtgtgctaaatg

SEQ ID NO: 5479002 - DNA, 25 bp, Homo sapien
agggcagcgtgcaaatcgggcaccc

SEQ ID NO: 5479003 - DNA, 25 bp, Homo sapien
ccaccctggcggtacgtgaagggca

SEQ ID NO: 5479004 - DNA, 25 bp, Homo sapien
caccctgtgtaagtcagagacccga

SEQ ID NO: 5479005 - DNA, 25 bp, Homo sapien
aagctggccacaggtcctgtcagct

SEQ ID NO: 5479006 - DNA, 25 bp, Homo sapien
cagctgggagaacacgcagagccag

SEQ ID NO: 5479007 - DNA, 25 bp, Homo sapien
ccgcaggggtctgatgggtcagctg

SEQ ID NO: 5479008 - DNA, 25 bp, Homo sapien
ggtgggtgtgagctagacagactca

SEQ ID NO: 5479009 - DNA, 25 bp, Homo sapien
cactgacattgggaaccaggcagca

SEQ ID NO: 5479010 - DNA, 25 bp, Homo sapien
acacggacaccacggacgctacagg

SEQ ID NO: 5479011 - DNA, 25 bp, Homo sapien
tggcacacggacaccacggacgcta

SEQ ID NO: 5479012 - DNA, 25 bp, Homo sapien
ctggcacacggacaccacggacgct

SEQ ID NO: 5479013 - DNA, 25 bp, Homo sapien
ggacaccacggacgctacaggccat

SEQ ID NO: 5479014 - DNA, 25 bp, Homo sapien
ggaccacgtcatgtcctgtccacag

SEQ ID NO: 5479015 - DNA, 25 bp, Homo sapien
gcctcgtctgactctgcttcaatgt

SEQ ID NO: 5479016 - DNA, 25 bp, Homo sapien
tgtcctttgatggtccctaaagcag

SEQ ID NO: 5479017 - DNA, 25 bp, Homo sapien
tgtgtcctttgatggtccctaaagc

SEQ ID NO: 5479018 - DNA, 25 bp, Homo sapien
ctcttggaccctgaggcgtctgtcg

SEQ ID NO: 5479019 - DNA, 25 bp, Homo sapien
cgtctgtcgaagagcagcccagtgg

SEQ ID NO: 5479020 - DNA, 25 bp, Homo sapien
cccagtgggcatccgtgacagcttg

SEQ ID NO: 5479021 - DNA, 25 bp, Homo sapien
accctgaggcgtctgtcgaagagca

SEQ ID NO: 5479022 - DNA, 25 bp, Homo sapien
acacagcagaatcttcagtgtcagc

SEQ ID NO: 5479023 - DNA, 25 bp, Homo sapien
tggcacacagcagaatcttcagtgt

SEQ ID NO: 5479024 - DNA, 25 bp, Homo sapien
agaatcttcagtgtcagccgcaggg

SEQ ID NO: 5479025 - DNA, 25 bp, Homo sapien
cagaatcttcagtgtcagccgcagg

SEQ ID NO: 5479026 - DNA, 25 bp, Homo sapien
caaggagcaaacacgggttcacgtc

SEQ ID NO: 5479027 - DNA, 25 bp, Homo sapien
agcgcctcccggatgcaaggagcaa

SEQ ID NO: 5479028 - DNA, 25 bp, Homo sapien
tcctgtggatcgaggtcacccctca

SEQ ID NO: 5479029 - DNA, 25 bp, Homo sapien
agcgcacacttcctgtggatcgagg

SEQ ID NO: 5479030 - DNA, 25 bp, Homo sapien
tattcctcagcacaatcagcgacag

SEQ ID NO: 5479031 - DNA, 25 bp, Homo sapien
taaaacgtcgcttctgccacatatg

SEQ ID NO: 5479032 - DNA, 25 bp, Homo sapien
gatacagatcacatacggctcccta

SEQ ID NO: 5479033 - DNA, 25 bp, Homo sapien
tgatcatgtaatgggtaggaccacc

SEQ ID NO: 5479034 - DNA, 25 bp, Homo sapien
gcttgtttcccgtggccacccctga

SEQ ID NO: 5479035 - DNA, 25 bp, Homo sapien
cccttgtcgaggaagatgtgcttgt

SEQ ID NO: 5479036 - DNA, 25 bp, Homo sapien
ggctccccttgtcgaggaagatgtg

SEQ ID NO: 5479037 - DNA, 25 bp, Homo sapien
aaaggctccccttgtcgaggaagat

SEQ ID NO: 5479038 - DNA, 25 bp, Homo sapien
gagccctgcaccttcccgtaaagtg

SEQ ID NO: 5479039 - DNA, 25 bp, Homo sapien
ttggaggctggacaaacgtcagtgt

SEQ ID NO: 5479040 - DNA, 25 bp, Homo sapien
actgagcagatcctcgcttggaggc

SEQ ID NO: 5479041 - DNA, 25 bp, Homo sapien
aaggataaagctgcctctcgggaga

SEQ ID NO: 5479042 - DNA, 25 bp, Homo sapien
ctaatgggaagccacgaacagcccg

SEQ ID NO: 5479043 - DNA, 25 bp, Homo sapien
acagagaagcagctcgtgggcaacc

SEQ ID NO: 5479044 - DNA, 25 bp, Homo sapien
cgagaggcctactgacgtgagtaac

SEQ ID NO: 5479045 - DNA, 25 bp, Homo sapien
cgtgagtaacgaggcgcagtccact

SEQ ID NO: 5479046 - DNA, 25 bp, Homo sapien
ccctgcatccgaaggaatgggtcct

SEQ ID NO: 5479047 - DNA, 25 bp, Homo sapien
tcgtaatctgggatacctgcgtggg

SEQ ID NO: 5479048 - DNA, 25 bp, Homo sapien
tcctaggcggcaacaatgagtctgc

SEQ ID NO: 5479049 - DNA, 25 bp, Homo sapien
ggctgcacaccacatcgatgggaaa

SEQ ID NO: 5479050 - DNA, 25 bp, Homo sapien
tctgtacgaaaatgggtggcactgg

SEQ ID NO: 5479051 - DNA, 25 bp, Homo sapien
ccttcccaagaggagcgtcagctga

SEQ ID NO: 5479052 - DNA, 25 bp, Homo sapien
gaacttctgctcgtaacaaggctgg

SEQ ID NO: 5479053 - DNA, 25 bp, Homo sapien
cagaggcagatgagtgtgtcccaac

SEQ ID NO: 5479054 - DNA, 25 bp, Homo sapien
caaggcagtgggcaaaatgcacaca

SEQ ID NO: 5479055 - DNA, 25 bp, Homo sapien
cagtgaagacgggacagaaagaacc

SEQ ID NO: 5479056 - DNA, 25 bp, Homo sapien
gggtccctgctcatgcaaatcagaa

SEQ ID NO: 5479057 - DNA, 25 bp, Homo sapien
gatacgaatcacactgtggccaagg

SEQ ID NO: 5479058 - DNA, 25 bp, Homo sapien
tccaccacaccacgacctgctgcag

SEQ ID NO: 5479059 - DNA, 25 bp, Homo sapien
accacaccacgacctgctgcagaga

SEQ ID NO: 5479060 - DNA, 25 bp, Homo sapien
ccacaccacgacctgctgcagagac

SEQ ID NO: 5479061 - DNA, 25 bp, Homo sapien
caccacaccacgacctgctgcagag

SEQ ID NO: 5479062 - DNA, 25 bp, Homo sapien
atggcacggtgccagccagcaaggc

SEQ ID NO: 5479063 - DNA, 25 bp, Homo sapien
tggcacggtgccagccagcaaggcc

SEQ ID NO: 5479064 - DNA, 25 bp, Homo sapien
ggcacggtgccagccagcaaggccc

SEQ ID NO: 5479065 - DNA, 25 bp, Homo sapien
gtgccccaaggagggcctagccgcg

SEQ ID NO: 5479066 - DNA, 25 bp, Homo sapien
tgtgccccaaggagggcctagccgc

SEQ ID NO: 5479067 - DNA, 25 bp, Homo sapien
atgtgccccaaggagggcctagccg

SEQ ID NO: 5479068 - DNA, 25 bp, Homo sapien
gaagaacatgatgtcttctagttct

SEQ ID NO: 5479069 - DNA, 25 bp, Homo sapien
gagaaagccagaagtactgcccaga

SEQ ID NO: 5479070 - DNA, 25 bp, Homo sapien
ccacacgtgacataagacagcatga

SEQ ID NO: 5479071 - DNA, 25 bp, Homo sapien
tctgcagtcccacacgtgacataag

SEQ ID NO: 5479072 - DNA, 25 bp, Homo sapien
gtgatttgtgggaataaacagaaaa

SEQ ID NO: 5479073 - DNA, 25 bp, Homo sapien
ttaactgcttcggtgatttgtggga

SEQ ID NO: 5479074 - DNA, 25 bp, Homo sapien
gatttgtgggaataaacagaaaagc

SEQ ID NO: 5479075 - DNA, 25 bp, Homo sapien
aactgcttcggtgatttgtgggaat

SEQ ID NO: 5479076 - DNA, 25 bp, Homo sapien
cgggcggcggacaatggcccgcggg

SEQ ID NO: 5479077 - DNA, 25 bp, Homo sapien
ccccgcaccgggagacggcgccgct

SEQ ID NO: 5479078 - DNA, 25 bp, Homo sapien
gcggcggccggctctagccctgctc

SEQ ID NO: 5479079 - DNA, 25 bp, Homo sapien
gcggcgcgggtggaaaggtccagaa

SEQ ID NO: 5479080 - DNA, 25 bp, Homo sapien
caaaagacgctccaggcgccagccg

SEQ ID NO: 5479081 - DNA, 25 bp, Homo sapien
gtgtccggtcgcactcggtagcccg

SEQ ID NO: 5479082 - DNA, 25 bp, Homo sapien
gcttcgcggttgaggaggcgcaggg

SEQ ID NO: 5479083 - DNA, 25 bp, Homo sapien
gccagtagtggccgtaaacacgggc

SEQ ID NO: 5479084 - DNA, 25 bp, Homo sapien
cagggtttgtaatggcaccagggtc

SEQ ID NO: 5479085 - DNA, 25 bp, Homo sapien
tattgttggatagatgcaaggttgg

SEQ ID NO: 5479086 - DNA, 25 bp, Homo sapien
gaaggccagctgcaaaattcttgta

SEQ ID NO: 5479087 - DNA, 25 bp, Homo sapien
aatgcagggtttgtaatggcaccag

SEQ ID NO: 5479088 - DNA, 25 bp, Homo sapien
gtatatctttattgaagactctgag

SEQ ID NO: 5479089 - DNA, 25 bp, Homo sapien
ttgaagactctgagaatagctgcat

SEQ ID NO: 5479090 - DNA, 25 bp, Homo sapien
ggttgtatatctttattgaagactc

SEQ ID NO: 5479091 - DNA, 25 bp, Homo sapien
ttgttcaggttgtatatctttattg

SEQ ID NO: 5479092 - DNA, 25 bp, Homo sapien
agtgccccgtgcactggaccaggtc

SEQ ID NO: 5479093 - DNA, 25 bp, Homo sapien
cagggagcccactgcgtgcgctgtg

SEQ ID NO: 5479094 - DNA, 25 bp, Homo sapien
gcgtgcgctgtgagaaggagccaca

SEQ ID NO: 5479095 - DNA, 25 bp, Homo sapien
caagtgccccgtgcactggaccagg

SEQ ID NO: 5479096 - DNA, 25 bp, Homo sapien
ccattcacgttagtcaagcccacct

SEQ ID NO: 5479097 - DNA, 25 bp, Homo sapien
ctggggccagcaacattctcgttcc

SEQ ID NO: 5479098 - DNA, 25 bp, Homo sapien
acattctcgttccacctcccgtcat

SEQ ID NO: 5479099 - DNA, 25 bp, Homo sapien
tccactcccattcacgttagtcaag

SEQ ID NO: 5479100 - DNA, 25 bp, Homo sapien
cttggcagaggcacgtaagggaggc

SEQ ID NO: 5479101 - DNA, 25 bp, Homo sapien
cgctgggacggccatctcgtttcat

SEQ ID NO: 5479102 - DNA, 25 bp, Homo sapien
gtccggcccctctctcatgttttca

SEQ ID NO: 5479103 - DNA, 25 bp, Homo sapien
tccagtggcctcttatagagggggc

SEQ ID NO: 5479104 - DNA, 25 bp, Homo sapien
gcagaagacaccaacagctattttc

SEQ ID NO: 5479105 - DNA, 25 bp, Homo sapien
ctggggaagcagaagacaccaacag

SEQ ID NO: 5479106 - DNA, 25 bp, Homo sapien
aagcagaagacaccaacagctattt

SEQ ID NO: 5479107 - DNA, 25 bp, Homo sapien
gaagacaccaacagctattttcctg

SEQ ID NO: 5479108 - DNA, 25 bp, Homo sapien
ttgagaagcccagcatgtaccctgt

SEQ ID NO: 5479109 - DNA, 25 bp, Homo sapien
tgttgagaagcccagcatgtaccct

SEQ ID NO: 5479110 - DNA, 25 bp, Homo sapien
ttcgatgtaagcctctcagactgtt

SEQ ID NO: 5479111 - DNA, 25 bp, Homo sapien
aaagtcttttcgatgtaagcctctc

SEQ ID NO: 5479112 - DNA, 25 bp, Homo sapien
agccagtcccaactgcatcatacag

SEQ ID NO: 5479113 - DNA, 25 bp, Homo sapien
aagtcaaaaattggctcatcgcaaa

SEQ ID NO: 5479114 - DNA, 25 bp, Homo sapien
tggctcatcgcaaactcttctttgt

SEQ ID NO: 5479115 - DNA, 25 bp, Homo sapien
gcagataccctgacagtcgtgtgcc

SEQ ID NO: 5479116 - DNA, 25 bp, Homo sapien
tacaggcccttgcttaggtccagac

SEQ ID NO: 5479117 - DNA, 25 bp, Homo sapien
ttccggagggcagtgttccgagttc

SEQ ID NO: 5479118 - DNA, 25 bp, Homo sapien
tcagcatagtgacagccgagagagg

SEQ ID NO: 5479119 - DNA, 25 bp, Homo sapien
tgggtgtctgtacccaggcagctcc

SEQ ID NO: 5479120 - DNA, 25 bp, Homo sapien
agtggggatcagcttggtaccaaag

SEQ ID NO: 5479121 - DNA, 25 bp, Homo sapien
tggtaaatgtcaagatgccgattgt

SEQ ID NO: 5479122 - DNA, 25 bp, Homo sapien
taaatgtcaagatgccgattgtgtg

SEQ ID NO: 5479123 - DNA, 25 bp, Homo sapien
tgtcaagatgccgattgtgtggagt

SEQ ID NO: 5479124 - DNA, 25 bp, Homo sapien
gagcaaggcgtgtccaatcgctggt

SEQ ID NO: 5479125 - DNA, 25 bp, Homo sapien
aggcgtgtccaatcgctggtgccat

SEQ ID NO: 5479126 - DNA, 25 bp, Homo sapien
gcaaggcgtgtccaatcgctggtgc

SEQ ID NO: 5479127 - DNA, 25 bp, Homo sapien
ttcctgatgagcgtgagcaaggcgt

SEQ ID NO: 5479128 - DNA, 25 bp, Homo sapien
tgagggcccagggcggcgtctccat

SEQ ID NO: 5479129 - DNA, 25 bp, Homo sapien
tgtgagggcccagggcggcgtctcc

SEQ ID NO: 5479130 - DNA, 25 bp, Homo sapien
tgtgtgagggcccagggcggcgtct

SEQ ID NO: 5479131 - DNA, 25 bp, Homo sapien
ctgtgtgagggcccagggcggcgtc

SEQ ID NO: 5479132 - DNA, 25 bp, Homo sapien
tcggtgactttgaagtcgagctgac

SEQ ID NO: 5479133 - DNA, 25 bp, Homo sapien
gaaccagagggctcggtgactttga

SEQ ID NO: 5479134 - DNA, 25 bp, Homo sapien
ggtgactttgaagtcgagctgaccc

SEQ ID NO: 5479135 - DNA, 25 bp, Homo sapien
cagagggctcggtgactttgaagtc

SEQ ID NO: 5479136 - DNA, 25 bp, Homo sapien
gtggggttcgtggcagggtcagcct

SEQ ID NO: 5479137 - DNA, 25 bp, Homo sapien
gaagtggggttcgtggcagggtcag

SEQ ID NO: 5479138 - DNA, 25 bp, Homo sapien
ctgaagtggggttcgtggcagggtc

SEQ ID NO: 5479139 - DNA, 25 bp, Homo sapien
aagtggggttcgtggcagggtcagc

SEQ ID NO: 5479140 - DNA, 25 bp, Homo sapien
gagggtggtccagtgaccgagcggg

SEQ ID NO: 5479141 - DNA, 25 bp, Homo sapien
gtggtccagtgaccgagcgggcaca

SEQ ID NO: 5479142 - DNA, 25 bp, Homo sapien
agaagtggcggggcccaagccttca

SEQ ID NO: 5479143 - DNA, 25 bp, Homo sapien
agtggcggggcccaagccttcactg

SEQ ID NO: 5479144 - DNA, 25 bp, Homo sapien
tgtgtttgtggaatatttgccatgc

SEQ ID NO: 5479145 - DNA, 25 bp, Homo sapien
gcctgcactgggttccgaggacaat

SEQ ID NO: 5479146 - DNA, 25 bp, Homo sapien
tggtaatgatcaatgcgttgatggt

SEQ ID NO: 5479147 - DNA, 25 bp, Homo sapien
tgatggtgatgttcagttccgcgtg

SEQ ID NO: 5479148 - DNA, 25 bp, Homo sapien
ctggcctgtttgcatgggaatgcat

SEQ ID NO: 5479149 - DNA, 25 bp, Homo sapien
taaacagcccgattccatgggaaca

SEQ ID NO: 5479150 - DNA, 25 bp, Homo sapien
cacaggtggaggaggtcgacatggg

SEQ ID NO: 5479151 - DNA, 25 bp, Homo sapien
gcacagcagtggtgtgggcacgacg

SEQ ID NO: 5479152 - DNA, 25 bp, Homo sapien
tggctcccggcctctgacgtccccc

SEQ ID NO: 5479153 - DNA, 25 bp, Homo sapien
agtggctcccggcctctgacgtccc

SEQ ID NO: 5479154 - DNA, 25 bp, Homo sapien
gtggctcccggcctctgacgtcccc

SEQ ID NO: 5479155 - DNA, 25 bp, Homo sapien
cagtggctcccggcctctgacgtcc

SEQ ID NO: 5479156 - DNA, 25 bp, Homo sapien
gcttgctgatttgaaccgaaatctg

SEQ ID NO: 5479157 - DNA, 25 bp, Homo sapien
caaatccgcatcgacagcttgctga

SEQ ID NO: 5479158 - DNA, 25 bp, Homo sapien
gaatgaatgagtgcgggcaaatccg

SEQ ID NO: 5479159 - DNA, 25 bp, Homo sapien
cacagtgcggccactgtagggtgca

SEQ ID NO: 5479160 - DNA, 25 bp, Homo sapien
tccgcggtgcccgtctctccatctc

SEQ ID NO: 5479161 - DNA, 25 bp, Homo sapien
ggtgcccgtctctccatctcgtggc

SEQ ID NO: 5479162 - DNA, 25 bp, Homo sapien
catgtcctcaggcctccgcggtgcc

SEQ ID NO: 5479163 - DNA, 25 bp, Homo sapien
gcccgtctctccatctcgtggccca

SEQ ID NO: 5479164 - DNA, 25 bp, Homo sapien
tcggccagaaaaacggccactcagg

SEQ ID NO: 5479165 - DNA, 25 bp, Homo sapien
gcaaggtgaacttttgggacacagc

SEQ ID NO: 5479166 - DNA, 25 bp, Homo sapien
gaacttttgggacacagccacagac

SEQ ID NO: 5479167 - DNA, 25 bp, Homo sapien
cccagaactcgagcattcggccaga

SEQ ID NO: 5479168 - DNA, 25 bp, Homo sapien
tgttatttctccctgggaaccgcca

SEQ ID NO: 5479169 - DNA, 25 bp, Homo sapien
ttttccgccttcacagatctgtttt

SEQ ID NO: 5479170 - DNA, 25 bp, Homo sapien
taaattttccgccttcacagatctg

SEQ ID NO: 5479171 - DNA, 25 bp, Homo sapien
tgggaaccgccaattctgttcttgt

SEQ ID NO: 5479172 - DNA, 25 bp, Homo sapien
tagcaaccacattttgtccgtcatt

SEQ ID NO: 5479173 - DNA, 25 bp, Homo sapien
cctgttggacggggcttagcaacca

SEQ ID NO: 5479174 - DNA, 25 bp, Homo sapien
cattttgtccgtcatttcctgtggg

SEQ ID NO: 5479175 - DNA, 25 bp, Homo sapien
cctgtggggatactgccctgacttc

SEQ ID NO: 5479176 - DNA, 25 bp, Homo sapien
ctgtgaggacccagctcgggatgtt

SEQ ID NO: 5479177 - DNA, 25 bp, Homo sapien
tgaggacccagctcgggatgttcca

SEQ ID NO: 5479178 - DNA, 25 bp, Homo sapien
tgtgaggacccagctcgggatgttc

SEQ ID NO: 5479179 - DNA, 25 bp, Homo sapien
aggacccagctcgggatgttccaca

SEQ ID NO: 5479180 - DNA, 25 bp, Homo sapien
atagtaacaatgagctccattacca

SEQ ID NO: 5479181 - DNA, 25 bp, Homo sapien
cctctccagatgctgaatagtaaca

SEQ ID NO: 5479182 - DNA, 25 bp, Homo sapien
atcgcaacagctgtcatttttgagg

SEQ ID NO: 5479183 - DNA, 25 bp, Homo sapien
gctccattaccatcgcaacagctgt

SEQ ID NO: 5479184 - DNA, 25 bp, Homo sapien
agacttgccattccttgtaccttgg

SEQ ID NO: 5479185 - DNA, 25 bp, Homo sapien
ctcctgtttcagacttgccattcct

SEQ ID NO: 5479186 - DNA, 25 bp, Homo sapien
gagaaccctggctgttctctcctgt

SEQ ID NO: 5479187 - DNA, 25 bp, Homo sapien
ttcgtcagctatgcccatgctggct

SEQ ID NO: 5479188 - DNA, 25 bp, Homo sapien
tcctgacagaagatggtctccatca

SEQ ID NO: 5479189 - DNA, 25 bp, Homo sapien
ctgacagaagatggtctccatcaga

SEQ ID NO: 5479190 - DNA, 25 bp, Homo sapien
cctcctgacagaagatggtctccat

SEQ ID NO: 5479191 - DNA, 25 bp, Homo sapien
tggtctccatcagacagtcccgcag

SEQ ID NO: 5479192 - DNA, 25 bp, Homo sapien
ctgaggaagggacgtgcactgtctt

SEQ ID NO: 5479193 - DNA, 25 bp, Homo sapien
tcccccagcccggattcagacccaa

SEQ ID NO: 5479194 - DNA, 25 bp, Homo sapien
aggaagggacgtgcactgtcttccc

SEQ ID NO: 5479195 - DNA, 25 bp, Homo sapien
tgaggaagggacgtgcactgtcttc

SEQ ID NO: 5479196 - DNA, 25 bp, Homo sapien
catgggatcttcgtggcaagatgcc

SEQ ID NO: 5479197 - DNA, 25 bp, Homo sapien
gagccatgggatcttcgtggcaaga

SEQ ID NO: 5479198 - DNA, 25 bp, Homo sapien
tctgagccatgggatcttcgtggca

SEQ ID NO: 5479199 - DNA, 25 bp, Homo sapien
agggaaccagaagcctgcactgatg

SEQ ID NO: 5479200 - DNA, 25 bp, Homo sapien
tggagtgaaaatctgggtgaacgtc

SEQ ID NO: 5479201 - DNA, 25 bp, Homo sapien
ggaaagctatctgccatgtgcagga

SEQ ID NO: 5479202 - DNA, 25 bp, Homo sapien
cttctctgtgcgttttgggaatgga

SEQ ID NO: 5479203 - DNA, 25 bp, Homo sapien
tgaacgtcaaaagccatccgtgcac

SEQ ID NO: 5479204 - DNA, 25 bp, Homo sapien
cctgctgtcggtgtggtccccagga

SEQ ID NO: 5479205 - DNA, 25 bp, Homo sapien
cactcatggtgagcgagtctcctgc

SEQ ID NO: 5479206 - DNA, 25 bp, Homo sapien
gagtctcctgctgtcggtgtggtcc

SEQ ID NO: 5479207 - DNA, 25 bp, Homo sapien
gcttctttcgtttttcactcatggt

SEQ ID NO: 5479208 - DNA, 25 bp, Homo sapien
tgaaggacttcaaatgaggggtggg

SEQ ID NO: 5479209 - DNA, 25 bp, Homo sapien
tgatgaaggacttcaaatgaggggt

SEQ ID NO: 5479210 - DNA, 25 bp, Homo sapien
gcctggacctcacttgccagtgggc

SEQ ID NO: 5479211 - DNA, 25 bp, Homo sapien
aggacttcaaatgaggggtgggcag

SEQ ID NO: 5479212 - DNA, 25 bp, Homo sapien
aggggccgctccttcattacagagg

SEQ ID NO: 5479213 - DNA, 25 bp, Homo sapien
gggccgctccttcattacagaggct

SEQ ID NO: 5479214 - DNA, 25 bp, Homo sapien
gggaggggccgctccttcattacag

SEQ ID NO: 5479215 - DNA, 25 bp, Homo sapien
gaggggccgctccttcattacagag

SEQ ID NO: 5479216 - DNA, 25 bp, Homo sapien
tggacatgaaccaaggtccgggctc

SEQ ID NO: 5479217 - DNA, 25 bp, Homo sapien
cctcgggtgcttggacatgaaccaa

SEQ ID NO: 5479218 - DNA, 25 bp, Homo sapien
ggtggcctcgggtgcttggacatga

SEQ ID NO: 5479219 - DNA, 25 bp, Homo sapien
ggacatgaaccaaggtccgggctct

SEQ ID NO: 5479220 - DNA, 25 bp, Homo sapien
gattgtgcctcgatccccagcagtt

SEQ ID NO: 5479221 - DNA, 25 bp, Homo sapien
catctgagatgatccggaaagaacc

SEQ ID NO: 5479222 - DNA, 25 bp, Homo sapien
aggaccagccgtcacctggaagggc

SEQ ID NO: 5479223 - DNA, 25 bp, Homo sapien
accagggcctcctccgaatgttcga

SEQ ID NO: 5479224 - DNA, 25 bp, Homo sapien
ttccatctgatgcgcgtctgcaccc

SEQ ID NO: 5479225 - DNA, 25 bp, Homo sapien
cttccatctgatgcgcgtctgcacc

SEQ ID NO: 5479226 - DNA, 25 bp, Homo sapien
ggtgctgtgcggccagctcctgtgc

SEQ ID NO: 5479227 - DNA, 25 bp, Homo sapien
tgctgtgcggccagctcctgtgccc

SEQ ID NO: 5479228 - DNA, 25 bp, Homo sapien
ccagctcctgtgccctcctcctcac

SEQ ID NO: 5479229 - DNA, 25 bp, Homo sapien
tgggtgctgtgcggccagctcctgt

SEQ ID NO: 5479230 - DNA, 25 bp, Homo sapien
tagggatcaaaggagctgcccaagg

SEQ ID NO: 5479231 - DNA, 25 bp, Homo sapien
ctgagtcctggggtgtagggatcaa

SEQ ID NO: 5479232 - DNA, 25 bp, Homo sapien
gtggtgggtgcagacgctgagtcct

SEQ ID NO: 5479233 - DNA, 25 bp, Homo sapien
caaggtcgcagagcgggcagtaggg

SEQ ID NO: 5479234 - DNA, 25 bp, Homo sapien
ggtacaccgcatctggtaactgccg

SEQ ID NO: 5479235 - DNA, 25 bp, Homo sapien
ttggatgcatcaccccatgaagggc

SEQ ID NO: 5479236 - DNA, 25 bp, Homo sapien
gtaactgccgccatcatgcacaggg

SEQ ID NO: 5479237 - DNA, 25 bp, Homo sapien
ccccagagacgtccgaggaatggaa

SEQ ID NO: 5479238 - DNA, 25 bp, Homo sapien
gaatgctatgatcccctgtcttgtt

SEQ ID NO: 5479239 - DNA, 25 bp, Homo sapien
gattggagccttcattgtggcctcc

SEQ ID NO: 5479240 - DNA, 25 bp, Homo sapien
gggcacaagtgatgattagaatgct

SEQ ID NO: 5479241 - DNA, 25 bp, Homo sapien
gagccttcattgtggcctcctccaa

SEQ ID NO: 5479242 - DNA, 25 bp, Homo sapien
cctcctccctcctacaccctcactt

SEQ ID NO: 5479243 - DNA, 25 bp, Homo sapien
ctgtcacctgcagagatgcccccct

SEQ ID NO: 5479244 - DNA, 25 bp, Homo sapien
ctcctacaccctcacttcctcccat

SEQ ID NO: 5479245 - DNA, 25 bp, Homo sapien
acctgcagagatgcccccctcctcc

SEQ ID NO: 5479246 - DNA, 25 bp, Homo sapien
ctgtctgtagtaccataaacctggt

SEQ ID NO: 5479247 - DNA, 25 bp, Homo sapien
gctgccctcggtgtgcagagtccgc

SEQ ID NO: 5479248 - DNA, 25 bp, Homo sapien
taaacctggtgtactgtgcgtgctg

SEQ ID NO: 5479249 - DNA, 25 bp, Homo sapien
cctagtttctagctcatctttgggc

SEQ ID NO: 5479250 - DNA, 25 bp, Homo sapien
atctttgctggatcgccggcccctt

SEQ ID NO: 5479251 - DNA, 25 bp, Homo sapien
gtccttcctgatccccgcaccaagg

SEQ ID NO: 5479252 - DNA, 25 bp, Homo sapien
cctcagactgagaggcacttgggca

SEQ ID NO: 5479253 - DNA, 25 bp, Homo sapien
gccggccccttcgatctccaggatc

SEQ ID NO: 5479254 - DNA, 25 bp, Homo sapien
cggttagataaagcaagaatagcga

SEQ ID NO: 5479255 - DNA, 25 bp, Homo sapien
tacatattgatgctgggcgacgggc

SEQ ID NO: 5479256 - DNA, 25 bp, Homo sapien
ggaaaaatctgtctacctactgacc

SEQ ID NO: 5479257 - DNA, 25 bp, Homo sapien
gcgacgggctcaagggagtcatttt

SEQ ID NO: 5479258 - DNA, 25 bp, Homo sapien
cctttgcaggctgtatatctgtttc

SEQ ID NO: 5479259 - DNA, 25 bp, Homo sapien
gcaggctgtatatctgtttcttgct

SEQ ID NO: 5479260 - DNA, 25 bp, Homo sapien
cttgcttctgtccattttcttaatc

SEQ ID NO: 5479261 - DNA, 25 bp, Homo sapien
tggcaaggcccctttgcaggctgta

SEQ ID NO: 5479262 - DNA, 25 bp, Homo sapien
tgtacaagcatgctccaagagctcg

SEQ ID NO: 5479263 - DNA, 25 bp, Homo sapien
agtgccttgtcctgtacaagcatgc

SEQ ID NO: 5479264 - DNA, 25 bp, Homo sapien
gtcctgtacaagcatgctccaagag

SEQ ID NO: 5479265 - DNA, 25 bp, Homo sapien
ccttgtcctgtacaagcatgctcca

SEQ ID NO: 5479266 - DNA, 25 bp, Homo sapien
gcattttcagtccaggattccacct

SEQ ID NO: 5479267 - DNA, 25 bp, Homo sapien
attccacctggatgaaccattcatt

SEQ ID NO: 5479268 - DNA, 25 bp, Homo sapien
tcacacgtgaggactgcccgcattt

SEQ ID NO: 5479269 - DNA, 25 bp, Homo sapien
cctggatgaaccattcattacttcc

SEQ ID NO: 5479270 - DNA, 25 bp, Homo sapien
tggatgtccccgcagccatgcagcc

SEQ ID NO: 5479271 - DNA, 25 bp, Homo sapien
gtggatgtccccgcagccatgcagc

SEQ ID NO: 5479272 - DNA, 25 bp, Homo sapien
gatgtccccgcagccatgcagccat

SEQ ID NO: 5479273 - DNA, 25 bp, Homo sapien
ggatgtccccgcagccatgcagcca

SEQ ID NO: 5479274 - DNA, 25 bp, Homo sapien
ctgagttctgatgccggtgttgggc

SEQ ID NO: 5479275 - DNA, 25 bp, Homo sapien
tgatgccggtgttgggcagggcctt

SEQ ID NO: 5479276 - DNA, 25 bp, Homo sapien
gctcttagaagggtccgtgacccag

SEQ ID NO: 5479277 - DNA, 25 bp, Homo sapien
acagaagcggatgccctgggaagct

SEQ ID NO: 5479278 - DNA, 25 bp, Homo sapien
gggccgatcagccaagccctcagag

SEQ ID NO: 5479279 - DNA, 25 bp, Homo sapien
ccgatcagccaagccctcagagtcc

SEQ ID NO: 5479280 - DNA, 25 bp, Homo sapien
ctggggccgatcagccaagccctca

SEQ ID NO: 5479281 - DNA, 25 bp, Homo sapien
ggccgatcagccaagccctcagagt

SEQ ID NO: 5479282 - DNA, 25 bp, Homo sapien
tccttgagggtcatgatgctctcct

SEQ ID NO: 5479283 - DNA, 25 bp, Homo sapien
tgagggtcatgatgctctcctcctg

SEQ ID NO: 5479284 - DNA, 25 bp, Homo sapien
tctccttgagggtcatgatgctctc

SEQ ID NO: 5479285 - DNA, 25 bp, Homo sapien
cttgagggtcatgatgctctcctcc

SEQ ID NO: 5479286 - DNA, 25 bp, Homo sapien
tgaaatcccagcacaggcactcggg

SEQ ID NO: 5479287 - DNA, 25 bp, Homo sapien
aaaggatctcagaggtaggagaaag

SEQ ID NO: 5479288 - DNA, 25 bp, Homo sapien
gacttccatctccttggaaaagtga

SEQ ID NO: 5479289 - DNA, 25 bp, Homo sapien
aagtgacaaaggatctcagaggtag

SEQ ID NO: 5479290 - DNA, 25 bp, Homo sapien
cgcccacaggcgaggggtattccag

SEQ ID NO: 5479291 - DNA, 25 bp, Homo sapien
cttgaaccttgctgatcaaggcttc

SEQ ID NO: 5479292 - DNA, 25 bp, Homo sapien
tgctgatcaaggcttcgcccacagg

SEQ ID NO: 5479293 - DNA, 25 bp, Homo sapien
tgcagcaggcactgaccaaagatgt

SEQ ID NO: 5479294 - DNA, 25 bp, Homo sapien
ggtgtagtcgcccagccattgccgc

SEQ ID NO: 5479295 - DNA, 25 bp, Homo sapien
attgccgcctgccagcatcactgtc

SEQ ID NO: 5479296 - DNA, 25 bp, Homo sapien
cactgtctcggcgagcggattggac

SEQ ID NO: 5479297 - DNA, 25 bp, Homo sapien
agcggattggacgaaggcttcccca

SEQ ID NO: 5479298 - DNA, 25 bp, Homo sapien
tgtggattccttccagtccccgggc

SEQ ID NO: 5479299 - DNA, 25 bp, Homo sapien
gctcccattcgcagggattcggtac

SEQ ID NO: 5479300 - DNA, 25 bp, Homo sapien
agaggcttggctcccattcgcaggg

SEQ ID NO: 5479301 - DNA, 25 bp, Homo sapien
gctctgactccgagttggatttggg

SEQ ID NO: 5479302 - DNA, 25 bp, Homo sapien
tcacagggttctgcgctgatgctgg

SEQ ID NO: 5479303 - DNA, 25 bp, Homo sapien
tcctcggtgggggacctttctgagc

SEQ ID NO: 5479304 - DNA, 25 bp, Homo sapien
tgcaggcagctcctcacgtgacaac

SEQ ID NO: 5479305 - DNA, 25 bp, Homo sapien
gctcctcacgtgacaacactgcaga

SEQ ID NO: 5479306 - DNA, 25 bp, Homo sapien
gctctgaatggacgctttttgctct

SEQ ID NO: 5479307 - DNA, 25 bp, Homo sapien
tggcttgatcaccaaggaggaaatc

SEQ ID NO: 5479308 - DNA, 25 bp, Homo sapien
tccaggagtgaacgttctcagcatt

SEQ ID NO: 5479309 - DNA, 25 bp, Homo sapien
ttatcactaatctgcagaaagctct

SEQ ID NO: 5479310 - DNA, 25 bp, Homo sapien
ttcccctggacctgctgatgcgcct

SEQ ID NO: 5479311 - DNA, 25 bp, Homo sapien
ggagttctgcagtgggttcattgag

SEQ ID NO: 5479312 - DNA, 25 bp, Homo sapien
aatgcgggccttcgcgttggttcca

SEQ ID NO: 5479313 - DNA, 25 bp, Homo sapien
tctgcagtgggttcattgagaaagt

SEQ ID NO: 5479314 - DNA, 25 bp, Homo sapien
tggaccacggctccaccaagtagtt

SEQ ID NO: 5479315 - DNA, 25 bp, Homo sapien
ggcctgcacggtgtcgctggaccac

SEQ ID NO: 5479316 - DNA, 25 bp, Homo sapien
acgtcgatgggattcgccaggcctc

SEQ ID NO: 5479317 - DNA, 25 bp, Homo sapien
ccaccaagtagtttattgacgtcga

SEQ ID NO: 5479318 - DNA, 25 bp, Homo sapien
tcagccagtctgaggctccctgatg

SEQ ID NO: 5479319 - DNA, 25 bp, Homo sapien
tgaggctccctgatgtggcggggtg

SEQ ID NO: 5479320 - DNA, 25 bp, Homo sapien
gccagtctgaggctccctgatgtgg

SEQ ID NO: 5479321 - DNA, 25 bp, Homo sapien
gtctgaggctccctgatgtggcggg

SEQ ID NO: 5479322 - DNA, 25 bp, Homo sapien
cgagcagccagcgtgaatgatgcat

SEQ ID NO: 5479323 - DNA, 25 bp, Homo sapien
gttgtttgacacgattgcacccatg

SEQ ID NO: 5479324 - DNA, 25 bp, Homo sapien
aaatagccctcagcagccgagcagc

SEQ ID NO: 5479325 - DNA, 25 bp, Homo sapien
gcagtcagtcccatcaggcattgga

SEQ ID NO: 5479326 - DNA, 25 bp, Homo sapien
agagatgaccaggacccaatccttg

SEQ ID NO: 5479327 - DNA, 25 bp, Homo sapien
agatgaccaggacccaatccttgta

SEQ ID NO: 5479328 - DNA, 25 bp, Homo sapien
tcagagatgaccaggacccaatcct

SEQ ID NO: 5479329 - DNA, 25 bp, Homo sapien
gaccaggacccaatccttgtaccca

SEQ ID NO: 5479330 - DNA, 25 bp, Homo sapien
gggtgccacaggtatctttcagggc

SEQ ID NO: 5479331 - DNA, 25 bp, Homo sapien
tcacggggtgccacaggtatctttc

SEQ ID NO: 5479332 - DNA, 25 bp, Homo sapien
gtgccacaggtatctttcagggcca

SEQ ID NO: 5479333 - DNA, 25 bp, Homo sapien
cggggtgccacaggtatctttcagg

SEQ ID NO: 5479334 - DNA, 25 bp, Homo sapien
tctggatccagcattccgggtcctc

SEQ ID NO: 5479335 - DNA, 25 bp, Homo sapien
ccttaggaccgatgggtgcacatat

SEQ ID NO: 5479336 - DNA, 25 bp, Homo sapien
tgagctggtgaagcgtctggatcca

SEQ ID NO: 5479337 - DNA, 25 bp, Homo sapien
tcactgtatcctgggtaggtcctca

SEQ ID NO: 5479338 - DNA, 25 bp, Homo sapien
cacatggttgaaaccgtggccaagc

SEQ ID NO: 5479339 - DNA, 25 bp, Homo sapien
gggccgtccgtcctcagccacgtgg

SEQ ID NO: 5479340 - DNA, 25 bp, Homo sapien
aaaccgtggccaagcttcctgggtg

SEQ ID NO: 5479341 - DNA, 25 bp, Homo sapien
agcaagaggccgaccacatggttga

SEQ ID NO: 5479342 - DNA, 25 bp, Homo sapien
gttatcccgtcaggagcagacaggg

SEQ ID NO: 5479343 - DNA, 25 bp, Homo sapien
gacactgagatagttgagacgcttc

SEQ ID NO: 5479344 - DNA, 25 bp, Homo sapien
agctcggtggctctctgatctgcaa

SEQ ID NO: 5479345 - DNA, 25 bp, Homo sapien
gagacgcttcttggaggatgctgcc

SEQ ID NO: 5479346 - DNA, 25 bp, Homo sapien
ggtgatgatatactgctcataggga

SEQ ID NO: 5479347 - DNA, 25 bp, Homo sapien
tgatcacgtcgtacttcattgacgg

SEQ ID NO: 5479348 - DNA, 25 bp, Homo sapien
gaaatgagcctcaaaaatgcatgtt

SEQ ID NO: 5479349 - DNA, 25 bp, Homo sapien
ttatgcatcgacctcttctggtaga

SEQ ID NO: 5479350 - DNA, 25 bp, Homo sapien
ctccaaagagcagataccaagaaaa

SEQ ID NO: 5479351 - DNA, 25 bp, Homo sapien
gagtcctccaaagagcagataccaa

SEQ ID NO: 5479352 - DNA, 25 bp, Homo sapien
tcttggggtgtggttggatggcatt

SEQ ID NO: 5479353 - DNA, 25 bp, Homo sapien
caaagagcagataccaagaaaagaa

SEQ ID NO: 5479354 - DNA, 25 bp, Homo sapien
cctcttcttaggcaggaggtcccca

SEQ ID NO: 5479355 - DNA, 25 bp, Homo sapien
gtgatgatatcttcctgcggtcgtc

SEQ ID NO: 5479356 - DNA, 25 bp, Homo sapien
ccagatgatgatatcctgatgccag

SEQ ID NO: 5479357 - DNA, 25 bp, Homo sapien
aagctccactggcacctgaatccag

SEQ ID NO: 5479358 - DNA, 25 bp, Homo sapien
ctagaaccacggtgcagcggatgtg

SEQ ID NO: 5479359 - DNA, 25 bp, Homo sapien
tgcagcggatgtggacaagcagctg

SEQ ID NO: 5479360 - DNA, 25 bp, Homo sapien
tctctgtaataactgctcggcatgg

SEQ ID NO: 5479361 - DNA, 25 bp, Homo sapien
gcagctggcagacggagctgttgcc

SEQ ID NO: 5479362 - DNA, 25 bp, Homo sapien
gggtgtgcctccttggccccgacag

SEQ ID NO: 5479363 - DNA, 25 bp, Homo sapien
cagtcacattgaggcggggtgtgcc

SEQ ID NO: 5479364 - DNA, 25 bp, Homo sapien
atccccacaagggctcgtacagtca

SEQ ID NO: 5479365 - DNA, 25 bp, Homo sapien
ccacaagggctcgtacagtcacatt

SEQ ID NO: 5479366 - DNA, 25 bp, Homo sapien
tgacgggtgtgcttgctggggacac

SEQ ID NO: 5479367 - DNA, 25 bp, Homo sapien
acgggtgtgcttgctggggacacac

SEQ ID NO: 5479368 - DNA, 25 bp, Homo sapien
gacgggtgtgcttgctggggacaca

SEQ ID NO: 5479369 - DNA, 25 bp, Homo sapien
tgcaccaccagtcacaccgaagatc

SEQ ID NO: 5479370 - DNA, 25 bp, Homo sapien
cgaagatcccattgccctgccagtc

SEQ ID NO: 5479371 - DNA, 25 bp, Homo sapien
accgaagatcccattgccctgccag

SEQ ID NO: 5479372 - DNA, 25 bp, Homo sapien
accagtcacaccgaagatcccattg

SEQ ID NO: 5479373 - DNA, 25 bp, Homo sapien
tcagtccagtgttaatcgacttggt

SEQ ID NO: 5479374 - DNA, 25 bp, Homo sapien
gcctggatttcaatcccagtgcttg

SEQ ID NO: 5479375 - DNA, 25 bp, Homo sapien
cagtgttaatcgacttggtgaggac

SEQ ID NO: 5479376 - DNA, 25 bp, Homo sapien
tgcttggccatgcttgcttggagag

SEQ ID NO: 5479377 - DNA, 25 bp, Homo sapien
tgctgctgtacgagcttcaaagcct

SEQ ID NO: 5479378 - DNA, 25 bp, Homo sapien
acgccctgtgaacagcctgccagtg

SEQ ID NO: 5479379 - DNA, 25 bp, Homo sapien
gagcttccatagtgcttacgatggg

SEQ ID NO: 5479380 - DNA, 25 bp, Homo sapien
tgatcacatatgccatctggagcag

SEQ ID NO: 5479381 - DNA, 25 bp, Homo sapien
gacccaccaaggagagaaatccatt

SEQ ID NO: 5479382 - DNA, 25 bp, Homo sapien
gacaactggagtccctcgatcagac

SEQ ID NO: 5479383 - DNA, 25 bp, Homo sapien
gtgacaactgcccatgcatagacaa

SEQ ID NO: 5479384 - DNA, 25 bp, Homo sapien
aactgcccatgcatagacaactgga

SEQ ID NO: 5479385 - DNA, 25 bp, Homo sapien
ctagactgtgggtcatggtggagac

SEQ ID NO: 5479386 - DNA, 25 bp, Homo sapien
tgtgggtcatggtggagacaagttc

SEQ ID NO: 5479387 - DNA, 25 bp, Homo sapien
caagttcaggaatcagcacgctggg

SEQ ID NO: 5479388 - DNA, 25 bp, Homo sapien
tcatggtggagacaagttcaggaat

SEQ ID NO: 5479389 - DNA, 25 bp, Homo sapien
ggtgccaatgggtgaggtgccaatg

SEQ ID NO: 5479390 - DNA, 25 bp, Homo sapien
gtgaggtgccaatgggtctctgaaa

SEQ ID NO: 5479391 - DNA, 25 bp, Homo sapien
ccactttcaccacagagggttctga

SEQ ID NO: 5479392 - DNA, 25 bp, Homo sapien
cagtgtgcagcttgaggtgccaatg

SEQ ID NO: 5479393 - DNA, 25 bp, Homo sapien
cggcatccttgaccggccatcatga

SEQ ID NO: 5479394 - DNA, 25 bp, Homo sapien
ggctgcagccttcgatacacattca

SEQ ID NO: 5479395 - DNA, 25 bp, Homo sapien
tattctccgcacgttcttgctcctt

SEQ ID NO: 5479396 - DNA, 25 bp, Homo sapien
ttcacgtgcagagaaagcgctttcc

SEQ ID NO: 5479397 - DNA, 25 bp, Homo sapien
gtttgacgtctgcgtagatacgcac

SEQ ID NO: 5479398 - DNA, 25 bp, Homo sapien
gacgtttgacgtctgcgtagatacg

SEQ ID NO: 5479399 - DNA, 25 bp, Homo sapien
cgtttgacgtctgcgtagatacgca

SEQ ID NO: 5479400 - DNA, 25 bp, Homo sapien
acgtttgacgtctgcgtagatacgc

SEQ ID NO: 5479401 - DNA, 25 bp, Homo sapien
cgtttgacgtctgcgtagatacaca

SEQ ID NO: 5479402 - DNA, 25 bp, Homo sapien
gtttgacgtctgcgtagatacacac

SEQ ID NO: 5479403 - DNA, 25 bp, Homo sapien
gacgtttgacgtctgcgtagataca

SEQ ID NO: 5479404 - DNA, 25 bp, Homo sapien
acgtttgacgtctgcgtagatacac

SEQ ID NO: 5479405 - DNA, 25 bp, Homo sapien
gctgtctgcatcttcgaatctttca

SEQ ID NO: 5479406 - DNA, 25 bp, Homo sapien
cctgcgtggatctgggtttgtatgc

SEQ ID NO: 5479407 - DNA, 25 bp, Homo sapien
gggtttggcatatccgccacctgaa

SEQ ID NO: 5479408 - DNA, 25 bp, Homo sapien
tgtatgctgtgagtaatgctgtctg

SEQ ID NO: 5479409 - DNA, 25 bp, Homo sapien
cactgtgacaatgtgtttatagtac

SEQ ID NO: 5479410 - DNA, 25 bp, Homo sapien
gtgacaatgtgtttatagtaccctg

SEQ ID NO: 5479411 - DNA, 25 bp, Homo sapien
cttcctgatacactgtgacaatgtg

SEQ ID NO: 5479412 - DNA, 25 bp, Homo sapien
cgccctccttcctgatacactgtga

SEQ ID NO: 5479413 - DNA, 25 bp, Homo sapien
aaccaggtagatacccacactgtgg

SEQ ID NO: 5479414 - DNA, 25 bp, Homo sapien
aagaaaccaggtagatacccacact

SEQ ID NO: 5479415 - DNA, 25 bp, Homo sapien
tgctttgtttgccgaagaaaccagg

SEQ ID NO: 5479416 - DNA, 25 bp, Homo sapien
gaaaccaggtagatacccacactgt

SEQ ID NO: 5479417 - DNA, 25 bp, Homo sapien
tctctgagtgtctgatgctgtgatc

SEQ ID NO: 5479418 - DNA, 25 bp, Homo sapien
ctggctggcaggcactatctgtatc

SEQ ID NO: 5479419 - DNA, 25 bp, Homo sapien
gctggcaggcactatctgtatctct

SEQ ID NO: 5479420 - DNA, 25 bp, Homo sapien
ttcacaaccacacgctggctggcag

SEQ ID NO: 5479421 - DNA, 25 bp, Homo sapien
tagtttgaagcacagtccatgagga

SEQ ID NO: 5479422 - DNA, 25 bp, Homo sapien
tggctgctttcctttcgaccgacct

SEQ ID NO: 5479423 - DNA, 25 bp, Homo sapien
gatcttctcaggcaggtccactctc

SEQ ID NO: 5479424 - DNA, 25 bp, Homo sapien
actgtcctcaccactagctcttggc

SEQ ID NO: 5479425 - DNA, 25 bp, Homo sapien
cattttcagctctcgtcacaccttt

SEQ ID NO: 5479426 - DNA, 25 bp, Homo sapien
tattgggtttgtactgaaatgcacc

SEQ ID NO: 5479427 - DNA, 25 bp, Homo sapien
tgcacctccgaggaaagctattgtt

SEQ ID NO: 5479428 - DNA, 25 bp, Homo sapien
cagctctcgtcacacctttattggg

SEQ ID NO: 5479429 - DNA, 25 bp, Homo sapien
ctgcgtggcctgaaacctgaagcag

SEQ ID NO: 5479430 - DNA, 25 bp, Homo sapien
caggagtgtggtcttggcccagaga

SEQ ID NO: 5479431 - DNA, 25 bp, Homo sapien
gtggcctgaaacctgaagcaggctg

SEQ ID NO: 5479432 - DNA, 25 bp, Homo sapien
gacaggatgcttcgggctgcttctg

SEQ ID NO: 5479433 - DNA, 25 bp, Homo sapien
agctcagggcccagtagaccaggga

SEQ ID NO: 5479434 - DNA, 25 bp, Homo sapien
agggctgtcactttttagatcattt

SEQ ID NO: 5479435 - DNA, 25 bp, Homo sapien
gggctgtcactttttagatcatttt

SEQ ID NO: 5479436 - DNA, 25 bp, Homo sapien
agccgaggagccggacgcagcgaga

SEQ ID NO: 5479437 - DNA, 25 bp, Homo sapien
gccgaggagccggacgcagcgagag

SEQ ID NO: 5479438 - DNA, 25 bp, Homo sapien
tgagccgaggagccggacgcagcga

SEQ ID NO: 5479439 - DNA, 25 bp, Homo sapien
gctgagccgaggagccggacgcagc

SEQ ID NO: 5479440 - DNA, 25 bp, Homo sapien
cagcagtgcagtcatagaaaccctc

SEQ ID NO: 5479441 - DNA, 25 bp, Homo sapien
tgccgctcactgcttttgcagcagt

SEQ ID NO: 5479442 - DNA, 25 bp, Homo sapien
tgggcggagtcagcaccctggcatc

SEQ ID NO: 5479443 - DNA, 25 bp, Homo sapien
gcagtcatagaaaccctctggccct

SEQ ID NO: 5479444 - DNA, 25 bp, Homo sapien
ctcctgggggacgcttgacttgtgt

SEQ ID NO: 5479445 - DNA, 25 bp, Homo sapien
gacactggagcctacgaggttgggg

SEQ ID NO: 5479446 - DNA, 25 bp, Homo sapien
agcctacgaggttggggacacattt

SEQ ID NO: 5479447 - DNA, 25 bp, Homo sapien
cctgggggacgcttgacttgtgtgt

SEQ ID NO: 5479448 - DNA, 25 bp, Homo sapien
tatctgagccggtagagagcagatc

SEQ ID NO: 5479449 - DNA, 25 bp, Homo sapien
cccagggctgttatctgagccggta

SEQ ID NO: 5479450 - DNA, 25 bp, Homo sapien
gatcagccgcggatcgaatgtacct

SEQ ID NO: 5479451 - DNA, 25 bp, Homo sapien
atgtacctcggtctctctccaaagg

SEQ ID NO: 5479452 - DNA, 25 bp, Homo sapien
caggtggcgcagaaatgcgagatcc

SEQ ID NO: 5479453 - DNA, 25 bp, Homo sapien
atccacgggccgctactttcatctg

SEQ ID NO: 5479454 - DNA, 25 bp, Homo sapien
cgctactttcatctgggcatgtccc

SEQ ID NO: 5479455 - DNA, 25 bp, Homo sapien
gaaactgatatccagggctgcacag

SEQ ID NO: 5479456 - DNA, 25 bp, Homo sapien
cgctgctttggtgaacagacaggca

SEQ ID NO: 5479457 - DNA, 25 bp, Homo sapien
cacaagcccttcagagcaggcgctg

SEQ ID NO: 5479458 - DNA, 25 bp, Homo sapien
agcaggcgctgctttggtgaacaga

SEQ ID NO: 5479459 - DNA, 25 bp, Homo sapien
aagcccttcagagcaggcgctgctt

SEQ ID NO: 5479460 - DNA, 25 bp, Homo sapien
tggcaaatccatcacgcactttggg

SEQ ID NO: 5479461 - DNA, 25 bp, Homo sapien
gcttggcaaatccatcacgcacttt

SEQ ID NO: 5479462 - DNA, 25 bp, Homo sapien
tggcttggcaaatccatcacgcact

SEQ ID NO: 5479463 - DNA, 25 bp, Homo sapien
ttgtggcttggcaaatccatcacgc

SEQ ID NO: 5479464 - DNA, 25 bp, Homo sapien
gctcctttgtgctccagctcatgtg

SEQ ID NO: 5479465 - DNA, 25 bp, Homo sapien
tgtgctccagctcatgtggtcctgg

SEQ ID NO: 5479466 - DNA, 25 bp, Homo sapien
ctgattcctgtccatcgggctcctt

SEQ ID NO: 5479467 - DNA, 25 bp, Homo sapien
gctgtggggacaggtcctgattcct

SEQ ID NO: 5479468 - DNA, 25 bp, Homo sapien
tactggttctgaggcaacactgttg

SEQ ID NO: 5479469 - DNA, 25 bp, Homo sapien
ccttcccggcgtcagtttctccatg

SEQ ID NO: 5479470 - DNA, 25 bp, Homo sapien
tgcttgcactgccgtgaacagtgct

SEQ ID NO: 5479471 - DNA, 25 bp, Homo sapien
gctttgctcatctgcgggtttgctg

SEQ ID NO: 5479472 - DNA, 25 bp, Homo sapien
cgcagagtgtgtttgttggggacac

SEQ ID NO: 5479473 - DNA, 25 bp, Homo sapien
gtgcccagcgcagagtgtgtttgtt

SEQ ID NO: 5479474 - DNA, 25 bp, Homo sapien
gggacacaagcagcacctgagcact

SEQ ID NO: 5479475 - DNA, 25 bp, Homo sapien
agtgtgtttgttggggacacaagca

SEQ ID NO: 5479476 - DNA, 25 bp, Homo sapien
ctggggaagagtcggcctccgtaat

SEQ ID NO: 5479477 - DNA, 25 bp, Homo sapien
cttccctgcactcgcccagcatcag

SEQ ID NO: 5479478 - DNA, 25 bp, Homo sapien
tgcagggccgtggaatcaaaaggct

SEQ ID NO: 5479479 - DNA, 25 bp, Homo sapien
cctccgtaatgccagccggctccgg

SEQ ID NO: 5479480 - DNA, 25 bp, Homo sapien
tgtgaatgtcacgtctaattccatg

SEQ ID NO: 5479481 - DNA, 25 bp, Homo sapien
taattccatgatccgtcatgcggaa

SEQ ID NO: 5479482 - DNA, 25 bp, Homo sapien
ctccagtgacgctgaacttgaccag

SEQ ID NO: 5479483 - DNA, 25 bp, Homo sapien
tcatgcggaaggttttgaccccggc

SEQ ID NO: 5479484 - DNA, 25 bp, Homo sapien
gggagctgtgtgaggtgtgcggccc

SEQ ID NO: 5479485 - DNA, 25 bp, Homo sapien
tcagggcctgtgagaccgggcaccg

SEQ ID NO: 5479486 - DNA, 25 bp, Homo sapien
ccagaggcgcaggcctgaactgatg

SEQ ID NO: 5479487 - DNA, 25 bp, Homo sapien
gaggcgcaggcctgaactgatgcct

SEQ ID NO: 5479488 - DNA, 25 bp, Homo sapien
acagttgtccgagaggcgctgggct

SEQ ID NO: 5479489 - DNA, 25 bp, Homo sapien
cgcgctctcccggctggaactgtta

SEQ ID NO: 5479490 - DNA, 25 bp, Homo sapien
tgaggtcggccatcacgggcctgct

SEQ ID NO: 5479491 - DNA, 25 bp, Homo sapien
tctggcggcgctccatcaatgctgg

SEQ ID NO: 5479492 - DNA, 25 bp, Homo sapien
cgcaggaggggaacatgcgtgtgtg

SEQ ID NO: 5479493 - DNA, 25 bp, Homo sapien
tacgcaggaggggaacatgcgtgtg

SEQ ID NO: 5479494 - DNA, 25 bp, Homo sapien
ctacgcaggaggggaacatgcgtgt

SEQ ID NO: 5479495 - DNA, 25 bp, Homo sapien
gcaggaggggaacatgcgtgtgtgt

SEQ ID NO: 5479496 - DNA, 25 bp, Homo sapien
ccaggggaagcctgtcgggatccca

SEQ ID NO: 5479497 - DNA, 25 bp, Homo sapien
aggggaagcctgtcgggatcccagg

SEQ ID NO: 5479498 - DNA, 25 bp, Homo sapien
atcccaggggaagcctgtcgggatc

SEQ ID NO: 5479499 - DNA, 25 bp, Homo sapien
cagggcaccttcggtccttcgtacg

SEQ ID NO: 5479500 - DNA, 25 bp, Homo sapien
gctggcgttggaagggaccgtgtca

SEQ ID NO: 5479501 - DNA, 25 bp, Homo sapien
gggaccgtgtcattaaagctctttc

SEQ ID NO: 5479502 - DNA, 25 bp, Homo sapien
ttccctgcctgggatcattgctgct

SEQ ID NO: 5479503 - DNA, 25 bp, Homo sapien
ggatgagaacttccctgcctgggat

SEQ ID NO: 5479504 - DNA, 25 bp, Homo sapien
gcccgacggtcttatcgcttcatcg

SEQ ID NO: 5479505 - DNA, 25 bp, Homo sapien
cgcttcatcgatggtaggttctgga

SEQ ID NO: 5479506 - DNA, 25 bp, Homo sapien
acatctggtcctgcccgacggtctt

SEQ ID NO: 5479507 - DNA, 25 bp, Homo sapien
tcgatggtaggttctggattcccca

SEQ ID NO: 5479508 - DNA, 25 bp, Homo sapien
cagaaggacactcaagtccagggcc

SEQ ID NO: 5479509 - DNA, 25 bp, Homo sapien
cctgcagcagaaggacactcaagtc

SEQ ID NO: 5479510 - DNA, 25 bp, Homo sapien
agcagaaggacactcaagtccaggg

SEQ ID NO: 5479511 - DNA, 25 bp, Homo sapien
tgcagcagaaggacactcaagtcca

SEQ ID NO: 5479512 - DNA, 25 bp, Homo sapien
tccacttttaccctccgctctgaag

SEQ ID NO: 5479513 - DNA, 25 bp, Homo sapien
gctgagtcctcgaggctggcaccac

SEQ ID NO: 5479514 - DNA, 25 bp, Homo sapien
gggacagcatcggcgctgagtcctc

SEQ ID NO: 5479515 - DNA, 25 bp, Homo sapien
catcggcgctgagtcctcgaggctg

SEQ ID NO: 5479516 - DNA, 25 bp, Homo sapien
tgttgccaatgaaggcggggggtgg

SEQ ID NO: 5479517 - DNA, 25 bp, Homo sapien
tgaagaatgtcagtgttgccaatga

SEQ ID NO: 5479518 - DNA, 25 bp, Homo sapien
agccaccacgtgggctcccacccct

SEQ ID NO: 5479519 - DNA, 25 bp, Homo sapien
gccagagcccaccatgaagaatgtc

SEQ ID NO: 5479520 - DNA, 25 bp, Homo sapien
gacacagggcagacatagatccagg

SEQ ID NO: 5479521 - DNA, 25 bp, Homo sapien
cttcctcacggcgtccaaggacacc

SEQ ID NO: 5479522 - DNA, 25 bp, Homo sapien
gggcagacatagatccaggcctgga

SEQ ID NO: 5479523 - DNA, 25 bp, Homo sapien
acagggcagacatagatccaggcct

SEQ ID NO: 5479524 - DNA, 25 bp, Homo sapien
catcacggtgacaatgccctggccc

SEQ ID NO: 5479525 - DNA, 25 bp, Homo sapien
aagcagctcgggaagccatcacggt

SEQ ID NO: 5479526 - DNA, 25 bp, Homo sapien
aagccatcacggtgacaatgccctg

SEQ ID NO: 5479527 - DNA, 25 bp, Homo sapien
gccatcacggtgacaatgccctggc

SEQ ID NO: 5479528 - DNA, 25 bp, Homo sapien
tacatcagggcctggctggtactgg

SEQ ID NO: 5479529 - DNA, 25 bp, Homo sapien
gttgaatctggaggctacatcaggg

SEQ ID NO: 5479530 - DNA, 25 bp, Homo sapien
gttccccagcttgtagctcaggaag

SEQ ID NO: 5479531 - DNA, 25 bp, Homo sapien
tgaatgcagcacagcgttgaatctg

SEQ ID NO: 5479532 - DNA, 25 bp, Homo sapien
tctgtcgtttatgaagtggtgccag

SEQ ID NO: 5479533 - DNA, 25 bp, Homo sapien
tcttcacggcggaaatgggtctgtc

SEQ ID NO: 5479534 - DNA, 25 bp, Homo sapien
cggaaatgggtctgtcgtttatgaa

SEQ ID NO: 5479535 - DNA, 25 bp, Homo sapien
tcattgttcttcacggcggaaatgg

SEQ ID NO: 5479536 - DNA, 25 bp, Homo sapien
ctgcacggccgcactgactctccac

SEQ ID NO: 5479537 - DNA, 25 bp, Homo sapien
tgtgtggtgggcgatggcacagccc

SEQ ID NO: 5479538 - DNA, 25 bp, Homo sapien
ccctgtgtggtgggcgatggcacag

SEQ ID NO: 5479539 - DNA, 25 bp, Homo sapien
tgtggtgggcgatggcacagccctc

SEQ ID NO: 5479540 - DNA, 25 bp, Homo sapien
cagagtccttggttgagggattaga

SEQ ID NO: 5479541 - DNA, 25 bp, Homo sapien
tccctggagggcatccatccttctg

SEQ ID NO: 5479542 - DNA, 25 bp, Homo sapien
gggagcacaggcttgcctgatacca

SEQ ID NO: 5479543 - DNA, 25 bp, Homo sapien
ttagaatttatgctgtgttccctgg

SEQ ID NO: 5479544 - DNA, 25 bp, Homo sapien
ccagggcagtcggtctcctttggac

SEQ ID NO: 5479545 - DNA, 25 bp, Homo sapien
cgagtgccttctgcatgccgattca

SEQ ID NO: 5479546 - DNA, 25 bp, Homo sapien
cttctgcatgccgattcagagcctt

SEQ ID NO: 5479547 - DNA, 25 bp, Homo sapien
cagtcggtctcctttggacacgcag

SEQ ID NO: 5479548 - DNA, 25 bp, Homo sapien
gactcagggaagcttgagggcctcc

SEQ ID NO: 5479549 - DNA, 25 bp, Homo sapien
aagcttgagggcctcccacgagaca

SEQ ID NO: 5479550 - DNA, 25 bp, Homo sapien
agggcctcccacgagacagcgtgca

SEQ ID NO: 5479551 - DNA, 25 bp, Homo sapien
tcccacgagacagcgtgcactcagg

SEQ ID NO: 5479552 - DNA, 25 bp, Homo sapien
gttgacacgtttgcgtgcagcttga

SEQ ID NO: 5479553 - DNA, 25 bp, Homo sapien
cacgtttgcgtgcagcttgatttaa

SEQ ID NO: 5479554 - DNA, 25 bp, Homo sapien
tgtggttgacacgtttgcgtgcagc

SEQ ID NO: 5479555 - DNA, 25 bp, Homo sapien
cactgtggttgacacgtttgcgtgc

SEQ ID NO: 5479556 - DNA, 25 bp, Homo sapien
tgaatgccagaaagaggacctcggg

SEQ ID NO: 5479557 - DNA, 25 bp, Homo sapien
tggtgaatgccagaaagaggacctc

SEQ ID NO: 5479558 - DNA, 25 bp, Homo sapien
caccgggtattttgaagaatgaagc

SEQ ID NO: 5479559 - DNA, 25 bp, Homo sapien
aaaggaaatgccagttggggcacag

SEQ ID NO: 5479560 - DNA, 25 bp, Homo sapien
gcacagcatcctcaacgacgcattt

SEQ ID NO: 5479561 - DNA, 25 bp, Homo sapien
ctttgctcggggacatcaacagcca

SEQ ID NO: 5479562 - DNA, 25 bp, Homo sapien
tctttatggaatagctgcccccttc

SEQ ID NO: 5479563 - DNA, 25 bp, Homo sapien
cagccatacatacgggctgcttggg

SEQ ID NO: 5479564 - DNA, 25 bp, Homo sapien
gagtagctcctgtcgtgctgctgag

SEQ ID NO: 5479565 - DNA, 25 bp, Homo sapien
cccagggtgagcttggagcagtcca

SEQ ID NO: 5479566 - DNA, 25 bp, Homo sapien
caaatgaatgagggagtagctcctg

SEQ ID NO: 5479567 - DNA, 25 bp, Homo sapien
aatgagggagtagctcctgtcgtgc

SEQ ID NO: 5479568 - DNA, 25 bp, Homo sapien
agttcaaaaccttcaaggcagctaa

SEQ ID NO: 5479569 - DNA, 25 bp, Homo sapien
taacagatgccctagatctgctggg

SEQ ID NO: 5479570 - DNA, 25 bp, Homo sapien
ctgtggatgggtttacacggattaa

SEQ ID NO: 5479571 - DNA, 25 bp, Homo sapien
gatgggtttacacggattaagttca

SEQ ID NO: 5479572 - DNA, 25 bp, Homo sapien
tagttccacggttggatgcaggccc

SEQ ID NO: 5479573 - DNA, 25 bp, Homo sapien
tcaggctgccgagtaattagttcca

SEQ ID NO: 5479574 - DNA, 25 bp, Homo sapien
tgtgctggaaatcgccctcaggctg

SEQ ID NO: 5479575 - DNA, 25 bp, Homo sapien
gaacacatttcccatgtcgaggctg

SEQ ID NO: 5479576 - DNA, 25 bp, Homo sapien
ctgtgaatggtcagttctgacaacg

SEQ ID NO: 5479577 - DNA, 25 bp, Homo sapien
gaatggtcagttctgacaacgggcc

SEQ ID NO: 5479578 - DNA, 25 bp, Homo sapien
cagttctgacaacgggccatatgtg

SEQ ID NO: 5479579 - DNA, 25 bp, Homo sapien
aacgggccatatgtgtggccaggca

SEQ ID NO: 5479580 - DNA, 25 bp, Homo sapien
tgctacgatcatggcccacacaaag

SEQ ID NO: 5479581 - DNA, 25 bp, Homo sapien
gaagtgttgctacgatcatggccca

SEQ ID NO: 5479582 - DNA, 25 bp, Homo sapien
atcctgggaagtgttgctacgatca

SEQ ID NO: 5479583 - DNA, 25 bp, Homo sapien
tgggaagtgttgctacgatcatggc

SEQ ID NO: 5479584 - DNA, 25 bp, Homo sapien
acaaggacaatttgccctgagcccc

SEQ ID NO: 5479585 - DNA, 25 bp, Homo sapien
ctgagccccttccatgttggctggt

SEQ ID NO: 5479586 - DNA, 25 bp, Homo sapien
cgcccaggtctggtgggagtcccca

SEQ ID NO: 5479587 - DNA, 25 bp, Homo sapien
gcaaacaaggacaatttgccctgag

SEQ ID NO: 5479588 - DNA, 25 bp, Homo sapien
gttgaaatgacccacatccttgttt

SEQ ID NO: 5479589 - DNA, 25 bp, Homo sapien
tcatttatgccttgagagtaggaac

SEQ ID NO: 5479590 - DNA, 25 bp, Homo sapien
tatgccttgagagtaggaactcagg

SEQ ID NO: 5479591 - DNA, 25 bp, Homo sapien
ggaactcaggggcttcagctctctg

SEQ ID NO: 5479592 - DNA, 25 bp, Homo sapien
caactttcccaaggtcaagaaacat

SEQ ID NO: 5479593 - DNA, 25 bp, Homo sapien
tcccaaggtcaagaaacatcccaca

SEQ ID NO: 5479594 - DNA, 25 bp, Homo sapien
ggtcaagaaacatcccacactgctc

SEQ ID NO: 5479595 - DNA, 25 bp, Homo sapien
tgcctccccaactttcccaaggtca

SEQ ID NO: 5479596 - DNA, 25 bp, Homo sapien
gaaacttgaggtcttcgagttgatt

SEQ ID NO: 5479597 - DNA, 25 bp, Homo sapien
agaaacttgaggtcttcgagttgat

SEQ ID NO: 5479598 - DNA, 25 bp, Homo sapien
gccatcaagggtggccatctggaac

SEQ ID NO: 5479599 - DNA, 25 bp, Homo sapien
atctggaactcagagcttccaaaag

SEQ ID NO: 5479600 - DNA, 25 bp, Homo sapien
ctgccatcaagggtggccatctgga

SEQ ID NO: 5479601 - DNA, 25 bp, Homo sapien
ctggaactcagagcttccaaaagca

SEQ ID NO: 5479602 - DNA, 25 bp, Homo sapien
tgtgttcagtaactcctatcctgat

SEQ ID NO: 5479603 - DNA, 25 bp, Homo sapien
cgctgccccaatccaagaaacagtg

SEQ ID NO: 5479604 - DNA, 25 bp, Homo sapien
tagggtgcacgtggacttttgttgt

SEQ ID NO: 5479605 - DNA, 25 bp, Homo sapien
catggtctttctaaatgtgttcagt

SEQ ID NO: 5479606 - DNA, 25 bp, Homo sapien
tccgtaacagctttactagtttaca

SEQ ID NO: 5479607 - DNA, 25 bp, Homo sapien
cccactaacaatgtgtaagagtttc

SEQ ID NO: 5479608 - DNA, 25 bp, Homo sapien
actactgctgcgatcaacatgggag

SEQ ID NO: 5479609 - DNA, 25 bp, Homo sapien
cattctaattggagtgagtggtatc

SEQ ID NO: 5479610 - DNA, 25 bp, Homo sapien
ccttatgctccaactgcctgggtca

SEQ ID NO: 5479611 - DNA, 25 bp, Homo sapien
tttacatggcattcgccctgtgtgt

SEQ ID NO: 5479612 - DNA, 25 bp, Homo sapien
ggtctttgcacattagagtcctggg

SEQ ID NO: 5479613 - DNA, 25 bp, Homo sapien
tgtcgggaagaatctgttaccagcc

SEQ ID NO: 5479614 - DNA, 25 bp, Homo sapien
taggcaacgagaaccacatatacgg

SEQ ID NO: 5479615 - DNA, 25 bp, Homo sapien
ggttgaatattacaggttaagacac

SEQ ID NO: 5479616 - DNA, 25 bp, Homo sapien
cagagtaaagctgacccacagaagt

SEQ ID NO: 5479617 - DNA, 25 bp, Homo sapien
ggcagttccatataagattgtcata

SEQ ID NO: 5479618 - DNA, 25 bp, Homo sapien
gaggacttttggttgcacataaccg

SEQ ID NO: 5479619 - DNA, 25 bp, Homo sapien
gattctgggacagccttacgtacca

SEQ ID NO: 5479620 - DNA, 25 bp, Homo sapien
tacgtaccagggctgggacgcagac

SEQ ID NO: 5479621 - DNA, 25 bp, Homo sapien
gaatgctgctctcggtttcaggcca

SEQ ID NO: 5479622 - DNA, 25 bp, Homo sapien
agtaggctgacccatctgtgctcct

SEQ ID NO: 5479623 - DNA, 25 bp, Homo sapien
gagtaggctgacccatctgtgctcc

SEQ ID NO: 5479624 - DNA, 25 bp, Homo sapien
tgtgtgagcctccttcacgagagcc

SEQ ID NO: 5479625 - DNA, 25 bp, Homo sapien
tttggtgtctgcgagggccgctctc

SEQ ID NO: 5479626 - DNA, 25 bp, Homo sapien
gcccaagatctgaccaggagccatg

SEQ ID NO: 5479627 - DNA, 25 bp, Homo sapien
tggccattatgtctcaacccctggg

SEQ ID NO: 5479628 - DNA, 25 bp, Homo sapien
ttgatgaacatcagtaatgcccagc

SEQ ID NO: 5479629 - DNA, 25 bp, Homo sapien
cattgctggaagtacgctctgagtt

SEQ ID NO: 5479630 - DNA, 25 bp, Homo sapien
tgtggcataaggatctcaccatagc

SEQ ID NO: 5479631 - DNA, 25 bp, Homo sapien
tgctttggcccactaatgacactgt

SEQ ID NO: 5479632 - DNA, 25 bp, Homo sapien
tattgaaagatcacaccatgtgtgc

SEQ ID NO: 5479633 - DNA, 25 bp, Homo sapien
aaaacaaatggattctgcatattga

SEQ ID NO: 5479634 - DNA, 25 bp, Homo sapien
tttctgcaccaaaacagtatggacc

SEQ ID NO: 5479635 - DNA, 25 bp, Homo sapien
gcaccaaaacagtatggaccttaga

SEQ ID NO: 5479636 - DNA, 25 bp, Homo sapien
tcctgaggccatgccagaaaggacc

SEQ ID NO: 5479637 - DNA, 25 bp, Homo sapien
agatgagcagacgagtatgggccct

SEQ ID NO: 5479638 - DNA, 25 bp, Homo sapien
tcttcatggaactggcagcgcggat

SEQ ID NO: 5479639 - DNA, 25 bp, Homo sapien
tttccagctcaaggagcaagctctg

SEQ ID NO: 5479640 - DNA, 25 bp, Homo sapien
tttgggacggacgtatgagagctca

SEQ ID NO: 5479641 - DNA, 25 bp, Homo sapien
tgctttaaccccacgaatgcaatgg

SEQ ID NO: 5479642 - DNA, 25 bp, Homo sapien
tccaacactgatacggataggagct

SEQ ID NO: 5479643 - DNA, 25 bp, Homo sapien
tgctgattgagcgacttcttccaac

SEQ ID NO: 5479644 - DNA, 25 bp, Homo sapien
taatgggagaaaaatcaggccgtcc

SEQ ID NO: 5479645 - DNA, 25 bp, Homo sapien
gacattggtcttcccttggactgga

SEQ ID NO: 5479646 - DNA, 25 bp, Homo sapien
cactggcctgttgaggtgggacatt

SEQ ID NO: 5479647 - DNA, 25 bp, Homo sapien
tgcagccaagcttgctgtgagaatc

SEQ ID NO: 5479648 - DNA, 25 bp, Homo sapien
aggcctggtcccaacggcacaccga

SEQ ID NO: 5479649 - DNA, 25 bp, Homo sapien
acggcacaccgaggcctccggcctg

SEQ ID NO: 5479650 - DNA, 25 bp, Homo sapien
aatgtatataactctaaagctatct

SEQ ID NO: 5479651 - DNA, 25 bp, Homo sapien
tctaggaagactctaatggcaagta

SEQ ID NO: 5479652 - DNA, 25 bp, Homo sapien
catgggtggttcctttcgcctgctg

SEQ ID NO: 5479653 - DNA, 25 bp, Homo sapien
tgttggcgacacagcccggaagtgt

SEQ ID NO: 5479654 - DNA, 25 bp, Homo sapien
tgggctttggctggcacataccatg

SEQ ID NO: 5479655 - DNA, 25 bp, Homo sapien
cagctggatagagcccgaccaatac

SEQ ID NO: 5479656 - DNA, 25 bp, Homo sapien
tataattggtaagcagggcacagag

SEQ ID NO: 5479657 - DNA, 25 bp, Homo sapien
ttgaagcggcgtaactgaaggtccc

SEQ ID NO: 5479658 - DNA, 25 bp, Homo sapien
catgtaaagccccagatcactcggg

SEQ ID NO: 5479659 - DNA, 25 bp, Homo sapien
gaacatggaggttccacagctgcct

SEQ ID NO: 5479660 - DNA, 25 bp, Homo sapien
actggcagcctgattcctaatggac

SEQ ID NO: 5479661 - DNA, 25 bp, Homo sapien
tcaagggaatgcaaccacacagggt

SEQ ID NO: 5479662 - DNA, 25 bp, Homo sapien
tgaactatggccagtgcaaccaagg

SEQ ID NO: 5479663 - DNA, 25 bp, Homo sapien
ggacggccacgtgaatctttctcaa

SEQ ID NO: 5479664 - DNA, 25 bp, Homo sapien
tggtgggccattccaaaacaaagct

SEQ ID NO: 5479665 - DNA, 25 bp, Homo sapien
ggattgctttttgtgagaccccttc

SEQ ID NO: 5479666 - DNA, 25 bp, Homo sapien
ttaaagctatatggcgtccaggaga

SEQ ID NO: 5479667 - DNA, 25 bp, Homo sapien
aacctgaatgacacagagcggcagc

SEQ ID NO: 5479668 - DNA, 25 bp, Homo sapien
ttcagccagatccacttgtctccca

SEQ ID NO: 5479669 - DNA, 25 bp, Homo sapien
tcacttcagccagatccacttgtct

SEQ ID NO: 5479670 - DNA, 25 bp, Homo sapien
ctcggtgttgtacccagggctgtac

SEQ ID NO: 5479671 - DNA, 25 bp, Homo sapien
ggtgttgtacccagggctgtacttg

SEQ ID NO: 5479672 - DNA, 25 bp, Homo sapien
cagggctgtacttgcggcccggcag

SEQ ID NO: 5479673 - DNA, 25 bp, Homo sapien
cggtgttgtacccagggctgtactt

SEQ ID NO: 5479674 - DNA, 25 bp, Homo sapien
cacaggacaggcaaagctctaggat

SEQ ID NO: 5479675 - DNA, 25 bp, Homo sapien
tttaaaatgagaggtcgacgcgcac

SEQ ID NO: 5479676 - DNA, 25 bp, Homo sapien
aatcactgaaatgtgccttgcctgg

SEQ ID NO: 5479677 - DNA, 25 bp, Homo sapien
tctaggatcttcaaggcccaggagc

SEQ ID NO: 5479678 - DNA, 25 bp, Homo sapien
gggctggcctcaaagggcctgacgg

SEQ ID NO: 5479679 - DNA, 25 bp, Homo sapien
gctatttctagaccggggagcagtg

SEQ ID NO: 5479680 - DNA, 25 bp, Homo sapien
ggtgctatttctagaccggggagca

SEQ ID NO: 5479681 - DNA, 25 bp, Homo sapien
tgtcagacgggctgtaggtgctatt

SEQ ID NO: 5479682 - DNA, 25 bp, Homo sapien
gagatctctatctcaagatgcccag

SEQ ID NO: 5479683 - DNA, 25 bp, Homo sapien
tctctgcatcaagaagtggtggaga

SEQ ID NO: 5479684 - DNA, 25 bp, Homo sapien
gggccacctttcacacgccaggtaa

SEQ ID NO: 5479685 - DNA, 25 bp, Homo sapien
gtatgtctatgcctgcacgcccatg

SEQ ID NO: 5479686 - DNA, 25 bp, Homo sapien
gcaggagactgggagatcatctggg

SEQ ID NO: 5479687 - DNA, 25 bp, Homo sapien
gactgggagatcatctgggttatct

SEQ ID NO: 5479688 - DNA, 25 bp, Homo sapien
tggcaaaagggcctctgcagcagga

SEQ ID NO: 5479689 - DNA, 25 bp, Homo sapien
aagggcctctgcagcaggagactgg

SEQ ID NO: 5479690 - DNA, 25 bp, Homo sapien
tcccgagccacgctttcccggatct

SEQ ID NO: 5479691 - DNA, 25 bp, Homo sapien
acggtgcccgggtgcgtgacaccca

SEQ ID NO: 5479692 - DNA, 25 bp, Homo sapien
cggtgcccgggtgcgtgacacccat

SEQ ID NO: 5479693 - DNA, 25 bp, Homo sapien
cggatctgctcgttcacggtgcccg

SEQ ID NO: 5479694 - DNA, 25 bp, Homo sapien
taagtaacttgctgagggtggcaca

SEQ ID NO: 5479695 - DNA, 25 bp, Homo sapien
tgcatgggtcggcaaactgtagccc

SEQ ID NO: 5479696 - DNA, 25 bp, Homo sapien
gctagaattggagccgtgtcccctg

SEQ ID NO: 5479697 - DNA, 25 bp, Homo sapien
tgctgacgcagccatcggaatgggt

SEQ ID NO: 5479698 - DNA, 25 bp, Homo sapien
tctactggtgaaacgctgtgtccta

SEQ ID NO: 5479699 - DNA, 25 bp, Homo sapien
gagaaatcctacctgaccaacacgg

SEQ ID NO: 5479700 - DNA, 25 bp, Homo sapien
taagtgcctacaggtgccaggtcct

SEQ ID NO: 5479701 - DNA, 25 bp, Homo sapien
taagtgcccacaggtacgaggtcct

SEQ ID NO: 5479702 - DNA, 25 bp, Homo sapien
tgttcctgtggacatgggactccct

SEQ ID NO: 5479703 - DNA, 25 bp, Homo sapien
cacgttacagaatgtgcctggtcag

SEQ ID NO: 5479704 - DNA, 25 bp, Homo sapien
gacaggcatctttggctctaggaca

SEQ ID NO: 5479705 - DNA, 25 bp, Homo sapien
catctctcggcgtatgaaacaggaa

SEQ ID NO: 5479706 - DNA, 25 bp, Homo sapien
taccaagaaaaccacgcagatgcat

SEQ ID NO: 5479707 - DNA, 25 bp, Homo sapien
ggaaactcaggtccacacaaaggaa

SEQ ID NO: 5479708 - DNA, 25 bp, Homo sapien
ttagaaactatgcaagccaagaggc

SEQ ID NO: 5479709 - DNA, 25 bp, Homo sapien
gactgtgacaagttagagttgcccg

SEQ ID NO: 5479710 - DNA, 25 bp, Homo sapien
taactcgggcatacagattaacgcc

SEQ ID NO: 5479711 - DNA, 25 bp, Homo sapien
taacacactgtaaagtcagggcact

SEQ ID NO: 5479712 - DNA, 25 bp, Homo sapien
gacaggcagataccacataccacag

SEQ ID NO: 5479713 - DNA, 25 bp, Homo sapien
catcttcttcgagggacacatgctg

SEQ ID NO: 5479714 - DNA, 25 bp, Homo sapien
ctaccctctcacgggtccccacagc

SEQ ID NO: 5479715 - DNA, 25 bp, Homo sapien
tctgggattccatcgcatcatctgc

SEQ ID NO: 5479716 - DNA, 25 bp, Homo sapien
taccctctcacgggtccccacagcc

SEQ ID NO: 5479717 - DNA, 25 bp, Homo sapien
ctgggattccatcgcatcatctgcg

SEQ ID NO: 5479718 - DNA, 25 bp, Homo sapien
tatggcgtgctaggccctctaactc

SEQ ID NO: 5479719 - DNA, 25 bp, Homo sapien
tcctgtttctggagtccccatttaa

SEQ ID NO: 5479720 - DNA, 25 bp, Homo sapien
ccccatttaagggtgcagttgatgg

SEQ ID NO: 5479721 - DNA, 25 bp, Homo sapien
cactgtccctgagtatggcgtgcta

SEQ ID NO: 5479722 - DNA, 25 bp, Homo sapien
ctggaatccttcagcaatagtctgc

SEQ ID NO: 5479723 - DNA, 25 bp, Homo sapien
actgacagcaagtgcccctgatgct

SEQ ID NO: 5479724 - DNA, 25 bp, Homo sapien
agcaagcacgacctcagccaggagc

SEQ ID NO: 5479725 - DNA, 25 bp, Homo sapien
caaaggaacataaaggctgtggtgt

SEQ ID NO: 5479726 - DNA, 25 bp, Homo sapien
gtggagacccagcaagcacgacctc

SEQ ID NO: 5479727 - DNA, 25 bp, Homo sapien
tcagcacctcaaacttatcctgaac

SEQ ID NO: 5479728 - DNA, 25 bp, Homo sapien
tctctgaactgatgtaagacacggt

SEQ ID NO: 5479729 - DNA, 25 bp, Homo sapien
aagacacggtcagtctgatgagctc

SEQ ID NO: 5479730 - DNA, 25 bp, Homo sapien
gaaagataggaatgcttgtgtaatt

SEQ ID NO: 5479731 - DNA, 25 bp, Homo sapien
gatagtctcttagctttatcatttc

SEQ ID NO: 5479732 - DNA, 25 bp, Homo sapien
gaatataaccactatacttaaagat

SEQ ID NO: 5479733 - DNA, 25 bp, Homo sapien
aatatacaaatcataggatagtctc

SEQ ID NO: 5479734 - DNA, 25 bp, Homo sapien
tatagtctgaatataaccactatac

SEQ ID NO: 5479735 - DNA, 25 bp, Homo sapien
tgagccacggccctttatcgaactt

SEQ ID NO: 5479736 - DNA, 25 bp, Homo sapien
tcaggtattcaatgtcctctaccac

SEQ ID NO: 5479737 - DNA, 25 bp, Homo sapien
tgcgattgtcctgcttgagccacgg

SEQ ID NO: 5479738 - DNA, 25 bp, Homo sapien
agtaatcgcaggtggtataaagtgc

SEQ ID NO: 5479739 - DNA, 25 bp, Homo sapien
cttgagcttcccttgcagaatattg

SEQ ID NO: 5479740 - DNA, 25 bp, Homo sapien
ttgagcttcccttgcagaatattgt

SEQ ID NO: 5479741 - DNA, 25 bp, Homo sapien
tgagcttcccttgcagaatattgta

SEQ ID NO: 5479742 - DNA, 25 bp, Homo sapien
taaggtctaacctaagatctaacaa

SEQ ID NO: 5479743 - DNA, 25 bp, Homo sapien
tatctatgatctaacaatattgtct

SEQ ID NO: 5479744 - DNA, 25 bp, Homo sapien
caatggtttaaatatacaagcccgg

SEQ ID NO: 5479745 - DNA, 25 bp, Homo sapien
tattcagtatttaactaaacaatgg

SEQ ID NO: 5479746 - DNA, 25 bp, Homo sapien
caatgtcctgtagataggcagaggt

SEQ ID NO: 5479747 - DNA, 25 bp, Homo sapien
ctcaatgtcctgtagataggcagag

SEQ ID NO: 5479748 - DNA, 25 bp, Homo sapien
tctcaatgtcctgtagataggcaga

SEQ ID NO: 5479749 - DNA, 25 bp, Homo sapien
tcaatgtcctgtagataggcagagg

SEQ ID NO: 5479750 - DNA, 25 bp, Homo sapien
ggacagggtggatgctcaatcaaca

SEQ ID NO: 5479751 - DNA, 25 bp, Homo sapien
ttttcttacaactcacaccgggcac

SEQ ID NO: 5479752 - DNA, 25 bp, Homo sapien
cacaggcgccttgcatataggaggt

SEQ ID NO: 5479753 - DNA, 25 bp, Homo sapien
tgagcacctacaagaattccggcac

SEQ ID NO: 5479754 - DNA, 25 bp, Homo sapien
ccaatgtggaagaaaacgataggac

SEQ ID NO: 5479755 - DNA, 25 bp, Homo sapien
cctctctcaagtgggaacagggtgt

SEQ ID NO: 5479756 - DNA, 25 bp, Homo sapien
tgtgtgtcaccctcctcgtgaggac

SEQ ID NO: 5479757 - DNA, 25 bp, Homo sapien
aacagaaaggtacgtgacagaggga

SEQ ID NO: 5479758 - DNA, 25 bp, Homo sapien
ctttcttctgaatccgcctctggac

SEQ ID NO: 5479759 - DNA, 25 bp, Homo sapien
atctcctttcttctgaatccgcctc

SEQ ID NO: 5479760 - DNA, 25 bp, Homo sapien
cctttcttctgaatccgcctctgga

SEQ ID NO: 5479761 - DNA, 25 bp, Homo sapien
ctcctttcttctgaatccgcctctg

SEQ ID NO: 5479762 - DNA, 25 bp, Homo sapien
gaacgggcacatcgatgtaaatcac

SEQ ID NO: 5479763 - DNA, 25 bp, Homo sapien
gcaggtaatcgcagatggtgacgct

SEQ ID NO: 5479764 - DNA, 25 bp, Homo sapien
ctctggaacgggcacatcgatgtaa

SEQ ID NO: 5479765 - DNA, 25 bp, Homo sapien
ctcttcacctcgttgtagtggtcca

SEQ ID NO: 5479766 - DNA, 25 bp, Homo sapien
taatcaacagtacttcctctgagct

SEQ ID NO: 5479767 - DNA, 25 bp, Homo sapien
cctctttcattaatcaacagtactt

SEQ ID NO: 5479768 - DNA, 25 bp, Homo sapien
cattaatcaacagtacttcctctga

SEQ ID NO: 5479769 - DNA, 25 bp, Homo sapien
tctttcattaatcaacagtacttcc

SEQ ID NO: 5479770 - DNA, 25 bp, Homo sapien
ggagaccgattaagtaatggcattt

SEQ ID NO: 5479771 - DNA, 25 bp, Homo sapien
taaacacagtaagtgcaaggtgagt

SEQ ID NO: 5479772 - DNA, 25 bp, Homo sapien
atctaacagacattcataaacacag

SEQ ID NO: 5479773 - DNA, 25 bp, Homo sapien
tattcatctatctaacagacattca

SEQ ID NO: 5479774 - DNA, 25 bp, Homo sapien
tcacagcccttgcaaagtcgcacca

SEQ ID NO: 5479775 - DNA, 25 bp, Homo sapien
acagcccttgcaaagtcgcaccaca

SEQ ID NO: 5479776 - DNA, 25 bp, Homo sapien
gcccttgcaaagtcgcaccacacac

SEQ ID NO: 5479777 - DNA, 25 bp, Homo sapien
agcccttgcaaagtcgcaccacaca

SEQ ID NO: 5479778 - DNA, 25 bp, Homo sapien
aagtgggtctgcaatgctgactcac

SEQ ID NO: 5479779 - DNA, 25 bp, Homo sapien
gaagtgggtctgcaatgctgactca

SEQ ID NO: 5479780 - DNA, 25 bp, Homo sapien
ccagaagtgggtctgcaatgctgac

SEQ ID NO: 5479781 - DNA, 25 bp, Homo sapien
cagaagtgggtctgcaatgctgact

SEQ ID NO: 5479782 - DNA, 25 bp, Homo sapien
actgctttcggatgaatccctggtt

SEQ ID NO: 5479783 - DNA, 25 bp, Homo sapien
tgtacatcgcctccaggaacacaaa

SEQ ID NO: 5479784 - DNA, 25 bp, Homo sapien
tcactgaagatggagcgctccaaca

SEQ ID NO: 5479785 - DNA, 25 bp, Homo sapien
ggagcgctccaacacaacaccttgt

SEQ ID NO: 5479786 - DNA, 25 bp, Homo sapien
tgaatccccgcttcaggaaagtgct

SEQ ID NO: 5479787 - DNA, 25 bp, Homo sapien
tacagttgccattatagtcggtggc

SEQ ID NO: 5479788 - DNA, 25 bp, Homo sapien
ggactgcaggcggtaactgttgcca

SEQ ID NO: 5479789 - DNA, 25 bp, Homo sapien
actgttgccatcattgcttctcgga

SEQ ID NO: 5479790 - DNA, 25 bp, Homo sapien
tgcttgctttatccccaagtaggaa

SEQ ID NO: 5479791 - DNA, 25 bp, Homo sapien
ccagtacatatattgccatctacag

SEQ ID NO: 5479792 - DNA, 25 bp, Homo sapien
gccacattccatagcgcagtttgca

SEQ ID NO: 5479793 - DNA, 25 bp, Homo sapien
tacagttatcactctgctgcgttct

SEQ ID NO: 5479794 - DNA, 25 bp, Homo sapien
acccgggcggacgcggacgtcgctg

SEQ ID NO: 5479795 - DNA, 25 bp, Homo sapien
cgggcggacgcggacgtcgctgcca

SEQ ID NO: 5479796 - DNA, 25 bp, Homo sapien
ggacgcggacgtcgctgccagcttc

SEQ ID NO: 5479797 - DNA, 25 bp, Homo sapien
gcggacgcggacgtcgctgccagct

SEQ ID NO: 5479798 - DNA, 25 bp, Homo sapien
gacgcggtcgcgacggggccctctc

SEQ ID NO: 5479799 - DNA, 25 bp, Homo sapien
ccggtcagctcaggatcaaggaccc

SEQ ID NO: 5479800 - DNA, 25 bp, Homo sapien
ggtcagctcaggatcaaggacccaa

SEQ ID NO: 5479801 - DNA, 25 bp, Homo sapien
cgcgacggggccctctctcgcggcc

SEQ ID NO: 5479802 - DNA, 25 bp, Homo sapien
gccaatatgacagtatggtggccag

SEQ ID NO: 5479803 - DNA, 25 bp, Homo sapien
agggttaattattggcgtgacaaca

SEQ ID NO: 5479804 - DNA, 25 bp, Homo sapien
tgtgccaatatgacagtatggtggc

SEQ ID NO: 5479805 - DNA, 25 bp, Homo sapien
caacagtgtacacggcagagatgag

SEQ ID NO: 5479806 - DNA, 25 bp, Homo sapien
acagccccggggtcacaaggacgtg

SEQ ID NO: 5479807 - DNA, 25 bp, Homo sapien
gacgtggtagcgcagcgggtggcag

SEQ ID NO: 5479808 - DNA, 25 bp, Homo sapien
cggggtcacaaggacgtggtagcgc

SEQ ID NO: 5479809 - DNA, 25 bp, Homo sapien
gtcacaaggacgtggtagcgcagcg

SEQ ID NO: 5479810 - DNA, 25 bp, Homo sapien
aggtgctgctccagacgatgaggat

SEQ ID NO: 5479811 - DNA, 25 bp, Homo sapien
gatgtcagacacgtaccagatctcc

SEQ ID NO: 5479812 - DNA, 25 bp, Homo sapien
gcctctgtgcttgggagctgcaggc

SEQ ID NO: 5479813 - DNA, 25 bp, Homo sapien
gagccgtgggggaagagctgttgaa

SEQ ID NO: 5479814 - DNA, 25 bp, Homo sapien
gtgaagagccgtggatgagccgtgg

SEQ ID NO: 5479815 - DNA, 25 bp, Homo sapien
cgtagatgaagagacttggatgaag

SEQ ID NO: 5479816 - DNA, 25 bp, Homo sapien
ctgaagaggcgtagatgaagagact

SEQ ID NO: 5479817 - DNA, 25 bp, Homo sapien
ggagctcattttgccacatggttaa

SEQ ID NO: 5479818 - DNA, 25 bp, Homo sapien
tcagagaacattcgttgggtataaa

SEQ ID NO: 5479819 - DNA, 25 bp, Homo sapien
taaaggcgaggaaaattcattaagc

SEQ ID NO: 5479820 - DNA, 25 bp, Homo sapien
tgggtataaaacagaaggctacatg

SEQ ID NO: 5479821 - DNA, 25 bp, Homo sapien
agaagactagaaagcctcccctcta

SEQ ID NO: 5479822 - DNA, 25 bp, Homo sapien
gaagactagaaagcctcccctctac

SEQ ID NO: 5479823 - DNA, 25 bp, Homo sapien
cagaagactagaaagcctcccctct

SEQ ID NO: 5479824 - DNA, 25 bp, Homo sapien
gcagctcgtcaagccgaaggctttt

SEQ ID NO: 5479825 - DNA, 25 bp, Homo sapien
tcaggcagtatatcaaggggttcaa

SEQ ID NO: 5479826 - DNA, 25 bp, Homo sapien
cgtcaagccgaaggcttttttcaag

SEQ ID NO: 5479827 - DNA, 25 bp, Homo sapien
ggcgcagctcgtcaagccgaaggct

SEQ ID NO: 5479828 - DNA, 25 bp, Homo sapien
gtcagacacgtaccagatctctagg

SEQ ID NO: 5479829 - DNA, 25 bp, Homo sapien
tgtgcgcatatgacagcatggtggc

SEQ ID NO: 5479830 - DNA, 25 bp, Homo sapien
cagagatgagcttgttggagctccg

SEQ ID NO: 5479831 - DNA, 25 bp, Homo sapien
gggtgatgtgcgcatatgacagcat

SEQ ID NO: 5479832 - DNA, 25 bp, Homo sapien
gcctctgtgcttgggagctgcaggc

SEQ ID NO: 5479833 - DNA, 25 bp, Homo sapien
ctacaaaacatcaaagagcaagagg

SEQ ID NO: 5479834 - DNA, 25 bp, Homo sapien
aagagcaagaggaaagggctgcagg

SEQ ID NO: 5479835 - DNA, 25 bp, Homo sapien
aacatcaaagagcaagaggaaaggg

SEQ ID NO: 5479836 - DNA, 25 bp, Homo sapien
catcaaagagcaagaggaaagggct

SEQ ID NO: 5479837 - DNA, 25 bp, Homo sapien
cacgaatgcctctgatgaggtctct

SEQ ID NO: 5479838 - DNA, 25 bp, Homo sapien
gtctcttcctcccatacataaagac

SEQ ID NO: 5479839 - DNA, 25 bp, Homo sapien
ggtgcacattcccacgaatgcctct

SEQ ID NO: 5479840 - DNA, 25 bp, Homo sapien
tcacaggcagttatactccctcctc

SEQ ID NO: 5479841 - DNA, 25 bp, Homo sapien
taaactctgctgacttgcaggtggc

SEQ ID NO: 5479842 - DNA, 25 bp, Homo sapien
cagagatgctaagctgaggccctca

SEQ ID NO: 5479843 - DNA, 25 bp, Homo sapien
agggagtcacctgagccactgttca

SEQ ID NO: 5479844 - DNA, 25 bp, Homo sapien
tgttcttctaacacgaaacggcgtc

SEQ ID NO: 5479845 - DNA, 25 bp, Homo sapien
cataaggacaaccccgggagctcct

SEQ ID NO: 5479846 - DNA, 25 bp, Homo sapien
tcataaggacaaccccgggagctcc

SEQ ID NO: 5479847 - DNA, 25 bp, Homo sapien
tctagataacttcccagccacttgg

SEQ ID NO: 5479848 - DNA, 25 bp, Homo sapien
tcttctccaccagcaacggatggtg

SEQ ID NO: 5479849 - DNA, 25 bp, Homo sapien
atggcctgtgctcccaaacgctctg

SEQ ID NO: 5479850 - DNA, 25 bp, Homo sapien
tgctttgttggtgccacacagcgga

SEQ ID NO: 5479851 - DNA, 25 bp, Homo sapien
gaaccatggaggactgctggcttgt

SEQ ID NO: 5479852 - DNA, 25 bp, Homo sapien
gctgccttcccacggaccccgtgct

SEQ ID NO: 5479853 - DNA, 25 bp, Homo sapien
cctcgctgcagtgcgggaaccatgg

SEQ ID NO: 5479854 - DNA, 25 bp, Homo sapien
ttccgacaccacaggccgctctgct

SEQ ID NO: 5479855 - DNA, 25 bp, Homo sapien
ggacaaaacctgatcccgttcagag

SEQ ID NO: 5479856 - DNA, 25 bp, Homo sapien
ctgatcccgttcagagatgaacaga

SEQ ID NO: 5479857 - DNA, 25 bp, Homo sapien
ctaaattcaagggatttccacgtgt

SEQ ID NO: 5479858 - DNA, 25 bp, Homo sapien
gaatcatctaggtcgttaagaacag

SEQ ID NO: 5479859 - DNA, 25 bp, Homo sapien
tgtcatcatcatcaaaaagatcttc

SEQ ID NO: 5479860 - DNA, 25 bp, Homo sapien
gatgtcatcatcatcaaaaagatct

SEQ ID NO: 5479861 - DNA, 25 bp, Homo sapien
gtcatcatcatcaaaaagatcttca

SEQ ID NO: 5479862 - DNA, 25 bp, Homo sapien
tggatgtcatcatcatcaaaaagat

SEQ ID NO: 5479863 - DNA, 25 bp, Homo sapien
gcaaaaccacgtagttacacctaca

SEQ ID NO: 5479864 - DNA, 25 bp, Homo sapien
cagggctcgtacatgtagtccaagg

SEQ ID NO: 5479865 - DNA, 25 bp, Homo sapien
ctacaagggtaagggctgaagaaat

SEQ ID NO: 5479866 - DNA, 25 bp, Homo sapien
gagataatcgtcaatgatccaatga

SEQ ID NO: 5479867 - DNA, 25 bp, Homo sapien
cagaggtctctcaaagtaaatggct

SEQ ID NO: 5479868 - DNA, 25 bp, Homo sapien
tcacctgacgggtaggacctgggtc

SEQ ID NO: 5479869 - DNA, 25 bp, Homo sapien
taggagcacttttgcgcagtcctgg

SEQ ID NO: 5479870 - DNA, 25 bp, Homo sapien
caattttgtaagacatggcgaggga

SEQ ID NO: 5479871 - DNA, 25 bp, Homo sapien
gcatgaacggccttttcattggctg

SEQ ID NO: 5479872 - DNA, 25 bp, Homo sapien
gtctgcatgaacggccttttcattg

SEQ ID NO: 5479873 - DNA, 25 bp, Homo sapien
tctgcatgaacggccttttcattgg

SEQ ID NO: 5479874 - DNA, 25 bp, Homo sapien
tgcatgaacggccttttcattggct

SEQ ID NO: 5479875 - DNA, 25 bp, Homo sapien
tcaacattttagttccagacacagg

SEQ ID NO: 5479876 - DNA, 25 bp, Homo sapien
tatgtcaggtgcgttttccgaaaga

SEQ ID NO: 5479877 - DNA, 25 bp, Homo sapien
ttccgaaagaacaggtgataagtgc

SEQ ID NO: 5479878 - DNA, 25 bp, Homo sapien
taagtgcattgcagggccactaccc

SEQ ID NO: 5479879 - DNA, 25 bp, Homo sapien
agaaaccgggatttgctctccgcgg

SEQ ID NO: 5479880 - DNA, 25 bp, Homo sapien
gagcagcaaacgcaactcctctgac

SEQ ID NO: 5479881 - DNA, 25 bp, Homo sapien
ggtgctgcagccatcgaagagcagc

SEQ ID NO: 5479882 - DNA, 25 bp, Homo sapien
gtcggtcgccgcctttcaccaggtg

SEQ ID NO: 5479883 - DNA, 25 bp, Homo sapien
ctcggagactcccgccgggcccgtg

SEQ ID NO: 5479884 - DNA, 25 bp, Homo sapien
tccaggtccacgtagggcccggcgc

SEQ ID NO: 5479885 - DNA, 25 bp, Homo sapien
ctcgtccaggtccacgtagggcccg

SEQ ID NO: 5479886 - DNA, 25 bp, Homo sapien
gcggcgctctaggctcacttccggc

SEQ ID NO: 5479887 - DNA, 25 bp, Homo sapien
gcgctctaggctcacttccggcctc

SEQ ID NO: 5479888 - DNA, 25 bp, Homo sapien
cggcgctctaggctcacttccggcc

SEQ ID NO: 5479889 - DNA, 25 bp, Homo sapien
ggcgctctaggctcacttccggcct

SEQ ID NO: 5479890 - DNA, 25 bp, Homo sapien
aagaagacacactcgcggccagtga

SEQ ID NO: 5479891 - DNA, 25 bp, Homo sapien
gcccagggcttgaccttcagacgtt

SEQ ID NO: 5479892 - DNA, 25 bp, Homo sapien
gaccagaggccggatccagaataaa

SEQ ID NO: 5479893 - DNA, 25 bp, Homo sapien
tctgccgcaaagacggccgggttca

SEQ ID NO: 5479894 - DNA, 25 bp, Homo sapien
catgcctgtggaggcccgaccgagt

SEQ ID NO: 5479895 - DNA, 25 bp, Homo sapien
cttcagtccggagtttattgagcgt

SEQ ID NO: 5479896 - DNA, 25 bp, Homo sapien
gggcgggcaccaggctggacaccat

SEQ ID NO: 5479897 - DNA, 25 bp, Homo sapien
attgagcgtgagaccaggcctgact

SEQ ID NO: 5479898 - DNA, 25 bp, Homo sapien
tgcacatagttccagaagtcagagg

SEQ ID NO: 5479899 - DNA, 25 bp, Homo sapien
tcagtcctcctgatagggaacgtgg

SEQ ID NO: 5479900 - DNA, 25 bp, Homo sapien
atggccggcagctccgcgtaagggt

SEQ ID NO: 5479901 - DNA, 25 bp, Homo sapien
aaagaaggttcgggccatgtcctcg

SEQ ID NO: 5479902 - DNA, 25 bp, Homo sapien
aagacacctgccttgggggctgtcc

SEQ ID NO: 5479903 - DNA, 25 bp, Homo sapien
gacacctgccttgggggctgtcccc

SEQ ID NO: 5479904 - DNA, 25 bp, Homo sapien
cacctgccttgggggctgtccccat

SEQ ID NO: 5479905 - DNA, 25 bp, Homo sapien
ctgaaagacacaagacacctgcctt

SEQ ID NO: 5479906 - DNA, 25 bp, Homo sapien
ccttcctcctgcacaggcttggccc

SEQ ID NO: 5479907 - DNA, 25 bp, Homo sapien
tccttcctcctgcacaggcttggcc

SEQ ID NO: 5479908 - DNA, 25 bp, Homo sapien
ctccttcctcctgcacaggcttggc

SEQ ID NO: 5479909 - DNA, 25 bp, Homo sapien
accagctgcagggctctaaggtttc

SEQ ID NO: 5479910 - DNA, 25 bp, Homo sapien
cagctgcagggctctaaggtttcct

SEQ ID NO: 5479911 - DNA, 25 bp, Homo sapien
ccagctgcagggctctaaggtttcc

SEQ ID NO: 5479912 - DNA, 25 bp, Homo sapien
ggccagccccggcaccatgcaggcc

SEQ ID NO: 5479913 - DNA, 25 bp, Homo sapien
agggccagccccggcaccatgcagg

SEQ ID NO: 5479914 - DNA, 25 bp, Homo sapien
gggccagccccggcaccatgcaggc

SEQ ID NO: 5479915 - DNA, 25 bp, Homo sapien
cggtgcttcctgatctgcgactcag

SEQ ID NO: 5479916 - DNA, 25 bp, Homo sapien
tgcttcctgatctgcgactcaggcc

SEQ ID NO: 5479917 - DNA, 25 bp, Homo sapien
tcccggtgcttcctgatctgcgact

SEQ ID NO: 5479918 - DNA, 25 bp, Homo sapien
ttcccggtgcttcctgatctgcgac

SEQ ID NO: 5479919 - DNA, 25 bp, Homo sapien
caggaagggcgagaccacccatccg

SEQ ID NO: 5479920 - DNA, 25 bp, Homo sapien
tgaacccaggaagggcgagaccacc

SEQ ID NO: 5479921 - DNA, 25 bp, Homo sapien
cacccatccgtcagggccggcttcc

SEQ ID NO: 5479922 - DNA, 25 bp, Homo sapien
agggcgagaccacccatccgtcagg

SEQ ID NO: 5479923 - DNA, 25 bp, Homo sapien
gctgccagctcaagagtcctcttta

SEQ ID NO: 5479924 - DNA, 25 bp, Homo sapien
tgctgccagctcaagagtcctcttt

SEQ ID NO: 5479925 - DNA, 25 bp, Homo sapien
ctgctgccagctcaagagtcctctt

SEQ ID NO: 5479926 - DNA, 25 bp, Homo sapien
tgccagctcaagagtcctctttata

SEQ ID NO: 5479927 - DNA, 25 bp, Homo sapien
gattcggcagcacactttccagtta

SEQ ID NO: 5479928 - DNA, 25 bp, Homo sapien
tcattgtcttttcgcagattcggca

SEQ ID NO: 5479929 - DNA, 25 bp, Homo sapien
gggaatttaagctctgcgctcgtca

SEQ ID NO: 5479930 - DNA, 25 bp, Homo sapien
ccatgggaaatggaaccagtcttcg

SEQ ID NO: 5479931 - DNA, 25 bp, Homo sapien
ggaaacatcaccgagaggccagcca

SEQ ID NO: 5479932 - DNA, 25 bp, Homo sapien
gtggaaacatcaccgagaggccagc

SEQ ID NO: 5479933 - DNA, 25 bp, Homo sapien
ttggtggaaacatcaccgagaggcc

SEQ ID NO: 5479934 - DNA, 25 bp, Homo sapien
tggtggaaacatcaccgagaggcca

SEQ ID NO: 5479935 - DNA, 25 bp, Homo sapien
ggtcagcgctgttcttatcgtctgc

SEQ ID NO: 5479936 - DNA, 25 bp, Homo sapien
cgctgttcttatcgtctgcatctcc

SEQ ID NO: 5479937 - DNA, 25 bp, Homo sapien
tgtgccacacccctccatagactgt

SEQ ID NO: 5479938 - DNA, 25 bp, Homo sapien
gcagggtcagcgctgttcttatcgt

SEQ ID NO: 5479939 - DNA, 25 bp, Homo sapien
tctgggtcctcgaccatggggccag

SEQ ID NO: 5479940 - DNA, 25 bp, Homo sapien
cgattctaaatttgctcacactctg

SEQ ID NO: 5479941 - DNA, 25 bp, Homo sapien
caggggtactcgattctaaatttgc

SEQ ID NO: 5479942 - DNA, 25 bp, Homo sapien
acactctgggtcctcgaccatgggg

SEQ ID NO: 5479943 - DNA, 25 bp, Homo sapien
cctcgcagctctaagcggtgaatct

SEQ ID NO: 5479944 - DNA, 25 bp, Homo sapien
ggttacttccaggacctcgcagctc

SEQ ID NO: 5479945 - DNA, 25 bp, Homo sapien
tgcattcggcgaatttctgcgcgtg

SEQ ID NO: 5479946 - DNA, 25 bp, Homo sapien
ttctgcgcgtgcgtgcccaggttac

SEQ ID NO: 5479947 - DNA, 25 bp, Homo sapien
gtaccacatcctgatgcatctgaat

SEQ ID NO: 5479948 - DNA, 25 bp, Homo sapien
gaatgtggggtacacgtcacacaca

SEQ ID NO: 5479949 - DNA, 25 bp, Homo sapien
ctgaatgtggggtacacgtcacaca

SEQ ID NO: 5479950 - DNA, 25 bp, Homo sapien
tgtggggtacacgtcacacacagcc

SEQ ID NO: 5479951 - DNA, 25 bp, Homo sapien
catctcgtggtcctgtgcaacctca

SEQ ID NO: 5479952 - DNA, 25 bp, Homo sapien
tgtgcggtctcatggccctgtgcag

SEQ ID NO: 5479953 - DNA, 25 bp, Homo sapien
tgctgcaccgccttgtggtcctgtg

SEQ ID NO: 5479954 - DNA, 25 bp, Homo sapien
tgtggtcctgtgcagcctcgtggtc

SEQ ID NO: 5479955 - DNA, 25 bp, Homo sapien
tggtgtggtgtgacgtcatccctgt

SEQ ID NO: 5479956 - DNA, 25 bp, Homo sapien
gtggtgtgacgtcatccctgtgtga

SEQ ID NO: 5479957 - DNA, 25 bp, Homo sapien
cgtcatccctgcatgagagaggagg

SEQ ID NO: 5479958 - DNA, 25 bp, Homo sapien
ccatggtgtgacgtcatccctgcat

SEQ ID NO: 5479959 - DNA, 25 bp, Homo sapien
tcaaacactgagtccagtcgggggg

SEQ ID NO: 5479960 - DNA, 25 bp, Homo sapien
cagtcaaacactgagtccagtcggg

SEQ ID NO: 5479961 - DNA, 25 bp, Homo sapien
cgtgatgtgtcacagacagtcaaac

SEQ ID NO: 5479962 - DNA, 25 bp, Homo sapien
gtcaaacactgagtccagtcggggg

SEQ ID NO: 5479963 - DNA, 25 bp, Homo sapien
cagggtgaaattgctctcatggctc

SEQ ID NO: 5479964 - DNA, 25 bp, Homo sapien
tctccgaagcttccgcaagccttga

SEQ ID NO: 5479965 - DNA, 25 bp, Homo sapien
gccttgacaaatgccgccagggtga

SEQ ID NO: 5479966 - DNA, 25 bp, Homo sapien
tctggtccggcacagggatgaagcc

SEQ ID NO: 5479967 - DNA, 25 bp, Homo sapien
ctcaacgccccataaaagtgcacag

SEQ ID NO: 5479968 - DNA, 25 bp, Homo sapien
agagctagctccctcaacgccccat

SEQ ID NO: 5479969 - DNA, 25 bp, Homo sapien
cacagtacagatgggcttgtctgcc

SEQ ID NO: 5479970 - DNA, 25 bp, Homo sapien
tgggaatgtgggcagctcgggtgtg

SEQ ID NO: 5479971 - DNA, 25 bp, Homo sapien
tcatcccctcattcagccgacactt

SEQ ID NO: 5479972 - DNA, 25 bp, Homo sapien
tcattcagccgacacttgctgagca

SEQ ID NO: 5479973 - DNA, 25 bp, Homo sapien
tggagcagtggttccggtccatgct

SEQ ID NO: 5479974 - DNA, 25 bp, Homo sapien
ctggagcagtggttccggtccatgc

SEQ ID NO: 5479975 - DNA, 25 bp, Homo sapien
catcagcgtgtcaagcgtgggtgcc

SEQ ID NO: 5479976 - DNA, 25 bp, Homo sapien
aagacagacatcagcgtgtcaagcg

SEQ ID NO: 5479977 - DNA, 25 bp, Homo sapien
gcagggacaagacagcagcttcagg

SEQ ID NO: 5479978 - DNA, 25 bp, Homo sapien
gcagcagggacaagacagcagcttc

SEQ ID NO: 5479979 - DNA, 25 bp, Homo sapien
catccctgtatgtatcactcatgac

SEQ ID NO: 5479980 - DNA, 25 bp, Homo sapien
atccctgtatgtatcactcatgaca

SEQ ID NO: 5479981 - DNA, 25 bp, Homo sapien
tccctgtatgtatcactcatgacag

SEQ ID NO: 5479982 - DNA, 25 bp, Homo sapien
ccctgtatgtatcactcatgacagc

SEQ ID NO: 5479983 - DNA, 25 bp, Homo sapien
gttggaggagcctgtgcggaagccc

SEQ ID NO: 5479984 - DNA, 25 bp, Homo sapien
aagggagagcccacaaggttggagg

SEQ ID NO: 5479985 - DNA, 25 bp, Homo sapien
taccttgcaacagtgatcagccact

SEQ ID NO: 5479986 - DNA, 25 bp, Homo sapien
tttgctgacgtcttcagctgtctgg

SEQ ID NO: 5479987 - DNA, 25 bp, Homo sapien
gggccagctcgtgtgaaccaaggcc

SEQ ID NO: 5479988 - DNA, 25 bp, Homo sapien
tccaggggccagctcgtgtgaacca

SEQ ID NO: 5479989 - DNA, 25 bp, Homo sapien
cagctcgtgtgaaccaaggcccagg

SEQ ID NO: 5479990 - DNA, 25 bp, Homo sapien
gccagctcgtgtgaaccaaggccca

SEQ ID NO: 5479991 - DNA, 25 bp, Homo sapien
ctcatcgtccgccgggtcagtgcgg

SEQ ID NO: 5479992 - DNA, 25 bp, Homo sapien
cgccgggtcagtgcggggcttcacc

SEQ ID NO: 5479993 - DNA, 25 bp, Homo sapien
aaggccttgcttccagcccgtgctc

SEQ ID NO: 5479994 - DNA, 25 bp, Homo sapien
tccaccctgctcatcgtccgccggg

SEQ ID NO: 5479995 - DNA, 25 bp, Homo sapien
tggttttgggcgtctgagaacagag

SEQ ID NO: 5479996 - DNA, 25 bp, Homo sapien
agcccagctccggagatgaccaaga

SEQ ID NO: 5479997 - DNA, 25 bp, Homo sapien
tggtccctccatctctcgggctgct

SEQ ID NO: 5479998 - DNA, 25 bp, Homo sapien
cacaccattggccatgcccttttcc

SEQ ID NO: 5479999 - DNA, 25 bp, Homo sapien
tgctggggattctttcaggaattgt

SEQ ID NO: 5480000 - DNA, 25 bp, Homo sapien
ctgctggggattctttcaggaattg

SEQ ID NO: 5480001 - DNA, 25 bp, Homo sapien
gctggggattctttcaggaattgtt

SEQ ID NO: 5480002 - DNA, 25 bp, Homo sapien
cttcccctccatagcacttctcaca

SEQ ID NO: 5480003 - DNA, 25 bp, Homo sapien
caggtgtgtcttcccctccatagca

SEQ ID NO: 5480004 - DNA, 25 bp, Homo sapien
ctgtcctcacaggtgtgtcttcccc

SEQ ID NO: 5480005 - DNA, 25 bp, Homo sapien
ttcccctccatagcacttctcacag

SEQ ID NO: 5480006 - DNA, 25 bp, Homo sapien
cttctttcctgactcaggaccaggc

SEQ ID NO: 5480007 - DNA, 25 bp, Homo sapien
tttcctgactcaggaccaggcaaag

SEQ ID NO: 5480008 - DNA, 25 bp, Homo sapien
tcctgactcaggaccaggcaaagcc

SEQ ID NO: 5480009 - DNA, 25 bp, Homo sapien
tctttcctgactcaggaccaggcaa

SEQ ID NO: 5480010 - DNA, 25 bp, Homo sapien
gttgttcagggatctcgccccagaa

SEQ ID NO: 5480011 - DNA, 25 bp, Homo sapien
agaagttgttcagggatctcgcccc

SEQ ID NO: 5480012 - DNA, 25 bp, Homo sapien
gttcagggatctcgccccagaacaa

SEQ ID NO: 5480013 - DNA, 25 bp, Homo sapien
aagttgttcagggatctcgccccag

SEQ ID NO: 5480014 - DNA, 25 bp, Homo sapien
gcccaggggagacggtcagcaccct

SEQ ID NO: 5480015 - DNA, 25 bp, Homo sapien
agcaccctcttagccgcacaggagg

SEQ ID NO: 5480016 - DNA, 25 bp, Homo sapien
gtggacaaggctggcttggtcacca

SEQ ID NO: 5480017 - DNA, 25 bp, Homo sapien
tagggagaacgctccaaccttactc

SEQ ID NO: 5480018 - DNA, 25 bp, Homo sapien
ctgccatgcacggaggtgctgtctg

SEQ ID NO: 5480019 - DNA, 25 bp, Homo sapien
tcctcatcagcattccagccatgct

SEQ ID NO: 5480020 - DNA, 25 bp, Homo sapien
tgcctctcattagcattcagtgagt

SEQ ID NO: 5480021 - DNA, 25 bp, Homo sapien
gctgtctgcctctcattagcattca

SEQ ID NO: 5480022 - DNA, 25 bp, Homo sapien
cagccgcagctggctcccatctgca

SEQ ID NO: 5480023 - DNA, 25 bp, Homo sapien
aatgtagctgaaagattgacttgag

SEQ ID NO: 5480024 - DNA, 25 bp, Homo sapien
cagctgcctggaagactcggactga

SEQ ID NO: 5480025 - DNA, 25 bp, Homo sapien
taggagccctattcggcctttatta

SEQ ID NO: 5480026 - DNA, 25 bp, Homo sapien
gaagcagcttggataggagccctat

SEQ ID NO: 5480027 - DNA, 25 bp, Homo sapien
cctcagagagctgcatggtccctgt

SEQ ID NO: 5480028 - DNA, 25 bp, Homo sapien
cactgcaactgccagcctcagagag

SEQ ID NO: 5480029 - DNA, 25 bp, Homo sapien
tcacagagatgagcaacctctccac

SEQ ID NO: 5480030 - DNA, 25 bp, Homo sapien
tgagcaacctctccacagtcagaca

SEQ ID NO: 5480031 - DNA, 25 bp, Homo sapien
tctaggcagtggctgcctgcctttc

SEQ ID NO: 5480032 - DNA, 25 bp, Homo sapien
tggctgcctgcctttctgtagtcca

SEQ ID NO: 5480033 - DNA, 25 bp, Homo sapien
gcagtggctgcctgcctttctgtag

SEQ ID NO: 5480034 - DNA, 25 bp, Homo sapien
cttctctaggcagtggctgcctgcc

SEQ ID NO: 5480035 - DNA, 25 bp, Homo sapien
tggccagctgcagagcactgcaaga

SEQ ID NO: 5480036 - DNA, 25 bp, Homo sapien
tcctggccagctgcagagcactgca

SEQ ID NO: 5480037 - DNA, 25 bp, Homo sapien
ctgtgcgtcctggccagctgcagag

SEQ ID NO: 5480038 - DNA, 25 bp, Homo sapien
ggccagctgcagagcactgcaagac

SEQ ID NO: 5480039 - DNA, 25 bp, Homo sapien
tgagcacatacatatctagtagtaa

SEQ ID NO: 5480040 - DNA, 25 bp, Homo sapien
tcctactcggtctaaagtggcatct

SEQ ID NO: 5480041 - DNA, 25 bp, Homo sapien
tgtttcagtttctcttgagcacata

SEQ ID NO: 5480042 - DNA, 25 bp, Homo sapien
cattgtaagataccacatgtaatct

SEQ ID NO: 5480043 - DNA, 25 bp, Homo sapien
ccagttcactggatgcgccgtggga

SEQ ID NO: 5480044 - DNA, 25 bp, Homo sapien
tagcagctacctgtgtggtcactca

SEQ ID NO: 5480045 - DNA, 25 bp, Homo sapien
taacgacactcggatgaatcactgg

SEQ ID NO: 5480046 - DNA, 25 bp, Homo sapien
catgtacagggaatgctgaccgcgg

SEQ ID NO: 5480047 - DNA, 25 bp, Homo sapien
ttctccatgggagcgcttgctggcc

SEQ ID NO: 5480048 - DNA, 25 bp, Homo sapien
tagtttttctccatgggagcgcttg

SEQ ID NO: 5480049 - DNA, 25 bp, Homo sapien
ttttctccatgggagcgcttgctgg

SEQ ID NO: 5480050 - DNA, 25 bp, Homo sapien
tccatgggagcgcttgctggccatg

SEQ ID NO: 5480051 - DNA, 25 bp, Homo sapien
aacacataaatgcactaagtgccac

SEQ ID NO: 5480052 - DNA, 25 bp, Homo sapien
gtgccactagttagacacttcaaaa

SEQ ID NO: 5480053 - DNA, 25 bp, Homo sapien
ctaattgaattacctaagcacctgg

SEQ ID NO: 5480054 - DNA, 25 bp, Homo sapien
cacatctggactttctattgcagtc

SEQ ID NO: 5480055 - DNA, 25 bp, Homo sapien
catccttgttccaggagaatgaagc

SEQ ID NO: 5480056 - DNA, 25 bp, Homo sapien
ggagagtacagcatcccgtggatca

SEQ ID NO: 5480057 - DNA, 25 bp, Homo sapien
caccacccttgttccaggagagtac

SEQ ID NO: 5480058 - DNA, 25 bp, Homo sapien
aagagtgcagcatcccatgaaccag

SEQ ID NO: 5480059 - DNA, 25 bp, Homo sapien
cctgaagcggttgtttttggcagtt

SEQ ID NO: 5480060 - DNA, 25 bp, Homo sapien
gttggaagacggctccagccatttt

SEQ ID NO: 5480061 - DNA, 25 bp, Homo sapien
cagtttggtgcatggggaccctcgc

SEQ ID NO: 5480062 - DNA, 25 bp, Homo sapien
ctcttgcctgaagcggttgtttttg

SEQ ID NO: 5480063 - DNA, 25 bp, Homo sapien
caagctgctcttggtcggggagggt

SEQ ID NO: 5480064 - DNA, 25 bp, Homo sapien
agctgctcttggtcggggagggtca

SEQ ID NO: 5480065 - DNA, 25 bp, Homo sapien
gtcaagctgctcttggtcggggagg

SEQ ID NO: 5480066 - DNA, 25 bp, Homo sapien
ctgtcaagctgctcttggtcgggga

SEQ ID NO: 5480067 - DNA, 25 bp, Homo sapien
gacaggcgctgaatcatcaaagcga

SEQ ID NO: 5480068 - DNA, 25 bp, Homo sapien
aggacaggcgctgaatcatcaaagc

SEQ ID NO: 5480069 - DNA, 25 bp, Homo sapien
ggcgctgaatcatcaaagcgatggg

SEQ ID NO: 5480070 - DNA, 25 bp, Homo sapien
ctaggacaggcgctgaatcatcaaa

SEQ ID NO: 5480071 - DNA, 25 bp, Homo sapien
ctcacaaaggggccggcactgataa

SEQ ID NO: 5480072 - DNA, 25 bp, Homo sapien
gggcttcaaggtcctgaattgccag

SEQ ID NO: 5480073 - DNA, 25 bp, Homo sapien
catggaggacatggggaaccagcat

SEQ ID NO: 5480074 - DNA, 25 bp, Homo sapien
caaaggggccggcactgataagcac

SEQ ID NO: 5480075 - DNA, 25 bp, Homo sapien
cgccctcgaggaagtgccctgtgga

SEQ ID NO: 5480076 - DNA, 25 bp, Homo sapien
atccatccacgtggtctgggacctg

SEQ ID NO: 5480077 - DNA, 25 bp, Homo sapien
gggccttgttgcacagagtaactcg

SEQ ID NO: 5480078 - DNA, 25 bp, Homo sapien
ctgacatccatccacgtggtctggg

SEQ ID NO: 5480079 - DNA, 25 bp, Homo sapien
ctgagggtctcaggaacgcacaggc

SEQ ID NO: 5480080 - DNA, 25 bp, Homo sapien
gggtctcaggaacgcacaggctgct

SEQ ID NO: 5480081 - DNA, 25 bp, Homo sapien
cacgaagcaagtctgggctcctctg

SEQ ID NO: 5480082 - DNA, 25 bp, Homo sapien
ctgcagcacgaagcaagtctgggct

SEQ ID NO: 5480083 - DNA, 25 bp, Homo sapien
gttatagctggatctccccggccag

SEQ ID NO: 5480084 - DNA, 25 bp, Homo sapien
cagtcatttgagttcccaaacccca

SEQ ID NO: 5480085 - DNA, 25 bp, Homo sapien
aaggtcacagcggacgcagaccaca

SEQ ID NO: 5480086 - DNA, 25 bp, Homo sapien
caaagagctggacgcccagcatgtc

SEQ ID NO: 5480087 - DNA, 25 bp, Homo sapien
ttcacaggttccaggcggatgtgtc

SEQ ID NO: 5480088 - DNA, 25 bp, Homo sapien
caggcggatgtgtctttttagtgtt

SEQ ID NO: 5480089 - DNA, 25 bp, Homo sapien
ggaggtggcacgtttcacccagtgc

SEQ ID NO: 5480090 - DNA, 25 bp, Homo sapien
acagccccgttcacaggttccaggt

SEQ ID NO: 5480091 - DNA, 25 bp, Homo sapien
gcaaagacggtcctcgctggcccct

SEQ ID NO: 5480092 - DNA, 25 bp, Homo sapien
ggcaaagacggtcctcgctggcccc

SEQ ID NO: 5480093 - DNA, 25 bp, Homo sapien
tgggcaaagacggtcctcgctggcc

SEQ ID NO: 5480094 - DNA, 25 bp, Homo sapien
gggcaaagacggtcctcgctggccc

SEQ ID NO: 5480095 - DNA, 25 bp, Homo sapien
taaaagtgcctcatcagggtaaggg

SEQ ID NO: 5480096 - DNA, 25 bp, Homo sapien
cctccctagggaaagctcagtaaat

SEQ ID NO: 5480097 - DNA, 25 bp, Homo sapien
catagagcctgttcaagtgtgcaca

SEQ ID NO: 5480098 - DNA, 25 bp, Homo sapien
taaattccccgaagatgctgagctt

SEQ ID NO: 5480099 - DNA, 25 bp, Homo sapien
aaaccagccctgggcggtgctgcca

SEQ ID NO: 5480100 - DNA, 25 bp, Homo sapien
ctgtccgaggtgagcccacaacttt

SEQ ID NO: 5480101 - DNA, 25 bp, Homo sapien
cgaggtgagcccacaactttgaggc

SEQ ID NO: 5480102 - DNA, 25 bp, Homo sapien
gagcccacaactttgaggcgcagcc

SEQ ID NO: 5480103 - DNA, 25 bp, Homo sapien
aggaaaccctgtgcccacagagcgg

SEQ ID NO: 5480104 - DNA, 25 bp, Homo sapien
aaaccctgtgcccacagagcgggag

SEQ ID NO: 5480105 - DNA, 25 bp, Homo sapien
ggcaggaaaccctgtgcccacagag

SEQ ID NO: 5480106 - DNA, 25 bp, Homo sapien
aaccctgtgcccacagagcgggagg

SEQ ID NO: 5480107 - DNA, 25 bp, Homo sapien
tatgaatccgactcctctagggacc

SEQ ID NO: 5480108 - DNA, 25 bp, Homo sapien
tcaagagttcagttttcagtggcgt

SEQ ID NO: 5480109 - DNA, 25 bp, Homo sapien
ttcatgctgttgtgcggccgtcacc

SEQ ID NO: 5480110 - DNA, 25 bp, Homo sapien
tccacgccggagcatgtgtcagaat

SEQ ID NO: 5480111 - DNA, 25 bp, Homo sapien
tcagctatgtcagcgggacctacag

SEQ ID NO: 5480112 - DNA, 25 bp, Homo sapien
tctgaaattcagatgtaactggccc

SEQ ID NO: 5480113 - DNA, 25 bp, Homo sapien
agatgaaatgactcggcttaacccc

SEQ ID NO: 5480114 - DNA, 25 bp, Homo sapien
tctattcgactgtggagagacatcg

SEQ ID NO: 5480115 - DNA, 25 bp, Homo sapien
tccagtgccaacactgggcagattc

SEQ ID NO: 5480116 - DNA, 25 bp, Homo sapien
cattcaggggcgtgccccgtcgagc

SEQ ID NO: 5480117 - DNA, 25 bp, Homo sapien
gggtcgtgttcgctccagtgccaac

SEQ ID NO: 5480118 - DNA, 25 bp, Homo sapien
cgtcgagccccgtgcttcctctggg

SEQ ID NO: 5480119 - DNA, 25 bp, Homo sapien
ctttattcagtaccagggtaccagg

SEQ ID NO: 5480120 - DNA, 25 bp, Homo sapien
gcctttattcagtaccagggtacca

SEQ ID NO: 5480121 - DNA, 25 bp, Homo sapien
gaaggagcatggcttgttgggactg

SEQ ID NO: 5480122 - DNA, 25 bp, Homo sapien
tcatttagacgtgtgcctttattca

SEQ ID NO: 5480123 - DNA, 25 bp, Homo sapien
agggtttgctctgggatccggccca

SEQ ID NO: 5480124 - DNA, 25 bp, Homo sapien
ttccccagtgtttatgagccatccc

SEQ ID NO: 5480125 - DNA, 25 bp, Homo sapien
tctctgcctggttggcattcacggg

SEQ ID NO: 5480126 - DNA, 25 bp, Homo sapien
cctccagaggcacccaagggtttgc

SEQ ID NO: 5480127 - DNA, 25 bp, Homo sapien
catcctgggttcgaagagtgggctc

SEQ ID NO: 5480128 - DNA, 25 bp, Homo sapien
tctgggcagcttagagagcagtctt

SEQ ID NO: 5480129 - DNA, 25 bp, Homo sapien
cttcttggcccgagctgtgactagg

SEQ ID NO: 5480130 - DNA, 25 bp, Homo sapien
tgtgactaggctcccatctgatgga

SEQ ID NO: 5480131 - DNA, 25 bp, Homo sapien
catgtgtccggctgacctgtgctct

SEQ ID NO: 5480132 - DNA, 25 bp, Homo sapien
atcacagcccacaccctcggagaga

SEQ ID NO: 5480133 - DNA, 25 bp, Homo sapien
acagcccacaccctcggagagacgc

SEQ ID NO: 5480134 - DNA, 25 bp, Homo sapien
catcatgtgtccggctgacctgtgc

SEQ ID NO: 5480135 - DNA, 25 bp, Homo sapien
acctgctgaacgactcggagcggac

SEQ ID NO: 5480136 - DNA, 25 bp, Homo sapien
gccttcggagagctgtacacgcaga

SEQ ID NO: 5480137 - DNA, 25 bp, Homo sapien
tccgggacctgtactcagagctgcg

SEQ ID NO: 5480138 - DNA, 25 bp, Homo sapien
tgatgactacctggactgcctgggc

SEQ ID NO: 5480139 - DNA, 25 bp, Homo sapien
ctgaggaggccgcttagtgctgctt

SEQ ID NO: 5480140 - DNA, 25 bp, Homo sapien
tgctttgcttttcatcaccgtcccg

SEQ ID NO: 5480141 - DNA, 25 bp, Homo sapien
gtcctgaaccgactgaccctgagga

SEQ ID NO: 5480142 - DNA, 25 bp, Homo sapien
gcagccctgagtggtcactggtcag

SEQ ID NO: 5480143 - DNA, 25 bp, Homo sapien
ccagaggctaagtggcacggcggca

SEQ ID NO: 5480144 - DNA, 25 bp, Homo sapien
taggggctccctatagccccgctcc

SEQ ID NO: 5480145 - DNA, 25 bp, Homo sapien
tcatggccagaggctaagtggcacg

SEQ ID NO: 5480146 - DNA, 25 bp, Homo sapien
ggctaagtggcacggcggcactggc

SEQ ID NO: 5480147 - DNA, 25 bp, Homo sapien
tattgagaattgcagccagtacagg

SEQ ID NO: 5480148 - DNA, 25 bp, Homo sapien
tccaggccccttgtgagcgtgagag

SEQ ID NO: 5480149 - DNA, 25 bp, Homo sapien
atctgggacccaggaatagagggcc

SEQ ID NO: 5480150 - DNA, 25 bp, Homo sapien
gaactccactgcttagtaggtccca

SEQ ID NO: 5480151 - DNA, 25 bp, Homo sapien
tgtggacaacgcatttggtccagcc

SEQ ID NO: 5480152 - DNA, 25 bp, Homo sapien
cagacactcatcagcggctgtagtt

SEQ ID NO: 5480153 - DNA, 25 bp, Homo sapien
ggtggggtggagtcctctccgtggc

SEQ ID NO: 5480154 - DNA, 25 bp, Homo sapien
tggggtggagtcctctccgtggcgg

SEQ ID NO: 5480155 - DNA, 25 bp, Homo sapien
gacaaggccctctgtcgagaaacac

SEQ ID NO: 5480156 - DNA, 25 bp, Homo sapien
ccatcaaagaagtgggtagagtcta

SEQ ID NO: 5480157 - DNA, 25 bp, Homo sapien
tgggcgtccatctctccaacagaca

SEQ ID NO: 5480158 - DNA, 25 bp, Homo sapien
tcatggaaggaccataactgggcgt

SEQ ID NO: 5480159 - DNA, 25 bp, Homo sapien
ctgaggtcacaggagagctaaaaac

SEQ ID NO: 5480160 - DNA, 25 bp, Homo sapien
taatacctatctgaggtcacaggag

SEQ ID NO: 5480161 - DNA, 25 bp, Homo sapien
acaggagagctaaaaacctcatgtg

SEQ ID NO: 5480162 - DNA, 25 bp, Homo sapien
cctatctgaggtcacaggagagcta

SEQ ID NO: 5480163 - DNA, 25 bp, Homo sapien
cacaaaagtgccttcgtgggagcct

SEQ ID NO: 5480164 - DNA, 25 bp, Homo sapien
ggttccactgcagatcccgaaatag

SEQ ID NO: 5480165 - DNA, 25 bp, Homo sapien
cactcgtctgagttaggccacaaaa

SEQ ID NO: 5480166 - DNA, 25 bp, Homo sapien
gaaatagccctgtaagtcagctcca

SEQ ID NO: 5480167 - DNA, 25 bp, Homo sapien
ttttctctgcaatctcacctgtatc

SEQ ID NO: 5480168 - DNA, 25 bp, Homo sapien
tgctgggtcaagtgacagctctgtt

SEQ ID NO: 5480169 - DNA, 25 bp, Homo sapien
cttgatctaatctaccactgatgga

SEQ ID NO: 5480170 - DNA, 25 bp, Homo sapien
gtgaatacaactacaatgaacatat

SEQ ID NO: 5480171 - DNA, 25 bp, Homo sapien
caggcacgggctccacaaaagctct

SEQ ID NO: 5480172 - DNA, 25 bp, Homo sapien
tgcctcgtccatcaggatggcccag

SEQ ID NO: 5480173 - DNA, 25 bp, Homo sapien
agaggcaggcacgggctccacaaaa

SEQ ID NO: 5480174 - DNA, 25 bp, Homo sapien
caagcaagatcaaagccaggggcag

SEQ ID NO: 5480175 - DNA, 25 bp, Homo sapien
gaccccaaaggtgcagaaatgcctg

SEQ ID NO: 5480176 - DNA, 25 bp, Homo sapien
gggccaatttattgcgaggtcgcaa

SEQ ID NO: 5480177 - DNA, 25 bp, Homo sapien
gaggtcgcaagggagacactgctac

SEQ ID NO: 5480178 - DNA, 25 bp, Homo sapien
gcattaggctggaagattccctgag

SEQ ID NO: 5480179 - DNA, 25 bp, Homo sapien
aagcctcggacgtgcagctgctgct

SEQ ID NO: 5480180 - DNA, 25 bp, Homo sapien
tctcctcctggaaacttgctccagt

SEQ ID NO: 5480181 - DNA, 25 bp, Homo sapien
ctctcctcctggaaacttgctccag

SEQ ID NO: 5480182 - DNA, 25 bp, Homo sapien
tgcaggtcaggatcccgtagcagcg

SEQ ID NO: 5480183 - DNA, 25 bp, Homo sapien
tccccgcagtccttcttgtggaact

SEQ ID NO: 5480184 - DNA, 25 bp, Homo sapien
ttgtggaactcggtccaggccttgg

SEQ ID NO: 5480185 - DNA, 25 bp, Homo sapien
gagcggccacactggtagcagaact

SEQ ID NO: 5480186 - DNA, 25 bp, Homo sapien
cccttcttcttcatcctgtggctgg

SEQ ID NO: 5480187 - DNA, 25 bp, Homo sapien
tgcccctgctccttcacatccaggc

SEQ ID NO: 5480188 - DNA, 25 bp, Homo sapien
ccttcttcttcatcctgtggctggg

SEQ ID NO: 5480189 - DNA, 25 bp, Homo sapien
tccttcacatccaggcccctgggca

SEQ ID NO: 5480190 - DNA, 25 bp, Homo sapien
cagcacatagatggatcttgtgttt

SEQ ID NO: 5480191 - DNA, 25 bp, Homo sapien
ctcctgtaaacagcacatagatgga

SEQ ID NO: 5480192 - DNA, 25 bp, Homo sapien
gttattaatgatatcctgtagttgg

SEQ ID NO: 5480193 - DNA, 25 bp, Homo sapien
taatgttattaatgatatcctgtag

SEQ ID NO: 5480194 - DNA, 25 bp, Homo sapien
tggagtcatttcttaccacaacaga

SEQ ID NO: 5480195 - DNA, 25 bp, Homo sapien
taacagtttatctaactctgagcac

SEQ ID NO: 5480196 - DNA, 25 bp, Homo sapien
caagttaacttgctggatataagat

SEQ ID NO: 5480197 - DNA, 25 bp, Homo sapien
tcttgtaagggaaggctataacaac

SEQ ID NO: 5480198 - DNA, 25 bp, Homo sapien
tataagtatacctagttactcctgc

SEQ ID NO: 5480199 - DNA, 25 bp, Homo sapien
tttaatccacttagctattctagct

SEQ ID NO: 5480200 - DNA, 25 bp, Homo sapien
cttgatatgtaaggctttgttcccg

SEQ ID NO: 5480201 - DNA, 25 bp, Homo sapien
tactttggcattgtgctttggtgga

SEQ ID NO: 5480202 - DNA, 25 bp, Homo sapien
acttcctagcccctactgtgggagc

SEQ ID NO: 5480203 - DNA, 25 bp, Homo sapien
gatcacagcagtgctcacttcccag

SEQ ID NO: 5480204 - DNA, 25 bp, Homo sapien
gagatggtagtatccacactgaggc

SEQ ID NO: 5480205 - DNA, 25 bp, Homo sapien
gcctggaccagtggtggaaaatgca

SEQ ID NO: 5480206 - DNA, 25 bp, Homo sapien
tgtgactgtctgtacactgctctgg

SEQ ID NO: 5480207 - DNA, 25 bp, Homo sapien
tattgggaattcactcctgatgccc

SEQ ID NO: 5480208 - DNA, 25 bp, Homo sapien
gagaaaaactcacagaccctgtagg

SEQ ID NO: 5480209 - DNA, 25 bp, Homo sapien
gatgctaccggtctctacgtcttgg

SEQ ID NO: 5480210 - DNA, 25 bp, Homo sapien
aggaagtagcctcagcaaaggtgca

SEQ ID NO: 5480211 - DNA, 25 bp, Homo sapien
tgagacttgttatgaccacaggaag

SEQ ID NO: 5480212 - DNA, 25 bp, Homo sapien
tagacatgggtcttcgcaacttgcc

SEQ ID NO: 5480213 - DNA, 25 bp, Homo sapien
gattagaaccccagtatcctcaggg

SEQ ID NO: 5480214 - DNA, 25 bp, Homo sapien
tgccgtagctgcaagcccatgtact

SEQ ID NO: 5480215 - DNA, 25 bp, Homo sapien
gccaggaacgtctcgcgctctgctg

SEQ ID NO: 5480216 - DNA, 25 bp, Homo sapien
cgctctgctggcatcagcgtgtgga

SEQ ID NO: 5480217 - DNA, 25 bp, Homo sapien
atgtactccaggagccgcttccgcg

SEQ ID NO: 5480218 - DNA, 25 bp, Homo sapien
ctggaagaatctgaagtagccatag

SEQ ID NO: 5480219 - DNA, 25 bp, Homo sapien
tctccctgcctgagcattacaggct

SEQ ID NO: 5480220 - DNA, 25 bp, Homo sapien
tagccatagtccacggctgtgccca

SEQ ID NO: 5480221 - DNA, 25 bp, Homo sapien
aggcttcaggatgtcggccccgtga

SEQ ID NO: 5480222 - DNA, 25 bp, Homo sapien
tgcccaagcctttggtcaggggcag

SEQ ID NO: 5480223 - DNA, 25 bp, Homo sapien
gttcctctggtgctcgtaggtcagg

SEQ ID NO: 5480224 - DNA, 25 bp, Homo sapien
tctggtgctcgtaggtcaggtcaca

SEQ ID NO: 5480225 - DNA, 25 bp, Homo sapien
tgtccatgttcctctggtgctcgta

SEQ ID NO: 5480226 - DNA, 25 bp, Homo sapien
tgggccactccagaactaacccctg

SEQ ID NO: 5480227 - DNA, 25 bp, Homo sapien
gtggccaccatgtcacttcccctga

SEQ ID NO: 5480228 - DNA, 25 bp, Homo sapien
acagacagtctcatcagtggccacc

SEQ ID NO: 5480229 - DNA, 25 bp, Homo sapien
cacttcccctgacagaggggaaggc

SEQ ID NO: 5480230 - DNA, 25 bp, Homo sapien
ttcatgccaccctgctaaagtagcc

SEQ ID NO: 5480231 - DNA, 25 bp, Homo sapien
tacatactagtttatggcctggctc

SEQ ID NO: 5480232 - DNA, 25 bp, Homo sapien
ggcctggctcctccaacgagaatat

SEQ ID NO: 5480233 - DNA, 25 bp, Homo sapien
tgccaggtacgtagcagatgctcag

SEQ ID NO: 5480234 - DNA, 25 bp, Homo sapien
gaaggagccggactatgtccctggc

SEQ ID NO: 5480235 - DNA, 25 bp, Homo sapien
cccactggcaatggacagggagagc

SEQ ID NO: 5480236 - DNA, 25 bp, Homo sapien
tggccactccacagcaggttaggat

SEQ ID NO: 5480237 - DNA, 25 bp, Homo sapien
tttgctccgtgggatagaaggagcc

SEQ ID NO: 5480238 - DNA, 25 bp, Homo sapien
ctgtgtccgtgctgtagtaggcttg

SEQ ID NO: 5480239 - DNA, 25 bp, Homo sapien
gtcatcctcccgctcgcaggccatg

SEQ ID NO: 5480240 - DNA, 25 bp, Homo sapien
tcccgctcgcaggccatgtgcagag

SEQ ID NO: 5480241 - DNA, 25 bp, Homo sapien
cctccgggagggctgtgtccgtgct

SEQ ID NO: 5480242 - DNA, 25 bp, Homo sapien
tgtaaaacggagggctccgccagcg

SEQ ID NO: 5480243 - DNA, 25 bp, Homo sapien
taaaacggagggctccgccagcgcc

SEQ ID NO: 5480244 - DNA, 25 bp, Homo sapien
ctgtgtaaaacggagggctccgcca

SEQ ID NO: 5480245 - DNA, 25 bp, Homo sapien
tgtgtaaaacggagggctccgccag

SEQ ID NO: 5480246 - DNA, 25 bp, Homo sapien
tgctggcgactgaaagcctcagagc

SEQ ID NO: 5480247 - DNA, 25 bp, Homo sapien
catgtccagcatgttcgtgcgctca

SEQ ID NO: 5480248 - DNA, 25 bp, Homo sapien
gaagacatggccttgcggcccatga

SEQ ID NO: 5480249 - DNA, 25 bp, Homo sapien
cgtgcgctcaatggctcctgctgtg

SEQ ID NO: 5480250 - DNA, 25 bp, Homo sapien
cttgccgggcttgtaagtgtcgtcc

SEQ ID NO: 5480251 - DNA, 25 bp, Homo sapien
gcggcagcgatgtggagtggtgtca

SEQ ID NO: 5480252 - DNA, 25 bp, Homo sapien
tcctcgtcggatgccttggcgtcca

SEQ ID NO: 5480253 - DNA, 25 bp, Homo sapien
tcggtgatggcatgcaacagcagct

SEQ ID NO: 5480254 - DNA, 25 bp, Homo sapien
cagcagtgacgcagaggtgttcaca

SEQ ID NO: 5480255 - DNA, 25 bp, Homo sapien
gcagccctgccgtcctaagggagag

SEQ ID NO: 5480256 - DNA, 25 bp, Homo sapien
tgctgtgcagcagtgacgcagaggt

SEQ ID NO: 5480257 - DNA, 25 bp, Homo sapien
tgacagcatccatagaggccactgc

SEQ ID NO: 5480258 - DNA, 25 bp, Homo sapien
gactggttctcccaattcatgcagg

SEQ ID NO: 5480259 - DNA, 25 bp, Homo sapien
tacagatggatccttggcttggcct

SEQ ID NO: 5480260 - DNA, 25 bp, Homo sapien
tataggcaatgactcttggccgggc

SEQ ID NO: 5480261 - DNA, 25 bp, Homo sapien
tacaatcaatcagctaccatccagg

SEQ ID NO: 5480262 - DNA, 25 bp, Homo sapien
tccagagcagtggaaattcgggaag

SEQ ID NO: 5480263 - DNA, 25 bp, Homo sapien
agcagtcatgggcagcgaccgattc

SEQ ID NO: 5480264 - DNA, 25 bp, Homo sapien
cgggaaggaagcccttccagcagct

SEQ ID NO: 5480265 - DNA, 25 bp, Homo sapien
cgaccgattccattccagagcagtg

SEQ ID NO: 5480266 - DNA, 25 bp, Homo sapien
ggcccgcctcctcctgaatataagt

SEQ ID NO: 5480267 - DNA, 25 bp, Homo sapien
tattttgcggctggatctgttgagc

SEQ ID NO: 5480268 - DNA, 25 bp, Homo sapien
tcttcgaagaactagcaggctaatt

SEQ ID NO: 5480269 - DNA, 25 bp, Homo sapien
ccgtccgctgggaaaggcacttctt

SEQ ID NO: 5480270 - DNA, 25 bp, Homo sapien
gcagcttgatggtccgccagcgctt

SEQ ID NO: 5480271 - DNA, 25 bp, Homo sapien
agcagatgtcggtcctcgccccgtg

SEQ ID NO: 5480272 - DNA, 25 bp, Homo sapien
cagcaaggaacaggacctgcatggg

SEQ ID NO: 5480273 - DNA, 25 bp, Homo sapien
cggcggaaagcagatgtcggtcctc

SEQ ID NO: 5480274 - DNA, 25 bp, Homo sapien
gctgtggaccttcactggcaagtgt

SEQ ID NO: 5480275 - DNA, 25 bp, Homo sapien
cactggcaagtgttaacatctctta

SEQ ID NO: 5480276 - DNA, 25 bp, Homo sapien
cttaaaggtgatgcggaccaaaaag

SEQ ID NO: 5480277 - DNA, 25 bp, Homo sapien
ccctttacagctcttaaacatggtg

SEQ ID NO: 5480278 - DNA, 25 bp, Homo sapien
aaaggaaactaagcaggttgtcgct

SEQ ID NO: 5480279 - DNA, 25 bp, Homo sapien
gaaaggaaactaagcaggttgtcgc

SEQ ID NO: 5480280 - DNA, 25 bp, Homo sapien
aaggaaactaagcaggttgtcgctg

SEQ ID NO: 5480281 - DNA, 25 bp, Homo sapien
ggaaactaagcaggttgtcgctgca

SEQ ID NO: 5480282 - DNA, 25 bp, Homo sapien
ggcactgtcggcatgtcttcaggca

SEQ ID NO: 5480283 - DNA, 25 bp, Homo sapien
tgtcaatggatcttcacccacctgg

SEQ ID NO: 5480284 - DNA, 25 bp, Homo sapien
ccatgtctcaaagttaagggaagct

SEQ ID NO: 5480285 - DNA, 25 bp, Homo sapien
tttgaactacatgaacccaggctgg

SEQ ID NO: 5480286 - DNA, 25 bp, Homo sapien
tgtggcagacacacatcagtgtcct

SEQ ID NO: 5480287 - DNA, 25 bp, Homo sapien
gggtgtgtacgcaaggagcaagatt

SEQ ID NO: 5480288 - DNA, 25 bp, Homo sapien
agacaggcatccccgcaagtgcaca

SEQ ID NO: 5480289 - DNA, 25 bp, Homo sapien
tgttttccgacccagaatattcgag

SEQ ID NO: 5480290 - DNA, 25 bp, Homo sapien
cattttgagacacactggtatagac

SEQ ID NO: 5480291 - DNA, 25 bp, Homo sapien
tggctaggataggacccctgacagt

SEQ ID NO: 5480292 - DNA, 25 bp, Homo sapien
tcactcacgtgcactatggctagga

SEQ ID NO: 5480293 - DNA, 25 bp, Homo sapien
taggattcagccctgatggtggccc

SEQ ID NO: 5480294 - DNA, 25 bp, Homo sapien
tgcacggtgagggcgaggccatctt

SEQ ID NO: 5480295 - DNA, 25 bp, Homo sapien
tcctccgcatggtccctttgtcgaa

SEQ ID NO: 5480296 - DNA, 25 bp, Homo sapien
acagcgccatcctccgcatggtccc

SEQ ID NO: 5480297 - DNA, 25 bp, Homo sapien
cacggtgagggcgaggccatcttca

SEQ ID NO: 5480298 - DNA, 25 bp, Homo sapien
tgtgtttcccaacacgtcctcaagc

SEQ ID NO: 5480299 - DNA, 25 bp, Homo sapien
tagctaccctgggaaggcacgttca

SEQ ID NO: 5480300 - DNA, 25 bp, Homo sapien
atggagaagtcgcacacacacacgt

SEQ ID NO: 5480301 - DNA, 25 bp, Homo sapien
tcaaatttcgtctcagcactgcaca

SEQ ID NO: 5480302 - DNA, 25 bp, Homo sapien
gatgatgaaaggattggaacaactg

SEQ ID NO: 5480303 - DNA, 25 bp, Homo sapien
tgatgaaaggattggaacaactggg

SEQ ID NO: 5480304 - DNA, 25 bp, Homo sapien
aggattggaacaactgggaattttg

SEQ ID NO: 5480305 - DNA, 25 bp, Homo sapien
tgaaaggattggaacaactgggaat

SEQ ID NO: 5480306 - DNA, 25 bp, Homo sapien
cccacagtccaggagaaggttgaca

SEQ ID NO: 5480307 - DNA, 25 bp, Homo sapien
cacatgctgagtgccgtgagaccct

SEQ ID NO: 5480308 - DNA, 25 bp, Homo sapien
tgacaatgtcgttgtggcagtgagt

SEQ ID NO: 5480309 - DNA, 25 bp, Homo sapien
tatggtccgttcagcaacattgggc

SEQ ID NO: 5480310 - DNA, 25 bp, Homo sapien
cattcgggagcttggcaaagggaca

SEQ ID NO: 5480311 - DNA, 25 bp, Homo sapien
atgaggccaccctatggcagggcag

SEQ ID NO: 5480312 - DNA, 25 bp, Homo sapien
gggtgtcctgatgccctcatgaggc

SEQ ID NO: 5480313 - DNA, 25 bp, Homo sapien
cagggcaggaaccagtgctcattcg

SEQ ID NO: 5480314 - DNA, 25 bp, Homo sapien
gatggcgcccatgttccagctggtg

SEQ ID NO: 5480315 - DNA, 25 bp, Homo sapien
cacgtcagcactagcaaagttgtcc

SEQ ID NO: 5480316 - DNA, 25 bp, Homo sapien
acagggtgcaaagccactgcgcttc

SEQ ID NO: 5480317 - DNA, 25 bp, Homo sapien
caagcacagtgtagccctttgcgtc

SEQ ID NO: 5480318 - DNA, 25 bp, Homo sapien
caacaagtttcagtggtcctagacc

SEQ ID NO: 5480319 - DNA, 25 bp, Homo sapien
tgtgctggctgcgagtacatccatg

SEQ ID NO: 5480320 - DNA, 25 bp, Homo sapien
tctgtcccgacaggaatgtgctggc

SEQ ID NO: 5480321 - DNA, 25 bp, Homo sapien
caatccactaggttgcacacggtgg

SEQ ID NO: 5480322 - DNA, 25 bp, Homo sapien
tggacaagtcaaaggcctgcctggg

SEQ ID NO: 5480323 - DNA, 25 bp, Homo sapien
gatcccttaccaccatataacagta

SEQ ID NO: 5480324 - DNA, 25 bp, Homo sapien
tcttttcacgccatccttggacaag

SEQ ID NO: 5480325 - DNA, 25 bp, Homo sapien
tagctctcatgcagatcccttacca

SEQ ID NO: 5480326 - DNA, 25 bp, Homo sapien
tcattgaggaagatgcgggcgtcca

SEQ ID NO: 5480327 - DNA, 25 bp, Homo sapien
gaggcagcgttaggttgtcattcag

SEQ ID NO: 5480328 - DNA, 25 bp, Homo sapien
cgggcgtccagctctttgcggaaag

SEQ ID NO: 5480329 - DNA, 25 bp, Homo sapien
tcactgttggtcgagtagacataca

SEQ ID NO: 5480330 - DNA, 25 bp, Homo sapien
gactataataagttctcagagagac

SEQ ID NO: 5480331 - DNA, 25 bp, Homo sapien
cctgggtaagtctaaaaatgctgac

SEQ ID NO: 5480332 - DNA, 25 bp, Homo sapien
cagaaatatccatcaccacccaaag

SEQ ID NO: 5480333 - DNA, 25 bp, Homo sapien
taagtttacagccatgaatccatca

SEQ ID NO: 5480334 - DNA, 25 bp, Homo sapien
tactggagtccttccgtatctgcag

SEQ ID NO: 5480335 - DNA, 25 bp, Homo sapien
gacatgcatcctcgcctagaaggca

SEQ ID NO: 5480336 - DNA, 25 bp, Homo sapien
tcctgcctgagatgtgaattgtgcc

SEQ ID NO: 5480337 - DNA, 25 bp, Homo sapien
gttacagagaaagacgcatcacagg

SEQ ID NO: 5480338 - DNA, 25 bp, Homo sapien
tgccactgcatgactactagagagg

SEQ ID NO: 5480339 - DNA, 25 bp, Homo sapien
gaataaaattgacacctccctggca

SEQ ID NO: 5480340 - DNA, 25 bp, Homo sapien
cagcagcgccactcatttagggaaa

SEQ ID NO: 5480341 - DNA, 25 bp, Homo sapien
taaagtaacagtgacaagaccaggt

SEQ ID NO: 5480342 - DNA, 25 bp, Homo sapien
gtctatatccttattattggtacca

SEQ ID NO: 5480343 - DNA, 25 bp, Homo sapien
taaaaaagctacttgtagctaaaca

SEQ ID NO: 5480344 - DNA, 25 bp, Homo sapien
acttcgaccccagctgaacacatgg

SEQ ID NO: 5480345 - DNA, 25 bp, Homo sapien
tccagtggcttagacacacacagcc

SEQ ID NO: 5480346 - DNA, 25 bp, Homo sapien
tcatgtacatggtgccgtagccttc

SEQ ID NO: 5480347 - DNA, 25 bp, Homo sapien
ccatggcagtggtcccggtaaaact

SEQ ID NO: 5480348 - DNA, 25 bp, Homo sapien
tctggccacatgtaggtacccaggc

SEQ ID NO: 5480349 - DNA, 25 bp, Homo sapien
tgtgcccgtgaaactggagccatct

SEQ ID NO: 5480350 - DNA, 25 bp, Homo sapien
gagtgtatcagagcctgccccttta

SEQ ID NO: 5480351 - DNA, 25 bp, Homo sapien
tcttccagaacctgacgggatgccc

SEQ ID NO: 5480352 - DNA, 25 bp, Homo sapien
gatgcctggcatgcgactattagag

SEQ ID NO: 5480353 - DNA, 25 bp, Homo sapien
tacagagaggattccccaagggacc

SEQ ID NO: 5480354 - DNA, 25 bp, Homo sapien
agagaatttgccatatccaagcttc

SEQ ID NO: 5480355 - DNA, 25 bp, Homo sapien
gcttcatgttcaacccaaactcccc

SEQ ID NO: 5480356 - DNA, 25 bp, Homo sapien
ctcgcctgtgggccaagagaatttg

SEQ ID NO: 5480357 - DNA, 25 bp, Homo sapien
gctggatgtaggactccctcaggtc

SEQ ID NO: 5480358 - DNA, 25 bp, Homo sapien
ctgcacaccctggacgagctggatg

SEQ ID NO: 5480359 - DNA, 25 bp, Homo sapien
gagctggatgtaggactccctcagg

SEQ ID NO: 5480360 - DNA, 25 bp, Homo sapien
acaccctggacgagctggatgtagg

SEQ ID NO: 5480361 - DNA, 25 bp, Homo sapien
taaggctgccaacggataggagaga

SEQ ID NO: 5480362 - DNA, 25 bp, Homo sapien
acccatggaaggtcggaaggcagct

SEQ ID NO: 5480363 - DNA, 25 bp, Homo sapien
cagcagggtcctcattcaagggcca

SEQ ID NO: 5480364 - DNA, 25 bp, Homo sapien
gaggcagccagctcatactaggatg

SEQ ID NO: 5480365 - DNA, 25 bp, Homo sapien
cttcccctctagcgggcgttggcgg

SEQ ID NO: 5480366 - DNA, 25 bp, Homo sapien
agccccagagacttcgtcctctaag

SEQ ID NO: 5480367 - DNA, 25 bp, Homo sapien
ttcgtcctctaagctaagggaggca

SEQ ID NO: 5480368 - DNA, 25 bp, Homo sapien
cttgtggcgaagacagcgtagttct

SEQ ID NO: 5480369 - DNA, 25 bp, Homo sapien
atcacagcaagggcggtcgcggcca

SEQ ID NO: 5480370 - DNA, 25 bp, Homo sapien
cgggaatcacagcaagggcggtcgc

SEQ ID NO: 5480371 - DNA, 25 bp, Homo sapien
gaatcacagcaagggcggtcgcggc

SEQ ID NO: 5480372 - DNA, 25 bp, Homo sapien
agcaagggcggtcgcggccacgtgg

SEQ ID NO: 5480373 - DNA, 25 bp, Homo sapien
agccctgcgcctacggagagcgtcg

SEQ ID NO: 5480374 - DNA, 25 bp, Homo sapien
agagcgtcgcgtttccctggagaca

SEQ ID NO: 5480375 - DNA, 25 bp, Homo sapien
acagcagggagaccgacgggactgc

SEQ ID NO: 5480376 - DNA, 25 bp, Homo sapien
caagcaagactcgaagagctcgcgc

SEQ ID NO: 5480377 - DNA, 25 bp, Homo sapien
aagagccacagacgcaagcccagtg

SEQ ID NO: 5480378 - DNA, 25 bp, Homo sapien
aaatgcaccaattacaaagcgggcc

SEQ ID NO: 5480379 - DNA, 25 bp, Homo sapien
gccgacaacgcagtcactagggaaa

SEQ ID NO: 5480380 - DNA, 25 bp, Homo sapien
gaacatgggacgcagagcggtccaa

SEQ ID NO: 5480381 - DNA, 25 bp, Homo sapien
agcccccaaaatagatcctcagggc

SEQ ID NO: 5480382 - DNA, 25 bp, Homo sapien
cagactcttcggcgggcgccatggg

SEQ ID NO: 5480383 - DNA, 25 bp, Homo sapien
cccaaaatagatcctcagggcccaa

SEQ ID NO: 5480384 - DNA, 25 bp, Homo sapien
ggcgccatgggaccggcagaagctg

SEQ ID NO: 5480385 - DNA, 25 bp, Homo sapien
tcgggagcgcgcgagccgcgggcgc

SEQ ID NO: 5480386 - DNA, 25 bp, Homo sapien
tcgcgccctcactcttcctcgggag

SEQ ID NO: 5480387 - DNA, 25 bp, Homo sapien
tggcgcgcgcgggagtcacgctgtg

SEQ ID NO: 5480388 - DNA, 25 bp, Homo sapien
ctccaccgttggtgcgcgtcgcgcc

SEQ ID NO: 5480389 - DNA, 25 bp, Homo sapien
cctgctggccattagcgcgacttgg

SEQ ID NO: 5480390 - DNA, 25 bp, Homo sapien
cttcgggattgggacaggcacttcc

SEQ ID NO: 5480391 - DNA, 25 bp, Homo sapien
ttgcagatggtgaagagcgctcgcc

SEQ ID NO: 5480392 - DNA, 25 bp, Homo sapien
tagtctactgcaagaacggccgcag

SEQ ID NO: 5480393 - DNA, 25 bp, Homo sapien
tggcttctacggtgacagagtatgg

SEQ ID NO: 5480394 - DNA, 25 bp, Homo sapien
taagaaattggtctatatagttttc

SEQ ID NO: 5480395 - DNA, 25 bp, Homo sapien
cagagtatggtgttcctgtagggaa

SEQ ID NO: 5480396 - DNA, 25 bp, Homo sapien
cacccatggcttctacggtgacaga

SEQ ID NO: 5480397 - DNA, 25 bp, Homo sapien
atgcacatcttgatcccagtttata

SEQ ID NO: 5480398 - DNA, 25 bp, Homo sapien
acatcttgatcccagtttataaact

SEQ ID NO: 5480399 - DNA, 25 bp, Homo sapien
cacatcttgatcccagtttataaac

SEQ ID NO: 5480400 - DNA, 25 bp, Homo sapien
gcacatcttgatcccagtttataaa

SEQ ID NO: 5480401 - DNA, 25 bp, Homo sapien
gatgacattgagttcgcgacgctgc

SEQ ID NO: 5480402 - DNA, 25 bp, Homo sapien
ctgtagttgacagcgctgcgtgaag

SEQ ID NO: 5480403 - DNA, 25 bp, Homo sapien
cgtagccccggatgaaaggatgaca

SEQ ID NO: 5480404 - DNA, 25 bp, Homo sapien
tcgcatctaaatggccacacgtggt

SEQ ID NO: 5480405 - DNA, 25 bp, Homo sapien
cccgaggcgcgcgagttggccggct

SEQ ID NO: 5480406 - DNA, 25 bp, Homo sapien
ccggctctgcgcctgcactcagccg

SEQ ID NO: 5480407 - DNA, 25 bp, Homo sapien
ggctgcctggtgctcgagctgtgcg

SEQ ID NO: 5480408 - DNA, 25 bp, Homo sapien
gctcgtgctcgacgcgcacccggct

SEQ ID NO: 5480409 - DNA, 25 bp, Homo sapien
ttccaggtcatcctgcggtacacct

SEQ ID NO: 5480410 - DNA, 25 bp, Homo sapien
ggtcatcctgcggtacacctcgacc

SEQ ID NO: 5480411 - DNA, 25 bp, Homo sapien
atcctgcggtacacctcgaccgacg

SEQ ID NO: 5480412 - DNA, 25 bp, Homo sapien
caggtcatcctgcggtacacctcga

SEQ ID NO: 5480413 - DNA, 25 bp, Homo sapien
aggcaaccttagcccctcagaacag

SEQ ID NO: 5480414 - DNA, 25 bp, Homo sapien
ggcacaggggcaaagcaatacccca

SEQ ID NO: 5480415 - DNA, 25 bp, Homo sapien
tggcagcctcagttggcccctggca

SEQ ID NO: 5480416 - DNA, 25 bp, Homo sapien
ggcccaccatgctgggagaggcggc

SEQ ID NO: 5480417 - DNA, 25 bp, Homo sapien
gaggcagacagggttgattccacag

SEQ ID NO: 5480418 - DNA, 25 bp, Homo sapien
caaagagattacgtggccatatggc

SEQ ID NO: 5480419 - DNA, 25 bp, Homo sapien
cacacgttatgtagatggagagcct

SEQ ID NO: 5480420 - DNA, 25 bp, Homo sapien
aactgaccatgggttgcagcaaagc

SEQ ID NO: 5480421 - DNA, 25 bp, Homo sapien
ccccagttaagatgtagagcgttca

SEQ ID NO: 5480422 - DNA, 25 bp, Homo sapien
gggacttttcgctcctgactgcaga

SEQ ID NO: 5480423 - DNA, 25 bp, Homo sapien
caagggtgaatcctcgagcaggtcc

SEQ ID NO: 5480424 - DNA, 25 bp, Homo sapien
tatagctgtaaatgtgcgtccacgg

SEQ ID NO: 5480425 - DNA, 25 bp, Homo sapien
atgctgggccagttcctccaagagg

SEQ ID NO: 5480426 - DNA, 25 bp, Homo sapien
agatgctgggccagttcctccaaga

SEQ ID NO: 5480427 - DNA, 25 bp, Homo sapien
tgctgggccagttcctccaagaggt

SEQ ID NO: 5480428 - DNA, 25 bp, Homo sapien
ggagatgctgggccagttcctccaa

SEQ ID NO: 5480429 - DNA, 25 bp, Homo sapien
ggaagcctccgtcaggagagacgca

SEQ ID NO: 5480430 - DNA, 25 bp, Homo sapien
cttctgttgcgccactgagacggca

SEQ ID NO: 5480431 - DNA, 25 bp, Homo sapien
tgatgaaaacctaacagggtggccc

SEQ ID NO: 5480432 - DNA, 25 bp, Homo sapien
tctgctgactccatatggaggcctc

SEQ ID NO: 5480433 - DNA, 25 bp, Homo sapien
atgcatgattatgtcacatgtgacc

SEQ ID NO: 5480434 - DNA, 25 bp, Homo sapien
catgtgaccataggtaattttactt

SEQ ID NO: 5480435 - DNA, 25 bp, Homo sapien
gtgccaagctgaattttctacatgc

SEQ ID NO: 5480436 - DNA, 25 bp, Homo sapien
tacatgcatgattatgtcacatgtg

SEQ ID NO: 5480437 - DNA, 25 bp, Homo sapien
gaggatccaagcgactcatttagga

SEQ ID NO: 5480438 - DNA, 25 bp, Homo sapien
gcttcactgcaaaaggagtctcgat

SEQ ID NO: 5480439 - DNA, 25 bp, Homo sapien
cagagcagggtgtcgtcagaaagca

SEQ ID NO: 5480440 - DNA, 25 bp, Homo sapien
gattcagacctcaagacatgcttcg

SEQ ID NO: 5480441 - DNA, 25 bp, Homo sapien
ttgaatcatgggtgcagtctcttcc

SEQ ID NO: 5480442 - DNA, 25 bp, Homo sapien
cagaataatataaggctgcatgcca

SEQ ID NO: 5480443 - DNA, 25 bp, Homo sapien
tcttcttgctgcgttgtgaagaagg

SEQ ID NO: 5480444 - DNA, 25 bp, Homo sapien
ttggcacttcttcttgctgcgttgt

SEQ ID NO: 5480445 - DNA, 25 bp, Homo sapien
aagcctttgggagacattcccctga

SEQ ID NO: 5480446 - DNA, 25 bp, Homo sapien
tttgggagacattcccctgagcacc

SEQ ID NO: 5480447 - DNA, 25 bp, Homo sapien
tggttcccaagcctttgggagacat

SEQ ID NO: 5480448 - DNA, 25 bp, Homo sapien
tcagccacagccgtccttgccttct

SEQ ID NO: 5480449 - DNA, 25 bp, Homo sapien
gaatgacgcggcactgtcttcggga

SEQ ID NO: 5480450 - DNA, 25 bp, Homo sapien
tcaaataagtagtccgagggtctgg

SEQ ID NO: 5480451 - DNA, 25 bp, Homo sapien
gatctgcgagtcagcttccaatgtt

SEQ ID NO: 5480452 - DNA, 25 bp, Homo sapien
tagccaaaatatcgcagcagctcca

SEQ ID NO: 5480453 - DNA, 25 bp, Homo sapien
cgtccaggcaagtgaaggctctttt

SEQ ID NO: 5480454 - DNA, 25 bp, Homo sapien
gatggtgtctttcgctttgtttcct

SEQ ID NO: 5480455 - DNA, 25 bp, Homo sapien
ccagcaggagacacgacggcacggt

SEQ ID NO: 5480456 - DNA, 25 bp, Homo sapien
tgtcttcctgtgacgttgtctgtag

SEQ ID NO: 5480457 - DNA, 25 bp, Homo sapien
ggccggtcggtgaacgtctccagcc

SEQ ID NO: 5480458 - DNA, 25 bp, Homo sapien
agaaacaaaaccgccctggtgcttg

SEQ ID NO: 5480459 - DNA, 25 bp, Homo sapien
tcagcgaggagaccacgctgtcggc

SEQ ID NO: 5480460 - DNA, 25 bp, Homo sapien
aggatgacacggacaaaggccaggc

SEQ ID NO: 5480461 - DNA, 25 bp, Homo sapien
cgtggaacctggcagactctagttt

SEQ ID NO: 5480462 - DNA, 25 bp, Homo sapien
ttgttctgtacccaggaagatgagc

SEQ ID NO: 5480463 - DNA, 25 bp, Homo sapien
gatgagcatcatcagcgtggaacct

SEQ ID NO: 5480464 - DNA, 25 bp, Homo sapien
gcaagatttccagatgtcgggagtc

SEQ ID NO: 5480465 - DNA, 25 bp, Homo sapien
gcgcgttcccggagtgggtgtggga

SEQ ID NO: 5480466 - DNA, 25 bp, Homo sapien
ccagagctgcagttcgccaggcgcg

SEQ ID NO: 5480467 - DNA, 25 bp, Homo sapien
cccatcctgggctaccggctgccac

SEQ ID NO: 5480468 - DNA, 25 bp, Homo sapien
tgggctaccggctgccaccagacct

SEQ ID NO: 5480469 - DNA, 25 bp, Homo sapien
tcgcacggggctcacacagagcaag

SEQ ID NO: 5480470 - DNA, 25 bp, Homo sapien
agggtccagctacaagcagggccct

SEQ ID NO: 5480471 - DNA, 25 bp, Homo sapien
gccaggattccctcttagctacaga

SEQ ID NO: 5480472 - DNA, 25 bp, Homo sapien
tcagctggaatgtggcccctcaaca

SEQ ID NO: 5480473 - DNA, 25 bp, Homo sapien
cttccctcggggtgctcggtacttg

SEQ ID NO: 5480474 - DNA, 25 bp, Homo sapien
ctttgcaggggtctgggtgtcccct

SEQ ID NO: 5480475 - DNA, 25 bp, Homo sapien
ggccgtagaacaggttcctctggaa

SEQ ID NO: 5480476 - DNA, 25 bp, Homo sapien
tgctcggtacttgttcttctggccg

SEQ ID NO: 5480477 - DNA, 25 bp, Homo sapien
ctgggcccaaacacagacaggacac

SEQ ID NO: 5480478 - DNA, 25 bp, Homo sapien
aaggcaggtcccaggtgggccgcgg

SEQ ID NO: 5480479 - DNA, 25 bp, Homo sapien
ggctcctgggcccaaacacagacag

SEQ ID NO: 5480480 - DNA, 25 bp, Homo sapien
tgtgccaggacaggcgagccaggca

SEQ ID NO: 5480481 - DNA, 25 bp, Homo sapien
aagtttgatctcactcctctaagga

SEQ ID NO: 5480482 - DNA, 25 bp, Homo sapien
ggcccacactggtcctagctctgtt

SEQ ID NO: 5480483 - DNA, 25 bp, Homo sapien
tctaaggatttaacccacagtgtgt

SEQ ID NO: 5480484 - DNA, 25 bp, Homo sapien
cacagtgtgtgagctccactagggc

SEQ ID NO: 5480485 - DNA, 25 bp, Homo sapien
cagacatgggagtgctgcgtctcca

SEQ ID NO: 5480486 - DNA, 25 bp, Homo sapien
gaatcaaccgaaacaggaggcgatg

SEQ ID NO: 5480487 - DNA, 25 bp, Homo sapien
acactcaagtgcaggtcagaaccag

SEQ ID NO: 5480488 - DNA, 25 bp, Homo sapien
ggaagctactgtgagacgggcacca

SEQ ID NO: 5480489 - DNA, 25 bp, Homo sapien
gatgcacttcgtatgcttcctagga

SEQ ID NO: 5480490 - DNA, 25 bp, Homo sapien
ttcctaggaccctgcacatgcctga

SEQ ID NO: 5480491 - DNA, 25 bp, Homo sapien
acggagctgttcctagcagagggca

SEQ ID NO: 5480492 - DNA, 25 bp, Homo sapien
gaagagtctcggagaagccctgcag

SEQ ID NO: 5480493 - DNA, 25 bp, Homo sapien
catggcgacaaatcacgatgacgtc

SEQ ID NO: 5480494 - DNA, 25 bp, Homo sapien
cagaattccataggaacccagctgc

SEQ ID NO: 5480495 - DNA, 25 bp, Homo sapien
ccccagtgtagagccagcagaagct

SEQ ID NO: 5480496 - DNA, 25 bp, Homo sapien
tgaccacatcagaaccatggcgaca

SEQ ID NO: 5480497 - DNA, 25 bp, Homo sapien
aatccccagatctaggtccaagagg

SEQ ID NO: 5480498 - DNA, 25 bp, Homo sapien
gaatccccagatctaggtccaagag

SEQ ID NO: 5480499 - DNA, 25 bp, Homo sapien
aggtggagccgagtgtctgagagca

SEQ ID NO: 5480500 - DNA, 25 bp, Homo sapien
ccagaatccccagatctaggtccaa

SEQ ID NO: 5480501 - DNA, 25 bp, Homo sapien
ctgcagcttgctcggcaccgggacg

SEQ ID NO: 5480502 - DNA, 25 bp, Homo sapien
ggtgtccacagtgagacatgccgtc

SEQ ID NO: 5480503 - DNA, 25 bp, Homo sapien
acagtgagacatgccgtcacagccc

SEQ ID NO: 5480504 - DNA, 25 bp, Homo sapien
tcggcaccgggacggtgtccacagt

SEQ ID NO: 5480505 - DNA, 25 bp, Homo sapien
aggcaaaggtcacagaggcggccag

SEQ ID NO: 5480506 - DNA, 25 bp, Homo sapien
ctgcacgtactccagtaaggtgtgt

SEQ ID NO: 5480507 - DNA, 25 bp, Homo sapien
tactccagtaaggtgtgtcccgagc

SEQ ID NO: 5480508 - DNA, 25 bp, Homo sapien
tgaagaaggcagacgtgaagggccc

SEQ ID NO: 5480509 - DNA, 25 bp, Homo sapien
aacagagccacagcgggcccgctgt

SEQ ID NO: 5480510 - DNA, 25 bp, Homo sapien
gccgtgacggtgaccaacagagcca

SEQ ID NO: 5480511 - DNA, 25 bp, Homo sapien
cgctgtaggcgggaggactgtgccg

SEQ ID NO: 5480512 - DNA, 25 bp, Homo sapien
gatggaaacaaaaggcgcaggcggc

SEQ ID NO: 5480513 - DNA, 25 bp, Homo sapien
ttcataggcgcccactgggagcagg

SEQ ID NO: 5480514 - DNA, 25 bp, Homo sapien
cctcccgggcgaagacttcataggc

SEQ ID NO: 5480515 - DNA, 25 bp, Homo sapien
aaggtgaccccgtgcgccaggaaga

SEQ ID NO: 5480516 - DNA, 25 bp, Homo sapien
agcaggtcaggcccaaagtccccag

SEQ ID NO: 5480517 - DNA, 25 bp, Homo sapien
ccgagatgctgtgcctgcaggacac

SEQ ID NO: 5480518 - DNA, 25 bp, Homo sapien
tgggccccccgagatgctgtgcctg

SEQ ID NO: 5480519 - DNA, 25 bp, Homo sapien
cggcctgggccccccgagatgctgt

SEQ ID NO: 5480520 - DNA, 25 bp, Homo sapien
ccccgagatgctgtgcctgcaggac

SEQ ID NO: 5480521 - DNA, 25 bp, Homo sapien
ctgaggggacagagcaggagctggc

SEQ ID NO: 5480522 - DNA, 25 bp, Homo sapien
ggggacagagcaggagctggccggt

SEQ ID NO: 5480523 - DNA, 25 bp, Homo sapien
gggacagagcaggagctggccggtt

SEQ ID NO: 5480524 - DNA, 25 bp, Homo sapien
gaggggacagagcaggagctggccg

SEQ ID NO: 5480525 - DNA, 25 bp, Homo sapien
cagcgtgagtctcgccagcgtcagg

SEQ ID NO: 5480526 - DNA, 25 bp, Homo sapien
aaagttaagtgtgagcccgtgcact

SEQ ID NO: 5480527 - DNA, 25 bp, Homo sapien
ggtgtcagcagcgtgagtctcgcca

SEQ ID NO: 5480528 - DNA, 25 bp, Homo sapien
gcccgtgcactgtgacaggtgtcag

SEQ ID NO: 5480529 - DNA, 25 bp, Homo sapien
tcaggccaggtcctggaagcccaca

SEQ ID NO: 5480530 - DNA, 25 bp, Homo sapien
acgtcgggacggcagctatgacatg

SEQ ID NO: 5480531 - DNA, 25 bp, Homo sapien
tacaggagcctagggctaacactcg

SEQ ID NO: 5480532 - DNA, 25 bp, Homo sapien
taacactcgggtgtaagacatcggg

SEQ ID NO: 5480533 - DNA, 25 bp, Homo sapien
ttggacagagcctcaagtgcacgca

SEQ ID NO: 5480534 - DNA, 25 bp, Homo sapien
ccctaggtggtttctggcagagcga

SEQ ID NO: 5480535 - DNA, 25 bp, Homo sapien
atatgtacaagccagggacgcggcc

SEQ ID NO: 5480536 - DNA, 25 bp, Homo sapien
gggacggactaactacaggaagcac

SEQ ID NO: 5480537 - DNA, 25 bp, Homo sapien
tgaaaccatctgagggagacggctt

SEQ ID NO: 5480538 - DNA, 25 bp, Homo sapien
cctagcaggcttgggagacacatgt

SEQ ID NO: 5480539 - DNA, 25 bp, Homo sapien
cactctcggagatggaacttcaggg

SEQ ID NO: 5480540 - DNA, 25 bp, Homo sapien
tcccatgtggtgtagaaggcccgtg

SEQ ID NO: 5480541 - DNA, 25 bp, Homo sapien
catttctcgccgcagctgaagaggc

SEQ ID NO: 5480542 - DNA, 25 bp, Homo sapien
tcagacccgcatctgggcagacctc

SEQ ID NO: 5480543 - DNA, 25 bp, Homo sapien
tctgggcagacctccttctggagag

SEQ ID NO: 5480544 - DNA, 25 bp, Homo sapien
gggcagacctccttctggagagctt

SEQ ID NO: 5480545 - DNA, 25 bp, Homo sapien
cgcatctgggcagacctccttctgg

SEQ ID NO: 5480546 - DNA, 25 bp, Homo sapien
cgtgcacaccgcgaatgtgttgggt

SEQ ID NO: 5480547 - DNA, 25 bp, Homo sapien
atgtccttgtcgctggcggcctgca

SEQ ID NO: 5480548 - DNA, 25 bp, Homo sapien
aggatgccgcggtgttccgtgcaca

SEQ ID NO: 5480549 - DNA, 25 bp, Homo sapien
gggttgaaggcgtacagccagtcat

SEQ ID NO: 5480550 - DNA, 25 bp, Homo sapien
acgggacgtgactgcccctcatggc

SEQ ID NO: 5480551 - DNA, 25 bp, Homo sapien
tccaggctcctgaacttgtccaggg

SEQ ID NO: 5480552 - DNA, 25 bp, Homo sapien
tcaaaaaaccatctcgtagacactg

SEQ ID NO: 5480553 - DNA, 25 bp, Homo sapien
cactcccaccacagggaatcaaaaa

SEQ ID NO: 5480554 - DNA, 25 bp, Homo sapien
cagtggccaggttgagcacgaaccg

SEQ ID NO: 5480555 - DNA, 25 bp, Homo sapien
gtggccaggttgagcacgaaccgct

SEQ ID NO: 5480556 - DNA, 25 bp, Homo sapien
cgctgttgtacatgtaggcataggg

SEQ ID NO: 5480557 - DNA, 25 bp, Homo sapien
gctccacggtgtccttgtcgctgtt

SEQ ID NO: 5480558 - DNA, 25 bp, Homo sapien
tgactcggatctcctggatgtcagg

SEQ ID NO: 5480559 - DNA, 25 bp, Homo sapien
ttggagtcggcctctggcagcagct

SEQ ID NO: 5480560 - DNA, 25 bp, Homo sapien
aagggagcttcttggagtcggcctc

SEQ ID NO: 5480561 - DNA, 25 bp, Homo sapien
ggatgtcagggaccagcaggcgctg

SEQ ID NO: 5480562 - DNA, 25 bp, Homo sapien
caccccaaggcactcggccattggg

SEQ ID NO: 5480563 - DNA, 25 bp, Homo sapien
gagagggctgcggactccactcctc

SEQ ID NO: 5480564 - DNA, 25 bp, Homo sapien
ccgagtcacggccatggtcatgggt

SEQ ID NO: 5480565 - DNA, 25 bp, Homo sapien
gtcagccgtggtgccagaagccact

SEQ ID NO: 5480566 - DNA, 25 bp, Homo sapien
caggtcagtggcaccgtaccgccct

SEQ ID NO: 5480567 - DNA, 25 bp, Homo sapien
accgtaccgcccttcaaccagagag

SEQ ID NO: 5480568 - DNA, 25 bp, Homo sapien
acatcgacgggtcccggagcagggt

SEQ ID NO: 5480569 - DNA, 25 bp, Homo sapien
gccacccctagaggggacatcgacg

SEQ ID NO: 5480570 - DNA, 25 bp, Homo sapien
aatgtgtgcgtgagcaggcgcaagc

SEQ ID NO: 5480571 - DNA, 25 bp, Homo sapien
ctctcgctggcactgacgcagacgt

SEQ ID NO: 5480572 - DNA, 25 bp, Homo sapien
cactgacgcagacgtggctgtgtgt

SEQ ID NO: 5480573 - DNA, 25 bp, Homo sapien
tctgttgaatgtgtgcgtgagcagg

SEQ ID NO: 5480574 - DNA, 25 bp, Homo sapien
tgggactcagagtcctcgctgaagg

SEQ ID NO: 5480575 - DNA, 25 bp, Homo sapien
caggagcaggtagtgcctagtcttc

SEQ ID NO: 5480576 - DNA, 25 bp, Homo sapien
agctcccgctgcctctcgttgggag

SEQ ID NO: 5480577 - DNA, 25 bp, Homo sapien
ggccgctgggcggtctccagcttct

SEQ ID NO: 5480578 - DNA, 25 bp, Homo sapien
aatgagactgtcactccggggcctc

SEQ ID NO: 5480579 - DNA, 25 bp, Homo sapien
ccactggtggtccagaatgagactg

SEQ ID NO: 5480580 - DNA, 25 bp, Homo sapien
gccccggacataggccacagatgtg

SEQ ID NO: 5480581 - DNA, 25 bp, Homo sapien
agatgtgtccaggactcgtcggcgc

SEQ ID NO: 5480582 - DNA, 25 bp, Homo sapien
tgggctgcccgcgtcagccacgtgg

SEQ ID NO: 5480583 - DNA, 25 bp, Homo sapien
gcccgcgtcagccacgtggcacagg

SEQ ID NO: 5480584 - DNA, 25 bp, Homo sapien
tgagctcgtacacaccagtcacacg

SEQ ID NO: 5480585 - DNA, 25 bp, Homo sapien
gctcgtacacaccagtcacacggtt

SEQ ID NO: 5480586 - DNA, 25 bp, Homo sapien
caggtcctgtgggaagctgtgtcca

SEQ ID NO: 5480587 - DNA, 25 bp, Homo sapien
tcctggtgttcggtgtgtggctccc

SEQ ID NO: 5480588 - DNA, 25 bp, Homo sapien
caagaatcaggagcgtgttcagcac

SEQ ID NO: 5480589 - DNA, 25 bp, Homo sapien
tgttcagcacgcaagcacggctggt

SEQ ID NO: 5480590 - DNA, 25 bp, Homo sapien
gacaacagccggctgggtgcagttc

SEQ ID NO: 5480591 - DNA, 25 bp, Homo sapien
ctggcagcttggcatcacgggaata

SEQ ID NO: 5480592 - DNA, 25 bp, Homo sapien
cagcttggcatcacgggaatagaag

SEQ ID NO: 5480593 - DNA, 25 bp, Homo sapien
gccaaagaggttgcggatggagcgc

SEQ ID NO: 5480594 - DNA, 25 bp, Homo sapien
aaccaggtcttgtttgaatgtgcac

SEQ ID NO: 5480595 - DNA, 25 bp, Homo sapien
ggatgacacgctaactgctgaacag

SEQ ID NO: 5480596 - DNA, 25 bp, Homo sapien
tggacgcaggcaggagaaagtctct

SEQ ID NO: 5480597 - DNA, 25 bp, Homo sapien
cccgaccctggaatgtctgtgagga

SEQ ID NO: 5480598 - DNA, 25 bp, Homo sapien
tgaagctggaataattcggctgtaa

SEQ ID NO: 5480599 - DNA, 25 bp, Homo sapien
ccccatgtgaagctggaataattcg

SEQ ID NO: 5480600 - DNA, 25 bp, Homo sapien
tgtgaagctggaataattcggctgt

SEQ ID NO: 5480601 - DNA, 25 bp, Homo sapien
catgtgaagctggaataattcggct

SEQ ID NO: 5480602 - DNA, 25 bp, Homo sapien
agtggttttggtggagtgccctggc

SEQ ID NO: 5480603 - DNA, 25 bp, Homo sapien
tgagtggttttggtggagtgccctg

SEQ ID NO: 5480604 - DNA, 25 bp, Homo sapien
gtggttttggtggagtgccctggca

SEQ ID NO: 5480605 - DNA, 25 bp, Homo sapien
gagtggttttggtggagtgccctgg

SEQ ID NO: 5480606 - DNA, 25 bp, Homo sapien
agcggagagtgtcatgtagattttc

SEQ ID NO: 5480607 - DNA, 25 bp, Homo sapien
tataagcggagagtgtcatgtagat

SEQ ID NO: 5480608 - DNA, 25 bp, Homo sapien
tcgatataagcggagagtgtcatgt

SEQ ID NO: 5480609 - DNA, 25 bp, Homo sapien
agattttctctcgataaggggtgac

SEQ ID NO: 5480610 - DNA, 25 bp, Homo sapien
cgcagcctcaaattggtaaaaggtc

SEQ ID NO: 5480611 - DNA, 25 bp, Homo sapien
gtgcatggagctgtcccacgcagcc

SEQ ID NO: 5480612 - DNA, 25 bp, Homo sapien
gcaggagagagttgtgcatggagct

SEQ ID NO: 5480613 - DNA, 25 bp, Homo sapien
cccacgcagcctcaaattggtaaaa

SEQ ID NO: 5480614 - DNA, 25 bp, Homo sapien
tgcaaggccgtgtgcaaaagcgtct

SEQ ID NO: 5480615 - DNA, 25 bp, Homo sapien
ctgcaaggccgtgtgcaaaagcgtc

SEQ ID NO: 5480616 - DNA, 25 bp, Homo sapien
ggcactcctcattcatcaggaacca

SEQ ID NO: 5480617 - DNA, 25 bp, Homo sapien
actcctcattcatcaggaaccacgt

SEQ ID NO: 5480618 - DNA, 25 bp, Homo sapien
tcattcatcaggaaccacgtccctg

SEQ ID NO: 5480619 - DNA, 25 bp, Homo sapien
ccaggcactcctcattcatcaggaa

SEQ ID NO: 5480620 - DNA, 25 bp, Homo sapien
caccagtgcctggattagggacttg

SEQ ID NO: 5480621 - DNA, 25 bp, Homo sapien
cttgattttccattcggaacggact

SEQ ID NO: 5480622 - DNA, 25 bp, Homo sapien
aacggactcgagttctcaccagtgc

SEQ ID NO: 5480623 - DNA, 25 bp, Homo sapien
ccacaggataactgccgtgacgctg

SEQ ID NO: 5480624 - DNA, 25 bp, Homo sapien
ctaggtatgtccgaatcaagaaact

SEQ ID NO: 5480625 - DNA, 25 bp, Homo sapien
gatgtatccggaagagaggatgttg

SEQ ID NO: 5480626 - DNA, 25 bp, Homo sapien
ggatgttgagagacaagatgttggg

SEQ ID NO: 5480627 - DNA, 25 bp, Homo sapien
ggactcgtcggtctctggagtgttt

SEQ ID NO: 5480628 - DNA, 25 bp, Homo sapien
ggtcgatcagggactcgtcggtctc

SEQ ID NO: 5480629 - DNA, 25 bp, Homo sapien
caggagagcccgctaagttgcatgc

SEQ ID NO: 5480630 - DNA, 25 bp, Homo sapien
ggagagcccgctaagttgcatgcac

SEQ ID NO: 5480631 - DNA, 25 bp, Homo sapien
gagcccgctaagttgcatgcactgg

SEQ ID NO: 5480632 - DNA, 25 bp, Homo sapien
tttccaggagagcccgctaagttgc

SEQ ID NO: 5480633 - DNA, 25 bp, Homo sapien
tcaccgtaatccgtcgctggatgcc

SEQ ID NO: 5480634 - DNA, 25 bp, Homo sapien
tatggctgcctgtctcatgcagtag

SEQ ID NO: 5480635 - DNA, 25 bp, Homo sapien
cgcgcacttccttccagcggatatg

SEQ ID NO: 5480636 - DNA, 25 bp, Homo sapien
tgtctcatgcagtagtgtcaccgta

SEQ ID NO: 5480637 - DNA, 25 bp, Homo sapien
ggaggaggaaggtccccatgcatgg

SEQ ID NO: 5480638 - DNA, 25 bp, Homo sapien
catgcatggcatgcccccacggtgg

SEQ ID NO: 5480639 - DNA, 25 bp, Homo sapien
ggaaggtccccatgcatggcatgcc

SEQ ID NO: 5480640 - DNA, 25 bp, Homo sapien
cacggtggtccaccacggccgggat

SEQ ID NO: 5480641 - DNA, 25 bp, Homo sapien
acagggccgcgtcagtgtgctgagc

SEQ ID NO: 5480642 - DNA, 25 bp, Homo sapien
gtcgtacttgcagtggcagggtccc

SEQ ID NO: 5480643 - DNA, 25 bp, Homo sapien
tagaccagcaggtcgtacttgcagt

SEQ ID NO: 5480644 - DNA, 25 bp, Homo sapien
ccagctcacagatctcgaagtagac

SEQ ID NO: 5480645 - DNA, 25 bp, Homo sapien
gggaagtggcggcgcgagggcctca

SEQ ID NO: 5480646 - DNA, 25 bp, Homo sapien
acagtggcatgacccgagggaagtg

SEQ ID NO: 5480647 - DNA, 25 bp, Homo sapien
cgagggaagtggcggcgcgagggcc

SEQ ID NO: 5480648 - DNA, 25 bp, Homo sapien
ttggacagtggcatgacccgaggga

SEQ ID NO: 5480649 - DNA, 25 bp, Homo sapien
gggcgggaacgggtgctgctggtag

SEQ ID NO: 5480650 - DNA, 25 bp, Homo sapien
gctgctggtagtggccaaagacctc

SEQ ID NO: 5480651 - DNA, 25 bp, Homo sapien
caaagacctcgaaaacaatgggctg

SEQ ID NO: 5480652 - DNA, 25 bp, Homo sapien
gtagtggccaaagacctcgaaaaca

SEQ ID NO: 5480653 - DNA, 25 bp, Homo sapien
atgaaggacttggtcacctccactg

SEQ ID NO: 5480654 - DNA, 25 bp, Homo sapien
tactcaatgaaggacttggtcacct

SEQ ID NO: 5480655 - DNA, 25 bp, Homo sapien
tgatgtactcaatgaaggacttggt

SEQ ID NO: 5480656 - DNA, 25 bp, Homo sapien
tcttgatgtactcaatgaaggactt

SEQ ID NO: 5480657 - DNA, 25 bp, Homo sapien
taggtcccaatccaacatggctgct

SEQ ID NO: 5480658 - DNA, 25 bp, Homo sapien
catggctgctgtccctatgaaaagc

SEQ ID NO: 5480659 - DNA, 25 bp, Homo sapien
tatgaaaagcggaagtttgggccca

SEQ ID NO: 5480660 - DNA, 25 bp, Homo sapien
cgagaggtcatcagagtaggtccca

SEQ ID NO: 5480661 - DNA, 25 bp, Homo sapien
tctggacgtggtagaagccaagtgg

SEQ ID NO: 5480662 - DNA, 25 bp, Homo sapien
tggagaaggcctcgtcgtggcggtg

SEQ ID NO: 5480663 - DNA, 25 bp, Homo sapien
ctgtggagaaggcctcgtcgtggcg

SEQ ID NO: 5480664 - DNA, 25 bp, Homo sapien
ctggacgtggtagaagccaagtggg

SEQ ID NO: 5480665 - DNA, 25 bp, Homo sapien
agagctgtctaggaggaggccttct

SEQ ID NO: 5480666 - DNA, 25 bp, Homo sapien
cctgcaggactgtcacacggaaggt

SEQ ID NO: 5480667 - DNA, 25 bp, Homo sapien
tgtcggcatattcggcagagatgct

SEQ ID NO: 5480668 - DNA, 25 bp, Homo sapien
ttgaactggcagaagatgtcggcat

SEQ ID NO: 5480669 - DNA, 25 bp, Homo sapien
tccacgatgcgaagctcttcctggg

SEQ ID NO: 5480670 - DNA, 25 bp, Homo sapien
ctgaacaggtgttgttgttgacttc

SEQ ID NO: 5480671 - DNA, 25 bp, Homo sapien
accacggggcaagactcggactgga

SEQ ID NO: 5480672 - DNA, 25 bp, Homo sapien
tgttgacttcatcggctgagggccc

SEQ ID NO: 5480673 - DNA, 25 bp, Homo sapien
ttagcagttcccgactggcggacgc

SEQ ID NO: 5480674 - DNA, 25 bp, Homo sapien
gagattttagcagttcccgactggc

SEQ ID NO: 5480675 - DNA, 25 bp, Homo sapien
ctggcggacgccagagccataatca

SEQ ID NO: 5480676 - DNA, 25 bp, Homo sapien
tcatcaaaggagattttagcagttc

SEQ ID NO: 5480677 - DNA, 25 bp, Homo sapien
ttctcgctgacgattgccacacggt

SEQ ID NO: 5480678 - DNA, 25 bp, Homo sapien
acctcgcccttctcgctgacgattg

SEQ ID NO: 5480679 - DNA, 25 bp, Homo sapien
tgagatggcctggacggccacgcgg

SEQ ID NO: 5480680 - DNA, 25 bp, Homo sapien
acgattgccacacggtgtaccaggg

SEQ ID NO: 5480681 - DNA, 25 bp, Homo sapien
cttccgcagaggccagggtaccttg

SEQ ID NO: 5480682 - DNA, 25 bp, Homo sapien
ctggtgccccagaccgccagaggca

SEQ ID NO: 5480683 - DNA, 25 bp, Homo sapien
ggccttccgcagaggccagggtacc

SEQ ID NO: 5480684 - DNA, 25 bp, Homo sapien
tccgcagaggccagggtaccttgaa

SEQ ID NO: 5480685 - DNA, 25 bp, Homo sapien
agagaggcctgcatggaactggcct

SEQ ID NO: 5480686 - DNA, 25 bp, Homo sapien
gagaggcctgcatggaactggcctt

SEQ ID NO: 5480687 - DNA, 25 bp, Homo sapien
ccggccgtcgcacagcgcgtgctcc

SEQ ID NO: 5480688 - DNA, 25 bp, Homo sapien
gggtcccggccgtcgcacagcgcgt

SEQ ID NO: 5480689 - DNA, 25 bp, Homo sapien
cggccgtcgcacagcgcgtgctccg

SEQ ID NO: 5480690 - DNA, 25 bp, Homo sapien
tcccggccgtcgcacagcgcgtgct

SEQ ID NO: 5480691 - DNA, 25 bp, Homo sapien
cgctcatgcatgtgttgagaagagg

SEQ ID NO: 5480692 - DNA, 25 bp, Homo sapien
tgctcctcggcaggctcggtggcgt

SEQ ID NO: 5480693 - DNA, 25 bp, Homo sapien
ggtgagagcagccatgcgctcgctc

SEQ ID NO: 5480694 - DNA, 25 bp, Homo sapien
gccatgcgctcgctcatgcatgtgt

SEQ ID NO: 5480695 - DNA, 25 bp, Homo sapien
ctcgcagggacgaacaggggccggg

SEQ ID NO: 5480696 - DNA, 25 bp, Homo sapien
cagagagaagttaacaccagcgact

SEQ ID NO: 5480697 - DNA, 25 bp, Homo sapien
agagaagttaacaccagcgactcgc

SEQ ID NO: 5480698 - DNA, 25 bp, Homo sapien
cagcgactcgcagggacgaacaggg

SEQ ID NO: 5480699 - DNA, 25 bp, Homo sapien
tcccctgaaataacaggccctgtgg

SEQ ID NO: 5480700 - DNA, 25 bp, Homo sapien
caggtgacctggaaagtttgcttgg

SEQ ID NO: 5480701 - DNA, 25 bp, Homo sapien
ttctggcggctacagccctgcagtg

SEQ ID NO: 5480702 - DNA, 25 bp, Homo sapien
tggaaaagcacttgtcagggccgct

SEQ ID NO: 5480703 - DNA, 25 bp, Homo sapien
tagaaggggtctccgccggtcacca

SEQ ID NO: 5480704 - DNA, 25 bp, Homo sapien
ggtcaccacgttgtcacagtcctcg

SEQ ID NO: 5480705 - DNA, 25 bp, Homo sapien
gacactggagggcacctctgcagcg

SEQ ID NO: 5480706 - DNA, 25 bp, Homo sapien
cagcgcggtcgtacatctcccgcat

SEQ ID NO: 5480707 - DNA, 25 bp, Homo sapien
acctccacggccacaatggtgcggg

SEQ ID NO: 5480708 - DNA, 25 bp, Homo sapien
tctctcggtctttggcggcctctgg

SEQ ID NO: 5480709 - DNA, 25 bp, Homo sapien
ccagcgtccagtagtgggtggcccc

SEQ ID NO: 5480710 - DNA, 25 bp, Homo sapien
tgtccgtcaggaggacaaactggaa

SEQ ID NO: 5480711 - DNA, 25 bp, Homo sapien
tccacttccggaaggcccagagcgc

SEQ ID NO: 5480712 - DNA, 25 bp, Homo sapien
ggcccagagcgccagctcacactcc

SEQ ID NO: 5480713 - DNA, 25 bp, Homo sapien
gcaggtcccgcagagacgtgaactg

SEQ ID NO: 5480714 - DNA, 25 bp, Homo sapien
cttgaggaagatggcgttgccccac

SEQ ID NO: 5480715 - DNA, 25 bp, Homo sapien
ctcgttcacctccgggtagtacctg

SEQ ID NO: 5480716 - DNA, 25 bp, Homo sapien
tcacctccgggtagtacctggagtc

SEQ ID NO: 5480717 - DNA, 25 bp, Homo sapien
ctccgggtagtacctggagtccatc

SEQ ID NO: 5480718 - DNA, 25 bp, Homo sapien
cctccgggtagtacctggagtccat

SEQ ID NO: 5480719 - DNA, 25 bp, Homo sapien
cgcggcggtactggtcctccagttc

SEQ ID NO: 5480720 - DNA, 25 bp, Homo sapien
gctcgcggcggtactggtcctccag

SEQ ID NO: 5480721 - DNA, 25 bp, Homo sapien
tcctcccgctcgcggcggtactggt

SEQ ID NO: 5480722 - DNA, 25 bp, Homo sapien
ccgctcgcggcggtactggtcctcc

SEQ ID NO: 5480723 - DNA, 25 bp, Homo sapien
tggttgaaccggaacacatggctct

SEQ ID NO: 5480724 - DNA, 25 bp, Homo sapien
ttctccagcagctcacgctgggcga

SEQ ID NO: 5480725 - DNA, 25 bp, Homo sapien
tcctgcttcatgtcgatgccctgct

SEQ ID NO: 5480726 - DNA, 25 bp, Homo sapien
tccgcacaaggcgtgcgctcacgct

SEQ ID NO: 5480727 - DNA, 25 bp, Homo sapien
gactggcccccggagtccccagcca

SEQ ID NO: 5480728 - DNA, 25 bp, Homo sapien
ctggcccccggagtccccagccata

SEQ ID NO: 5480729 - DNA, 25 bp, Homo sapien
ctgactggcccccggagtccccagc

SEQ ID NO: 5480730 - DNA, 25 bp, Homo sapien
tggcccccggagtccccagccatac

SEQ ID NO: 5480731 - DNA, 25 bp, Homo sapien
gactttcttgccattgacgtaggtg

SEQ ID NO: 5480732 - DNA, 25 bp, Homo sapien
tcacagggctccaaggtcaccacag

SEQ ID NO: 5480733 - DNA, 25 bp, Homo sapien
cattgacgtaggtgtctgccccctc

SEQ ID NO: 5480734 - DNA, 25 bp, Homo sapien
gtgcccactcagaacaatgtcctgc

SEQ ID NO: 5480735 - DNA, 25 bp, Homo sapien
gaagacgcagtgctcctccttgatg

SEQ ID NO: 5480736 - DNA, 25 bp, Homo sapien
ccctggagtcgctccggaagacgca

SEQ ID NO: 5480737 - DNA, 25 bp, Homo sapien
cctccttgatgaagtgcccactcag

SEQ ID NO: 5480738 - DNA, 25 bp, Homo sapien
ctggtgatcccatccttgatgtagt

SEQ ID NO: 5480739 - DNA, 25 bp, Homo sapien
tcctcgttcaggttgacgaggtgtg

SEQ ID NO: 5480740 - DNA, 25 bp, Homo sapien
catcagcgggtcctcgttcaggttg

SEQ ID NO: 5480741 - DNA, 25 bp, Homo sapien
gatcccatccttgatgtagtagagc

SEQ ID NO: 5480742 - DNA, 25 bp, Homo sapien
tgggagagaatacgcccaaggtgcc

SEQ ID NO: 5480743 - DNA, 25 bp, Homo sapien
gagaatacgcccaaggtgccgccat

SEQ ID NO: 5480744 - DNA, 25 bp, Homo sapien
ctttttgggagagaatacgcccaag

SEQ ID NO: 5480745 - DNA, 25 bp, Homo sapien
gtgccgccatcctccctcatggcca

SEQ ID NO: 5480746 - DNA, 25 bp, Homo sapien
ctcccaggtctcattgagctcagct

SEQ ID NO: 5480747 - DNA, 25 bp, Homo sapien
ctctccatccggatggcttctgtcc

SEQ ID NO: 5480748 - DNA, 25 bp, Homo sapien
tggcttctgtccgccgcagcttctc

SEQ ID NO: 5480749 - DNA, 25 bp, Homo sapien
ctcattgagctcagctatgatcttc

SEQ ID NO: 5480750 - DNA, 25 bp, Homo sapien
tggggattgaggcagagcacagtga

SEQ ID NO: 5480751 - DNA, 25 bp, Homo sapien
tgaggcagagcacagtgagctgccg

SEQ ID NO: 5480752 - DNA, 25 bp, Homo sapien
ctggggattgaggcagagcacagtg

SEQ ID NO: 5480753 - DNA, 25 bp, Homo sapien
ggcagagcacagtgagctgccgggg

SEQ ID NO: 5480754 - DNA, 25 bp, Homo sapien
aaacaagatgcgctcgtggaggctg

SEQ ID NO: 5480755 - DNA, 25 bp, Homo sapien
ctcatacccaccagggcattggtca

SEQ ID NO: 5480756 - DNA, 25 bp, Homo sapien
tgcccggggcaaacaagatgcgctc

SEQ ID NO: 5480757 - DNA, 25 bp, Homo sapien
cagtctttcaatggcctcctcgctg

SEQ ID NO: 5480758 - DNA, 25 bp, Homo sapien
gggcttcattcaccgtcccgccacg

SEQ ID NO: 5480759 - DNA, 25 bp, Homo sapien
ttcattcaccgtcccgccacggtta

SEQ ID NO: 5480760 - DNA, 25 bp, Homo sapien
ttattgttctcaaggtcggacacgt

SEQ ID NO: 5480761 - DNA, 25 bp, Homo sapien
gccacggttaaggttattgttctca

SEQ ID NO: 5480762 - DNA, 25 bp, Homo sapien
gtagggcgggcagacagacagaggg

SEQ ID NO: 5480763 - DNA, 25 bp, Homo sapien
aaaaagtaagagatggggcccagag

SEQ ID NO: 5480764 - DNA, 25 bp, Homo sapien
gatgaagatgggaaaaagtaagaga

SEQ ID NO: 5480765 - DNA, 25 bp, Homo sapien
gggtagggcgggcagacagacagag

SEQ ID NO: 5480766 - DNA, 25 bp, Homo sapien
ttgggtcctccaggcacagtgttgg

SEQ ID NO: 5480767 - DNA, 25 bp, Homo sapien
atttgggtcctccaggcacagtgtt

SEQ ID NO: 5480768 - DNA, 25 bp, Homo sapien
tttgggtcctccaggcacagtgttg

SEQ ID NO: 5480769 - DNA, 25 bp, Homo sapien
tgtcagtgatgtcgccaagaccctg

SEQ ID NO: 5480770 - DNA, 25 bp, Homo sapien
tcattgatgacagcattgcagcgga

SEQ ID NO: 5480771 - DNA, 25 bp, Homo sapien
tcatccttcagctcgcggatcagct

SEQ ID NO: 5480772 - DNA, 25 bp, Homo sapien
ttgcagcggatctgcttggcccggt

SEQ ID NO: 5480773 - DNA, 25 bp, Homo sapien
ctcatcgtagttgatgtctgcagga

SEQ ID NO: 5480774 - DNA, 25 bp, Homo sapien
tgcaggactcaaggctgccaccata

SEQ ID NO: 5480775 - DNA, 25 bp, Homo sapien
accatagctgtccttgagttaccgc

SEQ ID NO: 5480776 - DNA, 25 bp, Homo sapien
tcagcgtgctaagggtctcatcgta

SEQ ID NO: 5480777 - DNA, 25 bp, Homo sapien
caggtcaacacggaatctcggtacg

SEQ ID NO: 5480778 - DNA, 25 bp, Homo sapien
tctcggtacggaatgaaatctgtct

SEQ ID NO: 5480779 - DNA, 25 bp, Homo sapien
cggaggagccaggtcaacacggaat

SEQ ID NO: 5480780 - DNA, 25 bp, Homo sapien
cacggaatctcggtacggaatgaaa

SEQ ID NO: 5480781 - DNA, 25 bp, Homo sapien
acattcaaggtcaagcccgagccca

SEQ ID NO: 5480782 - DNA, 25 bp, Homo sapien
tttctccacacggttcttcacgcag

SEQ ID NO: 5480783 - DNA, 25 bp, Homo sapien
aacggcagtcactcgaatgcggacc

SEQ ID NO: 5480784 - DNA, 25 bp, Homo sapien
gttccacacgcaattctgtcacagt

SEQ ID NO: 5480785 - DNA, 25 bp, Homo sapien
tattcctccattcaggaaaacggca

SEQ ID NO: 5480786 - DNA, 25 bp, Homo sapien
ggcagacaccgccaccagcctcccg

SEQ ID NO: 5480787 - DNA, 25 bp, Homo sapien
cacagggcgccaatgcagggcagac

SEQ ID NO: 5480788 - DNA, 25 bp, Homo sapien
aatgcagggcagacaccgccaccag

SEQ ID NO: 5480789 - DNA, 25 bp, Homo sapien
agggcgccaatgcagggcagacacc

SEQ ID NO: 5480790 - DNA, 25 bp, Homo sapien
cccagggtggtcagcgacttgttga

SEQ ID NO: 5480791 - DNA, 25 bp, Homo sapien
ccagggtggtcagcgacttgttgat

SEQ ID NO: 5480792 - DNA, 25 bp, Homo sapien
ggagtcagcccgctcgctcccagcc

SEQ ID NO: 5480793 - DNA, 25 bp, Homo sapien
aggcgcgtgcccttggctcccgtgg

SEQ ID NO: 5480794 - DNA, 25 bp, Homo sapien
cttgaggcgcgtgcccttggctccc

SEQ ID NO: 5480795 - DNA, 25 bp, Homo sapien
gtgcccttggctcccgtggagtcag

SEQ ID NO: 5480796 - DNA, 25 bp, Homo sapien
gatattggtctctgcgtcatggcgc

SEQ ID NO: 5480797 - DNA, 25 bp, Homo sapien
cttctccgtggtgatattggtctct

SEQ ID NO: 5480798 - DNA, 25 bp, Homo sapien
atgatgttgaagacggcgtgggagc

SEQ ID NO: 5480799 - DNA, 25 bp, Homo sapien
tctctgcgtcatggcgcttctgggt

SEQ ID NO: 5480800 - DNA, 25 bp, Homo sapien
gttccctgagtccatgaggtcctgg

SEQ ID NO: 5480801 - DNA, 25 bp, Homo sapien
gacgcgctcacagtaaatctccatg

SEQ ID NO: 5480802 - DNA, 25 bp, Homo sapien
tggagaggtcctccacgtagggccc

SEQ ID NO: 5480803 - DNA, 25 bp, Homo sapien
tgggtgctccctcacgcgaaggttg

SEQ ID NO: 5480804 - DNA, 25 bp, Homo sapien
cgttggtcgtgtcgttgatccgaga

SEQ ID NO: 5480805 - DNA, 25 bp, Homo sapien
ccacggagtaggacatgttgtcgtt

SEQ ID NO: 5480806 - DNA, 25 bp, Homo sapien
catgttgtcgttggtcgtgtcgttg

SEQ ID NO: 5480807 - DNA, 25 bp, Homo sapien
gtcgttgatccgagagaagaggtcc

SEQ ID NO: 5480808 - DNA, 25 bp, Homo sapien
gtcatggtaaaggcactgagaaagt

SEQ ID NO: 5480809 - DNA, 25 bp, Homo sapien
cacacgtcatggtaaaggcactgag

SEQ ID NO: 5480810 - DNA, 25 bp, Homo sapien
cacgtcatggtaaaggcactgagaa

SEQ ID NO: 5480811 - DNA, 25 bp, Homo sapien
cacacacgtcatggtaaaggcactg

SEQ ID NO: 5480812 - DNA, 25 bp, Homo sapien
ctggtcccgccccatctgccagggc

SEQ ID NO: 5480813 - DNA, 25 bp, Homo sapien
tcagcctcagctggtcccgccccat

SEQ ID NO: 5480814 - DNA, 25 bp, Homo sapien
gggctgctctcaggggtgcctggcc

SEQ ID NO: 5480815 - DNA, 25 bp, Homo sapien
gtgcctggcccggagctctcagcct

SEQ ID NO: 5480816 - DNA, 25 bp, Homo sapien
ctgcttgcccatcatggtgtaggac

SEQ ID NO: 5480817 - DNA, 25 bp, Homo sapien
ggatgatgccctgctggtccttctc

SEQ ID NO: 5480818 - DNA, 25 bp, Homo sapien
ctgtgggatgatgccctgctggtcc

SEQ ID NO: 5480819 - DNA, 25 bp, Homo sapien
ggtccttctcctgcttgcccatcat

SEQ ID NO: 5480820 - DNA, 25 bp, Homo sapien
tgcgacgcgtagttgatgtcctcag

SEQ ID NO: 5480821 - DNA, 25 bp, Homo sapien
atctcctcgccgatgtcccggtaca

SEQ ID NO: 5480822 - DNA, 25 bp, Homo sapien
gttgtatccctcaaaggcatgctgc

SEQ ID NO: 5480823 - DNA, 25 bp, Homo sapien
gtacacctgcttctgcgacgcgtag

SEQ ID NO: 5480824 - DNA, 25 bp, Homo sapien
tgaggtgtgcgaccagtaggagtag

SEQ ID NO: 5480825 - DNA, 25 bp, Homo sapien
aaagctgaagcttttgggcgtctcc

SEQ ID NO: 5480826 - DNA, 25 bp, Homo sapien
ctgaagcttttgggcgtctccttgg

SEQ ID NO: 5480827 - DNA, 25 bp, Homo sapien
aagctgaagcttttgggcgtctcct

SEQ ID NO: 5480828 - DNA, 25 bp, Homo sapien
ctccaggctgtaccctcccgtttct

SEQ ID NO: 5480829 - DNA, 25 bp, Homo sapien
tgtcgaggtcttggcaacgctggct

SEQ ID NO: 5480830 - DNA, 25 bp, Homo sapien
gcagtgctgccagtgtcgaggtctt

SEQ ID NO: 5480831 - DNA, 25 bp, Homo sapien
aggtcttggcaacgctggctcacct

SEQ ID NO: 5480832 - DNA, 25 bp, Homo sapien
tgttcatgtcaccactcagtgcagc

SEQ ID NO: 5480833 - DNA, 25 bp, Homo sapien
gataatagatgagggcatgtcggat

SEQ ID NO: 5480834 - DNA, 25 bp, Homo sapien
catgtcggatgggtgcacggcacct

SEQ ID NO: 5480835 - DNA, 25 bp, Homo sapien
accacttgatcctgtgacggcagca

SEQ ID NO: 5480836 - DNA, 25 bp, Homo sapien
tgctccaagatactgatacggtttg

SEQ ID NO: 5480837 - DNA, 25 bp, Homo sapien
tgagagatgacaattggttcttgct

SEQ ID NO: 5480838 - DNA, 25 bp, Homo sapien
ggttcttgctccaagatactgatac

SEQ ID NO: 5480839 - DNA, 25 bp, Homo sapien
gacaattggttcttgctccaagata

SEQ ID NO: 5480840 - DNA, 25 bp, Homo sapien
tccagacatctgaatgatgcacttg

SEQ ID NO: 5480841 - DNA, 25 bp, Homo sapien
ccagacatctgaatgatgcacttgg

SEQ ID NO: 5480842 - DNA, 25 bp, Homo sapien
cagacatctgaatgatgcacttgga

SEQ ID NO: 5480843 - DNA, 25 bp, Homo sapien
gccaccttcaccgaagccccggcca

SEQ ID NO: 5480844 - DNA, 25 bp, Homo sapien
ccaccttcaccgaagccccggccat

SEQ ID NO: 5480845 - DNA, 25 bp, Homo sapien
tggccttcgtgggtcactcctcgca

SEQ ID NO: 5480846 - DNA, 25 bp, Homo sapien
ggtcactcctcgcagtagtgggagc

SEQ ID NO: 5480847 - DNA, 25 bp, Homo sapien
gtggccttcgtgggtcactcctcgc

SEQ ID NO: 5480848 - DNA, 25 bp, Homo sapien
gtcactcctcgcagtagtgggagcc

SEQ ID NO: 5480849 - DNA, 25 bp, Homo sapien
ggcactggcatgggcgcgggctctc

SEQ ID NO: 5480850 - DNA, 25 bp, Homo sapien
cggccccgcatgggcactggcatgg

SEQ ID NO: 5480851 - DNA, 25 bp, Homo sapien
gcggccccgcatgggcactggcatg

SEQ ID NO: 5480852 - DNA, 25 bp, Homo sapien
tggcccctttcgagtgaaatcgtaa

SEQ ID NO: 5480853 - DNA, 25 bp, Homo sapien
tgaaatcgtaaaacgtccacctgcc

SEQ ID NO: 5480854 - DNA, 25 bp, Homo sapien
cctggcccctttcgagtgaaatcgt

SEQ ID NO: 5480855 - DNA, 25 bp, Homo sapien
ttcgagtgaaatcgtaaaacgtcca

SEQ ID NO: 5480856 - DNA, 25 bp, Homo sapien
gatccccggggagcatgtttttctc

SEQ ID NO: 5480857 - DNA, 25 bp, Homo sapien
tattccttgggcgtcgagtgactct

SEQ ID NO: 5480858 - DNA, 25 bp, Homo sapien
gcccagtggtgtcgggacagcagct

SEQ ID NO: 5480859 - DNA, 25 bp, Homo sapien
tccttgggcgtcgagtgactctggc

SEQ ID NO: 5480860 - DNA, 25 bp, Homo sapien
aaccgggccgggatgcgcggatggc

SEQ ID NO: 5480861 - DNA, 25 bp, Homo sapien
tgctgtgacgtccaggcagcaaccg

SEQ ID NO: 5480862 - DNA, 25 bp, Homo sapien
gacgcatgtgctgtgacgtccaggc

SEQ ID NO: 5480863 - DNA, 25 bp, Homo sapien
catgtgctgtgacgtccaggcagca

SEQ ID NO: 5480864 - DNA, 25 bp, Homo sapien
tctgtggacaccaggatggaggtca

SEQ ID NO: 5480865 - DNA, 25 bp, Homo sapien
aggatggaggtcaggaagacgctgc

SEQ ID NO: 5480866 - DNA, 25 bp, Homo sapien
agcccggggggctctgtggacacca

SEQ ID NO: 5480867 - DNA, 25 bp, Homo sapien
tgaggtcagcccggggggctctgtg

SEQ ID NO: 5480868 - DNA, 25 bp, Homo sapien
cagcgcagactctccagaggtccag

SEQ ID NO: 5480869 - DNA, 25 bp, Homo sapien
ggtccaggaacctcagcagtggtgt

SEQ ID NO: 5480870 - DNA, 25 bp, Homo sapien
ccagaggtccaggaacctcagcagt

SEQ ID NO: 5480871 - DNA, 25 bp, Homo sapien
tgggagctggcctagctcatggcct

SEQ ID NO: 5480872 - DNA, 25 bp, Homo sapien
gctgactcagtgtctggccagcagc

SEQ ID NO: 5480873 - DNA, 25 bp, Homo sapien
tgccgggatctgcttgtggcgcact

SEQ ID NO: 5480874 - DNA, 25 bp, Homo sapien
gggccagatcccatcgcagcgcagc

SEQ ID NO: 5480875 - DNA, 25 bp, Homo sapien
gtggcgcactggacggccgggtgct

SEQ ID NO: 5480876 - DNA, 25 bp, Homo sapien
tcccagtccctccagttttccctca

SEQ ID NO: 5480877 - DNA, 25 bp, Homo sapien
cccagtccctccagttttccctcat

SEQ ID NO: 5480878 - DNA, 25 bp, Homo sapien
tgcttttgctgctcccagtccctcc

SEQ ID NO: 5480879 - DNA, 25 bp, Homo sapien
ttcccatgaggttgcaaggccgtgc

SEQ ID NO: 5480880 - DNA, 25 bp, Homo sapien
gggtgcccctgtaagctaaatgcca

SEQ ID NO: 5480881 - DNA, 25 bp, Homo sapien
agccaccagtccagagtccaggaag

SEQ ID NO: 5480882 - DNA, 25 bp, Homo sapien
ctctgcaggccacgagacaggaagt

SEQ ID NO: 5480883 - DNA, 25 bp, Homo sapien
aggccatgagcctcccgggaatgtt

SEQ ID NO: 5480884 - DNA, 25 bp, Homo sapien
acagtccacttgggcgcaaaaccca

SEQ ID NO: 5480885 - DNA, 25 bp, Homo sapien
tgagcctcccgggaatgtttaataa

SEQ ID NO: 5480886 - DNA, 25 bp, Homo sapien
gcgcaaaacccagtgccttccaaat

SEQ ID NO: 5480887 - DNA, 25 bp, Homo sapien
ggtgaagtcgtatttatgaatgagt

SEQ ID NO: 5480888 - DNA, 25 bp, Homo sapien
tcaattttggtgaagtcgtatttat

SEQ ID NO: 5480889 - DNA, 25 bp, Homo sapien
caattttggtgaagtcgtatttatg

SEQ ID NO: 5480890 - DNA, 25 bp, Homo sapien
tttggtgaagtcgtatttatgaatg

SEQ ID NO: 5480891 - DNA, 25 bp, Homo sapien
tgtgtgcaccctcagttggctttag

SEQ ID NO: 5480892 - DNA, 25 bp, Homo sapien
aatatacagcatttcgtcaccaagg

SEQ ID NO: 5480893 - DNA, 25 bp, Homo sapien
gggacacagatccaattctacctga

SEQ ID NO: 5480894 - DNA, 25 bp, Homo sapien
catgcaccacatggagagcttggca

SEQ ID NO: 5480895 - DNA, 25 bp, Homo sapien
catggcagagatccggtccttatcc

SEQ ID NO: 5480896 - DNA, 25 bp, Homo sapien
gcagagatccggtccttatcctgga

SEQ ID NO: 5480897 - DNA, 25 bp, Homo sapien
tctgcatggcagagatccggtcctt

SEQ ID NO: 5480898 - DNA, 25 bp, Homo sapien
gatccggtccttatcctggatgttg

SEQ ID NO: 5480899 - DNA, 25 bp, Homo sapien
cacacggtgctgcttgaaggctgcc

SEQ ID NO: 5480900 - DNA, 25 bp, Homo sapien
gagagcacagagcatggcctttgcc

SEQ ID NO: 5480901 - DNA, 25 bp, Homo sapien
gccgagagcacagcgtggaacaact

SEQ ID NO: 5480902 - DNA, 25 bp, Homo sapien
cctggcatgggcctacactgaggag

SEQ ID NO: 5480903 - DNA, 25 bp, Homo sapien
cttgtccagcaggacgtcgaagtag

SEQ ID NO: 5480904 - DNA, 25 bp, Homo sapien
cagtggcccagtaagtggggtcact

SEQ ID NO: 5480905 - DNA, 25 bp, Homo sapien
gacgtcgaagtaggcagtggcccag

SEQ ID NO: 5480906 - DNA, 25 bp, Homo sapien
ccagcaggacgtcgaagtaggcagt

SEQ ID NO: 5480907 - DNA, 25 bp, Homo sapien
cccggagccgatgcgcggcgggggg

SEQ ID NO: 5480908 - DNA, 25 bp, Homo sapien
gcgctggtagatggcaccaaggtcc

SEQ ID NO: 5480909 - DNA, 25 bp, Homo sapien
tccacgcgctggtagatggcaccaa

SEQ ID NO: 5480910 - DNA, 25 bp, Homo sapien
cctgcagcaggttgcgctgcgggtg

SEQ ID NO: 5480911 - DNA, 25 bp, Homo sapien
gcgaagccctccacgcgctggtaga

SEQ ID NO: 5480912 - DNA, 25 bp, Homo sapien
gtacacggcgccctgcagttctgcc

SEQ ID NO: 5480913 - DNA, 25 bp, Homo sapien
accaccagcaggcggtacacggcgc

SEQ ID NO: 5480914 - DNA, 25 bp, Homo sapien
agcaggcggtacacggcgccctgca

SEQ ID NO: 5480915 - DNA, 25 bp, Homo sapien
gcggtacacggcgccctgcagttct

SEQ ID NO: 5480916 - DNA, 25 bp, Homo sapien
cgtgagcaggtagtcagtggaggtc

SEQ ID NO: 5480917 - DNA, 25 bp, Homo sapien
tctcgtggttgacccggtcgaggat

SEQ ID NO: 5480918 - DNA, 25 bp, Homo sapien
gtcagtctggccactgtcacgccag

SEQ ID NO: 5480919 - DNA, 25 bp, Homo sapien
ttcaggtggccaaaggtcaggccgt

SEQ ID NO: 5480920 - DNA, 25 bp, Homo sapien
tggctgaggatccttctcaagctgc

SEQ ID NO: 5480921 - DNA, 25 bp, Homo sapien
aagcttccttctcaccacgggcacc

SEQ ID NO: 5480922 - DNA, 25 bp, Homo sapien
cctccctcaggctggccgcgttcag

SEQ ID NO: 5480923 - DNA, 25 bp, Homo sapien
tcaagctgccctcagggaatccggg

SEQ ID NO: 5480924 - DNA, 25 bp, Homo sapien
tgcaggctgcagctccccaacccca

SEQ ID NO: 5480925 - DNA, 25 bp, Homo sapien
caggctgcagctccccaaccccaga

SEQ ID NO: 5480926 - DNA, 25 bp, Homo sapien
ctgcagccctctctgctggccccca

SEQ ID NO: 5480927 - DNA, 25 bp, Homo sapien
agccctctctgctggcccccacctg

SEQ ID NO: 5480928 - DNA, 25 bp, Homo sapien
catgcctgcccaatggtgacagtcc

SEQ ID NO: 5480929 - DNA, 25 bp, Homo sapien
tgcctgcccaatggtgacagtcctc

SEQ ID NO: 5480930 - DNA, 25 bp, Homo sapien
atgcctgcccaatggtgacagtcct

SEQ ID NO: 5480931 - DNA, 25 bp, Homo sapien
cagctcagcgacttgcagcaccagt

SEQ ID NO: 5480932 - DNA, 25 bp, Homo sapien
tcagctcagcgacttgcagcaccag

SEQ ID NO: 5480933 - DNA, 25 bp, Homo sapien
tggccctggcatctctgctgccttc

SEQ ID NO: 5480934 - DNA, 25 bp, Homo sapien
ctgacgatggccctggcatctctgc

SEQ ID NO: 5480935 - DNA, 25 bp, Homo sapien
ctcctgacgatggccctggcatctc

SEQ ID NO: 5480936 - DNA, 25 bp, Homo sapien
ggccctggcatctctgctgccttct

SEQ ID NO: 5480937 - DNA, 25 bp, Homo sapien
gtgcgatgagactgtggtgcttgca

SEQ ID NO: 5480938 - DNA, 25 bp, Homo sapien
ggtgcgatgagactgtggtgcttgc

SEQ ID NO: 5480939 - DNA, 25 bp, Homo sapien
tgcgatgagactgtggtgcttgcag

SEQ ID NO: 5480940 - DNA, 25 bp, Homo sapien
ctggtgcgatgagactgtggtgctt

SEQ ID NO: 5480941 - DNA, 25 bp, Homo sapien
cacgggagtagtccacgatgaagcg

SEQ ID NO: 5480942 - DNA, 25 bp, Homo sapien
ggttcctcaatcagtagagcctcgg

SEQ ID NO: 5480943 - DNA, 25 bp, Homo sapien
taattcaaggccatcctccggctgg

SEQ ID NO: 5480944 - DNA, 25 bp, Homo sapien
cagtgaaggtatcctcggtggtcca

SEQ ID NO: 5480945 - DNA, 25 bp, Homo sapien
cagaattccagagtgacagcacagt

SEQ ID NO: 5480946 - DNA, 25 bp, Homo sapien
agcagaattccagagtgacagcaca

SEQ ID NO: 5480947 - DNA, 25 bp, Homo sapien
gcagaattccagagtgacagcacag

SEQ ID NO: 5480948 - DNA, 25 bp, Homo sapien
gaaatattgccgctggactgtgccg

SEQ ID NO: 5480949 - DNA, 25 bp, Homo sapien
tctctcatcttaggcccaaggcacg

SEQ ID NO: 5480950 - DNA, 25 bp, Homo sapien
tgtgcccggcttacaggctgcagtc

SEQ ID NO: 5480951 - DNA, 25 bp, Homo sapien
agaaaagcagtctccgtggctccac

SEQ ID NO: 5480952 - DNA, 25 bp, Homo sapien
tccagaggccttcaggcagccacta

SEQ ID NO: 5480953 - DNA, 25 bp, Homo sapien
cacaaaggggccaagtgctccagag

SEQ ID NO: 5480954 - DNA, 25 bp, Homo sapien
gacggctgggcagctttgaccacaa

SEQ ID NO: 5480955 - DNA, 25 bp, Homo sapien
gagagagaggagagccgctgctgac

SEQ ID NO: 5480956 - DNA, 25 bp, Homo sapien
ccagggctgaacctagggaagcaac

SEQ ID NO: 5480957 - DNA, 25 bp, Homo sapien
tatttcaggaagtcccggatgtgct

SEQ ID NO: 5480958 - DNA, 25 bp, Homo sapien
tcagggccagagcacggatcctgta

SEQ ID NO: 5480959 - DNA, 25 bp, Homo sapien
gaagcagacattccggcctgaacag

SEQ ID NO: 5480960 - DNA, 25 bp, Homo sapien
ccctcggagcagcactgagcggtag

SEQ ID NO: 5480961 - DNA, 25 bp, Homo sapien
gagcagacattggagcagactcatt

SEQ ID NO: 5480962 - DNA, 25 bp, Homo sapien
tgagggcgggctgatccctcacctg

SEQ ID NO: 5480963 - DNA, 25 bp, Homo sapien
gggctactttggaccaccctgagga

SEQ ID NO: 5480964 - DNA, 25 bp, Homo sapien
aaaggcggagtaatgttccacggtg

SEQ ID NO: 5480965 - DNA, 25 bp, Homo sapien
tcggccttagcacgcgcttatttca

SEQ ID NO: 5480966 - DNA, 25 bp, Homo sapien
gacctcaggtaagcgtcggccttag

SEQ ID NO: 5480967 - DNA, 25 bp, Homo sapien
tttcacctggcgttatatcctcagg

SEQ ID NO: 5480968 - DNA, 25 bp, Homo sapien
taataacgggtctttcagcagacag

SEQ ID NO: 5480969 - DNA, 25 bp, Homo sapien
acttatcaaagcatctcggtggcct

SEQ ID NO: 5480970 - DNA, 25 bp, Homo sapien
tgaaattcagtaggaacccaccctg

SEQ ID NO: 5480971 - DNA, 25 bp, Homo sapien
gaatgaaaagtctatgccggctcct

SEQ ID NO: 5480972 - DNA, 25 bp, Homo sapien
tatacatgtgtggatttgacaggca

SEQ ID NO: 5480973 - DNA, 25 bp, Homo sapien
gatggagcattttcgggcttttaag

SEQ ID NO: 5480974 - DNA, 25 bp, Homo sapien
gagggtgtctcgctcacacgcatct

SEQ ID NO: 5480975 - DNA, 25 bp, Homo sapien
agcagcgtgccacccttggagctga

SEQ ID NO: 5480976 - DNA, 25 bp, Homo sapien
ccagggacgtgcccaagtgcagaca

SEQ ID NO: 5480977 - DNA, 25 bp, Homo sapien
ggacgatgtcggacagagggcaggc

SEQ ID NO: 5480978 - DNA, 25 bp, Homo sapien
agggacgtgcccaagtgcagacaca

SEQ ID NO: 5480979 - DNA, 25 bp, Homo sapien
acacagaggtgggacgatgtcggac

SEQ ID NO: 5480980 - DNA, 25 bp, Homo sapien
caccagaggaaactctcggcaggaa

SEQ ID NO: 5480981 - DNA, 25 bp, Homo sapien
cctgcaccagaggaaactctcggca

SEQ ID NO: 5480982 - DNA, 25 bp, Homo sapien
gagatccttccaaaggagaaacaac

SEQ ID NO: 5480983 - DNA, 25 bp, Homo sapien
tgcaccagaggaaactctcggcagg

SEQ ID NO: 5480984 - DNA, 25 bp, Homo sapien
tcggtgactcggagccgggatggag

SEQ ID NO: 5480985 - DNA, 25 bp, Homo sapien
atggagggcttgtgccccatcccca

SEQ ID NO: 5480986 - DNA, 25 bp, Homo sapien
ctgactggcgttgaatgtatggttc

SEQ ID NO: 5480987 - DNA, 25 bp, Homo sapien
tctgcccattctgaacgggagccct

SEQ ID NO: 5480988 - DNA, 25 bp, Homo sapien
ggccgtggatgtctcctcatcccag

SEQ ID NO: 5480989 - DNA, 25 bp, Homo sapien
gggccgtggatgtctcctcatccca

SEQ ID NO: 5480990 - DNA, 25 bp, Homo sapien
tcaggggccgtggatgtctcctcat

SEQ ID NO: 5480991 - DNA, 25 bp, Homo sapien
ctgtcaggggccgtggatgtctcct

SEQ ID NO: 5480992 - DNA, 25 bp, Homo sapien
atcagagggagaccacggccctacg

SEQ ID NO: 5480993 - DNA, 25 bp, Homo sapien
catcagtgccacgactgaggagctg

SEQ ID NO: 5480994 - DNA, 25 bp, Homo sapien
ctggtgccaccgtgggctcccttct

SEQ ID NO: 5480995 - DNA, 25 bp, Homo sapien
tgaggagctgaaggccctccaggcc

SEQ ID NO: 5480996 - DNA, 25 bp, Homo sapien
gcatcatttctaagcctcctgaagg

SEQ ID NO: 5480997 - DNA, 25 bp, Homo sapien
gaaagaaggcatcatttctaagcct

SEQ ID NO: 5480998 - DNA, 25 bp, Homo sapien
acgcactaagccaagcccaggctct

SEQ ID NO: 5480999 - DNA, 25 bp, Homo sapien
cattggctaagggaagctgacacca

SEQ ID NO: 5481000 - DNA, 25 bp, Homo sapien
cagcctccgcagcactagggattgg

SEQ ID NO: 5481001 - DNA, 25 bp, Homo sapien
ttttcaacagcgagctgcgggccac

SEQ ID NO: 5481002 - DNA, 25 bp, Homo sapien
cccgcgagaaggacgtactgttgct

SEQ ID NO: 5481003 - DNA, 25 bp, Homo sapien
tctagagctgaatggtcctccccag

SEQ ID NO: 5481004 - DNA, 25 bp, Homo sapien
ccacagggagttcccatccagcagg

SEQ ID NO: 5481005 - DNA, 25 bp, Homo sapien
tccagcaggcaagataggtcacagg

SEQ ID NO: 5481006 - DNA, 25 bp, Homo sapien
caagataggtcacaggtggcctcca

SEQ ID NO: 5481007 - DNA, 25 bp, Homo sapien
agagggaggccaacggcctggctgg

SEQ ID NO: 5481008 - DNA, 25 bp, Homo sapien
gatgactcccgcatccagatggcga

SEQ ID NO: 5481009 - DNA, 25 bp, Homo sapien
gccggctgagcgaggcagagtgcag

SEQ ID NO: 5481010 - DNA, 25 bp, Homo sapien
ttctgcccaggatgactcccgcatc

SEQ ID NO: 5481011 - DNA, 25 bp, Homo sapien
gagtgcaggtgtgcccgggcccaga

SEQ ID NO: 5481012 - DNA, 25 bp, Homo sapien
tctggggtaggagcctcagaagccc

SEQ ID NO: 5481013 - DNA, 25 bp, Homo sapien
tctggggtaggagcctcaggagccc

SEQ ID NO: 5481014 - DNA, 25 bp, Homo sapien
ggtaggagcctcaggatcccaggct

SEQ ID NO: 5481015 - DNA, 25 bp, Homo sapien
atgctggctccaagaccgggctcat

SEQ ID NO: 5481016 - DNA, 25 bp, Homo sapien
gagccagccttagatggaacgaccc

SEQ ID NO: 5481017 - DNA, 25 bp, Homo sapien
tgaaatgcaccctcagccatcatgg

SEQ ID NO: 5481018 - DNA, 25 bp, Homo sapien
tgttttcatcccagcgatacggtcc

SEQ ID NO: 5481019 - DNA, 25 bp, Homo sapien
tcagctgtggacacgccgtttagga

SEQ ID NO: 5481020 - DNA, 25 bp, Homo sapien
ggtggcctcacaccgatccctcttt

SEQ ID NO: 5481021 - DNA, 25 bp, Homo sapien
cttgatgccggcctctcaagctgtc

SEQ ID NO: 5481022 - DNA, 25 bp, Homo sapien
ctgcacagttgggctcctccctgat

SEQ ID NO: 5481023 - DNA, 25 bp, Homo sapien
cctgatggggacatggtggctctcc

SEQ ID NO: 5481024 - DNA, 25 bp, Homo sapien
ctccagcgtcctgggggactcgagc

SEQ ID NO: 5481025 - DNA, 25 bp, Homo sapien
tgggggactcgagcttgttctcctt

SEQ ID NO: 5481026 - DNA, 25 bp, Homo sapien
gatgtgtgtctgtcctacacgggcc

SEQ ID NO: 5481027 - DNA, 25 bp, Homo sapien
gctgtgctgtcaggcttccggaaca

SEQ ID NO: 5481028 - DNA, 25 bp, Homo sapien
ccagaagggcattcgcagttacacc

SEQ ID NO: 5481029 - DNA, 25 bp, Homo sapien
ggaacagtgctactcctagaagccg

SEQ ID NO: 5481030 - DNA, 25 bp, Homo sapien
aatgccactggagcacgtctctgtg

SEQ ID NO: 5481031 - DNA, 25 bp, Homo sapien
cgcagagccgccctttgtgatctaa

SEQ ID NO: 5481032 - DNA, 25 bp, Homo sapien
gcatatcggcactttcagcccgagg

SEQ ID NO: 5481033 - DNA, 25 bp, Homo sapien
tctaaaacacctcgaggctgtgctg

SEQ ID NO: 5481034 - DNA, 25 bp, Homo sapien
cggggtgcctaaggtgctcagctgt

SEQ ID NO: 5481035 - DNA, 25 bp, Homo sapien
tgagtcgtgcaatctaggaacctgg

SEQ ID NO: 5481036 - DNA, 25 bp, Homo sapien
tctggttattgctggcacatagaac

SEQ ID NO: 5481037 - DNA, 25 bp, Homo sapien
gactatacagatcaatgtgaggaaa

SEQ ID NO: 5481038 - DNA, 25 bp, Homo sapien
tcagtaaggtttcagaatcgagtgc

SEQ ID NO: 5481039 - DNA, 25 bp, Homo sapien
ggaagccagaatgcacatcccagga

SEQ ID NO: 5481040 - DNA, 25 bp, Homo sapien
agtttgactgccctgttgacgccac

SEQ ID NO: 5481041 - DNA, 25 bp, Homo sapien
gatccctttcccgactggagaggca

SEQ ID NO: 5481042 - DNA, 25 bp, Homo sapien
tgttatccctgtggcccatgcaagg

SEQ ID NO: 5481043 - DNA, 25 bp, Homo sapien
tgtgtcactgatggatgcgcagcca

SEQ ID NO: 5481044 - DNA, 25 bp, Homo sapien
aacactatctctgtgggagttcgga

SEQ ID NO: 5481045 - DNA, 25 bp, Homo sapien
taaaatgccttagattgagtggctc

SEQ ID NO: 5481046 - DNA, 25 bp, Homo sapien
gaggtcggcagctgaactgtgtcac

SEQ ID NO: 5481047 - DNA, 25 bp, Homo sapien
acaaccggcgtgcaggcgacgtgta

SEQ ID NO: 5481048 - DNA, 25 bp, Homo sapien
gcgacgtgtactaccgggaggccac

SEQ ID NO: 5481049 - DNA, 25 bp, Homo sapien
acggaggacgtcaggcactacttcc

SEQ ID NO: 5481050 - DNA, 25 bp, Homo sapien
cattgccaaggaccgctgcgtggtg

SEQ ID NO: 5481051 - DNA, 25 bp, Homo sapien
agtgcccgcgcgggttccacggcaa

SEQ ID NO: 5481052 - DNA, 25 bp, Homo sapien
gcccgcgcgggttccacggcaagca

SEQ ID NO: 5481053 - DNA, 25 bp, Homo sapien
ctacacctgcgagtgcccgcgcggg

SEQ ID NO: 5481054 - DNA, 25 bp, Homo sapien
acacctgcgagtgcccgcgcgggtt

SEQ ID NO: 5481055 - DNA, 25 bp, Homo sapien
gatgaacatacttgaccatatgaaa

SEQ ID NO: 5481056 - DNA, 25 bp, Homo sapien
tgatgaacatacttgaccatatgaa

SEQ ID NO: 5481057 - DNA, 25 bp, Homo sapien
aatgatgaacatacttgaccatatg

SEQ ID NO: 5481058 - DNA, 25 bp, Homo sapien
tggggtagtgaaagactccttaagc

SEQ ID NO: 5481059 - DNA, 25 bp, Homo sapien
cactccgagtgtggtccggcaaatc

SEQ ID NO: 5481060 - DNA, 25 bp, Homo sapien
tgtcctggcaagatcttcccggtgg

SEQ ID NO: 5481061 - DNA, 25 bp, Homo sapien
cagtttaatgaacacgctctgagca

SEQ ID NO: 5481062 - DNA, 25 bp, Homo sapien
tgagtgccgctctgggaatctgcct

SEQ ID NO: 5481063 - DNA, 25 bp, Homo sapien
cacggtcatgtggtgtttgccagca

SEQ ID NO: 5481064 - DNA, 25 bp, Homo sapien
tctaagaggcgatagcagtctgcgc

SEQ ID NO: 5481065 - DNA, 25 bp, Homo sapien
ggttcatgttgcactctcacgctag

SEQ ID NO: 5481066 - DNA, 25 bp, Homo sapien
tccactgagtgaactgaccggctct

SEQ ID NO: 5481067 - DNA, 25 bp, Homo sapien
tctgtgaaatgcctgatcacgcctt

SEQ ID NO: 5481068 - DNA, 25 bp, Homo sapien
gatgtgactgcgcctctcctcatgg

SEQ ID NO: 5481069 - DNA, 25 bp, Homo sapien
tgatcacgccttttgactttatgtt

SEQ ID NO: 5481070 - DNA, 25 bp, Homo sapien
ctcatgggcatccaccaaaggtgtt

SEQ ID NO: 5481071 - DNA, 25 bp, Homo sapien
catttgtcaaaattcttatatgttt

SEQ ID NO: 5481072 - DNA, 25 bp, Homo sapien
tattcatttgtcaaaattcttatat

SEQ ID NO: 5481073 - DNA, 25 bp, Homo sapien
tatttgtactctttttattcatttg

SEQ ID NO: 5481074 - DNA, 25 bp, Homo sapien
gtcaaaattcttatatgttttgata

SEQ ID NO: 5481075 - DNA, 25 bp, Homo sapien
gttctgcaggtatcttcctccagcc

SEQ ID NO: 5481076 - DNA, 25 bp, Homo sapien
cctttgtcaggtctgtgttctgcag

SEQ ID NO: 5481077 - DNA, 25 bp, Homo sapien
agcctctggcttgtccttccctgtt

SEQ ID NO: 5481078 - DNA, 25 bp, Homo sapien
ctgatcctttgtcaggtctgtgttc

SEQ ID NO: 5481079 - DNA, 25 bp, Homo sapien
cattagtggttaacaagttgggagc

SEQ ID NO: 5481080 - DNA, 25 bp, Homo sapien
taaaagtagaattctggcggcgtca

SEQ ID NO: 5481081 - DNA, 25 bp, Homo sapien
gcgtcaatttgatacatctgtgcca

SEQ ID NO: 5481082 - DNA, 25 bp, Homo sapien
cacaccaaagttagaaagttattca

SEQ ID NO: 5481083 - DNA, 25 bp, Homo sapien
tagtaccatatcctttgtcagtgct

SEQ ID NO: 5481084 - DNA, 25 bp, Homo sapien
ttagtaccatatcctttgtcagtgc

SEQ ID NO: 5481085 - DNA, 25 bp, Homo sapien
tttatgcatattactgtaccacaat

SEQ ID NO: 5481086 - DNA, 25 bp, Homo sapien
tattttatgcatattactgtaccac

SEQ ID NO: 5481087 - DNA, 25 bp, Homo sapien
attttatgcatattactgtaccaca

SEQ ID NO: 5481088 - DNA, 25 bp, Homo sapien
tatgcatattactgtaccacaataa

SEQ ID NO: 5481089 - DNA, 25 bp, Homo sapien
tataaaagagtctaccgagttcacc

SEQ ID NO: 5481090 - DNA, 25 bp, Homo sapien
cagaacatggtgctacaattgggaa

SEQ ID NO: 5481091 - DNA, 25 bp, Homo sapien
gaagcacagggtgttacggacagcc

SEQ ID NO: 5481092 - DNA, 25 bp, Homo sapien
tcaagaagaccccaaacaggtgcct

SEQ ID NO: 5481093 - DNA, 25 bp, Homo sapien
tggcgtttgctgaaagaagtacgtg

SEQ ID NO: 5481094 - DNA, 25 bp, Homo sapien
tcaaggtagttacaagaattactac

SEQ ID NO: 5481095 - DNA, 25 bp, Homo sapien
tagaaaccacagagtcgaagcctgt

SEQ ID NO: 5481096 - DNA, 25 bp, Homo sapien
gaagtacgtgagaatattatatgct

SEQ ID NO: 5481097 - DNA, 25 bp, Homo sapien
gaaacccctagatcagctgcagtgg

SEQ ID NO: 5481098 - DNA, 25 bp, Homo sapien
tgtgttacagactcccgggcaggaa

SEQ ID NO: 5481099 - DNA, 25 bp, Homo sapien
tttagaaagtgttgaagaccgccgc

SEQ ID NO: 5481100 - DNA, 25 bp, Homo sapien
taaaatgctaatctccacagcggtg

SEQ ID NO: 5481101 - DNA, 25 bp, Homo sapien
tggcgcagatgagtgaggcaccctt

SEQ ID NO: 5481102 - DNA, 25 bp, Homo sapien
tgccccttataggagccctcacagt

SEQ ID NO: 5481103 - DNA, 25 bp, Homo sapien
ggttggcctaggacagctttgctct

SEQ ID NO: 5481104 - DNA, 25 bp, Homo sapien
gaaagatgaatctctggttggccta

SEQ ID NO: 5481105 - DNA, 25 bp, Homo sapien
ctgggcagggcgcttagcgtagctg

SEQ ID NO: 5481106 - DNA, 25 bp, Homo sapien
cttagcgtagctggaatgcgcagga

SEQ ID NO: 5481107 - DNA, 25 bp, Homo sapien
gcgcttagcgtagctggaatgcgca

SEQ ID NO: 5481108 - DNA, 25 bp, Homo sapien
tagcgtagctggaatgcgcaggact

SEQ ID NO: 5481109 - DNA, 25 bp, Homo sapien
acaggggcaggatcatccatgtcac

SEQ ID NO: 5481110 - DNA, 25 bp, Homo sapien
ttccacatcgtgtcccagtaacaca

SEQ ID NO: 5481111 - DNA, 25 bp, Homo sapien
ctgccacctcctgtgacaatgatgc

SEQ ID NO: 5481112 - DNA, 25 bp, Homo sapien
catcgtgtcccagtaacacacatgg

SEQ ID NO: 5481113 - DNA, 25 bp, Homo sapien
ttccacttccacatcgtgtcccagt

SEQ ID NO: 5481114 - DNA, 25 bp, Homo sapien
ggcaattcgcgaagtttcacctgta

SEQ ID NO: 5481115 - DNA, 25 bp, Homo sapien
cactgggtgaactgagagaaaccac

SEQ ID NO: 5481116 - DNA, 25 bp, Homo sapien
gagaaaccacgttcacaaacgcgta

SEQ ID NO: 5481117 - DNA, 25 bp, Homo sapien
tcaatgaagggtctcgagctcagcg

SEQ ID NO: 5481118 - DNA, 25 bp, Homo sapien
tgtggacggagtcaccgagctgctt

SEQ ID NO: 5481119 - DNA, 25 bp, Homo sapien
ttccactggcaaaggactgccactg

SEQ ID NO: 5481120 - DNA, 25 bp, Homo sapien
tgactcaactgtggcgatgtggacg

SEQ ID NO: 5481121 - DNA, 25 bp, Homo sapien
tttgcagtcacgctgtaagacgagg

SEQ ID NO: 5481122 - DNA, 25 bp, Homo sapien
gaatccccacaattgcatgcagctc

SEQ ID NO: 5481123 - DNA, 25 bp, Homo sapien
taaaataatacgatcctaagtccat

SEQ ID NO: 5481124 - DNA, 25 bp, Homo sapien
cacctagatttcagtgctgaatccc

SEQ ID NO: 5481125 - DNA, 25 bp, Homo sapien
taccaggggtattccagtgcatagg

SEQ ID NO: 5481126 - DNA, 25 bp, Homo sapien
cattgagttccctaaggtgacacgc

SEQ ID NO: 5481127 - DNA, 25 bp, Homo sapien
tagttgatcctagaatgctaccaag

SEQ ID NO: 5481128 - DNA, 25 bp, Homo sapien
tcacattactgttgtggaccaggcc

SEQ ID NO: 5481129 - DNA, 25 bp, Homo sapien
gagacaggcctctatctcagggatc

SEQ ID NO: 5481130 - DNA, 25 bp, Homo sapien
tcttttactctgctgtgcactgaat

SEQ ID NO: 5481131 - DNA, 25 bp, Homo sapien
gaaaactgccagcattttgctggcc

SEQ ID NO: 5481132 - DNA, 25 bp, Homo sapien
gtctggcactacagactacagggcc

SEQ ID NO: 5481133 - DNA, 25 bp, Homo sapien
ttaagaagccatgcaaaattaacca

SEQ ID NO: 5481134 - DNA, 25 bp, Homo sapien
tcctgaaccggaagaatgaacccca

SEQ ID NO: 5481135 - DNA, 25 bp, Homo sapien
caactgtcacggaattatcaccaac

SEQ ID NO: 5481136 - DNA, 25 bp, Homo sapien
gagaagattcaagtaaaggacccaa

SEQ ID NO: 5481137 - DNA, 25 bp, Homo sapien
gatatattgagtccccttgatgtga

SEQ ID NO: 5481138 - DNA, 25 bp, Homo sapien
tgaaaagcttccttgatatctctgg

SEQ ID NO: 5481139 - DNA, 25 bp, Homo sapien
aaagcttccttgatatctctgggcc

SEQ ID NO: 5481140 - DNA, 25 bp, Homo sapien
agcttccttgatatctctgggccct

SEQ ID NO: 5481141 - DNA, 25 bp, Homo sapien
aaaagcttccttgatatctctgggc

SEQ ID NO: 5481142 - DNA, 25 bp, Homo sapien
ctcatcattgtcctccgcctcgtcg

SEQ ID NO: 5481143 - DNA, 25 bp, Homo sapien
tcatcattgtcctccgcctcgtcgt

SEQ ID NO: 5481144 - DNA, 25 bp, Homo sapien
ggttagtgaatactgcaagtactca

SEQ ID NO: 5481145 - DNA, 25 bp, Homo sapien
tcctcaacagaagtacaggctgtcc

SEQ ID NO: 5481146 - DNA, 25 bp, Homo sapien
caggcgctccaggtaaatgtgtctc

SEQ ID NO: 5481147 - DNA, 25 bp, Homo sapien
caatgggttagggatctgtgtctgc

SEQ ID NO: 5481148 - DNA, 25 bp, Homo sapien
tctggatgcttaattcccatcctga

SEQ ID NO: 5481149 - DNA, 25 bp, Homo sapien
gcttaattcccatcctgaagtatgc

SEQ ID NO: 5481150 - DNA, 25 bp, Homo sapien
ggatgcttaattcccatcctgaagt

SEQ ID NO: 5481151 - DNA, 25 bp, Homo sapien
tgcttaattcccatcctgaagtatg

SEQ ID NO: 5481152 - DNA, 25 bp, Homo sapien
ctaggatactgacatttgtgtgaca

SEQ ID NO: 5481153 - DNA, 25 bp, Homo sapien
catttgtgtgacagccagcagtttc

SEQ ID NO: 5481154 - DNA, 25 bp, Homo sapien
tgacagccagcagtttcaaaacact

SEQ ID NO: 5481155 - DNA, 25 bp, Homo sapien
tactgacatttgtgtgacagccagc

SEQ ID NO: 5481156 - DNA, 25 bp, Homo sapien
acgctaatcacgctatcagtcattc

SEQ ID NO: 5481157 - DNA, 25 bp, Homo sapien
gctaatcacgctatcagtcattctc

SEQ ID NO: 5481158 - DNA, 25 bp, Homo sapien
tgaaactacgctaatcacgctatca

SEQ ID NO: 5481159 - DNA, 25 bp, Homo sapien
actacgctaatcacgctatcagtca

SEQ ID NO: 5481160 - DNA, 25 bp, Homo sapien
cctgctggcgcatggtgaaaatttc

SEQ ID NO: 5481161 - DNA, 25 bp, Homo sapien
tctccttgagaagcctgacagtgtc

SEQ ID NO: 5481162 - DNA, 25 bp, Homo sapien
aaaatcttggtgacttgctgtaccg

SEQ ID NO: 5481163 - DNA, 25 bp, Homo sapien
tgctgtaccgtgaaaaggcacttct

SEQ ID NO: 5481164 - DNA, 25 bp, Homo sapien
gcacccagccaaaatctgcaacttc

SEQ ID NO: 5481165 - DNA, 25 bp, Homo sapien
agccaaaatctgcaacttcttgtac

SEQ ID NO: 5481166 - DNA, 25 bp, Homo sapien
cccagccaaaatctgcaacttcttg

SEQ ID NO: 5481167 - DNA, 25 bp, Homo sapien
cagccaaaatctgcaacttcttgta

SEQ ID NO: 5481168 - DNA, 25 bp, Homo sapien
caagcccaagcttttgcaggtaact

SEQ ID NO: 5481169 - DNA, 25 bp, Homo sapien
tccaagcccaagcttttgcaggtaa

SEQ ID NO: 5481170 - DNA, 25 bp, Homo sapien
agcccaagcttttgcaggtaactgg

SEQ ID NO: 5481171 - DNA, 25 bp, Homo sapien
cttctccaagcccaagcttttgcag

SEQ ID NO: 5481172 - DNA, 25 bp, Homo sapien
aataggcagtttcaataactgggga

SEQ ID NO: 5481173 - DNA, 25 bp, Homo sapien
taggcagtttcaataactggggact

SEQ ID NO: 5481174 - DNA, 25 bp, Homo sapien
ttcttcaagaccacacacacaggct

SEQ ID NO: 5481175 - DNA, 25 bp, Homo sapien
aggcagtttcaataactggggactt

SEQ ID NO: 5481176 - DNA, 25 bp, Homo sapien
gaggagtctgcctagccatacaggc

SEQ ID NO: 5481177 - DNA, 25 bp, Homo sapien
ggatcaggcggtgccaatcaaggac

SEQ ID NO: 5481178 - DNA, 25 bp, Homo sapien
ccaaggacccttgtaccacaggagt

SEQ ID NO: 5481179 - DNA, 25 bp, Homo sapien
ggctgtagtcagtttgcgcaacaaa

SEQ ID NO: 5481180 - DNA, 25 bp, Homo sapien
aatggacaccataagacttctgagc

SEQ ID NO: 5481181 - DNA, 25 bp, Homo sapien
tcctcactattccagtgtaatggac

SEQ ID NO: 5481182 - DNA, 25 bp, Homo sapien
agacaattaattcctcactattcca

SEQ ID NO: 5481183 - DNA, 25 bp, Homo sapien
tccagtgtaatggacaccataagac

SEQ ID NO: 5481184 - DNA, 25 bp, Homo sapien
ccgtgaaacactcggcggccgcggt

SEQ ID NO: 5481185 - DNA, 25 bp, Homo sapien
gagggctccacgacctggccgtgaa

SEQ ID NO: 5481186 - DNA, 25 bp, Homo sapien
cggccgcggttcctctgcgtcgctg

SEQ ID NO: 5481187 - DNA, 25 bp, Homo sapien
cacgacctggccgtgaaacactcgg

SEQ ID NO: 5481188 - DNA, 25 bp, Homo sapien
agaagatggcagcagttacggcgcc

SEQ ID NO: 5481189 - DNA, 25 bp, Homo sapien
cggagaagatggcagcagttacggc

SEQ ID NO: 5481190 - DNA, 25 bp, Homo sapien
gatggcagcagttacggcgccggaa

SEQ ID NO: 5481191 - DNA, 25 bp, Homo sapien
atggcagcagttacggcgccggaag

SEQ ID NO: 5481192 - DNA, 25 bp, Homo sapien
cacatatccgtcactcagatgagca

SEQ ID NO: 5481193 - DNA, 25 bp, Homo sapien
gataactgtttactaacaaaggtgc

SEQ ID NO: 5481194 - DNA, 25 bp, Homo sapien
ggccatttgactaaccagttctaca

SEQ ID NO: 5481195 - DNA, 25 bp, Homo sapien
gatgagcatataccaagtcagagga

SEQ ID NO: 5481196 - DNA, 25 bp, Homo sapien
agaaggtgaattggggatgcttcag

SEQ ID NO: 5481197 - DNA, 25 bp, Homo sapien
taaaacagttgaacactggaatgtt

SEQ ID NO: 5481198 - DNA, 25 bp, Homo sapien
aacctgcacatgagtttttagaagg

SEQ ID NO: 5481199 - DNA, 25 bp, Homo sapien
tgcacatgagtttttagaaggtgaa

SEQ ID NO: 5481200 - DNA, 25 bp, Homo sapien
gctcgcagcggacagaactccactt

SEQ ID NO: 5481201 - DNA, 25 bp, Homo sapien
atccccgggatgcaaacagccttgg

SEQ ID NO: 5481202 - DNA, 25 bp, Homo sapien
ttagctggtcagcagacggggatcc

SEQ ID NO: 5481203 - DNA, 25 bp, Homo sapien
tggccattaggagcctcgcctggaa

SEQ ID NO: 5481204 - DNA, 25 bp, Homo sapien
tgttacccacgggtctgtcaccagc

SEQ ID NO: 5481205 - DNA, 25 bp, Homo sapien
tctccaaggtggtgcgtctctcagg

SEQ ID NO: 5481206 - DNA, 25 bp, Homo sapien
ttcccatgtatagtcagcaagattc

SEQ ID NO: 5481207 - DNA, 25 bp, Homo sapien
tggcttgtttactcgaaacacctct

SEQ ID NO: 5481208 - DNA, 25 bp, Homo sapien
cagaaggggttctcctcaaagacca

SEQ ID NO: 5481209 - DNA, 25 bp, Homo sapien
tcctcaaagaccagcgtgtacagag

SEQ ID NO: 5481210 - DNA, 25 bp, Homo sapien
tatggcgggtgtatggcagcctcca

SEQ ID NO: 5481211 - DNA, 25 bp, Homo sapien
gcgtgtacagagtgactcccagaga

SEQ ID NO: 5481212 - DNA, 25 bp, Homo sapien
ccttcagacgtgatcaggcatgttc

SEQ ID NO: 5481213 - DNA, 25 bp, Homo sapien
gaagcagagtacacgtccattggct

SEQ ID NO: 5481214 - DNA, 25 bp, Homo sapien
cacgatcttggtgtgaacgggcttg

SEQ ID NO: 5481215 - DNA, 25 bp, Homo sapien
tgtggacaccaaccacaagacgtgt

SEQ ID NO: 5481216 - DNA, 25 bp, Homo sapien
gtggcgacgatgtgaagggtgctgc

SEQ ID NO: 5481217 - DNA, 25 bp, Homo sapien
gatggctgtggcgacgatgtgaagg

SEQ ID NO: 5481218 - DNA, 25 bp, Homo sapien
ctgtggcgacgatgtgaagggtgct

SEQ ID NO: 5481219 - DNA, 25 bp, Homo sapien
ggaagatggctgtggcgacgatgtg

SEQ ID NO: 5481220 - DNA, 25 bp, Homo sapien
gctaccatctattgggtacctagag

SEQ ID NO: 5481221 - DNA, 25 bp, Homo sapien
tgttcacacagtgggccaaatggag

SEQ ID NO: 5481222 - DNA, 25 bp, Homo sapien
gaaccagaattagacaagggagcca

SEQ ID NO: 5481223 - DNA, 25 bp, Homo sapien
ctcaagagggcagatcacagaggcc

SEQ ID NO: 5481224 - DNA, 25 bp, Homo sapien
aagagctcaacgctgcctggcatgg

SEQ ID NO: 5481225 - DNA, 25 bp, Homo sapien
tatggcctaagcagacaccaggatc

SEQ ID NO: 5481226 - DNA, 25 bp, Homo sapien
tgcgtgactgcgagcaaatgccctg

SEQ ID NO: 5481227 - DNA, 25 bp, Homo sapien
tagatctgaagggaaactccacggc

SEQ ID NO: 5481228 - DNA, 25 bp, Homo sapien
gatttcttgtatggtcagccccgcg

SEQ ID NO: 5481229 - DNA, 25 bp, Homo sapien
gcagagatgcaaactcagccacaca

SEQ ID NO: 5481230 - DNA, 25 bp, Homo sapien
cagccccgcggtattttattgaaat

SEQ ID NO: 5481231 - DNA, 25 bp, Homo sapien
cctcgggactttctctagtgcttga

SEQ ID NO: 5481232 - DNA, 25 bp, Homo sapien
gaacttccggtgcacagtactcgat

SEQ ID NO: 5481233 - DNA, 25 bp, Homo sapien
gaagtcctcggcgatcacgatgttc

SEQ ID NO: 5481234 - DNA, 25 bp, Homo sapien
gcggccgagccaaagtctatcagct

SEQ ID NO: 5481235 - DNA, 25 bp, Homo sapien
tggatgatgtccttcaagcgcaggt

SEQ ID NO: 5481236 - DNA, 25 bp, Homo sapien
aaaaataaacctccgactcataatg

SEQ ID NO: 5481237 - DNA, 25 bp, Homo sapien
agcaattcaactaaaatatgcattt

SEQ ID NO: 5481238 - DNA, 25 bp, Homo sapien
aataaacctccgactcataatgaac

SEQ ID NO: 5481239 - DNA, 25 bp, Homo sapien
aacctccgactcataatgaactggg

SEQ ID NO: 5481240 - DNA, 25 bp, Homo sapien
aatgtgtggctactcaatgatgcag

SEQ ID NO: 5481241 - DNA, 25 bp, Homo sapien
gcagttacactggaaacgggcttcg

SEQ ID NO: 5481242 - DNA, 25 bp, Homo sapien
tcaaagacactcatggtgggcaagt

SEQ ID NO: 5481243 - DNA, 25 bp, Homo sapien
gaaagcaccaagtcgataacctcag

SEQ ID NO: 5481244 - DNA, 25 bp, Homo sapien
gatcactgatctttgcagccaccgg

SEQ ID NO: 5481245 - DNA, 25 bp, Homo sapien
tagtgggcacttacaacctgcaggc

SEQ ID NO: 5481246 - DNA, 25 bp, Homo sapien
tactgagagattaaccacaaagggc

SEQ ID NO: 5481247 - DNA, 25 bp, Homo sapien
tgaaatccccacacagaaggctaga

SEQ ID NO: 5481248 - DNA, 25 bp, Homo sapien
gaggtctaggccggagccgtgcttc

SEQ ID NO: 5481249 - DNA, 25 bp, Homo sapien
cgatgaaagcgaagaggtctaggcc

SEQ ID NO: 5481250 - DNA, 25 bp, Homo sapien
cggtcgatgaaagcgaagaggtcta

SEQ ID NO: 5481251 - DNA, 25 bp, Homo sapien
gggtggcggtcgatgaaagcgaaga

SEQ ID NO: 5481252 - DNA, 25 bp, Homo sapien
cccaagtttgggatcctcaatccaa

SEQ ID NO: 5481253 - DNA, 25 bp, Homo sapien
attgcgatctctaaagtaactttcc

SEQ ID NO: 5481254 - DNA, 25 bp, Homo sapien
cttgatgatattggcgtgctccacc

SEQ ID NO: 5481255 - DNA, 25 bp, Homo sapien
tccaccctggatagaattgcgatct

SEQ ID NO: 5481256 - DNA, 25 bp, Homo sapien
tttgggagtactcgccctcacaggc

SEQ ID NO: 5481257 - DNA, 25 bp, Homo sapien
ttttccttgtccacagcagtccaca

SEQ ID NO: 5481258 - DNA, 25 bp, Homo sapien
tgcccagcgggctcatggtactgta

SEQ ID NO: 5481259 - DNA, 25 bp, Homo sapien
agcagtccacacgaagccgaaggcc

SEQ ID NO: 5481260 - DNA, 25 bp, Homo sapien
caccaggctgggtccggtgagctca

SEQ ID NO: 5481261 - DNA, 25 bp, Homo sapien
ctgggtccggtgagctcagcagcgg

SEQ ID NO: 5481262 - DNA, 25 bp, Homo sapien
ggtccggtgagctcagcagcggtag

SEQ ID NO: 5481263 - DNA, 25 bp, Homo sapien
accaggctgggtccggtgagctcag

SEQ ID NO: 5481264 - DNA, 25 bp, Homo sapien
cggctgagtcgcgttggctgtggag

SEQ ID NO: 5481265 - DNA, 25 bp, Homo sapien
ggccctggagctccacccgcctcac

SEQ ID NO: 5481266 - DNA, 25 bp, Homo sapien
acccgcctcacctcaaactgtatac

SEQ ID NO: 5481267 - DNA, 25 bp, Homo sapien
gggtcctggcggctgagtcgcgttg

SEQ ID NO: 5481268 - DNA, 25 bp, Homo sapien
ccggagtaggcaccctcctggatct

SEQ ID NO: 5481269 - DNA, 25 bp, Homo sapien
tcagccgtaagccatctcgatggta

SEQ ID NO: 5481270 - DNA, 25 bp, Homo sapien
tcgatggtagcagctcccggagtag

SEQ ID NO: 5481271 - DNA, 25 bp, Homo sapien
cgcgcatcacgatcacgggcgtgga

SEQ ID NO: 5481272 - DNA, 25 bp, Homo sapien
cgtggaaggaacgtgtcctgggctt

SEQ ID NO: 5481273 - DNA, 25 bp, Homo sapien
ccaacgtggaaggaacgtgtcctgg

SEQ ID NO: 5481274 - DNA, 25 bp, Homo sapien
tttctctgtcgcttgctgcataatg

SEQ ID NO: 5481275 - DNA, 25 bp, Homo sapien
ctttctctgtcgcttgctgcataat

SEQ ID NO: 5481276 - DNA, 25 bp, Homo sapien
tcatccaggacacacgacccctgtt

SEQ ID NO: 5481277 - DNA, 25 bp, Homo sapien
gaaccgtcggccttggccaaggtca

SEQ ID NO: 5481278 - DNA, 25 bp, Homo sapien
gcggttctgttggatcatgtcccac

SEQ ID NO: 5481279 - DNA, 25 bp, Homo sapien
gtagtaacagctccctgtcatccag

SEQ ID NO: 5481280 - DNA, 25 bp, Homo sapien
gatgacgtttggtctgtctggtcac

SEQ ID NO: 5481281 - DNA, 25 bp, Homo sapien
ccgtggccaaggcatagcaggctga

SEQ ID NO: 5481282 - DNA, 25 bp, Homo sapien
gacgacacaggagcggtgacagcct

SEQ ID NO: 5481283 - DNA, 25 bp, Homo sapien
tctgagttcagacgtagcacaggaa

SEQ ID NO: 5481284 - DNA, 25 bp, Homo sapien
tcctgcaaggctcaactgggacagc

SEQ ID NO: 5481285 - DNA, 25 bp, Homo sapien
tgcagctcttctcggtcgttttcca

SEQ ID NO: 5481286 - DNA, 25 bp, Homo sapien
cagccacggctcatctagagtaggt

SEQ ID NO: 5481287 - DNA, 25 bp, Homo sapien
tagagtaggtgtcccaaacgagagg

SEQ ID NO: 5481288 - DNA, 25 bp, Homo sapien
cccatagcaagggcagtgcatcagg

SEQ ID NO: 5481289 - DNA, 25 bp, Homo sapien
tggcttcgccaccacaagccccatt

SEQ ID NO: 5481290 - DNA, 25 bp, Homo sapien
attcactcccatagcaagggcagtg

SEQ ID NO: 5481291 - DNA, 25 bp, Homo sapien
caagggcagtgcatcaggaggctgc

SEQ ID NO: 5481292 - DNA, 25 bp, Homo sapien
cactggcaggcttccttctgggaca

SEQ ID NO: 5481293 - DNA, 25 bp, Homo sapien
ggagcttcagaatcttcgcaggaag

SEQ ID NO: 5481294 - DNA, 25 bp, Homo sapien
tcacatccactggttcagacctgct

SEQ ID NO: 5481295 - DNA, 25 bp, Homo sapien
ttgggcagcgcctgttcaccgtgca

SEQ ID NO: 5481296 - DNA, 25 bp, Homo sapien
aatgctttggtcagcgctctcgctt

SEQ ID NO: 5481297 - DNA, 25 bp, Homo sapien
caatgctttggtcagcgctctcgct

SEQ ID NO: 5481298 - DNA, 25 bp, Homo sapien
tgctttggtcagcgctctcgcttca

SEQ ID NO: 5481299 - DNA, 25 bp, Homo sapien
atgctttggtcagcgctctcgcttc

SEQ ID NO: 5481300 - DNA, 25 bp, Homo sapien
cggatctcatctcggggcacaacgt

SEQ ID NO: 5481301 - DNA, 25 bp, Homo sapien
acaacgtggccaccagcaagcacga

SEQ ID NO: 5481302 - DNA, 25 bp, Homo sapien
gcaagcacgacattaatccttggat

SEQ ID NO: 5481303 - DNA, 25 bp, Homo sapien
tgagtcccggtgaagatgtcttggc

SEQ ID NO: 5481304 - DNA, 25 bp, Homo sapien
cagcctgcattaggaaggaccctgg

SEQ ID NO: 5481305 - DNA, 25 bp, Homo sapien
gccgggattgtaaggagaaccaaca

SEQ ID NO: 5481306 - DNA, 25 bp, Homo sapien
ttaacacccaagtcagagcacggca

SEQ ID NO: 5481307 - DNA, 25 bp, Homo sapien
ctctggatagaagccgaagtctcgg

SEQ ID NO: 5481308 - DNA, 25 bp, Homo sapien
ctgccacgggtccaaggttctctcc

SEQ ID NO: 5481309 - DNA, 25 bp, Homo sapien
tgccacgggtccaaggttctctccc

SEQ ID NO: 5481310 - DNA, 25 bp, Homo sapien
tccatgtagctgtagaaaccaggaa

SEQ ID NO: 5481311 - DNA, 25 bp, Homo sapien
ggagctgtaatgagctgttgtacgc

SEQ ID NO: 5481312 - DNA, 25 bp, Homo sapien
tctcattgccgacgtccaggcagct

SEQ ID NO: 5481313 - DNA, 25 bp, Homo sapien
aaccaggaatcaggaaagtgatatt

SEQ ID NO: 5481314 - DNA, 25 bp, Homo sapien
cctcgctgctgggttgggatttcag

SEQ ID NO: 5481315 - DNA, 25 bp, Homo sapien
taaccaaacagtgtcagcgcgaagc

SEQ ID NO: 5481316 - DNA, 25 bp, Homo sapien
caggagctccgtctttccgtaacca

SEQ ID NO: 5481317 - DNA, 25 bp, Homo sapien
tggctcttccaacagacctctgaat

SEQ ID NO: 5481318 - DNA, 25 bp, Homo sapien
caggtctgtgatatgctgcccagcc

SEQ ID NO: 5481319 - DNA, 25 bp, Homo sapien
gcaaagagactgtcacatgacgtga

SEQ ID NO: 5481320 - DNA, 25 bp, Homo sapien
cacgtacccgtgaagatgagcaaag

SEQ ID NO: 5481321 - DNA, 25 bp, Homo sapien
cacagaagggatcaggtctgtgata

SEQ ID NO: 5481322 - DNA, 25 bp, Homo sapien
tccccactacggctgatgatgtcca

SEQ ID NO: 5481323 - DNA, 25 bp, Homo sapien
aggaccaccacgcagcataggcggc

SEQ ID NO: 5481324 - DNA, 25 bp, Homo sapien
aaagcgacccaggtcgagaccctct

SEQ ID NO: 5481325 - DNA, 25 bp, Homo sapien
gtcgagaccctctccacgggctcca

SEQ ID NO: 5481326 - DNA, 25 bp, Homo sapien
caagctttgtcgttagcaaccagga

SEQ ID NO: 5481327 - DNA, 25 bp, Homo sapien
tccatgtgctcctcgctgagggcct

SEQ ID NO: 5481328 - DNA, 25 bp, Homo sapien
gcagcgtggccgtcggcctccatgt

SEQ ID NO: 5481329 - DNA, 25 bp, Homo sapien
gaactgcgtgagcttctggccaatc

SEQ ID NO: 5481330 - DNA, 25 bp, Homo sapien
ccaggacgaccatgcagaagccagc

SEQ ID NO: 5481331 - DNA, 25 bp, Homo sapien
gatggccttgttagggttgcacaca

SEQ ID NO: 5481332 - DNA, 25 bp, Homo sapien
tgatagacaataggagctccatctg

SEQ ID NO: 5481333 - DNA, 25 bp, Homo sapien
tacttgtacaaatattctgggcagc

SEQ ID NO: 5481334 - DNA, 25 bp, Homo sapien
cagggcagtgcagtttacttgtaca

SEQ ID NO: 5481335 - DNA, 25 bp, Homo sapien
accaacggaatctggacataggagg

SEQ ID NO: 5481336 - DNA, 25 bp, Homo sapien
caaaggaggcaccaacggaatctgg

SEQ ID NO: 5481337 - DNA, 25 bp, Homo sapien
gaggcaccaacggaatctggacata

SEQ ID NO: 5481338 - DNA, 25 bp, Homo sapien
aggaggcaccaacggaatctggaca

SEQ ID NO: 5481339 - DNA, 25 bp, Homo sapien
gcccattccttctgctcaggtgtct

SEQ ID NO: 5481340 - DNA, 25 bp, Homo sapien
gaaagcccattccttctgctcaggt

SEQ ID NO: 5481341 - DNA, 25 bp, Homo sapien
ccattccttctgctcaggtgtctgt

SEQ ID NO: 5481342 - DNA, 25 bp, Homo sapien
aagcccattccttctgctcaggtgt

SEQ ID NO: 5481343 - DNA, 25 bp, Homo sapien
ggtcctcttcaaaggctgttaagcc

SEQ ID NO: 5481344 - DNA, 25 bp, Homo sapien
ctgaggaaaacgacctgctgggctc

SEQ ID NO: 5481345 - DNA, 25 bp, Homo sapien
ctgggccctctgctgacactggcaa

SEQ ID NO: 5481346 - DNA, 25 bp, Homo sapien
ggctctgggaaaggcatctctggtc

SEQ ID NO: 5481347 - DNA, 25 bp, Homo sapien
actgccaagcttccaactctaacaa

SEQ ID NO: 5481348 - DNA, 25 bp, Homo sapien
aagggaggccaactgccaagcttcc

SEQ ID NO: 5481349 - DNA, 25 bp, Homo sapien
aactgccaagcttccaactctaaca

SEQ ID NO: 5481350 - DNA, 25 bp, Homo sapien
aagaagggaggccaactgccaagct

SEQ ID NO: 5481351 - DNA, 25 bp, Homo sapien
gatgttatacctactaagtcagcag

SEQ ID NO: 5481352 - DNA, 25 bp, Homo sapien
tacacacaagggtgaatcttagcca

SEQ ID NO: 5481353 - DNA, 25 bp, Homo sapien
gacaccagaatgttcgggacaatat

SEQ ID NO: 5481354 - DNA, 25 bp, Homo sapien
tcaatggcaaagagacaggcagaaa

SEQ ID NO: 5481355 - DNA, 25 bp, Homo sapien
aggccccacagccgccctggggaga

SEQ ID NO: 5481356 - DNA, 25 bp, Homo sapien
gcccgctctcccgagcgcaggtatc

SEQ ID NO: 5481357 - DNA, 25 bp, Homo sapien
ggagatggcggagcccggcccgctc

SEQ ID NO: 5481358 - DNA, 25 bp, Homo sapien
tgggccaggggcgcggagccgcgca

SEQ ID NO: 5481359 - DNA, 25 bp, Homo sapien
atcaggcgagggtcacgccaagccg

SEQ ID NO: 5481360 - DNA, 25 bp, Homo sapien
ctggatcaggcgagggtcacgccaa

SEQ ID NO: 5481361 - DNA, 25 bp, Homo sapien
ctacacaccacggaaaggagccctt

SEQ ID NO: 5481362 - DNA, 25 bp, Homo sapien
gctacacaccacggaaaggagccct

SEQ ID NO: 5481363 - DNA, 25 bp, Homo sapien
tggaccaccaagtgacctgtgcctg

SEQ ID NO: 5481364 - DNA, 25 bp, Homo sapien
tggccaaccttcgttagctaagcct

SEQ ID NO: 5481365 - DNA, 25 bp, Homo sapien
taatttaaccgtgacagcaacttgc

SEQ ID NO: 5481366 - DNA, 25 bp, Homo sapien
gccagattgtcatgcagtagaactt

SEQ ID NO: 5481367 - DNA, 25 bp, Homo sapien
tcccttgcctgtgggtgaaagctca

SEQ ID NO: 5481368 - DNA, 25 bp, Homo sapien
catgtggtccctctcctcggaagaa

SEQ ID NO: 5481369 - DNA, 25 bp, Homo sapien
taaaggcactgacgatagctggcgc

SEQ ID NO: 5481370 - DNA, 25 bp, Homo sapien
cagtcttgacctgcaacaaccgagg

SEQ ID NO: 5481371 - DNA, 25 bp, Homo sapien
ttaacctagcaagcgggcatgtgag

SEQ ID NO: 5481372 - DNA, 25 bp, Homo sapien
ccgcggcatctgtggaaagggagca

SEQ ID NO: 5481373 - DNA, 25 bp, Homo sapien
agcgtagccgcggcatctgtggaaa

SEQ ID NO: 5481374 - DNA, 25 bp, Homo sapien
ccggcaggcagctcttaacctagca

SEQ ID NO: 5481375 - DNA, 25 bp, Homo sapien
gaagtcatccgtagaagcacagacg

SEQ ID NO: 5481376 - DNA, 25 bp, Homo sapien
caaagtctgaaatagcaagtgaagc

SEQ ID NO: 5481377 - DNA, 25 bp, Homo sapien
caatcggcggattttcaccgtgtaa

SEQ ID NO: 5481378 - DNA, 25 bp, Homo sapien
caccgtgtaagtagactgaagtcat

SEQ ID NO: 5481379 - DNA, 25 bp, Homo sapien
cggaacaaaggatgagcagcccgag

SEQ ID NO: 5481380 - DNA, 25 bp, Homo sapien
ctcccactggacacccttcacggtt

SEQ ID NO: 5481381 - DNA, 25 bp, Homo sapien
cgcccactgtgcctcgtggccatgg

SEQ ID NO: 5481382 - DNA, 25 bp, Homo sapien
tggccctagtctgacttgtccctgc

SEQ ID NO: 5481383 - DNA, 25 bp, Homo sapien
attccaaagttaaggccaagggatg

SEQ ID NO: 5481384 - DNA, 25 bp, Homo sapien
tgtcctgacagcacagacgcttcag

SEQ ID NO: 5481385 - DNA, 25 bp, Homo sapien
ccaagggatggattgtagctatgga

SEQ ID NO: 5481386 - DNA, 25 bp, Homo sapien
tatggaagacatccaacaaggagga

SEQ ID NO: 5481387 - DNA, 25 bp, Homo sapien
ctaagacatcaagcgacatacagag

SEQ ID NO: 5481388 - DNA, 25 bp, Homo sapien
cagagatgtgcaaaacttggtgaga

SEQ ID NO: 5481389 - DNA, 25 bp, Homo sapien
tgaacagtttaggaaagggctcgcg

SEQ ID NO: 5481390 - DNA, 25 bp, Homo sapien
ctggaagcaagcagccaacaggaca

SEQ ID NO: 5481391 - DNA, 25 bp, Homo sapien
tgcaactagacttgggctaagccgt

SEQ ID NO: 5481392 - DNA, 25 bp, Homo sapien
tacctgggacaggacaactcgctag

SEQ ID NO: 5481393 - DNA, 25 bp, Homo sapien
taagccgtctgggtctactcaagaa

SEQ ID NO: 5481394 - DNA, 25 bp, Homo sapien
gtgtcaaggcggaagcgactgtccc

SEQ ID NO: 5481395 - DNA, 25 bp, Homo sapien
ccacgccggctgaggtagaaagaag

SEQ ID NO: 5481396 - DNA, 25 bp, Homo sapien
gaccccacggcaggtaaaatcagga

SEQ ID NO: 5481397 - DNA, 25 bp, Homo sapien
cactgaggacaagcgtaaggcccta

SEQ ID NO: 5481398 - DNA, 25 bp, Homo sapien
ggctgattgcactccacaaacagga

SEQ ID NO: 5481399 - DNA, 25 bp, Homo sapien
tgcggagctctcgtgatgaaggcca

SEQ ID NO: 5481400 - DNA, 25 bp, Homo sapien
taaacagtggagcaggtcctgagcg

SEQ ID NO: 5481401 - DNA, 25 bp, Homo sapien
cagagtgctgactgacatgccgggt

SEQ ID NO: 5481402 - DNA, 25 bp, Homo sapien
aagtggaatcctagccacggctgcg

SEQ ID NO: 5481403 - DNA, 25 bp, Homo sapien
aggagcggccgcacacacagccagg

SEQ ID NO: 5481404 - DNA, 25 bp, Homo sapien
ctggaggagcggccgcacacacagc

SEQ ID NO: 5481405 - DNA, 25 bp, Homo sapien
cgcacacacagccaggcgctaggct

SEQ ID NO: 5481406 - DNA, 25 bp, Homo sapien
cacacacagccaggcgctaggctcc

SEQ ID NO: 5481407 - DNA, 25 bp, Homo sapien
ccattgtgtggttgggtttgggtca

SEQ ID NO: 5481408 - DNA, 25 bp, Homo sapien
gagagggttctgttctttttgatca

SEQ ID NO: 5481409 - DNA, 25 bp, Homo sapien
aatttacggagggtccagccgctgg

SEQ ID NO: 5481410 - DNA, 25 bp, Homo sapien
gggaagagcgtcaacaatttacgga

SEQ ID NO: 5481411 - DNA, 25 bp, Homo sapien
agccccaaagctgggaaattcctca

SEQ ID NO: 5481412 - DNA, 25 bp, Homo sapien
aagctgggaaattcctcagagctgc

SEQ ID NO: 5481413 - DNA, 25 bp, Homo sapien
caagggagggtcttgggagccacct

SEQ ID NO: 5481414 - DNA, 25 bp, Homo sapien
acctgagccccaaagctgggaaatt

SEQ ID NO: 5481415 - DNA, 25 bp, Homo sapien
aagcagcttccgacgcagttgccac

SEQ ID NO: 5481416 - DNA, 25 bp, Homo sapien
agttgccaccctcaggacaccaagc

SEQ ID NO: 5481417 - DNA, 25 bp, Homo sapien
atgctccccaactcgcaagcagctt

SEQ ID NO: 5481418 - DNA, 25 bp, Homo sapien
gacacggcttcaggaggggatgctc

SEQ ID NO: 5481419 - DNA, 25 bp, Homo sapien
tgctggcggtccagggtgcgtcccg

SEQ ID NO: 5481420 - DNA, 25 bp, Homo sapien
gcggtccagggtgcgtcccgcacca

SEQ ID NO: 5481421 - DNA, 25 bp, Homo sapien
tggcggtccagggtgcgtcccgcac

SEQ ID NO: 5481422 - DNA, 25 bp, Homo sapien
tccagggtgcgtcccgcaccacaaa

SEQ ID NO: 5481423 - DNA, 25 bp, Homo sapien
tgtatacctgcagcgcctcactgtc

SEQ ID NO: 5481424 - DNA, 25 bp, Homo sapien
tgctgggggtttcatgtatacctgc

SEQ ID NO: 5481425 - DNA, 25 bp, Homo sapien
tcttcgtgtgctgggggtttcatgt

SEQ ID NO: 5481426 - DNA, 25 bp, Homo sapien
gggtttcatgtatacctgcagcgcc

SEQ ID NO: 5481427 - DNA, 25 bp, Homo sapien
gctcacccctgcacctcgcctgcct

SEQ ID NO: 5481428 - DNA, 25 bp, Homo sapien
ccagcatcccgcccgcctgctcacc

SEQ ID NO: 5481429 - DNA, 25 bp, Homo sapien
cgcctgcctctggaaacacaagtgc

SEQ ID NO: 5481430 - DNA, 25 bp, Homo sapien
ggcagaagacaggaagacagggtca

SEQ ID NO: 5481431 - DNA, 25 bp, Homo sapien
gacgtgccagggcgcctcagggctc

SEQ ID NO: 5481432 - DNA, 25 bp, Homo sapien
cggtggacgtgccagggcgcctcag

SEQ ID NO: 5481433 - DNA, 25 bp, Homo sapien
ggacgtgccagggcgcctcagggct

SEQ ID NO: 5481434 - DNA, 25 bp, Homo sapien
gtggacgtgccagggcgcctcaggg

SEQ ID NO: 5481435 - DNA, 25 bp, Homo sapien
tccgctctgtgggaagcgaatgtcc

SEQ ID NO: 5481436 - DNA, 25 bp, Homo sapien
cgctctgtgggaagcgaatgtccac

SEQ ID NO: 5481437 - DNA, 25 bp, Homo sapien
ccgtcacagtgacgcagttggggtc

SEQ ID NO: 5481438 - DNA, 25 bp, Homo sapien
ggagccccgtcacagtgacgcagtt

SEQ ID NO: 5481439 - DNA, 25 bp, Homo sapien
gcactgacccgtggtgtccatgagg

SEQ ID NO: 5481440 - DNA, 25 bp, Homo sapien
tgtatctcaggagcaccttgttccc

SEQ ID NO: 5481441 - DNA, 25 bp, Homo sapien
taatggccaccgtggcagtgcagcc

SEQ ID NO: 5481442 - DNA, 25 bp, Homo sapien
cgtactgtgcgctcttgcatgaaat

SEQ ID NO: 5481443 - DNA, 25 bp, Homo sapien
gcgggacgtcctcagaaaccatctg

SEQ ID NO: 5481444 - DNA, 25 bp, Homo sapien
gattttgcgaatggctttgccgcgg

SEQ ID NO: 5481445 - DNA, 25 bp, Homo sapien
cttgaattcgtccatgattttgcga

SEQ ID NO: 5481446 - DNA, 25 bp, Homo sapien
tttgccgcgggcaccaatgatgcgg

SEQ ID NO: 5481447 - DNA, 25 bp, Homo sapien
ggttaacaatgtccactcagggccg

SEQ ID NO: 5481448 - DNA, 25 bp, Homo sapien
gaagatggaaagcaacgtcacggct

SEQ ID NO: 5481449 - DNA, 25 bp, Homo sapien
ggatgccttactgggattcccgtca

SEQ ID NO: 5481450 - DNA, 25 bp, Homo sapien
gaatgtagtcagaaaaggggatgcc

SEQ ID NO: 5481451 - DNA, 25 bp, Homo sapien
gttcccatcgtccttatcaggaaac

SEQ ID NO: 5481452 - DNA, 25 bp, Homo sapien
tcccatcgtccttatcaggaaactg

SEQ ID NO: 5481453 - DNA, 25 bp, Homo sapien
ggttcccatcgtccttatcaggaaa

SEQ ID NO: 5481454 - DNA, 25 bp, Homo sapien
ctggttcccatcgtccttatcagga

SEQ ID NO: 5481455 - DNA, 25 bp, Homo sapien
ccctttctcccgataatcttgggat

SEQ ID NO: 5481456 - DNA, 25 bp, Homo sapien
tgctccaaccggatttgggtaatta

SEQ ID NO: 5481457 - DNA, 25 bp, Homo sapien
cgataatcttgggatggtatttggg

SEQ ID NO: 5481458 - DNA, 25 bp, Homo sapien
gttcacgtcatgctccaaccggatt

SEQ ID NO: 5481459 - DNA, 25 bp, Homo sapien
tggtccggaatggtccgccatctct

SEQ ID NO: 5481460 - DNA, 25 bp, Homo sapien
tgctaataatgagaaccagggaact

SEQ ID NO: 5481461 - DNA, 25 bp, Homo sapien
cagtgttctgtaacccgtggtccgg

SEQ ID NO: 5481462 - DNA, 25 bp, Homo sapien
agattgagctgatccaccctgtgac

SEQ ID NO: 5481463 - DNA, 25 bp, Homo sapien
tctgggcagtgccccggccacctcc

SEQ ID NO: 5481464 - DNA, 25 bp, Homo sapien
agtgccccggccacctcctgctcac

SEQ ID NO: 5481465 - DNA, 25 bp, Homo sapien
ggcagtgccccggccacctcctgct

SEQ ID NO: 5481466 - DNA, 25 bp, Homo sapien
ctctgggcagtgccccggccacctc

SEQ ID NO: 5481467 - DNA, 25 bp, Homo sapien
cgatgatgtcagactgcagctcagg

SEQ ID NO: 5481468 - DNA, 25 bp, Homo sapien
caggtgccgggacatgtatgttcac

SEQ ID NO: 5481469 - DNA, 25 bp, Homo sapien
cagcgaggcccgtgatggcgatgat

SEQ ID NO: 5481470 - DNA, 25 bp, Homo sapien
agtccagccttggcccggtccaaat

SEQ ID NO: 5481471 - DNA, 25 bp, Homo sapien
aagtcagtgcccagtccgagcagga

SEQ ID NO: 5481472 - DNA, 25 bp, Homo sapien
gcgacaggccactcctgtgacatgg

SEQ ID NO: 5481473 - DNA, 25 bp, Homo sapien
gaaagagtccattggccctgggacc

SEQ ID NO: 5481474 - DNA, 25 bp, Homo sapien
tgacgttcaggaccccagagaacag

SEQ ID NO: 5481475 - DNA, 25 bp, Homo sapien
ggtcaaagggcacctctacttcaat

SEQ ID NO: 5481476 - DNA, 25 bp, Homo sapien
ctttctgcccaataacgtaacggtg

SEQ ID NO: 5481477 - DNA, 25 bp, Homo sapien
acctctacttcaatggtgacaggaa

SEQ ID NO: 5481478 - DNA, 25 bp, Homo sapien
tcatcttgcggatcccacttccttt

SEQ ID NO: 5481479 - DNA, 25 bp, Homo sapien
aggatggtcatggttaggccgtggg

SEQ ID NO: 5481480 - DNA, 25 bp, Homo sapien
ggatggtcatggttaggccgtggga

SEQ ID NO: 5481481 - DNA, 25 bp, Homo sapien
gatggtcatggttaggccgtgggag

SEQ ID NO: 5481482 - DNA, 25 bp, Homo sapien
gacggctttggctaatgcccacgag

SEQ ID NO: 5481483 - DNA, 25 bp, Homo sapien
cagagtgacgttgtaagctcagcaa

SEQ ID NO: 5481484 - DNA, 25 bp, Homo sapien
tgacggctttgaccgatgcccatga

SEQ ID NO: 5481485 - DNA, 25 bp, Homo sapien
catgaggtgccacaagggactctcg

SEQ ID NO: 5481486 - DNA, 25 bp, Homo sapien
tgagagcagcatccagtacgcaggt

SEQ ID NO: 5481487 - DNA, 25 bp, Homo sapien
ggtggcactcgacactgactgcaca

SEQ ID NO: 5481488 - DNA, 25 bp, Homo sapien
cacaggatatatctgcgttgactgc

SEQ ID NO: 5481489 - DNA, 25 bp, Homo sapien
ggtgagctaggcctgataaccccac

SEQ ID NO: 5481490 - DNA, 25 bp, Homo sapien
cagcttcgtccccattctcctggac

SEQ ID NO: 5481491 - DNA, 25 bp, Homo sapien
gccggggtcacaatctttagcctct

SEQ ID NO: 5481492 - DNA, 25 bp, Homo sapien
tccccattctcctggacaactggct

SEQ ID NO: 5481493 - DNA, 25 bp, Homo sapien
ctccttggagagccggggtcacaat

SEQ ID NO: 5481494 - DNA, 25 bp, Homo sapien
ccccagaagtgaagaggcgtgtgaa

SEQ ID NO: 5481495 - DNA, 25 bp, Homo sapien
tccgattccgataaatgtgctagaa

SEQ ID NO: 5481496 - DNA, 25 bp, Homo sapien
caccgcgtgtgtaccaaaatagaca

SEQ ID NO: 5481497 - DNA, 25 bp, Homo sapien
gacgcctgcctgaaatcaagggtga

SEQ ID NO: 5481498 - DNA, 25 bp, Homo sapien
tgggaggcgccactattaacaagca

SEQ ID NO: 5481499 - DNA, 25 bp, Homo sapien
ggctcatgcgatccaaacgatgtca

SEQ ID NO: 5481500 - DNA, 25 bp, Homo sapien
ggatgcccagagagatgacactatg

SEQ ID NO: 5481501 - DNA, 25 bp, Homo sapien
gataacacagagtggagggcatacc

SEQ ID NO: 5481502 - DNA, 25 bp, Homo sapien
ctgaaatcccgagtaatctgctgga

SEQ ID NO: 5481503 - DNA, 25 bp, Homo sapien
catgacagatcgatggaatttctgg

SEQ ID NO: 5481504 - DNA, 25 bp, Homo sapien
ttaatttgaacactgaaatcccgag

SEQ ID NO: 5481505 - DNA, 25 bp, Homo sapien
gggtatagcacattctaatgtcacc

SEQ ID NO: 5481506 - DNA, 25 bp, Homo sapien
caattcagccaaaggagtgggacct

SEQ ID NO: 5481507 - DNA, 25 bp, Homo sapien
atccctggagggtggccaattcagc

SEQ ID NO: 5481508 - DNA, 25 bp, Homo sapien
taaagactgcttctaaagaccacgt

SEQ ID NO: 5481509 - DNA, 25 bp, Homo sapien
catggattcacgtggatgccctcaa

SEQ ID NO: 5481510 - DNA, 25 bp, Homo sapien
cctacagggtggagcgaacactcat

SEQ ID NO: 5481511 - DNA, 25 bp, Homo sapien
tccagggctgtatgagggagtcacc

SEQ ID NO: 5481512 - DNA, 25 bp, Homo sapien
ttctcaccaactatcaggaaggagg

SEQ ID NO: 5481513 - DNA, 25 bp, Homo sapien
gaacactcatacacggcttcggtga

SEQ ID NO: 5481514 - DNA, 25 bp, Homo sapien
tgactttgtcgctctgtgtgccaga

SEQ ID NO: 5481515 - DNA, 25 bp, Homo sapien
ttcagcaatctcccgcaagacctgg

SEQ ID NO: 5481516 - DNA, 25 bp, Homo sapien
gcatggagtcttccaccacattatc

SEQ ID NO: 5481517 - DNA, 25 bp, Homo sapien
ggtcctcaatgatctcctgaatgcg

SEQ ID NO: 5481518 - DNA, 25 bp, Homo sapien
taagaagagatggaagataagccac

SEQ ID NO: 5481519 - DNA, 25 bp, Homo sapien
agtgttaagaagagatggaagataa

SEQ ID NO: 5481520 - DNA, 25 bp, Homo sapien
aagagatggaagataagccacccca

SEQ ID NO: 5481521 - DNA, 25 bp, Homo sapien
ctgcagtgttaagaagagatggaag

SEQ ID NO: 5481522 - DNA, 25 bp, Homo sapien
tgacacgtgctccagtgctgtcgcg

SEQ ID NO: 5481523 - DNA, 25 bp, Homo sapien
gtattctggcttggcgcggatgtca

SEQ ID NO: 5481524 - DNA, 25 bp, Homo sapien
gtcgcgcaccttgcgaattttgccg

SEQ ID NO: 5481525 - DNA, 25 bp, Homo sapien
ttctgtgcctctcggacggcgtcct

SEQ ID NO: 5481526 - DNA, 25 bp, Homo sapien
actgtgttagcctgacaccacgtgc

SEQ ID NO: 5481527 - DNA, 25 bp, Homo sapien
gaaaccaatcccactgtgttagcct

SEQ ID NO: 5481528 - DNA, 25 bp, Homo sapien
gcagaaaccaatcccactgtgttag

SEQ ID NO: 5481529 - DNA, 25 bp, Homo sapien
aatcccactgtgttagcctgacacc

SEQ ID NO: 5481530 - DNA, 25 bp, Homo sapien
atgatggagcggatcagacggccct

SEQ ID NO: 5481531 - DNA, 25 bp, Homo sapien
gccttctccacatccgaggaagggc

SEQ ID NO: 5481532 - DNA, 25 bp, Homo sapien
gggatggagacctctacctcggcta

SEQ ID NO: 5481533 - DNA, 25 bp, Homo sapien
taacaacggtgtcgcttcctgaacc

SEQ ID NO: 5481534 - DNA, 25 bp, Homo sapien
gggcagaggaaaagataaactatca

SEQ ID NO: 5481535 - DNA, 25 bp, Homo sapien
gaggaggaagtcacatttttgtggc

SEQ ID NO: 5481536 - DNA, 25 bp, Homo sapien
tttttgtggcaaaaagggcagagga

SEQ ID NO: 5481537 - DNA, 25 bp, Homo sapien
gaaaccaaacacagggcaggaggag

SEQ ID NO: 5481538 - DNA, 25 bp, Homo sapien
caaacttctccaagccatttttgac

SEQ ID NO: 5481539 - DNA, 25 bp, Homo sapien
gactacaagcatgcagcaccattac

SEQ ID NO: 5481540 - DNA, 25 bp, Homo sapien
ctacaagcatgcagcaccattactg

SEQ ID NO: 5481541 - DNA, 25 bp, Homo sapien
tacaagcatgcagcaccattactgg

SEQ ID NO: 5481542 - DNA, 25 bp, Homo sapien
caagcatgcagcaccattactggct

SEQ ID NO: 5481543 - DNA, 25 bp, Homo sapien
taatacatttgacaccttggagaaa

SEQ ID NO: 5481544 - DNA, 25 bp, Homo sapien
aaaggataatgcaggactattctaa

SEQ ID NO: 5481545 - DNA, 25 bp, Homo sapien
ctgtgaaagagaggtgacgtcagta

SEQ ID NO: 5481546 - DNA, 25 bp, Homo sapien
caagcatactaccagggaaaaggca

SEQ ID NO: 5481547 - DNA, 25 bp, Homo sapien
ctctgctggaaggtcgattttggtg

SEQ ID NO: 5481548 - DNA, 25 bp, Homo sapien
aatagacagaatcctgctccgggca

SEQ ID NO: 5481549 - DNA, 25 bp, Homo sapien
gctccgggcagcttcgcagttggct

SEQ ID NO: 5481550 - DNA, 25 bp, Homo sapien
cttcgcagttggctcgcttgcctgt

SEQ ID NO: 5481551 - DNA, 25 bp, Homo sapien
gtttgaagatcggaacagaaattga

SEQ ID NO: 5481552 - DNA, 25 bp, Homo sapien
agatcggaacagaaattgaatagct

SEQ ID NO: 5481553 - DNA, 25 bp, Homo sapien
tgtgaaactgtttgaagatcggaac

SEQ ID NO: 5481554 - DNA, 25 bp, Homo sapien
cgcctcctttcccaatgatattctt

SEQ ID NO: 5481555 - DNA, 25 bp, Homo sapien
taggtcctctgagctggacaatgtc

SEQ ID NO: 5481556 - DNA, 25 bp, Homo sapien
ttttccacctcattcttaggtcctc

SEQ ID NO: 5481557 - DNA, 25 bp, Homo sapien
tgagctggacaatgtcacttttttg

SEQ ID NO: 5481558 - DNA, 25 bp, Homo sapien
cacttttttgtgctgggtctggaaa

SEQ ID NO: 5481559 - DNA, 25 bp, Homo sapien
cgttcacccttctgcccaatgattg

SEQ ID NO: 5481560 - DNA, 25 bp, Homo sapien
caatgattagatccttggtacgctc

SEQ ID NO: 5481561 - DNA, 25 bp, Homo sapien
tgcccaatgattgtgcgatgaaatc

SEQ ID NO: 5481562 - DNA, 25 bp, Homo sapien
ttgtcacgaatttcacggatccgtt

SEQ ID NO: 5481563 - DNA, 25 bp, Homo sapien
gacttccattctctaaggccgcaca

SEQ ID NO: 5481564 - DNA, 25 bp, Homo sapien
caatctctggagatggtacccaggc

SEQ ID NO: 5481565 - DNA, 25 bp, Homo sapien
aatccggttccagtgcaacgtggga

SEQ ID NO: 5481566 - DNA, 25 bp, Homo sapien
ccaagagacgcaaggccagtgcctt

SEQ ID NO: 5481567 - DNA, 25 bp, Homo sapien
gagggatgcgcacggacaccttgta

SEQ ID NO: 5481568 - DNA, 25 bp, Homo sapien
catgcgagatgcaagctccagcagc

SEQ ID NO: 5481569 - DNA, 25 bp, Homo sapien
cccctcgatgcggatcaaattgctc

SEQ ID NO: 5481570 - DNA, 25 bp, Homo sapien
tgcgcacggacaccttgtactggtc

SEQ ID NO: 5481571 - DNA, 25 bp, Homo sapien
gccaatgacataactgggcaggaca

SEQ ID NO: 5481572 - DNA, 25 bp, Homo sapien
ggcaggacagcgctaaagcgctaaa

SEQ ID NO: 5481573 - DNA, 25 bp, Homo sapien
taaataaccttatctgtgattccca

SEQ ID NO: 5481574 - DNA, 25 bp, Homo sapien
aaaggaaacacatttaggacacaga

SEQ ID NO: 5481575 - DNA, 25 bp, Homo sapien
gagggctttttgtgcgtccatccca

SEQ ID NO: 5481576 - DNA, 25 bp, Homo sapien
cactcagtctgggatttagctcgtc

SEQ ID NO: 5481577 - DNA, 25 bp, Homo sapien
cactgacgcctaagagccttgtggg

SEQ ID NO: 5481578 - DNA, 25 bp, Homo sapien
tggagaagccgtatcatcaggaaac

SEQ ID NO: 5481579 - DNA, 25 bp, Homo sapien
ggttcaagtagtgcgcaaaaaggtc

SEQ ID NO: 5481580 - DNA, 25 bp, Homo sapien
caaaaacggatacacggacgtcagt

SEQ ID NO: 5481581 - DNA, 25 bp, Homo sapien
cacgcgagtgtgtgagtatagccat

SEQ ID NO: 5481582 - DNA, 25 bp, Homo sapien
catgttatgcaggtcggtgtcccac

SEQ ID NO: 5481583 - DNA, 25 bp, Homo sapien
gtaactgtgctacacctgcaacctg

SEQ ID NO: 5481584 - DNA, 25 bp, Homo sapien
gtaactgtgctacacctacaacctg

SEQ ID NO: 5481585 - DNA, 25 bp, Homo sapien
caaaacatccttggacctgcagcag

SEQ ID NO: 5481586 - DNA, 25 bp, Homo sapien
ggtgaggcatatagcgaccttggct

SEQ ID NO: 5481587 - DNA, 25 bp, Homo sapien
tgttggcaccgctcttcccaatgag

SEQ ID NO: 5481588 - DNA, 25 bp, Homo sapien
ccaatgaggtgcctgtggaacttgt

SEQ ID NO: 5481589 - DNA, 25 bp, Homo sapien
tcgatgttgatctccacatagtcca

SEQ ID NO: 5481590 - DNA, 25 bp, Homo sapien
tggaacttgtggtcgatgttgatct

SEQ ID NO: 5481591 - DNA, 25 bp, Homo sapien
ctccagggtgatcttgtcttcgccc

SEQ ID NO: 5481592 - DNA, 25 bp, Homo sapien
cacattgacatcctctgtagggccc

SEQ ID NO: 5481593 - DNA, 25 bp, Homo sapien
gaccatgccttctatctgttcctgg

SEQ ID NO: 5481594 - DNA, 25 bp, Homo sapien
ttcgccctctgtgaactcgatgtga

SEQ ID NO: 5481595 - DNA, 25 bp, Homo sapien
taaaggccagaaggatggtacagac

SEQ ID NO: 5481596 - DNA, 25 bp, Homo sapien
taagctaacacggaagttgaccatg

SEQ ID NO: 5481597 - DNA, 25 bp, Homo sapien
caatacaacaggtgaaaaacgtgtc

SEQ ID NO: 5481598 - DNA, 25 bp, Homo sapien
acccggcccgccaaagtatcatgaa

SEQ ID NO: 5481599 - DNA, 25 bp, Homo sapien
gatgaaacggtgaagccaggaaggg

SEQ ID NO: 5481600 - DNA, 25 bp, Homo sapien
ggaaggggcggcgacagaggagacg

SEQ ID NO: 5481601 - DNA, 25 bp, Homo sapien
ctgctgagtgattttggccaggttc

SEQ ID NO: 5481602 - DNA, 25 bp, Homo sapien
ggcggcgacagaggagacggtgaag

SEQ ID NO: 5481603 - DNA, 25 bp, Homo sapien
tccaggccccaggatttacaaatcg

SEQ ID NO: 5481604 - DNA, 25 bp, Homo sapien
aaatcgagagctcatccatgaaggc

SEQ ID NO: 5481605 - DNA, 25 bp, Homo sapien
cagagctcaaggtcgtgtcacagtg

SEQ ID NO: 5481606 - DNA, 25 bp, Homo sapien
cacacttcatgctcggaggcagtta

SEQ ID NO: 5481607 - DNA, 25 bp, Homo sapien
ggatctcaacggaaactccagttct

SEQ ID NO: 5481608 - DNA, 25 bp, Homo sapien
ctaacttttcaggttcgcctcgaag

SEQ ID NO: 5481609 - DNA, 25 bp, Homo sapien
tggcatagacttcagtcaacgcctg

SEQ ID NO: 5481610 - DNA, 25 bp, Homo sapien
cgcctcgaagtattacagtctcaga

SEQ ID NO: 5481611 - DNA, 25 bp, Homo sapien
atgacatacttgtgttgggatttct

SEQ ID NO: 5481612 - DNA, 25 bp, Homo sapien
tgacatacttgtgttgggatttctt

SEQ ID NO: 5481613 - DNA, 25 bp, Homo sapien
ttccactgcaatggttgtagtcttc

SEQ ID NO: 5481614 - DNA, 25 bp, Homo sapien
tccactgcaatggttgtagtcttct

SEQ ID NO: 5481615 - DNA, 25 bp, Homo sapien
tattatacggcccagcgatgaaggg

SEQ ID NO: 5481616 - DNA, 25 bp, Homo sapien
taaatcttcttgatgcgagccacag

SEQ ID NO: 5481617 - DNA, 25 bp, Homo sapien
gcatgatctcgccaaccagtctatt

SEQ ID NO: 5481618 - DNA, 25 bp, Homo sapien
tctctgtccggttcacgctgggtgg

SEQ ID NO: 5481619 - DNA, 25 bp, Homo sapien
tttttagagttggagtcaagccctc

SEQ ID NO: 5481620 - DNA, 25 bp, Homo sapien
gggcacgaggcactcacacaggcct

SEQ ID NO: 5481621 - DNA, 25 bp, Homo sapien
gccttgaagtccacactggacacgg

SEQ ID NO: 5481622 - DNA, 25 bp, Homo sapien
gatctgatgagaacaggcctttgaa

SEQ ID NO: 5481623 - DNA, 25 bp, Homo sapien
gagatgagtaagacttcatggcgag

SEQ ID NO: 5481624 - DNA, 25 bp, Homo sapien
tctttggtgccagtgatcttgatct

SEQ ID NO: 5481625 - DNA, 25 bp, Homo sapien
ataacaaagcgatggtgttctttgg

SEQ ID NO: 5481626 - DNA, 25 bp, Homo sapien
agctttctcgatgccctctttggtg

SEQ ID NO: 5481627 - DNA, 25 bp, Homo sapien
tgctgacaactcgaaagccgtatgg

SEQ ID NO: 5481628 - DNA, 25 bp, Homo sapien
tcttttcaagacagtgatggcacgc

SEQ ID NO: 5481629 - DNA, 25 bp, Homo sapien
gccggagcgccaaagaatcgattat

SEQ ID NO: 5481630 - DNA, 25 bp, Homo sapien
tgatcaacactgaagtcgccggagc

SEQ ID NO: 5481631 - DNA, 25 bp, Homo sapien
tgacaccatgatggagaggccttgg

SEQ ID NO: 5481632 - DNA, 25 bp, Homo sapien
acagctccaagtgagcaccagttct

SEQ ID NO: 5481633 - DNA, 25 bp, Homo sapien
gcaacaatgtccttccgagctttca

SEQ ID NO: 5481634 - DNA, 25 bp, Homo sapien
tgagtctgcagtctagcaacaatgt

SEQ ID NO: 5481635 - DNA, 25 bp, Homo sapien
catccttgtaggttggagggtcgct

SEQ ID NO: 5481636 - DNA, 25 bp, Homo sapien
gggcactttccaggcaagcagcttt

SEQ ID NO: 5481637 - DNA, 25 bp, Homo sapien
gccttgatgggtcggatcttgttcc

SEQ ID NO: 5481638 - DNA, 25 bp, Homo sapien
tcctcttctgaatttagagtggcaa

SEQ ID NO: 5481639 - DNA, 25 bp, Homo sapien
gaagcattctttcagtgccgtcttc

SEQ ID NO: 5481640 - DNA, 25 bp, Homo sapien
aagcattctttcagtgccgtcttcc

SEQ ID NO: 5481641 - DNA, 25 bp, Homo sapien
cggaaccagcccacttcggtgttca

SEQ ID NO: 5481642 - DNA, 25 bp, Homo sapien
ttgggtcaaaactgcaacggaactc

SEQ ID NO: 5481643 - DNA, 25 bp, Homo sapien
acttcggtgttcagcaaaactctct

SEQ ID NO: 5481644 - DNA, 25 bp, Homo sapien
ctttgatttgttgcggaaccagccc

SEQ ID NO: 5481645 - DNA, 25 bp, Homo sapien
gttgatctcacacctacacacaatc

SEQ ID NO: 5481646 - DNA, 25 bp, Homo sapien
ggttgatctcacacctacacacaat

SEQ ID NO: 5481647 - DNA, 25 bp, Homo sapien
cagcaaaacggtcagtagccagaag

SEQ ID NO: 5481648 - DNA, 25 bp, Homo sapien
aaggtccgtcctgaggccgcctctg

SEQ ID NO: 5481649 - DNA, 25 bp, Homo sapien
aaacggtcagtagccagaaggtccg

SEQ ID NO: 5481650 - DNA, 25 bp, Homo sapien
gccagaaggtccgtcctgaggccgc

SEQ ID NO: 5481651 - DNA, 25 bp, Homo sapien
tcaagatatttatgctttggttact

SEQ ID NO: 5481652 - DNA, 25 bp, Homo sapien
caagatatttatgctttggttacta

SEQ ID NO: 5481653 - DNA, 25 bp, Homo sapien
aggtcaagatatttatgctttggtt

SEQ ID NO: 5481654 - DNA, 25 bp, Homo sapien
gtcaagatatttatgctttggttac

SEQ ID NO: 5481655 - DNA, 25 bp, Homo sapien
cgtaccccacataaccgctgggcgg

SEQ ID NO: 5481656 - DNA, 25 bp, Homo sapien
cctgcatggctggatcatctttccc

SEQ ID NO: 5481657 - DNA, 25 bp, Homo sapien
cacataaccgctgggcggctgaacc

SEQ ID NO: 5481658 - DNA, 25 bp, Homo sapien
tggctggatcatctttcccgtaccc

SEQ ID NO: 5481659 - DNA, 25 bp, Homo sapien
tatggtgaccaagagctaccgtctt

SEQ ID NO: 5481660 - DNA, 25 bp, Homo sapien
caagaattctccgtctattttgcag

SEQ ID NO: 5481661 - DNA, 25 bp, Homo sapien
gctgttagcctgtaaaagtccttca

SEQ ID NO: 5481662 - DNA, 25 bp, Homo sapien
caacagaatgtggacctcggggtct

SEQ ID NO: 5481663 - DNA, 25 bp, Homo sapien
aaggaaccttcaaaggctgtctggg

SEQ ID NO: 5481664 - DNA, 25 bp, Homo sapien
ctggggaggaccaagaactctgtga

SEQ ID NO: 5481665 - DNA, 25 bp, Homo sapien
tgaaatcgcaggattgaaaggaacc

SEQ ID NO: 5481666 - DNA, 25 bp, Homo sapien
gaaaccaggtcatgaaatcgcagga

SEQ ID NO: 5481667 - DNA, 25 bp, Homo sapien
gaccacatgtgctcctcaaccatga

SEQ ID NO: 5481668 - DNA, 25 bp, Homo sapien
cctcaaccatgaaaaggtggaactg

SEQ ID NO: 5481669 - DNA, 25 bp, Homo sapien
catgtgctcctcaaccatgaaaagg

SEQ ID NO: 5481670 - DNA, 25 bp, Homo sapien
cttgccttaggggactctggagatg

SEQ ID NO: 5481671 - DNA, 25 bp, Homo sapien
ggtctcgcctttccagcagaggatg

SEQ ID NO: 5481672 - DNA, 25 bp, Homo sapien
taatcttgcccttacgacacatggg

SEQ ID NO: 5481673 - DNA, 25 bp, Homo sapien
tagactggattaaagggtctcgcct

SEQ ID NO: 5481674 - DNA, 25 bp, Homo sapien
ggagaagactactcgtaccgtgaca

SEQ ID NO: 5481675 - DNA, 25 bp, Homo sapien
cgcgggagaagccgggacgctccga

SEQ ID NO: 5481676 - DNA, 25 bp, Homo sapien
gccgctggcttactcgccccccgcg

SEQ ID NO: 5481677 - DNA, 25 bp, Homo sapien
gcgggagaagccgggacgctccgag

SEQ ID NO: 5481678 - DNA, 25 bp, Homo sapien
ccccgcccgctggtcctgccgctgg

SEQ ID NO: 5481679 - DNA, 25 bp, Homo sapien
gaatggggtcaggtccgcacagcct

SEQ ID NO: 5481680 - DNA, 25 bp, Homo sapien
tggggtcaggtccgcacagcctgca

SEQ ID NO: 5481681 - DNA, 25 bp, Homo sapien
gggtcaggtccgcacagcctgcagc

SEQ ID NO: 5481682 - DNA, 25 bp, Homo sapien
aatggggtcaggtccgcacagcctg

SEQ ID NO: 5481683 - DNA, 25 bp, Homo sapien
gctctaagtcagcagcacggaactg

SEQ ID NO: 5481684 - DNA, 25 bp, Homo sapien
taggagccagcagaaataccatgca

SEQ ID NO: 5481685 - DNA, 25 bp, Homo sapien
gcacttcatgacaccacctagggag

SEQ ID NO: 5481686 - DNA, 25 bp, Homo sapien
aaggatatcatcagcaaagccgtgc

SEQ ID NO: 5481687 - DNA, 25 bp, Homo sapien
aaagctaggaagtcagcacaggcac

SEQ ID NO: 5481688 - DNA, 25 bp, Homo sapien
tcccagcaggcttagcacactgaaa

SEQ ID NO: 5481689 - DNA, 25 bp, Homo sapien
gattcggtccgctgtcaaggaactt

SEQ ID NO: 5481690 - DNA, 25 bp, Homo sapien
taactttgtgctaataaccgtccag

SEQ ID NO: 5481691 - DNA, 25 bp, Homo sapien
aggaacccgctgcagtggagccatg

SEQ ID NO: 5481692 - DNA, 25 bp, Homo sapien
cccgctgcagtggagccatgctgaa

SEQ ID NO: 5481693 - DNA, 25 bp, Homo sapien
ctgacaggaacccgctgcagtggag

SEQ ID NO: 5481694 - DNA, 25 bp, Homo sapien
agcagcggaccaggggtcatctcca

SEQ ID NO: 5481695 - DNA, 25 bp, Homo sapien
cacaaacatggcacacgtggcaggc

SEQ ID NO: 5481696 - DNA, 25 bp, Homo sapien
gatagaggcacacttcagcttacag

SEQ ID NO: 5481697 - DNA, 25 bp, Homo sapien
tacaagcaggcctttcatggaaatg

SEQ ID NO: 5481698 - DNA, 25 bp, Homo sapien
ttggagtgccacaaaccacgctcat

SEQ ID NO: 5481699 - DNA, 25 bp, Homo sapien
tgtatgaatgaaacaaagcctggat

SEQ ID NO: 5481700 - DNA, 25 bp, Homo sapien
gcgcccagccaatagctagatcgct

SEQ ID NO: 5481701 - DNA, 25 bp, Homo sapien
gggtctgaagaattacactaaatat

SEQ ID NO: 5481702 - DNA, 25 bp, Homo sapien
taagctcaccgttaagatctactgc

SEQ ID NO: 5481703 - DNA, 25 bp, Homo sapien
aagagctgtctttaccatgtggaga

SEQ ID NO: 5481704 - DNA, 25 bp, Homo sapien
gccacgttatctgcaagacgtctga

SEQ ID NO: 5481705 - DNA, 25 bp, Homo sapien
gcctgcacaactaagaacaattctg

SEQ ID NO: 5481706 - DNA, 25 bp, Homo sapien
aagaggacacttaagtatcaccagg

SEQ ID NO: 5481707 - DNA, 25 bp, Homo sapien
tgacccatgggtttactgatgtctc

SEQ ID NO: 5481708 - DNA, 25 bp, Homo sapien
tgcatccgtatgacccatgggttta

SEQ ID NO: 5481709 - DNA, 25 bp, Homo sapien
ggtttactgatgtctctaactgcca

SEQ ID NO: 5481710 - DNA, 25 bp, Homo sapien
gcttctaggtggaaatgcatccgta

SEQ ID NO: 5481711 - DNA, 25 bp, Homo sapien
gaatggctggcaccaaaggtaagga

SEQ ID NO: 5481712 - DNA, 25 bp, Homo sapien
tcagaagggcaacagcagagatagc

SEQ ID NO: 5481713 - DNA, 25 bp, Homo sapien
caagaagacattaggcatcaacgtg

SEQ ID NO: 5481714 - DNA, 25 bp, Homo sapien
gaaactccagctactgcacgtgtgg

SEQ ID NO: 5481715 - DNA, 25 bp, Homo sapien
gagcactgctaaagctacactcaca

SEQ ID NO: 5481716 - DNA, 25 bp, Homo sapien
ttatcaacgtctacagagcactgct

SEQ ID NO: 5481717 - DNA, 25 bp, Homo sapien
acactcacagggtgaatcaaacttg

SEQ ID NO: 5481718 - DNA, 25 bp, Homo sapien
tgctgacaactgtgaaagctgggtg

SEQ ID NO: 5481719 - DNA, 25 bp, Homo sapien
tgagtgagttataatcacgctactg

SEQ ID NO: 5481720 - DNA, 25 bp, Homo sapien
gtgagtgagttataatcacgctact

SEQ ID NO: 5481721 - DNA, 25 bp, Homo sapien
cagtgagtgagttataatcacgcta

SEQ ID NO: 5481722 - DNA, 25 bp, Homo sapien
agtgagtgagttataatcacgctac

SEQ ID NO: 5481723 - DNA, 25 bp, Homo sapien
tctggtccttttgggataagagccc

SEQ ID NO: 5481724 - DNA, 25 bp, Homo sapien
atggatctggtccttttgggataag

SEQ ID NO: 5481725 - DNA, 25 bp, Homo sapien
tccaatggatctggtccttttggga

SEQ ID NO: 5481726 - DNA, 25 bp, Homo sapien
gttccaatggatctggtccttttgg

SEQ ID NO: 5481727 - DNA, 25 bp, Homo sapien
caaaatacgtatatggcacctgcca

SEQ ID NO: 5481728 - DNA, 25 bp, Homo sapien
gcttcacgtgtaacccaggcttggg

SEQ ID NO: 5481729 - DNA, 25 bp, Homo sapien
taagccatagggatccaaaccaagt

SEQ ID NO: 5481730 - DNA, 25 bp, Homo sapien
gaattcagggaagtggctatcagcc

SEQ ID NO: 5481731 - DNA, 25 bp, Homo sapien
tagacagcacttaacccgagctggc

SEQ ID NO: 5481732 - DNA, 25 bp, Homo sapien
tgctgtgtgggcaggatatcccctt

SEQ ID NO: 5481733 - DNA, 25 bp, Homo sapien
caaacgctgggtaaatctgtcaaga

SEQ ID NO: 5481734 - DNA, 25 bp, Homo sapien
tggtcccactcctgaactagaaagt

SEQ ID NO: 5481735 - DNA, 25 bp, Homo sapien
aggcatccgccaccatgctcaacta

SEQ ID NO: 5481736 - DNA, 25 bp, Homo sapien
tgagtcaccgcgcccggccaaaaag

SEQ ID NO: 5481737 - DNA, 25 bp, Homo sapien
tgtgagtcaccgcgcccggccaaaa

SEQ ID NO: 5481738 - DNA, 25 bp, Homo sapien
catccgccaccatgctcaactaatt

SEQ ID NO: 5481739 - DNA, 25 bp, Homo sapien
gttacccaggttctgaggcatctgt

SEQ ID NO: 5481740 - DNA, 25 bp, Homo sapien
gctccaagtgttatccttccaaact

SEQ ID NO: 5481741 - DNA, 25 bp, Homo sapien
tatgagtgactaccagctccaagtg

SEQ ID NO: 5481742 - DNA, 25 bp, Homo sapien
gaatttctgataaactgagttaccc

SEQ ID NO: 5481743 - DNA, 25 bp, Homo sapien
aaggcaagccctagagtggatctga

SEQ ID NO: 5481744 - DNA, 25 bp, Homo sapien
gactgttgactttgacatcagccac

SEQ ID NO: 5481745 - DNA, 25 bp, Homo sapien
tactgctgcaggtctcacaaggtct

SEQ ID NO: 5481746 - DNA, 25 bp, Homo sapien
gaaagaattcatcgagactgctcac

SEQ ID NO: 5481747 - DNA, 25 bp, Homo sapien
gaaagaacatcctctgctcacttgg

SEQ ID NO: 5481748 - DNA, 25 bp, Homo sapien
caacgtaagctgatgacctgagaca

SEQ ID NO: 5481749 - DNA, 25 bp, Homo sapien
tagatattgccaaggtaaaactgcc

SEQ ID NO: 5481750 - DNA, 25 bp, Homo sapien
ccagcctgatgtgcgggaaatacga

SEQ ID NO: 5481751 - DNA, 25 bp, Homo sapien
tactggaggctagaaactggaaaca

SEQ ID NO: 5481752 - DNA, 25 bp, Homo sapien
aacgtgacctccgtgaaagtgcagg

SEQ ID NO: 5481753 - DNA, 25 bp, Homo sapien
ccaactggcaatatgactggaagcc

SEQ ID NO: 5481754 - DNA, 25 bp, Homo sapien
taaaagggctgaatcctgtatcggc

SEQ ID NO: 5481755 - DNA, 25 bp, Homo sapien
taataatgtcgatttcaaaagtgct

SEQ ID NO: 5481756 - DNA, 25 bp, Homo sapien
tgtacagcacggtgaatatagtaaa

SEQ ID NO: 5481757 - DNA, 25 bp, Homo sapien
tacaaaacatcaattagacaggagg

SEQ ID NO: 5481758 - DNA, 25 bp, Homo sapien
gctgacagtaatctcatatgctttc

SEQ ID NO: 5481759 - DNA, 25 bp, Homo sapien
cagatgcaaagccttcactcccagc

SEQ ID NO: 5481760 - DNA, 25 bp, Homo sapien
aagacgatggatgaaaacagtctcc

SEQ ID NO: 5481761 - DNA, 25 bp, Homo sapien
tgcccagcgttgaagaacatgagtt

SEQ ID NO: 5481762 - DNA, 25 bp, Homo sapien
taaatcaaaaaaatgcccagcgttg

SEQ ID NO: 5481763 - DNA, 25 bp, Homo sapien
ccacaccagaaggagaaagctaggg

SEQ ID NO: 5481764 - DNA, 25 bp, Homo sapien
agcccgggcacaggaaggccacgtc

SEQ ID NO: 5481765 - DNA, 25 bp, Homo sapien
ctcgggccccacaccagaaggagaa

SEQ ID NO: 5481766 - DNA, 25 bp, Homo sapien
agaaagctaggggccgcgccagctc

SEQ ID NO: 5481767 - DNA, 25 bp, Homo sapien
gaatcttcgccttgcggtgggtaac

SEQ ID NO: 5481768 - DNA, 25 bp, Homo sapien
tggtggcgggagtgcggagcgatca

SEQ ID NO: 5481769 - DNA, 25 bp, Homo sapien
ccttgcggtgggtaactggagtggg

SEQ ID NO: 5481770 - DNA, 25 bp, Homo sapien
taatgagaatcttcgccttgcggtg

SEQ ID NO: 5481771 - DNA, 25 bp, Homo sapien
aggagagaggcggtcgcgggagggc

SEQ ID NO: 5481772 - DNA, 25 bp, Homo sapien
cttcgccttgcggtgggtaactgga

SEQ ID NO: 5481773 - DNA, 25 bp, Homo sapien
tccccgtgatcgctccgcactcccg

SEQ ID NO: 5481774 - DNA, 25 bp, Homo sapien
tccagttacccaccgcaaggcgaag

SEQ ID NO: 5481775 - DNA, 25 bp, Homo sapien
tacccaccgcaaggcgaagattctc

SEQ ID NO: 5481776 - DNA, 25 bp, Homo sapien
caccgcaaggcgaagattctcatta

SEQ ID NO: 5481777 - DNA, 25 bp, Homo sapien
agttacccaccgcaaggcgaagatt

SEQ ID NO: 5481778 - DNA, 25 bp, Homo sapien
ttacccaccgcaaggcgaagattct

SEQ ID NO: 5481779 - DNA, 25 bp, Homo sapien
agcccagagtcgtccgcgttgtccg

SEQ ID NO: 5481780 - DNA, 25 bp, Homo sapien
ttccgagtgcgcaagcccagagtcg

SEQ ID NO: 5481781 - DNA, 25 bp, Homo sapien
gggaggtcaagcgtagcctcttctc

SEQ ID NO: 5481782 - DNA, 25 bp, Homo sapien
cacagttcctaccttatgagctcgg

SEQ ID NO: 5481783 - DNA, 25 bp, Homo sapien
aagatggcggcttgtccctgtttcg

SEQ ID NO: 5481784 - DNA, 25 bp, Homo sapien
tcccacggcagttggccatatagag

SEQ ID NO: 5481785 - DNA, 25 bp, Homo sapien
gaaacagggacaagccgccatcttg

SEQ ID NO: 5481786 - DNA, 25 bp, Homo sapien
ggacaacgcggacgactctgggctt

SEQ ID NO: 5481787 - DNA, 25 bp, Homo sapien
taagaaaaccgagctcataaggtag

SEQ ID NO: 5481788 - DNA, 25 bp, Homo sapien
tctatatggccaactgccgtgggag

SEQ ID NO: 5481789 - DNA, 25 bp, Homo sapien
cataaggtaggaactgtggcgaaac

SEQ ID NO: 5481790 - DNA, 25 bp, Homo sapien
gagaagaggctacgcttgacctccc

SEQ ID NO: 5481791 - DNA, 25 bp, Homo sapien
gatggccacacaagctctaagtgtt

SEQ ID NO: 5481792 - DNA, 25 bp, Homo sapien
tcccgcagggtcaacaaggggtcac

SEQ ID NO: 5481793 - DNA, 25 bp, Homo sapien
gctctaagtgtttgtcgggcctaaa

SEQ ID NO: 5481794 - DNA, 25 bp, Homo sapien
cagcaccgacgacagtgcagaggaa

SEQ ID NO: 5481795 - DNA, 25 bp, Homo sapien
tgtttgtcgggcctaaacctgtatc

SEQ ID NO: 5481796 - DNA, 25 bp, Homo sapien
tgtcgggcctaaacctgtatcctcc

SEQ ID NO: 5481797 - DNA, 25 bp, Homo sapien
gtgaccccttgttgaccctgcggga

SEQ ID NO: 5481798 - DNA, 25 bp, Homo sapien
gcgtcgagtgcggtcgaggtcggga

SEQ ID NO: 5481799 - DNA, 25 bp, Homo sapien
tcctctgcactgtcgtcggtgctgg

SEQ ID NO: 5481800 - DNA, 25 bp, Homo sapien
tttaggcccgacaaacacttagagc

SEQ ID NO: 5481801 - DNA, 25 bp, Homo sapien
gaggatacaggtttaggcccgacaa

SEQ ID NO: 5481802 - DNA, 25 bp, Homo sapien
aacacttagagcttgtgtggccatc

SEQ ID NO: 5481803 - DNA, 25 bp, Homo sapien
tccacggcatccagccgatgggctt

SEQ ID NO: 5481804 - DNA, 25 bp, Homo sapien
tacccgcagacagggcctagtcgct

SEQ ID NO: 5481805 - DNA, 25 bp, Homo sapien
tcgccgaaggtacccgcagacaggg

SEQ ID NO: 5481806 - DNA, 25 bp, Homo sapien
gtgcctcgctggtgcagaccttcgt

SEQ ID NO: 5481807 - DNA, 25 bp, Homo sapien
gcctgtccgtgcctcgctggtgcag

SEQ ID NO: 5481808 - DNA, 25 bp, Homo sapien
gcttatccacggcatccagccgatg

SEQ ID NO: 5481809 - DNA, 25 bp, Homo sapien
agcgactaggccctgtctgcgggta

SEQ ID NO: 5481810 - DNA, 25 bp, Homo sapien
catcggctggatgccgtggataagc

SEQ ID NO: 5481811 - DNA, 25 bp, Homo sapien
cctgtctgcgggtaccttcggcgag

SEQ ID NO: 5481812 - DNA, 25 bp, Homo sapien
gacgaaggtctgcaccagcgaggca

SEQ ID NO: 5481813 - DNA, 25 bp, Homo sapien
tctgcaccagcgaggcacggacagg

SEQ ID NO: 5481814 - DNA, 25 bp, Homo sapien
aagcccatcggctggatgccgtgga

SEQ ID NO: 5481815 - DNA, 25 bp, Homo sapien
aagtggcatgtatgactactaacag

SEQ ID NO: 5481816 - DNA, 25 bp, Homo sapien
cactgggtgcaaattggaccaaaaa

SEQ ID NO: 5481817 - DNA, 25 bp, Homo sapien
gtttattccacatgccagaagttgt

SEQ ID NO: 5481818 - DNA, 25 bp, Homo sapien
catctggcgatgtagaacccggaag

SEQ ID NO: 5481819 - DNA, 25 bp, Homo sapien
cccggaaggtccatgatcttattca

SEQ ID NO: 5481820 - DNA, 25 bp, Homo sapien
ggaaggtccacgttcagtataccca

SEQ ID NO: 5481821 - DNA, 25 bp, Homo sapien
tgaataagatcatggaccttccggg

SEQ ID NO: 5481822 - DNA, 25 bp, Homo sapien
cagtttgtgttgctggatcaaggct

SEQ ID NO: 5481823 - DNA, 25 bp, Homo sapien
taaacaacttctggcatgtggaata

SEQ ID NO: 5481824 - DNA, 25 bp, Homo sapien
accttccgggttctacatcgccaga

SEQ ID NO: 5481825 - DNA, 25 bp, Homo sapien
tatgtgggtatactgaacgtggacc

SEQ ID NO: 5481826 - DNA, 25 bp, Homo sapien
tggaataaacacgatctgaaggaac

SEQ ID NO: 5481827 - DNA, 25 bp, Homo sapien
aacaaaacccccatgtgctatccat

SEQ ID NO: 5481828 - DNA, 25 bp, Homo sapien
taaattacaaccgataattcggcag

SEQ ID NO: 5481829 - DNA, 25 bp, Homo sapien
tagatgctgatgaggcatatgaaat

SEQ ID NO: 5481830 - DNA, 25 bp, Homo sapien
aaacccccatgtgctatccattatc

SEQ ID NO: 5481831 - DNA, 25 bp, Homo sapien
ttacaaccgataattcggcaggaat

SEQ ID NO: 5481832 - DNA, 25 bp, Homo sapien
aattacaaccgataattcggcagga

SEQ ID NO: 5481833 - DNA, 25 bp, Homo sapien
tcctgccgaattatcggttgtaatt

SEQ ID NO: 5481834 - DNA, 25 bp, Homo sapien
attcctgccgaattatcggttgtaa

SEQ ID NO: 5481835 - DNA, 25 bp, Homo sapien
gataatggatagcacatgggggttt

SEQ ID NO: 5481836 - DNA, 25 bp, Homo sapien
taatggatagcacatgggggttttg

SEQ ID NO: 5481837 - DNA, 25 bp, Homo sapien
cctgccgaattatcggttgtaattt

SEQ ID NO: 5481838 - DNA, 25 bp, Homo sapien
atttcatatgcctcatcagcatcta

SEQ ID NO: 5481839 - DNA, 25 bp, Homo sapien
tcttttgtgaagcttcgtctgttaa

SEQ ID NO: 5481840 - DNA, 25 bp, Homo sapien
gacatcttttgtgaagcttcgtctg

SEQ ID NO: 5481841 - DNA, 25 bp, Homo sapien
cttttgtgaagcttcgtctgttaaa

SEQ ID NO: 5481842 - DNA, 25 bp, Homo sapien
catcttttgtgaagcttcgtctgtt

SEQ ID NO: 5481843 - DNA, 25 bp, Homo sapien
acatcttttgtgaagcttcgtctgt

SEQ ID NO: 5481844 - DNA, 25 bp, Homo sapien
ttgtgaagcttcgtctgttaaaaaa

SEQ ID NO: 5481845 - DNA, 25 bp, Homo sapien
aacagacgaagcttcacaaaagatg

SEQ ID NO: 5481846 - DNA, 25 bp, Homo sapien
ttaacagacgaagcttcacaaaaga

SEQ ID NO: 5481847 - DNA, 25 bp, Homo sapien
ttttttaacagacgaagcttcacaa

SEQ ID NO: 5481848 - DNA, 25 bp, Homo sapien
cagacgaagcttcacaaaagatgtc

SEQ ID NO: 5481849 - DNA, 25 bp, Homo sapien
taacagacgaagcttcacaaaagat

SEQ ID NO: 5481850 - DNA, 25 bp, Homo sapien
tttaacagacgaagcttcacaaaag

SEQ ID NO: 5481851 - DNA, 25 bp, Homo sapien
atagccaggtgtttctggatttata

SEQ ID NO: 5481852 - DNA, 25 bp, Homo sapien
tataaactgagttggctgttgctaa

SEQ ID NO: 5481853 - DNA, 25 bp, Homo sapien
gatttataaactgagttggctgttg

SEQ ID NO: 5481854 - DNA, 25 bp, Homo sapien
ccaggtgtttctggatttataaact

SEQ ID NO: 5481855 - DNA, 25 bp, Homo sapien
caggtgtttctggatttataaactg

SEQ ID NO: 5481856 - DNA, 25 bp, Homo sapien
tttataaactgagttggctgttgct

SEQ ID NO: 5481857 - DNA, 25 bp, Homo sapien
tagcaacagccaactcagtttataa

SEQ ID NO: 5481858 - DNA, 25 bp, Homo sapien
gcaacagccaactcagtttataaat

SEQ ID NO: 5481859 - DNA, 25 bp, Homo sapien
cagtttataaatccagaaacacctg

SEQ ID NO: 5481860 - DNA, 25 bp, Homo sapien
tataaatccagaaacacctggctat

SEQ ID NO: 5481861 - DNA, 25 bp, Homo sapien
agtttataaatccagaaacacctgg

SEQ ID NO: 5481862 - DNA, 25 bp, Homo sapien
ttagcaacagccaactcagtttata

SEQ ID NO: 5481863 - DNA, 25 bp, Homo sapien
tctttgccatcgagatccatttcta

SEQ ID NO: 5481864 - DNA, 25 bp, Homo sapien
cacaatgtaccaaaggacactgagg

SEQ ID NO: 5481865 - DNA, 25 bp, Homo sapien
gacactgagggcacattcaatttct

SEQ ID NO: 5481866 - DNA, 25 bp, Homo sapien
caaggtttcattcacccaggcttga

SEQ ID NO: 5481867 - DNA, 25 bp, Homo sapien
tcctgcagtgtataatgtgctgtca

SEQ ID NO: 5481868 - DNA, 25 bp, Homo sapien
tatattagactgttcacaatgtacc

SEQ ID NO: 5481869 - DNA, 25 bp, Homo sapien
gaaatggatctcgatggcaaagaag

SEQ ID NO: 5481870 - DNA, 25 bp, Homo sapien
tgacagcacattatacactgcagga

SEQ ID NO: 5481871 - DNA, 25 bp, Homo sapien
gaaattgaatgtgccctcagtgtcc

SEQ ID NO: 5481872 - DNA, 25 bp, Homo sapien
catgataagcctgacagcacattat

SEQ ID NO: 5481873 - DNA, 25 bp, Homo sapien
tcaagcctgggtgaatgaaaccttg

SEQ ID NO: 5481874 - DNA, 25 bp, Homo sapien
cctcagtgtcctttggtacattgtg

SEQ ID NO: 5481875 - DNA, 25 bp, Homo sapien
gaatttgttccaatgggattgatac

SEQ ID NO: 5481876 - DNA, 25 bp, Homo sapien
tcctccttgataactacactgcatg

SEQ ID NO: 5481877 - DNA, 25 bp, Homo sapien
tccttgataactacactgcatgaca

SEQ ID NO: 5481878 - DNA, 25 bp, Homo sapien
tgagaatttgttccaatgggattga

SEQ ID NO: 5481879 - DNA, 25 bp, Homo sapien
cttgataactacactgcatgacaat

SEQ ID NO: 5481880 - DNA, 25 bp, Homo sapien
cttcctccttgataactacactgca

SEQ ID NO: 5481881 - DNA, 25 bp, Homo sapien
attgtcatgcagtgtagttatcaag

SEQ ID NO: 5481882 - DNA, 25 bp, Homo sapien
gtatcaatcccattggaacaaattc

SEQ ID NO: 5481883 - DNA, 25 bp, Homo sapien
catgcagtgtagttatcaaggagga

SEQ ID NO: 5481884 - DNA, 25 bp, Homo sapien
tgtcatgcagtgtagttatcaagga

SEQ ID NO: 5481885 - DNA, 25 bp, Homo sapien
tcaatcccattggaacaaattctca

SEQ ID NO: 5481886 - DNA, 25 bp, Homo sapien
tgcagtgtagttatcaaggaggaag

SEQ ID NO: 5481887 - DNA, 25 bp, Homo sapien
gaattgtgggaccatttaaagagac

SEQ ID NO: 5481888 - DNA, 25 bp, Homo sapien
gactcctgtgggtaaatgtggttca

SEQ ID NO: 5481889 - DNA, 25 bp, Homo sapien
gacaggagtccatcagtggtcaaaa

SEQ ID NO: 5481890 - DNA, 25 bp, Homo sapien
ggcctcataaagatggagcttacac

SEQ ID NO: 5481891 - DNA, 25 bp, Homo sapien
gggaggaaccatcttatctctggga

SEQ ID NO: 5481892 - DNA, 25 bp, Homo sapien
cagaggagtcagaagtgatgagtaa

SEQ ID NO: 5481893 - DNA, 25 bp, Homo sapien
tcccagagataagatggttcctccc

SEQ ID NO: 5481894 - DNA, 25 bp, Homo sapien
tttgaccactgatggactcctgtcc

SEQ ID NO: 5481895 - DNA, 25 bp, Homo sapien
tagcatggatggatagtagaccagg

SEQ ID NO: 5481896 - DNA, 25 bp, Homo sapien
gtaagctccatctttatgaggccag

SEQ ID NO: 5481897 - DNA, 25 bp, Homo sapien
cataggacaaaagatgaggttagca

SEQ ID NO: 5481898 - DNA, 25 bp, Homo sapien
tgaaccacatttacccacaggagtc

SEQ ID NO: 5481899 - DNA, 25 bp, Homo sapien
aggaccagcctctagagtcagcagg

SEQ ID NO: 5481900 - DNA, 25 bp, Homo sapien
cattaactggttatgcaggaccagc

SEQ ID NO: 5481901 - DNA, 25 bp, Homo sapien
tgaaactaaagcaaccaacttggac

SEQ ID NO: 5481902 - DNA, 25 bp, Homo sapien
gtcagcaggccatcgtttaaaagtc

SEQ ID NO: 5481903 - DNA, 25 bp, Homo sapien
tacttttaaactctcggagcggcaa

SEQ ID NO: 5481904 - DNA, 25 bp, Homo sapien
tgcttcaaatgagctgcatcgctga

SEQ ID NO: 5481905 - DNA, 25 bp, Homo sapien
gacttttaaacgatggcctgctgac

SEQ ID NO: 5481906 - DNA, 25 bp, Homo sapien
tgacaccttagaatagtcctgaggg

SEQ ID NO: 5481907 - DNA, 25 bp, Homo sapien
gaaagagacaaggatgcctcagcga

SEQ ID NO: 5481908 - DNA, 25 bp, Homo sapien
gaggaaattgttgccgctccgagag

SEQ ID NO: 5481909 - DNA, 25 bp, Homo sapien
tcagcgatgcagctcatttgaagca

SEQ ID NO: 5481910 - DNA, 25 bp, Homo sapien
cctgctgactctagaggctggtcct

SEQ ID NO: 5481911 - DNA, 25 bp, Homo sapien
gatggccttgcaccaagtcagtgta

SEQ ID NO: 5481912 - DNA, 25 bp, Homo sapien
cacacagctggatcatgcatctgga

SEQ ID NO: 5481913 - DNA, 25 bp, Homo sapien
caggagtgctcatcaatggttagtc

SEQ ID NO: 5481914 - DNA, 25 bp, Homo sapien
tggagaacactacaaaaggtggctt

SEQ ID NO: 5481915 - DNA, 25 bp, Homo sapien
tacgaaaactggagcttatgactgc

SEQ ID NO: 5481916 - DNA, 25 bp, Homo sapien
tggatggcaccctcccaaggattga

SEQ ID NO: 5481917 - DNA, 25 bp, Homo sapien
gactaaccattgatgagcactcctg

SEQ ID NO: 5481918 - DNA, 25 bp, Homo sapien
gatacactgacttggtgcaaggcca

SEQ ID NO: 5481919 - DNA, 25 bp, Homo sapien
tatgcaaagaactcaccacaagcca

SEQ ID NO: 5481920 - DNA, 25 bp, Homo sapien
tccttagtggtagaggtgtgtgcct

SEQ ID NO: 5481921 - DNA, 25 bp, Homo sapien
tcaatccttgggagggtgccatcca

SEQ ID NO: 5481922 - DNA, 25 bp, Homo sapien
tccagatgcatgatccagctgtgtg

SEQ ID NO: 5481923 - DNA, 25 bp, Homo sapien
tttccacaggggaggcagatcttct

SEQ ID NO: 5481924 - DNA, 25 bp, Homo sapien
ttccacaggggaggcagatcttcta

SEQ ID NO: 5481925 - DNA, 25 bp, Homo sapien
gtaggcatcagaggttcagggcacc

SEQ ID NO: 5481926 - DNA, 25 bp, Homo sapien
caacagaccccaatttccacagggg

SEQ ID NO: 5481927 - DNA, 25 bp, Homo sapien
ccaacagaccccaatttccacaggg

SEQ ID NO: 5481928 - DNA, 25 bp, Homo sapien
gcttcaggggcacgcccaccaacag

SEQ ID NO: 5481929 - DNA, 25 bp, Homo sapien
gggtctgttggtgggcgtgcccctg

SEQ ID NO: 5481930 - DNA, 25 bp, Homo sapien
ggtgccctgaacctctgatgcctac

SEQ ID NO: 5481931 - DNA, 25 bp, Homo sapien
tagaagatctgcctcccctgtggaa

SEQ ID NO: 5481932 - DNA, 25 bp, Homo sapien
agaagatctgcctcccctgtggaaa

SEQ ID NO: 5481933 - DNA, 25 bp, Homo sapien
ctgttggtgggcgtgcccctgaagc

SEQ ID NO: 5481934 - DNA, 25 bp, Homo sapien
gaagatctgcctcccctgtggaaat

SEQ ID NO: 5481935 - DNA, 25 bp, Homo sapien
tgtggcttcgactgtgcggacctgc

SEQ ID NO: 5481936 - DNA, 25 bp, Homo sapien
aggcagcgtgcctgaagtactttca

SEQ ID NO: 5481937 - DNA, 25 bp, Homo sapien
caaccgctggagtgtaccataagga

SEQ ID NO: 5481938 - DNA, 25 bp, Homo sapien
gatgatgactgctactttcctccca

SEQ ID NO: 5481939 - DNA, 25 bp, Homo sapien
gacactaaggctacagtgcacagaa

SEQ ID NO: 5481940 - DNA, 25 bp, Homo sapien
tccgcatggatgtactctgaagtca

SEQ ID NO: 5481941 - DNA, 25 bp, Homo sapien
caagtttgctagtgactaagccccg

SEQ ID NO: 5481942 - DNA, 25 bp, Homo sapien
tgaaagtacttcaggcacgctgcct

SEQ ID NO: 5481943 - DNA, 25 bp, Homo sapien
gactaagccccgcatatgtgagtga

SEQ ID NO: 5481944 - DNA, 25 bp, Homo sapien
tccttatggtacactccagcggttg

SEQ ID NO: 5481945 - DNA, 25 bp, Homo sapien
tgacttcagagtacatccatgcgga

SEQ ID NO: 5481946 - DNA, 25 bp, Homo sapien
tgggaggaaagtagcagtcatcatc

SEQ ID NO: 5481947 - DNA, 25 bp, Homo sapien
ttctgctctacatcctgagagaaac

SEQ ID NO: 5481948 - DNA, 25 bp, Homo sapien
tctgctctacatcctgagagaaact

SEQ ID NO: 5481949 - DNA, 25 bp, Homo sapien
ttttctgctctacatcctgagagaa

SEQ ID NO: 5481950 - DNA, 25 bp, Homo sapien
cttttctgctctacatcctgagaga

SEQ ID NO: 5481951 - DNA, 25 bp, Homo sapien
tatacattgtatagaaatggaggcc

SEQ ID NO: 5481952 - DNA, 25 bp, Homo sapien
tctgttgtgccgtctgatcttgaac

SEQ ID NO: 5481953 - DNA, 25 bp, Homo sapien
tttaagggttgcatagttgtccatt

SEQ ID NO: 5481954 - DNA, 25 bp, Homo sapien
caggttgctgagttcacaggcgtga

SEQ ID NO: 5481955 - DNA, 25 bp, Homo sapien
tatttgtcctgatgagtacgggcct

SEQ ID NO: 5481956 - DNA, 25 bp, Homo sapien
ctgacagggaaggaaccaagattca

SEQ ID NO: 5481957 - DNA, 25 bp, Homo sapien
cacatgggtgtactcgtgttccagg

SEQ ID NO: 5481958 - DNA, 25 bp, Homo sapien
tccaggtgctcgaaattgctcgaaa

SEQ ID NO: 5481959 - DNA, 25 bp, Homo sapien
attagaacgacttagtgttggggca

SEQ ID NO: 5481960 - DNA, 25 bp, Homo sapien
tagaaattagaacgacttagtgttg

SEQ ID NO: 5481961 - DNA, 25 bp, Homo sapien
ttcagtagaaattagaacgacttag

SEQ ID NO: 5481962 - DNA, 25 bp, Homo sapien
ctttcagtagaaattagaacgactt

SEQ ID NO: 5481963 - DNA, 25 bp, Homo sapien
ccctggtgaagctaatgctgtggaa

SEQ ID NO: 5481964 - DNA, 25 bp, Homo sapien
cattactgttgcctgacgacggtcc

SEQ ID NO: 5481965 - DNA, 25 bp, Homo sapien
gcaggaatgtaaggaacccgcatca

SEQ ID NO: 5481966 - DNA, 25 bp, Homo sapien
ttcctaaggagtgggatcatgcccc

SEQ ID NO: 5481967 - DNA, 25 bp, Homo sapien
agcagtccccgtcaatgagaggcca

SEQ ID NO: 5481968 - DNA, 25 bp, Homo sapien
cagtgcctgttggacccatgaagtc

SEQ ID NO: 5481969 - DNA, 25 bp, Homo sapien
tgggtcaccgtcatagccaggtgtg

SEQ ID NO: 5481970 - DNA, 25 bp, Homo sapien
ttacatccagaaccttaaagccgca

SEQ ID NO: 5481971 - DNA, 25 bp, Homo sapien
tgagggatggacaatagcacaccaa

SEQ ID NO: 5481972 - DNA, 25 bp, Homo sapien
ggttaagtcattcccattaatgtca

SEQ ID NO: 5481973 - DNA, 25 bp, Homo sapien
tctgccattccaccgctctgaggag

SEQ ID NO: 5481974 - DNA, 25 bp, Homo sapien
tgtagcacttcacatgtgctgtggt

SEQ ID NO: 5481975 - DNA, 25 bp, Homo sapien
caaggaagcgccatctttagcatga

SEQ ID NO: 5481976 - DNA, 25 bp, Homo sapien
tcaaggtatgcttgttccctcccag

SEQ ID NO: 5481977 - DNA, 25 bp, Homo sapien
tgacgtgtcccctagttcaaggaag

SEQ ID NO: 5481978 - DNA, 25 bp, Homo sapien
tatggaagattctgtcacaggcggc

SEQ ID NO: 5481979 - DNA, 25 bp, Homo sapien
caaacagggaatcatgatgtcagct

SEQ ID NO: 5481980 - DNA, 25 bp, Homo sapien
taaactggtcactataagcaactgc

SEQ ID NO: 5481981 - DNA, 25 bp, Homo sapien
tgcatctgaaggtgccaacagtagt

SEQ ID NO: 5481982 - DNA, 25 bp, Homo sapien
tagcagcaggcaagatctttccagg

SEQ ID NO: 5481983 - DNA, 25 bp, Homo sapien
ctccaaagcccacacaaaaggcagt

SEQ ID NO: 5481984 - DNA, 25 bp, Homo sapien
acacaaaaggcagtcatcaacgaat

SEQ ID NO: 5481985 - DNA, 25 bp, Homo sapien
caacgaatcggggacatcctgctca

SEQ ID NO: 5481986 - DNA, 25 bp, Homo sapien
ctgctcaggaacatgcgccagttaa

SEQ ID NO: 5481987 - DNA, 25 bp, Homo sapien
tgctgcgccgcctatgcggacatta

SEQ ID NO: 5481988 - DNA, 25 bp, Homo sapien
tacttccaaagacatgacgaggtcc

SEQ ID NO: 5481989 - DNA, 25 bp, Homo sapien
caaacgctgtaagaagttggaggca

SEQ ID NO: 5481990 - DNA, 25 bp, Homo sapien
gaaggtctgctacttgcctctcaac

SEQ ID NO: 5481991 - DNA, 25 bp, Homo sapien
gcttggctgcgagaaggaacctgct

SEQ ID NO: 5481992 - DNA, 25 bp, Homo sapien
gaattaatgcgagcactgccacctg

SEQ ID NO: 5481993 - DNA, 25 bp, Homo sapien
tattgtcagccaagtgtagcggtgc

SEQ ID NO: 5481994 - DNA, 25 bp, Homo sapien
tgtgttgaactacctgagacgtggc

SEQ ID NO: 5481995 - DNA, 25 bp, Homo sapien
cagacttagccatgggatgacctgt

SEQ ID NO: 5481996 - DNA, 25 bp, Homo sapien
gatttttgaccttgatacaatagat

SEQ ID NO: 5481997 - DNA, 25 bp, Homo sapien
tctagagggcagacttagccatggg

SEQ ID NO: 5481998 - DNA, 25 bp, Homo sapien
ccttgatacaatagataggcttgtg

SEQ ID NO: 5481999 - DNA, 25 bp, Homo sapien
tgagagccacaagcttagttaccgg

SEQ ID NO: 5482000 - DNA, 25 bp, Homo sapien
tatctaacgccctgtggtggacgag

SEQ ID NO: 5482001 - DNA, 25 bp, Homo sapien
gcacatcctgtgagggagctctgga

SEQ ID NO: 5482002 - DNA, 25 bp, Homo sapien
tgatgctgctacctgtggctggaag

SEQ ID NO: 5482003 - DNA, 25 bp, Homo sapien
tgagtcagcaccagccagaattcct

SEQ ID NO: 5482004 - DNA, 25 bp, Homo sapien
tcttggttgtatcagggctccaggg

SEQ ID NO: 5482005 - DNA, 25 bp, Homo sapien
ccaatggccagtcgggacagtttca

SEQ ID NO: 5482006 - DNA, 25 bp, Homo sapien
tctgttagggacatcgcctgcagcg

SEQ ID NO: 5482007 - DNA, 25 bp, Homo sapien
taacttacgggaagactaacatctg

SEQ ID NO: 5482008 - DNA, 25 bp, Homo sapien
cagatttttgatgtccagtgagagg

SEQ ID NO: 5482009 - DNA, 25 bp, Homo sapien
ggacagagaactggccctcgttcct

SEQ ID NO: 5482010 - DNA, 25 bp, Homo sapien
gcactcgagttctttctgggcattc

SEQ ID NO: 5482011 - DNA, 25 bp, Homo sapien
ctctatctcactgcatgggcccggt

SEQ ID NO: 5482012 - DNA, 25 bp, Homo sapien
ccaccagcttatggccagtccagga

SEQ ID NO: 5482013 - DNA, 25 bp, Homo sapien
taaagaaccttccagacttggctca

SEQ ID NO: 5482014 - DNA, 25 bp, Homo sapien
gccatcttagagtgcaacccctgaa

SEQ ID NO: 5482015 - DNA, 25 bp, Homo sapien
ccaatgcaggtgatgctagcagaca

SEQ ID NO: 5482016 - DNA, 25 bp, Homo sapien
gagtttcactggagcccaatgcagg

SEQ ID NO: 5482017 - DNA, 25 bp, Homo sapien
tcttgcaggatgactacccactggc

SEQ ID NO: 5482018 - DNA, 25 bp, Homo sapien
gaacccgtgtccctatgctgtcttg

SEQ ID NO: 5482019 - DNA, 25 bp, Homo sapien
gcaagtacacatttgaaaggtaatt

SEQ ID NO: 5482020 - DNA, 25 bp, Homo sapien
ggtggtggaggcaagttttctgggc

SEQ ID NO: 5482021 - DNA, 25 bp, Homo sapien
gatgtccgctcagctcccatttcta

SEQ ID NO: 5482022 - DNA, 25 bp, Homo sapien
gtcagctgcccatttcgatgtccgc

SEQ ID NO: 5482023 - DNA, 25 bp, Homo sapien
gaaggaggaatgacgctcaacctgc

SEQ ID NO: 5482024 - DNA, 25 bp, Homo sapien
aaaaatgtgcgagtcttgagcgcgg

SEQ ID NO: 5482025 - DNA, 25 bp, Homo sapien
cctgaggcttctcaacagatgggaa

SEQ ID NO: 5482026 - DNA, 25 bp, Homo sapien
ctgagcagtgctctcggcatcggac

SEQ ID NO: 5482027 - DNA, 25 bp, Homo sapien
tccaacgggaagtagatgggcgact

SEQ ID NO: 5482028 - DNA, 25 bp, Homo sapien
gtagatgggcgactgctttgttcac

SEQ ID NO: 5482029 - DNA, 25 bp, Homo sapien
tggggccgtctaatttattactgcc

SEQ ID NO: 5482030 - DNA, 25 bp, Homo sapien
ccagcattccttccaacgggaagta

SEQ ID NO: 5482031 - DNA, 25 bp, Homo sapien
ggctgccgtctctgcgtgctgtgat

SEQ ID NO: 5482032 - DNA, 25 bp, Homo sapien
atccgtcacagggaagtttcgaagg

SEQ ID NO: 5482033 - DNA, 25 bp, Homo sapien
ctgctctgttcttccggtgggccaa

SEQ ID NO: 5482034 - DNA, 25 bp, Homo sapien
ccaggaatccgtcacagggaagttt

SEQ ID NO: 5482035 - DNA, 25 bp, Homo sapien
agtcaggtctttattgaaagtggca

SEQ ID NO: 5482036 - DNA, 25 bp, Homo sapien
caggtctttattgaaagtggcaggg

SEQ ID NO: 5482037 - DNA, 25 bp, Homo sapien
tcaggtctttattgaaagtggcagg

SEQ ID NO: 5482038 - DNA, 25 bp, Homo sapien
gtcaggtctttattgaaagtggcag

SEQ ID NO: 5482039 - DNA, 25 bp, Homo sapien
gatagttgctctgcgccttggtctg

SEQ ID NO: 5482040 - DNA, 25 bp, Homo sapien
tgggcatagagaacagcgtccctga

SEQ ID NO: 5482041 - DNA, 25 bp, Homo sapien
aatctatggccatcatgggccccgg

SEQ ID NO: 5482042 - DNA, 25 bp, Homo sapien
cgtgagcaatactgctgggccagga

SEQ ID NO: 5482043 - DNA, 25 bp, Homo sapien
caggggtggaaggagacggtgacct

SEQ ID NO: 5482044 - DNA, 25 bp, Homo sapien
aggggtggaaggagacggtgacctg

SEQ ID NO: 5482045 - DNA, 25 bp, Homo sapien
ctgcaggggtggaaggagacggtga

SEQ ID NO: 5482046 - DNA, 25 bp, Homo sapien
tgcaggggtggaaggagacggtgac

SEQ ID NO: 5482047 - DNA, 25 bp, Homo sapien
ctggcatgtgaggcccacgggatcc

SEQ ID NO: 5482048 - DNA, 25 bp, Homo sapien
catagcacagggcaccttccaagtc

SEQ ID NO: 5482049 - DNA, 25 bp, Homo sapien
ttccaagtcagcacagttcttatgg

SEQ ID NO: 5482050 - DNA, 25 bp, Homo sapien
gttcttatggagctcagaacaaaaa

SEQ ID NO: 5482051 - DNA, 25 bp, Homo sapien
tcccctatctgaacagcagtgcgct

SEQ ID NO: 5482052 - DNA, 25 bp, Homo sapien
caggtggtttctgttgtgtgaaaac

SEQ ID NO: 5482053 - DNA, 25 bp, Homo sapien
agcgggtggatgtcaggtggtttct

SEQ ID NO: 5482054 - DNA, 25 bp, Homo sapien
tcagcgggtggatgtcaggtggttt

SEQ ID NO: 5482055 - DNA, 25 bp, Homo sapien
gtcaggtggtttctgttgtgtgaaa

SEQ ID NO: 5482056 - DNA, 25 bp, Homo sapien
gtgtcagagtagctcccgggagcca

SEQ ID NO: 5482057 - DNA, 25 bp, Homo sapien
tctctttgctaaggactcgagtcag

SEQ ID NO: 5482058 - DNA, 25 bp, Homo sapien
gacgttttgccaccagcgtgtcaga

SEQ ID NO: 5482059 - DNA, 25 bp, Homo sapien
gaagcgagcccatgtagtgccaaat

SEQ ID NO: 5482060 - DNA, 25 bp, Homo sapien
gcttgtctgagatgccggggcagga

SEQ ID NO: 5482061 - DNA, 25 bp, Homo sapien
gctcccgccgctctgcttgtgcttc

SEQ ID NO: 5482062 - DNA, 25 bp, Homo sapien
gggcaggactcctcggccaggctga

SEQ ID NO: 5482063 - DNA, 25 bp, Homo sapien
gccaggctgaaggcgttctccagct

SEQ ID NO: 5482064 - DNA, 25 bp, Homo sapien
agtgatgccggaggccttcagggct

SEQ ID NO: 5482065 - DNA, 25 bp, Homo sapien
tgctcctttgctcggccacagtgat

SEQ ID NO: 5482066 - DNA, 25 bp, Homo sapien
tcggccacagtgatgccggaggcct

SEQ ID NO: 5482067 - DNA, 25 bp, Homo sapien
ggccacagtgatgccggaggccttc

SEQ ID NO: 5482068 - DNA, 25 bp, Homo sapien
cgttgatgcagggtcacgtgactaa

SEQ ID NO: 5482069 - DNA, 25 bp, Homo sapien
tatcacatttctgaggacggtgctg

SEQ ID NO: 5482070 - DNA, 25 bp, Homo sapien
atggaccccgactaaaccttctctg

SEQ ID NO: 5482071 - DNA, 25 bp, Homo sapien
acgtgactaaccagggcggcacctg

SEQ ID NO: 5482072 - DNA, 25 bp, Homo sapien
gctgcctcttgacgggctccgcagg

SEQ ID NO: 5482073 - DNA, 25 bp, Homo sapien
acgggccggaccagcgtggacaggc

SEQ ID NO: 5482074 - DNA, 25 bp, Homo sapien
tctccgaagacgggccggaccagcg

SEQ ID NO: 5482075 - DNA, 25 bp, Homo sapien
gacctcggctgcctcttgacgggct

SEQ ID NO: 5482076 - DNA, 25 bp, Homo sapien
gtgaactgtgcagggccgtcccctt

SEQ ID NO: 5482077 - DNA, 25 bp, Homo sapien
cagggccgtccccttgtgaagcttg

SEQ ID NO: 5482078 - DNA, 25 bp, Homo sapien
cttctgtgaactgtgcagggccgtc

SEQ ID NO: 5482079 - DNA, 25 bp, Homo sapien
cttgctgtgtggactcggccggatg

SEQ ID NO: 5482080 - DNA, 25 bp, Homo sapien
gggtcaccatgaggataaaccaggt

SEQ ID NO: 5482081 - DNA, 25 bp, Homo sapien
ccatgaggataaaccaggtccctac

SEQ ID NO: 5482082 - DNA, 25 bp, Homo sapien
tcaccatgaggataaaccaggtccc

SEQ ID NO: 5482083 - DNA, 25 bp, Homo sapien
caccatgaggataaaccaggtccct

SEQ ID NO: 5482084 - DNA, 25 bp, Homo sapien
tggactcctcgccatgcccctctga

SEQ ID NO: 5482085 - DNA, 25 bp, Homo sapien
cctctgacttccagcgcttatagcg

SEQ ID NO: 5482086 - DNA, 25 bp, Homo sapien
tatagcggtcgatgagctccgtgag

SEQ ID NO: 5482087 - DNA, 25 bp, Homo sapien
agctccgtgaggaaggaggtcttct

SEQ ID NO: 5482088 - DNA, 25 bp, Homo sapien
ttcaggagctccttggccgtgggcc

SEQ ID NO: 5482089 - DNA, 25 bp, Homo sapien
tcaggagctccttggccgtgggccg

SEQ ID NO: 5482090 - DNA, 25 bp, Homo sapien
tggccagctcgatggctgtgatccc

SEQ ID NO: 5482091 - DNA, 25 bp, Homo sapien
ccccttggccagctcgatggctgtg

SEQ ID NO: 5482092 - DNA, 25 bp, Homo sapien
cttggccagctcgatggctgtgatc

SEQ ID NO: 5482093 - DNA, 25 bp, Homo sapien
tcaggaacaggacgcgcatggggtg

SEQ ID NO: 5482094 - DNA, 25 bp, Homo sapien
aagtcgtaggccgactgcttgatga

SEQ ID NO: 5482095 - DNA, 25 bp, Homo sapien
gaatgtgttcctcttaatctgcgtg

SEQ ID NO: 5482096 - DNA, 25 bp, Homo sapien
gtaggccgactgcttgatgacctca

SEQ ID NO: 5482097 - DNA, 25 bp, Homo sapien
gttcctcttaatctgcgtgtctgtg

SEQ ID NO: 5482098 - DNA, 25 bp, Homo sapien
gtccgccagcttcacgtcaccctgc

SEQ ID NO: 5482099 - DNA, 25 bp, Homo sapien
ttcacgtcaccctgctccgagagta

SEQ ID NO: 5482100 - DNA, 25 bp, Homo sapien
tcaccctgctccgagagtagcacgt

SEQ ID NO: 5482101 - DNA, 25 bp, Homo sapien
tgctccgagagtagcacgttggcag

SEQ ID NO: 5482102 - DNA, 25 bp, Homo sapien
gacaaatcccaacgacaagcgactt

SEQ ID NO: 5482103 - DNA, 25 bp, Homo sapien
ggttctctatactccagaccctggg

SEQ ID NO: 5482104 - DNA, 25 bp, Homo sapien
tgaccaagggtgtagccaacacggg

SEQ ID NO: 5482105 - DNA, 25 bp, Homo sapien
tcctcagcgtacaaggaaaccgtta

SEQ ID NO: 5482106 - DNA, 25 bp, Homo sapien
gagtgcagataatccaggcccttca

SEQ ID NO: 5482107 - DNA, 25 bp, Homo sapien
ccttcagaatctcccgcaggatcgt

SEQ ID NO: 5482108 - DNA, 25 bp, Homo sapien
caggatcgtggcaatgtatgtctcc

SEQ ID NO: 5482109 - DNA, 25 bp, Homo sapien
gatgtctcggtggatcttgcgttcg

SEQ ID NO: 5482110 - DNA, 25 bp, Homo sapien
ggtactccatgatgatccatagctt

SEQ ID NO: 5482111 - DNA, 25 bp, Homo sapien
ccatgatgatccatagcttggtgct

SEQ ID NO: 5482112 - DNA, 25 bp, Homo sapien
tactccatgatgatccatagcttgg

SEQ ID NO: 5482113 - DNA, 25 bp, Homo sapien
ccaggtactccatgatgatccatag

SEQ ID NO: 5482114 - DNA, 25 bp, Homo sapien
tactgctacagatgctcagaggaca

SEQ ID NO: 5482115 - DNA, 25 bp, Homo sapien
caggttgagtacacacagcagtggc

SEQ ID NO: 5482116 - DNA, 25 bp, Homo sapien
ctgccaagaaccctgaacaggaaag

SEQ ID NO: 5482117 - DNA, 25 bp, Homo sapien
aaacccatcagcatttggcagcaag

SEQ ID NO: 5482118 - DNA, 25 bp, Homo sapien
ggtaggagccaaagtagcgggtgat

SEQ ID NO: 5482119 - DNA, 25 bp, Homo sapien
aggtaggagccaaagtagcgggtga

SEQ ID NO: 5482120 - DNA, 25 bp, Homo sapien
aggagccaaagtagcgggtgatgta

SEQ ID NO: 5482121 - DNA, 25 bp, Homo sapien
taggagccaaagtagcgggtgatgt

SEQ ID NO: 5482122 - DNA, 25 bp, Homo sapien
tggatgtcctcgatctcatcctcgg

SEQ ID NO: 5482123 - DNA, 25 bp, Homo sapien
gcccttgccaatgcggtcgagcttg

SEQ ID NO: 5482124 - DNA, 25 bp, Homo sapien
cctttgtgtggttatcgatgccctt

SEQ ID NO: 5482125 - DNA, 25 bp, Homo sapien
ttatcgatgcccttgtagacctccc

SEQ ID NO: 5482126 - DNA, 25 bp, Homo sapien
gggacagagggcagacagcgccggt

SEQ ID NO: 5482127 - DNA, 25 bp, Homo sapien
acagagggcagacagcgccggtcac

SEQ ID NO: 5482128 - DNA, 25 bp, Homo sapien
gacagagggcagacagcgccggtca

SEQ ID NO: 5482129 - DNA, 25 bp, Homo sapien
agagggcagacagcgccggtcacaa

SEQ ID NO: 5482130 - DNA, 25 bp, Homo sapien
tcaacgcttactcggggccctggga

SEQ ID NO: 5482131 - DNA, 25 bp, Homo sapien
caggcccaacgccaccttgtcaaat

SEQ ID NO: 5482132 - DNA, 25 bp, Homo sapien
gggacgctgctccaccgagccgtta

SEQ ID NO: 5482133 - DNA, 25 bp, Homo sapien
gtttgctcagcccatcaacgcttac

SEQ ID NO: 5482134 - DNA, 25 bp, Homo sapien
ggatgctgacatgaggttcccgccc

SEQ ID NO: 5482135 - DNA, 25 bp, Homo sapien
tcggtttctagaggcctgcgagctt

SEQ ID NO: 5482136 - DNA, 25 bp, Homo sapien
tgcgccggtgtctcttcacgcacct

SEQ ID NO: 5482137 - DNA, 25 bp, Homo sapien
ccttcggatgctgacatgaggttcc

SEQ ID NO: 5482138 - DNA, 25 bp, Homo sapien
gttggcaaatccccggaggtgagcc

SEQ ID NO: 5482139 - DNA, 25 bp, Homo sapien
tggttggcaaatccccggaggtgag

SEQ ID NO: 5482140 - DNA, 25 bp, Homo sapien
ctggttggcaaatccccggaggtga

SEQ ID NO: 5482141 - DNA, 25 bp, Homo sapien
tggcaaatccccggaggtgagccat

SEQ ID NO: 5482142 - DNA, 25 bp, Homo sapien
ggctagctcgcccctgcggcgtcag

SEQ ID NO: 5482143 - DNA, 25 bp, Homo sapien
agccggctagctcgcccctgcggcg

SEQ ID NO: 5482144 - DNA, 25 bp, Homo sapien
tagctcgcccctgcggcgtcagtcc

SEQ ID NO: 5482145 - DNA, 25 bp, Homo sapien
gagccggctagctcgcccctgcggc

SEQ ID NO: 5482146 - DNA, 25 bp, Homo sapien
ccagttcagtcatctgagaccgacc

SEQ ID NO: 5482147 - DNA, 25 bp, Homo sapien
cacgcccgggcctaacgcccaggct

SEQ ID NO: 5482148 - DNA, 25 bp, Homo sapien
ttcagtcatctgagaccgacctccg

SEQ ID NO: 5482149 - DNA, 25 bp, Homo sapien
ggtgcccagttcagtcatctgagac

SEQ ID NO: 5482150 - DNA, 25 bp, Homo sapien
tctgcagcgcccgcgaaggctccca

SEQ ID NO: 5482151 - DNA, 25 bp, Homo sapien
ctgcagcgcccgcgaaggctcccac

SEQ ID NO: 5482152 - DNA, 25 bp, Homo sapien
cgcgaagcaacggtggtggcggcag

SEQ ID NO: 5482153 - DNA, 25 bp, Homo sapien
gcgaccggagaaagcccggaggcga

SEQ ID NO: 5482154 - DNA, 25 bp, Homo sapien
tcccagcccgcgaagcaacggtggt

SEQ ID NO: 5482155 - DNA, 25 bp, Homo sapien
cgacggcgagggcggtgctcggcgt

SEQ ID NO: 5482156 - DNA, 25 bp, Homo sapien
tgtcgtcacggcacggagataagcc

SEQ ID NO: 5482157 - DNA, 25 bp, Homo sapien
gaagatttgtccctcctgcatactg

SEQ ID NO: 5482158 - DNA, 25 bp, Homo sapien
gaagcccctgttcgtactgagaccc

SEQ ID NO: 5482159 - DNA, 25 bp, Homo sapien
taggacgtccttggtcacaccgttg

SEQ ID NO: 5482160 - DNA, 25 bp, Homo sapien
tcttccttgggaatatggcgctaat

SEQ ID NO: 5482161 - DNA, 25 bp, Homo sapien
gaataacaccgtatgtggcgggcct

SEQ ID NO: 5482162 - DNA, 25 bp, Homo sapien
gagccccttgggcagcttaccttca

SEQ ID NO: 5482163 - DNA, 25 bp, Homo sapien
taccttcaggtccagtcacttggtg

SEQ ID NO: 5482164 - DNA, 25 bp, Homo sapien
ccgccggtccgtccgttcggcagct

SEQ ID NO: 5482165 - DNA, 25 bp, Homo sapien
gaaggccatcatcagctccgccggt

SEQ ID NO: 5482166 - DNA, 25 bp, Homo sapien
ctccgccggtccgtccgttcggcag

SEQ ID NO: 5482167 - DNA, 25 bp, Homo sapien
ctggaaggccatcatcagctccgcc

SEQ ID NO: 5482168 - DNA, 25 bp, Homo sapien
aagcaaagcggatgtgcagacactg

SEQ ID NO: 5482169 - DNA, 25 bp, Homo sapien
acatgtcaggcccagaggcgaagga

SEQ ID NO: 5482170 - DNA, 25 bp, Homo sapien
gaaggaacacgccagaaacacacat

SEQ ID NO: 5482171 - DNA, 25 bp, Homo sapien
ggcccagaggcgaaggaaaagcaaa

SEQ ID NO: 5482172 - DNA, 25 bp, Homo sapien
gtggccgtagccaggctctgaatgt

SEQ ID NO: 5482173 - DNA, 25 bp, Homo sapien
tggccgtagccaggctctgaatgtg

SEQ ID NO: 5482174 - DNA, 25 bp, Homo sapien
tgcccaggacgcgacgttcagtgaa

SEQ ID NO: 5482175 - DNA, 25 bp, Homo sapien
gggtgcattaccaggcctttaggaa

SEQ ID NO: 5482176 - DNA, 25 bp, Homo sapien
cctttaggaatgtgaaggatcgcct

SEQ ID NO: 5482177 - DNA, 25 bp, Homo sapien
gaaatgcgagttgcgtttggctgca

SEQ ID NO: 5482178 - DNA, 25 bp, Homo sapien
tgccgggcaccgggcaccgtcgtcc

SEQ ID NO: 5482179 - DNA, 25 bp, Homo sapien
ttagaatcaaggagtcggcagcgct

SEQ ID NO: 5482180 - DNA, 25 bp, Homo sapien
gggtgcagaaatccaaaataggcct

SEQ ID NO: 5482181 - DNA, 25 bp, Homo sapien
tatgtaggattcagtactctccgcg

SEQ ID NO: 5482182 - DNA, 25 bp, Homo sapien
aataggcctcagtgggttagaatca

SEQ ID NO: 5482183 - DNA, 25 bp, Homo sapien
tgaggttaatacgaggtcaccctgg

SEQ ID NO: 5482184 - DNA, 25 bp, Homo sapien
catgaccagtgactgttatccttag

SEQ ID NO: 5482185 - DNA, 25 bp, Homo sapien
tcaccctggattaggatgggtccca

SEQ ID NO: 5482186 - DNA, 25 bp, Homo sapien
tagacagagcgggagatttggacac

SEQ ID NO: 5482187 - DNA, 25 bp, Homo sapien
attttgtaatatcggccgggtgcgg

SEQ ID NO: 5482188 - DNA, 25 bp, Homo sapien
tctagtgggaaggttcgaccgcagc

SEQ ID NO: 5482189 - DNA, 25 bp, Homo sapien
ttctctgaggaaacgccgggtggca

SEQ ID NO: 5482190 - DNA, 25 bp, Homo sapien
tcacctcggccacttgaacctggag

SEQ ID NO: 5482191 - DNA, 25 bp, Homo sapien
ttgcgctggccaagtgaaaacacag

SEQ ID NO: 5482192 - DNA, 25 bp, Homo sapien
gaactcgctcggtcctccttaagcg

SEQ ID NO: 5482193 - DNA, 25 bp, Homo sapien
tctacgaacgaagaagacaacccaa

SEQ ID NO: 5482194 - DNA, 25 bp, Homo sapien
cagactctggaaagaacctctacga

SEQ ID NO: 5482195 - DNA, 25 bp, Homo sapien
ctacaatacaaagggcatgcgtccg

SEQ ID NO: 5482196 - DNA, 25 bp, Homo sapien
cgcgtcctcgcgggtctgaatggaa

SEQ ID NO: 5482197 - DNA, 25 bp, Homo sapien
gcagatcctgaagccagaactccac

SEQ ID NO: 5482198 - DNA, 25 bp, Homo sapien
agagcgcgggaagccccgtggacct

SEQ ID NO: 5482199 - DNA, 25 bp, Homo sapien
aatggaagggtcgaggtcgtcgtcg

SEQ ID NO: 5482200 - DNA, 25 bp, Homo sapien
atcatggacgcctttgaccgctcgc

SEQ ID NO: 5482201 - DNA, 25 bp, Homo sapien
cacgcactcgtcttcgagggcgggc

SEQ ID NO: 5482202 - DNA, 25 bp, Homo sapien
gtcttcgccgccgagatcatggacg

SEQ ID NO: 5482203 - DNA, 25 bp, Homo sapien
aatgtctgtagctgaattcgggctc

SEQ ID NO: 5482204 - DNA, 25 bp, Homo sapien
ccctttgtaggagcacgtgtcccga

SEQ ID NO: 5482205 - DNA, 25 bp, Homo sapien
acagtgacccttgttctcagctggg

SEQ ID NO: 5482206 - DNA, 25 bp, Homo sapien
tattcgttggtgctgtgaggacatc

SEQ ID NO: 5482207 - DNA, 25 bp, Homo sapien
tcagctgggcacagaaaccctttgt

SEQ ID NO: 5482208 - DNA, 25 bp, Homo sapien
ggccgcgtgacctgcagtcctgtgg

SEQ ID NO: 5482209 - DNA, 25 bp, Homo sapien
gtggggtggcacgtcctagggctgc

SEQ ID NO: 5482210 - DNA, 25 bp, Homo sapien
tttcccagacagctcccgagtagat

SEQ ID NO: 5482211 - DNA, 25 bp, Homo sapien
catccgtggggccgcgtgacctgca

SEQ ID NO: 5482212 - DNA, 25 bp, Homo sapien
aagcagactggctcccggagggcat

SEQ ID NO: 5482213 - DNA, 25 bp, Homo sapien
cggagaacagcagcgcatctcacct

SEQ ID NO: 5482214 - DNA, 25 bp, Homo sapien
ccacgggaggcttagggcttgtctc

SEQ ID NO: 5482215 - DNA, 25 bp, Homo sapien
cacatgcttctaggcccacgggagg

SEQ ID NO: 5482216 - DNA, 25 bp, Homo sapien
tgctctcacctgaaccccaggtgaa

SEQ ID NO: 5482217 - DNA, 25 bp, Homo sapien
aggggcccgggaacacctgctctca

SEQ ID NO: 5482218 - DNA, 25 bp, Homo sapien
gggcccgggaacacctgctctcacc

SEQ ID NO: 5482219 - DNA, 25 bp, Homo sapien
ctgagccccaggtgaaggggcccgg

SEQ ID NO: 5482220 - DNA, 25 bp, Homo sapien
caggtgaaggggcccggaacacctg

SEQ ID NO: 5482221 - DNA, 25 bp, Homo sapien
gtgaaggggcccggaacacctgctc

SEQ ID NO: 5482222 - DNA, 25 bp, Homo sapien
tgagccccaggtgaaggggcccgga

SEQ ID NO: 5482223 - DNA, 25 bp, Homo sapien
aaggggcccggaacacctgctctca

SEQ ID NO: 5482224 - DNA, 25 bp, Homo sapien
aggggcccggaacacttgctctcac

SEQ ID NO: 5482225 - DNA, 25 bp, Homo sapien
caggtgaaggggcccggaacacctg

SEQ ID NO: 5482226 - DNA, 25 bp, Homo sapien
tgagccccaggtgaaggggcccgga

SEQ ID NO: 5482227 - DNA, 25 bp, Homo sapien
gtgaaggggcccggaacacctgctc

SEQ ID NO: 5482228 - DNA, 25 bp, Homo sapien
aaggggcccggaacacctgctctca

SEQ ID NO: 5482229 - DNA, 25 bp, Homo sapien
tgctctcacctgagccccaggtgaa

SEQ ID NO: 5482230 - DNA, 25 bp, Homo sapien
ttgctctcacctgagccccaggtga

SEQ ID NO: 5482231 - DNA, 25 bp, Homo sapien
tgagccccaggtgaaggggcccgga

SEQ ID NO: 5482232 - DNA, 25 bp, Homo sapien
cacctgagccccaggtgaaggggcc

SEQ ID NO: 5482233 - DNA, 25 bp, Homo sapien
caatctgaaggtgaccctggcctgg

SEQ ID NO: 5482234 - DNA, 25 bp, Homo sapien
gaatgttgcatgagtcggatcccag

SEQ ID NO: 5482235 - DNA, 25 bp, Homo sapien
cctattagggctccgtaagaactca

SEQ ID NO: 5482236 - DNA, 25 bp, Homo sapien
cctacggccgagaaggaatgttgca

SEQ ID NO: 5482237 - DNA, 25 bp, Homo sapien
ttggtttttctatgccagtacagaa

SEQ ID NO: 5482238 - DNA, 25 bp, Homo sapien
ttctgccgcagggactgtctgttga

SEQ ID NO: 5482239 - DNA, 25 bp, Homo sapien
tgagcctgcagaggctcacggccac

SEQ ID NO: 5482240 - DNA, 25 bp, Homo sapien
tgtctgttgaggagccgaaccgttg

SEQ ID NO: 5482241 - DNA, 25 bp, Homo sapien
ttcttgtaggtgacgtgaagatgct

SEQ ID NO: 5482242 - DNA, 25 bp, Homo sapien
cattggctgtgtcgtggttgccatg

SEQ ID NO: 5482243 - DNA, 25 bp, Homo sapien
ggagaccgtctgctcaagtttgcct

SEQ ID NO: 5482244 - DNA, 25 bp, Homo sapien
gggtcaccttcttgtaggtgacgtg

SEQ ID NO: 5482245 - DNA, 25 bp, Homo sapien
agaatggaacaaagatagcttagtt

SEQ ID NO: 5482246 - DNA, 25 bp, Homo sapien
gaatggaacaaagatagcttagttt

SEQ ID NO: 5482247 - DNA, 25 bp, Homo sapien
cctgtgcgcccactgcatgccacac

SEQ ID NO: 5482248 - DNA, 25 bp, Homo sapien
ccacacactcatcacgggctgtgag

SEQ ID NO: 5482249 - DNA, 25 bp, Homo sapien
cactgtaactagaactgatgtccag

SEQ ID NO: 5482250 - DNA, 25 bp, Homo sapien
aagcgctgagcttccagtgcttccc

SEQ ID NO: 5482251 - DNA, 25 bp, Homo sapien
cagacaagcgctgagcttccagtgc

SEQ ID NO: 5482252 - DNA, 25 bp, Homo sapien
cactttcactgtaactagaactgat

SEQ ID NO: 5482253 - DNA, 25 bp, Homo sapien
gagctgctcggctgacgatgatggg

SEQ ID NO: 5482254 - DNA, 25 bp, Homo sapien
agagctgctcggctgacgatgatgg

SEQ ID NO: 5482255 - DNA, 25 bp, Homo sapien
agctgctcggctgacgatgatgggc

SEQ ID NO: 5482256 - DNA, 25 bp, Homo sapien
gctgctcggctgacgatgatgggca

SEQ ID NO: 5482257 - DNA, 25 bp, Homo sapien
ggacacgcagagctgctcggctgac

SEQ ID NO: 5482258 - DNA, 25 bp, Homo sapien
taggacacgcagagctgctcggctg

SEQ ID NO: 5482259 - DNA, 25 bp, Homo sapien
ctaggacacgcagagctgctcggct

SEQ ID NO: 5482260 - DNA, 25 bp, Homo sapien
aggacacgcagagctgctcggctga

SEQ ID NO: 5482261 - DNA, 25 bp, Homo sapien
agaactgcccggctgacgatgatgg

SEQ ID NO: 5482262 - DNA, 25 bp, Homo sapien
tgctcggctgacgatgatgggcact

SEQ ID NO: 5482263 - DNA, 25 bp, Homo sapien
gctcggctgatgataatgggcacta

SEQ ID NO: 5482264 - DNA, 25 bp, Homo sapien
gctgctcggctgatgataatgggca

SEQ ID NO: 5482265 - DNA, 25 bp, Homo sapien
gggcactaggacactcagaactgct

SEQ ID NO: 5482266 - DNA, 25 bp, Homo sapien
cactaggacactcagaactgctcgg

SEQ ID NO: 5482267 - DNA, 25 bp, Homo sapien
gatgggcactaggacactcagaact

SEQ ID NO: 5482268 - DNA, 25 bp, Homo sapien
gatgatgggcactaggacactcaga

SEQ ID NO: 5482269 - DNA, 25 bp, Homo sapien
tgcaaggcacgtgctacacagactg

SEQ ID NO: 5482270 - DNA, 25 bp, Homo sapien
gcacagtggaaatggtcaccagacc

SEQ ID NO: 5482271 - DNA, 25 bp, Homo sapien
gatgacccagcaacgacgtgaaaag

SEQ ID NO: 5482272 - DNA, 25 bp, Homo sapien
agatgctcaagctcgcaggtcaccg

SEQ ID NO: 5482273 - DNA, 25 bp, Homo sapien
gctcaagcctgggagccagaagttg

SEQ ID NO: 5482274 - DNA, 25 bp, Homo sapien
gcgagccaagatcttgctactgtat

SEQ ID NO: 5482275 - DNA, 25 bp, Homo sapien
gatcgctcaagcctgggagccagaa

SEQ ID NO: 5482276 - DNA, 25 bp, Homo sapien
aggatcgctcaagcctgggagccag

SEQ ID NO: 5482277 - DNA, 25 bp, Homo sapien
ggaagaggaagaggctgactccaca

SEQ ID NO: 5482278 - DNA, 25 bp, Homo sapien
aggaagaggctgactccacagaccg

SEQ ID NO: 5482279 - DNA, 25 bp, Homo sapien
aagaggaagaggctgactccacaga

SEQ ID NO: 5482280 - DNA, 25 bp, Homo sapien
agaggaagaggctgactccacagac

SEQ ID NO: 5482281 - DNA, 25 bp, Homo sapien
caaacagaagacaggagcgtgctgg

SEQ ID NO: 5482282 - DNA, 25 bp, Homo sapien
gtgggatgcgatgcacagctcctgc

SEQ ID NO: 5482283 - DNA, 25 bp, Homo sapien
ggagatcctggcgatggagtgggat

SEQ ID NO: 5482284 - DNA, 25 bp, Homo sapien
tcctggcgatggagtgggatgcgat

SEQ ID NO: 5482285 - DNA, 25 bp, Homo sapien
gatggagtgggatgcgatgcacagc

SEQ ID NO: 5482286 - DNA, 25 bp, Homo sapien
gaggcagccttgactctccttgcct

SEQ ID NO: 5482287 - DNA, 25 bp, Homo sapien
gcaagggaagggcagtcagctcacc

SEQ ID NO: 5482288 - DNA, 25 bp, Homo sapien
tgcaagccgggactccacaggaggc

SEQ ID NO: 5482289 - DNA, 25 bp, Homo sapien
cagctgtggaagcaacgatatttct

SEQ ID NO: 5482290 - DNA, 25 bp, Homo sapien
ctgacaaaggccaccttgttggtgt

SEQ ID NO: 5482291 - DNA, 25 bp, Homo sapien
ggcgctgacaaaggccaccttgttg

SEQ ID NO: 5482292 - DNA, 25 bp, Homo sapien
ctgtgttctgggcgctgacaaaggc

SEQ ID NO: 5482293 - DNA, 25 bp, Homo sapien
tgttctgggcgctgacaaaggccac

SEQ ID NO: 5482294 - DNA, 25 bp, Homo sapien
cgggcttgaggcgaatgaagccaca

SEQ ID NO: 5482295 - DNA, 25 bp, Homo sapien
gcttgcgcgtgtccgggtggaagga

SEQ ID NO: 5482296 - DNA, 25 bp, Homo sapien
tctgtgcatcggcttgcgcgtgtcc

SEQ ID NO: 5482297 - DNA, 25 bp, Homo sapien
aagccacactctctgtgcatcggct

SEQ ID NO: 5482298 - DNA, 25 bp, Homo sapien
ttttcagtaatattgggtgactaat

SEQ ID NO: 5482299 - DNA, 25 bp, Homo sapien
tattttcagtaatattgggtgacta

SEQ ID NO: 5482300 - DNA, 25 bp, Homo sapien
ttattttcagtaatattgggtgact

SEQ ID NO: 5482301 - DNA, 25 bp, Homo sapien
attttcagtaatattgggtgactaa

SEQ ID NO: 5482302 - DNA, 25 bp, Homo sapien
tttggtggtcagcttaatatctcca

SEQ ID NO: 5482303 - DNA, 25 bp, Homo sapien
tatgtttggattaacaagcctgtaa

SEQ ID NO: 5482304 - DNA, 25 bp, Homo sapien
ttattttcagagacctaggcggccc

SEQ ID NO: 5482305 - DNA, 25 bp, Homo sapien
tagatggacaagttccttttacacc

SEQ ID NO: 5482306 - DNA, 25 bp, Homo sapien
agtgtggggtaggtcccggctccag

SEQ ID NO: 5482307 - DNA, 25 bp, Homo sapien
ctccaggtgggtccgacagccaggt

SEQ ID NO: 5482308 - DNA, 25 bp, Homo sapien
acgtgggagatgtgaacctcctcca

SEQ ID NO: 5482309 - DNA, 25 bp, Homo sapien
tggcccacgtgggagatgtgaacct

SEQ ID NO: 5482310 - DNA, 25 bp, Homo sapien
ttctgagctgctgcaccggggccgc

SEQ ID NO: 5482311 - DNA, 25 bp, Homo sapien
ggagcagcgatccagagtccaggtt

SEQ ID NO: 5482312 - DNA, 25 bp, Homo sapien
cggcgccgggcatggccttcacact

SEQ ID NO: 5482313 - DNA, 25 bp, Homo sapien
ggccttcacactccccacgaggcag

SEQ ID NO: 5482314 - DNA, 25 bp, Homo sapien
cttccagattgcaggcgcgtgagct

SEQ ID NO: 5482315 - DNA, 25 bp, Homo sapien
tagagtcacacgtagaaggcgcatg

SEQ ID NO: 5482316 - DNA, 25 bp, Homo sapien
ttctgtggcagaagacgctagagtc

SEQ ID NO: 5482317 - DNA, 25 bp, Homo sapien
cacgtgcagtgagtgcgagctacaa

SEQ ID NO: 5482318 - DNA, 25 bp, Homo sapien
gcccaagacactgaaagcaggctta

SEQ ID NO: 5482319 - DNA, 25 bp, Homo sapien
tttattgaaatctcaaccaaaacac

SEQ ID NO: 5482320 - DNA, 25 bp, Homo sapien
ttcttttattgaaatctcaaccaaa

SEQ ID NO: 5482321 - DNA, 25 bp, Homo sapien
cccaagacactgaaagcaggcttac

SEQ ID NO: 5482322 - DNA, 25 bp, Homo sapien
tctaaactccggacactcgtcaagg

SEQ ID NO: 5482323 - DNA, 25 bp, Homo sapien
ctcgtcaaggttcctcaaggttgtt

SEQ ID NO: 5482324 - DNA, 25 bp, Homo sapien
tttctgccaattgacgggaaatgtt

SEQ ID NO: 5482325 - DNA, 25 bp, Homo sapien
tctgccaattgacgggaaatgtttg

SEQ ID NO: 5482326 - DNA, 25 bp, Homo sapien
gttagtgacacgttgtttcctgcca

SEQ ID NO: 5482327 - DNA, 25 bp, Homo sapien
gacaggaagtgagcaaatgcaccca

SEQ ID NO: 5482328 - DNA, 25 bp, Homo sapien
tacaacagggtgcatggaagctgag

SEQ ID NO: 5482329 - DNA, 25 bp, Homo sapien
tgtctcctggcaagcggcccgggaa

SEQ ID NO: 5482330 - DNA, 25 bp, Homo sapien
gcaccggaactaagatgacatacag

SEQ ID NO: 5482331 - DNA, 25 bp, Homo sapien
tgacatacagcctccacctagggaa

SEQ ID NO: 5482332 - DNA, 25 bp, Homo sapien
ctaataatcatggttgcttgatggg

SEQ ID NO: 5482333 - DNA, 25 bp, Homo sapien
caggaccgatcagctctcaacagtt

SEQ ID NO: 5482334 - DNA, 25 bp, Homo sapien
cgggaagggaacatgggtacgcgag

SEQ ID NO: 5482335 - DNA, 25 bp, Homo sapien
aagggaacatgggtacgcgaggctc

SEQ ID NO: 5482336 - DNA, 25 bp, Homo sapien
ggaacatgggtacgcgaggctccgg

SEQ ID NO: 5482337 - DNA, 25 bp, Homo sapien
catgggtacgcgaggctccggtact

SEQ ID NO: 5482338 - DNA, 25 bp, Homo sapien
tgcaggcccctgacgccgacaggat

SEQ ID NO: 5482339 - DNA, 25 bp, Homo sapien
agtgcagtgagtcgatgagcttgca

SEQ ID NO: 5482340 - DNA, 25 bp, Homo sapien
tccgcacctggctgtcggagcggct

SEQ ID NO: 5482341 - DNA, 25 bp, Homo sapien
tgggcgacagcaggctacttggata

SEQ ID NO: 5482342 - DNA, 25 bp, Homo sapien
catcgggtttccactcgaggacggt

SEQ ID NO: 5482343 - DNA, 25 bp, Homo sapien
gagccgataaatttgcacgccccag

SEQ ID NO: 5482344 - DNA, 25 bp, Homo sapien
gcttgcttcaacctgcgggactctg

SEQ ID NO: 5482345 - DNA, 25 bp, Homo sapien
ggcatcttttctccgggtgcggcca

SEQ ID NO: 5482346 - DNA, 25 bp, Homo sapien
aagtatttttgcacgcaccctaagc

SEQ ID NO: 5482347 - DNA, 25 bp, Homo sapien
caagtatttttgcacgcaccctaag

SEQ ID NO: 5482348 - DNA, 25 bp, Homo sapien
acaagtatttttgcacgcaccctaa

SEQ ID NO: 5482349 - DNA, 25 bp, Homo sapien
tgtttaagaacataggcctgggccg

SEQ ID NO: 5482350 - DNA, 25 bp, Homo sapien
cgcaggaagatactgaataggatgt

SEQ ID NO: 5482351 - DNA, 25 bp, Homo sapien
cctaataaagatccttcataaccat

SEQ ID NO: 5482352 - DNA, 25 bp, Homo sapien
gaaaaaagcaaccagcgcaggaaga

SEQ ID NO: 5482353 - DNA, 25 bp, Homo sapien
ggcgcaggtcgcgtctgcccggtcg

SEQ ID NO: 5482354 - DNA, 25 bp, Homo sapien
agcgcaggaggatgccgtccccagc

SEQ ID NO: 5482355 - DNA, 25 bp, Homo sapien
gccaggctctaagggagcgcaggag

SEQ ID NO: 5482356 - DNA, 25 bp, Homo sapien
ggctgtcagctacggaggcgcaggt

SEQ ID NO: 5482357 - DNA, 25 bp, Homo sapien
ctcgccctttccctgccggttggag

SEQ ID NO: 5482358 - DNA, 25 bp, Homo sapien
ggagacggcgcgcttctcgcccttt

SEQ ID NO: 5482359 - DNA, 25 bp, Homo sapien
agttcacggccgcacagcagatcac

SEQ ID NO: 5482360 - DNA, 25 bp, Homo sapien
ccggttggagcagttcacggccgca

SEQ ID NO: 5482361 - DNA, 25 bp, Homo sapien
cgcgtcctcgccagccgcgggttcg

SEQ ID NO: 5482362 - DNA, 25 bp, Homo sapien
gcaggcccctcgcagcgtccgtcgg

SEQ ID NO: 5482363 - DNA, 25 bp, Homo sapien
gacacggctcgggacgtgggccggc

SEQ ID NO: 5482364 - DNA, 25 bp, Homo sapien
cgtccgcgccgtacggcaagatgga

SEQ ID NO: 5482365 - DNA, 25 bp, Homo sapien
ttagtaaccagtagattctccaagc

SEQ ID NO: 5482366 - DNA, 25 bp, Homo sapien
tatcatcgggtcttagtttcttggg

SEQ ID NO: 5482367 - DNA, 25 bp, Homo sapien
gaaacgtgacgtgttcatcacagta

SEQ ID NO: 5482368 - DNA, 25 bp, Homo sapien
catcgctagcccagtagccctagaa

SEQ ID NO: 5482369 - DNA, 25 bp, Homo sapien
ggctctgttgtggatgctccgcccc

SEQ ID NO: 5482370 - DNA, 25 bp, Homo sapien
cccctagaaatcatgaatgacggtg

SEQ ID NO: 5482371 - DNA, 25 bp, Homo sapien
tctgggcctgaaatgggacggtctc

SEQ ID NO: 5482372 - DNA, 25 bp, Homo sapien
gatgctccgccccatttaggaggaa

SEQ ID NO: 5482373 - DNA, 25 bp, Homo sapien
tggaaagattcttcgactcagaaga

SEQ ID NO: 5482374 - DNA, 25 bp, Homo sapien
gcgctatgtcctgttccttctagat

SEQ ID NO: 5482375 - DNA, 25 bp, Homo sapien
ctagattcttctgatgtagagcgac

SEQ ID NO: 5482376 - DNA, 25 bp, Homo sapien
cacccaagatgcctgatgcgctatg

SEQ ID NO: 5482377 - DNA, 25 bp, Homo sapien
gaaagtatctttgccccactaggaa

SEQ ID NO: 5482378 - DNA, 25 bp, Homo sapien
tgggctccacgtccgagttcatggt

SEQ ID NO: 5482379 - DNA, 25 bp, Homo sapien
tgtgtgggacaccttgaccaaaggg

SEQ ID NO: 5482380 - DNA, 25 bp, Homo sapien
tactgcggcgttggcaggactcgct

SEQ ID NO: 5482381 - DNA, 25 bp, Homo sapien
cgtggcatcagccacctcatacaac

SEQ ID NO: 5482382 - DNA, 25 bp, Homo sapien
cagccgtggcatcagccacctcata

SEQ ID NO: 5482383 - DNA, 25 bp, Homo sapien
gccgtggcatcagccacctcataca

SEQ ID NO: 5482384 - DNA, 25 bp, Homo sapien
gtggcatcagccacctcatacaacc

SEQ ID NO: 5482385 - DNA, 25 bp, Homo sapien
ttccaactgattaccatttacagtg

SEQ ID NO: 5482386 - DNA, 25 bp, Homo sapien
agaaaatacaacagagtgccatcag

SEQ ID NO: 5482387 - DNA, 25 bp, Homo sapien
gagaattccaactgattaccattta

SEQ ID NO: 5482388 - DNA, 25 bp, Homo sapien
gctcagagttatcactgaacttcag

SEQ ID NO: 5482389 - DNA, 25 bp, Homo sapien
gagaggcgtctccagtgggcagcct

SEQ ID NO: 5482390 - DNA, 25 bp, Homo sapien
tgcaccccagctccggggcagaaga

SEQ ID NO: 5482391 - DNA, 25 bp, Homo sapien
cagatctctgctgccgggaaagagc

SEQ ID NO: 5482392 - DNA, 25 bp, Homo sapien
gagtctcccacctctcgggggactg

SEQ ID NO: 5482393 - DNA, 25 bp, Homo sapien
gagagcacgcggatgtcctcatgga

SEQ ID NO: 5482394 - DNA, 25 bp, Homo sapien
gacagcttcgatgcttttggaagca

SEQ ID NO: 5482395 - DNA, 25 bp, Homo sapien
tcctcatggacagcttcgatgcttt

SEQ ID NO: 5482396 - DNA, 25 bp, Homo sapien
gcgtcctcagagagcacgcggatgt

SEQ ID NO: 5482397 - DNA, 25 bp, Homo sapien
gaatttggtcctaacagctgtgctg

SEQ ID NO: 5482398 - DNA, 25 bp, Homo sapien
tgtgctgcacaatggcgtgaacggt

SEQ ID NO: 5482399 - DNA, 25 bp, Homo sapien
aagaggctcatcagcacgttccagg

SEQ ID NO: 5482400 - DNA, 25 bp, Homo sapien
cacactgtggtgacctccgggatac

SEQ ID NO: 5482401 - DNA, 25 bp, Homo sapien
agctcaagggactgaagctccgcgg

SEQ ID NO: 5482402 - DNA, 25 bp, Homo sapien
cgggaaacgaaaagctgcgtgacca

SEQ ID NO: 5482403 - DNA, 25 bp, Homo sapien
tggccacaagcgacagtgctggcgc

SEQ ID NO: 5482404 - DNA, 25 bp, Homo sapien
tgcgtgaccagcatcatctgcaggc

SEQ ID NO: 5482405 - DNA, 25 bp, Homo sapien
cggtgggcacgggcgactggagtct

SEQ ID NO: 5482406 - DNA, 25 bp, Homo sapien
actggagtctgggagagaggtaggg

SEQ ID NO: 5482407 - DNA, 25 bp, Homo sapien
ggcgactggagtctgggagagaggt

SEQ ID NO: 5482408 - DNA, 25 bp, Homo sapien
cagaggcggccagcctgcgagtcca

SEQ ID NO: 5482409 - DNA, 25 bp, Homo sapien
ttagaatttgctggcactggccggg

SEQ ID NO: 5482410 - DNA, 25 bp, Homo sapien
ctgaacttagatggccaggtgctgc

SEQ ID NO: 5482411 - DNA, 25 bp, Homo sapien
acaggctggcgctcgtgtctgaaga

SEQ ID NO: 5482412 - DNA, 25 bp, Homo sapien
gaggattgcgcagactctcacctga

SEQ ID NO: 5482413 - DNA, 25 bp, Homo sapien
ttctccacgcttcctagtgtgcaat

SEQ ID NO: 5482414 - DNA, 25 bp, Homo sapien
cagccaccacggtgtcatcctgagc

SEQ ID NO: 5482415 - DNA, 25 bp, Homo sapien
cctagtgtgcaattctgggattctc

SEQ ID NO: 5482416 - DNA, 25 bp, Homo sapien
cacatctgggaggaccagacggaaa

SEQ ID NO: 5482417 - DNA, 25 bp, Homo sapien
tcatagcgctcatggccaaacgctc

SEQ ID NO: 5482418 - DNA, 25 bp, Homo sapien
caaagtcgtgtctttcatgagctgg

SEQ ID NO: 5482419 - DNA, 25 bp, Homo sapien
tggaaagccccgttctcatagcgct

SEQ ID NO: 5482420 - DNA, 25 bp, Homo sapien
agctggtggaaacaccggagcgccc

SEQ ID NO: 5482421 - DNA, 25 bp, Homo sapien
tttgggaaggcccacgtctggctgt

SEQ ID NO: 5482422 - DNA, 25 bp, Homo sapien
ggctgtttacaccaatctagggaaa

SEQ ID NO: 5482423 - DNA, 25 bp, Homo sapien
gcccacgtctggctgtttacaccaa

SEQ ID NO: 5482424 - DNA, 25 bp, Homo sapien
tctggctgtttacaccaatctaggg

SEQ ID NO: 5482425 - DNA, 25 bp, Homo sapien
ccagaaaatgcgtatctgtccacga

SEQ ID NO: 5482426 - DNA, 25 bp, Homo sapien
tccttggcaccggtgaaggccacac

SEQ ID NO: 5482427 - DNA, 25 bp, Homo sapien
gtatctgtccacgacgagggtcacg

SEQ ID NO: 5482428 - DNA, 25 bp, Homo sapien
ggccacaccagaaaatgcgtatctg

SEQ ID NO: 5482429 - DNA, 25 bp, Homo sapien
ctgaaaaagaggatgctcctgagcc

SEQ ID NO: 5482430 - DNA, 25 bp, Homo sapien
ttaatccaaaaaggtctggatcttc

SEQ ID NO: 5482431 - DNA, 25 bp, Homo sapien
aatccaaaaaggtctggatcttctc

SEQ ID NO: 5482432 - DNA, 25 bp, Homo sapien
taatccaaaaaggtctggatcttct

SEQ ID NO: 5482433 - DNA, 25 bp, Homo sapien
ccacacctccagcaaaacccaacat

SEQ ID NO: 5482434 - DNA, 25 bp, Homo sapien
cccacacctccagcaaaacccaaca

SEQ ID NO: 5482435 - DNA, 25 bp, Homo sapien
ccatttggcgggatggatcccttga

SEQ ID NO: 5482436 - DNA, 25 bp, Homo sapien
cagcccatgagagaattgattaaga

SEQ ID NO: 5482437 - DNA, 25 bp, Homo sapien
aaggaaaggacagccggacgtggtg

SEQ ID NO: 5482438 - DNA, 25 bp, Homo sapien
agagaattgattaagatggacttca

SEQ ID NO: 5482439 - DNA, 25 bp, Homo sapien
agccaggtgtgttaacgtgcctata

SEQ ID NO: 5482440 - DNA, 25 bp, Homo sapien
actcagcctgcatgacacagagacc

SEQ ID NO: 5482441 - DNA, 25 bp, Homo sapien
gtgttaacgtgcctatagttgcagc

SEQ ID NO: 5482442 - DNA, 25 bp, Homo sapien
tgtgattgcgcactgcactcagcct

SEQ ID NO: 5482443 - DNA, 25 bp, Homo sapien
agaaaaggcaaaccacagcctagga

SEQ ID NO: 5482444 - DNA, 25 bp, Homo sapien
aggcaaaccacagcctaggagaaaa

SEQ ID NO: 5482445 - DNA, 25 bp, Homo sapien
aaccacagcctaggagaaaatatgt

SEQ ID NO: 5482446 - DNA, 25 bp, Homo sapien
cacagcctaggagaaaatatgtata

SEQ ID NO: 5482447 - DNA, 25 bp, Homo sapien
gatggacacaagagacgtagccctg

SEQ ID NO: 5482448 - DNA, 25 bp, Homo sapien
catgtaacacggatgatgaggaacc

SEQ ID NO: 5482449 - DNA, 25 bp, Homo sapien
gaacaattgcctccataaattctag

SEQ ID NO: 5482450 - DNA, 25 bp, Homo sapien
gcaagacacaaagctaagccggagg

SEQ ID NO: 5482451 - DNA, 25 bp, Homo sapien
tctagagacaatgcgacgacaatta

SEQ ID NO: 5482452 - DNA, 25 bp, Homo sapien
gacgacaattaaagagaatgagaag

SEQ ID NO: 5482453 - DNA, 25 bp, Homo sapien
cagagttaggggatctgtaagtgca

SEQ ID NO: 5482454 - DNA, 25 bp, Homo sapien
cgtggttctagagacaatgcgacga

SEQ ID NO: 5482455 - DNA, 25 bp, Homo sapien
aatttgtatggtatgacctcattta

SEQ ID NO: 5482456 - DNA, 25 bp, Homo sapien
cattaagtgttgaatgaagaggaaa

SEQ ID NO: 5482457 - DNA, 25 bp, Homo sapien
ttaagtgttgaatgaagaggaaacc

SEQ ID NO: 5482458 - DNA, 25 bp, Homo sapien
tcaacattaagtgttgaatgaagag

SEQ ID NO: 5482459 - DNA, 25 bp, Homo sapien
aagtgttgaatgaagaggaaaccta

SEQ ID NO: 5482460 - DNA, 25 bp, Homo sapien
cctgggcgtgatatggtgagacctt

SEQ ID NO: 5482461 - DNA, 25 bp, Homo sapien
tagggagcgctctacatactctact

SEQ ID NO: 5482462 - DNA, 25 bp, Homo sapien
aaacattaagtctatgaggccaggg

SEQ ID NO: 5482463 - DNA, 25 bp, Homo sapien
aaaaaggtggtaggagagttcatat

SEQ ID NO: 5482464 - DNA, 25 bp, Homo sapien
ctttgggaactagggcgcttcacca

SEQ ID NO: 5482465 - DNA, 25 bp, Homo sapien
tgtcattcagaatcgagtgctgcgt

SEQ ID NO: 5482466 - DNA, 25 bp, Homo sapien
tgcccacaggactgctaaacagaag

SEQ ID NO: 5482467 - DNA, 25 bp, Homo sapien
cagcattcattagcgccctttggga

SEQ ID NO: 5482468 - DNA, 25 bp, Homo sapien
tcccagcgatttgcagaaaaaagca

SEQ ID NO: 5482469 - DNA, 25 bp, Homo sapien
cagcgatttgcagaaaaaagcaggt

SEQ ID NO: 5482470 - DNA, 25 bp, Homo sapien
gatttgcagaaaaaagcaggtgcac

SEQ ID NO: 5482471 - DNA, 25 bp, Homo sapien
ttgttcccagcgatttgcagaaaaa

SEQ ID NO: 5482472 - DNA, 25 bp, Homo sapien
gaagtttgccgatttcagttgatct

SEQ ID NO: 5482473 - DNA, 25 bp, Homo sapien
actcagaagtttgccgatttcagtt

SEQ ID NO: 5482474 - DNA, 25 bp, Homo sapien
tttcttttgcaagtaggaactcaga

SEQ ID NO: 5482475 - DNA, 25 bp, Homo sapien
gatcctccacgtcacttttcttttg

SEQ ID NO: 5482476 - DNA, 25 bp, Homo sapien
ccgggaaccggagcagttcggcgcg

SEQ ID NO: 5482477 - DNA, 25 bp, Homo sapien
cagttcggcgcggtggcccgcggcg

SEQ ID NO: 5482478 - DNA, 25 bp, Homo sapien
cagcactatgagagccccgcgccgg

SEQ ID NO: 5482479 - DNA, 25 bp, Homo sapien
ctcttcccggcgcggtccacgccct

SEQ ID NO: 5482480 - DNA, 25 bp, Homo sapien
cagcgcgcgccgtgattagctagta

SEQ ID NO: 5482481 - DNA, 25 bp, Homo sapien
cggcctcggccaaattcgaagggat

SEQ ID NO: 5482482 - DNA, 25 bp, Homo sapien
ttagctagtatttcccggcctcggc

SEQ ID NO: 5482483 - DNA, 25 bp, Homo sapien
attggccggcgtcaacagcgcgcgc

SEQ ID NO: 5482484 - DNA, 25 bp, Homo sapien
caaattatagcacggagagggaacg

SEQ ID NO: 5482485 - DNA, 25 bp, Homo sapien
tgtccccggtatctagaaagcgctc

SEQ ID NO: 5482486 - DNA, 25 bp, Homo sapien
tatcttagggatatcaggctgcctg

SEQ ID NO: 5482487 - DNA, 25 bp, Homo sapien
caactcctctgaaatgtgggtcatg

SEQ ID NO: 5482488 - DNA, 25 bp, Homo sapien
atgatccgcccatctcagcctccca

SEQ ID NO: 5482489 - DNA, 25 bp, Homo sapien
ccacctcccgagttcatcccattct

SEQ ID NO: 5482490 - DNA, 25 bp, Homo sapien
catgatccgcccatctcagcctccc

SEQ ID NO: 5482491 - DNA, 25 bp, Homo sapien
cacctcccgagttcatcccattctc

SEQ ID NO: 5482492 - DNA, 25 bp, Homo sapien
ggttggtccacatcctagcagttct

SEQ ID NO: 5482493 - DNA, 25 bp, Homo sapien
tacatgaagtccagtgttaggcagg

SEQ ID NO: 5482494 - DNA, 25 bp, Homo sapien
cctgcgtgatcaaaggatgactgcc

SEQ ID NO: 5482495 - DNA, 25 bp, Homo sapien
tagcacaggtagcagaataccagcc

SEQ ID NO: 5482496 - DNA, 25 bp, Homo sapien
gagatgtatttgaggagacgtctcc

SEQ ID NO: 5482497 - DNA, 25 bp, Homo sapien
ctgactcagcaaggaatgcagtttc

SEQ ID NO: 5482498 - DNA, 25 bp, Homo sapien
catgatccccttaaaaaccttagct

SEQ ID NO: 5482499 - DNA, 25 bp, Homo sapien
tcatgggtctgttaactgtgcagca

SEQ ID NO: 5482500 - DNA, 25 bp, Homo sapien
tgagccagacaggtcccaaggagcc

SEQ ID NO: 5482501 - DNA, 25 bp, Homo sapien
agacaggtcccaaggagccttcggg

SEQ ID NO: 5482502 - DNA, 25 bp, Homo sapien
caggtcccaaggagccttcgggaag

SEQ ID NO: 5482503 - DNA, 25 bp, Homo sapien
gaagggagggcctcgtggcggcctg

SEQ ID NO: 5482504 - DNA, 25 bp, Homo sapien
gactcgcccgagttggtaagagcca

SEQ ID NO: 5482505 - DNA, 25 bp, Homo sapien
gtgtttgaaactccggcagactcgc

SEQ ID NO: 5482506 - DNA, 25 bp, Homo sapien
tgtggcgtcaacacaggctgtcctg

SEQ ID NO: 5482507 - DNA, 25 bp, Homo sapien
cacagggaaaggatgccgtgtctcg

SEQ ID NO: 5482508 - DNA, 25 bp, Homo sapien
ctgggccaggcggtggttgacggtt

SEQ ID NO: 5482509 - DNA, 25 bp, Homo sapien
tgccgtcatgcgagtcggctgcctc

SEQ ID NO: 5482510 - DNA, 25 bp, Homo sapien
ttgacggttgccgtcatgcgagtcg

SEQ ID NO: 5482511 - DNA, 25 bp, Homo sapien
gatggtgcaccgagggttttgagaa

SEQ ID NO: 5482512 - DNA, 25 bp, Homo sapien
ccatgctctcaacgcgtgcttggta

SEQ ID NO: 5482513 - DNA, 25 bp, Homo sapien
tgccatgctctcaacgcgtgcttgg

SEQ ID NO: 5482514 - DNA, 25 bp, Homo sapien
ggagcacttgtgagacggcagcttc

SEQ ID NO: 5482515 - DNA, 25 bp, Homo sapien
cttgtgagacggcagcttccagggc

SEQ ID NO: 5482516 - DNA, 25 bp, Homo sapien
attgatggtgtatctgtcagcttca

SEQ ID NO: 5482517 - DNA, 25 bp, Homo sapien
cgtgtgcctctcctggtgccctcct

SEQ ID NO: 5482518 - DNA, 25 bp, Homo sapien
cttgttcggttgatacttagtaact

SEQ ID NO: 5482519 - DNA, 25 bp, Homo sapien
gatacttagtaactccgtggccagt

SEQ ID NO: 5482520 - DNA, 25 bp, Homo sapien
tggccagttgaagcgctggatgttt

SEQ ID NO: 5482521 - DNA, 25 bp, Homo sapien
tccgtggccagttgaagcgctggat

SEQ ID NO: 5482522 - DNA, 25 bp, Homo sapien
aggactgtccggtacagcccgggct

SEQ ID NO: 5482523 - DNA, 25 bp, Homo sapien
cctcgcgtagctttcctgtggtttt

SEQ ID NO: 5482524 - DNA, 25 bp, Homo sapien
tttccaggactgtccggtacagccc

SEQ ID NO: 5482525 - DNA, 25 bp, Homo sapien
gcggccgccaccctcgcgtagcttt

SEQ ID NO: 5482526 - DNA, 25 bp, Homo sapien
gtgcgctcccgcgtggggcgcctcg

SEQ ID NO: 5482527 - DNA, 25 bp, Homo sapien
aggaagcggcctccgcttcgctggc

SEQ ID NO: 5482528 - DNA, 25 bp, Homo sapien
gcctttttagcttggacttcagtcc

SEQ ID NO: 5482529 - DNA, 25 bp, Homo sapien
accgaggcgcgcgtggggccactgc

SEQ ID NO: 5482530 - DNA, 25 bp, Homo sapien
ccgcgagaccctgtgcgacagctgg

SEQ ID NO: 5482531 - DNA, 25 bp, Homo sapien
cattagcttggagtggccgcaggtc

SEQ ID NO: 5482532 - DNA, 25 bp, Homo sapien
ctccggagtaaacggctcttcatta

SEQ ID NO: 5482533 - DNA, 25 bp, Homo sapien
gctgggctgatgctccgtttctctg

SEQ ID NO: 5482534 - DNA, 25 bp, Homo sapien
catgaagatcgtgggtctgtgtgtc

SEQ ID NO: 5482535 - DNA, 25 bp, Homo sapien
gagctgacgaaccacgaatgcttct

SEQ ID NO: 5482536 - DNA, 25 bp, Homo sapien
tgaaattaccctaatagcatgaaga

SEQ ID NO: 5482537 - DNA, 25 bp, Homo sapien
tctgtgtgtccgtgaagtgagtccc

SEQ ID NO: 5482538 - DNA, 25 bp, Homo sapien
ccttctgatggctacatctgtatct

SEQ ID NO: 5482539 - DNA, 25 bp, Homo sapien
tccttctgatggctacatctgtatc

SEQ ID NO: 5482540 - DNA, 25 bp, Homo sapien
cttctgatggctacatctgtatctt

SEQ ID NO: 5482541 - DNA, 25 bp, Homo sapien
gctgctcgtccctgccagtgtctgg

SEQ ID NO: 5482542 - DNA, 25 bp, Homo sapien
gagggcaggctacagtgcttcacac

SEQ ID NO: 5482543 - DNA, 25 bp, Homo sapien
cttcgccacggctgtgaaactggag

SEQ ID NO: 5482544 - DNA, 25 bp, Homo sapien
ctgcggcttagaagggaaagcgcca

SEQ ID NO: 5482545 - DNA, 25 bp, Homo sapien
agatgtttattgatcgtggaggata

SEQ ID NO: 5482546 - DNA, 25 bp, Homo sapien
ggataggtaagtgcagggagtttgt

SEQ ID NO: 5482547 - DNA, 25 bp, Homo sapien
acagatgtttattgatcgtggagga

SEQ ID NO: 5482548 - DNA, 25 bp, Homo sapien
gaagagggataggtaagtgcaggga

SEQ ID NO: 5482549 - DNA, 25 bp, Homo sapien
ctgtatgtattttgtggtgtccacc

SEQ ID NO: 5482550 - DNA, 25 bp, Homo sapien
cacgtttcatccaaaacgatgatgc

SEQ ID NO: 5482551 - DNA, 25 bp, Homo sapien
tattttcaaggaattattatctatg

SEQ ID NO: 5482552 - DNA, 25 bp, Homo sapien
gatgatgcagctttaacatgaatgt

SEQ ID NO: 5482553 - DNA, 25 bp, Homo sapien
ggggctcaagttgacttccaaggaa

SEQ ID NO: 5482554 - DNA, 25 bp, Homo sapien
tgctggggctcaagttgacttccaa

SEQ ID NO: 5482555 - DNA, 25 bp, Homo sapien
gctggggctcaagttgacttccaag

SEQ ID NO: 5482556 - DNA, 25 bp, Homo sapien
tggggctcaagttgacttccaagga

SEQ ID NO: 5482557 - DNA, 25 bp, Homo sapien
ccacaacgccgaaaccagcacctgc

SEQ ID NO: 5482558 - DNA, 25 bp, Homo sapien
aatccgtagactggagtcctcgctg

SEQ ID NO: 5482559 - DNA, 25 bp, Homo sapien
aaaccaatccgtagactggagtcct

SEQ ID NO: 5482560 - DNA, 25 bp, Homo sapien
aggtgaaaaccaatccgtagactgg

SEQ ID NO: 5482561 - DNA, 25 bp, Homo sapien
tcacaatgcggaaaccagcacctgc

SEQ ID NO: 5482562 - DNA, 25 bp, Homo sapien
ctcacaatgcggaaaccagcacctg

SEQ ID NO: 5482563 - DNA, 25 bp, Homo sapien
ggaaggcctcacaatgcggaaacca

SEQ ID NO: 5482564 - DNA, 25 bp, Homo sapien
aggcctcacaatgcggaaaccagca

SEQ ID NO: 5482565 - DNA, 25 bp, Homo sapien
tggttaaggaggacaggaatgactc

SEQ ID NO: 5482566 - DNA, 25 bp, Homo sapien
gggatgtggttaaggaggacaggaa

SEQ ID NO: 5482567 - DNA, 25 bp, Homo sapien
atcaccaggacaaatccagctcgcc

SEQ ID NO: 5482568 - DNA, 25 bp, Homo sapien
aggacaaatccagctcgccggtttt

SEQ ID NO: 5482569 - DNA, 25 bp, Homo sapien
gttgtccagcattggcgaggctctg

SEQ ID NO: 5482570 - DNA, 25 bp, Homo sapien
gctcgatgagttgacccggatatgc

SEQ ID NO: 5482571 - DNA, 25 bp, Homo sapien
acaatggggcttgcgcaggtccagc

SEQ ID NO: 5482572 - DNA, 25 bp, Homo sapien
agccctgggtttttggacatgttga

SEQ ID NO: 5482573 - DNA, 25 bp, Homo sapien
aggcagccgatgcccgccagaccat

SEQ ID NO: 5482574 - DNA, 25 bp, Homo sapien
ctctgtgccgtgtcatgacctgaag

SEQ ID NO: 5482575 - DNA, 25 bp, Homo sapien
ttgccactctgtgccgtgtcatgac

SEQ ID NO: 5482576 - DNA, 25 bp, Homo sapien
ccactctgtgccgtgtcatgacctg

SEQ ID NO: 5482577 - DNA, 25 bp, Homo sapien
cactctgtgccgtgtcatgacctga

SEQ ID NO: 5482578 - DNA, 25 bp, Homo sapien
cgggcttcccgtgaggatctgggct

SEQ ID NO: 5482579 - DNA, 25 bp, Homo sapien
ggagaggccagccgggtgacaggga

SEQ ID NO: 5482580 - DNA, 25 bp, Homo sapien
gcctgctgagggacacccgctggta

SEQ ID NO: 5482581 - DNA, 25 bp, Homo sapien
ctgctgagggacacccgctggtagt

SEQ ID NO: 5482582 - DNA, 25 bp, Homo sapien
ccgagtgactccgacgcaggagaac

SEQ ID NO: 5482583 - DNA, 25 bp, Homo sapien
gggttaacacagactccgagtgact

SEQ ID NO: 5482584 - DNA, 25 bp, Homo sapien
aaaatctgatgagacccgatcgcat

SEQ ID NO: 5482585 - DNA, 25 bp, Homo sapien
tcgcatccaggcaggccgtgttctc

SEQ ID NO: 5482586 - DNA, 25 bp, Homo sapien
gacgcgcagagaattccacgccgtc

SEQ ID NO: 5482587 - DNA, 25 bp, Homo sapien
tgacggcgttgagtgtccgtggtca

SEQ ID NO: 5482588 - DNA, 25 bp, Homo sapien
agagacgcgcagagaattccacgcc

SEQ ID NO: 5482589 - DNA, 25 bp, Homo sapien
caggtgtgtgtaagagacgcgcaga

SEQ ID NO: 5482590 - DNA, 25 bp, Homo sapien
tggtggtgactcatggcgcgtggcc

SEQ ID NO: 5482591 - DNA, 25 bp, Homo sapien
catttgcgttttcctgtggattcac

SEQ ID NO: 5482592 - DNA, 25 bp, Homo sapien
tgaccagccgtgtggagagcttggc

SEQ ID NO: 5482593 - DNA, 25 bp, Homo sapien
cgtggcccgtagctctgaggagcat

SEQ ID NO: 5482594 - DNA, 25 bp, Homo sapien
caagcccgtcccttgtggggacagc

SEQ ID NO: 5482595 - DNA, 25 bp, Homo sapien
tctgagtccagaagccgtcgctgtg

SEQ ID NO: 5482596 - DNA, 25 bp, Homo sapien
tgccctctcgtctgcgtcaggtcct

SEQ ID NO: 5482597 - DNA, 25 bp, Homo sapien
gcgtcaggtcctgagttctgagtcc

SEQ ID NO: 5482598 - DNA, 25 bp, Homo sapien
gcaggggtaggccccaggcaggtcc

SEQ ID NO: 5482599 - DNA, 25 bp, Homo sapien
caggggtaggccccaggcaggtcct

SEQ ID NO: 5482600 - DNA, 25 bp, Homo sapien
caacactgtggcgtggagacgctcg

SEQ ID NO: 5482601 - DNA, 25 bp, Homo sapien
tcatgcgtgcgcttcaggatgctcc

SEQ ID NO: 5482602 - DNA, 25 bp, Homo sapien
acgctcgagtgtccgcgtgacggct

SEQ ID NO: 5482603 - DNA, 25 bp, Homo sapien
tgtcttggcttcgtttcggaagtag

SEQ ID NO: 5482604 - DNA, 25 bp, Homo sapien
cagggagctttggctccgggtgtcc

SEQ ID NO: 5482605 - DNA, 25 bp, Homo sapien
gggagctttggctccgggtgtccca

SEQ ID NO: 5482606 - DNA, 25 bp, Homo sapien
ccatgcaggctgcacgtcccacact

SEQ ID NO: 5482607 - DNA, 25 bp, Homo sapien
gcaggctgcacgtcccacactaagg

SEQ ID NO: 5482608 - DNA, 25 bp, Homo sapien
ctgtgggtggaacaaatcaacagcc

SEQ ID NO: 5482609 - DNA, 25 bp, Homo sapien
gaggcctggtgcctcaagctgtccc

SEQ ID NO: 5482610 - DNA, 25 bp, Homo sapien
tttggggagcctcagcgacttgctg

SEQ ID NO: 5482611 - DNA, 25 bp, Homo sapien
ggttgtgcttgcagggccgaggcct

SEQ ID NO: 5482612 - DNA, 25 bp, Homo sapien
tggtgcactgtggcccctgatggcc

SEQ ID NO: 5482613 - DNA, 25 bp, Homo sapien
ggtgaagcctgctacacccatgtcc

SEQ ID NO: 5482614 - DNA, 25 bp, Homo sapien
taggtgaagcctgctacacccatgt

SEQ ID NO: 5482615 - DNA, 25 bp, Homo sapien
tgtcataggtgaagcctgctacacc

SEQ ID NO: 5482616 - DNA, 25 bp, Homo sapien
ttctgctgtcataggtgaagcctgc

SEQ ID NO: 5482617 - DNA, 25 bp, Homo sapien
gttagcatgcacctggccgccctgg

SEQ ID NO: 5482618 - DNA, 25 bp, Homo sapien
caggggtgccttgaggtcccatgca

SEQ ID NO: 5482619 - DNA, 25 bp, Homo sapien
cctgagggctgccccgtttgctgtt

SEQ ID NO: 5482620 - DNA, 25 bp, Homo sapien
gtttgctgttagcatgcacctggcc

SEQ ID NO: 5482621 - DNA, 25 bp, Homo sapien
ctgctcccatggcagagccagccca

SEQ ID NO: 5482622 - DNA, 25 bp, Homo sapien
tgctcaggaactcttcctgggcagg

SEQ ID NO: 5482623 - DNA, 25 bp, Homo sapien
agccctccccgctgctcccatggca

SEQ ID NO: 5482624 - DNA, 25 bp, Homo sapien
tgctgctcaggaactcttcctgggc

SEQ ID NO: 5482625 - DNA, 25 bp, Homo sapien
aggccctgggatgcgctgttcccct

SEQ ID NO: 5482626 - DNA, 25 bp, Homo sapien
ccacattttctttacggtctctatg

SEQ ID NO: 5482627 - DNA, 25 bp, Homo sapien
tatgtaacattcacacccggcagct

SEQ ID NO: 5482628 - DNA, 25 bp, Homo sapien
tagtttactgcacctattagcccgt

SEQ ID NO: 5482629 - DNA, 25 bp, Homo sapien
gcatctgcacccttgctgaaggctg

SEQ ID NO: 5482630 - DNA, 25 bp, Homo sapien
aggtctctccttgcggttgccgggc

SEQ ID NO: 5482631 - DNA, 25 bp, Homo sapien
ggccgccggtcaccaacatcatgtt

SEQ ID NO: 5482632 - DNA, 25 bp, Homo sapien
ttcctgaagacgcacaagacggcca

SEQ ID NO: 5482633 - DNA, 25 bp, Homo sapien
gaggaaccccgtgttccagctggag

SEQ ID NO: 5482634 - DNA, 25 bp, Homo sapien
gaaagtcatgcccaacgacaccttc

SEQ ID NO: 5482635 - DNA, 25 bp, Homo sapien
tctgttctgggcacccgggaaccag

SEQ ID NO: 5482636 - DNA, 25 bp, Homo sapien
ttcatctactacaaaacctacgccc

SEQ ID NO: 5482637 - DNA, 25 bp, Homo sapien
ggaaacattcccctgagttgaagaa

SEQ ID NO: 5482638 - DNA, 25 bp, Homo sapien
tgctgaacagttgtcgcggaggcct

SEQ ID NO: 5482639 - DNA, 25 bp, Homo sapien
aaagccctgggcaaaactcttgatg

SEQ ID NO: 5482640 - DNA, 25 bp, Homo sapien
taaacgggtcctggtctcgtcatgc

SEQ ID NO: 5482641 - DNA, 25 bp, Homo sapien
gcacatgtgggcccgagtgagtcca

SEQ ID NO: 5482642 - DNA, 25 bp, Homo sapien
ctgagcatcaggcagaacccgccgg

SEQ ID NO: 5482643 - DNA, 25 bp, Homo sapien
ggaggtgccgcttctgagcagagct

SEQ ID NO: 5482644 - DNA, 25 bp, Homo sapien
agcatgaggaggtgccgcttctgag

SEQ ID NO: 5482645 - DNA, 25 bp, Homo sapien
aggagcgagcgttgggtgcggtggc

SEQ ID NO: 5482646 - DNA, 25 bp, Homo sapien
gtgcggtggccgctgcgttggcagc

SEQ ID NO: 5482647 - DNA, 25 bp, Homo sapien
tgtccctgagcggaacgcaggtcgt

SEQ ID NO: 5482648 - DNA, 25 bp, Homo sapien
gccctgtccctgagcggaacgcagg

SEQ ID NO: 5482649 - DNA, 25 bp, Homo sapien
tctttctggcgacgtaaaactgtgt

SEQ ID NO: 5482650 - DNA, 25 bp, Homo sapien
aactgtgtgtagtttgcagtagaga

SEQ ID NO: 5482651 - DNA, 25 bp, Homo sapien
tgaggttggcgggaactgaaactgg

SEQ ID NO: 5482652 - DNA, 25 bp, Homo sapien
tttgcagtagagagtgttgagaaca

SEQ ID NO: 5482653 - DNA, 25 bp, Homo sapien
gatgtgtacgatggccaagttgcct

SEQ ID NO: 5482654 - DNA, 25 bp, Homo sapien
agttgcctggactgggtccgcccct

SEQ ID NO: 5482655 - DNA, 25 bp, Homo sapien
gcaggaggatgtgtacgatggccaa

SEQ ID NO: 5482656 - DNA, 25 bp, Homo sapien
ccaggattctcggctgtgagcagga

SEQ ID NO: 5482657 - DNA, 25 bp, Homo sapien
accacagcgccccaggtttcagaag

SEQ ID NO: 5482658 - DNA, 25 bp, Homo sapien
acagcgccccaggtttcagaagcag

SEQ ID NO: 5482659 - DNA, 25 bp, Homo sapien
tgtttcccaccacagcgccccaggt

SEQ ID NO: 5482660 - DNA, 25 bp, Homo sapien
ccaccacagcgccccaggtttcaga

SEQ ID NO: 5482661 - DNA, 25 bp, Homo sapien
cccagggatcccccacggaggctgc

SEQ ID NO: 5482662 - DNA, 25 bp, Homo sapien
gcccagggatcccccacggaggctg

SEQ ID NO: 5482663 - DNA, 25 bp, Homo sapien
tttgagcattggttaccaaggctgc

SEQ ID NO: 5482664 - DNA, 25 bp, Homo sapien
gagcattggttaccaaggctgcctc

SEQ ID NO: 5482665 - DNA, 25 bp, Homo sapien
gtggtcatttgagcattggttacca

SEQ ID NO: 5482666 - DNA, 25 bp, Homo sapien
tcatttgagcattggttaccaaggc

SEQ ID NO: 5482667 - DNA, 25 bp, Homo sapien
ccagcgtgaaagggactggcaggag

SEQ ID NO: 5482668 - DNA, 25 bp, Homo sapien
ctctgggaggtcaactgcggcctca

SEQ ID NO: 5482669 - DNA, 25 bp, Homo sapien
cccagaggagagtgtgcactcacgg

SEQ ID NO: 5482670 - DNA, 25 bp, Homo sapien
gcacagatacagagctagagcccag

SEQ ID NO: 5482671 - DNA, 25 bp, Homo sapien
tggagcagcagacccgtgtccctct

SEQ ID NO: 5482672 - DNA, 25 bp, Homo sapien
cacagggtgggtgtgacactgaggg

SEQ ID NO: 5482673 - DNA, 25 bp, Homo sapien
agggtgggtgtgacactgagggttc

SEQ ID NO: 5482674 - DNA, 25 bp, Homo sapien
cccacagggtgggtgtgacactgag

SEQ ID NO: 5482675 - DNA, 25 bp, Homo sapien
ctggcccacagggtgggtgtgacac

SEQ ID NO: 5482676 - DNA, 25 bp, Homo sapien
aggggtccacggaccagaaggccag

SEQ ID NO: 5482677 - DNA, 25 bp, Homo sapien
tccaggggtccacggaccagaaggc

SEQ ID NO: 5482678 - DNA, 25 bp, Homo sapien
ccacggaccagaaggccaggttctc

SEQ ID NO: 5482679 - DNA, 25 bp, Homo sapien
gtccacggaccagaaggccaggttc

SEQ ID NO: 5482680 - DNA, 25 bp, Homo sapien
tgcttcccgcttgggcacaattgcc

SEQ ID NO: 5482681 - DNA, 25 bp, Homo sapien
tttcaggaaccggtggcccagggca

SEQ ID NO: 5482682 - DNA, 25 bp, Homo sapien
tctcagaagccgcgcactggtggtg

SEQ ID NO: 5482683 - DNA, 25 bp, Homo sapien
gccagctgtcctagccaagagcctt

SEQ ID NO: 5482684 - DNA, 25 bp, Homo sapien
gtccccgtcgtaggcaggcgttctg

SEQ ID NO: 5482685 - DNA, 25 bp, Homo sapien
caggcgtggtgtccggcatccggcc

SEQ ID NO: 5482686 - DNA, 25 bp, Homo sapien
gggtgtgcatgggtccccgtcgtag

SEQ ID NO: 5482687 - DNA, 25 bp, Homo sapien
atgggtccccgtcgtaggcaggcgt

SEQ ID NO: 5482688 - DNA, 25 bp, Homo sapien
tggcttccacggtgctgtggcctct

SEQ ID NO: 5482689 - DNA, 25 bp, Homo sapien
tgggcgaattctgggatgaccctgt

SEQ ID NO: 5482690 - DNA, 25 bp, Homo sapien
cctgctgggcgaattctgggatgac

SEQ ID NO: 5482691 - DNA, 25 bp, Homo sapien
tccttgctcgaggttttgggtcctc

SEQ ID NO: 5482692 - DNA, 25 bp, Homo sapien
agcagagatgacctccccttgcggc

SEQ ID NO: 5482693 - DNA, 25 bp, Homo sapien
cagcccccagcagtgcggagcgtcc

SEQ ID NO: 5482694 - DNA, 25 bp, Homo sapien
gcttcggtgaccactcccaagggtg

SEQ ID NO: 5482695 - DNA, 25 bp, Homo sapien
ccccagcagtgcggagcgtccaggt

SEQ ID NO: 5482696 - DNA, 25 bp, Homo sapien
gcccgttgcccgggccctggcagtg

SEQ ID NO: 5482697 - DNA, 25 bp, Homo sapien
gctcgtggctagcagggtcatcaca

SEQ ID NO: 5482698 - DNA, 25 bp, Homo sapien
ttcagatctgaagcaaaggagccac

SEQ ID NO: 5482699 - DNA, 25 bp, Homo sapien
gacttgtggcccgtgtgtaggtcac

SEQ ID NO: 5482700 - DNA, 25 bp, Homo sapien
ggtacattgtgtcatgcatgtgtcc

SEQ ID NO: 5482701 - DNA, 25 bp, Homo sapien
cccattcttcgtcattctcttctat

SEQ ID NO: 5482702 - DNA, 25 bp, Homo sapien
ccattcttcgtcattctcttctata

SEQ ID NO: 5482703 - DNA, 25 bp, Homo sapien
gcccattcttcgtcattctcttcta

SEQ ID NO: 5482704 - DNA, 25 bp, Homo sapien
ggcccattcttcgtcattctcttct

SEQ ID NO: 5482705 - DNA, 25 bp, Homo sapien
caagtgatctgcttgtcctgacctc

SEQ ID NO: 5482706 - DNA, 25 bp, Homo sapien
tgatctgcttgtcctgacctcccaa

SEQ ID NO: 5482707 - DNA, 25 bp, Homo sapien
agtgatctgcttgtcctgacctccc

SEQ ID NO: 5482708 - DNA, 25 bp, Homo sapien
tcaagtgatctgcttgtcctgacct

SEQ ID NO: 5482709 - DNA, 25 bp, Homo sapien
gagttgttctgtcctgcgcgtgtgt

SEQ ID NO: 5482710 - DNA, 25 bp, Homo sapien
cgtctgcacatgtttgccggtgacc

SEQ ID NO: 5482711 - DNA, 25 bp, Homo sapien
gacggctttgccgttgccgagccag

SEQ ID NO: 5482712 - DNA, 25 bp, Homo sapien
cgcgtgtgtcccctcatggtcttga

SEQ ID NO: 5482713 - DNA, 25 bp, Homo sapien
ttgacaaagagccttagtgaatctg

SEQ ID NO: 5482714 - DNA, 25 bp, Homo sapien
tctaacggttctggccattctgctg

SEQ ID NO: 5482715 - DNA, 25 bp, Homo sapien
ggaatccagctagacccgcagggct

SEQ ID NO: 5482716 - DNA, 25 bp, Homo sapien
cctcagatatgagcgtggtgtctgt

SEQ ID NO: 5482717 - DNA, 25 bp, Homo sapien
gataggaaggactgagttcattttc

SEQ ID NO: 5482718 - DNA, 25 bp, Homo sapien
taggaaggactgagttcattttcag

SEQ ID NO: 5482719 - DNA, 25 bp, Homo sapien
ataggaaggactgagttcattttca

SEQ ID NO: 5482720 - DNA, 25 bp, Homo sapien
tttccacgtaactcgtatttgctac

SEQ ID NO: 5482721 - DNA, 25 bp, Homo sapien
ttgctactttagaggaaccatttat

SEQ ID NO: 5482722 - DNA, 25 bp, Homo sapien
tgccattttccacgtaactcgtatt

SEQ ID NO: 5482723 - DNA, 25 bp, Homo sapien
taactcgtatttgctactttagagg

SEQ ID NO: 5482724 - DNA, 25 bp, Homo sapien
agggcacatgtgcctccgttgcgca

SEQ ID NO: 5482725 - DNA, 25 bp, Homo sapien
gggcacatgtgcctccgttgcgcac

SEQ ID NO: 5482726 - DNA, 25 bp, Homo sapien
gctggccgtgaccagcggttccagg

SEQ ID NO: 5482727 - DNA, 25 bp, Homo sapien
gggctggccgtgaccagcggttcca

SEQ ID NO: 5482728 - DNA, 25 bp, Homo sapien
agcggttccaggtgacgctgccctg

SEQ ID NO: 5482729 - DNA, 25 bp, Homo sapien
ccagcggttccaggtgacgctgccc

SEQ ID NO: 5482730 - DNA, 25 bp, Homo sapien
taggtccttctcagaataggcagaa

SEQ ID NO: 5482731 - DNA, 25 bp, Homo sapien
acattcccacaccttaccaggatga

SEQ ID NO: 5482732 - DNA, 25 bp, Homo sapien
caggtggcactgatgagatggagca

SEQ ID NO: 5482733 - DNA, 25 bp, Homo sapien
cacaccttaccaggatgaggatctc

SEQ ID NO: 5482734 - DNA, 25 bp, Homo sapien
cacctgctgcgctgggtcaagctga

SEQ ID NO: 5482735 - DNA, 25 bp, Homo sapien
gacttcacagtccaggcagaactca

SEQ ID NO: 5482736 - DNA, 25 bp, Homo sapien
ggagacttcacagtccaggcagaac

SEQ ID NO: 5482737 - DNA, 25 bp, Homo sapien
acttcacagtccaggcagaactcac

SEQ ID NO: 5482738 - DNA, 25 bp, Homo sapien
tgggagacttcacagtccaggcaga

SEQ ID NO: 5482739 - DNA, 25 bp, Homo sapien
ccagggcacattttgcacttgccat

SEQ ID NO: 5482740 - DNA, 25 bp, Homo sapien
ggaaacaaactcaggtctgccaggg

SEQ ID NO: 5482741 - DNA, 25 bp, Homo sapien
tgccagggcacattttgcacttgcc

SEQ ID NO: 5482742 - DNA, 25 bp, Homo sapien
ggtctgccagggcacattttgcact

SEQ ID NO: 5482743 - DNA, 25 bp, Homo sapien
ttctgttaacattcccagtaaatcc

SEQ ID NO: 5482744 - DNA, 25 bp, Homo sapien
gttctgttaacattcccagtaaatc

SEQ ID NO: 5482745 - DNA, 25 bp, Homo sapien
tctgttaacattcccagtaaatcca

SEQ ID NO: 5482746 - DNA, 25 bp, Homo sapien
accattcttcatggagtctttctgg

SEQ ID NO: 5482747 - DNA, 25 bp, Homo sapien
ggggcttctgtttgcaatgactcat

SEQ ID NO: 5482748 - DNA, 25 bp, Homo sapien
tctggggcttctgtttgcaatgact

SEQ ID NO: 5482749 - DNA, 25 bp, Homo sapien
taccattcttcatggagtctttctg

SEQ ID NO: 5482750 - DNA, 25 bp, Homo sapien
gtactcagagatccagttgatggca

SEQ ID NO: 5482751 - DNA, 25 bp, Homo sapien
tggcattcattgtactcggagatcc

SEQ ID NO: 5482752 - DNA, 25 bp, Homo sapien
tgtactcggagatccagttgctgtg

SEQ ID NO: 5482753 - DNA, 25 bp, Homo sapien
tccagtcactgcgttgggtgtactc

SEQ ID NO: 5482754 - DNA, 25 bp, Homo sapien
aagatgcagttcctgaccgctgggt

SEQ ID NO: 5482755 - DNA, 25 bp, Homo sapien
cgctgggtgtggtccccggaacagc

SEQ ID NO: 5482756 - DNA, 25 bp, Homo sapien
tgtggtccccggaacagccaggctg

SEQ ID NO: 5482757 - DNA, 25 bp, Homo sapien
gatgcagttcctgaccgctgggtgt

SEQ ID NO: 5482758 - DNA, 25 bp, Homo sapien
actgtgagacctccgttgtcctggg

SEQ ID NO: 5482759 - DNA, 25 bp, Homo sapien
ggatgcccaccgcttcagacatgat

SEQ ID NO: 5482760 - DNA, 25 bp, Homo sapien
agcgcgctgtccgtatttatgggaa

SEQ ID NO: 5482761 - DNA, 25 bp, Homo sapien
tgacaatattcttttgcgggacccc

SEQ ID NO: 5482762 - DNA, 25 bp, Homo sapien
tgaaggctgcaacgtattccttcta

SEQ ID NO: 5482763 - DNA, 25 bp, Homo sapien
tccttctatctcaccatacgtttgc

SEQ ID NO: 5482764 - DNA, 25 bp, Homo sapien
ctcctgaaggctgcaacgtattcct

SEQ ID NO: 5482765 - DNA, 25 bp, Homo sapien
tatctcaccatacgtttgcacccat

SEQ ID NO: 5482766 - DNA, 25 bp, Homo sapien
gatcaatacgtctgcactctgattc

SEQ ID NO: 5482767 - DNA, 25 bp, Homo sapien
tcaactgcggccaggtcagtacgtc

SEQ ID NO: 5482768 - DNA, 25 bp, Homo sapien
tctgattcccacgtgtctatgcctc

SEQ ID NO: 5482769 - DNA, 25 bp, Homo sapien
ttcactttgatcaattgcggccaga

SEQ ID NO: 5482770 - DNA, 25 bp, Homo sapien
tcatgacactggggtttgctcaaca

SEQ ID NO: 5482771 - DNA, 25 bp, Homo sapien
tgtcgatgggaagcagcattcagga

SEQ ID NO: 5482772 - DNA, 25 bp, Homo sapien
tcctgggttgtcgatgggaagcagc

SEQ ID NO: 5482773 - DNA, 25 bp, Homo sapien
cctcctgagtgacgggcagtgcaca

SEQ ID NO: 5482774 - DNA, 25 bp, Homo sapien
gaggggccgatgctgccttttaagt

SEQ ID NO: 5482775 - DNA, 25 bp, Homo sapien
gacttggacggcagctagtgattcc

SEQ ID NO: 5482776 - DNA, 25 bp, Homo sapien
tttgagggtcgcacagctgtagaac

SEQ ID NO: 5482777 - DNA, 25 bp, Homo sapien
tgattccgctgttcaaacctgaggg

SEQ ID NO: 5482778 - DNA, 25 bp, Homo sapien
cccgtttgaggattggggatctgat

SEQ ID NO: 5482779 - DNA, 25 bp, Homo sapien
tgggaggagccgatattccagtttg

SEQ ID NO: 5482780 - DNA, 25 bp, Homo sapien
gctgatgttcccgtttgaggattgg

SEQ ID NO: 5482781 - DNA, 25 bp, Homo sapien
accctgggaggagccgatattccag

SEQ ID NO: 5482782 - DNA, 25 bp, Homo sapien
acagctgtctgtacttcacgggacc

SEQ ID NO: 5482783 - DNA, 25 bp, Homo sapien
gagggaatccacactctcgaggcag

SEQ ID NO: 5482784 - DNA, 25 bp, Homo sapien
gaaacgcagggctttgaacctgggc

SEQ ID NO: 5482785 - DNA, 25 bp, Homo sapien
ccatgatgtccacgaggcttgttcc

SEQ ID NO: 5482786 - DNA, 25 bp, Homo sapien
ctcagtgaaggcgaaagggttgatc

SEQ ID NO: 5482787 - DNA, 25 bp, Homo sapien
cctcagtgaaggcgaaagggttgat

SEQ ID NO: 5482788 - DNA, 25 bp, Homo sapien
gggtgtccctccgaatgctggtgtc

SEQ ID NO: 5482789 - DNA, 25 bp, Homo sapien
gtgggtgtccctccgaatgctggtg

SEQ ID NO: 5482790 - DNA, 25 bp, Homo sapien
ctgggcgcactgccgtcaggatgaa

SEQ ID NO: 5482791 - DNA, 25 bp, Homo sapien
tccttatgtcgtgtcagcagcaggc

SEQ ID NO: 5482792 - DNA, 25 bp, Homo sapien
tggagccctggtacgggtccttcag

SEQ ID NO: 5482793 - DNA, 25 bp, Homo sapien
cactgaagcttccttatgtcgtgtc

SEQ ID NO: 5482794 - DNA, 25 bp, Homo sapien
agcaggtgcggctgttacctgagga

SEQ ID NO: 5482795 - DNA, 25 bp, Homo sapien
gagcaggtgcggctgttacctgagg

SEQ ID NO: 5482796 - DNA, 25 bp, Homo sapien
ctgaggacggagcaggtgcggctgt

SEQ ID NO: 5482797 - DNA, 25 bp, Homo sapien
tgaggacggagcaggtgcggctgtt

SEQ ID NO: 5482798 - DNA, 25 bp, Homo sapien
aggacggagcaggtgcggctgttac

SEQ ID NO: 5482799 - DNA, 25 bp, Homo sapien
gaggacggagcaggtgcggctgtta

SEQ ID NO: 5482800 - DNA, 25 bp, Homo sapien
ctgaggatggagcaggtgtggctgt

SEQ ID NO: 5482801 - DNA, 25 bp, Homo sapien
tgaggatggagcaggtgtggctgtt

SEQ ID NO: 5482802 - DNA, 25 bp, Homo sapien
aggatggagcaggtgtggctgttac

SEQ ID NO: 5482803 - DNA, 25 bp, Homo sapien
gaggatggagcaggtgtggctgtta

SEQ ID NO: 5482804 - DNA, 25 bp, Homo sapien
cgatggtgtcctgttaactgagcaa

SEQ ID NO: 5482805 - DNA, 25 bp, Homo sapien
gcgatggtgtcctgttaactgagca

SEQ ID NO: 5482806 - DNA, 25 bp, Homo sapien
gatggtgtcctgttaactgagcaat

SEQ ID NO: 5482807 - DNA, 25 bp, Homo sapien
tgagcgatggtgtcccgtgaactga

SEQ ID NO: 5482808 - DNA, 25 bp, Homo sapien
gtcccgtgaactgagcgatggtgtc

SEQ ID NO: 5482809 - DNA, 25 bp, Homo sapien
ggtgtcccatgaactgagcgatggt

SEQ ID NO: 5482810 - DNA, 25 bp, Homo sapien
tgtcccatgaactgagcgatggtgt

SEQ ID NO: 5482811 - DNA, 25 bp, Homo sapien
gagtgggggtgtcccatgaactgag

SEQ ID NO: 5482812 - DNA, 25 bp, Homo sapien
ggtgtcccatgaactgagcgggggt

SEQ ID NO: 5482813 - DNA, 25 bp, Homo sapien
tgtcccatgaactgagcgggggtgt

SEQ ID NO: 5482814 - DNA, 25 bp, Homo sapien
gggggtgtcccatgaactgagcggg

SEQ ID NO: 5482815 - DNA, 25 bp, Homo sapien
ctccccgcagcggagagagacgccg

SEQ ID NO: 5482816 - DNA, 25 bp, Homo sapien
tccccgcagcggagagagacgccag

SEQ ID NO: 5482817 - DNA, 25 bp, Homo sapien
tccccgcagcggagacagacgccgg

SEQ ID NO: 5482818 - DNA, 25 bp, Homo sapien
ccccgcagcggagagagacgccaga

SEQ ID NO: 5482819 - DNA, 25 bp, Homo sapien
aggtcgctgaggtgtgcagtcacta

SEQ ID NO: 5482820 - DNA, 25 bp, Homo sapien
cccagggcccagagtacatgtttgc

SEQ ID NO: 5482821 - DNA, 25 bp, Homo sapien
gtcactagagctgtggatgacttca

SEQ ID NO: 5482822 - DNA, 25 bp, Homo sapien
tgtggaggcaacatgcatggccctg

SEQ ID NO: 5482823 - DNA, 25 bp, Homo sapien
ggctttgcggctgacatccttctct

SEQ ID NO: 5482824 - DNA, 25 bp, Homo sapien
tgctcctggcggcttgtcccaagtg

SEQ ID NO: 5482825 - DNA, 25 bp, Homo sapien
cccagaagaaagctgtgcccttgct

SEQ ID NO: 5482826 - DNA, 25 bp, Homo sapien
cctggtcgcccaagggctttgcggc

SEQ ID NO: 5482827 - DNA, 25 bp, Homo sapien
atttaaatgtttatagccttgcagt

SEQ ID NO: 5482828 - DNA, 25 bp, Homo sapien
tttaaatgtttatagccttgcagta

SEQ ID NO: 5482829 - DNA, 25 bp, Homo sapien
cttccttcgggcctttcaataacat

SEQ ID NO: 5482830 - DNA, 25 bp, Homo sapien
cactgaatgctaagatgttggagaa

SEQ ID NO: 5482831 - DNA, 25 bp, Homo sapien
gaatcttgatggaatgttcactgaa

SEQ ID NO: 5482832 - DNA, 25 bp, Homo sapien
tcctgtccgaaacactggtgcttct

SEQ ID NO: 5482833 - DNA, 25 bp, Homo sapien
ttctctccaggaaggtcttgcacat

SEQ ID NO: 5482834 - DNA, 25 bp, Homo sapien
gtttgtagttctctccaggaaggtc

SEQ ID NO: 5482835 - DNA, 25 bp, Homo sapien
tagttctctccaggaaggtcttgca

SEQ ID NO: 5482836 - DNA, 25 bp, Homo sapien
gtagttctctccaggaaggtcttgc

SEQ ID NO: 5482837 - DNA, 25 bp, Homo sapien
gggatcagggtttgtgcatctctgg

SEQ ID NO: 5482838 - DNA, 25 bp, Homo sapien
atcagggtttgtgcatctctgggtg

SEQ ID NO: 5482839 - DNA, 25 bp, Homo sapien
ctctggggatcagggtttgtgcatc

SEQ ID NO: 5482840 - DNA, 25 bp, Homo sapien
cctgctgtgaatctcgtttctgctc

SEQ ID NO: 5482841 - DNA, 25 bp, Homo sapien
tcagcatgagcatgcccagatgctc

SEQ ID NO: 5482842 - DNA, 25 bp, Homo sapien
gcagcggtgtatgcccagatcagca

SEQ ID NO: 5482843 - DNA, 25 bp, Homo sapien
cagggacactgcagcggtgtatgcc

SEQ ID NO: 5482844 - DNA, 25 bp, Homo sapien
ggtgtatgcccagatcagcatgagc

SEQ ID NO: 5482845 - DNA, 25 bp, Homo sapien
ctgacttcttggctccgggctccag

SEQ ID NO: 5482846 - DNA, 25 bp, Homo sapien
cctgacttcttggctccgggctcca

SEQ ID NO: 5482847 - DNA, 25 bp, Homo sapien
agttgcacgtctaggaatccagatg

SEQ ID NO: 5482848 - DNA, 25 bp, Homo sapien
ttgcagttgcacgtctaggaatcca

SEQ ID NO: 5482849 - DNA, 25 bp, Homo sapien
tctaggaatccagatgatggtccca

SEQ ID NO: 5482850 - DNA, 25 bp, Homo sapien
gcacgtctaggaatccagatgatgg

SEQ ID NO: 5482851 - DNA, 25 bp, Homo sapien
tataaagagaacgtgcttgtgcctg

SEQ ID NO: 5482852 - DNA, 25 bp, Homo sapien
agtgtgagcgcgcagtgatgcccta

SEQ ID NO: 5482853 - DNA, 25 bp, Homo sapien
acagaaatcctgtagcgtgcaccgc

SEQ ID NO: 5482854 - DNA, 25 bp, Homo sapien
ctagagtgcagtcatcccgggcttg

SEQ ID NO: 5482855 - DNA, 25 bp, Homo sapien
ccacttccggcaataatcgcctggt

SEQ ID NO: 5482856 - DNA, 25 bp, Homo sapien
ctgaggcgcgccgagaggcggtggc

SEQ ID NO: 5482857 - DNA, 25 bp, Homo sapien
ctgcgggcgtcaggacccggcagca

SEQ ID NO: 5482858 - DNA, 25 bp, Homo sapien
cggcagcaacactgccacgcgaatc

SEQ ID NO: 5482859 - DNA, 25 bp, Homo sapien
tctcagtgggcttagcaatgggggc

SEQ ID NO: 5482860 - DNA, 25 bp, Homo sapien
ggtaatttggttctcagtgggctta

SEQ ID NO: 5482861 - DNA, 25 bp, Homo sapien
tttggtaatttggttctcagtgggc

SEQ ID NO: 5482862 - DNA, 25 bp, Homo sapien
ttggttctcagtgggcttagcaatg

SEQ ID NO: 5482863 - DNA, 25 bp, Homo sapien
taatatcctagtcatgaggtggctg

SEQ ID NO: 5482864 - DNA, 25 bp, Homo sapien
taggtttgcggcctcatctggtgga

SEQ ID NO: 5482865 - DNA, 25 bp, Homo sapien
ttaagacggcgtttcccttctgcca

SEQ ID NO: 5482866 - DNA, 25 bp, Homo sapien
tccaagtggcacacgcaggaagtca

SEQ ID NO: 5482867 - DNA, 25 bp, Homo sapien
ctggtatagagcaagtgcctgctgc

SEQ ID NO: 5482868 - DNA, 25 bp, Homo sapien
ggtatagagcaagtgcctgctgctt

SEQ ID NO: 5482869 - DNA, 25 bp, Homo sapien
tggtatagagcaagtgcctgctgct

SEQ ID NO: 5482870 - DNA, 25 bp, Homo sapien
tatagagcaagtgcctgctgcttgt

SEQ ID NO: 5482871 - DNA, 25 bp, Homo sapien
caggcacctagtgtagggtcaacac

SEQ ID NO: 5482872 - DNA, 25 bp, Homo sapien
ctgctggccaggcacctagtgtagg

SEQ ID NO: 5482873 - DNA, 25 bp, Homo sapien
gcacctagtgtagggtcaacactcc

SEQ ID NO: 5482874 - DNA, 25 bp, Homo sapien
ccaggcacctagtgtagggtcaaca

SEQ ID NO: 5482875 - DNA, 25 bp, Homo sapien
ctggcaggttgctgggcctcgtgta

SEQ ID NO: 5482876 - DNA, 25 bp, Homo sapien
agctgccaacttggcaggttgtttt

SEQ ID NO: 5482877 - DNA, 25 bp, Homo sapien
ctggtggacgctcatgagcaacagc

SEQ ID NO: 5482878 - DNA, 25 bp, Homo sapien
ggacgctcatgagcaacagctgcca

SEQ ID NO: 5482879 - DNA, 25 bp, Homo sapien
tgacgccacgggaggcctcactgaa

SEQ ID NO: 5482880 - DNA, 25 bp, Homo sapien
ctgacgccacgggaggcctcactga

SEQ ID NO: 5482881 - DNA, 25 bp, Homo sapien
gccacgggaggcctcactgaacgca

SEQ ID NO: 5482882 - DNA, 25 bp, Homo sapien
acgggaggcctcactgaacgcaggc

SEQ ID NO: 5482883 - DNA, 25 bp, Homo sapien
gcgtgattttggctcactgtaaact

SEQ ID NO: 5482884 - DNA, 25 bp, Homo sapien
ttcttagtagagatgggggtttcac

SEQ ID NO: 5482885 - DNA, 25 bp, Homo sapien
gattttggctcactgtaaactccac

SEQ ID NO: 5482886 - DNA, 25 bp, Homo sapien
acctcctgggttcaagtgattctcc

SEQ ID NO: 5482887 - DNA, 25 bp, Homo sapien
ccatgtagccgccagaagttgtatc

SEQ ID NO: 5482888 - DNA, 25 bp, Homo sapien
gtcatttccgactgaagagtgagcc

SEQ ID NO: 5482889 - DNA, 25 bp, Homo sapien
tggccctttcggctctcggctgctg

SEQ ID NO: 5482890 - DNA, 25 bp, Homo sapien
tgctgcattgttcccatagagttcc

SEQ ID NO: 5482891 - DNA, 25 bp, Homo sapien
ctctcggctgctgcattgttcccat

SEQ ID NO: 5482892 - DNA, 25 bp, Homo sapien
gttcctggccctttcggctctcggc

SEQ ID NO: 5482893 - DNA, 25 bp, Homo sapien
cctggccctttcggctctcggctgc

SEQ ID NO: 5482894 - DNA, 25 bp, Homo sapien
tcggctgctgcattgttcccataga

SEQ ID NO: 5482895 - DNA, 25 bp, Homo sapien
gtggatggtcagtgtctggtcattt

SEQ ID NO: 5482896 - DNA, 25 bp, Homo sapien
tctggtcatttccgactgaagagtg

SEQ ID NO: 5482897 - DNA, 25 bp, Homo sapien
cccatagagttccacaaaagtatcc

SEQ ID NO: 5482898 - DNA, 25 bp, Homo sapien
aagcgttcctggccctttcggctct

SEQ ID NO: 5482899 - DNA, 25 bp, Homo sapien
actgaagtaattaagacaacgactg

SEQ ID NO: 5482900 - DNA, 25 bp, Homo sapien
cagtcgttgtcttaattacttcagt

SEQ ID NO: 5482901 - DNA, 25 bp, Homo sapien
acccctgcccggtcgccggatcgct

SEQ ID NO: 5482902 - DNA, 25 bp, Homo sapien
agcgatccggcgaccgggcaggggt

SEQ ID NO: 5482903 - DNA, 25 bp, Homo sapien
tcgaggaggtcaggacacgtccgac

SEQ ID NO: 5482904 - DNA, 25 bp, Homo sapien
gtcggacgtgtcctgacctcctcga

SEQ ID NO: 5482905 - DNA, 25 bp, Homo sapien
gggtactcccgactggggcggagtg

SEQ ID NO: 5482906 - DNA, 25 bp, Homo sapien
cactccgccccagtcgggagtaccc

SEQ ID NO: 5482907 - DNA, 25 bp, Homo sapien
tcagcggtttcgaaaggctttcacg

SEQ ID NO: 5482908 - DNA, 25 bp, Homo sapien
cgtgaaagcctttcgaaaccgctga

SEQ ID NO: 5482909 - DNA, 25 bp, Homo sapien
ccttcaaactataattcctaccaat

SEQ ID NO: 5482910 - DNA, 25 bp, Homo sapien
attggtaggaattatagtttgaagg

SEQ ID NO: 5482911 - DNA, 25 bp, Homo sapien
gagaaggaacccgaattacggtctg

SEQ ID NO: 5482912 - DNA, 25 bp, Homo sapien
cagaccgtaattcgggttccttctc

SEQ ID NO: 5482913 - DNA, 25 bp, Homo sapien
ccaggaggacattactgatctaatt

SEQ ID NO: 5482914 - DNA, 25 bp, Homo sapien
aattagatcagtaatgtcctcctgg

SEQ ID NO: 5482915 - DNA, 25 bp, Homo sapien
ggttgggtctgtttgatgctcggac

SEQ ID NO: 5482916 - DNA, 25 bp, Homo sapien
tgagagggctgaacccccctcatcg

SEQ ID NO: 5482917 - DNA, 25 bp, Homo sapien
tccacccctgtgcagggctccatcc

SEQ ID NO: 5482918 - DNA, 25 bp, Homo sapien
aagtcaaggggcccacttataccaa

SEQ ID NO: 5482919 - DNA, 25 bp, Homo sapien
agagatggtatgtccccccagacca

SEQ ID NO: 5482920 - DNA, 25 bp, Homo sapien
agggaagccccttcggacacttctg

SEQ ID NO: 5482921 - DNA, 25 bp, Homo sapien
tccagggatcctcagaaagtgaagg

SEQ ID NO: 5482922 - DNA, 25 bp, Homo sapien
acctacgtggatatcaccgtgggca

SEQ ID NO: 5482923 - DNA, 25 bp, Homo sapien
ggggtcacctacgtggatatcaccg

SEQ ID NO: 5482924 - DNA, 25 bp, Homo sapien
ccctcatcgtgtcaagtcaatctcc

SEQ ID NO: 5482925 - DNA, 25 bp, Homo sapien
cagcttcgtgtgcaccacctgctcc

SEQ ID NO: 5482926 - DNA, 25 bp, Homo sapien
acggaatcgcgaccctggtccctgg

SEQ ID NO: 5482927 - DNA, 25 bp, Homo sapien
ccagggaccagggtcgcgattccgt

SEQ ID NO: 5482928 - DNA, 25 bp, Homo sapien
taaatcctcatgtactaacagcaac

SEQ ID NO: 5482929 - DNA, 25 bp, Homo sapien
gttgctgttagtacatgaggattta

SEQ ID NO: 5482930 - DNA, 25 bp, Homo sapien
cgctcagtacaacggcaggggttca

SEQ ID NO: 5482931 - DNA, 25 bp, Homo sapien
tgaacccctgccgttgtactgagcg

SEQ ID NO: 5482932 - DNA, 25 bp, Homo sapien
tagttgattcagtccttggacgcag

SEQ ID NO: 5482933 - DNA, 25 bp, Homo sapien
ctgcgtccaaggactgaatcaacta

SEQ ID NO: 5482934 - DNA, 25 bp, Homo sapien
agttgaagctaaactaagttttatc

SEQ ID NO: 5482935 - DNA, 25 bp, Homo sapien
gataaaacttagtttagcttcaact

SEQ ID NO: 5482936 - DNA, 25 bp, Homo sapien
actaaattcagtattactatataag

SEQ ID NO: 5482937 - DNA, 25 bp, Homo sapien
cttatatagtaatactgaatttagt

SEQ ID NO: 5482938 - DNA, 25 bp, Homo sapien
agtactaaattcagtattactatat

SEQ ID NO: 5482939 - DNA, 25 bp, Homo sapien
atatagtaatactgaatttagtact

SEQ ID NO: 5482940 - DNA, 25 bp, Homo sapien
aaattcagtattactatataagagt

SEQ ID NO: 5482941 - DNA, 25 bp, Homo sapien
actcttatatagtaatactgaattt

SEQ ID NO: 5482942 - DNA, 25 bp, Homo sapien
gactatacaggaccttaacaaaaaa

SEQ ID NO: 5482943 - DNA, 25 bp, Homo sapien
ttttttgttaaggtcctgtatagtc

SEQ ID NO: 5482944 - DNA, 25 bp, Homo sapien
ccattcagaatgggggataaaatca

SEQ ID NO: 5482945 - DNA, 25 bp, Homo sapien
gtactgtctaatctagcaaagcctt

SEQ ID NO: 5482946 - DNA, 25 bp, Homo sapien
aaaaaagagtcaacattgcatggtc

SEQ ID NO: 5482947 - DNA, 25 bp, Homo sapien
gctctaatgattaccaagaagactc

SEQ ID NO: 5482948 - DNA, 25 bp, Homo sapien
tgccatcaagggttcctgaagcttt

SEQ ID NO: 5482949 - DNA, 25 bp, Homo sapien
tctcagatgataaaacaacgtgctc

SEQ ID NO: 5482950 - DNA, 25 bp, Homo sapien
ttgttcagaacctccagataaattt

SEQ ID NO: 5482951 - DNA, 25 bp, Homo sapien
accaagaagactccacaggacattt

SEQ ID NO: 5482952 - DNA, 25 bp, Homo sapien
gggataaaatcatgtaaacagttta

SEQ ID NO: 5482953 - DNA, 25 bp, Homo sapien
atgattacttcagtgaccagccttt

SEQ ID NO: 5482954 - DNA, 25 bp, Homo sapien
ttacttaactgatggaaaggagtgc

SEQ ID NO: 5482955 - DNA, 25 bp, Homo sapien
actacgtagataagaacggtcattg

SEQ ID NO: 5482956 - DNA, 25 bp, Homo sapien
caatgaccgttcttatctacgtagt

SEQ ID NO: 5482957 - DNA, 25 bp, Homo sapien
tccaacactttggaaggccaaggca

SEQ ID NO: 5482958 - DNA, 25 bp, Homo sapien
agagattgagaccatcttggccaac

SEQ ID NO: 5482959 - DNA, 25 bp, Homo sapien
ataaggccacctaatttgaaatcac

SEQ ID NO: 5482960 - DNA, 25 bp, Homo sapien
ttaagagtataaaccaaaatgaata

SEQ ID NO: 5482961 - DNA, 25 bp, Homo sapien
aatcacatatagaccaggcgcggtg

SEQ ID NO: 5482962 - DNA, 25 bp, Homo sapien
taatagagatgaggtttcttcatgt

SEQ ID NO: 5482963 - DNA, 25 bp, Homo sapien
actttggcctctcaaggtgctggga

SEQ ID NO: 5482964 - DNA, 25 bp, Homo sapien
catgcctggccgtacattctttcat

SEQ ID NO: 5482965 - DNA, 25 bp, Homo sapien
acacaaaaatcagctgggcgtcgtg

SEQ ID NO: 5482966 - DNA, 25 bp, Homo sapien
tcaagaaaatagagacagaaatcat

SEQ ID NO: 5482967 - DNA, 25 bp, Homo sapien
gatcacaaggtcaagagattgagac

SEQ ID NO: 5482968 - DNA, 25 bp, Homo sapien
gaccttccagtacaacgtttcggta

SEQ ID NO: 5482969 - DNA, 25 bp, Homo sapien
taccgaaacgttgtactggaaggtc

SEQ ID NO: 5482970 - DNA, 25 bp, Homo sapien
cggtaggcgaatgagacaccgagac

SEQ ID NO: 5482971 - DNA, 25 bp, Homo sapien
gtctcggtgtctcattcgcctaccg

SEQ ID NO: 5482972 - DNA, 25 bp, Homo sapien
tcccgcccagcgatgtattcagcgc

SEQ ID NO: 5482973 - DNA, 25 bp, Homo sapien
gcatgctgtccccggactgagccgg

SEQ ID NO: 5482974 - DNA, 25 bp, Homo sapien
gccctccgcctgcacttgcctgtgt

SEQ ID NO: 5482975 - DNA, 25 bp, Homo sapien
agcgatgtattcagcgccctccgcc

SEQ ID NO: 5482976 - DNA, 25 bp, Homo sapien
caactcggcttccagacccgccgcg

SEQ ID NO: 5482977 - DNA, 25 bp, Homo sapien
gcccagcgatgtattcagcgccctc

SEQ ID NO: 5482978 - DNA, 25 bp, Homo sapien
cgcaactcggcttccagacccgccg

SEQ ID NO: 5482979 - DNA, 25 bp, Homo sapien
tccgcctgcacttgcctgtgtttac

SEQ ID NO: 5482980 - DNA, 25 bp, Homo sapien
cctgtgtttacacttcctgctgctg

SEQ ID NO: 5482981 - DNA, 25 bp, Homo sapien
gcctccctcccgcccagcgatgtat

SEQ ID NO: 5482982 - DNA, 25 bp, Homo sapien
gatgtattcagcgccctccgcctgc

SEQ ID NO: 5482983 - DNA, 25 bp, Homo sapien
gtcctgagggctagaacccgggaga

SEQ ID NO: 5482984 - DNA, 25 bp, Homo sapien
tctcccgggttctagccctcaggac

SEQ ID NO: 5482985 - DNA, 25 bp, Homo sapien
gagggttctcccctggcgcttgagc

SEQ ID NO: 5482986 - DNA, 25 bp, Homo sapien
gtctctcaagaccttgcggtggcgc

SEQ ID NO: 5482987 - DNA, 25 bp, Homo sapien
gtaggtgactgcgtcccgaatcaca

SEQ ID NO: 5482988 - DNA, 25 bp, Homo sapien
gtctcctcgtaaatgaggccagaga

SEQ ID NO: 5482989 - DNA, 25 bp, Homo sapien
aacactttcagcacaccgcgggtct

SEQ ID NO: 5482990 - DNA, 25 bp, Homo sapien
tgaatgttgtctctcaagaccttgc

SEQ ID NO: 5482991 - DNA, 25 bp, Homo sapien
cgggtctcctcgtaaatgaggccag

SEQ ID NO: 5482992 - DNA, 25 bp, Homo sapien
gcctagcctccgaagccgtagaggg

SEQ ID NO: 5482993 - DNA, 25 bp, Homo sapien
tgactgcgtcccgaatcacattctc

SEQ ID NO: 5482994 - DNA, 25 bp, Homo sapien
tctccaagaacactttcagcacacc

SEQ ID NO: 5482995 - DNA, 25 bp, Homo sapien
cttagcgccccctttgcctaagcct

SEQ ID NO: 5482996 - DNA, 25 bp, Homo sapien
acggtcaagacctcttcgcggtagc

SEQ ID NO: 5482997 - DNA, 25 bp, Homo sapien
aggcggagatgtccatgccattcct

SEQ ID NO: 5482998 - DNA, 25 bp, Homo sapien
ggctcagagcttggaaagttgtatc

SEQ ID NO: 5482999 - DNA, 25 bp, Homo sapien
ggacgtccagctggtactgaaagtc

SEQ ID NO: 5483000 - DNA, 25 bp, Homo sapien
ctgtttccaccgtacgaggcagtgc

SEQ ID NO: 5483001 - DNA, 25 bp, Homo sapien
aggttttccgtgccaggctgggtat

SEQ ID NO: 5483002 - DNA, 25 bp, Homo sapien
gtcgtgttgcaacgtacggtgacat

SEQ ID NO: 5483003 - DNA, 25 bp, Homo sapien
actgaaagtccaggtacgacagctt

SEQ ID NO: 5483004 - DNA, 25 bp, Homo sapien
caagaaaacagttcccccgtgtcgc

SEQ ID NO: 5483005 - DNA, 25 bp, Homo sapien
ccaggagctccaattcaagatgcgg

SEQ ID NO: 5483006 - DNA, 25 bp, Homo sapien
tgcggacgtctgcagctctgatctt

SEQ ID NO: 5483007 - DNA, 25 bp, Homo sapien
aatactcacgcggactagaaggcag

SEQ ID NO: 5483008 - DNA, 25 bp, Homo sapien
ctgccttctagtccgcgtgagtatt

SEQ ID NO: 5483009 - DNA, 25 bp, Homo sapien
ggacggaagtagtcttgacgagtcg

SEQ ID NO: 5483010 - DNA, 25 bp, Homo sapien
cgactcgtcaagactacttccgtcc

SEQ ID NO: 5483011 - DNA, 25 bp, Homo sapien
ggccctgtgccttagtagtatttat

SEQ ID NO: 5483012 - DNA, 25 bp, Homo sapien
atgctttcagaattcgggcagtgac

SEQ ID NO: 5483013 - DNA, 25 bp, Homo sapien
gatgagctgatgcaggccctgaatt

SEQ ID NO: 5483014 - DNA, 25 bp, Homo sapien
atcaagctctgcatacttcttcatg

SEQ ID NO: 5483015 - DNA, 25 bp, Homo sapien
agacctcttttatgatggccctgtg

SEQ ID NO: 5483016 - DNA, 25 bp, Homo sapien
gtgacgagctatctgaatgcttcct

SEQ ID NO: 5483017 - DNA, 25 bp, Homo sapien
aatgcaaagcttctgatggatccta

SEQ ID NO: 5483018 - DNA, 25 bp, Homo sapien
gcaggccctgaatttcaacagtgag

SEQ ID NO: 5483019 - DNA, 25 bp, Homo sapien
aactaatgggagttgcctggcctcc

SEQ ID NO: 5483020 - DNA, 25 bp, Homo sapien
ttacatccacatgatacctctgatc

SEQ ID NO: 5483021 - DNA, 25 bp, Homo sapien
gagagacctctttcataactaatgg

SEQ ID NO: 5483022 - DNA, 25 bp, Homo sapien
ctcactgttgaaattcagggcctgc

SEQ ID NO: 5483023 - DNA, 25 bp, Homo sapien
aggaagcattcagatagctcgtcac

SEQ ID NO: 5483024 - DNA, 25 bp, Homo sapien
aattcagggcctgcatcagctcatc

SEQ ID NO: 5483025 - DNA, 25 bp, Homo sapien
ccattagttatgaaagaggtctctc

SEQ ID NO: 5483026 - DNA, 25 bp, Homo sapien
taggatccatcagaagctttgcatt

SEQ ID NO: 5483027 - DNA, 25 bp, Homo sapien
ataaatactactaaggcacagggcc

SEQ ID NO: 5483028 - DNA, 25 bp, Homo sapien
gtcactgcccgaattctgaaagcat

SEQ ID NO: 5483029 - DNA, 25 bp, Homo sapien
gatcagaggtatcatgtggatgtaa

SEQ ID NO: 5483030 - DNA, 25 bp, Homo sapien
cacagggccatcataaaagaggtct

SEQ ID NO: 5483031 - DNA, 25 bp, Homo sapien
ggaggccaggcaactcccattagtt

SEQ ID NO: 5483032 - DNA, 25 bp, Homo sapien
catgaagaagtatgcagagcttgat

SEQ ID NO: 5483033 - DNA, 25 bp, Homo sapien
cttatagtcttgttcatgggggtgc

SEQ ID NO: 5483034 - DNA, 25 bp, Homo sapien
gttgtgatagtataggcattgcttc

SEQ ID NO: 5483035 - DNA, 25 bp, Homo sapien
tttagaggctgaagaactaaaggat

SEQ ID NO: 5483036 - DNA, 25 bp, Homo sapien
tgtgatagctgtgaaaacaagggaa

SEQ ID NO: 5483037 - DNA, 25 bp, Homo sapien
tgaaagaatgagaacttagacaaaa

SEQ ID NO: 5483038 - DNA, 25 bp, Homo sapien
atagttttggccatggaagggattt

SEQ ID NO: 5483039 - DNA, 25 bp, Homo sapien
cccttggaaagttgagtgaaaacaa

SEQ ID NO: 5483040 - DNA, 25 bp, Homo sapien
ggggtgccatagctgagctacatga

SEQ ID NO: 5483041 - DNA, 25 bp, Homo sapien
ttgaatacagagtaggtttagaggc

SEQ ID NO: 5483042 - DNA, 25 bp, Homo sapien
atttggtggatttgagttaatgggc

SEQ ID NO: 5483043 - DNA, 25 bp, Homo sapien
gagttaatgggccaagcaagctttt

SEQ ID NO: 5483044 - DNA, 25 bp, Homo sapien
ggtgtaatttaagtcatgaccaaag

SEQ ID NO: 5483045 - DNA, 25 bp, Homo sapien
ctttggtcatgacttaaattacacc

SEQ ID NO: 5483046 - DNA, 25 bp, Homo sapien
catcttcctgatgacgagaaaggcc

SEQ ID NO: 5483047 - DNA, 25 bp, Homo sapien
cacacagccctcgtggaagagtttg

SEQ ID NO: 5483048 - DNA, 25 bp, Homo sapien
gaaaccttgggaacacgtgcttcat

SEQ ID NO: 5483049 - DNA, 25 bp, Homo sapien
tgatgtggtgagcccatctgagttc

SEQ ID NO: 5483050 - DNA, 25 bp, Homo sapien
caagaattctaagagtgcccagggt

SEQ ID NO: 5483051 - DNA, 25 bp, Homo sapien
agtgacactgagacctaagtccaac

SEQ ID NO: 5483052 - DNA, 25 bp, Homo sapien
ctccataacgaggtgaaccgagtga

SEQ ID NO: 5483053 - DNA, 25 bp, Homo sapien
gcctccagaggctctacatgcggga

SEQ ID NO: 5483054 - DNA, 25 bp, Homo sapien
aaatatctagaacgggaagacagta

SEQ ID NO: 5483055 - DNA, 25 bp, Homo sapien
agctaaagagctcgctgacgtgtac

SEQ ID NO: 5483056 - DNA, 25 bp, Homo sapien
acagtaggatcggggatctctttgt

SEQ ID NO: 5483057 - DNA, 25 bp, Homo sapien
gggtatgatctcagtattgtcacga

SEQ ID NO: 5483058 - DNA, 25 bp, Homo sapien
tcgtgacaatactgagatcataccc

SEQ ID NO: 5483059 - DNA, 25 bp, Homo sapien
cccgttgtatgtaccgtctacggta

SEQ ID NO: 5483060 - DNA, 25 bp, Homo sapien
taccgtagacggtacatacaacggg

SEQ ID NO: 5483061 - DNA, 25 bp, Homo sapien
ggcccgggcgaaaggaggcggctag

SEQ ID NO: 5483062 - DNA, 25 bp, Homo sapien
ctagccgcctcctttcgcccgggcc

SEQ ID NO: 5483063 - DNA, 25 bp, Homo sapien
acatagatctaaatgaccttaataa

SEQ ID NO: 5483064 - DNA, 25 bp, Homo sapien
ttattaaggtcatttagatctatgt

SEQ ID NO: 5483065 - DNA, 25 bp, Homo sapien
aataaaccaaactatacacctatat

SEQ ID NO: 5483066 - DNA, 25 bp, Homo sapien
atataggtgtatagtttggtttatt

SEQ ID NO: 5483067 - DNA, 25 bp, Homo sapien
tggtggtgtcattagtcttaaaggt

SEQ ID NO: 5483068 - DNA, 25 bp, Homo sapien
acctttaagactaatgacaccacca

SEQ ID NO: 5483069 - DNA, 25 bp, Homo sapien
ggaagtgtagacagtaagcttcagt

SEQ ID NO: 5483070 - DNA, 25 bp, Homo sapien
actgaagcttactgtctacacttcc

SEQ ID NO: 5483071 - DNA, 25 bp, Homo sapien
cgacgacttgtgagccccagagagg

SEQ ID NO: 5483072 - DNA, 25 bp, Homo sapien
cctctctggggctcacaagtcgtcg

SEQ ID NO: 5483073 - DNA, 25 bp, Homo sapien
ctcgtggtgggccctcgactcgacg

SEQ ID NO: 5483074 - DNA, 25 bp, Homo sapien
cgtcgagtcgagggcccaccacgag

SEQ ID NO: 5483075 - DNA, 25 bp, Homo sapien
atcctcttgcgttccagggcactgt

SEQ ID NO: 5483076 - DNA, 25 bp, Homo sapien
ggccatataggatgatgagcaacac

SEQ ID NO: 5483077 - DNA, 25 bp, Homo sapien
tctgaaaagcttgccgaaactcttc

SEQ ID NO: 5483078 - DNA, 25 bp, Homo sapien
tgtagattattggattgatgaggga

SEQ ID NO: 5483079 - DNA, 25 bp, Homo sapien
gatgataaaggcccccagaatgatg

SEQ ID NO: 5483080 - DNA, 25 bp, Homo sapien
cggttccgggcagcccggtagatcc

SEQ ID NO: 5483081 - DNA, 25 bp, Homo sapien
gccgtggtgaagcgcttcccataga

SEQ ID NO: 5483082 - DNA, 25 bp, Homo sapien
gatgagggagtttaaatagcctagc

SEQ ID NO: 5483083 - DNA, 25 bp, Homo sapien
tctgagaggtgttcaccagacagtc

SEQ ID NO: 5483084 - DNA, 25 bp, Homo sapien
gcgcttcccatagagtgagggtgga

SEQ ID NO: 5483085 - DNA, 25 bp, Homo sapien
gatgcccaggattttagtggctttc

SEQ ID NO: 5483086 - DNA, 25 bp, Homo sapien
gatcccagcgagagacgtccgacac

SEQ ID NO: 5483087 - DNA, 25 bp, Homo sapien
gtgtcggacgtctctcgctgggatc

SEQ ID NO: 5483088 - DNA, 25 bp, Homo sapien
tgggactacccgtcatggacaccga

SEQ ID NO: 5483089 - DNA, 25 bp, Homo sapien
tcggtgtccatgacgggtagtccca

SEQ ID NO: 5483090 - DNA, 25 bp, Homo sapien
acctaacgtgactggggtctgctcg

SEQ ID NO: 5483091 - DNA, 25 bp, Homo sapien
cgagcagaccccagtcacgttaggt

SEQ ID NO: 5483092 - DNA, 25 bp, Homo sapien
tacaagggatgtgaatcgggtgact

SEQ ID NO: 5483093 - DNA, 25 bp, Homo sapien
agtcacccgattcacatcccttgta

SEQ ID NO: 5483094 - DNA, 25 bp, Homo sapien
gtcgtagagctgagaggtgcccgta

SEQ ID NO: 5483095 - DNA, 25 bp, Homo sapien
tacgggcacctctcagctctacgac

SEQ ID NO: 5483096 - DNA, 25 bp, Homo sapien
gcttcagggccctcgtcgggccacc

SEQ ID NO: 5483097 - DNA, 25 bp, Homo sapien
ggtggcccgacgagggccctgaagc

SEQ ID NO: 5483098 - DNA, 25 bp, Homo sapien
aggtgaacatccagaccgaaattat

SEQ ID NO: 5483099 - DNA, 25 bp, Homo sapien
ataatttcggtctggatgttcacct

SEQ ID NO: 5483100 - DNA, 25 bp, Homo sapien
tccttagaatcactagacatagtat

SEQ ID NO: 5483101 - DNA, 25 bp, Homo sapien
atactatgtctagtgattctaagga

SEQ ID NO: 5483102 - DNA, 25 bp, Homo sapien
atatgtcatttggaggtcagtggag

SEQ ID NO: 5483103 - DNA, 25 bp, Homo sapien
acctacccagtgaaaaggataaatg

SEQ ID NO: 5483104 - DNA, 25 bp, Homo sapien
atgtctataaaataaggtggctagt

SEQ ID NO: 5483105 - DNA, 25 bp, Homo sapien
ctactgagtgttaagaagaatattc

SEQ ID NO: 5483106 - DNA, 25 bp, Homo sapien
tttagcttgccagacatcagttttc

SEQ ID NO: 5483107 - DNA, 25 bp, Homo sapien
gagaggtttgaattagaagcatgta

SEQ ID NO: 5483108 - DNA, 25 bp, Homo sapien
aaggataaatggcattgtccatctc

SEQ ID NO: 5483109 - DNA, 25 bp, Homo sapien
tacagataatgttgaagtcactgat

SEQ ID NO: 5483110 - DNA, 25 bp, Homo sapien
gcatgtatttggagtagtagaggaa

SEQ ID NO: 5483111 - DNA, 25 bp, Homo sapien
taaagagacctgggcttttttctca

SEQ ID NO: 5483112 - DNA, 25 bp, Homo sapien
ctgcttccctagagagaactgatct

SEQ ID NO: 5483113 - DNA, 25 bp, Homo sapien
gaatgggtgagctacttcccgtttc

SEQ ID NO: 5483114 - DNA, 25 bp, Homo sapien
ggaaaggtatagtgtatctagggga

SEQ ID NO: 5483115 - DNA, 25 bp, Homo sapien
aagtggaactctagcatctgtggta

SEQ ID NO: 5483116 - DNA, 25 bp, Homo sapien
actaatcacccattttgcaggcaga

SEQ ID NO: 5483117 - DNA, 25 bp, Homo sapien
ttgaaataacttagtggagaatggg

SEQ ID NO: 5483118 - DNA, 25 bp, Homo sapien
tatagatgacatgggagtatactat

SEQ ID NO: 5483119 - DNA, 25 bp, Homo sapien
ttgatagagatggttctcagttatt

SEQ ID NO: 5483120 - DNA, 25 bp, Homo sapien
tttgcaggcagattagttacagaga

SEQ ID NO: 5483121 - DNA, 25 bp, Homo sapien
ttagttacagagaatcagtggagga

SEQ ID NO: 5483122 - DNA, 25 bp, Homo sapien
gttttatagcaagtggaactctagc

SEQ ID NO: 5483123 - DNA, 25 bp, Homo sapien
acaactcaaaaggtatagtattatc

SEQ ID NO: 5483124 - DNA, 25 bp, Homo sapien
aatacagagtgctctaagagagaat

SEQ ID NO: 5483125 - DNA, 25 bp, Homo sapien
aatgaggacaaataaggtaaaacca

SEQ ID NO: 5483126 - DNA, 25 bp, Homo sapien
aaaagaagctagcaggaatctgatt

SEQ ID NO: 5483127 - DNA, 25 bp, Homo sapien
gagacagtcatgggccagcttatgt

SEQ ID NO: 5483128 - DNA, 25 bp, Homo sapien
tgaaggactataagaggagtctgag

SEQ ID NO: 5483129 - DNA, 25 bp, Homo sapien
aagagagaataacaataggaactgt

SEQ ID NO: 5483130 - DNA, 25 bp, Homo sapien
atggcacccttgatgagctgagata

SEQ ID NO: 5483131 - DNA, 25 bp, Homo sapien
ttgattactgctatggaagaaaaat

SEQ ID NO: 5483132 - DNA, 25 bp, Homo sapien
ttcttgctgcaaaggaggttatcat

SEQ ID NO: 5483133 - DNA, 25 bp, Homo sapien
ctaaaacagaatgagctagtggcat

SEQ ID NO: 5483134 - DNA, 25 bp, Homo sapien
tctaggtaaaacagatgtgaatcta

SEQ ID NO: 5483135 - DNA, 25 bp, Homo sapien
aatgaaaagaagatggaattttgga

SEQ ID NO: 5483136 - DNA, 25 bp, Homo sapien
gctgtgcgctctgcgctgtgcccag

SEQ ID NO: 5483137 - DNA, 25 bp, Homo sapien
agtgcggtgtcgtaatcttggctca

SEQ ID NO: 5483138 - DNA, 25 bp, Homo sapien
tcccttgggcaatgttctgattttc

SEQ ID NO: 5483139 - DNA, 25 bp, Homo sapien
tggattcaagaaagaccaaggttta

SEQ ID NO: 5483140 - DNA, 25 bp, Homo sapien
gagtcttgctgtgcgctctgcgctg

SEQ ID NO: 5483141 - DNA, 25 bp, Homo sapien
cctccctccgtggccttccagggtg

SEQ ID NO: 5483142 - DNA, 25 bp, Homo sapien
caagaaagaccaaggtttaaagctc

SEQ ID NO: 5483143 - DNA, 25 bp, Homo sapien
attttcaatcagcatggtataatga

SEQ ID NO: 5483144 - DNA, 25 bp, Homo sapien
actgcgcccgtcctaaagctccttt

SEQ ID NO: 5483145 - DNA, 25 bp, Homo sapien
gaaaagaagatggaattttggattc

SEQ ID NO: 5483146 - DNA, 25 bp, Homo sapien
gagctcccgtacccaggcatcagct

SEQ ID NO: 5483147 - DNA, 25 bp, Homo sapien
gcctccccttagcccggccctgctc

SEQ ID NO: 5483148 - DNA, 25 bp, Homo sapien
tgggccagaagttgccactggcaac

SEQ ID NO: 5483149 - DNA, 25 bp, Homo sapien
tccctctcacagcgaaagcagggga

SEQ ID NO: 5483150 - DNA, 25 bp, Homo sapien
ctcggctctccttcagactgggctc

SEQ ID NO: 5483151 - DNA, 25 bp, Homo sapien
ttggcctacaaaaagcagctaatac

SEQ ID NO: 5483152 - DNA, 25 bp, Homo sapien
ttctgcctgcgagtccaggatttcc

SEQ ID NO: 5483153 - DNA, 25 bp, Homo sapien
gcaactctagtcctgggccagatct

SEQ ID NO: 5483154 - DNA, 25 bp, Homo sapien
tctgctccccttagaccaggccctg

SEQ ID NO: 5483155 - DNA, 25 bp, Homo sapien
actggaggacactgcttgctcccca

SEQ ID NO: 5483156 - DNA, 25 bp, Homo sapien
ttagaacaggtgctagcccctattc

SEQ ID NO: 5483157 - DNA, 25 bp, Homo sapien
gaggagacccactttgacagggtac

SEQ ID NO: 5483158 - DNA, 25 bp, Homo sapien
gtaccctgtcaaagtgggtctcctc

SEQ ID NO: 5483159 - DNA, 25 bp, Homo sapien
gccgtcgtccaggtgttcctccggg

SEQ ID NO: 5483160 - DNA, 25 bp, Homo sapien
cccggaggaacacctggacgacggc

SEQ ID NO: 5483161 - DNA, 25 bp, Homo sapien
gcgcgccccgctttgtccaccctgg

SEQ ID NO: 5483162 - DNA, 25 bp, Homo sapien
ccagggtggacaaagcggggcgcgc

SEQ ID NO: 5483163 - DNA, 25 bp, Homo sapien
aggggctagctggatttgtttgttt

SEQ ID NO: 5483164 - DNA, 25 bp, Homo sapien
ctccctctgccagtcgggagagcca

SEQ ID NO: 5483165 - DNA, 25 bp, Homo sapien
ttactcatcgggcccagggacattg

SEQ ID NO: 5483166 - DNA, 25 bp, Homo sapien
gtggctgcctttgatcacaggagca

SEQ ID NO: 5483167 - DNA, 25 bp, Homo sapien
gaggaatttggctgcttctacggcc

SEQ ID NO: 5483168 - DNA, 25 bp, Homo sapien
atgccttagcatgtgactcctgaag

SEQ ID NO: 5483169 - DNA, 25 bp, Homo sapien
ttacgatctgtttccaaatcccttt

SEQ ID NO: 5483170 - DNA, 25 bp, Homo sapien
gggacattgcagagtggcctagagc

SEQ ID NO: 5483171 - DNA, 25 bp, Homo sapien
atgacgtggtgaactaaccgctccc

SEQ ID NO: 5483172 - DNA, 25 bp, Homo sapien
ggcttggatggaacatgcccacaac

SEQ ID NO: 5483173 - DNA, 25 bp, Homo sapien
ggctgcgcaattactactatgacgt

SEQ ID NO: 5483174 - DNA, 25 bp, Homo sapien
aaagggatttggaaacagatcgtaa

SEQ ID NO: 5483175 - DNA, 25 bp, Homo sapien
acgtcatagtagtaattgcgcagcc

SEQ ID NO: 5483176 - DNA, 25 bp, Homo sapien
caatgtccctgggcccgatgagtaa

SEQ ID NO: 5483177 - DNA, 25 bp, Homo sapien
gttgtgggcatgttccatccaagcc

SEQ ID NO: 5483178 - DNA, 25 bp, Homo sapien
ggccgtagaagcagccaaattcctc

SEQ ID NO: 5483179 - DNA, 25 bp, Homo sapien
tgctcctgtgatcaaaggcagccac

SEQ ID NO: 5483180 - DNA, 25 bp, Homo sapien
cttcaggagtcacatgctaaggcat

SEQ ID NO: 5483181 - DNA, 25 bp, Homo sapien
tggctctcccgactggcagagggag

SEQ ID NO: 5483182 - DNA, 25 bp, Homo sapien
gctctaggccactctgcaatgtccc

SEQ ID NO: 5483183 - DNA, 25 bp, Homo sapien
gggagcggttagttcaccacgtcat

SEQ ID NO: 5483184 - DNA, 25 bp, Homo sapien
aaacaaacaaatccagctagcccct

SEQ ID NO: 5483185 - DNA, 25 bp, Homo sapien
agaaaatagtctcattcaaaggtat

SEQ ID NO: 5483186 - DNA, 25 bp, Homo sapien
atacctttgaatgagactattttct

SEQ ID NO: 5483187 - DNA, 25 bp, Homo sapien
gtaaaagaaaatagtctcattcaaa

SEQ ID NO: 5483188 - DNA, 25 bp, Homo sapien
tttgaatgagactattttcttttac

SEQ ID NO: 5483189 - DNA, 25 bp, Homo sapien
ctttggtctcctcaccgacgctacc

SEQ ID NO: 5483190 - DNA, 25 bp, Homo sapien
ggtagcgtcggtgaggagaccaaag

SEQ ID NO: 5483191 - DNA, 25 bp, Homo sapien
tacttacttcattgtactaagaaat

SEQ ID NO: 5483192 - DNA, 25 bp, Homo sapien
atttcttagtacaatgaagtaagta

SEQ ID NO: 5483193 - DNA, 25 bp, Homo sapien
tccgacggaggctgaggggtgacct

SEQ ID NO: 5483194 - DNA, 25 bp, Homo sapien
aggtcacccctcagcctccgtcgga

SEQ ID NO: 5483195 - DNA, 25 bp, Homo sapien
atattaaacgagtttctgtattact

SEQ ID NO: 5483196 - DNA, 25 bp, Homo sapien
agtaatacagaaactcgtttaatat

SEQ ID NO: 5483197 - DNA, 25 bp, Homo sapien
tttatattaaacgagtttctgtatt

SEQ ID NO: 5483198 - DNA, 25 bp, Homo sapien
aatacagaaactcgtttaatataaa

SEQ ID NO: 5483199 - DNA, 25 bp, Homo sapien
attcaggtcagatttatgccaactt

SEQ ID NO: 5483200 - DNA, 25 bp, Homo sapien
ggaatcagagagacctgctaaaacc

SEQ ID NO: 5483201 - DNA, 25 bp, Homo sapien
gtaatcaggataacacaagcttagt

SEQ ID NO: 5483202 - DNA, 25 bp, Homo sapien
ggccaacgatgttagaacctagcgc

SEQ ID NO: 5483203 - DNA, 25 bp, Homo sapien
cttgaatattagtgaaggagaggag

SEQ ID NO: 5483204 - DNA, 25 bp, Homo sapien
taggaaaccaagattagaaacatta

SEQ ID NO: 5483205 - DNA, 25 bp, Homo sapien
acctagcgcaattgtaaagtgaaat

SEQ ID NO: 5483206 - DNA, 25 bp, Homo sapien
ttgtggtaatctatggccaacgatg

SEQ ID NO: 5483207 - DNA, 25 bp, Homo sapien
agggtatagatgagtgaacatcaac

SEQ ID NO: 5483208 - DNA, 25 bp, Homo sapien
aactttgctgagaatatggagggta

SEQ ID NO: 5483209 - DNA, 25 bp, Homo sapien
tataaacaccaaagacggaagccaa

SEQ ID NO: 5483210 - DNA, 25 bp, Homo sapien
tgaccggagtagagcaaagctcggt

SEQ ID NO: 5483211 - DNA, 25 bp, Homo sapien
accgagctttgctctactccggtca

SEQ ID NO: 5483212 - DNA, 25 bp, Homo sapien
gttgcgctcgcgctcattgcgccgc

SEQ ID NO: 5483213 - DNA, 25 bp, Homo sapien
gctcgcgctcattgcgccgcgctac

SEQ ID NO: 5483214 - DNA, 25 bp, Homo sapien
caccagcttcacgcggttgcgctcg

SEQ ID NO: 5483215 - DNA, 25 bp, Homo sapien
tcgcgctcattgcgccgcgctacgg

SEQ ID NO: 5483216 - DNA, 25 bp, Homo sapien
ttgcgctcgcgctcattgcgccgcg

SEQ ID NO: 5483217 - DNA, 25 bp, Homo sapien
tcaccagcttcacgcggttgcgctc

SEQ ID NO: 5483218 - DNA, 25 bp, Homo sapien
gcgctcgcgctcattgcgccgcgct

SEQ ID NO: 5483219 - DNA, 25 bp, Homo sapien
cgcgctcattgcgccgcgctacggc

SEQ ID NO: 5483220 - DNA, 25 bp, Homo sapien
gcagccgctgtcgtccgacgagtag

SEQ ID NO: 5483221 - DNA, 25 bp, Homo sapien
gaagcccaagttcaccagcttcacg

SEQ ID NO: 5483222 - DNA, 25 bp, Homo sapien
ctcgcgctccgcaggactcagcgcg

SEQ ID NO: 5483223 - DNA, 25 bp, Homo sapien
tcgttcccgtcggaggaggccttcg

SEQ ID NO: 5483224 - DNA, 25 bp, Homo sapien
cgaaggcctcctccgacgggaacga

SEQ ID NO: 5483225 - DNA, 25 bp, Homo sapien
cgtgcaataaagtcctcgtgcctgc

SEQ ID NO: 5483226 - DNA, 25 bp, Homo sapien
ggtgcataaatgggggtcagggagg

SEQ ID NO: 5483227 - DNA, 25 bp, Homo sapien
accacacgtgcaataaagtcctcgt

SEQ ID NO: 5483228 - DNA, 25 bp, Homo sapien
agtgcagctgtaggtcgtcatcacc

SEQ ID NO: 5483229 - DNA, 25 bp, Homo sapien
aggaggggggcccaggtgcataaat

SEQ ID NO: 5483230 - DNA, 25 bp, Homo sapien
tagagcaggaggtcggggcactctg

SEQ ID NO: 5483231 - DNA, 25 bp, Homo sapien
tgtaggtcgtcatcacctaaccaca

SEQ ID NO: 5483232 - DNA, 25 bp, Homo sapien
acaccaggaccacagtcctgcagcc

SEQ ID NO: 5483233 - DNA, 25 bp, Homo sapien
gtgctggaaggtgggggtgccacac

SEQ ID NO: 5483234 - DNA, 25 bp, Homo sapien
agttcccagtgcagctgtaggtcgt

SEQ ID NO: 5483235 - DNA, 25 bp, Homo sapien
tggaaggtgggggtgccacaccagg

SEQ ID NO: 5483236 - DNA, 25 bp, Homo sapien
acgaggactttattgcacgtgtggt

SEQ ID NO: 5483237 - DNA, 25 bp, Homo sapien
cctggtgtggcacccccaccttcca

SEQ ID NO: 5483238 - DNA, 25 bp, Homo sapien
atttatgcacctgggcccccctcct

SEQ ID NO: 5483239 - DNA, 25 bp, Homo sapien
tgtggttaggtgatgacgacctaca

SEQ ID NO: 5483240 - DNA, 25 bp, Homo sapien
ggtgatgacgacctacagctgcact

SEQ ID NO: 5483241 - DNA, 25 bp, Homo sapien
gcaggcacgaggactttattgcacg

SEQ ID NO: 5483242 - DNA, 25 bp, Homo sapien
cagagtgccccgacctcctgctcta

SEQ ID NO: 5483243 - DNA, 25 bp, Homo sapien
ggctgcaggactgtggtcctggtgt

SEQ ID NO: 5483244 - DNA, 25 bp, Homo sapien
acgacctacagctgcactgggaact

SEQ ID NO: 5483245 - DNA, 25 bp, Homo sapien
gtgtggcacccccaccttccagcac

SEQ ID NO: 5483246 - DNA, 25 bp, Homo sapien
cctccctgacccccatttatgcacc

SEQ ID NO: 5483247 - DNA, 25 bp, Homo sapien
gagtatataatattcctgtgcgatt

SEQ ID NO: 5483248 - DNA, 25 bp, Homo sapien
gtgaggttgagttatcatgctacta

SEQ ID NO: 5483249 - DNA, 25 bp, Homo sapien
tcctttggttcttattgacagtcag

SEQ ID NO: 5483250 - DNA, 25 bp, Homo sapien
aaagctctggccatgattccaaaca

SEQ ID NO: 5483251 - DNA, 25 bp, Homo sapien
aacacaaaagattccaccagactga

SEQ ID NO: 5483252 - DNA, 25 bp, Homo sapien
agtctgctgaagaggcattgcacag

SEQ ID NO: 5483253 - DNA, 25 bp, Homo sapien
atgtggacttgttctattgcctgac

SEQ ID NO: 5483254 - DNA, 25 bp, Homo sapien
atcatcaacatagtcctttggttct

SEQ ID NO: 5483255 - DNA, 25 bp, Homo sapien
ttgcttcagacactttcccaaagtt

SEQ ID NO: 5483256 - DNA, 25 bp, Homo sapien
tattgcctgacctgatgaactgtta

SEQ ID NO: 5483257 - DNA, 25 bp, Homo sapien
tgaagtggtcatccatttcttttta

SEQ ID NO: 5483258 - DNA, 25 bp, Homo sapien
tgtttggaatcatggccagagcttt

SEQ ID NO: 5483259 - DNA, 25 bp, Homo sapien
taacagttcatcaggtcaggcaata

SEQ ID NO: 5483260 - DNA, 25 bp, Homo sapien
ctgactgtcaataagaaccaaagga

SEQ ID NO: 5483261 - DNA, 25 bp, Homo sapien
tcagtctggtggaatcttttgtgtt

SEQ ID NO: 5483262 - DNA, 25 bp, Homo sapien
aactttgggaaagtgtctgaagcaa

SEQ ID NO: 5483263 - DNA, 25 bp, Homo sapien
gtcaggcaatagaacaagtccacat

SEQ ID NO: 5483264 - DNA, 25 bp, Homo sapien
aatcgcacaggaatattatatactc

SEQ ID NO: 5483265 - DNA, 25 bp, Homo sapien
agaaccaaaggactatgttgatgat

SEQ ID NO: 5483266 - DNA, 25 bp, Homo sapien
taaaaagaaatggatgaccacttca

SEQ ID NO: 5483267 - DNA, 25 bp, Homo sapien
ctgtgcaatgcctcttcagcagact

SEQ ID NO: 5483268 - DNA, 25 bp, Homo sapien
tagtagcatgataactcaacctcac

SEQ ID NO: 5483269 - DNA, 25 bp, Homo sapien
acagatcacctgcaccctctaaggt

SEQ ID NO: 5483270 - DNA, 25 bp, Homo sapien
accttagagggtgcaggtgatctgt

SEQ ID NO: 5483271 - DNA, 25 bp, Homo sapien
ccatctgccggacctcaaacgtgtg

SEQ ID NO: 5483272 - DNA, 25 bp, Homo sapien
cacacgtttgaggtccggcagatgg

SEQ ID NO: 5483273 - DNA, 25 bp, Homo sapien
gaccccacccaccgcctactgtccg

SEQ ID NO: 5483274 - DNA, 25 bp, Homo sapien
cggacagtaggcggtgggtggggtc

SEQ ID NO: 5483275 - DNA, 25 bp, Homo sapien
ttcatttctccctacaccaactcgg

SEQ ID NO: 5483276 - DNA, 25 bp, Homo sapien
ccgagttggtgtagggagaaatgaa

SEQ ID NO: 5483277 - DNA, 25 bp, Homo sapien
atgtcttttactactgggagatatt

SEQ ID NO: 5483278 - DNA, 25 bp, Homo sapien
ctatggtgtccttagaaagggtgct

SEQ ID NO: 5483279 - DNA, 25 bp, Homo sapien
cttgagaaattggatatccttttgc

SEQ ID NO: 5483280 - DNA, 25 bp, Homo sapien
tctctccagaggcaacttcttcttg

SEQ ID NO: 5483281 - DNA, 25 bp, Homo sapien
agtagaaaattctaagaaagaaata

SEQ ID NO: 5483282 - DNA, 25 bp, Homo sapien
gataggttggctcagtagaaaattc

SEQ ID NO: 5483283 - DNA, 25 bp, Homo sapien
gcagagtgcagagtacattctccta

SEQ ID NO: 5483284 - DNA, 25 bp, Homo sapien
tcgccttgtacataaaccctctgga

SEQ ID NO: 5483285 - DNA, 25 bp, Homo sapien
cttgtgctaagttctagatttaccc

SEQ ID NO: 5483286 - DNA, 25 bp, Homo sapien
tcatacttgatagataggttggctc

SEQ ID NO: 5483287 - DNA, 25 bp, Homo sapien
tttttgcagagtgcagagtacattc

SEQ ID NO: 5483288 - DNA, 25 bp, Homo sapien
aaaaaagaatgtgttacagctgcac

SEQ ID NO: 5483289 - DNA, 25 bp, Homo sapien
taaaagatgcacattaaccgttaac

SEQ ID NO: 5483290 - DNA, 25 bp, Homo sapien
gacatgttaagtacataaaagatgc

SEQ ID NO: 5483291 - DNA, 25 bp, Homo sapien
cagcaggaaatgggtaatgtatttt

SEQ ID NO: 5483292 - DNA, 25 bp, Homo sapien
gggggaatgtacatggcattgttta

SEQ ID NO: 5483293 - DNA, 25 bp, Homo sapien
aaaagtcacaattactgaaaacttc

SEQ ID NO: 5483294 - DNA, 25 bp, Homo sapien
ggcattgtttactggatgtacttcc

SEQ ID NO: 5483295 - DNA, 25 bp, Homo sapien
gctgcacatactaacatggaagttc

SEQ ID NO: 5483296 - DNA, 25 bp, Homo sapien
tcacactctggacagcaaatgggga

SEQ ID NO: 5483297 - DNA, 25 bp, Homo sapien
actatgtggctactaaaaaaagaat

SEQ ID NO: 5483298 - DNA, 25 bp, Homo sapien
ttaaccgttaactgtggtcacactc

SEQ ID NO: 5483299 - DNA, 25 bp, Homo sapien
gaaaacaggcagttaaagttactag

SEQ ID NO: 5483300 - DNA, 25 bp, Homo sapien
ctagtaactttaactgcctgttttc

SEQ ID NO: 5483301 - DNA, 25 bp, Homo sapien
agagtcagagaaattgtcacaagtc

SEQ ID NO: 5483302 - DNA, 25 bp, Homo sapien
aggtcaacaccagtagtggtaagtc

SEQ ID NO: 5483303 - DNA, 25 bp, Homo sapien
tcagccagttcatccaggtcaacac

SEQ ID NO: 5483304 - DNA, 25 bp, Homo sapien
ggagcctaaggacacatgaccacta

SEQ ID NO: 5483305 - DNA, 25 bp, Homo sapien
tggggtacataggagtgtcttgtac

SEQ ID NO: 5483306 - DNA, 25 bp, Homo sapien
gtagtggtaagtcgtgctcaccgta

SEQ ID NO: 5483307 - DNA, 25 bp, Homo sapien
atgataaagcatggattctagttaa

SEQ ID NO: 5483308 - DNA, 25 bp, Homo sapien
taagataataatagtggcaaccagc

SEQ ID NO: 5483309 - DNA, 25 bp, Homo sapien
ccgcaaacccacaacccgaagctta

SEQ ID NO: 5483310 - DNA, 25 bp, Homo sapien
aaaaatggaactagacctcaagaat

SEQ ID NO: 5483311 - DNA, 25 bp, Homo sapien
gaaaatcacaacagaggccattcta

SEQ ID NO: 5483312 - DNA, 25 bp, Homo sapien
gggaaggatgttggcagcgacacca

SEQ ID NO: 5483313 - DNA, 25 bp, Homo sapien
taaaatatgccgctggtttgccact

SEQ ID NO: 5483314 - DNA, 25 bp, Homo sapien
caagctttattcaggacacacttct

SEQ ID NO: 5483315 - DNA, 25 bp, Homo sapien
tcatctgcccaaagacaaatcctca

SEQ ID NO: 5483316 - DNA, 25 bp, Homo sapien
aaatgaggtcacttgggcacagcac

SEQ ID NO: 5483317 - DNA, 25 bp, Homo sapien
aaagcattcagcaaatggcacccta

SEQ ID NO: 5483318 - DNA, 25 bp, Homo sapien
ggtgcatgagtgtccatcatctgac

SEQ ID NO: 5483319 - DNA, 25 bp, Homo sapien
atcatctgactcttctcggagtctc

SEQ ID NO: 5483320 - DNA, 25 bp, Homo sapien
gaatcacaaccccaagtatctcatc

SEQ ID NO: 5483321 - DNA, 25 bp, Homo sapien
ccaagtatctcatcagccagggaag

SEQ ID NO: 5483322 - DNA, 25 bp, Homo sapien
tctcggagtctcatattttgtggga

SEQ ID NO: 5483323 - DNA, 25 bp, Homo sapien
tggtgtcgctgccaacatccttccc

SEQ ID NO: 5483324 - DNA, 25 bp, Homo sapien
gatgagatacttggggttgtgattc

SEQ ID NO: 5483325 - DNA, 25 bp, Homo sapien
agaagtgtgtcctgaataaagcttg

SEQ ID NO: 5483326 - DNA, 25 bp, Homo sapien
gagactccgagaagagtcagatgat

SEQ ID NO: 5483327 - DNA, 25 bp, Homo sapien
tagggtgccatttgctgaatgcttt

SEQ ID NO: 5483328 - DNA, 25 bp, Homo sapien
cttccctggctgatgagatacttgg

SEQ ID NO: 5483329 - DNA, 25 bp, Homo sapien
tgaggatttgtctttgggcagatga

SEQ ID NO: 5483330 - DNA, 25 bp, Homo sapien
gtcagatgatggacactcatgcacc

SEQ ID NO: 5483331 - DNA, 25 bp, Homo sapien
tcccacaaaatatgagactccgaga

SEQ ID NO: 5483332 - DNA, 25 bp, Homo sapien
gtgctgtgcccaagtgacctcattt

SEQ ID NO: 5483333 - DNA, 25 bp, Homo sapien
agtggcaaaccagcggcatatttta

SEQ ID NO: 5483334 - DNA, 25 bp, Homo sapien
ctagatacagtttaaggagtttttc

SEQ ID NO: 5483335 - DNA, 25 bp, Homo sapien
taggacagagataaaacttggaact

SEQ ID NO: 5483336 - DNA, 25 bp, Homo sapien
agatgggaaaacagctttgactcaa

SEQ ID NO: 5483337 - DNA, 25 bp, Homo sapien
gtttaaccaactaggacagagataa

SEQ ID NO: 5483338 - DNA, 25 bp, Homo sapien
atgggcaactgattccagatgggaa

SEQ ID NO: 5483339 - DNA, 25 bp, Homo sapien
gcggatagccaaatgggcaactgat

SEQ ID NO: 5483340 - DNA, 25 bp, Homo sapien
agtgcttaggaaataaacatctatc

SEQ ID NO: 5483341 - DNA, 25 bp, Homo sapien
taacctcgaaggtgatctccagagt

SEQ ID NO: 5483342 - DNA, 25 bp, Homo sapien
aaagttacagtatctagaaaggact

SEQ ID NO: 5483343 - DNA, 25 bp, Homo sapien
cataaagactgtactccaaagcggt

SEQ ID NO: 5483344 - DNA, 25 bp, Homo sapien
atcctactaggaagtgctagacctc

SEQ ID NO: 5483345 - DNA, 25 bp, Homo sapien
aaaatcactcataggaactataaat

SEQ ID NO: 5483346 - DNA, 25 bp, Homo sapien
atttatagttcctatgagtgatttt

SEQ ID NO: 5483347 - DNA, 25 bp, Homo sapien
accagtaatattttgagcaatattt

SEQ ID NO: 5483348 - DNA, 25 bp, Homo sapien
aaatattgctcaaaatattactggt

SEQ ID NO: 5483349 - DNA, 25 bp, Homo sapien
gaaggtagatctcaaagttttggta

SEQ ID NO: 5483350 - DNA, 25 bp, Homo sapien
taccaaaactttgagatctaccttc

SEQ ID NO: 5483351 - DNA, 25 bp, Homo sapien
ggtccagggagctctgacccgacca

SEQ ID NO: 5483352 - DNA, 25 bp, Homo sapien
tggtcgggtcagagctccctggacc

SEQ ID NO: 5483353 - DNA, 25 bp, Homo sapien
actcacacctgggccgcgcctgccc

SEQ ID NO: 5483354 - DNA, 25 bp, Homo sapien
gggcaggcgcggcccaggtgtgagt

SEQ ID NO: 5483355 - DNA, 25 bp, Homo sapien
cgtccctgcggacacagttagtgag

SEQ ID NO: 5483356 - DNA, 25 bp, Homo sapien
ctcactaactgtgtccgcagggacg

SEQ ID NO: 5483357 - DNA, 25 bp, Homo sapien
gtatctggaaatcttatagtagtat

SEQ ID NO: 5483358 - DNA, 25 bp, Homo sapien
atactactataagatttccagatac

SEQ ID NO: 5483359 - DNA, 25 bp, Homo sapien
aaataatgcggtctcaagtatgtct

SEQ ID NO: 5483360 - DNA, 25 bp, Homo sapien
attcaattgtaatacccaaggttgg

SEQ ID NO: 5483361 - DNA, 25 bp, Homo sapien
ttctttgctgaaaggctttggatta

SEQ ID NO: 5483362 - DNA, 25 bp, Homo sapien
gtgtgtagcacttccaactttgctc

SEQ ID NO: 5483363 - DNA, 25 bp, Homo sapien
tggcagacagccgtttgttctacat

SEQ ID NO: 5483364 - DNA, 25 bp, Homo sapien
gcctctaccagttggcagacagccg

SEQ ID NO: 5483365 - DNA, 25 bp, Homo sapien
taaaacatctggttgcaggcttttc

SEQ ID NO: 5483366 - DNA, 25 bp, Homo sapien
gtggaattcactagtaaaacatctg

SEQ ID NO: 5483367 - DNA, 25 bp, Homo sapien
gcctccctagccatgacctcctgta

SEQ ID NO: 5483368 - DNA, 25 bp, Homo sapien
ttttccccataaataatgcggtctc

SEQ ID NO: 5483369 - DNA, 25 bp, Homo sapien
ttgttgatcggaattccagattatt

SEQ ID NO: 5483370 - DNA, 25 bp, Homo sapien
ctacgggtccccattatgaaggcag

SEQ ID NO: 5483371 - DNA, 25 bp, Homo sapien
ctgccttcataatggggacccgtag

SEQ ID NO: 5483372 - DNA, 25 bp, Homo sapien
tgtctttgagttccacctacttcgg

SEQ ID NO: 5483373 - DNA, 25 bp, Homo sapien
ccgaagtaggtggaactcaaagaca

SEQ ID NO: 5483374 - DNA, 25 bp, Homo sapien
gtcctcgacctggacccggcggagc

SEQ ID NO: 5483375 - DNA, 25 bp, Homo sapien
gctccgccgggtccaggtcgaggac

SEQ ID NO: 5483376 - DNA, 25 bp, Homo sapien
cccaaagtgctagatacaggactgg

SEQ ID NO: 5483377 - DNA, 25 bp, Homo sapien
tttttaagacacaggtgtcccactc

SEQ ID NO: 5483378 - DNA, 25 bp, Homo sapien
accatgcccggctctgcctggctaa

SEQ ID NO: 5483379 - DNA, 25 bp, Homo sapien
gggaccaaagacatgcaccactaca

SEQ ID NO: 5483380 - DNA, 25 bp, Homo sapien
gggtttcactgatgtgcccaagctg

SEQ ID NO: 5483381 - DNA, 25 bp, Homo sapien
gtcccactcttacccaggatgaagt

SEQ ID NO: 5483382 - DNA, 25 bp, Homo sapien
agggtttcactgatgtgcccaagct

SEQ ID NO: 5483383 - DNA, 25 bp, Homo sapien
ggaccaaagacatgcaccactacac

SEQ ID NO: 5483384 - DNA, 25 bp, Homo sapien
cacaggtgtcccactcttacccagg

SEQ ID NO: 5483385 - DNA, 25 bp, Homo sapien
tttcactgatgtgcccaagctggtc

SEQ ID NO: 5483386 - DNA, 25 bp, Homo sapien
aggtgtcccactcttacccaggatg

SEQ ID NO: 5483387 - DNA, 25 bp, Homo sapien
tattttgacgggtaaacttgacaaa

SEQ ID NO: 5483388 - DNA, 25 bp, Homo sapien
tttgtcaagtttacccgtcaaaata

SEQ ID NO: 5483389 - DNA, 25 bp, Homo sapien
gtcgaagtcgttgttcctcccgagt

SEQ ID NO: 5483390 - DNA, 25 bp, Homo sapien
actcgggaggaacaacgacttcgac

SEQ ID NO: 5483391 - DNA, 25 bp, Homo sapien
tctctgtctgggtttaacaccgcca

SEQ ID NO: 5483392 - DNA, 25 bp, Homo sapien
cgctcttcaccttggttcagtaact

SEQ ID NO: 5483393 - DNA, 25 bp, Homo sapien
ggatcaccggaacgaattccactcc

SEQ ID NO: 5483394 - DNA, 25 bp, Homo sapien
cttgcactagcactcatttatctca

SEQ ID NO: 5483395 - DNA, 25 bp, Homo sapien
caagcgcatgcgactttctgaagga

SEQ ID NO: 5483396 - DNA, 25 bp, Homo sapien
ccttctactcaaagcctcaacatca

SEQ ID NO: 5483397 - DNA, 25 bp, Homo sapien
ggcggggagatctcctgttgacagc

SEQ ID NO: 5483398 - DNA, 25 bp, Homo sapien
agtgcagacctgtcatctctgtctg

SEQ ID NO: 5483399 - DNA, 25 bp, Homo sapien
gcaacacctacataacatgccacca

SEQ ID NO: 5483400 - DNA, 25 bp, Homo sapien
gcagctgtagcagttcgtacgacgg

SEQ ID NO: 5483401 - DNA, 25 bp, Homo sapien
ccatctgccctcagtcagttgggag

SEQ ID NO: 5483402 - DNA, 25 bp, Homo sapien
tccttcagaaagtcgcatgcgcttg

SEQ ID NO: 5483403 - DNA, 25 bp, Homo sapien
ggagtggaattcgttccggtgatcc

SEQ ID NO: 5483404 - DNA, 25 bp, Homo sapien
cagacagagatgacaggtctgcact

SEQ ID NO: 5483405 - DNA, 25 bp, Homo sapien
ctcccaactgactgagggcagatgg

SEQ ID NO: 5483406 - DNA, 25 bp, Homo sapien
gctgtcaacaggagatctccccgcc

SEQ ID NO: 5483407 - DNA, 25 bp, Homo sapien
tggtggcatgttatgtaggtgttgc

SEQ ID NO: 5483408 - DNA, 25 bp, Homo sapien
agttactgaaccaaggtgaagagcg

SEQ ID NO: 5483409 - DNA, 25 bp, Homo sapien
tgagataaatgagtgctagtgcaag

SEQ ID NO: 5483410 - DNA, 25 bp, Homo sapien
ccgtcgtacgaactgctacagctgc

SEQ ID NO: 5483411 - DNA, 25 bp, Homo sapien
tgatgttgaggctttgagtagaagg

SEQ ID NO: 5483412 - DNA, 25 bp, Homo sapien
tggcggtgttaaacccagacagaga

SEQ ID NO: 5483413 - DNA, 25 bp, Homo sapien
tggacggtgtattcaagaccggccc

SEQ ID NO: 5483414 - DNA, 25 bp, Homo sapien
gggccggtcttgaatacaccgtcca

SEQ ID NO: 5483415 - DNA, 25 bp, Homo sapien
tatctaaattagccggctgggtgag

SEQ ID NO: 5483416 - DNA, 25 bp, Homo sapien
aggtgcccgtaatcccagctgcttg

SEQ ID NO: 5483417 - DNA, 25 bp, Homo sapien
tttgagaccagcctgacaaatatgg

SEQ ID NO: 5483418 - DNA, 25 bp, Homo sapien
tttaaaaaatgtgactggctgggtg

SEQ ID NO: 5483419 - DNA, 25 bp, Homo sapien
ctgaatttgcaggtttgacatgttt

SEQ ID NO: 5483420 - DNA, 25 bp, Homo sapien
gggtaacagagtgagattccatttc

SEQ ID NO: 5483421 - DNA, 25 bp, Homo sapien
tcatttggaaggattgcatgaagcc

SEQ ID NO: 5483422 - DNA, 25 bp, Homo sapien
gacaaatatggtgaaaccccgcctc

SEQ ID NO: 5483423 - DNA, 25 bp, Homo sapien
ggtgttgtggctcatttggaaggat

SEQ ID NO: 5483424 - DNA, 25 bp, Homo sapien
accccgcctctaatgaaaatacaaa

SEQ ID NO: 5483425 - DNA, 25 bp, Homo sapien
ttgcatgaagccagaagtttgagac

SEQ ID NO: 5483426 - DNA, 25 bp, Homo sapien
cgacgtgactattcctccggtgtct

SEQ ID NO: 5483427 - DNA, 25 bp, Homo sapien
agacaccggaggaatagtcacgtcg

SEQ ID NO: 5483428 - DNA, 25 bp, Homo sapien
tcggtcgccaccatcgcgggtgagc

SEQ ID NO: 5483429 - DNA, 25 bp, Homo sapien
gctcacccgcgatggtggcgaccga

SEQ ID NO: 5483430 - DNA, 25 bp, Homo sapien
tggaagatacaccttgagttcgacg

SEQ ID NO: 5483431 - DNA, 25 bp, Homo sapien
cgtcgaactcaaggtgtatcttcca

SEQ ID NO: 5483432 - DNA, 25 bp, Homo sapien
aatttcctctttgattactacccag

SEQ ID NO: 5483433 - DNA, 25 bp, Homo sapien
ctgggtagtaatcaaagaggaaatt

SEQ ID NO: 5483434 - DNA, 25 bp, Homo sapien
acttcaaataatctcgggaaaccac

SEQ ID NO: 5483435 - DNA, 25 bp, Homo sapien
gtggtttcccgagattatttgaagt

SEQ ID NO: 5483436 - DNA, 25 bp, Homo sapien
atgttgcagcggaccgtaccgttaa

SEQ ID NO: 5483437 - DNA, 25 bp, Homo sapien
ttaacggtacggtccgctgcaacat

SEQ ID NO: 5483438 - DNA, 25 bp, Homo sapien
atgggaaatgtctatggaatggatt

SEQ ID NO: 5483439 - DNA, 25 bp, Homo sapien
atacaaggagctttaaacattcccc

SEQ ID NO: 5483440 - DNA, 25 bp, Homo sapien
ctagtatgaactgctttgtgtctcc

SEQ ID NO: 5483441 - DNA, 25 bp, Homo sapien
tctctgtgaactgcctcaagtctcc

SEQ ID NO: 5483442 - DNA, 25 bp, Homo sapien
tgggaagaactagaaaatcttttgc

SEQ ID NO: 5483443 - DNA, 25 bp, Homo sapien
attatacacactcatgggaaatgtc

SEQ ID NO: 5483444 - DNA, 25 bp, Homo sapien
ctccagtatgacttagcttgtgctc

SEQ ID NO: 5483445 - DNA, 25 bp, Homo sapien
gagaagtattacaaaagacaaggct

SEQ ID NO: 5483446 - DNA, 25 bp, Homo sapien
tcttaagagtggacagcatacaagg

SEQ ID NO: 5483447 - DNA, 25 bp, Homo sapien
cattccccacacttgtagagactga

SEQ ID NO: 5483448 - DNA, 25 bp, Homo sapien
gatgttcctgtaggtgggaagaact

SEQ ID NO: 5483449 - DNA, 25 bp, Homo sapien
cccctccggtcggtggctcggcatg

SEQ ID NO: 5483450 - DNA, 25 bp, Homo sapien
catgccgagccaccgaccggagggg

SEQ ID NO: 5483451 - DNA, 25 bp, Homo sapien
tcgctcgtcccgtacttagacgaag

SEQ ID NO: 5483452 - DNA, 25 bp, Homo sapien
cttcgtctaagtacgggacgagcga

SEQ ID NO: 5483453 - DNA, 25 bp, Homo sapien
gaccctccccgtgccgaagcggccc

SEQ ID NO: 5483454 - DNA, 25 bp, Homo sapien
gggccgcttcggcacggggagggtc

SEQ ID NO: 5483455 - DNA, 25 bp, Homo sapien
cgtgccgaagcggccctggggcgtg

SEQ ID NO: 5483456 - DNA, 25 bp, Homo sapien
cacgccccagggccgcttcggcacg

SEQ ID NO: 5483457 - DNA, 25 bp, Homo sapien
cggtactagtgactcagagaccggt

SEQ ID NO: 5483458 - DNA, 25 bp, Homo sapien
accggtctctgagtcactagtaccg

SEQ ID NO: 5483459 - DNA, 25 bp, Homo sapien
ccatcccatctaggaagtgaggagc

SEQ ID NO: 5483460 - DNA, 25 bp, Homo sapien
caacagctcattgagaacgggccat

SEQ ID NO: 5483461 - DNA, 25 bp, Homo sapien
gccaccaccccgtctgggaggtgta

SEQ ID NO: 5483462 - DNA, 25 bp, Homo sapien
gagaaatcggatggttgccgtgtct

SEQ ID NO: 5483463 - DNA, 25 bp, Homo sapien
agaagtagacatgggagacttttca

SEQ ID NO: 5483464 - DNA, 25 bp, Homo sapien
gccgtgtctgtgtagaaagaagtag

SEQ ID NO: 5483465 - DNA, 25 bp, Homo sapien
gcccatcgtctgagatgggagcgcc

SEQ ID NO: 5483466 - DNA, 25 bp, Homo sapien
ggccccccaaagtgccgagattgca

SEQ ID NO: 5483467 - DNA, 25 bp, Homo sapien
gctgcccagtctggaaagtgaggag

SEQ ID NO: 5483468 - DNA, 25 bp, Homo sapien
acgggccatgatgacaatggcggtt

SEQ ID NO: 5483469 - DNA, 25 bp, Homo sapien
cgctaccccgtctgggaagtgagga

SEQ ID NO: 5483470 - DNA, 25 bp, Homo sapien
gtttatacaaagtaataatccacaa

SEQ ID NO: 5483471 - DNA, 25 bp, Homo sapien
ttgtggattattactttgtataaac

SEQ ID NO: 5483472 - DNA, 25 bp, Homo sapien
actatctgaggtaagaaatggtaag

SEQ ID NO: 5483473 - DNA, 25 bp, Homo sapien
cttaccatttcttacctcagatagt

SEQ ID NO: 5483474 - DNA, 25 bp, Homo sapien
gggagcccaaatgtgtctagaactt

SEQ ID NO: 5483475 - DNA, 25 bp, Homo sapien
ccccatctgtggaaagacatgactg

SEQ ID NO: 5483476 - DNA, 25 bp, Homo sapien
gacatgactgaattagaggttctcc

SEQ ID NO: 5483477 - DNA, 25 bp, Homo sapien
gaactgtgcgtcattgagcaaatcc

SEQ ID NO: 5483478 - DNA, 25 bp, Homo sapien
ctgcctccctagacatgtgaccatc

SEQ ID NO: 5483479 - DNA, 25 bp, Homo sapien
tcctggatcgtaaggctaggtctga

SEQ ID NO: 5483480 - DNA, 25 bp, Homo sapien
ggaaggttgtggccccaactctgca

SEQ ID NO: 5483481 - DNA, 25 bp, Homo sapien
tatggggatggacttcagatccttg

SEQ ID NO: 5483482 - DNA, 25 bp, Homo sapien
gtgcattgctgtaggaagagatcct

SEQ ID NO: 5483483 - DNA, 25 bp, Homo sapien
gggatggtcatgcagatttgttctc

SEQ ID NO: 5483484 - DNA, 25 bp, Homo sapien
gggggttttataaagtcagagcatc

SEQ ID NO: 5483485 - DNA, 25 bp, Homo sapien
ctattgtctgtaggactttcgaccg

SEQ ID NO: 5483486 - DNA, 25 bp, Homo sapien
cggtcgaaagtcctacagacaatag

SEQ ID NO: 5483487 - DNA, 25 bp, Homo sapien
ttcgccacgagcgaacgagactgtc

SEQ ID NO: 5483488 - DNA, 25 bp, Homo sapien
gacagtctcgttcgctcgtggcgaa

SEQ ID NO: 5483489 - DNA, 25 bp, Homo sapien
tgtgacagagaccatgtggctcaca

SEQ ID NO: 5483490 - DNA, 25 bp, Homo sapien
ggtgtggggattcatgtctataatc

SEQ ID NO: 5483491 - DNA, 25 bp, Homo sapien
attacaatagcagagctgaatagtt

SEQ ID NO: 5483492 - DNA, 25 bp, Homo sapien
acaaaaactggaagagctatgttat

SEQ ID NO: 5483493 - DNA, 25 bp, Homo sapien
ataggcccacttccttggaaagtag

SEQ ID NO: 5483494 - DNA, 25 bp, Homo sapien
aatagcagagctgaatagttgtgac

SEQ ID NO: 5483495 - DNA, 25 bp, Homo sapien
ctagaattgttaacaaaaactggaa

SEQ ID NO: 5483496 - DNA, 25 bp, Homo sapien
tttacatactgtccacagctgcttt

SEQ ID NO: 5483497 - DNA, 25 bp, Homo sapien
agagaccatgtggctcacaaagctt

SEQ ID NO: 5483498 - DNA, 25 bp, Homo sapien
tggaagagctatgttataggcccac

SEQ ID NO: 5483499 - DNA, 25 bp, Homo sapien
ccacttccttggaaagtagactctg

SEQ ID NO: 5483500 - DNA, 25 bp, Homo sapien
attagtcttatcatctcaaacatcc

SEQ ID NO: 5483501 - DNA, 25 bp, Homo sapien
ggatgtttgagatgataagactaat

SEQ ID NO: 5483502 - DNA, 25 bp, Homo sapien
agtcttatcatctcaaacatccaaa

SEQ ID NO: 5483503 - DNA, 25 bp, Homo sapien
tttggatgtttgagatgataagact

SEQ ID NO: 5483504 - DNA, 25 bp, Homo sapien
cgtctggctagaccagaccgtgaca

SEQ ID NO: 5483505 - DNA, 25 bp, Homo sapien
tgtcacggtctggtctagccagacg

SEQ ID NO: 5483506 - DNA, 25 bp, Homo sapien
tgaagatcagtctcaaggttgctgc

SEQ ID NO: 5483507 - DNA, 25 bp, Homo sapien
gctgcctccttgcaggaggaggtcc

SEQ ID NO: 5483508 - DNA, 25 bp, Homo sapien
ttcccagcaagcctggatgacctgg

SEQ ID NO: 5483509 - DNA, 25 bp, Homo sapien
aggccactgctaataggggtgtctt

SEQ ID NO: 5483510 - DNA, 25 bp, Homo sapien
aagcagtcctccagtcccagtctct

SEQ ID NO: 5483511 - DNA, 25 bp, Homo sapien
atgtgtctgactctgggatcctttc

SEQ ID NO: 5483512 - DNA, 25 bp, Homo sapien
gctgcttgaccggtgagcagcagga

SEQ ID NO: 5483513 - DNA, 25 bp, Homo sapien
ggccagagtggcttggcttccagaa

SEQ ID NO: 5483514 - DNA, 25 bp, Homo sapien
gagcagcaggattcagacctagatg

SEQ ID NO: 5483515 - DNA, 25 bp, Homo sapien
tgggtcacttatgatgccagcctcc

SEQ ID NO: 5483516 - DNA, 25 bp, Homo sapien
gaagccccagtgggctgtccactct

SEQ ID NO: 5483517 - DNA, 25 bp, Homo sapien
ataacattacagactcagtttacaa

SEQ ID NO: 5483518 - DNA, 25 bp, Homo sapien
ttgtaaactgagtctgtaatgttat

SEQ ID NO: 5483519 - DNA, 25 bp, Homo sapien
gctggagtgcagtgatcacagctca

SEQ ID NO: 5483520 - DNA, 25 bp, Homo sapien
ccaggcatcatggcccgcgcctgtg

SEQ ID NO: 5483521 - DNA, 25 bp, Homo sapien
ccaggggcacatgctgctgtgcctg

SEQ ID NO: 5483522 - DNA, 25 bp, Homo sapien
acgcctgtggtcccagctactaggg

SEQ ID NO: 5483523 - DNA, 25 bp, Homo sapien
caacatcaaaacttataacaggcct

SEQ ID NO: 5483524 - DNA, 25 bp, Homo sapien
gcgcctgtggtcccagctactaggg

SEQ ID NO: 5483525 - DNA, 25 bp, Homo sapien
ggatcgcttaagtcctggggtcaag

SEQ ID NO: 5483526 - DNA, 25 bp, Homo sapien
gcctcctcagtagctggcaccaggg

SEQ ID NO: 5483527 - DNA, 25 bp, Homo sapien
agccaggcatcatggcccacgcctg

SEQ ID NO: 5483528 - DNA, 25 bp, Homo sapien
cagttctctctaagcacaaagactt

SEQ ID NO: 5483529 - DNA, 25 bp, Homo sapien
ctgggctccggtgatcttcctgcct

SEQ ID NO: 5483530 - DNA, 25 bp, Homo sapien
gattcaggctgaagtaagcatgacg

SEQ ID NO: 5483531 - DNA, 25 bp, Homo sapien
aaatcagtgcattagaggcaaaggc

SEQ ID NO: 5483532 - DNA, 25 bp, Homo sapien
ctatctacgtgaagaggtttgggat

SEQ ID NO: 5483533 - DNA, 25 bp, Homo sapien
gcaaaggctgggataactatctacg

SEQ ID NO: 5483534 - DNA, 25 bp, Homo sapien
taaatgggaccatgacgattcattg

SEQ ID NO: 5483535 - DNA, 25 bp, Homo sapien
gcacggatggtagtgcctgcatcaa

SEQ ID NO: 5483536 - DNA, 25 bp, Homo sapien
tcaggtccatgcttgaaggctttct

SEQ ID NO: 5483537 - DNA, 25 bp, Homo sapien
aagcatgacgacatcccaagtagga

SEQ ID NO: 5483538 - DNA, 25 bp, Homo sapien
caggtagccccaaaagctccttgcc

SEQ ID NO: 5483539 - DNA, 25 bp, Homo sapien
atttcttagacaattgcaggcccag

SEQ ID NO: 5483540 - DNA, 25 bp, Homo sapien
tcaaactgctaaatggtgagaacaa

SEQ ID NO: 5483541 - DNA, 25 bp, Homo sapien
gtcccgtggcccctagtcctcggga

SEQ ID NO: 5483542 - DNA, 25 bp, Homo sapien
tcccgaggactaggggccacgggac

SEQ ID NO: 5483543 - DNA, 25 bp, Homo sapien
tagaggcacgaaccaacagaagtgt

SEQ ID NO: 5483544 - DNA, 25 bp, Homo sapien
acacttctgttggttcgtgcctcta

SEQ ID NO: 5483545 - DNA, 25 bp, Homo sapien
ggtgttccagacctactcgacttat

SEQ ID NO: 5483546 - DNA, 25 bp, Homo sapien
ataagtcgagtaggtctggaacacc

SEQ ID NO: 5483547 - DNA, 25 bp, Homo sapien
acaagtaaaatgatggcgtccttcg

SEQ ID NO: 5483548 - DNA, 25 bp, Homo sapien
cgaaggacgccatcattttacttgt

SEQ ID NO: 5483549 - DNA, 25 bp, Homo sapien
gctccacgttgtactcgatgcggtc

SEQ ID NO: 5483550 - DNA, 25 bp, Homo sapien
cggctttcttggtgtcggatacggc

SEQ ID NO: 5483551 - DNA, 25 bp, Homo sapien
taatgatctcgttatgccgcgtctc

SEQ ID NO: 5483552 - DNA, 25 bp, Homo sapien
ctataggcccaaagtgcacccaatg

SEQ ID NO: 5483553 - DNA, 25 bp, Homo sapien
gaggggtccgtcataaattagcgca

SEQ ID NO: 5483554 - DNA, 25 bp, Homo sapien
cgtgcagctctcggatgctcgtttc

SEQ ID NO: 5483555 - DNA, 25 bp, Homo sapien
cagcaccacgcagcaaatgatgatg

SEQ ID NO: 5483556 - DNA, 25 bp, Homo sapien
ggatacggcgcgttccacgtaatcc

SEQ ID NO: 5483557 - DNA, 25 bp, Homo sapien
caatgggtttcgtagcaaatacagc

SEQ ID NO: 5483558 - DNA, 25 bp, Homo sapien
tgcggtcgatcatctccccctggct

SEQ ID NO: 5483559 - DNA, 25 bp, Homo sapien
cgtaatccaccgagtgctccacgtt

SEQ ID NO: 5483560 - DNA, 25 bp, Homo sapien
ataaaaacgaatttagatcaggtta

SEQ ID NO: 5483561 - DNA, 25 bp, Homo sapien
taacctgatctaaattcgtttttat

SEQ ID NO: 5483562 - DNA, 25 bp, Homo sapien
ttcacaaagtgaacgtttagaaaca

SEQ ID NO: 5483563 - DNA, 25 bp, Homo sapien
tgtttctaaacgttcactttgtgaa

SEQ ID NO: 5483564 - DNA, 25 bp, Homo sapien
tcctaacctggcatgaagcttcttt

SEQ ID NO: 5483565 - DNA, 25 bp, Homo sapien
aggtccccagatgatctgcaagcac

SEQ ID NO: 5483566 - DNA, 25 bp, Homo sapien
gtacaggcataactattgtcagtgc

SEQ ID NO: 5483567 - DNA, 25 bp, Homo sapien
tttctggtcatggaatgctgccttc

SEQ ID NO: 5483568 - DNA, 25 bp, Homo sapien
gctgcctgaatgctcaggtagactc

SEQ ID NO: 5483569 - DNA, 25 bp, Homo sapien
ggggaatcacagatagggtttactc

SEQ ID NO: 5483570 - DNA, 25 bp, Homo sapien
gagggaaatagtgtgcagttactaa

SEQ ID NO: 5483571 - DNA, 25 bp, Homo sapien
agggtttactcagtagagggaaata

SEQ ID NO: 5483572 - DNA, 25 bp, Homo sapien
gatggaactgcagaaactctgcccc

SEQ ID NO: 5483573 - DNA, 25 bp, Homo sapien
tagccccacttttgcatggagggac

SEQ ID NO: 5483574 - DNA, 25 bp, Homo sapien
acttcagtgttggagaagcactggg

SEQ ID NO: 5483575 - DNA, 25 bp, Homo sapien
ggctggtcttgcaaggaaattttaa

SEQ ID NO: 5483576 - DNA, 25 bp, Homo sapien
ggctgttaatgcgggaatggcagcc

SEQ ID NO: 5483577 - DNA, 25 bp, Homo sapien
atgtgctaccccaggcttgtcactt

SEQ ID NO: 5483578 - DNA, 25 bp, Homo sapien
taatcactagacatgagagcctcat

SEQ ID NO: 5483579 - DNA, 25 bp, Homo sapien
tctctggcctgcctagacgtgtgga

SEQ ID NO: 5483580 - DNA, 25 bp, Homo sapien
gcatcagtggcacacagagttctgc

SEQ ID NO: 5483581 - DNA, 25 bp, Homo sapien
gagttctgcagtaatggtaataatc

SEQ ID NO: 5483582 - DNA, 25 bp, Homo sapien
gcctgttctccgtgggcacagagca

SEQ ID NO: 5483583 - DNA, 25 bp, Homo sapien
tagacgtgtggactctccatgaagg

SEQ ID NO: 5483584 - DNA, 25 bp, Homo sapien
tccatgaaggctacgcttcaggcat

SEQ ID NO: 5483585 - DNA, 25 bp, Homo sapien
ctctaccagggtttgaaaggtgagt

SEQ ID NO: 5483586 - DNA, 25 bp, Homo sapien
actaaaaatgtacaacgaagttgta

SEQ ID NO: 5483587 - DNA, 25 bp, Homo sapien
tacaacttcgttgtacatttttagt

SEQ ID NO: 5483588 - DNA, 25 bp, Homo sapien
taactaaaaatgtacaacgaagttg

SEQ ID NO: 5483589 - DNA, 25 bp, Homo sapien
caacttcgttgtacatttttagtta

SEQ ID NO: 5483590 - DNA, 25 bp, Homo sapien
aagtagtattgctgggtaaatccca

SEQ ID NO: 5483591 - DNA, 25 bp, Homo sapien
gaccagtcctcaaagaccttagtcc

SEQ ID NO: 5483592 - DNA, 25 bp, Homo sapien
taaggactctataatggaagtgctt

SEQ ID NO: 5483593 - DNA, 25 bp, Homo sapien
acaatgatggaatacttacagtgtc

SEQ ID NO: 5483594 - DNA, 25 bp, Homo sapien
atagtcagaagtgtaaaatttaggt

SEQ ID NO: 5483595 - DNA, 25 bp, Homo sapien
atggaactcctaggagcagaccagt

SEQ ID NO: 5483596 - DNA, 25 bp, Homo sapien
atagtacaatgaagcctcagtaatc

SEQ ID NO: 5483597 - DNA, 25 bp, Homo sapien
ataactgatactagagggtggtttc

SEQ ID NO: 5483598 - DNA, 25 bp, Homo sapien
ttcactattccaaagagcaagatct

SEQ ID NO: 5483599 - DNA, 25 bp, Homo sapien
ctacatcctaaaatgggggaataaa

SEQ ID NO: 5483600 - DNA, 25 bp, Homo sapien
aaagtgtaaattgggaatgttgaat

SEQ ID NO: 5483601 - DNA, 25 bp, Homo sapien
tccggtagtgcttgcttaatttctc

SEQ ID NO: 5483602 - DNA, 25 bp, Homo sapien
caggggtttttgataggtagccaca

SEQ ID NO: 5483603 - DNA, 25 bp, Homo sapien
gtcaaagatgaacatcggaataaca

SEQ ID NO: 5483604 - DNA, 25 bp, Homo sapien
ttgataggtagccacatgccattac

SEQ ID NO: 5483605 - DNA, 25 bp, Homo sapien
taggctcaaattaggggtgttttga

SEQ ID NO: 5483606 - DNA, 25 bp, Homo sapien
tgaagagtctggtcaggtaccctat

SEQ ID NO: 5483607 - DNA, 25 bp, Homo sapien
gccattactggagatgttaaccttc

SEQ ID NO: 5483608 - DNA, 25 bp, Homo sapien
ggcttggcactcaagtcaaagatga

SEQ ID NO: 5483609 - DNA, 25 bp, Homo sapien
aagactaccctagaggtgatgtgtc

SEQ ID NO: 5483610 - DNA, 25 bp, Homo sapien
agaagcagagcactaagtctaccca

SEQ ID NO: 5483611 - DNA, 25 bp, Homo sapien
aggatcaaatcccagctaccacact

SEQ ID NO: 5483612 - DNA, 25 bp, Homo sapien
cactcttggaacagttagttatccc

SEQ ID NO: 5483613 - DNA, 25 bp, Homo sapien
cccctccaaagctgcgccttcccta

SEQ ID NO: 5483614 - DNA, 25 bp, Homo sapien
tcagacctccaatccatgagttgtc

SEQ ID NO: 5483615 - DNA, 25 bp, Homo sapien
tcaaagtctgtctggaatcagctcc

SEQ ID NO: 5483616 - DNA, 25 bp, Homo sapien
ggttatcacatctagccccctggct

SEQ ID NO: 5483617 - DNA, 25 bp, Homo sapien
agtattccccacctcagcaaatggc

SEQ ID NO: 5483618 - DNA, 25 bp, Homo sapien
agtccagactcctcgcaggagctcc

SEQ ID NO: 5483619 - DNA, 25 bp, Homo sapien
tcctaggtgtgcccgctcatttgac

SEQ ID NO: 5483620 - DNA, 25 bp, Homo sapien
cagcctaaactggtctcactgcctc

SEQ ID NO: 5483621 - DNA, 25 bp, Homo sapien
ttgcctagatgacaacagcctaaac

SEQ ID NO: 5483622 - DNA, 25 bp, Homo sapien
cgcaggagctccacactcctaggtg

SEQ ID NO: 5483623 - DNA, 25 bp, Homo sapien
ggcgtcgagccttcgccccccgagg

SEQ ID NO: 5483624 - DNA, 25 bp, Homo sapien
cctcggggggcgaaggctcgacgcc

SEQ ID NO: 5483625 - DNA, 25 bp, Homo sapien
gccccccgaggggacgctgtggagg

SEQ ID NO: 5483626 - DNA, 25 bp, Homo sapien
cctccacagcgtcccctcggggggc

SEQ ID NO: 5483627 - DNA, 25 bp, Homo sapien
gcgtcggcgtcgagccttcgccccc

SEQ ID NO: 5483628 - DNA, 25 bp, Homo sapien
gggggcgaaggctcgacgccgacgc

SEQ ID NO: 5483629 - DNA, 25 bp, Homo sapien
ctcccactgcggggaactcctgcag

SEQ ID NO: 5483630 - DNA, 25 bp, Homo sapien
ctgcaggagttccccgcagtgggag

SEQ ID NO: 5483631 - DNA, 25 bp, Homo sapien
ggcctgtcttggtcatcactgtgtc

SEQ ID NO: 5483632 - DNA, 25 bp, Homo sapien
acacagcaggaattcgttcagggct

SEQ ID NO: 5483633 - DNA, 25 bp, Homo sapien
cagcatcagctgcccaggttcaaca

SEQ ID NO: 5483634 - DNA, 25 bp, Homo sapien
gtccccaggcctgatacacagcagg

SEQ ID NO: 5483635 - DNA, 25 bp, Homo sapien
cactagagccgttcaggcccctgtg

SEQ ID NO: 5483636 - DNA, 25 bp, Homo sapien
gtgcttactgtgtggcgaccattat

SEQ ID NO: 5483637 - DNA, 25 bp, Homo sapien
gtaagctgggctacagcagtgaaca

SEQ ID NO: 5483638 - DNA, 25 bp, Homo sapien
ttaaaagaggtccttgttggctgtc

SEQ ID NO: 5483639 - DNA, 25 bp, Homo sapien
gctggccagccacataagctcacta

SEQ ID NO: 5483640 - DNA, 25 bp, Homo sapien
gctttgtggcagggtgcatctttta

SEQ ID NO: 5483641 - DNA, 25 bp, Homo sapien
aggctagtcctgaactcgtgacctc

SEQ ID NO: 5483642 - DNA, 25 bp, Homo sapien
ccgtgatggcgcttccgacagccat

SEQ ID NO: 5483643 - DNA, 25 bp, Homo sapien
atggctgtcggaagcgccatcacgg

SEQ ID NO: 5483644 - DNA, 25 bp, Homo sapien
acgacaggaacaacggttgataaga

SEQ ID NO: 5483645 - DNA, 25 bp, Homo sapien
tcttatcaaccgttgttcctgtcgt

SEQ ID NO: 5483646 - DNA, 25 bp, Homo sapien
cgagaccgtcacacgggccctctgg

SEQ ID NO: 5483647 - DNA, 25 bp, Homo sapien
ccagagggcccgtgtgacggtctcg

SEQ ID NO: 5483648 - DNA, 25 bp, Homo sapien
cgctcaccgaaggagcgcgggaact

SEQ ID NO: 5483649 - DNA, 25 bp, Homo sapien
agttcccgcgctccttcggtgagcg

SEQ ID NO: 5483650 - DNA, 25 bp, Homo sapien
ttatagacatcttaaagtaatcttt

SEQ ID NO: 5483651 - DNA, 25 bp, Homo sapien
aaagattactttaagatgtctataa

SEQ ID NO: 5483652 - DNA, 25 bp, Homo sapien
ccgcagcccccgcggtgtacagacc

SEQ ID NO: 5483653 - DNA, 25 bp, Homo sapien
ggtctgtacaccgcgggggctgcgg

SEQ ID NO: 5483654 - DNA, 25 bp, Homo sapien
cgcagcccccgcggtgtacagaccc

SEQ ID NO: 5483655 - DNA, 25 bp, Homo sapien
gggtctgtacaccgcgggggctgcg

SEQ ID NO: 5483656 - DNA, 25 bp, Homo sapien
tctactataacaaaggtttagagat

SEQ ID NO: 5483657 - DNA, 25 bp, Homo sapien
atctctaaacctttgttatagtaga

SEQ ID NO: 5483658 - DNA, 25 bp, Homo sapien
cattttagaaagactcattcaggac

SEQ ID NO: 5483659 - DNA, 25 bp, Homo sapien
gtcctgaatgagtctttctaaaatg

SEQ ID NO: 5483660 - DNA, 25 bp, Homo sapien
ggacagctatgactgggagtagtca

SEQ ID NO: 5483661 - DNA, 25 bp, Homo sapien
gcctgcacctgaggagtgaattgat

SEQ ID NO: 5483662 - DNA, 25 bp, Homo sapien
agcagggggctgtttcatatactga

SEQ ID NO: 5483663 - DNA, 25 bp, Homo sapien
cccatatgtccttccgagtgagaga

SEQ ID NO: 5483664 - DNA, 25 bp, Homo sapien
agatcttcataagagaagagggaca

SEQ ID NO: 5483665 - DNA, 25 bp, Homo sapien
cgagtgagagacacaaaaaattcca

SEQ ID NO: 5483666 - DNA, 25 bp, Homo sapien
ctcaaggggcttcatgatgtcccca

SEQ ID NO: 5483667 - DNA, 25 bp, Homo sapien
gagggaaaaagatctcagtggtatt

SEQ ID NO: 5483668 - DNA, 25 bp, Homo sapien
tcatggcagccagcatatggcatat

SEQ ID NO: 5483669 - DNA, 25 bp, Homo sapien
ctggctagtaaaacatgtaaggaaa

SEQ ID NO: 5483670 - DNA, 25 bp, Homo sapien
tagccagaagtcagatgctcaaggg

SEQ ID NO: 5483671 - DNA, 25 bp, Homo sapien
caaacagtaaagtgcacccatttat

SEQ ID NO: 5483672 - DNA, 25 bp, Homo sapien
acatacaacttggtgagaaacctat

SEQ ID NO: 5483673 - DNA, 25 bp, Homo sapien
ttagtgcaagaatcctgggccaatg

SEQ ID NO: 5483674 - DNA, 25 bp, Homo sapien
aaatacactaaaagacaagagcggt

SEQ ID NO: 5483675 - DNA, 25 bp, Homo sapien
tggtgagaaacctattaaactgaag

SEQ ID NO: 5483676 - DNA, 25 bp, Homo sapien
agaatcctgggccaatggaacatac

SEQ ID NO: 5483677 - DNA, 25 bp, Homo sapien
ctgtcctccatttcagggtggtatg

SEQ ID NO: 5483678 - DNA, 25 bp, Homo sapien
gggtggtatgaattgagtaagtttc

SEQ ID NO: 5483679 - DNA, 25 bp, Homo sapien
aaaagacaagagcggttctgctatt

SEQ ID NO: 5483680 - DNA, 25 bp, Homo sapien
aatgaagacattactcacacttaaa

SEQ ID NO: 5483681 - DNA, 25 bp, Homo sapien
actcagcgagtgtttgctgctgggg

SEQ ID NO: 5483682 - DNA, 25 bp, Homo sapien
caagattcaactctccgaaggccgg

SEQ ID NO: 5483683 - DNA, 25 bp, Homo sapien
ccggccttcggagagttgaatcttg

SEQ ID NO: 5483684 - DNA, 25 bp, Homo sapien
cgggtgttacaaacaccgaggtgaa

SEQ ID NO: 5483685 - DNA, 25 bp, Homo sapien
ttcacctcggtgtttgtaacacccg

SEQ ID NO: 5483686 - DNA, 25 bp, Homo sapien
taaagcattcgtaaccgaaactact

SEQ ID NO: 5483687 - DNA, 25 bp, Homo sapien
agtagtttcggttacgaatgcttta

SEQ ID NO: 5483688 - DNA, 25 bp, Homo sapien
tagtgttctagttttctataacggt

SEQ ID NO: 5483689 - DNA, 25 bp, Homo sapien
accgttatagaaaactagaacacta

SEQ ID NO: 5483690 - DNA, 25 bp, Homo sapien
ctcccgtgctccgtcgttgtgtggg

SEQ ID NO: 5483691 - DNA, 25 bp, Homo sapien
cccacacaacgacggagcacgggag

SEQ ID NO: 5483692 - DNA, 25 bp, Homo sapien
tccacactgtaggcacggctcttga

SEQ ID NO: 5483693 - DNA, 25 bp, Homo sapien
gtggcgtcgtcctgctcagcaaaca

SEQ ID NO: 5483694 - DNA, 25 bp, Homo sapien
cgacagctgactcaccgtggcgtcg

SEQ ID NO: 5483695 - DNA, 25 bp, Homo sapien
gagggccaccatgcgcatcttagca

SEQ ID NO: 5483696 - DNA, 25 bp, Homo sapien
ggcatgagcatgttgcaagccaccg

SEQ ID NO: 5483697 - DNA, 25 bp, Homo sapien
ggcgttgtccatccagctgaggcat

SEQ ID NO: 5483698 - DNA, 25 bp, Homo sapien
agcaaacacgttaaccagctgcacc

SEQ ID NO: 5483699 - DNA, 25 bp, Homo sapien
ttagcaatgatgagcacgtagcaca

SEQ ID NO: 5483700 - DNA, 25 bp, Homo sapien
ggcgtaatagtcaaccggctcctcc

SEQ ID NO: 5483701 - DNA, 25 bp, Homo sapien
ttgaagttgtctgagagaaagccat

SEQ ID NO: 5483702 - DNA, 25 bp, Homo sapien
accattaaggtgatcttgcgctccg

SEQ ID NO: 5483703 - DNA, 25 bp, Homo sapien
gtgacggccttggtgccctctgaca

SEQ ID NO: 5483704 - DNA, 25 bp, Homo sapien
ctggatctccctggaggtgatggtg

SEQ ID NO: 5483705 - DNA, 25 bp, Homo sapien
gtacacgtacacggaatagctctcc

SEQ ID NO: 5483706 - DNA, 25 bp, Homo sapien
agcccttttttggagcaggagcgga

SEQ ID NO: 5483707 - DNA, 25 bp, Homo sapien
tgcggctacgcttgcgcttcttacc

SEQ ID NO: 5483708 - DNA, 25 bp, Homo sapien
cctctgacacggcgtgcttagccag

SEQ ID NO: 5483709 - DNA, 25 bp, Homo sapien
tacttagagctggtgtacttggtga

SEQ ID NO: 5483710 - DNA, 25 bp, Homo sapien
gccagcgatgcgctcgaagatatcg

SEQ ID NO: 5483711 - DNA, 25 bp, Homo sapien
cgcttgttgtaatgcgccaggcggg

SEQ ID NO: 5483712 - DNA, 25 bp, Homo sapien
gatgcccatggccttggatgagatg

SEQ ID NO: 5483713 - DNA, 25 bp, Homo sapien
tatcgttgacgaaggagttcatgat

SEQ ID NO: 5483714 - DNA, 25 bp, Homo sapien
cttgcgtgcagtctgcttggtgcgg

SEQ ID NO: 5483715 - DNA, 25 bp, Homo sapien
gtccttgggcatgatagtcactcgc

SEQ ID NO: 5483716 - DNA, 25 bp, Homo sapien
ggcgctttgccaccggtggacttgc

SEQ ID NO: 5483717 - DNA, 25 bp, Homo sapien
tcgcaggcctcctgcagggccatca

SEQ ID NO: 5483718 - DNA, 25 bp, Homo sapien
gcggaactctgaaagcgcagatctg

SEQ ID NO: 5483719 - DNA, 25 bp, Homo sapien
caggttggtatcctcaaagagcccc

SEQ ID NO: 5483720 - DNA, 25 bp, Homo sapien
gccgccttagtggccagctgcttgc

SEQ ID NO: 5483721 - DNA, 25 bp, Homo sapien
cggatcagcagctcagtcgacttct

SEQ ID NO: 5483722 - DNA, 25 bp, Homo sapien
cgacttctgatagcggcgaatctcg

SEQ ID NO: 5483723 - DNA, 25 bp, Homo sapien
ccggcgcgcttttccgagccgcctt

SEQ ID NO: 5483724 - DNA, 25 bp, Homo sapien
gtcactcgcttagcatggatggcac

SEQ ID NO: 5483725 - DNA, 25 bp, Homo sapien
gcgatctcacgtaccagacgctgga

SEQ ID NO: 5483726 - DNA, 25 bp, Homo sapien
gaatcagtagctcagtcgatttctg

SEQ ID NO: 5483727 - DNA, 25 bp, Homo sapien
gtagctcagtcgatttctgatagcg

SEQ ID NO: 5483728 - DNA, 25 bp, Homo sapien
atttctgatagcggcggatttcacg

SEQ ID NO: 5483729 - DNA, 25 bp, Homo sapien
gctttgccgccagtggacttacgag

SEQ ID NO: 5483730 - DNA, 25 bp, Homo sapien
tggtagcttgcgaatcagtagctca

SEQ ID NO: 5483731 - DNA, 25 bp, Homo sapien
tggaatggtagcttgcgaatcagta

SEQ ID NO: 5483732 - DNA, 25 bp, Homo sapien
ctcacgtaccagacgctggaatggt

SEQ ID NO: 5483733 - DNA, 25 bp, Homo sapien
gaatggtagcttgcgaatcagtagc

SEQ ID NO: 5483734 - DNA, 25 bp, Homo sapien
ttatgccctctctccgcgaatgcgg

SEQ ID NO: 5483735 - DNA, 25 bp, Homo sapien
ctggaatggtagcttgcgaatcagt

SEQ ID NO: 5483736 - DNA, 25 bp, Homo sapien
ctctcgaagcctagaggattgaagg

SEQ ID NO: 5483737 - DNA, 25 bp, Homo sapien
gatgtgggagcatcgaatgttttgc

SEQ ID NO: 5483738 - DNA, 25 bp, Homo sapien
aagtatcatgagaggcacttcactc

SEQ ID NO: 5483739 - DNA, 25 bp, Homo sapien
ttcagcccatcctttgtagccacaa

SEQ ID NO: 5483740 - DNA, 25 bp, Homo sapien
catcaagtatcatgagaggcacttc

SEQ ID NO: 5483741 - DNA, 25 bp, Homo sapien
gggtcaacagaatgcttaaaggaga

SEQ ID NO: 5483742 - DNA, 25 bp, Homo sapien
aaaacatgatattgaaacttgagat

SEQ ID NO: 5483743 - DNA, 25 bp, Homo sapien
caaaactctcgaagcctagaggatt

SEQ ID NO: 5483744 - DNA, 25 bp, Homo sapien
caggtcaaaactctcgaagcctaga

SEQ ID NO: 5483745 - DNA, 25 bp, Homo sapien
ccagggtcaacagaatgcttaaagg

SEQ ID NO: 5483746 - DNA, 25 bp, Homo sapien
catccagggtcaacagaatgcttaa

SEQ ID NO: 5483747 - DNA, 25 bp, Homo sapien
ccttttttagggactggagcagatt

SEQ ID NO: 5483748 - DNA, 25 bp, Homo sapien
ggactggagcagatttgactggttc

SEQ ID NO: 5483749 - DNA, 25 bp, Homo sapien
cttgttaatggccttcttggagcct

SEQ ID NO: 5483750 - DNA, 25 bp, Homo sapien
ggcgtgacgcttctccggcgatacg

SEQ ID NO: 5483751 - DNA, 25 bp, Homo sapien
gccaattccccgggtagcagtaggc

SEQ ID NO: 5483752 - DNA, 25 bp, Homo sapien
cggctgcgtttgcgcttctttccat

SEQ ID NO: 5483753 - DNA, 25 bp, Homo sapien
ggagcagatttgactggttcaggca

SEQ ID NO: 5483754 - DNA, 25 bp, Homo sapien
ccggcgatacgctcaaagatgtcgt

SEQ ID NO: 5483755 - DNA, 25 bp, Homo sapien
cttctgagccttgttaatggccttc

SEQ ID NO: 5483756 - DNA, 25 bp, Homo sapien
gtctggatctccctcgaagtgatgg

SEQ ID NO: 5483757 - DNA, 25 bp, Homo sapien
gattcccatagccttggaagagatg

SEQ ID NO: 5483758 - DNA, 25 bp, Homo sapien
ttagactgaaaatgattgggctgag

SEQ ID NO: 5483759 - DNA, 25 bp, Homo sapien
tggcagatggtcacgtagtgatcat

SEQ ID NO: 5483760 - DNA, 25 bp, Homo sapien
ccacggggactcattagcatgttgt

SEQ ID NO: 5483761 - DNA, 25 bp, Homo sapien
acagagaaaatggtggatcacatta

SEQ ID NO: 5483762 - DNA, 25 bp, Homo sapien
agaaagtgaggtgaaaaaccatcat

SEQ ID NO: 5483763 - DNA, 25 bp, Homo sapien
tcagggctgtgacacacaccagcat

SEQ ID NO: 5483764 - DNA, 25 bp, Homo sapien
ccttgggtttgaggtagataaggga

SEQ ID NO: 5483765 - DNA, 25 bp, Homo sapien
ggatacacaagtggagaaagtcttg

SEQ ID NO: 5483766 - DNA, 25 bp, Homo sapien
ggaatcctcaagatggcagccacaa

SEQ ID NO: 5483767 - DNA, 25 bp, Homo sapien
atgatgaggaacaaacagcctatca

SEQ ID NO: 5483768 - DNA, 25 bp, Homo sapien
agcatgttgtaatgcagtgggtggc

SEQ ID NO: 5483769 - DNA, 25 bp, Homo sapien
tggtgccctccgacaccgcgtgttt

SEQ ID NO: 5483770 - DNA, 25 bp, Homo sapien
gcctcgcctgcaatgcgctcgaaaa

SEQ ID NO: 5483771 - DNA, 25 bp, Homo sapien
gtacacgtacacggaatagctctcc

SEQ ID NO: 5483772 - DNA, 25 bp, Homo sapien
ggtcaccgccttcttggagcccttc

SEQ ID NO: 5483773 - DNA, 25 bp, Homo sapien
gcttgttataatgcgccaggcggga

SEQ ID NO: 5483774 - DNA, 25 bp, Homo sapien
gggagctgacttagctggttcaggc

SEQ ID NO: 5483775 - DNA, 25 bp, Homo sapien
gtcgttgacgaaggagttcataatc

SEQ ID NO: 5483776 - DNA, 25 bp, Homo sapien
cgcacagccgtttggatctccctgg

SEQ ID NO: 5483777 - DNA, 25 bp, Homo sapien
agtgatggtcgagcgcttgttataa

SEQ ID NO: 5483778 - DNA, 25 bp, Homo sapien
ggggtggacctgcttcagcaccttg

SEQ ID NO: 5483779 - DNA, 25 bp, Homo sapien
aatccccatagccttggacgagatg

SEQ ID NO: 5483780 - DNA, 25 bp, Homo sapien
attcatgaagcttaggaactccgtc

SEQ ID NO: 5483781 - DNA, 25 bp, Homo sapien
ttctggaaaacagcaatcagggact

SEQ ID NO: 5483782 - DNA, 25 bp, Homo sapien
ccgctcagtctctgtagggctggag

SEQ ID NO: 5483783 - DNA, 25 bp, Homo sapien
ggttctttgtaaaggcagccagctc

SEQ ID NO: 5483784 - DNA, 25 bp, Homo sapien
ctgtagggctggagatttttgccat

SEQ ID NO: 5483785 - DNA, 25 bp, Homo sapien
cagggactcaatgcaccgctcagtc

SEQ ID NO: 5483786 - DNA, 25 bp, Homo sapien
ctaactgcccatcactgctgacatc

SEQ ID NO: 5483787 - DNA, 25 bp, Homo sapien
ttcttcatgtggtcaaggacaccgg

SEQ ID NO: 5483788 - DNA, 25 bp, Homo sapien
ctccgtcttggagagattgcggttg

SEQ ID NO: 5483789 - DNA, 25 bp, Homo sapien
ccacagctaggccaccaatcagatt

SEQ ID NO: 5483790 - DNA, 25 bp, Homo sapien
ggagagattgcggttgtaaccatcc

SEQ ID NO: 5483791 - DNA, 25 bp, Homo sapien
cggtgcacagctctgctccagacct

SEQ ID NO: 5483792 - DNA, 25 bp, Homo sapien
gctccagaccttcccagggcagtca

SEQ ID NO: 5483793 - DNA, 25 bp, Homo sapien
cagcacgccccacatgcttcggaga

SEQ ID NO: 5483794 - DNA, 25 bp, Homo sapien
gcagtcagcacgccccacatgcttc

SEQ ID NO: 5483795 - DNA, 25 bp, Homo sapien
gctctgctccagaccttcccagggc

SEQ ID NO: 5483796 - DNA, 25 bp, Homo sapien
gcagtcgacttccacagccggtgca

SEQ ID NO: 5483797 - DNA, 25 bp, Homo sapien
cacgccccacatgcttcggagaaac

SEQ ID NO: 5483798 - DNA, 25 bp, Homo sapien
acgccccacatgcttcggagaaacg

SEQ ID NO: 5483799 - DNA, 25 bp, Homo sapien
ccagaccttcccagggcagtcagca

SEQ ID NO: 5483800 - DNA, 25 bp, Homo sapien
gcacagctctgctccagaccttccc

SEQ ID NO: 5483801 - DNA, 25 bp, Homo sapien
agtcgacttccacagccggtgcaca

SEQ ID NO: 5483802 - DNA, 25 bp, Homo sapien
gatccccatggctttggaggagatg

SEQ ID NO: 5483803 - DNA, 25 bp, Homo sapien
tcgttgacaaaggaattcatgatcc

SEQ ID NO: 5483804 - DNA, 25 bp, Homo sapien
acggctgtctggatctccctggagg

SEQ ID NO: 5483805 - DNA, 25 bp, Homo sapien
tgtaaacgtatacggagtagctctc

SEQ ID NO: 5483806 - DNA, 25 bp, Homo sapien
ggggtggacttgcttcagcaccttg

SEQ ID NO: 5483807 - DNA, 25 bp, Homo sapien
ggtcaccgccttcttggagcccttc

SEQ ID NO: 5483808 - DNA, 25 bp, Homo sapien
gtgacggccttagtgccctcggaca

SEQ ID NO: 5483809 - DNA, 25 bp, Homo sapien
gagtagctctccttgcggctgcgtt

SEQ ID NO: 5483810 - DNA, 25 bp, Homo sapien
ggcgatgcgctcgaagatatcgttg

SEQ ID NO: 5483811 - DNA, 25 bp, Homo sapien
gaacgcttgttgtaatgagccaggc

SEQ ID NO: 5483812 - DNA, 25 bp, Homo sapien
gaggtaatggtcgaacgcttgttgt

SEQ ID NO: 5483813 - DNA, 25 bp, Homo sapien
agagctagtgtacttggtaactgcc

SEQ ID NO: 5483814 - DNA, 25 bp, Homo sapien
cgcttattgtagtgagccaggcgag

SEQ ID NO: 5483815 - DNA, 25 bp, Homo sapien
cttctgcgccttagtgatagccttc

SEQ ID NO: 5483816 - DNA, 25 bp, Homo sapien
acttggtaactgccttagtgccctc

SEQ ID NO: 5483817 - DNA, 25 bp, Homo sapien
agcgcttattgtagtgagccaggcg

SEQ ID NO: 5483818 - DNA, 25 bp, Homo sapien
cggctgcgcttacgcttcttaccat

SEQ ID NO: 5483819 - DNA, 25 bp, Homo sapien
agtgccctcggacacagcatgctta

SEQ ID NO: 5483820 - DNA, 25 bp, Homo sapien
cttagtgatagccttcttagaaccc

SEQ ID NO: 5483821 - DNA, 25 bp, Homo sapien
ccctcggacacagcatgcttagcca

SEQ ID NO: 5483822 - DNA, 25 bp, Homo sapien
atttagagctagtgtacttggtaac

SEQ ID NO: 5483823 - DNA, 25 bp, Homo sapien
cgcacagccgtctgaatctccctgg

SEQ ID NO: 5483824 - DNA, 25 bp, Homo sapien
tgccagcgctttcttgagagcggcc

SEQ ID NO: 5483825 - DNA, 25 bp, Homo sapien
gctgggctcttgggcgccttttttg

SEQ ID NO: 5483826 - DNA, 25 bp, Homo sapien
ggcccagacgctttgcgcttggccg

SEQ ID NO: 5483827 - DNA, 25 bp, Homo sapien
agctgcagccggcttcttcgccttc

SEQ ID NO: 5483828 - DNA, 25 bp, Homo sapien
gcggccaaagatacgccgctgcgct

SEQ ID NO: 5483829 - DNA, 25 bp, Homo sapien
aactgctttggccttcgctgggctc

SEQ ID NO: 5483830 - DNA, 25 bp, Homo sapien
ttttctccacgtcatagccagcggc

SEQ ID NO: 5483831 - DNA, 25 bp, Homo sapien
gctttagtaatgagctcggacaccg

SEQ ID NO: 5483832 - DNA, 25 bp, Homo sapien
gaggcggcaacagctttagtaatga

SEQ ID NO: 5483833 - DNA, 25 bp, Homo sapien
aggctcttgagacccagcttgatgc

SEQ ID NO: 5483834 - DNA, 25 bp, Homo sapien
ccttaggcttggcttccccagaggc

SEQ ID NO: 5483835 - DNA, 25 bp, Homo sapien
tggaagaccctccgataggagctcc

SEQ ID NO: 5483836 - DNA, 25 bp, Homo sapien
tgccctttgcctcggagggtgtgga

SEQ ID NO: 5483837 - DNA, 25 bp, Homo sapien
gcctgcattgcagaacacgatgagg

SEQ ID NO: 5483838 - DNA, 25 bp, Homo sapien
aaactgtggcacctggtggagttct

SEQ ID NO: 5483839 - DNA, 25 bp, Homo sapien
ctgtttctcaggctcccggagtctt

SEQ ID NO: 5483840 - DNA, 25 bp, Homo sapien
tcctgccagatgatgctgaaggagc

SEQ ID NO: 5483841 - DNA, 25 bp, Homo sapien
gagccctgatgatgcctgcattgca

SEQ ID NO: 5483842 - DNA, 25 bp, Homo sapien
ctgccctggagtagaaactgtggca

SEQ ID NO: 5483843 - DNA, 25 bp, Homo sapien
tgcagctccccagattctggaagat

SEQ ID NO: 5483844 - DNA, 25 bp, Homo sapien
ggcccgctgaagcttgggctgtttc

SEQ ID NO: 5483845 - DNA, 25 bp, Homo sapien
ggaagatgtgcatcaggactctggc

SEQ ID NO: 5483846 - DNA, 25 bp, Homo sapien
agctcctcgcccgaggttacggcac

SEQ ID NO: 5483847 - DNA, 25 bp, Homo sapien
gcccccgactgctgtcccgctacta

SEQ ID NO: 5483848 - DNA, 25 bp, Homo sapien
ccgtcaagttgagcatcactgccag

SEQ ID NO: 5483849 - DNA, 25 bp, Homo sapien
ccgagtataagctgtacgggtcctc

SEQ ID NO: 5483850 - DNA, 25 bp, Homo sapien
tggatttcatccacgggaaagggag

SEQ ID NO: 5483851 - DNA, 25 bp, Homo sapien
tctcctccggttctgctgcgtatgc

SEQ ID NO: 5483852 - DNA, 25 bp, Homo sapien
cctgttgggctcttccaggacccca

SEQ ID NO: 5483853 - DNA, 25 bp, Homo sapien
tgctgcgtatgcacctcctgcccac

SEQ ID NO: 5483854 - DNA, 25 bp, Homo sapien
gggagatgaaccctgttgggctctt

SEQ ID NO: 5483855 - DNA, 25 bp, Homo sapien
ttacggcacaatcctgctccggctc

SEQ ID NO: 5483856 - DNA, 25 bp, Homo sapien
gcgtgagctttggtggatttcatcc

SEQ ID NO: 5483857 - DNA, 25 bp, Homo sapien
catggatgccttcagtgtttgcccg

SEQ ID NO: 5483858 - DNA, 25 bp, Homo sapien
gagaaatgggactctggctcatcca

SEQ ID NO: 5483859 - DNA, 25 bp, Homo sapien
tagacttctctgtggaacagccacc

SEQ ID NO: 5483860 - DNA, 25 bp, Homo sapien
gtgctgcccattcttgagcctacac

SEQ ID NO: 5483861 - DNA, 25 bp, Homo sapien
gcacacagagtgcccacaatcttcc

SEQ ID NO: 5483862 - DNA, 25 bp, Homo sapien
tcagcaaagtagactgcactggaga

SEQ ID NO: 5483863 - DNA, 25 bp, Homo sapien
agatgagcaaccccaactcccgcat

SEQ ID NO: 5483864 - DNA, 25 bp, Homo sapien
ttattaagagagtctgtgctgccca

SEQ ID NO: 5483865 - DNA, 25 bp, Homo sapien
ggactagctctgtgatgagagttgc

SEQ ID NO: 5483866 - DNA, 25 bp, Homo sapien
ggtcgggcacatgtccccatagcct

SEQ ID NO: 5483867 - DNA, 25 bp, Homo sapien
gccatcaggaatgctagagaaatgg

SEQ ID NO: 5483868 - DNA, 25 bp, Homo sapien
tgccttcatttgactgactgttgtc

SEQ ID NO: 5483869 - DNA, 25 bp, Homo sapien
ctgaggctctgttactgcttagttc

SEQ ID NO: 5483870 - DNA, 25 bp, Homo sapien
aggagaggcctatgttgattgtatt

SEQ ID NO: 5483871 - DNA, 25 bp, Homo sapien
aaatttagatgtatgaggtttggac

SEQ ID NO: 5483872 - DNA, 25 bp, Homo sapien
aaaagttctttcacatcggagggcg

SEQ ID NO: 5483873 - DNA, 25 bp, Homo sapien
ccaatacttctaggcccactgaggc

SEQ ID NO: 5483874 - DNA, 25 bp, Homo sapien
tccaggaaaagttctttcacatcgg

SEQ ID NO: 5483875 - DNA, 25 bp, Homo sapien
tctaggcccactgaggctctgttac

SEQ ID NO: 5483876 - DNA, 25 bp, Homo sapien
tcatctgcgaggccttccaatttgc

SEQ ID NO: 5483877 - DNA, 25 bp, Homo sapien
aaattcatctgcgaggccttccaat

SEQ ID NO: 5483878 - DNA, 25 bp, Homo sapien
ctttggcaagtttgcaattgaggag

SEQ ID NO: 5483879 - DNA, 25 bp, Homo sapien
ggtgcgctcttgcgagccaccttgg

SEQ ID NO: 5483880 - DNA, 25 bp, Homo sapien
gatctcgcgcatcagccgctggaag

SEQ ID NO: 5483881 - DNA, 25 bp, Homo sapien
ccaggtaagactcgcacgcctcctg

SEQ ID NO: 5483882 - DNA, 25 bp, Homo sapien
ttaaagtcctgagcgatctcgcgca

SEQ ID NO: 5483883 - DNA, 25 bp, Homo sapien
gcatgatggtgacccgtttggcatg

SEQ ID NO: 5483884 - DNA, 25 bp, Homo sapien
cacccgttgacttgcgcgcagtctg

SEQ ID NO: 5483885 - DNA, 25 bp, Homo sapien
gatgtccttaggcatgatggtgacc

SEQ ID NO: 5483886 - DNA, 25 bp, Homo sapien
cggattagcagctcagtggacttct

SEQ ID NO: 5483887 - DNA, 25 bp, Homo sapien
gcggcgccttgccacccgttgactt

SEQ ID NO: 5483888 - DNA, 25 bp, Homo sapien
cctgagcgatctcgcgcatcagccg

SEQ ID NO: 5483889 - DNA, 25 bp, Homo sapien
gtgacccgtttggcatggatgacac

SEQ ID NO: 5483890 - DNA, 25 bp, Homo sapien
gagcagtttgcttagtgcgagccat

SEQ ID NO: 5483891 - DNA, 25 bp, Homo sapien
gcgcttttgcgggctgccttagtgg

SEQ ID NO: 5483892 - DNA, 25 bp, Homo sapien
gcgctggaaaggtagtttacgaata

SEQ ID NO: 5483893 - DNA, 25 bp, Homo sapien
tagtggccaactgtttgcgtggcgc

SEQ ID NO: 5483894 - DNA, 25 bp, Homo sapien
gccaccagtagacttccgagcagtt

SEQ ID NO: 5483895 - DNA, 25 bp, Homo sapien
gcgcacaggttagtgtcctcaaata

SEQ ID NO: 5483896 - DNA, 25 bp, Homo sapien
acgaataagcagttcagtggacttc

SEQ ID NO: 5483897 - DNA, 25 bp, Homo sapien
atctcgcgcactaggcgctggaaag

SEQ ID NO: 5483898 - DNA, 25 bp, Homo sapien
tgcgtggcgccttgccaccagtaga

SEQ ID NO: 5483899 - DNA, 25 bp, Homo sapien
gcagagccatcacagcggagctctg

SEQ ID NO: 5483900 - DNA, 25 bp, Homo sapien
gttttaaagtcctgcgcaatctcgc

SEQ ID NO: 5483901 - DNA, 25 bp, Homo sapien
gaacggcagcttccgaatcagcaac

SEQ ID NO: 5483902 - DNA, 25 bp, Homo sapien
ttccgaatcagcaactcggtcgact

SEQ ID NO: 5483903 - DNA, 25 bp, Homo sapien
cgtggcgctttaccgccggtggatt

SEQ ID NO: 5483904 - DNA, 25 bp, Homo sapien
taccaagtaggcctcacaagcctcc

SEQ ID NO: 5483905 - DNA, 25 bp, Homo sapien
gatggcgcaaaggtttgtgtcctca

SEQ ID NO: 5483906 - DNA, 25 bp, Homo sapien
gaagatcggtcttgaagtcttgggc

SEQ ID NO: 5483907 - DNA, 25 bp, Homo sapien
tgtctttgggcataatagtcactcg

SEQ ID NO: 5483908 - DNA, 25 bp, Homo sapien
agcaactcggtcgacttttggtagc

SEQ ID NO: 5483909 - DNA, 25 bp, Homo sapien
cgccggtggatttccgagctgtctg

SEQ ID NO: 5483910 - DNA, 25 bp, Homo sapien
cggtcttgaagtcttgggcgatttc

SEQ ID NO: 5483911 - DNA, 25 bp, Homo sapien
gagctgtctgtttagtacgagccat

SEQ ID NO: 5483912 - DNA, 25 bp, Homo sapien
cagctggatatctttgggcatgatg

SEQ ID NO: 5483913 - DNA, 25 bp, Homo sapien
cttacgggctgctttagtagcaagc

SEQ ID NO: 5483914 - DNA, 25 bp, Homo sapien
gcaggtcggttttgaagtcctgggc

SEQ ID NO: 5483915 - DNA, 25 bp, Homo sapien
tgccctttccccacggatgcgacgt

SEQ ID NO: 5483916 - DNA, 25 bp, Homo sapien
cacagattggtgtcttcgaagagtc

SEQ ID NO: 5483917 - DNA, 25 bp, Homo sapien
tgatggtgacgcgtttagcgtgaat

SEQ ID NO: 5483918 - DNA, 25 bp, Homo sapien
gcgacgtgccagctggatatctttg

SEQ ID NO: 5483919 - DNA, 25 bp, Homo sapien
tttagtagcaagctgcttgcgcgga

SEQ ID NO: 5483920 - DNA, 25 bp, Homo sapien
tagcgtgaatagcgcacagattggt

SEQ ID NO: 5483921 - DNA, 25 bp, Homo sapien
ggagcgctcttacgggctgctttag

SEQ ID NO: 5483922 - DNA, 25 bp, Homo sapien
tgtcttcgaagagtcccaccaggta

SEQ ID NO: 5483923 - DNA, 25 bp, Homo sapien
attcccatggccttagaggagatgc

SEQ ID NO: 5483924 - DNA, 25 bp, Homo sapien
gcgcttgcgcttcctgccgtccttc

SEQ ID NO: 5483925 - DNA, 25 bp, Homo sapien
gatggtcgagcgcttgttgtaatgc

SEQ ID NO: 5483926 - DNA, 25 bp, Homo sapien
tacttagcgctggtgtacttggtga

SEQ ID NO: 5483927 - DNA, 25 bp, Homo sapien
ggatctccctggaggtgatggtcga

SEQ ID NO: 5483928 - DNA, 25 bp, Homo sapien
gaagcctcacctgcgatgcgttcga

SEQ ID NO: 5483929 - DNA, 25 bp, Homo sapien
ttgacgaaggagttcatgattccca

SEQ ID NO: 5483930 - DNA, 25 bp, Homo sapien
atgcgttcgaagatgtcgttgacga

SEQ ID NO: 5483931 - DNA, 25 bp, Homo sapien
ggggtggacctgcttcagcaccttg

SEQ ID NO: 5483932 - DNA, 25 bp, Homo sapien
tgtacacgtatacggagtagctctc

SEQ ID NO: 5483933 - DNA, 25 bp, Homo sapien
agtagctctccttgcggctgcgctt

SEQ ID NO: 5483934 - DNA, 25 bp, Homo sapien
gagcgcgtagaccacatccatggcg

SEQ ID NO: 5483935 - DNA, 25 bp, Homo sapien
acatccatggcggtgaccgtcttgc

SEQ ID NO: 5483936 - DNA, 25 bp, Homo sapien
gaacaccttcagcaccccgcgagtc

SEQ ID NO: 5483937 - DNA, 25 bp, Homo sapien
gtcccggatcacgttctccaggaac

SEQ ID NO: 5483938 - DNA, 25 bp, Homo sapien
tacggtggcgcttagcgccgccttt

SEQ ID NO: 5483939 - DNA, 25 bp, Homo sapien
gcgcttggcgtgctctgtataggtc

SEQ ID NO: 5483940 - DNA, 25 bp, Homo sapien
ttggtgatgccctggatattgtcgc

SEQ ID NO: 5483941 - DNA, 25 bp, Homo sapien
tgtcgcgcagtactttacggtggcg

SEQ ID NO: 5483942 - DNA, 25 bp, Homo sapien
gcttcacgccgccgcggcgagcaag

SEQ ID NO: 5483943 - DNA, 25 bp, Homo sapien
tctcctcgtagatgaggccggagat

SEQ ID NO: 5483944 - DNA, 25 bp, Homo sapien
tcccgcctttgccgcggccagacat

SEQ ID NO: 5483945 - DNA, 25 bp, Homo sapien
gcccgtgccctcgacctgcgccacg

SEQ ID NO: 5483946 - DNA, 25 bp, Homo sapien
cgtggcgcaggtcgagggcacgggc

SEQ ID NO: 5483947 - DNA, 25 bp, Homo sapien
ccgcccgtgccctcgacctgcgcca

SEQ ID NO: 5483948 - DNA, 25 bp, Homo sapien
tggcgcaggtcgagggcacgggcgg

SEQ ID NO: 5483949 - DNA, 25 bp, Homo sapien
gggctccggaatgtcgatgccctgg

SEQ ID NO: 5483950 - DNA, 25 bp, Homo sapien
gctttcgtctgcctttttgcgggtc

SEQ ID NO: 5483951 - DNA, 25 bp, Homo sapien
cggtgctgcctcaactggcatgatc

SEQ ID NO: 5483952 - DNA, 25 bp, Homo sapien
gtgatggcagtccgctttcgtctgc

SEQ ID NO: 5483953 - DNA, 25 bp, Homo sapien
gccggtgctgcctcaactggcatga

SEQ ID NO: 5483954 - DNA, 25 bp, Homo sapien
gcctcaactggcatgatctctcatt

SEQ ID NO: 5483955 - DNA, 25 bp, Homo sapien
gagtatcattcgccttcccggtccc

SEQ ID NO: 5483956 - DNA, 25 bp, Homo sapien
gcattgcaccggatgcttgcctgcg

SEQ ID NO: 5483957 - DNA, 25 bp, Homo sapien
gggtcgaaaggagtatcattcgcct

SEQ ID NO: 5483958 - DNA, 25 bp, Homo sapien
ggctgcattgcaccggatgcttgcc

SEQ ID NO: 5483959 - DNA, 25 bp, Homo sapien
cattcgccttcccggtccctgggct

SEQ ID NO: 5483960 - DNA, 25 bp, Homo sapien
tggtgaggattcatctcggtctgcc

SEQ ID NO: 5483961 - DNA, 25 bp, Homo sapien
cagcatatggtgaggattcatctcg

SEQ ID NO: 5483962 - DNA, 25 bp, Homo sapien
tgcctttaccttcatcccaccagtc

SEQ ID NO: 5483963 - DNA, 25 bp, Homo sapien
caaaagtgtcattgaaggatgcaaa

SEQ ID NO: 5483964 - DNA, 25 bp, Homo sapien
aagatcagtgacatggacaaaagtg

SEQ ID NO: 5483965 - DNA, 25 bp, Homo sapien
ctccttcagccacctgaggtccgag

SEQ ID NO: 5483966 - DNA, 25 bp, Homo sapien
ttcagccacctgaggtccgaggctg

SEQ ID NO: 5483967 - DNA, 25 bp, Homo sapien
gtccgaggctgatgacctgttcttc

SEQ ID NO: 5483968 - DNA, 25 bp, Homo sapien
ggacaaaagtgtcattgaaggatgc

SEQ ID NO: 5483969 - DNA, 25 bp, Homo sapien
tcatcccaccagtcacacggcagat

SEQ ID NO: 5483970 - DNA, 25 bp, Homo sapien
tgccagaaagatcagtgacatggac

SEQ ID NO: 5483971 - DNA, 25 bp, Homo sapien
accccccttcctgcgagtgctgtca

SEQ ID NO: 5483972 - DNA, 25 bp, Homo sapien
cagatggtttccttgccagaaagat

SEQ ID NO: 5483973 - DNA, 25 bp, Homo sapien
gggcggtgatacccagctccttgca

SEQ ID NO: 5483974 - DNA, 25 bp, Homo sapien
tgcacgtcgtctccagactccacac

SEQ ID NO: 5483975 - DNA, 25 bp, Homo sapien
cggcagatggtttccttgccagaaa

SEQ ID NO: 5483976 - DNA, 25 bp, Homo sapien
gcgaccccccttcctgcgagtgctg

SEQ ID NO: 5483977 - DNA, 25 bp, Homo sapien
tccagactccacaccgggtggaatg

SEQ ID NO: 5483978 - DNA, 25 bp, Homo sapien
gactccacaccgggtggaatgaaac

SEQ ID NO: 5483979 - DNA, 25 bp, Homo sapien
ctccacaccgggtggaatgaaactt

SEQ ID NO: 5483980 - DNA, 25 bp, Homo sapien
cccttcctgcgagtgctgtcagagg

SEQ ID NO: 5483981 - DNA, 25 bp, Homo sapien
ggatgggggtgacatcctcaatccg

SEQ ID NO: 5483982 - DNA, 25 bp, Homo sapien
cgggagcaccggactccactagcag

SEQ ID NO: 5483983 - DNA, 25 bp, Homo sapien
ctgctagtggagtccggtgctcccg

SEQ ID NO: 5483984 - DNA, 25 bp, Homo sapien
ggactccactagcagggacaccgag

SEQ ID NO: 5483985 - DNA, 25 bp, Homo sapien
ctcggtgtccctgctagtggagtcc

SEQ ID NO: 5483986 - DNA, 25 bp, Homo sapien
agcccggacaaatcttgggtctcga

SEQ ID NO: 5483987 - DNA, 25 bp, Homo sapien
tcgagacccaagatttgtccgggct

SEQ ID NO: 5483988 - DNA, 25 bp, Homo sapien
accggagtcctatccaggtctctct

SEQ ID NO: 5483989 - DNA, 25 bp, Homo sapien
agagagacctggataggactccggt

SEQ ID NO: 5483990 - DNA, 25 bp, Homo sapien
aacctatcttttcctcatatataat

SEQ ID NO: 5483991 - DNA, 25 bp, Homo sapien
attatatatgaggaaaagataggtt

SEQ ID NO: 5483992 - DNA, 25 bp, Homo sapien
aaacctatcttttcctcatatataa

SEQ ID NO: 5483993 - DNA, 25 bp, Homo sapien
ttatatatgaggaaaagataggttt

SEQ ID NO: 5483994 - DNA, 25 bp, Homo sapien
agggttgtcctattatctctggaac

SEQ ID NO: 5483995 - DNA, 25 bp, Homo sapien
gttccagagataataggacaaccct

SEQ ID NO: 5483996 - DNA, 25 bp, Homo sapien
aggtcagggtggttttcagaacaag

SEQ ID NO: 5483997 - DNA, 25 bp, Homo sapien
cttgttctgaaaaccaccctgacct

SEQ ID NO: 5483998 - DNA, 25 bp, Homo sapien
gaagccgagcggaaagtcgggcgcg

SEQ ID NO: 5483999 - DNA, 25 bp, Homo sapien
cgcgcccgactttccgctcggcttc

SEQ ID NO: 5484000 - DNA, 25 bp, Homo sapien
gtccggaccgctgtaccactaaaaa

SEQ ID NO: 5484001 - DNA, 25 bp, Homo sapien
tttttagtggtacagcggtccggac

SEQ ID NO: 5484002 - DNA, 25 bp, Homo sapien
tgagatctttcacagactaccacaa

SEQ ID NO: 5484003 - DNA, 25 bp, Homo sapien
ttgtggtagtctgtgaaagatctca

SEQ ID NO: 5484004 - DNA, 25 bp, Homo sapien
gtaaagggacatattatatattaat

SEQ ID NO: 5484005 - DNA, 25 bp, Homo sapien
attaatatataatatgtccctttac

SEQ ID NO: 5484006 - DNA, 25 bp, Homo sapien
cggaggtcaactggtgtaagtacat

SEQ ID NO: 5484007 - DNA, 25 bp, Homo sapien
atgtacttacaccagttgacctccg

SEQ ID NO: 5484008 - DNA, 25 bp, Homo sapien
catccgaaaatcgatgttacatatt

SEQ ID NO: 5484009 - DNA, 25 bp, Homo sapien
aatatgtaacatcgattttcggatg

SEQ ID NO: 5484010 - DNA, 25 bp, Homo sapien
cgccgcactggcatcggaggagaca

SEQ ID NO: 5484011 - DNA, 25 bp, Homo sapien
tgtctcctccgatgccagtgcggcg

SEQ ID NO: 5484012 - DNA, 25 bp, Homo sapien
agtgtaagcgtgtctcaggacgtcg

SEQ ID NO: 5484013 - DNA, 25 bp, Homo sapien
cgacgtcctgagacacgcttacact

SEQ ID NO: 5484014 - DNA, 25 bp, Homo sapien
gaaaggctgctaaggatgtcttcaa

SEQ ID NO: 5484015 - DNA, 25 bp, Homo sapien
cagaaatggaacacagacaatactc

SEQ ID NO: 5484016 - DNA, 25 bp, Homo sapien
gggtggcttgctggctatcagatga

SEQ ID NO: 5484017 - DNA, 25 bp, Homo sapien
ccaacgtactgtgacctaggaaagg

SEQ ID NO: 5484018 - DNA, 25 bp, Homo sapien
aaggatatggctttggcatggtcaa

SEQ ID NO: 5484019 - DNA, 25 bp, Homo sapien
cttacactgatacagggaaagcatc

SEQ ID NO: 5484020 - DNA, 25 bp, Homo sapien
ttcataagagcctgagagagatttt

SEQ ID NO: 5484021 - DNA, 25 bp, Homo sapien
gctgaagggttgaaactgactcttg

SEQ ID NO: 5484022 - DNA, 25 bp, Homo sapien
ggaaagcatcaggcaacctagaaac

SEQ ID NO: 5484023 - DNA, 25 bp, Homo sapien
ctagggacagaaatctcttgggaga

SEQ ID NO: 5484024 - DNA, 25 bp, Homo sapien
tttgtaccgaacacaggaaagaaga

SEQ ID NO: 5484025 - DNA, 25 bp, Homo sapien
atgtaatatgacaattgggggtggg

SEQ ID NO: 5484026 - DNA, 25 bp, Homo sapien
aaagacctgtcttcacaacacttgc

SEQ ID NO: 5484027 - DNA, 25 bp, Homo sapien
ccttttcaatagactgccctggctc

SEQ ID NO: 5484028 - DNA, 25 bp, Homo sapien
caacacttgcattgtagagaaaggc

SEQ ID NO: 5484029 - DNA, 25 bp, Homo sapien
ttgaaatagcccataaagacctgtc

SEQ ID NO: 5484030 - DNA, 25 bp, Homo sapien
cacttgcattgtagagaaaggcttc

SEQ ID NO: 5484031 - DNA, 25 bp, Homo sapien
ggcatcctaaccatgtaatatgaca

SEQ ID NO: 5484032 - DNA, 25 bp, Homo sapien
tggggttgaaatagcccataaagac

SEQ ID NO: 5484033 - DNA, 25 bp, Homo sapien
actgtctgtctcctggcatcctaac

SEQ ID NO: 5484034 - DNA, 25 bp, Homo sapien
cctggctctttcctaggccttccac

SEQ ID NO: 5484035 - DNA, 25 bp, Homo sapien
ttgtagagaaaggcttcttatatcc

SEQ ID NO: 5484036 - DNA, 25 bp, Homo sapien
ctggatacgttaaccactccggtgt

SEQ ID NO: 5484037 - DNA, 25 bp, Homo sapien
acaccggagtggttaacgtatccag

SEQ ID NO: 5484038 - DNA, 25 bp, Homo sapien
aggtctcatccgtccaccctgcatc

SEQ ID NO: 5484039 - DNA, 25 bp, Homo sapien
gatgcagggtggacggatgagacct

SEQ ID NO: 5484040 - DNA, 25 bp, Homo sapien
tttgtataaacggatgaagaagtta

SEQ ID NO: 5484041 - DNA, 25 bp, Homo sapien
taacttcttcatccgtttatacaaa

SEQ ID NO: 5484042 - DNA, 25 bp, Homo sapien
attttcacgttgatccagaactagg

SEQ ID NO: 5484043 - DNA, 25 bp, Homo sapien
cctagttctggatcaacgtgaaaat

SEQ ID NO: 5484044 - DNA, 25 bp, Homo sapien
gaccggcacacgttcgtgcccccgc

SEQ ID NO: 5484045 - DNA, 25 bp, Homo sapien
gcgggggcacgaacgtgtgccggtc

SEQ ID NO: 5484046 - DNA, 25 bp, Homo sapien
cgaccggcacacgttcgtgcccccg

SEQ ID NO: 5484047 - DNA, 25 bp, Homo sapien
cgggggcacgaacgtgtgccggtcg

SEQ ID NO: 5484048 - DNA, 25 bp, Homo sapien
agctgtatacagaaacgtaggtcat

SEQ ID NO: 5484049 - DNA, 25 bp, Homo sapien
tgaatggaagcagtacttaactcgc

SEQ ID NO: 5484050 - DNA, 25 bp, Homo sapien
cgcagagcctcagtgcacacacttc

SEQ ID NO: 5484051 - DNA, 25 bp, Homo sapien
cactctgcaggtttatatggactac

SEQ ID NO: 5484052 - DNA, 25 bp, Homo sapien
atcatatcctgtagtgtagtgaaag

SEQ ID NO: 5484053 - DNA, 25 bp, Homo sapien
gtacttaactcgcagggctaccagg

SEQ ID NO: 5484054 - DNA, 25 bp, Homo sapien
cagcgtaaacaatgaatggaagcag

SEQ ID NO: 5484055 - DNA, 25 bp, Homo sapien
taacagtatcgagcactctggaaaa

SEQ ID NO: 5484056 - DNA, 25 bp, Homo sapien
tatggactacatggagatcatatcc

SEQ ID NO: 5484057 - DNA, 25 bp, Homo sapien
tttcagccctaatggagatgtaatt

SEQ ID NO: 5484058 - DNA, 25 bp, Homo sapien
aacatcaaaagcaacacagctgtat

SEQ ID NO: 5484059 - DNA, 25 bp, Homo sapien
gaaatcggtgcagggatcggtcttt

SEQ ID NO: 5484060 - DNA, 25 bp, Homo sapien
aaagaccgatccctgcaccgatttc

SEQ ID NO: 5484061 - DNA, 25 bp, Homo sapien
acatgtcgaggttgtgggtataact

SEQ ID NO: 5484062 - DNA, 25 bp, Homo sapien
agttatacccacaacctcgacatgt

SEQ ID NO: 5484063 - DNA, 25 bp, Homo sapien
gaggcggagcacctcgtcccactcc

SEQ ID NO: 5484064 - DNA, 25 bp, Homo sapien
ggagtgggacgaggtgctccgcctc

SEQ ID NO: 5484065 - DNA, 25 bp, Homo sapien
caacttctaaacattcaaactttgt

SEQ ID NO: 5484066 - DNA, 25 bp, Homo sapien
acaaagtttgaatgtttagaagttg

SEQ ID NO: 5484067 - DNA, 25 bp, Homo sapien
ataccataataagttaagcagaaat

SEQ ID NO: 5484068 - DNA, 25 bp, Homo sapien
atttctgcttaacttattatggtat

SEQ ID NO: 5484069 - DNA, 25 bp, Homo sapien
aaacgtcctctgcgtgcaccttgcc

SEQ ID NO: 5484070 - DNA, 25 bp, Homo sapien
cagcatctctgaccaagtgtgtgtg

SEQ ID NO: 5484071 - DNA, 25 bp, Homo sapien
cagagttcatgatcctaagactttc

SEQ ID NO: 5484072 - DNA, 25 bp, Homo sapien
taatatgggtaactagctggaaact

SEQ ID NO: 5484073 - DNA, 25 bp, Homo sapien
atacgtagtgtacggacagcatgac

SEQ ID NO: 5484074 - DNA, 25 bp, Homo sapien
gacagcatgacgggccttgctttct

SEQ ID NO: 5484075 - DNA, 25 bp, Homo sapien
tacgtacatgcttcatcccagactc

SEQ ID NO: 5484076 - DNA, 25 bp, Homo sapien
gctggaaactgtacagttcgcatcc

SEQ ID NO: 5484077 - DNA, 25 bp, Homo sapien
ctgagtggggcttgtttgtttctct

SEQ ID NO: 5484078 - DNA, 25 bp, Homo sapien
caacaaaacgtactggaatgatatc

SEQ ID NO: 5484079 - DNA, 25 bp, Homo sapien
agtgtgtttaaaggaaccacaaagc

SEQ ID NO: 5484080 - DNA, 25 bp, Homo sapien
aggaggacgagatcgaggacaagga

SEQ ID NO: 5484081 - DNA, 25 bp, Homo sapien
tccttgtcctcgatctcgtcctcct

SEQ ID NO: 5484082 - DNA, 25 bp, Homo sapien
cgccccgccctagggctggtccgtc

SEQ ID NO: 5484083 - DNA, 25 bp, Homo sapien
gacggaccagccctagggcggggcg

SEQ ID NO: 5484084 - DNA, 25 bp, Homo sapien
gccttcggcggtccgtctgtgagcc

SEQ ID NO: 5484085 - DNA, 25 bp, Homo sapien
ggctcacagacggaccgccgaaggc

SEQ ID NO: 5484086 - DNA, 25 bp, Homo sapien
atagaaggaattgtgggagagtaat

SEQ ID NO: 5484087 - DNA, 25 bp, Homo sapien
attactctcccacaattccttctat

SEQ ID NO: 5484088 - DNA, 25 bp, Homo sapien
attgtcgttacgtagcttcccgaaa

SEQ ID NO: 5484089 - DNA, 25 bp, Homo sapien
tttcgggaagctacgtaacgacaat

SEQ ID NO: 5484090 - DNA, 25 bp, Homo sapien
aacgtcaagactacaacttcctgta

SEQ ID NO: 5484091 - DNA, 25 bp, Homo sapien
tacaggaagttgtagtcttgacgtt

SEQ ID NO: 5484092 - DNA, 25 bp, Homo sapien
aatacacttgagaaggtaccggaaa

SEQ ID NO: 5484093 - DNA, 25 bp, Homo sapien
tttccggtaccttctcaagtgtatt

SEQ ID NO: 5484094 - DNA, 25 bp, Homo sapien
tagtctcaggggtccgcgaccacct

SEQ ID NO: 5484095 - DNA, 25 bp, Homo sapien
aggtggtcgcggacccctgagacta

SEQ ID NO: 5484096 - DNA, 25 bp, Homo sapien
tgtcgccaccgcctgtgtcgccctg

SEQ ID NO: 5484097 - DNA, 25 bp, Homo sapien
cagggcgacacaggcggtggcgaca

SEQ ID NO: 5484098 - DNA, 25 bp, Homo sapien
cctctcggcctacggtgtcccacag

SEQ ID NO: 5484099 - DNA, 25 bp, Homo sapien
ctgtgggacaccgtaggccgagagg

SEQ ID NO: 5484100 - DNA, 25 bp, Homo sapien
acctctcggcctacggtgtcccaca

SEQ ID NO: 5484101 - DNA, 25 bp, Homo sapien
tgtgggacaccgtaggccgagaggt

SEQ ID NO: 5484102 - DNA, 25 bp, Homo sapien
accttaagtagaaccgacctcactc

SEQ ID NO: 5484103 - DNA, 25 bp, Homo sapien
gagtgaggtcggttctacttaaggt

SEQ ID NO: 5484104 - DNA, 25 bp, Homo sapien
gacagcgcagggaccctgacgaaga

SEQ ID NO: 5484105 - DNA, 25 bp, Homo sapien
tcttcgtcagggtccctgcgctgtc

SEQ ID NO: 5484106 - DNA, 25 bp, Homo sapien
agtgcacaggttgatcggataaaaa

SEQ ID NO: 5484107 - DNA, 25 bp, Homo sapien
aagaagggtcttcggcccatacaga

SEQ ID NO: 5484108 - DNA, 25 bp, Homo sapien
aaaaagaacatgtgtaacaaggagc

SEQ ID NO: 5484109 - DNA, 25 bp, Homo sapien
cagcagctcgcagcatgctcaacat

SEQ ID NO: 5484110 - DNA, 25 bp, Homo sapien
gtctctacgcgaggaattaaggaag

SEQ ID NO: 5484111 - DNA, 25 bp, Homo sapien
ccacggcacctgagaccgtctctac

SEQ ID NO: 5484112 - DNA, 25 bp, Homo sapien
taaagctacacgctatggagcacac

SEQ ID NO: 5484113 - DNA, 25 bp, Homo sapien
gcgtggatacacttagctgagctcc

SEQ ID NO: 5484114 - DNA, 25 bp, Homo sapien
ctgggtcaaagcactcatctccgag

SEQ ID NO: 5484115 - DNA, 25 bp, Homo sapien
ggctgctgaaccacagcgtggatac

SEQ ID NO: 5484116 - DNA, 25 bp, Homo sapien
tgacaccagacaaacacggtgggag

SEQ ID NO: 5484117 - DNA, 25 bp, Homo sapien
tagtcgacctccacctcccccaagt

SEQ ID NO: 5484118 - DNA, 25 bp, Homo sapien
acttgggggaggtggaggtcgacta

SEQ ID NO: 5484119 - DNA, 25 bp, Homo sapien
ccttcagtcttgtctggtcagagag

SEQ ID NO: 5484120 - DNA, 25 bp, Homo sapien
ctctctgaccagacaagactgaagg

SEQ ID NO: 5484121 - DNA, 25 bp, Homo sapien
gacgacgaccactcgaggaccagag

SEQ ID NO: 5484122 - DNA, 25 bp, Homo sapien
ctctggtcctcgagtggtcgtcgtc

SEQ ID NO: 5484123 - DNA, 25 bp, Homo sapien
tcccctcgttctctccgcctgatct

SEQ ID NO: 5484124 - DNA, 25 bp, Homo sapien
agatcaggcggagagaacgagggga

SEQ ID NO: 5484125 - DNA, 25 bp, Homo sapien
gccccacgaggtgtctccctggtgg

SEQ ID NO: 5484126 - DNA, 25 bp, Homo sapien
aaacatgtcctcggctggccagtcg

SEQ ID NO: 5484127 - DNA, 25 bp, Homo sapien
gtgggatggtcaaacatgtcctcgg

SEQ ID NO: 5484128 - DNA, 25 bp, Homo sapien
tttttcctccatgacgggctcgcag

SEQ ID NO: 5484129 - DNA, 25 bp, Homo sapien
aggaaaaaagttggcatcttgttac

SEQ ID NO: 5484130 - DNA, 25 bp, Homo sapien
aaggtcagagagggactcctctgac

SEQ ID NO: 5484131 - DNA, 25 bp, Homo sapien
aaatacagctccggaagcccttctc

SEQ ID NO: 5484132 - DNA, 25 bp, Homo sapien
tccctggtggactgtcccattctcc

SEQ ID NO: 5484133 - DNA, 25 bp, Homo sapien
acatgagagcttgggatcctccaat

SEQ ID NO: 5484134 - DNA, 25 bp, Homo sapien
tgtcactggtgacaataagggcaac

SEQ ID NO: 5484135 - DNA, 25 bp, Homo sapien
gatcctccaatggtcgggagggaga

SEQ ID NO: 5484136 - DNA, 25 bp, Homo sapien
gtcgacgtcagttccgggttataac

SEQ ID NO: 5484137 - DNA, 25 bp, Homo sapien
gttataacccggaactgacgtcgac

SEQ ID NO: 5484138 - DNA, 25 bp, Homo sapien
cctctctctttatgatgtgacgatc

SEQ ID NO: 5484139 - DNA, 25 bp, Homo sapien
gatcgtcacatcataaagagagagg

SEQ ID NO: 5484140 - DNA, 25 bp, Homo sapien
cgcagaaatgattccaaaacccagg

SEQ ID NO: 5484141 - DNA, 25 bp, Homo sapien
tctactccttccaccggggcaacag

SEQ ID NO: 5484142 - DNA, 25 bp, Homo sapien
gggtttcacggtcgcagccatcttg

SEQ ID NO: 5484143 - DNA, 25 bp, Homo sapien
ctggccctaccgtgggacttactcc

SEQ ID NO: 5484144 - DNA, 25 bp, Homo sapien
ggagcaaccactggccctaccgtgg

SEQ ID NO: 5484145 - DNA, 25 bp, Homo sapien
tctcctttgagaggcccatgtgtcg

SEQ ID NO: 5484146 - DNA, 25 bp, Homo sapien
ccgccctcacctacggcctctactc

SEQ ID NO: 5484147 - DNA, 25 bp, Homo sapien
ccctaagcccagggtctggccttga

SEQ ID NO: 5484148 - DNA, 25 bp, Homo sapien
tggccttgaaagctccgcagaaatg

SEQ ID NO: 5484149 - DNA, 25 bp, Homo sapien
gctctcagctcatgatgcgcacccg

SEQ ID NO: 5484150 - DNA, 25 bp, Homo sapien
tcgcagccatcttgctgggtctggc

SEQ ID NO: 5484151 - DNA, 25 bp, Homo sapien
cgttgggtgggtgggtacagcggga

SEQ ID NO: 5484152 - DNA, 25 bp, Homo sapien
tcccgctgtacccacccacccaacg

SEQ ID NO: 5484153 - DNA, 25 bp, Homo sapien
tactgtaccaggaactcaggtggtc

SEQ ID NO: 5484154 - DNA, 25 bp, Homo sapien
gaccacctgagttcctggtacagta

SEQ ID NO: 5484155 - DNA, 25 bp, Homo sapien
atgagacccaatacacaaacggtct

SEQ ID NO: 5484156 - DNA, 25 bp, Homo sapien
agaccgtttgtgtattgggtctcat

SEQ ID NO: 5484157 - DNA, 25 bp, Homo sapien
gtcccatcgccctccactcgggttt

SEQ ID NO: 5484158 - DNA, 25 bp, Homo sapien
aaacccgagtggagggcgatgggac

SEQ ID NO: 5484159 - DNA, 25 bp, Homo sapien
gataccacatcggaagtgattttct

SEQ ID NO: 5484160 - DNA, 25 bp, Homo sapien
agagatacctggagcgacggctgct

SEQ ID NO: 5484161 - DNA, 25 bp, Homo sapien
aggagacaataccctcattcacggg

SEQ ID NO: 5484162 - DNA, 25 bp, Homo sapien
gtgaggccacagtcattgaggccct

SEQ ID NO: 5484163 - DNA, 25 bp, Homo sapien
cacggggaggagcccaaaccactga

SEQ ID NO: 5484164 - DNA, 25 bp, Homo sapien
cttccgtctcctccagtggagggag

SEQ ID NO: 5484165 - DNA, 25 bp, Homo sapien
agtcctgaggaggagcgccagttgc

SEQ ID NO: 5484166 - DNA, 25 bp, Homo sapien
cacagccaaggctggactgggttgg

SEQ ID NO: 5484167 - DNA, 25 bp, Homo sapien
ggtgtttagtggataccacatcgga

SEQ ID NO: 5484168 - DNA, 25 bp, Homo sapien
ggagcgacggctgctgaaagaggct

SEQ ID NO: 5484169 - DNA, 25 bp, Homo sapien
ggttggctgcagtgtggtgtttagt

SEQ ID NO: 5484170 - DNA, 25 bp, Homo sapien
agcctctttcagcagccgtcgctcc

SEQ ID NO: 5484171 - DNA, 25 bp, Homo sapien
ccaacccagtccagccttggctgtg

SEQ ID NO: 5484172 - DNA, 25 bp, Homo sapien
agggcctcaatgactgtggcctcac

SEQ ID NO: 5484173 - DNA, 25 bp, Homo sapien
agcagccgtcgctccaggtatctct

SEQ ID NO: 5484174 - DNA, 25 bp, Homo sapien
tcagtggtttgggctcctccccgtg

SEQ ID NO: 5484175 - DNA, 25 bp, Homo sapien
tccgatgtggtatccactaaacacc

SEQ ID NO: 5484176 - DNA, 25 bp, Homo sapien
gcaactggcgctcctcctcaggact

SEQ ID NO: 5484177 - DNA, 25 bp, Homo sapien
actaaacaccacactgcagccaacc

SEQ ID NO: 5484178 - DNA, 25 bp, Homo sapien
agaaaatcacttccgatgtggtatc

SEQ ID NO: 5484179 - DNA, 25 bp, Homo sapien
ctccctccactggaggagacggaag

SEQ ID NO: 5484180 - DNA, 25 bp, Homo sapien
cccgtgaatgagggtattgtctcct

SEQ ID NO: 5484181 - DNA, 25 bp, Homo sapien
ggagattttccgagtccctttagta

SEQ ID NO: 5484182 - DNA, 25 bp, Homo sapien
tactaaagggactcggaaaatctcc

SEQ ID NO: 5484183 - DNA, 25 bp, Homo sapien
gtcagagatgagggccgcctacgag

SEQ ID NO: 5484184 - DNA, 25 bp, Homo sapien
ggctggagccgagagaacgcatgga

SEQ ID NO: 5484185 - DNA, 25 bp, Homo sapien
tggaccccggtcatcaaggatgtaa

SEQ ID NO: 5484186 - DNA, 25 bp, Homo sapien
gcttcggtcactggcacaagaacaa

SEQ ID NO: 5484187 - DNA, 25 bp, Homo sapien
cctcatccgtaacctggagcagctg

SEQ ID NO: 5484188 - DNA, 25 bp, Homo sapien
gaccagggccaccgagggaagtggg

SEQ ID NO: 5484189 - DNA, 25 bp, Homo sapien
ccggctcatcgtgtatgtcatgggc

SEQ ID NO: 5484190 - DNA, 25 bp, Homo sapien
tggaggaccggctggacaggaacct

SEQ ID NO: 5484191 - DNA, 25 bp, Homo sapien
agctgatccagcatgccaatgtaca

SEQ ID NO: 5484192 - DNA, 25 bp, Homo sapien
gtcatgggcggtgtggccatgtcag

SEQ ID NO: 5484193 - DNA, 25 bp, Homo sapien
ggatgacctgaaggcactggacaag

SEQ ID NO: 5484194 - DNA, 25 bp, Homo sapien
cagctgctccaggttacggatgagg

SEQ ID NO: 5484195 - DNA, 25 bp, Homo sapien
ttacatccttgatgaccggggtcca

SEQ ID NO: 5484196 - DNA, 25 bp, Homo sapien
cttgtccagtgccttcaggtcatcc

SEQ ID NO: 5484197 - DNA, 25 bp, Homo sapien
tgtacattggcatgctggatcagct

SEQ ID NO: 5484198 - DNA, 25 bp, Homo sapien
ttgttcttgtgccagtgaccgaagc

SEQ ID NO: 5484199 - DNA, 25 bp, Homo sapien
ctcgtaggcggccctcatctctgac

SEQ ID NO: 5484200 - DNA, 25 bp, Homo sapien
aggttcctgtccagccggtcctcca

SEQ ID NO: 5484201 - DNA, 25 bp, Homo sapien
ctgacatggccacaccgcccatgac

SEQ ID NO: 5484202 - DNA, 25 bp, Homo sapien
tccatgcgttctctcggctccagcc

SEQ ID NO: 5484203 - DNA, 25 bp, Homo sapien
cccacttccctcggtggccctggtc

SEQ ID NO: 5484204 - DNA, 25 bp, Homo sapien
gcccatgacatacacgatgagccgg

SEQ ID NO: 5484205 - DNA, 25 bp, Homo sapien
acaccagtacaaatagtatatccaa

SEQ ID NO: 5484206 - DNA, 25 bp, Homo sapien
ttggatatactatttgtactggtgt

SEQ ID NO: 5484207 - DNA, 25 bp, Homo sapien
cattttatagggacgagattcatca

SEQ ID NO: 5484208 - DNA, 25 bp, Homo sapien
tgatgaatctcgtccctataaaatg

SEQ ID NO: 5484209 - DNA, 25 bp, Homo sapien
ttgcggtgtttggagaggtcaaaac

SEQ ID NO: 5484210 - DNA, 25 bp, Homo sapien
gttttgacctctccaaacaccgcaa

SEQ ID NO: 5484211 - DNA, 25 bp, Homo sapien
tttgtacatctatgtggttttaaaa

SEQ ID NO: 5484212 - DNA, 25 bp, Homo sapien
ttttaaaaccacatagatgtacaaa

SEQ ID NO: 5484213 - DNA, 25 bp, Homo sapien
acgtttaaacaggactaagacataa

SEQ ID NO: 5484214 - DNA, 25 bp, Homo sapien
ttatgtcttagtcctgtttaaacgt

SEQ ID NO: 5484215 - DNA, 25 bp, Homo sapien
ccacgaggcacctcgaagtggaagg

SEQ ID NO: 5484216 - DNA, 25 bp, Homo sapien
ccttccacttcgaggtgcctcgtgg

SEQ ID NO: 5484217 - DNA, 25 bp, Homo sapien
aggtaagagtcaaagtcaacattga

SEQ ID NO: 5484218 - DNA, 25 bp, Homo sapien
tcaatgttgactttgactcttacct

SEQ ID NO: 5484219 - DNA, 25 bp, Homo sapien
gctgacggccatctccatgagtgcc

SEQ ID NO: 5484220 - DNA, 25 bp, Homo sapien
ttgactactatgacaggaacctggc

SEQ ID NO: 5484221 - DNA, 25 bp, Homo sapien
tgcctgcagaatatctttggggtta

SEQ ID NO: 5484222 - DNA, 25 bp, Homo sapien
aggaacctggcactgtttgaggaag

SEQ ID NO: 5484223 - DNA, 25 bp, Homo sapien
ctgggaaagctcgtcagctacacca

SEQ ID NO: 5484224 - DNA, 25 bp, Homo sapien
agcccgcacgatgcctcacttcacc

SEQ ID NO: 5484225 - DNA, 25 bp, Homo sapien
tggacatccgcccaaaggtatcgtc

SEQ ID NO: 5484226 - DNA, 25 bp, Homo sapien
gctgctgttgtaccctgctgacggc

SEQ ID NO: 5484227 - DNA, 25 bp, Homo sapien
gccatcgccaccaacggtgtggttc

SEQ ID NO: 5484228 - DNA, 25 bp, Homo sapien
acccagcatgggcaccctcatgggg

SEQ ID NO: 5484229 - DNA, 25 bp, Homo sapien
cacttcaccgtggtgccagtggacg

SEQ ID NO: 5484230 - DNA, 25 bp, Homo sapien
tgaacacaggaatctgctgaccatc

SEQ ID NO: 5484231 - DNA, 25 bp, Homo sapien
ggactagaagcaagctgggtcttct

SEQ ID NO: 5484232 - DNA, 25 bp, Homo sapien
ggccacctctggatgagtggacgta

SEQ ID NO: 5484233 - DNA, 25 bp, Homo sapien
gacgtagagaaggccctctgatttg

SEQ ID NO: 5484234 - DNA, 25 bp, Homo sapien
catcccactggtggctggaaaactg

SEQ ID NO: 5484235 - DNA, 25 bp, Homo sapien
gcttgagataatggatgttgagagg

SEQ ID NO: 5484236 - DNA, 25 bp, Homo sapien
tttggatccagagacaggaatcttc

SEQ ID NO: 5484237 - DNA, 25 bp, Homo sapien
accccagtggccatatggtagagat

SEQ ID NO: 5484238 - DNA, 25 bp, Homo sapien
tgggtcttctgggtcgtctctactc

SEQ ID NO: 5484239 - DNA, 25 bp, Homo sapien
gagtgtctgtcactgagatgggcca

SEQ ID NO: 5484240 - DNA, 25 bp, Homo sapien
aagacctcgtcaaggtgccacctct

SEQ ID NO: 5484241 - DNA, 25 bp, Homo sapien
gcccagtaacaggatacatagtgaa

SEQ ID NO: 5484242 - DNA, 25 bp, Homo sapien
tgctgatgacagacagtccggaaaa

SEQ ID NO: 5484243 - DNA, 25 bp, Homo sapien
cagttcgctactgaaagagcattta

SEQ ID NO: 5484244 - DNA, 25 bp, Homo sapien
cagcaccaccccctctccaagtagc

SEQ ID NO: 5484245 - DNA, 25 bp, Homo sapien
acccactaaggatgctgatgacaga

SEQ ID NO: 5484246 - DNA, 25 bp, Homo sapien
acctaggctggtaccatcttggctc

SEQ ID NO: 5484247 - DNA, 25 bp, Homo sapien
ctgaaagctgtttaagcccagtaac

SEQ ID NO: 5484248 - DNA, 25 bp, Homo sapien
ttagtcaagtgtgaactcagttcgc

SEQ ID NO: 5484249 - DNA, 25 bp, Homo sapien
gacagtccggaaaatatccttagtc

SEQ ID NO: 5484250 - DNA, 25 bp, Homo sapien
atatggggaaacccactaaggatgc

SEQ ID NO: 5484251 - DNA, 25 bp, Homo sapien
gcccagctagctaacttgaattttt

SEQ ID NO: 5484252 - DNA, 25 bp, Homo sapien
accaacacaactcacaccaaggatt

SEQ ID NO: 5484253 - DNA, 25 bp, Homo sapien
aatccttggtgtgagttgtgttggt

SEQ ID NO: 5484254 - DNA, 25 bp, Homo sapien
attgttagtatacggtctataaacg

SEQ ID NO: 5484255 - DNA, 25 bp, Homo sapien
cgtttatagaccgtatactaacaat

SEQ ID NO: 5484256 - DNA, 25 bp, Homo sapien
gttattgttagtatacggtctataa

SEQ ID NO: 5484257 - DNA, 25 bp, Homo sapien
ttatagaccgtatactaacaataac

SEQ ID NO: 5484258 - DNA, 25 bp, Homo sapien
tttaactaaagattgtattgtgaca

SEQ ID NO: 5484259 - DNA, 25 bp, Homo sapien
tgtcacaatacaatctttagttaaa

SEQ ID NO: 5484260 - DNA, 25 bp, Homo sapien
acaccttagacaggagactacattc

SEQ ID NO: 5484261 - DNA, 25 bp, Homo sapien
gaatgtagtctcctgtctaaggtgt

SEQ ID NO: 5484262 - DNA, 25 bp, Homo sapien
tggtgcaggtacgtggaaccaaaac

SEQ ID NO: 5484263 - DNA, 25 bp, Homo sapien
gttttggttccacgtacctgcacca

SEQ ID NO: 5484264 - DNA, 25 bp, Homo sapien
aagcaacattgaatcacctaaacgg

SEQ ID NO: 5484265 - DNA, 25 bp, Homo sapien
ccgtttaggtgattcaatgttgctt

SEQ ID NO: 5484266 - DNA, 25 bp, Homo sapien
cgtccctggtctaccgccggtctcg

SEQ ID NO: 5484267 - DNA, 25 bp, Homo sapien
cgagaccggcggtagaccagggacg

SEQ ID NO: 5484268 - DNA, 25 bp, Homo sapien
gactcttcgggcccgcccccacgga

SEQ ID NO: 5484269 - DNA, 25 bp, Homo sapien
tccgtgggggcgggcccgaagagtc

SEQ ID NO: 5484270 - DNA, 25 bp, Homo sapien
cgagtctctcttggcagtcatggaa

SEQ ID NO: 5484271 - DNA, 25 bp, Homo sapien
ttccatgactgccaagagagactcg

SEQ ID NO: 5484272 - DNA, 25 bp, Homo sapien
ctgtcttcggaagggccactgtgac

SEQ ID NO: 5484273 - DNA, 25 bp, Homo sapien
gtcacagtggcccttccgaagacag

SEQ ID NO: 5484274 - DNA, 25 bp, Homo sapien
tttcaacctaaacagccaatttcta

SEQ ID NO: 5484275 - DNA, 25 bp, Homo sapien
gaattgcaaaactgacatcccattt

SEQ ID NO: 5484276 - DNA, 25 bp, Homo sapien
gttgtgttatagtttatgcttctta

SEQ ID NO: 5484277 - DNA, 25 bp, Homo sapien
actgacatcccatttcacagcaata

SEQ ID NO: 5484278 - DNA, 25 bp, Homo sapien
aaatcttaggtttgcttatgcccag

SEQ ID NO: 5484279 - DNA, 25 bp, Homo sapien
ataggaggggttaaggttcatgaga

SEQ ID NO: 5484280 - DNA, 25 bp, Homo sapien
ggtctgagatgggtgctgcaaagat

SEQ ID NO: 5484281 - DNA, 25 bp, Homo sapien
tattttctagattatccctgtgaat

SEQ ID NO: 5484282 - DNA, 25 bp, Homo sapien
cacagcaatagtgacctttatttaa

SEQ ID NO: 5484283 - DNA, 25 bp, Homo sapien
acagccaatttctaagcagacagga

SEQ ID NO: 5484284 - DNA, 25 bp, Homo sapien
gctgtttctcacatctatagtgaca

SEQ ID NO: 5484285 - DNA, 25 bp, Homo sapien
tctcatgaaccttaacccctcctat

SEQ ID NO: 5484286 - DNA, 25 bp, Homo sapien
ttaaataaaggtcactattgctgtg

SEQ ID NO: 5484287 - DNA, 25 bp, Homo sapien
ctgggcataagcaaacctaagattt

SEQ ID NO: 5484288 - DNA, 25 bp, Homo sapien
aaatgggatgtcagttttgcaattc

SEQ ID NO: 5484289 - DNA, 25 bp, Homo sapien
attcacagggataatctagaaaata

SEQ ID NO: 5484290 - DNA, 25 bp, Homo sapien
atctttgcagcacccatctcagacc

SEQ ID NO: 5484291 - DNA, 25 bp, Homo sapien
taagaagcataaactataacacaac

SEQ ID NO: 5484292 - DNA, 25 bp, Homo sapien
tcctgtctgcttagaaattggctgt

SEQ ID NO: 5484293 - DNA, 25 bp, Homo sapien
tattgctgtgaaatgggatgtcagt

SEQ ID NO: 5484294 - DNA, 25 bp, Homo sapien
tagaaattggctgtttaggttgaaa

SEQ ID NO: 5484295 - DNA, 25 bp, Homo sapien
tgtcactatagatgtgagaaacagc

SEQ ID NO: 5484296 - DNA, 25 bp, Homo sapien
acgcagacgaagttacccttgtcag

SEQ ID NO: 5484297 - DNA, 25 bp, Homo sapien
ctgacaagggtaacttcgtctgcgt

SEQ ID NO: 5484298 - DNA, 25 bp, Homo sapien
aagaccaacccgtgtcaaagagaat

SEQ ID NO: 5484299 - DNA, 25 bp, Homo sapien
attctctttgacacgggttggtctt

SEQ ID NO: 5484300 - DNA, 25 bp, Homo sapien
tagaggagtgtagaagcacatatac

SEQ ID NO: 5484301 - DNA, 25 bp, Homo sapien
gtatatgtgcttctacactcctcta

SEQ ID NO: 5484302 - DNA, 25 bp, Homo sapien
tcatagttatgtgaactgcaataat

SEQ ID NO: 5484303 - DNA, 25 bp, Homo sapien
attattgcagttcacataactatga

SEQ ID NO: 5484304 - DNA, 25 bp, Homo sapien
caaaacgtatattactactttataa

SEQ ID NO: 5484305 - DNA, 25 bp, Homo sapien
ttataaagtagtaatatacgttttg

SEQ ID NO: 5484306 - DNA, 25 bp, Homo sapien
tctagtcagaatgcttaagagagac

SEQ ID NO: 5484307 - DNA, 25 bp, Homo sapien
gtctctcttaagcattctgactaga

SEQ ID NO: 5484308 - DNA, 25 bp, Homo sapien
ggtcatcaaccatagacgtaattat

SEQ ID NO: 5484309 - DNA, 25 bp, Homo sapien
ataattacgtctatggttgatgacc

SEQ ID NO: 5484310 - DNA, 25 bp, Homo sapien
tgaagggtacttgttatatcttacg

SEQ ID NO: 5484311 - DNA, 25 bp, Homo sapien
cgtaagatataacaagtacccttca

SEQ ID NO: 5484312 - DNA, 25 bp, Homo sapien
tcaatcaccatagaaatacagtatt

SEQ ID NO: 5484313 - DNA, 25 bp, Homo sapien
ttaataatgctgctgctgtacttac

SEQ ID NO: 5484314 - DNA, 25 bp, Homo sapien
tttaaacataccaagataacattct

SEQ ID NO: 5484315 - DNA, 25 bp, Homo sapien
acctgaaactcatactgcaattgca

SEQ ID NO: 5484316 - DNA, 25 bp, Homo sapien
ttaaactgatattttgtggcccaag

SEQ ID NO: 5484317 - DNA, 25 bp, Homo sapien
aaatgaagaataatatctatgtctc

SEQ ID NO: 5484318 - DNA, 25 bp, Homo sapien
acataaaccatctgattaaactgat

SEQ ID NO: 5484319 - DNA, 25 bp, Homo sapien
tggagattagagatctatgtttgcc

SEQ ID NO: 5484320 - DNA, 25 bp, Homo sapien
tgaaatgtgtttgtgtgtgtctctc

SEQ ID NO: 5484321 - DNA, 25 bp, Homo sapien
actgcaattgcaacacatcttaagt

SEQ ID NO: 5484322 - DNA, 25 bp, Homo sapien
agagaaatggagattagagatctat

SEQ ID NO: 5484323 - DNA, 25 bp, Homo sapien
agaaaccaaggccattccagtcagc

SEQ ID NO: 5484324 - DNA, 25 bp, Homo sapien
ggccaccaaggtgtcagcttcctct

SEQ ID NO: 5484325 - DNA, 25 bp, Homo sapien
agccatcagagaaatcaacagaacc

SEQ ID NO: 5484326 - DNA, 25 bp, Homo sapien
ctacccaagcaggcatcagatacag

SEQ ID NO: 5484327 - DNA, 25 bp, Homo sapien
agaagaagtcacagtcaaccaagct

SEQ ID NO: 5484328 - DNA, 25 bp, Homo sapien
caacagatggaaggaccacatcttc

SEQ ID NO: 5484329 - DNA, 25 bp, Homo sapien
cagagccaaaaagcctacccaagca

SEQ ID NO: 5484330 - DNA, 25 bp, Homo sapien
ccagatcagctgaacagcagccatc

SEQ ID NO: 5484331 - DNA, 25 bp, Homo sapien
atacaggaagtaacgatgctcacaa

SEQ ID NO: 5484332 - DNA, 25 bp, Homo sapien
agtgaaaaaaccagtgaatcgcctt

SEQ ID NO: 5484333 - DNA, 25 bp, Homo sapien
gaacctatgctggtggaacagcctc

SEQ ID NO: 5484334 - DNA, 25 bp, Homo sapien
ggcaaaccataggctgggtcatgcc

SEQ ID NO: 5484335 - DNA, 25 bp, Homo sapien
ggcctaggactattgggtgttctga

SEQ ID NO: 5484336 - DNA, 25 bp, Homo sapien
aaatatttcgactagaggggtgcaa

SEQ ID NO: 5484337 - DNA, 25 bp, Homo sapien
tggggtaagcacaaaatatttcgac

SEQ ID NO: 5484338 - DNA, 25 bp, Homo sapien
cgaatagagttcaatagtcacacac

SEQ ID NO: 5484339 - DNA, 25 bp, Homo sapien
cacaattaatgaaaaaacggagaaa

SEQ ID NO: 5484340 - DNA, 25 bp, Homo sapien
atgccccaactcgcagtgggaagat

SEQ ID NO: 5484341 - DNA, 25 bp, Homo sapien
tagtacaagcagtctacgaatagag

SEQ ID NO: 5484342 - DNA, 25 bp, Homo sapien
gtgggaagatgcttatttagcttgc

SEQ ID NO: 5484343 - DNA, 25 bp, Homo sapien
agaaaaatgcagaccttggcttggc

SEQ ID NO: 5484344 - DNA, 25 bp, Homo sapien
gtcacacacatatattggggtaagc

SEQ ID NO: 5484345 - DNA, 25 bp, Homo sapien
ggtcctcggagacccacgacgactg

SEQ ID NO: 5484346 - DNA, 25 bp, Homo sapien
cagtcgtcgtgggtctccgaggacc

SEQ ID NO: 5484347 - DNA, 25 bp, Homo sapien
ggcggtggaacaccccgaaattgac

SEQ ID NO: 5484348 - DNA, 25 bp, Homo sapien
gtcaatttcggggtgttccaccgcc

SEQ ID NO: 5484349 - DNA, 25 bp, Homo sapien
gtggaagctgtggtcactttcgcag

SEQ ID NO: 5484350 - DNA, 25 bp, Homo sapien
ccaaagccatcatccaggtgtctgc

SEQ ID NO: 5484351 - DNA, 25 bp, Homo sapien
gccttccacctaaactgaatgcctg

SEQ ID NO: 5484352 - DNA, 25 bp, Homo sapien
cttcctaaacccttgccatagtgga

SEQ ID NO: 5484353 - DNA, 25 bp, Homo sapien
tctgctcatgcgcttggtggtggag

SEQ ID NO: 5484354 - DNA, 25 bp, Homo sapien
gaggcaggctgggagcatggaggac

SEQ ID NO: 5484355 - DNA, 25 bp, Homo sapien
gaccctggacatgctggagtcctgt

SEQ ID NO: 5484356 - DNA, 25 bp, Homo sapien
acccactgaagagccctttggacct

SEQ ID NO: 5484357 - DNA, 25 bp, Homo sapien
cctgcttcgaaatgcctatcgggag

SEQ ID NO: 5484358 - DNA, 25 bp, Homo sapien
cctcttcacgctctacaacaagaac

SEQ ID NO: 5484359 - DNA, 25 bp, Homo sapien
tgcctatcgggaggtgtctcgggcc

SEQ ID NO: 5484360 - DNA, 25 bp, Homo sapien
ctcccgataggcatttcgaagcagg

SEQ ID NO: 5484361 - DNA, 25 bp, Homo sapien
ctccaccaccaagcgcatgagcaga

SEQ ID NO: 5484362 - DNA, 25 bp, Homo sapien
ctgcgaaagtgaccacagcttccac

SEQ ID NO: 5484363 - DNA, 25 bp, Homo sapien
ggcccgagacacctcccgataggca

SEQ ID NO: 5484364 - DNA, 25 bp, Homo sapien
acaggactccagcatgtccagggtc

SEQ ID NO: 5484365 - DNA, 25 bp, Homo sapien
aggtccaaagggctcttcagtgggt

SEQ ID NO: 5484366 - DNA, 25 bp, Homo sapien
caggcattcagtttaggtggaaggc

SEQ ID NO: 5484367 - DNA, 25 bp, Homo sapien
gcagacacctggatgatggctttgg

SEQ ID NO: 5484368 - DNA, 25 bp, Homo sapien
tccactatggcaagggtttaggaag

SEQ ID NO: 5484369 - DNA, 25 bp, Homo sapien
gttcttgttgtagagcgtgaagagg

SEQ ID NO: 5484370 - DNA, 25 bp, Homo sapien
gtcctccatgctcccagcctgcctc

SEQ ID NO: 5484371 - DNA, 25 bp, Homo sapien
tgttcccagttgtccaccgagggcc

SEQ ID NO: 5484372 - DNA, 25 bp, Homo sapien
ggccctcggtggacaactgggaaca

SEQ ID NO: 5484373 - DNA, 25 bp, Homo sapien
ctgtattacagaatttttcagtagg

SEQ ID NO: 5484374 - DNA, 25 bp, Homo sapien
cctactgaaaaattctgtaatacag

SEQ ID NO: 5484375 - DNA, 25 bp, Homo sapien
gtcacactgtgtgacgggtcccttt

SEQ ID NO: 5484376 - DNA, 25 bp, Homo sapien
aaagggacccgtcacacagtgtgac

SEQ ID NO: 5484377 - DNA, 25 bp, Homo sapien
ttggccgcttcactgctttgcttgg

SEQ ID NO: 5484378 - DNA, 25 bp, Homo sapien
ctacaggcaaacccttggccgcttc

SEQ ID NO: 5484379 - DNA, 25 bp, Homo sapien
tgccttgggttcatccaaaatgggt

SEQ ID NO: 5484380 - DNA, 25 bp, Homo sapien
cccatggggcatttccaaggtttta

SEQ ID NO: 5484381 - DNA, 25 bp, Homo sapien
gggttcatccaaaatgggtactgtc

SEQ ID NO: 5484382 - DNA, 25 bp, Homo sapien
tgtttctcgttaaagacaagtctcc

SEQ ID NO: 5484383 - DNA, 25 bp, Homo sapien
cccaatatggatgaaccaaaggcaa

SEQ ID NO: 5484384 - DNA, 25 bp, Homo sapien
gggtactgtcccatgcttggtctag

SEQ ID NO: 5484385 - DNA, 25 bp, Homo sapien
aaaagtctacaggcaaacccttggc

SEQ ID NO: 5484386 - DNA, 25 bp, Homo sapien
aaaaccgcaatcaatcccatggggc

SEQ ID NO: 5484387 - DNA, 25 bp, Homo sapien
ggacagtacccaatatggatgaacc

SEQ ID NO: 5484388 - DNA, 25 bp, Homo sapien
tttcggtcgctgctcacacctaaac

SEQ ID NO: 5484389 - DNA, 25 bp, Homo sapien
gtttaggtgtgagcagcgaccgaaa

SEQ ID NO: 5484390 - DNA, 25 bp, Homo sapien
aagtgcagggacgactcgcgcccgt

SEQ ID NO: 5484391 - DNA, 25 bp, Homo sapien
acgggcgcgagtcgtccctgcactt

SEQ ID NO: 5484392 - DNA, 25 bp, Homo sapien
ttaggaagatttagtattacttacg

SEQ ID NO: 5484393 - DNA, 25 bp, Homo sapien
cgtaagtaatactaaatcttcctaa

SEQ ID NO: 5484394 - DNA, 25 bp, Homo sapien
acttcctcagctgtagacaggtcct

SEQ ID NO: 5484395 - DNA, 25 bp, Homo sapien
gacaggtccttttcgatggtacata

SEQ ID NO: 5484396 - DNA, 25 bp, Homo sapien
atgggatgatcgtgtatttattttt

SEQ ID NO: 5484397 - DNA, 25 bp, Homo sapien
tacgtgcaatacttcaatacttcat

SEQ ID NO: 5484398 - DNA, 25 bp, Homo sapien
tggtacatatttctttgcctttata

SEQ ID NO: 5484399 - DNA, 25 bp, Homo sapien
tagtctaattgaatcccttaaactc

SEQ ID NO: 5484400 - DNA, 25 bp, Homo sapien
atattctgtaatcttcagacctaga

SEQ ID NO: 5484401 - DNA, 25 bp, Homo sapien
tataatcttttatacagtgtcttac

SEQ ID NO: 5484402 - DNA, 25 bp, Homo sapien
gtgatgtggcaaatctctattagga

SEQ ID NO: 5484403 - DNA, 25 bp, Homo sapien
aggtttgtgactttcctaaatcaat

SEQ ID NO: 5484404 - DNA, 25 bp, Homo sapien
ttttttacttcctcagctgtagaca

SEQ ID NO: 5484405 - DNA, 25 bp, Homo sapien
tcctaatagagatttgccacatcac

SEQ ID NO: 5484406 - DNA, 25 bp, Homo sapien
tataaaggcaaagaaatatgtacca

SEQ ID NO: 5484407 - DNA, 25 bp, Homo sapien
tctaggtctgaagattacagaatat

SEQ ID NO: 5484408 - DNA, 25 bp, Homo sapien
gtaagacactgtataaaagattata

SEQ ID NO: 5484409 - DNA, 25 bp, Homo sapien
tatgtaccatcgaaaaggacctgtc

SEQ ID NO: 5484410 - DNA, 25 bp, Homo sapien
atgaagtattgaagtattgcacgta

SEQ ID NO: 5484411 - DNA, 25 bp, Homo sapien
attgatttaggaaagtcacaaacct

SEQ ID NO: 5484412 - DNA, 25 bp, Homo sapien
tgtctacagctgaggaagtaaaaaa

SEQ ID NO: 5484413 - DNA, 25 bp, Homo sapien
aaaaataaatacacgatcatcccat

SEQ ID NO: 5484414 - DNA, 25 bp, Homo sapien
aggacctgtctacagctgaggaagt

SEQ ID NO: 5484415 - DNA, 25 bp, Homo sapien
gagtttaagggattcaattagacta

SEQ ID NO: 5484416 - DNA, 25 bp, Homo sapien
cgtaaatattgaatcacttaaattt

SEQ ID NO: 5484417 - DNA, 25 bp, Homo sapien
aaatttaagtgattcaatatttacg

SEQ ID NO: 5484418 - DNA, 25 bp, Homo sapien
acgtaaatattgaatcacttaaatt

SEQ ID NO: 5484419 - DNA, 25 bp, Homo sapien
aatttaagtgattcaatatttacgt

SEQ ID NO: 5484420 - DNA, 25 bp, Homo sapien
gctcatcgatttccagaaccgccgc

SEQ ID NO: 5484421 - DNA, 25 bp, Homo sapien
cttccagctatggaagaagaagcgc

SEQ ID NO: 5484422 - DNA, 25 bp, Homo sapien
gccatcgcgctggcgctcatcgatt

SEQ ID NO: 5484423 - DNA, 25 bp, Homo sapien
gcgccctgcaggactttcgcagccg

SEQ ID NO: 5484424 - DNA, 25 bp, Homo sapien
gcgcagcgacagcctcttccagcta

SEQ ID NO: 5484425 - DNA, 25 bp, Homo sapien
tcgtcaccaccgaccacaaggagat

SEQ ID NO: 5484426 - DNA, 25 bp, Homo sapien
gccgctcccagtcccgcgctcggca

SEQ ID NO: 5484427 - DNA, 25 bp, Homo sapien
gagctgcgcttccactccatcctca

SEQ ID NO: 5484428 - DNA, 25 bp, Homo sapien
gtgctcacctccgaccgcctgagcc

SEQ ID NO: 5484429 - DNA, 25 bp, Homo sapien
acgacatgaaatcccccgacgaggt

SEQ ID NO: 5484430 - DNA, 25 bp, Homo sapien
agtacgtgtacttcaccatcgtcac

SEQ ID NO: 5484431 - DNA, 25 bp, Homo sapien
ccggaaccactgttcgagccacagg

SEQ ID NO: 5484432 - DNA, 25 bp, Homo sapien
cctgtggctcgaacagtggttccgg

SEQ ID NO: 5484433 - DNA, 25 bp, Homo sapien
tggggacttcccaccactcgaggga

SEQ ID NO: 5484434 - DNA, 25 bp, Homo sapien
tccctcgagtggtgggaagtcccca

SEQ ID NO: 5484435 - DNA, 25 bp, Homo sapien
ggaacaagccagatgtcagaccttc

SEQ ID NO: 5484436 - DNA, 25 bp, Homo sapien
gaaggtctgacatctggcttgttcc

SEQ ID NO: 5484437 - DNA, 25 bp, Homo sapien
gcccggacccctgcggcgcttcacg

SEQ ID NO: 5484438 - DNA, 25 bp, Homo sapien
cgtgaagcgccgcaggggtccgggc

SEQ ID NO: 5484439 - DNA, 25 bp, Homo sapien
ggcccggacccctgcggcgcttcac

SEQ ID NO: 5484440 - DNA, 25 bp, Homo sapien
gtgaagcgccgcaggggtccgggcc

SEQ ID NO: 5484441 - DNA, 25 bp, Homo sapien
gcacccacaagggaccgaccctggg

SEQ ID NO: 5484442 - DNA, 25 bp, Homo sapien
cccagggtcggtcccttgtgggtgc

SEQ ID NO: 5484443 - DNA, 25 bp, Homo sapien
ttcggcccccgcgaacgggctccgc

SEQ ID NO: 5484444 - DNA, 25 bp, Homo sapien
gcggagcccgttcgcgggggccgaa

SEQ ID NO: 5484445 - DNA, 25 bp, Homo sapien
actcatcctgctgcaccgacgggcc

SEQ ID NO: 5484446 - DNA, 25 bp, Homo sapien
ggcccgtcggtgcagcaggatgagt

SEQ ID NO: 5484447 - DNA, 25 bp, Homo sapien
tgcgagaccgccggcggcgcggtcg

SEQ ID NO: 5484448 - DNA, 25 bp, Homo sapien
cgaccgcgccgccggcggtctcgca

SEQ ID NO: 5484449 - DNA, 25 bp, Homo sapien
gcaaacaacctaaacagggcaagag

SEQ ID NO: 5484450 - DNA, 25 bp, Homo sapien
ctcttgccctgtttaggttgtttgc

SEQ ID NO: 5484451 - DNA, 25 bp, Homo sapien
gagttaccgttccacttttagacat

SEQ ID NO: 5484452 - DNA, 25 bp, Homo sapien
atgtctaaaagtggaacggtaactc

SEQ ID NO: 5484453 - DNA, 25 bp, Homo sapien
agccatgagacttcccaagggtcac

SEQ ID NO: 5484454 - DNA, 25 bp, Homo sapien
tccaggctggacagttcagtgattt

SEQ ID NO: 5484455 - DNA, 25 bp, Homo sapien
cagagttcaactggagacagagaaa

SEQ ID NO: 5484456 - DNA, 25 bp, Homo sapien
tgagcaagagacctgtgccactcag

SEQ ID NO: 5484457 - DNA, 25 bp, Homo sapien
gagaggggaaccccaacctctgtca

SEQ ID NO: 5484458 - DNA, 25 bp, Homo sapien
gtgtccccagtgcagccatgatgat

SEQ ID NO: 5484459 - DNA, 25 bp, Homo sapien
ggcacagggactccattcgtagacc

SEQ ID NO: 5484460 - DNA, 25 bp, Homo sapien
gtagaccacctctgggacagtgtgt

SEQ ID NO: 5484461 - DNA, 25 bp, Homo sapien
ctctgaggtcagacgctctgcactg

SEQ ID NO: 5484462 - DNA, 25 bp, Homo sapien
ggacagtgtgtctgcctctgaggtc

SEQ ID NO: 5484463 - DNA, 25 bp, Homo sapien
gcagacaccgccctttgtgggaaac

SEQ ID NO: 5484464 - DNA, 25 bp, Homo sapien
gaggctatggcatcgcaccttccgt

SEQ ID NO: 5484465 - DNA, 25 bp, Homo sapien
acggaaggtgcgatgccatagcctc

SEQ ID NO: 5484466 - DNA, 25 bp, Homo sapien
taaaacataaagtccaagaaggtga

SEQ ID NO: 5484467 - DNA, 25 bp, Homo sapien
tcaccttcttggactttatgtttta

SEQ ID NO: 5484468 - DNA, 25 bp, Homo sapien
gtaagatttagcacccttctgctgt

SEQ ID NO: 5484469 - DNA, 25 bp, Homo sapien
aagtggaggcactcttcagttatga

SEQ ID NO: 5484470 - DNA, 25 bp, Homo sapien
aagactgcgcaactacagatttgga

SEQ ID NO: 5484471 - DNA, 25 bp, Homo sapien
acccttctgctgtatactgtactga

SEQ ID NO: 5484472 - DNA, 25 bp, Homo sapien
caggtactgatcctgtttcttgctc

SEQ ID NO: 5484473 - DNA, 25 bp, Homo sapien
aagctgtacatttggtgcacttttc

SEQ ID NO: 5484474 - DNA, 25 bp, Homo sapien
ctagctagccagctgtgttcacact

SEQ ID NO: 5484475 - DNA, 25 bp, Homo sapien
ttcttgctctgagtgctagctagcc

SEQ ID NO: 5484476 - DNA, 25 bp, Homo sapien
ggcacgagagagtcttccaggtact

SEQ ID NO: 5484477 - DNA, 25 bp, Homo sapien
gatgatttcctggggcacagtgggt

SEQ ID NO: 5484478 - DNA, 25 bp, Homo sapien
cagttatgaggctacccaaccagag

SEQ ID NO: 5484479 - DNA, 25 bp, Homo sapien
tcataactgaagagtgcctccactt

SEQ ID NO: 5484480 - DNA, 25 bp, Homo sapien
agtacctggaagactctctcgtgcc

SEQ ID NO: 5484481 - DNA, 25 bp, Homo sapien
gaaaagtgcaccaaatgtacagctt

SEQ ID NO: 5484482 - DNA, 25 bp, Homo sapien
ggctagctagcactcagagcaagaa

SEQ ID NO: 5484483 - DNA, 25 bp, Homo sapien
tccaaatctgtagttgcgcagtctt

SEQ ID NO: 5484484 - DNA, 25 bp, Homo sapien
acccactgtgccccaggaaatcatc

SEQ ID NO: 5484485 - DNA, 25 bp, Homo sapien
acagcagaagggtgctaaatcttac

SEQ ID NO: 5484486 - DNA, 25 bp, Homo sapien
ctctggttgggtagcctcataactg

SEQ ID NO: 5484487 - DNA, 25 bp, Homo sapien
tcagtacagtatacagcagaagggt

SEQ ID NO: 5484488 - DNA, 25 bp, Homo sapien
gagcaagaaacaggatcagtacctg

SEQ ID NO: 5484489 - DNA, 25 bp, Homo sapien
agtgtgaacacagctggctagctag

SEQ ID NO: 5484490 - DNA, 25 bp, Homo sapien
aattatgtttcatttgttacagtat

SEQ ID NO: 5484491 - DNA, 25 bp, Homo sapien
atactgtaacaaatgaaacataatt

SEQ ID NO: 5484492 - DNA, 25 bp, Homo sapien
aaagtgatcgatttcaattatgttt

SEQ ID NO: 5484493 - DNA, 25 bp, Homo sapien
aaacataattgaaatcgatcacttt

SEQ ID NO: 5484494 - DNA, 25 bp, Homo sapien
cggtggaggccagacgccaacgaac

SEQ ID NO: 5484495 - DNA, 25 bp, Homo sapien
gttcgttggcgtctggcctccaccg

SEQ ID NO: 5484496 - DNA, 25 bp, Homo sapien
ttctcggaacaatatacttctttat

SEQ ID NO: 5484497 - DNA, 25 bp, Homo sapien
ataaagaagtatattgttccgagaa

SEQ ID NO: 5484498 - DNA, 25 bp, Homo sapien
aggttcggtgaatttctacattgtg

SEQ ID NO: 5484499 - DNA, 25 bp, Homo sapien
cacaatgtagaaattcaccgaacct

SEQ ID NO: 5484500 - DNA, 25 bp, Homo sapien
gattaccggcgcatcacgcgcgcca

SEQ ID NO: 5484501 - DNA, 25 bp, Homo sapien
cccacgagcatccgcgtgcactttc

SEQ ID NO: 5484502 - DNA, 25 bp, Homo sapien
ttccgttcgcacgccgattaccggc

SEQ ID NO: 5484503 - DNA, 25 bp, Homo sapien
gacacgcacttccgcacattccgtt

SEQ ID NO: 5484504 - DNA, 25 bp, Homo sapien
cgcgagagcttcgactgcctcttcg

SEQ ID NO: 5484505 - DNA, 25 bp, Homo sapien
cttccgcacattccgttcgcacgcc

SEQ ID NO: 5484506 - DNA, 25 bp, Homo sapien
agcggaactgctttttcgcccttag

SEQ ID NO: 5484507 - DNA, 25 bp, Homo sapien
gagcatccgcgtgcactttcaggcc

SEQ ID NO: 5484508 - DNA, 25 bp, Homo sapien
ctggacgcctgcggattctactggg

SEQ ID NO: 5484509 - DNA, 25 bp, Homo sapien
tttttcgcccttagcgtgaagatgg

SEQ ID NO: 5484510 - DNA, 25 bp, Homo sapien
ggcaccttcctggtgcgcgacagcc

SEQ ID NO: 5484511 - DNA, 25 bp, Homo sapien
tcgtgtggaagtgggaccgtcttta

SEQ ID NO: 5484512 - DNA, 25 bp, Homo sapien
taaagacggtcccacttccacacga

SEQ ID NO: 5484513 - DNA, 25 bp, Homo sapien
cactttccacatagtgtcaccggta

SEQ ID NO: 5484514 - DNA, 25 bp, Homo sapien
taccggtgacactatgtggaaagtg

SEQ ID NO: 5484515 - DNA, 25 bp, Homo sapien
cggggtcttcccagcttccgcggcg

SEQ ID NO: 5484516 - DNA, 25 bp, Homo sapien
cgccgcggaagctgggaagaccccg

SEQ ID NO: 5484517 - DNA, 25 bp, Homo sapien
tccggggtcttcccagcttccgcgg

SEQ ID NO: 5484518 - DNA, 25 bp, Homo sapien
ccgcggaagctgggaagaccccgga

SEQ ID NO: 5484519 - DNA, 25 bp, Homo sapien
ttacaagtgtatgcgtgactaggtt

SEQ ID NO: 5484520 - DNA, 25 bp, Homo sapien
aacctagtcacgcatacacttgtaa

SEQ ID NO: 5484521 - DNA, 25 bp, Homo sapien
ccaacggaattatcgtgtaagtaat

SEQ ID NO: 5484522 - DNA, 25 bp, Homo sapien
attacttacacgataattccgttgg

SEQ ID NO: 5484523 - DNA, 25 bp, Homo sapien
gcgaaaaagagctctccagaattac

SEQ ID NO: 5484524 - DNA, 25 bp, Homo sapien
gtaattctggagagctctttttcgc

SEQ ID NO: 5484525 - DNA, 25 bp, Homo sapien
tatgaaaacaggtacagaccacggg

SEQ ID NO: 5484526 - DNA, 25 bp, Homo sapien
cccgtggtctgtacctgttttcata

SEQ ID NO: 5484527 - DNA, 25 bp, Homo sapien
ctcaactgttgtatattttcgaaat

SEQ ID NO: 5484528 - DNA, 25 bp, Homo sapien
atttcgaaaatatacaacagttgag

SEQ ID NO: 5484529 - DNA, 25 bp, Homo sapien
cctgacgcaaaacttgtcgctgccc

SEQ ID NO: 5484530 - DNA, 25 bp, Homo sapien
gaagtccccttctacacagcggcgc

SEQ ID NO: 5484531 - DNA, 25 bp, Homo sapien
tcctgcagtacgccaactccacggt

SEQ ID NO: 5484532 - DNA, 25 bp, Homo sapien
ctctctggactcggtggccagaaac

SEQ ID NO: 5484533 - DNA, 25 bp, Homo sapien
ctccacggtcacgcagctgcttgag

SEQ ID NO: 5484534 - DNA, 25 bp, Homo sapien
gctgcccaatagcacggcccaagca

SEQ ID NO: 5484535 - DNA, 25 bp, Homo sapien
gaaggcaacctgtttgacccagcgc

SEQ ID NO: 5484536 - DNA, 25 bp, Homo sapien
ttctttatcctgctggggctgcgac

SEQ ID NO: 5484537 - DNA, 25 bp, Homo sapien
gagacgagttcggcttcctgcagta

SEQ ID NO: 5484538 - DNA, 25 bp, Homo sapien
tcgaggccctacgccagcatctgga

SEQ ID NO: 5484539 - DNA, 25 bp, Homo sapien
gcccaccatctccgtgaaggaagtc

SEQ ID NO: 5484540 - DNA, 25 bp, Homo sapien
gtaaagtggaaaagctgtcctgatc

SEQ ID NO: 5484541 - DNA, 25 bp, Homo sapien
gagtaaagtggaaaagctgtcctga

SEQ ID NO: 5484542 - DNA, 25 bp, Homo sapien
ctacttgcttgtaggaaaccgagta

SEQ ID NO: 5484543 - DNA, 25 bp, Homo sapien
agggtaaattcactgtatttcctac

SEQ ID NO: 5484544 - DNA, 25 bp, Homo sapien
gcaaaacactgacaaggtacataaa

SEQ ID NO: 5484545 - DNA, 25 bp, Homo sapien
ataagatttattgatcagattgttt

SEQ ID NO: 5484546 - DNA, 25 bp, Homo sapien
agattggacattttagggtaaattc

SEQ ID NO: 5484547 - DNA, 25 bp, Homo sapien
gctgtcctgatcatatggcatgcac

SEQ ID NO: 5484548 - DNA, 25 bp, Homo sapien
aatacagattggacattttagggta

SEQ ID NO: 5484549 - DNA, 25 bp, Homo sapien
caaggtacataaatacagattggac

SEQ ID NO: 5484550 - DNA, 25 bp, Homo sapien
tgcttgtaggaaaccgagtaaagtg

SEQ ID NO: 5484551 - DNA, 25 bp, Homo sapien
ggacgcaactccctaggtcctctgt

SEQ ID NO: 5484552 - DNA, 25 bp, Homo sapien
acagaggacctagggagttgcgtcc

SEQ ID NO: 5484553 - DNA, 25 bp, Homo sapien
cgtcgctgccgcgcgggtcacggac

SEQ ID NO: 5484554 - DNA, 25 bp, Homo sapien
gtccgtgacccgcgcggcagcgacg

SEQ ID NO: 5484555 - DNA, 25 bp, Homo sapien
ttactacatcttccgtggggcgaat

SEQ ID NO: 5484556 - DNA, 25 bp, Homo sapien
gtgtctgggtggtggggtatggtcc

SEQ ID NO: 5484557 - DNA, 25 bp, Homo sapien
ggcctggcaggagtactgccggcgt

SEQ ID NO: 5484558 - DNA, 25 bp, Homo sapien
cctcaccaccatggatatcacacat

SEQ ID NO: 5484559 - DNA, 25 bp, Homo sapien
gccacagggcggaaactgctggtgt

SEQ ID NO: 5484560 - DNA, 25 bp, Homo sapien
agtgcctgcagaagtacggcctggc

SEQ ID NO: 5484561 - DNA, 25 bp, Homo sapien
ccatctctacagccacagggcggaa

SEQ ID NO: 5484562 - DNA, 25 bp, Homo sapien
ccgccatcccaactatcttggagac

SEQ ID NO: 5484563 - DNA, 25 bp, Homo sapien
tcatgctggcgtttggggacatggc

SEQ ID NO: 5484564 - DNA, 25 bp, Homo sapien
tatcacacatgacgggtttggcttc

SEQ ID NO: 5484565 - DNA, 25 bp, Homo sapien
tatcttggagacctcatcatggctc

SEQ ID NO: 5484566 - DNA, 25 bp, Homo sapien
gccatgtccccaaacgccagcatga

SEQ ID NO: 5484567 - DNA, 25 bp, Homo sapien
ggaccataccccaccacccagacac

SEQ ID NO: 5484568 - DNA, 25 bp, Homo sapien
gtctccaagatagttgggatggcgg

SEQ ID NO: 5484569 - DNA, 25 bp, Homo sapien
acaccagcagtttccgccctgtggc

SEQ ID NO: 5484570 - DNA, 25 bp, Homo sapien
gccaggccgtacttctgcaggcact

SEQ ID NO: 5484571 - DNA, 25 bp, Homo sapien
gagccatgatgaggtctccaagata

SEQ ID NO: 5484572 - DNA, 25 bp, Homo sapien
atgtgtgatatccatggtggtgagg

SEQ ID NO: 5484573 - DNA, 25 bp, Homo sapien
gaagccaaacccgtcatgtgtgata

SEQ ID NO: 5484574 - DNA, 25 bp, Homo sapien
acgccggcagtactcctgccaggcc

SEQ ID NO: 5484575 - DNA, 25 bp, Homo sapien
ttccgccctgtggctgtagagatgg

SEQ ID NO: 5484576 - DNA, 25 bp, Homo sapien
attcgccccacggaagatgtagtaa

SEQ ID NO: 5484577 - DNA, 25 bp, Homo sapien
ggcgggccagcctcggcacagtcca

SEQ ID NO: 5484578 - DNA, 25 bp, Homo sapien
tggactgtgccgaggctggcccgcc

SEQ ID NO: 5484579 - DNA, 25 bp, Homo sapien
tgtctgccttgcttctgctagaccc

SEQ ID NO: 5484580 - DNA, 25 bp, Homo sapien
gggtctagcagaagcaaggcagaca

SEQ ID NO: 5484581 - DNA, 25 bp, Homo sapien
gagaaaaggaaatatatcagttaaa

SEQ ID NO: 5484582 - DNA, 25 bp, Homo sapien
tttaactgatatatttccttttctc

SEQ ID NO: 5484583 - DNA, 25 bp, Homo sapien
tggtcgcccgagacttccttgccca

SEQ ID NO: 5484584 - DNA, 25 bp, Homo sapien
acgttgagctcgatgacgttcaggg

SEQ ID NO: 5484585 - DNA, 25 bp, Homo sapien
gggccggcctgctacttgaggcagg

SEQ ID NO: 5484586 - DNA, 25 bp, Homo sapien
gttgtcgcgctgcttcatctcggcc

SEQ ID NO: 5484587 - DNA, 25 bp, Homo sapien
cggccttccgcacctgcgccttggc

SEQ ID NO: 5484588 - DNA, 25 bp, Homo sapien
tggatgcggatcttgcagttgtcgc

SEQ ID NO: 5484589 - DNA, 25 bp, Homo sapien
ggccagcaagttctcggaaaacacg

SEQ ID NO: 5484590 - DNA, 25 bp, Homo sapien
acttaccctgctcgaacatgtcctc

SEQ ID NO: 5484591 - DNA, 25 bp, Homo sapien
cgcgcccttcacgtcggccagcaag

SEQ ID NO: 5484592 - DNA, 25 bp, Homo sapien
ccagcaccgccatctgcaagaagag

SEQ ID NO: 5484593 - DNA, 25 bp, Homo sapien
gcgttgtactgcgcccgcgaaatgc

SEQ ID NO: 5484594 - DNA, 25 bp, Homo sapien
agggcgcaactgctcaagaacgtct

SEQ ID NO: 5484595 - DNA, 25 bp, Homo sapien
agaaccacgtgaacttgtaccgctc

SEQ ID NO: 5484596 - DNA, 25 bp, Homo sapien
atctgagctcatctcgctgatggac

SEQ ID NO: 5484597 - DNA, 25 bp, Homo sapien
aaggagagctaccaggttgtcaccg

SEQ ID NO: 5484598 - DNA, 25 bp, Homo sapien
gataccacgaaacagaggcccgacg

SEQ ID NO: 5484599 - DNA, 25 bp, Homo sapien
taccgctctgaatccttgcaacaaa

SEQ ID NO: 5484600 - DNA, 25 bp, Homo sapien
tgctaaccaattccagtctggtcca

SEQ ID NO: 5484601 - DNA, 25 bp, Homo sapien
aatctgctccatgggtatgcgttct

SEQ ID NO: 5484602 - DNA, 25 bp, Homo sapien
ggctctgttacctctctaaggagag

SEQ ID NO: 5484603 - DNA, 25 bp, Homo sapien
aagcactgtgcaactgtactgtaac

SEQ ID NO: 5484604 - DNA, 25 bp, Homo sapien
gttgtcaccgcagtctgctaaccaa

SEQ ID NO: 5484605 - DNA, 25 bp, Homo sapien
gagcggtacaagttcacgtggttct

SEQ ID NO: 5484606 - DNA, 25 bp, Homo sapien
agacgttcttgagcagttgcgccct

SEQ ID NO: 5484607 - DNA, 25 bp, Homo sapien
ttggttagcagactgcggtgacaac

SEQ ID NO: 5484608 - DNA, 25 bp, Homo sapien
gttacagtacagttgcacagtgctt

SEQ ID NO: 5484609 - DNA, 25 bp, Homo sapien
tttgttgcaaggattcagagcggta

SEQ ID NO: 5484610 - DNA, 25 bp, Homo sapien
ctctccttagagaggtaacagagcc

SEQ ID NO: 5484611 - DNA, 25 bp, Homo sapien
gtccatcagcgagatgagctcagat

SEQ ID NO: 5484612 - DNA, 25 bp, Homo sapien
cggtgacaacctggtagctctcctt

SEQ ID NO: 5484613 - DNA, 25 bp, Homo sapien
agaacgcatacccatggagcagatt

SEQ ID NO: 5484614 - DNA, 25 bp, Homo sapien
cgtcgggcctctgtttcgtggtatc

SEQ ID NO: 5484615 - DNA, 25 bp, Homo sapien
tggaccagactggaattggttagca

SEQ ID NO: 5484616 - DNA, 25 bp, Homo sapien
acaggagtacctggtggtagaacag

SEQ ID NO: 5484617 - DNA, 25 bp, Homo sapien
ctgttctaccaccaggtactcctgt

SEQ ID NO: 5484618 - DNA, 25 bp, Homo sapien
tagtaaggaactaagtgagctttgt

SEQ ID NO: 5484619 - DNA, 25 bp, Homo sapien
acaaagctcacttagttccttacta

SEQ ID NO: 5484620 - DNA, 25 bp, Homo sapien
cagtagaagtcatctcagaaatgtt

SEQ ID NO: 5484621 - DNA, 25 bp, Homo sapien
caaccccggaaacttcctgtgcaac

SEQ ID NO: 5484622 - DNA, 25 bp, Homo sapien
agcactgccctccaaccccggaaac

SEQ ID NO: 5484623 - DNA, 25 bp, Homo sapien
agtagagacactgctgctgagatga

SEQ ID NO: 5484624 - DNA, 25 bp, Homo sapien
tcccctttgactgctgggagccagt

SEQ ID NO: 5484625 - DNA, 25 bp, Homo sapien
ctcaccaagctcaagggccccttga

SEQ ID NO: 5484626 - DNA, 25 bp, Homo sapien
gcccggcgtctcctgaacctgagta

SEQ ID NO: 5484627 - DNA, 25 bp, Homo sapien
gcatgtgaatgccatccaggaggcc

SEQ ID NO: 5484628 - DNA, 25 bp, Homo sapien
atggtcatcttggagggaccaaggg

SEQ ID NO: 5484629 - DNA, 25 bp, Homo sapien
gagctagaaactcaggatggtcatc

SEQ ID NO: 5484630 - DNA, 25 bp, Homo sapien
agccactacaagcagcactgccctc

SEQ ID NO: 5484631 - DNA, 25 bp, Homo sapien
aattacgtactgaaactatcttgtt

SEQ ID NO: 5484632 - DNA, 25 bp, Homo sapien
aacaagatagtttcagtacgtaatt

SEQ ID NO: 5484633 - DNA, 25 bp, Homo sapien
cgccgtcgctcgtctgtgtggcgga

SEQ ID NO: 5484634 - DNA, 25 bp, Homo sapien
tccgccacacagacgagcgacggcg

SEQ ID NO: 5484635 - DNA, 25 bp, Homo sapien
ctttacaatctcaagaacaggtcta

SEQ ID NO: 5484636 - DNA, 25 bp, Homo sapien
tagacctgttcttgagattgtaaag

SEQ ID NO: 5484637 - DNA, 25 bp, Homo sapien
agattttatagaaacgagaacagaa

SEQ ID NO: 5484638 - DNA, 25 bp, Homo sapien
ttctgttctcgtttctataaaatct

SEQ ID NO: 5484639 - DNA, 25 bp, Homo sapien
aacgactcgtcacacacattcaacc

SEQ ID NO: 5484640 - DNA, 25 bp, Homo sapien
ggttgaatgtgtgtgacgagtcgtt

SEQ ID NO: 5484641 - DNA, 25 bp, Homo sapien
ctacggtgccttccgggacagtgac

SEQ ID NO: 5484642 - DNA, 25 bp, Homo sapien
gtcactgtcccggaaggcaccgtag

SEQ ID NO: 5484643 - DNA, 25 bp, Homo sapien
tcggtgaatacgactacctacacgt

SEQ ID NO: 5484644 - DNA, 25 bp, Homo sapien
acgtgtaggtagtcgtattcaccga

SEQ ID NO: 5484645 - DNA, 25 bp, Homo sapien
actcttaggacgtggtactcacccg

SEQ ID NO: 5484646 - DNA, 25 bp, Homo sapien
cgggtgagtaccacgtcctaagagt

SEQ ID NO: 5484647 - DNA, 25 bp, Homo sapien
tcactatatttatcaataatgtatg

SEQ ID NO: 5484648 - DNA, 25 bp, Homo sapien
catacattattgataaatatagtga

SEQ ID NO: 5484649 - DNA, 25 bp, Homo sapien
agtagatttcactatatttatcaat

SEQ ID NO: 5484650 - DNA, 25 bp, Homo sapien
attgataaatatagtgaaatctact

SEQ ID NO: 5484651 - DNA, 25 bp, Homo sapien
aagtagatttcactatatttatcaa

SEQ ID NO: 5484652 - DNA, 25 bp, Homo sapien
ttgataaatatagtgaaatctactt

SEQ ID NO: 5484653 - DNA, 25 bp, Homo sapien
cggtcgcgtcagtcgccgtgccggg

SEQ ID NO: 5484654 - DNA, 25 bp, Homo sapien
cccggcacggcgactgacgcgaccg

SEQ ID NO: 5484655 - DNA, 25 bp, Homo sapien
ggcggtcgcgtcagtcgccgtgccg

SEQ ID NO: 5484656 - DNA, 25 bp, Homo sapien
cggcacggcgactgacgcgaccgcc

SEQ ID NO: 5484657 - DNA, 25 bp, Homo sapien
aggaagacatagcgctactgctgct

SEQ ID NO: 5484658 - DNA, 25 bp, Homo sapien
gcccactctgcagtagaggctgccg

SEQ ID NO: 5484659 - DNA, 25 bp, Homo sapien
ttaacatattggcttcgtgggatcc

SEQ ID NO: 5484660 - DNA, 25 bp, Homo sapien
gggctgcaccctcgtttggcttttc

SEQ ID NO: 5484661 - DNA, 25 bp, Homo sapien
cagatggaaaccgatgcccactctg

SEQ ID NO: 5484662 - DNA, 25 bp, Homo sapien
ttgccatccgggtagatctgcagat

SEQ ID NO: 5484663 - DNA, 25 bp, Homo sapien
attgctgaggcataggtattatagc

SEQ ID NO: 5484664 - DNA, 25 bp, Homo sapien
ggtagagatatgctggggtttaacc

SEQ ID NO: 5484665 - DNA, 25 bp, Homo sapien
acgcttctccccgtgagcccaggcg

SEQ ID NO: 5484666 - DNA, 25 bp, Homo sapien
ggctccactggaaactgctctgctc

SEQ ID NO: 5484667 - DNA, 25 bp, Homo sapien
tcttgaaaacgctccctgaacttgc

SEQ ID NO: 5484668 - DNA, 25 bp, Homo sapien
agatctcaaactttgacagacctgg

SEQ ID NO: 5484669 - DNA, 25 bp, Homo sapien
ccaggtctgtcaaagtttgagatct

SEQ ID NO: 5484670 - DNA, 25 bp, Homo sapien
acaccctctgggtctcaggtaattt

SEQ ID NO: 5484671 - DNA, 25 bp, Homo sapien
atcaagaaaacagttcccccgtgtc

SEQ ID NO: 5484672 - DNA, 25 bp, Homo sapien
agacctcttcgcggtagcctttccc

SEQ ID NO: 5484673 - DNA, 25 bp, Homo sapien
ggtcaagacctcttcgcggtagcct

SEQ ID NO: 5484674 - DNA, 25 bp, Homo sapien
tctggggtgaattcctcccagatga

SEQ ID NO: 5484675 - DNA, 25 bp, Homo sapien
ctctgggtctcaggtaatttccttc

SEQ ID NO: 5484676 - DNA, 25 bp, Homo sapien
ttcctctggggtgaattcctcccag

SEQ ID NO: 5484677 - DNA, 25 bp, Homo sapien
aatttccttcacggtcaagacctct

SEQ ID NO: 5484678 - DNA, 25 bp, Homo sapien
gtccatgccattcctacaccctctg

SEQ ID NO: 5484679 - DNA, 25 bp, Homo sapien
caagaaaacagttcccccgtgtcgc

SEQ ID NO: 5484680 - DNA, 25 bp, Homo sapien
cacggtcaagacctcttcgcggtag

SEQ ID NO: 5484681 - DNA, 25 bp, Homo sapien
caaccgtcaaattgaactaatctat

SEQ ID NO: 5484682 - DNA, 25 bp, Homo sapien
atagattagttcaatttgacggttg

SEQ ID NO: 5484683 - DNA, 25 bp, Homo sapien
tgaaataaaagtacctataagaagt

SEQ ID NO: 5484684 - DNA, 25 bp, Homo sapien
acttcttataggtacttttatttca

SEQ ID NO: 5484685 - DNA, 25 bp, Homo sapien
aagaagactacgaaattacatcgaa

SEQ ID NO: 5484686 - DNA, 25 bp, Homo sapien
ttcgatgtaatttcgtagtcttctt

SEQ ID NO: 5484687 - DNA, 25 bp, Homo sapien
cgggcccgacatatccccgtcgtct

SEQ ID NO: 5484688 - DNA, 25 bp, Homo sapien
agacgacggggatatgtcgggcccg

SEQ ID NO: 5484689 - DNA, 25 bp, Homo sapien
tccggccagaggtacggcccgtctc

SEQ ID NO: 5484690 - DNA, 25 bp, Homo sapien
gagacgggccgtacctctggccgga

SEQ ID NO: 5484691 - DNA, 25 bp, Homo sapien
cacagcgaaaggcctctagacggta

SEQ ID NO: 5484692 - DNA, 25 bp, Homo sapien
taccgtctagaggcctttcgctgtg

SEQ ID NO: 5484693 - DNA, 25 bp, Homo sapien
aggacccggcggaggacagaaagtg

SEQ ID NO: 5484694 - DNA, 25 bp, Homo sapien
cactttctgtcctccgccgggtcct

SEQ ID NO: 5484695 - DNA, 25 bp, Homo sapien
ttaagatacttgaacttcatttatt

SEQ ID NO: 5484696 - DNA, 25 bp, Homo sapien
aataaatgaagttcaagtatcttaa

SEQ ID NO: 5484697 - DNA, 25 bp, Homo sapien
agttgtggagatgggtctcgtaacc

SEQ ID NO: 5484698 - DNA, 25 bp, Homo sapien
ggttacgagacccatctccacaact

SEQ ID NO: 5484699 - DNA, 25 bp, Homo sapien
gaactcctcatctgccgtggccgtt

SEQ ID NO: 5484700 - DNA, 25 bp, Homo sapien
aacggccacggcagatgaggagttc

SEQ ID NO: 5484701 - DNA, 25 bp, Homo sapien
gaccggaactcctcatctgccgtgg

SEQ ID NO: 5484702 - DNA, 25 bp, Homo sapien
ccacggcagatgaggagttccggtc

SEQ ID NO: 5484703 - DNA, 25 bp, Homo sapien
tagccttctaggcccttacctggca

SEQ ID NO: 5484704 - DNA, 25 bp, Homo sapien
cctcctcactccctcggcctactcc

SEQ ID NO: 5484705 - DNA, 25 bp, Homo sapien
ctccttaaggaacacccttgcctcc

SEQ ID NO: 5484706 - DNA, 25 bp, Homo sapien
tatcagcaactcaaacatgccatac

SEQ ID NO: 5484707 - DNA, 25 bp, Homo sapien
attgcttgctccaggaaacctttcc

SEQ ID NO: 5484708 - DNA, 25 bp, Homo sapien
tgagagtttaaccccatagactagc

SEQ ID NO: 5484709 - DNA, 25 bp, Homo sapien
tttgccgcacaaaaattctatcagc

SEQ ID NO: 5484710 - DNA, 25 bp, Homo sapien
aggcccttacctggcattctgtgct

SEQ ID NO: 5484711 - DNA, 25 bp, Homo sapien
caactcaaacatgccatactgcctc

SEQ ID NO: 5484712 - DNA, 25 bp, Homo sapien
attcttcagatcttagctcagccat

SEQ ID NO: 5484713 - DNA, 25 bp, Homo sapien
cttagctcagccattgcttgctcca

SEQ ID NO: 5484714 - DNA, 25 bp, Homo sapien
agggtctgtttctgtggcccaggtt

SEQ ID NO: 5484715 - DNA, 25 bp, Homo sapien
gtataaacaataaacaacttgccca

SEQ ID NO: 5484716 - DNA, 25 bp, Homo sapien
cagtattttacgaaggagtataaac

SEQ ID NO: 5484717 - DNA, 25 bp, Homo sapien
agtcacctggctagatagaagagct

SEQ ID NO: 5484718 - DNA, 25 bp, Homo sapien
accacatgctaaatccttgacaaac

SEQ ID NO: 5484719 - DNA, 25 bp, Homo sapien
gcagagaagtcagcagtattttacg

SEQ ID NO: 5484720 - DNA, 25 bp, Homo sapien
taataccaggaaatattcaacattt

SEQ ID NO: 5484721 - DNA, 25 bp, Homo sapien
acatctcattcccaacaatgcagag

SEQ ID NO: 5484722 - DNA, 25 bp, Homo sapien
ttcagaagcaagacctccttcctcc

SEQ ID NO: 5484723 - DNA, 25 bp, Homo sapien
tcacctggctagatagaagagctgg

SEQ ID NO: 5484724 - DNA, 25 bp, Homo sapien
gggacttcagaagcaagacctcctt

SEQ ID NO: 5484725 - DNA, 25 bp, Homo sapien
ttcaggacagccaggttggcttcca

SEQ ID NO: 5484726 - DNA, 25 bp, Homo sapien
agcggtcaatgtgctggtaagtgat

SEQ ID NO: 5484727 - DNA, 25 bp, Homo sapien
gcctggaaatggcaggtctccagca

SEQ ID NO: 5484728 - DNA, 25 bp, Homo sapien
ggctgggttgaactggtacagcttc

SEQ ID NO: 5484729 - DNA, 25 bp, Homo sapien
aaacacctgaagttactgggaggag

SEQ ID NO: 5484730 - DNA, 25 bp, Homo sapien
ggccatgatgctggacacactgtca

SEQ ID NO: 5484731 - DNA, 25 bp, Homo sapien
ttgatgtgcctggtcgatcatgcac

SEQ ID NO: 5484732 - DNA, 25 bp, Homo sapien
tccagggcttgccagaaggcctgga

SEQ ID NO: 5484733 - DNA, 25 bp, Homo sapien
gcaggtccccgaggtacaaaatctg

SEQ ID NO: 5484734 - DNA, 25 bp, Homo sapien
tcggacagagtcttcaaagccagtt

SEQ ID NO: 5484735 - DNA, 25 bp, Homo sapien
gcacagagtgaagtctgtgtgcggc

SEQ ID NO: 5484736 - DNA, 25 bp, Homo sapien
gcaatgactccgatgtgctggcagt

SEQ ID NO: 5484737 - DNA, 25 bp, Homo sapien
gtggcctgggatctctgttctatct

SEQ ID NO: 5484738 - DNA, 25 bp, Homo sapien
cagtttatggtcaatgcaaagcaat

SEQ ID NO: 5484739 - DNA, 25 bp, Homo sapien
atgtgctagagactgactgccatgt

SEQ ID NO: 5484740 - DNA, 25 bp, Homo sapien
ccacagaatgggtctgctccttccc

SEQ ID NO: 5484741 - DNA, 25 bp, Homo sapien
tatgaacaacccaagtagagttctc

SEQ ID NO: 5484742 - DNA, 25 bp, Homo sapien
tccacaaactgacccatcctgggcc

SEQ ID NO: 5484743 - DNA, 25 bp, Homo sapien
gccctgcgggatattaacaaagaca

SEQ ID NO: 5484744 - DNA, 25 bp, Homo sapien
gatggctatgtgctgagactcaacc

SEQ ID NO: 5484745 - DNA, 25 bp, Homo sapien
ccatgtgctcagaaagaaggcatgg

SEQ ID NO: 5484746 - DNA, 25 bp, Homo sapien
atttacatgacgtgccctgactgcc

SEQ ID NO: 5484747 - DNA, 25 bp, Homo sapien
tttcacaggaaaaggaatgtagcaa

SEQ ID NO: 5484748 - DNA, 25 bp, Homo sapien
tttgcaaacacagccctgggcacac

SEQ ID NO: 5484749 - DNA, 25 bp, Homo sapien
gtttacatctgggagaaaggttgtc

SEQ ID NO: 5484750 - DNA, 25 bp, Homo sapien
gtgcagggagcttgaattctgttcc

SEQ ID NO: 5484751 - DNA, 25 bp, Homo sapien
acaacagggccataacagtcctgac

SEQ ID NO: 5484752 - DNA, 25 bp, Homo sapien
gcagcaggagcagcagctcttcttg

SEQ ID NO: 5484753 - DNA, 25 bp, Homo sapien
gcagcagctgcacttctctgacgcc

SEQ ID NO: 5484754 - DNA, 25 bp, Homo sapien
ccaactaactcagcacaacagggcc

SEQ ID NO: 5484755 - DNA, 25 bp, Homo sapien
gcacacttgctacagcccacggggc

SEQ ID NO: 5484756 - DNA, 25 bp, Homo sapien
tggactttccaagagagaagcgaag

SEQ ID NO: 5484757 - DNA, 25 bp, Homo sapien
ggttgtcctggcatcagtcgcagca

SEQ ID NO: 5484758 - DNA, 25 bp, Homo sapien
ctggaggctccctctggccggctct

SEQ ID NO: 5484759 - DNA, 25 bp, Homo sapien
agagccggccagagggagcctccag

SEQ ID NO: 5484760 - DNA, 25 bp, Homo sapien
gacgacatcctgtcgacttccgaga

SEQ ID NO: 5484761 - DNA, 25 bp, Homo sapien
tctcggaagtcgacaggatgtcgtc

SEQ ID NO: 5484762 - DNA, 25 bp, Homo sapien
cccaaccagtcgagtgctatccccg

SEQ ID NO: 5484763 - DNA, 25 bp, Homo sapien
cggggatagcactcgactggttggg

SEQ ID NO: 5484764 - DNA, 25 bp, Homo sapien
cagaaggtactaaactttcacaggt

SEQ ID NO: 5484765 - DNA, 25 bp, Homo sapien
acctgtgaaagtttagtaccttctg

SEQ ID NO: 5484766 - DNA, 25 bp, Homo sapien
tctaacaagtaggtgcatagatagt

SEQ ID NO: 5484767 - DNA, 25 bp, Homo sapien
actatctatgcacctacttgttaga

SEQ ID NO: 5484768 - DNA, 25 bp, Homo sapien
tcaggccaaatctatgctgtggttc

SEQ ID NO: 5484769 - DNA, 25 bp, Homo sapien
tatgaagagtaacctgaaatgccac

SEQ ID NO: 5484770 - DNA, 25 bp, Homo sapien
attgtggaaataggataattgtaat

SEQ ID NO: 5484771 - DNA, 25 bp, Homo sapien
gatttgtacagattgaccacgggaa

SEQ ID NO: 5484772 - DNA, 25 bp, Homo sapien
gaccacgggaatactactgccatgt

SEQ ID NO: 5484773 - DNA, 25 bp, Homo sapien
tagatttcatggatgaggggatatg

SEQ ID NO: 5484774 - DNA, 25 bp, Homo sapien
tatgagacttgtatgaagatgccct

SEQ ID NO: 5484775 - DNA, 25 bp, Homo sapien
agaaagagatggatatagtagcctc

SEQ ID NO: 5484776 - DNA, 25 bp, Homo sapien
tgaggggatatggttgaccttttac

SEQ ID NO: 5484777 - DNA, 25 bp, Homo sapien
aaagatactatgactgccacctgcc

SEQ ID NO: 5484778 - DNA, 25 bp, Homo sapien
tgtcagtagaaataaccatatgtgc

SEQ ID NO: 5484779 - DNA, 25 bp, Homo sapien
tttaatctaggaaggatgaactctt

SEQ ID NO: 5484780 - DNA, 25 bp, Homo sapien
ctcagaaagctatgagctgaatgtc

SEQ ID NO: 5484781 - DNA, 25 bp, Homo sapien
aagaagaatagtcacaacttagacc

SEQ ID NO: 5484782 - DNA, 25 bp, Homo sapien
atgagctgaatgtctggatactact

SEQ ID NO: 5484783 - DNA, 25 bp, Homo sapien
aaggaggccactaatgggcatgtaa

SEQ ID NO: 5484784 - DNA, 25 bp, Homo sapien
agccatcgcacccaggcaaacccta

SEQ ID NO: 5484785 - DNA, 25 bp, Homo sapien
ggatgaactcttaaggaggccacta

SEQ ID NO: 5484786 - DNA, 25 bp, Homo sapien
tgaaggatatttggctacagaagct

SEQ ID NO: 5484787 - DNA, 25 bp, Homo sapien
tactttcatatggagatggcagttt

SEQ ID NO: 5484788 - DNA, 25 bp, Homo sapien
tccaggactcacgtgttgctcccac

SEQ ID NO: 5484789 - DNA, 25 bp, Homo sapien
atgggcatgtaacaaagtaattcat

SEQ ID NO: 5484790 - DNA, 25 bp, Homo sapien
ccctagggcgctcccgctccccgtg

SEQ ID NO: 5484791 - DNA, 25 bp, Homo sapien
cacggggagcgggagcgccctaggg

SEQ ID NO: 5484792 - DNA, 25 bp, Homo sapien
gggcgctcccgctccccgtgacggt

SEQ ID NO: 5484793 - DNA, 25 bp, Homo sapien
accgtcacggggagcgggagcgccc

SEQ ID NO: 5484794 - DNA, 25 bp, Homo sapien
cgatttatccgttcttgtgaacgtc

SEQ ID NO: 5484795 - DNA, 25 bp, Homo sapien
gacgttcacaagaacggataaatcg

SEQ ID NO: 5484796 - DNA, 25 bp, Homo sapien
tacctaggcctggtcagcatgttga

SEQ ID NO: 5484797 - DNA, 25 bp, Homo sapien
agtggctgtagtaacagagccacgc

SEQ ID NO: 5484798 - DNA, 25 bp, Homo sapien
cccatacctaggcctggtcagcatg

SEQ ID NO: 5484799 - DNA, 25 bp, Homo sapien
gatgtatctacggagatcagctgca

SEQ ID NO: 5484800 - DNA, 25 bp, Homo sapien
tgggccatctgctctggtgtggcat

SEQ ID NO: 5484801 - DNA, 25 bp, Homo sapien
gtatctacggagatcagctgcatac

SEQ ID NO: 5484802 - DNA, 25 bp, Homo sapien
ggctgtagtaacagagccacgcagg

SEQ ID NO: 5484803 - DNA, 25 bp, Homo sapien
ctacggagatcagctgcatactggg

SEQ ID NO: 5484804 - DNA, 25 bp, Homo sapien
tttcccatacctaggcctggtcagc

SEQ ID NO: 5484805 - DNA, 25 bp, Homo sapien
ttgtgtcttttcccatacctaggcc

SEQ ID NO: 5484806 - DNA, 25 bp, Homo sapien
ctgggccatctgctctggtgtggca

SEQ ID NO: 5484807 - DNA, 25 bp, Homo sapien
tggacctggtgaggcacctgtggtc

SEQ ID NO: 5484808 - DNA, 25 bp, Homo sapien
gaccacaggtgcctcaccaggtcca

SEQ ID NO: 5484809 - DNA, 25 bp, Homo sapien
ctcaacaccatagaaagtcagagtg

SEQ ID NO: 5484810 - DNA, 25 bp, Homo sapien
tgtccagtggcctttggaaaggtgg

SEQ ID NO: 5484811 - DNA, 25 bp, Homo sapien
gaatgatcaagagctgaaatgcagc

SEQ ID NO: 5484812 - DNA, 25 bp, Homo sapien
aagctctcaacaccatagaaagtca

SEQ ID NO: 5484813 - DNA, 25 bp, Homo sapien
ggcagaatgatcaagagctgaaatg

SEQ ID NO: 5484814 - DNA, 25 bp, Homo sapien
gatcaagagctgaaatgcagcgttt

SEQ ID NO: 5484815 - DNA, 25 bp, Homo sapien
caccatagaaagtcagagtgtttcc

SEQ ID NO: 5484816 - DNA, 25 bp, Homo sapien
gaaatgcagcgtttaagagacatgt

SEQ ID NO: 5484817 - DNA, 25 bp, Homo sapien
ttaagagacatgtccagtggccttt

SEQ ID NO: 5484818 - DNA, 25 bp, Homo sapien
gaaagtcagagtgtttccccagacc

SEQ ID NO: 5484819 - DNA, 25 bp, Homo sapien
tccccagaccataacaaagaaccta

SEQ ID NO: 5484820 - DNA, 25 bp, Homo sapien
gtacaaaacgatataaacgatagta

SEQ ID NO: 5484821 - DNA, 25 bp, Homo sapien
tactatcgtttatatcgttttgtac

SEQ ID NO: 5484822 - DNA, 25 bp, Homo sapien
tgtctaaggagatatgtgttgtggg

SEQ ID NO: 5484823 - DNA, 25 bp, Homo sapien
ttcttgaattgagttgctgtgatat

SEQ ID NO: 5484824 - DNA, 25 bp, Homo sapien
ttagggcttcagtaggccgtgatca

SEQ ID NO: 5484825 - DNA, 25 bp, Homo sapien
gccatgagtcttataacacagcatt

SEQ ID NO: 5484826 - DNA, 25 bp, Homo sapien
acacagcattagtgtctaaggagat

SEQ ID NO: 5484827 - DNA, 25 bp, Homo sapien
tcatcaagataaggtacacgaagct

SEQ ID NO: 5484828 - DNA, 25 bp, Homo sapien
atgccattttctgaggtgaacgttc

SEQ ID NO: 5484829 - DNA, 25 bp, Homo sapien
gaaaaatgtgttaagccatgagtct

SEQ ID NO: 5484830 - DNA, 25 bp, Homo sapien
tagctgaacaagaataaaactatgt

SEQ ID NO: 5484831 - DNA, 25 bp, Homo sapien
tgtgggagtagtagataagattaca

SEQ ID NO: 5484832 - DNA, 25 bp, Homo sapien
gggagaattatgtggcaaggtattt

SEQ ID NO: 5484833 - DNA, 25 bp, Homo sapien
aagtacagccagccctctgtgtcta

SEQ ID NO: 5484834 - DNA, 25 bp, Homo sapien
taacagttggctttaaacgtataca

SEQ ID NO: 5484835 - DNA, 25 bp, Homo sapien
gtgaaaacccaattatggcaaataa

SEQ ID NO: 5484836 - DNA, 25 bp, Homo sapien
cagtgagacaacatcgtgccactgc

SEQ ID NO: 5484837 - DNA, 25 bp, Homo sapien
tcgatctagtcggaacatgtgggca

SEQ ID NO: 5484838 - DNA, 25 bp, Homo sapien
tcatgatgaaaactgaagttgaatc

SEQ ID NO: 5484839 - DNA, 25 bp, Homo sapien
gggaaataaagtacagccagccctc

SEQ ID NO: 5484840 - DNA, 25 bp, Homo sapien
tttggggtgtaatctaaatagtgaa

SEQ ID NO: 5484841 - DNA, 25 bp, Homo sapien
aaaaactgtcatttggggtgtaatc

SEQ ID NO: 5484842 - DNA, 25 bp, Homo sapien
atacccaaatatataaggctgtgtt

SEQ ID NO: 5484843 - DNA, 25 bp, Homo sapien
atttaataaaggcatcgatctagtc

SEQ ID NO: 5484844 - DNA, 25 bp, Homo sapien
aatctatatgatttaggaggtaacg

SEQ ID NO: 5484845 - DNA, 25 bp, Homo sapien
cgttacctcctaaatcatatagatt

SEQ ID NO: 5484846 - DNA, 25 bp, Homo sapien
acaacagggtggtaatcgaaacaaa

SEQ ID NO: 5484847 - DNA, 25 bp, Homo sapien
tttgtttcgattaccaccctgttgt

SEQ ID NO: 5484848 - DNA, 25 bp, Homo sapien
tggttttcagctatggacacagtcc

SEQ ID NO: 5484849 - DNA, 25 bp, Homo sapien
acaacagcctgaatccagaactgtc

SEQ ID NO: 5484850 - DNA, 25 bp, Homo sapien
tgaccttcccgctcccacaacagcc

SEQ ID NO: 5484851 - DNA, 25 bp, Homo sapien
ccaggcaaagcagttcttagaggga

SEQ ID NO: 5484852 - DNA, 25 bp, Homo sapien
cctttccggagccactgcccgaagg

SEQ ID NO: 5484853 - DNA, 25 bp, Homo sapien
ctctgcctcccggattcaagcgatt

SEQ ID NO: 5484854 - DNA, 25 bp, Homo sapien
cagaactgtcaagtctggttttcag

SEQ ID NO: 5484855 - DNA, 25 bp, Homo sapien
tcttagagggaaattcacattcatc

SEQ ID NO: 5484856 - DNA, 25 bp, Homo sapien
gggaagccttgatggcctttccgga

SEQ ID NO: 5484857 - DNA, 25 bp, Homo sapien
atggacacagtccactgcccgaagg

SEQ ID NO: 5484858 - DNA, 25 bp, Homo sapien
actcacctcggcatccacccacctc

SEQ ID NO: 5484859 - DNA, 25 bp, Homo sapien
cctggctgtcaatgtcaacggcaag

SEQ ID NO: 5484860 - DNA, 25 bp, Homo sapien
atttgcagctccaggactgacatgg

SEQ ID NO: 5484861 - DNA, 25 bp, Homo sapien
gcgagtgtaggaaaatgatataatg

SEQ ID NO: 5484862 - DNA, 25 bp, Homo sapien
tttagccttgaatgtcacggacacc

SEQ ID NO: 5484863 - DNA, 25 bp, Homo sapien
cagaggcaaaacatacaagatcaac

SEQ ID NO: 5484864 - DNA, 25 bp, Homo sapien
aagagtcattggggccactgttctt

SEQ ID NO: 5484865 - DNA, 25 bp, Homo sapien
tgaatggcatccaaccgctgctcac

SEQ ID NO: 5484866 - DNA, 25 bp, Homo sapien
tcgctgatggtagtggtcatttgca

SEQ ID NO: 5484867 - DNA, 25 bp, Homo sapien
acggacacctcagagtgaatggcat

SEQ ID NO: 5484868 - DNA, 25 bp, Homo sapien
ggaagaaagactatagacagtgcca

SEQ ID NO: 5484869 - DNA, 25 bp, Homo sapien
ggccgagaggaaagcctttctgtag

SEQ ID NO: 5484870 - DNA, 25 bp, Homo sapien
gaggactccagtcctgtcccgaccc

SEQ ID NO: 5484871 - DNA, 25 bp, Homo sapien
gggtcgggacaggactggagtcctc

SEQ ID NO: 5484872 - DNA, 25 bp, Homo sapien
tgtaactcagtgttttgtacttcac

SEQ ID NO: 5484873 - DNA, 25 bp, Homo sapien
ttaatatcgatcagagtaattcttt

SEQ ID NO: 5484874 - DNA, 25 bp, Homo sapien
tagagtagtatttgctttttagtcc

SEQ ID NO: 5484875 - DNA, 25 bp, Homo sapien
ccctctccctgcccctagaacaacc

SEQ ID NO: 5484876 - DNA, 25 bp, Homo sapien
ccctgcccctagaacaaccagtatt

SEQ ID NO: 5484877 - DNA, 25 bp, Homo sapien
aaccagtattagaaggtgccaccat

SEQ ID NO: 5484878 - DNA, 25 bp, Homo sapien
agaacaaccagtattagaaggtgcc

SEQ ID NO: 5484879 - DNA, 25 bp, Homo sapien
ccaccattggtgctgccttctcttc

SEQ ID NO: 5484880 - DNA, 25 bp, Homo sapien
gaaggtgccaccattggtgctgcct

SEQ ID NO: 5484881 - DNA, 25 bp, Homo sapien
tcccacagcctgtaactcagtgttt

SEQ ID NO: 5484882 - DNA, 25 bp, Homo sapien
caccccaacatagagtagtatttgc

SEQ ID NO: 5484883 - DNA, 25 bp, Homo sapien
ttaagacggtgcaagagggccctgt

SEQ ID NO: 5484884 - DNA, 25 bp, Homo sapien
acagggccctcttgcaccgtcttaa

SEQ ID NO: 5484885 - DNA, 25 bp, Homo sapien
acacccgttagcttgatcgagaact

SEQ ID NO: 5484886 - DNA, 25 bp, Homo sapien
agttctcgatcaagctaacgggtgt

SEQ ID NO: 5484887 - DNA, 25 bp, Homo sapien
ttatgatcatttagtcagtacaata

SEQ ID NO: 5484888 - DNA, 25 bp, Homo sapien
tattgtactgactaaatgatcataa

SEQ ID NO: 5484889 - DNA, 25 bp, Homo sapien
gtagcaccaagcctgatagatctgt

SEQ ID NO: 5484890 - DNA, 25 bp, Homo sapien
atttgatggacactgcaccagcttc

SEQ ID NO: 5484891 - DNA, 25 bp, Homo sapien
gcagcgcagtgccaatgctgatcac

SEQ ID NO: 5484892 - DNA, 25 bp, Homo sapien
gcttctcagggaatccgacaccagc

SEQ ID NO: 5484893 - DNA, 25 bp, Homo sapien
gcttccttcaggttctagattcttg

SEQ ID NO: 5484894 - DNA, 25 bp, Homo sapien
gcagaggggaatccgaggccatcaa

SEQ ID NO: 5484895 - DNA, 25 bp, Homo sapien
ggagattttgttaacgtctgccacc

SEQ ID NO: 5484896 - DNA, 25 bp, Homo sapien
ggccatcaaccttggtgacagcagc

SEQ ID NO: 5484897 - DNA, 25 bp, Homo sapien
tcagcctcagagccttgggatgcag

SEQ ID NO: 5484898 - DNA, 25 bp, Homo sapien
gacctcgggcaagtctcacagaaac

SEQ ID NO: 5484899 - DNA, 25 bp, Homo sapien
agattcttgctacttagggcgggct

SEQ ID NO: 5484900 - DNA, 25 bp, Homo sapien
gctgctgtcaccaaggttgatggcc

SEQ ID NO: 5484901 - DNA, 25 bp, Homo sapien
gtttctgtgagacttgcccgaggtc

SEQ ID NO: 5484902 - DNA, 25 bp, Homo sapien
ttgatggcctcggattcccctctgc

SEQ ID NO: 5484903 - DNA, 25 bp, Homo sapien
gaagctggtgcagtgtccatcaaat

SEQ ID NO: 5484904 - DNA, 25 bp, Homo sapien
agcccgccctaagtagcaagaatct

SEQ ID NO: 5484905 - DNA, 25 bp, Homo sapien
gctggtgtcggattccctgagaagc

SEQ ID NO: 5484906 - DNA, 25 bp, Homo sapien
ggtggcagacgttaacaaaatctcc

SEQ ID NO: 5484907 - DNA, 25 bp, Homo sapien
acagatctatcaggcttggtgctac

SEQ ID NO: 5484908 - DNA, 25 bp, Homo sapien
gtgatcagcattggcactgcgctgc

SEQ ID NO: 5484909 - DNA, 25 bp, Homo sapien
caagaatctagaacctgaaggaagc

SEQ ID NO: 5484910 - DNA, 25 bp, Homo sapien
ctgcatcccaaggctctgaggctga

SEQ ID NO: 5484911 - DNA, 25 bp, Homo sapien
ttattatatgactaactaacatgac

SEQ ID NO: 5484912 - DNA, 25 bp, Homo sapien
gtcatgttagttagtcatataataa

SEQ ID NO: 5484913 - DNA, 25 bp, Homo sapien
tcttttggctcttcacttcgtgtct

SEQ ID NO: 5484914 - DNA, 25 bp, Homo sapien
agacacgaagtgaagagccaaaaga

SEQ ID NO: 5484915 - DNA, 25 bp, Homo sapien
acctcgtcagcggagtcccccggtc

SEQ ID NO: 5484916 - DNA, 25 bp, Homo sapien
gaccgggggactccgctgacgaggt

SEQ ID NO: 5484917 - DNA, 25 bp, Homo sapien
ggtagaaggctcgattctaaaacct

SEQ ID NO: 5484918 - DNA, 25 bp, Homo sapien
aggttttagaatcgagccttctacc

SEQ ID NO: 5484919 - DNA, 25 bp, Homo sapien
tggaagtgtcaaagtcccatgaaat

SEQ ID NO: 5484920 - DNA, 25 bp, Homo sapien
atttcatgggactttgacacttcca

SEQ ID NO: 5484921 - DNA, 25 bp, Homo sapien
gagaccgttgtaaaacaagtatggt

SEQ ID NO: 5484922 - DNA, 25 bp, Homo sapien
accatacttgttttacaacggtctc

SEQ ID NO: 5484923 - DNA, 25 bp, Homo sapien
tgaaagttctggacgttgaactagt

SEQ ID NO: 5484924 - DNA, 25 bp, Homo sapien
actagttcaacgtccagaactttca

SEQ ID NO: 5484925 - DNA, 25 bp, Homo sapien
cactacataccctggtgaccatagg

SEQ ID NO: 5484926 - DNA, 25 bp, Homo sapien
cctatggtcaccagggtatgtagtg

SEQ ID NO: 5484927 - DNA, 25 bp, Homo sapien
tcctttgacgaaccaaaaactatac

SEQ ID NO: 5484928 - DNA, 25 bp, Homo sapien
gtatagtttttggttcgtcaaagga

SEQ ID NO: 5484929 - DNA, 25 bp, Homo sapien
cttacactctgaaaattagaaaggg

SEQ ID NO: 5484930 - DNA, 25 bp, Homo sapien
aagttacaaagtacaagtttgacat

SEQ ID NO: 5484931 - DNA, 25 bp, Homo sapien
tgacatgcaaaataggttgtatccc

SEQ ID NO: 5484932 - DNA, 25 bp, Homo sapien
aaagaatgaaatatatagtaataca

SEQ ID NO: 5484933 - DNA, 25 bp, Homo sapien
cacaaagcataaattcttgagtgga

SEQ ID NO: 5484934 - DNA, 25 bp, Homo sapien
cgtggggatggatactctattttcc

SEQ ID NO: 5484935 - DNA, 25 bp, Homo sapien
gcatacctctatcaaaacacatcat

SEQ ID NO: 5484936 - DNA, 25 bp, Homo sapien
aaatataaatgctcgtggggatgga

SEQ ID NO: 5484937 - DNA, 25 bp, Homo sapien
tgagtggatgagtatctcatgttcc

SEQ ID NO: 5484938 - DNA, 25 bp, Homo sapien
aagaaatgaaagacttacactctga

SEQ ID NO: 5484939 - DNA, 25 bp, Homo sapien
ataaattcttgagtggatgagtatc

SEQ ID NO: 5484940 - DNA, 25 bp, Homo sapien
gaagaagaagcggcctcgcaactct

SEQ ID NO: 5484941 - DNA, 25 bp, Homo sapien
gtttcattccctgatgttacgagca

SEQ ID NO: 5484942 - DNA, 25 bp, Homo sapien
aatatgaccatcttctgtattctgg

SEQ ID NO: 5484943 - DNA, 25 bp, Homo sapien
gaccacattccttggattacagctg

SEQ ID NO: 5484944 - DNA, 25 bp, Homo sapien
ggcctcgcaactcttataaatgtgg

SEQ ID NO: 5484945 - DNA, 25 bp, Homo sapien
atcttcacctttctctatagagctt

SEQ ID NO: 5484946 - DNA, 25 bp, Homo sapien
atagagcttgaggaccctcagcctc

SEQ ID NO: 5484947 - DNA, 25 bp, Homo sapien
tgtacgacgtttccatcagcttgtc

SEQ ID NO: 5484948 - DNA, 25 bp, Homo sapien
gacaagacgcggcttttatcttcac

SEQ ID NO: 5484949 - DNA, 25 bp, Homo sapien
gacctgctcatctatacacggttac

SEQ ID NO: 5484950 - DNA, 25 bp, Homo sapien
gtgtacataaatttgacctgctcat

SEQ ID NO: 5484951 - DNA, 25 bp, Homo sapien
gaggctgagggtcctcaagctctat

SEQ ID NO: 5484952 - DNA, 25 bp, Homo sapien
gtgaagataaaagccgcgtcttgtc

SEQ ID NO: 5484953 - DNA, 25 bp, Homo sapien
ccagaatacagaagatggtcatatt

SEQ ID NO: 5484954 - DNA, 25 bp, Homo sapien
gtaaccgtgtatagatgagcaggtc

SEQ ID NO: 5484955 - DNA, 25 bp, Homo sapien
cagctgtaatccaaggaatgtggtc

SEQ ID NO: 5484956 - DNA, 25 bp, Homo sapien
aagctctatagagaaaggtgaagat

SEQ ID NO: 5484957 - DNA, 25 bp, Homo sapien
ccacatttataagagttgcgaggcc

SEQ ID NO: 5484958 - DNA, 25 bp, Homo sapien
atgagcaggtcaaatttatgtacac

SEQ ID NO: 5484959 - DNA, 25 bp, Homo sapien
tgctcgtaacatcagggaatgaaac

SEQ ID NO: 5484960 - DNA, 25 bp, Homo sapien
gacaagctgatggaaacgtcgtaca

SEQ ID NO: 5484961 - DNA, 25 bp, Homo sapien
agagttgcgaggccgcttcttcttc

SEQ ID NO: 5484962 - DNA, 25 bp, Homo sapien
agccgtggagcttcaaagtctgaaa

SEQ ID NO: 5484963 - DNA, 25 bp, Homo sapien
gcccagcgggtacaccatttggtca

SEQ ID NO: 5484964 - DNA, 25 bp, Homo sapien
cccacgatccccagtggctgcgaga

SEQ ID NO: 5484965 - DNA, 25 bp, Homo sapien
ttgtaggtagttgtagccagaaagt

SEQ ID NO: 5484966 - DNA, 25 bp, Homo sapien
gatagaacacaaaagtccctgcaaa

SEQ ID NO: 5484967 - DNA, 25 bp, Homo sapien
tcagacatctgaggcctttaactag

SEQ ID NO: 5484968 - DNA, 25 bp, Homo sapien
tagctcagaacacaaagccgtggag

SEQ ID NO: 5484969 - DNA, 25 bp, Homo sapien
atgttgaatcttggctttggctctc

SEQ ID NO: 5484970 - DNA, 25 bp, Homo sapien
ctgaaagagaacttacccacgatcc

SEQ ID NO: 5484971 - DNA, 25 bp, Homo sapien
tacctatgagtgcaagaaaaagaaa

SEQ ID NO: 5484972 - DNA, 25 bp, Homo sapien
gccagaaagtggagtactcagttct

SEQ ID NO: 5484973 - DNA, 25 bp, Homo sapien
tgagcagacaatggatccagcagta

SEQ ID NO: 5484974 - DNA, 25 bp, Homo sapien
tggagagagaaatggttcatctaca

SEQ ID NO: 5484975 - DNA, 25 bp, Homo sapien
gtggaataagtaaccttgagcagac

SEQ ID NO: 5484976 - DNA, 25 bp, Homo sapien
ctgcctcccagcagaagacaagagc

SEQ ID NO: 5484977 - DNA, 25 bp, Homo sapien
ctggctagctacaaagccgtggtcc

SEQ ID NO: 5484978 - DNA, 25 bp, Homo sapien
caagagccctagaaagactgtcatt

SEQ ID NO: 5484979 - DNA, 25 bp, Homo sapien
ccggcgtaaattccgaaggagctgg

SEQ ID NO: 5484980 - DNA, 25 bp, Homo sapien
cctgcagttagaagaaaacagcagc

SEQ ID NO: 5484981 - DNA, 25 bp, Homo sapien
ggtaggatgtacgtcttagtggaat

SEQ ID NO: 5484982 - DNA, 25 bp, Homo sapien
ggagctggagaacgattcttccctt

SEQ ID NO: 5484983 - DNA, 25 bp, Homo sapien
ctaagagaactcagcagatacaaat

SEQ ID NO: 5484984 - DNA, 25 bp, Homo sapien
agcgcagactgcgaggctcttttgt

SEQ ID NO: 5484985 - DNA, 25 bp, Homo sapien
ggcctgcggtacgccgcttcagtga

SEQ ID NO: 5484986 - DNA, 25 bp, Homo sapien
cggcgcttcgggccttgtagtcttg

SEQ ID NO: 5484987 - DNA, 25 bp, Homo sapien
accctcgcctactgtgcgtgcgcgg

SEQ ID NO: 5484988 - DNA, 25 bp, Homo sapien
tctaggttacaacgctctacgctgc

SEQ ID NO: 5484989 - DNA, 25 bp, Homo sapien
gctcttttgttcggctgaggggagg

SEQ ID NO: 5484990 - DNA, 25 bp, Homo sapien
acaacgctctacgctgcaatctctc

SEQ ID NO: 5484991 - DNA, 25 bp, Homo sapien
tgcaatctctccaccgttacagttt

SEQ ID NO: 5484992 - DNA, 25 bp, Homo sapien
actataagtccctaccaccctcgcc

SEQ ID NO: 5484993 - DNA, 25 bp, Homo sapien
ttgtagtcttggacagacccccgag

SEQ ID NO: 5484994 - DNA, 25 bp, Homo sapien
gcgaccgcccctggcccatatgttc

SEQ ID NO: 5484995 - DNA, 25 bp, Homo sapien
gagacagagtctttacagaggcaat

SEQ ID NO: 5484996 - DNA, 25 bp, Homo sapien
tgttggatagggttgttgtctctcc

SEQ ID NO: 5484997 - DNA, 25 bp, Homo sapien
tgaggtcattagggtagacccctaa

SEQ ID NO: 5484998 - DNA, 25 bp, Homo sapien
aggatgtctctgttctgggccccat

SEQ ID NO: 5484999 - DNA, 25 bp, Homo sapien
acccaaggagtggtgttatgggttg

SEQ ID NO: 5485000 - DNA, 25 bp, Homo sapien
gttagattggcgtccttgcagaaag

SEQ ID NO: 5485001 - DNA, 25 bp, Homo sapien
tggatttcatcactgggaaagctgt

SEQ ID NO: 5485002 - DNA, 25 bp, Homo sapien
gggccccacaaaaagctacattgaa

SEQ ID NO: 5485003 - DNA, 25 bp, Homo sapien
gcacctactaagtgtgtggtctggg

SEQ ID NO: 5485004 - DNA, 25 bp, Homo sapien
aggcgtgtctgtgttgatacccaag

SEQ ID NO: 5485005 - DNA, 25 bp, Homo sapien
gaggcaatcaagtgaaaatgaggtc

SEQ ID NO: 5485006 - DNA, 25 bp, Homo sapien
tctagaagtaagagtcactgagatt

SEQ ID NO: 5485007 - DNA, 25 bp, Homo sapien
gtggaagtgattatgcagtgccatg

SEQ ID NO: 5485008 - DNA, 25 bp, Homo sapien
tatagaaggaagagtgccctctcta

SEQ ID NO: 5485009 - DNA, 25 bp, Homo sapien
tgaggtagccagaaaatgctggaac

SEQ ID NO: 5485010 - DNA, 25 bp, Homo sapien
ttagatttggctagatttgggtgga

SEQ ID NO: 5485011 - DNA, 25 bp, Homo sapien
agagtcactgagattaaacaagaaa

SEQ ID NO: 5485012 - DNA, 25 bp, Homo sapien
tggaacagagacctgtatggtcttc

SEQ ID NO: 5485013 - DNA, 25 bp, Homo sapien
gattatgcagtgccatgaggtagcc

SEQ ID NO: 5485014 - DNA, 25 bp, Homo sapien
cttgatggttagaaaggttagaggt

SEQ ID NO: 5485015 - DNA, 25 bp, Homo sapien
agaaagggagtttgtcttggaatag

SEQ ID NO: 5485016 - DNA, 25 bp, Homo sapien
ttggaatagatacagaagtgcttaa

SEQ ID NO: 5485017 - DNA, 25 bp, Homo sapien
catggtggcttaccgtcaaaatcat

SEQ ID NO: 5485018 - DNA, 25 bp, Homo sapien
agttgtcaacctaatgccttctgtc

SEQ ID NO: 5485019 - DNA, 25 bp, Homo sapien
cataaccaccacccactctgcttct

SEQ ID NO: 5485020 - DNA, 25 bp, Homo sapien
taaggaaggtctttcaggcactttc

SEQ ID NO: 5485021 - DNA, 25 bp, Homo sapien
cttctgtcaaacataaccaccaccc

SEQ ID NO: 5485022 - DNA, 25 bp, Homo sapien
ggcagagaacacaatcatggtggct

SEQ ID NO: 5485023 - DNA, 25 bp, Homo sapien
aacaggcacatataagcttagcaag

SEQ ID NO: 5485024 - DNA, 25 bp, Homo sapien
tagcaagagcacctttcaaagtcac

SEQ ID NO: 5485025 - DNA, 25 bp, Homo sapien
ttttgtaaggtcaaccagaggcaga

SEQ ID NO: 5485026 - DNA, 25 bp, Homo sapien
gaagtagggagtcaagacttgatat

SEQ ID NO: 5485027 - DNA, 25 bp, Homo sapien
tcaaagtcacagttccaatggtttt

SEQ ID NO: 5485028 - DNA, 25 bp, Homo sapien
gcctgcgtggtcgcccttcaggtag

SEQ ID NO: 5485029 - DNA, 25 bp, Homo sapien
ttcgctatttccagtttgaagctac

SEQ ID NO: 5485030 - DNA, 25 bp, Homo sapien
tatcatgggcgtttagagttataca

SEQ ID NO: 5485031 - DNA, 25 bp, Homo sapien
atagtcgcagaactcgaagaagaag

SEQ ID NO: 5485032 - DNA, 25 bp, Homo sapien
gggcgtttagagttatacaaatgac

SEQ ID NO: 5485033 - DNA, 25 bp, Homo sapien
cggagtcactgcccaccgtccagta

SEQ ID NO: 5485034 - DNA, 25 bp, Homo sapien
gcagactgagttattttatttcgct

SEQ ID NO: 5485035 - DNA, 25 bp, Homo sapien
gtttgaagctactatcatgggcgtt

SEQ ID NO: 5485036 - DNA, 25 bp, Homo sapien
gatggccaccttgttatagtcgcag

SEQ ID NO: 5485037 - DNA, 25 bp, Homo sapien
ccgtccagtatttgcctgtggagtc

SEQ ID NO: 5485038 - DNA, 25 bp, Homo sapien
ccggccctagtactcccagagcgag

SEQ ID NO: 5485039 - DNA, 25 bp, Homo sapien
agaggaagactgctccaaacttctc

SEQ ID NO: 5485040 - DNA, 25 bp, Homo sapien
gagagaatcgcacacagttgacaaa

SEQ ID NO: 5485041 - DNA, 25 bp, Homo sapien
tcagtccaagcaatgtctttgatct

SEQ ID NO: 5485042 - DNA, 25 bp, Homo sapien
tactgtcttcagtccaagcaatgtc

SEQ ID NO: 5485043 - DNA, 25 bp, Homo sapien
ctcatacttcaacaggtgctccttc

SEQ ID NO: 5485044 - DNA, 25 bp, Homo sapien
tgtaatctcgcccacagaagagcca

SEQ ID NO: 5485045 - DNA, 25 bp, Homo sapien
tttgttgtgtcctgtaatctcgccc

SEQ ID NO: 5485046 - DNA, 25 bp, Homo sapien
agcgaaaggctggtactcatacttc

SEQ ID NO: 5485047 - DNA, 25 bp, Homo sapien
cgcgcagttatcatcgcttcccgtg

SEQ ID NO: 5485048 - DNA, 25 bp, Homo sapien
ctttgatcttcccagcgaaaggctg

SEQ ID NO: 5485049 - DNA, 25 bp, Homo sapien
tcttcccagcgaaaggctggtactc

SEQ ID NO: 5485050 - DNA, 25 bp, Homo sapien
tgtttcaaagtgcaaggaaggattg

SEQ ID NO: 5485051 - DNA, 25 bp, Homo sapien
ccgaacacgcaaaacactcccaatc

SEQ ID NO: 5485052 - DNA, 25 bp, Homo sapien
aagtgattccgaacacgcaaaacac

SEQ ID NO: 5485053 - DNA, 25 bp, Homo sapien
aaggaaggattgtctcagccaacat

SEQ ID NO: 5485054 - DNA, 25 bp, Homo sapien
cagccaacattacaagtgattccga

SEQ ID NO: 5485055 - DNA, 25 bp, Homo sapien
gtggcgccaactgtgaacttgaact

SEQ ID NO: 5485056 - DNA, 25 bp, Homo sapien
gtatggcggctctgcttgatgccac

SEQ ID NO: 5485057 - DNA, 25 bp, Homo sapien
aaagtgtttcaaagtgcaaggaagg

SEQ ID NO: 5485058 - DNA, 25 bp, Homo sapien
tcccaatcaggtgctttaaacttac

SEQ ID NO: 5485059 - DNA, 25 bp, Homo sapien
catcgcttcccgtgccagcggtatg

SEQ ID NO: 5485060 - DNA, 25 bp, Homo sapien
aggctatctcttaaaggctcaaagt

SEQ ID NO: 5485061 - DNA, 25 bp, Homo sapien
tacaaggcctttttgtgagggctgc

SEQ ID NO: 5485062 - DNA, 25 bp, Homo sapien
ccctacggtggcagtcaccgagaga

SEQ ID NO: 5485063 - DNA, 25 bp, Homo sapien
cctggcggacattcccacacagtgc

SEQ ID NO: 5485064 - DNA, 25 bp, Homo sapien
tgtctcaatgaggctccgagctctg

SEQ ID NO: 5485065 - DNA, 25 bp, Homo sapien
ttctcattagaaagagagatggggc

SEQ ID NO: 5485066 - DNA, 25 bp, Homo sapien
tctttgtcatgtgggttcggccctc

SEQ ID NO: 5485067 - DNA, 25 bp, Homo sapien
gggatggcttggtcacgtctctgcc

SEQ ID NO: 5485068 - DNA, 25 bp, Homo sapien
agggcagggagtcactctttgtcat

SEQ ID NO: 5485069 - DNA, 25 bp, Homo sapien
tgagggctgctacgcaaactctctt

SEQ ID NO: 5485070 - DNA, 25 bp, Homo sapien
gcccgttcaggacgggtctccacag

SEQ ID NO: 5485071 - DNA, 25 bp, Homo sapien
tagtcaagacacagtcgcccgttca

SEQ ID NO: 5485072 - DNA, 25 bp, Homo sapien
taaagaactcataaaacttaacaat

SEQ ID NO: 5485073 - DNA, 25 bp, Homo sapien
attgttaagttttatgagttcttta

SEQ ID NO: 5485074 - DNA, 25 bp, Homo sapien
cgtgcccggcgggactcgccgccac

SEQ ID NO: 5485075 - DNA, 25 bp, Homo sapien
gtggcggcgagtcccgccgggcacg

SEQ ID NO: 5485076 - DNA, 25 bp, Homo sapien
cgatagggtttgttacaccataaag

SEQ ID NO: 5485077 - DNA, 25 bp, Homo sapien
ctttatggtgtaacaaaccctatcg

SEQ ID NO: 5485078 - DNA, 25 bp, Homo sapien
aaaatatttattggtcatctatacc

SEQ ID NO: 5485079 - DNA, 25 bp, Homo sapien
ggtatagatgaccaataaatatttt

SEQ ID NO: 5485080 - DNA, 25 bp, Homo sapien
ccggggcacccacggcgagtgcgac

SEQ ID NO: 5485081 - DNA, 25 bp, Homo sapien
gtcgcactcgccgtgggtgccccgg

SEQ ID NO: 5485082 - DNA, 25 bp, Homo sapien
gggcctatacgccaacacacgtcaa

SEQ ID NO: 5485083 - DNA, 25 bp, Homo sapien
ttgacgtgtgttggcgtataggccc

SEQ ID NO: 5485084 - DNA, 25 bp, Homo sapien
cgacagtcagagactcggtcacggt

SEQ ID NO: 5485085 - DNA, 25 bp, Homo sapien
accgtgaccgagtctctgactgtcg

SEQ ID NO: 5485086 - DNA, 25 bp, Homo sapien
tgtccacttccgtccgcggacaccc

SEQ ID NO: 5485087 - DNA, 25 bp, Homo sapien
gggtgtccgcggacggaagtggaca

SEQ ID NO: 5485088 - DNA, 25 bp, Homo sapien
catataactatgagtcaaaagaact

SEQ ID NO: 5485089 - DNA, 25 bp, Homo sapien
agttcttttgactcatagttatatg

SEQ ID NO: 5485090 - DNA, 25 bp, Homo sapien
gaggcagagccgtctgcgcatcgcc

SEQ ID NO: 5485091 - DNA, 25 bp, Homo sapien
ggcgatgcgcagacggctctgcctc

SEQ ID NO: 5485092 - DNA, 25 bp, Homo sapien
acagtgaaactgcgaatggctcatt

SEQ ID NO: 5485093 - DNA, 25 bp, Homo sapien
ggttgatcctgccagtagcatatgc

SEQ ID NO: 5485094 - DNA, 25 bp, Homo sapien
atgcatgtctaagtacgcacggccg

SEQ ID NO: 5485095 - DNA, 25 bp, Homo sapien
atggctcattaaatcagttatggtt

SEQ ID NO: 5485096 - DNA, 25 bp, Homo sapien
tcagttatggttcctttggtcgctc

SEQ ID NO: 5485097 - DNA, 25 bp, Homo sapien
gccggtacagtgaaactgcgaatgg

SEQ ID NO: 5485098 - DNA, 25 bp, Homo sapien
aagccatgcatgtctaagtacgcac

SEQ ID NO: 5485099 - DNA, 25 bp, Homo sapien
tggtcgctcgctcctctcctacttg

SEQ ID NO: 5485100 - DNA, 25 bp, Homo sapien
tctcaaagattaagccatgcatgtc

SEQ ID NO: 5485101 - DNA, 25 bp, Homo sapien
gtagcatatgcttgtctcaaagatt

SEQ ID NO: 5485102 - DNA, 25 bp, Homo sapien
tatggttcctttggtcgctcgctcc

SEQ ID NO: 5485103 - DNA, 25 bp, Homo sapien
ggcactatgtctaataacgttaaaa

SEQ ID NO: 5485104 - DNA, 25 bp, Homo sapien
ttttaacgttattagacatagtgcc

SEQ ID NO: 5485105 - DNA, 25 bp, Homo sapien
tggtggcagcttggacttaaccagg

SEQ ID NO: 5485106 - DNA, 25 bp, Homo sapien
cccagagtttccgtgatgctgctgc

SEQ ID NO: 5485107 - DNA, 25 bp, Homo sapien
gagtttccgtgatgctgctgctgct

SEQ ID NO: 5485108 - DNA, 25 bp, Homo sapien
ttggacttaaccaggctgaacttgc

SEQ ID NO: 5485109 - DNA, 25 bp, Homo sapien
gtttccgtgatgctgctgctgctgc

SEQ ID NO: 5485110 - DNA, 25 bp, Homo sapien
ggatgggcattgctgttggctaaga

SEQ ID NO: 5485111 - DNA, 25 bp, Homo sapien
ttaaccaggctgaacttgctaagcc

SEQ ID NO: 5485112 - DNA, 25 bp, Homo sapien
tggcagcttggacttaaccaggctg

SEQ ID NO: 5485113 - DNA, 25 bp, Homo sapien
ggcccagagtttccgtgatgctgct

SEQ ID NO: 5485114 - DNA, 25 bp, Homo sapien
agcttggacttaaccaggctgaact

SEQ ID NO: 5485115 - DNA, 25 bp, Homo sapien
cagagtttccgtgatgctgctgctg

SEQ ID NO: 5485116 - DNA, 25 bp, Homo sapien
taaaagcgactctgaatatactggt

SEQ ID NO: 5485117 - DNA, 25 bp, Homo sapien
tgattgcactgcgtttggggttaca

SEQ ID NO: 5485118 - DNA, 25 bp, Homo sapien
ataaggcattcccagtagcacctct

SEQ ID NO: 5485119 - DNA, 25 bp, Homo sapien
ctgccccaactgacaagaactgcca

SEQ ID NO: 5485120 - DNA, 25 bp, Homo sapien
tggagaccgataaaagcgactctga

SEQ ID NO: 5485121 - DNA, 25 bp, Homo sapien
atcctctgccccaactgacaagaac

SEQ ID NO: 5485122 - DNA, 25 bp, Homo sapien
agtagcacctctggagaccgataaa

SEQ ID NO: 5485123 - DNA, 25 bp, Homo sapien
atatactggtatatcctctgcccca

SEQ ID NO: 5485124 - DNA, 25 bp, Homo sapien
tcaactatcttgattgcactgcgtt

SEQ ID NO: 5485125 - DNA, 25 bp, Homo sapien
acaagaactgccaaagtcaactatc

SEQ ID NO: 5485126 - DNA, 25 bp, Homo sapien
gcactgcgtttggggttacaaagaa

SEQ ID NO: 5485127 - DNA, 25 bp, Homo sapien
aggtgtccagcttgttcccaaaggt

SEQ ID NO: 5485128 - DNA, 25 bp, Homo sapien
ttcattgctgaagccgaaatccccg

SEQ ID NO: 5485129 - DNA, 25 bp, Homo sapien
ttttgccctggaagagttctggggc

SEQ ID NO: 5485130 - DNA, 25 bp, Homo sapien
tgctgaagccgaaatccccgatttt

SEQ ID NO: 5485131 - DNA, 25 bp, Homo sapien
tcattgctgaagccgaaatccccga

SEQ ID NO: 5485132 - DNA, 25 bp, Homo sapien
ccagcttgttcccaaaggtgaattc

SEQ ID NO: 5485133 - DNA, 25 bp, Homo sapien
ttgccctggaagagttctggggcag

SEQ ID NO: 5485134 - DNA, 25 bp, Homo sapien
ttcccaaaggtgaattcattgctga

SEQ ID NO: 5485135 - DNA, 25 bp, Homo sapien
aaggtgaattcattgctgaagccga

SEQ ID NO: 5485136 - DNA, 25 bp, Homo sapien
catattttttgccctggaagagttc

SEQ ID NO: 5485137 - DNA, 25 bp, Homo sapien
gccacagaaggtgtccagcttgttc

SEQ ID NO: 5485138 - DNA, 25 bp, Homo sapien
acagcttcacctgaggaaatggctc

SEQ ID NO: 5485139 - DNA, 25 bp, Homo sapien
atgatgcgtgcaaatccaaagtcac

SEQ ID NO: 5485140 - DNA, 25 bp, Homo sapien
ccacagatctcctgaatgacttttc

SEQ ID NO: 5485141 - DNA, 25 bp, Homo sapien
gggctaagtatgctggagttcctac

SEQ ID NO: 5485142 - DNA, 25 bp, Homo sapien
tgatgcaagcagcacattttctggc

SEQ ID NO: 5485143 - DNA, 25 bp, Homo sapien
cctttgctccggagaacttcagggg

SEQ ID NO: 5485144 - DNA, 25 bp, Homo sapien
gagaacttcaggggctaagtatgct

SEQ ID NO: 5485145 - DNA, 25 bp, Homo sapien
tgctggagttcctaccacagatctc

SEQ ID NO: 5485146 - DNA, 25 bp, Homo sapien
gaggaaatggctctgctgatgcaag

SEQ ID NO: 5485147 - DNA, 25 bp, Homo sapien
tttcaccaatgatgcgtgcaaatcc

SEQ ID NO: 5485148 - DNA, 25 bp, Homo sapien
aaatccaaagtcacacagcttcacc

SEQ ID NO: 5485149 - DNA, 25 bp, Homo sapien
aagtcccttaagagttgattgtaat

SEQ ID NO: 5485150 - DNA, 25 bp, Homo sapien
tatttagcaaaatatttcctgcctt

SEQ ID NO: 5485151 - DNA, 25 bp, Homo sapien
gagttgattgtaatattgtagctat

SEQ ID NO: 5485152 - DNA, 25 bp, Homo sapien
ctgtattccgcttggccatggtatc

SEQ ID NO: 5485153 - DNA, 25 bp, Homo sapien
cataaaatgaaggtattcaagtccc

SEQ ID NO: 5485154 - DNA, 25 bp, Homo sapien
aatggtgttcctatcactgtattcc

SEQ ID NO: 5485155 - DNA, 25 bp, Homo sapien
tcctgccttgatatctcggtgtatt

SEQ ID NO: 5485156 - DNA, 25 bp, Homo sapien
ttggccatggtatctgtaagttgac

SEQ ID NO: 5485157 - DNA, 25 bp, Homo sapien
taagttgacctgctaccccaaaatc

SEQ ID NO: 5485158 - DNA, 25 bp, Homo sapien
ttccgcttggccatggtatctgtaa

SEQ ID NO: 5485159 - DNA, 25 bp, Homo sapien
tcctatcactgtattccgcttggcc

SEQ ID NO: 5485160 - DNA, 25 bp, Homo sapien
tctagcaattccaaaatcaccaatc

SEQ ID NO: 5485161 - DNA, 25 bp, Homo sapien
gtctattaagaactctagcaattcc

SEQ ID NO: 5485162 - DNA, 25 bp, Homo sapien
gtatggggtccctatgcaagttcga

SEQ ID NO: 5485163 - DNA, 25 bp, Homo sapien
agtagtatggggtccctatgcaagt

SEQ ID NO: 5485164 - DNA, 25 bp, Homo sapien
agctctaccagtctattaagaactc

SEQ ID NO: 5485165 - DNA, 25 bp, Homo sapien
tgacaagtagtatggggtccctatg

SEQ ID NO: 5485166 - DNA, 25 bp, Homo sapien
ctatgcaagttcgagccagctctac

SEQ ID NO: 5485167 - DNA, 25 bp, Homo sapien
gtccctatgcaagttcgagccagct

SEQ ID NO: 5485168 - DNA, 25 bp, Homo sapien
gtaaggtttgttttcacagatttca

SEQ ID NO: 5485169 - DNA, 25 bp, Homo sapien
gatttcaggtgacaagtagtatggg

SEQ ID NO: 5485170 - DNA, 25 bp, Homo sapien
cacagatttcaggtgacaagtagta

SEQ ID NO: 5485171 - DNA, 25 bp, Homo sapien
taggttactaggcttcaggtctcgg

SEQ ID NO: 5485172 - DNA, 25 bp, Homo sapien
accacctagtggccacgtagcctgt

SEQ ID NO: 5485173 - DNA, 25 bp, Homo sapien
ctcaggagccctgtaccacctagtg

SEQ ID NO: 5485174 - DNA, 25 bp, Homo sapien
ccgagccagtccaaaatccagaatc

SEQ ID NO: 5485175 - DNA, 25 bp, Homo sapien
tcatcatctgtgtgccgagccagtc

SEQ ID NO: 5485176 - DNA, 25 bp, Homo sapien
ttcacagctaggttactaggcttca

SEQ ID NO: 5485177 - DNA, 25 bp, Homo sapien
gttcagcatgatctcaggagccctg

SEQ ID NO: 5485178 - DNA, 25 bp, Homo sapien
cacagtcttcattcacagctaggtt

SEQ ID NO: 5485179 - DNA, 25 bp, Homo sapien
catttcatcatctgtgtgccgagcc

SEQ ID NO: 5485180 - DNA, 25 bp, Homo sapien
ccagaatcttcagctcacagtcttc

SEQ ID NO: 5485181 - DNA, 25 bp, Homo sapien
tagtggccacgtagcctgtcatttc

SEQ ID NO: 5485182 - DNA, 25 bp, Homo sapien
gacgtctgtataaatcagcccaccg

SEQ ID NO: 5485183 - DNA, 25 bp, Homo sapien
cggtgggctgatttatacagacgtc

SEQ ID NO: 5485184 - DNA, 25 bp, Homo sapien
ttcgagtggcaatttctggtgaaat

SEQ ID NO: 5485185 - DNA, 25 bp, Homo sapien
atgtgcacttcgagtggcaatttct

SEQ ID NO: 5485186 - DNA, 25 bp, Homo sapien
catgtggcattttcagttgagttgc

SEQ ID NO: 5485187 - DNA, 25 bp, Homo sapien
gcattttcagttgagttgccagccc

SEQ ID NO: 5485188 - DNA, 25 bp, Homo sapien
ctggtgaaatgtagttaggagttcc

SEQ ID NO: 5485189 - DNA, 25 bp, Homo sapien
taatgtatagtgcttttcatgtggc

SEQ ID NO: 5485190 - DNA, 25 bp, Homo sapien
tttctggtgaaatgtagttaggagt

SEQ ID NO: 5485191 - DNA, 25 bp, Homo sapien
gtatagtgcttttcatgtggcattt

SEQ ID NO: 5485192 - DNA, 25 bp, Homo sapien
aatgtagttaggagttccacataat

SEQ ID NO: 5485193 - DNA, 25 bp, Homo sapien
gcacttcgagtggcaatttctggtg

SEQ ID NO: 5485194 - DNA, 25 bp, Homo sapien
ggtgaaatgtagttaggagttccac

SEQ ID NO: 5485195 - DNA, 25 bp, Homo sapien
caggagcacgataaaatctactgac

SEQ ID NO: 5485196 - DNA, 25 bp, Homo sapien
aaatctactgacaagataaggtgtt

SEQ ID NO: 5485197 - DNA, 25 bp, Homo sapien
cattatccgcaacatgtgaagccga

SEQ ID NO: 5485198 - DNA, 25 bp, Homo sapien
tctactgacaagataaggtgttatg

SEQ ID NO: 5485199 - DNA, 25 bp, Homo sapien
acaagataaggtgttatgtcattat

SEQ ID NO: 5485200 - DNA, 25 bp, Homo sapien
gtcattatccgcaacatgtgaagcc

SEQ ID NO: 5485201 - DNA, 25 bp, Homo sapien
tactgacaagataaggtgttatgtc

SEQ ID NO: 5485202 - DNA, 25 bp, Homo sapien
aaggtgttatgtcattatccgcaac

SEQ ID NO: 5485203 - DNA, 25 bp, Homo sapien
tttcaggagcacgataaaatctact

SEQ ID NO: 5485204 - DNA, 25 bp, Homo sapien
atttcaggagcacgataaaatctac

SEQ ID NO: 5485205 - DNA, 25 bp, Homo sapien
tgatttcaggagcacgataaaatct

SEQ ID NO: 5485206 - DNA, 25 bp, Homo sapien
agaaggatttattttcaacctacac

SEQ ID NO: 5485207 - DNA, 25 bp, Homo sapien
gtgtaggttgaaaataaatccttct

SEQ ID NO: 5485208 - DNA, 25 bp, Homo sapien
agtcgggggctggcgaggcggtcgg

SEQ ID NO: 5485209 - DNA, 25 bp, Homo sapien
ccgaccgcctcgccagcccccgact

SEQ ID NO: 5485210 - DNA, 25 bp, Homo sapien
ccactgtggacgggaggccgtcatg

SEQ ID NO: 5485211 - DNA, 25 bp, Homo sapien
catgacggcctcccgtccacagtgg

SEQ ID NO: 5485212 - DNA, 25 bp, Homo sapien
gaaacctctctattgggacttgtat

SEQ ID NO: 5485213 - DNA, 25 bp, Homo sapien
gacagaccccaaagaggatcccatc

SEQ ID NO: 5485214 - DNA, 25 bp, Homo sapien
tgccactgatgactacgctgtgcca

SEQ ID NO: 5485215 - DNA, 25 bp, Homo sapien
ggcatcaaaagccacaactcagccc

SEQ ID NO: 5485216 - DNA, 25 bp, Homo sapien
tgggactgtgggctctctagagtag

SEQ ID NO: 5485217 - DNA, 25 bp, Homo sapien
tctgcctcgggagcccaaggatgca

SEQ ID NO: 5485218 - DNA, 25 bp, Homo sapien
gtacagccaggtccagaagagcggg

SEQ ID NO: 5485219 - DNA, 25 bp, Homo sapien
aggaggagggctatgagctccccta

SEQ ID NO: 5485220 - DNA, 25 bp, Homo sapien
aggatgcatggtggtgccaagctcg

SEQ ID NO: 5485221 - DNA, 25 bp, Homo sapien
tatgatgaacctgagggcctggccc

SEQ ID NO: 5485222 - DNA, 25 bp, Homo sapien
cctgaacctggtactgcaactggca

SEQ ID NO: 5485223 - DNA, 25 bp, Homo sapien
cccgctcttctggacctggctgtac

SEQ ID NO: 5485224 - DNA, 25 bp, Homo sapien
cgagcttggcaccaccatgcatcct

SEQ ID NO: 5485225 - DNA, 25 bp, Homo sapien
gatgggatcctctttggggtctgtc

SEQ ID NO: 5485226 - DNA, 25 bp, Homo sapien
tggcacagcgtagtcatcagtggca

SEQ ID NO: 5485227 - DNA, 25 bp, Homo sapien
taggggagctcatagccctcctcct

SEQ ID NO: 5485228 - DNA, 25 bp, Homo sapien
gggccaggccctcaggttcatcata

SEQ ID NO: 5485229 - DNA, 25 bp, Homo sapien
tgcatccttgggctcccgaggcaga

SEQ ID NO: 5485230 - DNA, 25 bp, Homo sapien
atacaagtcccaatagagaggtttc

SEQ ID NO: 5485231 - DNA, 25 bp, Homo sapien
gggctgagttgtggcttttgatgcc

SEQ ID NO: 5485232 - DNA, 25 bp, Homo sapien
ctactctagagagcccacagtccca

SEQ ID NO: 5485233 - DNA, 25 bp, Homo sapien
tgccagttgcagtaccaggttcagg

SEQ ID NO: 5485234 - DNA, 25 bp, Homo sapien
gctgagtttgagaagctgccatgca

SEQ ID NO: 5485235 - DNA, 25 bp, Homo sapien
tgggctctgacagtgactgaggccc

SEQ ID NO: 5485236 - DNA, 25 bp, Homo sapien
acgaaaccgaagcctaccaagcgga

SEQ ID NO: 5485237 - DNA, 25 bp, Homo sapien
ccccccaatgccgaagaagagtcgg

SEQ ID NO: 5485238 - DNA, 25 bp, Homo sapien
gcaggggaaacacccttgctgcatc

SEQ ID NO: 5485239 - DNA, 25 bp, Homo sapien
cggaggaatatgaggactcttccac

SEQ ID NO: 5485240 - DNA, 25 bp, Homo sapien
gacaatctgcggctcaacctgacca

SEQ ID NO: 5485241 - DNA, 25 bp, Homo sapien
gcagcatgtccaagcgagctgtgac

SEQ ID NO: 5485242 - DNA, 25 bp, Homo sapien
ttcaaaggttaatagaggctgagga

SEQ ID NO: 5485243 - DNA, 25 bp, Homo sapien
ccagccctcgaagtcgaaagaatgc

SEQ ID NO: 5485244 - DNA, 25 bp, Homo sapien
tgacgaagcccacaagatgaaattc

SEQ ID NO: 5485245 - DNA, 25 bp, Homo sapien
cgaggctcacgttcgcgccctgggt

SEQ ID NO: 5485246 - DNA, 25 bp, Homo sapien
acccagggcgcgaacgtgagcctcg

SEQ ID NO: 5485247 - DNA, 25 bp, Homo sapien
tgaaccccgacatcccccgcttcca

SEQ ID NO: 5485248 - DNA, 25 bp, Homo sapien
aggtgtttccatcagggtgtacgac

SEQ ID NO: 5485249 - DNA, 25 bp, Homo sapien
atcccccgcttccagcctgctgatt

SEQ ID NO: 5485250 - DNA, 25 bp, Homo sapien
ggtgtacgacgctctgactagacct

SEQ ID NO: 5485251 - DNA, 25 bp, Homo sapien
cccaaagcaacggttacaaatcttg

SEQ ID NO: 5485252 - DNA, 25 bp, Homo sapien
tataaggactcttggaagatggcct

SEQ ID NO: 5485253 - DNA, 25 bp, Homo sapien
ggaaattgtgtatctcgcatgtatt

SEQ ID NO: 5485254 - DNA, 25 bp, Homo sapien
tcagtgtgaaatctgtccctgggcc

SEQ ID NO: 5485255 - DNA, 25 bp, Homo sapien
acaaatcttgtgtataaggactctt

SEQ ID NO: 5485256 - DNA, 25 bp, Homo sapien
ctcgcatgtattaatgaaccccgac

SEQ ID NO: 5485257 - DNA, 25 bp, Homo sapien
tgctgagtccatcacaactaggtgt

SEQ ID NO: 5485258 - DNA, 25 bp, Homo sapien
agtacgactggcgactctgacagaa

SEQ ID NO: 5485259 - DNA, 25 bp, Homo sapien
ttctgtcagagtcgccagtcgtact

SEQ ID NO: 5485260 - DNA, 25 bp, Homo sapien
ttgttgacctttacaggatgaagga

SEQ ID NO: 5485261 - DNA, 25 bp, Homo sapien
gagacatgtacagattttgtgcatt

SEQ ID NO: 5485262 - DNA, 25 bp, Homo sapien
tgttctgaatgcaagtcaacaattc

SEQ ID NO: 5485263 - DNA, 25 bp, Homo sapien
gtacattagcaccataacatgcgtc

SEQ ID NO: 5485264 - DNA, 25 bp, Homo sapien
attatgggtgtctgtaaggaaaaaa

SEQ ID NO: 5485265 - DNA, 25 bp, Homo sapien
aatctttctgatgggagacatgtac

SEQ ID NO: 5485266 - DNA, 25 bp, Homo sapien
aaaagatcaacaaccacatacaagc

SEQ ID NO: 5485267 - DNA, 25 bp, Homo sapien
ctgtggcatgccaatgaatctttct

SEQ ID NO: 5485268 - DNA, 25 bp, Homo sapien
attagtaatcttgaccagcaatgac

SEQ ID NO: 5485269 - DNA, 25 bp, Homo sapien
ttacaagcagttgatatccaatatt

SEQ ID NO: 5485270 - DNA, 25 bp, Homo sapien
tctagagtttaaaagtgaaagtaca

SEQ ID NO: 5485271 - DNA, 25 bp, Homo sapien
gactaccgtcttaatctagtataga

SEQ ID NO: 5485272 - DNA, 25 bp, Homo sapien
tctatactagattaagacggtagtc

SEQ ID NO: 5485273 - DNA, 25 bp, Homo sapien
cctcttggaacatacgccgtttggg

SEQ ID NO: 5485274 - DNA, 25 bp, Homo sapien
cccaaacggcgtatgttccaagagg

SEQ ID NO: 5485275 - DNA, 25 bp, Homo sapien
aagacctcttttatgacacgaagaa

SEQ ID NO: 5485276 - DNA, 25 bp, Homo sapien
ttcttcgtgtcataaaagaggtctt

SEQ ID NO: 5485277 - DNA, 25 bp, Homo sapien
ttttcaaatagtattccgttcttaa

SEQ ID NO: 5485278 - DNA, 25 bp, Homo sapien
ttaagaacggaatactatttgaaaa

SEQ ID NO: 5485279 - DNA, 25 bp, Homo sapien
gctgggtgaaacagaccctgtaaac

SEQ ID NO: 5485280 - DNA, 25 bp, Homo sapien
ctgggaaccaatgtagatggagttg

SEQ ID NO: 5485281 - DNA, 25 bp, Homo sapien
gttcttggtcactactggcatttac

SEQ ID NO: 5485282 - DNA, 25 bp, Homo sapien
agattcttgggtaatgtgctatgag

SEQ ID NO: 5485283 - DNA, 25 bp, Homo sapien
caaatcaaagcaagtttaaggtgtg

SEQ ID NO: 5485284 - DNA, 25 bp, Homo sapien
aatgaaatccctccagtatagtgta

SEQ ID NO: 5485285 - DNA, 25 bp, Homo sapien
aaacacaaggaatgagttctaaatc

SEQ ID NO: 5485286 - DNA, 25 bp, Homo sapien
tctctgactttccgggctgggtgaa

SEQ ID NO: 5485287 - DNA, 25 bp, Homo sapien
acatcaaaaacaaagacaggttatt

SEQ ID NO: 5485288 - DNA, 25 bp, Homo sapien
aagttcataacgaatataggtgttc

SEQ ID NO: 5485289 - DNA, 25 bp, Homo sapien
aaggtgtgaagtagctgtgcattaa

SEQ ID NO: 5485290 - DNA, 25 bp, Homo sapien
ataaaactaaatggacagaggaaaa

SEQ ID NO: 5485291 - DNA, 25 bp, Homo sapien
accaagtatgaactgcatgcatggc

SEQ ID NO: 5485292 - DNA, 25 bp, Homo sapien
tttagaaaaattggtgtcatccagt

SEQ ID NO: 5485293 - DNA, 25 bp, Homo sapien
agaggaaaaaattcaaccagtatgt

SEQ ID NO: 5485294 - DNA, 25 bp, Homo sapien
gccctgtggttgttcattatgctgt

SEQ ID NO: 5485295 - DNA, 25 bp, Homo sapien
atcttctagaaacgataaaggattt

SEQ ID NO: 5485296 - DNA, 25 bp, Homo sapien
tatgctgtagactttgaggttaaat

SEQ ID NO: 5485297 - DNA, 25 bp, Homo sapien
atgaaaagaccagccaatataaaac

SEQ ID NO: 5485298 - DNA, 25 bp, Homo sapien
gcatgcatggctaatgtatgatttc

SEQ ID NO: 5485299 - DNA, 25 bp, Homo sapien
tggtccaacagtgtattttcagtgc

SEQ ID NO: 5485300 - DNA, 25 bp, Homo sapien
aaaaaactgacttggaacatgaatt

SEQ ID NO: 5485301 - DNA, 25 bp, Homo sapien
atttgagcacaaagtgattggaatt

SEQ ID NO: 5485302 - DNA, 25 bp, Homo sapien
tgtggataacttgtaggaggcaaaa

SEQ ID NO: 5485303 - DNA, 25 bp, Homo sapien
taggagcacgtaatgaaatgatctt

SEQ ID NO: 5485304 - DNA, 25 bp, Homo sapien
ttgtctaagttgtaggagcagcttt

SEQ ID NO: 5485305 - DNA, 25 bp, Homo sapien
ggcatcctcctccagagtaatcagc

SEQ ID NO: 5485306 - DNA, 25 bp, Homo sapien
aagtccatatggaactctgccactt

SEQ ID NO: 5485307 - DNA, 25 bp, Homo sapien
ttgagctgttggtttgattgtggga

SEQ ID NO: 5485308 - DNA, 25 bp, Homo sapien
tttgttaggtttctgaggagcttta

SEQ ID NO: 5485309 - DNA, 25 bp, Homo sapien
ctgaggagctttagtatgattagat

SEQ ID NO: 5485310 - DNA, 25 bp, Homo sapien
aggagcagcttttaggagcacgtaa

SEQ ID NO: 5485311 - DNA, 25 bp, Homo sapien
actttgcaagtacaagattagttac

SEQ ID NO: 5485312 - DNA, 25 bp, Homo sapien
tgcctccgccactgccctcggtcca

SEQ ID NO: 5485313 - DNA, 25 bp, Homo sapien
tggaccgagggcagtggcggaggca

SEQ ID NO: 5485314 - DNA, 25 bp, Homo sapien
ttaaccaccagagatcgggaaaaag

SEQ ID NO: 5485315 - DNA, 25 bp, Homo sapien
ctttttcccgatctctggtggttaa

SEQ ID NO: 5485316 - DNA, 25 bp, Homo sapien
cccagatgatcaaattcaatggctt

SEQ ID NO: 5485317 - DNA, 25 bp, Homo sapien
cgcgcctggccccaaatgtcatgtt

SEQ ID NO: 5485318 - DNA, 25 bp, Homo sapien
acggtcaagacctcttcgcggtagc

SEQ ID NO: 5485319 - DNA, 25 bp, Homo sapien
aggcggagatgtccatgccattcct

SEQ ID NO: 5485320 - DNA, 25 bp, Homo sapien
tgcggacgtctgcagctctgatctt

SEQ ID NO: 5485321 - DNA, 25 bp, Homo sapien
ccaggagctccaattcaagatgcgg

SEQ ID NO: 5485322 - DNA, 25 bp, Homo sapien
ttgctctgtcacgcaggttggtgtg

SEQ ID NO: 5485323 - DNA, 25 bp, Homo sapien
cgccgtgcctgggtaaatttctgca

SEQ ID NO: 5485324 - DNA, 25 bp, Homo sapien
caagaaaacagttcccccgtgtcgc

SEQ ID NO: 5485325 - DNA, 25 bp, Homo sapien
ccttcctctggggtgaattcctccc

SEQ ID NO: 5485326 - DNA, 25 bp, Homo sapien
tcaatggcttcactccaggagctcc

SEQ ID NO: 5485327 - DNA, 25 bp, Homo sapien
cgtgtcaacacaggctccaggcagg

SEQ ID NO: 5485328 - DNA, 25 bp, Homo sapien
cctgcctggagcctgtgttgacacg

SEQ ID NO: 5485329 - DNA, 25 bp, Homo sapien
taaattacggtgtttcatgttataa

SEQ ID NO: 5485330 - DNA, 25 bp, Homo sapien
ttataacatgaaacaccgtaattta

SEQ ID NO: 5485331 - DNA, 25 bp, Homo sapien
agtgaggagaagaggcttacgggta

SEQ ID NO: 5485332 - DNA, 25 bp, Homo sapien
tacccgtaagcctcttctcctcact

SEQ ID NO: 5485333 - DNA, 25 bp, Homo sapien
agacgccccacctgaccgggtcgga

SEQ ID NO: 5485334 - DNA, 25 bp, Homo sapien
tccgacccggtcaggtggggcgtct

SEQ ID NO: 5485335 - DNA, 25 bp, Homo sapien
tcataagatgcacttctctacactc

SEQ ID NO: 5485336 - DNA, 25 bp, Homo sapien
ctaattgtgtcgaatttccaggatt

SEQ ID NO: 5485337 - DNA, 25 bp, Homo sapien
cccaacctaccactgctaagactgt

SEQ ID NO: 5485338 - DNA, 25 bp, Homo sapien
tggatgaggagccgatattgtttta

SEQ ID NO: 5485339 - DNA, 25 bp, Homo sapien
gctaagactgtttcataagatgcac

SEQ ID NO: 5485340 - DNA, 25 bp, Homo sapien
cagccctcctactagaagcactgga

SEQ ID NO: 5485341 - DNA, 25 bp, Homo sapien
ttttggttgcagctatctccttccc

SEQ ID NO: 5485342 - DNA, 25 bp, Homo sapien
tatctccttcccaacctaccactgc

SEQ ID NO: 5485343 - DNA, 25 bp, Homo sapien
tattttcttgggtgggtattctgga

SEQ ID NO: 5485344 - DNA, 25 bp, Homo sapien
ctttcagccctcctactagaagcac

SEQ ID NO: 5485345 - DNA, 25 bp, Homo sapien
ctacactcagctaatgaggtgtttc

SEQ ID NO: 5485346 - DNA, 25 bp, Homo sapien
gacggagagtcatcaatctttctac

SEQ ID NO: 5485347 - DNA, 25 bp, Homo sapien
gtagaaagattgatgactctccgtc

SEQ ID NO: 5485348 - DNA, 25 bp, Homo sapien
gggcggtgtggagcccggtcccgat

SEQ ID NO: 5485349 - DNA, 25 bp, Homo sapien
atcgggaccgggctccacaccgccc

SEQ ID NO: 5485350 - DNA, 25 bp, Homo sapien
cagctcggtgtaccccggtgggtcg

SEQ ID NO: 5485351 - DNA, 25 bp, Homo sapien
cgacccaccggggtacaccgagctg

SEQ ID NO: 5485352 - DNA, 25 bp, Homo sapien
gctaatcaataaccctgtaagaaat

SEQ ID NO: 5485353 - DNA, 25 bp, Homo sapien
agttttgaaagacctcttgtgtata

SEQ ID NO: 5485354 - DNA, 25 bp, Homo sapien
gggtgcaatgagtcgagactgcacc

SEQ ID NO: 5485355 - DNA, 25 bp, Homo sapien
aaaatcttttcattgtgccacaggc

SEQ ID NO: 5485356 - DNA, 25 bp, Homo sapien
tgtgccacaggctaatcaataaccc

SEQ ID NO: 5485357 - DNA, 25 bp, Homo sapien
gatggcctggttcctgtggttacct

SEQ ID NO: 5485358 - DNA, 25 bp, Homo sapien
gcagatggcctggttcctgtggtta

SEQ ID NO: 5485359 - DNA, 25 bp, Homo sapien
taaaaaagaatgccccatgtaacat

SEQ ID NO: 5485360 - DNA, 25 bp, Homo sapien
tttatttatctaaggcagatggcct

SEQ ID NO: 5485361 - DNA, 25 bp, Homo sapien
ttggtacttaagcttggagaaaatc

SEQ ID NO: 5485362 - DNA, 25 bp, Homo sapien
acttgaatgaagaatgttctttaat

SEQ ID NO: 5485363 - DNA, 25 bp, Homo sapien
caccatgccggcccaacataacttt

SEQ ID NO: 5485364 - DNA, 25 bp, Homo sapien
tctggaacccaacccacagtatctt

SEQ ID NO: 5485365 - DNA, 25 bp, Homo sapien
atgcactgcaaaacaaaaaaatccc

SEQ ID NO: 5485366 - DNA, 25 bp, Homo sapien
attattaaacaacttagtggcttaa

SEQ ID NO: 5485367 - DNA, 25 bp, Homo sapien
ttaagagatggggtcttaccatgtt

SEQ ID NO: 5485368 - DNA, 25 bp, Homo sapien
agtatcttccaagtttgcctgtaca

SEQ ID NO: 5485369 - DNA, 25 bp, Homo sapien
agccaccatgccggcccaacataac

SEQ ID NO: 5485370 - DNA, 25 bp, Homo sapien
cctgtttcaacctcccaagtagctg

SEQ ID NO: 5485371 - DNA, 25 bp, Homo sapien
ggctttattgtagtggtctggaacc

SEQ ID NO: 5485372 - DNA, 25 bp, Homo sapien
caaaaaaatccctgtgactcacttt

SEQ ID NO: 5485373 - DNA, 25 bp, Homo sapien
ttaccatgttaccaaggttggtctc

SEQ ID NO: 5485374 - DNA, 25 bp, Homo sapien
ttctcaaccataaatccaccagtat

SEQ ID NO: 5485375 - DNA, 25 bp, Homo sapien
atactggtggatttatggttgagaa

SEQ ID NO: 5485376 - DNA, 25 bp, Homo sapien
gccattcctggacccaaagcgctcc

SEQ ID NO: 5485377 - DNA, 25 bp, Homo sapien
aataattctgtgaaagcgcgagcac

SEQ ID NO: 5485378 - DNA, 25 bp, Homo sapien
agtcttggcagtgcagatgaaaaac

SEQ ID NO: 5485379 - DNA, 25 bp, Homo sapien
agcgagagcacaaagattctaggat

SEQ ID NO: 5485380 - DNA, 25 bp, Homo sapien
catagatggacttgccaccagtgcc

SEQ ID NO: 5485381 - DNA, 25 bp, Homo sapien
actgggaaccatttgtgttgggtcc

SEQ ID NO: 5485382 - DNA, 25 bp, Homo sapien
atggcgtgtgaagtcaccaccctga

SEQ ID NO: 5485383 - DNA, 25 bp, Homo sapien
agaaggaatgatctggtggttaaga

SEQ ID NO: 5485384 - DNA, 25 bp, Homo sapien
catttgccatggacaagatgccagg

SEQ ID NO: 5485385 - DNA, 25 bp, Homo sapien
tctgcaatccagctaggcatgggag

SEQ ID NO: 5485386 - DNA, 25 bp, Homo sapien
aagatgccaggacccgtatgcttta

SEQ ID NO: 5485387 - DNA, 25 bp, Homo sapien
ttcggcccactgactatttaagagt

SEQ ID NO: 5485388 - DNA, 25 bp, Homo sapien
ccacacccagcacatttgtaattcc

SEQ ID NO: 5485389 - DNA, 25 bp, Homo sapien
gatagatgaggtcttgtcatattgc

SEQ ID NO: 5485390 - DNA, 25 bp, Homo sapien
taaatttccctagaagcattgcttg

SEQ ID NO: 5485391 - DNA, 25 bp, Homo sapien
ttccagtgtcttatggtggtgaatc

SEQ ID NO: 5485392 - DNA, 25 bp, Homo sapien
atttaagagtgagctgtttgtgggt

SEQ ID NO: 5485393 - DNA, 25 bp, Homo sapien
accctgatatgtttagctaaaggtt

SEQ ID NO: 5485394 - DNA, 25 bp, Homo sapien
ttatggtggtgaatcgattactgat

SEQ ID NO: 5485395 - DNA, 25 bp, Homo sapien
caccacacccaggtgttgggattac

SEQ ID NO: 5485396 - DNA, 25 bp, Homo sapien
attgtaggcattaacagctataaat

SEQ ID NO: 5485397 - DNA, 25 bp, Homo sapien
tcgattactgatttgagagctttct

SEQ ID NO: 5485398 - DNA, 25 bp, Homo sapien
gcttggccgtacctaccctccataa

SEQ ID NO: 5485399 - DNA, 25 bp, Homo sapien
ttatggagggtaggtacggccaagc

SEQ ID NO: 5485400 - DNA, 25 bp, Homo sapien
agaagaatgagaactataagagcct

SEQ ID NO: 5485401 - DNA, 25 bp, Homo sapien
aaggccgcatcacccgctcaatggc

SEQ ID NO: 5485402 - DNA, 25 bp, Homo sapien
cagtggctgagtgcgtcctctatta

SEQ ID NO: 5485403 - DNA, 25 bp, Homo sapien
caagaactttggcctgatcgcatca

SEQ ID NO: 5485404 - DNA, 25 bp, Homo sapien
caatggctaatgaggccaacagcga

SEQ ID NO: 5485405 - DNA, 25 bp, Homo sapien
ggcctccaaaggccgcaaaactgcc

SEQ ID NO: 5485406 - DNA, 25 bp, Homo sapien
acctcctcaaggagaagacagacga

SEQ ID NO: 5485407 - DNA, 25 bp, Homo sapien
gaacgacaaggaagacctcctcaag

SEQ ID NO: 5485408 - DNA, 25 bp, Homo sapien
ctgatcgcatcattcctggagagga

SEQ ID NO: 5485409 - DNA, 25 bp, Homo sapien
ggccgcaaaactgccaacagccagg

SEQ ID NO: 5485410 - DNA, 25 bp, Homo sapien
cgggagaagttcatgcagcatccca

SEQ ID NO: 5485411 - DNA, 25 bp, Homo sapien
ctgcttcggctgcctaaaagggaag

SEQ ID NO: 5485412 - DNA, 25 bp, Homo sapien
aaacgctgacatatgctgccttctc

SEQ ID NO: 5485413 - DNA, 25 bp, Homo sapien
catgatcacgtgacttgcttgacct

SEQ ID NO: 5485414 - DNA, 25 bp, Homo sapien
tggcctccacctcctgaccttgtga

SEQ ID NO: 5485415 - DNA, 25 bp, Homo sapien
gtctctgcgtcttgatggtagtggt

SEQ ID NO: 5485416 - DNA, 25 bp, Homo sapien
cagtcatttggacgactcaccctcc

SEQ ID NO: 5485417 - DNA, 25 bp, Homo sapien
atacaataaatatcagcgcgcccag

SEQ ID NO: 5485418 - DNA, 25 bp, Homo sapien
ggaagggccccctgtcccatgatca

SEQ ID NO: 5485419 - DNA, 25 bp, Homo sapien
ggcgccctccaccacgcgcccggat

SEQ ID NO: 5485420 - DNA, 25 bp, Homo sapien
cagagaagaaaacgctgacatatgc

SEQ ID NO: 5485421 - DNA, 25 bp, Homo sapien
gccactaccggtctctgcgtcttga

SEQ ID NO: 5485422 - DNA, 25 bp, Homo sapien
gacacctgagcagggcccctccccg

SEQ ID NO: 5485423 - DNA, 25 bp, Homo sapien
cggggaggggccctgctcaggtgtc

SEQ ID NO: 5485424 - DNA, 25 bp, Homo sapien
aagtacagccaagactcatgaaggg

SEQ ID NO: 5485425 - DNA, 25 bp, Homo sapien
tgatagaagtacagccaagactcat

SEQ ID NO: 5485426 - DNA, 25 bp, Homo sapien
aagggaaattagttcccattaggca

SEQ ID NO: 5485427 - DNA, 25 bp, Homo sapien
cagtacccgatgatagaagtacagc

SEQ ID NO: 5485428 - DNA, 25 bp, Homo sapien
tacccgatgatagaagtacagccaa

SEQ ID NO: 5485429 - DNA, 25 bp, Homo sapien
ttcacagtacccgatgatagaagta

SEQ ID NO: 5485430 - DNA, 25 bp, Homo sapien
agttcccattaggcaaagatgctgg

SEQ ID NO: 5485431 - DNA, 25 bp, Homo sapien
agatgctggagttttcacagtaccc

SEQ ID NO: 5485432 - DNA, 25 bp, Homo sapien
taaaaaatgtaagctggcttaccca

SEQ ID NO: 5485433 - DNA, 25 bp, Homo sapien
gaaatttataacccaggcagctatt

SEQ ID NO: 5485434 - DNA, 25 bp, Homo sapien
attagttcccattaggcaaagatgc

SEQ ID NO: 5485435 - DNA, 25 bp, Homo sapien
agcgagaggcagttatttttgggtg

SEQ ID NO: 5485436 - DNA, 25 bp, Homo sapien
ccaggacgctcttcagatcataggt

SEQ ID NO: 5485437 - DNA, 25 bp, Homo sapien
tctttaatgtcatccagggaggggg

SEQ ID NO: 5485438 - DNA, 25 bp, Homo sapien
gaggggagacttggtattttgttca

SEQ ID NO: 5485439 - DNA, 25 bp, Homo sapien
accttagtgatgcccagttgaccca

SEQ ID NO: 5485440 - DNA, 25 bp, Homo sapien
tgttcaatcattaagaagacaaagg

SEQ ID NO: 5485441 - DNA, 25 bp, Homo sapien
caatcattaagaagacaaagggttt

SEQ ID NO: 5485442 - DNA, 25 bp, Homo sapien
gctcttcagatcataggttccagta

SEQ ID NO: 5485443 - DNA, 25 bp, Homo sapien
ggtcagcacagccttatgcacggcc

SEQ ID NO: 5485444 - DNA, 25 bp, Homo sapien
agaccttagtgatgcccagttgacc

SEQ ID NO: 5485445 - DNA, 25 bp, Homo sapien
tcgatggtcagcacagccttatgca

SEQ ID NO: 5485446 - DNA, 25 bp, Homo sapien
tatcggttatcaaattgtgctcatc

SEQ ID NO: 5485447 - DNA, 25 bp, Homo sapien
cttctgaggtctttaggcatcaagg

SEQ ID NO: 5485448 - DNA, 25 bp, Homo sapien
tgagtactatcttttttgaggggaa

SEQ ID NO: 5485449 - DNA, 25 bp, Homo sapien
ttgtgctcatctatgaatgtctcat

SEQ ID NO: 5485450 - DNA, 25 bp, Homo sapien
aagaatctggtaagggctcctttta

SEQ ID NO: 5485451 - DNA, 25 bp, Homo sapien
gggaaggtatgtagctgtcatcata

SEQ ID NO: 5485452 - DNA, 25 bp, Homo sapien
ggcatcaagggttccattaactctc

SEQ ID NO: 5485453 - DNA, 25 bp, Homo sapien
gaggtctttaggcatcaagggttcc

SEQ ID NO: 5485454 - DNA, 25 bp, Homo sapien
ctctctgaaattacaggtagaattg

SEQ ID NO: 5485455 - DNA, 25 bp, Homo sapien
tatcctcaaagaggtccacggttgg

SEQ ID NO: 5485456 - DNA, 25 bp, Homo sapien
tacaggtagaattgtgagtactatc

SEQ ID NO: 5485457 - DNA, 25 bp, Homo sapien
cttgcagcagataatattagtactt

SEQ ID NO: 5485458 - DNA, 25 bp, Homo sapien
tgtgcttgtagcagtgttctttcac

SEQ ID NO: 5485459 - DNA, 25 bp, Homo sapien
tgggtctgttttagtagtgcctttc

SEQ ID NO: 5485460 - DNA, 25 bp, Homo sapien
ctccaagatttaaggtctaggtgta

SEQ ID NO: 5485461 - DNA, 25 bp, Homo sapien
gtagagatcatctgctgagaatggg

SEQ ID NO: 5485462 - DNA, 25 bp, Homo sapien
taaggtctaggtgtattttctctgc

SEQ ID NO: 5485463 - DNA, 25 bp, Homo sapien
ggaaatcagaggtagagatcatctg

SEQ ID NO: 5485464 - DNA, 25 bp, Homo sapien
ttccccttaacctcccagccacagc

SEQ ID NO: 5485465 - DNA, 25 bp, Homo sapien
ccagccacagcattggtgatgatct

SEQ ID NO: 5485466 - DNA, 25 bp, Homo sapien
gcatatggcagtacctctcctgtgc

SEQ ID NO: 5485467 - DNA, 25 bp, Homo sapien
aagttatgaaatgcttaaagtccac

SEQ ID NO: 5485468 - DNA, 25 bp, Homo sapien
aaacaaaaactgtagtggttgggca

SEQ ID NO: 5485469 - DNA, 25 bp, Homo sapien
atctataaaatggcagtgaggccgg

SEQ ID NO: 5485470 - DNA, 25 bp, Homo sapien
ggcatggggtctaacacctgaaacc

SEQ ID NO: 5485471 - DNA, 25 bp, Homo sapien
tcatctataaaatggcagtgaggcc

SEQ ID NO: 5485472 - DNA, 25 bp, Homo sapien
gattatattggtaggttgacaatca

SEQ ID NO: 5485473 - DNA, 25 bp, Homo sapien
tggtaggttgacaatcagtatggac

SEQ ID NO: 5485474 - DNA, 25 bp, Homo sapien
taggatactatctctagtcccagtt

SEQ ID NO: 5485475 - DNA, 25 bp, Homo sapien
gtcaccgtctatttcacaacttttc

SEQ ID NO: 5485476 - DNA, 25 bp, Homo sapien
aacaatcaacaagcattaggatact

SEQ ID NO: 5485477 - DNA, 25 bp, Homo sapien
acaaaaactgtagtggttgggcatg

SEQ ID NO: 5485478 - DNA, 25 bp, Homo sapien
atcagtatggacaaaaacaatcaac

SEQ ID NO: 5485479 - DNA, 25 bp, Homo sapien
cttggcttcccaatgtgctaggttt

SEQ ID NO: 5485480 - DNA, 25 bp, Homo sapien
tggcctcccaatgtactgagattac

SEQ ID NO: 5485481 - DNA, 25 bp, Homo sapien
tacaggcgtgaaaacattgtgttgt

SEQ ID NO: 5485482 - DNA, 25 bp, Homo sapien
caccacgcccggccaaaaacattta

SEQ ID NO: 5485483 - DNA, 25 bp, Homo sapien
agagtacagtgtgcaatcatagctc

SEQ ID NO: 5485484 - DNA, 25 bp, Homo sapien
gattacaggcgcccaccatcacgcc

SEQ ID NO: 5485485 - DNA, 25 bp, Homo sapien
gtctcccaggctagagtacagtgtg

SEQ ID NO: 5485486 - DNA, 25 bp, Homo sapien
aatgtgctaggtttacaggcgtgaa

SEQ ID NO: 5485487 - DNA, 25 bp, Homo sapien
aaatactgcagtaggaaatgtaatt

SEQ ID NO: 5485488 - DNA, 25 bp, Homo sapien
ctcagcctctggagtggctgggatt

SEQ ID NO: 5485489 - DNA, 25 bp, Homo sapien
cgcccaccatcacgcccggccaatt

SEQ ID NO: 5485490 - DNA, 25 bp, Homo sapien
ccagccaccctgtccaggaggtgag

SEQ ID NO: 5485491 - DNA, 25 bp, Homo sapien
acgggccatgatgacaatggcggtt

SEQ ID NO: 5485492 - DNA, 25 bp, Homo sapien
gccaccaccccgtctgggaggtgta

SEQ ID NO: 5485493 - DNA, 25 bp, Homo sapien
aggtagacatgggagacttttcatt

SEQ ID NO: 5485494 - DNA, 25 bp, Homo sapien
gattgagaaatcggatggttgccat

SEQ ID NO: 5485495 - DNA, 25 bp, Homo sapien
gaaggcagcatgctcgttaagagtc

SEQ ID NO: 5485496 - DNA, 25 bp, Homo sapien
cctcagggttgaatggattaagggt

SEQ ID NO: 5485497 - DNA, 25 bp, Homo sapien
caacagctcattgagaacgggccat

SEQ ID NO: 5485498 - DNA, 25 bp, Homo sapien
gccatgtctgtgtagaaagaggtag

SEQ ID NO: 5485499 - DNA, 25 bp, Homo sapien
ctcaagtacccagggacacaaacac

SEQ ID NO: 5485500 - DNA, 25 bp, Homo sapien
gggtggtgcaagatgtgctttgtta

SEQ ID NO: 5485501 - DNA, 25 bp, Homo sapien
ggaaactccccgaccagcgcgggga

SEQ ID NO: 5485502 - DNA, 25 bp, Homo sapien
tccccgcgctggtcggggagtttcc

SEQ ID NO: 5485503 - DNA, 25 bp, Homo sapien
gtaacaccatctcccaggtcaagga

SEQ ID NO: 5485504 - DNA, 25 bp, Homo sapien
catcccggtgaaggtcctcaactgt

SEQ ID NO: 5485505 - DNA, 25 bp, Homo sapien
cttgtgtcgcactggactgacgtca

SEQ ID NO: 5485506 - DNA, 25 bp, Homo sapien
gtggaagcgcgtcaacacccttatg

SEQ ID NO: 5485507 - DNA, 25 bp, Homo sapien
ccaggtcaaggagaagatcattgac

SEQ ID NO: 5485508 - DNA, 25 bp, Homo sapien
tgcactacaatgtccgggatggagc

SEQ ID NO: 5485509 - DNA, 25 bp, Homo sapien
gggctccacagcgcagatccttgtg

SEQ ID NO: 5485510 - DNA, 25 bp, Homo sapien
gatcattgaccaggtgtaccgtggg

SEQ ID NO: 5485511 - DNA, 25 bp, Homo sapien
agggcatcaccgagatcctcctgcg

SEQ ID NO: 5485512 - DNA, 25 bp, Homo sapien
gaaggccaagtacactctcaacgac

SEQ ID NO: 5485513 - DNA, 25 bp, Homo sapien
agcgccatgccctcctggaggagga

SEQ ID NO: 5485514 - DNA, 25 bp, Homo sapien
gacttgtgcacgaccttggacagag

SEQ ID NO: 5485515 - DNA, 25 bp, Homo sapien
gacgaatctggcacaccgcatcatc

SEQ ID NO: 5485516 - DNA, 25 bp, Homo sapien
ctcaagtcagtggtctcgtccggaa

SEQ ID NO: 5485517 - DNA, 25 bp, Homo sapien
gagacaggtctgtctgggacattcc

SEQ ID NO: 5485518 - DNA, 25 bp, Homo sapien
tgccaccactgcacggataaggcca

SEQ ID NO: 5485519 - DNA, 25 bp, Homo sapien
accaagactgccctgtcctcacgga

SEQ ID NO: 5485520 - DNA, 25 bp, Homo sapien
gcgggagggacacttccacctcctc

SEQ ID NO: 5485521 - DNA, 25 bp, Homo sapien
tgggacattccagagaagtctgcct

SEQ ID NO: 5485522 - DNA, 25 bp, Homo sapien
agctcgaaggcatcagtcatgccca

SEQ ID NO: 5485523 - DNA, 25 bp, Homo sapien
gcatcatcatgatggcagctgtggc

SEQ ID NO: 5485524 - DNA, 25 bp, Homo sapien
tcgtccggaagcatgatgatcatat

SEQ ID NO: 5485525 - DNA, 25 bp, Homo sapien
gcagcttgatggagatacctcttac

SEQ ID NO: 5485526 - DNA, 25 bp, Homo sapien
tcttcacggttttggtgcgaacgcg

SEQ ID NO: 5485527 - DNA, 25 bp, Homo sapien
ggacagactgccgaagtccaaaagc

SEQ ID NO: 5485528 - DNA, 25 bp, Homo sapien
tccccgaggcgttttgaaattcatc

SEQ ID NO: 5485529 - DNA, 25 bp, Homo sapien
tggggataatggcgatctcctcgca

SEQ ID NO: 5485530 - DNA, 25 bp, Homo sapien
cagatgcgtgacataacctgctatc

SEQ ID NO: 5485531 - DNA, 25 bp, Homo sapien
acctcatgtgatcgcctgccttggc

SEQ ID NO: 5485532 - DNA, 25 bp, Homo sapien
gttgcggagctttttgctggggata

SEQ ID NO: 5485533 - DNA, 25 bp, Homo sapien
tcatcccaactgtaggctgagtgac

SEQ ID NO: 5485534 - DNA, 25 bp, Homo sapien
cccaggcgcgtgtagtacttttcta

SEQ ID NO: 5485535 - DNA, 25 bp, Homo sapien
ctgatccaaggctgagacctcagga

SEQ ID NO: 5485536 - DNA, 25 bp, Homo sapien
ggagtgtacaaagggaccaatgacg

SEQ ID NO: 5485537 - DNA, 25 bp, Homo sapien
cgtcattggtccctttgtacactcc

SEQ ID NO: 5485538 - DNA, 25 bp, Homo sapien
agtaagaggtaagacccccatcacc

SEQ ID NO: 5485539 - DNA, 25 bp, Homo sapien
ggtgatgggggtcttacctcttact

SEQ ID NO: 5485540 - DNA, 25 bp, Homo sapien
agttacgggaccctcagtattggag

SEQ ID NO: 5485541 - DNA, 25 bp, Homo sapien
ctccaatactgagggtcccgtaact

SEQ ID NO: 5485542 - DNA, 25 bp, Homo sapien
caaagtcgtcgtacaagtggctcag

SEQ ID NO: 5485543 - DNA, 25 bp, Homo sapien
ctgagccacttgtacgacgactttg

SEQ ID NO: 5485544 - DNA, 25 bp, Homo sapien
actaggcatagaagggatcttctgc

SEQ ID NO: 5485545 - DNA, 25 bp, Homo sapien
ttataactaataaaggaggcaggat

SEQ ID NO: 5485546 - DNA, 25 bp, Homo sapien
tataggtataaagctccaaacaaaa

SEQ ID NO: 5485547 - DNA, 25 bp, Homo sapien
aaaatgcatgggtggttcaacatat

SEQ ID NO: 5485548 - DNA, 25 bp, Homo sapien
tctgcaacatgacaatgggatgtac

SEQ ID NO: 5485549 - DNA, 25 bp, Homo sapien
caatgatgaaacactgaaagctgtt

SEQ ID NO: 5485550 - DNA, 25 bp, Homo sapien
acatctagaagaaaaggatggtgca

SEQ ID NO: 5485551 - DNA, 25 bp, Homo sapien
cagtaaaatgaataagcacgtgatt

SEQ ID NO: 5485552 - DNA, 25 bp, Homo sapien
gtattcaacgtagcactggcagttc

SEQ ID NO: 5485553 - DNA, 25 bp, Homo sapien
ttgctgcagagaaaacattgatgaa

SEQ ID NO: 5485554 - DNA, 25 bp, Homo sapien
gcactggcagttctagccagagcaa

SEQ ID NO: 5485555 - DNA, 25 bp, Homo sapien
ggccacgcgcccaccctggtcctcg

SEQ ID NO: 5485556 - DNA, 25 bp, Homo sapien
cgaggaccagggtgggcgcgtggcc

SEQ ID NO: 5485557 - DNA, 25 bp, Homo sapien
gacaatggaaactgggcccagttga

SEQ ID NO: 5485558 - DNA, 25 bp, Homo sapien
aaaaaggccgaagtatagtattctc

SEQ ID NO: 5485559 - DNA, 25 bp, Homo sapien
tccaacagataatgggtactgcctc

SEQ ID NO: 5485560 - DNA, 25 bp, Homo sapien
cagaataaaaccttgacagtaattt

SEQ ID NO: 5485561 - DNA, 25 bp, Homo sapien
ttgacacctgctatgcctaatgaac

SEQ ID NO: 5485562 - DNA, 25 bp, Homo sapien
agataataaatacaggcagcttata

SEQ ID NO: 5485563 - DNA, 25 bp, Homo sapien
aatgaacttgaagtagtaaagggag

SEQ ID NO: 5485564 - DNA, 25 bp, Homo sapien
gggcccagttgaataaagccatatt

SEQ ID NO: 5485565 - DNA, 25 bp, Homo sapien
agcattctgtctagtgtatccatct

SEQ ID NO: 5485566 - DNA, 25 bp, Homo sapien
agcagaatttcaatcaagaagacac

SEQ ID NO: 5485567 - DNA, 25 bp, Homo sapien
tgttttggaacgcagagttctctgc

SEQ ID NO: 5485568 - DNA, 25 bp, Homo sapien
gcctatggcaaacttgtctaaatcg

SEQ ID NO: 5485569 - DNA, 25 bp, Homo sapien
cgatttagacaagtttgccataggc

SEQ ID NO: 5485570 - DNA, 25 bp, Homo sapien
ggagacatcggttatgactcaacat

SEQ ID NO: 5485571 - DNA, 25 bp, Homo sapien
atgttgagtcataaccgatgtctcc

SEQ ID NO: 5485572 - DNA, 25 bp, Homo sapien
aggggttatagttggtgctcccact

SEQ ID NO: 5485573 - DNA, 25 bp, Homo sapien
gcggtcacagagctcagcttcaggg

SEQ ID NO: 5485574 - DNA, 25 bp, Homo sapien
ctccagtcccttccctgggggctgc

SEQ ID NO: 5485575 - DNA, 25 bp, Homo sapien
gtagtaactactgatggagccacca

SEQ ID NO: 5485576 - DNA, 25 bp, Homo sapien
ctactgatatggtgactcgactctt

SEQ ID NO: 5485577 - DNA, 25 bp, Homo sapien
agccaccagagacactgcaggtgag

SEQ ID NO: 5485578 - DNA, 25 bp, Homo sapien
cgaccccccgaaatcgttctcgcac

SEQ ID NO: 5485579 - DNA, 25 bp, Homo sapien
gggtctccgaaggcttcaccagtcc

SEQ ID NO: 5485580 - DNA, 25 bp, Homo sapien
tcgcacagtaatacacggccgtgtc

SEQ ID NO: 5485581 - DNA, 25 bp, Homo sapien
tgccggatccagctccagtagtaac

SEQ ID NO: 5485582 - DNA, 25 bp, Homo sapien
ggagaactggttcttggacgtgtct

SEQ ID NO: 5485583 - DNA, 25 bp, Homo sapien
tctcgcacaataatagacggccgtg

SEQ ID NO: 5485584 - DNA, 25 bp, Homo sapien
gtctcgcacaataatagacggccgt

SEQ ID NO: 5485585 - DNA, 25 bp, Homo sapien
ccatagcccaacgacgtctcgcaca

SEQ ID NO: 5485586 - DNA, 25 bp, Homo sapien
atcaaaagcatatttcttccccacc

SEQ ID NO: 5485587 - DNA, 25 bp, Homo sapien
gctgtagttggtgttcccactgtaa

SEQ ID NO: 5485588 - DNA, 25 bp, Homo sapien
caccatagcccaacgacgtctcgca

SEQ ID NO: 5485589 - DNA, 25 bp, Homo sapien
tagcccaacgacgtctcgcacaata

SEQ ID NO: 5485590 - DNA, 25 bp, Homo sapien
tcgcggacgtgtccactgacatggt

SEQ ID NO: 5485591 - DNA, 25 bp, Homo sapien
ttcttccccaccatagcccaacgac

SEQ ID NO: 5485592 - DNA, 25 bp, Homo sapien
cttccccaccatagcccaacgacgt

SEQ ID NO: 5485593 - DNA, 25 bp, Homo sapien
tggttcgcggacgtgtccactgaca

SEQ ID NO: 5485594 - DNA, 25 bp, Homo sapien
ctactgaaatggtgactcgactctt

SEQ ID NO: 5485595 - DNA, 25 bp, Homo sapien
ggcggatccagctccagtagtaacc

SEQ ID NO: 5485596 - DNA, 25 bp, Homo sapien
tcgcacagtaatacacagccgtgtc

SEQ ID NO: 5485597 - DNA, 25 bp, Homo sapien
gtagtaaccactgaaggacccacca

SEQ ID NO: 5485598 - DNA, 25 bp, Homo sapien
ggagaactggttcttggacgtgtct

SEQ ID NO: 5485599 - DNA, 25 bp, Homo sapien
tccgaaggcttcaacagtcctgcgc

SEQ ID NO: 5485600 - DNA, 25 bp, Homo sapien
tccagtcccttccctgggggctggc

SEQ ID NO: 5485601 - DNA, 25 bp, Homo sapien
cctgcgccccactgctgtagctgca

SEQ ID NO: 5485602 - DNA, 25 bp, Homo sapien
gcggtcacagagctcagcttcaggg

SEQ ID NO: 5485603 - DNA, 25 bp, Homo sapien
cccgaaccatgataatacctgcctc

SEQ ID NO: 5485604 - DNA, 25 bp, Homo sapien
agtcaaagtggttgtctccccgaac

SEQ ID NO: 5485605 - DNA, 25 bp, Homo sapien
gctaagttgctgcgaacactctgac

SEQ ID NO: 5485606 - DNA, 25 bp, Homo sapien
gatggtgagagtgaactctgtccca

SEQ ID NO: 5485607 - DNA, 25 bp, Homo sapien
ttcccctggagacacagacagggtg

SEQ ID NO: 5485608 - DNA, 25 bp, Homo sapien
gccactgaacctggctgggatacca

SEQ ID NO: 5485609 - DNA, 25 bp, Homo sapien
tgcaaaatcgtcagactgcaggccg

SEQ ID NO: 5485610 - DNA, 25 bp, Homo sapien
gtcccagacccactgccactgaacc

SEQ ID NO: 5485611 - DNA, 25 bp, Homo sapien
ggataccattggccctggtggatgc

SEQ ID NO: 5485612 - DNA, 25 bp, Homo sapien
ggctggaagctgcgtcatcactatt

SEQ ID NO: 5485613 - DNA, 25 bp, Homo sapien
acactctgactggccctgcaggaga

SEQ ID NO: 5485614 - DNA, 25 bp, Homo sapien
acgtccacggaggccagttattata

SEQ ID NO: 5485615 - DNA, 25 bp, Homo sapien
ggtaccaggctaagttgctgcgaac

SEQ ID NO: 5485616 - DNA, 25 bp, Homo sapien
aacgtgtccttacgaacttagagac

SEQ ID NO: 5485617 - DNA, 25 bp, Homo sapien
gtctctaagttcgtaaggacacgtt

SEQ ID NO: 5485618 - DNA, 25 bp, Homo sapien
gctgattgtgagagtgaattctgtc

SEQ ID NO: 5485619 - DNA, 25 bp, Homo sapien
gtcccagatccactgccgctgaacc

SEQ ID NO: 5485620 - DNA, 25 bp, Homo sapien
ttgcaaactggatgcagcatagatc

SEQ ID NO: 5485621 - DNA, 25 bp, Homo sapien
gcaaaatcttcaggctgcaggctgc

SEQ ID NO: 5485622 - DNA, 25 bp, Homo sapien
taatgccctgacttgcccggcaagt

SEQ ID NO: 5485623 - DNA, 25 bp, Homo sapien
tgatgggaccccactttgcaaactg

SEQ ID NO: 5485624 - DNA, 25 bp, Homo sapien
caagggtaactattatgctgtagac

SEQ ID NO: 5485625 - DNA, 25 bp, Homo sapien
gctgtagacagtaataagttgcaaa

SEQ ID NO: 5485626 - DNA, 25 bp, Homo sapien
gcaagtgatggtgactctgtctcct

SEQ ID NO: 5485627 - DNA, 25 bp, Homo sapien
ctcctacagatgcagacagggagga

SEQ ID NO: 5485628 - DNA, 25 bp, Homo sapien
gatgcagcatagatcaggcgcttag

SEQ ID NO: 5485629 - DNA, 25 bp, Homo sapien
gactctacccgggtgtcaaccgagg

SEQ ID NO: 5485630 - DNA, 25 bp, Homo sapien
cctcggttgacacccgggtagagtc

SEQ ID NO: 5485631 - DNA, 25 bp, Homo sapien
gctccaaagctgagcttgtagtctc

SEQ ID NO: 5485632 - DNA, 25 bp, Homo sapien
gagcttgtagtctctcacggcacag

SEQ ID NO: 5485633 - DNA, 25 bp, Homo sapien
agcttgtagtctctcacggcacaga

SEQ ID NO: 5485634 - DNA, 25 bp, Homo sapien
ttgtagtctctcacggcacagaggt

SEQ ID NO: 5485635 - DNA, 25 bp, Homo sapien
gggagtctctgatgagcagagaaac

SEQ ID NO: 5485636 - DNA, 25 bp, Homo sapien
tagtctctcacggcacagaggtagg

SEQ ID NO: 5485637 - DNA, 25 bp, Homo sapien
gctgggagtctctgatgagcagaga

SEQ ID NO: 5485638 - DNA, 25 bp, Homo sapien
tccggctccaaagctgagcttgtag

SEQ ID NO: 5485639 - DNA, 25 bp, Homo sapien
gtagtctctcacggcacagaggtag

SEQ ID NO: 5485640 - DNA, 25 bp, Homo sapien
ctctgatgagcagagaaacatactg

SEQ ID NO: 5485641 - DNA, 25 bp, Homo sapien
gctgagcttgtagtctctcacggca

SEQ ID NO: 5485642 - DNA, 25 bp, Homo sapien
cgaaggaatcttgaggtatcaaacc

SEQ ID NO: 5485643 - DNA, 25 bp, Homo sapien
ggtttgatacctcaagattccttcg

SEQ ID NO: 5485644 - DNA, 25 bp, Homo sapien
caggaaggtctgagtgaacttcttc

SEQ ID NO: 5485645 - DNA, 25 bp, Homo sapien
ggtgccaccagtgaggtggacatac

SEQ ID NO: 5485646 - DNA, 25 bp, Homo sapien
aaggaagtaagtttctcggtgccac

SEQ ID NO: 5485647 - DNA, 25 bp, Homo sapien
agtgaggtggacatacactcacatc

SEQ ID NO: 5485648 - DNA, 25 bp, Homo sapien
ttattagaaatacaagaagtgcact

SEQ ID NO: 5485649 - DNA, 25 bp, Homo sapien
gaagtgcacttaatacaaggaagta

SEQ ID NO: 5485650 - DNA, 25 bp, Homo sapien
ctgaattcaggaaggtctgagtgaa

SEQ ID NO: 5485651 - DNA, 25 bp, Homo sapien
tgaacaagctgaccttaacttttgg

SEQ ID NO: 5485652 - DNA, 25 bp, Homo sapien
acgaaggtttcgccagatttccctc

SEQ ID NO: 5485653 - DNA, 25 bp, Homo sapien
taaaagccagaacataacaaatctc

SEQ ID NO: 5485654 - DNA, 25 bp, Homo sapien
catcagtccctcaaacgaaggtttc

SEQ ID NO: 5485655 - DNA, 25 bp, Homo sapien
gcgcagctgctcctccgcgaactcc

SEQ ID NO: 5485656 - DNA, 25 bp, Homo sapien
cgcccacctgggatcttcaggggtg

SEQ ID NO: 5485657 - DNA, 25 bp, Homo sapien
gtcagctcctcggtcacgctcagcc

SEQ ID NO: 5485658 - DNA, 25 bp, Homo sapien
ggcctcaccagctcgaagcccagga

SEQ ID NO: 5485659 - DNA, 25 bp, Homo sapien
tcacgctcagccgctggtccgagta

SEQ ID NO: 5485660 - DNA, 25 bp, Homo sapien
gccgctggtccgagtacagcggcgc

SEQ ID NO: 5485661 - DNA, 25 bp, Homo sapien
cgctcagcacggccctccagctgac

SEQ ID NO: 5485662 - DNA, 25 bp, Homo sapien
tccgcgaactccagcagcaccgcga

SEQ ID NO: 5485663 - DNA, 25 bp, Homo sapien
tcagtatcacaaacacgacacgggg

SEQ ID NO: 5485664 - DNA, 25 bp, Homo sapien
ccctctggctatcccctcgcccacc

SEQ ID NO: 5485665 - DNA, 25 bp, Homo sapien
cgcgaggctgtccttgcagccctcg

SEQ ID NO: 5485666 - DNA, 25 bp, Homo sapien
tcctcttagccaagcactgcagccc

SEQ ID NO: 5485667 - DNA, 25 bp, Homo sapien
gcagcatccttgccaacgccctctg

SEQ ID NO: 5485668 - DNA, 25 bp, Homo sapien
tcctgggctcccacctgtgccttgc

SEQ ID NO: 5485669 - DNA, 25 bp, Homo sapien
tggtgctctcctcttagccaagcac

SEQ ID NO: 5485670 - DNA, 25 bp, Homo sapien
agcactgcagcccacctcatccact

SEQ ID NO: 5485671 - DNA, 25 bp, Homo sapien
cacctcatccactgtgggctcatcc

SEQ ID NO: 5485672 - DNA, 25 bp, Homo sapien
agcctggacggaatcctcgttactg

SEQ ID NO: 5485673 - DNA, 25 bp, Homo sapien
cttgccaacgccctctgtctcagcc

SEQ ID NO: 5485674 - DNA, 25 bp, Homo sapien
tgggctcccacctgtgccttgccgg

SEQ ID NO: 5485675 - DNA, 25 bp, Homo sapien
ctgtgggctcatccccctcctgggc

SEQ ID NO: 5485676 - DNA, 25 bp, Homo sapien
cctcgttactgcactggagggaagc

SEQ ID NO: 5485677 - DNA, 25 bp, Homo sapien
gacgccgcgttcctcgccggcctgg

SEQ ID NO: 5485678 - DNA, 25 bp, Homo sapien
ccaggccggcgaggaacgcggcgtc

SEQ ID NO: 5485679 - DNA, 25 bp, Homo sapien
ttcctcgccggcctggccgacctcc

SEQ ID NO: 5485680 - DNA, 25 bp, Homo sapien
ggaggtcggccaggccggcgaggaa

SEQ ID NO: 5485681 - DNA, 25 bp, Homo sapien
atcgaggtaccgtcctagaaaggac

SEQ ID NO: 5485682 - DNA, 25 bp, Homo sapien
gtcctttctaggacggtacctcgat

SEQ ID NO: 5485683 - DNA, 25 bp, Homo sapien
accaccactacaacccatcccttct

SEQ ID NO: 5485684 - DNA, 25 bp, Homo sapien
agaagggatgggttgtagtggtggt

SEQ ID NO: 5485685 - DNA, 25 bp, Homo sapien
gaagatgtcggcacatgtattttat

SEQ ID NO: 5485686 - DNA, 25 bp, Homo sapien
ataaaatacatgtgccgacatcttc

SEQ ID NO: 5485687 - DNA, 25 bp, Homo sapien
ataaaaggccaacaagtgggattct

SEQ ID NO: 5485688 - DNA, 25 bp, Homo sapien
cctaaagtcgcacaggtagtaagcg

SEQ ID NO: 5485689 - DNA, 25 bp, Homo sapien
tactattagatggagcagctgcaaa

SEQ ID NO: 5485690 - DNA, 25 bp, Homo sapien
ggttgctatgagttaaggaagtgga

SEQ ID NO: 5485691 - DNA, 25 bp, Homo sapien
gactcagatgagttaagtgccagac

SEQ ID NO: 5485692 - DNA, 25 bp, Homo sapien
gattctagtggtgacaggttgttct

SEQ ID NO: 5485693 - DNA, 25 bp, Homo sapien
actgcgagctgattattgtggtgac

SEQ ID NO: 5485694 - DNA, 25 bp, Homo sapien
gtagtaagcgacacaactggaattc

SEQ ID NO: 5485695 - DNA, 25 bp, Homo sapien
taatgtgaagtggaacctcgctcca

SEQ ID NO: 5485696 - DNA, 25 bp, Homo sapien
aagatagtgaacacacagtggttgc

SEQ ID NO: 5485697 - DNA, 25 bp, Homo sapien
tccgggtgaggttagaatatctcta

SEQ ID NO: 5485698 - DNA, 25 bp, Homo sapien
ggctaagctcctcacgtaggtgcgt

SEQ ID NO: 5485699 - DNA, 25 bp, Homo sapien
gtcctcctccgaccggctggtgttc

SEQ ID NO: 5485700 - DNA, 25 bp, Homo sapien
tccatgtctctagggtaggcctgca

SEQ ID NO: 5485701 - DNA, 25 bp, Homo sapien
ctacactggaagcagctatacagct

SEQ ID NO: 5485702 - DNA, 25 bp, Homo sapien
gttgacatgccagggctccgtctac

SEQ ID NO: 5485703 - DNA, 25 bp, Homo sapien
taggtgcgtaggttctggttaataa

SEQ ID NO: 5485704 - DNA, 25 bp, Homo sapien
ttctctaggaacgctgttgacatgc

SEQ ID NO: 5485705 - DNA, 25 bp, Homo sapien
aggtgcctggcaatattccggatga

SEQ ID NO: 5485706 - DNA, 25 bp, Homo sapien
tgtgtgaaagacatcacggagcaag

SEQ ID NO: 5485707 - DNA, 25 bp, Homo sapien
gtcacacttctggaactgtccgttc

SEQ ID NO: 5485708 - DNA, 25 bp, Homo sapien
gggatgctacggtccatgctgtccc

SEQ ID NO: 5485709 - DNA, 25 bp, Homo sapien
gtcctctatgtctgggacctccatt

SEQ ID NO: 5485710 - DNA, 25 bp, Homo sapien
aatggaggtcccagacatagaggac

SEQ ID NO: 5485711 - DNA, 25 bp, Homo sapien
tagtcatacggtcaatagttacgat

SEQ ID NO: 5485712 - DNA, 25 bp, Homo sapien
atcgtaactattgaccgtatgacta

SEQ ID NO: 5485713 - DNA, 25 bp, Homo sapien
cacgcgcgggctgcgcccctgcggg

SEQ ID NO: 5485714 - DNA, 25 bp, Homo sapien
cccgcaggggcgcagcccgcgcgtg

SEQ ID NO: 5485715 - DNA, 25 bp, Homo sapien
acacgcgcgggctgcgcccctgcgg

SEQ ID NO: 5485716 - DNA, 25 bp, Homo sapien
ccgcaggggcgcagcccgcgcgtgt

SEQ ID NO: 5485717 - DNA, 25 bp, Homo sapien
gcacacgcgcgggctgcgcccctgc

SEQ ID NO: 5485718 - DNA, 25 bp, Homo sapien
gcaggggcgcagcccgcgcgtgtgc

SEQ ID NO: 5485719 - DNA, 25 bp, Homo sapien
acgtgactcgtgagaccatcattgg

SEQ ID NO: 5485720 - DNA, 25 bp, Homo sapien
ccaatgatggtctcacgagtcacgt

SEQ ID NO: 5485721 - DNA, 25 bp, Homo sapien
atcccatcgtggactacaaccgagc

SEQ ID NO: 5485722 - DNA, 25 bp, Homo sapien
gctcggttgtagtccacgatgggat

SEQ ID NO: 5485723 - DNA, 25 bp, Homo sapien
gatcacgtcctaggggtcatcctcc

SEQ ID NO: 5485724 - DNA, 25 bp, Homo sapien
ggaggatgacccctaggacgtgatc

SEQ ID NO: 5485725 - DNA, 25 bp, Homo sapien
cacggcactgctgaacctcacatcc

SEQ ID NO: 5485726 - DNA, 25 bp, Homo sapien
acctcccggacatccgcgaaacaga

SEQ ID NO: 5485727 - DNA, 25 bp, Homo sapien
tgctcaatgtacagcctcagcttgt

SEQ ID NO: 5485728 - DNA, 25 bp, Homo sapien
tgcacgctgatgaagacgttctccg

SEQ ID NO: 5485729 - DNA, 25 bp, Homo sapien
gctgatgaagacgttctccggcagc

SEQ ID NO: 5485730 - DNA, 25 bp, Homo sapien
aggtctccccgagaaagctgtagat

SEQ ID NO: 5485731 - DNA, 25 bp, Homo sapien
tttctgctcaatgtacagcctcagc

SEQ ID NO: 5485732 - DNA, 25 bp, Homo sapien
tgaaggtctccccgagaaagctgta

SEQ ID NO: 5485733 - DNA, 25 bp, Homo sapien
tgctgaacctcacatccgactgctc

SEQ ID NO: 5485734 - DNA, 25 bp, Homo sapien
ctcccggacatccgcgaaacagaag

SEQ ID NO: 5485735 - DNA, 25 bp, Homo sapien
aacctcacatccgactgctcggtgc

SEQ ID NO: 5485736 - DNA, 25 bp, Homo sapien
aaatctcaacacttctaacacatgt

SEQ ID NO: 5485737 - DNA, 25 bp, Homo sapien
acatgtgttagaagtgttgagattt

SEQ ID NO: 5485738 - DNA, 25 bp, Homo sapien
gcatgaaatataagggcctcaggag

SEQ ID NO: 5485739 - DNA, 25 bp, Homo sapien
ctcctgaggcccttatatttcatgc

SEQ ID NO: 5485740 - DNA, 25 bp, Homo sapien
tagttgacaagcatgaaatataagg

SEQ ID NO: 5485741 - DNA, 25 bp, Homo sapien
ccttatatttcatgcttgtcaacta

SEQ ID NO: 5485742 - DNA, 25 bp, Homo sapien
ttcaaagaagaaatcatacaatagt

SEQ ID NO: 5485743 - DNA, 25 bp, Homo sapien
actattgtatgatttcttctttgaa

SEQ ID NO: 5485744 - DNA, 25 bp, Homo sapien
attattcacataccatttctatgac

SEQ ID NO: 5485745 - DNA, 25 bp, Homo sapien
gtcatagaaatggtatgtgaataat

SEQ ID NO: 5485746 - DNA, 25 bp, Homo sapien
tctcgtcgcgggagatcgcctccgg

SEQ ID NO: 5485747 - DNA, 25 bp, Homo sapien
ccggaggcgatctcccgcgacgaga

SEQ ID NO: 5485748 - DNA, 25 bp, Homo sapien
tttgtcaaatccaagtagtttttac

SEQ ID NO: 5485749 - DNA, 25 bp, Homo sapien
gtaaaaactacttggatttgacaaa

SEQ ID NO: 5485750 - DNA, 25 bp, Homo sapien
ggcttcggtccgagtaggcccttcg

SEQ ID NO: 5485751 - DNA, 25 bp, Homo sapien
cgaagggcctactcggaccgaagcc

SEQ ID NO: 5485752 - DNA, 25 bp, Homo sapien
tcgggtgaccgtaacagagactcgt

SEQ ID NO: 5485753 - DNA, 25 bp, Homo sapien
acgagtctctgttacggtcacccga

SEQ ID NO: 5485754 - DNA, 25 bp, Homo sapien
ttgttattgggaaattccagtgact

SEQ ID NO: 5485755 - DNA, 25 bp, Homo sapien
agtcactggaatttcccaataacaa

SEQ ID NO: 5485756 - DNA, 25 bp, Homo sapien
gctgctggccacacagactcaccaa

SEQ ID NO: 5485757 - DNA, 25 bp, Homo sapien
agcaagtaacagcccacggtgttct

SEQ ID NO: 5485758 - DNA, 25 bp, Homo sapien
tcagatgaattagaagaaagaggtt

SEQ ID NO: 5485759 - DNA, 25 bp, Homo sapien
taccttagccacgaagtgaccaagc

SEQ ID NO: 5485760 - DNA, 25 bp, Homo sapien
acggtgttctggccaaagacatcag

SEQ ID NO: 5485761 - DNA, 25 bp, Homo sapien
gtgttgctggggcctaatgttctca

SEQ ID NO: 5485762 - DNA, 25 bp, Homo sapien
tacaggcgtaaatgcaaaccgcttc

SEQ ID NO: 5485763 - DNA, 25 bp, Homo sapien
aataccctgcacagatcagaggctg

SEQ ID NO: 5485764 - DNA, 25 bp, Homo sapien
acccgcaagacaaaacaactggttc

SEQ ID NO: 5485765 - DNA, 25 bp, Homo sapien
aagacatcagctaagaaaggaaact

SEQ ID NO: 5485766 - DNA, 25 bp, Homo sapien
aaagaatcgagaattgcgtacaaaa

SEQ ID NO: 5485767 - DNA, 25 bp, Homo sapien
attaccacagtatttggtcttatcg

SEQ ID NO: 5485768 - DNA, 25 bp, Homo sapien
cgataagaccaaatactgtggtaat

SEQ ID NO: 5485769 - DNA, 25 bp, Homo sapien
tcccgacgttgaccaggggcatccc

SEQ ID NO: 5485770 - DNA, 25 bp, Homo sapien
gggatgcccctggtcaacgtcggga

SEQ ID NO: 5485771 - DNA, 25 bp, Homo sapien
ccgacggagtcgtgttggtcctaac

SEQ ID NO: 5485772 - DNA, 25 bp, Homo sapien
gttaggaccaacacgactccgtcgg

SEQ ID NO: 5485773 - DNA, 25 bp, Homo sapien
tggtgtatcgcgattttagttaaaa

SEQ ID NO: 5485774 - DNA, 25 bp, Homo sapien
ttttaactaaaatcgcgatacacca

SEQ ID NO: 5485775 - DNA, 25 bp, Homo sapien
aaaacataattaaaggaggagtctg

SEQ ID NO: 5485776 - DNA, 25 bp, Homo sapien
cagactcctcctttaattatgtttt

SEQ ID NO: 5485777 - DNA, 25 bp, Homo sapien
tccgtgacaaaatgtacgcgtccac

SEQ ID NO: 5485778 - DNA, 25 bp, Homo sapien
cagagtctgctcaaaagctcagctc

SEQ ID NO: 5485779 - DNA, 25 bp, Homo sapien
aaagagaaacttaaatcctgttgta

SEQ ID NO: 5485780 - DNA, 25 bp, Homo sapien
tttgagtcacatccatatggcatgg

SEQ ID NO: 5485781 - DNA, 25 bp, Homo sapien
agctctgtggactccgtgacaaaat

SEQ ID NO: 5485782 - DNA, 25 bp, Homo sapien
ttcaacacaagcaatgatacttctc

SEQ ID NO: 5485783 - DNA, 25 bp, Homo sapien
agcaatgatacttctcagagtctgc

SEQ ID NO: 5485784 - DNA, 25 bp, Homo sapien
ccgcgcccggcctttcttcagtgca

SEQ ID NO: 5485785 - DNA, 25 bp, Homo sapien
gtacgcgtccactgccgaccctctt

SEQ ID NO: 5485786 - DNA, 25 bp, Homo sapien
cctctctgccagaaggaactgaact

SEQ ID NO: 5485787 - DNA, 25 bp, Homo sapien
gaaaagctgtgggacccctcatttg

SEQ ID NO: 5485788 - DNA, 25 bp, Homo sapien
caaaagaagagaaacaatttcaacc

SEQ ID NO: 5485789 - DNA, 25 bp, Homo sapien
tatcaaacatgaagtctggtgcatt

SEQ ID NO: 5485790 - DNA, 25 bp, Homo sapien
gaccatctattaactgggaaaacac

SEQ ID NO: 5485791 - DNA, 25 bp, Homo sapien
tctcattagaccacaacaagcttta

SEQ ID NO: 5485792 - DNA, 25 bp, Homo sapien
caaaccacattgggatggcatttac

SEQ ID NO: 5485793 - DNA, 25 bp, Homo sapien
taagttacaaaaagctgaaagtata

SEQ ID NO: 5485794 - DNA, 25 bp, Homo sapien
aaggaatatctatcagagggtgagg

SEQ ID NO: 5485795 - DNA, 25 bp, Homo sapien
ttgtggaaacagtgaccatctatta

SEQ ID NO: 5485796 - DNA, 25 bp, Homo sapien
gggctggcttactggcagtttgaca

SEQ ID NO: 5485797 - DNA, 25 bp, Homo sapien
agaagctcagaaaaacattatgcac

SEQ ID NO: 5485798 - DNA, 25 bp, Homo sapien
agtctggtgcattaaaggaatatct

SEQ ID NO: 5485799 - DNA, 25 bp, Homo sapien
actggggctgctcccatcattgatg

SEQ ID NO: 5485800 - DNA, 25 bp, Homo sapien
tggtctgcatcaccaccggatcaac

SEQ ID NO: 5485801 - DNA, 25 bp, Homo sapien
aagcagcctgtcatcgtgaaggcca

SEQ ID NO: 5485802 - DNA, 25 bp, Homo sapien
ttgacaaattgtggactttggtcag

SEQ ID NO: 5485803 - DNA, 25 bp, Homo sapien
ccggatcaacttcgacaaataccac

SEQ ID NO: 5485804 - DNA, 25 bp, Homo sapien
ttaccacttaaagaggaaccagagc

SEQ ID NO: 5485805 - DNA, 25 bp, Homo sapien
ccatcattgatgtggtgcgatcggg

SEQ ID NO: 5485806 - DNA, 25 bp, Homo sapien
acatgccatccagactgaggaagac

SEQ ID NO: 5485807 - DNA, 25 bp, Homo sapien
tgggaaagttggtatgaagcattac

SEQ ID NO: 5485808 - DNA, 25 bp, Homo sapien
tgcgatcgggctactacaaagttct

SEQ ID NO: 5485809 - DNA, 25 bp, Homo sapien
agagcttctgcccaactgtcaacct

SEQ ID NO: 5485810 - DNA, 25 bp, Homo sapien
gataaacattatccgtctttaaata

SEQ ID NO: 5485811 - DNA, 25 bp, Homo sapien
tatttaaagacggataatgtttatc

SEQ ID NO: 5485812 - DNA, 25 bp, Homo sapien
ccttcggcaaccgaaagcgacggaa

SEQ ID NO: 5485813 - DNA, 25 bp, Homo sapien
ttccgtcgctttcggttgccgaagg

SEQ ID NO: 5485814 - DNA, 25 bp, Homo sapien
tcaggagacacaaaagatttacaat

SEQ ID NO: 5485815 - DNA, 25 bp, Homo sapien
cactcagagctaattttaagggaag

SEQ ID NO: 5485816 - DNA, 25 bp, Homo sapien
gcacaagaatgaacaatgggctatt

SEQ ID NO: 5485817 - DNA, 25 bp, Homo sapien
aaatatggattcgaagatgtctttt

SEQ ID NO: 5485818 - DNA, 25 bp, Homo sapien
tctaccaggcttgaaatatggattc

SEQ ID NO: 5485819 - DNA, 25 bp, Homo sapien
ttgaatgaatgttggctacaaaatc

SEQ ID NO: 5485820 - DNA, 25 bp, Homo sapien
ttttaagggaagtcttcaggagaca

SEQ ID NO: 5485821 - DNA, 25 bp, Homo sapien
tataacataaaggtgaatggaccat

SEQ ID NO: 5485822 - DNA, 25 bp, Homo sapien
aaggttctgctagaaaagccaattc

SEQ ID NO: 5485823 - DNA, 25 bp, Homo sapien
gggtgtgctctgaaaagtcaaagta

SEQ ID NO: 5485824 - DNA, 25 bp, Homo sapien
gtacagcacaagaatgaacaatggg

SEQ ID NO: 5485825 - DNA, 25 bp, Homo sapien
gcggcggagggtccaccccgcgcct

SEQ ID NO: 5485826 - DNA, 25 bp, Homo sapien
aggcgcggggtggaccctccgccgc

SEQ ID NO: 5485827 - DNA, 25 bp, Homo sapien
cgcctcgagccgagacgcggcggtg

SEQ ID NO: 5485828 - DNA, 25 bp, Homo sapien
caccgccgcgtctcggctcgaggcg

SEQ ID NO: 5485829 - DNA, 25 bp, Homo sapien
gctctccacatcaggctcgaggtta

SEQ ID NO: 5485830 - DNA, 25 bp, Homo sapien
taacctcgagcctgatgtggagagc

SEQ ID NO: 5485831 - DNA, 25 bp, Homo sapien
tacaggacatgcatgataaaaaatt

SEQ ID NO: 5485832 - DNA, 25 bp, Homo sapien
aatgcaaaaagtcaaagtaggtaac

SEQ ID NO: 5485833 - DNA, 25 bp, Homo sapien
cgactcaggtttacaggtgaaattc

SEQ ID NO: 5485834 - DNA, 25 bp, Homo sapien
ttaaaaagtatgcagtatagcacat

SEQ ID NO: 5485835 - DNA, 25 bp, Homo sapien
ttattgtgcaggcttgtaaccttta

SEQ ID NO: 5485836 - DNA, 25 bp, Homo sapien
ttgcatgagggactaagcatctatg

SEQ ID NO: 5485837 - DNA, 25 bp, Homo sapien
agtcaaagtaggtaacaggttggta

SEQ ID NO: 5485838 - DNA, 25 bp, Homo sapien
aatcacaatatgagcaggaggaata

SEQ ID NO: 5485839 - DNA, 25 bp, Homo sapien
ttggtaattaaagtgtcaggaagac

SEQ ID NO: 5485840 - DNA, 25 bp, Homo sapien
tttggatataccaggcagctttctg

SEQ ID NO: 5485841 - DNA, 25 bp, Homo sapien
cagacatgtcttggaatacacagtt

SEQ ID NO: 5485842 - DNA, 25 bp, Homo sapien
cctggtatgaagggatgggttgtag

SEQ ID NO: 5485843 - DNA, 25 bp, Homo sapien
ctacaacccatcccttcataccagg

SEQ ID NO: 5485844 - DNA, 25 bp, Homo sapien
atcagatgtcagttatggaaacaca

SEQ ID NO: 5485845 - DNA, 25 bp, Homo sapien
ttccccaggactccacagaaccatc

SEQ ID NO: 5485846 - DNA, 25 bp, Homo sapien
ccatctggtactgctagtgctgggt

SEQ ID NO: 5485847 - DNA, 25 bp, Homo sapien
gggagtcagactgtgctctctccat

SEQ ID NO: 5485848 - DNA, 25 bp, Homo sapien
aaaagcagacatgtttggctgaaat

SEQ ID NO: 5485849 - DNA, 25 bp, Homo sapien
cccatcctgtaggaagtggtgggaa

SEQ ID NO: 5485850 - DNA, 25 bp, Homo sapien
agaaacacagctaaaactcccccat

SEQ ID NO: 5485851 - DNA, 25 bp, Homo sapien
gagaatgaggtctgcatcagatgtc

SEQ ID NO: 5485852 - DNA, 25 bp, Homo sapien
gaaagaaacccagctcttgagtctc

SEQ ID NO: 5485853 - DNA, 25 bp, Homo sapien
aaacacagagaaccagaatgtgacc

SEQ ID NO: 5485854 - DNA, 25 bp, Homo sapien
accatgggcaagtcaactcctggct

SEQ ID NO: 5485855 - DNA, 25 bp, Homo sapien
tagtagtacagctggtgcttctgcc

SEQ ID NO: 5485856 - DNA, 25 bp, Homo sapien
tgtttgtaatcgtctagaaagtgaa

SEQ ID NO: 5485857 - DNA, 25 bp, Homo sapien
ggtcgaacagacctttgtggcaagc

SEQ ID NO: 5485858 - DNA, 25 bp, Homo sapien
tgtggcaagccagatgtcctatcac

SEQ ID NO: 5485859 - DNA, 25 bp, Homo sapien
atcacctcgctagcggtaagagggc

SEQ ID NO: 5485860 - DNA, 25 bp, Homo sapien
tacttcacatggcattgggcagctg

SEQ ID NO: 5485861 - DNA, 25 bp, Homo sapien
caccgaggactgttcaggtggtaac

SEQ ID NO: 5485862 - DNA, 25 bp, Homo sapien
tccacctagtcaggttggagacacc

SEQ ID NO: 5485863 - DNA, 25 bp, Homo sapien
ctgatagaaggttggcctcacattc

SEQ ID NO: 5485864 - DNA, 25 bp, Homo sapien
ttagctaggatatgtctggtcgaac

SEQ ID NO: 5485865 - DNA, 25 bp, Homo sapien
cattctcttagggtagggaactctg

SEQ ID NO: 5485866 - DNA, 25 bp, Homo sapien
gggcgaccggtgtcacgtcggaaag

SEQ ID NO: 5485867 - DNA, 25 bp, Homo sapien
ctttccgacgtgacaccggtcgccc

SEQ ID NO: 5485868 - DNA, 25 bp, Homo sapien
aaaagagagtgaaaatctcaactgt

SEQ ID NO: 5485869 - DNA, 25 bp, Homo sapien
acagttgagattttcactctctttt

SEQ ID NO: 5485870 - DNA, 25 bp, Homo sapien
gaaactggtatttgagaccctctaa

SEQ ID NO: 5485871 - DNA, 25 bp, Homo sapien
ttagagggtctcaaataccagtttc

SEQ ID NO: 5485872 - DNA, 25 bp, Homo sapien
ttggagggcttactcaaatgaaccc

SEQ ID NO: 5485873 - DNA, 25 bp, Homo sapien
ttactaaaagtccaatgtcattcac

SEQ ID NO: 5485874 - DNA, 25 bp, Homo sapien
atcatcaaatggtaattagggcaac

SEQ ID NO: 5485875 - DNA, 25 bp, Homo sapien
aagggatctaaaggtgctcatgtca

SEQ ID NO: 5485876 - DNA, 25 bp, Homo sapien
tggtaattagggcaacatatgtaaa

SEQ ID NO: 5485877 - DNA, 25 bp, Homo sapien
tcaaatgaacccacaatacctccac

SEQ ID NO: 5485878 - DNA, 25 bp, Homo sapien
ttgaatggtatctttggagggctta

SEQ ID NO: 5485879 - DNA, 25 bp, Homo sapien
ataagatgcctatgtacaagacagt

SEQ ID NO: 5485880 - DNA, 25 bp, Homo sapien
gggtgcagtgaataagatgcctatg

SEQ ID NO: 5485881 - DNA, 25 bp, Homo sapien
gtctttcaaataatgtgcggggcgg

SEQ ID NO: 5485882 - DNA, 25 bp, Homo sapien
agtcgtccctggaaaaagaagtaga

SEQ ID NO: 5485883 - DNA, 25 bp, Homo sapien
tcagtggtgacgattcgattcttct

SEQ ID NO: 5485884 - DNA, 25 bp, Homo sapien
agaagaatcgaatcgtcaccactga

SEQ ID NO: 5485885 - DNA, 25 bp, Homo sapien
tacaactggttgtgaacaggaagaa

SEQ ID NO: 5485886 - DNA, 25 bp, Homo sapien
agcagataaggttttcagatgcctg

SEQ ID NO: 5485887 - DNA, 25 bp, Homo sapien
ttgagtggtcataaatgaattgtca

SEQ ID NO: 5485888 - DNA, 25 bp, Homo sapien
gaaattctcaaagtttgggcatgtc

SEQ ID NO: 5485889 - DNA, 25 bp, Homo sapien
gcctataaagtcgcaaaaacagttg

SEQ ID NO: 5485890 - DNA, 25 bp, Homo sapien
ggttactaacgctgtttgagtggtc

SEQ ID NO: 5485891 - DNA, 25 bp, Homo sapien
acattgtctagcagataaggttttc

SEQ ID NO: 5485892 - DNA, 25 bp, Homo sapien
aatcccagataactctgtgtgaatc

SEQ ID NO: 5485893 - DNA, 25 bp, Homo sapien
gtctgaaaagactttgactgcatct

SEQ ID NO: 5485894 - DNA, 25 bp, Homo sapien
tagcattagatggttgaagaaattc

SEQ ID NO: 5485895 - DNA, 25 bp, Homo sapien
gaaggaaaacagtagctagtatttc

SEQ ID NO: 5485896 - DNA, 25 bp, Homo sapien
ggaggtgccttgagcgcgcggcgcc

SEQ ID NO: 5485897 - DNA, 25 bp, Homo sapien
ggcgccgcgcgctcaaggcacctcc

SEQ ID NO: 5485898 - DNA, 25 bp, Homo sapien
cggaggaggtgccttgagcgcgcgg

SEQ ID NO: 5485899 - DNA, 25 bp, Homo sapien
ccgcgcgctcaaggcacctcctccg

SEQ ID NO: 5485900 - DNA, 25 bp, Homo sapien
aggttctgcgtaggcccggcccttg

SEQ ID NO: 5485901 - DNA, 25 bp, Homo sapien
caagggccgggcctacgcagaacct

SEQ ID NO: 5485902 - DNA, 25 bp, Homo sapien
gttcgttttactgcacgtggttgag

SEQ ID NO: 5485903 - DNA, 25 bp, Homo sapien
ctcaaccacgtgcagtaaaacgaac

SEQ ID NO: 5485904 - DNA, 25 bp, Homo sapien
gtccgacgggcagggaccggtgagt

SEQ ID NO: 5485905 - DNA, 25 bp, Homo sapien
actcaccggtccctgcccgtcggac

SEQ ID NO: 5485906 - DNA, 25 bp, Homo sapien
gcggcgcatgggaagcgcggagggc

SEQ ID NO: 5485907 - DNA, 25 bp, Homo sapien
gccctccgcgcttcccatgcgccgc

SEQ ID NO: 5485908 - DNA, 25 bp, Homo sapien
gagattgaaagtggagataatactg

SEQ ID NO: 5485909 - DNA, 25 bp, Homo sapien
ctttctctgatcaggggaaaggagc

SEQ ID NO: 5485910 - DNA, 25 bp, Homo sapien
gagatgggaaatggacatacttaga

SEQ ID NO: 5485911 - DNA, 25 bp, Homo sapien
cttagggaccaaggctggtctcttt

SEQ ID NO: 5485912 - DNA, 25 bp, Homo sapien
aatactgctgacacctcccttgaag

SEQ ID NO: 5485913 - DNA, 25 bp, Homo sapien
aatttagtgactttaatagcctgga

SEQ ID NO: 5485914 - DNA, 25 bp, Homo sapien
gaaatctcaaatgtaggatagaaca

SEQ ID NO: 5485915 - DNA, 25 bp, Homo sapien
tggggattaagaagacgtttctgga

SEQ ID NO: 5485916 - DNA, 25 bp, Homo sapien
taagaagacgtttctggaggcttag

SEQ ID NO: 5485917 - DNA, 25 bp, Homo sapien
tctcaaatgtaggatagaacaaaac

SEQ ID NO: 5485918 - DNA, 25 bp, Homo sapien
tgaaagtggagataatactgctgac

SEQ ID NO: 5485919 - DNA, 25 bp, Homo sapien
caaaagcacaaaatgtcccagttga

SEQ ID NO: 5485920 - DNA, 25 bp, Homo sapien
catgacaatggtataacaaggctta

SEQ ID NO: 5485921 - DNA, 25 bp, Homo sapien
tgggaacaaaagcatcaacgaaata

SEQ ID NO: 5485922 - DNA, 25 bp, Homo sapien
ctaagagagtagctttcgttgctcc

SEQ ID NO: 5485923 - DNA, 25 bp, Homo sapien
agtttagggtcacacttgggaacaa

SEQ ID NO: 5485924 - DNA, 25 bp, Homo sapien
tgatagtttcggcatgagtaaaggg

SEQ ID NO: 5485925 - DNA, 25 bp, Homo sapien
tcacaagaacataactaagagagta

SEQ ID NO: 5485926 - DNA, 25 bp, Homo sapien
aaggcaccagtcagaaataggaaag

SEQ ID NO: 5485927 - DNA, 25 bp, Homo sapien
ggaggaaagcacataacacccgatt

SEQ ID NO: 5485928 - DNA, 25 bp, Homo sapien
tggctttatgacaggggtccatgac

SEQ ID NO: 5485929 - DNA, 25 bp, Homo sapien
aatatgctcaaaaatggaggaaagc

SEQ ID NO: 5485930 - DNA, 25 bp, Homo sapien
aggttcatcccctcggttcaggaac

SEQ ID NO: 5485931 - DNA, 25 bp, Homo sapien
gttcctgaaccgaggggatgaacct

SEQ ID NO: 5485932 - DNA, 25 bp, Homo sapien
cttctgagtgttgagacttccagtc

SEQ ID NO: 5485933 - DNA, 25 bp, Homo sapien
gactggaagtctcaacactcagaag

SEQ ID NO: 5485934 - DNA, 25 bp, Homo sapien
tactaactgatctgggctctaaacc

SEQ ID NO: 5485935 - DNA, 25 bp, Homo sapien
aaccctgaagcagtgaatgtgtttc

SEQ ID NO: 5485936 - DNA, 25 bp, Homo sapien
aggagacacacagattagaaccctg

SEQ ID NO: 5485937 - DNA, 25 bp, Homo sapien
agaagacaacgaaagcctactaact

SEQ ID NO: 5485938 - DNA, 25 bp, Homo sapien
agagtagcttacagaaatggagtca

SEQ ID NO: 5485939 - DNA, 25 bp, Homo sapien
ctgtacaaatgctggtgatgggtaa

SEQ ID NO: 5485940 - DNA, 25 bp, Homo sapien
tacccgttttgtgatggaaagaagc

SEQ ID NO: 5485941 - DNA, 25 bp, Homo sapien
taaaccatactgaagagaaagagat

SEQ ID NO: 5485942 - DNA, 25 bp, Homo sapien
gaaagaagccatggatatcgagtcc

SEQ ID NO: 5485943 - DNA, 25 bp, Homo sapien
caaggtagcaaaagtgaagattcct

SEQ ID NO: 5485944 - DNA, 25 bp, Homo sapien
tacaatggttgtatggctagcttgc

SEQ ID NO: 5485945 - DNA, 25 bp, Homo sapien
gtacgaaagtctaacggtcttaaga

SEQ ID NO: 5485946 - DNA, 25 bp, Homo sapien
tcttaagaccgttagactttcgtac

SEQ ID NO: 5485947 - DNA, 25 bp, Homo sapien
aaaagggctcctaatgtagtactgc

SEQ ID NO: 5485948 - DNA, 25 bp, Homo sapien
gcttcatgtctgagaaggctctccc

SEQ ID NO: 5485949 - DNA, 25 bp, Homo sapien
gtagtactgcttgaaaatggtacat

SEQ ID NO: 5485950 - DNA, 25 bp, Homo sapien
tagacattaacagataaggcaactt

SEQ ID NO: 5485951 - DNA, 25 bp, Homo sapien
aaggcaacttatacattgagaatcc

SEQ ID NO: 5485952 - DNA, 25 bp, Homo sapien
ccttcaatggggatgacaaactcca

SEQ ID NO: 5485953 - DNA, 25 bp, Homo sapien
tactagattcacactggaacggggg

SEQ ID NO: 5485954 - DNA, 25 bp, Homo sapien
ctgaattaataggaaataaacacgg

SEQ ID NO: 5485955 - DNA, 25 bp, Homo sapien
gatgacaaactccaaatgccacaca

SEQ ID NO: 5485956 - DNA, 25 bp, Homo sapien
caaatggaagccagatcaaatttgt

SEQ ID NO: 5485957 - DNA, 25 bp, Homo sapien
taaagagacagaagatagacattaa

SEQ ID NO: 5485958 - DNA, 25 bp, Homo sapien
gtacatcacgtcccctcccgtgtgg

SEQ ID NO: 5485959 - DNA, 25 bp, Homo sapien
ccacacgggaggggacgtgatgtac

SEQ ID NO: 5485960 - DNA, 25 bp, Homo sapien
tcttcgtcgacccacatccgccggt

SEQ ID NO: 5485961 - DNA, 25 bp, Homo sapien
accggcggatgtgggtcgacgaaga

SEQ ID NO: 5485962 - DNA, 25 bp, Homo sapien
agagtcggtgccctggtcccttcca

SEQ ID NO: 5485963 - DNA, 25 bp, Homo sapien
tggaagggaccagggcaccgactct

SEQ ID NO: 5485964 - DNA, 25 bp, Homo sapien
gtgtagaccacggacactagtctcg

SEQ ID NO: 5485965 - DNA, 25 bp, Homo sapien
cgagactagtgtccgtggtctacac

SEQ ID NO: 5485966 - DNA, 25 bp, Homo sapien
aggcctgtatagtcaagccaaggac

SEQ ID NO: 5485967 - DNA, 25 bp, Homo sapien
tggcaatggattggggccctatata

SEQ ID NO: 5485968 - DNA, 25 bp, Homo sapien
tgatatgccatgaagttcaaggcct

SEQ ID NO: 5485969 - DNA, 25 bp, Homo sapien
gttacatggtagcttggaattttgc

SEQ ID NO: 5485970 - DNA, 25 bp, Homo sapien
gccaaggactcaaagttgcaccatc

SEQ ID NO: 5485971 - DNA, 25 bp, Homo sapien
gcagatatggcaaagttgatatgcc

SEQ ID NO: 5485972 - DNA, 25 bp, Homo sapien
ctggaccacaacaatgcacaacatg

SEQ ID NO: 5485973 - DNA, 25 bp, Homo sapien
aagggcaatttgatggcaatggatt

SEQ ID NO: 5485974 - DNA, 25 bp, Homo sapien
ggaaaagtccaagggcaatttgatg

SEQ ID NO: 5485975 - DNA, 25 bp, Homo sapien
aaaaggtttggcatttctggaccac

SEQ ID NO: 5485976 - DNA, 25 bp, Homo sapien
gcacaacatgtaaagaaggtaggaa

SEQ ID NO: 5485977 - DNA, 25 bp, Homo sapien
ggtcggtcccgcaccgtctccccac

SEQ ID NO: 5485978 - DNA, 25 bp, Homo sapien
gtggggagacggtgcgggaccgacc

SEQ ID NO: 5485979 - DNA, 25 bp, Homo sapien
gggtcggtcccgcaccgtctcccca

SEQ ID NO: 5485980 - DNA, 25 bp, Homo sapien
tggggagacggtgcgggaccgaccc

SEQ ID NO: 5485981 - DNA, 25 bp, Homo sapien
cgggtacgcgggaagctgtggtcgg

SEQ ID NO: 5485982 - DNA, 25 bp, Homo sapien
ccgaccacagcttcccgcgtacccg

SEQ ID NO: 5485983 - DNA, 25 bp, Homo sapien
gacggcactcagaaccacgtagttt

SEQ ID NO: 5485984 - DNA, 25 bp, Homo sapien
aaactacgtggttctgagtgccgtc

SEQ ID NO: 5485985 - DNA, 25 bp, Homo sapien
gggctcggcgcataagcaccggccc

SEQ ID NO: 5485986 - DNA, 25 bp, Homo sapien
gggccggtgcttatgcgccgagccc

SEQ ID NO: 5485987 - DNA, 25 bp, Homo sapien
tcggtccggtaggtgtcagtccagt

SEQ ID NO: 5485988 - DNA, 25 bp, Homo sapien
actggactgacacctaccggaccga

SEQ ID NO: 5485989 - DNA, 25 bp, Homo sapien
tatatagagatacccttcatccacc

SEQ ID NO: 5485990 - DNA, 25 bp, Homo sapien
agtatatggatacaagaaaggtgtt

SEQ ID NO: 5485991 - DNA, 25 bp, Homo sapien
ataaggtttagaatagatatagctt

SEQ ID NO: 5485992 - DNA, 25 bp, Homo sapien
ctgggtaactggtaccaatgtctaa

SEQ ID NO: 5485993 - DNA, 25 bp, Homo sapien
aatcattgcacattgttgagcactt

SEQ ID NO: 5485994 - DNA, 25 bp, Homo sapien
tcatgaaatggctgtaatatcttac

SEQ ID NO: 5485995 - DNA, 25 bp, Homo sapien
cagggtaagtatgcatttgtgggtt

SEQ ID NO: 5485996 - DNA, 25 bp, Homo sapien
aagaaaggtgttttgtaatagatac

SEQ ID NO: 5485997 - DNA, 25 bp, Homo sapien
tattgaaatatgaggcacagggtaa

SEQ ID NO: 5485998 - DNA, 25 bp, Homo sapien
agcaacacctgaagtatatggatac

SEQ ID NO: 5485999 - DNA, 25 bp, Homo sapien
gatactatgttgaatggtaaagcat

SEQ ID NO: 5486000 - DNA, 25 bp, Homo sapien
acctaagccacagggaataggttcc

SEQ ID NO: 5486001 - DNA, 25 bp, Homo sapien
ggttgtgttaccagaagatggggaa

SEQ ID NO: 5486002 - DNA, 25 bp, Homo sapien
ttatcactgtggctaggaagctgtg

SEQ ID NO: 5486003 - DNA, 25 bp, Homo sapien
tctgctagcatccgagtttctcctc

SEQ ID NO: 5486004 - DNA, 25 bp, Homo sapien
acagctggatctagggcctccagaa

SEQ ID NO: 5486005 - DNA, 25 bp, Homo sapien
aacccaatagaaagcaggtaaggga

SEQ ID NO: 5486006 - DNA, 25 bp, Homo sapien
ggcacaaattcaggcttacatggtc

SEQ ID NO: 5486007 - DNA, 25 bp, Homo sapien
ggcctggtcacatgctcacctaagc

SEQ ID NO: 5486008 - DNA, 25 bp, Homo sapien
caggtaagggatacaaacaatccac

SEQ ID NO: 5486009 - DNA, 25 bp, Homo sapien
gcagaagttctgttaagggctttcc

SEQ ID NO: 5486010 - DNA, 25 bp, Homo sapien
cagacagactctctccacatggcac

SEQ ID NO: 5486011 - DNA, 25 bp, Homo sapien
ggcggcgcatcttaggtgctttgtt

SEQ ID NO: 5486012 - DNA, 25 bp, Homo sapien
ggccaccgaccttgtgtccagcccc

SEQ ID NO: 5486013 - DNA, 25 bp, Homo sapien
taacgtcggaatggtacacactgtt

SEQ ID NO: 5486014 - DNA, 25 bp, Homo sapien
cgaccatgagctctgtaggtccggc

SEQ ID NO: 5486015 - DNA, 25 bp, Homo sapien
cagccccattgcttggcctgcgcac

SEQ ID NO: 5486016 - DNA, 25 bp, Homo sapien
gggagagctcatgtatgggttaatc

SEQ ID NO: 5486017 - DNA, 25 bp, Homo sapien
gcctgcgcacacctgccaactccac

SEQ ID NO: 5486018 - DNA, 25 bp, Homo sapien
tacccttgatggcctgagcagtttc

SEQ ID NO: 5486019 - DNA, 25 bp, Homo sapien
gtgaacacgaagattggaacctctt

SEQ ID NO: 5486020 - DNA, 25 bp, Homo sapien
atttgcatgatttcgtggggttctc

SEQ ID NO: 5486021 - DNA, 25 bp, Homo sapien
ggatatgctcaatgaccagagaatc

SEQ ID NO: 5486022 - DNA, 25 bp, Homo sapien
agaaagaagggacaaagttatatct

SEQ ID NO: 5486023 - DNA, 25 bp, Homo sapien
agatataactttgtcccttctttct

SEQ ID NO: 5486024 - DNA, 25 bp, Homo sapien
gacagattcctatacttttatttta

SEQ ID NO: 5486025 - DNA, 25 bp, Homo sapien
taaaataaaagtataggaatctgtc

SEQ ID NO: 5486026 - DNA, 25 bp, Homo sapien
gaagttctcgggattaggctcataa

SEQ ID NO: 5486027 - DNA, 25 bp, Homo sapien
ttatgagcctaatcccgagaacttc

SEQ ID NO: 5486028 - DNA, 25 bp, Homo sapien
tcacatccctcaaaggttatcagct

SEQ ID NO: 5486029 - DNA, 25 bp, Homo sapien
gggactagaaggacaaactatttga

SEQ ID NO: 5486030 - DNA, 25 bp, Homo sapien
aggttatcagctaaagacaagagtt

SEQ ID NO: 5486031 - DNA, 25 bp, Homo sapien
ctgatgcacagacaacagtatcttt

SEQ ID NO: 5486032 - DNA, 25 bp, Homo sapien
accatgaccagccctccatttatta

SEQ ID NO: 5486033 - DNA, 25 bp, Homo sapien
gtgacctcaagctaacctgatgcac

SEQ ID NO: 5486034 - DNA, 25 bp, Homo sapien
agctaaagacaagagtttctgaggc

SEQ ID NO: 5486035 - DNA, 25 bp, Homo sapien
aggacctgtggtgacctcaagctaa

SEQ ID NO: 5486036 - DNA, 25 bp, Homo sapien
agagtttctgaggctaatgcaaaaa

SEQ ID NO: 5486037 - DNA, 25 bp, Homo sapien
ccctcaaaggttatcagctaaagac

SEQ ID NO: 5486038 - DNA, 25 bp, Homo sapien
agacaagagtttctgaggctaatgc

SEQ ID NO: 5486039 - DNA, 25 bp, Homo sapien
cttctaagcaagcaagcctgagagg

SEQ ID NO: 5486040 - DNA, 25 bp, Homo sapien
cctcgagaccttctgcagcctgaga

SEQ ID NO: 5486041 - DNA, 25 bp, Homo sapien
agagggggtgatactcccacaccct

SEQ ID NO: 5486042 - DNA, 25 bp, Homo sapien
agcctgagaggcattacatgggctg

SEQ ID NO: 5486043 - DNA, 25 bp, Homo sapien
gtgaaggataacatgtgaaatgtac

SEQ ID NO: 5486044 - DNA, 25 bp, Homo sapien
cagcctagatctagcagtgagagag

SEQ ID NO: 5486045 - DNA, 25 bp, Homo sapien
tcctgctgtgacgccaccctcgaga

SEQ ID NO: 5486046 - DNA, 25 bp, Homo sapien
aaggaacttgactatgtagcaacac

SEQ ID NO: 5486047 - DNA, 25 bp, Homo sapien
gcaaaacactcccagagggcagtga

SEQ ID NO: 5486048 - DNA, 25 bp, Homo sapien
gcaggagcctccaatgagcactgta

SEQ ID NO: 5486049 - DNA, 25 bp, Homo sapien
agaaagtactagatgaaaatgagaa

SEQ ID NO: 5486050 - DNA, 25 bp, Homo sapien
aatattagacgtaagacaacacagt

SEQ ID NO: 5486051 - DNA, 25 bp, Homo sapien
actgtgttgtcttacgtctaatatt

SEQ ID NO: 5486052 - DNA, 25 bp, Homo sapien
gatatcgttcattgatagtagtagt

SEQ ID NO: 5486053 - DNA, 25 bp, Homo sapien
actactactatcaatgaacgatatc

SEQ ID NO: 5486054 - DNA, 25 bp, Homo sapien
gttagcacagagttagacttcaaga

SEQ ID NO: 5486055 - DNA, 25 bp, Homo sapien
acctaagttgtcagcagaaagatcc

SEQ ID NO: 5486056 - DNA, 25 bp, Homo sapien
atttgtaactaaagctaatgctact

SEQ ID NO: 5486057 - DNA, 25 bp, Homo sapien
aaaaatcacccaagctcaatttgct

SEQ ID NO: 5486058 - DNA, 25 bp, Homo sapien
aggaggatatgtttgaaggacacat

SEQ ID NO: 5486059 - DNA, 25 bp, Homo sapien
ttaaaatggagatctgttagcacag

SEQ ID NO: 5486060 - DNA, 25 bp, Homo sapien
caagcagtgattaacattcacatct

SEQ ID NO: 5486061 - DNA, 25 bp, Homo sapien
gcaggtacaggaaacatcagattta

SEQ ID NO: 5486062 - DNA, 25 bp, Homo sapien
ttctaacatagtgtggcaggtacag

SEQ ID NO: 5486063 - DNA, 25 bp, Homo sapien
taatatgaagtgatttaccacgttt

SEQ ID NO: 5486064 - DNA, 25 bp, Homo sapien
agtacagtttgagaagttgcaggag

SEQ ID NO: 5486065 - DNA, 25 bp, Homo sapien
caaatttcaaaggagcagtatgtat

SEQ ID NO: 5486066 - DNA, 25 bp, Homo sapien
aaagttaagcgtagtctctggactc

SEQ ID NO: 5486067 - DNA, 25 bp, Homo sapien
ggtgcctctggataatggttggtac

SEQ ID NO: 5486068 - DNA, 25 bp, Homo sapien
atgactaactctccatggtgcctct

SEQ ID NO: 5486069 - DNA, 25 bp, Homo sapien
tgaaaaatgagggcacgatctcttc

SEQ ID NO: 5486070 - DNA, 25 bp, Homo sapien
aatgcatgcatagaaagttaagcgt

SEQ ID NO: 5486071 - DNA, 25 bp, Homo sapien
atctgcaaggacagtgctttattcc

SEQ ID NO: 5486072 - DNA, 25 bp, Homo sapien
ttgaaatgcaacacagatcagtatt

SEQ ID NO: 5486073 - DNA, 25 bp, Homo sapien
cctgtcagaagtctgctctggagac

SEQ ID NO: 5486074 - DNA, 25 bp, Homo sapien
tctgaaactcagaactgcaagtaat

SEQ ID NO: 5486075 - DNA, 25 bp, Homo sapien
acattatcaggtaaaaacagctttc

SEQ ID NO: 5486076 - DNA, 25 bp, Homo sapien
tacaatcaagggtcaggagatgtga

SEQ ID NO: 5486077 - DNA, 25 bp, Homo sapien
tcacatctcctgacccttgattgta

SEQ ID NO: 5486078 - DNA, 25 bp, Homo sapien
acactcccgttaacaagtagacttg

SEQ ID NO: 5486079 - DNA, 25 bp, Homo sapien
caagtctacttgttaacgggagtgt

SEQ ID NO: 5486080 - DNA, 25 bp, Homo sapien
ggctatgagcctatctaaaaacttc

SEQ ID NO: 5486081 - DNA, 25 bp, Homo sapien
tgtggtggttgctatatgaaaacat

SEQ ID NO: 5486082 - DNA, 25 bp, Homo sapien
caggtgcagtgctaataaggctttg

SEQ ID NO: 5486083 - DNA, 25 bp, Homo sapien
agtacttagaattttggcatgaaca

SEQ ID NO: 5486084 - DNA, 25 bp, Homo sapien
aaacgaaatacaaggctatgagcct

SEQ ID NO: 5486085 - DNA, 25 bp, Homo sapien
tagaaatggctactttggcaaatga

SEQ ID NO: 5486086 - DNA, 25 bp, Homo sapien
ctactttggcaaatgagtgaggcaa

SEQ ID NO: 5486087 - DNA, 25 bp, Homo sapien
taaacaaagagatgcttactggcct

SEQ ID NO: 5486088 - DNA, 25 bp, Homo sapien
aatgagtgaggcaaaatgacctatt

SEQ ID NO: 5486089 - DNA, 25 bp, Homo sapien
tatagtatccctgccattgagctta

SEQ ID NO: 5486090 - DNA, 25 bp, Homo sapien
aagaatatactgtggtggttgctat

SEQ ID NO: 5486091 - DNA, 25 bp, Homo sapien
tcttcgggtccccaactgcggtcta

SEQ ID NO: 5486092 - DNA, 25 bp, Homo sapien
tagaccgcagttggggacccgaaga

SEQ ID NO: 5486093 - DNA, 25 bp, Homo sapien
aggtagagaacgtaaaagatagacc

SEQ ID NO: 5486094 - DNA, 25 bp, Homo sapien
ggtctatcttttacgttctctacct

SEQ ID NO: 5486095 - DNA, 25 bp, Homo sapien
agttcacagtggagactatggagat

SEQ ID NO: 5486096 - DNA, 25 bp, Homo sapien
ctgaacttgagaggtgtcaaaagtc

SEQ ID NO: 5486097 - DNA, 25 bp, Homo sapien
aagtggggagatgccattacccctg

SEQ ID NO: 5486098 - DNA, 25 bp, Homo sapien
tatgagtgactatgagacacctaac

SEQ ID NO: 5486099 - DNA, 25 bp, Homo sapien
tgcaaacacacgaaatccccctcct

SEQ ID NO: 5486100 - DNA, 25 bp, Homo sapien
gacagaagcgtttggcttgagctct

SEQ ID NO: 5486101 - DNA, 25 bp, Homo sapien
tgcagtacatgaaaacaggctctgt

SEQ ID NO: 5486102 - DNA, 25 bp, Homo sapien
tcagcaaagggttaatgcagaagga

SEQ ID NO: 5486103 - DNA, 25 bp, Homo sapien
gtctgtttgagaagcctaaagtggg

SEQ ID NO: 5486104 - DNA, 25 bp, Homo sapien
gcaggatccctcaggtacaagaaac

SEQ ID NO: 5486105 - DNA, 25 bp, Homo sapien
ggcctgaagcgcacactcatgcaaa

SEQ ID NO: 5486106 - DNA, 25 bp, Homo sapien
gagttaagacaatgacttttacgtg

SEQ ID NO: 5486107 - DNA, 25 bp, Homo sapien
cacgtaaaagtcattgtcttaactc

SEQ ID NO: 5486108 - DNA, 25 bp, Homo sapien
tgttcccactacctcattaagagag

SEQ ID NO: 5486109 - DNA, 25 bp, Homo sapien
ctctcttaatgaggtagtgggaaca

SEQ ID NO: 5486110 - DNA, 25 bp, Homo sapien
tgcgggcctactaagtgtccgggtc

SEQ ID NO: 5486111 - DNA, 25 bp, Homo sapien
gacccggacacttagtaggcccgca

SEQ ID NO: 5486112 - DNA, 25 bp, Homo sapien
taaaactcttttcactgatataaaa

SEQ ID NO: 5486113 - DNA, 25 bp, Homo sapien
ttttatatcagtgaaaagagtttta

SEQ ID NO: 5486114 - DNA, 25 bp, Homo sapien
agaaacatcagggagttgttacaag

SEQ ID NO: 5486115 - DNA, 25 bp, Homo sapien
aattacatgttcacccacaaagctc

SEQ ID NO: 5486116 - DNA, 25 bp, Homo sapien
tctgcttaagaagttgaatggtaac

SEQ ID NO: 5486117 - DNA, 25 bp, Homo sapien
aactactgatgtccaggataagaac

SEQ ID NO: 5486118 - DNA, 25 bp, Homo sapien
ggttgggtcagactgtccaaaccac

SEQ ID NO: 5486119 - DNA, 25 bp, Homo sapien
tccaggataagaacagatatgaaaa

SEQ ID NO: 5486120 - DNA, 25 bp, Homo sapien
tgctgattgatgaggtctgaattac

SEQ ID NO: 5486121 - DNA, 25 bp, Homo sapien
ccacaaagctcaaggttgggtcaga

SEQ ID NO: 5486122 - DNA, 25 bp, Homo sapien
agcttctcctccacagttcagatgg

SEQ ID NO: 5486123 - DNA, 25 bp, Homo sapien
gagttgttacaagatggaacggatg

SEQ ID NO: 5486124 - DNA, 25 bp, Homo sapien
taagaagttgaatggtaacagctgg

SEQ ID NO: 5486125 - DNA, 25 bp, Homo sapien
taagagtggtcgacaagagagaagt

SEQ ID NO: 5486126 - DNA, 25 bp, Homo sapien
acttctctcttgtcgaccactctta

SEQ ID NO: 5486127 - DNA, 25 bp, Homo sapien
cgttattaggactcttattaataga

SEQ ID NO: 5486128 - DNA, 25 bp, Homo sapien
tctattaataagagtcctaataacg

SEQ ID NO: 5486129 - DNA, 25 bp, Homo sapien
gtggtggcgggtgcgagtcggacac

SEQ ID NO: 5486130 - DNA, 25 bp, Homo sapien
gtgtccgactcgcacccgccaccac

SEQ ID NO: 5486131 - DNA, 25 bp, Homo sapien
gggcttcgacgagggacgcggccgc

SEQ ID NO: 5486132 - DNA, 25 bp, Homo sapien
gcggccgcgtccctcgtcgaagccc

SEQ ID NO: 5486133 - DNA, 25 bp, Homo sapien
gggtcccgatccgagcccgccaccc

SEQ ID NO: 5486134 - DNA, 25 bp, Homo sapien
gggtggcgggctcggatcgggaccc

SEQ ID NO: 5486135 - DNA, 25 bp, Homo sapien
cgatttacataacactgtcgaggat

SEQ ID NO: 5486136 - DNA, 25 bp, Homo sapien
atcctcgacagtgttatgtaaatcg

SEQ ID NO: 5486137 - DNA, 25 bp, Homo sapien
tatgtagtcatactttcaaatgtat

SEQ ID NO: 5486138 - DNA, 25 bp, Homo sapien
atacatttgaaagtatgactacata

SEQ ID NO: 5486139 - DNA, 25 bp, Homo sapien
aagtggattgggacatatgcattct

SEQ ID NO: 5486140 - DNA, 25 bp, Homo sapien
ttggctacagctaatcgtttcagaa

SEQ ID NO: 5486141 - DNA, 25 bp, Homo sapien
aaacgtaaccacataatttggctac

SEQ ID NO: 5486142 - DNA, 25 bp, Homo sapien
aattcgaatcatatcagagaccatt

SEQ ID NO: 5486143 - DNA, 25 bp, Homo sapien
aactcctatagaagtggattgggac

SEQ ID NO: 5486144 - DNA, 25 bp, Homo sapien
agtacagagttaacaagttttgagt

SEQ ID NO: 5486145 - DNA, 25 bp, Homo sapien
ttctaatgtagcaaaacgtaaccac

SEQ ID NO: 5486146 - DNA, 25 bp, Homo sapien
tcaaaagttaccaaaattcgaatca

SEQ ID NO: 5486147 - DNA, 25 bp, Homo sapien
agaaatccatgactaaagggggaaa

SEQ ID NO: 5486148 - DNA, 25 bp, Homo sapien
ggaaaagcctagtcaattcagatgc

SEQ ID NO: 5486149 - DNA, 25 bp, Homo sapien
agagaacttcccaggatcctttatc

SEQ ID NO: 5486150 - DNA, 25 bp, Homo sapien
gatcgttcggtaagggccactgacc

SEQ ID NO: 5486151 - DNA, 25 bp, Homo sapien
ggtcagtggcccttaccgaacgatc

SEQ ID NO: 5486152 - DNA, 25 bp, Homo sapien
gtgacggcctggccccaagggtcga

SEQ ID NO: 5486153 - DNA, 25 bp, Homo sapien
tcgacccttggggccaggccgtcac

SEQ ID NO: 5486154 - DNA, 25 bp, Homo sapien
gaagaacatcggagaccagagagag

SEQ ID NO: 5486155 - DNA, 25 bp, Homo sapien
gacaagtccaccgagggggaggtga

SEQ ID NO: 5486156 - DNA, 25 bp, Homo sapien
gctttgctgtgtatacgcttgttgc

SEQ ID NO: 5486157 - DNA, 25 bp, Homo sapien
tacgcttgttgccctgaaataaata

SEQ ID NO: 5486158 - DNA, 25 bp, Homo sapien
tgtgtatacgcttgttgccctgaaa

SEQ ID NO: 5486159 - DNA, 25 bp, Homo sapien
taccaccgtcaccttgttcaaggtg

SEQ ID NO: 5486160 - DNA, 25 bp, Homo sapien
caaggtgaaatgatcccaacagaag

SEQ ID NO: 5486161 - DNA, 25 bp, Homo sapien
cctccagttgtgtgctctcacacag

SEQ ID NO: 5486162 - DNA, 25 bp, Homo sapien
caccgagggggaggtgagcgccgac

SEQ ID NO: 5486163 - DNA, 25 bp, Homo sapien
aatgatcccaacagaagaacatcgg

SEQ ID NO: 5486164 - DNA, 25 bp, Homo sapien
agttgtgtgctctcacacaggcttc

SEQ ID NO: 5486165 - DNA, 25 bp, Homo sapien
tcacctccccctcggtggacttgtc

SEQ ID NO: 5486166 - DNA, 25 bp, Homo sapien
tttcagggcaacaagcgtatacaca

SEQ ID NO: 5486167 - DNA, 25 bp, Homo sapien
ctgtgtgagagcacacaactggagg

SEQ ID NO: 5486168 - DNA, 25 bp, Homo sapien
gtcggcgctcacctccccctcggtg

SEQ ID NO: 5486169 - DNA, 25 bp, Homo sapien
tatttatttcagggcaacaagcgta

SEQ ID NO: 5486170 - DNA, 25 bp, Homo sapien
gcaacaagcgtatacacagcaaagc

SEQ ID NO: 5486171 - DNA, 25 bp, Homo sapien
gaagcctgtgtgagagcacacaact

SEQ ID NO: 5486172 - DNA, 25 bp, Homo sapien
caccttgaacaaggtgacggtggta

SEQ ID NO: 5486173 - DNA, 25 bp, Homo sapien
ctctctctggtctccgatgttcttc

SEQ ID NO: 5486174 - DNA, 25 bp, Homo sapien
ccgatgttcttctgttgggatcatt

SEQ ID NO: 5486175 - DNA, 25 bp, Homo sapien
cttctgttgggatcatttcaccttg

SEQ ID NO: 5486176 - DNA, 25 bp, Homo sapien
aagcatacacagattggcccccaag

SEQ ID NO: 5486177 - DNA, 25 bp, Homo sapien
cataaaatgagtggacagtatacgg

SEQ ID NO: 5486178 - DNA, 25 bp, Homo sapien
ctggacagccctgaagtaaagttcc

SEQ ID NO: 5486179 - DNA, 25 bp, Homo sapien
ccggctcatgactggagtgtattgt

SEQ ID NO: 5486180 - DNA, 25 bp, Homo sapien
tggttgtggtcttgggtcaaaccac

SEQ ID NO: 5486181 - DNA, 25 bp, Homo sapien
gggcacaactgcaatctggacagcc

SEQ ID NO: 5486182 - DNA, 25 bp, Homo sapien
ctagatccacatacacggggcacaa

SEQ ID NO: 5486183 - DNA, 25 bp, Homo sapien
gataacagggcaaacgtcctcactc

SEQ ID NO: 5486184 - DNA, 25 bp, Homo sapien
tgccagaattaatggtgcagggaaa

SEQ ID NO: 5486185 - DNA, 25 bp, Homo sapien
agggagatctgttgagttgcaagta

SEQ ID NO: 5486186 - DNA, 25 bp, Homo sapien
tacttcagggtctcatggttgtggt

SEQ ID NO: 5486187 - DNA, 25 bp, Homo sapien
gggtcgagactcgactcctccggga

SEQ ID NO: 5486188 - DNA, 25 bp, Homo sapien
tcccggaggagtcgagtctcgaccc

SEQ ID NO: 5486189 - DNA, 25 bp, Homo sapien
cgagtgccgagccctttgctccctc

SEQ ID NO: 5486190 - DNA, 25 bp, Homo sapien
aggacctggcgagcccaggtctaag

SEQ ID NO: 5486191 - DNA, 25 bp, Homo sapien
agccctttgctccctcggccgcgcg

SEQ ID NO: 5486192 - DNA, 25 bp, Homo sapien
gagccctttgctccctcggccgcgc

SEQ ID NO: 5486193 - DNA, 25 bp, Homo sapien
cggcgccgagctctgcttcggcttc

SEQ ID NO: 5486194 - DNA, 25 bp, Homo sapien
ttaggacctggcgagcccaggtcta

SEQ ID NO: 5486195 - DNA, 25 bp, Homo sapien
tcgaggccctccccgcctcgcccta

SEQ ID NO: 5486196 - DNA, 25 bp, Homo sapien
tcttctttaggacctggcgagccca

SEQ ID NO: 5486197 - DNA, 25 bp, Homo sapien
gacctggcgagcccaggtctaagcg

SEQ ID NO: 5486198 - DNA, 25 bp, Homo sapien
ttctttaggacctggcgagcccagg

SEQ ID NO: 5486199 - DNA, 25 bp, Homo sapien
gaggcgcaggctcttctttaggacc

SEQ ID NO: 5486200 - DNA, 25 bp, Homo sapien
acaggcacatcaggctgcagaatgc

SEQ ID NO: 5486201 - DNA, 25 bp, Homo sapien
atcaggctgcagaatgcgctttaga

SEQ ID NO: 5486202 - DNA, 25 bp, Homo sapien
ggcacatcaggctgcagaatgcgct

SEQ ID NO: 5486203 - DNA, 25 bp, Homo sapien
gaaagcattgttttagtccaggcac

SEQ ID NO: 5486204 - DNA, 25 bp, Homo sapien
tcctcactctgggacagacgatgta

SEQ ID NO: 5486205 - DNA, 25 bp, Homo sapien
gatgtgggaaggagatcaacttctc

SEQ ID NO: 5486206 - DNA, 25 bp, Homo sapien
gggacagacgatgtatggaaactaa

SEQ ID NO: 5486207 - DNA, 25 bp, Homo sapien
ttctcctcactctgggacagacgat

SEQ ID NO: 5486208 - DNA, 25 bp, Homo sapien
gcattgttttagtccaggcacagtg

SEQ ID NO: 5486209 - DNA, 25 bp, Homo sapien
ggctgcagaatgcgctttagaaagc

SEQ ID NO: 5486210 - DNA, 25 bp, Homo sapien
tttaattgagaggggcagggctgga

SEQ ID NO: 5486211 - DNA, 25 bp, Homo sapien
gagaagttgatctccttcccacatc

SEQ ID NO: 5486212 - DNA, 25 bp, Homo sapien
gctttctaaagcgcattctgcagcc

SEQ ID NO: 5486213 - DNA, 25 bp, Homo sapien
gtgcctggactaaaacaatgctttc

SEQ ID NO: 5486214 - DNA, 25 bp, Homo sapien
gcattctgcagcctgatgtgcctgt

SEQ ID NO: 5486215 - DNA, 25 bp, Homo sapien
tccagccctgcccctctcaattaaa

SEQ ID NO: 5486216 - DNA, 25 bp, Homo sapien
tacatcgtctgtcccagagtgagga

SEQ ID NO: 5486217 - DNA, 25 bp, Homo sapien
agcgcattctgcagcctgatgtgcc

SEQ ID NO: 5486218 - DNA, 25 bp, Homo sapien
cactgtgcctggactaaaacaatgc

SEQ ID NO: 5486219 - DNA, 25 bp, Homo sapien
ttagtttccatacatcgtctgtccc

SEQ ID NO: 5486220 - DNA, 25 bp, Homo sapien
atcgtctgtcccagagtgaggagaa

SEQ ID NO: 5486221 - DNA, 25 bp, Homo sapien
tctaaagcgcattctgcagcctgat

SEQ ID NO: 5486222 - DNA, 25 bp, Homo sapien
tttgctatgtaacctgctgctgcag

SEQ ID NO: 5486223 - DNA, 25 bp, Homo sapien
cagctgcagcatgtgatggtaaata

SEQ ID NO: 5486224 - DNA, 25 bp, Homo sapien
gtgatccataaggtgcagactgcaa

SEQ ID NO: 5486225 - DNA, 25 bp, Homo sapien
tttattggagatttacttggctaca

SEQ ID NO: 5486226 - DNA, 25 bp, Homo sapien
tttaaattgtctgtggttgatgtcc

SEQ ID NO: 5486227 - DNA, 25 bp, Homo sapien
actgctagtggaaaatacaatggtc

SEQ ID NO: 5486228 - DNA, 25 bp, Homo sapien
tacaatggtctcaatgcaaatttcc

SEQ ID NO: 5486229 - DNA, 25 bp, Homo sapien
acaagttagttgtgaaaaatcattt

SEQ ID NO: 5486230 - DNA, 25 bp, Homo sapien
gtatgaatgaatgacatcatgttcc

SEQ ID NO: 5486231 - DNA, 25 bp, Homo sapien
cctagatattgctattggcgtctcc

SEQ ID NO: 5486232 - DNA, 25 bp, Homo sapien
aaggtaattgtgatccataaggtgc

SEQ ID NO: 5486233 - DNA, 25 bp, Homo sapien
ttacgatttgttcttcacaggtaaa

SEQ ID NO: 5486234 - DNA, 25 bp, Homo sapien
tttacctgtgaagaacaaatcgtaa

SEQ ID NO: 5486235 - DNA, 25 bp, Homo sapien
ttgagaaacacgagtactttacaaa

SEQ ID NO: 5486236 - DNA, 25 bp, Homo sapien
tttgtaaagtactcgtgtttctcaa

SEQ ID NO: 5486237 - DNA, 25 bp, Homo sapien
ggcagacctggcgtttcttagcctg

SEQ ID NO: 5486238 - DNA, 25 bp, Homo sapien
ccctggctcctgactcctgccgggc

SEQ ID NO: 5486239 - DNA, 25 bp, Homo sapien
gcagaaactggcagccatcagccat

SEQ ID NO: 5486240 - DNA, 25 bp, Homo sapien
tggtgcagtttagtccaggtctggc

SEQ ID NO: 5486241 - DNA, 25 bp, Homo sapien
aggtctggcacctgaccctccccac

SEQ ID NO: 5486242 - DNA, 25 bp, Homo sapien
tacctgtgtatcagcagaaactggc

SEQ ID NO: 5486243 - DNA, 25 bp, Homo sapien
gtctgggccgtgactcactctgccc

SEQ ID NO: 5486244 - DNA, 25 bp, Homo sapien
ttctcacgttgcctcagcgagcttg

SEQ ID NO: 5486245 - DNA, 25 bp, Homo sapien
cagatattcatgaagggtcccatcc

SEQ ID NO: 5486246 - DNA, 25 bp, Homo sapien
ccattgcccagcaagaacaggcaga

SEQ ID NO: 5486247 - DNA, 25 bp, Homo sapien
ctccccactctgggggtgggattta

SEQ ID NO: 5486248 - DNA, 25 bp, Homo sapien
aggaacatatgtagtccatcggttt

SEQ ID NO: 5486249 - DNA, 25 bp, Homo sapien
aaaccgatggactacatatgttcct

SEQ ID NO: 5486250 - DNA, 25 bp, Homo sapien
cattgtgctgtttcaaggcagaacc

SEQ ID NO: 5486251 - DNA, 25 bp, Homo sapien
cagctttggaaaataacacacagtc

SEQ ID NO: 5486252 - DNA, 25 bp, Homo sapien
tgccaaagacactggaccataaaat

SEQ ID NO: 5486253 - DNA, 25 bp, Homo sapien
tgataactgcatttaactggcccac

SEQ ID NO: 5486254 - DNA, 25 bp, Homo sapien
gcccacatctggcccaaaggacagg

SEQ ID NO: 5486255 - DNA, 25 bp, Homo sapien
aaggcagaaccataacatggcaatt

SEQ ID NO: 5486256 - DNA, 25 bp, Homo sapien
cacatagtatcggtagagctacatc

SEQ ID NO: 5486257 - DNA, 25 bp, Homo sapien
aaagttaggtaaaatgttgcagcac

SEQ ID NO: 5486258 - DNA, 25 bp, Homo sapien
aaagcctcatggtgaggtaggaaca

SEQ ID NO: 5486259 - DNA, 25 bp, Homo sapien
tcagagacgtgaaacactgtatgac

SEQ ID NO: 5486260 - DNA, 25 bp, Homo sapien
ggctcttgtgccagtgaaaatgact

SEQ ID NO: 5486261 - DNA, 25 bp, Homo sapien
gaagcgctcttgtgctgagacctgg

SEQ ID NO: 5486262 - DNA, 25 bp, Homo sapien
ggaaaagtgcccacgggtctctaca

SEQ ID NO: 5486263 - DNA, 25 bp, Homo sapien
cttggaatcaactcgtgcccccgac

SEQ ID NO: 5486264 - DNA, 25 bp, Homo sapien
ggccgcagctggccacttcgaaagc

SEQ ID NO: 5486265 - DNA, 25 bp, Homo sapien
cagtcctgcattccaggcggctgtg

SEQ ID NO: 5486266 - DNA, 25 bp, Homo sapien
tttagtctgaacaaagctcgaagct

SEQ ID NO: 5486267 - DNA, 25 bp, Homo sapien
gtctctacattcaaagcgggtgggg

SEQ ID NO: 5486268 - DNA, 25 bp, Homo sapien
tcagcaaaggcatgtgcttggaatc

SEQ ID NO: 5486269 - DNA, 25 bp, Homo sapien
gctcattctgtgcaaaggaagcgct

SEQ ID NO: 5486270 - DNA, 25 bp, Homo sapien
ctaaaccacctcacagaagcacagc

SEQ ID NO: 5486271 - DNA, 25 bp, Homo sapien
cgaggtcatcacccgaacagcagtg

SEQ ID NO: 5486272 - DNA, 25 bp, Homo sapien
ttggaagtacagtaatcctgcaaac

SEQ ID NO: 5486273 - DNA, 25 bp, Homo sapien
tctagtgggtctttggaagtacagt

SEQ ID NO: 5486274 - DNA, 25 bp, Homo sapien
tttctcagtggagagtacagagtac

SEQ ID NO: 5486275 - DNA, 25 bp, Homo sapien
ataacaaggtgaacactacaggtgt

SEQ ID NO: 5486276 - DNA, 25 bp, Homo sapien
agcataactgttaagacataggatt

SEQ ID NO: 5486277 - DNA, 25 bp, Homo sapien
cacaaacatgaatcaccggaaatcc

SEQ ID NO: 5486278 - DNA, 25 bp, Homo sapien
gatgtttttacagaaagccagtatc

SEQ ID NO: 5486279 - DNA, 25 bp, Homo sapien
aatttccaaaagagcaccaagaact

SEQ ID NO: 5486280 - DNA, 25 bp, Homo sapien
cccaacaatacaggtagtctttatc

SEQ ID NO: 5486281 - DNA, 25 bp, Homo sapien
agctttcaaaaagttagagcataac

SEQ ID NO: 5486282 - DNA, 25 bp, Homo sapien
gtataccaccatgaacagaatccct

SEQ ID NO: 5486283 - DNA, 25 bp, Homo sapien
aagacgacttgtactcacgagggag

SEQ ID NO: 5486284 - DNA, 25 bp, Homo sapien
ctccctcgtgagtacaagtcgtctt

SEQ ID NO: 5486285 - DNA, 25 bp, Homo sapien
taactatgcttacagaaatacactc

SEQ ID NO: 5486286 - DNA, 25 bp, Homo sapien
tgtacacatgtgaaactgtaaaagc

SEQ ID NO: 5486287 - DNA, 25 bp, Homo sapien
acaaaccaagattcagataatttct

SEQ ID NO: 5486288 - DNA, 25 bp, Homo sapien
aaaaaaggatttgcaatctggttta

SEQ ID NO: 5486289 - DNA, 25 bp, Homo sapien
tccatcaaatgctgctaaagaaggc

SEQ ID NO: 5486290 - DNA, 25 bp, Homo sapien
ctcagaaaagtaacacgtattgcac

SEQ ID NO: 5486291 - DNA, 25 bp, Homo sapien
tcaatgccagtttagaaagttcaat

SEQ ID NO: 5486292 - DNA, 25 bp, Homo sapien
aatattgcatgtagattgtaaatct

SEQ ID NO: 5486293 - DNA, 25 bp, Homo sapien
caaaaacttggtacatggtttagga

SEQ ID NO: 5486294 - DNA, 25 bp, Homo sapien
tttataaaattggtgcaacaaaaca

SEQ ID NO: 5486295 - DNA, 25 bp, Homo sapien
ttcacttcatctgctgaggtcaacc

SEQ ID NO: 5486296 - DNA, 25 bp, Homo sapien
gctgttcatgctgggactgacagcc

SEQ ID NO: 5486297 - DNA, 25 bp, Homo sapien
gaagagtctgtgttgaaggcatctt

SEQ ID NO: 5486298 - DNA, 25 bp, Homo sapien
cgctccacagtctcggacggatctg

SEQ ID NO: 5486299 - DNA, 25 bp, Homo sapien
tcggacggatctgctcagaaaggaa

SEQ ID NO: 5486300 - DNA, 25 bp, Homo sapien
tcttggagcctctccgagcagcaac

SEQ ID NO: 5486301 - DNA, 25 bp, Homo sapien
gggtggcgattccgctccacagtct

SEQ ID NO: 5486302 - DNA, 25 bp, Homo sapien
tcgctctggttctcagggcagcatt

SEQ ID NO: 5486303 - DNA, 25 bp, Homo sapien
cagcaaccagacgggagatttttat

SEQ ID NO: 5486304 - DNA, 25 bp, Homo sapien
agctggctggattcctagaagagtc

SEQ ID NO: 5486305 - DNA, 25 bp, Homo sapien
tgtgaccctcccttttaggtgaagc

SEQ ID NO: 5486306 - DNA, 25 bp, Homo sapien
ctccggttagaaatgttacttggtg

SEQ ID NO: 5486307 - DNA, 25 bp, Homo sapien
atgactgacctcacagatggttgtc

SEQ ID NO: 5486308 - DNA, 25 bp, Homo sapien
caaaacaggacaatgccctttgatt

SEQ ID NO: 5486309 - DNA, 25 bp, Homo sapien
gtatgtgcatctataggcactcaac

SEQ ID NO: 5486310 - DNA, 25 bp, Homo sapien
aatctttttgaaatggggctggctg

SEQ ID NO: 5486311 - DNA, 25 bp, Homo sapien
aatgactctcaatgaagcaaaacac

SEQ ID NO: 5486312 - DNA, 25 bp, Homo sapien
ttcttcggaagatgattttgaccca

SEQ ID NO: 5486313 - DNA, 25 bp, Homo sapien
tccctcctggatgtttaattctctc

SEQ ID NO: 5486314 - DNA, 25 bp, Homo sapien
tgaagcaaaacactacatagcacac

SEQ ID NO: 5486315 - DNA, 25 bp, Homo sapien
tggggctggctgttacacattatcc

SEQ ID NO: 5486316 - DNA, 25 bp, Homo sapien
gcactcaactgataaaaacaagaaa

SEQ ID NO: 5486317 - DNA, 25 bp, Homo sapien
gcagtagtaaaaataattcatgaaa

SEQ ID NO: 5486318 - DNA, 25 bp, Homo sapien
taaaagttgagatggaatgggagtt

SEQ ID NO: 5486319 - DNA, 25 bp, Homo sapien
aactcccattccatctcaactttta

SEQ ID NO: 5486320 - DNA, 25 bp, Homo sapien
caggtactaccgctgtgaccgaaac

SEQ ID NO: 5486321 - DNA, 25 bp, Homo sapien
ggacaggtactaccgctgtgaccga

SEQ ID NO: 5486322 - DNA, 25 bp, Homo sapien
gcgcttcatcgacaacctgagggac

SEQ ID NO: 5486323 - DNA, 25 bp, Homo sapien
gtactaccgctgtgaccgaaacctg

SEQ ID NO: 5486324 - DNA, 25 bp, Homo sapien
tcatcgacaacctgagggacaggta

SEQ ID NO: 5486325 - DNA, 25 bp, Homo sapien
ctttgtgctggacacctctgagagc

SEQ ID NO: 5486326 - DNA, 25 bp, Homo sapien
gagatcatccaaggcctcacgcgca

SEQ ID NO: 5486327 - DNA, 25 bp, Homo sapien
tcaagtccttcaccaagcgcttcat

SEQ ID NO: 5486328 - DNA, 25 bp, Homo sapien
accaagcgcttcatcgacaacctga

SEQ ID NO: 5486329 - DNA, 25 bp, Homo sapien
ctgccccgtggacctgttctttgtg

SEQ ID NO: 5486330 - DNA, 25 bp, Homo sapien
gaggtggagatcatccaaggcctca

SEQ ID NO: 5486331 - DNA, 25 bp, Homo sapien
ggttagaatagacaagttagaattg

SEQ ID NO: 5486332 - DNA, 25 bp, Homo sapien
taccacagaaaggaatgtactttgc

SEQ ID NO: 5486333 - DNA, 25 bp, Homo sapien
cagcagctggcaaaataacacacag

SEQ ID NO: 5486334 - DNA, 25 bp, Homo sapien
cagttacaggacaaaataccacaga

SEQ ID NO: 5486335 - DNA, 25 bp, Homo sapien
tgtagacaacagaaggtaaactgga

SEQ ID NO: 5486336 - DNA, 25 bp, Homo sapien
actgacagctctttagcagatatgc

SEQ ID NO: 5486337 - DNA, 25 bp, Homo sapien
aaaaaagctgtagacaacagaaggt

SEQ ID NO: 5486338 - DNA, 25 bp, Homo sapien
ttctgcttgcaactaaaacactgta

SEQ ID NO: 5486339 - DNA, 25 bp, Homo sapien
ttgtacacaataggttagaatagac

SEQ ID NO: 5486340 - DNA, 25 bp, Homo sapien
ttttacagagtcagtaatgaaaact

SEQ ID NO: 5486341 - DNA, 25 bp, Homo sapien
aaacactgtacaatgagatggatac

SEQ ID NO: 5486342 - DNA, 25 bp, Homo sapien
acctctcggagtgccgcgtcctccc

SEQ ID NO: 5486343 - DNA, 25 bp, Homo sapien
gggaggacgcggcactccgagaggt

SEQ ID NO: 5486344 - DNA, 25 bp, Homo sapien
aaacacctcctcaacaattaaggat

SEQ ID NO: 5486345 - DNA, 25 bp, Homo sapien
atccttaattgttgaggaggtgttt

SEQ ID NO: 5486346 - DNA, 25 bp, Homo sapien
gtcccagattggctcacactgagaa

SEQ ID NO: 5486347 - DNA, 25 bp, Homo sapien
ctcccctccaacctggggggcagtg

SEQ ID NO: 5486348 - DNA, 25 bp, Homo sapien
agtgggtcccagattggctcacact

SEQ ID NO: 5486349 - DNA, 25 bp, Homo sapien
aagaacggggctcttctcatttcac

SEQ ID NO: 5486350 - DNA, 25 bp, Homo sapien
gtgggtcccagattggctcacactg

SEQ ID NO: 5486351 - DNA, 25 bp, Homo sapien
aggaagaacggggctcttctcattt

SEQ ID NO: 5486352 - DNA, 25 bp, Homo sapien
ctcatttcacccctccctttctccc

SEQ ID NO: 5486353 - DNA, 25 bp, Homo sapien
gaagccacaggcctgagatttcatc

SEQ ID NO: 5486354 - DNA, 25 bp, Homo sapien
cacaggcctgagatttcatctgctc

SEQ ID NO: 5486355 - DNA, 25 bp, Homo sapien
attggctcacactgagaatgtaaga

SEQ ID NO: 5486356 - DNA, 25 bp, Homo sapien
gagaagccacaggcctgagatttca

SEQ ID NO: 5486357 - DNA, 25 bp, Homo sapien
tcttcggaaagttacaaacacgtac

SEQ ID NO: 5486358 - DNA, 25 bp, Homo sapien
gtacgtgtttgtaactttccgaaga

SEQ ID NO: 5486359 - DNA, 25 bp, Homo sapien
gtctcagtcactacaggaccctggg

SEQ ID NO: 5486360 - DNA, 25 bp, Homo sapien
actatggaaccagacttacaagact

SEQ ID NO: 5486361 - DNA, 25 bp, Homo sapien
aaatgacgctacgcaagaaccagtt

SEQ ID NO: 5486362 - DNA, 25 bp, Homo sapien
gaggacctcaaagtgggacaatata

SEQ ID NO: 5486363 - DNA, 25 bp, Homo sapien
gttgggagcagatcgattttacctt

SEQ ID NO: 5486364 - DNA, 25 bp, Homo sapien
tggaccttcagatggaagtagttac

SEQ ID NO: 5486365 - DNA, 25 bp, Homo sapien
ctacaaagtggcagtcgcattgtct

SEQ ID NO: 5486366 - DNA, 25 bp, Homo sapien
gagtcgcttaagtgcgaggacctca

SEQ ID NO: 5486367 - DNA, 25 bp, Homo sapien
gtggaattgggagcctaattgattt

SEQ ID NO: 5486368 - DNA, 25 bp, Homo sapien
acggccagactcgttggtgtcctgt

SEQ ID NO: 5486369 - DNA, 25 bp, Homo sapien
aaggattccagtggcaatgaaacac

SEQ ID NO: 5486370 - DNA, 25 bp, Homo sapien
ggattaccgtcaacggactccgtgt

SEQ ID NO: 5486371 - DNA, 25 bp, Homo sapien
acacggagtccgttgacggtaatcc

SEQ ID NO: 5486372 - DNA, 25 bp, Homo sapien
atctgaaattagtctgctggatagc

SEQ ID NO: 5486373 - DNA, 25 bp, Homo sapien
gaaagcccgagacagtatgctctca

SEQ ID NO: 5486374 - DNA, 25 bp, Homo sapien
ggtgcaaaggagactttctgaaaat

SEQ ID NO: 5486375 - DNA, 25 bp, Homo sapien
gctggatagctgtcactctagggtg

SEQ ID NO: 5486376 - DNA, 25 bp, Homo sapien
tcagtgttgctgatgacaaatctgt

SEQ ID NO: 5486377 - DNA, 25 bp, Homo sapien
ccttaagctctgaagatgttgatcc

SEQ ID NO: 5486378 - DNA, 25 bp, Homo sapien
ttcctcagtaagggtgcaaaggaga

SEQ ID NO: 5486379 - DNA, 25 bp, Homo sapien
gaaaatttgcctgacagaaaatgtc

SEQ ID NO: 5486380 - DNA, 25 bp, Homo sapien
atgagacatcctaagtaaggtccac

SEQ ID NO: 5486381 - DNA, 25 bp, Homo sapien
tatctatggcactgaatgcacattc

SEQ ID NO: 5486382 - DNA, 25 bp, Homo sapien
gggtgagatacccttttggctgtca

SEQ ID NO: 5486383 - DNA, 25 bp, Homo sapien
aataggtgagttagacatggctttt

SEQ ID NO: 5486384 - DNA, 25 bp, Homo sapien
tctcagtgctggataataaacctgc

SEQ ID NO: 5486385 - DNA, 25 bp, Homo sapien
gctagcgagaatatacagtaaagtt

SEQ ID NO: 5486386 - DNA, 25 bp, Homo sapien
cccttgcagtgtttatggggggaaa

SEQ ID NO: 5486387 - DNA, 25 bp, Homo sapien
tcagtggcttcagattccatcatac

SEQ ID NO: 5486388 - DNA, 25 bp, Homo sapien
tgcaacatatgctctggttacctat

SEQ ID NO: 5486389 - DNA, 25 bp, Homo sapien
cgtaagtgctcaaccatcttctccc

SEQ ID NO: 5486390 - DNA, 25 bp, Homo sapien
tcagtttcggcatcagtgtcttccc

SEQ ID NO: 5486391 - DNA, 25 bp, Homo sapien
ttcaagtaggattttcagtggcttc

SEQ ID NO: 5486392 - DNA, 25 bp, Homo sapien
cagaattactgttgctagcgagaat

SEQ ID NO: 5486393 - DNA, 25 bp, Homo sapien
tgtatgaaaaatagttgctgttaac

SEQ ID NO: 5486394 - DNA, 25 bp, Homo sapien
ccattacaaaagataaggatttaac

SEQ ID NO: 5486395 - DNA, 25 bp, Homo sapien
attccctagaggtaatgcttttaac

SEQ ID NO: 5486396 - DNA, 25 bp, Homo sapien
ttaacttacactatcgccactttcc

SEQ ID NO: 5486397 - DNA, 25 bp, Homo sapien
tattttagatcgtctggtaactttc

SEQ ID NO: 5486398 - DNA, 25 bp, Homo sapien
agctttgaacaatacactaatcctc

SEQ ID NO: 5486399 - DNA, 25 bp, Homo sapien
cttgttccattaactgaagatcttt

SEQ ID NO: 5486400 - DNA, 25 bp, Homo sapien
ttaaataatatgtttgagcaataat

SEQ ID NO: 5486401 - DNA, 25 bp, Homo sapien
gtaatacatgcacaaggtaaaaaat

SEQ ID NO: 5486402 - DNA, 25 bp, Homo sapien
tttcaaagtaatacatgcacaaggt

SEQ ID NO: 5486403 - DNA, 25 bp, Homo sapien
ctctctccaaatgtctgatagttac

SEQ ID NO: 5486404 - DNA, 25 bp, Homo sapien
tagtacagaaggacttaaaatgaaa

SEQ ID NO: 5486405 - DNA, 25 bp, Homo sapien
gtaaaagaacgtttgtgacaatagg

SEQ ID NO: 5486406 - DNA, 25 bp, Homo sapien
cctattgtcacaaacgttcttttac

SEQ ID NO: 5486407 - DNA, 25 bp, Homo sapien
actgaactcatacgaacaaaccggt

SEQ ID NO: 5486408 - DNA, 25 bp, Homo sapien
accggtttgttcgtatgagttcagt

SEQ ID NO: 5486409 - DNA, 25 bp, Homo sapien
tgtgaggcaggtttacaacactaca

SEQ ID NO: 5486410 - DNA, 25 bp, Homo sapien
cgtttgtttgttggagtggtgccag

SEQ ID NO: 5486411 - DNA, 25 bp, Homo sapien
ctagaaatggtgtaaaggctgtctt

SEQ ID NO: 5486412 - DNA, 25 bp, Homo sapien
catgtattttgtgaggcaggtttac

SEQ ID NO: 5486413 - DNA, 25 bp, Homo sapien
caccattccaacaggtcgaggagag

SEQ ID NO: 5486414 - DNA, 25 bp, Homo sapien
gtcgaggagagcttaaacaccttct

SEQ ID NO: 5486415 - DNA, 25 bp, Homo sapien
ggacatgcccatatatgaaggagat

SEQ ID NO: 5486416 - DNA, 25 bp, Homo sapien
aacttgtctacaaccagggattgat

SEQ ID NO: 5486417 - DNA, 25 bp, Homo sapien
taacattgccaaaatagtgtgccac

SEQ ID NO: 5486418 - DNA, 25 bp, Homo sapien
tagtgtgccactagaaatggtgtaa

SEQ ID NO: 5486419 - DNA, 25 bp, Homo sapien
aattgaagtggtgcataacattgcc

SEQ ID NO: 5486420 - DNA, 25 bp, Homo sapien
gctacagcctggacttaccaccact

SEQ ID NO: 5486421 - DNA, 25 bp, Homo sapien
ctgcagtttcttgggacataggagc

SEQ ID NO: 5486422 - DNA, 25 bp, Homo sapien
atttttgtaatggtagctttttcta

SEQ ID NO: 5486423 - DNA, 25 bp, Homo sapien
cgacccatacctcagacccgacggc

SEQ ID NO: 5486424 - DNA, 25 bp, Homo sapien
taccaccactaaactgcgagagaag

SEQ ID NO: 5486425 - DNA, 25 bp, Homo sapien
ccgctgcagtttcttgggacatagg

SEQ ID NO: 5486426 - DNA, 25 bp, Homo sapien
gcaacaacatcgccgtgcgcaagag

SEQ ID NO: 5486427 - DNA, 25 bp, Homo sapien
ctgcgagagaagctaaacgtgttta

SEQ ID NO: 5486428 - DNA, 25 bp, Homo sapien
ccggcctccggcagttcttcaagca

SEQ ID NO: 5486429 - DNA, 25 bp, Homo sapien
gagactcagcaacgacccatacctc

SEQ ID NO: 5486430 - DNA, 25 bp, Homo sapien
cgagcgcaacaacatcgccgtgcgc

SEQ ID NO: 5486431 - DNA, 25 bp, Homo sapien
cacatctacggtccgaggtaccctg

SEQ ID NO: 5486432 - DNA, 25 bp, Homo sapien
cagggtacctcggaccgtagatgtg

SEQ ID NO: 5486433 - DNA, 25 bp, Homo sapien
ggctacaaggcccaggacacaccta

SEQ ID NO: 5486434 - DNA, 25 bp, Homo sapien
taggtgtgtcctgggccttgtagcc

SEQ ID NO: 5486435 - DNA, 25 bp, Homo sapien
caggaagcctgatctcgacatgttt

SEQ ID NO: 5486436 - DNA, 25 bp, Homo sapien
ttaaccggcaaagacctgcacctga

SEQ ID NO: 5486437 - DNA, 25 bp, Homo sapien
acaacaggcctcttattatgggtcc

SEQ ID NO: 5486438 - DNA, 25 bp, Homo sapien
ccatagcagatggtttagggtagat

SEQ ID NO: 5486439 - DNA, 25 bp, Homo sapien
aagatatcaatgctaatggcctacc

SEQ ID NO: 5486440 - DNA, 25 bp, Homo sapien
ttggtgaagctgactatctgcagta

SEQ ID NO: 5486441 - DNA, 25 bp, Homo sapien
ataactatgtggaaaaagggtaaga

SEQ ID NO: 5486442 - DNA, 25 bp, Homo sapien
ggtaagagttaaagctgctgcagct

SEQ ID NO: 5486443 - DNA, 25 bp, Homo sapien
agggttgaaaaatgctggttaaatc

SEQ ID NO: 5486444 - DNA, 25 bp, Homo sapien
gtttcctctgcggctttggtgaagc

SEQ ID NO: 5486445 - DNA, 25 bp, Homo sapien
aggcaagtgagtacaccccactcct

SEQ ID NO: 5486446 - DNA, 25 bp, Homo sapien
aaacaagctcgatttctggccgtac

SEQ ID NO: 5486447 - DNA, 25 bp, Homo sapien
tttagttccacagagttgtatgctc

SEQ ID NO: 5486448 - DNA, 25 bp, Homo sapien
tctggccgtaccaaaagcaaaatac

SEQ ID NO: 5486449 - DNA, 25 bp, Homo sapien
gattttgtaactgggaaagaacagc

SEQ ID NO: 5486450 - DNA, 25 bp, Homo sapien
agttgataaacctgaaaacaagtct

SEQ ID NO: 5486451 - DNA, 25 bp, Homo sapien
ttaatgagttcaggttacaaccgaa

SEQ ID NO: 5486452 - DNA, 25 bp, Homo sapien
ctgaaaatatcaggaactatgaaaa

SEQ ID NO: 5486453 - DNA, 25 bp, Homo sapien
gggaaagaacagcttgtgtaacaac

SEQ ID NO: 5486454 - DNA, 25 bp, Homo sapien
caggttacaaccgaacacaggattt

SEQ ID NO: 5486455 - DNA, 25 bp, Homo sapien
cctctatggagctaaacaagttttc

SEQ ID NO: 5486456 - DNA, 25 bp, Homo sapien
aaatctttccgtaaaatagcagctt

SEQ ID NO: 5486457 - DNA, 25 bp, Homo sapien
ttggaagacttgacaaagcatcagt

SEQ ID NO: 5486458 - DNA, 25 bp, Homo sapien
agtcactggcctggaaactttttat

SEQ ID NO: 5486459 - DNA, 25 bp, Homo sapien
gaatgtaattaaacaagtcactggc

SEQ ID NO: 5486460 - DNA, 25 bp, Homo sapien
ctgctttgaaaggcaaagtgaatgt

SEQ ID NO: 5486461 - DNA, 25 bp, Homo sapien
caacagacctaggaagctccctgtc

SEQ ID NO: 5486462 - DNA, 25 bp, Homo sapien
ttggaatgaatttgcttgtaggttt

SEQ ID NO: 5486463 - DNA, 25 bp, Homo sapien
tatcatgaaacaaatgtaatacatt

SEQ ID NO: 5486464 - DNA, 25 bp, Homo sapien
agaaaggatttcacagtatcagtga

SEQ ID NO: 5486465 - DNA, 25 bp, Homo sapien
gtattttgcaaggctagaaaggaga

SEQ ID NO: 5486466 - DNA, 25 bp, Homo sapien
taagcaccagcttgacaatttaaag

SEQ ID NO: 5486467 - DNA, 25 bp, Homo sapien
agtttatcaacagacctaggaagct

SEQ ID NO: 5486468 - DNA, 25 bp, Homo sapien
agcaagcaataactgactactcgtc

SEQ ID NO: 5486469 - DNA, 25 bp, Homo sapien
acatggagattgtgcatgtgcctcc

SEQ ID NO: 5486470 - DNA, 25 bp, Homo sapien
ccaaccgggcacaataaaaccttca

SEQ ID NO: 5486471 - DNA, 25 bp, Homo sapien
ttatggcccatgaggacaaaatgcc

SEQ ID NO: 5486472 - DNA, 25 bp, Homo sapien
gactgcagtatgagcagctgctagc

SEQ ID NO: 5486473 - DNA, 25 bp, Homo sapien
agaacgttatcctccaaccgggcac

SEQ ID NO: 5486474 - DNA, 25 bp, Homo sapien
atcaaccctggtgtgtagctagcaa

SEQ ID NO: 5486475 - DNA, 25 bp, Homo sapien
ggttgatcccagaggcctgaactct

SEQ ID NO: 5486476 - DNA, 25 bp, Homo sapien
cagctgctagcagtataggctggat

SEQ ID NO: 5486477 - DNA, 25 bp, Homo sapien
ttctggcccagtctggggttgatcc

SEQ ID NO: 5486478 - DNA, 25 bp, Homo sapien
taggctggatataacagtaacaatc

SEQ ID NO: 5486479 - DNA, 25 bp, Homo sapien
tgccctcgatgaaggatgcataaaa

SEQ ID NO: 5486480 - DNA, 25 bp, Homo sapien
ctggtactgtatcatgcaataagtc

SEQ ID NO: 5486481 - DNA, 25 bp, Homo sapien
gccacatcagtccctgtagcacagt

SEQ ID NO: 5486482 - DNA, 25 bp, Homo sapien
gcaataagtcatcaagggcttagtc

SEQ ID NO: 5486483 - DNA, 25 bp, Homo sapien
ctagtgtaccggtaagctagtggca

SEQ ID NO: 5486484 - DNA, 25 bp, Homo sapien
ctgcataaagagatatatttgccac

SEQ ID NO: 5486485 - DNA, 25 bp, Homo sapien
tccatgcaacttcaatgccctcgat

SEQ ID NO: 5486486 - DNA, 25 bp, Homo sapien
tcaagggcttagtctagtgtaccgg

SEQ ID NO: 5486487 - DNA, 25 bp, Homo sapien
aatacaagactggctttagtgtcac

SEQ ID NO: 5486488 - DNA, 25 bp, Homo sapien
aagctagtggcactgaagcgctttt

SEQ ID NO: 5486489 - DNA, 25 bp, Homo sapien
aaggatgcataaaaagccatacttc

SEQ ID NO: 5486490 - DNA, 25 bp, Homo sapien
agaaaaaattgcaacaaaaaatgta

SEQ ID NO: 5486491 - DNA, 25 bp, Homo sapien
attgaccgtctccaacttgtcccct

SEQ ID NO: 5486492 - DNA, 25 bp, Homo sapien
atgtgaccaacagatctgtggcacg

SEQ ID NO: 5486493 - DNA, 25 bp, Homo sapien
ctgtggcacggacacagtacaaaga

SEQ ID NO: 5486494 - DNA, 25 bp, Homo sapien
cagatctgtggcacggacacagtac

SEQ ID NO: 5486495 - DNA, 25 bp, Homo sapien
gagttgtcatggcaatgagtttggc

SEQ ID NO: 5486496 - DNA, 25 bp, Homo sapien
tgaccaacagatctgtggcacggac

SEQ ID NO: 5486497 - DNA, 25 bp, Homo sapien
tcaacatacatttgaattgcaacac

SEQ ID NO: 5486498 - DNA, 25 bp, Homo sapien
aaaatgtaaaaattgaccgtctcca

SEQ ID NO: 5486499 - DNA, 25 bp, Homo sapien
tacaaagagttgtcatggcaatgag

SEQ ID NO: 5486500 - DNA, 25 bp, Homo sapien
cagtacaaagagttgtcatggcaat

SEQ ID NO: 5486501 - DNA, 25 bp, Homo sapien
caaaaaatacgaagttagggtgaca

SEQ ID NO: 5486502 - DNA, 25 bp, Homo sapien
gctgagagaaaagcatcaaatcctt

SEQ ID NO: 5486503 - DNA, 25 bp, Homo sapien
attctcccattgagtggcagggctc

SEQ ID NO: 5486504 - DNA, 25 bp, Homo sapien
ttggagataaaaatcaagggcacaa

SEQ ID NO: 5486505 - DNA, 25 bp, Homo sapien
agagagtattgagctatctggtatc

SEQ ID NO: 5486506 - DNA, 25 bp, Homo sapien
tagggtgacaaagtttgacagtgat

SEQ ID NO: 5486507 - DNA, 25 bp, Homo sapien
aagggcacaatgtactcagagagta

SEQ ID NO: 5486508 - DNA, 25 bp, Homo sapien
tggcagggctcaagtcatcattagg

SEQ ID NO: 5486509 - DNA, 25 bp, Homo sapien
cttggaaggtcatagtaagcatacc

SEQ ID NO: 5486510 - DNA, 25 bp, Homo sapien
gaggtcatcctgcaaagtgcgtatc

SEQ ID NO: 5486511 - DNA, 25 bp, Homo sapien
caatccacatagccctgaggtcatc

SEQ ID NO: 5486512 - DNA, 25 bp, Homo sapien
tgtatattgggctcagagagtacac

SEQ ID NO: 5486513 - DNA, 25 bp, Homo sapien
tatttgacagacatccttgcagttt

SEQ ID NO: 5486514 - DNA, 25 bp, Homo sapien
ccaccgagctctgtgggaaaaaaga

SEQ ID NO: 5486515 - DNA, 25 bp, Homo sapien
ctaggcccctgtgtagtagtgcata

SEQ ID NO: 5486516 - DNA, 25 bp, Homo sapien
gaatacaatgggaaaagagtctcta

SEQ ID NO: 5486517 - DNA, 25 bp, Homo sapien
gggggaaataccttgagcagaatac

SEQ ID NO: 5486518 - DNA, 25 bp, Homo sapien
ctctatgtgaatatggacagttagc

SEQ ID NO: 5486519 - DNA, 25 bp, Homo sapien
gctcccttcgctctgctggaagctg

SEQ ID NO: 5486520 - DNA, 25 bp, Homo sapien
tcagtcgccctgttcttgaggtctc

SEQ ID NO: 5486521 - DNA, 25 bp, Homo sapien
gtatggaatcaacaccaccgagctc

SEQ ID NO: 5486522 - DNA, 25 bp, Homo sapien
gggctcagagagtacactgtgtctc

SEQ ID NO: 5486523 - DNA, 25 bp, Homo sapien
acaacatggaaatgaatgtatggat

SEQ ID NO: 5486524 - DNA, 25 bp, Homo sapien
cagtgcaagttctacattgggttcc

SEQ ID NO: 5486525 - DNA, 25 bp, Homo sapien
gcaactaatttaaggcaagatattg

SEQ ID NO: 5486526 - DNA, 25 bp, Homo sapien
ttttagtcaataaaggtgagtataa

SEQ ID NO: 5486527 - DNA, 25 bp, Homo sapien
tgaatcctagaaagaataggcaact

SEQ ID NO: 5486528 - DNA, 25 bp, Homo sapien
tgcactgctagtcaaacaacatgga

SEQ ID NO: 5486529 - DNA, 25 bp, Homo sapien
aatgtatggattatgatagtggggg

SEQ ID NO: 5486530 - DNA, 25 bp, Homo sapien
gtaataaaaatatcagtgcaagttc

SEQ ID NO: 5486531 - DNA, 25 bp, Homo sapien
aatcgtagtacagttatgaagtcac

SEQ ID NO: 5486532 - DNA, 25 bp, Homo sapien
ctcagtagagaaaataataggttct

SEQ ID NO: 5486533 - DNA, 25 bp, Homo sapien
atagattcatataaaggcagtaata

SEQ ID NO: 5486534 - DNA, 25 bp, Homo sapien
gggcgcatacccgtgcccttccggc

SEQ ID NO: 5486535 - DNA, 25 bp, Homo sapien
gccggaagggcacgggtatgcgccc

SEQ ID NO: 5486536 - DNA, 25 bp, Homo sapien
tgatactccaggttcggaaggaaaa

SEQ ID NO: 5486537 - DNA, 25 bp, Homo sapien
tgctattctggtgtgaaactgctgt

SEQ ID NO: 5486538 - DNA, 25 bp, Homo sapien
actaacatagaaagtgtccacgtaa

SEQ ID NO: 5486539 - DNA, 25 bp, Homo sapien
aaaaggattcaaagaattatgcatc

SEQ ID NO: 5486540 - DNA, 25 bp, Homo sapien
aagaaaggtccaatcagtatgtaca

SEQ ID NO: 5486541 - DNA, 25 bp, Homo sapien
tgcagggacaggtattcttacacat

SEQ ID NO: 5486542 - DNA, 25 bp, Homo sapien
aaagaaagggcactgctattctggt

SEQ ID NO: 5486543 - DNA, 25 bp, Homo sapien
ccacgtaacagtaaagaaaggtcca

SEQ ID NO: 5486544 - DNA, 25 bp, Homo sapien
tacatacaacagatctgcttgtgtt

SEQ ID NO: 5486545 - DNA, 25 bp, Homo sapien
tagttactacattgcagggacaggt

SEQ ID NO: 5486546 - DNA, 25 bp, Homo sapien
cctgtgacaggatttaagttttcta

SEQ ID NO: 5486547 - DNA, 25 bp, Homo sapien
atcacctgtaatggggaggaataat

SEQ ID NO: 5486548 - DNA, 25 bp, Homo sapien
ctctactgcctgttggagacgtgac

SEQ ID NO: 5486549 - DNA, 25 bp, Homo sapien
gaaagctagaatgaagcgagtctag

SEQ ID NO: 5486550 - DNA, 25 bp, Homo sapien
gttcttagctgtaagagggagttca

SEQ ID NO: 5486551 - DNA, 25 bp, Homo sapien
gtaaaggtaaaagcagaaagctaga

SEQ ID NO: 5486552 - DNA, 25 bp, Homo sapien
caaacctgtggcataaaagaggtgg

SEQ ID NO: 5486553 - DNA, 25 bp, Homo sapien
ctagtaggagactcagcacaattgg

SEQ ID NO: 5486554 - DNA, 25 bp, Homo sapien
tcacagccctaccctgagcgggaga

SEQ ID NO: 5486555 - DNA, 25 bp, Homo sapien
ggctggattccaacccagggctccc

SEQ ID NO: 5486556 - DNA, 25 bp, Homo sapien
ccctgagcaggttgcttaagctctc

SEQ ID NO: 5486557 - DNA, 25 bp, Homo sapien
tagtctgggactctggtacaaaaac

SEQ ID NO: 5486558 - DNA, 25 bp, Homo sapien
ataaacatacaaattttcaactgta

SEQ ID NO: 5486559 - DNA, 25 bp, Homo sapien
tacagttgaaaatttgtatgtttat

SEQ ID NO: 5486560 - DNA, 25 bp, Homo sapien
ctctcgtatagcagcatgagctttc

SEQ ID NO: 5486561 - DNA, 25 bp, Homo sapien
catagactggattctctcgtatagc

SEQ ID NO: 5486562 - DNA, 25 bp, Homo sapien
ctttatgtattgagagaactgtttc

SEQ ID NO: 5486563 - DNA, 25 bp, Homo sapien
cattttgggacggttccacctcttc

SEQ ID NO: 5486564 - DNA, 25 bp, Homo sapien
catcatgtctggagttacgctgttc

SEQ ID NO: 5486565 - DNA, 25 bp, Homo sapien
ggtttagctctcagcagcccgctcc

SEQ ID NO: 5486566 - DNA, 25 bp, Homo sapien
cttttgagctacccgatccttcttc

SEQ ID NO: 5486567 - DNA, 25 bp, Homo sapien
catagaaaattgctgggtttagctc

SEQ ID NO: 5486568 - DNA, 25 bp, Homo sapien
tgagctctgaggaagcttgccttct

SEQ ID NO: 5486569 - DNA, 25 bp, Homo sapien
gcccgctcctgagctctgaggaagc

SEQ ID NO: 5486570 - DNA, 25 bp, Homo sapien
tcttctgagcaagggacattttggg

SEQ ID NO: 5486571 - DNA, 25 bp, Homo sapien
gggcgagaccggaggcccctttcgc

SEQ ID NO: 5486572 - DNA, 25 bp, Homo sapien
gcgaaaggggcctccggtctcgccc

SEQ ID NO: 5486573 - DNA, 25 bp, Homo sapien
tcaaatatgacgacgcagaaaggag

SEQ ID NO: 5486574 - DNA, 25 bp, Homo sapien
tatctcccatgcgccaagtggagcc

SEQ ID NO: 5486575 - DNA, 25 bp, Homo sapien
cttcctagcacatgagaagatctgg

SEQ ID NO: 5486576 - DNA, 25 bp, Homo sapien
acagacccagcacgtatctcccatg

SEQ ID NO: 5486577 - DNA, 25 bp, Homo sapien
gccagcgtgatcctccgtgacattg

SEQ ID NO: 5486578 - DNA, 25 bp, Homo sapien
atggctacaaacttcctagcacatg

SEQ ID NO: 5486579 - DNA, 25 bp, Homo sapien
cgacaagttcaaatatgacgacgca

SEQ ID NO: 5486580 - DNA, 25 bp, Homo sapien
atccagaaatccctggctggaagct

SEQ ID NO: 5486581 - DNA, 25 bp, Homo sapien
cagcaggccatctccaagctggagg

SEQ ID NO: 5486582 - DNA, 25 bp, Homo sapien
tgagaagatctggttcgacaagttc

SEQ ID NO: 5486583 - DNA, 25 bp, Homo sapien
aaaggagattctacgagcagatgaa

SEQ ID NO: 5486584 - DNA, 25 bp, Homo sapien
cactgctcccaggagcggttacccg

SEQ ID NO: 5486585 - DNA, 25 bp, Homo sapien
tgagagttcaagtatccgacagttc

SEQ ID NO: 5486586 - DNA, 25 bp, Homo sapien
cctttggccaagttggcagctggac

SEQ ID NO: 5486587 - DNA, 25 bp, Homo sapien
tgggcacctgttcctcccgcgacct

SEQ ID NO: 5486588 - DNA, 25 bp, Homo sapien
attatggtcgctctgtcactggtgc

SEQ ID NO: 5486589 - DNA, 25 bp, Homo sapien
cccggcaacagaacaatctgctggc

SEQ ID NO: 5486590 - DNA, 25 bp, Homo sapien
tccctcaggtttagaagtcgcgttg

SEQ ID NO: 5486591 - DNA, 25 bp, Homo sapien
gatccacgggcaaatatgcagccat

SEQ ID NO: 5486592 - DNA, 25 bp, Homo sapien
cccgcgacctttgtgcccacgtctc

SEQ ID NO: 5486593 - DNA, 25 bp, Homo sapien
cgggtacctggctgcgcttattcat

SEQ ID NO: 5486594 - DNA, 25 bp, Homo sapien
cccccacgtccgcctcctgccattg

SEQ ID NO: 5486595 - DNA, 25 bp, Homo sapien
gtgacaaagacacagtcgtttaatc

SEQ ID NO: 5486596 - DNA, 25 bp, Homo sapien
actcctaaagttaagcagaggtgac

SEQ ID NO: 5486597 - DNA, 25 bp, Homo sapien
aacaaagttggggcttatatgatgt

SEQ ID NO: 5486598 - DNA, 25 bp, Homo sapien
tcatgcaaacggagattagaggtta

SEQ ID NO: 5486599 - DNA, 25 bp, Homo sapien
taggtgcttatacagaaggaaaaac

SEQ ID NO: 5486600 - DNA, 25 bp, Homo sapien
tgaaagaccctaacagaagggatgt

SEQ ID NO: 5486601 - DNA, 25 bp, Homo sapien
cctctgcgatataaccaaatggtgt

SEQ ID NO: 5486602 - DNA, 25 bp, Homo sapien
ttctaacaaagcgtatcatgcaaac

SEQ ID NO: 5486603 - DNA, 25 bp, Homo sapien
tgtttgacggttgaatggcctctac

SEQ ID NO: 5486604 - DNA, 25 bp, Homo sapien
ttaatgatttaaacgtggtatgtcc

SEQ ID NO: 5486605 - DNA, 25 bp, Homo sapien
agaagggatgtgaggttaattttta

SEQ ID NO: 5486606 - DNA, 25 bp, Homo sapien
gtgcccacagagaaaagcataggca

SEQ ID NO: 5486607 - DNA, 25 bp, Homo sapien
caggcacaccaaaccctagacgtcc

SEQ ID NO: 5486608 - DNA, 25 bp, Homo sapien
tcccctgcaccctcaggagaacccc

SEQ ID NO: 5486609 - DNA, 25 bp, Homo sapien
gttacaataggaatgctaaaggtta

SEQ ID NO: 5486610 - DNA, 25 bp, Homo sapien
aaccatgtccacagacctggcaggg

SEQ ID NO: 5486611 - DNA, 25 bp, Homo sapien
ctacccctgagctctggagccgggg

SEQ ID NO: 5486612 - DNA, 25 bp, Homo sapien
ctctcccgggcatataaccatgtcc

SEQ ID NO: 5486613 - DNA, 25 bp, Homo sapien
ctcctggtcacctcccctaagggac

SEQ ID NO: 5486614 - DNA, 25 bp, Homo sapien
cgaggggcatcctgatgtgcccaca

SEQ ID NO: 5486615 - DNA, 25 bp, Homo sapien
cgtagaagatacattgactgaccct

SEQ ID NO: 5486616 - DNA, 25 bp, Homo sapien
ccaccaagagctccctgcaccaaag

SEQ ID NO: 5486617 - DNA, 25 bp, Homo sapien
tcagggagctgaaaatactacttta

SEQ ID NO: 5486618 - DNA, 25 bp, Homo sapien
taaagtagttaaacaacagatagta

SEQ ID NO: 5486619 - DNA, 25 bp, Homo sapien
agcaggaatggtttttcagggagct

SEQ ID NO: 5486620 - DNA, 25 bp, Homo sapien
ataacaattagaggacaaaatgttt

SEQ ID NO: 5486621 - DNA, 25 bp, Homo sapien
aaacacagtgcatcaaacatcaaga

SEQ ID NO: 5486622 - DNA, 25 bp, Homo sapien
aagggagatttatttgctgagaagt

SEQ ID NO: 5486623 - DNA, 25 bp, Homo sapien
tcacaaaaggccaatgacacataac

SEQ ID NO: 5486624 - DNA, 25 bp, Homo sapien
ttctgtagtagctgccttccaaggc

SEQ ID NO: 5486625 - DNA, 25 bp, Homo sapien
gagaaaactactataaccacagatt

SEQ ID NO: 5486626 - DNA, 25 bp, Homo sapien
ctgtggaaagttgctgttaattcaa

SEQ ID NO: 5486627 - DNA, 25 bp, Homo sapien
acatcaagataaacaaacctgagaa

SEQ ID NO: 5486628 - DNA, 25 bp, Homo sapien
gctgaaggtatcgttcgcacgagac

SEQ ID NO: 5486629 - DNA, 25 bp, Homo sapien
gtctcgtgcgaacgataccttcagc

SEQ ID NO: 5486630 - DNA, 25 bp, Homo sapien
gctgtggagggttctaaagaaataa

SEQ ID NO: 5486631 - DNA, 25 bp, Homo sapien
gcatctccaacaaaaacaacggttc

SEQ ID NO: 5486632 - DNA, 25 bp, Homo sapien
agggtagggcagaatttgcatatat

SEQ ID NO: 5486633 - DNA, 25 bp, Homo sapien
agaatataaacgttttaagaggatc

SEQ ID NO: 5486634 - DNA, 25 bp, Homo sapien
tcaagacacaatctgcatctccaac

SEQ ID NO: 5486635 - DNA, 25 bp, Homo sapien
aggaagccgcactgtgtgacctttt

SEQ ID NO: 5486636 - DNA, 25 bp, Homo sapien
aatccaacgaaaatatacatcctac

SEQ ID NO: 5486637 - DNA, 25 bp, Homo sapien
acaacggttcaactctcattgctcc

SEQ ID NO: 5486638 - DNA, 25 bp, Homo sapien
agaacagagataagatatgagcttc

SEQ ID NO: 5486639 - DNA, 25 bp, Homo sapien
taattgataaaggtctctgggtttc

SEQ ID NO: 5486640 - DNA, 25 bp, Homo sapien
ctgtttcccacaggaagccgcactg

SEQ ID NO: 5486641 - DNA, 25 bp, Homo sapien
caacttagagtcataggtcattaag

SEQ ID NO: 5486642 - DNA, 25 bp, Homo sapien
cttaatgacctatgactctaagttg

SEQ ID NO: 5486643 - DNA, 25 bp, Homo sapien
tttgtgatctgttgcaagagtccaa

SEQ ID NO: 5486644 - DNA, 25 bp, Homo sapien
gcatcggatcaagatggtttcgccc

SEQ ID NO: 5486645 - DNA, 25 bp, Homo sapien
tgaacatacagaaatgaccaaagtc

SEQ ID NO: 5486646 - DNA, 25 bp, Homo sapien
cactgaaaagggctttcactgtagt

SEQ ID NO: 5486647 - DNA, 25 bp, Homo sapien
tctggatttgtaatgagcatctgat

SEQ ID NO: 5486648 - DNA, 25 bp, Homo sapien
aaacattaagagagtactgattttc

SEQ ID NO: 5486649 - DNA, 25 bp, Homo sapien
atgtggatacatataggaagtgtgt

SEQ ID NO: 5486650 - DNA, 25 bp, Homo sapien
aacattactgcattcgcatcggatc

SEQ ID NO: 5486651 - DNA, 25 bp, Homo sapien
cacatggtagttctgagtcaggcca

SEQ ID NO: 5486652 - DNA, 25 bp, Homo sapien
aatcaacatgactaaaagaaataac

SEQ ID NO: 5486653 - DNA, 25 bp, Homo sapien
taactgatgaaatggtatatagaac

SEQ ID NO: 5486654 - DNA, 25 bp, Homo sapien
agcacttgatagaaaaggcgtatgc

SEQ ID NO: 5486655 - DNA, 25 bp, Homo sapien
acaaaaaaagtgctggtaacattta

SEQ ID NO: 5486656 - DNA, 25 bp, Homo sapien
aatagtataatgaagcgctacagtt

SEQ ID NO: 5486657 - DNA, 25 bp, Homo sapien
aaatatacgtgagaaaaatacgagg

SEQ ID NO: 5486658 - DNA, 25 bp, Homo sapien
taaagtatatgcaagagataaaact

SEQ ID NO: 5486659 - DNA, 25 bp, Homo sapien
aaacagtgtgaacttgtacaatacc

SEQ ID NO: 5486660 - DNA, 25 bp, Homo sapien
atacaagtcacaggtaaatatacgt

SEQ ID NO: 5486661 - DNA, 25 bp, Homo sapien
acgaggctaatattaaatggcaggt

SEQ ID NO: 5486662 - DNA, 25 bp, Homo sapien
attaaatggcaggtaaggatactgt

SEQ ID NO: 5486663 - DNA, 25 bp, Homo sapien
aatacctcggaaagtgaaacttaca

SEQ ID NO: 5486664 - DNA, 25 bp, Homo sapien
aaggcgtatgcaaggtttttccaaa

SEQ ID NO: 5486665 - DNA, 25 bp, Homo sapien
tcccctcagaacagatagacagact

SEQ ID NO: 5486666 - DNA, 25 bp, Homo sapien
gtaagacactagagggataaatttc

SEQ ID NO: 5486667 - DNA, 25 bp, Homo sapien
aatggcccagcttagagacttcagc

SEQ ID NO: 5486668 - DNA, 25 bp, Homo sapien
tagacagactgaagccactgaactc

SEQ ID NO: 5486669 - DNA, 25 bp, Homo sapien
ctgaactctgccaggagtcaacatg

SEQ ID NO: 5486670 - DNA, 25 bp, Homo sapien
attgcacagtgggcaaatggcttat

SEQ ID NO: 5486671 - DNA, 25 bp, Homo sapien
tggctatggtatttagtaatggccc

SEQ ID NO: 5486672 - DNA, 25 bp, Homo sapien
tgctggatatgcagaaatgatagga

SEQ ID NO: 5486673 - DNA, 25 bp, Homo sapien
aatggcttatgtgaggtaagacact

SEQ ID NO: 5486674 - DNA, 25 bp, Homo sapien
accaatcccaggcaacaaacatgtc

SEQ ID NO: 5486675 - DNA, 25 bp, Homo sapien
gatggatgtgaaaatctacggccaa

SEQ ID NO: 5486676 - DNA, 25 bp, Homo sapien
gtccatgatgaggaccgagatgatc

SEQ ID NO: 5486677 - DNA, 25 bp, Homo sapien
ggaatctctgcagaaatgggctagt

SEQ ID NO: 5486678 - DNA, 25 bp, Homo sapien
gttgccctgcctctgggtgacaatg

SEQ ID NO: 5486679 - DNA, 25 bp, Homo sapien
ggagacttgtaccacaaaggcctgc

SEQ ID NO: 5486680 - DNA, 25 bp, Homo sapien
gaaggttgtcaaggttccccacaga

SEQ ID NO: 5486681 - DNA, 25 bp, Homo sapien
aatccttgccagagaccctcgtcat

SEQ ID NO: 5486682 - DNA, 25 bp, Homo sapien
aaaggaagaggcctagaatatctct

SEQ ID NO: 5486683 - DNA, 25 bp, Homo sapien
gtctagaccttggactgtgatggaa

SEQ ID NO: 5486684 - DNA, 25 bp, Homo sapien
atgggctagtgttttacgtgagcac

SEQ ID NO: 5486685 - DNA, 25 bp, Homo sapien
cacgcgctgcaacgtgtggattctg

SEQ ID NO: 5486686 - DNA, 25 bp, Homo sapien
aagactatatggaacctgaagaagg

SEQ ID NO: 5486687 - DNA, 25 bp, Homo sapien
cagagacgtcaaaatcctacgacct

SEQ ID NO: 5486688 - DNA, 25 bp, Homo sapien
aggtcgtaggattttgacgtctctg

SEQ ID NO: 5486689 - DNA, 25 bp, Homo sapien
gtacacacaaggaggctgaacctcc

SEQ ID NO: 5486690 - DNA, 25 bp, Homo sapien
catgtctgcacagtacagtacacac

SEQ ID NO: 5486691 - DNA, 25 bp, Homo sapien
cttaagtgttcggtgcaaaattgca

SEQ ID NO: 5486692 - DNA, 25 bp, Homo sapien
acacgcacacagtaaacgggtttat

SEQ ID NO: 5486693 - DNA, 25 bp, Homo sapien
attggctgaaaatggcctgatgacc

SEQ ID NO: 5486694 - DNA, 25 bp, Homo sapien
aggctgaacctcccagagaatgctt

SEQ ID NO: 5486695 - DNA, 25 bp, Homo sapien
cagatcgtacttacaaaccacaccc

SEQ ID NO: 5486696 - DNA, 25 bp, Homo sapien
gcactggatgtgactattggctgaa

SEQ ID NO: 5486697 - DNA, 25 bp, Homo sapien
aggctttgcaaagtccagaaggaaa

SEQ ID NO: 5486698 - DNA, 25 bp, Homo sapien
agtccagaaggaaaagctattaaac

SEQ ID NO: 5486699 - DNA, 25 bp, Homo sapien
cacaggtatacatgggaattcatcc

SEQ ID NO: 5486700 - DNA, 25 bp, Homo sapien
taaacatcggtgtcttaagtcgttt

SEQ ID NO: 5486701 - DNA, 25 bp, Homo sapien
aaacgacttaagacaccgatgttta

SEQ ID NO: 5486702 - DNA, 25 bp, Homo sapien
ccctatcagagatattgacacctgt

SEQ ID NO: 5486703 - DNA, 25 bp, Homo sapien
acaggtgtcaatatctctgataggg

SEQ ID NO: 5486704 - DNA, 25 bp, Homo sapien
ccacagacgtcagtatcaaaatcac

SEQ ID NO: 5486705 - DNA, 25 bp, Homo sapien
gtgattttgatactgacgtctgtgg

SEQ ID NO: 5486706 - DNA, 25 bp, Homo sapien
cccgcgccgtgtccctctccaagcg

SEQ ID NO: 5486707 - DNA, 25 bp, Homo sapien
ctctgctgaaactcagtgcaaaaaa

SEQ ID NO: 5486708 - DNA, 25 bp, Homo sapien
cactggtcccaaggtgtaaagcttt

SEQ ID NO: 5486709 - DNA, 25 bp, Homo sapien
gtattctgcacgagaaggtacactg

SEQ ID NO: 5486710 - DNA, 25 bp, Homo sapien
aaatgtattctgcacgagaaggtac

SEQ ID NO: 5486711 - DNA, 25 bp, Homo sapien
aactgtgcaatgtattaataacgtc

SEQ ID NO: 5486712 - DNA, 25 bp, Homo sapien
agaaggtacactggtcccaaggtgt

SEQ ID NO: 5486713 - DNA, 25 bp, Homo sapien
gagccaatttagagcccaaagagcc

SEQ ID NO: 5486714 - DNA, 25 bp, Homo sapien
cgccgtgtccctctccaagcgccgc

SEQ ID NO: 5486715 - DNA, 25 bp, Homo sapien
aaggtgtaaagctttaagagtcatt

SEQ ID NO: 5486716 - DNA, 25 bp, Homo sapien
ggtgagccaatttagagcccaaaga

SEQ ID NO: 5486717 - DNA, 25 bp, Homo sapien
cgcgcagagggacggtagttggcgg

SEQ ID NO: 5486718 - DNA, 25 bp, Homo sapien
ccgccaactaccgtccctctgcgcg

SEQ ID NO: 5486719 - DNA, 25 bp, Homo sapien
acgcgcagagggacggtagttggcg

SEQ ID NO: 5486720 - DNA, 25 bp, Homo sapien
cgccaactaccgtccctctgcgcgt

SEQ ID NO: 5486721 - DNA, 25 bp, Homo sapien
acgggccgtgtaagtcctccggcac

SEQ ID NO: 5486722 - DNA, 25 bp, Homo sapien
gtgccggaggacttacacggcccgt

SEQ ID NO: 5486723 - DNA, 25 bp, Homo sapien
taaaccgccaaggttctgctgcagg

SEQ ID NO: 5486724 - DNA, 25 bp, Homo sapien
cagcagaaattggacaggctcattc

SEQ ID NO: 5486725 - DNA, 25 bp, Homo sapien
ctgtgaatccagaatccagaggtgc

SEQ ID NO: 5486726 - DNA, 25 bp, Homo sapien
gggcttggacttggtctgtgaatcc

SEQ ID NO: 5486727 - DNA, 25 bp, Homo sapien
cacttagtgttaagagtggcagagg

SEQ ID NO: 5486728 - DNA, 25 bp, Homo sapien
gaggtgcaggtagcactatggatca

SEQ ID NO: 5486729 - DNA, 25 bp, Homo sapien
agatcccagaggctacttgtgactc

SEQ ID NO: 5486730 - DNA, 25 bp, Homo sapien
agaagtaccgagaatgccgttcggg

SEQ ID NO: 5486731 - DNA, 25 bp, Homo sapien
gggaagaggagtctaagttccatca

SEQ ID NO: 5486732 - DNA, 25 bp, Homo sapien
gaggtaaagtgtctaagtggctatt

SEQ ID NO: 5486733 - DNA, 25 bp, Homo sapien
ttgcatactgaagaggtaaagtgtc

SEQ ID NO: 5486734 - DNA, 25 bp, Homo sapien
tgtttcagggtgtctgaagtagagg

SEQ ID NO: 5486735 - DNA, 25 bp, Homo sapien
cctctacttcagacaccctgaaaca

SEQ ID NO: 5486736 - DNA, 25 bp, Homo sapien
ggtaaggggcccgacgacagcgagg

SEQ ID NO: 5486737 - DNA, 25 bp, Homo sapien
cctcgctgtcgtcgggccccttacc

SEQ ID NO: 5486738 - DNA, 25 bp, Homo sapien
tacaggcgtaaatgcaaaccgcttc

SEQ ID NO: 5486739 - DNA, 25 bp, Homo sapien
actgggtcctacggcttggactttc

SEQ ID NO: 5486740 - DNA, 25 bp, Homo sapien
aagacatcagctaagaaaggaaact

SEQ ID NO: 5486741 - DNA, 25 bp, Homo sapien
gtgttgctggggcctaatgttctca

SEQ ID NO: 5486742 - DNA, 25 bp, Homo sapien
acggtgttctggccaaagacatcag

SEQ ID NO: 5486743 - DNA, 25 bp, Homo sapien
caaggtcaaaatcagcaacaagttc

SEQ ID NO: 5486744 - DNA, 25 bp, Homo sapien
aaggggaacagttaacttgaataca

SEQ ID NO: 5486745 - DNA, 25 bp, Homo sapien
aaagaatcgagaattgcgtacaaaa

SEQ ID NO: 5486746 - DNA, 25 bp, Homo sapien
ttccaaccctgacagacccgcaaga

SEQ ID NO: 5486747 - DNA, 25 bp, Homo sapien
agcaagtaacagcccacggtgttct

SEQ ID NO: 5486748 - DNA, 25 bp, Homo sapien
ctgacatgttaataccaaggggaac

SEQ ID NO: 5486749 - DNA, 25 bp, Homo sapien
tatttattgaacgccatggaccagg

SEQ ID NO: 5486750 - DNA, 25 bp, Homo sapien
cagtaacttcagaaaccaaacatcc

SEQ ID NO: 5486751 - DNA, 25 bp, Homo sapien
tccagtacgtcagagtgccatggga

SEQ ID NO: 5486752 - DNA, 25 bp, Homo sapien
actctcaggaagacatccctaacac

SEQ ID NO: 5486753 - DNA, 25 bp, Homo sapien
atccctaacacaaatccagggactt

SEQ ID NO: 5486754 - DNA, 25 bp, Homo sapien
cacttcttgctaccagggatggggg

SEQ ID NO: 5486755 - DNA, 25 bp, Homo sapien
ggaaacacttcttgctaccagggat

SEQ ID NO: 5486756 - DNA, 25 bp, Homo sapien
caaacatccagtacgtcagagtgcc

SEQ ID NO: 5486757 - DNA, 25 bp, Homo sapien
ggcagggtaaacagccagtaacttc

SEQ ID NO: 5486758 - DNA, 25 bp, Homo sapien
aactgcttccctataggggcctgtt

SEQ ID NO: 5486759 - DNA, 25 bp, Homo sapien
taatcattttcatggaactgcttcc

SEQ ID NO: 5486760 - DNA, 25 bp, Homo sapien
cttggatgccagtcttactcatagc

SEQ ID NO: 5486761 - DNA, 25 bp, Homo sapien
actcaacacttatagaggtttgctc

SEQ ID NO: 5486762 - DNA, 25 bp, Homo sapien
aaaaaagaagagagctgccaattaa

SEQ ID NO: 5486763 - DNA, 25 bp, Homo sapien
tgactataaacaaaaagacatccct

SEQ ID NO: 5486764 - DNA, 25 bp, Homo sapien
caagaaaaagcaccaagtaaaaagc

SEQ ID NO: 5486765 - DNA, 25 bp, Homo sapien
gaacacagaccaccagtgcaaaaca

SEQ ID NO: 5486766 - DNA, 25 bp, Homo sapien
tggaaaactaagaaatgcctcttat

SEQ ID NO: 5486767 - DNA, 25 bp, Homo sapien
agaccaccagtgcaaaacaagaaaa

SEQ ID NO: 5486768 - DNA, 25 bp, Homo sapien
aagtaaaaagccagtgaaaagaaga

SEQ ID NO: 5486769 - DNA, 25 bp, Homo sapien
tgccaattaaagctaacagttgtat

SEQ ID NO: 5486770 - DNA, 25 bp, Homo sapien
tccattctgagaaccctgggtattt

SEQ ID NO: 5486771 - DNA, 25 bp, Homo sapien
cattcaatgcaacgtcagggaaagc

SEQ ID NO: 5486772 - DNA, 25 bp, Homo sapien
gacggtgttcgagaccttgtggttc

SEQ ID NO: 5486773 - DNA, 25 bp, Homo sapien
tggttctggccattggggaattgca

SEQ ID NO: 5486774 - DNA, 25 bp, Homo sapien
gggtcgacctgtgaagtacaacatc

SEQ ID NO: 5486775 - DNA, 25 bp, Homo sapien
catctgccttgtgacagggacacac

SEQ ID NO: 5486776 - DNA, 25 bp, Homo sapien
ttgttcaggcccaaaatcgagacag

SEQ ID NO: 5486777 - DNA, 25 bp, Homo sapien
catcaccacaaatggggctgtctac

SEQ ID NO: 5486778 - DNA, 25 bp, Homo sapien
aggaggctcgagatatcacatgttt

SEQ ID NO: 5486779 - DNA, 25 bp, Homo sapien
ctctgcagatagaagagccagaatg

SEQ ID NO: 5486780 - DNA, 25 bp, Homo sapien
gggaaaagcgaagatccatcaacct

SEQ ID NO: 5486781 - DNA, 25 bp, Homo sapien
acaagctgtcgcactgcgggacatt

SEQ ID NO: 5486782 - DNA, 25 bp, Homo sapien
aacacttgtatgggcagtaaggttc

SEQ ID NO: 5486783 - DNA, 25 bp, Homo sapien
ttgtcaataaggagaaagttgttcc

SEQ ID NO: 5486784 - DNA, 25 bp, Homo sapien
tcaaagaaacacagctaccgatagc

SEQ ID NO: 5486785 - DNA, 25 bp, Homo sapien
caggtagacaattattccaggaaag

SEQ ID NO: 5486786 - DNA, 25 bp, Homo sapien
tgacaatcttccaggtatagggggt

SEQ ID NO: 5486787 - DNA, 25 bp, Homo sapien
tccaggaaagtacctcttcagaatc

SEQ ID NO: 5486788 - DNA, 25 bp, Homo sapien
caaaggattaggatgcacttcttgc

SEQ ID NO: 5486789 - DNA, 25 bp, Homo sapien
ggttcagacccctagaagccaattc

SEQ ID NO: 5486790 - DNA, 25 bp, Homo sapien
aactccaacagataacagaagggca

SEQ ID NO: 5486791 - DNA, 25 bp, Homo sapien
tgggcagtaaggttcagacccctag

SEQ ID NO: 5486792 - DNA, 25 bp, Homo sapien
accgatagcacacaaatattcaacc

SEQ ID NO: 5486793 - DNA, 25 bp, Homo sapien
atatttatctcttttgttgtaagta

SEQ ID NO: 5486794 - DNA, 25 bp, Homo sapien
tacttacaacaaaagagataaatat

SEQ ID NO: 5486795 - DNA, 25 bp, Homo sapien
ctcagtgaggtagcttagaaatatt

SEQ ID NO: 5486796 - DNA, 25 bp, Homo sapien
ctggacagggacaccctcatgtagc

SEQ ID NO: 5486797 - DNA, 25 bp, Homo sapien
ttttcactggaggattgacaaacac

SEQ ID NO: 5486798 - DNA, 25 bp, Homo sapien
cccaacagcacagtccctggaagag

SEQ ID NO: 5486799 - DNA, 25 bp, Homo sapien
aatcctaatacagaaaaggtaacag

SEQ ID NO: 5486800 - DNA, 25 bp, Homo sapien
atagacccagtgactgattgtcttc

SEQ ID NO: 5486801 - DNA, 25 bp, Homo sapien
ggaagaggaggtaactctccacaca

SEQ ID NO: 5486802 - DNA, 25 bp, Homo sapien
ccaaaatgtgatctagatagtgctt

SEQ ID NO: 5486803 - DNA, 25 bp, Homo sapien
gctgctgtagacactagtgttagaa

SEQ ID NO: 5486804 - DNA, 25 bp, Homo sapien
gaggattgacaaacacgctacatac

SEQ ID NO: 5486805 - DNA, 25 bp, Homo sapien
tcagcacacatctaatttggccatt

SEQ ID NO: 5486806 - DNA, 25 bp, Homo sapien
gaacatagctatcccatcatataaa

SEQ ID NO: 5486807 - DNA, 25 bp, Homo sapien
tttatatgatgggatagctatgttc

SEQ ID NO: 5486808 - DNA, 25 bp, Homo sapien
taggaatggaatgtaccactacgag

SEQ ID NO: 5486809 - DNA, 25 bp, Homo sapien
tcagtgagttgtattgtgcgagaaa

SEQ ID NO: 5486810 - DNA, 25 bp, Homo sapien
taaggacattgttgtttgagcgggg

SEQ ID NO: 5486811 - DNA, 25 bp, Homo sapien
agaacgcaggcgcttacacaacttt

SEQ ID NO: 5486812 - DNA, 25 bp, Homo sapien
ctatctagccaaacccagaagaacg

SEQ ID NO: 5486813 - DNA, 25 bp, Homo sapien
agactggaaggtaccctacagtgtt

SEQ ID NO: 5486814 - DNA, 25 bp, Homo sapien
tctacagaagcatcctcagtgagtt

SEQ ID NO: 5486815 - DNA, 25 bp, Homo sapien
ttccatagagggacacaaccctatc

SEQ ID NO: 5486816 - DNA, 25 bp, Homo sapien
tcagttgacataaaaatagacccgt

SEQ ID NO: 5486817 - DNA, 25 bp, Homo sapien
attccagaaagtatagtgcaaacac

SEQ ID NO: 5486818 - DNA, 25 bp, Homo sapien
gaagttacccagtgagagtgagtta

SEQ ID NO: 5486819 - DNA, 25 bp, Homo sapien
taaatacggtagacttgttagtcag

SEQ ID NO: 5486820 - DNA, 25 bp, Homo sapien
ctgactaacaagtctaccgtattta

SEQ ID NO: 5486821 - DNA, 25 bp, Homo sapien
aagtgaaaaaagctgatactatttt

SEQ ID NO: 5486822 - DNA, 25 bp, Homo sapien
cacttaattgtggaaaataaaggaa

SEQ ID NO: 5486823 - DNA, 25 bp, Homo sapien
agtaagtagtgaaccaatggaccag

SEQ ID NO: 5486824 - DNA, 25 bp, Homo sapien
acaggaaatgtttcacaagggcctt

SEQ ID NO: 5486825 - DNA, 25 bp, Homo sapien
agaatgaacaaagcaggtaaatata

SEQ ID NO: 5486826 - DNA, 25 bp, Homo sapien
tggaccagtggttattgttggagaa

SEQ ID NO: 5486827 - DNA, 25 bp, Homo sapien
ttggagaaaacaattaggcaactca

SEQ ID NO: 5486828 - DNA, 25 bp, Homo sapien
attaggcaactcatcaatgcgctat

SEQ ID NO: 5486829 - DNA, 25 bp, Homo sapien
gcactgaatatttgaatgaagatgt

SEQ ID NO: 5486830 - DNA, 25 bp, Homo sapien
cacggtaaaaataacgttcacatgc

SEQ ID NO: 5486831 - DNA, 25 bp, Homo sapien
cgtttgagtggttttcagcatgatc

SEQ ID NO: 5486832 - DNA, 25 bp, Homo sapien
gaccttaacgtgagtagaaggtggt

SEQ ID NO: 5486833 - DNA, 25 bp, Homo sapien
accaccttctactcacgttaaggtc

SEQ ID NO: 5486834 - DNA, 25 bp, Homo sapien
ataggaataaatggtagcagataca

SEQ ID NO: 5486835 - DNA, 25 bp, Homo sapien
atggtagcagatacatccttctaac

SEQ ID NO: 5486836 - DNA, 25 bp, Homo sapien
gttatggaggactataaatgaagtt

SEQ ID NO: 5486837 - DNA, 25 bp, Homo sapien
actccatgcaggcccagctgttgag

SEQ ID NO: 5486838 - DNA, 25 bp, Homo sapien
gctccggactttatctgaggtgtct

SEQ ID NO: 5486839 - DNA, 25 bp, Homo sapien
ataaatggtagcagatacatccttc

SEQ ID NO: 5486840 - DNA, 25 bp, Homo sapien
tgaggtgtctggagaagttctcctg

SEQ ID NO: 5486841 - DNA, 25 bp, Homo sapien
gtctggagaagttctcctgcccctc

SEQ ID NO: 5486842 - DNA, 25 bp, Homo sapien
ctttatctgaggtgtctggagaagt

SEQ ID NO: 5486843 - DNA, 25 bp, Homo sapien
ctaaatgagtataatgtcaagcccc

SEQ ID NO: 5486844 - DNA, 25 bp, Homo sapien
ttctaacttgttatggaggactata

SEQ ID NO: 5486845 - DNA, 25 bp, Homo sapien
aatgaatggggtaccatacatggtt

SEQ ID NO: 5486846 - DNA, 25 bp, Homo sapien
aagtccctgcttttatcctggtgcc

SEQ ID NO: 5486847 - DNA, 25 bp, Homo sapien
atgaagttactaaaaacatagactg

SEQ ID NO: 5486848 - DNA, 25 bp, Homo sapien
ggagactgatagcatgtgatggctc

SEQ ID NO: 5486849 - DNA, 25 bp, Homo sapien
atggttaagataaagccttgggctc

SEQ ID NO: 5486850 - DNA, 25 bp, Homo sapien
gcccaagccctgtcttaaggcccag

SEQ ID NO: 5486851 - DNA, 25 bp, Homo sapien
tttatcctggtgcctgattggggtg

SEQ ID NO: 5486852 - DNA, 25 bp, Homo sapien
cttgaaatataacactccatgcagg

SEQ ID NO: 5486853 - DNA, 25 bp, Homo sapien
ggactgtcctactgtaacccctgtg

SEQ ID NO: 5486854 - DNA, 25 bp, Homo sapien
gtttacacattttgcacttgggagg

SEQ ID NO: 5486855 - DNA, 25 bp, Homo sapien
ttctcaggtggcaatgtaactcatt

SEQ ID NO: 5486856 - DNA, 25 bp, Homo sapien
aacgagggttcactaaaggctatag

SEQ ID NO: 5486857 - DNA, 25 bp, Homo sapien
cttactgtatgcaaggcactgggga

SEQ ID NO: 5486858 - DNA, 25 bp, Homo sapien
cgcattttgtgcgtctgaggggctg

SEQ ID NO: 5486859 - DNA, 25 bp, Homo sapien
aaaatcagtaacaacacagaggcct

SEQ ID NO: 5486860 - DNA, 25 bp, Homo sapien
cagggctaagagagtaatactcgct

SEQ ID NO: 5486861 - DNA, 25 bp, Homo sapien
atactcgcttagccaggaaaggatg

SEQ ID NO: 5486862 - DNA, 25 bp, Homo sapien
ggccttgcacgtggcagtgtctatc

SEQ ID NO: 5486863 - DNA, 25 bp, Homo sapien
tcagatttgggaggtcagctattaa

SEQ ID NO: 5486864 - DNA, 25 bp, Homo sapien
gcgggtctaagaaatgaagagttaa

SEQ ID NO: 5486865 - DNA, 25 bp, Homo sapien
ccaagtggacaacagtacagataat

SEQ ID NO: 5486866 - DNA, 25 bp, Homo sapien
acagaggcctgaacaattgccaagt

SEQ ID NO: 5486867 - DNA, 25 bp, Homo sapien
tgactgtgtctcctggtattttaca

SEQ ID NO: 5486868 - DNA, 25 bp, Homo sapien
tgtaaaataccaggagacacagtca

SEQ ID NO: 5486869 - DNA, 25 bp, Homo sapien
ctcgatagtcgtcttgatcgggcaa

SEQ ID NO: 5486870 - DNA, 25 bp, Homo sapien
ttgcccgatcaagacgactatcgag

SEQ ID NO: 5486871 - DNA, 25 bp, Homo sapien
agtcatcctcaggtagacggaacat

SEQ ID NO: 5486872 - DNA, 25 bp, Homo sapien
atgttccgtctacctgaggatgact

SEQ ID NO: 5486873 - DNA, 25 bp, Homo sapien
caaactgcaatagagactgtagatt

SEQ ID NO: 5486874 - DNA, 25 bp, Homo sapien
aatttgatgaaagctgattactgtc

SEQ ID NO: 5486875 - DNA, 25 bp, Homo sapien
caataaactattggaaagtactccc

SEQ ID NO: 5486876 - DNA, 25 bp, Homo sapien
actagctatctaggtggagttgaaa

SEQ ID NO: 5486877 - DNA, 25 bp, Homo sapien
ctcattcagtattaaaggggggagg

SEQ ID NO: 5486878 - DNA, 25 bp, Homo sapien
taagagatttggagcactctgagtt

SEQ ID NO: 5486879 - DNA, 25 bp, Homo sapien
agggggttacaaactgcaatagaga

SEQ ID NO: 5486880 - DNA, 25 bp, Homo sapien
gaggctgagcctacagatgaactct

SEQ ID NO: 5486881 - DNA, 25 bp, Homo sapien
ctggcctgccttcgttaactgtgta

SEQ ID NO: 5486882 - DNA, 25 bp, Homo sapien
ctgcatggacctaacattcgatctc

SEQ ID NO: 5486883 - DNA, 25 bp, Homo sapien
acattgaccaagaactgcatggacc

SEQ ID NO: 5486884 - DNA, 25 bp, Homo sapien
atttaaaaggcctaggtattggagc

SEQ ID NO: 5486885 - DNA, 25 bp, Homo sapien
aacaagttaagtgaaatttgcagtt

SEQ ID NO: 5486886 - DNA, 25 bp, Homo sapien
tggaaacatatgagaacatgtgttc

SEQ ID NO: 5486887 - DNA, 25 bp, Homo sapien
caaaaacacaggctcacagtatgaa

SEQ ID NO: 5486888 - DNA, 25 bp, Homo sapien
tcagttttgagattttaaagagggc

SEQ ID NO: 5486889 - DNA, 25 bp, Homo sapien
agaggctaagtcaggtatgtattac

SEQ ID NO: 5486890 - DNA, 25 bp, Homo sapien
ttcacagggcataaattaaatcatt

SEQ ID NO: 5486891 - DNA, 25 bp, Homo sapien
ttgctatcaagggaaagtaagaagg

SEQ ID NO: 5486892 - DNA, 25 bp, Homo sapien
taatccacaaccacactatacaccc

SEQ ID NO: 5486893 - DNA, 25 bp, Homo sapien
tgaaatgctgaagaggctaagtcag

SEQ ID NO: 5486894 - DNA, 25 bp, Homo sapien
ttacaagactataaaagcaagatct

SEQ ID NO: 5486895 - DNA, 25 bp, Homo sapien
aatttaaccagaatcagaatacttt

SEQ ID NO: 5486896 - DNA, 25 bp, Homo sapien
aaattgtgtcgtgttcaggagttgg

SEQ ID NO: 5486897 - DNA, 25 bp, Homo sapien
ggtgggctagtgagctgctcaaaca

SEQ ID NO: 5486898 - DNA, 25 bp, Homo sapien
aggagttgggaagccaacacattaa

SEQ ID NO: 5486899 - DNA, 25 bp, Homo sapien
aaggcagatgtcaatgacatgcaca

SEQ ID NO: 5486900 - DNA, 25 bp, Homo sapien
acagggcctggaaccatattcgtta

SEQ ID NO: 5486901 - DNA, 25 bp, Homo sapien
tcttgcactgccttgagtgagtata

SEQ ID NO: 5486902 - DNA, 25 bp, Homo sapien
tcccagaagttctaaggcagatgtc

SEQ ID NO: 5486903 - DNA, 25 bp, Homo sapien
atgtaaataatgggatagaatctct

SEQ ID NO: 5486904 - DNA, 25 bp, Homo sapien
tgggatagaatctctcgaatcagga

SEQ ID NO: 5486905 - DNA, 25 bp, Homo sapien
cgaatcaggattgtcccagaagttc

SEQ ID NO: 5486906 - DNA, 25 bp, Homo sapien
gtacaatacagcaagtgatcatcac

SEQ ID NO: 5486907 - DNA, 25 bp, Homo sapien
tgataatccaaaagagcagataatt

SEQ ID NO: 5486908 - DNA, 25 bp, Homo sapien
acggctagtagcagtagtgataatc

SEQ ID NO: 5486909 - DNA, 25 bp, Homo sapien
ttcaggtttaacagagaagaactcc

SEQ ID NO: 5486910 - DNA, 25 bp, Homo sapien
aatgaaagaggctttgtaacaactc

SEQ ID NO: 5486911 - DNA, 25 bp, Homo sapien
aacaactcatcccaacacagcctcc

SEQ ID NO: 5486912 - DNA, 25 bp, Homo sapien
agtgtcttgcatagagtagaccttc

SEQ ID NO: 5486913 - DNA, 25 bp, Homo sapien
cacctgagtctaacagcagtttgac

SEQ ID NO: 5486914 - DNA, 25 bp, Homo sapien
ttggaaccaggcttctatcaactac

SEQ ID NO: 5486915 - DNA, 25 bp, Homo sapien
actatactagtcgaggggctttaga

SEQ ID NO: 5486916 - DNA, 25 bp, Homo sapien
gagaagaactcctggacatggcatg

SEQ ID NO: 5486917 - DNA, 25 bp, Homo sapien
gtacgtctacattggacactacagt

SEQ ID NO: 5486918 - DNA, 25 bp, Homo sapien
actgtagtgtccaatgtagacgtac

SEQ ID NO: 5486919 - DNA, 25 bp, Homo sapien
gcagtataatgaagaaaagtgctgt

SEQ ID NO: 5486920 - DNA, 25 bp, Homo sapien
caaactggtaagaacaattaggtac

SEQ ID NO: 5486921 - DNA, 25 bp, Homo sapien
ttctggtatacaagaagaacagctt

SEQ ID NO: 5486922 - DNA, 25 bp, Homo sapien
gctgatgaatggatacataaaatgc

SEQ ID NO: 5486923 - DNA, 25 bp, Homo sapien
tacagtgtaatgaaattagcagtat

SEQ ID NO: 5486924 - DNA, 25 bp, Homo sapien
tactaaacaatgggagtactaggga

SEQ ID NO: 5486925 - DNA, 25 bp, Homo sapien
atatgcaaagttatgaggaaagagt

SEQ ID NO: 5486926 - DNA, 25 bp, Homo sapien
ggaatgactgagctctaagacaaac

SEQ ID NO: 5486927 - DNA, 25 bp, Homo sapien
atgaggaaagagttactgtataatc

SEQ ID NO: 5486928 - DNA, 25 bp, Homo sapien
aatttgggttctgaaagatggatat

SEQ ID NO: 5486929 - DNA, 25 bp, Homo sapien
ttcattttgagtgggagatgttgga

SEQ ID NO: 5486930 - DNA, 25 bp, Homo sapien
cttcctgacccagacgcactcacga

SEQ ID NO: 5486931 - DNA, 25 bp, Homo sapien
caggcttgtgttaaggcaatggact

SEQ ID NO: 5486932 - DNA, 25 bp, Homo sapien
acatcccccaggacttgatgaccac

SEQ ID NO: 5486933 - DNA, 25 bp, Homo sapien
gagacgcacagagaggtctcttcct

SEQ ID NO: 5486934 - DNA, 25 bp, Homo sapien
ttcaatacacgtcaaggtcgcttcc

SEQ ID NO: 5486935 - DNA, 25 bp, Homo sapien
ggccagcacctccgtcggaagcatt

SEQ ID NO: 5486936 - DNA, 25 bp, Homo sapien
cccacggtcactgctgtgttcagcc

SEQ ID NO: 5486937 - DNA, 25 bp, Homo sapien
tcggaagcatttggcacacacacct

SEQ ID NO: 5486938 - DNA, 25 bp, Homo sapien
gggttgcttcagccagtgcagtgag

SEQ ID NO: 5486939 - DNA, 25 bp, Homo sapien
catctcagcctgagacgcacagaga

SEQ ID NO: 5486940 - DNA, 25 bp, Homo sapien
tttatattgtgagaaaacagcccca

SEQ ID NO: 5486941 - DNA, 25 bp, Homo sapien
ctgcccattgaggtatactgccatc

SEQ ID NO: 5486942 - DNA, 25 bp, Homo sapien
gtcatgtgtgaggaccgaaatttgc

SEQ ID NO: 5486943 - DNA, 25 bp, Homo sapien
acaaatgcatcaagaaagcggtgaa

SEQ ID NO: 5486944 - DNA, 25 bp, Homo sapien
acctgtgtgataatggtcaagcccc

SEQ ID NO: 5486945 - DNA, 25 bp, Homo sapien
aggcttacgatgagtgcctggagga

SEQ ID NO: 5486946 - DNA, 25 bp, Homo sapien
atcccctctaagacggacctgggtg

SEQ ID NO: 5486947 - DNA, 25 bp, Homo sapien
tggtcaaccagaaccccatcgcgca

SEQ ID NO: 5486948 - DNA, 25 bp, Homo sapien
cccacccacactgacggcatcttcc

SEQ ID NO: 5486949 - DNA, 25 bp, Homo sapien
ctacccctatgaggggctccggtag

SEQ ID NO: 5486950 - DNA, 25 bp, Homo sapien
ggttttggcaggagacacactgccc

SEQ ID NO: 5486951 - DNA, 25 bp, Homo sapien
agaaaaagggatcatggttttggca

SEQ ID NO: 5486952 - DNA, 25 bp, Homo sapien
attattcactctagctccactgaga

SEQ ID NO: 5486953 - DNA, 25 bp, Homo sapien
ggcatgcttgctgagccataattac

SEQ ID NO: 5486954 - DNA, 25 bp, Homo sapien
gacattctaactcagttccagtatg

SEQ ID NO: 5486955 - DNA, 25 bp, Homo sapien
tgtaagtggacgggttccctgaatc

SEQ ID NO: 5486956 - DNA, 25 bp, Homo sapien
gtatgtagcaatcctgcgtgtgaag

SEQ ID NO: 5486957 - DNA, 25 bp, Homo sapien
tgcaattggactgaagctccctggc

SEQ ID NO: 5486958 - DNA, 25 bp, Homo sapien
gggtccttggagagccatcgaggag

SEQ ID NO: 5486959 - DNA, 25 bp, Homo sapien
gctccctggctgaagatacatgccg

SEQ ID NO: 5486960 - DNA, 25 bp, Homo sapien
gatgattttggtggcatgcttgctg

SEQ ID NO: 5486961 - DNA, 25 bp, Homo sapien
gagtctctgggttctagatgatttt

SEQ ID NO: 5486962 - DNA, 25 bp, Homo sapien
gccgagtcagcacatgggtagagat

SEQ ID NO: 5486963 - DNA, 25 bp, Homo sapien
gccagggagcttcagtccaattgca

SEQ ID NO: 5486964 - DNA, 25 bp, Homo sapien
cggcatgtatcttcagccagggagc

SEQ ID NO: 5486965 - DNA, 25 bp, Homo sapien
aaaatcatctagaacccagagactc

SEQ ID NO: 5486966 - DNA, 25 bp, Homo sapien
tctcagtggagctagagtgaataat

SEQ ID NO: 5486967 - DNA, 25 bp, Homo sapien
gattcagggaacccgtccacttaca

SEQ ID NO: 5486968 - DNA, 25 bp, Homo sapien
atctctacccatgtgctgactcggc

SEQ ID NO: 5486969 - DNA, 25 bp, Homo sapien
cttcacacgcaggattgctacatac

SEQ ID NO: 5486970 - DNA, 25 bp, Homo sapien
ctcctcgatggctctccaaggaccc

SEQ ID NO: 5486971 - DNA, 25 bp, Homo sapien
gtaattatggctcagcaagcatgcc

SEQ ID NO: 5486972 - DNA, 25 bp, Homo sapien
catactggaactgagttagaatgtc

SEQ ID NO: 5486973 - DNA, 25 bp, Homo sapien
cagcaagcatgccaccaaaatcatc

SEQ ID NO: 5486974 - DNA, 25 bp, Homo sapien
ccgccggacggcgacgtgggtcagc

SEQ ID NO: 5486975 - DNA, 25 bp, Homo sapien
gctgacccacgtcgccgtccggcgg

SEQ ID NO: 5486976 - DNA, 25 bp, Homo sapien
cccgccggacggcgacgtgggtcag

SEQ ID NO: 5486977 - DNA, 25 bp, Homo sapien
ctgacccacgtcgccgtccggcggg

SEQ ID NO: 5486978 - DNA, 25 bp, Homo sapien
ttgttcagaatacatgacattggta

SEQ ID NO: 5486979 - DNA, 25 bp, Homo sapien
tctatacaagtatgagatcagggtt

SEQ ID NO: 5486980 - DNA, 25 bp, Homo sapien
tcgtctcatggcaaaccgaagaacg

SEQ ID NO: 5486981 - DNA, 25 bp, Homo sapien
ggtaaatatgccacatgcctttggt

SEQ ID NO: 5486982 - DNA, 25 bp, Homo sapien
cacacagtggaaaccccacatcgtc

SEQ ID NO: 5486983 - DNA, 25 bp, Homo sapien
catgcctttggtggaagtacaactg

SEQ ID NO: 5486984 - DNA, 25 bp, Homo sapien
acagacacacagtggaaaccccaca

SEQ ID NO: 5486985 - DNA, 25 bp, Homo sapien
tacaagtatgagatcagggttagga

SEQ ID NO: 5486986 - DNA, 25 bp, Homo sapien
ccacatcgtctcatggcaaaccgaa

SEQ ID NO: 5486987 - DNA, 25 bp, Homo sapien
tttggtggaagtacaactgttgtta

SEQ ID NO: 5486988 - DNA, 25 bp, Homo sapien
tacatgacattggtaaatatgccac

SEQ ID NO: 5486989 - DNA, 25 bp, Homo sapien
cagtcccggtgggacactggaggtt

SEQ ID NO: 5486990 - DNA, 25 bp, Homo sapien
aacctccagtgtcccaccgggactg

SEQ ID NO: 5486991 - DNA, 25 bp, Homo sapien
cgcgagggcgacgggggacctcttg

SEQ ID NO: 5486992 - DNA, 25 bp, Homo sapien
caagaggtcccccgtcgccctcgcg

SEQ ID NO: 5486993 - DNA, 25 bp, Homo sapien
tgccgcgagggcgacgggggacctc

SEQ ID NO: 5486994 - DNA, 25 bp, Homo sapien
gaggtcccccgtcgccctcgcggca

SEQ ID NO: 5486995 - DNA, 25 bp, Homo sapien
ctccttcttacaggatcactaggtg

SEQ ID NO: 5486996 - DNA, 25 bp, Homo sapien
cacctagtgatcctgtaagaaggag

SEQ ID NO: 5486997 - DNA, 25 bp, Homo sapien
ttctcacctcttgagggggtcctcc

SEQ ID NO: 5486998 - DNA, 25 bp, Homo sapien
tctgctgtgcagaatcctattttat

SEQ ID NO: 5486999 - DNA, 25 bp, Homo sapien
gttgtagcagcttaactgtatctgg

SEQ ID NO: 5487000 - DNA, 25 bp, Homo sapien
gacctgaactcgcacctcctacctc

SEQ ID NO: 5487001 - DNA, 25 bp, Homo sapien
ccccttccagatttgaccggcagcg

SEQ ID NO: 5487002 - DNA, 25 bp, Homo sapien
tccgcgactacctgagctccttccc

SEQ ID NO: 5487003 - DNA, 25 bp, Homo sapien
tacttgcctggaaccatgtgggtac

SEQ ID NO: 5487004 - DNA, 25 bp, Homo sapien
ctgggtccccctggttgttgtagca

SEQ ID NO: 5487005 - DNA, 25 bp, Homo sapien
atctttgcacaaaccaggggttggg

SEQ ID NO: 5487006 - DNA, 25 bp, Homo sapien
acgcagcattaactgggatgccgtg

SEQ ID NO: 5487007 - DNA, 25 bp, Homo sapien
gaggccgcagaccccttctcacctc

SEQ ID NO: 5487008 - DNA, 25 bp, Homo sapien
actcaactcggcaatccaagcacct

SEQ ID NO: 5487009 - DNA, 25 bp, Homo sapien
aagcacctagataccagcacaagtc

SEQ ID NO: 5487010 - DNA, 25 bp, Homo sapien
cctcctaggaggacatttaggggag

SEQ ID NO: 5487011 - DNA, 25 bp, Homo sapien
cttcattcataggtctgcgctgggg

SEQ ID NO: 5487012 - DNA, 25 bp, Homo sapien
cctcccgagtgactgcctcctagga

SEQ ID NO: 5487013 - DNA, 25 bp, Homo sapien
ctagaaccttaggcattggggagtt

SEQ ID NO: 5487014 - DNA, 25 bp, Homo sapien
taatccctgtctggactgagcctcc

SEQ ID NO: 5487015 - DNA, 25 bp, Homo sapien
tgaactggaattctgcagctaaccc

SEQ ID NO: 5487016 - DNA, 25 bp, Homo sapien
gccgggacccaggcctttcacatca

SEQ ID NO: 5487017 - DNA, 25 bp, Homo sapien
gtggacagcaagagtcgttttcgcg

SEQ ID NO: 5487018 - DNA, 25 bp, Homo sapien
cattggggagttttagatggactaa

SEQ ID NO: 5487019 - DNA, 25 bp, Homo sapien
cagtaggaccacctgaagagattac

SEQ ID NO: 5487020 - DNA, 25 bp, Homo sapien
gtaatctcttcaggtggtcctactg

SEQ ID NO: 5487021 - DNA, 25 bp, Homo sapien
aagatggcttaagagtagactaact

SEQ ID NO: 5487022 - DNA, 25 bp, Homo sapien
acagtcctcgagatttatcggcgcc

SEQ ID NO: 5487023 - DNA, 25 bp, Homo sapien
ttgcataggatgtgccaacaatcac

SEQ ID NO: 5487024 - DNA, 25 bp, Homo sapien
ttcagcgtcacgatcagactgttac

SEQ ID NO: 5487025 - DNA, 25 bp, Homo sapien
tagcaatcaacagcatggggtgcaa

SEQ ID NO: 5487026 - DNA, 25 bp, Homo sapien
ccaaggtttccgaagacaatggctt

SEQ ID NO: 5487027 - DNA, 25 bp, Homo sapien
acatgataatggatacacaagcttc

SEQ ID NO: 5487028 - DNA, 25 bp, Homo sapien
cacagaacagaaactagcaataacc

SEQ ID NO: 5487029 - DNA, 25 bp, Homo sapien
atcggcgccatacacatgagtagtt

SEQ ID NO: 5487030 - DNA, 25 bp, Homo sapien
acctggcatcaccctgaaggaattc

SEQ ID NO: 5487031 - DNA, 25 bp, Homo sapien
tgttggggaaatttaccaagatggc

SEQ ID NO: 5487032 - DNA, 25 bp, Homo sapien
catgtaatatgtggcaaacttatgc

SEQ ID NO: 5487033 - DNA, 25 bp, Homo sapien
attctgttggaagaattgggggtaa

SEQ ID NO: 5487034 - DNA, 25 bp, Homo sapien
actgcatgttccagagcggatttgg

SEQ ID NO: 5487035 - DNA, 25 bp, Homo sapien
agaagggccctgattatccaagtgc

SEQ ID NO: 5487036 - DNA, 25 bp, Homo sapien
tgatgattgattataaaaggaagaa

SEQ ID NO: 5487037 - DNA, 25 bp, Homo sapien
tttcactctgctagcaatgggaaaa

SEQ ID NO: 5487038 - DNA, 25 bp, Homo sapien
aacatccatgaagctaaaattaaac

SEQ ID NO: 5487039 - DNA, 25 bp, Homo sapien
aaataagtttggtgcagttactgca

SEQ ID NO: 5487040 - DNA, 25 bp, Homo sapien
cttggctgaaaactaggaatgcata

SEQ ID NO: 5487041 - DNA, 25 bp, Homo sapien
agaattgggggtaagatacatatat

SEQ ID NO: 5487042 - DNA, 25 bp, Homo sapien
aagtgctttgggctggtacaatcac

SEQ ID NO: 5487043 - DNA, 25 bp, Homo sapien
cgaattgcgggaactaggatagaga

SEQ ID NO: 5487044 - DNA, 25 bp, Homo sapien
tctctatcctagttcccgcaattcg

SEQ ID NO: 5487045 - DNA, 25 bp, Homo sapien
tcgcgaattccacgtgctaggccat

SEQ ID NO: 5487046 - DNA, 25 bp, Homo sapien
ggcttggcgcttgtctaaggctttg

SEQ ID NO: 5487047 - DNA, 25 bp, Homo sapien
acgggtgaagttgaatcttgaacgc

SEQ ID NO: 5487048 - DNA, 25 bp, Homo sapien
aatgccttcctcggccatggcggtg

SEQ ID NO: 5487049 - DNA, 25 bp, Homo sapien
gatgagggcagtcttcagaacctct

SEQ ID NO: 5487050 - DNA, 25 bp, Homo sapien
gcaagcacacaaagatgggcttggc

SEQ ID NO: 5487051 - DNA, 25 bp, Homo sapien
gatttggtgttcagcacaaagggcc

SEQ ID NO: 5487052 - DNA, 25 bp, Homo sapien
acaaagggcctccaccaacttgaca

SEQ ID NO: 5487053 - DNA, 25 bp, Homo sapien
attacacctccagcagcaatgcctt

SEQ ID NO: 5487054 - DNA, 25 bp, Homo sapien
atcacagttggatgcaagcacacaa

SEQ ID NO: 5487055 - DNA, 25 bp, Homo sapien
aatgacatccttggcctgagactcc

SEQ ID NO: 5487056 - DNA, 25 bp, Homo sapien
acactcagtcacaagagagagcttc

SEQ ID NO: 5487057 - DNA, 25 bp, Homo sapien
caggggatgtctgcatgcaatagac

SEQ ID NO: 5487058 - DNA, 25 bp, Homo sapien
atgtccaaagacaactggcagagtt

SEQ ID NO: 5487059 - DNA, 25 bp, Homo sapien
gaaaaggcatgttagtgtgtaggta

SEQ ID NO: 5487060 - DNA, 25 bp, Homo sapien
gtgagcctgttaagagacctccacc

SEQ ID NO: 5487061 - DNA, 25 bp, Homo sapien
ggattaaatggaggaagatctagaa

SEQ ID NO: 5487062 - DNA, 25 bp, Homo sapien
acaaaagagcagaactgagcctgca

SEQ ID NO: 5487063 - DNA, 25 bp, Homo sapien
atagacaactgaattagaaagagca

SEQ ID NO: 5487064 - DNA, 25 bp, Homo sapien
tctgaaaggtgagtgagcctgttaa

SEQ ID NO: 5487065 - DNA, 25 bp, Homo sapien
gcctggctagcttaaaggggctcta

SEQ ID NO: 5487066 - DNA, 25 bp, Homo sapien
taggattaagtgagagacttcagct

SEQ ID NO: 5487067 - DNA, 25 bp, Homo sapien
atagtcagagtcactggttaaattt

SEQ ID NO: 5487068 - DNA, 25 bp, Homo sapien
aaatttaaccagtgactctgactat

SEQ ID NO: 5487069 - DNA, 25 bp, Homo sapien
tggctgtgtgatcccgatgcagaag

SEQ ID NO: 5487070 - DNA, 25 bp, Homo sapien
ggcagtcaaagtcaaatgtttctct

SEQ ID NO: 5487071 - DNA, 25 bp, Homo sapien
accaactgggcagtcctgctgatgg

SEQ ID NO: 5487072 - DNA, 25 bp, Homo sapien
gcaaaagtggagtcatcgctatttc

SEQ ID NO: 5487073 - DNA, 25 bp, Homo sapien
gtggtcaatggagtgtgctcaccaa

SEQ ID NO: 5487074 - DNA, 25 bp, Homo sapien
ctgctttgttcaaggtgccacaggg

SEQ ID NO: 5487075 - DNA, 25 bp, Homo sapien
agaaagacgaccaactgcacacttt

SEQ ID NO: 5487076 - DNA, 25 bp, Homo sapien
ttactatcctaaagaaaggagaaga

SEQ ID NO: 5487077 - DNA, 25 bp, Homo sapien
atgtattctgaagggaaagttaagt

SEQ ID NO: 5487078 - DNA, 25 bp, Homo sapien
gtgctcaccaactgggcagtcctgc

SEQ ID NO: 5487079 - DNA, 25 bp, Homo sapien
aagtctgagcaaaagcagtaacatc

SEQ ID NO: 5487080 - DNA, 25 bp, Homo sapien
tccttgtgatgaagtagaaaaagcc

SEQ ID NO: 5487081 - DNA, 25 bp, Homo sapien
tagggtgattcaaagtttcaggaaa

SEQ ID NO: 5487082 - DNA, 25 bp, Homo sapien
aagaatgccaaaaaatacagagctc

SEQ ID NO: 5487083 - DNA, 25 bp, Homo sapien
ttgaaatgtttgaaatacgtcgagc

SEQ ID NO: 5487084 - DNA, 25 bp, Homo sapien
gataagtggccagctacactggatt

SEQ ID NO: 5487085 - DNA, 25 bp, Homo sapien
ttcaatcagtaagagcacataagtc

SEQ ID NO: 5487086 - DNA, 25 bp, Homo sapien
ctgacaggtgaattttaaggataaa

SEQ ID NO: 5487087 - DNA, 25 bp, Homo sapien
tagaaaaagccctggataagtggcc

SEQ ID NO: 5487088 - DNA, 25 bp, Homo sapien
caggaaaaagaaaattcccagtatc

SEQ ID NO: 5487089 - DNA, 25 bp, Homo sapien
aaggataaaaaaagcagacactttc

SEQ ID NO: 5487090 - DNA, 25 bp, Homo sapien
aagtgctgtggtattaaaatgtgat

SEQ ID NO: 5487091 - DNA, 25 bp, Homo sapien
gcacaagccagaatgcaaaacttca

SEQ ID NO: 5487092 - DNA, 25 bp, Homo sapien
tgtgtgctggacctgactctcggtc

SEQ ID NO: 5487093 - DNA, 25 bp, Homo sapien
ctaggaaggtctgtcatgctatgtc

SEQ ID NO: 5487094 - DNA, 25 bp, Homo sapien
agaacatgtctggctgtacgtctga

SEQ ID NO: 5487095 - DNA, 25 bp, Homo sapien
agctacaacacacaaggtgattttt

SEQ ID NO: 5487096 - DNA, 25 bp, Homo sapien
aaagtcaagtcctacggtgtcgcga

SEQ ID NO: 5487097 - DNA, 25 bp, Homo sapien
atctgaacagaatcggaaaaatgcc

SEQ ID NO: 5487098 - DNA, 25 bp, Homo sapien
ccctttcccaggtgtgtgctggacc

SEQ ID NO: 5487099 - DNA, 25 bp, Homo sapien
cactgtgaacccgaccaaacactct

SEQ ID NO: 5487100 - DNA, 25 bp, Homo sapien
ttttcttcaaagagcgtgagggtga

SEQ ID NO: 5487101 - DNA, 25 bp, Homo sapien
tgaaaaggcggtcgctgtcatctga

SEQ ID NO: 5487102 - DNA, 25 bp, Homo sapien
caaggccataaatttgggctgttta

SEQ ID NO: 5487103 - DNA, 25 bp, Homo sapien
gtcatgcagtaagtccaaggccata

SEQ ID NO: 5487104 - DNA, 25 bp, Homo sapien
ggtccagcccaaggttaagactgca

SEQ ID NO: 5487105 - DNA, 25 bp, Homo sapien
gcattccatgacaggtaaccaggcc

SEQ ID NO: 5487106 - DNA, 25 bp, Homo sapien
gtttacatacacttaggtccagccc

SEQ ID NO: 5487107 - DNA, 25 bp, Homo sapien
tggcaaaccaccactgcagcattcc

SEQ ID NO: 5487108 - DNA, 25 bp, Homo sapien
taatagtgctacaaagcggccaaaa

SEQ ID NO: 5487109 - DNA, 25 bp, Homo sapien
ctatgagcataggcatgaaaacaaa

SEQ ID NO: 5487110 - DNA, 25 bp, Homo sapien
ctttcatcaggtcttgagaaggcat

SEQ ID NO: 5487111 - DNA, 25 bp, Homo sapien
agcggccaaaactgtaagcaactga

SEQ ID NO: 5487112 - DNA, 25 bp, Homo sapien
gtaaccaggccatgtgtcatgcagt

SEQ ID NO: 5487113 - DNA, 25 bp, Homo sapien
tccagaaaaacagagtcgctgtgta

SEQ ID NO: 5487114 - DNA, 25 bp, Homo sapien
ttggtcacaaggacatcgcacagta

SEQ ID NO: 5487115 - DNA, 25 bp, Homo sapien
gtggtcgtgaaaattggactgttgc

SEQ ID NO: 5487116 - DNA, 25 bp, Homo sapien
atgggcgtatcaaaatatgggatgt

SEQ ID NO: 5487117 - DNA, 25 bp, Homo sapien
gtggagatatagtctggagtcttgc

SEQ ID NO: 5487118 - DNA, 25 bp, Homo sapien
tagtgatggtggtcagaaaaataag

SEQ ID NO: 5487119 - DNA, 25 bp, Homo sapien
aaagcttgttccgtggtcccagtgc

SEQ ID NO: 5487120 - DNA, 25 bp, Homo sapien
tggtagatcatactgaagtggtcag

SEQ ID NO: 5487121 - DNA, 25 bp, Homo sapien
tcttgctacagggttgaacaatggg

SEQ ID NO: 5487122 - DNA, 25 bp, Homo sapien
atggccagctttcccccgagggtca

SEQ ID NO: 5487123 - DNA, 25 bp, Homo sapien
gtgtaaatatagaatggcatcgctt

SEQ ID NO: 5487124 - DNA, 25 bp, Homo sapien
tgctgtggatgtttttcgaaggata

SEQ ID NO: 5487125 - DNA, 25 bp, Homo sapien
tgtggggaaatcctcattgacgatt

SEQ ID NO: 5487126 - DNA, 25 bp, Homo sapien
ttcctcagacatactccatagatat

SEQ ID NO: 5487127 - DNA, 25 bp, Homo sapien
ttatgttggttgggaataagaaaga

SEQ ID NO: 5487128 - DNA, 25 bp, Homo sapien
gggtgatcagttatgaagaagggaa

SEQ ID NO: 5487129 - DNA, 25 bp, Homo sapien
catgctcggtgatgtgattctgctg

SEQ ID NO: 5487130 - DNA, 25 bp, Homo sapien
tgaagtgattaaagttatccatggc

SEQ ID NO: 5487131 - DNA, 25 bp, Homo sapien
agtcttcatgctcggtgatgtgatt

SEQ ID NO: 5487132 - DNA, 25 bp, Homo sapien
gggaataagaaagacctgcatatgg

SEQ ID NO: 5487133 - DNA, 25 bp, Homo sapien
gacctgcatatggaaagggtgatca

SEQ ID NO: 5487134 - DNA, 25 bp, Homo sapien
tgtggactcctacgatccaaccata

SEQ ID NO: 5487135 - DNA, 25 bp, Homo sapien
aactgtgccagaaatttgaacctta

SEQ ID NO: 5487136 - DNA, 25 bp, Homo sapien
ttaacgaacctgaagtgcagagtag

SEQ ID NO: 5487137 - DNA, 25 bp, Homo sapien
tagtgccgacctactgctggctaac

SEQ ID NO: 5487138 - DNA, 25 bp, Homo sapien
taccaaaagtgaaaccatgctgcta

SEQ ID NO: 5487139 - DNA, 25 bp, Homo sapien
aagaagttgtcttttgggggtgcta

SEQ ID NO: 5487140 - DNA, 25 bp, Homo sapien
taaccgtggaaaacactagtgccga

SEQ ID NO: 5487141 - DNA, 25 bp, Homo sapien
acctgtcaaaggtgataaccgtgga

SEQ ID NO: 5487142 - DNA, 25 bp, Homo sapien
aggaaagcagttgccatatacattt

SEQ ID NO: 5487143 - DNA, 25 bp, Homo sapien
tacaatgggagtaacatagaaaacc

SEQ ID NO: 5487144 - DNA, 25 bp, Homo sapien
aacacctcctcatggggtggcttcc

SEQ ID NO: 5487145 - DNA, 25 bp, Homo sapien
tactgctggctaacatgtaagctac

SEQ ID NO: 5487146 - DNA, 25 bp, Homo sapien
tggtcaactccttggaagtctgctc

SEQ ID NO: 5487147 - DNA, 25 bp, Homo sapien
aaaatgaatgctagaaaggaatatt

SEQ ID NO: 5487148 - DNA, 25 bp, Homo sapien
aaggggctgtatcacaagcatagct

SEQ ID NO: 5487149 - DNA, 25 bp, Homo sapien
gtgattcccacagaaaaaggaaatg

SEQ ID NO: 5487150 - DNA, 25 bp, Homo sapien
aatagtcattgttaaggaagtcctt

SEQ ID NO: 5487151 - DNA, 25 bp, Homo sapien
acaagcatagctctggaatgaaggg

SEQ ID NO: 5487152 - DNA, 25 bp, Homo sapien
actggaaaggtgaccagactagtca

SEQ ID NO: 5487153 - DNA, 25 bp, Homo sapien
gttacatgattaaggctcaacctgt

SEQ ID NO: 5487154 - DNA, 25 bp, Homo sapien
tgatcctgtaactggaaaggtgacc

SEQ ID NO: 5487155 - DNA, 25 bp, Homo sapien
gactagtcacaaactggtcaactcc

SEQ ID NO: 5487156 - DNA, 25 bp, Homo sapien
tggaatgaagggaactaacatccta

SEQ ID NO: 5487157 - DNA, 25 bp, Homo sapien
ggtctaagatgcaattttcctccat

SEQ ID NO: 5487158 - DNA, 25 bp, Homo sapien
atagcttacagtgacaatgtagtat

SEQ ID NO: 5487159 - DNA, 25 bp, Homo sapien
aagttagctaacaagatgatgtttc

SEQ ID NO: 5487160 - DNA, 25 bp, Homo sapien
gacctgtgccttcgtgcctatttgc

SEQ ID NO: 5487161 - DNA, 25 bp, Homo sapien
caatgtagtattttagacctgtgcc

SEQ ID NO: 5487162 - DNA, 25 bp, Homo sapien
gtgtaaagtttgtgtgaacagggaa

SEQ ID NO: 5487163 - DNA, 25 bp, Homo sapien
tactttcaaaacacggcatctctct

SEQ ID NO: 5487164 - DNA, 25 bp, Homo sapien
aatcatcagattaaagtgtaaagtt

SEQ ID NO: 5487165 - DNA, 25 bp, Homo sapien
tgtacactgcatataaaaatggtct

SEQ ID NO: 5487166 - DNA, 25 bp, Homo sapien
tctagcccagcaaattgtacactgc

SEQ ID NO: 5487167 - DNA, 25 bp, Homo sapien
gtgtgaacagggaaattagatcatt

SEQ ID NO: 5487168 - DNA, 25 bp, Homo sapien
gagccaggattgaatacttggaccc

SEQ ID NO: 5487169 - DNA, 25 bp, Homo sapien
gaccccaggtctggagattgggata

SEQ ID NO: 5487170 - DNA, 25 bp, Homo sapien
atccccaccggctcaactcgcatct

SEQ ID NO: 5487171 - DNA, 25 bp, Homo sapien
gagccggtgactacgcactcctttg

SEQ ID NO: 5487172 - DNA, 25 bp, Homo sapien
cctggccttcattgcgggaattctc

SEQ ID NO: 5487173 - DNA, 25 bp, Homo sapien
accccgagaagttcgcggactcgga

SEQ ID NO: 5487174 - DNA, 25 bp, Homo sapien
tggaagagtgtgacagatgttatca

SEQ ID NO: 5487175 - DNA, 25 bp, Homo sapien
gacggtgttcctggccattcccctg

SEQ ID NO: 5487176 - DNA, 25 bp, Homo sapien
tccattgtgtacgagcgtaggacga

SEQ ID NO: 5487177 - DNA, 25 bp, Homo sapien
ttcagtgcagacaatatggaagagt

SEQ ID NO: 5487178 - DNA, 25 bp, Homo sapien
tgtcagcctgcaactgagccaggat

SEQ ID NO: 5487179 - DNA, 25 bp, Homo sapien
ccagcgcccctgcgagtactctctg

SEQ ID NO: 5487180 - DNA, 25 bp, Homo sapien
aaggagaggtttgcgttgtttctag

SEQ ID NO: 5487181 - DNA, 25 bp, Homo sapien
ttaatctcgagggtcttgagtgcag

SEQ ID NO: 5487182 - DNA, 25 bp, Homo sapien
ttgtttctagtaagacacagccctc

SEQ ID NO: 5487183 - DNA, 25 bp, Homo sapien
cagacggggttagcaccgttaatct

SEQ ID NO: 5487184 - DNA, 25 bp, Homo sapien
acagaaggagcaaaactaacatgaa

SEQ ID NO: 5487185 - DNA, 25 bp, Homo sapien
ggggctctcatgtccagtccaggcc

SEQ ID NO: 5487186 - DNA, 25 bp, Homo sapien
gccgagtcgccgagatttatgtctg

SEQ ID NO: 5487187 - DNA, 25 bp, Homo sapien
aactaacatgaacatagaaaggggg

SEQ ID NO: 5487188 - DNA, 25 bp, Homo sapien
gaaaagtcagcaacatggatatggt

SEQ ID NO: 5487189 - DNA, 25 bp, Homo sapien
gcaacggcctcctgaccttggtttc

SEQ ID NO: 5487190 - DNA, 25 bp, Homo sapien
atctaatttaagtgggacagttttc

SEQ ID NO: 5487191 - DNA, 25 bp, Homo sapien
aaaagcataacaacatttagagtac

SEQ ID NO: 5487192 - DNA, 25 bp, Homo sapien
agagtactgagttgttgaacaggac

SEQ ID NO: 5487193 - DNA, 25 bp, Homo sapien
gttgaacaggacataaatctggtat

SEQ ID NO: 5487194 - DNA, 25 bp, Homo sapien
agaaagtgagagaaagaatttccag

SEQ ID NO: 5487195 - DNA, 25 bp, Homo sapien
aaccagtcattattaaggcgcagat

SEQ ID NO: 5487196 - DNA, 25 bp, Homo sapien
tccaagattattatctgggaaggtc

SEQ ID NO: 5487197 - DNA, 25 bp, Homo sapien
tgttgcaaatgcatggtagacagct

SEQ ID NO: 5487198 - DNA, 25 bp, Homo sapien
ttattaaggcgcagattaaaagtta

SEQ ID NO: 5487199 - DNA, 25 bp, Homo sapien
ctgggaaggtcttattaaaagcata

SEQ ID NO: 5487200 - DNA, 25 bp, Homo sapien
agctgggaaaagagctccaagatta

SEQ ID NO: 5487201 - DNA, 25 bp, Homo sapien
gtgggagctgcggactcctttaacc

SEQ ID NO: 5487202 - DNA, 25 bp, Homo sapien
tgacatggtgtcaccctccaggcca

SEQ ID NO: 5487203 - DNA, 25 bp, Homo sapien
taaccgccggcataatcgctgactt

SEQ ID NO: 5487204 - DNA, 25 bp, Homo sapien
agctcagcccacatcaatgacaccc

SEQ ID NO: 5487205 - DNA, 25 bp, Homo sapien
ctttagtccagaggggaataaagaa

SEQ ID NO: 5487206 - DNA, 25 bp, Homo sapien
ctgactttcagctgtgcaccgacat

SEQ ID NO: 5487207 - DNA, 25 bp, Homo sapien
acatggagtgcagagctaaaaataa

SEQ ID NO: 5487208 - DNA, 25 bp, Homo sapien
ccctggcacatttctaaccgccggc

SEQ ID NO: 5487209 - DNA, 25 bp, Homo sapien
ctgaaccctgaaaccacatggagtg

SEQ ID NO: 5487210 - DNA, 25 bp, Homo sapien
aatcaaagcaaactctgacgggaat

SEQ ID NO: 5487211 - DNA, 25 bp, Homo sapien
gtgcaccgacatgttccccagctca

SEQ ID NO: 5487212 - DNA, 25 bp, Homo sapien
aaaaggcacccggagagaaacatag

SEQ ID NO: 5487213 - DNA, 25 bp, Homo sapien
ctatgtttctctccgggtgcctttt

SEQ ID NO: 5487214 - DNA, 25 bp, Homo sapien
tcaggggtgcagatgtctccctgca

SEQ ID NO: 5487215 - DNA, 25 bp, Homo sapien
ttggggagcagccctgtctccctct

SEQ ID NO: 5487216 - DNA, 25 bp, Homo sapien
acgcgtgcatgcgacgtcatagctc

SEQ ID NO: 5487217 - DNA, 25 bp, Homo sapien
cttgggctctggaaggtcagagcag

SEQ ID NO: 5487218 - DNA, 25 bp, Homo sapien
tccctctgtcctccaggggagcagc

SEQ ID NO: 5487219 - DNA, 25 bp, Homo sapien
atatccccctggggcagttggttgc

SEQ ID NO: 5487220 - DNA, 25 bp, Homo sapien
aggatccaagcttacgtacgcgtgc

SEQ ID NO: 5487221 - DNA, 25 bp, Homo sapien
gggggcactcctggctgcccaactc

SEQ ID NO: 5487222 - DNA, 25 bp, Homo sapien
cagcagagcagactgcccgttttcc

SEQ ID NO: 5487223 - DNA, 25 bp, Homo sapien
gaggcctggactgcctgtggccttt

SEQ ID NO: 5487224 - DNA, 25 bp, Homo sapien
tgtggcctttgtcgagtcactgccc

SEQ ID NO: 5487225 - DNA, 25 bp, Homo sapien
tgcctcagccaggccctgagatggg

SEQ ID NO: 5487226 - DNA, 25 bp, Homo sapien
atgcacgcgtacgtaagcttggatc

SEQ ID NO: 5487227 - DNA, 25 bp, Homo sapien
ggggtgcttcctcctcaggcccagc

SEQ ID NO: 5487228 - DNA, 25 bp, Homo sapien
tctgcacccctgagttgggcagcca

SEQ ID NO: 5487229 - DNA, 25 bp, Homo sapien
ccgggaatggataataaagatacta

SEQ ID NO: 5487230 - DNA, 25 bp, Homo sapien
ctctagagcggccgcctactactac

SEQ ID NO: 5487231 - DNA, 25 bp, Homo sapien
ccacaggcagtccaggcctctctct

SEQ ID NO: 5487232 - DNA, 25 bp, Homo sapien
ccagctgctcccctggaggacagag

SEQ ID NO: 5487233 - DNA, 25 bp, Homo sapien
tggtgcagggagacatctgcacccc

SEQ ID NO: 5487234 - DNA, 25 bp, Homo sapien
accaactgccccagggggatatggg

SEQ ID NO: 5487235 - DNA, 25 bp, Homo sapien
aaaacgggcagtctgctctgctgct

SEQ ID NO: 5487236 - DNA, 25 bp, Homo sapien
actacacaaatctatcaaataatgt

SEQ ID NO: 5487237 - DNA, 25 bp, Homo sapien
acattatttgatagatttgtgtagt

SEQ ID NO: 5487238 - DNA, 25 bp, Homo sapien
gtaacctctcagggctgtgcactcc

SEQ ID NO: 5487239 - DNA, 25 bp, Homo sapien
ggggaggcctaggctatgctcttta

SEQ ID NO: 5487240 - DNA, 25 bp, Homo sapien
gggccagcatgttttccaagggttc

SEQ ID NO: 5487241 - DNA, 25 bp, Homo sapien
cagttggcctctgatagtgggactg

SEQ ID NO: 5487242 - DNA, 25 bp, Homo sapien
tatgccatgctagatgcaggtgacc

SEQ ID NO: 5487243 - DNA, 25 bp, Homo sapien
gagagagatttctaagggccacttc

SEQ ID NO: 5487244 - DNA, 25 bp, Homo sapien
atggacaaggcttagagccaggttg

SEQ ID NO: 5487245 - DNA, 25 bp, Homo sapien
gcgtgatcttgggcaggccatgtaa

SEQ ID NO: 5487246 - DNA, 25 bp, Homo sapien
gagcatcaaggagcaatagtctggt

SEQ ID NO: 5487247 - DNA, 25 bp, Homo sapien
gatgaaagagcattactagaggagt

SEQ ID NO: 5487248 - DNA, 25 bp, Homo sapien
cttctgcctgtcagtcagggaggga

SEQ ID NO: 5487249 - DNA, 25 bp, Homo sapien
gacacccttcactggggacgcccgt

SEQ ID NO: 5487250 - DNA, 25 bp, Homo sapien
acgggcgtccccagtgaagggtgtc

SEQ ID NO: 5487251 - DNA, 25 bp, Homo sapien
gatttacataatagtccattaagac

SEQ ID NO: 5487252 - DNA, 25 bp, Homo sapien
gtcttaatggactattatgtaaatc

SEQ ID NO: 5487253 - DNA, 25 bp, Homo sapien
atttacataatagtccattaagaca

SEQ ID NO: 5487254 - DNA, 25 bp, Homo sapien
tgtcttaatggactattatgtaaat

SEQ ID NO: 5487255 - DNA, 25 bp, Homo sapien
gtatatataagtccaagagagactc

SEQ ID NO: 5487256 - DNA, 25 bp, Homo sapien
caagtacttggccaaaacagcagga

SEQ ID NO: 5487257 - DNA, 25 bp, Homo sapien
aaggtcagacatgcaagacaagtac

SEQ ID NO: 5487258 - DNA, 25 bp, Homo sapien
ataggaaagagaattaggttatgct

SEQ ID NO: 5487259 - DNA, 25 bp, Homo sapien
aacagcaggattctaactagtgtaa

SEQ ID NO: 5487260 - DNA, 25 bp, Homo sapien
tgggcacagcctttcagagcattta

SEQ ID NO: 5487261 - DNA, 25 bp, Homo sapien
ggagtgagcgagctttgtaaactac

SEQ ID NO: 5487262 - DNA, 25 bp, Homo sapien
gtagtatgggtatattaagtggttc

SEQ ID NO: 5487263 - DNA, 25 bp, Homo sapien
attagtatgctatgatccaccccag

SEQ ID NO: 5487264 - DNA, 25 bp, Homo sapien
attgttcaaggtagtatgggtatat

SEQ ID NO: 5487265 - DNA, 25 bp, Homo sapien
tccaccccagcttctgcaaggtcag

SEQ ID NO: 5487266 - DNA, 25 bp, Homo sapien
ggcatcgaacatctgctgggtgagc

SEQ ID NO: 5487267 - DNA, 25 bp, Homo sapien
gggatccactccacgaagtagctgc

SEQ ID NO: 5487268 - DNA, 25 bp, Homo sapien
caccttcacgttgttggggatccac

SEQ ID NO: 5487269 - DNA, 25 bp, Homo sapien
ggatggccagcatctgctcgtccac

SEQ ID NO: 5487270 - DNA, 25 bp, Homo sapien
cggagatgcgcttgaacagctcctg

SEQ ID NO: 5487271 - DNA, 25 bp, Homo sapien
aacagctcctggatggccgtgctgt

SEQ ID NO: 5487272 - DNA, 25 bp, Homo sapien
ggtactcggacaccaggtcgttcat

SEQ ID NO: 5487273 - DNA, 25 bp, Homo sapien
tcggcctcggtgaactccatctcgt

SEQ ID NO: 5487274 - DNA, 25 bp, Homo sapien
gtcgcaggcggccatcatgttcttg

SEQ ID NO: 5487275 - DNA, 25 bp, Homo sapien
atgccctcgcccgtgtaccagtgca

SEQ ID NO: 5487276 - DNA, 25 bp, Homo sapien
ggatgtcacacacggccaccttcac

SEQ ID NO: 5487277 - DNA, 25 bp, Homo sapien
aaaatggttatgaggaattgagaag

SEQ ID NO: 5487278 - DNA, 25 bp, Homo sapien
atggaataccataaagccagagttt

SEQ ID NO: 5487279 - DNA, 25 bp, Homo sapien
tacagtagaagagcacccctatatc

SEQ ID NO: 5487280 - DNA, 25 bp, Homo sapien
aggtctaaactttgcaacactggta

SEQ ID NO: 5487281 - DNA, 25 bp, Homo sapien
taacatgtggcatctttgtggcttc

SEQ ID NO: 5487282 - DNA, 25 bp, Homo sapien
tcattgttcactatggaggggctac

SEQ ID NO: 5487283 - DNA, 25 bp, Homo sapien
ggaggggctacaaatacacttctga

SEQ ID NO: 5487284 - DNA, 25 bp, Homo sapien
aaagtgattaaataagggagtgtgg

SEQ ID NO: 5487285 - DNA, 25 bp, Homo sapien
acactggtaaaaatggttatgagga

SEQ ID NO: 5487286 - DNA, 25 bp, Homo sapien
tttcaaaacatcaaaggcacttacc

SEQ ID NO: 5487287 - DNA, 25 bp, Homo sapien
aaggccccactcttcagtcactcat

SEQ ID NO: 5487288 - DNA, 25 bp, Homo sapien
gttctcgtgaaaatcaaagggcagc

SEQ ID NO: 5487289 - DNA, 25 bp, Homo sapien
catacagaaattcacgggcagagat

SEQ ID NO: 5487290 - DNA, 25 bp, Homo sapien
gggcagctttggtgctcagagattc

SEQ ID NO: 5487291 - DNA, 25 bp, Homo sapien
aggtgaggtaacagcacacacatac

SEQ ID NO: 5487292 - DNA, 25 bp, Homo sapien
ttactagggtcatgtctgcaggtga

SEQ ID NO: 5487293 - DNA, 25 bp, Homo sapien
gggaagacagtaagtactcttgcgt

SEQ ID NO: 5487294 - DNA, 25 bp, Homo sapien
tgcgtgacgattgtcagacacagac

SEQ ID NO: 5487295 - DNA, 25 bp, Homo sapien
gagatgccaccgcagcatcaccgtc

SEQ ID NO: 5487296 - DNA, 25 bp, Homo sapien
tagactgggttcctgcttgcctgca

SEQ ID NO: 5487297 - DNA, 25 bp, Homo sapien
aaaagtgttagcatagagaaaggca

SEQ ID NO: 5487298 - DNA, 25 bp, Homo sapien
actaggaaaagctaaacacagacaa

SEQ ID NO: 5487299 - DNA, 25 bp, Homo sapien
tatgattcataaccaaaactagaca

SEQ ID NO: 5487300 - DNA, 25 bp, Homo sapien
tgtctagttttggttatgaatcata

SEQ ID NO: 5487301 - DNA, 25 bp, Homo sapien
agacgtttaagatgggaccagaaag

SEQ ID NO: 5487302 - DNA, 25 bp, Homo sapien
atgtttataactgagaaggctgggg

SEQ ID NO: 5487303 - DNA, 25 bp, Homo sapien
gtgcagcacaacagaagacgtttaa

SEQ ID NO: 5487304 - DNA, 25 bp, Homo sapien
ccccaaagcatctgagacaccatct

SEQ ID NO: 5487305 - DNA, 25 bp, Homo sapien
ccagcccgatgacatgtgaccaggg

SEQ ID NO: 5487306 - DNA, 25 bp, Homo sapien
ctgagagatctggccagcatgttta

SEQ ID NO: 5487307 - DNA, 25 bp, Homo sapien
cagtggaagtgctataaccagccga

SEQ ID NO: 5487308 - DNA, 25 bp, Homo sapien
aacgaatggtctgccccaagccttc

SEQ ID NO: 5487309 - DNA, 25 bp, Homo sapien
agcctaagaggactgactcaaattc

SEQ ID NO: 5487310 - DNA, 25 bp, Homo sapien
gagagaataatggggtcccaccatc

SEQ ID NO: 5487311 - DNA, 25 bp, Homo sapien
gaccagaaagaagaatgtatagctc

SEQ ID NO: 5487312 - DNA, 25 bp, Homo sapien
atgtgcgaatccataccggagacag

SEQ ID NO: 5487313 - DNA, 25 bp, Homo sapien
ttaaagaagatgatgctccaagaac

SEQ ID NO: 5487314 - DNA, 25 bp, Homo sapien
cctcctggaggaatacctggcattg

SEQ ID NO: 5487315 - DNA, 25 bp, Homo sapien
gagggcgagttctcggtcaccatgt

SEQ ID NO: 5487316 - DNA, 25 bp, Homo sapien
agacaggccctatgtgtgccccttc

SEQ ID NO: 5487317 - DNA, 25 bp, Homo sapien
gaaaacatctgcacacccacggtcc

SEQ ID NO: 5487318 - DNA, 25 bp, Homo sapien
ttcagggataactcggccatgagaa

SEQ ID NO: 5487319 - DNA, 25 bp, Homo sapien
aggctgcacaaagatgttcagggat

SEQ ID NO: 5487320 - DNA, 25 bp, Homo sapien
tttcagtgcacgttcgaaggctgtg

SEQ ID NO: 5487321 - DNA, 25 bp, Homo sapien
agaacagatcattggagagaactca

SEQ ID NO: 5487322 - DNA, 25 bp, Homo sapien
gaccatgagacagtggttgaagaac

SEQ ID NO: 5487323 - DNA, 25 bp, Homo sapien
gggcgaccgagcctttggacccgcg

SEQ ID NO: 5487324 - DNA, 25 bp, Homo sapien
cgcgggtccaaaggctcggtcgccc

SEQ ID NO: 5487325 - DNA, 25 bp, Homo sapien
tgaacagaagagtgagcttactgca

SEQ ID NO: 5487326 - DNA, 25 bp, Homo sapien
tattggggagacatttcgttactac

SEQ ID NO: 5487327 - DNA, 25 bp, Homo sapien
actgcaaaccacaggctggacagta

SEQ ID NO: 5487328 - DNA, 25 bp, Homo sapien
aattcatgcttactgggagggaagt

SEQ ID NO: 5487329 - DNA, 25 bp, Homo sapien
acatgcctaagctccaaagggaatc

SEQ ID NO: 5487330 - DNA, 25 bp, Homo sapien
ctgaacataccaacaggtagcagtc

SEQ ID NO: 5487331 - DNA, 25 bp, Homo sapien
ctaggtaaaggccctcctgtggtca

SEQ ID NO: 5487332 - DNA, 25 bp, Homo sapien
acaggtagcagtccagttaagctct

SEQ ID NO: 5487333 - DNA, 25 bp, Homo sapien
gcatatcctcactgagtggagctca

SEQ ID NO: 5487334 - DNA, 25 bp, Homo sapien
ggacagtagagggtgcatatcctca

SEQ ID NO: 5487335 - DNA, 25 bp, Homo sapien
gcatgaacctaatgaagccctgaac

SEQ ID NO: 5487336 - DNA, 25 bp, Homo sapien
caatggttctcaaatctctgtgtgc

SEQ ID NO: 5487337 - DNA, 25 bp, Homo sapien
taaaatactaagtggcaaatgctat

SEQ ID NO: 5487338 - DNA, 25 bp, Homo sapien
tttccaaagagatgtggtccaaacc

SEQ ID NO: 5487339 - DNA, 25 bp, Homo sapien
tctaagtggcaaaacaatctattac

SEQ ID NO: 5487340 - DNA, 25 bp, Homo sapien
agtggcaaatgctattctaagtggc

SEQ ID NO: 5487341 - DNA, 25 bp, Homo sapien
caaaactgacaataaatactccaac

SEQ ID NO: 5487342 - DNA, 25 bp, Homo sapien
tgtggtccaaaccctctgaaggctt

SEQ ID NO: 5487343 - DNA, 25 bp, Homo sapien
gctgaacataaaagagacaccattg

SEQ ID NO: 5487344 - DNA, 25 bp, Homo sapien
attatcacggcactttgtcaaatgg

SEQ ID NO: 5487345 - DNA, 25 bp, Homo sapien
aatggaagcagcattcagaacaatg

SEQ ID NO: 5487346 - DNA, 25 bp, Homo sapien
aaaagagacaccattgtttgcttct

SEQ ID NO: 5487347 - DNA, 25 bp, Homo sapien
gtaccatgtggcaaaggtacagcga

SEQ ID NO: 5487348 - DNA, 25 bp, Homo sapien
aatgtggataccgcctcactcacac

SEQ ID NO: 5487349 - DNA, 25 bp, Homo sapien
aagacagaaaagctacttctagcct

SEQ ID NO: 5487350 - DNA, 25 bp, Homo sapien
aaaccaggcattccactcggcactg

SEQ ID NO: 5487351 - DNA, 25 bp, Homo sapien
tacaacaaagcaccacagctgaacc

SEQ ID NO: 5487352 - DNA, 25 bp, Homo sapien
agcaaaggccaggctgccttttaca

SEQ ID NO: 5487353 - DNA, 25 bp, Homo sapien
ttctagctggcaagcatacagtacc

SEQ ID NO: 5487354 - DNA, 25 bp, Homo sapien
gacttgaagttgagaatgtggatac

SEQ ID NO: 5487355 - DNA, 25 bp, Homo sapien
gtgctgcatcagtagacagaacttc

SEQ ID NO: 5487356 - DNA, 25 bp, Homo sapien
gggcttgagacccaggctccatctt

SEQ ID NO: 5487357 - DNA, 25 bp, Homo sapien
cacagctgaacccagtccctcctcc

SEQ ID NO: 5487358 - DNA, 25 bp, Homo sapien
ggccctgcaccagcgctcgacggcc

SEQ ID NO: 5487359 - DNA, 25 bp, Homo sapien
ggccgtcgagcgctggtgcagggcc

SEQ ID NO: 5487360 - DNA, 25 bp, Homo sapien
ccggccctgcaccagcgctcgacgg

SEQ ID NO: 5487361 - DNA, 25 bp, Homo sapien
ccgtcgagcgctggtgcagggccgg

SEQ ID NO: 5487362 - DNA, 25 bp, Homo sapien
ggaaagcccattagaaagtcagggc

SEQ ID NO: 5487363 - DNA, 25 bp, Homo sapien
ctccctgcttccttaggagcagctc

SEQ ID NO: 5487364 - DNA, 25 bp, Homo sapien
ccagatcctttgctttggaggcctt

SEQ ID NO: 5487365 - DNA, 25 bp, Homo sapien
actgtcgctatgccctgcctgcctg

SEQ ID NO: 5487366 - DNA, 25 bp, Homo sapien
atttccttgtagacagagggtgagg

SEQ ID NO: 5487367 - DNA, 25 bp, Homo sapien
agcagggaaactggtccagatcctt

SEQ ID NO: 5487368 - DNA, 25 bp, Homo sapien
caagccccatgctattctcagggcc

SEQ ID NO: 5487369 - DNA, 25 bp, Homo sapien
tgctattctcagggccagagaaacc

SEQ ID NO: 5487370 - DNA, 25 bp, Homo sapien
cacaccactaataataaataaccac

SEQ ID NO: 5487371 - DNA, 25 bp, Homo sapien
tcccacactgtcgctatgccctgcc

SEQ ID NO: 5487372 - DNA, 25 bp, Homo sapien
gcagctcccagtgccacaccactaa

SEQ ID NO: 5487373 - DNA, 25 bp, Homo sapien
agacgcccctgaaggcctccagtgt

SEQ ID NO: 5487374 - DNA, 25 bp, Homo sapien
acactggaggccttcaggggcgtct

SEQ ID NO: 5487375 - DNA, 25 bp, Homo sapien
aaacaaaagaccaccctgaataatg

SEQ ID NO: 5487376 - DNA, 25 bp, Homo sapien
tctgactgtccgctgcctattcccc

SEQ ID NO: 5487377 - DNA, 25 bp, Homo sapien
gtacactgaaagaaactactgagag

SEQ ID NO: 5487378 - DNA, 25 bp, Homo sapien
ctgttgagtattttgagcgaacttc

SEQ ID NO: 5487379 - DNA, 25 bp, Homo sapien
gtaaatgtaccggcactgaacaagc

SEQ ID NO: 5487380 - DNA, 25 bp, Homo sapien
tatgatgaccacagtagtattctac

SEQ ID NO: 5487381 - DNA, 25 bp, Homo sapien
atatgcacaaaatgatctgaccaca

SEQ ID NO: 5487382 - DNA, 25 bp, Homo sapien
aaattgtgggtaataactcactgct

SEQ ID NO: 5487383 - DNA, 25 bp, Homo sapien
atataagaacaattggcatggcact

SEQ ID NO: 5487384 - DNA, 25 bp, Homo sapien
acttaaagactgcaaaaaacagaac

SEQ ID NO: 5487385 - DNA, 25 bp, Homo sapien
tccaatccaggctgcatatgcacaa

SEQ ID NO: 5487386 - DNA, 25 bp, Homo sapien
ttatccagcaacacagaggtcagca

SEQ ID NO: 5487387 - DNA, 25 bp, Homo sapien
ccggcgaaggtatgatatcacacca

SEQ ID NO: 5487388 - DNA, 25 bp, Homo sapien
actgggagacttggagattttatca

SEQ ID NO: 5487389 - DNA, 25 bp, Homo sapien
agctcccactgtgggcacccaaacc

SEQ ID NO: 5487390 - DNA, 25 bp, Homo sapien
acagggtcagctctttcacgaaaac

SEQ ID NO: 5487391 - DNA, 25 bp, Homo sapien
ttaaaaatccacacctcagcatcac

SEQ ID NO: 5487392 - DNA, 25 bp, Homo sapien
agattttatcagggctgtggaggac

SEQ ID NO: 5487393 - DNA, 25 bp, Homo sapien
agcagccagaacagtatctttagtc

SEQ ID NO: 5487394 - DNA, 25 bp, Homo sapien
tcctccagagatagatgactcatta

SEQ ID NO: 5487395 - DNA, 25 bp, Homo sapien
tcagcatcaccctgccaaggggtgg

SEQ ID NO: 5487396 - DNA, 25 bp, Homo sapien
ggggtggggtatgtacacatcccca

SEQ ID NO: 5487397 - DNA, 25 bp, Homo sapien
cacgaacaagtaacagtttcaaaac

SEQ ID NO: 5487398 - DNA, 25 bp, Homo sapien
gttttgaaactgttacttgttcgtg

SEQ ID NO: 5487399 - DNA, 25 bp, Homo sapien
ttggctggtgagcacatttcagttc

SEQ ID NO: 5487400 - DNA, 25 bp, Homo sapien
aaaagggtttctgaagtatcaagtc

SEQ ID NO: 5487401 - DNA, 25 bp, Homo sapien
caagtatctgagtaacaaatgtcct

SEQ ID NO: 5487402 - DNA, 25 bp, Homo sapien
ctgcttgtgggtcaataaaaagggt

SEQ ID NO: 5487403 - DNA, 25 bp, Homo sapien
acacccacacaccccactcaacctt

SEQ ID NO: 5487404 - DNA, 25 bp, Homo sapien
gtcacaggtttggttaactgccctc

SEQ ID NO: 5487405 - DNA, 25 bp, Homo sapien
aaccctaagggcaggtagtattcta

SEQ ID NO: 5487406 - DNA, 25 bp, Homo sapien
gaggagatatgattagtcacaggtt

SEQ ID NO: 5487407 - DNA, 25 bp, Homo sapien
ctatctcctggctggctcatcacat

SEQ ID NO: 5487408 - DNA, 25 bp, Homo sapien
tcctggagcaataaagtaagaagta

SEQ ID NO: 5487409 - DNA, 25 bp, Homo sapien
cttcacacagtaaatgcagcccatc

SEQ ID NO: 5487410 - DNA, 25 bp, Homo sapien
caggccccgcgggacggcgtcgccc

SEQ ID NO: 5487411 - DNA, 25 bp, Homo sapien
gggcgacgccgtcccgcggggcctg

SEQ ID NO: 5487412 - DNA, 25 bp, Homo sapien
gccaggccccgcgggacggcgtcgc

SEQ ID NO: 5487413 - DNA, 25 bp, Homo sapien
gcgacgccgtcccgcggggcctggc

SEQ ID NO: 5487414 - DNA, 25 bp, Homo sapien
acgcgccaggccccgcgggacggcg

SEQ ID NO: 5487415 - DNA, 25 bp, Homo sapien
cgccgtcccgcggggcctggcgcgt

SEQ ID NO: 5487416 - DNA, 25 bp, Homo sapien
ggaggcttgtttaaactacggatgc

SEQ ID NO: 5487417 - DNA, 25 bp, Homo sapien
ccgagcacaagccaagaagtttgcg

SEQ ID NO: 5487418 - DNA, 25 bp, Homo sapien
cgccaccaaaatgtaaattcgaacc

SEQ ID NO: 5487419 - DNA, 25 bp, Homo sapien
cctcataagcagcgaccttgtggca

SEQ ID NO: 5487420 - DNA, 25 bp, Homo sapien
cacgatgaacctcatgaactgggag

SEQ ID NO: 5487421 - DNA, 25 bp, Homo sapien
ccaagaagtttgcgccctcataagc

SEQ ID NO: 5487422 - DNA, 25 bp, Homo sapien
caaaaaatcccgatggcacgatgaa

SEQ ID NO: 5487423 - DNA, 25 bp, Homo sapien
ggagtgcgccattccaggaaagaaa

SEQ ID NO: 5487424 - DNA, 25 bp, Homo sapien
gagggactttgaacatgtcggggat

SEQ ID NO: 5487425 - DNA, 25 bp, Homo sapien
acccatttggtttcgtggctgtccc

SEQ ID NO: 5487426 - DNA, 25 bp, Homo sapien
cgtggctgtcccaacaaaaaatccc

SEQ ID NO: 5487427 - DNA, 25 bp, Homo sapien
ccctctgagtcaaggtccaactcga

SEQ ID NO: 5487428 - DNA, 25 bp, Homo sapien
tcgagttggaccttgactcagaggg

SEQ ID NO: 5487429 - DNA, 25 bp, Homo sapien
ataaaaacacagtagggctttgcac

SEQ ID NO: 5487430 - DNA, 25 bp, Homo sapien
tgcaggggatgatgccttctgctca

SEQ ID NO: 5487431 - DNA, 25 bp, Homo sapien
ctgggggccagaccttctcccttca

SEQ ID NO: 5487432 - DNA, 25 bp, Homo sapien
cttcagtttccaagaccaaggccac

SEQ ID NO: 5487433 - DNA, 25 bp, Homo sapien
tcctagctttgcccaggtccaaggc

SEQ ID NO: 5487434 - DNA, 25 bp, Homo sapien
gggggcgttcaagtatcgaacctca

SEQ ID NO: 5487435 - DNA, 25 bp, Homo sapien
ggtcactgccacctgagggtcatca

SEQ ID NO: 5487436 - DNA, 25 bp, Homo sapien
atgtcttatacagtgacggggtcac

SEQ ID NO: 5487437 - DNA, 25 bp, Homo sapien
caagaccaccccccagctcaaactg

SEQ ID NO: 5487438 - DNA, 25 bp, Homo sapien
tatcgaacctcacagagggccagtg

SEQ ID NO: 5487439 - DNA, 25 bp, Homo sapien
tagggctttgcacaagtggaatctc

SEQ ID NO: 5487440 - DNA, 25 bp, Homo sapien
ggaggtcacccgaggtacgtacacc

SEQ ID NO: 5487441 - DNA, 25 bp, Homo sapien
ggtgtacgtacctcgggtgacctcc

SEQ ID NO: 5487442 - DNA, 25 bp, Homo sapien
ggaggtggttgatacatgaaaaact

SEQ ID NO: 5487443 - DNA, 25 bp, Homo sapien
tggttaagaacatcagaatccggct

SEQ ID NO: 5487444 - DNA, 25 bp, Homo sapien
ggctgagtcttttgggtatggtgag

SEQ ID NO: 5487445 - DNA, 25 bp, Homo sapien
atccacaatcctgccagaggaccag

SEQ ID NO: 5487446 - DNA, 25 bp, Homo sapien
gtatggtgaggagctctatccacaa

SEQ ID NO: 5487447 - DNA, 25 bp, Homo sapien
ttcagaagcgcatctagccagcata

SEQ ID NO: 5487448 - DNA, 25 bp, Homo sapien
atttctggctctggtaaggttagtc

SEQ ID NO: 5487449 - DNA, 25 bp, Homo sapien
gactgacttactgtagagtcgagtc

SEQ ID NO: 5487450 - DNA, 25 bp, Homo sapien
tggtaaggttagtcctatgagaccc

SEQ ID NO: 5487451 - DNA, 25 bp, Homo sapien
aaatttagatgtgccgacacttccc

SEQ ID NO: 5487452 - DNA, 25 bp, Homo sapien
agccagcataatgatggatagcctc

SEQ ID NO: 5487453 - DNA, 25 bp, Homo sapien
gtgacataaattaaagagttacatt

SEQ ID NO: 5487454 - DNA, 25 bp, Homo sapien
aatgtaactctttaatttatgtcac

SEQ ID NO: 5487455 - DNA, 25 bp, Homo sapien
tgcactaaagtacaactatgatgtc

SEQ ID NO: 5487456 - DNA, 25 bp, Homo sapien
actctaggctatttggagtgttccc

SEQ ID NO: 5487457 - DNA, 25 bp, Homo sapien
attgtggtctacagagttaaatact

SEQ ID NO: 5487458 - DNA, 25 bp, Homo sapien
gctttcagggaatttggtgtgtaaa

SEQ ID NO: 5487459 - DNA, 25 bp, Homo sapien
gtcattagcagcattactgagcttt

SEQ ID NO: 5487460 - DNA, 25 bp, Homo sapien
gtggttacacactgagcagattgcc

SEQ ID NO: 5487461 - DNA, 25 bp, Homo sapien
agcatggcagcaagattacatcagt

SEQ ID NO: 5487462 - DNA, 25 bp, Homo sapien
tacaagtagtccaccttccaggtta

SEQ ID NO: 5487463 - DNA, 25 bp, Homo sapien
ttgcctcaagtgtaagttatggaac

SEQ ID NO: 5487464 - DNA, 25 bp, Homo sapien
atgcttgggtatcatgaaaacttcc

SEQ ID NO: 5487465 - DNA, 25 bp, Homo sapien
ctatgatgtctctactgcctctccc

SEQ ID NO: 5487466 - DNA, 25 bp, Homo sapien
ccgctacgcatttggccaagagacg

SEQ ID NO: 5487467 - DNA, 25 bp, Homo sapien
gcaaccactgaggcaaagtagctta

SEQ ID NO: 5487468 - DNA, 25 bp, Homo sapien
gcctccactgaggattaagagcaac

SEQ ID NO: 5487469 - DNA, 25 bp, Homo sapien
tggccaagagacgaatgtccctttg

SEQ ID NO: 5487470 - DNA, 25 bp, Homo sapien
ttcattgagaaacgctacgtggagc

SEQ ID NO: 5487471 - DNA, 25 bp, Homo sapien
agccctggagaacgttctaagtggt

SEQ ID NO: 5487472 - DNA, 25 bp, Homo sapien
aaggcgaatcccgacctacccatcc

SEQ ID NO: 5487473 - DNA, 25 bp, Homo sapien
gctgatcaggtaaccagagccctgg

SEQ ID NO: 5487474 - DNA, 25 bp, Homo sapien
gggcgtcagggacttcattgagaaa

SEQ ID NO: 5487475 - DNA, 25 bp, Homo sapien
taatccgcgaatgctccgatgtgca

SEQ ID NO: 5487476 - DNA, 25 bp, Homo sapien
aagtggtaaagcctgaagcctccac

SEQ ID NO: 5487477 - DNA, 25 bp, Homo sapien
acgctatgatggaatctcgagtctc

SEQ ID NO: 5487478 - DNA, 25 bp, Homo sapien
gcacacttgaggaaatctcggtggg

SEQ ID NO: 5487479 - DNA, 25 bp, Homo sapien
accaccagtcctgctagtgagggtt

SEQ ID NO: 5487480 - DNA, 25 bp, Homo sapien
tggcaaagtctgggatctgtgcttg

SEQ ID NO: 5487481 - DNA, 25 bp, Homo sapien
gatacagatgtcccagggcaaagga

SEQ ID NO: 5487482 - DNA, 25 bp, Homo sapien
ttccactctaggccccaggtgagac

SEQ ID NO: 5487483 - DNA, 25 bp, Homo sapien
gtgcttgtgtgaggttaacccaccc

SEQ ID NO: 5487484 - DNA, 25 bp, Homo sapien
gcaaacacagacaagcccatcaggg

SEQ ID NO: 5487485 - DNA, 25 bp, Homo sapien
agcgacctgccagggtctgtcccta

SEQ ID NO: 5487486 - DNA, 25 bp, Homo sapien
gccctcctccaagagctgagacctc

SEQ ID NO: 5487487 - DNA, 25 bp, Homo sapien
ggtacagtcacaggacctcagacac

SEQ ID NO: 5487488 - DNA, 25 bp, Homo sapien
gggaaccgctgagctgaagttcttg

SEQ ID NO: 5487489 - DNA, 25 bp, Homo sapien
cggcaccagctcattcacggcgaag

SEQ ID NO: 5487490 - DNA, 25 bp, Homo sapien
ctcagcgaacccttgctgggaaccg

SEQ ID NO: 5487491 - DNA, 25 bp, Homo sapien
gcatacccagctcggacctcctagg

SEQ ID NO: 5487492 - DNA, 25 bp, Homo sapien
accaacctagtccgccaccaggcga

SEQ ID NO: 5487493 - DNA, 25 bp, Homo sapien
ttcttgcccacagtttcgagaggcc

SEQ ID NO: 5487494 - DNA, 25 bp, Homo sapien
gtctgcgtccgcacagcatacccag

SEQ ID NO: 5487495 - DNA, 25 bp, Homo sapien
gtgccccgttggaaagcagatattt

SEQ ID NO: 5487496 - DNA, 25 bp, Homo sapien
gcagatatttcccggacccagcgcg

SEQ ID NO: 5487497 - DNA, 25 bp, Homo sapien
gagcctagttctcacgaggaccctt

SEQ ID NO: 5487498 - DNA, 25 bp, Homo sapien
gaagttcttggaaggctcccaccca

SEQ ID NO: 5487499 - DNA, 25 bp, Homo sapien
cagtttgcgaattatagagacaatc

SEQ ID NO: 5487500 - DNA, 25 bp, Homo sapien
gcatacgagagacttggttgaactt

SEQ ID NO: 5487501 - DNA, 25 bp, Homo sapien
gggcacgctgccgccttccccatca

SEQ ID NO: 5487502 - DNA, 25 bp, Homo sapien
tggttgaacttggttggtccttgtc

SEQ ID NO: 5487503 - DNA, 25 bp, Homo sapien
tgcaccctcgacaagaccacacttt

SEQ ID NO: 5487504 - DNA, 25 bp, Homo sapien
ctgactgcaagccccaccctccttg

SEQ ID NO: 5487505 - DNA, 25 bp, Homo sapien
ccctccttgagactggagctggcgt

SEQ ID NO: 5487506 - DNA, 25 bp, Homo sapien
tattcgaaccactgagagcgagatg

SEQ ID NO: 5487507 - DNA, 25 bp, Homo sapien
gagatgggaagcatagatatctata

SEQ ID NO: 5487508 - DNA, 25 bp, Homo sapien
atgagggccttgtaataaatttcta

SEQ ID NO: 5487509 - DNA, 25 bp, Homo sapien
gaccacactttgggacttgggagct

SEQ ID NO: 5487510 - DNA, 25 bp, Homo sapien
tcccgcaggaaggcatatgtttgta

SEQ ID NO: 5487511 - DNA, 25 bp, Homo sapien
atatggcaaaggttcaggtgaacaa

SEQ ID NO: 5487512 - DNA, 25 bp, Homo sapien
atctatgtgggctctgcagaaagtg

SEQ ID NO: 5487513 - DNA, 25 bp, Homo sapien
gtgcatcgaggacctgtctgaagac

SEQ ID NO: 5487514 - DNA, 25 bp, Homo sapien
gcagatgcagtaggcgtaactgttg

SEQ ID NO: 5487515 - DNA, 25 bp, Homo sapien
gatgcagagagcagtaatccaaatc

SEQ ID NO: 5487516 - DNA, 25 bp, Homo sapien
tgaacaatgtagtggtgctggataa

SEQ ID NO: 5487517 - DNA, 25 bp, Homo sapien
tcccagggtcacaagattccacatt

SEQ ID NO: 5487518 - DNA, 25 bp, Homo sapien
agcatcaaagggatggtccacatca

SEQ ID NO: 5487519 - DNA, 25 bp, Homo sapien
attgggaagataacacagaaaaact

SEQ ID NO: 5487520 - DNA, 25 bp, Homo sapien
agaaagtgaagaatacgatcaagtt

SEQ ID NO: 5487521 - DNA, 25 bp, Homo sapien
acaggagcttcagctacacagggga

SEQ ID NO: 5487522 - DNA, 25 bp, Homo sapien
gcaccatggacatcctggcctccct

SEQ ID NO: 5487523 - DNA, 25 bp, Homo sapien
agcggtacaccatcgtccagcagca

SEQ ID NO: 5487524 - DNA, 25 bp, Homo sapien
gcggccagtgctccctacttcgagg

SEQ ID NO: 5487525 - DNA, 25 bp, Homo sapien
ggcgcaggagctatgcctgtaccta

SEQ ID NO: 5487526 - DNA, 25 bp, Homo sapien
gcggacaagatcctcagcacaggaa

SEQ ID NO: 5487527 - DNA, 25 bp, Homo sapien
gtccacgctgagcctgctccacgac

SEQ ID NO: 5487528 - DNA, 25 bp, Homo sapien
caggaggattacaacgacaagtact

SEQ ID NO: 5487529 - DNA, 25 bp, Homo sapien
tcgccacctcggtggacaaaggcga

SEQ ID NO: 5487530 - DNA, 25 bp, Homo sapien
acaggggcatcatccacgacccata

SEQ ID NO: 5487531 - DNA, 25 bp, Homo sapien
ccagcagcagatcccgtccttcctg

SEQ ID NO: 5487532 - DNA, 25 bp, Homo sapien
aaacaagaaagacgcactttggctt

SEQ ID NO: 5487533 - DNA, 25 bp, Homo sapien
gggccctgctactcccggcagttca

SEQ ID NO: 5487534 - DNA, 25 bp, Homo sapien
tactcccggcagttcatcacctcct

SEQ ID NO: 5487535 - DNA, 25 bp, Homo sapien
tacgaccccaacagcgtccgcatca

SEQ ID NO: 5487536 - DNA, 25 bp, Homo sapien
aacagcgtccgcatcagcttcgcca

SEQ ID NO: 5487537 - DNA, 25 bp, Homo sapien
cgcatcagcttcgccaagggctggg

SEQ ID NO: 5487538 - DNA, 25 bp, Homo sapien
cacggacaaaaccccccagatatca

SEQ ID NO: 5487539 - DNA, 25 bp, Homo sapien
gtgtgtatatggacaaaacaagaaa

SEQ ID NO: 5487540 - DNA, 25 bp, Homo sapien
cctcaacaaccccagatagtggcgg

SEQ ID NO: 5487541 - DNA, 25 bp, Homo sapien
tttatgtatggtgcaatgtgtgtat

SEQ ID NO: 5487542 - DNA, 25 bp, Homo sapien
ggctggagatcctcctcaacaaccc

SEQ ID NO: 5487543 - DNA, 25 bp, Homo sapien
cactgaggaatgatcagattttttt

SEQ ID NO: 5487544 - DNA, 25 bp, Homo sapien
ctcaaagaacaactgaaatggaaac

SEQ ID NO: 5487545 - DNA, 25 bp, Homo sapien
ctttattcacaatggagcgtctctc

SEQ ID NO: 5487546 - DNA, 25 bp, Homo sapien
ctatccccaatatttctgccccctc

SEQ ID NO: 5487547 - DNA, 25 bp, Homo sapien
gcttaggagctggtatgagctcttt

SEQ ID NO: 5487548 - DNA, 25 bp, Homo sapien
tcttaatagggcttaggagctggta

SEQ ID NO: 5487549 - DNA, 25 bp, Homo sapien
aggcattagaggaccaggcctcttc

SEQ ID NO: 5487550 - DNA, 25 bp, Homo sapien
tgctgtctagctaagcagcccacac

SEQ ID NO: 5487551 - DNA, 25 bp, Homo sapien
ccctaagccctgacccaaccctatc

SEQ ID NO: 5487552 - DNA, 25 bp, Homo sapien
actgaaatggaaacaaggcattaga

SEQ ID NO: 5487553 - DNA, 25 bp, Homo sapien
aataatcacgaatggttagtacatc

SEQ ID NO: 5487554 - DNA, 25 bp, Homo sapien
tctgataccctgtacaagagctatt

SEQ ID NO: 5487555 - DNA, 25 bp, Homo sapien
gccatatggatgggcaaaactgagc

SEQ ID NO: 5487556 - DNA, 25 bp, Homo sapien
gtacactggttcatagatcggcact

SEQ ID NO: 5487557 - DNA, 25 bp, Homo sapien
tcccacttaggaatggaaggcttgg

SEQ ID NO: 5487558 - DNA, 25 bp, Homo sapien
agagatgctgccatatggatgggca

SEQ ID NO: 5487559 - DNA, 25 bp, Homo sapien
tacaagagctattagagatgctgcc

SEQ ID NO: 5487560 - DNA, 25 bp, Homo sapien
catagatcggcacttgactttgaac

SEQ ID NO: 5487561 - DNA, 25 bp, Homo sapien
atgggcaaaactgagccaatcccac

SEQ ID NO: 5487562 - DNA, 25 bp, Homo sapien
tgaacctggcaccaaaaggcacaat

SEQ ID NO: 5487563 - DNA, 25 bp, Homo sapien
ccaaaaggcacaatatctgataccc

SEQ ID NO: 5487564 - DNA, 25 bp, Homo sapien
ccaatcccacttaggaatggaaggc

SEQ ID NO: 5487565 - DNA, 25 bp, Homo sapien
gttatacagtgtagctacagatact

SEQ ID NO: 5487566 - DNA, 25 bp, Homo sapien
ttgaagaacagttatacagtgtagc

SEQ ID NO: 5487567 - DNA, 25 bp, Homo sapien
tcaaatgatttagctgtccagaaca

SEQ ID NO: 5487568 - DNA, 25 bp, Homo sapien
tacagatactgactagatactaaat

SEQ ID NO: 5487569 - DNA, 25 bp, Homo sapien
atataaagtatggttgtaaaggagt

SEQ ID NO: 5487570 - DNA, 25 bp, Homo sapien
tctcttaaggatgggatatgaggta

SEQ ID NO: 5487571 - DNA, 25 bp, Homo sapien
cttcacaagttagggaatagaaatc

SEQ ID NO: 5487572 - DNA, 25 bp, Homo sapien
atgaggtacacatgagctggtttct

SEQ ID NO: 5487573 - DNA, 25 bp, Homo sapien
cctgaagttaacaaagtcctggatt

SEQ ID NO: 5487574 - DNA, 25 bp, Homo sapien
tgaaaaaattgagatgatattaccc

SEQ ID NO: 5487575 - DNA, 25 bp, Homo sapien
gtccagaacatatttgacagttgat

SEQ ID NO: 5487576 - DNA, 25 bp, Homo sapien
aaacaggaaaaatatcagttggcaa

SEQ ID NO: 5487577 - DNA, 25 bp, Homo sapien
tttgcactgactagtactgaataat

SEQ ID NO: 5487578 - DNA, 25 bp, Homo sapien
ataagcagccttgatgggatatgtt

SEQ ID NO: 5487579 - DNA, 25 bp, Homo sapien
tagaagtgtcatgaaagtgtgattc

SEQ ID NO: 5487580 - DNA, 25 bp, Homo sapien
tgatgggatatgttagaagtgtcat

SEQ ID NO: 5487581 - DNA, 25 bp, Homo sapien
ggcttgctgagcgtttaaacaaatg

SEQ ID NO: 5487582 - DNA, 25 bp, Homo sapien
tgatgttgtgtctataagcagcctt

SEQ ID NO: 5487583 - DNA, 25 bp, Homo sapien
ggtgaccatccgctcggcttgctga

SEQ ID NO: 5487584 - DNA, 25 bp, Homo sapien
acaaatgtttagacaggctgtgggg

SEQ ID NO: 5487585 - DNA, 25 bp, Homo sapien
aacagcttgatatgcaggtccttgc

SEQ ID NO: 5487586 - DNA, 25 bp, Homo sapien
acaactcagtgtctaacagcttgat

SEQ ID NO: 5487587 - DNA, 25 bp, Homo sapien
tactcagagattatagggagcatgg

SEQ ID NO: 5487588 - DNA, 25 bp, Homo sapien
aatagaaacagaagatgagattatg

SEQ ID NO: 5487589 - DNA, 25 bp, Homo sapien
tgaggaagaactggattccatggca

SEQ ID NO: 5487590 - DNA, 25 bp, Homo sapien
agaaaaggatattccagattgcccc

SEQ ID NO: 5487591 - DNA, 25 bp, Homo sapien
agcaggcttgtgcacaaccagatca

SEQ ID NO: 5487592 - DNA, 25 bp, Homo sapien
agaaacaggagaatcagtgtgtctc

SEQ ID NO: 5487593 - DNA, 25 bp, Homo sapien
cagaccctagactggagattgggac

SEQ ID NO: 5487594 - DNA, 25 bp, Homo sapien
tgtgccggcctgcgagtttttagga

SEQ ID NO: 5487595 - DNA, 25 bp, Homo sapien
ttaggccccaaaacgtgctccagat

SEQ ID NO: 5487596 - DNA, 25 bp, Homo sapien
tggaaaaggaagattactcagagat

SEQ ID NO: 5487597 - DNA, 25 bp, Homo sapien
gatatggcagaggtattgcccccat

SEQ ID NO: 5487598 - DNA, 25 bp, Homo sapien
cctatgatttcacaaaagatatgtt

SEQ ID NO: 5487599 - DNA, 25 bp, Homo sapien
aacatatcttttgtgaaatcatagg

SEQ ID NO: 5487600 - DNA, 25 bp, Homo sapien
catacagaagtgaggctgtcgtttc

SEQ ID NO: 5487601 - DNA, 25 bp, Homo sapien
aagtgaggctgtcgtttcttcccct

SEQ ID NO: 5487602 - DNA, 25 bp, Homo sapien
aggccacatcagcagtccatacaga

SEQ ID NO: 5487603 - DNA, 25 bp, Homo sapien
ctgctccaaagacaatgcccgctga

SEQ ID NO: 5487604 - DNA, 25 bp, Homo sapien
ctcctgctgctccaaagacaatgcc

SEQ ID NO: 5487605 - DNA, 25 bp, Homo sapien
agcagtccatacagaagtgaggctg

SEQ ID NO: 5487606 - DNA, 25 bp, Homo sapien
ctcaacacccttacccaacaggagg

SEQ ID NO: 5487607 - DNA, 25 bp, Homo sapien
aggttttcagcacaagtcacactca

SEQ ID NO: 5487608 - DNA, 25 bp, Homo sapien
tcagcacaagtcacactcaacaccc

SEQ ID NO: 5487609 - DNA, 25 bp, Homo sapien
ccaaagacaatgcccgctgaacagg

SEQ ID NO: 5487610 - DNA, 25 bp, Homo sapien
tatatatgaaccaggttttcagcac

SEQ ID NO: 5487611 - DNA, 25 bp, Homo sapien
tggttaaggctgttgaagcccttgc

SEQ ID NO: 5487612 - DNA, 25 bp, Homo sapien
tccccaggcttatgtgaagaagccc

SEQ ID NO: 5487613 - DNA, 25 bp, Homo sapien
ctcactcactctggcctgcgcactg

SEQ ID NO: 5487614 - DNA, 25 bp, Homo sapien
gggacaggattagcccaggaataaa

SEQ ID NO: 5487615 - DNA, 25 bp, Homo sapien
gaagcccacgcccactctcaacaaa

SEQ ID NO: 5487616 - DNA, 25 bp, Homo sapien
atgtgcttaactggtgaaatgattc

SEQ ID NO: 5487617 - DNA, 25 bp, Homo sapien
cactggctatggggaataatatttg

SEQ ID NO: 5487618 - DNA, 25 bp, Homo sapien
tccagctggaaatgccactaacccc

SEQ ID NO: 5487619 - DNA, 25 bp, Homo sapien
cacaatccagcacctgagagaggaa

SEQ ID NO: 5487620 - DNA, 25 bp, Homo sapien
cttatggcaactacaacaggaggaa

SEQ ID NO: 5487621 - DNA, 25 bp, Homo sapien
cagactcctccttgggaagcatctc

SEQ ID NO: 5487622 - DNA, 25 bp, Homo sapien
atgtggacggagacgatagggacac

SEQ ID NO: 5487623 - DNA, 25 bp, Homo sapien
gtgtccctatcgtctccgtccacat

SEQ ID NO: 5487624 - DNA, 25 bp, Homo sapien
agggttctgggtaagcccaagtctg

SEQ ID NO: 5487625 - DNA, 25 bp, Homo sapien
cccaagtctgctactgccaccgtgc

SEQ ID NO: 5487626 - DNA, 25 bp, Homo sapien
aactacaggttcccagtattcctat

SEQ ID NO: 5487627 - DNA, 25 bp, Homo sapien
ctatagcgtcagagacttagggttc

SEQ ID NO: 5487628 - DNA, 25 bp, Homo sapien
taaagggcatgactcccaacatgta

SEQ ID NO: 5487629 - DNA, 25 bp, Homo sapien
agggagataactataggcttagcaa

SEQ ID NO: 5487630 - DNA, 25 bp, Homo sapien
cagagggttttgtaattgaaactgg

SEQ ID NO: 5487631 - DNA, 25 bp, Homo sapien
ccaggcatattaaagggcatgactc

SEQ ID NO: 5487632 - DNA, 25 bp, Homo sapien
tttatggttcttagggagataacta

SEQ ID NO: 5487633 - DNA, 25 bp, Homo sapien
acagtgtctgttacgattgcctacc

SEQ ID NO: 5487634 - DNA, 25 bp, Homo sapien
ccaccgtgcagtgccaggcatatta

SEQ ID NO: 5487635 - DNA, 25 bp, Homo sapien
tctgaccatggcttggatgccctca

SEQ ID NO: 5487636 - DNA, 25 bp, Homo sapien
ccagcgactgtctcagactgggcag

SEQ ID NO: 5487637 - DNA, 25 bp, Homo sapien
gtcaggtcttggtaggtgcctgcat

SEQ ID NO: 5487638 - DNA, 25 bp, Homo sapien
gtacaaccaccatgacaactgccgg

SEQ ID NO: 5487639 - DNA, 25 bp, Homo sapien
gtcgtggtcacctgccagcgactgt

SEQ ID NO: 5487640 - DNA, 25 bp, Homo sapien
cctgtccctcagggtagcaccatgg

SEQ ID NO: 5487641 - DNA, 25 bp, Homo sapien
gggaactggagtgtccttgctgtat

SEQ ID NO: 5487642 - DNA, 25 bp, Homo sapien
ctttggcatgacttaagaggaaggg

SEQ ID NO: 5487643 - DNA, 25 bp, Homo sapien
atatcaggctagagacccatggcca

SEQ ID NO: 5487644 - DNA, 25 bp, Homo sapien
cccgctatgcaggtcctggcaaacc

SEQ ID NO: 5487645 - DNA, 25 bp, Homo sapien
tgccaggccacgaatatcaggctag

SEQ ID NO: 5487646 - DNA, 25 bp, Homo sapien
gtatgtagtgtagcacagaaaaaaa

SEQ ID NO: 5487647 - DNA, 25 bp, Homo sapien
tttggtgatttgtatgtagtgtagc

SEQ ID NO: 5487648 - DNA, 25 bp, Homo sapien
ggctctatgcaaacagggctcatca

SEQ ID NO: 5487649 - DNA, 25 bp, Homo sapien
gccccaaagaaactgctcagtacac

SEQ ID NO: 5487650 - DNA, 25 bp, Homo sapien
ctcttcgcaccaagtcacatccctg

SEQ ID NO: 5487651 - DNA, 25 bp, Homo sapien
gggcaaggaggtcatttagaaattg

SEQ ID NO: 5487652 - DNA, 25 bp, Homo sapien
gaagagcaggatgacaccttgctcc

SEQ ID NO: 5487653 - DNA, 25 bp, Homo sapien
cattttagtaagctgggcaaggagg

SEQ ID NO: 5487654 - DNA, 25 bp, Homo sapien
gtgccaaaatggatactgacattgc

SEQ ID NO: 5487655 - DNA, 25 bp, Homo sapien
actgctcagtacaccaaggatcaca

SEQ ID NO: 5487656 - DNA, 25 bp, Homo sapien
ctgatgtagatactcttgggggagg

SEQ ID NO: 5487657 - DNA, 25 bp, Homo sapien
ctcctacgacccaaagaggaactac

SEQ ID NO: 5487658 - DNA, 25 bp, Homo sapien
ttgcaattatatgactcaagcattc

SEQ ID NO: 5487659 - DNA, 25 bp, Homo sapien
cacagaatactaagaagagctgttc

SEQ ID NO: 5487660 - DNA, 25 bp, Homo sapien
tattacagttatagctctctcaagc

SEQ ID NO: 5487661 - DNA, 25 bp, Homo sapien
actaagaagagctgttcacccaggc

SEQ ID NO: 5487662 - DNA, 25 bp, Homo sapien
atgactcaagcattctggctccgtt

SEQ ID NO: 5487663 - DNA, 25 bp, Homo sapien
acccaggcctcactaagaactcttc

SEQ ID NO: 5487664 - DNA, 25 bp, Homo sapien
tggctccgttaactattactgctgt

SEQ ID NO: 5487665 - DNA, 25 bp, Homo sapien
caaagaggaactacagcaactactc

SEQ ID NO: 5487666 - DNA, 25 bp, Homo sapien
atgacaactgctcctacgacccaaa

SEQ ID NO: 5487667 - DNA, 25 bp, Homo sapien
aaatgttcagaaatataagtctatt

SEQ ID NO: 5487668 - DNA, 25 bp, Homo sapien
tgccacgtagggcaggaatctttat

SEQ ID NO: 5487669 - DNA, 25 bp, Homo sapien
gaaccagtggacagaggtatcatta

SEQ ID NO: 5487670 - DNA, 25 bp, Homo sapien
ccctttagtctctggtggcagcttc

SEQ ID NO: 5487671 - DNA, 25 bp, Homo sapien
acactgagtacctcacaacgagttc

SEQ ID NO: 5487672 - DNA, 25 bp, Homo sapien
tcccaaatatctatggagagctgtt

SEQ ID NO: 5487673 - DNA, 25 bp, Homo sapien
aacgagttcagtcagtagcagaagg

SEQ ID NO: 5487674 - DNA, 25 bp, Homo sapien
tcatgtggggtatcgtcctcaaaac

SEQ ID NO: 5487675 - DNA, 25 bp, Homo sapien
tgtccatgtattgtgaagtctgagg

SEQ ID NO: 5487676 - DNA, 25 bp, Homo sapien
agcttttgcacagggaaccagtgga

SEQ ID NO: 5487677 - DNA, 25 bp, Homo sapien
caggagctactccacatcaggccag

SEQ ID NO: 5487678 - DNA, 25 bp, Homo sapien
caaaacaggacagccaagttgatgt

SEQ ID NO: 5487679 - DNA, 25 bp, Homo sapien
gagtcacggttcgactctcggtcgt

SEQ ID NO: 5487680 - DNA, 25 bp, Homo sapien
acgaccgagagtcgaaccgtgactc

SEQ ID NO: 5487681 - DNA, 25 bp, Homo sapien
ttttgttattataaagaatgcagac

SEQ ID NO: 5487682 - DNA, 25 bp, Homo sapien
acaaagtcacaatcatagtatgcat

SEQ ID NO: 5487683 - DNA, 25 bp, Homo sapien
attccatatcccgctacactaacac

SEQ ID NO: 5487684 - DNA, 25 bp, Homo sapien
taaagaatgcagacataaatgtctt

SEQ ID NO: 5487685 - DNA, 25 bp, Homo sapien
ggggcaaaggatatggtcattttta

SEQ ID NO: 5487686 - DNA, 25 bp, Homo sapien
cactttcttgacatggagttttttt

SEQ ID NO: 5487687 - DNA, 25 bp, Homo sapien
ccttccacatgcataaagattttac

SEQ ID NO: 5487688 - DNA, 25 bp, Homo sapien
agtagaatttatggggcaaaggata

SEQ ID NO: 5487689 - DNA, 25 bp, Homo sapien
accatatcaaacatgtccacgtttc

SEQ ID NO: 5487690 - DNA, 25 bp, Homo sapien
atcccgctacactaacacaatgaat

SEQ ID NO: 5487691 - DNA, 25 bp, Homo sapien
gttttgcagattaccttccacatgc

SEQ ID NO: 5487692 - DNA, 25 bp, Homo sapien
gctgtcacctgaagcaaggaacaca

SEQ ID NO: 5487693 - DNA, 25 bp, Homo sapien
gtcctttgatggacggaagagacaa

SEQ ID NO: 5487694 - DNA, 25 bp, Homo sapien
caggcccgaatccttccgctgccct

SEQ ID NO: 5487695 - DNA, 25 bp, Homo sapien
aggtcaagcccctatccaggcccga

SEQ ID NO: 5487696 - DNA, 25 bp, Homo sapien
aaggaacacagcatgggtgtccttt

SEQ ID NO: 5487697 - DNA, 25 bp, Homo sapien
gtgaccgcctgtctcagtggcacgg

SEQ ID NO: 5487698 - DNA, 25 bp, Homo sapien
agagcctgggtctgccttttgtcca

SEQ ID NO: 5487699 - DNA, 25 bp, Homo sapien
tcgcccagtgcctgcattggaacgt

SEQ ID NO: 5487700 - DNA, 25 bp, Homo sapien
tcccctccatctgtgtgcgggaccc

SEQ ID NO: 5487701 - DNA, 25 bp, Homo sapien
gactggtttgagagcctcgcccagt

SEQ ID NO: 5487702 - DNA, 25 bp, Homo sapien
aatctgcgtgtgtctgtgaccgcct

SEQ ID NO: 5487703 - DNA, 25 bp, Homo sapien
tgaagggaatagtctctgctctctg

SEQ ID NO: 5487704 - DNA, 25 bp, Homo sapien
agcagagaagtaggaaatatcatct

SEQ ID NO: 5487705 - DNA, 25 bp, Homo sapien
agtagcatccctgaggggtaaacac

SEQ ID NO: 5487706 - DNA, 25 bp, Homo sapien
cttaagaggtttgcagtccccattc

SEQ ID NO: 5487707 - DNA, 25 bp, Homo sapien
tgagacctggcaagaccttgagatc

SEQ ID NO: 5487708 - DNA, 25 bp, Homo sapien
aagcgcctgagtctgggccttttct

SEQ ID NO: 5487709 - DNA, 25 bp, Homo sapien
tgcaccagagctagaaaatggacag

SEQ ID NO: 5487710 - DNA, 25 bp, Homo sapien
agtcccaatggagattgtgagacct

SEQ ID NO: 5487711 - DNA, 25 bp, Homo sapien
gacaggcaaggatccctacagatag

SEQ ID NO: 5487712 - DNA, 25 bp, Homo sapien
gggtaaacacaagactggtccactg

SEQ ID NO: 5487713 - DNA, 25 bp, Homo sapien
ccctgaaacaggaaacactttgggc

SEQ ID NO: 5487714 - DNA, 25 bp, Homo sapien
ttctcaagttagttataggatgtac

SEQ ID NO: 5487715 - DNA, 25 bp, Homo sapien
gagacgcaataccaatacttaggat

SEQ ID NO: 5487716 - DNA, 25 bp, Homo sapien
actctaagtggaaatcaggattgtt

SEQ ID NO: 5487717 - DNA, 25 bp, Homo sapien
taggtaaaagcagttgaattatgtt

SEQ ID NO: 5487718 - DNA, 25 bp, Homo sapien
acagtgaagctgagtaaactataac

SEQ ID NO: 5487719 - DNA, 25 bp, Homo sapien
tgtatgaaattctgaggccttgatt

SEQ ID NO: 5487720 - DNA, 25 bp, Homo sapien
gcagtaagcgtatttaggtaaaagc

SEQ ID NO: 5487721 - DNA, 25 bp, Homo sapien
acctgtaaggcacgtaagtttaagc

SEQ ID NO: 5487722 - DNA, 25 bp, Homo sapien
atctaggatgtaacagtgaagctga

SEQ ID NO: 5487723 - DNA, 25 bp, Homo sapien
taatgggaaaaatttgagacgcaat

SEQ ID NO: 5487724 - DNA, 25 bp, Homo sapien
aaaacaatataggagctgtgtctac

SEQ ID NO: 5487725 - DNA, 25 bp, Homo sapien
aactcgacggtctatcggttaacag

SEQ ID NO: 5487726 - DNA, 25 bp, Homo sapien
ctgttaaccgatagaccgtcgagtt

SEQ ID NO: 5487727 - DNA, 25 bp, Homo sapien
ccaggccagtttgactctaaagtcc

SEQ ID NO: 5487728 - DNA, 25 bp, Homo sapien
acagctacaagcaatgaggatcagg

SEQ ID NO: 5487729 - DNA, 25 bp, Homo sapien
ggctagtttcaaactgctaggctca

SEQ ID NO: 5487730 - DNA, 25 bp, Homo sapien
caatgaggatcaggattcaaatcca

SEQ ID NO: 5487731 - DNA, 25 bp, Homo sapien
gtccagatcatacagctacaagcaa

SEQ ID NO: 5487732 - DNA, 25 bp, Homo sapien
atcaaggttagaaacagttactgtc

SEQ ID NO: 5487733 - DNA, 25 bp, Homo sapien
taggcacaaaccactggtcaggaac

SEQ ID NO: 5487734 - DNA, 25 bp, Homo sapien
ggtcaggaactgtacacgcatttta

SEQ ID NO: 5487735 - DNA, 25 bp, Homo sapien
atccttaggagttacaattggcatc

SEQ ID NO: 5487736 - DNA, 25 bp, Homo sapien
cttgctaacaagtaatggattaatt

SEQ ID NO: 5487737 - DNA, 25 bp, Homo sapien
tgtctggaagtaaaacatgaaagtt

SEQ ID NO: 5487738 - DNA, 25 bp, Homo sapien
gaggacgtggctcacagaaaataaa

SEQ ID NO: 5487739 - DNA, 25 bp, Homo sapien
gggctctagatgtcgagtagccagc

SEQ ID NO: 5487740 - DNA, 25 bp, Homo sapien
caggcgaagcgcatcactccttttg

SEQ ID NO: 5487741 - DNA, 25 bp, Homo sapien
ctctagatgtcgagtagccagcttg

SEQ ID NO: 5487742 - DNA, 25 bp, Homo sapien
gcgggctctagatgtcgagtagcca

SEQ ID NO: 5487743 - DNA, 25 bp, Homo sapien
taaaaacggggctcaaatcacgtga

SEQ ID NO: 5487744 - DNA, 25 bp, Homo sapien
ccaggctcagcaagctgaacacctg

SEQ ID NO: 5487745 - DNA, 25 bp, Homo sapien
gagcccaggctcagcaagctgaaca

SEQ ID NO: 5487746 - DNA, 25 bp, Homo sapien
ccaggcgaagcgcatcactcctttt

SEQ ID NO: 5487747 - DNA, 25 bp, Homo sapien
gacgtggctcacagaaaataaaaac

SEQ ID NO: 5487748 - DNA, 25 bp, Homo sapien
cccgttgttctcccattggatctgc

SEQ ID NO: 5487749 - DNA, 25 bp, Homo sapien
actcgagttttgttcgaagacttaa

SEQ ID NO: 5487750 - DNA, 25 bp, Homo sapien
ttaagtcttcgaacaaaactcgagt

SEQ ID NO: 5487751 - DNA, 25 bp, Homo sapien
ggatgtcttcagagatcctgctctt

SEQ ID NO: 5487752 - DNA, 25 bp, Homo sapien
acaaggtactctgtggatatcccct

SEQ ID NO: 5487753 - DNA, 25 bp, Homo sapien
ggatatccccttggacaaaactgtc

SEQ ID NO: 5487754 - DNA, 25 bp, Homo sapien
cattgatgatggcacctcagatcgc

SEQ ID NO: 5487755 - DNA, 25 bp, Homo sapien
aactgtcgtcaataaggatgtcttc

SEQ ID NO: 5487756 - DNA, 25 bp, Homo sapien
cgtgaagaacattgatgatggcacc

SEQ ID NO: 5487757 - DNA, 25 bp, Homo sapien
agtggttcttccagaaactgcggtt

SEQ ID NO: 5487758 - DNA, 25 bp, Homo sapien
cgcaaagctgtcatcgtgaagaaca

SEQ ID NO: 5487759 - DNA, 25 bp, Homo sapien
caaaactgtcgtcaataaggatgtc

SEQ ID NO: 5487760 - DNA, 25 bp, Homo sapien
gacaggcaagaacaagtggttcttc

SEQ ID NO: 5487761 - DNA, 25 bp, Homo sapien
gaaactgcggttttagatgctttgt

SEQ ID NO: 5487762 - DNA, 25 bp, Homo sapien
caggcctcagcaatggctgtggtgt

SEQ ID NO: 5487763 - DNA, 25 bp, Homo sapien
gaagctgaaattctgggagcatgac

SEQ ID NO: 5487764 - DNA, 25 bp, Homo sapien
tacaacaggcagcaagccatgtatt

SEQ ID NO: 5487765 - DNA, 25 bp, Homo sapien
gaggctggtagttgatgccaacctt

SEQ ID NO: 5487766 - DNA, 25 bp, Homo sapien
atggtggcaatggcagcattgacat

SEQ ID NO: 5487767 - DNA, 25 bp, Homo sapien
aggcacgcttggcatacatcaggtc

SEQ ID NO: 5487768 - DNA, 25 bp, Homo sapien
tgccaaccttgaagccagtggggca

SEQ ID NO: 5487769 - DNA, 25 bp, Homo sapien
atttaccatggcgagggtcacattt

SEQ ID NO: 5487770 - DNA, 25 bp, Homo sapien
aagggcagccatatcttcacgggcc

SEQ ID NO: 5487771 - DNA, 25 bp, Homo sapien
atcaggtcaaacttgtggtccaggc

SEQ ID NO: 5487772 - DNA, 25 bp, Homo sapien
agggccaaaaggaatggataattag

SEQ ID NO: 5487773 - DNA, 25 bp, Homo sapien
tgatgcaagcatctaagagagaggt

SEQ ID NO: 5487774 - DNA, 25 bp, Homo sapien
actaacaggactacatagaggcttt

SEQ ID NO: 5487775 - DNA, 25 bp, Homo sapien
ccactgaagcaggttagcgttgaag

SEQ ID NO: 5487776 - DNA, 25 bp, Homo sapien
taagagagaggttaatcacactata

SEQ ID NO: 5487777 - DNA, 25 bp, Homo sapien
gaaatgttgctgaaaagcatggtgc

SEQ ID NO: 5487778 - DNA, 25 bp, Homo sapien
gccagatgtggcaagatcaccatta

SEQ ID NO: 5487779 - DNA, 25 bp, Homo sapien
atagaggcataagtggtatcagttt

SEQ ID NO: 5487780 - DNA, 25 bp, Homo sapien
agcatggtgctggtaacagttcaac

SEQ ID NO: 5487781 - DNA, 25 bp, Homo sapien
taaaggcaagagtgaatttctgtgg

SEQ ID NO: 5487782 - DNA, 25 bp, Homo sapien
agtaattgggtgttagcttgagatg

SEQ ID NO: 5487783 - DNA, 25 bp, Homo sapien
ttcaacaatccgtggctgctcattc

SEQ ID NO: 5487784 - DNA, 25 bp, Homo sapien
atcagccataaagatggggctccct

SEQ ID NO: 5487785 - DNA, 25 bp, Homo sapien
gcagagtattcaggcatatagggtt

SEQ ID NO: 5487786 - DNA, 25 bp, Homo sapien
ataaaccaggatctgacatagatat

SEQ ID NO: 5487787 - DNA, 25 bp, Homo sapien
tctgacacttcaggatgttccctcc

SEQ ID NO: 5487788 - DNA, 25 bp, Homo sapien
tccctcctggtatcagctgtgcacc

SEQ ID NO: 5487789 - DNA, 25 bp, Homo sapien
ataaataagccttggccaacattat

SEQ ID NO: 5487790 - DNA, 25 bp, Homo sapien
cactttggctaatagggaaaagaaa

SEQ ID NO: 5487791 - DNA, 25 bp, Homo sapien
ctcttaagagatagtcactttggct

SEQ ID NO: 5487792 - DNA, 25 bp, Homo sapien
tggcctggctctgactggcatcatc

SEQ ID NO: 5487793 - DNA, 25 bp, Homo sapien
atagggttgtagttgatcagccata

SEQ ID NO: 5487794 - DNA, 25 bp, Homo sapien
caccaaagctaaaagttcacaaggc

SEQ ID NO: 5487795 - DNA, 25 bp, Homo sapien
ttctgcaacgtggcttgttcaaccc

SEQ ID NO: 5487796 - DNA, 25 bp, Homo sapien
gatgagaactgaagtacagactata

SEQ ID NO: 5487797 - DNA, 25 bp, Homo sapien
gcttatgtcgtgggatttactctgc

SEQ ID NO: 5487798 - DNA, 25 bp, Homo sapien
ttgtagatttcagatgtaggtcgtc

SEQ ID NO: 5487799 - DNA, 25 bp, Homo sapien
tacaacttagttggtagcttgccac

SEQ ID NO: 5487800 - DNA, 25 bp, Homo sapien
catgaaagcacaggtttaagttggc

SEQ ID NO: 5487801 - DNA, 25 bp, Homo sapien
gagacaagagtcatagaatggaact

SEQ ID NO: 5487802 - DNA, 25 bp, Homo sapien
gttggctacagaatactgcagaaac

SEQ ID NO: 5487803 - DNA, 25 bp, Homo sapien
tgtaggtcgtcaatactgagcactt

SEQ ID NO: 5487804 - DNA, 25 bp, Homo sapien
aatgaatagggccaagattactagt

SEQ ID NO: 5487805 - DNA, 25 bp, Homo sapien
ttcccccgaaccactgataccagct

SEQ ID NO: 5487806 - DNA, 25 bp, Homo sapien
agttcccggactactgcacgcccga

SEQ ID NO: 5487807 - DNA, 25 bp, Homo sapien
caaactttgagagcatgtccctggg

SEQ ID NO: 5487808 - DNA, 25 bp, Homo sapien
ggctccggctcgcacttcgagttcc

SEQ ID NO: 5487809 - DNA, 25 bp, Homo sapien
ggagactggctcgagtccagcatct

SEQ ID NO: 5487810 - DNA, 25 bp, Homo sapien
cgtcctccgacgacgagttcgaaga

SEQ ID NO: 5487811 - DNA, 25 bp, Homo sapien
gcagcttcagttcgtcgtcggcgct

SEQ ID NO: 5487812 - DNA, 25 bp, Homo sapien
gctcgacctgaaccccagctcaaac

SEQ ID NO: 5487813 - DNA, 25 bp, Homo sapien
ctcggcctcgtcccactcctcctct

SEQ ID NO: 5487814 - DNA, 25 bp, Homo sapien
cctggattttaacttcgagcccggc

SEQ ID NO: 5487815 - DNA, 25 bp, Homo sapien
tcgcacttcgagttcccggactact

SEQ ID NO: 5487816 - DNA, 25 bp, Homo sapien
agttcgaagacgacctgctcgacct

SEQ ID NO: 5487817 - DNA, 25 bp, Homo sapien
ctgccccaagtgcagtggatcagag

SEQ ID NO: 5487818 - DNA, 25 bp, Homo sapien
tcgtagcctagcctagagcacactt

SEQ ID NO: 5487819 - DNA, 25 bp, Homo sapien
aatgacagtcttggccatgggtcta

SEQ ID NO: 5487820 - DNA, 25 bp, Homo sapien
acaaagacacatgaatgggcaaatt

SEQ ID NO: 5487821 - DNA, 25 bp, Homo sapien
tctggcaaaagcccttggtggtgag

SEQ ID NO: 5487822 - DNA, 25 bp, Homo sapien
aggagctcatggcctctcgtagcct

SEQ ID NO: 5487823 - DNA, 25 bp, Homo sapien
ctgaatgagaaaaagcttccaggag

SEQ ID NO: 5487824 - DNA, 25 bp, Homo sapien
agaaccaatgatgcagaaagtagac

SEQ ID NO: 5487825 - DNA, 25 bp, Homo sapien
ctgtgtttctccaggcaggcggtaa

SEQ ID NO: 5487826 - DNA, 25 bp, Homo sapien
catccccagttcagtgagagtgtac

SEQ ID NO: 5487827 - DNA, 25 bp, Homo sapien
atgggtctagacaacacacaattcc

SEQ ID NO: 5487828 - DNA, 25 bp, Homo sapien
gagaaaacactccaagagaaagctt

SEQ ID NO: 5487829 - DNA, 25 bp, Homo sapien
accttgataatcatagtgctcactc

SEQ ID NO: 5487830 - DNA, 25 bp, Homo sapien
gatctagtacttttggtgagtcctc

SEQ ID NO: 5487831 - DNA, 25 bp, Homo sapien
ctggcattaccaatctgagagtcac

SEQ ID NO: 5487832 - DNA, 25 bp, Homo sapien
tagaccctttgaagacagggggaga

SEQ ID NO: 5487833 - DNA, 25 bp, Homo sapien
tgctgcagcagtaaacaccactatc

SEQ ID NO: 5487834 - DNA, 25 bp, Homo sapien
ggttgaggttcaacttccagctatc

SEQ ID NO: 5487835 - DNA, 25 bp, Homo sapien
tccagctatcagagaaaaatgtccc

SEQ ID NO: 5487836 - DNA, 25 bp, Homo sapien
aaaatgatacaaatactgcatgtct

SEQ ID NO: 5487837 - DNA, 25 bp, Homo sapien
atcttgtgatacatgctgcagcagt

SEQ ID NO: 5487838 - DNA, 25 bp, Homo sapien
tactgctaaaaggttgttatgcatc

SEQ ID NO: 5487839 - DNA, 25 bp, Homo sapien
ctgaaatagaataactgacaaatgc

SEQ ID NO: 5487840 - DNA, 25 bp, Homo sapien
gttactggctgagaacatacggtga

SEQ ID NO: 5487841 - DNA, 25 bp, Homo sapien
ctacgggacaaatcagtatctactc

SEQ ID NO: 5487842 - DNA, 25 bp, Homo sapien
ctcatcaggggtttaggagtttgca

SEQ ID NO: 5487843 - DNA, 25 bp, Homo sapien
gatgggagcattcaaaaactaatac

SEQ ID NO: 5487844 - DNA, 25 bp, Homo sapien
tccagaatgagaggactcatcaggg

SEQ ID NO: 5487845 - DNA, 25 bp, Homo sapien
catacggtgacctgtgttctgagtg

SEQ ID NO: 5487846 - DNA, 25 bp, Homo sapien
ttacacttcctcgatgggagcattc

SEQ ID NO: 5487847 - DNA, 25 bp, Homo sapien
gaaaaggctctcagtgaaaacttgt

SEQ ID NO: 5487848 - DNA, 25 bp, Homo sapien
tgcaaagccttcaaaatgtatcgtg

SEQ ID NO: 5487849 - DNA, 25 bp, Homo sapien
catctgccatactacgggacaaatc

SEQ ID NO: 5487850 - DNA, 25 bp, Homo sapien
tggtgaaaatgggcagtcatcttac

SEQ ID NO: 5487851 - DNA, 25 bp, Homo sapien
ttagaatacacaaaaccaaggcaga

SEQ ID NO: 5487852 - DNA, 25 bp, Homo sapien
aagcattccaaagcagcacaggcta

SEQ ID NO: 5487853 - DNA, 25 bp, Homo sapien
ggcaactgagccaagcacacataaa

SEQ ID NO: 5487854 - DNA, 25 bp, Homo sapien
taatacacagtcacatacagagata

SEQ ID NO: 5487855 - DNA, 25 bp, Homo sapien
aggctgtgtaacaggcaactgagcc

SEQ ID NO: 5487856 - DNA, 25 bp, Homo sapien
aaatcattagtgagcatggccaacc

SEQ ID NO: 5487857 - DNA, 25 bp, Homo sapien
atggccaaccaatttttagagagag

SEQ ID NO: 5487858 - DNA, 25 bp, Homo sapien
catcaaagaaagaataagcattcca

SEQ ID NO: 5487859 - DNA, 25 bp, Homo sapien
ttgacaaaggtatacatggtgaaaa

SEQ ID NO: 5487860 - DNA, 25 bp, Homo sapien
aacagaaaagtgtaggaaatcctgc

SEQ ID NO: 5487861 - DNA, 25 bp, Homo sapien
tgatttggagatatttatgggggga

SEQ ID NO: 5487862 - DNA, 25 bp, Homo sapien
ctggaagctgtgtccttgcacctgc

SEQ ID NO: 5487863 - DNA, 25 bp, Homo sapien
agagaggaatcagacttcacactgc

SEQ ID NO: 5487864 - DNA, 25 bp, Homo sapien
taagttgctaaacgagtcaatcccc

SEQ ID NO: 5487865 - DNA, 25 bp, Homo sapien
acagggtagcaggtaccactgattt

SEQ ID NO: 5487866 - DNA, 25 bp, Homo sapien
gtctaatatacagggtagcaggtac

SEQ ID NO: 5487867 - DNA, 25 bp, Homo sapien
acactgcaagagccttggtgtccac

SEQ ID NO: 5487868 - DNA, 25 bp, Homo sapien
tgcacctgcatccgtagttccctga

SEQ ID NO: 5487869 - DNA, 25 bp, Homo sapien
tatataactagctagaagtgggcca

SEQ ID NO: 5487870 - DNA, 25 bp, Homo sapien
gggagaacttacattgtgaaacttc

SEQ ID NO: 5487871 - DNA, 25 bp, Homo sapien
gtctagggagagacccttgtttgat

SEQ ID NO: 5487872 - DNA, 25 bp, Homo sapien
cccacatgagcttccacacactgag

SEQ ID NO: 5487873 - DNA, 25 bp, Homo sapien
attcagtccagttcaggatccccgc

SEQ ID NO: 5487874 - DNA, 25 bp, Homo sapien
aggatccccgctatctcagggctct

SEQ ID NO: 5487875 - DNA, 25 bp, Homo sapien
ccagctcaccagcccaaacagggtg

SEQ ID NO: 5487876 - DNA, 25 bp, Homo sapien
tccacacactgagaagtgtccgaga

SEQ ID NO: 5487877 - DNA, 25 bp, Homo sapien
cacactgagaagtgtccgagaaatt

SEQ ID NO: 5487878 - DNA, 25 bp, Homo sapien
tgggagaccacgttttattcagtcc

SEQ ID NO: 5487879 - DNA, 25 bp, Homo sapien
gcccacctgaactcccagctcacca

SEQ ID NO: 5487880 - DNA, 25 bp, Homo sapien
tccagttcaggatccccgctatctc

SEQ ID NO: 5487881 - DNA, 25 bp, Homo sapien
gctcaccagcccaaacagggtgcag

SEQ ID NO: 5487882 - DNA, 25 bp, Homo sapien
ccacaacacttcccaggcatgagcc

SEQ ID NO: 5487883 - DNA, 25 bp, Homo sapien
aaaagcactgtgttaaaaggattat

SEQ ID NO: 5487884 - DNA, 25 bp, Homo sapien
ctcaactacatgcacaagtggatcc

SEQ ID NO: 5487885 - DNA, 25 bp, Homo sapien
atatttatggagagatacttgcttt

SEQ ID NO: 5487886 - DNA, 25 bp, Homo sapien
agacagtggtctcaactacatgcac

SEQ ID NO: 5487887 - DNA, 25 bp, Homo sapien
cttagctgccaatcaaaatggagtt

SEQ ID NO: 5487888 - DNA, 25 bp, Homo sapien
aagtggatcctaaaaaatgtatgaa

SEQ ID NO: 5487889 - DNA, 25 bp, Homo sapien
acaaactaaggccacacaacgcaaa

SEQ ID NO: 5487890 - DNA, 25 bp, Homo sapien
cacacaacgcaaatagtccgccagg

SEQ ID NO: 5487891 - DNA, 25 bp, Homo sapien
agagagaattgaaaagtgctatatt

SEQ ID NO: 5487892 - DNA, 25 bp, Homo sapien
agtccgccaggcaaatatacatttc

SEQ ID NO: 5487893 - DNA, 25 bp, Homo sapien
ttcaagacaaggataggtcccttac

SEQ ID NO: 5487894 - DNA, 25 bp, Homo sapien
gtgtattaagaaatgacatgcactt

SEQ ID NO: 5487895 - DNA, 25 bp, Homo sapien
atctgcatggaaaagtactaaagtt

SEQ ID NO: 5487896 - DNA, 25 bp, Homo sapien
tagcaacacacaatagtggtccaac

SEQ ID NO: 5487897 - DNA, 25 bp, Homo sapien
acatgtgcacaaatctgcatggaaa

SEQ ID NO: 5487898 - DNA, 25 bp, Homo sapien
atcactagacaaactggacaccctc

SEQ ID NO: 5487899 - DNA, 25 bp, Homo sapien
gggactacagtcaatgattagcaac

SEQ ID NO: 5487900 - DNA, 25 bp, Homo sapien
agtggtccaactctctaaataacaa

SEQ ID NO: 5487901 - DNA, 25 bp, Homo sapien
ataacaatcactagacaaactggac

SEQ ID NO: 5487902 - DNA, 25 bp, Homo sapien
actggacaccctctcacatgtgcac

SEQ ID NO: 5487903 - DNA, 25 bp, Homo sapien
agggcataacattttcacaaggctt

SEQ ID NO: 5487904 - DNA, 25 bp, Homo sapien
actctgctgttacatagggcataac

SEQ ID NO: 5487905 - DNA, 25 bp, Homo sapien
ggcagcgggtctttcactggctaga

SEQ ID NO: 5487906 - DNA, 25 bp, Homo sapien
tgacctaagactactgggagaaagt

SEQ ID NO: 5487907 - DNA, 25 bp, Homo sapien
gcactcgacatgacaagctggaaga

SEQ ID NO: 5487908 - DNA, 25 bp, Homo sapien
aagttcactgagcatgacctaagac

SEQ ID NO: 5487909 - DNA, 25 bp, Homo sapien
gcctccacgactcctccagacgctc

SEQ ID NO: 5487910 - DNA, 25 bp, Homo sapien
gactgagcctccaaccctgagcagt

SEQ ID NO: 5487911 - DNA, 25 bp, Homo sapien
caaagcaaatccccctacaggcacc

SEQ ID NO: 5487912 - DNA, 25 bp, Homo sapien
aggctgaaggaaaaccatatctgga

SEQ ID NO: 5487913 - DNA, 25 bp, Homo sapien
agcctgaagaacgagctctcagagg

SEQ ID NO: 5487914 - DNA, 25 bp, Homo sapien
gggatccctgagttagctccagagc

SEQ ID NO: 5487915 - DNA, 25 bp, Homo sapien
tccccctacaggcaccatgcaaggc

SEQ ID NO: 5487916 - DNA, 25 bp, Homo sapien
gcctgtcagaagtcccaaaggtttc

SEQ ID NO: 5487917 - DNA, 25 bp, Homo sapien
tgagaattagctagtgatcactggc

SEQ ID NO: 5487918 - DNA, 25 bp, Homo sapien
gattgattgctctattgacaagctc

SEQ ID NO: 5487919 - DNA, 25 bp, Homo sapien
agtaaggaaaatataaatgaagtct

SEQ ID NO: 5487920 - DNA, 25 bp, Homo sapien
tagtcactaaggcttgaattgtctc

SEQ ID NO: 5487921 - DNA, 25 bp, Homo sapien
aagactgtaaacaggacaaaaaggc

SEQ ID NO: 5487922 - DNA, 25 bp, Homo sapien
tttgggtcacattggcaacagtgtc

SEQ ID NO: 5487923 - DNA, 25 bp, Homo sapien
gactagaacacaacttacagaatac

SEQ ID NO: 5487924 - DNA, 25 bp, Homo sapien
ttcaggaatcctaaggttatagttc

SEQ ID NO: 5487925 - DNA, 25 bp, Homo sapien
aaaaggcatggatatgagaattagc

SEQ ID NO: 5487926 - DNA, 25 bp, Homo sapien
ttcaccagatgcctgtcagaagtcc

SEQ ID NO: 5487927 - DNA, 25 bp, Homo sapien
ggacactcagtacccagacctgggc

SEQ ID NO: 5487928 - DNA, 25 bp, Homo sapien
tccctggttcattggagagtaacag

SEQ ID NO: 5487929 - DNA, 25 bp, Homo sapien
aagacagaattctcaagggataggc

SEQ ID NO: 5487930 - DNA, 25 bp, Homo sapien
tggggtgactgtgcccctcactcct

SEQ ID NO: 5487931 - DNA, 25 bp, Homo sapien
aagtaggcaaagtgcttgaagcttc

SEQ ID NO: 5487932 - DNA, 25 bp, Homo sapien
actatttatagctggaggcctaggc

SEQ ID NO: 5487933 - DNA, 25 bp, Homo sapien
tggagagtaacagggttttagcata

SEQ ID NO: 5487934 - DNA, 25 bp, Homo sapien
gcctaggctgctgacctgtgacatt

SEQ ID NO: 5487935 - DNA, 25 bp, Homo sapien
agcctctcgggccctccggactatt

SEQ ID NO: 5487936 - DNA, 25 bp, Homo sapien
ggcagctctggacactcagtaccca

SEQ ID NO: 5487937 - DNA, 25 bp, Homo sapien
ataatgctggccagagccagtgtgc

SEQ ID NO: 5487938 - DNA, 25 bp, Homo sapien
tatgcttgacagaaagggtgatttt

SEQ ID NO: 5487939 - DNA, 25 bp, Homo sapien
tttcctctggatagtcaaacctgcc

SEQ ID NO: 5487940 - DNA, 25 bp, Homo sapien
ggagaggccaagatatgcttgacag

SEQ ID NO: 5487941 - DNA, 25 bp, Homo sapien
aaatgcaggcaacactgagacatgg

SEQ ID NO: 5487942 - DNA, 25 bp, Homo sapien
gctataaaacgagcatttggagggc

SEQ ID NO: 5487943 - DNA, 25 bp, Homo sapien
gtagagagaggttgctataaaacga

SEQ ID NO: 5487944 - DNA, 25 bp, Homo sapien
tcactcaggacctgctgggcttgtg

SEQ ID NO: 5487945 - DNA, 25 bp, Homo sapien
gccagatatcaaacctgaggaaggc

SEQ ID NO: 5487946 - DNA, 25 bp, Homo sapien
gaagtgaatttggagaactagggta

SEQ ID NO: 5487947 - DNA, 25 bp, Homo sapien
gtaaccgtagcaaaactgcattggt

SEQ ID NO: 5487948 - DNA, 25 bp, Homo sapien
aaagggtgattttgaggctcagtta

SEQ ID NO: 5487949 - DNA, 25 bp, Homo sapien
gatattcgagtcatggaactttttc

SEQ ID NO: 5487950 - DNA, 25 bp, Homo sapien
cccggtgatttttccaccccataca

SEQ ID NO: 5487951 - DNA, 25 bp, Homo sapien
atgaacagatctgggtccaaagagg

SEQ ID NO: 5487952 - DNA, 25 bp, Homo sapien
acaaaagcatgaacagatctgggtc

SEQ ID NO: 5487953 - DNA, 25 bp, Homo sapien
agcctgctcatagccaagggacagg

SEQ ID NO: 5487954 - DNA, 25 bp, Homo sapien
cctgctcatagccaagggacaggta

SEQ ID NO: 5487955 - DNA, 25 bp, Homo sapien
atttcagatattcgagtcatggaac

SEQ ID NO: 5487956 - DNA, 25 bp, Homo sapien
aggagccatcccagcctctaagccc

SEQ ID NO: 5487957 - DNA, 25 bp, Homo sapien
cgaagacaaaagcatgaacagatct

SEQ ID NO: 5487958 - DNA, 25 bp, Homo sapien
cccccaaagcctgctcatagccaag

SEQ ID NO: 5487959 - DNA, 25 bp, Homo sapien
gagccatcccagcctctaagccccc

SEQ ID NO: 5487960 - DNA, 25 bp, Homo sapien
ctaagtcttgttacccaactgttgg

SEQ ID NO: 5487961 - DNA, 25 bp, Homo sapien
ccaacagttgggtaacaagacttag

SEQ ID NO: 5487962 - DNA, 25 bp, Homo sapien
aattgaacagttgcaaagatgtctt

SEQ ID NO: 5487963 - DNA, 25 bp, Homo sapien
gatggctactgagttatcagtggcc

SEQ ID NO: 5487964 - DNA, 25 bp, Homo sapien
ttgtgtaaagaattggtgtagtcat

SEQ ID NO: 5487965 - DNA, 25 bp, Homo sapien
gtagtcatgactttagctgatactc

SEQ ID NO: 5487966 - DNA, 25 bp, Homo sapien
tccttcagtggcatgtagttatcta

SEQ ID NO: 5487967 - DNA, 25 bp, Homo sapien
tcttaatcggtgctttatggaggcc

SEQ ID NO: 5487968 - DNA, 25 bp, Homo sapien
tcgttgagaaagttgaggaatttcc

SEQ ID NO: 5487969 - DNA, 25 bp, Homo sapien
accgcatgactattcagatggctac

SEQ ID NO: 5487970 - DNA, 25 bp, Homo sapien
ttctcaacagatgttaaggtacaac

SEQ ID NO: 5487971 - DNA, 25 bp, Homo sapien
tctactgcgaaacaaaaatagctcc

SEQ ID NO: 5487972 - DNA, 25 bp, Homo sapien
tggattaatcagctggtttcaactc

SEQ ID NO: 5487973 - DNA, 25 bp, Homo sapien
tctccaacaagagaatagtaggctg

SEQ ID NO: 5487974 - DNA, 25 bp, Homo sapien
tacaatgtactggccccaaagggag

SEQ ID NO: 5487975 - DNA, 25 bp, Homo sapien
cagtaaagactagccattgcattgg

SEQ ID NO: 5487976 - DNA, 25 bp, Homo sapien
aagggactggacccatacaatgtac

SEQ ID NO: 5487977 - DNA, 25 bp, Homo sapien
caccagggaagaccctaatttagtc

SEQ ID NO: 5487978 - DNA, 25 bp, Homo sapien
gcagctggcacactgagcacctgca

SEQ ID NO: 5487979 - DNA, 25 bp, Homo sapien
acaagagaatagtaggctgcatctg

SEQ ID NO: 5487980 - DNA, 25 bp, Homo sapien
gcgtcgtctggttttggctgcacaa

SEQ ID NO: 5487981 - DNA, 25 bp, Homo sapien
tctggttttggctgcacaaaggcga

SEQ ID NO: 5487982 - DNA, 25 bp, Homo sapien
agaggacaataccagcgtcgtctgg

SEQ ID NO: 5487983 - DNA, 25 bp, Homo sapien
aatagtaggctgcatctgtgaagag

SEQ ID NO: 5487984 - DNA, 25 bp, Homo sapien
tcacaccagcagtcaataaggccac

SEQ ID NO: 5487985 - DNA, 25 bp, Homo sapien
agagaaactatattatggatagggc

SEQ ID NO: 5487986 - DNA, 25 bp, Homo sapien
aggccactctagggaaaaatctttc

SEQ ID NO: 5487987 - DNA, 25 bp, Homo sapien
tcattctaagaaaacttggcaaata

SEQ ID NO: 5487988 - DNA, 25 bp, Homo sapien
atggatagggctgatttacattttc

SEQ ID NO: 5487989 - DNA, 25 bp, Homo sapien
gcagtcaataaggccactctaggga

SEQ ID NO: 5487990 - DNA, 25 bp, Homo sapien
ttacagtggcatcacaccagcagtc

SEQ ID NO: 5487991 - DNA, 25 bp, Homo sapien
aaatgtattcagtggaactcacagt

SEQ ID NO: 5487992 - DNA, 25 bp, Homo sapien
ttcagaacattaagatagcagttac

SEQ ID NO: 5487993 - DNA, 25 bp, Homo sapien
ctgaaatcagctttggttttagagc

SEQ ID NO: 5487994 - DNA, 25 bp, Homo sapien
aaaactttggactggaattggcatt

SEQ ID NO: 5487995 - DNA, 25 bp, Homo sapien
gaaactaatgcctgaatgagatgta

SEQ ID NO: 5487996 - DNA, 25 bp, Homo sapien
aatcccactctggagcagctctcgg

SEQ ID NO: 5487997 - DNA, 25 bp, Homo sapien
atgtgactatgtactacacgggttc

SEQ ID NO: 5487998 - DNA, 25 bp, Homo sapien
gagaagagcgattaattagccgatc

SEQ ID NO: 5487999 - DNA, 25 bp, Homo sapien
gctcagttacacggagaagagcgat

SEQ ID NO: 5488000 - DNA, 25 bp, Homo sapien
gtaggaaacagcagcacgttaacaa

SEQ ID NO: 5488001 - DNA, 25 bp, Homo sapien
attaggaaccatgaaattgcaattc

SEQ ID NO: 5488002 - DNA, 25 bp, Homo sapien
ggctccaagtaccgctcctgacacc

SEQ ID NO: 5488003 - DNA, 25 bp, Homo sapien
aattgcaattcctcggggaaggagc

SEQ ID NO: 5488004 - DNA, 25 bp, Homo sapien
ctgacacccacagcctaagtgatcc

SEQ ID NO: 5488005 - DNA, 25 bp, Homo sapien
gaaggagcgcgatcgctcagttaca

SEQ ID NO: 5488006 - DNA, 25 bp, Homo sapien
acctggacccactcatgaaccctca

SEQ ID NO: 5488007 - DNA, 25 bp, Homo sapien
ccaagtccaccagagtggctgcagg

SEQ ID NO: 5488008 - DNA, 25 bp, Homo sapien
atgaaccctcacatccgcgtgggcc

SEQ ID NO: 5488009 - DNA, 25 bp, Homo sapien
ggtctccagcctccgacccctcgcc

SEQ ID NO: 5488010 - DNA, 25 bp, Homo sapien
gagtccccgtgggtcaagcatttgt

SEQ ID NO: 5488011 - DNA, 25 bp, Homo sapien
gccgctgaccctgctccagcgggcg

SEQ ID NO: 5488012 - DNA, 25 bp, Homo sapien
ttgacttgctttcctcccgggtctc

SEQ ID NO: 5488013 - DNA, 25 bp, Homo sapien
cccaaagccaagtccaccagagtgg

SEQ ID NO: 5488014 - DNA, 25 bp, Homo sapien
tgcccctctccctcaagcctaagac

SEQ ID NO: 5488015 - DNA, 25 bp, Homo sapien
gccctcatgtctcgcctaggccggg

SEQ ID NO: 5488016 - DNA, 25 bp, Homo sapien
agcctaagacactaagaccccagac

SEQ ID NO: 5488017 - DNA, 25 bp, Homo sapien
ccaaataatgaggttttattcgact

SEQ ID NO: 5488018 - DNA, 25 bp, Homo sapien
agtcgaataaaacctcattatttgg

SEQ ID NO: 5488019 - DNA, 25 bp, Homo sapien
ggcagcttcaccaaggccacagctt

SEQ ID NO: 5488020 - DNA, 25 bp, Homo sapien
gcaggtcccctcccctctcctcctc

SEQ ID NO: 5488021 - DNA, 25 bp, Homo sapien
gaccatttgccagaatccaccgctt

SEQ ID NO: 5488022 - DNA, 25 bp, Homo sapien
ggctggtccccagtctgttggggtg

SEQ ID NO: 5488023 - DNA, 25 bp, Homo sapien
gctcgctcctggccaagggagctag

SEQ ID NO: 5488024 - DNA, 25 bp, Homo sapien
tcccccaccagggctgtagtgtgag

SEQ ID NO: 5488025 - DNA, 25 bp, Homo sapien
gagggcacaaggaccatttgccaga

SEQ ID NO: 5488026 - DNA, 25 bp, Homo sapien
gtccccagtctgttggggtggtgct

SEQ ID NO: 5488027 - DNA, 25 bp, Homo sapien
aaggccacagcttcgctcgctcctg

SEQ ID NO: 5488028 - DNA, 25 bp, Homo sapien
gggccctcccagatgcctgaggagg

SEQ ID NO: 5488029 - DNA, 25 bp, Homo sapien
ctcccctctcctcctcttccctccc

SEQ ID NO: 5488030 - DNA, 25 bp, Homo sapien
atttggtatagatgtgacacatttt

SEQ ID NO: 5488031 - DNA, 25 bp, Homo sapien
ttggtaatctggatcagctgcagtg

SEQ ID NO: 5488032 - DNA, 25 bp, Homo sapien
agtatggatcaccagccccggataa

SEQ ID NO: 5488033 - DNA, 25 bp, Homo sapien
tacacattttaagttatagggaata

SEQ ID NO: 5488034 - DNA, 25 bp, Homo sapien
gctaaatcaccatacctaaactgct

SEQ ID NO: 5488035 - DNA, 25 bp, Homo sapien
ctgggtccatctcatcatcaatatc

SEQ ID NO: 5488036 - DNA, 25 bp, Homo sapien
cagccccggataaatctgttccatt

SEQ ID NO: 5488037 - DNA, 25 bp, Homo sapien
tcgcttacgctctgattccaaacaa

SEQ ID NO: 5488038 - DNA, 25 bp, Homo sapien
atctggaaaaaagtcctctctttca

SEQ ID NO: 5488039 - DNA, 25 bp, Homo sapien
ataagcttcttctatctctgggtcc

SEQ ID NO: 5488040 - DNA, 25 bp, Homo sapien
tcgattttattgcagccaaaacagt

SEQ ID NO: 5488041 - DNA, 25 bp, Homo sapien
gctttacccttccctgcgggctctc

SEQ ID NO: 5488042 - DNA, 25 bp, Homo sapien
gcaccaccccaacagactggggacc

SEQ ID NO: 5488043 - DNA, 25 bp, Homo sapien
aatggtccttgtgccctccccactc

SEQ ID NO: 5488044 - DNA, 25 bp, Homo sapien
tgccccctcctcaggcatctgggag

SEQ ID NO: 5488045 - DNA, 25 bp, Homo sapien
ccccactcatccctggtctggtccc

SEQ ID NO: 5488046 - DNA, 25 bp, Homo sapien
ctccccactcatccctggtctggtc

SEQ ID NO: 5488047 - DNA, 25 bp, Homo sapien
cggtggattctggcaaatggtcctt

SEQ ID NO: 5488048 - DNA, 25 bp, Homo sapien
cctgcgggctctctccccgacacat

SEQ ID NO: 5488049 - DNA, 25 bp, Homo sapien
atagccctttaccctgagcaccacc

SEQ ID NO: 5488050 - DNA, 25 bp, Homo sapien
ctcgcctgcctgtgtctctccccaa

SEQ ID NO: 5488051 - DNA, 25 bp, Homo sapien
ggattctggcaaatggtccttgtgc

SEQ ID NO: 5488052 - DNA, 25 bp, Homo sapien
acctatcacgtccagccggcgtgcg

SEQ ID NO: 5488053 - DNA, 25 bp, Homo sapien
tctatgagatgatcctgaaacgcag

SEQ ID NO: 5488054 - DNA, 25 bp, Homo sapien
gagcgaaccaaagcgatgcttcgaa

SEQ ID NO: 5488055 - DNA, 25 bp, Homo sapien
tgacttaaggagctgcgaagtctga

SEQ ID NO: 5488056 - DNA, 25 bp, Homo sapien
acccaaatgcaggactggtgactta

SEQ ID NO: 5488057 - DNA, 25 bp, Homo sapien
gatcctgaaacgcaggaagtccctc

SEQ ID NO: 5488058 - DNA, 25 bp, Homo sapien
ccgctgctggtcatcgccaacaagc

SEQ ID NO: 5488059 - DNA, 25 bp, Homo sapien
gggcatggacaagctctatgagatg

SEQ ID NO: 5488060 - DNA, 25 bp, Homo sapien
gctgcgaagtctgatttaccggcct

SEQ ID NO: 5488061 - DNA, 25 bp, Homo sapien
taccggcctactctcgacctgcccc

SEQ ID NO: 5488062 - DNA, 25 bp, Homo sapien
acgagcttatcccggccaccaccta

SEQ ID NO: 5488063 - DNA, 25 bp, Homo sapien
atgagtagcataccccaaccaccct

SEQ ID NO: 5488064 - DNA, 25 bp, Homo sapien
gatggctagatgttttgtggaagat

SEQ ID NO: 5488065 - DNA, 25 bp, Homo sapien
gaaaggcaaaatggccagcattatc

SEQ ID NO: 5488066 - DNA, 25 bp, Homo sapien
ttgagatttcagttggaagacaccc

SEQ ID NO: 5488067 - DNA, 25 bp, Homo sapien
ttttgggtttactgggtgaatagca

SEQ ID NO: 5488068 - DNA, 25 bp, Homo sapien
gtttgtataggtagaatgattcatc

SEQ ID NO: 5488069 - DNA, 25 bp, Homo sapien
aaaaatcagataggaagtggccttt

SEQ ID NO: 5488070 - DNA, 25 bp, Homo sapien
tgttgaaaagcaatgcgaaagtcaa

SEQ ID NO: 5488071 - DNA, 25 bp, Homo sapien
ttcccaaggaaatgtcagaaaggca

SEQ ID NO: 5488072 - DNA, 25 bp, Homo sapien
aaggggaggttcttgcagattccca

SEQ ID NO: 5488073 - DNA, 25 bp, Homo sapien
gtggaagatcttagaattgcctgcc

SEQ ID NO: 5488074 - DNA, 25 bp, Homo sapien
gcagatatatggaaaacccagccag

SEQ ID NO: 5488075 - DNA, 25 bp, Homo sapien
gccctttaggtcacagcaggtcctc

SEQ ID NO: 5488076 - DNA, 25 bp, Homo sapien
tggggcccattcctgtctcgaagca

SEQ ID NO: 5488077 - DNA, 25 bp, Homo sapien
gtagcagctgtgccttcatggtcac

SEQ ID NO: 5488078 - DNA, 25 bp, Homo sapien
ggaaaacgaataaatgacagcagat

SEQ ID NO: 5488079 - DNA, 25 bp, Homo sapien
gggtctcaatggaccaggctgagct

SEQ ID NO: 5488080 - DNA, 25 bp, Homo sapien
tctgtttctgcatgacagtggggcc

SEQ ID NO: 5488081 - DNA, 25 bp, Homo sapien
ccatctctgagaggatgctaaggtc

SEQ ID NO: 5488082 - DNA, 25 bp, Homo sapien
tgatgtctgtttagagtgggtctca

SEQ ID NO: 5488083 - DNA, 25 bp, Homo sapien
taagctggacaatgagtaaaacgta

SEQ ID NO: 5488084 - DNA, 25 bp, Homo sapien
aacccagccagcgaccatgggaata

SEQ ID NO: 5488085 - DNA, 25 bp, Homo sapien
ctctaaagtggctaaaatatgcatt

SEQ ID NO: 5488086 - DNA, 25 bp, Homo sapien
atgaggtttctctaaagtggctaaa

SEQ ID NO: 5488087 - DNA, 25 bp, Homo sapien
tggaaactctgtgcctatgaggttt

SEQ ID NO: 5488088 - DNA, 25 bp, Homo sapien
tttaattctagagactgtaaggagt

SEQ ID NO: 5488089 - DNA, 25 bp, Homo sapien
aatgagtacatttaattctagagac

SEQ ID NO: 5488090 - DNA, 25 bp, Homo sapien
atttgcaatatacataatactggaa

SEQ ID NO: 5488091 - DNA, 25 bp, Homo sapien
gagggtcaagttcgtgaagatattc

SEQ ID NO: 5488092 - DNA, 25 bp, Homo sapien
actggaattgaaatgctgtctgatg

SEQ ID NO: 5488093 - DNA, 25 bp, Homo sapien
cttaaaattaatcttggaaactctg

SEQ ID NO: 5488094 - DNA, 25 bp, Homo sapien
ttaatatgttgtctaaatgagtaca

SEQ ID NO: 5488095 - DNA, 25 bp, Homo sapien
ataatactggaattgaaatgctgtc

SEQ ID NO: 5488096 - DNA, 25 bp, Homo sapien
ttccattgtggactgctaccctcac

SEQ ID NO: 5488097 - DNA, 25 bp, Homo sapien
agttattgagttagtcagacagaag

SEQ ID NO: 5488098 - DNA, 25 bp, Homo sapien
agtcagacagaaggattcatgatat

SEQ ID NO: 5488099 - DNA, 25 bp, Homo sapien
ttgagttagtcagacagaaggattc

SEQ ID NO: 5488100 - DNA, 25 bp, Homo sapien
gactgtaaggagtagagattatatg

SEQ ID NO: 5488101 - DNA, 25 bp, Homo sapien
agtagagattatatgctttggggct

SEQ ID NO: 5488102 - DNA, 25 bp, Homo sapien
atcagttgtacagatcccattaaac

SEQ ID NO: 5488103 - DNA, 25 bp, Homo sapien
gtacagatcccattaaacgaaattg

SEQ ID NO: 5488104 - DNA, 25 bp, Homo sapien
tggactgctaccctcacctaggata

SEQ ID NO: 5488105 - DNA, 25 bp, Homo sapien
atataacttgttgtctcctagctcc

SEQ ID NO: 5488106 - DNA, 25 bp, Homo sapien
taaaaggaatacaacctccactgtc

SEQ ID NO: 5488107 - DNA, 25 bp, Homo sapien
gcatttcaaatggtaaaaggcttaa

SEQ ID NO: 5488108 - DNA, 25 bp, Homo sapien
ggagaaagatatgaaaagtcgactt

SEQ ID NO: 5488109 - DNA, 25 bp, Homo sapien
cctcctcccatccccaacgcgcaca

SEQ ID NO: 5488110 - DNA, 25 bp, Homo sapien
ccaacgcgcacaacacatgcatttc

SEQ ID NO: 5488111 - DNA, 25 bp, Homo sapien
ggccacaggatctgctgccaccact

SEQ ID NO: 5488112 - DNA, 25 bp, Homo sapien
ccatcggtgtctggattaagggtca

SEQ ID NO: 5488113 - DNA, 25 bp, Homo sapien
tgtctgaaatcaggactgtgtaata

SEQ ID NO: 5488114 - DNA, 25 bp, Homo sapien
gaggtgacactgagccgctcctcag

SEQ ID NO: 5488115 - DNA, 25 bp, Homo sapien
taaatagattaaggttgaaattgtc

SEQ ID NO: 5488116 - DNA, 25 bp, Homo sapien
aaacagagttcatttcaggagaaag

SEQ ID NO: 5488117 - DNA, 25 bp, Homo sapien
atacaagtatcactgggtcccgtcc

SEQ ID NO: 5488118 - DNA, 25 bp, Homo sapien
ccccaaagcactgacaaagaaggag

SEQ ID NO: 5488119 - DNA, 25 bp, Homo sapien
tcccatgagtctcagctggggaacc

SEQ ID NO: 5488120 - DNA, 25 bp, Homo sapien
tgcaagcattgcaggttgaagtgtc

SEQ ID NO: 5488121 - DNA, 25 bp, Homo sapien
ggacatcaacaacccggtggacaga

SEQ ID NO: 5488122 - DNA, 25 bp, Homo sapien
aacaaatgtaccaaagaagcccctg

SEQ ID NO: 5488123 - DNA, 25 bp, Homo sapien
gggaaccgcattgatgacgtctcct

SEQ ID NO: 5488124 - DNA, 25 bp, Homo sapien
atatttggagtgaagtgcaagcatt

SEQ ID NO: 5488125 - DNA, 25 bp, Homo sapien
gatccccacagatggtacggaggga

SEQ ID NO: 5488126 - DNA, 25 bp, Homo sapien
agagcagccgaaccccattttggaa

SEQ ID NO: 5488127 - DNA, 25 bp, Homo sapien
cacagcacagcttcatcaccccgcc

SEQ ID NO: 5488128 - DNA, 25 bp, Homo sapien
actcacccggagcaagtcccatgag

SEQ ID NO: 5488129 - DNA, 25 bp, Homo sapien
ttctagtctttgtagtagcaaaaga

SEQ ID NO: 5488130 - DNA, 25 bp, Homo sapien
tcttttgctactacaaagactagaa

SEQ ID NO: 5488131 - DNA, 25 bp, Homo sapien
ccaggaaattagctgcagctgaagg

SEQ ID NO: 5488132 - DNA, 25 bp, Homo sapien
accatagtatgatgggggatgatga

SEQ ID NO: 5488133 - DNA, 25 bp, Homo sapien
gggatgatgaagatgcctgtagtga

SEQ ID NO: 5488134 - DNA, 25 bp, Homo sapien
gctgaaggcttggagccaaagtatc

SEQ ID NO: 5488135 - DNA, 25 bp, Homo sapien
ggagaggaggatagtgacctctcac

SEQ ID NO: 5488136 - DNA, 25 bp, Homo sapien
gaaatgaacatcttggcgacgtatc

SEQ ID NO: 5488137 - DNA, 25 bp, Homo sapien
caaagtatcggattcaggaacaaga

SEQ ID NO: 5488138 - DNA, 25 bp, Homo sapien
gatgcctgtagtgacaccgaggcca

SEQ ID NO: 5488139 - DNA, 25 bp, Homo sapien
tgaagccatggcgccagacatctta

SEQ ID NO: 5488140 - DNA, 25 bp, Homo sapien
cggcctcgcaccggcccatcaaggg

SEQ ID NO: 5488141 - DNA, 25 bp, Homo sapien
ggcgacgtatcatccagcagacaaa

SEQ ID NO: 5488142 - DNA, 25 bp, Homo sapien
ctcagctacggtgtctttgagggga

SEQ ID NO: 5488143 - DNA, 25 bp, Homo sapien
ggatctgagtggcaattggcactga

SEQ ID NO: 5488144 - DNA, 25 bp, Homo sapien
gacccctccagatttcgctccctcc

SEQ ID NO: 5488145 - DNA, 25 bp, Homo sapien
atacaccctggtgtccccagctggg

SEQ ID NO: 5488146 - DNA, 25 bp, Homo sapien
ggtgcccgatgaatcctgaactgct

SEQ ID NO: 5488147 - DNA, 25 bp, Homo sapien
gctcccagaacaggtcaccctcagc

SEQ ID NO: 5488148 - DNA, 25 bp, Homo sapien
tccaggggctagactccctcaggag

SEQ ID NO: 5488149 - DNA, 25 bp, Homo sapien
gtcttgtgataggcagtccctggca

SEQ ID NO: 5488150 - DNA, 25 bp, Homo sapien
gtcattaagctacagggccccttct

SEQ ID NO: 5488151 - DNA, 25 bp, Homo sapien
cctcaggaggctgaattgaaaaagg

SEQ ID NO: 5488152 - DNA, 25 bp, Homo sapien
gaggggaaactcaacgtcattaagc

SEQ ID NO: 5488153 - DNA, 25 bp, Homo sapien
gaccttcccagggagccttggtgac

SEQ ID NO: 5488154 - DNA, 25 bp, Homo sapien
ggaccctgggcctaattgcagttca

SEQ ID NO: 5488155 - DNA, 25 bp, Homo sapien
ctctccagaatcacgaaaaggtcct

SEQ ID NO: 5488156 - DNA, 25 bp, Homo sapien
tttcaccatagggtccagaagcaca

SEQ ID NO: 5488157 - DNA, 25 bp, Homo sapien
cgctcataggccccgtggacttttt

SEQ ID NO: 5488158 - DNA, 25 bp, Homo sapien
cacagtgcaaaacattgaggtgagc

SEQ ID NO: 5488159 - DNA, 25 bp, Homo sapien
aaggcaaggaaatgcaaagaattca

SEQ ID NO: 5488160 - DNA, 25 bp, Homo sapien
acaaaagcaactaaggcaaggaaat

SEQ ID NO: 5488161 - DNA, 25 bp, Homo sapien
taaccaaaatagatgagaatgagtc

SEQ ID NO: 5488162 - DNA, 25 bp, Homo sapien
attcagaagtgttggtctgtgtgcc

SEQ ID NO: 5488163 - DNA, 25 bp, Homo sapien
gaggtgagccctctaagccttggtc

SEQ ID NO: 5488164 - DNA, 25 bp, Homo sapien
taataagctgtaggaagaaaagtag

SEQ ID NO: 5488165 - DNA, 25 bp, Homo sapien
agttaagaaggcataaaaatgcccc

SEQ ID NO: 5488166 - DNA, 25 bp, Homo sapien
catgaagtgaggtcatagaacctac

SEQ ID NO: 5488167 - DNA, 25 bp, Homo sapien
acattgactttccaggtgatggccc

SEQ ID NO: 5488168 - DNA, 25 bp, Homo sapien
gggaacaatggcctatagttcagcc

SEQ ID NO: 5488169 - DNA, 25 bp, Homo sapien
gagacaaacctttcagcggaattgc

SEQ ID NO: 5488170 - DNA, 25 bp, Homo sapien
gactcgtcaggagtattgactctcc

SEQ ID NO: 5488171 - DNA, 25 bp, Homo sapien
ggaattgcctggaacccatgaagtg

SEQ ID NO: 5488172 - DNA, 25 bp, Homo sapien
tccacaatggagaatgttaggcttc

SEQ ID NO: 5488173 - DNA, 25 bp, Homo sapien
atcccacatgtgtaagctggaaaaa

SEQ ID NO: 5488174 - DNA, 25 bp, Homo sapien
ggtgatggccctacaaaactcaaac

SEQ ID NO: 5488175 - DNA, 25 bp, Homo sapien
tgctagatggccaagcctcagcctt

SEQ ID NO: 5488176 - DNA, 25 bp, Homo sapien
tggtccagtgcaacccttgcctcgc

SEQ ID NO: 5488177 - DNA, 25 bp, Homo sapien
actgccctggatgaagggcactgct

SEQ ID NO: 5488178 - DNA, 25 bp, Homo sapien
attttgtatggaatgctagatggcc

SEQ ID NO: 5488179 - DNA, 25 bp, Homo sapien
tcctatctcacggttgaggcagacc

SEQ ID NO: 5488180 - DNA, 25 bp, Homo sapien
aaaagattaaccagtgtgaacattc

SEQ ID NO: 5488181 - DNA, 25 bp, Homo sapien
atcatcagtcctagtcggcagttcc

SEQ ID NO: 5488182 - DNA, 25 bp, Homo sapien
agcagctagtaccagagactctcct

SEQ ID NO: 5488183 - DNA, 25 bp, Homo sapien
agttccttaagaatggactggcggc

SEQ ID NO: 5488184 - DNA, 25 bp, Homo sapien
ggttagaagaaccatctggaaacac

SEQ ID NO: 5488185 - DNA, 25 bp, Homo sapien
ggttgagctgatatggaaaagctgc

SEQ ID NO: 5488186 - DNA, 25 bp, Homo sapien
gtgtgtgccatgtgtagttctattt

SEQ ID NO: 5488187 - DNA, 25 bp, Homo sapien
aaagcacctttaggtttgcaccagt

SEQ ID NO: 5488188 - DNA, 25 bp, Homo sapien
tgcaaatctgcaaagtagtaaaact

SEQ ID NO: 5488189 - DNA, 25 bp, Homo sapien
tgaaacagatgttgcttgccccaac

SEQ ID NO: 5488190 - DNA, 25 bp, Homo sapien
gatgtagaagggcaaagtcctttaa

SEQ ID NO: 5488191 - DNA, 25 bp, Homo sapien
aggatgtaatttgatgtagaagggc

SEQ ID NO: 5488192 - DNA, 25 bp, Homo sapien
aatgactggcattcaagaggattac

SEQ ID NO: 5488193 - DNA, 25 bp, Homo sapien
tgtaagttcatgctaacctcttccc

SEQ ID NO: 5488194 - DNA, 25 bp, Homo sapien
tttgcaccagttattacagaaatgg

SEQ ID NO: 5488195 - DNA, 25 bp, Homo sapien
accatgtattcttaaggattgagca

SEQ ID NO: 5488196 - DNA, 25 bp, Homo sapien
taagacatagtaaaagcatgttgta

SEQ ID NO: 5488197 - DNA, 25 bp, Homo sapien
tttagtcctctaaggaccaggaagc

SEQ ID NO: 5488198 - DNA, 25 bp, Homo sapien
caaaaactcctaacaactgcaaaac

SEQ ID NO: 5488199 - DNA, 25 bp, Homo sapien
cctctaaggaccaggaagcaatttt

SEQ ID NO: 5488200 - DNA, 25 bp, Homo sapien
gaaaggctctaaaattcaggatgcc

SEQ ID NO: 5488201 - DNA, 25 bp, Homo sapien
gcaaaaccaaaagaggatcaaagct

SEQ ID NO: 5488202 - DNA, 25 bp, Homo sapien
gtttttgctagagtggaaatgaaag

SEQ ID NO: 5488203 - DNA, 25 bp, Homo sapien
tcaggatgccctgttcccttgtaaa

SEQ ID NO: 5488204 - DNA, 25 bp, Homo sapien
aatgagggtcttgtttttagtcctc

SEQ ID NO: 5488205 - DNA, 25 bp, Homo sapien
agaaaaacgcaagcccagtttttgc

SEQ ID NO: 5488206 - DNA, 25 bp, Homo sapien
ctgcaaaaccaaaagaggatcaaag

SEQ ID NO: 5488207 - DNA, 25 bp, Homo sapien
aatgccagcaaaaactcctaacaac

SEQ ID NO: 5488208 - DNA, 25 bp, Homo sapien
atcccacttgtttcaccgaacactc

SEQ ID NO: 5488209 - DNA, 25 bp, Homo sapien
ctcagaggctgagcaaccagcctca

SEQ ID NO: 5488210 - DNA, 25 bp, Homo sapien
catcctcagacagagcactgaaagc

SEQ ID NO: 5488211 - DNA, 25 bp, Homo sapien
accagcctcagagttattgagccat

SEQ ID NO: 5488212 - DNA, 25 bp, Homo sapien
aagacttgctggcccagaaaatccc

SEQ ID NO: 5488213 - DNA, 25 bp, Homo sapien
gtttggaagacttgctggcccagaa

SEQ ID NO: 5488214 - DNA, 25 bp, Homo sapien
agacaggatgcatcatatacagttt

SEQ ID NO: 5488215 - DNA, 25 bp, Homo sapien
tccctctctcacccgggctggcgta

SEQ ID NO: 5488216 - DNA, 25 bp, Homo sapien
gggggtcgagtttgcatatgcatat

SEQ ID NO: 5488217 - DNA, 25 bp, Homo sapien
gagccattatctgggcaggaacggg

SEQ ID NO: 5488218 - DNA, 25 bp, Homo sapien
acagagcactgaaagcatctgaggt

SEQ ID NO: 5488219 - DNA, 25 bp, Homo sapien
aataaagcaaattcagtctgtagga

SEQ ID NO: 5488220 - DNA, 25 bp, Homo sapien
tttaaatgtgaggattgtgaacttc

SEQ ID NO: 5488221 - DNA, 25 bp, Homo sapien
cattcactaagtaaacgaaggaact

SEQ ID NO: 5488222 - DNA, 25 bp, Homo sapien
cccagcaaaggataattgagattag

SEQ ID NO: 5488223 - DNA, 25 bp, Homo sapien
acttggcacatctgcggccagaaac

SEQ ID NO: 5488224 - DNA, 25 bp, Homo sapien
tctgcggccagaaactccattcact

SEQ ID NO: 5488225 - DNA, 25 bp, Homo sapien
atcttggcgctcatgttgcttcctg

SEQ ID NO: 5488226 - DNA, 25 bp, Homo sapien
aatcagacaacacatcttggcgctc

SEQ ID NO: 5488227 - DNA, 25 bp, Homo sapien
cctgtataagtgaaacctgtcattc

SEQ ID NO: 5488228 - DNA, 25 bp, Homo sapien
atgctgtgcataacaaagatcaaat

SEQ ID NO: 5488229 - DNA, 25 bp, Homo sapien
agattagagagtgtgtaaaacaaaa

SEQ ID NO: 5488230 - DNA, 25 bp, Homo sapien
agcgaggtgaagcccacctatcgca

SEQ ID NO: 5488231 - DNA, 25 bp, Homo sapien
gtgccctacaaggtgtgggccaagt

SEQ ID NO: 5488232 - DNA, 25 bp, Homo sapien
tcgcaactccatcaccgtgccctac

SEQ ID NO: 5488233 - DNA, 25 bp, Homo sapien
cccgagggcacctccttgactgtgg

SEQ ID NO: 5488234 - DNA, 25 bp, Homo sapien
cgtgacgctctggccaagctcatcg

SEQ ID NO: 5488235 - DNA, 25 bp, Homo sapien
ttcgatgtgggctccaacaagtacg

SEQ ID NO: 5488236 - DNA, 25 bp, Homo sapien
ggccaagttcggacacaccttctgc

SEQ ID NO: 5488237 - DNA, 25 bp, Homo sapien
agctcatcgacgactacggagtgga

SEQ ID NO: 5488238 - DNA, 25 bp, Homo sapien
agatgaagaagattcaagagaagca

SEQ ID NO: 5488239 - DNA, 25 bp, Homo sapien
ggctcatcgagttccgtgacgctct

SEQ ID NO: 5488240 - DNA, 25 bp, Homo sapien
acaagtacggcgtgtttatgcgagt

SEQ ID NO: 5488241 - DNA, 25 bp, Homo sapien
gcggaacctgaatcccaaagcagcc

SEQ ID NO: 5488242 - DNA, 25 bp, Homo sapien
gacaaagcgcagaccaagctgctca

SEQ ID NO: 5488243 - DNA, 25 bp, Homo sapien
tcatcctgcagcaggccgtgcaggt

SEQ ID NO: 5488244 - DNA, 25 bp, Homo sapien
gggcgcatgtgccagatgcacctca

SEQ ID NO: 5488245 - DNA, 25 bp, Homo sapien
ctctggccccagaacggccactcga

SEQ ID NO: 5488246 - DNA, 25 bp, Homo sapien
tgcacctcaagtcggacaaagcgca

SEQ ID NO: 5488247 - DNA, 25 bp, Homo sapien
cccacaaccccgccgggcacatgtg

SEQ ID NO: 5488248 - DNA, 25 bp, Homo sapien
cactcgagaccccgggcttcatcca

SEQ ID NO: 5488249 - DNA, 25 bp, Homo sapien
gcctgtttgaaacggcgagaagagg

SEQ ID NO: 5488250 - DNA, 25 bp, Homo sapien
ttcagccctgtgctctggccccaga

SEQ ID NO: 5488251 - DNA, 25 bp, Homo sapien
gagaacacgtcagcggctgaccact

SEQ ID NO: 5488252 - DNA, 25 bp, Homo sapien
cctctccctccagccaataggcagc

SEQ ID NO: 5488253 - DNA, 25 bp, Homo sapien
tgcctaagcctctccctccagccaa

SEQ ID NO: 5488254 - DNA, 25 bp, Homo sapien
tccagccaataggcagctttcttaa

SEQ ID NO: 5488255 - DNA, 25 bp, Homo sapien
taactatcctaacaagccttggacc

SEQ ID NO: 5488256 - DNA, 25 bp, Homo sapien
tagggcttctgcctaagcctctccc

SEQ ID NO: 5488257 - DNA, 25 bp, Homo sapien
aacaagccttggaccaaatggaaat

SEQ ID NO: 5488258 - DNA, 25 bp, Homo sapien
acgacagaagggccccttgcaaagt

SEQ ID NO: 5488259 - DNA, 25 bp, Homo sapien
tccctccagccaataggcagctttc

SEQ ID NO: 5488260 - DNA, 25 bp, Homo sapien
cttgcaaagtaatagggcttctgcc

SEQ ID NO: 5488261 - DNA, 25 bp, Homo sapien
cttggaccaaatggaaataaagctt

SEQ ID NO: 5488262 - DNA, 25 bp, Homo sapien
cagccaataggcagctttcttaact

SEQ ID NO: 5488263 - DNA, 25 bp, Homo sapien
agtgaggactctggttcgccaaaac

SEQ ID NO: 5488264 - DNA, 25 bp, Homo sapien
gcacactcctggttcgtagctatcc

SEQ ID NO: 5488265 - DNA, 25 bp, Homo sapien
gaaacctaagcatgccggatctgga

SEQ ID NO: 5488266 - DNA, 25 bp, Homo sapien
tagtatcagatctgccgtgggaagg

SEQ ID NO: 5488267 - DNA, 25 bp, Homo sapien
tgcagccccccagtcaccaagcttt

SEQ ID NO: 5488268 - DNA, 25 bp, Homo sapien
gctggaggtcaagttcatccgagaa

SEQ ID NO: 5488269 - DNA, 25 bp, Homo sapien
ctggaaaacagattgatagagctac

SEQ ID NO: 5488270 - DNA, 25 bp, Homo sapien
ctgatagcaggaacacgttgatcct

SEQ ID NO: 5488271 - DNA, 25 bp, Homo sapien
aaggacaggaagatcatccctctca

SEQ ID NO: 5488272 - DNA, 25 bp, Homo sapien
catccgagaagtaacaccatatatc

SEQ ID NO: 5488273 - DNA, 25 bp, Homo sapien
gttcgccaaaacaccagaacagcac

SEQ ID NO: 5488274 - DNA, 25 bp, Homo sapien
gttagctacactctgaaggacattc

SEQ ID NO: 5488275 - DNA, 25 bp, Homo sapien
gtcaacatgggcatcagtgtggtta

SEQ ID NO: 5488276 - DNA, 25 bp, Homo sapien
tatttgcactctttggggaaggctc

SEQ ID NO: 5488277 - DNA, 25 bp, Homo sapien
ggcacagagagattacgaactgaag

SEQ ID NO: 5488278 - DNA, 25 bp, Homo sapien
tcaagtccaaaaagatgcacggatt

SEQ ID NO: 5488279 - DNA, 25 bp, Homo sapien
gcaggaaaaggtgtctgctcagtac

SEQ ID NO: 5488280 - DNA, 25 bp, Homo sapien
ctatgacatcgaggtcaacacccgc

SEQ ID NO: 5488281 - DNA, 25 bp, Homo sapien
gaaggctcgaacagctcaagtccaa

SEQ ID NO: 5488282 - DNA, 25 bp, Homo sapien
actgaagaaggccgcctatgacatc

SEQ ID NO: 5488283 - DNA, 25 bp, Homo sapien
aaggacattcacgatgaccaggact

SEQ ID NO: 5488284 - DNA, 25 bp, Homo sapien
gatctataaggacaggcagaaattc

SEQ ID NO: 5488285 - DNA, 25 bp, Homo sapien
atgtcggtgggaaaagtctttcacc

SEQ ID NO: 5488286 - DNA, 25 bp, Homo sapien
aggccaactcgaccacagatgctct

SEQ ID NO: 5488287 - DNA, 25 bp, Homo sapien
ggtgcacgctggaaacttctccacc

SEQ ID NO: 5488288 - DNA, 25 bp, Homo sapien
ctccctgggctgttatggggataag

SEQ ID NO: 5488289 - DNA, 25 bp, Homo sapien
cgccccgagccgcgtttctttcctc

SEQ ID NO: 5488290 - DNA, 25 bp, Homo sapien
tgacaccacccgcctgtacgacttc

SEQ ID NO: 5488291 - DNA, 25 bp, Homo sapien
gacttcaactcctactggagggtgc

SEQ ID NO: 5488292 - DNA, 25 bp, Homo sapien
ctcatcatcgtggatgacctgcgcc

SEQ ID NO: 5488293 - DNA, 25 bp, Homo sapien
aggagaatggctatgtgaccatgtc

SEQ ID NO: 5488294 - DNA, 25 bp, Homo sapien
ccgatgattctccgtatagctggtc

SEQ ID NO: 5488295 - DNA, 25 bp, Homo sapien
attgaccaactggcatcccacagcc

SEQ ID NO: 5488296 - DNA, 25 bp, Homo sapien
ggcaagtgaggcctatctggttggc

SEQ ID NO: 5488297 - DNA, 25 bp, Homo sapien
gtaagtaaggaggtctctgtaccat

SEQ ID NO: 5488298 - DNA, 25 bp, Homo sapien
aaaacagatctgcgcttccagagcg

SEQ ID NO: 5488299 - DNA, 25 bp, Homo sapien
actgcccgcaaatcgaccggtggta

SEQ ID NO: 5488300 - DNA, 25 bp, Homo sapien
ggagaacgtgcttaagaatccacta

SEQ ID NO: 5488301 - DNA, 25 bp, Homo sapien
catggctcgtacaaagcagactgcc

SEQ ID NO: 5488302 - DNA, 25 bp, Homo sapien
cttccagcgtctggtgcgagaaatt

SEQ ID NO: 5488303 - DNA, 25 bp, Homo sapien
caggaagcaactggctacaaaagcc

SEQ ID NO: 5488304 - DNA, 25 bp, Homo sapien
ggctacaaaagccgctcgcaagagt

SEQ ID NO: 5488305 - DNA, 25 bp, Homo sapien
gtggcgctccgtgaaattagacgtt

SEQ ID NO: 5488306 - DNA, 25 bp, Homo sapien
aggggtgaagaaacctcatcgttac

SEQ ID NO: 5488307 - DNA, 25 bp, Homo sapien
taaactatggtcgagaaataatctt

SEQ ID NO: 5488308 - DNA, 25 bp, Homo sapien
aagattatttctcgaccatagttta

SEQ ID NO: 5488309 - DNA, 25 bp, Homo sapien
ccagcgtctacaggaagcgtaggat

SEQ ID NO: 5488310 - DNA, 25 bp, Homo sapien
atcctacgcttcctgtagacgctgg

SEQ ID NO: 5488311 - DNA, 25 bp, Homo sapien
ctgggtctggctgtcactgctatga

SEQ ID NO: 5488312 - DNA, 25 bp, Homo sapien
aaaaagcctcgtgccgaattcggcg

SEQ ID NO: 5488313 - DNA, 25 bp, Homo sapien
gctatgaagtctcgaccctaagccc

SEQ ID NO: 5488314 - DNA, 25 bp, Homo sapien
tgattccaaaacccagggagcaacc

SEQ ID NO: 5488315 - DNA, 25 bp, Homo sapien
attccagaatgaagtagctcggcaa

SEQ ID NO: 5488316 - DNA, 25 bp, Homo sapien
gggtttcacggtcgcagccatcttg

SEQ ID NO: 5488317 - DNA, 25 bp, Homo sapien
tctcctttgagaggcccatgtgtcg

SEQ ID NO: 5488318 - DNA, 25 bp, Homo sapien
ccctaagcccagggtctggccttga

SEQ ID NO: 5488319 - DNA, 25 bp, Homo sapien
ggcaattaataagtgaagaaggtac

SEQ ID NO: 5488320 - DNA, 25 bp, Homo sapien
actggccctaccgtgggacttactc

SEQ ID NO: 5488321 - DNA, 25 bp, Homo sapien
tggccttgaaagctccgcagaaatg

SEQ ID NO: 5488322 - DNA, 25 bp, Homo sapien
ataaataagacggcacattcatata

SEQ ID NO: 5488323 - DNA, 25 bp, Homo sapien
tgctcaatagaccagactcccccaa

SEQ ID NO: 5488324 - DNA, 25 bp, Homo sapien
tacaatatggtctgaacaatctcct

SEQ ID NO: 5488325 - DNA, 25 bp, Homo sapien
cttagagctctcagtaaaaactttc

SEQ ID NO: 5488326 - DNA, 25 bp, Homo sapien
gatcattcatcatagcaccaagcct

SEQ ID NO: 5488327 - DNA, 25 bp, Homo sapien
cagcaccactgtgagtgacataggc

SEQ ID NO: 5488328 - DNA, 25 bp, Homo sapien
tgacataggcagcatcttatggtgc

SEQ ID NO: 5488329 - DNA, 25 bp, Homo sapien
tagaaaacagtcaaataacaaatac

SEQ ID NO: 5488330 - DNA, 25 bp, Homo sapien
agacatagtcaattaagccctgcac

SEQ ID NO: 5488331 - DNA, 25 bp, Homo sapien
aagccctgcacaataaggaaacatt

SEQ ID NO: 5488332 - DNA, 25 bp, Homo sapien
gtctttggcggatagtatcagcacc

SEQ ID NO: 5488333 - DNA, 25 bp, Homo sapien
ggtgcaaagggtgcccctctgtcaa

SEQ ID NO: 5488334 - DNA, 25 bp, Homo sapien
ggcctttgcgcctctagaggcagcc

SEQ ID NO: 5488335 - DNA, 25 bp, Homo sapien
actattaagccataggagtcctggg

SEQ ID NO: 5488336 - DNA, 25 bp, Homo sapien
cttggctcctgtgtttagaggggtg

SEQ ID NO: 5488337 - DNA, 25 bp, Homo sapien
ctagaggcagccactcatggattca

SEQ ID NO: 5488338 - DNA, 25 bp, Homo sapien
ctgggacaagacactgtactgccct

SEQ ID NO: 5488339 - DNA, 25 bp, Homo sapien
ctgcagaacatgaaccttccgctcc

SEQ ID NO: 5488340 - DNA, 25 bp, Homo sapien
aaacagaccctggcgcttgtgatgt

SEQ ID NO: 5488341 - DNA, 25 bp, Homo sapien
cctctgtcaacacccttggctcctg

SEQ ID NO: 5488342 - DNA, 25 bp, Homo sapien
tcctccgatgctggcctttgcgcct

SEQ ID NO: 5488343 - DNA, 25 bp, Homo sapien
cttccatcaggaccactattaagcc

SEQ ID NO: 5488344 - DNA, 25 bp, Homo sapien
ggacctagaatgagatctggaccta

SEQ ID NO: 5488345 - DNA, 25 bp, Homo sapien
tttccggcctctggctgactcattc

SEQ ID NO: 5488346 - DNA, 25 bp, Homo sapien
tcttcttggggacagtgattcagat

SEQ ID NO: 5488347 - DNA, 25 bp, Homo sapien
ttcctcgtggacatctccaaccatc

SEQ ID NO: 5488348 - DNA, 25 bp, Homo sapien
ttggggacagtgattcagatcttct

SEQ ID NO: 5488349 - DNA, 25 bp, Homo sapien
aatgagatctggacctagaccactt

SEQ ID NO: 5488350 - DNA, 25 bp, Homo sapien
ccctttttggagaccgagactgaga

SEQ ID NO: 5488351 - DNA, 25 bp, Homo sapien
tgttctacatcttgagggggaccta

SEQ ID NO: 5488352 - DNA, 25 bp, Homo sapien
accggggagagtaactatctctgtc

SEQ ID NO: 5488353 - DNA, 25 bp, Homo sapien
tctaccaaatgatgaactcttactt

SEQ ID NO: 5488354 - DNA, 25 bp, Homo sapien
agaccgagactgagattgcctcctt

SEQ ID NO: 5488355 - DNA, 25 bp, Homo sapien
caaagcaaaagatgttgatcctaga

SEQ ID NO: 5488356 - DNA, 25 bp, Homo sapien
atttcagtaagaaaaaggccaatgc

SEQ ID NO: 5488357 - DNA, 25 bp, Homo sapien
aatctctgtttgctgggttggctga

SEQ ID NO: 5488358 - DNA, 25 bp, Homo sapien
tctatccattaaaaagttgacacat

SEQ ID NO: 5488359 - DNA, 25 bp, Homo sapien
aagtaaaataaacatctgatcagct

SEQ ID NO: 5488360 - DNA, 25 bp, Homo sapien
aggccaatgccaaatgaaagtaaaa

SEQ ID NO: 5488361 - DNA, 25 bp, Homo sapien
aaaatcaacagagtctgataatctc

SEQ ID NO: 5488362 - DNA, 25 bp, Homo sapien
gacctgcaaaggtcagagacagaaa

SEQ ID NO: 5488363 - DNA, 25 bp, Homo sapien
aaaaaagtttcagatatatagtatc

SEQ ID NO: 5488364 - DNA, 25 bp, Homo sapien
aaagccaagagatgttgatttttca

SEQ ID NO: 5488365 - DNA, 25 bp, Homo sapien
attaagaaaatagacctgcaaaggt

SEQ ID NO: 5488366 - DNA, 25 bp, Homo sapien
atcatcaaggccatggtgcttaaac

SEQ ID NO: 5488367 - DNA, 25 bp, Homo sapien
actactctccaaatcggagtccatc

SEQ ID NO: 5488368 - DNA, 25 bp, Homo sapien
cataggtgacaaccagttacttttc

SEQ ID NO: 5488369 - DNA, 25 bp, Homo sapien
cacgtaagggtctcataggtgacaa

SEQ ID NO: 5488370 - DNA, 25 bp, Homo sapien
aagggtctcataggtgacaaccagt

SEQ ID NO: 5488371 - DNA, 25 bp, Homo sapien
ttaactaaattacagctgctttgaa

SEQ ID NO: 5488372 - DNA, 25 bp, Homo sapien
ttcttctccccaacagtgaatcatc

SEQ ID NO: 5488373 - DNA, 25 bp, Homo sapien
acaatcacgtaagggtctcataggt

SEQ ID NO: 5488374 - DNA, 25 bp, Homo sapien
aaatcggagtccatcacttcacttc

SEQ ID NO: 5488375 - DNA, 25 bp, Homo sapien
tccccaacagtgaatcatcaaggcc

SEQ ID NO: 5488376 - DNA, 25 bp, Homo sapien
taactaacaatcacgtaagggtctc

SEQ ID NO: 5488377 - DNA, 25 bp, Homo sapien
ccgaccctgggtgggcagacgaaca

SEQ ID NO: 5488378 - DNA, 25 bp, Homo sapien
tgttcgtctgcccacccagggtcgg

SEQ ID NO: 5488379 - DNA, 25 bp, Homo sapien
aacaacttgcaaaccccagggatgg

SEQ ID NO: 5488380 - DNA, 25 bp, Homo sapien
tcatatgctcaaacactggaatctt

SEQ ID NO: 5488381 - DNA, 25 bp, Homo sapien
ctagcacaattaagcaggcagagtc

SEQ ID NO: 5488382 - DNA, 25 bp, Homo sapien
agagttaatgcagagtcctaaggat

SEQ ID NO: 5488383 - DNA, 25 bp, Homo sapien
gtcctaaggataatctagtagtcac

SEQ ID NO: 5488384 - DNA, 25 bp, Homo sapien
tggctgaagactgttcatgccgttc

SEQ ID NO: 5488385 - DNA, 25 bp, Homo sapien
ttgcagacaagaagccaaccatttt

SEQ ID NO: 5488386 - DNA, 25 bp, Homo sapien
ggatggaaaaaccctaagaatgcac

SEQ ID NO: 5488387 - DNA, 25 bp, Homo sapien
atcacaactgtggctgaagactgtt

SEQ ID NO: 5488388 - DNA, 25 bp, Homo sapien
atgagatctcaaagcagtatagttc

SEQ ID NO: 5488389 - DNA, 25 bp, Homo sapien
atcagctggcttgcagacaagaagc

SEQ ID NO: 5488390 - DNA, 25 bp, Homo sapien
aaggtcctgcctgctgatagccatg

SEQ ID NO: 5488391 - DNA, 25 bp, Homo sapien
ttcaacctggtaaagatcatccgca

SEQ ID NO: 5488392 - DNA, 25 bp, Homo sapien
gtcagacggcgagaatgtcattata

SEQ ID NO: 5488393 - DNA, 25 bp, Homo sapien
gccacgcacatctacggcgcctcgg

SEQ ID NO: 5488394 - DNA, 25 bp, Homo sapien
aggccaatgtctgcagcggtttcat

SEQ ID NO: 5488395 - DNA, 25 bp, Homo sapien
gtcccccttctcgggcgagagtgac

SEQ ID NO: 5488396 - DNA, 25 bp, Homo sapien
ctgatagccatgagcatgccagtgg

SEQ ID NO: 5488397 - DNA, 25 bp, Homo sapien
atccccgtgtactgtgggctcatcc

SEQ ID NO: 5488398 - DNA, 25 bp, Homo sapien
gttcattgaggtatctaaagaggcc

SEQ ID NO: 5488399 - DNA, 25 bp, Homo sapien
ttcctcggcgtctactacgtcggcg

SEQ ID NO: 5488400 - DNA, 25 bp, Homo sapien
atggtggcatttcagacaacctgcc

SEQ ID NO: 5488401 - DNA, 25 bp, Homo sapien
gactggctgtatatgcatcccctga

SEQ ID NO: 5488402 - DNA, 25 bp, Homo sapien
gggtgacctggtctcagtgaagaaa

SEQ ID NO: 5488403 - DNA, 25 bp, Homo sapien
gtgaagaaatctttaggccggaatc

SEQ ID NO: 5488404 - DNA, 25 bp, Homo sapien
atgtcaaatgggagctgaaccctga

SEQ ID NO: 5488405 - DNA, 25 bp, Homo sapien
gctcatcctgacgcagtcggtggag

SEQ ID NO: 5488406 - DNA, 25 bp, Homo sapien
aagaaaacctggagctcatcctgac

SEQ ID NO: 5488407 - DNA, 25 bp, Homo sapien
ttaggccggaatcgactccttcctc

SEQ ID NO: 5488408 - DNA, 25 bp, Homo sapien
ctgcaccggcgacatcgcgtctata

SEQ ID NO: 5488409 - DNA, 25 bp, Homo sapien
catcccctgaaaacaagaagctgtt

SEQ ID NO: 5488410 - DNA, 25 bp, Homo sapien
ctgaaccctgaaatagttgcccgcc

SEQ ID NO: 5488411 - DNA, 25 bp, Homo sapien
gaacaatgtcaaatgggagctgaac

SEQ ID NO: 5488412 - DNA, 25 bp, Homo sapien
atctggtttccggcgcaagttaggt

SEQ ID NO: 5488413 - DNA, 25 bp, Homo sapien
ggatgctcgctccaaccgactgctg

SEQ ID NO: 5488414 - DNA, 25 bp, Homo sapien
caatgtgcaatcaaagtcctcggcc

SEQ ID NO: 5488415 - DNA, 25 bp, Homo sapien
ggtaagccctggctgcctccaccca

SEQ ID NO: 5488416 - DNA, 25 bp, Homo sapien
gatggcaagggacttcctgtaacaa

SEQ ID NO: 5488417 - DNA, 25 bp, Homo sapien
tacatctcaagttgggggacaaaaa

SEQ ID NO: 5488418 - DNA, 25 bp, Homo sapien
tctcaagtcagtgtacaggtaagcc

SEQ ID NO: 5488419 - DNA, 25 bp, Homo sapien
ggagaggactgggccattctcctta

SEQ ID NO: 5488420 - DNA, 25 bp, Homo sapien
ccacattgtgaactttgggggatgc

SEQ ID NO: 5488421 - DNA, 25 bp, Homo sapien
gggcacgaaggctcatcattcaaaa

SEQ ID NO: 5488422 - DNA, 25 bp, Homo sapien
cagggagaccaaaagccttcataca

SEQ ID NO: 5488423 - DNA, 25 bp, Homo sapien
gtgaggagctggcttaccagttgtc

SEQ ID NO: 5488424 - DNA, 25 bp, Homo sapien
acattctggtcaacaatggtggaat

SEQ ID NO: 5488425 - DNA, 25 bp, Homo sapien
gtgcatggataccagcttggatgtc

SEQ ID NO: 5488426 - DNA, 25 bp, Homo sapien
accagttgtctaaactaggagtttc

SEQ ID NO: 5488427 - DNA, 25 bp, Homo sapien
ggcgacctgacgctactatgggccg

SEQ ID NO: 5488428 - DNA, 25 bp, Homo sapien
gaaaagaagatgcctagagaatggc

SEQ ID NO: 5488429 - DNA, 25 bp, Homo sapien
ctcttgtgctgtcagccagaagagt

SEQ ID NO: 5488430 - DNA, 25 bp, Homo sapien
tgaccgacactggttcccatgaagc

SEQ ID NO: 5488431 - DNA, 25 bp, Homo sapien
tggtggaatgtcccagcgttctctg

SEQ ID NO: 5488432 - DNA, 25 bp, Homo sapien
tccaggagtttggtagaatcgacat

SEQ ID NO: 5488433 - DNA, 25 bp, Homo sapien
ttttgccccttgacctgaccgacac

SEQ ID NO: 5488434 - DNA, 25 bp, Homo sapien
gcctcccctgacccaaccacttgac

SEQ ID NO: 5488435 - DNA, 25 bp, Homo sapien
gtgctttcggccatgatccggggag

SEQ ID NO: 5488436 - DNA, 25 bp, Homo sapien
aggccctgctggatcgatacttcga

SEQ ID NO: 5488437 - DNA, 25 bp, Homo sapien
gacacagccatccttgggtgtaggc

SEQ ID NO: 5488438 - DNA, 25 bp, Homo sapien
ggggtgacaggctcatccatgagca

SEQ ID NO: 5488439 - DNA, 25 bp, Homo sapien
cttagccccaggagcaaattaaaag

SEQ ID NO: 5488440 - DNA, 25 bp, Homo sapien
cttcgaggctgatcctccagggcag

SEQ ID NO: 5488441 - DNA, 25 bp, Homo sapien
cagatggctctcggttccaggtgtg

SEQ ID NO: 5488442 - DNA, 25 bp, Homo sapien
gcagtctggccgcgtgctttcggcc

SEQ ID NO: 5488443 - DNA, 25 bp, Homo sapien
tttaacaagcggatcctgtgcctgt

SEQ ID NO: 5488444 - DNA, 25 bp, Homo sapien
atcctgtgcctgttccgcccgcagt

SEQ ID NO: 5488445 - DNA, 25 bp, Homo sapien
aacaagctctgaacagactacgtgc

SEQ ID NO: 5488446 - DNA, 25 bp, Homo sapien
taatattgacagaaggtgcagtttt

SEQ ID NO: 5488447 - DNA, 25 bp, Homo sapien
ccaaacatgactggacagcagcttt

SEQ ID NO: 5488448 - DNA, 25 bp, Homo sapien
aaaagaatctctagctgaccagttt

SEQ ID NO: 5488449 - DNA, 25 bp, Homo sapien
aagtgcccatagtttagtgacaatt

SEQ ID NO: 5488450 - DNA, 25 bp, Homo sapien
gattggtctggtgtcagctgtgttt

SEQ ID NO: 5488451 - DNA, 25 bp, Homo sapien
gaacagactacgtgctcagcttaga

SEQ ID NO: 5488452 - DNA, 25 bp, Homo sapien
tttgggttatagtcgtgattttcgc

SEQ ID NO: 5488453 - DNA, 25 bp, Homo sapien
ccggatggattttagggattggtct

SEQ ID NO: 5488454 - DNA, 25 bp, Homo sapien
ttgagtcttaagaaaaagtgcccat

SEQ ID NO: 5488455 - DNA, 25 bp, Homo sapien
gaaagcaaggatcacacttccccct

SEQ ID NO: 5488456 - DNA, 25 bp, Homo sapien
gtctggggttgcaaatgaaccattc

SEQ ID NO: 5488457 - DNA, 25 bp, Homo sapien
ccctgagagtggaacccttacatcc

SEQ ID NO: 5488458 - DNA, 25 bp, Homo sapien
attgctgttcatgagtggaatccat

SEQ ID NO: 5488459 - DNA, 25 bp, Homo sapien
ggcaaatactgtggtctggggttgc

SEQ ID NO: 5488460 - DNA, 25 bp, Homo sapien
tggagtcagcagaactgaaataggc

SEQ ID NO: 5488461 - DNA, 25 bp, Homo sapien
ggagagagagttcgcatcaaatttg

SEQ ID NO: 5488462 - DNA, 25 bp, Homo sapien
tttgtgaatgggagatccgtgtaaa

SEQ ID NO: 5488463 - DNA, 25 bp, Homo sapien
acccacagacctatcccaacagcac

SEQ ID NO: 5488464 - DNA, 25 bp, Homo sapien
ctggacgcggatttttggcctcata

SEQ ID NO: 5488465 - DNA, 25 bp, Homo sapien
ggatgtggacacactgtactaggcc

SEQ ID NO: 5488466 - DNA, 25 bp, Homo sapien
ttgaatcaaaaggcaatgaaatcac

SEQ ID NO: 5488467 - DNA, 25 bp, Homo sapien
agtcaaactggtcagctagagattc

SEQ ID NO: 5488468 - DNA, 25 bp, Homo sapien
tattacagggtcaagaaacaaaagc

SEQ ID NO: 5488469 - DNA, 25 bp, Homo sapien
aagaaacaaaagctgctgtccagtc

SEQ ID NO: 5488470 - DNA, 25 bp, Homo sapien
ctcaagtacaacagaaacaagtcat

SEQ ID NO: 5488471 - DNA, 25 bp, Homo sapien
ttagcgaaaatcacgactataaccc

SEQ ID NO: 5488472 - DNA, 25 bp, Homo sapien
gccaaaataaaggctttgcggagaa

SEQ ID NO: 5488473 - DNA, 25 bp, Homo sapien
aacacagctgacaccagaccaatcc

SEQ ID NO: 5488474 - DNA, 25 bp, Homo sapien
ttgcggagaaatgaaaagcctataa

SEQ ID NO: 5488475 - DNA, 25 bp, Homo sapien
tataatcaggatttaggtgtgcaat

SEQ ID NO: 5488476 - DNA, 25 bp, Homo sapien
tctaagctgagcacgtagtctgttc

SEQ ID NO: 5488477 - DNA, 25 bp, Homo sapien
tggacaataacgtttggggtcagac

SEQ ID NO: 5488478 - DNA, 25 bp, Homo sapien
aagtatattaaagcctatgggatgc

SEQ ID NO: 5488479 - DNA, 25 bp, Homo sapien
aagtgaaagaatttagactggcctt

SEQ ID NO: 5488480 - DNA, 25 bp, Homo sapien
aagtgacaaagtccacgcagaactc

SEQ ID NO: 5488481 - DNA, 25 bp, Homo sapien
cagaactctttcagggtaaatggct

SEQ ID NO: 5488482 - DNA, 25 bp, Homo sapien
gtcaatgtgttaagaattactgcgc

SEQ ID NO: 5488483 - DNA, 25 bp, Homo sapien
ggaatgggaggactccgtttgaata

SEQ ID NO: 5488484 - DNA, 25 bp, Homo sapien
ttactatgcaagtgacaaagtccac

SEQ ID NO: 5488485 - DNA, 25 bp, Homo sapien
ttctgaacaatgaggcacatgctat

SEQ ID NO: 5488486 - DNA, 25 bp, Homo sapien
ctgtaaagatgtaagtgaaagaatt

SEQ ID NO: 5488487 - DNA, 25 bp, Homo sapien
ggtccagttgaacatgagaaaagtc

SEQ ID NO: 5488488 - DNA, 25 bp, Homo sapien
agatttctgggtatggaagagagaa

SEQ ID NO: 5488489 - DNA, 25 bp, Homo sapien
actgattctgtgaaaataccccctt

SEQ ID NO: 5488490 - DNA, 25 bp, Homo sapien
ataaaaatccttgcataccttgttc

SEQ ID NO: 5488491 - DNA, 25 bp, Homo sapien
gcataccttgttcaattggagaatt

SEQ ID NO: 5488492 - DNA, 25 bp, Homo sapien
ccattagtggcatgctcattcagct

SEQ ID NO: 5488493 - DNA, 25 bp, Homo sapien
ttccagtaagttattttgctctcac

SEQ ID NO: 5488494 - DNA, 25 bp, Homo sapien
tgtacgtagctgttacatgtagggc

SEQ ID NO: 5488495 - DNA, 25 bp, Homo sapien
cgtagctgttacatgtagggcaatc

SEQ ID NO: 5488496 - DNA, 25 bp, Homo sapien
ttgattgacatcaagtggagacggg

SEQ ID NO: 5488497 - DNA, 25 bp, Homo sapien
ataccccctttctccattagtggca

SEQ ID NO: 5488498 - DNA, 25 bp, Homo sapien
ttttcccttcaagtcaagcgtcttg

SEQ ID NO: 5488499 - DNA, 25 bp, Homo sapien
gttacatgtagggcaatctgtcttt

SEQ ID NO: 5488500 - DNA, 25 bp, Homo sapien
tcgtgcccttccaccaccacccaac

SEQ ID NO: 5488501 - DNA, 25 bp, Homo sapien
gttgggtggtggtggaagggcacga

SEQ ID NO: 5488502 - DNA, 25 bp, Homo sapien
agagagaacacagctaaaaccaagc

SEQ ID NO: 5488503 - DNA, 25 bp, Homo sapien
taagcagagaagtaatgttcctaac

SEQ ID NO: 5488504 - DNA, 25 bp, Homo sapien
gagtctcttgagtccaaagtggtgt

SEQ ID NO: 5488505 - DNA, 25 bp, Homo sapien
aatctacctaacagccatttggttt

SEQ ID NO: 5488506 - DNA, 25 bp, Homo sapien
ttggtttggatgtattgaagctaat

SEQ ID NO: 5488507 - DNA, 25 bp, Homo sapien
caaatccaagttaaaacatctgatc

SEQ ID NO: 5488508 - DNA, 25 bp, Homo sapien
aaacaggataatacgttactgagtc

SEQ ID NO: 5488509 - DNA, 25 bp, Homo sapien
gagtccaaagtggtgtcagatattg

SEQ ID NO: 5488510 - DNA, 25 bp, Homo sapien
tcaagtgggttatccagagagaaca

SEQ ID NO: 5488511 - DNA, 25 bp, Homo sapien
aatgggcagagaaacacaatataaa

SEQ ID NO: 5488512 - DNA, 25 bp, Homo sapien
tataggataatagaaggtaagaatt

SEQ ID NO: 5488513 - DNA, 25 bp, Homo sapien
tgagacataaaactgagtcacgaaa

SEQ ID NO: 5488514 - DNA, 25 bp, Homo sapien
tttcgtgactcagttttatgtctca

SEQ ID NO: 5488515 - DNA, 25 bp, Homo sapien
ggtgagacataaaactgagtcacga

SEQ ID NO: 5488516 - DNA, 25 bp, Homo sapien
tcgtgactcagttttatgtctcacc

SEQ ID NO: 5488517 - DNA, 25 bp, Homo sapien
ggccgacaagcgtgggcccacaccc

SEQ ID NO: 5488518 - DNA, 25 bp, Homo sapien
gggtgtgggcccacgcttgtcggcc

SEQ ID NO: 5488519 - DNA, 25 bp, Homo sapien
ccccggcccgtcacctcttcaccac

SEQ ID NO: 5488520 - DNA, 25 bp, Homo sapien
gtggtgaagaggtgacgggccgggg

SEQ ID NO: 5488521 - DNA, 25 bp, Homo sapien
ttcgtgtgctatatagtaaggtcaa

SEQ ID NO: 5488522 - DNA, 25 bp, Homo sapien
ttaactttaaggattgagcaggcac

SEQ ID NO: 5488523 - DNA, 25 bp, Homo sapien
agaataacaagtacaggtggagttc

SEQ ID NO: 5488524 - DNA, 25 bp, Homo sapien
catgcatgttactagcacaagctgc

SEQ ID NO: 5488525 - DNA, 25 bp, Homo sapien
agctgggtggagttgaactctaaaa

SEQ ID NO: 5488526 - DNA, 25 bp, Homo sapien
ttcccaacggaaatgcaggtactga

SEQ ID NO: 5488527 - DNA, 25 bp, Homo sapien
attgaggtatactttgacatgccat

SEQ ID NO: 5488528 - DNA, 25 bp, Homo sapien
cagcaggaaggtcttttactatcat

SEQ ID NO: 5488529 - DNA, 25 bp, Homo sapien
caatcctgctggcgtagtacgcgag

SEQ ID NO: 5488530 - DNA, 25 bp, Homo sapien
agcaggcacgatacagcatagattg

SEQ ID NO: 5488531 - DNA, 25 bp, Homo sapien
gtactgaatacaaccaactgcaact

SEQ ID NO: 5488532 - DNA, 25 bp, Homo sapien
aatacgtcttcatctcggtagacgg

SEQ ID NO: 5488533 - DNA, 25 bp, Homo sapien
ccgtctaccgagatgaagacgtatt

SEQ ID NO: 5488534 - DNA, 25 bp, Homo sapien
gggttgccccccgacacacctgtgg

SEQ ID NO: 5488535 - DNA, 25 bp, Homo sapien
ccacaggtgtgtcggggggcaaccc

SEQ ID NO: 5488536 - DNA, 25 bp, Homo sapien
tcatgtaggcctctaagaaagcatc

SEQ ID NO: 5488537 - DNA, 25 bp, Homo sapien
gcagagtctgacaaaagttccctct

SEQ ID NO: 5488538 - DNA, 25 bp, Homo sapien
ggagaattctgactaatgcaccccc

SEQ ID NO: 5488539 - DNA, 25 bp, Homo sapien
agctaggagtttgttgcagagtctg

SEQ ID NO: 5488540 - DNA, 25 bp, Homo sapien
tcttagcagcagaggacactctgga

SEQ ID NO: 5488541 - DNA, 25 bp, Homo sapien
gacactctggatagagctaggagtt

SEQ ID NO: 5488542 - DNA, 25 bp, Homo sapien
agaaagcatcaagaatcaatgcaat

SEQ ID NO: 5488543 - DNA, 25 bp, Homo sapien
tgctcacagaaagataccagtcctt

SEQ ID NO: 5488544 - DNA, 25 bp, Homo sapien
gtttatcagagcaatctaagaaatc

SEQ ID NO: 5488545 - DNA, 25 bp, Homo sapien
tccaggcttttgaggagaaagatac

SEQ ID NO: 5488546 - DNA, 25 bp, Homo sapien
gacacaaggatatgcagtctttatc

SEQ ID NO: 5488547 - DNA, 25 bp, Homo sapien
accacctccgcagaatggaattccc

SEQ ID NO: 5488548 - DNA, 25 bp, Homo sapien
tgacactctacggaagtacgcaagc

SEQ ID NO: 5488549 - DNA, 25 bp, Homo sapien
acacactcaagactatgccggccag

SEQ ID NO: 5488550 - DNA, 25 bp, Homo sapien
accccgaaacggctgcatgtctcta

SEQ ID NO: 5488551 - DNA, 25 bp, Homo sapien
atctcttacgacagaaggtggagca

SEQ ID NO: 5488552 - DNA, 25 bp, Homo sapien
gatgtttgggcagtttggcaaaatc

SEQ ID NO: 5488553 - DNA, 25 bp, Homo sapien
gaattcccacagagtatggggtgcc

SEQ ID NO: 5488554 - DNA, 25 bp, Homo sapien
ggaccctgacctccggcagatgttt

SEQ ID NO: 5488555 - DNA, 25 bp, Homo sapien
agccgacaacaactcctgacgcaat

SEQ ID NO: 5488556 - DNA, 25 bp, Homo sapien
tcagagagtaaatctaccccgaaac

SEQ ID NO: 5488557 - DNA, 25 bp, Homo sapien
accggtgagcataacctgacactct

SEQ ID NO: 5488558 - DNA, 25 bp, Homo sapien
cagtcctgagactagggaaaatgct

SEQ ID NO: 5488559 - DNA, 25 bp, Homo sapien
agttattggggccctggtgaaaaca

SEQ ID NO: 5488560 - DNA, 25 bp, Homo sapien
tttgctggagctaagtaagaagcga

SEQ ID NO: 5488561 - DNA, 25 bp, Homo sapien
agtggatcaatgagctgtccagtcc

SEQ ID NO: 5488562 - DNA, 25 bp, Homo sapien
agcatcacatccagaaaccaggtca

SEQ ID NO: 5488563 - DNA, 25 bp, Homo sapien
gaattatggaatctggaagtgaact

SEQ ID NO: 5488564 - DNA, 25 bp, Homo sapien
tacactggcacaagtggatagagaa

SEQ ID NO: 5488565 - DNA, 25 bp, Homo sapien
gacggctgcgcctgtgcctactaca

SEQ ID NO: 5488566 - DNA, 25 bp, Homo sapien
aacagatgaacaagaagtaatcaac

SEQ ID NO: 5488567 - DNA, 25 bp, Homo sapien
aagaagcgagaatctgttcctgacc

SEQ ID NO: 5488568 - DNA, 25 bp, Homo sapien
gcacactgtcagcaaaacacgtccc

SEQ ID NO: 5488569 - DNA, 25 bp, Homo sapien
atttgtgatggcaaatggacagaac

SEQ ID NO: 5488570 - DNA, 25 bp, Homo sapien
ctatgtgatgaaacaggtaggattc

SEQ ID NO: 5488571 - DNA, 25 bp, Homo sapien
tggacagaacaatcatttaggtagc

SEQ ID NO: 5488572 - DNA, 25 bp, Homo sapien
tttaggtagcatctaggaatattgc

SEQ ID NO: 5488573 - DNA, 25 bp, Homo sapien
gccagggccttctatgtgatgaaac

SEQ ID NO: 5488574 - DNA, 25 bp, Homo sapien
ccagcatatcagcatgtctgtggaa

SEQ ID NO: 5488575 - DNA, 25 bp, Homo sapien
tctgtggaaataaggcatccggaga

SEQ ID NO: 5488576 - DNA, 25 bp, Homo sapien
gaatgctacacccactgcagcaccc

SEQ ID NO: 5488577 - DNA, 25 bp, Homo sapien
aatcacaaacattaggtacacaatt

SEQ ID NO: 5488578 - DNA, 25 bp, Homo sapien
ggtaggattctagtgacctgggtga

SEQ ID NO: 5488579 - DNA, 25 bp, Homo sapien
acaggaagaatttcaaactatgttg

SEQ ID NO: 5488580 - DNA, 25 bp, Homo sapien
atggtccaagtctaacaggattgac

SEQ ID NO: 5488581 - DNA, 25 bp, Homo sapien
cagcattatccaggcatcaggcaac

SEQ ID NO: 5488582 - DNA, 25 bp, Homo sapien
actgcagaagaaaaagcaatcgttc

SEQ ID NO: 5488583 - DNA, 25 bp, Homo sapien
ctgacagttcaagaaaaggagaaat

SEQ ID NO: 5488584 - DNA, 25 bp, Homo sapien
gggcactccagtaaaaatgacatcc

SEQ ID NO: 5488585 - DNA, 25 bp, Homo sapien
aatcgttcagcagtggttagaatac

SEQ ID NO: 5488586 - DNA, 25 bp, Homo sapien
ctcaagtagatgggcactccagtaa

SEQ ID NO: 5488587 - DNA, 25 bp, Homo sapien
agcagctcatctagtcaagcaagcc

SEQ ID NO: 5488588 - DNA, 25 bp, Homo sapien
cactagaagctgtccatgccataca

SEQ ID NO: 5488589 - DNA, 25 bp, Homo sapien
aaagaatatttgctggggagtactg

SEQ ID NO: 5488590 - DNA, 25 bp, Homo sapien
ggttagaatacagggtcactcaagt

SEQ ID NO: 5488591 - DNA, 25 bp, Homo sapien
ggaaaaattaattcagatagtaaca

SEQ ID NO: 5488592 - DNA, 25 bp, Homo sapien
taactgaatcacggaggtgagtctt

SEQ ID NO: 5488593 - DNA, 25 bp, Homo sapien
ggggaattcccctgcacacatgctc

SEQ ID NO: 5488594 - DNA, 25 bp, Homo sapien
cacatgaaattcaaagaacgcatta

SEQ ID NO: 5488595 - DNA, 25 bp, Homo sapien
tttacacatgaaattcaaagaacgc

SEQ ID NO: 5488596 - DNA, 25 bp, Homo sapien
tgaatcacggaggtgagtctttctc

SEQ ID NO: 5488597 - DNA, 25 bp, Homo sapien
cggaggtgagtctttctcatgctgc

SEQ ID NO: 5488598 - DNA, 25 bp, Homo sapien
caaagaacgcattatttttccttac

SEQ ID NO: 5488599 - DNA, 25 bp, Homo sapien
tctaaaactaaaatgctagtgtgaa

SEQ ID NO: 5488600 - DNA, 25 bp, Homo sapien
tcagatagtaacatagaactagttc

SEQ ID NO: 5488601 - DNA, 25 bp, Homo sapien
aactaaaatgctagtgtgaatgtat

SEQ ID NO: 5488602 - DNA, 25 bp, Homo sapien
cgggttggtgagaacaatctctcct

SEQ ID NO: 5488603 - DNA, 25 bp, Homo sapien
tctagctttgaaggcagcatgaagg

SEQ ID NO: 5488604 - DNA, 25 bp, Homo sapien
attacaagcagcatccagcagaaga

SEQ ID NO: 5488605 - DNA, 25 bp, Homo sapien
atcagcatctgaaaggttgtggaaa

SEQ ID NO: 5488606 - DNA, 25 bp, Homo sapien
gtaaatgcatcgccaagcactgggg

SEQ ID NO: 5488607 - DNA, 25 bp, Homo sapien
tcagttctgactgtgggatctgggg

SEQ ID NO: 5488608 - DNA, 25 bp, Homo sapien
agcactggggctgatttgcagtaat

SEQ ID NO: 5488609 - DNA, 25 bp, Homo sapien
gctggcttcccaacaacgcagattc

SEQ ID NO: 5488610 - DNA, 25 bp, Homo sapien
ctaagcaaggcaaacatgatctagc

SEQ ID NO: 5488611 - DNA, 25 bp, Homo sapien
gggggctgaatctttgagtggttta

SEQ ID NO: 5488612 - DNA, 25 bp, Homo sapien
tgagggcctagaaatctgtaaatgc

SEQ ID NO: 5488613 - DNA, 25 bp, Homo sapien
gtagcgtatgtgtatttgcataaat

SEQ ID NO: 5488614 - DNA, 25 bp, Homo sapien
atttatgcaaatacacatacgctac

SEQ ID NO: 5488615 - DNA, 25 bp, Homo sapien
gtatctatacaattactcactgtgt

SEQ ID NO: 5488616 - DNA, 25 bp, Homo sapien
acacagtgagtaattgtatagatac

SEQ ID NO: 5488617 - DNA, 25 bp, Homo sapien
gaattccctaccacagcgaggtccc

SEQ ID NO: 5488618 - DNA, 25 bp, Homo sapien
acaaagatgcaaagactgctgcttc

SEQ ID NO: 5488619 - DNA, 25 bp, Homo sapien
gggaggcccacaataagaaagcctc

SEQ ID NO: 5488620 - DNA, 25 bp, Homo sapien
tgtgagtttgaaagaagctgtctgc

SEQ ID NO: 5488621 - DNA, 25 bp, Homo sapien
gagacaccttcggcccagatggaag

SEQ ID NO: 5488622 - DNA, 25 bp, Homo sapien
ataagaaagcctcaagcaggtcctg

SEQ ID NO: 5488623 - DNA, 25 bp, Homo sapien
gccgccaccttaccagccagaaccc

SEQ ID NO: 5488624 - DNA, 25 bp, Homo sapien
acaaaggacgagctctaaagagtcc

SEQ ID NO: 5488625 - DNA, 25 bp, Homo sapien
tcctcaatcggaaacacgagtggga

SEQ ID NO: 5488626 - DNA, 25 bp, Homo sapien
gctctaaagagtccagccccatccc

SEQ ID NO: 5488627 - DNA, 25 bp, Homo sapien
cctctgatcgtaaagccaagactgc

SEQ ID NO: 5488628 - DNA, 25 bp, Homo sapien
ttggggaatagcagattctgggata

SEQ ID NO: 5488629 - DNA, 25 bp, Homo sapien
gctggaacagctgagttttgaaggc

SEQ ID NO: 5488630 - DNA, 25 bp, Homo sapien
acaacaggccctattgtcctggctc

SEQ ID NO: 5488631 - DNA, 25 bp, Homo sapien
gtcattaaaatcggttactgccaac

SEQ ID NO: 5488632 - DNA, 25 bp, Homo sapien
gttagaattggtacatcacaacagt

SEQ ID NO: 5488633 - DNA, 25 bp, Homo sapien
ctttgcttctggaggaacaccctac

SEQ ID NO: 5488634 - DNA, 25 bp, Homo sapien
aatgaagagacaatgattaaacgca

SEQ ID NO: 5488635 - DNA, 25 bp, Homo sapien
tggaggaacaccctacaacaggtaa

SEQ ID NO: 5488636 - DNA, 25 bp, Homo sapien
acaaattcattgcaagagatggaaa

SEQ ID NO: 5488637 - DNA, 25 bp, Homo sapien
aaataatatgaaaggggagctaaat

SEQ ID NO: 5488638 - DNA, 25 bp, Homo sapien
taaagaaattcactaaacaacaggc

SEQ ID NO: 5488639 - DNA, 25 bp, Homo sapien
ctctgtgtgctctggcattgagacc

SEQ ID NO: 5488640 - DNA, 25 bp, Homo sapien
gtaatacaataagaggtttagccat

SEQ ID NO: 5488641 - DNA, 25 bp, Homo sapien
tataagatatctgggtttcggtggg

SEQ ID NO: 5488642 - DNA, 25 bp, Homo sapien
gaaaagaaagtgagcaagttcatca

SEQ ID NO: 5488643 - DNA, 25 bp, Homo sapien
gcctgcttggcatccctagttaaca

SEQ ID NO: 5488644 - DNA, 25 bp, Homo sapien
ttacagagcaaccaaacaaacacat

SEQ ID NO: 5488645 - DNA, 25 bp, Homo sapien
gtttagccattgaaccaagcctgct

SEQ ID NO: 5488646 - DNA, 25 bp, Homo sapien
cccaaagcaaagtgggaattcaagg

SEQ ID NO: 5488647 - DNA, 25 bp, Homo sapien
gtctagggataaaaactagtagcta

SEQ ID NO: 5488648 - DNA, 25 bp, Homo sapien
actagtagctaattacagagcaacc

SEQ ID NO: 5488649 - DNA, 25 bp, Homo sapien
gagaccaggctgagatcagcattac

SEQ ID NO: 5488650 - DNA, 25 bp, Homo sapien
taaattatttagaggggagtctcta

SEQ ID NO: 5488651 - DNA, 25 bp, Homo sapien
caagtacataaaaggattatttgac

SEQ ID NO: 5488652 - DNA, 25 bp, Homo sapien
attagcttatcaccaaccaaacctt

SEQ ID NO: 5488653 - DNA, 25 bp, Homo sapien
aataaactctaagcaagaagttctc

SEQ ID NO: 5488654 - DNA, 25 bp, Homo sapien
agttggaattttgttggcatcaatg

SEQ ID NO: 5488655 - DNA, 25 bp, Homo sapien
attaattttatggggctatgagttt

SEQ ID NO: 5488656 - DNA, 25 bp, Homo sapien
tttgtttcagatatacagaactgcc

SEQ ID NO: 5488657 - DNA, 25 bp, Homo sapien
tgccagtcacaaagagccactaagt

SEQ ID NO: 5488658 - DNA, 25 bp, Homo sapien
acctttgttagtagcagttggaatt

SEQ ID NO: 5488659 - DNA, 25 bp, Homo sapien
agaacaggtctgagaacaagtacat

SEQ ID NO: 5488660 - DNA, 25 bp, Homo sapien
atggggctatgagttttacagtttg

SEQ ID NO: 5488661 - DNA, 25 bp, Homo sapien
gagagccaccgtcgccgcccggggt

SEQ ID NO: 5488662 - DNA, 25 bp, Homo sapien
accccgggcggcgacggtggctctc

SEQ ID NO: 5488663 - DNA, 25 bp, Homo sapien
acgagagccaccgtcgccgcccggg

SEQ ID NO: 5488664 - DNA, 25 bp, Homo sapien
cccgggcggcgacggtggctctcgt

SEQ ID NO: 5488665 - DNA, 25 bp, Homo sapien
gacgagagccaccgtcgccgcccgg

SEQ ID NO: 5488666 - DNA, 25 bp, Homo sapien
ccgggcggcgacggtggctctcgtc

SEQ ID NO: 5488667 - DNA, 25 bp, Homo sapien
acaacagacagcacaccatacattc

SEQ ID NO: 5488668 - DNA, 25 bp, Homo sapien
ttgtggttgtttggtctgtaggata

SEQ ID NO: 5488669 - DNA, 25 bp, Homo sapien
taaaaggtatgtaagatacagaaat

SEQ ID NO: 5488670 - DNA, 25 bp, Homo sapien
ggctggcttccagtctgtagctatt

SEQ ID NO: 5488671 - DNA, 25 bp, Homo sapien
taccaccactaacaaggagatcatt

SEQ ID NO: 5488672 - DNA, 25 bp, Homo sapien
tcaagtcacttgaagtaagtcttct

SEQ ID NO: 5488673 - DNA, 25 bp, Homo sapien
ttatataaaacattgacagggcctc

SEQ ID NO: 5488674 - DNA, 25 bp, Homo sapien
tacaaaaatagttcgcagtcctttc

SEQ ID NO: 5488675 - DNA, 25 bp, Homo sapien
ctatcaatggagatttggctggctt

SEQ ID NO: 5488676 - DNA, 25 bp, Homo sapien
tctgtggggttatatcaccaacttg

SEQ ID NO: 5488677 - DNA, 25 bp, Homo sapien
tcgttatacaacagacagcacacca

SEQ ID NO: 5488678 - DNA, 25 bp, Homo sapien
attcgcgtactagccggacttggat

SEQ ID NO: 5488679 - DNA, 25 bp, Homo sapien
gtttgacgcggattctcttgcccac

SEQ ID NO: 5488680 - DNA, 25 bp, Homo sapien
tgcccgtgagcttcttatagacacc

SEQ ID NO: 5488681 - DNA, 25 bp, Homo sapien
catcgtgcacagctgtcagagtacg

SEQ ID NO: 5488682 - DNA, 25 bp, Homo sapien
gccggctgccatctagtttgacgcg

SEQ ID NO: 5488683 - DNA, 25 bp, Homo sapien
attaacatccttgcccgtgagcttc

SEQ ID NO: 5488684 - DNA, 25 bp, Homo sapien
aatgaacctttatgagccggctgcc

SEQ ID NO: 5488685 - DNA, 25 bp, Homo sapien
ttgggaagaccaagtcctcaaggat

SEQ ID NO: 5488686 - DNA, 25 bp, Homo sapien
tttacaattgaaactctgggaattc

SEQ ID NO: 5488687 - DNA, 25 bp, Homo sapien
atagacaccagaaaaagtttcaacc

SEQ ID NO: 5488688 - DNA, 25 bp, Homo sapien
ccacaatttcgcttgggaagaccaa

SEQ ID NO: 5488689 - DNA, 25 bp, Homo sapien
aaaccagtagaaaggctcctattta

SEQ ID NO: 5488690 - DNA, 25 bp, Homo sapien
ggggcctgtgatctgagaatctcag

SEQ ID NO: 5488691 - DNA, 25 bp, Homo sapien
cacacagcgtccacgcatggatggc

SEQ ID NO: 5488692 - DNA, 25 bp, Homo sapien
ctgggaagagaggacttttccaagg

SEQ ID NO: 5488693 - DNA, 25 bp, Homo sapien
tcagatccagaatcaggagctggga

SEQ ID NO: 5488694 - DNA, 25 bp, Homo sapien
tgccatgaaagtggccgcctctcac

SEQ ID NO: 5488695 - DNA, 25 bp, Homo sapien
agcttgtgcgggatcccgtcatcct

SEQ ID NO: 5488696 - DNA, 25 bp, Homo sapien
cgcctctcacactggcaggcggtgg

SEQ ID NO: 5488697 - DNA, 25 bp, Homo sapien
gcggtggctcagatctgctgaggtt

SEQ ID NO: 5488698 - DNA, 25 bp, Homo sapien
ttaagctcaagtaatatgcaaggca

SEQ ID NO: 5488699 - DNA, 25 bp, Homo sapien
aggagcaaatgacactgggtctttg

SEQ ID NO: 5488700 - DNA, 25 bp, Homo sapien
tggcgtctaaaccgggtgtgtgtaa

SEQ ID NO: 5488701 - DNA, 25 bp, Homo sapien
ctcctccgtctgggaccgaggagct

SEQ ID NO: 5488702 - DNA, 25 bp, Homo sapien
cgctcctcccccgcagagctttggc

SEQ ID NO: 5488703 - DNA, 25 bp, Homo sapien
ccgttgtgctgtgactccctgagtc

SEQ ID NO: 5488704 - DNA, 25 bp, Homo sapien
tcccccgcagagctttggcgtctaa

SEQ ID NO: 5488705 - DNA, 25 bp, Homo sapien
aaccgggtgtgtgtaaatcggtgtc

SEQ ID NO: 5488706 - DNA, 25 bp, Homo sapien
ctctggacatgtatgagcacgagac

SEQ ID NO: 5488707 - DNA, 25 bp, Homo sapien
gtgtcatcgcttgtgtcttgctggg

SEQ ID NO: 5488708 - DNA, 25 bp, Homo sapien
tgactccctgagtcccctgactgct

SEQ ID NO: 5488709 - DNA, 25 bp, Homo sapien
gtgtgtgtaaatcggtgtcatcgct

SEQ ID NO: 5488710 - DNA, 25 bp, Homo sapien
gaggtggctctggacatgtatgagc

SEQ ID NO: 5488711 - DNA, 25 bp, Homo sapien
gcaagagaagactatgatagaagta

SEQ ID NO: 5488712 - DNA, 25 bp, Homo sapien
ctgccatcctgaggcaagagaagac

SEQ ID NO: 5488713 - DNA, 25 bp, Homo sapien
atgtggtgatattcatggacaattc

SEQ ID NO: 5488714 - DNA, 25 bp, Homo sapien
cctccaacccaacggcttactttca

SEQ ID NO: 5488715 - DNA, 25 bp, Homo sapien
ggaggatcacctagtaacacacgct

SEQ ID NO: 5488716 - DNA, 25 bp, Homo sapien
gatagaagtagatgctccaatcaca

SEQ ID NO: 5488717 - DNA, 25 bp, Homo sapien
gaagaggaagtagccttaaagataa

SEQ ID NO: 5488718 - DNA, 25 bp, Homo sapien
tatgtggacagaggctatttcagta

SEQ ID NO: 5488719 - DNA, 25 bp, Homo sapien
ccgcgtcatcaaagctgtccccttt

SEQ ID NO: 5488720 - DNA, 25 bp, Homo sapien
tcaaggaagtatttgagaatgggaa

SEQ ID NO: 5488721 - DNA, 25 bp, Homo sapien
agataatcaatgatggggctgccat

SEQ ID NO: 5488722 - DNA, 25 bp, Homo sapien
cgaagtggcatgagtgtcgtgcaat

SEQ ID NO: 5488723 - DNA, 25 bp, Homo sapien
attgcacgacactcatgccacttcg

SEQ ID NO: 5488724 - DNA, 25 bp, Homo sapien
accaatgcagttttgctacggttac

SEQ ID NO: 5488725 - DNA, 25 bp, Homo sapien
gtgaaaagcgtacaaaagatactta

SEQ ID NO: 5488726 - DNA, 25 bp, Homo sapien
caaaagatacttaaaagggctcctg

SEQ ID NO: 5488727 - DNA, 25 bp, Homo sapien
tgtcaagcatatcttggcctctccc

SEQ ID NO: 5488728 - DNA, 25 bp, Homo sapien
cctcaggtttgatatctggcaggtt

SEQ ID NO: 5488729 - DNA, 25 bp, Homo sapien
aactgagcctcaaaatcaccctttc

SEQ ID NO: 5488730 - DNA, 25 bp, Homo sapien
gtgggccctccaaatgctcgtttta

SEQ ID NO: 5488731 - DNA, 25 bp, Homo sapien
ctggcaggtttgactatccagagga

SEQ ID NO: 5488732 - DNA, 25 bp, Homo sapien
tagcaacctctctctaccctagttc

SEQ ID NO: 5488733 - DNA, 25 bp, Homo sapien
ggcctctcccatgtctcagtgttgc

SEQ ID NO: 5488734 - DNA, 25 bp, Homo sapien
gtctcagtgttgcctgcatttctcc

SEQ ID NO: 5488735 - DNA, 25 bp, Homo sapien
gggcatgtacccagaagagcatttt

SEQ ID NO: 5488736 - DNA, 25 bp, Homo sapien
gcgtcctgtccacacccagctcagc

SEQ ID NO: 5488737 - DNA, 25 bp, Homo sapien
ctcgaggccattgtcagcgtgattg

SEQ ID NO: 5488738 - DNA, 25 bp, Homo sapien
actgccagtctcactgtgggaaggc

SEQ ID NO: 5488739 - DNA, 25 bp, Homo sapien
gatcttcagggaactgcatagattg

SEQ ID NO: 5488740 - DNA, 25 bp, Homo sapien
agcgtgattgctgagcgcaacaaga

SEQ ID NO: 5488741 - DNA, 25 bp, Homo sapien
gtctggccaggcctcttggcagtca

SEQ ID NO: 5488742 - DNA, 25 bp, Homo sapien
cagaccggattccgaacagtgtggc

SEQ ID NO: 5488743 - DNA, 25 bp, Homo sapien
cccgattccgcaagaacctcgaggc

SEQ ID NO: 5488744 - DNA, 25 bp, Homo sapien
tgtggccatctgagcacactgccag

SEQ ID NO: 5488745 - DNA, 25 bp, Homo sapien
ttttatcgagaagcctgtgaaggaa

SEQ ID NO: 5488746 - DNA, 25 bp, Homo sapien
agttacttttacatcatgttaattt

SEQ ID NO: 5488747 - DNA, 25 bp, Homo sapien
aaattaacatgatgtaaaagtaact

SEQ ID NO: 5488748 - DNA, 25 bp, Homo sapien
acttttacatcatgttaatttgcat

SEQ ID NO: 5488749 - DNA, 25 bp, Homo sapien
atgcaaattaacatgatgtaaaagt

SEQ ID NO: 5488750 - DNA, 25 bp, Homo sapien
ccgcgacgttttccagaagagccgt

SEQ ID NO: 5488751 - DNA, 25 bp, Homo sapien
actgcccatgatcggccgtaccagc

SEQ ID NO: 5488752 - DNA, 25 bp, Homo sapien
gtttcatcatagccgggcggcaggc

SEQ ID NO: 5488753 - DNA, 25 bp, Homo sapien
gcgcggcgccccgcactttcgtttc

SEQ ID NO: 5488754 - DNA, 25 bp, Homo sapien
gggcgctctcggactactcgctgta

SEQ ID NO: 5488755 - DNA, 25 bp, Homo sapien
ttcgtttcatcatagccgggcggca

SEQ ID NO: 5488756 - DNA, 25 bp, Homo sapien
cgctctcggactactcgctgtactt

SEQ ID NO: 5488757 - DNA, 25 bp, Homo sapien
actgccttccccgcgccgtacgggc

SEQ ID NO: 5488758 - DNA, 25 bp, Homo sapien
gcagaaactgcccatgatcggccgt

SEQ ID NO: 5488759 - DNA, 25 bp, Homo sapien
gcggcgccccgcactttcgtttcat

SEQ ID NO: 5488760 - DNA, 25 bp, Homo sapien
cgttttccagaagagccgtttcgcc

SEQ ID NO: 5488761 - DNA, 25 bp, Homo sapien
atgatgatggaggtgattcacctgt

SEQ ID NO: 5488762 - DNA, 25 bp, Homo sapien
tcaagatattgataccccagaggtt

SEQ ID NO: 5488763 - DNA, 25 bp, Homo sapien
agtaaatacacttaggagatacaaa

SEQ ID NO: 5488764 - DNA, 25 bp, Homo sapien
gaccaggacttaataaagcacaact

SEQ ID NO: 5488765 - DNA, 25 bp, Homo sapien
cataaaaacttaattcagagtgttc

SEQ ID NO: 5488766 - DNA, 25 bp, Homo sapien
aggagatacaaaagacacttcaagc

SEQ ID NO: 5488767 - DNA, 25 bp, Homo sapien
tggataagagcgcaaggcatcttta

SEQ ID NO: 5488768 - DNA, 25 bp, Homo sapien
caagctaccaaccagaccaggactt

SEQ ID NO: 5488769 - DNA, 25 bp, Homo sapien
gacacttcaagctaccaaccagacc

SEQ ID NO: 5488770 - DNA, 25 bp, Homo sapien
agagtgttcgaaacagaagaaagag

SEQ ID NO: 5488771 - DNA, 25 bp, Homo sapien
ccccagaggttgatttataccaatt

SEQ ID NO: 5488772 - DNA, 25 bp, Homo sapien
cccttgtcagtgagccatttcagat

SEQ ID NO: 5488773 - DNA, 25 bp, Homo sapien
cttgtcagtgagccatttcagattt

SEQ ID NO: 5488774 - DNA, 25 bp, Homo sapien
aggactgtaagaaaataaacttgtc

SEQ ID NO: 5488775 - DNA, 25 bp, Homo sapien
ccaggactgtaagaaaataaacttg

SEQ ID NO: 5488776 - DNA, 25 bp, Homo sapien
tgtcagtgagccatttcagatttct

SEQ ID NO: 5488777 - DNA, 25 bp, Homo sapien
ccccttgtcagtgagccatttcaga

SEQ ID NO: 5488778 - DNA, 25 bp, Homo sapien
ttgtcagtgagccatttcagatttc

SEQ ID NO: 5488779 - DNA, 25 bp, Homo sapien
tctgacttccaggactgtaagaaaa

SEQ ID NO: 5488780 - DNA, 25 bp, Homo sapien
cttccaggactgtaagaaaataaac

SEQ ID NO: 5488781 - DNA, 25 bp, Homo sapien
tgacttccaggactgtaagaaaata

SEQ ID NO: 5488782 - DNA, 25 bp, Homo sapien
cagatttctgacttccaggactgta

SEQ ID NO: 5488783 - DNA, 25 bp, Homo sapien
ggctacgtgcgcttcctgaacgagc

SEQ ID NO: 5488784 - DNA, 25 bp, Homo sapien
gatccgcacgcgccacccggatctg

SEQ ID NO: 5488785 - DNA, 25 bp, Homo sapien
gggcgtaccagcagtctgaagccta

SEQ ID NO: 5488786 - DNA, 25 bp, Homo sapien
gtcacgggctacgtgcgcttcctga

SEQ ID NO: 5488787 - DNA, 25 bp, Homo sapien
aagcagcagtacatgaaggagctgc

SEQ ID NO: 5488788 - DNA, 25 bp, Homo sapien
gcagtctgaagcctataagatgtgc

SEQ ID NO: 5488789 - DNA, 25 bp, Homo sapien
cgccacccggatctgccctttcccg

SEQ ID NO: 5488790 - DNA, 25 bp, Homo sapien
ctctgggctcatgaacactctcctg

SEQ ID NO: 5488791 - DNA, 25 bp, Homo sapien
tcccgagatcaccaagatgctgggc

SEQ ID NO: 5488792 - DNA, 25 bp, Homo sapien
gggcttcgtggtgactgtcaagcaa

SEQ ID NO: 5488793 - DNA, 25 bp, Homo sapien
ccctttcccgagatcaccaagatgc

SEQ ID NO: 5488794 - DNA, 25 bp, Homo sapien
acagaggagtagtcatatatatgcc

SEQ ID NO: 5488795 - DNA, 25 bp, Homo sapien
tcagggaacagtcacttagggttta

SEQ ID NO: 5488796 - DNA, 25 bp, Homo sapien
ttatacacctaagggacagaggagt

SEQ ID NO: 5488797 - DNA, 25 bp, Homo sapien
catcaacgttaagatggagagacca

SEQ ID NO: 5488798 - DNA, 25 bp, Homo sapien
tagggtttatggcctgcttcagggg

SEQ ID NO: 5488799 - DNA, 25 bp, Homo sapien
tcagaggacaaaaggacataatcta

SEQ ID NO: 5488800 - DNA, 25 bp, Homo sapien
ttttggggttatgtgtcctgaatcc

SEQ ID NO: 5488801 - DNA, 25 bp, Homo sapien
tgaggataaagggtacctatggaat

SEQ ID NO: 5488802 - DNA, 25 bp, Homo sapien
atggaatgaaggttttatgatctac

SEQ ID NO: 5488803 - DNA, 25 bp, Homo sapien
taaactgtggagaacttagcaagtc

SEQ ID NO: 5488804 - DNA, 25 bp, Homo sapien
tatgcagaagtataatcagaggaca

SEQ ID NO: 5488805 - DNA, 25 bp, Homo sapien
aatgaggcagttggcaaacttctca

SEQ ID NO: 5488806 - DNA, 25 bp, Homo sapien
atcatgtttgtgactgtaaccattt

SEQ ID NO: 5488807 - DNA, 25 bp, Homo sapien
cgcctgcaccagtgccgtcctgctg

SEQ ID NO: 5488808 - DNA, 25 bp, Homo sapien
tgtatgttggaacgtgccccagaat

SEQ ID NO: 5488809 - DNA, 25 bp, Homo sapien
ggcaaacttctcaggacaatgaatc

SEQ ID NO: 5488810 - DNA, 25 bp, Homo sapien
cccccttgttccaaatgaagacggc

SEQ ID NO: 5488811 - DNA, 25 bp, Homo sapien
ttccaaatgaagacggcatcacgaa

SEQ ID NO: 5488812 - DNA, 25 bp, Homo sapien
caccagtgccgtcctgctgatgtgg

SEQ ID NO: 5488813 - DNA, 25 bp, Homo sapien
ccgctgcccatcgacgtctgtcctg

SEQ ID NO: 5488814 - DNA, 25 bp, Homo sapien
gaacgtgccccagaatgaggcagtt

SEQ ID NO: 5488815 - DNA, 25 bp, Homo sapien
gctgatgtggtaggctagcaatatt

SEQ ID NO: 5488816 - DNA, 25 bp, Homo sapien
aaacaaggcgtaagtctcaaggcat

SEQ ID NO: 5488817 - DNA, 25 bp, Homo sapien
atgccttgagacttacgccttgttt

SEQ ID NO: 5488818 - DNA, 25 bp, Homo sapien
gctacagccgccacagctcctacga

SEQ ID NO: 5488819 - DNA, 25 bp, Homo sapien
ccgcagccggactaagtcgtccaag

SEQ ID NO: 5488820 - DNA, 25 bp, Homo sapien
agccggactaagtcgtccaaggagc

SEQ ID NO: 5488821 - DNA, 25 bp, Homo sapien
tccaaggagccgccttcggcctaca

SEQ ID NO: 5488822 - DNA, 25 bp, Homo sapien
agcccctattctcggcggctgccgc

SEQ ID NO: 5488823 - DNA, 25 bp, Homo sapien
ctctcgcagtccctacagccctgtg

SEQ ID NO: 5488824 - DNA, 25 bp, Homo sapien
gtcccctagtccctacagcagcagc

SEQ ID NO: 5488825 - DNA, 25 bp, Homo sapien
tggcgccgctctcgcagtccctaca

SEQ ID NO: 5488826 - DNA, 25 bp, Homo sapien
gccgccacagctcctacgagcgggg

SEQ ID NO: 5488827 - DNA, 25 bp, Homo sapien
cgcgctccccgagcccctacagtcg

SEQ ID NO: 5488828 - DNA, 25 bp, Homo sapien
caagaccgagcctaaggcctacagg

SEQ ID NO: 5488829 - DNA, 25 bp, Homo sapien
acgtgcacatgcagaactggctgcg

SEQ ID NO: 5488830 - DNA, 25 bp, Homo sapien
gtcgagaggttcctaaagctgtcgc

SEQ ID NO: 5488831 - DNA, 25 bp, Homo sapien
ggagcattacagccacggcttgggc

SEQ ID NO: 5488832 - DNA, 25 bp, Homo sapien
tgctgctcatcctgcgagacccgtc

SEQ ID NO: 5488833 - DNA, 25 bp, Homo sapien
agaagcacaagccctacccgtccat

SEQ ID NO: 5488834 - DNA, 25 bp, Homo sapien
ggagcgcgtgctatctgactacacc

SEQ ID NO: 5488835 - DNA, 25 bp, Homo sapien
gcgagtctacagcatgaacccgtcc

SEQ ID NO: 5488836 - DNA, 25 bp, Homo sapien
cccgtccatcgaggagttcctggtg

SEQ ID NO: 5488837 - DNA, 25 bp, Homo sapien
gaacccgtccatccggctgctgctc

SEQ ID NO: 5488838 - DNA, 25 bp, Homo sapien
aggctcaatgtggactacaaggccc

SEQ ID NO: 5488839 - DNA, 25 bp, Homo sapien
aaagctgtcgccgcagatcaatgct

SEQ ID NO: 5488840 - DNA, 25 bp, Homo sapien
cagtgagtgacccaatgtctggttg

SEQ ID NO: 5488841 - DNA, 25 bp, Homo sapien
ctgggtctatagaaacccaggttta

SEQ ID NO: 5488842 - DNA, 25 bp, Homo sapien
tctctgaacttcttgctgttggacc

SEQ ID NO: 5488843 - DNA, 25 bp, Homo sapien
gctgttggacctaaaatgtggatgt

SEQ ID NO: 5488844 - DNA, 25 bp, Homo sapien
acccaggtttattcccatttgctac

SEQ ID NO: 5488845 - DNA, 25 bp, Homo sapien
tctaataaaatgcactggcaaggtg

SEQ ID NO: 5488846 - DNA, 25 bp, Homo sapien
catttgctacaacagattcccttct

SEQ ID NO: 5488847 - DNA, 25 bp, Homo sapien
gacctaaaatgtggatgtaaattgg

SEQ ID NO: 5488848 - DNA, 25 bp, Homo sapien
gtgaccagtgagtgacccaatgtct

SEQ ID NO: 5488849 - DNA, 25 bp, Homo sapien
aatgtctggttgggaaatctctctc

SEQ ID NO: 5488850 - DNA, 25 bp, Homo sapien
tcaagtggaagtccaaacaaatttc

SEQ ID NO: 5488851 - DNA, 25 bp, Homo sapien
atggcagtttttactgggtgtctaa

SEQ ID NO: 5488852 - DNA, 25 bp, Homo sapien
ttttactgggtgtctaatactctct

SEQ ID NO: 5488853 - DNA, 25 bp, Homo sapien
aaaataacaatccaacaagagtcat

SEQ ID NO: 5488854 - DNA, 25 bp, Homo sapien
aatgtacccaactgggaccaaatac

SEQ ID NO: 5488855 - DNA, 25 bp, Homo sapien
ccacctaacaagactttggtaagaa

SEQ ID NO: 5488856 - DNA, 25 bp, Homo sapien
agccaaaagaactataaaccaccta

SEQ ID NO: 5488857 - DNA, 25 bp, Homo sapien
tggtaagaaagagacttgatgcttc

SEQ ID NO: 5488858 - DNA, 25 bp, Homo sapien
aattccccattgcaaacaaaaaata

SEQ ID NO: 5488859 - DNA, 25 bp, Homo sapien
atccaacaagagtcatgttacccat

SEQ ID NO: 5488860 - DNA, 25 bp, Homo sapien
ctctttactgtctcaagtggaagtc

SEQ ID NO: 5488861 - DNA, 25 bp, Homo sapien
tggttttaagtctccaaaatcagga

SEQ ID NO: 5488862 - DNA, 25 bp, Homo sapien
ttgtctcctcagcagacgcggaaga

SEQ ID NO: 5488863 - DNA, 25 bp, Homo sapien
tcttggaagaattggacattgatct

SEQ ID NO: 5488864 - DNA, 25 bp, Homo sapien
atcctgacttttggggtcctctggc

SEQ ID NO: 5488865 - DNA, 25 bp, Homo sapien
cgcggaagatctcagtggttcaata

SEQ ID NO: 5488866 - DNA, 25 bp, Homo sapien
atttctgagacaaagaggttatggc

SEQ ID NO: 5488867 - DNA, 25 bp, Homo sapien
cattatatggacagtttagggtggt

SEQ ID NO: 5488868 - DNA, 25 bp, Homo sapien
atgcccccactaacggggacttcac

SEQ ID NO: 5488869 - DNA, 25 bp, Homo sapien
ttagggtggtctcatggattataac

SEQ ID NO: 5488870 - DNA, 25 bp, Homo sapien
tgatcctgaagataacaagccactc

SEQ ID NO: 5488871 - DNA, 25 bp, Homo sapien
cgatgtgttttgatgccaatgccat

SEQ ID NO: 5488872 - DNA, 25 bp, Homo sapien
ttttaatagacaagtggtgagagac

SEQ ID NO: 5488873 - DNA, 25 bp, Homo sapien
agccggcagcagtaaaaaggagtcg

SEQ ID NO: 5488874 - DNA, 25 bp, Homo sapien
cgactcctttttactgctgccggct

SEQ ID NO: 5488875 - DNA, 25 bp, Homo sapien
gggactggcagctttaagaagcaaa

SEQ ID NO: 5488876 - DNA, 25 bp, Homo sapien
tcaaactgcagctaaaagagcttcc

SEQ ID NO: 5488877 - DNA, 25 bp, Homo sapien
ttaagaagcaaaggaatttcctctc

SEQ ID NO: 5488878 - DNA, 25 bp, Homo sapien
ttttggctagcatgtgaagatttta

SEQ ID NO: 5488879 - DNA, 25 bp, Homo sapien
tccagcaaggcctcatcacaggtca

SEQ ID NO: 5488880 - DNA, 25 bp, Homo sapien
tctcatgaagtacgacagctacagc

SEQ ID NO: 5488881 - DNA, 25 bp, Homo sapien
tggaagaaccgcaccctctgatgtt

SEQ ID NO: 5488882 - DNA, 25 bp, Homo sapien
tcggctcaacgagaagatcctggaa

SEQ ID NO: 5488883 - DNA, 25 bp, Homo sapien
ccagaatttataacacatgagcccc

SEQ ID NO: 5488884 - DNA, 25 bp, Homo sapien
aatgcaagataagacgcagatgcag

SEQ ID NO: 5488885 - DNA, 25 bp, Homo sapien
cgtgccgggtttatcattgctttgt

SEQ ID NO: 5488886 - DNA, 25 bp, Homo sapien
gtgctgtgccacctggtgccgacaa

SEQ ID NO: 5488887 - DNA, 25 bp, Homo sapien
ttggagaggattcttttgcattgaa

SEQ ID NO: 5488888 - DNA, 25 bp, Homo sapien
ttccagtttagaggcggatttggtc

SEQ ID NO: 5488889 - DNA, 25 bp, Homo sapien
cagccacctcagtaaaattggagag

SEQ ID NO: 5488890 - DNA, 25 bp, Homo sapien
tgcattgaataaacttacagccaaa

SEQ ID NO: 5488891 - DNA, 25 bp, Homo sapien
tcagtaaaattggagaggattcttt

SEQ ID NO: 5488892 - DNA, 25 bp, Homo sapien
tgtgccacctggtgccgacaagaaa

SEQ ID NO: 5488893 - DNA, 25 bp, Homo sapien
gggtcagcaaccgaattccagttta

SEQ ID NO: 5488894 - DNA, 25 bp, Homo sapien
gtggacgtggtcagccacctcagta

SEQ ID NO: 5488895 - DNA, 25 bp, Homo sapien
gcaaccgaattccagtttagaggcg

SEQ ID NO: 5488896 - DNA, 25 bp, Homo sapien
ggctgggtcagcaaccgaattccag

SEQ ID NO: 5488897 - DNA, 25 bp, Homo sapien
ctcaggcaaaccatgcagatccacg

SEQ ID NO: 5488898 - DNA, 25 bp, Homo sapien
gagccacgtgtcacccagagctttg

SEQ ID NO: 5488899 - DNA, 25 bp, Homo sapien
cggctcgggctccttgtaattcttg

SEQ ID NO: 5488900 - DNA, 25 bp, Homo sapien
tcctgcggaaatgctcctccaccac

SEQ ID NO: 5488901 - DNA, 25 bp, Homo sapien
ggatgctccgtccttggccgctttg

SEQ ID NO: 5488902 - DNA, 25 bp, Homo sapien
tcctccaccacggggtcacaggtgg

SEQ ID NO: 5488903 - DNA, 25 bp, Homo sapien
gaggcgctcccttcaggagaccaca

SEQ ID NO: 5488904 - DNA, 25 bp, Homo sapien
tgactgttcaaagctcaggcaaacc

SEQ ID NO: 5488905 - DNA, 25 bp, Homo sapien
gccgctttgatctggagccacgtgt

SEQ ID NO: 5488906 - DNA, 25 bp, Homo sapien
cagatccacgtgttgttggaggagg

SEQ ID NO: 5488907 - DNA, 25 bp, Homo sapien
ccagagctttggcaaagtggtcgtc

SEQ ID NO: 5488908 - DNA, 25 bp, Homo sapien
tcagctccttcgaggagagcgacat

SEQ ID NO: 5488909 - DNA, 25 bp, Homo sapien
ggcctccgaagcagcggcttcttca

SEQ ID NO: 5488910 - DNA, 25 bp, Homo sapien
aggcccatgcgcaagtccttctccc

SEQ ID NO: 5488911 - DNA, 25 bp, Homo sapien
cgaggaaaatcgaactatgctcttc

SEQ ID NO: 5488912 - DNA, 25 bp, Homo sapien
gctcgctggcctttaggaaggagct

SEQ ID NO: 5488913 - DNA, 25 bp, Homo sapien
ttcacgattggccagtctgaagttt

SEQ ID NO: 5488914 - DNA, 25 bp, Homo sapien
gagagcgacattgagaaccacctca

SEQ ID NO: 5488915 - DNA, 25 bp, Homo sapien
agcggacacaatattgtgcagccca

SEQ ID NO: 5488916 - DNA, 25 bp, Homo sapien
ttgggtttatctgtcgggagtcttc

SEQ ID NO: 5488917 - DNA, 25 bp, Homo sapien
gtgcagcccacagatatcgaggaaa

SEQ ID NO: 5488918 - DNA, 25 bp, Homo sapien
gagaaccacctcattagcggacaca

SEQ ID NO: 5488919 - DNA, 25 bp, Homo sapien
cgtcttctcgcagccgtatagtagt

SEQ ID NO: 5488920 - DNA, 25 bp, Homo sapien
atgctggttttacagactccgaccc

SEQ ID NO: 5488921 - DNA, 25 bp, Homo sapien
tctcgcagccgtatagtagtagtag

SEQ ID NO: 5488922 - DNA, 25 bp, Homo sapien
tacagactccgacccttctgtcgtc

SEQ ID NO: 5488923 - DNA, 25 bp, Homo sapien
ttctgtcgtcttctcgcagccgtat

SEQ ID NO: 5488924 - DNA, 25 bp, Homo sapien
gatcaatgtgaaaaaagccaaactg

SEQ ID NO: 5488925 - DNA, 25 bp, Homo sapien
atgtgaaaaaagccaaactgtatgc

SEQ ID NO: 5488926 - DNA, 25 bp, Homo sapien
gccgtatagtagtagtaggcggccg

SEQ ID NO: 5488927 - DNA, 25 bp, Homo sapien
aaaaagccaaactgtatgctggttt

SEQ ID NO: 5488928 - DNA, 25 bp, Homo sapien
aaaaatgatcaatgtgaaaaaagcc

SEQ ID NO: 5488929 - DNA, 25 bp, Homo sapien
gcagccgtatagtagtagtaggcgg

SEQ ID NO: 5488930 - DNA, 25 bp, Homo sapien
cagtttggcttttttcacattgatc

SEQ ID NO: 5488931 - DNA, 25 bp, Homo sapien
gtaaaaccagcatacagtttggctt

SEQ ID NO: 5488932 - DNA, 25 bp, Homo sapien
taaaaccagcatacagtttggcttt

SEQ ID NO: 5488933 - DNA, 25 bp, Homo sapien
atgaaataaaaagatcctgcattta

SEQ ID NO: 5488934 - DNA, 25 bp, Homo sapien
ggtcggagtctgtaaaaccagcata

SEQ ID NO: 5488935 - DNA, 25 bp, Homo sapien
ttatatgaaataaaaagatcctgca

SEQ ID NO: 5488936 - DNA, 25 bp, Homo sapien
atatgaaataaaaagatcctgcatt

SEQ ID NO: 5488937 - DNA, 25 bp, Homo sapien
tgtaaaaccagcatacagtttggct

SEQ ID NO: 5488938 - DNA, 25 bp, Homo sapien
aaaaccagcatacagtttggctttt

SEQ ID NO: 5488939 - DNA, 25 bp, Homo sapien
gtcggagtctgtaaaaccagcatac

SEQ ID NO: 5488940 - DNA, 25 bp, Homo sapien
tcggagtctgtaaaaccagcataca

SEQ ID NO: 5488941 - DNA, 25 bp, Homo sapien
ggtactcggacaccaggtcgttcat

SEQ ID NO: 5488942 - DNA, 25 bp, Homo sapien
cagcgcacacctaaagtagaccatg

SEQ ID NO: 5488943 - DNA, 25 bp, Homo sapien
ttaccataccgaaagaataaattca

SEQ ID NO: 5488944 - DNA, 25 bp, Homo sapien
aagagaggacaccattccgacacaa

SEQ ID NO: 5488945 - DNA, 25 bp, Homo sapien
ttaaaactcaggttgatctctcatc

SEQ ID NO: 5488946 - DNA, 25 bp, Homo sapien
ccaccccctcgctttcctcctccgc

SEQ ID NO: 5488947 - DNA, 25 bp, Homo sapien
tccactgccaggttatcgtcccggg

SEQ ID NO: 5488948 - DNA, 25 bp, Homo sapien
tacaacagtaattcagaaatatctc

SEQ ID NO: 5488949 - DNA, 25 bp, Homo sapien
tcaatgcaatgtgttcagaaagtta

SEQ ID NO: 5488950 - DNA, 25 bp, Homo sapien
ctccgctttccctaacccgtctcgc

SEQ ID NO: 5488951 - DNA, 25 bp, Homo sapien
tgttaaaggaagaattcaatgcaat

SEQ ID NO: 5488952 - DNA, 25 bp, Homo sapien
gcacctcaccgaaaagagcctgtac

SEQ ID NO: 5488953 - DNA, 25 bp, Homo sapien
tctacgtgaccaccaacccacagga

SEQ ID NO: 5488954 - DNA, 25 bp, Homo sapien
caggagcgacactaccagttgctgt

SEQ ID NO: 5488955 - DNA, 25 bp, Homo sapien
gtgaaggagttgcccagctctttcc

SEQ ID NO: 5488956 - DNA, 25 bp, Homo sapien
cagctctttccagcagcgcctgtcc

SEQ ID NO: 5488957 - DNA, 25 bp, Homo sapien
gccggccccacaacctgcctgtggt

SEQ ID NO: 5488958 - DNA, 25 bp, Homo sapien
taccagttgctgtcggcgctacaga

SEQ ID NO: 5488959 - DNA, 25 bp, Homo sapien
ctgtcctacaccacgctcagcgacc

SEQ ID NO: 5488960 - DNA, 25 bp, Homo sapien
tggctggcttctacgtgaccaccaa

SEQ ID NO: 5488961 - DNA, 25 bp, Homo sapien
gggctactggagatccagcacctca

SEQ ID NO: 5488962 - DNA, 25 bp, Homo sapien
ctgctggaactcatccgaaagctgc

SEQ ID NO: 5488963 - DNA, 25 bp, Homo sapien
cagctgacttggaagaccccttcaa

SEQ ID NO: 5488964 - DNA, 25 bp, Homo sapien
ggactacatcttagagaagagccac

SEQ ID NO: 5488965 - DNA, 25 bp, Homo sapien
gactgatcagtctggagcaactctc

SEQ ID NO: 5488966 - DNA, 25 bp, Homo sapien
agcttcctggaactggtggactaca

SEQ ID NO: 5488967 - DNA, 25 bp, Homo sapien
agctcagttagtgctggtaggagcc

SEQ ID NO: 5488968 - DNA, 25 bp, Homo sapien
ctgcttcaacggctcttgggccagc

SEQ ID NO: 5488969 - DNA, 25 bp, Homo sapien
agacacactgctggatgaaagcttc

SEQ ID NO: 5488970 - DNA, 25 bp, Homo sapien
ttccttcccgagaattggcccaaca

SEQ ID NO: 5488971 - DNA, 25 bp, Homo sapien
aggccctgaaaagtcgactgatcag

SEQ ID NO: 5488972 - DNA, 25 bp, Homo sapien
ctcccttcctatccccgcgccccga

SEQ ID NO: 5488973 - DNA, 25 bp, Homo sapien
cccgaggcctggtccttgttccttc

SEQ ID NO: 5488974 - DNA, 25 bp, Homo sapien
tgaggaaggaaccttcgccacagac

SEQ ID NO: 5488975 - DNA, 25 bp, Homo sapien
ggtacctcgaggcaccattccagcc

SEQ ID NO: 5488976 - DNA, 25 bp, Homo sapien
gggatgtgagaatgatgaaacccga

SEQ ID NO: 5488977 - DNA, 25 bp, Homo sapien
tggaactgctgattttcggtgggtt

SEQ ID NO: 5488978 - DNA, 25 bp, Homo sapien
tgatgaaacccgacagaagtatctc

SEQ ID NO: 5488979 - DNA, 25 bp, Homo sapien
caagcatctggttcagcggaaatgg

SEQ ID NO: 5488980 - DNA, 25 bp, Homo sapien
aaaggagtctgcaattggaactgct

SEQ ID NO: 5488981 - DNA, 25 bp, Homo sapien
gaagtatctcagcctgcagtcagtt

SEQ ID NO: 5488982 - DNA, 25 bp, Homo sapien
gctcgcacagtgttctgaggaagga

SEQ ID NO: 5488983 - DNA, 25 bp, Homo sapien
ggaggtgagctagttaacaaacttg

SEQ ID NO: 5488984 - DNA, 25 bp, Homo sapien
tgcctgtcgctagcaagcatctggt

SEQ ID NO: 5488985 - DNA, 25 bp, Homo sapien
gcttgagcatgaactgggtcaaggg

SEQ ID NO: 5488986 - DNA, 25 bp, Homo sapien
cgagcgcatgatcttcggcgcctgc

SEQ ID NO: 5488987 - DNA, 25 bp, Homo sapien
gcacgctgcgcaccatcgtgcggga

SEQ ID NO: 5488988 - DNA, 25 bp, Homo sapien
ctctgcagacgctggcgctgtctgc

SEQ ID NO: 5488989 - DNA, 25 bp, Homo sapien
accaccttcgacctcatgcagatcc

SEQ ID NO: 5488990 - DNA, 25 bp, Homo sapien
gggggtgcgcttgattctacttcag

SEQ ID NO: 5488991 - DNA, 25 bp, Homo sapien
gtccacgtccaaacgcaaagctggc

SEQ ID NO: 5488992 - DNA, 25 bp, Homo sapien
gcgcggcctctacaaaggcttgagc

SEQ ID NO: 5488993 - DNA, 25 bp, Homo sapien
cctcatgcagatcctgctgcggcac

SEQ ID NO: 5488994 - DNA, 25 bp, Homo sapien
aggtgttgcccaaaaggccctagtg

SEQ ID NO: 5488995 - DNA, 25 bp, Homo sapien
cctgagctgctctcaggacggtgga

SEQ ID NO: 5488996 - DNA, 25 bp, Homo sapien
aaaatactcaaaatagtgggtcttc

SEQ ID NO: 5488997 - DNA, 25 bp, Homo sapien
taaagtgcatgtaggttgatatttt

SEQ ID NO: 5488998 - DNA, 25 bp, Homo sapien
gaggcacgcaacacctatggacaaa

SEQ ID NO: 5488999 - DNA, 25 bp, Homo sapien
gtgtggtagaaaaggcacaattcca

SEQ ID NO: 5489000 - DNA, 25 bp, Homo sapien
aatacttccccacagatgagaggca

SEQ ID NO: 5489001 - DNA, 25 bp, Homo sapien
acacctatggacaaaagggagttac

SEQ ID NO: 5489002 - DNA, 25 bp, Homo sapien
gctttctggcaaaagttggggataa

SEQ ID NO: 5489003 - DNA, 25 bp, Homo sapien
atagtgggtcttcgagtttaaaata

SEQ ID NO: 5489004 - DNA, 25 bp, Homo sapien
tatttaatccagtgtggtagaaaag

SEQ ID NO: 5489005 - DNA, 25 bp, Homo sapien
tgtgtatagacaagcccatgcccat

SEQ ID NO: 5489006 - DNA, 25 bp, Homo sapien
ttgaatgtcattaacctggctttgt

SEQ ID NO: 5489007 - DNA, 25 bp, Homo sapien
taaactgtacagacaatgggagcaa

SEQ ID NO: 5489008 - DNA, 25 bp, Homo sapien
aaaaactcagtgatgccaaaccaga

SEQ ID NO: 5489009 - DNA, 25 bp, Homo sapien
ttcacagctctgaggggaaataaaa

SEQ ID NO: 5489010 - DNA, 25 bp, Homo sapien
acacggagctggacttcacacccag

SEQ ID NO: 5489011 - DNA, 25 bp, Homo sapien
atgggtaacctccgacatgccagca

SEQ ID NO: 5489012 - DNA, 25 bp, Homo sapien
ggagagcggattttgactcatgggt

SEQ ID NO: 5489013 - DNA, 25 bp, Homo sapien
cacaatgagtggcttcaatggggtg

SEQ ID NO: 5489014 - DNA, 25 bp, Homo sapien
ggagcaagcccattgtagggagatt

SEQ ID NO: 5489015 - DNA, 25 bp, Homo sapien
ccagacgcacacacaatgagtggct

SEQ ID NO: 5489016 - DNA, 25 bp, Homo sapien
acatcctagcagccctggggccaat

SEQ ID NO: 5489017 - DNA, 25 bp, Homo sapien
agtaagtgcaaaggaactgcaaagc

SEQ ID NO: 5489018 - DNA, 25 bp, Homo sapien
gcaattcaggtagtcaaggtaaaaa

SEQ ID NO: 5489019 - DNA, 25 bp, Homo sapien
acaaggaaggcaatcctcatttttc

SEQ ID NO: 5489020 - DNA, 25 bp, Homo sapien
ggtgactagacatacttggaagttc

SEQ ID NO: 5489021 - DNA, 25 bp, Homo sapien
tgttaggcagaagtatatcaaatat

SEQ ID NO: 5489022 - DNA, 25 bp, Homo sapien
ttcaataatgaaccaacaggagagt

SEQ ID NO: 5489023 - DNA, 25 bp, Homo sapien
acaggagagttgctgactttgtaac

SEQ ID NO: 5489024 - DNA, 25 bp, Homo sapien
cttggaagttcaaagcagtaggatg

SEQ ID NO: 5489025 - DNA, 25 bp, Homo sapien
tcaaggtaaaaagcgcatacaagga

SEQ ID NO: 5489026 - DNA, 25 bp, Homo sapien
aaaatcccttgcaattcaggtagtc

SEQ ID NO: 5489027 - DNA, 25 bp, Homo sapien
ttccatgttgttaggcagaagtata

SEQ ID NO: 5489028 - DNA, 25 bp, Homo sapien
ttaaaaggtgactagacatacttgg

SEQ ID NO: 5489029 - DNA, 25 bp, Homo sapien
tttgagacatcactggcctataata

SEQ ID NO: 5489030 - DNA, 25 bp, Homo sapien
tgaaagaccagtagacgctcctcta

SEQ ID NO: 5489031 - DNA, 25 bp, Homo sapien
tctttgagacatcactggcctataa

SEQ ID NO: 5489032 - DNA, 25 bp, Homo sapien
atcactggcctataataaatgggtt

SEQ ID NO: 5489033 - DNA, 25 bp, Homo sapien
gagacatcactggcctataataaat

SEQ ID NO: 5489034 - DNA, 25 bp, Homo sapien
ctctactctttgagacatcactggc

SEQ ID NO: 5489035 - DNA, 25 bp, Homo sapien
acgctcctctactctttgagacatc

SEQ ID NO: 5489036 - DNA, 25 bp, Homo sapien
actctttgagacatcactggcctat

SEQ ID NO: 5489037 - DNA, 25 bp, Homo sapien
cactggcctataataaatgggttaa

SEQ ID NO: 5489038 - DNA, 25 bp, Homo sapien
ctggcctataataaatgggttaatt

SEQ ID NO: 5489039 - DNA, 25 bp, Homo sapien
ctactctttgagacatcactggcct

SEQ ID NO: 5489040 - DNA, 25 bp, Homo sapien
acgagagcaaagaacacaactgtta

SEQ ID NO: 5489041 - DNA, 25 bp, Homo sapien
gtaaagacactccaagctgggatgg

SEQ ID NO: 5489042 - DNA, 25 bp, Homo sapien
acgcgtactactaattagaggtaat

SEQ ID NO: 5489043 - DNA, 25 bp, Homo sapien
cagtctatgcatccaaaacgagagc

SEQ ID NO: 5489044 - DNA, 25 bp, Homo sapien
cagggcacccataaacccaaaagga

SEQ ID NO: 5489045 - DNA, 25 bp, Homo sapien
atggaacttgtgtcagcaaagaact

SEQ ID NO: 5489046 - DNA, 25 bp, Homo sapien
gctggagtatcagggcacccataaa

SEQ ID NO: 5489047 - DNA, 25 bp, Homo sapien
gccaccaatgtaacgaagtaagaaa

SEQ ID NO: 5489048 - DNA, 25 bp, Homo sapien
gatagaatggatctgtagccttctg

SEQ ID NO: 5489049 - DNA, 25 bp, Homo sapien
agaaaaaaaatacgtgcattactgc

SEQ ID NO: 5489050 - DNA, 25 bp, Homo sapien
gcatccaaaacgagagcaaagaaca

SEQ ID NO: 5489051 - DNA, 25 bp, Homo sapien
aagtattcagtaaggttttagtgaa

SEQ ID NO: 5489052 - DNA, 25 bp, Homo sapien
ttcactaaaaccttactgaatactt

SEQ ID NO: 5489053 - DNA, 25 bp, Homo sapien
gagaaggaatccatgttgtgacagc

SEQ ID NO: 5489054 - DNA, 25 bp, Homo sapien
tggtagcaaactaagtgcctagatc

SEQ ID NO: 5489055 - DNA, 25 bp, Homo sapien
ggaacaatgtggtagcaaactaagt

SEQ ID NO: 5489056 - DNA, 25 bp, Homo sapien
aagcctagaaagacatccatgagaa

SEQ ID NO: 5489057 - DNA, 25 bp, Homo sapien
ttaggaaatatgactgaagagagag

SEQ ID NO: 5489058 - DNA, 25 bp, Homo sapien
aatttgtggaaaacacgagttctcc

SEQ ID NO: 5489059 - DNA, 25 bp, Homo sapien
atatcttggttggtaaagtcggcgt

SEQ ID NO: 5489060 - DNA, 25 bp, Homo sapien
tagatcaatgttagctgaatgtcac

SEQ ID NO: 5489061 - DNA, 25 bp, Homo sapien
ctccagtgctaaatcagcgaggtac

SEQ ID NO: 5489062 - DNA, 25 bp, Homo sapien
acattcaaggaataactccagtgct

SEQ ID NO: 5489063 - DNA, 25 bp, Homo sapien
cattaggtcagaatagaacatcatt

SEQ ID NO: 5489064 - DNA, 25 bp, Homo sapien
aacacctgcgtggtggcagttgttg

SEQ ID NO: 5489065 - DNA, 25 bp, Homo sapien
gatgcgtctctggtttcgctctgga

SEQ ID NO: 5489066 - DNA, 25 bp, Homo sapien
gggtgcaagcccagaaactatttcc

SEQ ID NO: 5489067 - DNA, 25 bp, Homo sapien
gcagttgttgacgttcttgttcatc

SEQ ID NO: 5489068 - DNA, 25 bp, Homo sapien
aactgatttgaaggcatctccgggg

SEQ ID NO: 5489069 - DNA, 25 bp, Homo sapien
tcagtcaccctccttccgtccccca

SEQ ID NO: 5489070 - DNA, 25 bp, Homo sapien
tttagaaacacctgcgtggtggcag

SEQ ID NO: 5489071 - DNA, 25 bp, Homo sapien
acttcctggcaccacagggaaaatc

SEQ ID NO: 5489072 - DNA, 25 bp, Homo sapien
tgccaggatttgatgcgtctctggt

SEQ ID NO: 5489073 - DNA, 25 bp, Homo sapien
gcaccacagggaaaatcgggtgcaa

SEQ ID NO: 5489074 - DNA, 25 bp, Homo sapien
cccaccaccacttgttgaaaaactg

SEQ ID NO: 5489075 - DNA, 25 bp, Homo sapien
cgtgagaaagaacttgaaaaagaac

SEQ ID NO: 5489076 - DNA, 25 bp, Homo sapien
atctccagaggaaattagggaaagg

SEQ ID NO: 5489077 - DNA, 25 bp, Homo sapien
tgagaagcttggcatcctggaaaaa

SEQ ID NO: 5489078 - DNA, 25 bp, Homo sapien
cttgaaaaagaacaagaacaggagc

SEQ ID NO: 5489079 - DNA, 25 bp, Homo sapien
cgattggatgagaagcttggcatcc

SEQ ID NO: 5489080 - DNA, 25 bp, Homo sapien
gaaactgaaacgattggatgagaag

SEQ ID NO: 5489081 - DNA, 25 bp, Homo sapien
cggagaaactgaaacgattggatga

SEQ ID NO: 5489082 - DNA, 25 bp, Homo sapien
accatctccagaggaaattagggaa

SEQ ID NO: 5489083 - DNA, 25 bp, Homo sapien
aaaaacaaccatctccagaggaaat

SEQ ID NO: 5489084 - DNA, 25 bp, Homo sapien
agcgtgagaaagaacttgaaaaaga

SEQ ID NO: 5489085 - DNA, 25 bp, Homo sapien
ttggcatcctggaaaaacaaccatc

SEQ ID NO: 5489086 - DNA, 25 bp, Homo sapien
gagtgcagaggttgaacacatcaca

SEQ ID NO: 5489087 - DNA, 25 bp, Homo sapien
cagattcatgtaacaaaaaggcaga

SEQ ID NO: 5489088 - DNA, 25 bp, Homo sapien
aaaaaagaaacaatcacaggccaat

SEQ ID NO: 5489089 - DNA, 25 bp, Homo sapien
ccttgagaactaacggaaaagccta

SEQ ID NO: 5489090 - DNA, 25 bp, Homo sapien
ccaagagccaaaagaggatccttga

SEQ ID NO: 5489091 - DNA, 25 bp, Homo sapien
aattgttcagctgggatgatcagta

SEQ ID NO: 5489092 - DNA, 25 bp, Homo sapien
ggatgatcagtatggaatgaggcaa

SEQ ID NO: 5489093 - DNA, 25 bp, Homo sapien
caaaaaggcagaacagttttcaaat

SEQ ID NO: 5489094 - DNA, 25 bp, Homo sapien
atgaggcaaagcagttcgcattcta

SEQ ID NO: 5489095 - DNA, 25 bp, Homo sapien
acaatagtgctgaacacagaatcac

SEQ ID NO: 5489096 - DNA, 25 bp, Homo sapien
aagaataagagaaagtatactaaaa

SEQ ID NO: 5489097 - DNA, 25 bp, Homo sapien
tttcctctggagatggttgtttttc

SEQ ID NO: 5489098 - DNA, 25 bp, Homo sapien
gtggatgctgctgtgcaagcaactt

SEQ ID NO: 5489099 - DNA, 25 bp, Homo sapien
cagtttctccgcacaagctgccttc

SEQ ID NO: 5489100 - DNA, 25 bp, Homo sapien
gccaagcttctcatccaatcgtttc

SEQ ID NO: 5489101 - DNA, 25 bp, Homo sapien
tactgcctgtcgatctggaggtgga

SEQ ID NO: 5489102 - DNA, 25 bp, Homo sapien
caagttctttctcacgctcccgttc

SEQ ID NO: 5489103 - DNA, 25 bp, Homo sapien
gtttttccaggatgccaagcttctc

SEQ ID NO: 5489104 - DNA, 25 bp, Homo sapien
caggtactgcctgtcgatctggagg

SEQ ID NO: 5489105 - DNA, 25 bp, Homo sapien
ccctctccttctctcgctcctgttc

SEQ ID NO: 5489106 - DNA, 25 bp, Homo sapien
tgctgtgcaagcaactttggaggtg

SEQ ID NO: 5489107 - DNA, 25 bp, Homo sapien
aggggcctggtcttccaggtactgc

SEQ ID NO: 5489108 - DNA, 25 bp, Homo sapien
gggtctctttcgtcgagcccagggt

SEQ ID NO: 5489109 - DNA, 25 bp, Homo sapien
accctgggctcgacgaaagagaccc

SEQ ID NO: 5489110 - DNA, 25 bp, Homo sapien
ggcttgcttgttacacacacaggtc

SEQ ID NO: 5489111 - DNA, 25 bp, Homo sapien
aagcaggctagtctaaccatggtgc

SEQ ID NO: 5489112 - DNA, 25 bp, Homo sapien
gtggagttttaaggttactgatgac

SEQ ID NO: 5489113 - DNA, 25 bp, Homo sapien
tgtatgcagactggttgtagtggga

SEQ ID NO: 5489114 - DNA, 25 bp, Homo sapien
aagatcacatcaggtggatggagag

SEQ ID NO: 5489115 - DNA, 25 bp, Homo sapien
gtggatggagagacatttgatccct

SEQ ID NO: 5489116 - DNA, 25 bp, Homo sapien
taaaatgatggcttggaaaagcagg

SEQ ID NO: 5489117 - DNA, 25 bp, Homo sapien
agaacgaattgatgtgtaactgtat

SEQ ID NO: 5489118 - DNA, 25 bp, Homo sapien
gttgtagtgggaccaatctgataac

SEQ ID NO: 5489119 - DNA, 25 bp, Homo sapien
caataattaggtctaagtggagttt

SEQ ID NO: 5489120 - DNA, 25 bp, Homo sapien
tggaactcattagctgtgtgcatat

SEQ ID NO: 5489121 - DNA, 25 bp, Homo sapien
tacgtagttcgggcaaatcctccaa

SEQ ID NO: 5489122 - DNA, 25 bp, Homo sapien
ggttgtcaaatgtagtgtgtttccc

SEQ ID NO: 5489123 - DNA, 25 bp, Homo sapien
gttgatattttgggcttggggcagt

SEQ ID NO: 5489124 - DNA, 25 bp, Homo sapien
gtggaaatacagacaaggatcttag

SEQ ID NO: 5489125 - DNA, 25 bp, Homo sapien
cttttgatagctgtgccaggaaggg

SEQ ID NO: 5489126 - DNA, 25 bp, Homo sapien
cttggttctggttaaacagctgtac

SEQ ID NO: 5489127 - DNA, 25 bp, Homo sapien
ctcagggaaaaacatgcagtcctct

SEQ ID NO: 5489128 - DNA, 25 bp, Homo sapien
taggtatgactgtggaaatacagac

SEQ ID NO: 5489129 - DNA, 25 bp, Homo sapien
ggatggcgctcccagtgactacttt

SEQ ID NO: 5489130 - DNA, 25 bp, Homo sapien
ggtggtctaagtgctgactggctac

SEQ ID NO: 5489131 - DNA, 25 bp, Homo sapien
aagtgctgactggctacgtagttcg

SEQ ID NO: 5489132 - DNA, 25 bp, Homo sapien
tgcagagggctacaacttccatata

SEQ ID NO: 5489133 - DNA, 25 bp, Homo sapien
gagtccaggaggtcctttccgctct

SEQ ID NO: 5489134 - DNA, 25 bp, Homo sapien
gccattgcccacccaggtaccagca

SEQ ID NO: 5489135 - DNA, 25 bp, Homo sapien
agcagcagaagactatctgacttgg

SEQ ID NO: 5489136 - DNA, 25 bp, Homo sapien
gcagacatggtggccattgcccacc

SEQ ID NO: 5489137 - DNA, 25 bp, Homo sapien
cattgcatatgaaaatgtccatttc

SEQ ID NO: 5489138 - DNA, 25 bp, Homo sapien
catataaggtaggtttttttgtggc

SEQ ID NO: 5489139 - DNA, 25 bp, Homo sapien
atatttacagaaagtagggaggaag

SEQ ID NO: 5489140 - DNA, 25 bp, Homo sapien
tttgtggctgttttccattgcatat

SEQ ID NO: 5489141 - DNA, 25 bp, Homo sapien
ggtaccagcagcagaagactatctg

SEQ ID NO: 5489142 - DNA, 25 bp, Homo sapien
tggtttagatacagatatttacaga

SEQ ID NO: 5489143 - DNA, 25 bp, Homo sapien
ggctgctgaacacatatggctgacc

SEQ ID NO: 5489144 - DNA, 25 bp, Homo sapien
ggagagtagcccctgactgctagca

SEQ ID NO: 5489145 - DNA, 25 bp, Homo sapien
gatgtaatgaggaaatgaggttctc

SEQ ID NO: 5489146 - DNA, 25 bp, Homo sapien
agattagggaagacaatcacagttc

SEQ ID NO: 5489147 - DNA, 25 bp, Homo sapien
agttctgggggtgaattttgccatt

SEQ ID NO: 5489148 - DNA, 25 bp, Homo sapien
tacaacaggtactagcaggacaata

SEQ ID NO: 5489149 - DNA, 25 bp, Homo sapien
gtgtcacatacctgggatagggtgg

SEQ ID NO: 5489150 - DNA, 25 bp, Homo sapien
aggacaataaagaacagccagccaa

SEQ ID NO: 5489151 - DNA, 25 bp, Homo sapien
acttgtgggccttccagattaggga

SEQ ID NO: 5489152 - DNA, 25 bp, Homo sapien
atgaggttctcagacaccccacctg

SEQ ID NO: 5489153 - DNA, 25 bp, Homo sapien
gcttctggagggtctccagtgcttc

SEQ ID NO: 5489154 - DNA, 25 bp, Homo sapien
atgaaaaagacattgtgaaattaca

SEQ ID NO: 5489155 - DNA, 25 bp, Homo sapien
agaaaaagactggaaataaatccac

SEQ ID NO: 5489156 - DNA, 25 bp, Homo sapien
ggttaactaaaccatgatgtcatcc

SEQ ID NO: 5489157 - DNA, 25 bp, Homo sapien
attgatgaacaatttatgatgagac

SEQ ID NO: 5489158 - DNA, 25 bp, Homo sapien
ttctgggatttgtgattatgggtgg

SEQ ID NO: 5489159 - DNA, 25 bp, Homo sapien
aatttggaaagaccctcaaatatcc

SEQ ID NO: 5489160 - DNA, 25 bp, Homo sapien
atgtgcacatatagccatagaaaaa

SEQ ID NO: 5489161 - DNA, 25 bp, Homo sapien
gaaatgtagctattaaaaggacttc

SEQ ID NO: 5489162 - DNA, 25 bp, Homo sapien
aaaagcaacaaagctgtatgcatta

SEQ ID NO: 5489163 - DNA, 25 bp, Homo sapien
tccacttagtcaatgaaatgtagct

SEQ ID NO: 5489164 - DNA, 25 bp, Homo sapien
ttatgatgagacaaagaggtactaa

SEQ ID NO: 5489165 - DNA, 25 bp, Homo sapien
aagttcaggtaggtttttggagaca

SEQ ID NO: 5489166 - DNA, 25 bp, Homo sapien
gacagtagataaaaatgcatggggt

SEQ ID NO: 5489167 - DNA, 25 bp, Homo sapien
acattgtgttttagaaggctgggtg

SEQ ID NO: 5489168 - DNA, 25 bp, Homo sapien
cctctgatgagcagatagctggagg

SEQ ID NO: 5489169 - DNA, 25 bp, Homo sapien
tcatgtctcagcgaagaagtcggag

SEQ ID NO: 5489170 - DNA, 25 bp, Homo sapien
gacagagattggccgcatcatatct

SEQ ID NO: 5489171 - DNA, 25 bp, Homo sapien
gtatgtgtggtgatcttcggaatgc

SEQ ID NO: 5489172 - DNA, 25 bp, Homo sapien
gagaatccatgcagagagtttacac

SEQ ID NO: 5489173 - DNA, 25 bp, Homo sapien
tgcatggggtttacttccagggatt

SEQ ID NO: 5489174 - DNA, 25 bp, Homo sapien
gcaggagttgtaaaagaatgcttcc

SEQ ID NO: 5489175 - DNA, 25 bp, Homo sapien
tagctggaggctgttcccacagtca

SEQ ID NO: 5489176 - DNA, 25 bp, Homo sapien
ggtggttgttcatagaagagtgttc

SEQ ID NO: 5489177 - DNA, 25 bp, Homo sapien
ttatctgatagagttaggaaatttc

SEQ ID NO: 5489178 - DNA, 25 bp, Homo sapien
gaagctgaaacatgggttaggttac

SEQ ID NO: 5489179 - DNA, 25 bp, Homo sapien
gttctgaatctggggaagtagtaaa

SEQ ID NO: 5489180 - DNA, 25 bp, Homo sapien
aaagacagggaaaaccagatattta

SEQ ID NO: 5489181 - DNA, 25 bp, Homo sapien
gatatttagagtcgaagcagcatgc

SEQ ID NO: 5489182 - DNA, 25 bp, Homo sapien
ttaaggcctctaaaatcagatcccc

SEQ ID NO: 5489183 - DNA, 25 bp, Homo sapien
agtccacctgtggcaacctgcaaat

SEQ ID NO: 5489184 - DNA, 25 bp, Homo sapien
gtccatgaacagaaaattaaggcct

SEQ ID NO: 5489185 - DNA, 25 bp, Homo sapien
ttggttagtaatgatgtcccagcat

SEQ ID NO: 5489186 - DNA, 25 bp, Homo sapien
actaatgaaggctactggagttact

SEQ ID NO: 5489187 - DNA, 25 bp, Homo sapien
attacatctggaaaccgtgccgtga

SEQ ID NO: 5489188 - DNA, 25 bp, Homo sapien
ttagagacgtggtcttgctatattg

SEQ ID NO: 5489189 - DNA, 25 bp, Homo sapien
tcttaacccctgaggtgagaacctg

SEQ ID NO: 5489190 - DNA, 25 bp, Homo sapien
caacccctctagagtgaggagacac

SEQ ID NO: 5489191 - DNA, 25 bp, Homo sapien
ctggggtgagctcttaacccatggg

SEQ ID NO: 5489192 - DNA, 25 bp, Homo sapien
aaccccagaatatttggaatgttcc

SEQ ID NO: 5489193 - DNA, 25 bp, Homo sapien
gaaaccgtgccgtgatgatctctct

SEQ ID NO: 5489194 - DNA, 25 bp, Homo sapien
gagtgaggagacacgtcatcatttt

SEQ ID NO: 5489195 - DNA, 25 bp, Homo sapien
ttggacctgtctgaactctgagctc

SEQ ID NO: 5489196 - DNA, 25 bp, Homo sapien
accctataagtggtggtcctgggct

SEQ ID NO: 5489197 - DNA, 25 bp, Homo sapien
aacccatgggaccaacccctctaga

SEQ ID NO: 5489198 - DNA, 25 bp, Homo sapien
gagtacaacacctgctgagcacgcc

SEQ ID NO: 5489199 - DNA, 25 bp, Homo sapien
gtatcgagtacaacacctgctgagc

SEQ ID NO: 5489200 - DNA, 25 bp, Homo sapien
cacgtcgcttattagatagcatagt

SEQ ID NO: 5489201 - DNA, 25 bp, Homo sapien
gagcagactctgcgatgatcccttg

SEQ ID NO: 5489202 - DNA, 25 bp, Homo sapien
tcttggtacgaaccacacgtcgctt

SEQ ID NO: 5489203 - DNA, 25 bp, Homo sapien
atgatcccttgtttgtatcgagtac

SEQ ID NO: 5489204 - DNA, 25 bp, Homo sapien
gatagcatagtatggagcagactct

SEQ ID NO: 5489205 - DNA, 25 bp, Homo sapien
ttagatagcatagtatggagcagac

SEQ ID NO: 5489206 - DNA, 25 bp, Homo sapien
tgctgagcacgccagtgcacgataa

SEQ ID NO: 5489207 - DNA, 25 bp, Homo sapien
gtatggagcagactctgcgatgatc

SEQ ID NO: 5489208 - DNA, 25 bp, Homo sapien
agcacgccagtgcacgataatgtgc

SEQ ID NO: 5489209 - DNA, 25 bp, Homo sapien
gctgcgcctgctaatcacgtctggt

SEQ ID NO: 5489210 - DNA, 25 bp, Homo sapien
caaatcactgtttggcccaggggaa

SEQ ID NO: 5489211 - DNA, 25 bp, Homo sapien
tgctaatcacgtctggtgtcggctc

SEQ ID NO: 5489212 - DNA, 25 bp, Homo sapien
attgaatttgctgcgcctgctaatc

SEQ ID NO: 5489213 - DNA, 25 bp, Homo sapien
attgagggagacaaatcactgtttg

SEQ ID NO: 5489214 - DNA, 25 bp, Homo sapien
taatcacgtctggtgtcggctctga

SEQ ID NO: 5489215 - DNA, 25 bp, Homo sapien
atttgctgcgcctgctaatcacgtc

SEQ ID NO: 5489216 - DNA, 25 bp, Homo sapien
cccacagtaatggaaactcagggca

SEQ ID NO: 5489217 - DNA, 25 bp, Homo sapien
tctggtgtcggctctgatcagagac

SEQ ID NO: 5489218 - DNA, 25 bp, Homo sapien
cacccacagtaatggaaactcaggg

SEQ ID NO: 5489219 - DNA, 25 bp, Homo sapien
aacaaattgaatttgctgcgcctgc

SEQ ID NO: 5489220 - DNA, 25 bp, Homo sapien
caagaccgagtcagctcacaccgtt

SEQ ID NO: 5489221 - DNA, 25 bp, Homo sapien
aacggtgtgagctgactcggtcttg

SEQ ID NO: 5489222 - DNA, 25 bp, Homo sapien
gcaggttagcattttattagataaa

SEQ ID NO: 5489223 - DNA, 25 bp, Homo sapien
tgtgatcatgacaggggttcaaaca

SEQ ID NO: 5489224 - DNA, 25 bp, Homo sapien
ctgacactgtgatcatgacaggggt

SEQ ID NO: 5489225 - DNA, 25 bp, Homo sapien
ggctctgaagggcactcctcaactt

SEQ ID NO: 5489226 - DNA, 25 bp, Homo sapien
agaggacgcgtctctgacactgtga

SEQ ID NO: 5489227 - DNA, 25 bp, Homo sapien
ctgcctgctactggctctgaagggc

SEQ ID NO: 5489228 - DNA, 25 bp, Homo sapien
gacactgtgatcatgacaggggttc

SEQ ID NO: 5489229 - DNA, 25 bp, Homo sapien
tcaacttccccaagaaagaggacgc

SEQ ID NO: 5489230 - DNA, 25 bp, Homo sapien
gcctgctactggctctgaagggcac

SEQ ID NO: 5489231 - DNA, 25 bp, Homo sapien
ctgaagggcactcctcaacttcccc

SEQ ID NO: 5489232 - DNA, 25 bp, Homo sapien
actgtgatcatgacaggggttcaaa

SEQ ID NO: 5489233 - DNA, 25 bp, Homo sapien
ccgagaagaacgaagcttataggtc

SEQ ID NO: 5489234 - DNA, 25 bp, Homo sapien
gacctataagcttcgttcttctcgg

SEQ ID NO: 5489235 - DNA, 25 bp, Homo sapien
attttatgcgtgcgagaagtcagtg

SEQ ID NO: 5489236 - DNA, 25 bp, Homo sapien
aggagttattctgctaaaaatggtc

SEQ ID NO: 5489237 - DNA, 25 bp, Homo sapien
tagagatgaagaaataataaggaaa

SEQ ID NO: 5489238 - DNA, 25 bp, Homo sapien
aacaaagactgtaagcctgtgtgtg

SEQ ID NO: 5489239 - DNA, 25 bp, Homo sapien
taaagatgacttataagaaccctga

SEQ ID NO: 5489240 - DNA, 25 bp, Homo sapien
tagccacattaaataagagaaactg

SEQ ID NO: 5489241 - DNA, 25 bp, Homo sapien
ctgcagggcttaatacattagtggt

SEQ ID NO: 5489242 - DNA, 25 bp, Homo sapien
atttatataggtgagacaatagaaa

SEQ ID NO: 5489243 - DNA, 25 bp, Homo sapien
cttagttgtctgaaaagccagctct

SEQ ID NO: 5489244 - DNA, 25 bp, Homo sapien
cccttctgtgtgaccgaccccttgg

SEQ ID NO: 5489245 - DNA, 25 bp, Homo sapien
aaaagatcttcagccaggcctttct

SEQ ID NO: 5489246 - DNA, 25 bp, Homo sapien
gtgcagttcgtgaccggcaccttca

SEQ ID NO: 5489247 - DNA, 25 bp, Homo sapien
gtccatgcgggacctgtacatcaag

SEQ ID NO: 5489248 - DNA, 25 bp, Homo sapien
cctgtacatcaagaacggccagggc

SEQ ID NO: 5489249 - DNA, 25 bp, Homo sapien
cagcctcgtcaaccagcagagcttc

SEQ ID NO: 5489250 - DNA, 25 bp, Homo sapien
tgagaaagtgccagtcatcttggtt

SEQ ID NO: 5489251 - DNA, 25 bp, Homo sapien
aatggtggacgaactctttgcagaa

SEQ ID NO: 5489252 - DNA, 25 bp, Homo sapien
catgcgggaccagatcatccgcgtg

SEQ ID NO: 5489253 - DNA, 25 bp, Homo sapien
catcgagaaatacgaccccaccatc

SEQ ID NO: 5489254 - DNA, 25 bp, Homo sapien
ggtaggcaaatccgccctgaccgtg

SEQ ID NO: 5489255 - DNA, 25 bp, Homo sapien
ttgcagaaattgtgaggcagatgaa

SEQ ID NO: 5489256 - DNA, 25 bp, Homo sapien
acggccagggcttcatcctcgtcta

SEQ ID NO: 5489257 - DNA, 25 bp, Homo sapien
accagcctgcgcctcaagaccttca

SEQ ID NO: 5489258 - DNA, 25 bp, Homo sapien
aagacccagtctgggaccaagaacc

SEQ ID NO: 5489259 - DNA, 25 bp, Homo sapien
gtgccccgcttcgactgcgtgctca

SEQ ID NO: 5489260 - DNA, 25 bp, Homo sapien
gtgcaccactacatgccgccccctg

SEQ ID NO: 5489261 - DNA, 25 bp, Homo sapien
aggcgaacctgctgctcagtgccga

SEQ ID NO: 5489262 - DNA, 25 bp, Homo sapien
accttcagctccaagagcgagtacc

SEQ ID NO: 5489263 - DNA, 25 bp, Homo sapien
cgccggcacctttctgatccgcgac

SEQ ID NO: 5489264 - DNA, 25 bp, Homo sapien
ttctctctgcagagcgatccccgga

SEQ ID NO: 5489265 - DNA, 25 bp, Homo sapien
aagaacctgcgcatccagtgtgagg

SEQ ID NO: 5489266 - DNA, 25 bp, Homo sapien
cttcccctcgccacctactgaaccc

SEQ ID NO: 5489267 - DNA, 25 bp, Homo sapien
gcaagtttcccgccgccgggatgag

SEQ ID NO: 5489268 - DNA, 25 bp, Homo sapien
cttaagtaaatctttgcgacgtcac

SEQ ID NO: 5489269 - DNA, 25 bp, Homo sapien
gtgacgtcgcaaagatttacttaag

SEQ ID NO: 5489270 - DNA, 25 bp, Homo sapien
ttactgcacataagactattactac

SEQ ID NO: 5489271 - DNA, 25 bp, Homo sapien
gcactgtgctgcttcacttggaatt

SEQ ID NO: 5489272 - DNA, 25 bp, Homo sapien
ttcaagcctaaaaggaagataggat

SEQ ID NO: 5489273 - DNA, 25 bp, Homo sapien
ctactaaaggtcacttcagagtccc

SEQ ID NO: 5489274 - DNA, 25 bp, Homo sapien
tagtacttgagaaagcaggattgtt

SEQ ID NO: 5489275 - DNA, 25 bp, Homo sapien
gtgaggtggtagaaatatcatccct

SEQ ID NO: 5489276 - DNA, 25 bp, Homo sapien
aaataacagacataccaggaaaatc

SEQ ID NO: 5489277 - DNA, 25 bp, Homo sapien
ctgttcagcatcatattcaagccta

SEQ ID NO: 5489278 - DNA, 25 bp, Homo sapien
tggcctggaattttggcagcaccca

SEQ ID NO: 5489279 - DNA, 25 bp, Homo sapien
ataaagcgcaatgttagaatagtac

SEQ ID NO: 5489280 - DNA, 25 bp, Homo sapien
cagagtccctgcaaaatggcctgga

SEQ ID NO: 5489281 - DNA, 25 bp, Homo sapien
catggtgtgtcctatactcgagaag

SEQ ID NO: 5489282 - DNA, 25 bp, Homo sapien
cttctcgagtataggacacaccatg

SEQ ID NO: 5489283 - DNA, 25 bp, Homo sapien
acaagaagtatctatataacatgaa

SEQ ID NO: 5489284 - DNA, 25 bp, Homo sapien
ttcatgttatatagatacttcttgt

SEQ ID NO: 5489285 - DNA, 25 bp, Homo sapien
gctacacccgcctccgggactggca

SEQ ID NO: 5489286 - DNA, 25 bp, Homo sapien
agcccacgctacacccgcctccggg

SEQ ID NO: 5489287 - DNA, 25 bp, Homo sapien
ggttcatctgacactgccttccctc

SEQ ID NO: 5489288 - DNA, 25 bp, Homo sapien
actggcaccaccagcgctctgccca

SEQ ID NO: 5489289 - DNA, 25 bp, Homo sapien
ctgcccacgtgctcaacgtgcagtc

SEQ ID NO: 5489290 - DNA, 25 bp, Homo sapien
ctggccgcccacctgggttcatctg

SEQ ID NO: 5489291 - DNA, 25 bp, Homo sapien
cacgtgctcaacgtgcagtcgtagc

SEQ ID NO: 5489292 - DNA, 25 bp, Homo sapien
cccccctttcgtgcccctggcctga

SEQ ID NO: 5489293 - DNA, 25 bp, Homo sapien
cctttcgtgcccctggcctgagcct

SEQ ID NO: 5489294 - DNA, 25 bp, Homo sapien
gcccagggcacccccttagtgcctc

SEQ ID NO: 5489295 - DNA, 25 bp, Homo sapien
agcgctctgcccacgtgctcaacgt

SEQ ID NO: 5489296 - DNA, 25 bp, Homo sapien
gtgagccgagatcgcatcactgtac

SEQ ID NO: 5489297 - DNA, 25 bp, Homo sapien
ctccagtctgagtgacacagtgaga

SEQ ID NO: 5489298 - DNA, 25 bp, Homo sapien
caataaaatgaaagaaagacctagc

SEQ ID NO: 5489299 - DNA, 25 bp, Homo sapien
actccactgtaaaacataggttacc

SEQ ID NO: 5489300 - DNA, 25 bp, Homo sapien
gtgcggtggttcacgcctgtaatcc

SEQ ID NO: 5489301 - DNA, 25 bp, Homo sapien
atcacatgcaaaacctgtcacttca

SEQ ID NO: 5489302 - DNA, 25 bp, Homo sapien
gtgacacagtgagactctgtccccc

SEQ ID NO: 5489303 - DNA, 25 bp, Homo sapien
ttaacagaaaacactcatcacatgc

SEQ ID NO: 5489304 - DNA, 25 bp, Homo sapien
caataaaatggatgtagtactggcc

SEQ ID NO: 5489305 - DNA, 25 bp, Homo sapien
ctgtaatcccggcactttaggaggc

SEQ ID NO: 5489306 - DNA, 25 bp, Homo sapien
aaaagtacatgtgaaaagaaagctt

SEQ ID NO: 5489307 - DNA, 25 bp, Homo sapien
tcattaaactttcattagttataac

SEQ ID NO: 5489308 - DNA, 25 bp, Homo sapien
gttataactaatgaaagtttaatga

SEQ ID NO: 5489309 - DNA, 25 bp, Homo sapien
cttcattaaactttcattagttata

SEQ ID NO: 5489310 - DNA, 25 bp, Homo sapien
tataactaatgaaagtttaatgaag

SEQ ID NO: 5489311 - DNA, 25 bp, Homo sapien
aattcttcattaaactttcattagt

SEQ ID NO: 5489312 - DNA, 25 bp, Homo sapien
actaatgaaagtttaatgaagaatt

SEQ ID NO: 5489313 - DNA, 25 bp, Homo sapien
caaagtgtacaaagccaaatacccc

SEQ ID NO: 5489314 - DNA, 25 bp, Homo sapien
gatggcagccctaacctggacttca

SEQ ID NO: 5489315 - DNA, 25 bp, Homo sapien
cctacaatgccttgacggggaagga

SEQ ID NO: 5489316 - DNA, 25 bp, Homo sapien
cccatgacactacgggtctcacggc

SEQ ID NO: 5489317 - DNA, 25 bp, Homo sapien
cgaggagccccctacaatgccttga

SEQ ID NO: 5489318 - DNA, 25 bp, Homo sapien
ataccccatcgtcggctacactgcc

SEQ ID NO: 5489319 - DNA, 25 bp, Homo sapien
tccttggatcctgcagacctcaccc

SEQ ID NO: 5489320 - DNA, 25 bp, Homo sapien
gaggggtagccaagatgtccttgga

SEQ ID NO: 5489321 - DNA, 25 bp, Homo sapien
cagtgcggcttttcaccgaggagga

SEQ ID NO: 5489322 - DNA, 25 bp, Homo sapien
tcaagcctgaagaccagccccattt

SEQ ID NO: 5489323 - DNA, 25 bp, Homo sapien
ggctacactgcccggagaattctca

SEQ ID NO: 5489324 - DNA, 25 bp, Homo sapien
cacacctgtgagtgctcaaagtcac

SEQ ID NO: 5489325 - DNA, 25 bp, Homo sapien
taccacctgtgtggagtgtaaagac

SEQ ID NO: 5489326 - DNA, 25 bp, Homo sapien
tttaataggccaatggatgctactc

SEQ ID NO: 5489327 - DNA, 25 bp, Homo sapien
caaagtcacacgcatgattgagggg

SEQ ID NO: 5489328 - DNA, 25 bp, Homo sapien
agacagcagaaaccaaagcattttc

SEQ ID NO: 5489329 - DNA, 25 bp, Homo sapien
gcctggctaatgcttaatacgcttc

SEQ ID NO: 5489330 - DNA, 25 bp, Homo sapien
tccagcacaacattgtcagagctgc

SEQ ID NO: 5489331 - DNA, 25 bp, Homo sapien
gaaagcaaactgcaatatccagcac

SEQ ID NO: 5489332 - DNA, 25 bp, Homo sapien
agggccaaggtataaccccaggcta

SEQ ID NO: 5489333 - DNA, 25 bp, Homo sapien
acaaaaccaaaggcccaatggtgtc

SEQ ID NO: 5489334 - DNA, 25 bp, Homo sapien
accccaggctaacccacctgccctg

SEQ ID NO: 5489335 - DNA, 25 bp, Homo sapien
atggggttcatgaggtcaaaactat

SEQ ID NO: 5489336 - DNA, 25 bp, Homo sapien
gacagatgaaaatctagctggcttc

SEQ ID NO: 5489337 - DNA, 25 bp, Homo sapien
aagtgttaccctataccagtgattc

SEQ ID NO: 5489338 - DNA, 25 bp, Homo sapien
tctggggaacctttcatggggttca

SEQ ID NO: 5489339 - DNA, 25 bp, Homo sapien
acatatttaagtggggtacagagaa

SEQ ID NO: 5489340 - DNA, 25 bp, Homo sapien
ggggtacagagaactgaatttacac

SEQ ID NO: 5489341 - DNA, 25 bp, Homo sapien
gaggccacatgatccatgacatcac

SEQ ID NO: 5489342 - DNA, 25 bp, Homo sapien
cagaacaagtaagaaatcaaacagc

SEQ ID NO: 5489343 - DNA, 25 bp, Homo sapien
gaatcagacattaaggggtccagag

SEQ ID NO: 5489344 - DNA, 25 bp, Homo sapien
gggtccagagaccataaagtgtgac

SEQ ID NO: 5489345 - DNA, 25 bp, Homo sapien
cattctcgagtatacagtagagttt

SEQ ID NO: 5489346 - DNA, 25 bp, Homo sapien
aaatgctcctggtacaaactttgtt

SEQ ID NO: 5489347 - DNA, 25 bp, Homo sapien
ccttccccgtcaagctccggtccac

SEQ ID NO: 5489348 - DNA, 25 bp, Homo sapien
cgggcacatcttgctggacactcgc

SEQ ID NO: 5489349 - DNA, 25 bp, Homo sapien
ccctctcgctcaaatacagggatgg

SEQ ID NO: 5489350 - DNA, 25 bp, Homo sapien
caaactttgttgcaggggaattgga

SEQ ID NO: 5489351 - DNA, 25 bp, Homo sapien
ttctgcagagcttcacgctcccgca

SEQ ID NO: 5489352 - DNA, 25 bp, Homo sapien
catccacgggcacatcttgctggac

SEQ ID NO: 5489353 - DNA, 25 bp, Homo sapien
tccacgggcacatcttgctggacac

SEQ ID NO: 5489354 - DNA, 25 bp, Homo sapien
gacactcgccaaatgctcctggtac

SEQ ID NO: 5489355 - DNA, 25 bp, Homo sapien
ttgctggacactcgccaaatgctcc

SEQ ID NO: 5489356 - DNA, 25 bp, Homo sapien
ctgcagagcttcacgctcccgcacc

SEQ ID NO: 5489357 - DNA, 25 bp, Homo sapien
aatgttggatagagaatgcgctaat

SEQ ID NO: 5489358 - DNA, 25 bp, Homo sapien
ttaatggggcataatccgttctttc

SEQ ID NO: 5489359 - DNA, 25 bp, Homo sapien
caaatccagagagcacttaacaaac

SEQ ID NO: 5489360 - DNA, 25 bp, Homo sapien
ctgagccacaccgcactacctgaga

SEQ ID NO: 5489361 - DNA, 25 bp, Homo sapien
tacaataagatagagcaacaacaac

SEQ ID NO: 5489362 - DNA, 25 bp, Homo sapien
acctgagacctgaccagggactttc

SEQ ID NO: 5489363 - DNA, 25 bp, Homo sapien
gagagctcattgtgccctgtggcct

SEQ ID NO: 5489364 - DNA, 25 bp, Homo sapien
gttgctgtctcagtgagaagggcct

SEQ ID NO: 5489365 - DNA, 25 bp, Homo sapien
tggccttcaactcaaatggatgctc

SEQ ID NO: 5489366 - DNA, 25 bp, Homo sapien
actgaggcagtgagttccacaaata

SEQ ID NO: 5489367 - DNA, 25 bp, Homo sapien
acaatctaactatatggaggctttc

SEQ ID NO: 5489368 - DNA, 25 bp, Homo sapien
ggatgaccacataaagggcccacta

SEQ ID NO: 5489369 - DNA, 25 bp, Homo sapien
cagtgggcactgatgtgagtgctaa

SEQ ID NO: 5489370 - DNA, 25 bp, Homo sapien
tgagtgctaaatacagaggagcctt

SEQ ID NO: 5489371 - DNA, 25 bp, Homo sapien
aaggtgcagctgaacctggtgtttt

SEQ ID NO: 5489372 - DNA, 25 bp, Homo sapien
agatgcgagttggtacactgtagtt

SEQ ID NO: 5489373 - DNA, 25 bp, Homo sapien
tggaagtgaagaatcttgatggtgc

SEQ ID NO: 5489374 - DNA, 25 bp, Homo sapien
gccaagatcaagacagcaaaaagac

SEQ ID NO: 5489375 - DNA, 25 bp, Homo sapien
gtttttgatgacggagatgagaaga

SEQ ID NO: 5489376 - DNA, 25 bp, Homo sapien
tagaggataccttggtcccagagtc

SEQ ID NO: 5489377 - DNA, 25 bp, Homo sapien
ggtcccagagtcatcatgaaggccc

SEQ ID NO: 5489378 - DNA, 25 bp, Homo sapien
atgaaggcccttgatgagcctccct

SEQ ID NO: 5489379 - DNA, 25 bp, Homo sapien
gatgttgcataggctggcatggaat

SEQ ID NO: 5489380 - DNA, 25 bp, Homo sapien
gcaaatcatctaacaaaaacaaatc

SEQ ID NO: 5489381 - DNA, 25 bp, Homo sapien
atttattaagtggggtttcatgatg

SEQ ID NO: 5489382 - DNA, 25 bp, Homo sapien
tgatgcatcataataccttagaaac

SEQ ID NO: 5489383 - DNA, 25 bp, Homo sapien
taagagcaaagatattcagtatttt

SEQ ID NO: 5489384 - DNA, 25 bp, Homo sapien
gtaagtcactcatagtacctcataa

SEQ ID NO: 5489385 - DNA, 25 bp, Homo sapien
acatggaagaactagttgatgcatc

SEQ ID NO: 5489386 - DNA, 25 bp, Homo sapien
gcataggctggcatggaattccagg

SEQ ID NO: 5489387 - DNA, 25 bp, Homo sapien
aacatttgagcaagacttagtcgtt

SEQ ID NO: 5489388 - DNA, 25 bp, Homo sapien
tataaaggataacaattcaaatcat

SEQ ID NO: 5489389 - DNA, 25 bp, Homo sapien
tttcatgatgttgcataggctggca

SEQ ID NO: 5489390 - DNA, 25 bp, Homo sapien
gtggtccgtcggagctgtcgtcctc

SEQ ID NO: 5489391 - DNA, 25 bp, Homo sapien
gaggacgacagctccgacggaccac

SEQ ID NO: 5489392 - DNA, 25 bp, Homo sapien
acagtaagacgactacccgcgagga

SEQ ID NO: 5489393 - DNA, 25 bp, Homo sapien
tcctcgcgggtagtcgtcttactgt

SEQ ID NO: 5489394 - DNA, 25 bp, Homo sapien
tctcaacagaatcgcaccaaactat

SEQ ID NO: 5489395 - DNA, 25 bp, Homo sapien
tcaacagaatcgcaccaaactatac

SEQ ID NO: 5489396 - DNA, 25 bp, Homo sapien
gagccatctcaacagaatcgcacca

SEQ ID NO: 5489397 - DNA, 25 bp, Homo sapien
aacagaatcgcaccaaactatactt

SEQ ID NO: 5489398 - DNA, 25 bp, Homo sapien
ggaagagccatctcaacagaatcgc

SEQ ID NO: 5489399 - DNA, 25 bp, Homo sapien
gggaagagccatctcaacagaatcg

SEQ ID NO: 5489400 - DNA, 25 bp, Homo sapien
aagagccatctcaacagaatcgcac

SEQ ID NO: 5489401 - DNA, 25 bp, Homo sapien
catctcaacagaatcgcaccaaact

SEQ ID NO: 5489402 - DNA, 25 bp, Homo sapien
agagccatctcaacagaatcgcacc

SEQ ID NO: 5489403 - DNA, 25 bp, Homo sapien
gccatctcaacagaatcgcaccaaa

SEQ ID NO: 5489404 - DNA, 25 bp, Homo sapien
gcaccaaactatactttcaggatga

SEQ ID NO: 5489405 - DNA, 25 bp, Homo sapien
aaagtatagtttggtgcgattctgt

SEQ ID NO: 5489406 - DNA, 25 bp, Homo sapien
tcatcctgaaagtatagtttggtgc

SEQ ID NO: 5489407 - DNA, 25 bp, Homo sapien
ggtgcgattctgttgagatggctct

SEQ ID NO: 5489408 - DNA, 25 bp, Homo sapien
ttctgtcgtcttctcgcagccgtat

SEQ ID NO: 5489409 - DNA, 25 bp, Homo sapien
gccgtatagtagtagtaggcggccg

SEQ ID NO: 5489410 - DNA, 25 bp, Homo sapien
ttccaaaagatggcagaaagaagaa

SEQ ID NO: 5489411 - DNA, 25 bp, Homo sapien
tggcagaaagaagaaattcatcctg

SEQ ID NO: 5489412 - DNA, 25 bp, Homo sapien
agatggctcttccctctgaacgtgc

SEQ ID NO: 5489413 - DNA, 25 bp, Homo sapien
tctgaacgtgctctcctactgacca

SEQ ID NO: 5489414 - DNA, 25 bp, Homo sapien
tttattccaaaagatggcagaaaga

SEQ ID NO: 5489415 - DNA, 25 bp, Homo sapien
ctcgcagccgtatagtagtagtagg

SEQ ID NO: 5489416 - DNA, 25 bp, Homo sapien
cttccttgtagctggtgtatgtccc

SEQ ID NO: 5489417 - DNA, 25 bp, Homo sapien
gaacaaagtgctatgctgctataag

SEQ ID NO: 5489418 - DNA, 25 bp, Homo sapien
ggtgtatgtcccacagtgcagccat

SEQ ID NO: 5489419 - DNA, 25 bp, Homo sapien
gaggtaagttaactgaatcacaggc

SEQ ID NO: 5489420 - DNA, 25 bp, Homo sapien
tatggctaccaggcactggcaacaa

SEQ ID NO: 5489421 - DNA, 25 bp, Homo sapien
agtgcagccataaactatgaagccc

SEQ ID NO: 5489422 - DNA, 25 bp, Homo sapien
tatgaagcccagaagtatatgactt

SEQ ID NO: 5489423 - DNA, 25 bp, Homo sapien
ggttatgtggccaaattggtctttc

SEQ ID NO: 5489424 - DNA, 25 bp, Homo sapien
tagtatctggatggcagatgacagg

SEQ ID NO: 5489425 - DNA, 25 bp, Homo sapien
ccagatcagcaggccttatggctac

SEQ ID NO: 5489426 - DNA, 25 bp, Homo sapien
atttcagcttcatcgggtcctatcc

SEQ ID NO: 5489427 - DNA, 25 bp, Homo sapien
aaaagcaactgccaagctaataata

SEQ ID NO: 5489428 - DNA, 25 bp, Homo sapien
acatatgggacagttcttactatta

SEQ ID NO: 5489429 - DNA, 25 bp, Homo sapien
agagttggaagatgaatttcacagt

SEQ ID NO: 5489430 - DNA, 25 bp, Homo sapien
attgttatgtttcacctagtaggca

SEQ ID NO: 5489431 - DNA, 25 bp, Homo sapien
ttattctctgaaatccaacgcattc

SEQ ID NO: 5489432 - DNA, 25 bp, Homo sapien
aaaaatagtgtgtagaaatgaatag

SEQ ID NO: 5489433 - DNA, 25 bp, Homo sapien
tcacagtaatgtaattttaaccacc

SEQ ID NO: 5489434 - DNA, 25 bp, Homo sapien
taacagttaaccactaacatgtatc

SEQ ID NO: 5489435 - DNA, 25 bp, Homo sapien
aaatccaacgcattcaaaggatgtt

SEQ ID NO: 5489436 - DNA, 25 bp, Homo sapien
ttaacttagagttggaagatgaatt

SEQ ID NO: 5489437 - DNA, 25 bp, Homo sapien
catagatgtagtcaatgattaatat

SEQ ID NO: 5489438 - DNA, 25 bp, Homo sapien
caggttgtttgatgtgtgcacagtg

SEQ ID NO: 5489439 - DNA, 25 bp, Homo sapien
tctccaccatccgcgaggtggcggt

SEQ ID NO: 5489440 - DNA, 25 bp, Homo sapien
acaccgagtagtgcatcgcgatcta

SEQ ID NO: 5489441 - DNA, 25 bp, Homo sapien
acttggataaagttccagagcctgg

SEQ ID NO: 5489442 - DNA, 25 bp, Homo sapien
aacagacagagaaaccaaactaact

SEQ ID NO: 5489443 - DNA, 25 bp, Homo sapien
gagcaccccaacgtggtcaggttgt

SEQ ID NO: 5489444 - DNA, 25 bp, Homo sapien
gtgcacagtgtcacgaacagacaga

SEQ ID NO: 5489445 - DNA, 25 bp, Homo sapien
cagcttctccgaggtctggactttc

SEQ ID NO: 5489446 - DNA, 25 bp, Homo sapien
gttcaaggcccgcgacttgaagaac

SEQ ID NO: 5489447 - DNA, 25 bp, Homo sapien
tgaacatgtcgatcaagacttgacc

SEQ ID NO: 5489448 - DNA, 25 bp, Homo sapien
gcccactgaaaccataaaggatatg

SEQ ID NO: 5489449 - DNA, 25 bp, Homo sapien
aatacttgtctgagggccttgaggg

SEQ ID NO: 5489450 - DNA, 25 bp, Homo sapien
ggaccctcaggaatatgcctttctt

SEQ ID NO: 5489451 - DNA, 25 bp, Homo sapien
atgttatcaggctacagaccgtatt

SEQ ID NO: 5489452 - DNA, 25 bp, Homo sapien
ggtaataataggaaatggaccctca

SEQ ID NO: 5489453 - DNA, 25 bp, Homo sapien
gttgatcaggacttagaatacttgt

SEQ ID NO: 5489454 - DNA, 25 bp, Homo sapien
agtaaattagaagaagcaagacatc

SEQ ID NO: 5489455 - DNA, 25 bp, Homo sapien
catcagaagcaatacacccaaatac

SEQ ID NO: 5489456 - DNA, 25 bp, Homo sapien
atactttggtgacaacttggggcga

SEQ ID NO: 5489457 - DNA, 25 bp, Homo sapien
aagcgatgccattagttgaagaaac

SEQ ID NO: 5489458 - DNA, 25 bp, Homo sapien
ttactggaagattcgtcagtgactt

SEQ ID NO: 5489459 - DNA, 25 bp, Homo sapien
cagatgctgactttgggtatgatta

SEQ ID NO: 5489460 - DNA, 25 bp, Homo sapien
aaagaattatgaagtagcattgacg

SEQ ID NO: 5489461 - DNA, 25 bp, Homo sapien
cgtcaatgctacttcataattcttt

SEQ ID NO: 5489462 - DNA, 25 bp, Homo sapien
tattctttggtagaggactgaagga

SEQ ID NO: 5489463 - DNA, 25 bp, Homo sapien
gtgagcagtcacttttgtaggcaac

SEQ ID NO: 5489464 - DNA, 25 bp, Homo sapien
tacactgtaggagtaataccgcctt

SEQ ID NO: 5489465 - DNA, 25 bp, Homo sapien
ttaaagaatgcatgatccctgaatt

SEQ ID NO: 5489466 - DNA, 25 bp, Homo sapien
aaagcaagcgtaacagtattaaatt

SEQ ID NO: 5489467 - DNA, 25 bp, Homo sapien
aaaatgtctatgtaggttcagggcc

SEQ ID NO: 5489468 - DNA, 25 bp, Homo sapien
aaaacaaacagcaccattaaagaat

SEQ ID NO: 5489469 - DNA, 25 bp, Homo sapien
aggttcagggccttcgcccccaatc

SEQ ID NO: 5489470 - DNA, 25 bp, Homo sapien
aaaaaggcattaaatggctaatgtc

SEQ ID NO: 5489471 - DNA, 25 bp, Homo sapien
cttactgaatcaactgctccccctt

SEQ ID NO: 5489472 - DNA, 25 bp, Homo sapien
tttagtcaggtatcaaagcaagcgt

SEQ ID NO: 5489473 - DNA, 25 bp, Homo sapien
ttaatagagtcaatgcagcacatgc

SEQ ID NO: 5489474 - DNA, 25 bp, Homo sapien
ggaatgtagggtgaatttgaaatgt

SEQ ID NO: 5489475 - DNA, 25 bp, Homo sapien
caggacaccttcagagaggctagtg

SEQ ID NO: 5489476 - DNA, 25 bp, Homo sapien
cacatgctagaaacagatacagagt

SEQ ID NO: 5489477 - DNA, 25 bp, Homo sapien
gtgctgcagacaccagtgcttctcc

SEQ ID NO: 5489478 - DNA, 25 bp, Homo sapien
taaacaaacagaacaaagaaagaga

SEQ ID NO: 5489479 - DNA, 25 bp, Homo sapien
atacagaagtgctaaacagaccatt

SEQ ID NO: 5489480 - DNA, 25 bp, Homo sapien
ttatcacagtggcctgtgggctgag

SEQ ID NO: 5489481 - DNA, 25 bp, Homo sapien
agtgagaatccagggccttcccctc

SEQ ID NO: 5489482 - DNA, 25 bp, Homo sapien
gccctggccccagcctgggccttgt

SEQ ID NO: 5489483 - DNA, 25 bp, Homo sapien
accagtgcttctccagggctggcca

SEQ ID NO: 5489484 - DNA, 25 bp, Homo sapien
aatgcagtacaaggccatgcaagct

SEQ ID NO: 5489485 - DNA, 25 bp, Homo sapien
agaagaagaaggtccgtaaatactg

SEQ ID NO: 5489486 - DNA, 25 bp, Homo sapien
gcacatcaccccaatgcagtacaag

SEQ ID NO: 5489487 - DNA, 25 bp, Homo sapien
atcaccccaatgcagtacaaggcca

SEQ ID NO: 5489488 - DNA, 25 bp, Homo sapien
gcagcaaacctttgaccagaggcgc

SEQ ID NO: 5489489 - DNA, 25 bp, Homo sapien
aggtccgtaaatactgggacgtgcc

SEQ ID NO: 5489490 - DNA, 25 bp, Homo sapien
attcgttccccccgccacgagaaga

SEQ ID NO: 5489491 - DNA, 25 bp, Homo sapien
acctttgaccagaggcgctaaagag

SEQ ID NO: 5489492 - DNA, 25 bp, Homo sapien
cggtggactgattcgttccccccgc

SEQ ID NO: 5489493 - DNA, 25 bp, Homo sapien
aaatactgggacgtgccacccccag

SEQ ID NO: 5489494 - DNA, 25 bp, Homo sapien
gacgacgcagcaaacctttgaccag

SEQ ID NO: 5489495 - DNA, 25 bp, Homo sapien
cttcttaaggtccctgctcggccgg

SEQ ID NO: 5489496 - DNA, 25 bp, Homo sapien
ctgcttcttaaggtccctgctcggc

SEQ ID NO: 5489497 - DNA, 25 bp, Homo sapien
cggtgtaccccaatgccaaggtgga

SEQ ID NO: 5489498 - DNA, 25 bp, Homo sapien
tgtccctctaataaagctcctctgc

SEQ ID NO: 5489499 - DNA, 25 bp, Homo sapien
caccctgtccctctaataaagctcc

SEQ ID NO: 5489500 - DNA, 25 bp, Homo sapien
tgggaccctgctcccacgcctgctt

SEQ ID NO: 5489501 - DNA, 25 bp, Homo sapien
tgcttcttaaggtccctgctcggcc

SEQ ID NO: 5489502 - DNA, 25 bp, Homo sapien
tgtaaatatgtttcaccctgtccct

SEQ ID NO: 5489503 - DNA, 25 bp, Homo sapien
tctaataaagctcctctgctccacc

SEQ ID NO: 5489504 - DNA, 25 bp, Homo sapien
ggcggtgtaccccaatgccaaggtg

SEQ ID NO: 5489505 - DNA, 25 bp, Homo sapien
tggcggtgtaccccaatgccaaggt

SEQ ID NO: 5489506 - DNA, 25 bp, Homo sapien
aggctcaaatccaggccaagtgatc

SEQ ID NO: 5489507 - DNA, 25 bp, Homo sapien
cttttgctcacagctgccttggccc

SEQ ID NO: 5489508 - DNA, 25 bp, Homo sapien
gatcccaataaagtgctgttgcagc

SEQ ID NO: 5489509 - DNA, 25 bp, Homo sapien
caggcactggtacttgcccccttgt

SEQ ID NO: 5489510 - DNA, 25 bp, Homo sapien
ttgggcaagttaatctctgggaact

SEQ ID NO: 5489511 - DNA, 25 bp, Homo sapien
aaccctaggcccttgagaagctgat

SEQ ID NO: 5489512 - DNA, 25 bp, Homo sapien
accccctgcctgaatggatgggtcc

SEQ ID NO: 5489513 - DNA, 25 bp, Homo sapien
gatgtagcaaattgagtgtgggttt

SEQ ID NO: 5489514 - DNA, 25 bp, Homo sapien
ccccacccctgggagatgtagcaaa

SEQ ID NO: 5489515 - DNA, 25 bp, Homo sapien
tatgtgaactgtagactcagatccc

SEQ ID NO: 5489516 - DNA, 25 bp, Homo sapien
ggttttggagtctgagcctcaggct

SEQ ID NO: 5489517 - DNA, 25 bp, Homo sapien
gagaaccccaagatgcacaactcgg

SEQ ID NO: 5489518 - DNA, 25 bp, Homo sapien
acgctcatgaagaaggataagtaca

SEQ ID NO: 5489519 - DNA, 25 bp, Homo sapien
agacgctcatgaagaaggataagta

SEQ ID NO: 5489520 - DNA, 25 bp, Homo sapien
ggccgttcatcgacgaggctaagcg

SEQ ID NO: 5489521 - DNA, 25 bp, Homo sapien
catgaaggagcacccggattataaa

SEQ ID NO: 5489522 - DNA, 25 bp, Homo sapien
atgcacaactcggagatcagcaagc

SEQ ID NO: 5489523 - DNA, 25 bp, Homo sapien
aaggagcacccggattataaatacc

SEQ ID NO: 5489524 - DNA, 25 bp, Homo sapien
ggcggaaaaccaagacgctcatgaa

SEQ ID NO: 5489525 - DNA, 25 bp, Homo sapien
tggaaacttttgtcggagacggaga

SEQ ID NO: 5489526 - DNA, 25 bp, Homo sapien
accccaagatgcacaactcggagat

SEQ ID NO: 5489527 - DNA, 25 bp, Homo sapien
atgaatgccttcatggtgtggtccc

SEQ ID NO: 5489528 - DNA, 25 bp, Homo sapien
tgggaatcagtgcttccccccaccc

SEQ ID NO: 5489529 - DNA, 25 bp, Homo sapien
tcccacttgtctggggcagacggta

SEQ ID NO: 5489530 - DNA, 25 bp, Homo sapien
gtagtcctggaaccatctggccacc

SEQ ID NO: 5489531 - DNA, 25 bp, Homo sapien
tggcaggtcacagagataaattaaa

SEQ ID NO: 5489532 - DNA, 25 bp, Homo sapien
tttataaaagcactcccaggttcac

SEQ ID NO: 5489533 - DNA, 25 bp, Homo sapien
aggcaccccctaactgggaatcagt

SEQ ID NO: 5489534 - DNA, 25 bp, Homo sapien
ggccaccttggcactcccatgtctg

SEQ ID NO: 5489535 - DNA, 25 bp, Homo sapien
tctccctggcaggtcacagagataa

SEQ ID NO: 5489536 - DNA, 25 bp, Homo sapien
ccctactgctcagttaggcaccccc

SEQ ID NO: 5489537 - DNA, 25 bp, Homo sapien
gagaaaaatcccaagtgttcacaca

SEQ ID NO: 5489538 - DNA, 25 bp, Homo sapien
ggcagcagtggcaaacagttaaaaa

SEQ ID NO: 5489539 - DNA, 25 bp, Homo sapien
gctgcctgtcaagagcatggtactt

SEQ ID NO: 5489540 - DNA, 25 bp, Homo sapien
agtgtgcatagtaggataccacggt

SEQ ID NO: 5489541 - DNA, 25 bp, Homo sapien
agattctgggaatgtcttgagtctc

SEQ ID NO: 5489542 - DNA, 25 bp, Homo sapien
ggtcatgggagtcacgctctcatgc

SEQ ID NO: 5489543 - DNA, 25 bp, Homo sapien
gtattcaccccagagagtgggatgg

SEQ ID NO: 5489544 - DNA, 25 bp, Homo sapien
aagcagattataagaaaacagtgtg

SEQ ID NO: 5489545 - DNA, 25 bp, Homo sapien
atgtacagttaagtgcaaaagcaga

SEQ ID NO: 5489546 - DNA, 25 bp, Homo sapien
gttcacacagcagggatttaaagcc

SEQ ID NO: 5489547 - DNA, 25 bp, Homo sapien
ggggaggtacctgcctaagttcaca

SEQ ID NO: 5489548 - DNA, 25 bp, Homo sapien
acttcctgtgcccagggaaccagca

SEQ ID NO: 5489549 - DNA, 25 bp, Homo sapien
ttgacatggaaagaggttcacaatg

SEQ ID NO: 5489550 - DNA, 25 bp, Homo sapien
tgttgacttccagcagatgggatgg

SEQ ID NO: 5489551 - DNA, 25 bp, Homo sapien
attcatgcagactatgttgcaagtc

SEQ ID NO: 5489552 - DNA, 25 bp, Homo sapien
tttgcccagtttccttatcacttgc

SEQ ID NO: 5489553 - DNA, 25 bp, Homo sapien
tgttgcaagtctgtttcatctagta

SEQ ID NO: 5489554 - DNA, 25 bp, Homo sapien
ttttatttcgagagaatctttcatt

SEQ ID NO: 5489555 - DNA, 25 bp, Homo sapien
ggctttgcgttaggatgctctgatc

SEQ ID NO: 5489556 - DNA, 25 bp, Homo sapien
gatctgacatttgacatgaacacaa

SEQ ID NO: 5489557 - DNA, 25 bp, Homo sapien
atatctaagaccagtatagtaaact

SEQ ID NO: 5489558 - DNA, 25 bp, Homo sapien
gcgttaggatgctctgatctgacat

SEQ ID NO: 5489559 - DNA, 25 bp, Homo sapien
ggggaaacacagcagttcttggtaa

SEQ ID NO: 5489560 - DNA, 25 bp, Homo sapien
gctagatgctcttgttgacttccag

SEQ ID NO: 5489561 - DNA, 25 bp, Homo sapien
atgtcgggaccgacttgtacgtcga

SEQ ID NO: 5489562 - DNA, 25 bp, Homo sapien
tcgacgtacaagtcggtcccgacat

SEQ ID NO: 5489563 - DNA, 25 bp, Homo sapien
agtgaatcctctaagacccctcttc

SEQ ID NO: 5489564 - DNA, 25 bp, Homo sapien
tccatccagtcatcagggagacaag

SEQ ID NO: 5489565 - DNA, 25 bp, Homo sapien
aggttataactccaaaatggacgaa

SEQ ID NO: 5489566 - DNA, 25 bp, Homo sapien
tgagcctcctccctcgtctcccaca

SEQ ID NO: 5489567 - DNA, 25 bp, Homo sapien
atgagtgaatcctctaagacccctc

SEQ ID NO: 5489568 - DNA, 25 bp, Homo sapien
ctccctcgtctcccacagcctcagc

SEQ ID NO: 5489569 - DNA, 25 bp, Homo sapien
aaacaacaaatgagactcttgcaag

SEQ ID NO: 5489570 - DNA, 25 bp, Homo sapien
gggacatgagtgaatcctctaagac

SEQ ID NO: 5489571 - DNA, 25 bp, Homo sapien
aggacatttgaaccatctgagtttc

SEQ ID NO: 5489572 - DNA, 25 bp, Homo sapien
atccagtcatcagggagacaagaaa

SEQ ID NO: 5489573 - DNA, 25 bp, Homo sapien
cacagcactgaggcccaactatctc

SEQ ID NO: 5489574 - DNA, 25 bp, Homo sapien
gggagcctggaatcccaaccacctc

SEQ ID NO: 5489575 - DNA, 25 bp, Homo sapien
cagacccaggcctgtccagaatcta

SEQ ID NO: 5489576 - DNA, 25 bp, Homo sapien
cacctcccttgcagacccaggcctg

SEQ ID NO: 5489577 - DNA, 25 bp, Homo sapien
gccttgtcatgactccgaggccagt

SEQ ID NO: 5489578 - DNA, 25 bp, Homo sapien
ccagaatctagctgcctgagagagg

SEQ ID NO: 5489579 - DNA, 25 bp, Homo sapien
tcaacaccagcctcaaactagcaac

SEQ ID NO: 5489580 - DNA, 25 bp, Homo sapien
ccgagctgctcgcccagccttgtca

SEQ ID NO: 5489581 - DNA, 25 bp, Homo sapien
aactagcaactgtacaggtgctgct

SEQ ID NO: 5489582 - DNA, 25 bp, Homo sapien
atggccgagccattcttgtcagaat

SEQ ID NO: 5489583 - DNA, 25 bp, Homo sapien
cgaggactctactagccatggccga

SEQ ID NO: 5489584 - DNA, 25 bp, Homo sapien
ttgtcagaatatcaacaccagcctc

SEQ ID NO: 5489585 - DNA, 25 bp, Homo sapien
ctggagatgtgcatgaaccactgtg

SEQ ID NO: 5489586 - DNA, 25 bp, Homo sapien
tggcccacaagatccagtctccgca

SEQ ID NO: 5489587 - DNA, 25 bp, Homo sapien
gaacgaactgatcaaagtgttgtcc

SEQ ID NO: 5489588 - DNA, 25 bp, Homo sapien
gatgctgaagaaacaaggaattata

SEQ ID NO: 5489589 - DNA, 25 bp, Homo sapien
cggaacaggattggtcagctatcca

SEQ ID NO: 5489590 - DNA, 25 bp, Homo sapien
agcgaggtggccaaatttcgtttcc

SEQ ID NO: 5489591 - DNA, 25 bp, Homo sapien
attcgagacgcttatcagatgctga

SEQ ID NO: 5489592 - DNA, 25 bp, Homo sapien
ccacacatgcgccctggctactggc

SEQ ID NO: 5489593 - DNA, 25 bp, Homo sapien
gcaggtgaacactgaccccaatggc

SEQ ID NO: 5489594 - DNA, 25 bp, Homo sapien
gaaaagttaaaggaagagtcattga

SEQ ID NO: 5489595 - DNA, 25 bp, Homo sapien
ccacagacccaagcatgtcggaaca

SEQ ID NO: 5489596 - DNA, 25 bp, Homo sapien
tcgccggcccgaagtgccatacgtg

SEQ ID NO: 5489597 - DNA, 25 bp, Homo sapien
cacgtatggcacttcgggccggcga

SEQ ID NO: 5489598 - DNA, 25 bp, Homo sapien
gcagcaagaagtattccaatgtctc

SEQ ID NO: 5489599 - DNA, 25 bp, Homo sapien
ctaggctgaattaaggtagactatt

SEQ ID NO: 5489600 - DNA, 25 bp, Homo sapien
aatattcacaagtgggagttttctt

SEQ ID NO: 5489601 - DNA, 25 bp, Homo sapien
tgaaaaaagatcagtaaatcaatgt

SEQ ID NO: 5489602 - DNA, 25 bp, Homo sapien
gatggatattttaacatggagtttc

SEQ ID NO: 5489603 - DNA, 25 bp, Homo sapien
aatctggaagaatttactaagtgta

SEQ ID NO: 5489604 - DNA, 25 bp, Homo sapien
aaatgactagttattatgaagacac

SEQ ID NO: 5489605 - DNA, 25 bp, Homo sapien
gttttacaaaacccatgccatccaa

SEQ ID NO: 5489606 - DNA, 25 bp, Homo sapien
agacactactgttgaagatggatat

SEQ ID NO: 5489607 - DNA, 25 bp, Homo sapien
aaccagttctcgcaagcaatgtgta

SEQ ID NO: 5489608 - DNA, 25 bp, Homo sapien
ttaagatgacatgtagcagcaagaa

SEQ ID NO: 5489609 - DNA, 25 bp, Homo sapien
gccgcgtctgagcatcatcgccacg

SEQ ID NO: 5489610 - DNA, 25 bp, Homo sapien
gaggccatcagccagaccatcgaca

SEQ ID NO: 5489611 - DNA, 25 bp, Homo sapien
catcgacaccatcgtggacatgatc

SEQ ID NO: 5489612 - DNA, 25 bp, Homo sapien
acaccgactgcgctatcaagaaggg

SEQ ID NO: 5489613 - DNA, 25 bp, Homo sapien
caagtgtgctgctccttcgaatgcc

SEQ ID NO: 5489614 - DNA, 25 bp, Homo sapien
aaggagaataagtacctgattgtgg

SEQ ID NO: 5489615 - DNA, 25 bp, Homo sapien
cttctcggtggccatcacacccgac

SEQ ID NO: 5489616 - DNA, 25 bp, Homo sapien
cctgggcgtcaaagtcttctcggtg

SEQ ID NO: 5489617 - DNA, 25 bp, Homo sapien
gggcacctacaccgactgcgctatc

SEQ ID NO: 5489618 - DNA, 25 bp, Homo sapien
tccttcgaatgccagcctgcaagag

SEQ ID NO: 5489619 - DNA, 25 bp, Homo sapien
aagtacctgattgtggtgaccgacg

SEQ ID NO: 5489620 - DNA, 25 bp, Homo sapien
aatctatatacaagccccgggggta

SEQ ID NO: 5489621 - DNA, 25 bp, Homo sapien
acccaggctcctctgcccgtcggga

SEQ ID NO: 5489622 - DNA, 25 bp, Homo sapien
ctccttgtcccctcgggacccaggc

SEQ ID NO: 5489623 - DNA, 25 bp, Homo sapien
acccaggctccttgtcccctcggga

SEQ ID NO: 5489624 - DNA, 25 bp, Homo sapien
tataatctatatacaagccccgggg

SEQ ID NO: 5489625 - DNA, 25 bp, Homo sapien
cccaggctccttgtcccctcgggac

SEQ ID NO: 5489626 - DNA, 25 bp, Homo sapien
tttataatctatatacaagccccgg

SEQ ID NO: 5489627 - DNA, 25 bp, Homo sapien
ccttgtcccctcgggacccaggctc

SEQ ID NO: 5489628 - DNA, 25 bp, Homo sapien
ggcaacccaggctccttgtcccctc

SEQ ID NO: 5489629 - DNA, 25 bp, Homo sapien
ataatctatatacaagccccggggg

SEQ ID NO: 5489630 - DNA, 25 bp, Homo sapien
caacccaggctccttgtcccctcgg

SEQ ID NO: 5489631 - DNA, 25 bp, Homo sapien
taagcttgataaaatccggtgtcac

SEQ ID NO: 5489632 - DNA, 25 bp, Homo sapien
acgagtacccaggtgatgctagtgt

SEQ ID NO: 5489633 - DNA, 25 bp, Homo sapien
ctgctttagtggagagacattattc

SEQ ID NO: 5489634 - DNA, 25 bp, Homo sapien
aggtaccgccagagaatctgcactt

SEQ ID NO: 5489635 - DNA, 25 bp, Homo sapien
ttctaattcaggaggtctaaggtac

SEQ ID NO: 5489636 - DNA, 25 bp, Homo sapien
attgaaaccacttggagggcttgtt

SEQ ID NO: 5489637 - DNA, 25 bp, Homo sapien
aatccggtgtcacaaaggatatgag

SEQ ID NO: 5489638 - DNA, 25 bp, Homo sapien
ttcgatccagctaccacacactaaa

SEQ ID NO: 5489639 - DNA, 25 bp, Homo sapien
atctgtagacaacatttggaaaact

SEQ ID NO: 5489640 - DNA, 25 bp, Homo sapien
ggtaggagtaaagatcacattgttg

SEQ ID NO: 5489641 - DNA, 25 bp, Homo sapien
cattgttgaattataaagagcttac

SEQ ID NO: 5489642 - DNA, 25 bp, Homo sapien
gcagcggatcgcctttccgggttgg

SEQ ID NO: 5489643 - DNA, 25 bp, Homo sapien
gcgcctgggagactttctgaaccag

SEQ ID NO: 5489644 - DNA, 25 bp, Homo sapien
ctgggagactttctgaaccaggaga

SEQ ID NO: 5489645 - DNA, 25 bp, Homo sapien
cttctccctgcgactgcggatcttc

SEQ ID NO: 5489646 - DNA, 25 bp, Homo sapien
attccgtacttgagcaagcaccggg

SEQ ID NO: 5489647 - DNA, 25 bp, Homo sapien
caactgctggggcattccgtacttg

SEQ ID NO: 5489648 - DNA, 25 bp, Homo sapien
tggagctccccaaccatgaagccca

SEQ ID NO: 5489649 - DNA, 25 bp, Homo sapien
ctccggacccccagggtcctagcgc

SEQ ID NO: 5489650 - DNA, 25 bp, Homo sapien
gcgactgcggatcttcaacctcaac

SEQ ID NO: 5489651 - DNA, 25 bp, Homo sapien
agcccaacttctccctgcgactgcg

SEQ ID NO: 5489652 - DNA, 25 bp, Homo sapien
ggggcattccgtacttgagcaagca

SEQ ID NO: 5489653 - DNA, 25 bp, Homo sapien
taaaaagtctaagggtctggaggaa

SEQ ID NO: 5489654 - DNA, 25 bp, Homo sapien
ttcctccagacccttagacttttta

SEQ ID NO: 5489655 - DNA, 25 bp, Homo sapien
acccttggactctcagatgcagggc

SEQ ID NO: 5489656 - DNA, 25 bp, Homo sapien
actagtgggtcttatgtgtgtctgt

SEQ ID NO: 5489657 - DNA, 25 bp, Homo sapien
cgttaccgcgtgactcccaccatcc

SEQ ID NO: 5489658 - DNA, 25 bp, Homo sapien
gtgaggcctgaggctcatctgatac

SEQ ID NO: 5489659 - DNA, 25 bp, Homo sapien
accttctccccaagccagcgtggac

SEQ ID NO: 5489660 - DNA, 25 bp, Homo sapien
gtctctggccctgccgagcctatgg

SEQ ID NO: 5489661 - DNA, 25 bp, Homo sapien
gattcagccatgcatggactggggt

SEQ ID NO: 5489662 - DNA, 25 bp, Homo sapien
cgtggaccctggtgtctatggtgaa

SEQ ID NO: 5489663 - DNA, 25 bp, Homo sapien
gggcctgttctgctcctaggagacc

SEQ ID NO: 5489664 - DNA, 25 bp, Homo sapien
cacctgtgcgcaggtttgcacactc

SEQ ID NO: 5489665 - DNA, 25 bp, Homo sapien
tcgcgctcctcgtggattcagccat

SEQ ID NO: 5489666 - DNA, 25 bp, Homo sapien
ctgcggtcaccagcacccttctcac

SEQ ID NO: 5489667 - DNA, 25 bp, Homo sapien
cagccatccctgcagcgctgcacca

SEQ ID NO: 5489668 - DNA, 25 bp, Homo sapien
cgctgcaccagctcccacggctgtg

SEQ ID NO: 5489669 - DNA, 25 bp, Homo sapien
gagaaagcaccgataaggtcttcac

SEQ ID NO: 5489670 - DNA, 25 bp, Homo sapien
cgaggctgtctcccttgaggacacc

SEQ ID NO: 5489671 - DNA, 25 bp, Homo sapien
gcggagctcagatgcacactctgct

SEQ ID NO: 5489672 - DNA, 25 bp, Homo sapien
gcaggtgattcagatttggacagcc

SEQ ID NO: 5489673 - DNA, 25 bp, Homo sapien
tgtggagtcactgtgtgtgacggga

SEQ ID NO: 5489674 - DNA, 25 bp, Homo sapien
caccatctatgtcatggggggtctc

SEQ ID NO: 5489675 - DNA, 25 bp, Homo sapien
aggtgcagtgctttgaccccaagga

SEQ ID NO: 5489676 - DNA, 25 bp, Homo sapien
ccttctcacagcggtgtctcgaggc

SEQ ID NO: 5489677 - DNA, 25 bp, Homo sapien
ccccagttgaggtttcgtgtggttc

SEQ ID NO: 5489678 - DNA, 25 bp, Homo sapien
aagacagaagagaatgcatctcatg

SEQ ID NO: 5489679 - DNA, 25 bp, Homo sapien
gccagcccctcactcccccagttga

SEQ ID NO: 5489680 - DNA, 25 bp, Homo sapien
cagtgagactggcttagattggcag

SEQ ID NO: 5489681 - DNA, 25 bp, Homo sapien
tgaccgggttctctcaacatgttgc

SEQ ID NO: 5489682 - DNA, 25 bp, Homo sapien
cccatccaccaaagacagaagagaa

SEQ ID NO: 5489683 - DNA, 25 bp, Homo sapien
ttcgtgtggttcacagtgagactgg

SEQ ID NO: 5489684 - DNA, 25 bp, Homo sapien
gaggcctagtctctggacatccccc

SEQ ID NO: 5489685 - DNA, 25 bp, Homo sapien
tacccgccctggccagactcacaga

SEQ ID NO: 5489686 - DNA, 25 bp, Homo sapien
agtacactttattgaccgggttctc

SEQ ID NO: 5489687 - DNA, 25 bp, Homo sapien
ccctccacgctccctacccgccctg

SEQ ID NO: 5489688 - DNA, 25 bp, Homo sapien
gaagggaggtagcatctcccccatc

SEQ ID NO: 5489689 - DNA, 25 bp, Homo sapien
ttacatgatgctgcagttctggggg

SEQ ID NO: 5489690 - DNA, 25 bp, Homo sapien
cagaccctccctcccctggccccta

SEQ ID NO: 5489691 - DNA, 25 bp, Homo sapien
ggcttcaagccccctcccatgacgt

SEQ ID NO: 5489692 - DNA, 25 bp, Homo sapien
tggcaggtcccagattacatgatgc

SEQ ID NO: 5489693 - DNA, 25 bp, Homo sapien
agccctgcccctgccctccagtctg

SEQ ID NO: 5489694 - DNA, 25 bp, Homo sapien
ccccctcccatgacgtgcagggcag

SEQ ID NO: 5489695 - DNA, 25 bp, Homo sapien
ctccagtctggggctcagacaagag

SEQ ID NO: 5489696 - DNA, 25 bp, Homo sapien
tctcccccatccctcacactccagc

SEQ ID NO: 5489697 - DNA, 25 bp, Homo sapien
ctccacccccacccctgcctggcag

SEQ ID NO: 5489698 - DNA, 25 bp, Homo sapien
ctcacactccagccctgcccctgcc

SEQ ID NO: 5489699 - DNA, 25 bp, Homo sapien
aggaggaaatgagtctcaaccagac

SEQ ID NO: 5489700 - DNA, 25 bp, Homo sapien
ctgggtccctcagaatatgactctc

SEQ ID NO: 5489701 - DNA, 25 bp, Homo sapien
tgcctgaaaatagcgagacaggagg

SEQ ID NO: 5489702 - DNA, 25 bp, Homo sapien
gggccatgagaatgccgcattgcca

SEQ ID NO: 5489703 - DNA, 25 bp, Homo sapien
gttacatctggaagcaagcagtgct

SEQ ID NO: 5489704 - DNA, 25 bp, Homo sapien
tcccagtggagcccatgacttctga

SEQ ID NO: 5489705 - DNA, 25 bp, Homo sapien
agcaactaaggtttcagagctgaac

SEQ ID NO: 5489706 - DNA, 25 bp, Homo sapien
gcaaggacagcgctcatctgatgaa

SEQ ID NO: 5489707 - DNA, 25 bp, Homo sapien
cttctgatcaggacgctaaggttgt

SEQ ID NO: 5489708 - DNA, 25 bp, Homo sapien
tttgagtcaggtaccagcaactaag

SEQ ID NO: 5489709 - DNA, 25 bp, Homo sapien
gaaccctaatgcagaagtgtggggg

SEQ ID NO: 5489710 - DNA, 25 bp, Homo sapien
aatctattaacagttagaagtaggg

SEQ ID NO: 5489711 - DNA, 25 bp, Homo sapien
ccctacttctaactgttaatagatt

SEQ ID NO: 5489712 - DNA, 25 bp, Homo sapien
tagagattctgacagcttgagggtt

SEQ ID NO: 5489713 - DNA, 25 bp, Homo sapien
aagctgttgctaaatgtgaactcac

SEQ ID NO: 5489714 - DNA, 25 bp, Homo sapien
gggaagatcagtgaaattcaaccaa

SEQ ID NO: 5489715 - DNA, 25 bp, Homo sapien
aaagaacagatacacgcacacaatt

SEQ ID NO: 5489716 - DNA, 25 bp, Homo sapien
ttgtaaatggtaactatagagattc

SEQ ID NO: 5489717 - DNA, 25 bp, Homo sapien
ttgagggttattaataagctgttgc

SEQ ID NO: 5489718 - DNA, 25 bp, Homo sapien
ttttactgggagactagcataggaa

SEQ ID NO: 5489719 - DNA, 25 bp, Homo sapien
gctgccacaacagagaaagaacaga

SEQ ID NO: 5489720 - DNA, 25 bp, Homo sapien
tcagttataagtgcagaaaaaagta

SEQ ID NO: 5489721 - DNA, 25 bp, Homo sapien
ttttaatagtacaagctgccacaac

SEQ ID NO: 5489722 - DNA, 25 bp, Homo sapien
agacagtagagactctcccaggcct

SEQ ID NO: 5489723 - DNA, 25 bp, Homo sapien
ccatcacgtggtcaggagtattagt

SEQ ID NO: 5489724 - DNA, 25 bp, Homo sapien
actaatactcctgaccacgtgatgg

SEQ ID NO: 5489725 - DNA, 25 bp, Homo sapien
ctttctccacacaggagctggggga

SEQ ID NO: 5489726 - DNA, 25 bp, Homo sapien
acggagaccactcccaggctctcca

SEQ ID NO: 5489727 - DNA, 25 bp, Homo sapien
gccctggtccaggcctctcacatcc

SEQ ID NO: 5489728 - DNA, 25 bp, Homo sapien
tgatggatggtgccttcctccaccc

SEQ ID NO: 5489729 - DNA, 25 bp, Homo sapien
gccagcccccaacacagacactgca

SEQ ID NO: 5489730 - DNA, 25 bp, Homo sapien
gcctctcacatccagccccaggtgc

SEQ ID NO: 5489731 - DNA, 25 bp, Homo sapien
tgccccagtcgctccttgcgggaac

SEQ ID NO: 5489732 - DNA, 25 bp, Homo sapien
aggtctgcggcccccttagccatct

SEQ ID NO: 5489733 - DNA, 25 bp, Homo sapien
gctctccacaccctggagccagccc

SEQ ID NO: 5489734 - DNA, 25 bp, Homo sapien
atccgggacagctgttgccctttct

SEQ ID NO: 5489735 - DNA, 25 bp, Homo sapien
gcccccttctctgcgcctcggagcc

SEQ ID NO: 5489736 - DNA, 25 bp, Homo sapien
ctgggaaaactaaaaaagctctctg

SEQ ID NO: 5489737 - DNA, 25 bp, Homo sapien
agcgcatcaaggtctccaaagcggc

SEQ ID NO: 5489738 - DNA, 25 bp, Homo sapien
gctggtggaacagctacgcatagaa

SEQ ID NO: 5489739 - DNA, 25 bp, Homo sapien
tctcaggcagggcatcattcagtaa

SEQ ID NO: 5489740 - DNA, 25 bp, Homo sapien
agagctgatggcagacaatgtcagc

SEQ ID NO: 5489741 - DNA, 25 bp, Homo sapien
gtagaatggaccttgtaggtggaga

SEQ ID NO: 5489742 - DNA, 25 bp, Homo sapien
gcgagacctcctgcacagggtgtac

SEQ ID NO: 5489743 - DNA, 25 bp, Homo sapien
aagcggcgtctgacctcatgagcta

SEQ ID NO: 5489744 - DNA, 25 bp, Homo sapien
cagggtgtacagcaagctgtgattc

SEQ ID NO: 5489745 - DNA, 25 bp, Homo sapien
ctaacaacatagcccaggcccggaa

SEQ ID NO: 5489746 - DNA, 25 bp, Homo sapien
atgagctactgtgagcaacatgccc

SEQ ID NO: 5489747 - DNA, 25 bp, Homo sapien
gcattaacaaactgtaagtcaactg

SEQ ID NO: 5489748 - DNA, 25 bp, Homo sapien
ccctcacaataaaatcagaagcagg

SEQ ID NO: 5489749 - DNA, 25 bp, Homo sapien
aaatttgaaggtaaccacaattgta

SEQ ID NO: 5489750 - DNA, 25 bp, Homo sapien
aaaggtggcagctttacatctcagc

SEQ ID NO: 5489751 - DNA, 25 bp, Homo sapien
tactccactacagcacagacagcca

SEQ ID NO: 5489752 - DNA, 25 bp, Homo sapien
cagccaaagcaacagcaacacaaag

SEQ ID NO: 5489753 - DNA, 25 bp, Homo sapien
tcttaaaagataatgtaacaaatga

SEQ ID NO: 5489754 - DNA, 25 bp, Homo sapien
atgaactcataaagcagtagcagat

SEQ ID NO: 5489755 - DNA, 25 bp, Homo sapien
caccccagactgacaaatactccac

SEQ ID NO: 5489756 - DNA, 25 bp, Homo sapien
aagcagtagcagatacatcaatatc

SEQ ID NO: 5489757 - DNA, 25 bp, Homo sapien
acagcaacacaaagtttcaccgcac

SEQ ID NO: 5489758 - DNA, 25 bp, Homo sapien
atattgcaagacagatcggcttacc

SEQ ID NO: 5489759 - DNA, 25 bp, Homo sapien
ttcttaccgctcaggaaaggcctat

SEQ ID NO: 5489760 - DNA, 25 bp, Homo sapien
accccgcaatgcaaatgcctgcttg

SEQ ID NO: 5489761 - DNA, 25 bp, Homo sapien
atctcagcaagcttgcagaagggga

SEQ ID NO: 5489762 - DNA, 25 bp, Homo sapien
caaatcttatcgggtggagtgtttc

SEQ ID NO: 5489763 - DNA, 25 bp, Homo sapien
atcgtcgggacatgtatattgcaag

SEQ ID NO: 5489764 - DNA, 25 bp, Homo sapien
cagaagtacactcagaagaagcctt

SEQ ID NO: 5489765 - DNA, 25 bp, Homo sapien
tgaaaggacacagttgtactacccc

SEQ ID NO: 5489766 - DNA, 25 bp, Homo sapien
cataagcagaaaagccacgatgata

SEQ ID NO: 5489767 - DNA, 25 bp, Homo sapien
taccaaaggatcagaatgtgaccaa

SEQ ID NO: 5489768 - DNA, 25 bp, Homo sapien
gcttgcgaaatgttgtgttgatctc

SEQ ID NO: 5489769 - DNA, 25 bp, Homo sapien
caagtacgacgaattgttaaaatat

SEQ ID NO: 5489770 - DNA, 25 bp, Homo sapien
atattttaacaattcgtcgtacttg

SEQ ID NO: 5489771 - DNA, 25 bp, Homo sapien
aatggttaatgaagagtatacaagc

SEQ ID NO: 5489772 - DNA, 25 bp, Homo sapien
ctgaggaaatggcatgttactgagc

SEQ ID NO: 5489773 - DNA, 25 bp, Homo sapien
tgatgaaggagatttcagtttgcct

SEQ ID NO: 5489774 - DNA, 25 bp, Homo sapien
aaagcgaaaggatttctatcccctc

SEQ ID NO: 5489775 - DNA, 25 bp, Homo sapien
cccaaataaacacccaggccaggca

SEQ ID NO: 5489776 - DNA, 25 bp, Homo sapien
caagccaagctaagaaaaagtgggt

SEQ ID NO: 5489777 - DNA, 25 bp, Homo sapien
gggcatcggcaacacctcacaatgt

SEQ ID NO: 5489778 - DNA, 25 bp, Homo sapien
tgcaagcctcggagttctgctgtgg

SEQ ID NO: 5489779 - DNA, 25 bp, Homo sapien
aggtttctaccagccctgggagggc

SEQ ID NO: 5489780 - DNA, 25 bp, Homo sapien
tgctgtggctacaccagcaggaaga

SEQ ID NO: 5489781 - DNA, 25 bp, Homo sapien
tgagccttgatggcattactggcac

SEQ ID NO: 5489782 - DNA, 25 bp, Homo sapien
gtactggaccaatcgttgcacgagg

SEQ ID NO: 5489783 - DNA, 25 bp, Homo sapien
cctcgtgcaacgattggtccagtac

SEQ ID NO: 5489784 - DNA, 25 bp, Homo sapien
agtatgcagcatttattacaaagcc

SEQ ID NO: 5489785 - DNA, 25 bp, Homo sapien
tacagtcacaggacctcagacacag

SEQ ID NO: 5489786 - DNA, 25 bp, Homo sapien
cacacctacgctatgatggaatctc

SEQ ID NO: 5489787 - DNA, 25 bp, Homo sapien
gcaaacacagacaagcccatcaggg

SEQ ID NO: 5489788 - DNA, 25 bp, Homo sapien
gagggtacagtcacaggacctcaga

SEQ ID NO: 5489789 - DNA, 25 bp, Homo sapien
ctatgatggaatctcgagtctcgac

SEQ ID NO: 5489790 - DNA, 25 bp, Homo sapien
gatacagatgtcccagggcaaagga

SEQ ID NO: 5489791 - DNA, 25 bp, Homo sapien
ctcccaaccccacacacctacgcta

SEQ ID NO: 5489792 - DNA, 25 bp, Homo sapien
gatctatgcacacttgaggaaatct

SEQ ID NO: 5489793 - DNA, 25 bp, Homo sapien
attacaaagccaagagatacagatg

SEQ ID NO: 5489794 - DNA, 25 bp, Homo sapien
cgactcctctcagatctatgcacac

SEQ ID NO: 5489795 - DNA, 25 bp, Homo sapien
ggccctggtccttaggagaggagac

SEQ ID NO: 5489796 - DNA, 25 bp, Homo sapien
gtctcctctcctaaggaccagggcc

SEQ ID NO: 5489797 - DNA, 25 bp, Homo sapien
aagaggaggcttgtaataatccgat

SEQ ID NO: 5489798 - DNA, 25 bp, Homo sapien
gagattctggaatagaagcgtcgaa

SEQ ID NO: 5489799 - DNA, 25 bp, Homo sapien
gcggccgagaactccttcctgctac

SEQ ID NO: 5489800 - DNA, 25 bp, Homo sapien
ccagtctccctttcggggcggaaga

SEQ ID NO: 5489801 - DNA, 25 bp, Homo sapien
acaactcctcggatgtcgccagtct

SEQ ID NO: 5489802 - DNA, 25 bp, Homo sapien
gtcgaaggagatcaagtgaaccttc

SEQ ID NO: 5489803 - DNA, 25 bp, Homo sapien
ccctgtttgcagacgtccgtgggag

SEQ ID NO: 5489804 - DNA, 25 bp, Homo sapien
caccgctaaggttaagagattctgg

SEQ ID NO: 5489805 - DNA, 25 bp, Homo sapien
atctacccctaggaatgaagaggag

SEQ ID NO: 5489806 - DNA, 25 bp, Homo sapien
gcggaagactacgtttgagcatctc

SEQ ID NO: 5489807 - DNA, 25 bp, Homo sapien
ttcggcttcccagcgaagtgggaga

SEQ ID NO: 5489808 - DNA, 25 bp, Homo sapien
gcctctcattgtgatgagcgtgttc

SEQ ID NO: 5489809 - DNA, 25 bp, Homo sapien
gtcacgagaagagaatgccttctag

SEQ ID NO: 5489810 - DNA, 25 bp, Homo sapien
acaatgcagcgtgttttcctttgcc

SEQ ID NO: 5489811 - DNA, 25 bp, Homo sapien
gcttcttggtgccttggttcatccc

SEQ ID NO: 5489812 - DNA, 25 bp, Homo sapien
cgtgggaatcagtgaagtgtttaga

SEQ ID NO: 5489813 - DNA, 25 bp, Homo sapien
aaccggggagttatcattaccatgt

SEQ ID NO: 5489814 - DNA, 25 bp, Homo sapien
aatcacctccaaaccagaccacttt

SEQ ID NO: 5489815 - DNA, 25 bp, Homo sapien
tccataacctgaactgtgccgactc

SEQ ID NO: 5489816 - DNA, 25 bp, Homo sapien
gccttctagatgcaaaatcacctcc

SEQ ID NO: 5489817 - DNA, 25 bp, Homo sapien
gaccatggcgtatcacggcctcact

SEQ ID NO: 5489818 - DNA, 25 bp, Homo sapien
ggtgaattacgtgcctccataacct

SEQ ID NO: 5489819 - DNA, 25 bp, Homo sapien
ggacgattgtagtatcgactgtagt

SEQ ID NO: 5489820 - DNA, 25 bp, Homo sapien
actacagtcgatactacaatcgtcc

SEQ ID NO: 5489821 - DNA, 25 bp, Homo sapien
taacaaacaggatatccaaggccac

SEQ ID NO: 5489822 - DNA, 25 bp, Homo sapien
acaggatatccaaggccactacatt

SEQ ID NO: 5489823 - DNA, 25 bp, Homo sapien
ctatatacagatgcaagcaaggggc

SEQ ID NO: 5489824 - DNA, 25 bp, Homo sapien
caaacaggatatccaaggccactac

SEQ ID NO: 5489825 - DNA, 25 bp, Homo sapien
tccaaggccactacattgaggaggg

SEQ ID NO: 5489826 - DNA, 25 bp, Homo sapien
agtgagggctccctgctccctccct

SEQ ID NO: 5489827 - DNA, 25 bp, Homo sapien
aagggttacttgctgctcacactat

SEQ ID NO: 5489828 - DNA, 25 bp, Homo sapien
cactatatacagatgcaagcaaggg

SEQ ID NO: 5489829 - DNA, 25 bp, Homo sapien
attaacaaacaggatatccaaggcc

SEQ ID NO: 5489830 - DNA, 25 bp, Homo sapien
ctcacactatatacagatgcaagca

SEQ ID NO: 5489831 - DNA, 25 bp, Homo sapien
gtctttattaacaaacaggatatcc

SEQ ID NO: 5489832 - DNA, 25 bp, Homo sapien
agagttcagtgttcgcagtcgcata

SEQ ID NO: 5489833 - DNA, 25 bp, Homo sapien
agtggcgtagagttcagtgttcgca

SEQ ID NO: 5489834 - DNA, 25 bp, Homo sapien
tcgcagtcgcatattacaaccatgt

SEQ ID NO: 5489835 - DNA, 25 bp, Homo sapien
gaactctggatgaatacatggtggc

SEQ ID NO: 5489836 - DNA, 25 bp, Homo sapien
atggtggcaacagtccatgacacct

SEQ ID NO: 5489837 - DNA, 25 bp, Homo sapien
acaaccatgtttcacacagccctgc

SEQ ID NO: 5489838 - DNA, 25 bp, Homo sapien
atttaaaactcaaagaaagcatgct

SEQ ID NO: 5489839 - DNA, 25 bp, Homo sapien
cacacagccctgctcggtttgattt

SEQ ID NO: 5489840 - DNA, 25 bp, Homo sapien
ctccacgtggttgataattgtcttc

SEQ ID NO: 5489841 - DNA, 25 bp, Homo sapien
gtcttcagttgctgctaagtgattt

SEQ ID NO: 5489842 - DNA, 25 bp, Homo sapien
atcctcgccctacaattacctaagt

SEQ ID NO: 5489843 - DNA, 25 bp, Homo sapien
gtccttgtcgtagttcgaccaggag

SEQ ID NO: 5489844 - DNA, 25 bp, Homo sapien
ctcctggtcgaactacgacaaggac

SEQ ID NO: 5489845 - DNA, 25 bp, Homo sapien
ctattggcccctgtagaaagttaac

SEQ ID NO: 5489846 - DNA, 25 bp, Homo sapien
caagactccagtatgtgaaggttaa

SEQ ID NO: 5489847 - DNA, 25 bp, Homo sapien
cccctggcttcatgagaacaaaggc

SEQ ID NO: 5489848 - DNA, 25 bp, Homo sapien
tcagtaatctgagtttttgatggcc

SEQ ID NO: 5489849 - DNA, 25 bp, Homo sapien
aacaaaggcaggcccaggttataat

SEQ ID NO: 5489850 - DNA, 25 bp, Homo sapien
atgtgaaggttaattgctgtgctcc

SEQ ID NO: 5489851 - DNA, 25 bp, Homo sapien
tagcgtaagagcaagtataggatat

SEQ ID NO: 5489852 - DNA, 25 bp, Homo sapien
cttgattaagaagctaaaatgtttc

SEQ ID NO: 5489853 - DNA, 25 bp, Homo sapien
ttggtttgttattagcgtaagagca

SEQ ID NO: 5489854 - DNA, 25 bp, Homo sapien
acaattgctttagggtaagtgaatt

SEQ ID NO: 5489855 - DNA, 25 bp, Homo sapien
ttgatggccttttaaacaagactcc

SEQ ID NO: 5489856 - DNA, 25 bp, Homo sapien
ttattcaacaggaagcgctcaagtg

SEQ ID NO: 5489857 - DNA, 25 bp, Homo sapien
tacagccaggtcaagtgcctgcttt

SEQ ID NO: 5489858 - DNA, 25 bp, Homo sapien
ggatctagacaattcagaaaaaccc

SEQ ID NO: 5489859 - DNA, 25 bp, Homo sapien
cgctcaagtgggactcaccccccac

SEQ ID NO: 5489860 - DNA, 25 bp, Homo sapien
tcacagtgtaaagtgaatagggagc

SEQ ID NO: 5489861 - DNA, 25 bp, Homo sapien
ctgctttattcaacaggaagcgctc

SEQ ID NO: 5489862 - DNA, 25 bp, Homo sapien
gaaaaataatgcatggatctagaca

SEQ ID NO: 5489863 - DNA, 25 bp, Homo sapien
gttcactcaagacctaggctacagc

SEQ ID NO: 5489864 - DNA, 25 bp, Homo sapien
taggctacagccaggtcaagtgcct

SEQ ID NO: 5489865 - DNA, 25 bp, Homo sapien
ctcaccccccacctttcacagtgta

SEQ ID NO: 5489866 - DNA, 25 bp, Homo sapien
cactcaagacctaggctacagccag

SEQ ID NO: 5489867 - DNA, 25 bp, Homo sapien
ccaccgcacacgtgagcatctttgg

SEQ ID NO: 5489868 - DNA, 25 bp, Homo sapien
aggcatttatgtggccccaccgcac

SEQ ID NO: 5489869 - DNA, 25 bp, Homo sapien
cgactccagagcaacaatttctcac

SEQ ID NO: 5489870 - DNA, 25 bp, Homo sapien
tgggctcaggcatttatgtggcccc

SEQ ID NO: 5489871 - DNA, 25 bp, Homo sapien
cagccaagtgtgaaaacttcgactc

SEQ ID NO: 5489872 - DNA, 25 bp, Homo sapien
aagtgtgaaaacttcgactccagag

SEQ ID NO: 5489873 - DNA, 25 bp, Homo sapien
tccgtggtgaaagttccttcaagtg

SEQ ID NO: 5489874 - DNA, 25 bp, Homo sapien
tggtgaaagttccttcaagtgcagg

SEQ ID NO: 5489875 - DNA, 25 bp, Homo sapien
tgggcggacaaactttccgtggtga

SEQ ID NO: 5489876 - DNA, 25 bp, Homo sapien
gggctgaaagcctcctgtggatgcc

SEQ ID NO: 5489877 - DNA, 25 bp, Homo sapien
gagcatctttgggcggacaaacttt

SEQ ID NO: 5489878 - DNA, 25 bp, Homo sapien
tctgtactggatctctggttttctc

SEQ ID NO: 5489879 - DNA, 25 bp, Homo sapien
ttcctatctggagacagtgctgagg

SEQ ID NO: 5489880 - DNA, 25 bp, Homo sapien
gggttcatgactgctggacagagaa

SEQ ID NO: 5489881 - DNA, 25 bp, Homo sapien
tcattaaggagaaatgaaatactcc

SEQ ID NO: 5489882 - DNA, 25 bp, Homo sapien
gggttagggccagagccttcattaa

SEQ ID NO: 5489883 - DNA, 25 bp, Homo sapien
ctccaggctgcctaattaactgctt

SEQ ID NO: 5489884 - DNA, 25 bp, Homo sapien
aggttacttctcaaattagggacac

SEQ ID NO: 5489885 - DNA, 25 bp, Homo sapien
tgctggacagagaatgaaatatcat

SEQ ID NO: 5489886 - DNA, 25 bp, Homo sapien
ccacccccaccaaactaaatgatca

SEQ ID NO: 5489887 - DNA, 25 bp, Homo sapien
ctcctcctgtgtatgtgggaggggc

SEQ ID NO: 5489888 - DNA, 25 bp, Homo sapien
caaattagggacaccctgggaattg

SEQ ID NO: 5489889 - DNA, 25 bp, Homo sapien
caccaccagattgccacgctcacgg

SEQ ID NO: 5489890 - DNA, 25 bp, Homo sapien
gaaggatgagcgtttccagcttgag

SEQ ID NO: 5489891 - DNA, 25 bp, Homo sapien
ccatagttgtcatccagaacccagc

SEQ ID NO: 5489892 - DNA, 25 bp, Homo sapien
gccagctctacacagaagacaccca

SEQ ID NO: 5489893 - DNA, 25 bp, Homo sapien
agattgccacgctcacggtactagt

SEQ ID NO: 5489894 - DNA, 25 bp, Homo sapien
atggcacccgtgccttgaaggatga

SEQ ID NO: 5489895 - DNA, 25 bp, Homo sapien
cagcttgaggagttctccccacgcc

SEQ ID NO: 5489896 - DNA, 25 bp, Homo sapien
gccgtctgcaccagtatgatgggtc

SEQ ID NO: 5489897 - DNA, 25 bp, Homo sapien
ggatccggctctcagatgcccgcct

SEQ ID NO: 5489898 - DNA, 25 bp, Homo sapien
tggctgagatcacctgccgtctgca

SEQ ID NO: 5489899 - DNA, 25 bp, Homo sapien
aggggggctatttctgccagctcta

SEQ ID NO: 5489900 - DNA, 25 bp, Homo sapien
gacagtccctcaaaacagccacgct

SEQ ID NO: 5489901 - DNA, 25 bp, Homo sapien
gtttgttcactgatgggacagtccc

SEQ ID NO: 5489902 - DNA, 25 bp, Homo sapien
gcatatgctaggaggtaaaaaccaa

SEQ ID NO: 5489903 - DNA, 25 bp, Homo sapien
taagtgcacagaaatagacagcagc

SEQ ID NO: 5489904 - DNA, 25 bp, Homo sapien
tctgaaaggagtatttgatgaacac

SEQ ID NO: 5489905 - DNA, 25 bp, Homo sapien
gccaagagcccagagtctctctcca

SEQ ID NO: 5489906 - DNA, 25 bp, Homo sapien
ctccaaggccatgcagtttgttcac

SEQ ID NO: 5489907 - DNA, 25 bp, Homo sapien
acagccacgctaagtagacagatac

SEQ ID NO: 5489908 - DNA, 25 bp, Homo sapien
tgttcaggataagaagcaatgtgac

SEQ ID NO: 5489909 - DNA, 25 bp, Homo sapien
gatgaacacatctgagccaagagcc

SEQ ID NO: 5489910 - DNA, 25 bp, Homo sapien
tcaaggtgtcaagtgttcaggataa

SEQ ID NO: 5489911 - DNA, 25 bp, Homo sapien
aagacgatctgactcattagagtat

SEQ ID NO: 5489912 - DNA, 25 bp, Homo sapien
atactctaatgagtcagatcgtctt

SEQ ID NO: 5489913 - DNA, 25 bp, Homo sapien
tcgcgtggtcccgtcatcgccctac

SEQ ID NO: 5489914 - DNA, 25 bp, Homo sapien
gtagggcgatgacgggaccacgcga

SEQ ID NO: 5489915 - DNA, 25 bp, Homo sapien
taacattaaaaagacgtcaagctcc

SEQ ID NO: 5489916 - DNA, 25 bp, Homo sapien
gaagaagacgttgccagaaatcatt

SEQ ID NO: 5489917 - DNA, 25 bp, Homo sapien
ttgacaaaccaggctgtgctgaagc

SEQ ID NO: 5489918 - DNA, 25 bp, Homo sapien
accaggtgtccatccaaacaggtct

SEQ ID NO: 5489919 - DNA, 25 bp, Homo sapien
gcctcatgacatgcagaagcaggga

SEQ ID NO: 5489920 - DNA, 25 bp, Homo sapien
gcaggggaaaccttcctgctgcctc

SEQ ID NO: 5489921 - DNA, 25 bp, Homo sapien
tcaagctccacctgaagaagacgtt

SEQ ID NO: 5489922 - DNA, 25 bp, Homo sapien
accagcaggcacataagcccctgtg

SEQ ID NO: 5489923 - DNA, 25 bp, Homo sapien
gaggtgaggaacatgacatattttc

SEQ ID NO: 5489924 - DNA, 25 bp, Homo sapien
atatttatttggaggtgaggaacat

SEQ ID NO: 5489925 - DNA, 25 bp, Homo sapien
agcccagccccaactatgtgcctct

SEQ ID NO: 5489926 - DNA, 25 bp, Homo sapien
tggcaccaagccactcacgcaacta

SEQ ID NO: 5489927 - DNA, 25 bp, Homo sapien
acttatgggagcagttacagaagat

SEQ ID NO: 5489928 - DNA, 25 bp, Homo sapien
ctcacgcaactagccaaaaaggtcc

SEQ ID NO: 5489929 - DNA, 25 bp, Homo sapien
aggttaagaagagacatgttgaccc

SEQ ID NO: 5489930 - DNA, 25 bp, Homo sapien
catggaatggactcagatcatcacc

SEQ ID NO: 5489931 - DNA, 25 bp, Homo sapien
atacacagtgcctgtgatgcgggct

SEQ ID NO: 5489932 - DNA, 25 bp, Homo sapien
gagcatggcagtgccaagaacgtca

SEQ ID NO: 5489933 - DNA, 25 bp, Homo sapien
gggctgcctggctcattaagatgac

SEQ ID NO: 5489934 - DNA, 25 bp, Homo sapien
ccaagtgaaccagaaggataacttc

SEQ ID NO: 5489935 - DNA, 25 bp, Homo sapien
ggatgaactgacggccttgaatgta

SEQ ID NO: 5489936 - DNA, 25 bp, Homo sapien
ttcctgacactggtcgcaggaagcc

SEQ ID NO: 5489937 - DNA, 25 bp, Homo sapien
gtttcagttcgaggacatgcaggaa

SEQ ID NO: 5489938 - DNA, 25 bp, Homo sapien
accacgatgtgggactcaactataa

SEQ ID NO: 5489939 - DNA, 25 bp, Homo sapien
acccggacactgttgaaggtcttgt

SEQ ID NO: 5489940 - DNA, 25 bp, Homo sapien
atgatcccttgcgtcctgcagtacc

SEQ ID NO: 5489941 - DNA, 25 bp, Homo sapien
ggacatgcaggaaatcattcagaac

SEQ ID NO: 5489942 - DNA, 25 bp, Homo sapien
ccaaacccaaacgcccagcgatcct

SEQ ID NO: 5489943 - DNA, 25 bp, Homo sapien
acaataattggagttggtgttggag

SEQ ID NO: 5489944 - DNA, 25 bp, Homo sapien
agagggagcccctgtgttccctttg

SEQ ID NO: 5489945 - DNA, 25 bp, Homo sapien
cactgtctatggcacccccaaaccc

SEQ ID NO: 5489946 - DNA, 25 bp, Homo sapien
ccaagactcactctgtggagacacc

SEQ ID NO: 5489947 - DNA, 25 bp, Homo sapien
tggagacaccatacggctctgtcac

SEQ ID NO: 5489948 - DNA, 25 bp, Homo sapien
agcccttcaagtacacgacggtgac

SEQ ID NO: 5489949 - DNA, 25 bp, Homo sapien
ggatccggcccacacaccctgccta

SEQ ID NO: 5489950 - DNA, 25 bp, Homo sapien
tgtagtcaacccacaggtgcttgtc

SEQ ID NO: 5489951 - DNA, 25 bp, Homo sapien
ttgttgacttgaaacccccgatgac

SEQ ID NO: 5489952 - DNA, 25 bp, Homo sapien
ccccgatgacaaaagactcacgcaa

SEQ ID NO: 5489953 - DNA, 25 bp, Homo sapien
gactcacgcaaagggactgtagtca

SEQ ID NO: 5489954 - DNA, 25 bp, Homo sapien
cagccggagcttcagaagcccttca

SEQ ID NO: 5489955 - DNA, 25 bp, Homo sapien
tctaggaacagacaactctaaactc

SEQ ID NO: 5489956 - DNA, 25 bp, Homo sapien
tcccagaaaactgcatcagaggaat

SEQ ID NO: 5489957 - DNA, 25 bp, Homo sapien
gaatgaggaaaccaacactttgaga

SEQ ID NO: 5489958 - DNA, 25 bp, Homo sapien
cgacggtgaccaagaggtcccgtcg

SEQ ID NO: 5489959 - DNA, 25 bp, Homo sapien
cagaagcccgtattcatctaggcat

SEQ ID NO: 5489960 - DNA, 25 bp, Homo sapien
gtagcaggcacagattgtctagatc

SEQ ID NO: 5489961 - DNA, 25 bp, Homo sapien
aggcattcaagatctcgtagcaggc

SEQ ID NO: 5489962 - DNA, 25 bp, Homo sapien
gtgctcagacggtctggaaaatccc

SEQ ID NO: 5489963 - DNA, 25 bp, Homo sapien
atctaggcattcaagatctcgtagc

SEQ ID NO: 5489964 - DNA, 25 bp, Homo sapien
agccctgtgctcagacggtctggaa

SEQ ID NO: 5489965 - DNA, 25 bp, Homo sapien
cgaagcagaagcccgtattcatcta

SEQ ID NO: 5489966 - DNA, 25 bp, Homo sapien
attcaagatctcgtagcaggcacag

SEQ ID NO: 5489967 - DNA, 25 bp, Homo sapien
agacggtctggaaaatcccgaagca

SEQ ID NO: 5489968 - DNA, 25 bp, Homo sapien
gatctcgtagcaggcacagattgtc

SEQ ID NO: 5489969 - DNA, 25 bp, Homo sapien
gtctggaaaatcccgaagcagaagc

SEQ ID NO: 5489970 - DNA, 25 bp, Homo sapien
gccttgcctccttgcttgccacgac

SEQ ID NO: 5489971 - DNA, 25 bp, Homo sapien
acgaccagacatgacagcgatagta

SEQ ID NO: 5489972 - DNA, 25 bp, Homo sapien
accagacatgacagcgatagtagtc

SEQ ID NO: 5489973 - DNA, 25 bp, Homo sapien
gcttgccacgaccagacatgacagc

SEQ ID NO: 5489974 - DNA, 25 bp, Homo sapien
cggcggtcagatactcgaggaccgc

SEQ ID NO: 5489975 - DNA, 25 bp, Homo sapien
ccttgcttgccacgaccagacatga

SEQ ID NO: 5489976 - DNA, 25 bp, Homo sapien
gatctcggcggtcagatactcgagg

SEQ ID NO: 5489977 - DNA, 25 bp, Homo sapien
gacatgacagcgatagtagtcaccg

SEQ ID NO: 5489978 - DNA, 25 bp, Homo sapien
gcctccttgcttgccacgaccagac

SEQ ID NO: 5489979 - DNA, 25 bp, Homo sapien
tgacagcgatagtagtcaccgagag

SEQ ID NO: 5489980 - DNA, 25 bp, Homo sapien
gcttgttcagttcctcgtcgttgcg

SEQ ID NO: 5489981 - DNA, 25 bp, Homo sapien
taaatggtagaaatcaacagaactt

SEQ ID NO: 5489982 - DNA, 25 bp, Homo sapien
ctatgtacatctaagtggggccatc

SEQ ID NO: 5489983 - DNA, 25 bp, Homo sapien
gagagggcccattttgaagtggcta

SEQ ID NO: 5489984 - DNA, 25 bp, Homo sapien
gggcctgaggtactgaatataaaac

SEQ ID NO: 5489985 - DNA, 25 bp, Homo sapien
tggggccatcagcagataatcatac

SEQ ID NO: 5489986 - DNA, 25 bp, Homo sapien
aggcaggaaacctagtcgttaagga

SEQ ID NO: 5489987 - DNA, 25 bp, Homo sapien
tcttctgggatatctggggaaagaa

SEQ ID NO: 5489988 - DNA, 25 bp, Homo sapien
agataatcatacgggcctgaggtac

SEQ ID NO: 5489989 - DNA, 25 bp, Homo sapien
gtacatcttggaggacttcagctta

SEQ ID NO: 5489990 - DNA, 25 bp, Homo sapien
taaaaagaagtgtacagaatcactc

SEQ ID NO: 5489991 - DNA, 25 bp, Homo sapien
ttcttagagaaaaccacagtacatc

SEQ ID NO: 5489992 - DNA, 25 bp, Homo sapien
taaacatgattaggatttgtaggtc

SEQ ID NO: 5489993 - DNA, 25 bp, Homo sapien
atttgtaggtcaaaatcccgtaaca

SEQ ID NO: 5489994 - DNA, 25 bp, Homo sapien
gataccaaaagtaagctgaataacc

SEQ ID NO: 5489995 - DNA, 25 bp, Homo sapien
aaaacaacagtggttcctgaattta

SEQ ID NO: 5489996 - DNA, 25 bp, Homo sapien
ccaatacaaaaaacagaactaactg

SEQ ID NO: 5489997 - DNA, 25 bp, Homo sapien
tttaaaggaaggatgcccacttctc

SEQ ID NO: 5489998 - DNA, 25 bp, Homo sapien
acaaggaaagcatgttaaacagaat

SEQ ID NO: 5489999 - DNA, 25 bp, Homo sapien
catctacccaacaccggcacatttt

SEQ ID NO: 5490000 - DNA, 25 bp, Homo sapien
tctctctcaagaggcagatggtcag

SEQ ID NO: 5490001 - DNA, 25 bp, Homo sapien
taaatataaattgaaccccagaggc

SEQ ID NO: 5490002 - DNA, 25 bp, Homo sapien
agaggcagaaaagtcatctacccaa

SEQ ID NO: 5490003 - DNA, 25 bp, Homo sapien
gtcttgcagctctttgtagaggacc

SEQ ID NO: 5490004 - DNA, 25 bp, Homo sapien
gcagctctttgtagaggacctagcc

SEQ ID NO: 5490005 - DNA, 25 bp, Homo sapien
tctgtatgcaagccgacgcagacaa

SEQ ID NO: 5490006 - DNA, 25 bp, Homo sapien
catagttaagacacaaacaccacac

SEQ ID NO: 5490007 - DNA, 25 bp, Homo sapien
ggccctctgtatgcaagccgacgca

SEQ ID NO: 5490008 - DNA, 25 bp, Homo sapien
ctttgtagaggacctagcctttctc

SEQ ID NO: 5490009 - DNA, 25 bp, Homo sapien
ctagcctttctctactgaactgaag

SEQ ID NO: 5490010 - DNA, 25 bp, Homo sapien
tggtcccatcacccgaagactggcc

SEQ ID NO: 5490011 - DNA, 25 bp, Homo sapien
ttggtcccatcacccgaagactggc

SEQ ID NO: 5490012 - DNA, 25 bp, Homo sapien
agtgcatagttaagacacaaacacc

SEQ ID NO: 5490013 - DNA, 25 bp, Homo sapien
gggcccagtgcatagttaagacaca

SEQ ID NO: 5490014 - DNA, 25 bp, Homo sapien
tcctgctgccaagagcccctcaaga

SEQ ID NO: 5490015 - DNA, 25 bp, Homo sapien
caccaggcttcttggtgaaccggcg

SEQ ID NO: 5490016 - DNA, 25 bp, Homo sapien
gagcagctggacaccaggcttcttg

SEQ ID NO: 5490017 - DNA, 25 bp, Homo sapien
ggcctgtgcccatcgcaggcctggg

SEQ ID NO: 5490018 - DNA, 25 bp, Homo sapien
tttgtagaagtttctcgaaggtgct

SEQ ID NO: 5490019 - DNA, 25 bp, Homo sapien
cccagggcactcgcccccctcctta

SEQ ID NO: 5490020 - DNA, 25 bp, Homo sapien
accagtcactgcctcgcagagccct

SEQ ID NO: 5490021 - DNA, 25 bp, Homo sapien
gccgctccaacatcacctctctctc

SEQ ID NO: 5490022 - DNA, 25 bp, Homo sapien
gagccctacactcccgcagccgctc

SEQ ID NO: 5490023 - DNA, 25 bp, Homo sapien
ctctctcctagacgcccaggaccgg

SEQ ID NO: 5490024 - DNA, 25 bp, Homo sapien
gagcccctcaagagaagggctgaac

SEQ ID NO: 5490025 - DNA, 25 bp, Homo sapien
cccgactacagcctggtggtgcggg

SEQ ID NO: 5490026 - DNA, 25 bp, Homo sapien
ttctcctcagccttctccttagccg

SEQ ID NO: 5490027 - DNA, 25 bp, Homo sapien
atgaccagaacctggcaaacctggc

SEQ ID NO: 5490028 - DNA, 25 bp, Homo sapien
gtgctacctctgcgggcactgtcgg

SEQ ID NO: 5490029 - DNA, 25 bp, Homo sapien
ggaagaccaccgtgtggatctgagg

SEQ ID NO: 5490030 - DNA, 25 bp, Homo sapien
ggcctcaggcagactctgcccagag

SEQ ID NO: 5490031 - DNA, 25 bp, Homo sapien
ggcagtgctacctctgcgggcactg

SEQ ID NO: 5490032 - DNA, 25 bp, Homo sapien
tggaaacctgcgaccccttctcctc

SEQ ID NO: 5490033 - DNA, 25 bp, Homo sapien
aacctggcaaacctggccctgcagg

SEQ ID NO: 5490034 - DNA, 25 bp, Homo sapien
gaagaccaccgtgtggatctgaggg

SEQ ID NO: 5490035 - DNA, 25 bp, Homo sapien
ggcgcatgaccagaacctggcaaac

SEQ ID NO: 5490036 - DNA, 25 bp, Homo sapien
cgccgccagccttaccatgcatttc

SEQ ID NO: 5490037 - DNA, 25 bp, Homo sapien
aggtgcacgacagctacgcactgct

SEQ ID NO: 5490038 - DNA, 25 bp, Homo sapien
gtgcacgacagctacgcactgctgg

SEQ ID NO: 5490039 - DNA, 25 bp, Homo sapien
acgacagctacgcactgctggtggc

SEQ ID NO: 5490040 - DNA, 25 bp, Homo sapien
gccttaccatgcatttccgcgcccg

SEQ ID NO: 5490041 - DNA, 25 bp, Homo sapien
ccatgcatttccgcgcccgcgccac

SEQ ID NO: 5490042 - DNA, 25 bp, Homo sapien
gccgccagccttaccatgcatttcc

SEQ ID NO: 5490043 - DNA, 25 bp, Homo sapien
gcgccgccagccttaccatgcattt

SEQ ID NO: 5490044 - DNA, 25 bp, Homo sapien
cagccttaccatgcatttccgcgcc

SEQ ID NO: 5490045 - DNA, 25 bp, Homo sapien
gcacgacagctacgcactgctggtg

SEQ ID NO: 5490046 - DNA, 25 bp, Homo sapien
cttaccatgcatttccgcgcccgcg

SEQ ID NO: 5490047 - DNA, 25 bp, Homo sapien
ggtgtcgtggaggaagccagccgag

SEQ ID NO: 5490048 - DNA, 25 bp, Homo sapien
ctcggctggcttcctccacgacacc

SEQ ID NO: 5490049 - DNA, 25 bp, Homo sapien
gtcaccactcgggacatagagggtg

SEQ ID NO: 5490050 - DNA, 25 bp, Homo sapien
gggtgccctcagtaaagcgctttgt

SEQ ID NO: 5490051 - DNA, 25 bp, Homo sapien
gagtggagtcaccactcgggacata

SEQ ID NO: 5490052 - DNA, 25 bp, Homo sapien
gtggagtcaccactcgggacataga

SEQ ID NO: 5490053 - DNA, 25 bp, Homo sapien
gtgccctcagtaaagcgctttgttg

SEQ ID NO: 5490054 - DNA, 25 bp, Homo sapien
agtggagtcaccactcgggacatag

SEQ ID NO: 5490055 - DNA, 25 bp, Homo sapien
ggtgccctcagtaaagcgctttgtt

SEQ ID NO: 5490056 - DNA, 25 bp, Homo sapien
ggagtggagtcaccactcgggacat

SEQ ID NO: 5490057 - DNA, 25 bp, Homo sapien
tggagtcaccactcgggacatagag

SEQ ID NO: 5490058 - DNA, 25 bp, Homo sapien
ctgcctccttgggactgtggagtgg

SEQ ID NO: 5490059 - DNA, 25 bp, Homo sapien
agccggaacaccactacgccttcaa

SEQ ID NO: 5490060 - DNA, 25 bp, Homo sapien
cctcaaggcctacgaacaggtgatg

SEQ ID NO: 5490061 - DNA, 25 bp, Homo sapien
cccacaaaatggacctcaaggccta

SEQ ID NO: 5490062 - DNA, 25 bp, Homo sapien
cgagtcgcctcactcgagcgcctcc

SEQ ID NO: 5490063 - DNA, 25 bp, Homo sapien
gtgatgcactaccccggctacggtt

SEQ ID NO: 5490064 - DNA, 25 bp, Homo sapien
tcttaagaagacgacggcttcagtc

SEQ ID NO: 5490065 - DNA, 25 bp, Homo sapien
cggctacggttcccccatgcctggc

SEQ ID NO: 5490066 - DNA, 25 bp, Homo sapien
ttcagtcccggctaactctggcacc

SEQ ID NO: 5490067 - DNA, 25 bp, Homo sapien
agatacctcgctacgtaccaggggg

SEQ ID NO: 5490068 - DNA, 25 bp, Homo sapien
aacctcatgtcctcggagcagcagc

SEQ ID NO: 5490069 - DNA, 25 bp, Homo sapien
tcccggcccattatggaactccgtc

SEQ ID NO: 5490070 - DNA, 25 bp, Homo sapien
caagaagctctggctaagcttaaag

SEQ ID NO: 5490071 - DNA, 25 bp, Homo sapien
cggcttgaagaattagaagccaagc

SEQ ID NO: 5490072 - DNA, 25 bp, Homo sapien
agcaaagccactgttaaagctatgc

SEQ ID NO: 5490073 - DNA, 25 bp, Homo sapien
gttaaagctatgcaagaagctctgg

SEQ ID NO: 5490074 - DNA, 25 bp, Homo sapien
tgaagaattagaagccaagcgtaaa

SEQ ID NO: 5490075 - DNA, 25 bp, Homo sapien
aggaagaacgtataaaacggcttga

SEQ ID NO: 5490076 - DNA, 25 bp, Homo sapien
acgtataaaacggcttgaagaatta

SEQ ID NO: 5490077 - DNA, 25 bp, Homo sapien
gccactgttaaagctatgcaagaag

SEQ ID NO: 5490078 - DNA, 25 bp, Homo sapien
tctggctaagcttaaagaggaagaa

SEQ ID NO: 5490079 - DNA, 25 bp, Homo sapien
aaaaggacctagcaaagccactgtt

SEQ ID NO: 5490080 - DNA, 25 bp, Homo sapien
taaaacggcttgaagaattagaagc

SEQ ID NO: 5490081 - DNA, 25 bp, Homo sapien
aggcaagaaaagatgttgatcaaga

SEQ ID NO: 5490082 - DNA, 25 bp, Homo sapien
atgttgatcaagaaagatgagaacc

SEQ ID NO: 5490083 - DNA, 25 bp, Homo sapien
caagaaaagatgttgatcaagaaag

SEQ ID NO: 5490084 - DNA, 25 bp, Homo sapien
agaggcaagaaaagatgttgatcaa

SEQ ID NO: 5490085 - DNA, 25 bp, Homo sapien
gatgttgatcaagaaagatgagaac

SEQ ID NO: 5490086 - DNA, 25 bp, Homo sapien
gaaggagaatcaaagataaaatacc

SEQ ID NO: 5490087 - DNA, 25 bp, Homo sapien
gctgaaggagaatcaaagataaaat

SEQ ID NO: 5490088 - DNA, 25 bp, Homo sapien
gaaaagatgttgatcaagaaagatg

SEQ ID NO: 5490089 - DNA, 25 bp, Homo sapien
agaatcaaagataaaataccagttt

SEQ ID NO: 5490090 - DNA, 25 bp, Homo sapien
aagatgttgatcaagaaagatgaga

SEQ ID NO: 5490091 - DNA, 25 bp, Homo sapien
gttgatcaagaaagatgagaaccag

SEQ ID NO: 5490092 - DNA, 25 bp, Homo sapien
tatctttgattctccttcagccctc

SEQ ID NO: 5490093 - DNA, 25 bp, Homo sapien
ctcacccctggttctcatctttctt

SEQ ID NO: 5490094 - DNA, 25 bp, Homo sapien
tgcctctgtccccttctgtcgtctt

SEQ ID NO: 5490095 - DNA, 25 bp, Homo sapien
tttcttgcctctgtccccttctgtc

SEQ ID NO: 5490096 - DNA, 25 bp, Homo sapien
tcagccctcacccctggttctcatc

SEQ ID NO: 5490097 - DNA, 25 bp, Homo sapien
atcttttcttgcctctgtccccttc

SEQ ID NO: 5490098 - DNA, 25 bp, Homo sapien
ccttcagccctcacccctggttctc

SEQ ID NO: 5490099 - DNA, 25 bp, Homo sapien
cttgcctctgtccccttctgtcgtc

SEQ ID NO: 5490100 - DNA, 25 bp, Homo sapien
ttgattctccttcagccctcacccc

SEQ ID NO: 5490101 - DNA, 25 bp, Homo sapien
cttgatcaacatcttttcttgcctc

SEQ ID NO: 5490102 - DNA, 25 bp, Homo sapien
ctccttcagccctcacccctggttc

SEQ ID NO: 5490103 - DNA, 25 bp, Homo sapien
tgttagacgaaaatttgatcgctac

SEQ ID NO: 5490104 - DNA, 25 bp, Homo sapien
gtagcgatcaaattttcgtctaaca

SEQ ID NO: 5490105 - DNA, 25 bp, Homo sapien
agctatcagaggatgtagacttcac

SEQ ID NO: 5490106 - DNA, 25 bp, Homo sapien
acgtgtggtggcattaaaagaatgt

SEQ ID NO: 5490107 - DNA, 25 bp, Homo sapien
gcctgacaaaccagatacatgtatg

SEQ ID NO: 5490108 - DNA, 25 bp, Homo sapien
actctcataaaatgtgtggtctctc

SEQ ID NO: 5490109 - DNA, 25 bp, Homo sapien
acagagtcacgcagcaataaaatcg

SEQ ID NO: 5490110 - DNA, 25 bp, Homo sapien
aaatactttaaaagagagaagcgga

SEQ ID NO: 5490111 - DNA, 25 bp, Homo sapien
tagtgcacaccaaagtatgatgagt

SEQ ID NO: 5490112 - DNA, 25 bp, Homo sapien
ttagtgatatgacaagtagagaaat

SEQ ID NO: 5490113 - DNA, 25 bp, Homo sapien
aaggataagttttgggcatgtctac

SEQ ID NO: 5490114 - DNA, 25 bp, Homo sapien
tttgcagcctaccttgtagcctgac

SEQ ID NO: 5490115 - DNA, 25 bp, Homo sapien
atgcaccaaagtaatacagagtcac

SEQ ID NO: 5490116 - DNA, 25 bp, Homo sapien
ttagcacgctaaacacatggccaag

SEQ ID NO: 5490117 - DNA, 25 bp, Homo sapien
tgtcaaacaggacagaatgtggtaa

SEQ ID NO: 5490118 - DNA, 25 bp, Homo sapien
ggggaagtaacctgtctgaggtcat

SEQ ID NO: 5490119 - DNA, 25 bp, Homo sapien
cacatggccaagtcggcctgagaag

SEQ ID NO: 5490120 - DNA, 25 bp, Homo sapien
acaatgagcacacagatgagttcca

SEQ ID NO: 5490121 - DNA, 25 bp, Homo sapien
acagatgagttccagcgactttagc

SEQ ID NO: 5490122 - DNA, 25 bp, Homo sapien
ctttgacagctaaggaaacagttta

SEQ ID NO: 5490123 - DNA, 25 bp, Homo sapien
gattaaatgaggtaggcaccactct

SEQ ID NO: 5490124 - DNA, 25 bp, Homo sapien
catccaatttggagtcacggagcca

SEQ ID NO: 5490125 - DNA, 25 bp, Homo sapien
tcacggagccagaccctagtctgtc

SEQ ID NO: 5490126 - DNA, 25 bp, Homo sapien
gaaagtgggtgaagctaatgcttaa

SEQ ID NO: 5490127 - DNA, 25 bp, Homo sapien
acagaatgcacggtttcagaaagct

SEQ ID NO: 5490128 - DNA, 25 bp, Homo sapien
aacaggctctgtatgctatatctag

SEQ ID NO: 5490129 - DNA, 25 bp, Homo sapien
atccggtcagtggcaaaactgttga

SEQ ID NO: 5490130 - DNA, 25 bp, Homo sapien
taaatggttaaaatcgcagtgccaa

SEQ ID NO: 5490131 - DNA, 25 bp, Homo sapien
gtatctaaaactcaaaaacaggctc

SEQ ID NO: 5490132 - DNA, 25 bp, Homo sapien
atttgggcaaattcttaaaccatgg

SEQ ID NO: 5490133 - DNA, 25 bp, Homo sapien
agggcaatagttgaagctgttgggt

SEQ ID NO: 5490134 - DNA, 25 bp, Homo sapien
tcactgaaaggaagaaactacagaa

SEQ ID NO: 5490135 - DNA, 25 bp, Homo sapien
tccatccagagactgaaaccgtttc

SEQ ID NO: 5490136 - DNA, 25 bp, Homo sapien
ttcctaccaggactaaaacacagca

SEQ ID NO: 5490137 - DNA, 25 bp, Homo sapien
atcgcagtgccaaaaatacattgac

SEQ ID NO: 5490138 - DNA, 25 bp, Homo sapien
ccagcttgcgcttgcggcacttgga

SEQ ID NO: 5490139 - DNA, 25 bp, Homo sapien
ctctgagttcctgggcacactcggg

SEQ ID NO: 5490140 - DNA, 25 bp, Homo sapien
gcgagatgcgctccagcttgcgctt

SEQ ID NO: 5490141 - DNA, 25 bp, Homo sapien
ctgaggactttctgcttgagctgcg

SEQ ID NO: 5490142 - DNA, 25 bp, Homo sapien
cgtgttctgactcttgagggtcttc

SEQ ID NO: 5490143 - DNA, 25 bp, Homo sapien
ttctcttccaggcgcgagatgcgct

SEQ ID NO: 5490144 - DNA, 25 bp, Homo sapien
gccgcaccctctccaagtccggggc

SEQ ID NO: 5490145 - DNA, 25 bp, Homo sapien
ggccgcgccctctctgagttcctgg

SEQ ID NO: 5490146 - DNA, 25 bp, Homo sapien
gggtccagcttgtcgagtcctgggc

SEQ ID NO: 5490147 - DNA, 25 bp, Homo sapien
gccacctgctcgcgcagcaggctcg

SEQ ID NO: 5490148 - DNA, 25 bp, Homo sapien
tggcagccgctgttgacgtggctga

SEQ ID NO: 5490149 - DNA, 25 bp, Homo sapien
tgactcgagcactacatttccatcc

SEQ ID NO: 5490150 - DNA, 25 bp, Homo sapien
cttaggtaggcttttaactttgctc

SEQ ID NO: 5490151 - DNA, 25 bp, Homo sapien
ctttggaaaacaagccctgtggaga

SEQ ID NO: 5490152 - DNA, 25 bp, Homo sapien
tttacgatatgcttaggtaggcttt

SEQ ID NO: 5490153 - DNA, 25 bp, Homo sapien
agccctgtggagagatccttccatc

SEQ ID NO: 5490154 - DNA, 25 bp, Homo sapien
ctagaggactagtacatgcagaatt

SEQ ID NO: 5490155 - DNA, 25 bp, Homo sapien
acatgcagaattgtcaactacaggg

SEQ ID NO: 5490156 - DNA, 25 bp, Homo sapien
tttccatccacaagactgggtctga

SEQ ID NO: 5490157 - DNA, 25 bp, Homo sapien
ctttaagcagaatgtgactcgagca

SEQ ID NO: 5490158 - DNA, 25 bp, Homo sapien
atttttgaacagctttacgatatgc

SEQ ID NO: 5490159 - DNA, 25 bp, Homo sapien
caagactgggtctgagttatttttg

SEQ ID NO: 5490160 - DNA, 25 bp, Homo sapien
agtgagtactaaaacaaaaacaaca

SEQ ID NO: 5490161 - DNA, 25 bp, Homo sapien
aacaacaataaatatgagcactaca

SEQ ID NO: 5490162 - DNA, 25 bp, Homo sapien
ggagtgtagtggcatgatctcacca

SEQ ID NO: 5490163 - DNA, 25 bp, Homo sapien
cttctgtaatatgtgtcaaagatat

SEQ ID NO: 5490164 - DNA, 25 bp, Homo sapien
aataaatatgagcactacagcaaac

SEQ ID NO: 5490165 - DNA, 25 bp, Homo sapien
atgaaacaagtgagtactaaaacaa

SEQ ID NO: 5490166 - DNA, 25 bp, Homo sapien
gatattatgaaacaagtgagtacta

SEQ ID NO: 5490167 - DNA, 25 bp, Homo sapien
attatgaaaaaaagattagaagtcc

SEQ ID NO: 5490168 - DNA, 25 bp, Homo sapien
gcatgatctcaccacactgcaacct

SEQ ID NO: 5490169 - DNA, 25 bp, Homo sapien
agcaaacatgacatactgtaataga

SEQ ID NO: 5490170 - DNA, 25 bp, Homo sapien
aatatgagcactacagcaaacatga

SEQ ID NO: 5490171 - DNA, 25 bp, Homo sapien
atatgcactccataggcaaaatcca

SEQ ID NO: 5490172 - DNA, 25 bp, Homo sapien
gcaccttcaaagcatactacagaca

SEQ ID NO: 5490173 - DNA, 25 bp, Homo sapien
ttcaaagcatactacagacaatcac

SEQ ID NO: 5490174 - DNA, 25 bp, Homo sapien
aaacctcagtacccacccacccaca

SEQ ID NO: 5490175 - DNA, 25 bp, Homo sapien
gaagtaaagaggcaatgttaagtga

SEQ ID NO: 5490176 - DNA, 25 bp, Homo sapien
acccagatctgtaatgtgtcaaagc

SEQ ID NO: 5490177 - DNA, 25 bp, Homo sapien
gaaatcatatatgcactccataggc

SEQ ID NO: 5490178 - DNA, 25 bp, Homo sapien
tccataggcaaaatccaaataccca

SEQ ID NO: 5490179 - DNA, 25 bp, Homo sapien
gcactccataggcaaaatccaaata

SEQ ID NO: 5490180 - DNA, 25 bp, Homo sapien
tactacagacaatcacaaagaagag

SEQ ID NO: 5490181 - DNA, 25 bp, Homo sapien
taactggactactctaatttctgtt

SEQ ID NO: 5490182 - DNA, 25 bp, Homo sapien
tattctgggtctgcttgttacggta

SEQ ID NO: 5490183 - DNA, 25 bp, Homo sapien
ctgggtctgcttgttacggtaattt

SEQ ID NO: 5490184 - DNA, 25 bp, Homo sapien
attaatttcattaaatgaggccaga

SEQ ID NO: 5490185 - DNA, 25 bp, Homo sapien
ataggggcatgtgttattaatttca

SEQ ID NO: 5490186 - DNA, 25 bp, Homo sapien
agaaatgtttcagtactggggaagt

SEQ ID NO: 5490187 - DNA, 25 bp, Homo sapien
attttcagtattctgggtctgcttg

SEQ ID NO: 5490188 - DNA, 25 bp, Homo sapien
cacccacccacacatcatccaaaag

SEQ ID NO: 5490189 - DNA, 25 bp, Homo sapien
gtgtctaccactgcagagcaccttc

SEQ ID NO: 5490190 - DNA, 25 bp, Homo sapien
ctaccactgcagagcaccttcaaag

SEQ ID NO: 5490191 - DNA, 25 bp, Homo sapien
gagaaataggggcatgtgttattaa

SEQ ID NO: 5490192 - DNA, 25 bp, Homo sapien
agtgtgtctaccactgcagagcacc

SEQ ID NO: 5490193 - DNA, 25 bp, Homo sapien
ataacagtcaatggtacagtcaaac

SEQ ID NO: 5490194 - DNA, 25 bp, Homo sapien
aaattccacaagttaagtgcaccac

SEQ ID NO: 5490195 - DNA, 25 bp, Homo sapien
cagtgaggtgtaatgcaacttcatc

SEQ ID NO: 5490196 - DNA, 25 bp, Homo sapien
caaagcgtcatcaaaggaaacagag

SEQ ID NO: 5490197 - DNA, 25 bp, Homo sapien
gctgaattctagatgggatataaat

SEQ ID NO: 5490198 - DNA, 25 bp, Homo sapien
aacatcacatgtacagaacacacaa

SEQ ID NO: 5490199 - DNA, 25 bp, Homo sapien
gagagagacatacaacgctgaactt

SEQ ID NO: 5490200 - DNA, 25 bp, Homo sapien
taagtgcaccacagtgtagagagag

SEQ ID NO: 5490201 - DNA, 25 bp, Homo sapien
gtaaagaatccttgcagtgaggtgt

SEQ ID NO: 5490202 - DNA, 25 bp, Homo sapien
ctaaaaacaagctaagtaaagaatc

SEQ ID NO: 5490203 - DNA, 25 bp, Homo sapien
gcagcagcagcacctagctgaattc

SEQ ID NO: 5490204 - DNA, 25 bp, Homo sapien
agggaacaggaataaagaaatctgt

SEQ ID NO: 5490205 - DNA, 25 bp, Homo sapien
atttcacaacccagacacccaggcc

SEQ ID NO: 5490206 - DNA, 25 bp, Homo sapien
gaaggagacaccccatttcacaacc

SEQ ID NO: 5490207 - DNA, 25 bp, Homo sapien
aggcctagtgaagccgggcttatgg

SEQ ID NO: 5490208 - DNA, 25 bp, Homo sapien
ctttgtgtagttgcagagtttgaac

SEQ ID NO: 5490209 - DNA, 25 bp, Homo sapien
gcagaactgcaacgtgacccagtat

SEQ ID NO: 5490210 - DNA, 25 bp, Homo sapien
aactttaaattgggcagggaccatg

SEQ ID NO: 5490211 - DNA, 25 bp, Homo sapien
gtccctcgcctgtactcggtgtctc

SEQ ID NO: 5490212 - DNA, 25 bp, Homo sapien
tggagcctatggcatccaaggcgca

SEQ ID NO: 5490213 - DNA, 25 bp, Homo sapien
gggcaagcagactgtctatgtggca

SEQ ID NO: 5490214 - DNA, 25 bp, Homo sapien
ttggatgaatccaggtccttacggc

SEQ ID NO: 5490215 - DNA, 25 bp, Homo sapien
tgcgctgccacctcggctacactgc

SEQ ID NO: 5490216 - DNA, 25 bp, Homo sapien
tgtttaacaaagcgctgaggaaaga

SEQ ID NO: 5490217 - DNA, 25 bp, Homo sapien
tcggctacactgccctccgcgacga

SEQ ID NO: 5490218 - DNA, 25 bp, Homo sapien
tcccccagttcggcaaaggtgatat

SEQ ID NO: 5490219 - DNA, 25 bp, Homo sapien
ctgaggaaagagaacgtcttcttga

SEQ ID NO: 5490220 - DNA, 25 bp, Homo sapien
cgacgacccctgaccagccggggtc

SEQ ID NO: 5490221 - DNA, 25 bp, Homo sapien
gtgaaaatggaggtatctgtttgcc

SEQ ID NO: 5490222 - DNA, 25 bp, Homo sapien
ttttcctgtgagtgtccagatggct

SEQ ID NO: 5490223 - DNA, 25 bp, Homo sapien
gctcacccacctccgcgcgccggag

SEQ ID NO: 5490224 - DNA, 25 bp, Homo sapien
tttgccaggattggctgatggttcc

SEQ ID NO: 5490225 - DNA, 25 bp, Homo sapien
cgctcggtagccgtctggctcttgg

SEQ ID NO: 5490226 - DNA, 25 bp, Homo sapien
acgacgtggtcaccaacctaggcaa

SEQ ID NO: 5490227 - DNA, 25 bp, Homo sapien
gcactgccacctacaccacggtgcc

SEQ ID NO: 5490228 - DNA, 25 bp, Homo sapien
ttgacgacgtggtcaccaacctagg

SEQ ID NO: 5490229 - DNA, 25 bp, Homo sapien
ggtactcaagtttgacgacgtggtc

SEQ ID NO: 5490230 - DNA, 25 bp, Homo sapien
aagtttgacgacgtggtcaccaacc

SEQ ID NO: 5490231 - DNA, 25 bp, Homo sapien
agggttacgaggtactcaagtttga

SEQ ID NO: 5490232 - DNA, 25 bp, Homo sapien
actcaagtttgacgacgtggtcacc

SEQ ID NO: 5490233 - DNA, 25 bp, Homo sapien
acgaggtactcaagtttgacgacgt

SEQ ID NO: 5490234 - DNA, 25 bp, Homo sapien
gccatcagcactgccacctacacca

SEQ ID NO: 5490235 - DNA, 25 bp, Homo sapien
gcgtggccttctacgccggcctcaa

SEQ ID NO: 5490236 - DNA, 25 bp, Homo sapien
gccttctacgccggcctcaagaacc

SEQ ID NO: 5490237 - DNA, 25 bp, Homo sapien
tcgcgggagctcactttgttcctgc

SEQ ID NO: 5490238 - DNA, 25 bp, Homo sapien
gggtttctggagctttcagtgtgga

SEQ ID NO: 5490239 - DNA, 25 bp, Homo sapien
ggaagactcggctgagattgagtaa

SEQ ID NO: 5490240 - DNA, 25 bp, Homo sapien
cgggttggcgcttaactcactcacc

SEQ ID NO: 5490241 - DNA, 25 bp, Homo sapien
gattgagtaaaaagcagctgcctat

SEQ ID NO: 5490242 - DNA, 25 bp, Homo sapien
ctgacactaagaacttgagggagag

SEQ ID NO: 5490243 - DNA, 25 bp, Homo sapien
agtgggtctgtctccgtttgcccgc

SEQ ID NO: 5490244 - DNA, 25 bp, Homo sapien
gcttcttgcaggaaaagttgggcag

SEQ ID NO: 5490245 - DNA, 25 bp, Homo sapien
cagctgcctatgaagccccacctcg

SEQ ID NO: 5490246 - DNA, 25 bp, Homo sapien
tgtggaaaaacggatgcttcttgca

SEQ ID NO: 5490247 - DNA, 25 bp, Homo sapien
ctcggcccgataagctgacactaag

SEQ ID NO: 5490248 - DNA, 25 bp, Homo sapien
agaatagggatgattcaaaagcttc

SEQ ID NO: 5490249 - DNA, 25 bp, Homo sapien
catgactaatagcagtggaaaggag

SEQ ID NO: 5490250 - DNA, 25 bp, Homo sapien
ggagagtgaccatgactaatagcag

SEQ ID NO: 5490251 - DNA, 25 bp, Homo sapien
aaggtaaaagctaacagtctgcatg

SEQ ID NO: 5490252 - DNA, 25 bp, Homo sapien
taagaagtaatcaactgcatgcacc

SEQ ID NO: 5490253 - DNA, 25 bp, Homo sapien
tagataaaacacagaatagggatga

SEQ ID NO: 5490254 - DNA, 25 bp, Homo sapien
aaaccaaaactctgggaatactggc

SEQ ID NO: 5490255 - DNA, 25 bp, Homo sapien
cagtaaaaaccaattagaaggtctc

SEQ ID NO: 5490256 - DNA, 25 bp, Homo sapien
ataggacatgatgcctagaagaatc

SEQ ID NO: 5490257 - DNA, 25 bp, Homo sapien
gaatcatcatcaggaagcccataaa

SEQ ID NO: 5490258 - DNA, 25 bp, Homo sapien
ctgcatgcaccaaaaaccccaagac

SEQ ID NO: 5490259 - DNA, 25 bp, Homo sapien
gccacagcctagatgggcagttttt

SEQ ID NO: 5490260 - DNA, 25 bp, Homo sapien
ctgtgactccagtgactcagacgtt

SEQ ID NO: 5490261 - DNA, 25 bp, Homo sapien
ccagtgactcagacgttagacctct

SEQ ID NO: 5490262 - DNA, 25 bp, Homo sapien
agctgagctgtccgtgtcccatgct

SEQ ID NO: 5490263 - DNA, 25 bp, Homo sapien
ttttcccactggtccctgaggctct

SEQ ID NO: 5490264 - DNA, 25 bp, Homo sapien
aaaacactggaattacaaatgagaa

SEQ ID NO: 5490265 - DNA, 25 bp, Homo sapien
acgtgccggaactttttgtccattc

SEQ ID NO: 5490266 - DNA, 25 bp, Homo sapien
attccctagtaggcctgccacagcc

SEQ ID NO: 5490267 - DNA, 25 bp, Homo sapien
aatttgtacttctgcggtgctggtt

SEQ ID NO: 5490268 - DNA, 25 bp, Homo sapien
atgctccctcagccagtggaacgtg

SEQ ID NO: 5490269 - DNA, 25 bp, Homo sapien
gttagacctcttgatgttttcccac

SEQ ID NO: 5490270 - DNA, 25 bp, Homo sapien
tgggctgagtccaaaaagagtcagc

SEQ ID NO: 5490271 - DNA, 25 bp, Homo sapien
gggaaggtgtattgtcacaaggtca

SEQ ID NO: 5490272 - DNA, 25 bp, Homo sapien
tctcaatggcggagagaatattaca

SEQ ID NO: 5490273 - DNA, 25 bp, Homo sapien
aggtcaattgatcagttagggtggg

SEQ ID NO: 5490274 - DNA, 25 bp, Homo sapien
tggggagaatattacaaagcacctt

SEQ ID NO: 5490275 - DNA, 25 bp, Homo sapien
gttaaggcaggaactggctattttc

SEQ ID NO: 5490276 - DNA, 25 bp, Homo sapien
gggggtggatcttacaaagcacatt

SEQ ID NO: 5490277 - DNA, 25 bp, Homo sapien
ataaagggacacttccaggcatttc

SEQ ID NO: 5490278 - DNA, 25 bp, Homo sapien
ttcaggccatctgggtgtatacgtg

SEQ ID NO: 5490279 - DNA, 25 bp, Homo sapien
agcaccttctcaagggtggggaagg

SEQ ID NO: 5490280 - DNA, 25 bp, Homo sapien
aggcctgacagtgggtaatttccac

SEQ ID NO: 5490281 - DNA, 25 bp, Homo sapien
ctaccttcagaatgtggggttgggg

SEQ ID NO: 5490282 - DNA, 25 bp, Homo sapien
aatccaggtctcggatgaaggtaag

SEQ ID NO: 5490283 - DNA, 25 bp, Homo sapien
aggtaaacccctcggtggatagatg

SEQ ID NO: 5490284 - DNA, 25 bp, Homo sapien
ggaataatgccagggccagttgctt

SEQ ID NO: 5490285 - DNA, 25 bp, Homo sapien
tccaaacatggttcctggaggaggt

SEQ ID NO: 5490286 - DNA, 25 bp, Homo sapien
tcattgcaaatggagcatgtggtgg

SEQ ID NO: 5490287 - DNA, 25 bp, Homo sapien
tggacctgggaaatcccttggtgga

SEQ ID NO: 5490288 - DNA, 25 bp, Homo sapien
gcggaatcaatcctgaagggaactc

SEQ ID NO: 5490289 - DNA, 25 bp, Homo sapien
tcctctgactggagcaagaggtgga

SEQ ID NO: 5490290 - DNA, 25 bp, Homo sapien
ggtggaaaataacctcgagaagctc

SEQ ID NO: 5490291 - DNA, 25 bp, Homo sapien
gcaggctcctttgaaggcggaatca

SEQ ID NO: 5490292 - DNA, 25 bp, Homo sapien
aaaagccccagttccacaccaagcc

SEQ ID NO: 5490293 - DNA, 25 bp, Homo sapien
cacctataatctgaatgctggctgt

SEQ ID NO: 5490294 - DNA, 25 bp, Homo sapien
tggctgtacacaacaatcacctgga

SEQ ID NO: 5490295 - DNA, 25 bp, Homo sapien
tctgatgaacagtgagaaccaagaa

SEQ ID NO: 5490296 - DNA, 25 bp, Homo sapien
gaaccaagaaccactgatccagacc

SEQ ID NO: 5490297 - DNA, 25 bp, Homo sapien
tatctcccaaggctccccgaggtga

SEQ ID NO: 5490298 - DNA, 25 bp, Homo sapien
gggatggggcttatctcccaaggct

SEQ ID NO: 5490299 - DNA, 25 bp, Homo sapien
atgaatcgaaatctctggggatggg

SEQ ID NO: 5490300 - DNA, 25 bp, Homo sapien
acaccaagccagtatcaaatgaatc

SEQ ID NO: 5490301 - DNA, 25 bp, Homo sapien
ataataaaggtgccaagatagtaac

SEQ ID NO: 5490302 - DNA, 25 bp, Homo sapien
caagatagtaacagcaacaacagcc

SEQ ID NO: 5490303 - DNA, 25 bp, Homo sapien
gcaaatttctgttcacaaaggtcac

SEQ ID NO: 5490304 - DNA, 25 bp, Homo sapien
atatgaagagatggtctacacactt

SEQ ID NO: 5490305 - DNA, 25 bp, Homo sapien
cttgaaaatatgaagagatggtcta

SEQ ID NO: 5490306 - DNA, 25 bp, Homo sapien
gaagcgtgcatctaggattatggcc

SEQ ID NO: 5490307 - DNA, 25 bp, Homo sapien
tgtgcaggtacatgaattagaagcg

SEQ ID NO: 5490308 - DNA, 25 bp, Homo sapien
tctaggattatggccaaactgtttt

SEQ ID NO: 5490309 - DNA, 25 bp, Homo sapien
caggtacatgaattagaagcgtgca

SEQ ID NO: 5490310 - DNA, 25 bp, Homo sapien
cagaaagttacaagtaaacacaaat

SEQ ID NO: 5490311 - DNA, 25 bp, Homo sapien
accagagatgtatgacaatcacggg

SEQ ID NO: 5490312 - DNA, 25 bp, Homo sapien
tcacaaaggtcacatgtgcaggtac

SEQ ID NO: 5490313 - DNA, 25 bp, Homo sapien
caaatgttgcttataccagagatgt

SEQ ID NO: 5490314 - DNA, 25 bp, Homo sapien
tggggcaaggctctgccaaaatctg

SEQ ID NO: 5490315 - DNA, 25 bp, Homo sapien
ctaatcgacatagacagcgtgtgcg

SEQ ID NO: 5490316 - DNA, 25 bp, Homo sapien
gcggccaagctgctccacatctacc

SEQ ID NO: 5490317 - DNA, 25 bp, Homo sapien
catctaccaacaatcccggaaggac

SEQ ID NO: 5490318 - DNA, 25 bp, Homo sapien
agctggtgcgcatgttcctcatgat

SEQ ID NO: 5490319 - DNA, 25 bp, Homo sapien
aatcccggaaggacaactccaattc

SEQ ID NO: 5490320 - DNA, 25 bp, Homo sapien
ggggggcactcagtatcctatacca

SEQ ID NO: 5490321 - DNA, 25 bp, Homo sapien
caattccctgcaggtgaaaacgtgc

SEQ ID NO: 5490322 - DNA, 25 bp, Homo sapien
tgcacccctggtacatcccctcctc

SEQ ID NO: 5490323 - DNA, 25 bp, Homo sapien
gacggcacagcagcctaatcgacat

SEQ ID NO: 5490324 - DNA, 25 bp, Homo sapien
gaaaacgtgccacctggtcaggtac

SEQ ID NO: 5490325 - DNA, 25 bp, Homo sapien
ggttcaaagagttggatatcaacac

SEQ ID NO: 5490326 - DNA, 25 bp, Homo sapien
gcagaataataaagtcatcaatacc

SEQ ID NO: 5490327 - DNA, 25 bp, Homo sapien
tggacatgtacctgcagaataataa

SEQ ID NO: 5490328 - DNA, 25 bp, Homo sapien
gatggtgcagttaacttccaggagt

SEQ ID NO: 5490329 - DNA, 25 bp, Homo sapien
agccttgaactctatcatcgacgtc

SEQ ID NO: 5490330 - DNA, 25 bp, Homo sapien
gcatcatgttgaccgagctggagaa

SEQ ID NO: 5490331 - DNA, 25 bp, Homo sapien
tttccatgccgtctacagggatgac

SEQ ID NO: 5490332 - DNA, 25 bp, Homo sapien
gggtgcagacgtctggttcaaagag

SEQ ID NO: 5490333 - DNA, 25 bp, Homo sapien
aggagttcctcattctggtgataaa

SEQ ID NO: 5490334 - DNA, 25 bp, Homo sapien
atcgacgtctaccacaagtactccc

SEQ ID NO: 5490335 - DNA, 25 bp, Homo sapien
gcgtggcagcccacaaaaaaagcca

SEQ ID NO: 5490336 - DNA, 25 bp, Homo sapien
ttgtatttcctgaggggtgccaggg

SEQ ID NO: 5490337 - DNA, 25 bp, Homo sapien
tctctgcttcatcagccccaggctg

SEQ ID NO: 5490338 - DNA, 25 bp, Homo sapien
tttttgtagaaatggggtgttgcca

SEQ ID NO: 5490339 - DNA, 25 bp, Homo sapien
gcctctgccagtcttgtgggggaaa

SEQ ID NO: 5490340 - DNA, 25 bp, Homo sapien
gggatccagcgaacatctctgcttc

SEQ ID NO: 5490341 - DNA, 25 bp, Homo sapien
ggggtgacagtgtctctctgtggac

SEQ ID NO: 5490342 - DNA, 25 bp, Homo sapien
ctgagctcaagtgatcctctcactc

SEQ ID NO: 5490343 - DNA, 25 bp, Homo sapien
tgtctctctgtggaccaggctggag

SEQ ID NO: 5490344 - DNA, 25 bp, Homo sapien
agccccaggctgcccagcctctgcc

SEQ ID NO: 5490345 - DNA, 25 bp, Homo sapien
tgcacccagcctgattctgaggcca

SEQ ID NO: 5490346 - DNA, 25 bp, Homo sapien
tgagccactgcacccagcctgattc

SEQ ID NO: 5490347 - DNA, 25 bp, Homo sapien
ctcaagacacggtcacagatcagag

SEQ ID NO: 5490348 - DNA, 25 bp, Homo sapien
agatgaacatcaggaaggaacatcc

SEQ ID NO: 5490349 - DNA, 25 bp, Homo sapien
acctcacaggaaaaatggtaagttc

SEQ ID NO: 5490350 - DNA, 25 bp, Homo sapien
gctgggacagggtccttctgtgaca

SEQ ID NO: 5490351 - DNA, 25 bp, Homo sapien
ggatacgcttgtgatcaagggcctg

SEQ ID NO: 5490352 - DNA, 25 bp, Homo sapien
cacggaacctcaccatggatacgct

SEQ ID NO: 5490353 - DNA, 25 bp, Homo sapien
tgactttttagggtgatgtgccagg

SEQ ID NO: 5490354 - DNA, 25 bp, Homo sapien
gccagaactcacagaatagaagtat

SEQ ID NO: 5490355 - DNA, 25 bp, Homo sapien
atagaagtatcagcaccgaaacctc

SEQ ID NO: 5490356 - DNA, 25 bp, Homo sapien
caagggcctggtctcccctcaagac

SEQ ID NO: 5490357 - DNA, 25 bp, Homo sapien
tgaacggacacaattgccagaactc

SEQ ID NO: 5490358 - DNA, 25 bp, Homo sapien
gaccttgcaaagaaactggacgtac

SEQ ID NO: 5490359 - DNA, 25 bp, Homo sapien
cagagctactgtcgttacatgcaac

SEQ ID NO: 5490360 - DNA, 25 bp, Homo sapien
catgcaactcaagacaacgagcagc

SEQ ID NO: 5490361 - DNA, 25 bp, Homo sapien
ccctggcacaatcagaccacactac

SEQ ID NO: 5490362 - DNA, 25 bp, Homo sapien
cttccagggttgatctagaactgta

SEQ ID NO: 5490363 - DNA, 25 bp, Homo sapien
taaccattgtcaacaggcaaactcc

SEQ ID NO: 5490364 - DNA, 25 bp, Homo sapien
ggcaaactccaacaatgtctgggtt

SEQ ID NO: 5490365 - DNA, 25 bp, Homo sapien
agacaacgagcagcatcataaccat

SEQ ID NO: 5490366 - DNA, 25 bp, Homo sapien
ggttttatgttgagagaagcagatt

SEQ ID NO: 5490367 - DNA, 25 bp, Homo sapien
actggacgtacatggttttgccttc

SEQ ID NO: 5490368 - DNA, 25 bp, Homo sapien
atctagaactgtaagggtgcatgtg

SEQ ID NO: 5490369 - DNA, 25 bp, Homo sapien
tcccatgtgcaggaggttcaactat

SEQ ID NO: 5490370 - DNA, 25 bp, Homo sapien
ggttcaactatgctaagattaggtc

SEQ ID NO: 5490371 - DNA, 25 bp, Homo sapien
tgggtatgatcacatatactctccc

SEQ ID NO: 5490372 - DNA, 25 bp, Homo sapien
tctatctcatgcaaggaatcaggtc

SEQ ID NO: 5490373 - DNA, 25 bp, Homo sapien
atctcatgcaaggaatcaggtctgg

SEQ ID NO: 5490374 - DNA, 25 bp, Homo sapien
gaaaatacccacccttcccatgtgc

SEQ ID NO: 5490375 - DNA, 25 bp, Homo sapien
tgctaagattaggtctactagaagc

SEQ ID NO: 5490376 - DNA, 25 bp, Homo sapien
tactctccctgcttagtgctcccac

SEQ ID NO: 5490377 - DNA, 25 bp, Homo sapien
taaaataccgtttgggtatgatcac

SEQ ID NO: 5490378 - DNA, 25 bp, Homo sapien
tagtgctcccacatgacgatatata

SEQ ID NO: 5490379 - DNA, 25 bp, Homo sapien
cacccttcccatgtgcaggaggttc

SEQ ID NO: 5490380 - DNA, 25 bp, Homo sapien
agagttcgaccttgacgggtctgta

SEQ ID NO: 5490381 - DNA, 25 bp, Homo sapien
tacagacccgtcaaggtcgaactct

SEQ ID NO: 5490382 - DNA, 25 bp, Homo sapien
gacaaacagagttcgaccttgacgg

SEQ ID NO: 5490383 - DNA, 25 bp, Homo sapien
ccgtcaaggtcgaactctgtttgtc

SEQ ID NO: 5490384 - DNA, 25 bp, Homo sapien
ttctggagagagcttctcgccgcac

SEQ ID NO: 5490385 - DNA, 25 bp, Homo sapien
gtgcggcgagaagctctctccagaa

SEQ ID NO: 5490386 - DNA, 25 bp, Homo sapien
cccaccgctgctcggcttctccggg

SEQ ID NO: 5490387 - DNA, 25 bp, Homo sapien
catttgccaggctggatccccactc

SEQ ID NO: 5490388 - DNA, 25 bp, Homo sapien
tccgtgccctttctgcgggcgcaga

SEQ ID NO: 5490389 - DNA, 25 bp, Homo sapien
ctcctagatacctcgggagcgcagg

SEQ ID NO: 5490390 - DNA, 25 bp, Homo sapien
gtcgctcctgcggcctcctagatac

SEQ ID NO: 5490391 - DNA, 25 bp, Homo sapien
gctgccctcatgccaagcccagcgc

SEQ ID NO: 5490392 - DNA, 25 bp, Homo sapien
cgggccctctccccacgaccctgtg

SEQ ID NO: 5490393 - DNA, 25 bp, Homo sapien
aggaaaactacgaaccggctgtcca

SEQ ID NO: 5490394 - DNA, 25 bp, Homo sapien
atccccactcgaacagggggccatg

SEQ ID NO: 5490395 - DNA, 25 bp, Homo sapien
cgcctctagaatgtaatgggacgcc

SEQ ID NO: 5490396 - DNA, 25 bp, Homo sapien
gggacgccccacccatttgccaggc

SEQ ID NO: 5490397 - DNA, 25 bp, Homo sapien
tcggtggccagcaggctggccacga

SEQ ID NO: 5490398 - DNA, 25 bp, Homo sapien
gctctccggcaagccgcttcctccc

SEQ ID NO: 5490399 - DNA, 25 bp, Homo sapien
cggtggccagcaggctggccacgaa

SEQ ID NO: 5490400 - DNA, 25 bp, Homo sapien
ggctctccggcaagccgcttcctcc

SEQ ID NO: 5490401 - DNA, 25 bp, Homo sapien
gtcggtggccagcaggctggccacg

SEQ ID NO: 5490402 - DNA, 25 bp, Homo sapien
ggtggccagcaggctggccacgaac

SEQ ID NO: 5490403 - DNA, 25 bp, Homo sapien
ctctccggcaagccgcttcctccct

SEQ ID NO: 5490404 - DNA, 25 bp, Homo sapien
ggcaagccgcttcctccctccctct

SEQ ID NO: 5490405 - DNA, 25 bp, Homo sapien
ctggctctccggcaagccgcttcct

SEQ ID NO: 5490406 - DNA, 25 bp, Homo sapien
gtggccagcaggctggccacgaaca

SEQ ID NO: 5490407 - DNA, 25 bp, Homo sapien
tggccagcaggctggccacgaacag

SEQ ID NO: 5490408 - DNA, 25 bp, Homo sapien
gtggcgagtcgggactgtccggaac

SEQ ID NO: 5490409 - DNA, 25 bp, Homo sapien
gttccggacagtcccgactcgccac

SEQ ID NO: 5490410 - DNA, 25 bp, Homo sapien
gggtcctccagctgattgatttttc

SEQ ID NO: 5490411 - DNA, 25 bp, Homo sapien
tcctggtggtattgaaaatgtatta

SEQ ID NO: 5490412 - DNA, 25 bp, Homo sapien
tgagctcctcagcccagagccctcc

SEQ ID NO: 5490413 - DNA, 25 bp, Homo sapien
tccctgagctcacatggcaggatat

SEQ ID NO: 5490414 - DNA, 25 bp, Homo sapien
tgtttaacgaggctacattgtttcc

SEQ ID NO: 5490415 - DNA, 25 bp, Homo sapien
agaaataaaacgtctggcaacccag

SEQ ID NO: 5490416 - DNA, 25 bp, Homo sapien
cctttgaggatcagcaacagtccca

SEQ ID NO: 5490417 - DNA, 25 bp, Homo sapien
tccatcctacagaggcctttgagga

SEQ ID NO: 5490418 - DNA, 25 bp, Homo sapien
atgcatttgcattccctgagctcac

SEQ ID NO: 5490419 - DNA, 25 bp, Homo sapien
gtctaatttgtgaaggaaacagcgc

SEQ ID NO: 5490420 - DNA, 25 bp, Homo sapien
gatcagcaacagtcccattccctcc

SEQ ID NO: 5490421 - DNA, 25 bp, Homo sapien
agatcttgttgaaagctgcgatatc

SEQ ID NO: 5490422 - DNA, 25 bp, Homo sapien
ctcagtctttaatcgtggcagggcc

SEQ ID NO: 5490423 - DNA, 25 bp, Homo sapien
acacacactcaggcttcagatcttg

SEQ ID NO: 5490424 - DNA, 25 bp, Homo sapien
tgtcgtcttctcgcagccgtatagt

SEQ ID NO: 5490425 - DNA, 25 bp, Homo sapien
gccgtatagtagtagtaggcggccg

SEQ ID NO: 5490426 - DNA, 25 bp, Homo sapien
gtgatctcctcctccagcaagtctg

SEQ ID NO: 5490427 - DNA, 25 bp, Homo sapien
agcaagtctgtccccttctgtcgtc

SEQ ID NO: 5490428 - DNA, 25 bp, Homo sapien
gttgaaagctgcgatatcgacactc

SEQ ID NO: 5490429 - DNA, 25 bp, Homo sapien
tatcgacactctgcacgtgctcctc

SEQ ID NO: 5490430 - DNA, 25 bp, Homo sapien
cgcgcacgtacacacactcaggctt

SEQ ID NO: 5490431 - DNA, 25 bp, Homo sapien
cgtgctcctcaaacttggtgatctc

SEQ ID NO: 5490432 - DNA, 25 bp, Homo sapien
tgaggccctgccacgattaaagact

SEQ ID NO: 5490433 - DNA, 25 bp, Homo sapien
gtgcagagtgtcgatatcgcagctt

SEQ ID NO: 5490434 - DNA, 25 bp, Homo sapien
tcaacaagatctgaagcctgagtgt

SEQ ID NO: 5490435 - DNA, 25 bp, Homo sapien
aggagatcaccaagtttgaggagca

SEQ ID NO: 5490436 - DNA, 25 bp, Homo sapien
acaagatctgaagcctgagtgtgtg

SEQ ID NO: 5490437 - DNA, 25 bp, Homo sapien
ggccctgccacgattaaagactgag

SEQ ID NO: 5490438 - DNA, 25 bp, Homo sapien
cctgccacgattaaagactgagacc

SEQ ID NO: 5490439 - DNA, 25 bp, Homo sapien
gatcaccaagtttgaggagcacgtg

SEQ ID NO: 5490440 - DNA, 25 bp, Homo sapien
tgcgtgaggccctgccacgattaaa

SEQ ID NO: 5490441 - DNA, 25 bp, Homo sapien
tatcgcagctttcaacaagatctga

SEQ ID NO: 5490442 - DNA, 25 bp, Homo sapien
gcagagtgtcgatatcgcagctttc

SEQ ID NO: 5490443 - DNA, 25 bp, Homo sapien
tcttgatttgggcctggtgacccac

SEQ ID NO: 5490444 - DNA, 25 bp, Homo sapien
cctctcacctcccatgggcagagaa

SEQ ID NO: 5490445 - DNA, 25 bp, Homo sapien
tggccctgcaagcttaggatgagaa

SEQ ID NO: 5490446 - DNA, 25 bp, Homo sapien
taggatgagaaccacttagtgtccc

SEQ ID NO: 5490447 - DNA, 25 bp, Homo sapien
tacttctccaacacccggcagcact

SEQ ID NO: 5490448 - DNA, 25 bp, Homo sapien
cggcagcacttggccctgcaagctt

SEQ ID NO: 5490449 - DNA, 25 bp, Homo sapien
tgcaggtgaatcttcaataaaatgc

SEQ ID NO: 5490450 - DNA, 25 bp, Homo sapien
gaattattggggtcacatatgtccc

SEQ ID NO: 5490451 - DNA, 25 bp, Homo sapien
ccttcccagtccaatgccatctccc

SEQ ID NO: 5490452 - DNA, 25 bp, Homo sapien
atctacatcagaaccaaactacttc

SEQ ID NO: 5490453 - DNA, 25 bp, Homo sapien
ggaaggatgtcagctgacctctcac

SEQ ID NO: 5490454 - DNA, 25 bp, Homo sapien
ccacaggcagtccaggcctctctct

SEQ ID NO: 5490455 - DNA, 25 bp, Homo sapien
cattctgcaccacacctggcatggt

SEQ ID NO: 5490456 - DNA, 25 bp, Homo sapien
tctgcacccctgagttgggcagcca

SEQ ID NO: 5490457 - DNA, 25 bp, Homo sapien
ggagacatctgcacccctgagttgg

SEQ ID NO: 5490458 - DNA, 25 bp, Homo sapien
aataaagacactagagaactcaaaa

SEQ ID NO: 5490459 - DNA, 25 bp, Homo sapien
ggcagtccaggcctctctctgctcc

SEQ ID NO: 5490460 - DNA, 25 bp, Homo sapien
cgggaatggataataaagacactag

SEQ ID NO: 5490461 - DNA, 25 bp, Homo sapien
caccacacctggcatggtgcaggga

SEQ ID NO: 5490462 - DNA, 25 bp, Homo sapien
tggtgcagggagacatctgcacccc

SEQ ID NO: 5490463 - DNA, 25 bp, Homo sapien
tctctgctccatccccctgcctccc

SEQ ID NO: 5490464 - DNA, 25 bp, Homo sapien
cctgcctcccattctgcaccacacc

SEQ ID NO: 5490465 - DNA, 25 bp, Homo sapien
tcaggggtgcagatgtctccctgca

SEQ ID NO: 5490466 - DNA, 25 bp, Homo sapien
tgtcgtcttctcgcagccgtatagt

SEQ ID NO: 5490467 - DNA, 25 bp, Homo sapien
ctccctgcaccatgccaggtgtggt

SEQ ID NO: 5490468 - DNA, 25 bp, Homo sapien
gcaccatgccaggtgtggtgcagaa

SEQ ID NO: 5490469 - DNA, 25 bp, Homo sapien
ctcctggctgcccaactcaggggtg

SEQ ID NO: 5490470 - DNA, 25 bp, Homo sapien
gggggcactcctggctgcccaactc

SEQ ID NO: 5490471 - DNA, 25 bp, Homo sapien
gccgtatagtagtagtaggcggccg

SEQ ID NO: 5490472 - DNA, 25 bp, Homo sapien
gtcgagtcactgcccttctgtcgtc

SEQ ID NO: 5490473 - DNA, 25 bp, Homo sapien
gaggcctggactgcctgtggccttt

SEQ ID NO: 5490474 - DNA, 25 bp, Homo sapien
tgtggcctttgtcgagtcactgccc

SEQ ID NO: 5490475 - DNA, 25 bp, Homo sapien
attatccattcccgggggcactcct

SEQ ID NO: 5490476 - DNA, 25 bp, Homo sapien
gcataagcgtgccaggctagcaatg

SEQ ID NO: 5490477 - DNA, 25 bp, Homo sapien
gttcagcttctggcataagcgtgcc

SEQ ID NO: 5490478 - DNA, 25 bp, Homo sapien
cctccttggccacggcacctgtgag

SEQ ID NO: 5490479 - DNA, 25 bp, Homo sapien
gcagtgacgtctccatggtggagtc

SEQ ID NO: 5490480 - DNA, 25 bp, Homo sapien
tcaggcggttcagcttctggcataa

SEQ ID NO: 5490481 - DNA, 25 bp, Homo sapien
aaattctgcatagcatagggctgcc

SEQ ID NO: 5490482 - DNA, 25 bp, Homo sapien
ctgcatagcatagggctgccagcag

SEQ ID NO: 5490483 - DNA, 25 bp, Homo sapien
ggcacacgtgccccaaattctgcat

SEQ ID NO: 5490484 - DNA, 25 bp, Homo sapien
cacctccttggccacggcacctgtg

SEQ ID NO: 5490485 - DNA, 25 bp, Homo sapien
gtgcgtggcacacgtgccccaaatt

SEQ ID NO: 5490486 - DNA, 25 bp, Homo sapien
tattattatggatcccttgggctgt

SEQ ID NO: 5490487 - DNA, 25 bp, Homo sapien
cttctgtatcatcttactatattaa

SEQ ID NO: 5490488 - DNA, 25 bp, Homo sapien
ttaatatagtaagatgatacagaag

SEQ ID NO: 5490489 - DNA, 25 bp, Homo sapien
tccgggtcacttctgaaagagttga

SEQ ID NO: 5490490 - DNA, 25 bp, Homo sapien
atcaatagcgctgatggctacagct

SEQ ID NO: 5490491 - DNA, 25 bp, Homo sapien
gtctgacctgatccaggcacggtcc

SEQ ID NO: 5490492 - DNA, 25 bp, Homo sapien
tcttctgaatgtgaggcaacgtatc

SEQ ID NO: 5490493 - DNA, 25 bp, Homo sapien
aacgtatcttctccggcaaagcagc

SEQ ID NO: 5490494 - DNA, 25 bp, Homo sapien
acagaatggtgaatgctcttgaaaa

SEQ ID NO: 5490495 - DNA, 25 bp, Homo sapien
cctgcagactgttgaccttcgactt

SEQ ID NO: 5490496 - DNA, 25 bp, Homo sapien
tcttgaaaatcttgcgggaatcgac

SEQ ID NO: 5490497 - DNA, 25 bp, Homo sapien
gttggaagaaatcaatgaaagagaa

SEQ ID NO: 5490498 - DNA, 25 bp, Homo sapien
cgggaatcgacaggtctgacctgat

SEQ ID NO: 5490499 - DNA, 25 bp, Homo sapien
aaatatgtcaatgaggttggaagaa

SEQ ID NO: 5490500 - DNA, 25 bp, Homo sapien
cagaaatactactgtgtaagggcca

SEQ ID NO: 5490501 - DNA, 25 bp, Homo sapien
attgatcgacttgccaaatttagat

SEQ ID NO: 5490502 - DNA, 25 bp, Homo sapien
aaatttagatttgtgtgcatcaggc

SEQ ID NO: 5490503 - DNA, 25 bp, Homo sapien
ttaaagtgagagcacgcctgtacta

SEQ ID NO: 5490504 - DNA, 25 bp, Homo sapien
agcacgcctgtactagagcaagcag

SEQ ID NO: 5490505 - DNA, 25 bp, Homo sapien
ttagagaagttcaatataagctttt

SEQ ID NO: 5490506 - DNA, 25 bp, Homo sapien
ggctttcttaaagtgagagcacgcc

SEQ ID NO: 5490507 - DNA, 25 bp, Homo sapien
tagatttgtgtgcatcaggctttct

SEQ ID NO: 5490508 - DNA, 25 bp, Homo sapien
ctgtactagagcaagcaggaatcag

SEQ ID NO: 5490509 - DNA, 25 bp, Homo sapien
tactactgtgtaagggccagaaata

SEQ ID NO: 5490510 - DNA, 25 bp, Homo sapien
cgcccagcggcatcaggctttctta

SEQ ID NO: 5490511 - DNA, 25 bp, Homo sapien
taataattcaggtctgctgggcatg

SEQ ID NO: 5490512 - DNA, 25 bp, Homo sapien
aaaaactggttccttgcttagcttc

SEQ ID NO: 5490513 - DNA, 25 bp, Homo sapien
tgtacttagagtttagatgtagttt

SEQ ID NO: 5490514 - DNA, 25 bp, Homo sapien
gtgtaagagttttaagcataagaag

SEQ ID NO: 5490515 - DNA, 25 bp, Homo sapien
tgcttagcttcagcaaaacagcaaa

SEQ ID NO: 5490516 - DNA, 25 bp, Homo sapien
aacggattgctgatttaaaaactgg

SEQ ID NO: 5490517 - DNA, 25 bp, Homo sapien
gcaaaacagcaaagtctaccacatt

SEQ ID NO: 5490518 - DNA, 25 bp, Homo sapien
cttggggttaacactgtgtaagagt

SEQ ID NO: 5490519 - DNA, 25 bp, Homo sapien
tgcaaatctgtcttggggttaacac

SEQ ID NO: 5490520 - DNA, 25 bp, Homo sapien
agcataagaagtctgtacttagagt

SEQ ID NO: 5490521 - DNA, 25 bp, Homo sapien
tttgaggtgcactattaaattgctc

SEQ ID NO: 5490522 - DNA, 25 bp, Homo sapien
agcatggattgcaataaatgggtcc

SEQ ID NO: 5490523 - DNA, 25 bp, Homo sapien
ttgaaaaaggctgaccattgaccac

SEQ ID NO: 5490524 - DNA, 25 bp, Homo sapien
ggaagaccagtctgtaaagtggctg

SEQ ID NO: 5490525 - DNA, 25 bp, Homo sapien
aagtccagtgcaattgccatcgacc

SEQ ID NO: 5490526 - DNA, 25 bp, Homo sapien
atggaaaagtgagctttgccatcac

SEQ ID NO: 5490527 - DNA, 25 bp, Homo sapien
ctgaaggcaaccatgttcctgattt

SEQ ID NO: 5490528 - DNA, 25 bp, Homo sapien
aaatgggtcctcagcagagttacta

SEQ ID NO: 5490529 - DNA, 25 bp, Homo sapien
acaagtagtgtctgcattaatggtc

SEQ ID NO: 5490530 - DNA, 25 bp, Homo sapien
agagttactaatggaaaagtgagct

SEQ ID NO: 5490531 - DNA, 25 bp, Homo sapien
tccataaggatgagccaacataaat

SEQ ID NO: 5490532 - DNA, 25 bp, Homo sapien
gggtggtccaatccagtcattctga

SEQ ID NO: 5490533 - DNA, 25 bp, Homo sapien
ggaagaatcccagcagaaaaacacc

SEQ ID NO: 5490534 - DNA, 25 bp, Homo sapien
tctgactcgaacacactgggaaaag

SEQ ID NO: 5490535 - DNA, 25 bp, Homo sapien
tccgccatgagaatcacacagagtc

SEQ ID NO: 5490536 - DNA, 25 bp, Homo sapien
tctttgcaaaggttctctgactcga

SEQ ID NO: 5490537 - DNA, 25 bp, Homo sapien
actggaagtgaaaactctgctgtta

SEQ ID NO: 5490538 - DNA, 25 bp, Homo sapien
acagagtcttctgtaggggtatggt

SEQ ID NO: 5490539 - DNA, 25 bp, Homo sapien
cttcccaaggtggaagaatcccagc

SEQ ID NO: 5490540 - DNA, 25 bp, Homo sapien
gccagcagctgttcacttcagtcct

SEQ ID NO: 5490541 - DNA, 25 bp, Homo sapien
actgggaaaagtttgtctctgtgac

SEQ ID NO: 5490542 - DNA, 25 bp, Homo sapien
tgggccaagaggatctgtccaatat

SEQ ID NO: 5490543 - DNA, 25 bp, Homo sapien
gtcctccgactctgtgcctgttggt

SEQ ID NO: 5490544 - DNA, 25 bp, Homo sapien
ttcccaacccagagatgtttgaccc

SEQ ID NO: 5490545 - DNA, 25 bp, Homo sapien
ccccatgcagtgacctgtgacatta

SEQ ID NO: 5490546 - DNA, 25 bp, Homo sapien
aatggatttgcctctgtgccgccct

SEQ ID NO: 5490547 - DNA, 25 bp, Homo sapien
cactttctggatgaaggtggcaatt

SEQ ID NO: 5490548 - DNA, 25 bp, Homo sapien
ctgtgctacatgacaacaaagaatt

SEQ ID NO: 5490549 - DNA, 25 bp, Homo sapien
aaactatctcattcccaagggcaca

SEQ ID NO: 5490550 - DNA, 25 bp, Homo sapien
ttgacccaaagaaccttgacaccac

SEQ ID NO: 5490551 - DNA, 25 bp, Homo sapien
gtgccgcccttctaccagctgtgct

SEQ ID NO: 5490552 - DNA, 25 bp, Homo sapien
ttcctgtctgaagaagagcagatgg

SEQ ID NO: 5490553 - DNA, 25 bp, Homo sapien
tgaagatctagtgaacattcgacct

SEQ ID NO: 5490554 - DNA, 25 bp, Homo sapien
ccccaccagcctgccccatgcagtg

SEQ ID NO: 5490555 - DNA, 25 bp, Homo sapien
catcaagattttgagcagcccctgg

SEQ ID NO: 5490556 - DNA, 25 bp, Homo sapien
tatcattgattacttcccgggaact

SEQ ID NO: 5490557 - DNA, 25 bp, Homo sapien
acaggagccacatgccctacacaga

SEQ ID NO: 5490558 - DNA, 25 bp, Homo sapien
agattgaacgtgtgattggcagaaa

SEQ ID NO: 5490559 - DNA, 25 bp, Homo sapien
gagcagcccctggatccagatctgc

SEQ ID NO: 5490560 - DNA, 25 bp, Homo sapien
gaatcaatggacatgaacaaccctc

SEQ ID NO: 5490561 - DNA, 25 bp, Homo sapien
ggagccacatgccctacacagatgc

SEQ ID NO: 5490562 - DNA, 25 bp, Homo sapien
cttcccgggaactcacaacaaatta

SEQ ID NO: 5490563 - DNA, 25 bp, Homo sapien
accaagaatcaatggacatgaacaa

SEQ ID NO: 5490564 - DNA, 25 bp, Homo sapien
tttgattataaagatcagcaatttc

SEQ ID NO: 5490565 - DNA, 25 bp, Homo sapien
ccgggaactcacaacaaattactta

SEQ ID NO: 5490566 - DNA, 25 bp, Homo sapien
acagaatgaggttgaaacttacttt

SEQ ID NO: 5490567 - DNA, 25 bp, Homo sapien
ccattgtgtggacttgtgatcatca

SEQ ID NO: 5490568 - DNA, 25 bp, Homo sapien
gtgtataaactgtgtccattgtgtg

SEQ ID NO: 5490569 - DNA, 25 bp, Homo sapien
aacaactcctaagtggcagggcatg

SEQ ID NO: 5490570 - DNA, 25 bp, Homo sapien
tgcataaagatatacagaatgaggt

SEQ ID NO: 5490571 - DNA, 25 bp, Homo sapien
tcattgagggattttgccctaatac

SEQ ID NO: 5490572 - DNA, 25 bp, Homo sapien
taagtgtacaccactatggatgtgt

SEQ ID NO: 5490573 - DNA, 25 bp, Homo sapien
aaaacaactcctaagtggcagggca

SEQ ID NO: 5490574 - DNA, 25 bp, Homo sapien
aagatatacagaatgaggttgaaac

SEQ ID NO: 5490575 - DNA, 25 bp, Homo sapien
tagtagttaagtgtacaccactatg

SEQ ID NO: 5490576 - DNA, 25 bp, Homo sapien
aaaaagacctacatgcataaagata

SEQ ID NO: 5490577 - DNA, 25 bp, Homo sapien
tgagggaaactctcctgcaggactt

SEQ ID NO: 5490578 - DNA, 25 bp, Homo sapien
atgggaatgaccagcaggtatttct

SEQ ID NO: 5490579 - DNA, 25 bp, Homo sapien
gtcaccaagaaagaagattcctgcc

SEQ ID NO: 5490580 - DNA, 25 bp, Homo sapien
gggcaactggtaactgaagtcacca

SEQ ID NO: 5490581 - DNA, 25 bp, Homo sapien
cagccgccatcatggacccaccatt

SEQ ID NO: 5490582 - DNA, 25 bp, Homo sapien
agcaggaaccagagcccatcttaat

SEQ ID NO: 5490583 - DNA, 25 bp, Homo sapien
ggagtgtctgcagacctgccgaact

SEQ ID NO: 5490584 - DNA, 25 bp, Homo sapien
tgaccaagaaattcagccgccatca

SEQ ID NO: 5490585 - DNA, 25 bp, Homo sapien
caacttcgtcacagaaaaggagtgt

SEQ ID NO: 5490586 - DNA, 25 bp, Homo sapien
tcaccatggctgaccgaggtgaatg

SEQ ID NO: 5490587 - DNA, 25 bp, Homo sapien
atcttaatcccgagagtccggaggg

SEQ ID NO: 5490588 - DNA, 25 bp, Homo sapien
agagctatcgcacgtgtctcggaac

SEQ ID NO: 5490589 - DNA, 25 bp, Homo sapien
gttccgagacacgtgcgatagctct

SEQ ID NO: 5490590 - DNA, 25 bp, Homo sapien
cagtgacgactgttggaaaagatat

SEQ ID NO: 5490591 - DNA, 25 bp, Homo sapien
tatgcatagaaaaaagagctaattt

SEQ ID NO: 5490592 - DNA, 25 bp, Homo sapien
gtgacgactgttggaaaagatatgt

SEQ ID NO: 5490593 - DNA, 25 bp, Homo sapien
tcagccaggtgttcatttgtccttc

SEQ ID NO: 5490594 - DNA, 25 bp, Homo sapien
ttgtacacgtacacagagtaactct

SEQ ID NO: 5490595 - DNA, 25 bp, Homo sapien
aaagatatgtctaaaagctgttgtc

SEQ ID NO: 5490596 - DNA, 25 bp, Homo sapien
ctaggatcactcattttcattggtt

SEQ ID NO: 5490597 - DNA, 25 bp, Homo sapien
acagtgtccagcagtgacgactgtt

SEQ ID NO: 5490598 - DNA, 25 bp, Homo sapien
gtccagcagtgacgactgttggaaa

SEQ ID NO: 5490599 - DNA, 25 bp, Homo sapien
aaatatgtcgttaacgaaagaattc

SEQ ID NO: 5490600 - DNA, 25 bp, Homo sapien
ttgattgttcaaaatacctccattt

SEQ ID NO: 5490601 - DNA, 25 bp, Homo sapien
gcttctcttataaattggtatttca

SEQ ID NO: 5490602 - DNA, 25 bp, Homo sapien
tgaaataccaatttataagagaagc

SEQ ID NO: 5490603 - DNA, 25 bp, Homo sapien
gattgcttctcttataaattggtat

SEQ ID NO: 5490604 - DNA, 25 bp, Homo sapien
ataccaatttataagagaagcaatc

SEQ ID NO: 5490605 - DNA, 25 bp, Homo sapien
gggtctgtttggagtctgaatgctc

SEQ ID NO: 5490606 - DNA, 25 bp, Homo sapien
ccccttagcattccgagggagccac

SEQ ID NO: 5490607 - DNA, 25 bp, Homo sapien
taggacaatcggctcacagggtcct

SEQ ID NO: 5490608 - DNA, 25 bp, Homo sapien
atgcgtgactagaccagcaagaagt

SEQ ID NO: 5490609 - DNA, 25 bp, Homo sapien
tgctcactcgggaagcactgataac

SEQ ID NO: 5490610 - DNA, 25 bp, Homo sapien
cacagggtcctttcatgtccgatcc

SEQ ID NO: 5490611 - DNA, 25 bp, Homo sapien
agcagtaaaaaccaaggcatcccca

SEQ ID NO: 5490612 - DNA, 25 bp, Homo sapien
ccacactgggaacgactgtctataa

SEQ ID NO: 5490613 - DNA, 25 bp, Homo sapien
ggagtctgaatgctctgctgcctct

SEQ ID NO: 5490614 - DNA, 25 bp, Homo sapien
aactcgaagtgttccatgctcactc

SEQ ID NO: 5490615 - DNA, 25 bp, Homo sapien
catccccaacactgcatgcgtgact

SEQ ID NO: 5490616 - DNA, 25 bp, Homo sapien
gtcaaaatacaaacactctttataa

SEQ ID NO: 5490617 - DNA, 25 bp, Homo sapien
ttataaagagtgtttgtattttgac

SEQ ID NO: 5490618 - DNA, 25 bp, Homo sapien
cttggccttgtggtgactctcagtc

SEQ ID NO: 5490619 - DNA, 25 bp, Homo sapien
tctttcgagcagccttggtggccag

SEQ ID NO: 5490620 - DNA, 25 bp, Homo sapien
tccgccttgcttgccgcgtccggac

SEQ ID NO: 5490621 - DNA, 25 bp, Homo sapien
ggatgatgcgggtcttcttgttgtc

SEQ ID NO: 5490622 - DNA, 25 bp, Homo sapien
gcttggtacgagccattgcgaactt

SEQ ID NO: 5490623 - DNA, 25 bp, Homo sapien
gcccgccagctccaggatctcggcg

SEQ ID NO: 5490624 - DNA, 25 bp, Homo sapien
agccttagctcgggcctttccgcct

SEQ ID NO: 5490625 - DNA, 25 bp, Homo sapien
acaccgccgccagatacactggcgc

SEQ ID NO: 5490626 - DNA, 25 bp, Homo sapien
gccccgactcgctcggagtagttgc

SEQ ID NO: 5490627 - DNA, 25 bp, Homo sapien
gaagagcgggtcttagccttagctc

SEQ ID NO: 5490628 - DNA, 25 bp, Homo sapien
gaacaccgccctgagcaattgtgac

SEQ ID NO: 5490629 - DNA, 25 bp, Homo sapien
cgtcccccgtcgtcgcccttgggca

SEQ ID NO: 5490630 - DNA, 25 bp, Homo sapien
tgcccaagggcgacgacgggggacg

SEQ ID NO: 5490631 - DNA, 25 bp, Homo sapien
ctcctcatcgttgcggatggccagc

SEQ ID NO: 5490632 - DNA, 25 bp, Homo sapien
gcggtcaggtactccagcaccgccg

SEQ ID NO: 5490633 - DNA, 25 bp, Homo sapien
ttgggattgagttgctgcaaactaa

SEQ ID NO: 5490634 - DNA, 25 bp, Homo sapien
gacgccaccctgtgcgatggtgact

SEQ ID NO: 5490635 - DNA, 25 bp, Homo sapien
ggtggctctcggtcttcttgggcag

SEQ ID NO: 5490636 - DNA, 25 bp, Homo sapien
atagttgcctttgcggagcaggcga

SEQ ID NO: 5490637 - DNA, 25 bp, Homo sapien
gcaccgacccgctccgcatagttgc

SEQ ID NO: 5490638 - DNA, 25 bp, Homo sapien
tccacaaaattgtaggtggctctga

SEQ ID NO: 5490639 - DNA, 25 bp, Homo sapien
cgggatgatgcgagtcttcttgttg

SEQ ID NO: 5490640 - DNA, 25 bp, Homo sapien
tggcgcgagctttgcctccctgctt

SEQ ID NO: 5490641 - DNA, 25 bp, Homo sapien
tgccacgcccagacatggcaaaagg

SEQ ID NO: 5490642 - DNA, 25 bp, Homo sapien
gactacctactattctacacaacct

SEQ ID NO: 5490643 - DNA, 25 bp, Homo sapien
aggttgtgtagaatagtaggtagtc

SEQ ID NO: 5490644 - DNA, 25 bp, Homo sapien
tgggaatgtggtcaccagtgacctc

SEQ ID NO: 5490645 - DNA, 25 bp, Homo sapien
cggcttccgttgaggaaggtcttgc

SEQ ID NO: 5490646 - DNA, 25 bp, Homo sapien
gagatttagcagattcatgcagttc

SEQ ID NO: 5490647 - DNA, 25 bp, Homo sapien
ataaaaagtagataagtaacatatt

SEQ ID NO: 5490648 - DNA, 25 bp, Homo sapien
tccacaatagcagcacacactactg

SEQ ID NO: 5490649 - DNA, 25 bp, Homo sapien
ggcttttgtcccagatgaggatatc

SEQ ID NO: 5490650 - DNA, 25 bp, Homo sapien
cgtcttatccggagctgcagtagga

SEQ ID NO: 5490651 - DNA, 25 bp, Homo sapien
tgctacctgcaaagctgtcagtctc

SEQ ID NO: 5490652 - DNA, 25 bp, Homo sapien
ttgctttagccatgttgtaatcccc

SEQ ID NO: 5490653 - DNA, 25 bp, Homo sapien
agctgcagtaggaagttgcttgttc

SEQ ID NO: 5490654 - DNA, 25 bp, Homo sapien
tctgctttctctggactagtcactt

SEQ ID NO: 5490655 - DNA, 25 bp, Homo sapien
tcccgacatgacgaagaaacgataa

SEQ ID NO: 5490656 - DNA, 25 bp, Homo sapien
aagagccgttgtattggaaagtgat

SEQ ID NO: 5490657 - DNA, 25 bp, Homo sapien
cgttccaaatgtttaaccagtggcc

SEQ ID NO: 5490658 - DNA, 25 bp, Homo sapien
ccaccctgagcgatggttactttgc

SEQ ID NO: 5490659 - DNA, 25 bp, Homo sapien
tgtttaaccagtggcccagctctcc

SEQ ID NO: 5490660 - DNA, 25 bp, Homo sapien
catgacgaagaaacgataaatggag

SEQ ID NO: 5490661 - DNA, 25 bp, Homo sapien
ccgcagaaatagtaggtggctctga

SEQ ID NO: 5490662 - DNA, 25 bp, Homo sapien
tgaaaagagccgttgtattggaaag

SEQ ID NO: 5490663 - DNA, 25 bp, Homo sapien
ccagctctcccgcagaaatagtagg

SEQ ID NO: 5490664 - DNA, 25 bp, Homo sapien
gtgattctatggagacattatttgc

SEQ ID NO: 5490665 - DNA, 25 bp, Homo sapien
gcttgccgcgtcccgacatgacgaa

SEQ ID NO: 5490666 - DNA, 25 bp, Homo sapien
taaggctgatggagcatcgtatgtt

SEQ ID NO: 5490667 - DNA, 25 bp, Homo sapien
ctccaatttccttatcaacgtagat

SEQ ID NO: 5490668 - DNA, 25 bp, Homo sapien
aaacttgagatatcccatctaatgc

SEQ ID NO: 5490669 - DNA, 25 bp, Homo sapien
ctgatggagcatcgtatgttttgcc

SEQ ID NO: 5490670 - DNA, 25 bp, Homo sapien
gattgaaggtctagactccagcttc

SEQ ID NO: 5490671 - DNA, 25 bp, Homo sapien
aaggtctagactccagcttcagcac

SEQ ID NO: 5490672 - DNA, 25 bp, Homo sapien
tctccctcctcatcaaggatcatga

SEQ ID NO: 5490673 - DNA, 25 bp, Homo sapien
tttgattgaaggtctagactccagc

SEQ ID NO: 5490674 - DNA, 25 bp, Homo sapien
aggagactgcaaacagattgcattc

SEQ ID NO: 5490675 - DNA, 25 bp, Homo sapien
acatccttggcagccacacgggtgc

SEQ ID NO: 5490676 - DNA, 25 bp, Homo sapien
tccagcttcagcacatccttggcag

SEQ ID NO: 5490677 - DNA, 25 bp, Homo sapien
agcaaatgagacagagcgctttctg

SEQ ID NO: 5490678 - DNA, 25 bp, Homo sapien
agctgaagcatgagcgcaaacatga

SEQ ID NO: 5490679 - DNA, 25 bp, Homo sapien
tgcaagggtgctacacatcactggg

SEQ ID NO: 5490680 - DNA, 25 bp, Homo sapien
tccgctatcaaggaatagagggtga

SEQ ID NO: 5490681 - DNA, 25 bp, Homo sapien
ttgttcttggtgagcggtctgacca

SEQ ID NO: 5490682 - DNA, 25 bp, Homo sapien
agcagcaaacgtccccaggatgata

SEQ ID NO: 5490683 - DNA, 25 bp, Homo sapien
catatatgacagggttgatgatgga

SEQ ID NO: 5490684 - DNA, 25 bp, Homo sapien
ccctttccgggtggtcacatagtgc

SEQ ID NO: 5490685 - DNA, 25 bp, Homo sapien
gcagtggaagtgcttggtaaatgca

SEQ ID NO: 5490686 - DNA, 25 bp, Homo sapien
ggggtaggtgtaatccgctatcaag

SEQ ID NO: 5490687 - DNA, 25 bp, Homo sapien
gtaaatgcagagtcctcctgggtgc

SEQ ID NO: 5490688 - DNA, 25 bp, Homo sapien
gagcgcacgtgtgcgccccgcgtct

SEQ ID NO: 5490689 - DNA, 25 bp, Homo sapien
agacgcggggcgcacacgtgcgctc

SEQ ID NO: 5490690 - DNA, 25 bp, Homo sapien
ggtttattaggtatgtgtatttatt

SEQ ID NO: 5490691 - DNA, 25 bp, Homo sapien
aataaatacacatacctaataaacc

SEQ ID NO: 5490692 - DNA, 25 bp, Homo sapien
cacccccctggcgaggacaccgccg

SEQ ID NO: 5490693 - DNA, 25 bp, Homo sapien
cggcggtgtcctcgccaggggggtg

SEQ ID NO: 5490694 - DNA, 25 bp, Homo sapien
gtgcgccgtgtgcacctcagggtgt

SEQ ID NO: 5490695 - DNA, 25 bp, Homo sapien
acaccctgaggtgcacacggcgcac

SEQ ID NO: 5490696 - DNA, 25 bp, Homo sapien
aatgaggctcatcgagacatgtatc

SEQ ID NO: 5490697 - DNA, 25 bp, Homo sapien
actgggatagttatcatagaaaatc

SEQ ID NO: 5490698 - DNA, 25 bp, Homo sapien
atttgataaaacggtacagctactt

SEQ ID NO: 5490699 - DNA, 25 bp, Homo sapien
ggtagagcaactgaagccctcatac

SEQ ID NO: 5490700 - DNA, 25 bp, Homo sapien
tagctagaaagtggaaacaactcaa

SEQ ID NO: 5490701 - DNA, 25 bp, Homo sapien
caaagcaatatgatacaccaattcc

SEQ ID NO: 5490702 - DNA, 25 bp, Homo sapien
aaatgagcaaagaatctggagagtt

SEQ ID NO: 5490703 - DNA, 25 bp, Homo sapien
ttcatagtagctagaaagtggaaac

SEQ ID NO: 5490704 - DNA, 25 bp, Homo sapien
aaatttgggtgacaaaaatgaggct

SEQ ID NO: 5490705 - DNA, 25 bp, Homo sapien
tcagaaaactgtttggtctgtcctc

SEQ ID NO: 5490706 - DNA, 25 bp, Homo sapien
ttgtatatgaatgtttgcagtagca

SEQ ID NO: 5490707 - DNA, 25 bp, Homo sapien
gaccgaatcccactgacactgtcat

SEQ ID NO: 5490708 - DNA, 25 bp, Homo sapien
atgacagtgtcagtgggattcggtc

SEQ ID NO: 5490709 - DNA, 25 bp, Homo sapien
accaccacgtaacctctgaataaca

SEQ ID NO: 5490710 - DNA, 25 bp, Homo sapien
tgttattcagaggttacgtggtggt

SEQ ID NO: 5490711 - DNA, 25 bp, Homo sapien
acaaaataatgtttattgtacttag

SEQ ID NO: 5490712 - DNA, 25 bp, Homo sapien
ctaagtacaataaacattattttgt

SEQ ID NO: 5490713 - DNA, 25 bp, Homo sapien
gacaaaataatgtttattgtactta

SEQ ID NO: 5490714 - DNA, 25 bp, Homo sapien
taagtacaataaacattattttgtc

SEQ ID NO: 5490715 - DNA, 25 bp, Homo sapien
tcccagtgaagcagggggtcgtaca

SEQ ID NO: 5490716 - DNA, 25 bp, Homo sapien
tgtacgaccccctgcttcactggga

SEQ ID NO: 5490717 - DNA, 25 bp, Homo sapien
ctggacccttcaacgtgagactcag

SEQ ID NO: 5490718 - DNA, 25 bp, Homo sapien
ctgagtctcacgttgaagggtccag

SEQ ID NO: 5490719 - DNA, 25 bp, Homo sapien
tatttaagtcattcattataacggt

SEQ ID NO: 5490720 - DNA, 25 bp, Homo sapien
accgttataatgaatgacttaaata

SEQ ID NO: 5490721 - DNA, 25 bp, Homo sapien
tcaatcctctctacagcctgggttt

SEQ ID NO: 5490722 - DNA, 25 bp, Homo sapien
tcgaaacacacattcaggagcatct

SEQ ID NO: 5490723 - DNA, 25 bp, Homo sapien
tataaaggtgtgcttaagttattgc

SEQ ID NO: 5490724 - DNA, 25 bp, Homo sapien
atagggtcattataaaggtgtgctt

SEQ ID NO: 5490725 - DNA, 25 bp, Homo sapien
gcgggctggatagaattgtcttaca

SEQ ID NO: 5490726 - DNA, 25 bp, Homo sapien
gccactcccggattttctagctcga

SEQ ID NO: 5490727 - DNA, 25 bp, Homo sapien
gccaggggctcagatgtctattata

SEQ ID NO: 5490728 - DNA, 25 bp, Homo sapien
gctatcaggtgcatttaccctacac

SEQ ID NO: 5490729 - DNA, 25 bp, Homo sapien
ggtaagacactgaccacatggactc

SEQ ID NO: 5490730 - DNA, 25 bp, Homo sapien
accctacaccgggtaagacactgac

SEQ ID NO: 5490731 - DNA, 25 bp, Homo sapien
cataatgtgcaagaattcatgaata

SEQ ID NO: 5490732 - DNA, 25 bp, Homo sapien
ggaggattccaagtccagcagttca

SEQ ID NO: 5490733 - DNA, 25 bp, Homo sapien
tacagtgagcttcagtggtgttact

SEQ ID NO: 5490734 - DNA, 25 bp, Homo sapien
agcttcagtggtgttactgcactcc

SEQ ID NO: 5490735 - DNA, 25 bp, Homo sapien
tccaagtccagcagttcaaagttac

SEQ ID NO: 5490736 - DNA, 25 bp, Homo sapien
gtaattgcagccctttgaaggccac

SEQ ID NO: 5490737 - DNA, 25 bp, Homo sapien
gttacagtgagcttcagtggtgtta

SEQ ID NO: 5490738 - DNA, 25 bp, Homo sapien
attgcagccctttgaaggccacagc

SEQ ID NO: 5490739 - DNA, 25 bp, Homo sapien
agccctttgaaggccacagcaggag

SEQ ID NO: 5490740 - DNA, 25 bp, Homo sapien
tgcagccctttgaaggccacagcag

SEQ ID NO: 5490741 - DNA, 25 bp, Homo sapien
caagtccagcagttcaaagttacag

SEQ ID NO: 5490742 - DNA, 25 bp, Homo sapien
cttgtaattgcagccctttgaaggc

SEQ ID NO: 5490743 - DNA, 25 bp, Homo sapien
taagcattacagtgaaggcaaggga

SEQ ID NO: 5490744 - DNA, 25 bp, Homo sapien
caaaacgtgttgacctaaagaggta

SEQ ID NO: 5490745 - DNA, 25 bp, Homo sapien
ctgggatacccaggttatctaggct

SEQ ID NO: 5490746 - DNA, 25 bp, Homo sapien
gcccagccagtcttttaatttggtc

SEQ ID NO: 5490747 - DNA, 25 bp, Homo sapien
gtgaactcctatatgaagccattcc

SEQ ID NO: 5490748 - DNA, 25 bp, Homo sapien
accaacaccagttcactcaaaacgt

SEQ ID NO: 5490749 - DNA, 25 bp, Homo sapien
aagactacacaaccattaagcatta

SEQ ID NO: 5490750 - DNA, 25 bp, Homo sapien
tgaagtcaggagtcacgtataagac

SEQ ID NO: 5490751 - DNA, 25 bp, Homo sapien
tttggtcctccaatcagctcaactc

SEQ ID NO: 5490752 - DNA, 25 bp, Homo sapien
acagaccaggatccttgaagtcagg

SEQ ID NO: 5490753 - DNA, 25 bp, Homo sapien
gacctaaagaggtacagaccaggat

SEQ ID NO: 5490754 - DNA, 25 bp, Homo sapien
agttaatggcgaagtgtcgaatgct

SEQ ID NO: 5490755 - DNA, 25 bp, Homo sapien
gagcttaaaagcagtcaggatgaac

SEQ ID NO: 5490756 - DNA, 25 bp, Homo sapien
ctgcagtcgtctgacaaacggacca

SEQ ID NO: 5490757 - DNA, 25 bp, Homo sapien
agaagaaatacagtgaggagcttaa

SEQ ID NO: 5490758 - DNA, 25 bp, Homo sapien
tgaacctgtagaacagtcagaggcc

SEQ ID NO: 5490759 - DNA, 25 bp, Homo sapien
gacacgccagcagttggctcagtac

SEQ ID NO: 5490760 - DNA, 25 bp, Homo sapien
gactaaagacaaactggaacaagcc

SEQ ID NO: 5490761 - DNA, 25 bp, Homo sapien
tgccccaagtaccagcaggactaca

SEQ ID NO: 5490762 - DNA, 25 bp, Homo sapien
tagagggtatgcagagtaccattct

SEQ ID NO: 5490763 - DNA, 25 bp, Homo sapien
aaacggaccaagtaatggtagctcc

SEQ ID NO: 5490764 - DNA, 25 bp, Homo sapien
gcctggaagtttacgcctgatagcc

SEQ ID NO: 5490765 - DNA, 25 bp, Homo sapien
cggagcccgtctccgcgtgcgcccc

SEQ ID NO: 5490766 - DNA, 25 bp, Homo sapien
ggggcgcacgcggagacgggctccg

SEQ ID NO: 5490767 - DNA, 25 bp, Homo sapien
taagtagaatttgcacatgttggta

SEQ ID NO: 5490768 - DNA, 25 bp, Homo sapien
aaatagggtctgcttaatgtttccc

SEQ ID NO: 5490769 - DNA, 25 bp, Homo sapien
tcccaagtcagatatacaggctctc

SEQ ID NO: 5490770 - DNA, 25 bp, Homo sapien
tagtctgatagaacactgcccatac

SEQ ID NO: 5490771 - DNA, 25 bp, Homo sapien
tctcatcaaagtcgcacgtaggctc

SEQ ID NO: 5490772 - DNA, 25 bp, Homo sapien
tagttattaccgcgccagtgaaaat

SEQ ID NO: 5490773 - DNA, 25 bp, Homo sapien
ttatgtggtaattcaatagttctcc

SEQ ID NO: 5490774 - DNA, 25 bp, Homo sapien
tcaaaggctagaagcttagtctgat

SEQ ID NO: 5490775 - DNA, 25 bp, Homo sapien
aaggtgtcaacgtttacacagagtg

SEQ ID NO: 5490776 - DNA, 25 bp, Homo sapien
gctatgtggtcgttccaacaccaaa

SEQ ID NO: 5490777 - DNA, 25 bp, Homo sapien
cgcacgtaggctcattcccagcacc

SEQ ID NO: 5490778 - DNA, 25 bp, Homo sapien
gacccacccctcgaccctcaggagt

SEQ ID NO: 5490779 - DNA, 25 bp, Homo sapien
actcctgagggtcgaggggtgggtc

SEQ ID NO: 5490780 - DNA, 25 bp, Homo sapien
cgtcatcgatgacccgaaggtaccg

SEQ ID NO: 5490781 - DNA, 25 bp, Homo sapien
cggtaccttcgggtcatcgatgacg

SEQ ID NO: 5490782 - DNA, 25 bp, Homo sapien
agcttaggaggctgtcctggtttct

SEQ ID NO: 5490783 - DNA, 25 bp, Homo sapien
aaatctgtcccagacccgctgccac

SEQ ID NO: 5490784 - DNA, 25 bp, Homo sapien
tggtaccaagctaagtagttcttat

SEQ ID NO: 5490785 - DNA, 25 bp, Homo sapien
ccgctgccactgaatcggtcaggga

SEQ ID NO: 5490786 - DNA, 25 bp, Homo sapien
gtcatcacgatgtccccgtaggcac

SEQ ID NO: 5490787 - DNA, 25 bp, Homo sapien
cccgggtagatgcccagtaaatgag

SEQ ID NO: 5490788 - DNA, 25 bp, Homo sapien
actgggtcatcacgatgtccccgta

SEQ ID NO: 5490789 - DNA, 25 bp, Homo sapien
ttggagctgtataaaacactctggc

SEQ ID NO: 5490790 - DNA, 25 bp, Homo sapien
acctgggtctgcaacaccatcttgc

SEQ ID NO: 5490791 - DNA, 25 bp, Homo sapien
aagtagttcttattgttggagctgt

SEQ ID NO: 5490792 - DNA, 25 bp, Homo sapien
ccccggattcccgggtagatgccca

SEQ ID NO: 5490793 - DNA, 25 bp, Homo sapien
ttgctaaaagagccctggtcaggca

SEQ ID NO: 5490794 - DNA, 25 bp, Homo sapien
tttccttgctaaaagagccctggtc

SEQ ID NO: 5490795 - DNA, 25 bp, Homo sapien
caagtatgatttgttgcacaccaac

SEQ ID NO: 5490796 - DNA, 25 bp, Homo sapien
ttcaggtttcacaacatgtagcaag

SEQ ID NO: 5490797 - DNA, 25 bp, Homo sapien
attgtaagagacataaggcagatac

SEQ ID NO: 5490798 - DNA, 25 bp, Homo sapien
actaacaaataacttcaggtttcac

SEQ ID NO: 5490799 - DNA, 25 bp, Homo sapien
atactattctcgaaagcactctctc

SEQ ID NO: 5490800 - DNA, 25 bp, Homo sapien
aacaggagagaacctccattgtaag

SEQ ID NO: 5490801 - DNA, 25 bp, Homo sapien
tcaatttagcagttcacatagttta

SEQ ID NO: 5490802 - DNA, 25 bp, Homo sapien
ttcagcaatataacaggagagaacc

SEQ ID NO: 5490803 - DNA, 25 bp, Homo sapien
ggtgcatctctggggtacattcttc

SEQ ID NO: 5490804 - DNA, 25 bp, Homo sapien
gatcgacgaggggagcctctgcgga

SEQ ID NO: 5490805 - DNA, 25 bp, Homo sapien
tccgcagaggctcccctcgtcgatc

SEQ ID NO: 5490806 - DNA, 25 bp, Homo sapien
taggcacagaaggtttacagctgca

SEQ ID NO: 5490807 - DNA, 25 bp, Homo sapien
agaaggtttacagctgcatggtcag

SEQ ID NO: 5490808 - DNA, 25 bp, Homo sapien
agctgcatggtcagtaagcgatact

SEQ ID NO: 5490809 - DNA, 25 bp, Homo sapien
tacagctgcatggtcagtaagcgat

SEQ ID NO: 5490810 - DNA, 25 bp, Homo sapien
ctaaaattcccccatgaaacttcta

SEQ ID NO: 5490811 - DNA, 25 bp, Homo sapien
actcactcttaggtttatactttcc

SEQ ID NO: 5490812 - DNA, 25 bp, Homo sapien
gctcaagcaactcttacacttcagc

SEQ ID NO: 5490813 - DNA, 25 bp, Homo sapien
agcaactcttacacttcagcctcca

SEQ ID NO: 5490814 - DNA, 25 bp, Homo sapien
aaagagagactgctgttaaaaatca

SEQ ID NO: 5490815 - DNA, 25 bp, Homo sapien
taagcgatactttggtcatgaatgt

SEQ ID NO: 5490816 - DNA, 25 bp, Homo sapien
aatcaaaattctcgtggaatgaaga

SEQ ID NO: 5490817 - DNA, 25 bp, Homo sapien
gtatctgcgatataactgggaactc

SEQ ID NO: 5490818 - DNA, 25 bp, Homo sapien
cttagtcctgagcaaggctttctat

SEQ ID NO: 5490819 - DNA, 25 bp, Homo sapien
gtgattacaagcgtgttcctggtct

SEQ ID NO: 5490820 - DNA, 25 bp, Homo sapien
gagcaaggctttctatcaggtcccc

SEQ ID NO: 5490821 - DNA, 25 bp, Homo sapien
taactgggaactctgccttagtcct

SEQ ID NO: 5490822 - DNA, 25 bp, Homo sapien
gtgttcctggtctctttgtatctgc

SEQ ID NO: 5490823 - DNA, 25 bp, Homo sapien
atgctcaatgcaacacttcccatcc

SEQ ID NO: 5490824 - DNA, 25 bp, Homo sapien
ccaggccactcagttacggtgttgg

SEQ ID NO: 5490825 - DNA, 25 bp, Homo sapien
atcaggtccccaggccactcagtta

SEQ ID NO: 5490826 - DNA, 25 bp, Homo sapien
tcagttacggtgttggagattttac

SEQ ID NO: 5490827 - DNA, 25 bp, Homo sapien
tcacaatcccaggtgtggtgcagtg

SEQ ID NO: 5490828 - DNA, 25 bp, Homo sapien
tggatggccagtcagtgaccaatta

SEQ ID NO: 5490829 - DNA, 25 bp, Homo sapien
caaagttaaccttaggaatagcacc

SEQ ID NO: 5490830 - DNA, 25 bp, Homo sapien
ttgctgcttctgatgaaaccaaatc

SEQ ID NO: 5490831 - DNA, 25 bp, Homo sapien
aatgaagcctaaactgtcaaaatat

SEQ ID NO: 5490832 - DNA, 25 bp, Homo sapien
gcagtccaaataatcagaatagttc

SEQ ID NO: 5490833 - DNA, 25 bp, Homo sapien
gtcagtgaccaattaatgcagtcca

SEQ ID NO: 5490834 - DNA, 25 bp, Homo sapien
ttaaaggtacttaggagtgtgtgtg

SEQ ID NO: 5490835 - DNA, 25 bp, Homo sapien
ttctgtatgcaagggtctaactatt

SEQ ID NO: 5490836 - DNA, 25 bp, Homo sapien
ttaggaatagcaccataaccaaaaa

SEQ ID NO: 5490837 - DNA, 25 bp, Homo sapien
gaaaaaatggtaattggatggccag

SEQ ID NO: 5490838 - DNA, 25 bp, Homo sapien
tgtgtgtgtcacatattcaaagtta

SEQ ID NO: 5490839 - DNA, 25 bp, Homo sapien
ggggtgtttagtaaatgccgcctca

SEQ ID NO: 5490840 - DNA, 25 bp, Homo sapien
tgcatttaaggcagccgtaagtttt

SEQ ID NO: 5490841 - DNA, 25 bp, Homo sapien
gagcagtcgcccagttaattgagat

SEQ ID NO: 5490842 - DNA, 25 bp, Homo sapien
aagataagctcgccttgcggcgctc

SEQ ID NO: 5490843 - DNA, 25 bp, Homo sapien
tcacccgaactgatgaaaccctttc

SEQ ID NO: 5490844 - DNA, 25 bp, Homo sapien
aatgccgcctcaacacaaaggatgc

SEQ ID NO: 5490845 - DNA, 25 bp, Homo sapien
tgcagccttgcaccttgggggtgtt

SEQ ID NO: 5490846 - DNA, 25 bp, Homo sapien
gactccaacaagcctgtccagccac

SEQ ID NO: 5490847 - DNA, 25 bp, Homo sapien
cctgggcactgtaccaggtgtggaa

SEQ ID NO: 5490848 - DNA, 25 bp, Homo sapien
taaaatgccaacaggtgaggcttta

SEQ ID NO: 5490849 - DNA, 25 bp, Homo sapien
tgcggcgctcgattctcttgcagcc

SEQ ID NO: 5490850 - DNA, 25 bp, Homo sapien
gagacatctactgggaaattcctgt

SEQ ID NO: 5490851 - DNA, 25 bp, Homo sapien
acaggaatttcccagtagatgtctc

SEQ ID NO: 5490852 - DNA, 25 bp, Homo sapien
agaagaatggctcattaggtaaccc

SEQ ID NO: 5490853 - DNA, 25 bp, Homo sapien
tcccacccctgaactttaggcattc

SEQ ID NO: 5490854 - DNA, 25 bp, Homo sapien
ccaaaagggcataccttacagagcc

SEQ ID NO: 5490855 - DNA, 25 bp, Homo sapien
accttacagagcctagaagaatggc

SEQ ID NO: 5490856 - DNA, 25 bp, Homo sapien
gaagatcccaggcctatgtgagcat

SEQ ID NO: 5490857 - DNA, 25 bp, Homo sapien
ccgaccccatccagaagatcccagg

SEQ ID NO: 5490858 - DNA, 25 bp, Homo sapien
caccaatatatggcattcccacccc

SEQ ID NO: 5490859 - DNA, 25 bp, Homo sapien
aaatatcctagccaaaagggcatac

SEQ ID NO: 5490860 - DNA, 25 bp, Homo sapien
tgcccaagaaagtgccaagtgatta

SEQ ID NO: 5490861 - DNA, 25 bp, Homo sapien
cacaatccttggaagggaaaagaac

SEQ ID NO: 5490862 - DNA, 25 bp, Homo sapien
tgaaacagtgctaatattggtgccc

SEQ ID NO: 5490863 - DNA, 25 bp, Homo sapien
gggtctacagcccctgtggcgtctc

SEQ ID NO: 5490864 - DNA, 25 bp, Homo sapien
gagacgccacaggggctgtagaccc

SEQ ID NO: 5490865 - DNA, 25 bp, Homo sapien
atagtattccttagttcagactaag

SEQ ID NO: 5490866 - DNA, 25 bp, Homo sapien
cttagtctgaactaaggaatactat

SEQ ID NO: 5490867 - DNA, 25 bp, Homo sapien
tcctatatggtaaatgagagaatac

SEQ ID NO: 5490868 - DNA, 25 bp, Homo sapien
tctgcatcccagagacatatatgcc

SEQ ID NO: 5490869 - DNA, 25 bp, Homo sapien
atgtgtaagaccatcattgagcata

SEQ ID NO: 5490870 - DNA, 25 bp, Homo sapien
aagaagtaatcaattaagaccagtt

SEQ ID NO: 5490871 - DNA, 25 bp, Homo sapien
tccaagtgcccagtctcagccacca

SEQ ID NO: 5490872 - DNA, 25 bp, Homo sapien
tgttagaaaatgtaagcacaaactg

SEQ ID NO: 5490873 - DNA, 25 bp, Homo sapien
gcatagagcaccagttttcaaagtc

SEQ ID NO: 5490874 - DNA, 25 bp, Homo sapien
gagagaatacaatcaagccaaattt

SEQ ID NO: 5490875 - DNA, 25 bp, Homo sapien
gcacaaactgaaaattcatagggtt

SEQ ID NO: 5490876 - DNA, 25 bp, Homo sapien
ttccctagaggaatgtgtaagacca

SEQ ID NO: 5490877 - DNA, 25 bp, Homo sapien
aagaccagttaggtttggactttca

SEQ ID NO: 5490878 - DNA, 25 bp, Homo sapien
aaggcaccaacctcaacgcgcccaa

SEQ ID NO: 5490879 - DNA, 25 bp, Homo sapien
aggcagggagaatgcactctccaaa

SEQ ID NO: 5490880 - DNA, 25 bp, Homo sapien
gtgcggaagaaccacatgtactcct

SEQ ID NO: 5490881 - DNA, 25 bp, Homo sapien
aaccctccgtcgacatggacatggc

SEQ ID NO: 5490882 - DNA, 25 bp, Homo sapien
ccgctactgcaggctcaagaaatgc

SEQ ID NO: 5490883 - DNA, 25 bp, Homo sapien
cccccgtctccgggatcaacggcga

SEQ ID NO: 5490884 - DNA, 25 bp, Homo sapien
actcgaaggtcaagctatgaggaca

SEQ ID NO: 5490885 - DNA, 25 bp, Homo sapien
ggaccggatcagcactcgaaggtca

SEQ ID NO: 5490886 - DNA, 25 bp, Homo sapien
aaacactacggtgcctcgagctgtg

SEQ ID NO: 5490887 - DNA, 25 bp, Homo sapien
gcggaggtcctgtcccgacagatca

SEQ ID NO: 5490888 - DNA, 25 bp, Homo sapien
atggccgactacagtgctgcactgg

SEQ ID NO: 5490889 - DNA, 25 bp, Homo sapien
tatgacaccaaaagcttcgagagca

SEQ ID NO: 5490890 - DNA, 25 bp, Homo sapien
gacaagtacaaccgtgccatcgaca

SEQ ID NO: 5490891 - DNA, 25 bp, Homo sapien
gtggcccagatgattgatgagatca

SEQ ID NO: 5490892 - DNA, 25 bp, Homo sapien
gggcaccacgcagcccatgaagctg

SEQ ID NO: 5490893 - DNA, 25 bp, Homo sapien
gccgctgccggtctacgataaacat

SEQ ID NO: 5490894 - DNA, 25 bp, Homo sapien
tgggtctgtgaagaaatcccggatc

SEQ ID NO: 5490895 - DNA, 25 bp, Homo sapien
ctgcagcaggtctacaaccactcgg

SEQ ID NO: 5490896 - DNA, 25 bp, Homo sapien
ggagacctccttcgacctggtggcc

SEQ ID NO: 5490897 - DNA, 25 bp, Homo sapien
acatcactatggcgtcgagaaagca

SEQ ID NO: 5490898 - DNA, 25 bp, Homo sapien
cggccgtccactggactcctgcgcc

SEQ ID NO: 5490899 - DNA, 25 bp, Homo sapien
tgaccgacgacgacctgtttgtgga

SEQ ID NO: 5490900 - DNA, 25 bp, Homo sapien
atggtctggactgtgaagttcacta

SEQ ID NO: 5490901 - DNA, 25 bp, Homo sapien
gccagtgaccagccatggtctggac

SEQ ID NO: 5490902 - DNA, 25 bp, Homo sapien
taactgatggatgcccacttgcctt

SEQ ID NO: 5490903 - DNA, 25 bp, Homo sapien
accgctctcaaacctaccaaaacta

SEQ ID NO: 5490904 - DNA, 25 bp, Homo sapien
aaaactttaatagcagacggacagc

SEQ ID NO: 5490905 - DNA, 25 bp, Homo sapien
cactaccatttgtcaagaatcaccc

SEQ ID NO: 5490906 - DNA, 25 bp, Homo sapien
tgagtctcttaactgatggatgccc

SEQ ID NO: 5490907 - DNA, 25 bp, Homo sapien
cttacatgagtaattgaaatgaaat

SEQ ID NO: 5490908 - DNA, 25 bp, Homo sapien
gatctccacgggttagttaccgctc

SEQ ID NO: 5490909 - DNA, 25 bp, Homo sapien
tttacagcgaaacccttacatgagt

SEQ ID NO: 5490910 - DNA, 25 bp, Homo sapien
gcccacttgccttaaagcagcatac

SEQ ID NO: 5490911 - DNA, 25 bp, Homo sapien
atgttaagaatgaaattggatattt

SEQ ID NO: 5490912 - DNA, 25 bp, Homo sapien
tgtacaacctgctgtgcaccaaaat

SEQ ID NO: 5490913 - DNA, 25 bp, Homo sapien
ttctacgtggtgaagtgctttttct

SEQ ID NO: 5490914 - DNA, 25 bp, Homo sapien
ttcattgtacaggatacttaagata

SEQ ID NO: 5490915 - DNA, 25 bp, Homo sapien
aataaatgacacacaaggaaaatat

SEQ ID NO: 5490916 - DNA, 25 bp, Homo sapien
atgacacacaaggaaaatataacaa

SEQ ID NO: 5490917 - DNA, 25 bp, Homo sapien
tcaagtactgctagtaagtgttccc

SEQ ID NO: 5490918 - DNA, 25 bp, Homo sapien
accacccacaaagttctgtgtaatc

SEQ ID NO: 5490919 - DNA, 25 bp, Homo sapien
ttaaatgttgataatgaattgaaat

SEQ ID NO: 5490920 - DNA, 25 bp, Homo sapien
atcaggaatgatacaatttgcaata

SEQ ID NO: 5490921 - DNA, 25 bp, Homo sapien
tgtttgcagaggattaaatgttgat

SEQ ID NO: 5490922 - DNA, 25 bp, Homo sapien
ctgaaaggagaaatcagtcctggca

SEQ ID NO: 5490923 - DNA, 25 bp, Homo sapien
gtacccctgctaccagtggccgtga

SEQ ID NO: 5490924 - DNA, 25 bp, Homo sapien
agtcctggcaagatcaacagcgtag

SEQ ID NO: 5490925 - DNA, 25 bp, Homo sapien
tgctacggaaggtaacattcgatcc

SEQ ID NO: 5490926 - DNA, 25 bp, Homo sapien
caacagcgtagagcagaatgatatg

SEQ ID NO: 5490927 - DNA, 25 bp, Homo sapien
tggcctatgccttcttggggactgc

SEQ ID NO: 5490928 - DNA, 25 bp, Homo sapien
agtggccgtgacaaatcactcagct

SEQ ID NO: 5490929 - DNA, 25 bp, Homo sapien
tcctgaggtatggtacccctgctac

SEQ ID NO: 5490930 - DNA, 25 bp, Homo sapien
gtgaatgtcagcggaaagttcttcg

SEQ ID NO: 5490931 - DNA, 25 bp, Homo sapien
ctggctcttcaagcaccgccgggtg

SEQ ID NO: 5490932 - DNA, 25 bp, Homo sapien
ctggccatgatctatgggctcatcg

SEQ ID NO: 5490933 - DNA, 25 bp, Homo sapien
taggcggcaccttgcagtactgcca

SEQ ID NO: 5490934 - DNA, 25 bp, Homo sapien
aaatactacccaagaagcagctcgt

SEQ ID NO: 5490935 - DNA, 25 bp, Homo sapien
tgagacagaactaccagatgatatt

SEQ ID NO: 5490936 - DNA, 25 bp, Homo sapien
gtactgccacagtgaatggatcatc

SEQ ID NO: 5490937 - DNA, 25 bp, Homo sapien
ttgatagagatttttggctgccgtt

SEQ ID NO: 5490938 - DNA, 25 bp, Homo sapien
aacgaacgttcacagacattggatt

SEQ ID NO: 5490939 - DNA, 25 bp, Homo sapien
tgcgttgacaattggaaaagaaaag

SEQ ID NO: 5490940 - DNA, 25 bp, Homo sapien
tggtttagtcaggaggattttatgc

SEQ ID NO: 5490941 - DNA, 25 bp, Homo sapien
ttgctgccactgtgctaatggaagc

SEQ ID NO: 5490942 - DNA, 25 bp, Homo sapien
gtgtaattgcgtacaggcgaaatgg

SEQ ID NO: 5490943 - DNA, 25 bp, Homo sapien
gtgaaagaaatggctcagatgttac

SEQ ID NO: 5490944 - DNA, 25 bp, Homo sapien
gagctcagtggttcctggagactca

SEQ ID NO: 5490945 - DNA, 25 bp, Homo sapien
ctcccagatggtctcagccctcatc

SEQ ID NO: 5490946 - DNA, 25 bp, Homo sapien
gtagttgcttgcgccgcagagtgtg

SEQ ID NO: 5490947 - DNA, 25 bp, Homo sapien
gatgcctgcctgcataacggctgcc

SEQ ID NO: 5490948 - DNA, 25 bp, Homo sapien
acagtcattgctacgtggccataat

SEQ ID NO: 5490949 - DNA, 25 bp, Homo sapien
tggaatgctaagtgcctacacccta

SEQ ID NO: 5490950 - DNA, 25 bp, Homo sapien
ctgctagaccaaggctaaaccgtgg

SEQ ID NO: 5490951 - DNA, 25 bp, Homo sapien
tcaaggttaaagtcgctgctagacc

SEQ ID NO: 5490952 - DNA, 25 bp, Homo sapien
gcttcccacccacgcacacgcagta

SEQ ID NO: 5490953 - DNA, 25 bp, Homo sapien
cgcctacttcaggcgggatggagat

SEQ ID NO: 5490954 - DNA, 25 bp, Homo sapien
acataaggggtgccacttccacacc

SEQ ID NO: 5490955 - DNA, 25 bp, Homo sapien
ggctcacgattttggaggctgcaaa

SEQ ID NO: 5490956 - DNA, 25 bp, Homo sapien
attgggccccagatctcaacactgt

SEQ ID NO: 5490957 - DNA, 25 bp, Homo sapien
atcataaacatggtggaaggaatca

SEQ ID NO: 5490958 - DNA, 25 bp, Homo sapien
tctgctacacaataggggcaaggag

SEQ ID NO: 5490959 - DNA, 25 bp, Homo sapien
gcactgtcaggatggttaaccccaa

SEQ ID NO: 5490960 - DNA, 25 bp, Homo sapien
tgaccaagaggaactgcttccacca

SEQ ID NO: 5490961 - DNA, 25 bp, Homo sapien
tgtgggtttggaaatctctagtgac

SEQ ID NO: 5490962 - DNA, 25 bp, Homo sapien
actgttgcaatgggaatcaagtttc

SEQ ID NO: 5490963 - DNA, 25 bp, Homo sapien
tgatcttgtgccatctggggctcct

SEQ ID NO: 5490964 - DNA, 25 bp, Homo sapien
aatacaagatcaaggaaccagcatc

SEQ ID NO: 5490965 - DNA, 25 bp, Homo sapien
agggaatatagttatgggtctgtta

SEQ ID NO: 5490966 - DNA, 25 bp, Homo sapien
caacgcacccagcctgatcacatca

SEQ ID NO: 5490967 - DNA, 25 bp, Homo sapien
cctagtagaaacagggcttcaccat

SEQ ID NO: 5490968 - DNA, 25 bp, Homo sapien
gcaatggcgcaatctcgtctcactg

SEQ ID NO: 5490969 - DNA, 25 bp, Homo sapien
cttttcaaaggtattgctctcctac

SEQ ID NO: 5490970 - DNA, 25 bp, Homo sapien
tgtattcctagtagaaacagggctt

SEQ ID NO: 5490971 - DNA, 25 bp, Homo sapien
ttcaagcgactctcctgcttcagcc

SEQ ID NO: 5490972 - DNA, 25 bp, Homo sapien
tctcactctgtcgcccagcctggag

SEQ ID NO: 5490973 - DNA, 25 bp, Homo sapien
agtgccctgcaactaagactttggg

SEQ ID NO: 5490974 - DNA, 25 bp, Homo sapien
atacacgagtattagttttgacaac

SEQ ID NO: 5490975 - DNA, 25 bp, Homo sapien
tccacaaaagtgaaatgacaaaaat

SEQ ID NO: 5490976 - DNA, 25 bp, Homo sapien
tccacctcccaagttcaagcgactc

SEQ ID NO: 5490977 - DNA, 25 bp, Homo sapien
ccggggcttcccttcctgggtgaca

SEQ ID NO: 5490978 - DNA, 25 bp, Homo sapien
gaacccagcttccggactgtgagga

SEQ ID NO: 5490979 - DNA, 25 bp, Homo sapien
ctggaacagtcgctcttggaaccca

SEQ ID NO: 5490980 - DNA, 25 bp, Homo sapien
gccacacagagaggccacgtgtgga

SEQ ID NO: 5490981 - DNA, 25 bp, Homo sapien
ccttgtagcttctgcctgaggctgc

SEQ ID NO: 5490982 - DNA, 25 bp, Homo sapien
tggcagtcaaaagaaggatctagaa

SEQ ID NO: 5490983 - DNA, 25 bp, Homo sapien
agaacagtgaagctctgagaggtta

SEQ ID NO: 5490984 - DNA, 25 bp, Homo sapien
tggatgctcccatgaacagccccag

SEQ ID NO: 5490985 - DNA, 25 bp, Homo sapien
tggcaatcaaaatcagctggcagtc

SEQ ID NO: 5490986 - DNA, 25 bp, Homo sapien
gctgagctcatgaagcaggtaaagc

SEQ ID NO: 5490987 - DNA, 25 bp, Homo sapien
gatcgcatctgggcagccttgtagc

SEQ ID NO: 5490988 - DNA, 25 bp, Homo sapien
acttaagctacaccgtagtatcctc

SEQ ID NO: 5490989 - DNA, 25 bp, Homo sapien
ccccctcggtgaggtaaaagtgtca

SEQ ID NO: 5490990 - DNA, 25 bp, Homo sapien
gatgaataagcaaatcagccccttt

SEQ ID NO: 5490991 - DNA, 25 bp, Homo sapien
tacgtggtttctagtgaaatagtcc

SEQ ID NO: 5490992 - DNA, 25 bp, Homo sapien
ccttcattctagggaacagcagttc

SEQ ID NO: 5490993 - DNA, 25 bp, Homo sapien
gaggtaaaagtgtcaatagagaagt

SEQ ID NO: 5490994 - DNA, 25 bp, Homo sapien
tgccttgttagaagtaatttgtgct

SEQ ID NO: 5490995 - DNA, 25 bp, Homo sapien
gaaatagtccagcaaaatcatataa

SEQ ID NO: 5490996 - DNA, 25 bp, Homo sapien
aaaccaaacaacagaccttcattct

SEQ ID NO: 5490997 - DNA, 25 bp, Homo sapien
caaaagagatcagttagtcctattc

SEQ ID NO: 5490998 - DNA, 25 bp, Homo sapien
ttgaaattaagattactgtccacat

SEQ ID NO: 5490999 - DNA, 25 bp, Homo sapien
gacgtcagcccgtgcggcgccgcgg

SEQ ID NO: 5491000 - DNA, 25 bp, Homo sapien
ccgcggcgccgcacgggctgacgtc

SEQ ID NO: 5491001 - DNA, 25 bp, Homo sapien
ggcacgacgtcagcccgtgcggcgc

SEQ ID NO: 5491002 - DNA, 25 bp, Homo sapien
gcgccgcacgggctgacgtcgtgcc

SEQ ID NO: 5491003 - DNA, 25 bp, Homo sapien
tcttaatgccggtaaaggtgttccc

SEQ ID NO: 5491004 - DNA, 25 bp, Homo sapien
gggaacacctttaccggcattaaga

SEQ ID NO: 5491005 - DNA, 25 bp, Homo sapien
cgacgtcagcccgtgcggcgccgcg

SEQ ID NO: 5491006 - DNA, 25 bp, Homo sapien
cgcggcgccgcacgggctgacgtcg

SEQ ID NO: 5491007 - DNA, 25 bp, Homo sapien
acgtcagcccgtgcggcgccgcggc

SEQ ID NO: 5491008 - DNA, 25 bp, Homo sapien
gccgcggcgccgcacgggctgacgt

SEQ ID NO: 5491009 - DNA, 25 bp, Homo sapien
accatgtgaggacagtgtttaaagc

SEQ ID NO: 5491010 - DNA, 25 bp, Homo sapien
cttctaccatgtgaggacagtgttt

SEQ ID NO: 5491011 - DNA, 25 bp, Homo sapien
ggtgtgatagaaatgttttgtctct

SEQ ID NO: 5491012 - DNA, 25 bp, Homo sapien
acctgctagtgccttgatcataaac

SEQ ID NO: 5491013 - DNA, 25 bp, Homo sapien
aaattagaaactgggccctcagaca

SEQ ID NO: 5491014 - DNA, 25 bp, Homo sapien
aaaaagataggaaagagtcattgtt

SEQ ID NO: 5491015 - DNA, 25 bp, Homo sapien
acataggaaattgccggtgtgatag

SEQ ID NO: 5491016 - DNA, 25 bp, Homo sapien
gtcattgtttggagccagcaaaggg

SEQ ID NO: 5491017 - DNA, 25 bp, Homo sapien
ggaaagagtcattgtttggagccag

SEQ ID NO: 5491018 - DNA, 25 bp, Homo sapien
ctcagacaccaaacctgctagtgcc

SEQ ID NO: 5491019 - DNA, 25 bp, Homo sapien
gggacacataggaaattgccggtgt

SEQ ID NO: 5491020 - DNA, 25 bp, Homo sapien
tggagtcaagaataactatgaggtt

SEQ ID NO: 5491021 - DNA, 25 bp, Homo sapien
aaaacaatgagtcaataagctgagt

SEQ ID NO: 5491022 - DNA, 25 bp, Homo sapien
aactatgaggtttctggcttgggaa

SEQ ID NO: 5491023 - DNA, 25 bp, Homo sapien
atgtatgctgtgccacctacagatg

SEQ ID NO: 5491024 - DNA, 25 bp, Homo sapien
ggatagtgacacaagtacataaatg

SEQ ID NO: 5491025 - DNA, 25 bp, Homo sapien
tctctatctatgaggatagtgacac

SEQ ID NO: 5491026 - DNA, 25 bp, Homo sapien
tgaggtttctggcttgggaaatcag

SEQ ID NO: 5491027 - DNA, 25 bp, Homo sapien
ctggcttgggaaatcagatgtatgc

SEQ ID NO: 5491028 - DNA, 25 bp, Homo sapien
cttcctggagtcaagaataactatg

SEQ ID NO: 5491029 - DNA, 25 bp, Homo sapien
tctatgaggatagtgacacaagtac

SEQ ID NO: 5491030 - DNA, 25 bp, Homo sapien
tgggaaatcagatgtatgctgtgcc

SEQ ID NO: 5491031 - DNA, 25 bp, Homo sapien
ccggtggaggaagtgtgtcgagact

SEQ ID NO: 5491032 - DNA, 25 bp, Homo sapien
agtctcgacacacttcctccaccgg

SEQ ID NO: 5491033 - DNA, 25 bp, Homo sapien
agtttgaatgcgttcagtgaattcc

SEQ ID NO: 5491034 - DNA, 25 bp, Homo sapien
tgtctcagtgataccaagatgataa

SEQ ID NO: 5491035 - DNA, 25 bp, Homo sapien
aagatgataatttctgggaggaaat

SEQ ID NO: 5491036 - DNA, 25 bp, Homo sapien
gatacgaaagcatcagtcagtggac

SEQ ID NO: 5491037 - DNA, 25 bp, Homo sapien
gcatcagtcagtggacaggaaataa

SEQ ID NO: 5491038 - DNA, 25 bp, Homo sapien
cattgtaaagagaatgtagagagag

SEQ ID NO: 5491039 - DNA, 25 bp, Homo sapien
gtgcagctacatggtgatacgaaag

SEQ ID NO: 5491040 - DNA, 25 bp, Homo sapien
ccttgcgatttatgtggacagacat

SEQ ID NO: 5491041 - DNA, 25 bp, Homo sapien
attgggaaaccagtcacttagagac

SEQ ID NO: 5491042 - DNA, 25 bp, Homo sapien
tgtagagagaggtctgaacatttta

SEQ ID NO: 5491043 - DNA, 25 bp, Homo sapien
tggacaggaaataaacagaatacct

SEQ ID NO: 5491044 - DNA, 25 bp, Homo sapien
agatccgttccaaagcgtcgtgttt

SEQ ID NO: 5491045 - DNA, 25 bp, Homo sapien
aaacacgacgctttggaacggatct

SEQ ID NO: 5491046 - DNA, 25 bp, Homo sapien
tgacttccgttatttgttacaactg

SEQ ID NO: 5491047 - DNA, 25 bp, Homo sapien
cagttgtaacaaataacggaagtca

SEQ ID NO: 5491048 - DNA, 25 bp, Homo sapien
atgataagtccagcaaaaaggaata

SEQ ID NO: 5491049 - DNA, 25 bp, Homo sapien
acagcacttacaggataggcctaca

SEQ ID NO: 5491050 - DNA, 25 bp, Homo sapien
tggcccaaaggctttcttgaccctc

SEQ ID NO: 5491051 - DNA, 25 bp, Homo sapien
gttgaatgattgggaatccatacag

SEQ ID NO: 5491052 - DNA, 25 bp, Homo sapien
ggataggcctacattcaactggcac

SEQ ID NO: 5491053 - DNA, 25 bp, Homo sapien
ctagctatgttgttcagactgttct

SEQ ID NO: 5491054 - DNA, 25 bp, Homo sapien
tgaaatttctatggatgataagtcc

SEQ ID NO: 5491055 - DNA, 25 bp, Homo sapien
atggacttacacgcagtgctaggca

SEQ ID NO: 5491056 - DNA, 25 bp, Homo sapien
ctccaattacaggctccctggaagt

SEQ ID NO: 5491057 - DNA, 25 bp, Homo sapien
ccctggaagtgttaacagggtcttc

SEQ ID NO: 5491058 - DNA, 25 bp, Homo sapien
ctccagttcacaaggatctctccat

SEQ ID NO: 5491059 - DNA, 25 bp, Homo sapien
tagccagaagcaggcttgttttcct

SEQ ID NO: 5491060 - DNA, 25 bp, Homo sapien
ctcccatggataatagtgctaattc

SEQ ID NO: 5491061 - DNA, 25 bp, Homo sapien
gtgctaattcctgaggacctgaagg

SEQ ID NO: 5491062 - DNA, 25 bp, Homo sapien
ccttccctcccatggataatagtgc

SEQ ID NO: 5491063 - DNA, 25 bp, Homo sapien
ggattagccagaagcaggcttgttt

SEQ ID NO: 5491064 - DNA, 25 bp, Homo sapien
tgggccttggcctgcagacccaata

SEQ ID NO: 5491065 - DNA, 25 bp, Homo sapien
gagttttgatcatcctgagaaaaat

SEQ ID NO: 5491066 - DNA, 25 bp, Homo sapien
ggcctgcagacccaataaaccttcc

SEQ ID NO: 5491067 - DNA, 25 bp, Homo sapien
ccctcccatggataatagtgctaat

SEQ ID NO: 5491068 - DNA, 25 bp, Homo sapien
taatagtgctaattcctgaggacct

SEQ ID NO: 5491069 - DNA, 25 bp, Homo sapien
tgcagacccaataaaccttccctcc

SEQ ID NO: 5491070 - DNA, 25 bp, Homo sapien
ttccaaacaaaggtgaaatagctta

SEQ ID NO: 5491071 - DNA, 25 bp, Homo sapien
ttcaaaggacaaaataaagactatg

SEQ ID NO: 5491072 - DNA, 25 bp, Homo sapien
cctacaagccttttcacaagtgtca

SEQ ID NO: 5491073 - DNA, 25 bp, Homo sapien
aaaacaaagcaaaaatagaaattca

SEQ ID NO: 5491074 - DNA, 25 bp, Homo sapien
caaggatattaagacaacactgact

SEQ ID NO: 5491075 - DNA, 25 bp, Homo sapien
agggaggagctttcctacaagcctt

SEQ ID NO: 5491076 - DNA, 25 bp, Homo sapien
aggtgaaatagcttaaacagaaata

SEQ ID NO: 5491077 - DNA, 25 bp, Homo sapien
ataggcatctaaaaagctcagcaat

SEQ ID NO: 5491078 - DNA, 25 bp, Homo sapien
aactttacagcattatcaaggatat

SEQ ID NO: 5491079 - DNA, 25 bp, Homo sapien
aaaataaagactatgaaccaatgag

SEQ ID NO: 5491080 - DNA, 25 bp, Homo sapien
gatacacaataggcatctaaaaagc

SEQ ID NO: 5491081 - DNA, 25 bp, Homo sapien
gtcgaattgtgacccaccctaaggc

SEQ ID NO: 5491082 - DNA, 25 bp, Homo sapien
tgaccgtcgaattgtgacccaccct

SEQ ID NO: 5491083 - DNA, 25 bp, Homo sapien
ctgctggctgctctcaaggcactta

SEQ ID NO: 5491084 - DNA, 25 bp, Homo sapien
acaaatgaccgtcgaattgtgaccc

SEQ ID NO: 5491085 - DNA, 25 bp, Homo sapien
tgacccaccctaaggcaattggctt

SEQ ID NO: 5491086 - DNA, 25 bp, Homo sapien
ttccctatggagcatctactgagcc

SEQ ID NO: 5491087 - DNA, 25 bp, Homo sapien
ccactcagtcacacaaatgaccgtc

SEQ ID NO: 5491088 - DNA, 25 bp, Homo sapien
gcatctactgagccccagccgagag

SEQ ID NO: 5491089 - DNA, 25 bp, Homo sapien
aatgaccgtcgaattgtgacccacc

SEQ ID NO: 5491090 - DNA, 25 bp, Homo sapien
ttttatttccctatggagcatctac

SEQ ID NO: 5491091 - DNA, 25 bp, Homo sapien
cagtcacacaaatgaccgtcgaatt

SEQ ID NO: 5491092 - DNA, 25 bp, Homo sapien
cggattgatccttctttgagcacca

SEQ ID NO: 5491093 - DNA, 25 bp, Homo sapien
gaaagtgtgttgatacgaccaggta

SEQ ID NO: 5491094 - DNA, 25 bp, Homo sapien
gcacataagattccagtaacaagct

SEQ ID NO: 5491095 - DNA, 25 bp, Homo sapien
ccaggtaggcccacctagctatgct

SEQ ID NO: 5491096 - DNA, 25 bp, Homo sapien
atgaaaggccaccagcataatactc

SEQ ID NO: 5491097 - DNA, 25 bp, Homo sapien
tgagaaccaccaaaataaaggctaa

SEQ ID NO: 5491098 - DNA, 25 bp, Homo sapien
tttgtggtatgactatcgtgattat

SEQ ID NO: 5491099 - DNA, 25 bp, Homo sapien
cctgtgtcttaatgtggagctggga

SEQ ID NO: 5491100 - DNA, 25 bp, Homo sapien
caacaaaggtgatatgtattaatgt

SEQ ID NO: 5491101 - DNA, 25 bp, Homo sapien
attctaaaagggaaattgaaggatg

SEQ ID NO: 5491102 - DNA, 25 bp, Homo sapien
tgaaggatgcaaccggattgatcct

SEQ ID NO: 5491103 - DNA, 25 bp, Homo sapien
ttgaccaaacacatgggcgccatag

SEQ ID NO: 5491104 - DNA, 25 bp, Homo sapien
atgcctcccattacagacccagctt

SEQ ID NO: 5491105 - DNA, 25 bp, Homo sapien
ttaaatcaggaaatctaaggggaca

SEQ ID NO: 5491106 - DNA, 25 bp, Homo sapien
gtatgtccctcgcacagagcactcc

SEQ ID NO: 5491107 - DNA, 25 bp, Homo sapien
agaggagacgcattaagtgttaatc

SEQ ID NO: 5491108 - DNA, 25 bp, Homo sapien
atctgataaagtgggttttgggtat

SEQ ID NO: 5491109 - DNA, 25 bp, Homo sapien
cacaacagctaataaaatgcctccc

SEQ ID NO: 5491110 - DNA, 25 bp, Homo sapien
ggcgccatagcctcaccaagttgac

SEQ ID NO: 5491111 - DNA, 25 bp, Homo sapien
acagagcactccaaatgttccaagc

SEQ ID NO: 5491112 - DNA, 25 bp, Homo sapien
gaaactgcaactcaaaaagtgtgtc

SEQ ID NO: 5491113 - DNA, 25 bp, Homo sapien
ctaaggggacatgttacccaatcac

SEQ ID NO: 5491114 - DNA, 25 bp, Homo sapien
gtccaaagttcctgaggctcactgc

SEQ ID NO: 5491115 - DNA, 25 bp, Homo sapien
aactgcaggtatataacaggaagga

SEQ ID NO: 5491116 - DNA, 25 bp, Homo sapien
taacagccaatgattcacgagacaa

SEQ ID NO: 5491117 - DNA, 25 bp, Homo sapien
gcagaatctcaggcctcgtgtccca

SEQ ID NO: 5491118 - DNA, 25 bp, Homo sapien
gggggctagttccaaagacatgagc

SEQ ID NO: 5491119 - DNA, 25 bp, Homo sapien
gacatgagcctaataaggaatggaa

SEQ ID NO: 5491120 - DNA, 25 bp, Homo sapien
gcattgctctccaaggtgtggtccc

SEQ ID NO: 5491121 - DNA, 25 bp, Homo sapien
tgcacccaatagagactgggagtcc

SEQ ID NO: 5491122 - DNA, 25 bp, Homo sapien
tgaccaaaagcaaccaaacatgatc

SEQ ID NO: 5491123 - DNA, 25 bp, Homo sapien
ttcagccagactccccagtgattcc

SEQ ID NO: 5491124 - DNA, 25 bp, Homo sapien
acgagacaaaaagttagagcaagaa

SEQ ID NO: 5491125 - DNA, 25 bp, Homo sapien
ttgtcttcttgggaaggacgcgtta

SEQ ID NO: 5491126 - DNA, 25 bp, Homo sapien
tagagaggaataaagatagctttgc

SEQ ID NO: 5491127 - DNA, 25 bp, Homo sapien
atagctttgcagtatctggagtgtt

SEQ ID NO: 5491128 - DNA, 25 bp, Homo sapien
catccacatgacaaaggagagtgca

SEQ ID NO: 5491129 - DNA, 25 bp, Homo sapien
ggaaggacgcgttaaagacctatga

SEQ ID NO: 5491130 - DNA, 25 bp, Homo sapien
caggaaaagagtaaattcaggtcac

SEQ ID NO: 5491131 - DNA, 25 bp, Homo sapien
gtatctggagtgtttcaggaaagct

SEQ ID NO: 5491132 - DNA, 25 bp, Homo sapien
ataggttagcattacccaaggagcc

SEQ ID NO: 5491133 - DNA, 25 bp, Homo sapien
ccaaggagcctccctatcccgtatt

SEQ ID NO: 5491134 - DNA, 25 bp, Homo sapien
acttgtgcagcaatgttcaaatttc

SEQ ID NO: 5491135 - DNA, 25 bp, Homo sapien
atcaaagtgtgaaccaagaacgtgt

SEQ ID NO: 5491136 - DNA, 25 bp, Homo sapien
atcctgctcccctgccgagacctct

SEQ ID NO: 5491137 - DNA, 25 bp, Homo sapien
ccccaacagagttcccaggagaaga

SEQ ID NO: 5491138 - DNA, 25 bp, Homo sapien
gaaggggacattacaatgcatggac

SEQ ID NO: 5491139 - DNA, 25 bp, Homo sapien
tttgcaaaagacaggacacttgagt

SEQ ID NO: 5491140 - DNA, 25 bp, Homo sapien
ctcttggtcagttgcacggagatga

SEQ ID NO: 5491141 - DNA, 25 bp, Homo sapien
caaataggtctgtgtaaaggaagga

SEQ ID NO: 5491142 - DNA, 25 bp, Homo sapien
ctgggtcctatggaaagtatgtccc

SEQ ID NO: 5491143 - DNA, 25 bp, Homo sapien
ggatctgggcgtcccaggcacttct

SEQ ID NO: 5491144 - DNA, 25 bp, Homo sapien
agatgcgaatcccaaagctgtcacc

SEQ ID NO: 5491145 - DNA, 25 bp, Homo sapien
gagactgagtagctacgtttgacat

SEQ ID NO: 5491146 - DNA, 25 bp, Homo sapien
tccggatagctcttggggctccggg

SEQ ID NO: 5491147 - DNA, 25 bp, Homo sapien
aatcaatatcataacagcagctaac

SEQ ID NO: 5491148 - DNA, 25 bp, Homo sapien
tgggtgaggatggtacttaaataat

SEQ ID NO: 5491149 - DNA, 25 bp, Homo sapien
ttatggtacttctaagcaggaaaga

SEQ ID NO: 5491150 - DNA, 25 bp, Homo sapien
ctgcttaacttggttgggatgggag

SEQ ID NO: 5491151 - DNA, 25 bp, Homo sapien
ctacagattaataaaaaggagctta

SEQ ID NO: 5491152 - DNA, 25 bp, Homo sapien
ggacaggcacagaatctccacgtga

SEQ ID NO: 5491153 - DNA, 25 bp, Homo sapien
gatcaacagtctaccaaggatatac

SEQ ID NO: 5491154 - DNA, 25 bp, Homo sapien
aatcaagtgagatcaacaggagaaa

SEQ ID NO: 5491155 - DNA, 25 bp, Homo sapien
cctgtagactagtaagaaaatcaag

SEQ ID NO: 5491156 - DNA, 25 bp, Homo sapien
tgagttgcttacagaagagaggtct

SEQ ID NO: 5491157 - DNA, 25 bp, Homo sapien
agctaacagtacactgggtgaggat

SEQ ID NO: 5491158 - DNA, 25 bp, Homo sapien
gtctcgtcccggtcaagggaccacg

SEQ ID NO: 5491159 - DNA, 25 bp, Homo sapien
cgtggtcccttgaccgggacgagac

SEQ ID NO: 5491160 - DNA, 25 bp, Homo sapien
gaaaataattatcacttggattaat

SEQ ID NO: 5491161 - DNA, 25 bp, Homo sapien
attaatccaagtgataattattttc

SEQ ID NO: 5491162 - DNA, 25 bp, Homo sapien
ctaagtgaagtttagcttggtcttc

SEQ ID NO: 5491163 - DNA, 25 bp, Homo sapien
taagatacttagacactcataattt

SEQ ID NO: 5491164 - DNA, 25 bp, Homo sapien
tctaatgagatgtgtatatgaagtg

SEQ ID NO: 5491165 - DNA, 25 bp, Homo sapien
tctctgatgtgtttaggttggttgt

SEQ ID NO: 5491166 - DNA, 25 bp, Homo sapien
tatgaagcataactaagatacttag

SEQ ID NO: 5491167 - DNA, 25 bp, Homo sapien
ctgccttcttagtctgtaagctcag

SEQ ID NO: 5491168 - DNA, 25 bp, Homo sapien
gaagtgaattgatttaagtatgtat

SEQ ID NO: 5491169 - DNA, 25 bp, Homo sapien
gtgtttaggttggttgtgtgtatac

SEQ ID NO: 5491170 - DNA, 25 bp, Homo sapien
tctgtagttgtaaagcttttctgcc

SEQ ID NO: 5491171 - DNA, 25 bp, Homo sapien
atgagatgtgtatatgaagtgaatt

SEQ ID NO: 5491172 - DNA, 25 bp, Homo sapien
tctcttaccccagtcagatcttatg

SEQ ID NO: 5491173 - DNA, 25 bp, Homo sapien
tcgtccaccgtagagtctcagtaaa

SEQ ID NO: 5491174 - DNA, 25 bp, Homo sapien
tttactgagactctacggtggacga

SEQ ID NO: 5491175 - DNA, 25 bp, Homo sapien
ttatcatggtaaatcttgtgactat

SEQ ID NO: 5491176 - DNA, 25 bp, Homo sapien
cttctcagcagtcccatgagcccct

SEQ ID NO: 5491177 - DNA, 25 bp, Homo sapien
caggtaacagaggctttttaaagga

SEQ ID NO: 5491178 - DNA, 25 bp, Homo sapien
ccttttgttcggatggagcctgaga

SEQ ID NO: 5491179 - DNA, 25 bp, Homo sapien
tgacctcctttcaggtaacagaggc

SEQ ID NO: 5491180 - DNA, 25 bp, Homo sapien
cttccttttgttcggatggagcctg

SEQ ID NO: 5491181 - DNA, 25 bp, Homo sapien
ctcctttcaggtaacagaggctttt

SEQ ID NO: 5491182 - DNA, 25 bp, Homo sapien
ccccacccagctctaactcagtgct

SEQ ID NO: 5491183 - DNA, 25 bp, Homo sapien
tccactgaccactccaccccgtctg

SEQ ID NO: 5491184 - DNA, 25 bp, Homo sapien
aacagaggctttttaaaggactgat

SEQ ID NO: 5491185 - DNA, 25 bp, Homo sapien
aaatcttgtgactattgggaaggag

SEQ ID NO: 5491186 - DNA, 25 bp, Homo sapien
ggtcagcctaagagaaaattcagtg

SEQ ID NO: 5491187 - DNA, 25 bp, Homo sapien
aaaatatatggtcagcctaagagaa

SEQ ID NO: 5491188 - DNA, 25 bp, Homo sapien
gccaccacacttaaatgctgccaca

SEQ ID NO: 5491189 - DNA, 25 bp, Homo sapien
agtgacttctatggagccaccacac

SEQ ID NO: 5491190 - DNA, 25 bp, Homo sapien
gaagaggtccctttctgtatggcac

SEQ ID NO: 5491191 - DNA, 25 bp, Homo sapien
cagcttacattgaggtctaaaacat

SEQ ID NO: 5491192 - DNA, 25 bp, Homo sapien
tgtatggcacttgtttggctctcac

SEQ ID NO: 5491193 - DNA, 25 bp, Homo sapien
agcaagccaagtggctcgtccatgc

SEQ ID NO: 5491194 - DNA, 25 bp, Homo sapien
ggctcgtccatgctatagtgacttc

SEQ ID NO: 5491195 - DNA, 25 bp, Homo sapien
tcatgtcatgatacagataagagaa

SEQ ID NO: 5491196 - DNA, 25 bp, Homo sapien
gttgaaaatagtctgcttcgtatcc

SEQ ID NO: 5491197 - DNA, 25 bp, Homo sapien
cagaagtgagacccaaaaagattat

SEQ ID NO: 5491198 - DNA, 25 bp, Homo sapien
aaatcacttacgaagcagctactgt

SEQ ID NO: 5491199 - DNA, 25 bp, Homo sapien
agggttcttcaacaaaagatagcgc

SEQ ID NO: 5491200 - DNA, 25 bp, Homo sapien
agatagcgcaagtatgaactccaat

SEQ ID NO: 5491201 - DNA, 25 bp, Homo sapien
tccaatttgcagaagtgagacccaa

SEQ ID NO: 5491202 - DNA, 25 bp, Homo sapien
ttcaacaaaagatagcgcaagtatg

SEQ ID NO: 5491203 - DNA, 25 bp, Homo sapien
agacccaaaaagattatggactatc

SEQ ID NO: 5491204 - DNA, 25 bp, Homo sapien
tgaactacaaccaaattagtctaga

SEQ ID NO: 5491205 - DNA, 25 bp, Homo sapien
cgcccagcccaaaaatcacttacga

SEQ ID NO: 5491206 - DNA, 25 bp, Homo sapien
gaactccaatttgcagaagtgagac

SEQ ID NO: 5491207 - DNA, 25 bp, Homo sapien
tttgcaactatcttgagggttcttc

SEQ ID NO: 5491208 - DNA, 25 bp, Homo sapien
tgcaggaattgactaggtgaaaaaa

SEQ ID NO: 5491209 - DNA, 25 bp, Homo sapien
cagtgaacaaaatcctaacagtagc

SEQ ID NO: 5491210 - DNA, 25 bp, Homo sapien
cctaacagtagctgactgccagggg

SEQ ID NO: 5491211 - DNA, 25 bp, Homo sapien
aggaacaaagcttaaacacactgat

SEQ ID NO: 5491212 - DNA, 25 bp, Homo sapien
ttccagacataggggtttgagttac

SEQ ID NO: 5491213 - DNA, 25 bp, Homo sapien
cccaaactagaaacagcccattgtt

SEQ ID NO: 5491214 - DNA, 25 bp, Homo sapien
gaatacatactgcataagtgagtcc

SEQ ID NO: 5491215 - DNA, 25 bp, Homo sapien
cagatgtaatacagatgttccagac

SEQ ID NO: 5491216 - DNA, 25 bp, Homo sapien
caggtgaaacgttaaaatgtggcat

SEQ ID NO: 5491217 - DNA, 25 bp, Homo sapien
aagtgagtccgttatatgaagttct

SEQ ID NO: 5491218 - DNA, 25 bp, Homo sapien
catgctgagtaaaaggaacttacag

SEQ ID NO: 5491219 - DNA, 25 bp, Homo sapien
cagagcatctctacctgggccagtc

SEQ ID NO: 5491220 - DNA, 25 bp, Homo sapien
aagcagagcctggagcatctccact

SEQ ID NO: 5491221 - DNA, 25 bp, Homo sapien
gggaagacggtaaccatctcctgca

SEQ ID NO: 5491222 - DNA, 25 bp, Homo sapien
actctgtgtcggagtctccggggaa

SEQ ID NO: 5491223 - DNA, 25 bp, Homo sapien
tctggctccatcgacagctcctcca

SEQ ID NO: 5491224 - DNA, 25 bp, Homo sapien
ccggagagaggtagctctcccatct

SEQ ID NO: 5491225 - DNA, 25 bp, Homo sapien
gccagcaactatgtgcagtggtacc

SEQ ID NO: 5491226 - DNA, 25 bp, Homo sapien
gactgacagctgagtcgctgggtag

SEQ ID NO: 5491227 - DNA, 25 bp, Homo sapien
cgctcactgcacaggttcttgggcc

SEQ ID NO: 5491228 - DNA, 25 bp, Homo sapien
cctgtctaagtgcttgaggtgactt

SEQ ID NO: 5491229 - DNA, 25 bp, Homo sapien
tgggccagtctcagcctgtctccac

SEQ ID NO: 5491230 - DNA, 25 bp, Homo sapien
taggaggactaataccgtcgggtat

SEQ ID NO: 5491231 - DNA, 25 bp, Homo sapien
atacccgacggtattagtcctccta

SEQ ID NO: 5491232 - DNA, 25 bp, Homo sapien
aatctccatttgaggaaggggaaga

SEQ ID NO: 5491233 - DNA, 25 bp, Homo sapien
tcatcaatggcggctctcctgaact

SEQ ID NO: 5491234 - DNA, 25 bp, Homo sapien
catgccttggcgtaaagtgaaaatc

SEQ ID NO: 5491235 - DNA, 25 bp, Homo sapien
cacagaagggtatgctttgtgtcac

SEQ ID NO: 5491236 - DNA, 25 bp, Homo sapien
aggcagtgactgtaaacaaacttgg

SEQ ID NO: 5491237 - DNA, 25 bp, Homo sapien
agggtgacagcctccccctgagaga

SEQ ID NO: 5491238 - DNA, 25 bp, Homo sapien
taatgtagcagtggaaacaaaattc

SEQ ID NO: 5491239 - DNA, 25 bp, Homo sapien
gagagagccagttgcgttcatgatt

SEQ ID NO: 5491240 - DNA, 25 bp, Homo sapien
ctcctgaactagggatgagtgtgaa

SEQ ID NO: 5491241 - DNA, 25 bp, Homo sapien
tttgtgtcaccaaatgggggtgcag

SEQ ID NO: 5491242 - DNA, 25 bp, Homo sapien
atttgagaacccagaattcagctcc

SEQ ID NO: 5491243 - DNA, 25 bp, Homo sapien
ccctgaacgccagccgcgcggcctg

SEQ ID NO: 5491244 - DNA, 25 bp, Homo sapien
caggccgcgcggctggcgttcaggg

SEQ ID NO: 5491245 - DNA, 25 bp, Homo sapien
tcgggccgtccacaggcgcggcggg

SEQ ID NO: 5491246 - DNA, 25 bp, Homo sapien
cccgccgcgcctgtggacggcccga

SEQ ID NO: 5491247 - DNA, 25 bp, Homo sapien
ctctattccttaagtgttcccatcc

SEQ ID NO: 5491248 - DNA, 25 bp, Homo sapien
agatccaatagtataatagaaagac

SEQ ID NO: 5491249 - DNA, 25 bp, Homo sapien
cacctcctgtgtttaaacgattctc

SEQ ID NO: 5491250 - DNA, 25 bp, Homo sapien
cctgactgacctcagacgaaccacc

SEQ ID NO: 5491251 - DNA, 25 bp, Homo sapien
catgaattctagagcttgtgttgtc

SEQ ID NO: 5491252 - DNA, 25 bp, Homo sapien
gcctgctcccagtttttacaagatg

SEQ ID NO: 5491253 - DNA, 25 bp, Homo sapien
tggggtaagtgtaagatttaatctc

SEQ ID NO: 5491254 - DNA, 25 bp, Homo sapien
ttgtataggtggatgaataaagatc

SEQ ID NO: 5491255 - DNA, 25 bp, Homo sapien
aacaaacaaacatgaattctagagc

SEQ ID NO: 5491256 - DNA, 25 bp, Homo sapien
tagaaagactattagtaagaatgcc

SEQ ID NO: 5491257 - DNA, 25 bp, Homo sapien
tgttgtcagtaaccagctgtggggt

SEQ ID NO: 5491258 - DNA, 25 bp, Homo sapien
tggggactgttctgtctggatctca

SEQ ID NO: 5491259 - DNA, 25 bp, Homo sapien
cacaccccctcgttgtaagacagtt

SEQ ID NO: 5491260 - DNA, 25 bp, Homo sapien
gttcctggctcaacgtctagatgac

SEQ ID NO: 5491261 - DNA, 25 bp, Homo sapien
tgaagttgcccctaaaaactgacca

SEQ ID NO: 5491262 - DNA, 25 bp, Homo sapien
gaccagtttcagacagtaatactac

SEQ ID NO: 5491263 - DNA, 25 bp, Homo sapien
ttgggtattaatcttggcaggtatt

SEQ ID NO: 5491264 - DNA, 25 bp, Homo sapien
agtattgatctgctctgacctctct

SEQ ID NO: 5491265 - DNA, 25 bp, Homo sapien
ctgaaaggttgcttgattgtgttcc

SEQ ID NO: 5491266 - DNA, 25 bp, Homo sapien
agtcatggcatttgattgggtatta

SEQ ID NO: 5491267 - DNA, 25 bp, Homo sapien
tcagaaacacactactgtcagagtt

SEQ ID NO: 5491268 - DNA, 25 bp, Homo sapien
cttggggcctggctatatcctgaaa

SEQ ID NO: 5491269 - DNA, 25 bp, Homo sapien
gaagtcagctcagaggccaaagatt

SEQ ID NO: 5491270 - DNA, 25 bp, Homo sapien
gaggccaaagatttccaggaacgtc

SEQ ID NO: 5491271 - DNA, 25 bp, Homo sapien
tctcccactccccccaaccactctc

SEQ ID NO: 5491272 - DNA, 25 bp, Homo sapien
gaggctgaccatgagtcccaagttg

SEQ ID NO: 5491273 - DNA, 25 bp, Homo sapien
gaacgtcgatgtttagggaagatca

SEQ ID NO: 5491274 - DNA, 25 bp, Homo sapien
ctgcccgagaatgatgctgtacact

SEQ ID NO: 5491275 - DNA, 25 bp, Homo sapien
actgtagcagtcaactcaagtcctc

SEQ ID NO: 5491276 - DNA, 25 bp, Homo sapien
ggccgttgcatggaagcaacaggtt

SEQ ID NO: 5491277 - DNA, 25 bp, Homo sapien
gagtcccaagttgtgtgggccgttg

SEQ ID NO: 5491278 - DNA, 25 bp, Homo sapien
acacacattggatagcaaaagctga

SEQ ID NO: 5491279 - DNA, 25 bp, Homo sapien
cctggctcacaagcaacagagaaga

SEQ ID NO: 5491280 - DNA, 25 bp, Homo sapien
taagccgccacgccctgcctataac

SEQ ID NO: 5491281 - DNA, 25 bp, Homo sapien
gtgaagaaggcaccatgcattgtgc

SEQ ID NO: 5491282 - DNA, 25 bp, Homo sapien
atacactgtaaagaggcaatatgtc

SEQ ID NO: 5491283 - DNA, 25 bp, Homo sapien
tgctctgtagtggtgactggagaga

SEQ ID NO: 5491284 - DNA, 25 bp, Homo sapien
aggtgtggtatatggtgctaccctg

SEQ ID NO: 5491285 - DNA, 25 bp, Homo sapien
agaaacttagctggatagtcagttc

SEQ ID NO: 5491286 - DNA, 25 bp, Homo sapien
tggcaagcacttatcatacactgta

SEQ ID NO: 5491287 - DNA, 25 bp, Homo sapien
atctgtagtcaggatttgaagaagg

SEQ ID NO: 5491288 - DNA, 25 bp, Homo sapien
gcaaggtccctgcttaaagacagtt

SEQ ID NO: 5491289 - DNA, 25 bp, Homo sapien
gggagaaggtatttgcttgtgaaga

SEQ ID NO: 5491290 - DNA, 25 bp, Homo sapien
atgcattgtgctctgtagtggtgac

SEQ ID NO: 5491291 - DNA, 25 bp, Homo sapien
atcttgaagggcgccggggtcttcg

SEQ ID NO: 5491292 - DNA, 25 bp, Homo sapien
cgaagaccccggcgcccttcaagat

SEQ ID NO: 5491293 - DNA, 25 bp, Homo sapien
gaactataggcagataccatcacgc

SEQ ID NO: 5491294 - DNA, 25 bp, Homo sapien
cactaaagggaacattaaaagacat

SEQ ID NO: 5491295 - DNA, 25 bp, Homo sapien
atagatggactgcaaaagcaaacgt

SEQ ID NO: 5491296 - DNA, 25 bp, Homo sapien
ctggaactataggcagataccatca

SEQ ID NO: 5491297 - DNA, 25 bp, Homo sapien
gcagataccatcacgcccagataat

SEQ ID NO: 5491298 - DNA, 25 bp, Homo sapien
atgcccagccaacccaattaatttc

SEQ ID NO: 5491299 - DNA, 25 bp, Homo sapien
caggtcttctttgatgcgttttaat

SEQ ID NO: 5491300 - DNA, 25 bp, Homo sapien
caatagatggactgcaaaagcaaac

SEQ ID NO: 5491301 - DNA, 25 bp, Homo sapien
catgttacttgggatggtcttgaac

SEQ ID NO: 5491302 - DNA, 25 bp, Homo sapien
ccactacactaaagggaacattaaa

SEQ ID NO: 5491303 - DNA, 25 bp, Homo sapien
aattaatttcgatgtaagagtactt

SEQ ID NO: 5491304 - DNA, 25 bp, Homo sapien
gtcaccggccagaacaggacaacta

SEQ ID NO: 5491305 - DNA, 25 bp, Homo sapien
tagttgtcctgttctggccggtgac

SEQ ID NO: 5491306 - DNA, 25 bp, Homo sapien
agcctctagggaagacattatgtct

SEQ ID NO: 5491307 - DNA, 25 bp, Homo sapien
ttggcagtgatcattactgagtgtt

SEQ ID NO: 5491308 - DNA, 25 bp, Homo sapien
gcactgtgtgcaattgttaatctga

SEQ ID NO: 5491309 - DNA, 25 bp, Homo sapien
tacacagctcaagtggcagaaatgg

SEQ ID NO: 5491310 - DNA, 25 bp, Homo sapien
tatctaggtgccagaaaagatagaa

SEQ ID NO: 5491311 - DNA, 25 bp, Homo sapien
taatcaagattttccagggcttaaa

SEQ ID NO: 5491312 - DNA, 25 bp, Homo sapien
gtccaaagtacacagctcaagtggc

SEQ ID NO: 5491313 - DNA, 25 bp, Homo sapien
atctgagaaagatacaataaattca

SEQ ID NO: 5491314 - DNA, 25 bp, Homo sapien
tttgcaatactgaaatgtcctcttt

SEQ ID NO: 5491315 - DNA, 25 bp, Homo sapien
taatcctcacaagcctctagggaag

SEQ ID NO: 5491316 - DNA, 25 bp, Homo sapien
ttcaaatgggaaagattagattaat

SEQ ID NO: 5491317 - DNA, 25 bp, Homo sapien
agaagtagcctgcgttgactcgtca

SEQ ID NO: 5491318 - DNA, 25 bp, Homo sapien
cttcccacctaacaggggtggcagc

SEQ ID NO: 5491319 - DNA, 25 bp, Homo sapien
ttagattttaaggctcaagaataat

SEQ ID NO: 5491320 - DNA, 25 bp, Homo sapien
ggtgatggatcctaagcaggtctga

SEQ ID NO: 5491321 - DNA, 25 bp, Homo sapien
cttctgagcccaccagtgtggtagc

SEQ ID NO: 5491322 - DNA, 25 bp, Homo sapien
tacaggcatactcaaggtttcaccc

SEQ ID NO: 5491323 - DNA, 25 bp, Homo sapien
gagacaggcataggataaacattcc

SEQ ID NO: 5491324 - DNA, 25 bp, Homo sapien
agcaggtctgaaacgtataaaggca

SEQ ID NO: 5491325 - DNA, 25 bp, Homo sapien
atgaacctgtgaaactagacaagtt

SEQ ID NO: 5491326 - DNA, 25 bp, Homo sapien
tcatttagatcaggtacaggcatac

SEQ ID NO: 5491327 - DNA, 25 bp, Homo sapien
tgaaacgtataaaggcaaatcccat

SEQ ID NO: 5491328 - DNA, 25 bp, Homo sapien
atctgccaatctgcaacagagcaag

SEQ ID NO: 5491329 - DNA, 25 bp, Homo sapien
cttgccggctcccgctcagtactgg

SEQ ID NO: 5491330 - DNA, 25 bp, Homo sapien
gccctccctgttgccagatgggccc

SEQ ID NO: 5491331 - DNA, 25 bp, Homo sapien
ctccaagaggttcctccacacttcc

SEQ ID NO: 5491332 - DNA, 25 bp, Homo sapien
tctggcaagcatagctggcttctcc

SEQ ID NO: 5491333 - DNA, 25 bp, Homo sapien
gctgtgctatagaacaggctcagca

SEQ ID NO: 5491334 - DNA, 25 bp, Homo sapien
tggtcacggtcagtgctgtgctata

SEQ ID NO: 5491335 - DNA, 25 bp, Homo sapien
ggctgagttctggcaagcatagctg

SEQ ID NO: 5491336 - DNA, 25 bp, Homo sapien
ggaggcggcatctgccaatctgcaa

SEQ ID NO: 5491337 - DNA, 25 bp, Homo sapien
agctggcttctccaagaggttcctc

SEQ ID NO: 5491338 - DNA, 25 bp, Homo sapien
cagtgctgtgctatagaacaggctc

SEQ ID NO: 5491339 - DNA, 25 bp, Homo sapien
tgcatgaggacaatgattagaaggg

SEQ ID NO: 5491340 - DNA, 25 bp, Homo sapien
gcttgggttgggagtgctttttata

SEQ ID NO: 5491341 - DNA, 25 bp, Homo sapien
ttaattaggaccaagggattctcag

SEQ ID NO: 5491342 - DNA, 25 bp, Homo sapien
acattctgtacgtaggtctggaggg

SEQ ID NO: 5491343 - DNA, 25 bp, Homo sapien
atgattagaagggaatatatggaca

SEQ ID NO: 5491344 - DNA, 25 bp, Homo sapien
acataaaccacctagcgaatcttgc

SEQ ID NO: 5491345 - DNA, 25 bp, Homo sapien
caagtattgcagaggctgtttgtcc

SEQ ID NO: 5491346 - DNA, 25 bp, Homo sapien
gtcaagagataaggtgaaacccatt

SEQ ID NO: 5491347 - DNA, 25 bp, Homo sapien
agtgtgaagaatgtagcagcaacat

SEQ ID NO: 5491348 - DNA, 25 bp, Homo sapien
gcaaatctgagtgtggaaaagaatt

SEQ ID NO: 5491349 - DNA, 25 bp, Homo sapien
gatgtaatgttaggagaaagagtat

SEQ ID NO: 5491350 - DNA, 25 bp, Homo sapien
taagtaccatatttgatgcgcaatt

SEQ ID NO: 5491351 - DNA, 25 bp, Homo sapien
acacaaactatcctgctaggcagtt

SEQ ID NO: 5491352 - DNA, 25 bp, Homo sapien
actatgctaggcagtgagagaaata

SEQ ID NO: 5491353 - DNA, 25 bp, Homo sapien
caggcagagtaacacaaactatcct

SEQ ID NO: 5491354 - DNA, 25 bp, Homo sapien
accaccgcatctggctcatttttat

SEQ ID NO: 5491355 - DNA, 25 bp, Homo sapien
tatcacggtcatggatacaggcaga

SEQ ID NO: 5491356 - DNA, 25 bp, Homo sapien
tcttatcacggtcatggatacaggc

SEQ ID NO: 5491357 - DNA, 25 bp, Homo sapien
atattccaactgagtgaaaggcact

SEQ ID NO: 5491358 - DNA, 25 bp, Homo sapien
ttggaacagatgggagatttattca

SEQ ID NO: 5491359 - DNA, 25 bp, Homo sapien
actgagtgaaaggcactatgctagg

SEQ ID NO: 5491360 - DNA, 25 bp, Homo sapien
acaaatgaaaataagactcaacctc

SEQ ID NO: 5491361 - DNA, 25 bp, Homo sapien
aaaaataacatagcaacacggtttc

SEQ ID NO: 5491362 - DNA, 25 bp, Homo sapien
ttgagcaatacttttaggagggtaa

SEQ ID NO: 5491363 - DNA, 25 bp, Homo sapien
catttgtcaaagatggaaaagtttt

SEQ ID NO: 5491364 - DNA, 25 bp, Homo sapien
acacggtttctgttgaatgcctgcc

SEQ ID NO: 5491365 - DNA, 25 bp, Homo sapien
gatatgacataagggtttcaatccc

SEQ ID NO: 5491366 - DNA, 25 bp, Homo sapien
gtggctagtgttacttgttggaaaa

SEQ ID NO: 5491367 - DNA, 25 bp, Homo sapien
gtaacagagtggtttatgtgaattc

SEQ ID NO: 5491368 - DNA, 25 bp, Homo sapien
ggtgccgaagtgagttacacttttg

SEQ ID NO: 5491369 - DNA, 25 bp, Homo sapien
tataatggcttcctgggtaagaaag

SEQ ID NO: 5491370 - DNA, 25 bp, Homo sapien
aaagcacaaaatgaagtggctagtg

SEQ ID NO: 5491371 - DNA, 25 bp, Homo sapien
acacttttgccaaccaggccagaag

SEQ ID NO: 5491372 - DNA, 25 bp, Homo sapien
agaatcacactaaaaggaacacatc

SEQ ID NO: 5491373 - DNA, 25 bp, Homo sapien
gaaatgaggacctggatcatccttt

SEQ ID NO: 5491374 - DNA, 25 bp, Homo sapien
tttggttttcagagcattgggactt

SEQ ID NO: 5491375 - DNA, 25 bp, Homo sapien
ccctagtagggaaccatgtcataaa

SEQ ID NO: 5491376 - DNA, 25 bp, Homo sapien
tgcacccagcctgtaggtccacatt

SEQ ID NO: 5491377 - DNA, 25 bp, Homo sapien
ctgcaacaaagaatcacactaaaag

SEQ ID NO: 5491378 - DNA, 25 bp, Homo sapien
tggctcttaggaagtagtcagcaaa

SEQ ID NO: 5491379 - DNA, 25 bp, Homo sapien
ctggacaaaaaaggtcagaactgta

SEQ ID NO: 5491380 - DNA, 25 bp, Homo sapien
aggtttggtttcaaatgggttatga

SEQ ID NO: 5491381 - DNA, 25 bp, Homo sapien
caggagccacgtctcagcaattcca

SEQ ID NO: 5491382 - DNA, 25 bp, Homo sapien
agcattgggactttggaaatgagga

SEQ ID NO: 5491383 - DNA, 25 bp, Homo sapien
aagctcctagggacctgtagctcat

SEQ ID NO: 5491384 - DNA, 25 bp, Homo sapien
gaggaactctggctttggacgtctc

SEQ ID NO: 5491385 - DNA, 25 bp, Homo sapien
catcttgcacaacgcggtccacgaa

SEQ ID NO: 5491386 - DNA, 25 bp, Homo sapien
acatcactctcagcgctgtggggct

SEQ ID NO: 5491387 - DNA, 25 bp, Homo sapien
gccctggctaagcctgtgaggttcc

SEQ ID NO: 5491388 - DNA, 25 bp, Homo sapien
gtggggctcacggttgttgtccact

SEQ ID NO: 5491389 - DNA, 25 bp, Homo sapien
tgtgaagtgttgcgcatactgccat

SEQ ID NO: 5491390 - DNA, 25 bp, Homo sapien
atgatgtagtcagcaaggcaatcga

SEQ ID NO: 5491391 - DNA, 25 bp, Homo sapien
agggtatttattgtggaggaactct

SEQ ID NO: 5491392 - DNA, 25 bp, Homo sapien
tttctagaagggtcttgagtctggt

SEQ ID NO: 5491393 - DNA, 25 bp, Homo sapien
tcaaacaaaaagcgagtcacatcac

SEQ ID NO: 5491394 - DNA, 25 bp, Homo sapien
agagccaggttgtccaaaaggaaaa

SEQ ID NO: 5491395 - DNA, 25 bp, Homo sapien
actttgggatgtcactgagcagact

SEQ ID NO: 5491396 - DNA, 25 bp, Homo sapien
tcaggccagctgatgctttcctcac

SEQ ID NO: 5491397 - DNA, 25 bp, Homo sapien
gttgcgctcagatcagccctgcact

SEQ ID NO: 5491398 - DNA, 25 bp, Homo sapien
gaaacgttaggttgcgctcagatca

SEQ ID NO: 5491399 - DNA, 25 bp, Homo sapien
ttctctgcacatgaagcggaagatg

SEQ ID NO: 5491400 - DNA, 25 bp, Homo sapien
gacttcccgagtctccatggcttcc

SEQ ID NO: 5491401 - DNA, 25 bp, Homo sapien
agaaaagcagtcacccttggcagct

SEQ ID NO: 5491402 - DNA, 25 bp, Homo sapien
ggaagctcgcggcatcgtgttttcc

SEQ ID NO: 5491403 - DNA, 25 bp, Homo sapien
atcataaacaagcagtggctcaggc

SEQ ID NO: 5491404 - DNA, 25 bp, Homo sapien
ccacgtgctcccacagagccaggtt

SEQ ID NO: 5491405 - DNA, 25 bp, Homo sapien
tgtgactcttagacagatgccccat

SEQ ID NO: 5491406 - DNA, 25 bp, Homo sapien
tgatcaatgggaagtttagtgcatg

SEQ ID NO: 5491407 - DNA, 25 bp, Homo sapien
tccataccaatgcccagatacgccc

SEQ ID NO: 5491408 - DNA, 25 bp, Homo sapien
tctagttccatgggtgagctgagga

SEQ ID NO: 5491409 - DNA, 25 bp, Homo sapien
agttcagctggcaaagatgcatttc

SEQ ID NO: 5491410 - DNA, 25 bp, Homo sapien
tatttgaacgcactaggagcatcca

SEQ ID NO: 5491411 - DNA, 25 bp, Homo sapien
cagatacgcccaatggccaatgctt

SEQ ID NO: 5491412 - DNA, 25 bp, Homo sapien
ttagtgcatgacaagttcagctggc

SEQ ID NO: 5491413 - DNA, 25 bp, Homo sapien
tgtgaaagtcaaacatccaaatggt

SEQ ID NO: 5491414 - DNA, 25 bp, Homo sapien
gagcatccacacggacctggtcctt

SEQ ID NO: 5491415 - DNA, 25 bp, Homo sapien
cagttttggtatacatgggtgaggg

SEQ ID NO: 5491416 - DNA, 25 bp, Homo sapien
agagtatcagtgtccaaccggtaaa

SEQ ID NO: 5491417 - DNA, 25 bp, Homo sapien
acaatgaaggggtttaattctgtaa

SEQ ID NO: 5491418 - DNA, 25 bp, Homo sapien
tccaggatcagaacactaaagtact

SEQ ID NO: 5491419 - DNA, 25 bp, Homo sapien
ggaatttgacagagtatcagtgtcc

SEQ ID NO: 5491420 - DNA, 25 bp, Homo sapien
ctaaatttcagcagactaaagagtc

SEQ ID NO: 5491421 - DNA, 25 bp, Homo sapien
agatggtccacaaataaagcttcac

SEQ ID NO: 5491422 - DNA, 25 bp, Homo sapien
caatgaaataagatcccctgaataa

SEQ ID NO: 5491423 - DNA, 25 bp, Homo sapien
tgagtttagaatgagcaaaggttta

SEQ ID NO: 5491424 - DNA, 25 bp, Homo sapien
cccctgtaaattctgtgaggcttaa

SEQ ID NO: 5491425 - DNA, 25 bp, Homo sapien
aatggacaacctagataacagataa

SEQ ID NO: 5491426 - DNA, 25 bp, Homo sapien
tccaagagtttaataagcacagtaa

SEQ ID NO: 5491427 - DNA, 25 bp, Homo sapien
tgtttgagctgagttccatatggac

SEQ ID NO: 5491428 - DNA, 25 bp, Homo sapien
gaagtgtctattcacaggccactgc

SEQ ID NO: 5491429 - DNA, 25 bp, Homo sapien
cagggtatcatctgtgtgacctccc

SEQ ID NO: 5491430 - DNA, 25 bp, Homo sapien
aatgaatcaaggaaagaatcttaac

SEQ ID NO: 5491431 - DNA, 25 bp, Homo sapien
atgtgacacaagctgagcctatcac

SEQ ID NO: 5491432 - DNA, 25 bp, Homo sapien
aaaaatgcatgaaaactgctgtatc

SEQ ID NO: 5491433 - DNA, 25 bp, Homo sapien
cccgggctcaaagtaattctgcctc

SEQ ID NO: 5491434 - DNA, 25 bp, Homo sapien
gtttacagcagttccctcagggtat

SEQ ID NO: 5491435 - DNA, 25 bp, Homo sapien
aggccactgcgaatattcgatcctc

SEQ ID NO: 5491436 - DNA, 25 bp, Homo sapien
agctgagcctatcacgcacccctta

SEQ ID NO: 5491437 - DNA, 25 bp, Homo sapien
gtgacctccctgggcatgtgacaca

SEQ ID NO: 5491438 - DNA, 25 bp, Homo sapien
ggccgtcatgcaggatctgatcagc

SEQ ID NO: 5491439 - DNA, 25 bp, Homo sapien
ctccatcacccactgcaggaagagc

SEQ ID NO: 5491440 - DNA, 25 bp, Homo sapien
gcagcgcaagcgtaagctcaagcgc

SEQ ID NO: 5491441 - DNA, 25 bp, Homo sapien
ggaagagcctggagtctcccttgtc

SEQ ID NO: 5491442 - DNA, 25 bp, Homo sapien
aagcgcaaaaaagaccctccactct

SEQ ID NO: 5491443 - DNA, 25 bp, Homo sapien
aggtgcctcatagccaatcggactc

SEQ ID NO: 5491444 - DNA, 25 bp, Homo sapien
cctgttcagcaccctggctgcctgc

SEQ ID NO: 5491445 - DNA, 25 bp, Homo sapien
accgaaggagagttctttgccaagg

SEQ ID NO: 5491446 - DNA, 25 bp, Homo sapien
catcatggagttccgtgtcgcagag

SEQ ID NO: 5491447 - DNA, 25 bp, Homo sapien
gcgggaatcgtagctaccatctgct

SEQ ID NO: 5491448 - DNA, 25 bp, Homo sapien
ctttgccaaggatctgtcacaggac

SEQ ID NO: 5491449 - DNA, 25 bp, Homo sapien
aggatggacaggcaatttccatccc

SEQ ID NO: 5491450 - DNA, 25 bp, Homo sapien
tccactggtactatccactggattt

SEQ ID NO: 5491451 - DNA, 25 bp, Homo sapien
ttgtatttagatagagtttaagtgc

SEQ ID NO: 5491452 - DNA, 25 bp, Homo sapien
attcatttgccccttcagcatggat

SEQ ID NO: 5491453 - DNA, 25 bp, Homo sapien
tcatatctgaggaataaaggatgga

SEQ ID NO: 5491454 - DNA, 25 bp, Homo sapien
ctaatattgtactaaaaatgaggat

SEQ ID NO: 5491455 - DNA, 25 bp, Homo sapien
aagtaatctgctgatttaaggttgt

SEQ ID NO: 5491456 - DNA, 25 bp, Homo sapien
ttgatgttccataattctagctatt

SEQ ID NO: 5491457 - DNA, 25 bp, Homo sapien
agatagagtttaagtgcaaagtaat

SEQ ID NO: 5491458 - DNA, 25 bp, Homo sapien
cataggatgtgatgtctaatattgt

SEQ ID NO: 5491459 - DNA, 25 bp, Homo sapien
tgaggatgcttatgctatactccac

SEQ ID NO: 5491460 - DNA, 25 bp, Homo sapien
gtcatggacatctcggtacgggaac

SEQ ID NO: 5491461 - DNA, 25 bp, Homo sapien
gttcccgtaccgagatgtccatgac

SEQ ID NO: 5491462 - DNA, 25 bp, Homo sapien
ggcttgtgacaggtttgtaataagt

SEQ ID NO: 5491463 - DNA, 25 bp, Homo sapien
gaggagcacctagcataagacctgg

SEQ ID NO: 5491464 - DNA, 25 bp, Homo sapien
gacacctctacaggtacagccgacc

SEQ ID NO: 5491465 - DNA, 25 bp, Homo sapien
aacccatatagtggctaggtggggg

SEQ ID NO: 5491466 - DNA, 25 bp, Homo sapien
tgcacatgctgatccctcctcctgg

SEQ ID NO: 5491467 - DNA, 25 bp, Homo sapien
aggggcagcttgcaagcctcccttt

SEQ ID NO: 5491468 - DNA, 25 bp, Homo sapien
caggggacccttataggcctctgtc

SEQ ID NO: 5491469 - DNA, 25 bp, Homo sapien
tacagccgaccatgccctacctcca

SEQ ID NO: 5491470 - DNA, 25 bp, Homo sapien
ctgcttgaccatctggtgaaggctt

SEQ ID NO: 5491471 - DNA, 25 bp, Homo sapien
gctcaagaacctgttgagaggagca

SEQ ID NO: 5491472 - DNA, 25 bp, Homo sapien
gaggaggtggtcaaaatatctaaca

SEQ ID NO: 5491473 - DNA, 25 bp, Homo sapien
ggcacgcgcctgtaatcccggctac

SEQ ID NO: 5491474 - DNA, 25 bp, Homo sapien
tgaaaaatctcatcccaagtccttt

SEQ ID NO: 5491475 - DNA, 25 bp, Homo sapien
tggccaacatgacaaaaccccatct

SEQ ID NO: 5491476 - DNA, 25 bp, Homo sapien
agctcaagcatgtaatcccagcact

SEQ ID NO: 5491477 - DNA, 25 bp, Homo sapien
ttagccaggtatggtagctcaagca

SEQ ID NO: 5491478 - DNA, 25 bp, Homo sapien
ccagcccagccaacatggcaaaacc

SEQ ID NO: 5491479 - DNA, 25 bp, Homo sapien
gaggcaagtggatcacctgaaatca

SEQ ID NO: 5491480 - DNA, 25 bp, Homo sapien
acatgctggccacacaaccagaggg

SEQ ID NO: 5491481 - DNA, 25 bp, Homo sapien
cctttggctagaaaaacatgctggc

SEQ ID NO: 5491482 - DNA, 25 bp, Homo sapien
aattctagcactttgggaggtcgag

SEQ ID NO: 5491483 - DNA, 25 bp, Homo sapien
tgagccaagattgtgacagtacact

SEQ ID NO: 5491484 - DNA, 25 bp, Homo sapien
aattgcaagagattatgtcattgtt

SEQ ID NO: 5491485 - DNA, 25 bp, Homo sapien
tgattctacagtaggtctgggtggc

SEQ ID NO: 5491486 - DNA, 25 bp, Homo sapien
attgcttgagctgagttagtagacg

SEQ ID NO: 5491487 - DNA, 25 bp, Homo sapien
aatggtaggagcacctttcagcagt

SEQ ID NO: 5491488 - DNA, 25 bp, Homo sapien
atataagctccgtccagcaaggatt

SEQ ID NO: 5491489 - DNA, 25 bp, Homo sapien
agctgagttagtagacgctcgagtc

SEQ ID NO: 5491490 - DNA, 25 bp, Homo sapien
gacgctcgagtcatagattaggaat

SEQ ID NO: 5491491 - DNA, 25 bp, Homo sapien
tccagcaactccagacaactgatac

SEQ ID NO: 5491492 - DNA, 25 bp, Homo sapien
gggtagatatgaggtgctcctgtct

SEQ ID NO: 5491493 - DNA, 25 bp, Homo sapien
tttgtgaagggcctagattgcttga

SEQ ID NO: 5491494 - DNA, 25 bp, Homo sapien
ctgatacatgttagaagacagcaca

SEQ ID NO: 5491495 - DNA, 25 bp, Homo sapien
tgcccttatcagaagaggaagagac

SEQ ID NO: 5491496 - DNA, 25 bp, Homo sapien
gagagaatggaatcaagtgacactt

SEQ ID NO: 5491497 - DNA, 25 bp, Homo sapien
aggatgggaccctcatgatgaggtt

SEQ ID NO: 5491498 - DNA, 25 bp, Homo sapien
accaggaaggaagcaaccttcaacg

SEQ ID NO: 5491499 - DNA, 25 bp, Homo sapien
ggtctcaccagagcaaacgaccagg

SEQ ID NO: 5491500 - DNA, 25 bp, Homo sapien
caggttggtgtagctagataaagat

SEQ ID NO: 5491501 - DNA, 25 bp, Homo sapien
cactttgcaggtcatttggtctcac

SEQ ID NO: 5491502 - DNA, 25 bp, Homo sapien
tcatgatgaggttagtgcccttatc

SEQ ID NO: 5491503 - DNA, 25 bp, Homo sapien
cagcagcctgaactgagtcagacat

SEQ ID NO: 5491504 - DNA, 25 bp, Homo sapien
tagataaagattgcctgggatggaa

SEQ ID NO: 5491505 - DNA, 25 bp, Homo sapien
atacctacagtaccagtccccattc

SEQ ID NO: 5491506 - DNA, 25 bp, Homo sapien
gaaagcaagcagactgttgccccat

SEQ ID NO: 5491507 - DNA, 25 bp, Homo sapien
agcccctagaatctgaaaggccggg

SEQ ID NO: 5491508 - DNA, 25 bp, Homo sapien
tcagatgagtgttgggtgaatctgt

SEQ ID NO: 5491509 - DNA, 25 bp, Homo sapien
ctaacccaaccatggtccagcagtt

SEQ ID NO: 5491510 - DNA, 25 bp, Homo sapien
gtgaatctgtcatctggtaccctcc

SEQ ID NO: 5491511 - DNA, 25 bp, Homo sapien
atcttagtggaagatggtacgtcat

SEQ ID NO: 5491512 - DNA, 25 bp, Homo sapien
ctccatggaaacagcccctagaatc

SEQ ID NO: 5491513 - DNA, 25 bp, Homo sapien
tgaaaggccgggataaacctaatca

SEQ ID NO: 5491514 - DNA, 25 bp, Homo sapien
ggtacgtcatgctcagtgtccagtt

SEQ ID NO: 5491515 - DNA, 25 bp, Homo sapien
attctgtagaagttacgtctggctc

SEQ ID NO: 5491516 - DNA, 25 bp, Homo sapien
acgtctggctctaggttaacccttc

SEQ ID NO: 5491517 - DNA, 25 bp, Homo sapien
ggtgagtagtggcatgattactgat

SEQ ID NO: 5491518 - DNA, 25 bp, Homo sapien
tggcgaacaacactggtgagtagtg

SEQ ID NO: 5491519 - DNA, 25 bp, Homo sapien
agagggcgtacacttcagcttcttg

SEQ ID NO: 5491520 - DNA, 25 bp, Homo sapien
gctccaggcctgtcattcaacgtga

SEQ ID NO: 5491521 - DNA, 25 bp, Homo sapien
ttcaacgtgaactagaaatgggaac

SEQ ID NO: 5491522 - DNA, 25 bp, Homo sapien
ggaaaatcaatcggtagaggctgat

SEQ ID NO: 5491523 - DNA, 25 bp, Homo sapien
attactgatggcaccctggatggaa

SEQ ID NO: 5491524 - DNA, 25 bp, Homo sapien
ttcataagcgacactgcagcctatt

SEQ ID NO: 5491525 - DNA, 25 bp, Homo sapien
tctttgagctgttaggcatccgggt

SEQ ID NO: 5491526 - DNA, 25 bp, Homo sapien
ttcttgagaaggataacaaggtagg

SEQ ID NO: 5491527 - DNA, 25 bp, Homo sapien
agaggctgatgctagagtcagcact

SEQ ID NO: 5491528 - DNA, 25 bp, Homo sapien
aagggggttgaaaatcaatctccag

SEQ ID NO: 5491529 - DNA, 25 bp, Homo sapien
caatgagcaaggagcttccagctcc

SEQ ID NO: 5491530 - DNA, 25 bp, Homo sapien
ctgctgcatatgaaaaaggtcacca

SEQ ID NO: 5491531 - DNA, 25 bp, Homo sapien
aagaaacaacacacagaaaagtcca

SEQ ID NO: 5491532 - DNA, 25 bp, Homo sapien
cttactgaggcatatgcagccagga

SEQ ID NO: 5491533 - DNA, 25 bp, Homo sapien
ggaggactcaatgtatatgggaacc

SEQ ID NO: 5491534 - DNA, 25 bp, Homo sapien
tttcaaggtagtatgctaggaatgc

SEQ ID NO: 5491535 - DNA, 25 bp, Homo sapien
tcccaccaaaggaggactcaatgta

SEQ ID NO: 5491536 - DNA, 25 bp, Homo sapien
ctacaagagcctatcctgaaggatc

SEQ ID NO: 5491537 - DNA, 25 bp, Homo sapien
gctttccacagtcccctaggccttc

SEQ ID NO: 5491538 - DNA, 25 bp, Homo sapien
tgcagccaggattcaactgagacca

SEQ ID NO: 5491539 - DNA, 25 bp, Homo sapien
acttcagaacccagaataccagagc

SEQ ID NO: 5491540 - DNA, 25 bp, Homo sapien
taagtgtgacatttcagttcctaaa

SEQ ID NO: 5491541 - DNA, 25 bp, Homo sapien
ccagaacagttctaatcaggccctc

SEQ ID NO: 5491542 - DNA, 25 bp, Homo sapien
tcagaatgcttcagttcagtaagtc

SEQ ID NO: 5491543 - DNA, 25 bp, Homo sapien
gaataccagagcacactctcgagtc

SEQ ID NO: 5491544 - DNA, 25 bp, Homo sapien
tgctcaaagttgtaggtctatgtat

SEQ ID NO: 5491545 - DNA, 25 bp, Homo sapien
acccagaataccagagcaacactct

SEQ ID NO: 5491546 - DNA, 25 bp, Homo sapien
ctcgagtcatacttgttgaacccag

SEQ ID NO: 5491547 - DNA, 25 bp, Homo sapien
tgttgaacccagaataccacgtata

SEQ ID NO: 5491548 - DNA, 25 bp, Homo sapien
accacgtataaccagacttcagaac

SEQ ID NO: 5491549 - DNA, 25 bp, Homo sapien
ccagagcacactctcgagtcatact

SEQ ID NO: 5491550 - DNA, 25 bp, Homo sapien
cgtgccattgcaccttagcctggac

SEQ ID NO: 5491551 - DNA, 25 bp, Homo sapien
ttcacagtgttggtcactctggtct

SEQ ID NO: 5491552 - DNA, 25 bp, Homo sapien
ctgcaacctcagcttccccagtagc

SEQ ID NO: 5491553 - DNA, 25 bp, Homo sapien
ctgtaatctctgcttcccgggttca

SEQ ID NO: 5491554 - DNA, 25 bp, Homo sapien
ctgcaccaggccaaaattagttttt

SEQ ID NO: 5491555 - DNA, 25 bp, Homo sapien
tgcctcagcctccgagtgaggtggg

SEQ ID NO: 5491556 - DNA, 25 bp, Homo sapien
ttgacaaagtgttgctctgttgccc

SEQ ID NO: 5491557 - DNA, 25 bp, Homo sapien
ggcgtgagccatcgtgccattgcac

SEQ ID NO: 5491558 - DNA, 25 bp, Homo sapien
gtgctgggattatagcgcaagtcac

SEQ ID NO: 5491559 - DNA, 25 bp, Homo sapien
ttatagcgcaagtcactgcaccagg

SEQ ID NO: 5491560 - DNA, 25 bp, Homo sapien
gcctaaagatgtttatgctgtagac

SEQ ID NO: 5491561 - DNA, 25 bp, Homo sapien
cagcctcgtcttctgcctggactcc

SEQ ID NO: 5491562 - DNA, 25 bp, Homo sapien
gtctgctgattgacagtaatagtca

SEQ ID NO: 5491563 - DNA, 25 bp, Homo sapien
agaagtcactgatcagacacactag

SEQ ID NO: 5491564 - DNA, 25 bp, Homo sapien
tttatatatcaccagcacaggggcc

SEQ ID NO: 5491565 - DNA, 25 bp, Homo sapien
aagtaccactgctgtctgctgattg

SEQ ID NO: 5491566 - DNA, 25 bp, Homo sapien
gtcagctcataggaggcctcagagc

SEQ ID NO: 5491567 - DNA, 25 bp, Homo sapien
gtaatagtcagcctcgtcttctgcc

SEQ ID NO: 5491568 - DNA, 25 bp, Homo sapien
ccctgagggcctctcactgtcttta

SEQ ID NO: 5491569 - DNA, 25 bp, Homo sapien
ggactccactgatggtcaacgtgac

SEQ ID NO: 5491570 - DNA, 25 bp, Homo sapien
tgatggtcaacgtgactgttgtccc

SEQ ID NO: 5491571 - DNA, 25 bp, Homo sapien
tgcctggactccactgatggtcaac

SEQ ID NO: 5491572 - DNA, 25 bp, Homo sapien
gactttgaaaccagcccagaactcc

SEQ ID NO: 5491573 - DNA, 25 bp, Homo sapien
gcccagcatctgggactttgaaacc

SEQ ID NO: 5491574 - DNA, 25 bp, Homo sapien
ctccaacaggaaaccccagtccaga

SEQ ID NO: 5491575 - DNA, 25 bp, Homo sapien
ttttgggtgtcggttccacttgctc

SEQ ID NO: 5491576 - DNA, 25 bp, Homo sapien
atgacacagtaagagggattttttt

SEQ ID NO: 5491577 - DNA, 25 bp, Homo sapien
cagggcaccttcaattagttagtcc

SEQ ID NO: 5491578 - DNA, 25 bp, Homo sapien
tccacttgctctgatacacgctatt

SEQ ID NO: 5491579 - DNA, 25 bp, Homo sapien
tcaacttctcagatggggaaccaag

SEQ ID NO: 5491580 - DNA, 25 bp, Homo sapien
aataataaagagaatccaagctccc

SEQ ID NO: 5491581 - DNA, 25 bp, Homo sapien
catgcaggcattgcactccagggca

SEQ ID NO: 5491582 - DNA, 25 bp, Homo sapien
cttatgatgacacagtaagagggat

SEQ ID NO: 5491583 - DNA, 25 bp, Homo sapien
tatgggacccaagaaatgtataatc

SEQ ID NO: 5491584 - DNA, 25 bp, Homo sapien
tactgtgtgctacccaacacccacc

SEQ ID NO: 5491585 - DNA, 25 bp, Homo sapien
gaaagatggattggagctaaaatta

SEQ ID NO: 5491586 - DNA, 25 bp, Homo sapien
agcccctggaagactgcttggcttt

SEQ ID NO: 5491587 - DNA, 25 bp, Homo sapien
gcatgactaagtacttaaggggtgg

SEQ ID NO: 5491588 - DNA, 25 bp, Homo sapien
aaatatgttgtacacacacccctga

SEQ ID NO: 5491589 - DNA, 25 bp, Homo sapien
ggatcaagatttgggatgttttcat

SEQ ID NO: 5491590 - DNA, 25 bp, Homo sapien
cacccaccaggtaagctgctgtgtg

SEQ ID NO: 5491591 - DNA, 25 bp, Homo sapien
gcttggctttggtattccagaattt

SEQ ID NO: 5491592 - DNA, 25 bp, Homo sapien
tgaaggcctaatgtttgtatgggct

SEQ ID NO: 5491593 - DNA, 25 bp, Homo sapien
atggtaaatgcaaagtatgggaccc

SEQ ID NO: 5491594 - DNA, 25 bp, Homo sapien
tccttgataaatccggggattcgac

SEQ ID NO: 5491595 - DNA, 25 bp, Homo sapien
gtcgaatccccggatttatcaagga

SEQ ID NO: 5491596 - DNA, 25 bp, Homo sapien
ggcctcccatgcgaacagagctggg

SEQ ID NO: 5491597 - DNA, 25 bp, Homo sapien
gaagccggtttaagacttgtctctg

SEQ ID NO: 5491598 - DNA, 25 bp, Homo sapien
tctagctatgagaactcggccaacc

SEQ ID NO: 5491599 - DNA, 25 bp, Homo sapien
ggaagagagacctgtagcattctag

SEQ ID NO: 5491600 - DNA, 25 bp, Homo sapien
gactcaggctctagtactgtgctcc

SEQ ID NO: 5491601 - DNA, 25 bp, Homo sapien
ccctaaagatgggaaattatgggga

SEQ ID NO: 5491602 - DNA, 25 bp, Homo sapien
ccaggctacctggtaaaagcgaagg

SEQ ID NO: 5491603 - DNA, 25 bp, Homo sapien
ggggatgacaggaaattcaactgaa

SEQ ID NO: 5491604 - DNA, 25 bp, Homo sapien
atgctttgaagaaggattcacaggt

SEQ ID NO: 5491605 - DNA, 25 bp, Homo sapien
cagacagatgaaacattaagcactt

SEQ ID NO: 5491606 - DNA, 25 bp, Homo sapien
gattcacaggttttgctggggatga

SEQ ID NO: 5491607 - DNA, 25 bp, Homo sapien
ttccgtaaggttatacgtattggtg

SEQ ID NO: 5491608 - DNA, 25 bp, Homo sapien
caccaatacgtataaccttacggaa

SEQ ID NO: 5491609 - DNA, 25 bp, Homo sapien
tattccgtaaggttatacgtattgg

SEQ ID NO: 5491610 - DNA, 25 bp, Homo sapien
ccaatacgtataaccttacggaata

SEQ ID NO: 5491611 - DNA, 25 bp, Homo sapien
acttagaatgactttcaggaaacgt

SEQ ID NO: 5491612 - DNA, 25 bp, Homo sapien
ttacgcaacagaagcctcagaggaa

SEQ ID NO: 5491613 - DNA, 25 bp, Homo sapien
agtgaagttcacgtaacagaaatgg

SEQ ID NO: 5491614 - DNA, 25 bp, Homo sapien
tcaaattcctgagagtgaagttcac

SEQ ID NO: 5491615 - DNA, 25 bp, Homo sapien
tgcccagcccacctcaccgtgtctc

SEQ ID NO: 5491616 - DNA, 25 bp, Homo sapien
taattaccttggaaaggctggcgac

SEQ ID NO: 5491617 - DNA, 25 bp, Homo sapien
atttttagtcactacaaaaggaaga

SEQ ID NO: 5491618 - DNA, 25 bp, Homo sapien
acagaaatggcttacgcaacagaag

SEQ ID NO: 5491619 - DNA, 25 bp, Homo sapien
aaaagattggtggatccattacatc

SEQ ID NO: 5491620 - DNA, 25 bp, Homo sapien
agaagcctcagaggaaaagattggt

SEQ ID NO: 5491621 - DNA, 25 bp, Homo sapien
tcaggaaacgtatttttcttgccca

SEQ ID NO: 5491622 - DNA, 25 bp, Homo sapien
cagagacccgataatttacagtaaa

SEQ ID NO: 5491623 - DNA, 25 bp, Homo sapien
tttactgtaaattatcgggtctctg

SEQ ID NO: 5491624 - DNA, 25 bp, Homo sapien
gggaggctcccagtcgggcaccggg

SEQ ID NO: 5491625 - DNA, 25 bp, Homo sapien
cccggtgcccgactgggagcctccc

SEQ ID NO: 5491626 - DNA, 25 bp, Homo sapien
ttggagtggctctgcctctgagatc

SEQ ID NO: 5491627 - DNA, 25 bp, Homo sapien
tcagctggctgaatatttggcaaca

SEQ ID NO: 5491628 - DNA, 25 bp, Homo sapien
ctctgagatcactacaggggagaca

SEQ ID NO: 5491629 - DNA, 25 bp, Homo sapien
tgccatcatgagctagagttcaccc

SEQ ID NO: 5491630 - DNA, 25 bp, Homo sapien
taaagaaagttcatcagggttaatc

SEQ ID NO: 5491631 - DNA, 25 bp, Homo sapien
agattagctcgggccaaacccttac

SEQ ID NO: 5491632 - DNA, 25 bp, Homo sapien
tacccctaaagctggggagatgcca

SEQ ID NO: 5491633 - DNA, 25 bp, Homo sapien
gcagctggaattgacaagaagtact

SEQ ID NO: 5491634 - DNA, 25 bp, Homo sapien
acaagaagtactggagattagctcg

SEQ ID NO: 5491635 - DNA, 25 bp, Homo sapien
tttgctcggaggataattggatgaa

SEQ ID NO: 5491636 - DNA, 25 bp, Homo sapien
agcaagcccccaacaccatagaaaa

SEQ ID NO: 5491637 - DNA, 25 bp, Homo sapien
ttattcgagttacaacaaaggaagt

SEQ ID NO: 5491638 - DNA, 25 bp, Homo sapien
acttcctttgttgtaactcgaataa

SEQ ID NO: 5491639 - DNA, 25 bp, Homo sapien
tcttagctcctagagggtgactgtc

SEQ ID NO: 5491640 - DNA, 25 bp, Homo sapien
cagcacggctgcttagcagggtctg

SEQ ID NO: 5491641 - DNA, 25 bp, Homo sapien
gtctactctccaggtcagggccatg

SEQ ID NO: 5491642 - DNA, 25 bp, Homo sapien
gtgctcaaccattgcagggccagga

SEQ ID NO: 5491643 - DNA, 25 bp, Homo sapien
gcacacatgctcgtgcagtggcaac

SEQ ID NO: 5491644 - DNA, 25 bp, Homo sapien
tggagccacatgaggttgaagtcca

SEQ ID NO: 5491645 - DNA, 25 bp, Homo sapien
gccaggagaactatgcatcaggaac

SEQ ID NO: 5491646 - DNA, 25 bp, Homo sapien
accccccgaagcacgttgtctactc

SEQ ID NO: 5491647 - DNA, 25 bp, Homo sapien
gagttcatggtgcttccaggctgac

SEQ ID NO: 5491648 - DNA, 25 bp, Homo sapien
ggcttacccttgcttgcggggcgct

SEQ ID NO: 5491649 - DNA, 25 bp, Homo sapien
tacggtagaaggccgtgtgtatgta

SEQ ID NO: 5491650 - DNA, 25 bp, Homo sapien
gactgagggtatctaatgttggcta

SEQ ID NO: 5491651 - DNA, 25 bp, Homo sapien
atatagcaagaatttgaagtgtatt

SEQ ID NO: 5491652 - DNA, 25 bp, Homo sapien
attctacaggagtatgtgcagaaaa

SEQ ID NO: 5491653 - DNA, 25 bp, Homo sapien
gttggctagaaatgggcactttcat

SEQ ID NO: 5491654 - DNA, 25 bp, Homo sapien
aagaagaaataaggatggctaaaat

SEQ ID NO: 5491655 - DNA, 25 bp, Homo sapien
ctgattaggcattttatagggtaac

SEQ ID NO: 5491656 - DNA, 25 bp, Homo sapien
taaaagaaagagatacatagttgta

SEQ ID NO: 5491657 - DNA, 25 bp, Homo sapien
atagggtaacttggtaatactagtc

SEQ ID NO: 5491658 - DNA, 25 bp, Homo sapien
acttaagtatgagactgagggtatc

SEQ ID NO: 5491659 - DNA, 25 bp, Homo sapien
catcatggagatatggttaagtata

SEQ ID NO: 5491660 - DNA, 25 bp, Homo sapien
cataacaaaggattagcactcattc

SEQ ID NO: 5491661 - DNA, 25 bp, Homo sapien
cctgcggaaccgcttcttcggccac

SEQ ID NO: 5491662 - DNA, 25 bp, Homo sapien
cccagcaccgggaccctctccattt

SEQ ID NO: 5491663 - DNA, 25 bp, Homo sapien
gcactccttcttcggcgcccagcac

SEQ ID NO: 5491664 - DNA, 25 bp, Homo sapien
tggggaggacatcgatgtcacctcc

SEQ ID NO: 5491665 - DNA, 25 bp, Homo sapien
cgagctcgtgttccccgaggccatg

SEQ ID NO: 5491666 - DNA, 25 bp, Homo sapien
ttctgcacggccccttcgcacgcaa

SEQ ID NO: 5491667 - DNA, 25 bp, Homo sapien
gccttcgagaagaaccactacgtgg

SEQ ID NO: 5491668 - DNA, 25 bp, Homo sapien
tcagcctctccgagacgcaggtgaa

SEQ ID NO: 5491669 - DNA, 25 bp, Homo sapien
catcacatcaaccggtggcgcattg

SEQ ID NO: 5491670 - DNA, 25 bp, Homo sapien
cttcggccaccgcttccaggccagc

SEQ ID NO: 5491671 - DNA, 25 bp, Homo sapien
aagaagaagggctcccatcacatca

SEQ ID NO: 5491672 - DNA, 25 bp, Homo sapien
aactggatgcttttttgggatggag

SEQ ID NO: 5491673 - DNA, 25 bp, Homo sapien
atttgcatgagcaatgcagacatcc

SEQ ID NO: 5491674 - DNA, 25 bp, Homo sapien
ctgtcagctgcctttggagtcccta

SEQ ID NO: 5491675 - DNA, 25 bp, Homo sapien
ggagatgacattagtaggctgatga

SEQ ID NO: 5491676 - DNA, 25 bp, Homo sapien
cttttcatttgggtggtgatggtgt

SEQ ID NO: 5491677 - DNA, 25 bp, Homo sapien
aatttggtacaaagtagtggtgact

SEQ ID NO: 5491678 - DNA, 25 bp, Homo sapien
gaactgaaagccagatgctgtcagc

SEQ ID NO: 5491679 - DNA, 25 bp, Homo sapien
agagccaaaacagtgaatttggtac

SEQ ID NO: 5491680 - DNA, 25 bp, Homo sapien
attttgaagcaaaacctgccaattc

SEQ ID NO: 5491681 - DNA, 25 bp, Homo sapien
agtgggcaattctgaactggatgct

SEQ ID NO: 5491682 - DNA, 25 bp, Homo sapien
ttggtcaccagggtaggtttctcag

SEQ ID NO: 5491683 - DNA, 25 bp, Homo sapien
agcctgcttattccctctggtcact

SEQ ID NO: 5491684 - DNA, 25 bp, Homo sapien
cacagcaccaaacaccccattatca

SEQ ID NO: 5491685 - DNA, 25 bp, Homo sapien
tcacatgacctctgagacactgccc

SEQ ID NO: 5491686 - DNA, 25 bp, Homo sapien
gaaggcccgttccagactggagaca

SEQ ID NO: 5491687 - DNA, 25 bp, Homo sapien
ggagcacagtctgactagcctagtc

SEQ ID NO: 5491688 - DNA, 25 bp, Homo sapien
ggtgctttgaagcctagagcctgct

SEQ ID NO: 5491689 - DNA, 25 bp, Homo sapien
caggactttactctggaaggcccgt

SEQ ID NO: 5491690 - DNA, 25 bp, Homo sapien
tccagactggagacaatgttcttac

SEQ ID NO: 5491691 - DNA, 25 bp, Homo sapien
gtctttgtaaaggcagaaggacatg

SEQ ID NO: 5491692 - DNA, 25 bp, Homo sapien
tgatccttccatgattagggacatt

SEQ ID NO: 5491693 - DNA, 25 bp, Homo sapien
ttctttaagtggtgatggagcttct

SEQ ID NO: 5491694 - DNA, 25 bp, Homo sapien
ctttggagatatgcggtgctaacag

SEQ ID NO: 5491695 - DNA, 25 bp, Homo sapien
tgtaagagagccatgagctcacctc

SEQ ID NO: 5491696 - DNA, 25 bp, Homo sapien
ccccgttgaactgtcaaagggctgg

SEQ ID NO: 5491697 - DNA, 25 bp, Homo sapien
taacagccccttgagtggcacatgc

SEQ ID NO: 5491698 - DNA, 25 bp, Homo sapien
cctgccagtatccagaagggccagg

SEQ ID NO: 5491699 - DNA, 25 bp, Homo sapien
gtgcgctccagtgttgattgtgctc

SEQ ID NO: 5491700 - DNA, 25 bp, Homo sapien
cctgtgacactgcagtcaagaggga

SEQ ID NO: 5491701 - DNA, 25 bp, Homo sapien
caagagggacaacatccactaggtt

SEQ ID NO: 5491702 - DNA, 25 bp, Homo sapien
tgacctgtctgcagtgagatgtgcg

SEQ ID NO: 5491703 - DNA, 25 bp, Homo sapien
ggcaggaacgccactgacctgtctg

SEQ ID NO: 5491704 - DNA, 25 bp, Homo sapien
ctgctaagcaatcgcgtgcagggca

SEQ ID NO: 5491705 - DNA, 25 bp, Homo sapien
tagcctagagttcaagggaaagtaa

SEQ ID NO: 5491706 - DNA, 25 bp, Homo sapien
tacatacagtggaacaaagaataac

SEQ ID NO: 5491707 - DNA, 25 bp, Homo sapien
ctcaagaacaacatgtacaagccaa

SEQ ID NO: 5491708 - DNA, 25 bp, Homo sapien
ggaaagtaaagggcctgataactga

SEQ ID NO: 5491709 - DNA, 25 bp, Homo sapien
gattcctacaaaaggtggttctgct

SEQ ID NO: 5491710 - DNA, 25 bp, Homo sapien
gtggaacaaagaataactgcagaat

SEQ ID NO: 5491711 - DNA, 25 bp, Homo sapien
tgtctgaagaagtaatgtcaaaaat

SEQ ID NO: 5491712 - DNA, 25 bp, Homo sapien
agaaaaccacacaaagacacatcat

SEQ ID NO: 5491713 - DNA, 25 bp, Homo sapien
acctacagatcccagaagttgaata

SEQ ID NO: 5491714 - DNA, 25 bp, Homo sapien
tccaccaaaggttctggaactagcc

SEQ ID NO: 5491715 - DNA, 25 bp, Homo sapien
ctacttcaccggatagtaagggaac

SEQ ID NO: 5491716 - DNA, 25 bp, Homo sapien
aagatatgagaccaccgagtttttc

SEQ ID NO: 5491717 - DNA, 25 bp, Homo sapien
aaaccattcaaaagagaactcactc

SEQ ID NO: 5491718 - DNA, 25 bp, Homo sapien
ttcatgagattatcacttggctact

SEQ ID NO: 5491719 - DNA, 25 bp, Homo sapien
ttacatgcctggtcttcatcctgac

SEQ ID NO: 5491720 - DNA, 25 bp, Homo sapien
tgagacatttaccacataagaaagc

SEQ ID NO: 5491721 - DNA, 25 bp, Homo sapien
aactcactctgtaaaaacgattctc

SEQ ID NO: 5491722 - DNA, 25 bp, Homo sapien
atcctgacatatgcagatgacacaa

SEQ ID NO: 5491723 - DNA, 25 bp, Homo sapien
caactgtcaaaagatatgagaccac

SEQ ID NO: 5491724 - DNA, 25 bp, Homo sapien
aagaaagtaagtctgaatgtttcag

SEQ ID NO: 5491725 - DNA, 25 bp, Homo sapien
caaggaaactgaacaaataccaggc

SEQ ID NO: 5491726 - DNA, 25 bp, Homo sapien
ataccaggcagcaaaatactgagac

SEQ ID NO: 5491727 - DNA, 25 bp, Homo sapien
cgaccgactctcccgccaggcacgg

SEQ ID NO: 5491728 - DNA, 25 bp, Homo sapien
ccgtgcctggcgggagagtcggtcg

SEQ ID NO: 5491729 - DNA, 25 bp, Homo sapien
ccagagcaaaactgattagaaaact

SEQ ID NO: 5491730 - DNA, 25 bp, Homo sapien
taggggttgtgctgtactgtttact

SEQ ID NO: 5491731 - DNA, 25 bp, Homo sapien
ccctgcacttaggggttgtgctgta

SEQ ID NO: 5491732 - DNA, 25 bp, Homo sapien
gttttgcctccagatcccctgcact

SEQ ID NO: 5491733 - DNA, 25 bp, Homo sapien
aacaatcctaaaagtcaggtatagc

SEQ ID NO: 5491734 - DNA, 25 bp, Homo sapien
ttaacttatgacaccagagcaaaac

SEQ ID NO: 5491735 - DNA, 25 bp, Homo sapien
tcccaagattacacagctggaaagt

SEQ ID NO: 5491736 - DNA, 25 bp, Homo sapien
tatatgagaaaagtgcaactgctct

SEQ ID NO: 5491737 - DNA, 25 bp, Homo sapien
gtggtacagtgaggctttgaccctc

SEQ ID NO: 5491738 - DNA, 25 bp, Homo sapien
ccaaaagcactggaaaaaatctatt

SEQ ID NO: 5491739 - DNA, 25 bp, Homo sapien
tgcaggaaaattagtttggtatgga

SEQ ID NO: 5491740 - DNA, 25 bp, Homo sapien
tgaaacagtaggaaaatatagagga

SEQ ID NO: 5491741 - DNA, 25 bp, Homo sapien
tttgtgtataaataggtaactagat

SEQ ID NO: 5491742 - DNA, 25 bp, Homo sapien
agagtatgcataggaaagaaactac

SEQ ID NO: 5491743 - DNA, 25 bp, Homo sapien
aaattgaccaaaatagacatgatta

SEQ ID NO: 5491744 - DNA, 25 bp, Homo sapien
gaggaggtctcaccaagtgagtttc

SEQ ID NO: 5491745 - DNA, 25 bp, Homo sapien
attatttggtatatggcgaggatgg

SEQ ID NO: 5491746 - DNA, 25 bp, Homo sapien
ctctccagattatgtacagacacaa

SEQ ID NO: 5491747 - DNA, 25 bp, Homo sapien
aggtaactagataaaggaatagaat

SEQ ID NO: 5491748 - DNA, 25 bp, Homo sapien
atgattctagagtatgcataggaaa

SEQ ID NO: 5491749 - DNA, 25 bp, Homo sapien
gggggatacatgtgctattcagtaa

SEQ ID NO: 5491750 - DNA, 25 bp, Homo sapien
taaacagttcagaaattgaccaaaa

SEQ ID NO: 5491751 - DNA, 25 bp, Homo sapien
gtgagaaattgtccctagagaacta

SEQ ID NO: 5491752 - DNA, 25 bp, Homo sapien
taaagcaacattaagggtctcaatt

SEQ ID NO: 5491753 - DNA, 25 bp, Homo sapien
ttgtctgtatgggcaagatatggta

SEQ ID NO: 5491754 - DNA, 25 bp, Homo sapien
tacatttgattggactggagtgaac

SEQ ID NO: 5491755 - DNA, 25 bp, Homo sapien
agaaatgatgctcagtgttgaaacc

SEQ ID NO: 5491756 - DNA, 25 bp, Homo sapien
atttaagcctctccactgaagttcc

SEQ ID NO: 5491757 - DNA, 25 bp, Homo sapien
atgggcaagatatggtaaacctcat

SEQ ID NO: 5491758 - DNA, 25 bp, Homo sapien
gtagcaacagtgaagactttagaac

SEQ ID NO: 5491759 - DNA, 25 bp, Homo sapien
aaatgctgaagaaatttacaggtat

SEQ ID NO: 5491760 - DNA, 25 bp, Homo sapien
caaaacacatgccagttagaaactt

SEQ ID NO: 5491761 - DNA, 25 bp, Homo sapien
tggagtgaactgacattatagcatc

SEQ ID NO: 5491762 - DNA, 25 bp, Homo sapien
aataacaaccttccgagtgaccacc

SEQ ID NO: 5491763 - DNA, 25 bp, Homo sapien
gaacggaccccatctaagtggatcc

SEQ ID NO: 5491764 - DNA, 25 bp, Homo sapien
gagatggtcatggcagctttgacac

SEQ ID NO: 5491765 - DNA, 25 bp, Homo sapien
gagtgaccaccgacgcatcaaatac

SEQ ID NO: 5491766 - DNA, 25 bp, Homo sapien
ggacccgtccaactcagcctgcttg

SEQ ID NO: 5491767 - DNA, 25 bp, Homo sapien
ttataagaccaagagaatgtaaaac

SEQ ID NO: 5491768 - DNA, 25 bp, Homo sapien
agagccctgcagtgaatatagacat

SEQ ID NO: 5491769 - DNA, 25 bp, Homo sapien
ataagaatgtcaacatggcagaggg

SEQ ID NO: 5491770 - DNA, 25 bp, Homo sapien
catcaaatactggattgggcgtggt

SEQ ID NO: 5491771 - DNA, 25 bp, Homo sapien
ggaacattcaggccaagaccctttc

SEQ ID NO: 5491772 - DNA, 25 bp, Homo sapien
tcaggccatacgtcttgggccaggc

SEQ ID NO: 5491773 - DNA, 25 bp, Homo sapien
acaaagtatcaagacttgagtctta

SEQ ID NO: 5491774 - DNA, 25 bp, Homo sapien
ggatgacatgggctaaaagataaca

SEQ ID NO: 5491775 - DNA, 25 bp, Homo sapien
acttgagtcttaagggatgtcaggg

SEQ ID NO: 5491776 - DNA, 25 bp, Homo sapien
ctataagcattaacaataaggaaga

SEQ ID NO: 5491777 - DNA, 25 bp, Homo sapien
gctggcatagtcaaagcacctaggc

SEQ ID NO: 5491778 - DNA, 25 bp, Homo sapien
tctgaagaaatacaagctggcatag

SEQ ID NO: 5491779 - DNA, 25 bp, Homo sapien
agtgttcatattgacagcaaaactc

SEQ ID NO: 5491780 - DNA, 25 bp, Homo sapien
gcacctaggctagaaacagcaaatg

SEQ ID NO: 5491781 - DNA, 25 bp, Homo sapien
gcaaatgattcggatgacatgggct

SEQ ID NO: 5491782 - DNA, 25 bp, Homo sapien
atgggctaaaagataacaaggaatc

SEQ ID NO: 5491783 - DNA, 25 bp, Homo sapien
gaaacagcaaatgattcggatgaca

SEQ ID NO: 5491784 - DNA, 25 bp, Homo sapien
gtgtgtgtacaggtaaagatcaagg

SEQ ID NO: 5491785 - DNA, 25 bp, Homo sapien
tggcagcagaaactacaattaaatc

SEQ ID NO: 5491786 - DNA, 25 bp, Homo sapien
acccttgtaaattgggccatatttc

SEQ ID NO: 5491787 - DNA, 25 bp, Homo sapien
tgaccaggattctaagtgaaattac

SEQ ID NO: 5491788 - DNA, 25 bp, Homo sapien
aaaaatagctccttaggaggctgag

SEQ ID NO: 5491789 - DNA, 25 bp, Homo sapien
aaaataattatggagactttttggc

SEQ ID NO: 5491790 - DNA, 25 bp, Homo sapien
gtacaggtaaagatcaaggtagtta

SEQ ID NO: 5491791 - DNA, 25 bp, Homo sapien
aaaagtaaagaatctagctgggcac

SEQ ID NO: 5491792 - DNA, 25 bp, Homo sapien
aagatcaaggtagttataagttatt

SEQ ID NO: 5491793 - DNA, 25 bp, Homo sapien
tcatctaccatgaaggtgtataccc

SEQ ID NO: 5491794 - DNA, 25 bp, Homo sapien
catttgatctacagaaagaggcata

SEQ ID NO: 5491795 - DNA, 25 bp, Homo sapien
tagagcgcatattggacactgattt

SEQ ID NO: 5491796 - DNA, 25 bp, Homo sapien
actctaagaaaagcaggtgcaagca

SEQ ID NO: 5491797 - DNA, 25 bp, Homo sapien
aataagctaggtcttcagtacccac

SEQ ID NO: 5491798 - DNA, 25 bp, Homo sapien
ctgagttgagaggttaggactctaa

SEQ ID NO: 5491799 - DNA, 25 bp, Homo sapien
tgcttccttgcacctgagttgagag

SEQ ID NO: 5491800 - DNA, 25 bp, Homo sapien
ttgttgttacaataagctaggtctt

SEQ ID NO: 5491801 - DNA, 25 bp, Homo sapien
atatggtaaccagaaagatttaacc

SEQ ID NO: 5491802 - DNA, 25 bp, Homo sapien
taaccagattatatttagagcgcat

SEQ ID NO: 5491803 - DNA, 25 bp, Homo sapien
gcaggcagaacaagtcaagattctc

SEQ ID NO: 5491804 - DNA, 25 bp, Homo sapien
agtacccacaaaagtagtcaaactc

SEQ ID NO: 5491805 - DNA, 25 bp, Homo sapien
gttaggactctaagaaaagcaggtg

SEQ ID NO: 5491806 - DNA, 25 bp, Homo sapien
tcatagatctccaagcaacaatcac

SEQ ID NO: 5491807 - DNA, 25 bp, Homo sapien
catacagaggcaatcttgatgacaa

SEQ ID NO: 5491808 - DNA, 25 bp, Homo sapien
atcttaagatgagtgaaaagcaaat

SEQ ID NO: 5491809 - DNA, 25 bp, Homo sapien
aacaaaaatacgtgtgagtgggatt

SEQ ID NO: 5491810 - DNA, 25 bp, Homo sapien
ccacacctttaataggcccaagtgc

SEQ ID NO: 5491811 - DNA, 25 bp, Homo sapien
atcccaggtgtttgtgatgacaagc

SEQ ID NO: 5491812 - DNA, 25 bp, Homo sapien
attttgctcaagttcaggctctctc

SEQ ID NO: 5491813 - DNA, 25 bp, Homo sapien
aaatgaaacccttgataatgaatcc

SEQ ID NO: 5491814 - DNA, 25 bp, Homo sapien
agtgggattcccacggagaaatgtt

SEQ ID NO: 5491815 - DNA, 25 bp, Homo sapien
tgatgacaaaagattgggctcaatt

SEQ ID NO: 5491816 - DNA, 25 bp, Homo sapien
gaaatcagaataaagctgcataccc

SEQ ID NO: 5491817 - DNA, 25 bp, Homo sapien
aggagataagtcagtgtaaaaaaac

SEQ ID NO: 5491818 - DNA, 25 bp, Homo sapien
cacacgaaggagataagtcagtgta

SEQ ID NO: 5491819 - DNA, 25 bp, Homo sapien
actgttctgttgtcttcctctgggg

SEQ ID NO: 5491820 - DNA, 25 bp, Homo sapien
atccctgaatactaaaaagacagaa

SEQ ID NO: 5491821 - DNA, 25 bp, Homo sapien
ggtgtggtctcagctaactgcaacc

SEQ ID NO: 5491822 - DNA, 25 bp, Homo sapien
accatgcctggtcaaggattacaga

SEQ ID NO: 5491823 - DNA, 25 bp, Homo sapien
tttcagtaggctcaagcacagagat

SEQ ID NO: 5491824 - DNA, 25 bp, Homo sapien
gcctggtcaaggattacagaattaa

SEQ ID NO: 5491825 - DNA, 25 bp, Homo sapien
gcacagagattcagtgcaggaaaaa

SEQ ID NO: 5491826 - DNA, 25 bp, Homo sapien
gtaggctcaagcacagagattcagt

SEQ ID NO: 5491827 - DNA, 25 bp, Homo sapien
gggggatcatttcagtaggctcaag

SEQ ID NO: 5491828 - DNA, 25 bp, Homo sapien
tatacctcatcctacagttgggcaa

SEQ ID NO: 5491829 - DNA, 25 bp, Homo sapien
ggtgggagactgaacataaattaaa

SEQ ID NO: 5491830 - DNA, 25 bp, Homo sapien
ttagaaatatgaaggagtcagaaga

SEQ ID NO: 5491831 - DNA, 25 bp, Homo sapien
gttgggcaaattgtctaacacaaac

SEQ ID NO: 5491832 - DNA, 25 bp, Homo sapien
ggccactgagaacagtgggagaatt

SEQ ID NO: 5491833 - DNA, 25 bp, Homo sapien
aacgtgctcagaacatatacctcat

SEQ ID NO: 5491834 - DNA, 25 bp, Homo sapien
aaactaaatgatctgcttccctgtc

SEQ ID NO: 5491835 - DNA, 25 bp, Homo sapien
aattacaaggaacaggacttgggag

SEQ ID NO: 5491836 - DNA, 25 bp, Homo sapien
actttccataggacccacaaggcct

SEQ ID NO: 5491837 - DNA, 25 bp, Homo sapien
ttccctgtcaggaacctatagagat

SEQ ID NO: 5491838 - DNA, 25 bp, Homo sapien
gacttgggagactagcagtattcta

SEQ ID NO: 5491839 - DNA, 25 bp, Homo sapien
gacgcagccggctccgcacccgcgg

SEQ ID NO: 5491840 - DNA, 25 bp, Homo sapien
ccgcgggtgcggagccggctgcgtc

SEQ ID NO: 5491841 - DNA, 25 bp, Homo sapien
acaattagaagtgaagttcctgact

SEQ ID NO: 5491842 - DNA, 25 bp, Homo sapien
tagaaatagtcgcttaaaatatctt

SEQ ID NO: 5491843 - DNA, 25 bp, Homo sapien
acgtggcattaaataagacacattg

SEQ ID NO: 5491844 - DNA, 25 bp, Homo sapien
tttactcctgggtccacgtggcatt

SEQ ID NO: 5491845 - DNA, 25 bp, Homo sapien
tcaggacataaaacttgtagtcaac

SEQ ID NO: 5491846 - DNA, 25 bp, Homo sapien
ataagaaaaataagtccaaatagac

SEQ ID NO: 5491847 - DNA, 25 bp, Homo sapien
tggtgcacttccaagcaggtagtaa

SEQ ID NO: 5491848 - DNA, 25 bp, Homo sapien
tgtgaatatgtaatgaggcagtacc

SEQ ID NO: 5491849 - DNA, 25 bp, Homo sapien
atgtataaaacctgagggttagaaa

SEQ ID NO: 5491850 - DNA, 25 bp, Homo sapien
tgaggcagtacctatatagtgcttg

SEQ ID NO: 5491851 - DNA, 25 bp, Homo sapien
aattacctgctaagtcataagaaaa

SEQ ID NO: 5491852 - DNA, 25 bp, Homo sapien
actaaaacacattacaagtggagaa

SEQ ID NO: 5491853 - DNA, 25 bp, Homo sapien
ttactgtcacgatgctgcaggccat

SEQ ID NO: 5491854 - DNA, 25 bp, Homo sapien
ccaagatcaggaagttatctatccc

SEQ ID NO: 5491855 - DNA, 25 bp, Homo sapien
ggtagggaacatgccctgttcatat

SEQ ID NO: 5491856 - DNA, 25 bp, Homo sapien
tatctatcccttccccacaccatcc

SEQ ID NO: 5491857 - DNA, 25 bp, Homo sapien
cacgatgctgcaggccatcactgct

SEQ ID NO: 5491858 - DNA, 25 bp, Homo sapien
ataaaatccaagatcaggaagttat

SEQ ID NO: 5491859 - DNA, 25 bp, Homo sapien
ccaaacagaaggccaatcattattt

SEQ ID NO: 5491860 - DNA, 25 bp, Homo sapien
ccacaccatccaatcagcaagcctc

SEQ ID NO: 5491861 - DNA, 25 bp, Homo sapien
agtctcaatgaggcaccaccatcca

SEQ ID NO: 5491862 - DNA, 25 bp, Homo sapien
gtaaaaatagtccttagcatgcaaa

SEQ ID NO: 5491863 - DNA, 25 bp, Homo sapien
accgtctgagctgtcacggcaaagc

SEQ ID NO: 5491864 - DNA, 25 bp, Homo sapien
tttctcgggacctgtgtgtccaggc

SEQ ID NO: 5491865 - DNA, 25 bp, Homo sapien
aacctggcagatgcgttactagagc

SEQ ID NO: 5491866 - DNA, 25 bp, Homo sapien
atgtgccttcagcgcctggagaaaa

SEQ ID NO: 5491867 - DNA, 25 bp, Homo sapien
ccattttgcaagcctggaaggagcg

SEQ ID NO: 5491868 - DNA, 25 bp, Homo sapien
tggagtgactaccaatgggcaatca

SEQ ID NO: 5491869 - DNA, 25 bp, Homo sapien
ggtggtcaacctgaagcaagccatt

SEQ ID NO: 5491870 - DNA, 25 bp, Homo sapien
tgcgctgcacggcagcctctgcaga

SEQ ID NO: 5491871 - DNA, 25 bp, Homo sapien
gagtgaaataatgaaggtggtcaac

SEQ ID NO: 5491872 - DNA, 25 bp, Homo sapien
gttactagagcaggccatgattgga

SEQ ID NO: 5491873 - DNA, 25 bp, Homo sapien
gagaagcagcttgccatgtgccttc

SEQ ID NO: 5491874 - DNA, 25 bp, Homo sapien
gaccctagcgtgcttgaatggggac

SEQ ID NO: 5491875 - DNA, 25 bp, Homo sapien
gctgacatcgtgggtttcacgggct

SEQ ID NO: 5491876 - DNA, 25 bp, Homo sapien
gactgctactactgcgtgtcgggcc

SEQ ID NO: 5491877 - DNA, 25 bp, Homo sapien
cagggaaggttcatatcacaaagac

SEQ ID NO: 5491878 - DNA, 25 bp, Homo sapien
tcgatgaattagccacggagaacca

SEQ ID NO: 5491879 - DNA, 25 bp, Homo sapien
aaccactgtcgccgcatcaagattc

SEQ ID NO: 5491880 - DNA, 25 bp, Homo sapien
tcaagattctcggggactgctacta

SEQ ID NO: 5491881 - DNA, 25 bp, Homo sapien
ttcacgggcttggcatcccagtgca

SEQ ID NO: 5491882 - DNA, 25 bp, Homo sapien
acgacgtgtggtccaatgatgtgac

SEQ ID NO: 5491883 - DNA, 25 bp, Homo sapien
aggcacgacaatgtgagcatcctgt

SEQ ID NO: 5491884 - DNA, 25 bp, Homo sapien
ggacatgagaggaacagtttcttga

SEQ ID NO: 5491885 - DNA, 25 bp, Homo sapien
ttcagcgctgcgctagaaagaactg

SEQ ID NO: 5491886 - DNA, 25 bp, Homo sapien
cagcacaagtagtggcaccctcttc

SEQ ID NO: 5491887 - DNA, 25 bp, Homo sapien
tagaaagaactgatgtgcatttata

SEQ ID NO: 5491888 - DNA, 25 bp, Homo sapien
aatccggcctaactcaggcggccaa

SEQ ID NO: 5491889 - DNA, 25 bp, Homo sapien
ctaactcaggcggccaagtatatat

SEQ ID NO: 5491890 - DNA, 25 bp, Homo sapien
ctggccatgccaaacagcacccagc

SEQ ID NO: 5491891 - DNA, 25 bp, Homo sapien
tatattagcttttggaggatagtac

SEQ ID NO: 5491892 - DNA, 25 bp, Homo sapien
ttggaggatagtactaatccggcct

SEQ ID NO: 5491893 - DNA, 25 bp, Homo sapien
ggcaccctcttcagcgctgcgctag

SEQ ID NO: 5491894 - DNA, 25 bp, Homo sapien
ctcttactgtgccactggccatgcc

SEQ ID NO: 5491895 - DNA, 25 bp, Homo sapien
ctcctggtcctgttgtccccctctc

SEQ ID NO: 5491896 - DNA, 25 bp, Homo sapien
aactttcgatcaaaattatctttct

SEQ ID NO: 5491897 - DNA, 25 bp, Homo sapien
agaaagataattttgatcgaaagtt

SEQ ID NO: 5491898 - DNA, 25 bp, Homo sapien
gacacgtaccatgtctcagacaagc

SEQ ID NO: 5491899 - DNA, 25 bp, Homo sapien
caaccgtttctggtaaggagaactg

SEQ ID NO: 5491900 - DNA, 25 bp, Homo sapien
agagggtgataggctttcccccatc

SEQ ID NO: 5491901 - DNA, 25 bp, Homo sapien
ggctttgctgccccattgcccatta

SEQ ID NO: 5491902 - DNA, 25 bp, Homo sapien
tctgggttcgctggtcagtaaaacg

SEQ ID NO: 5491903 - DNA, 25 bp, Homo sapien
taatttctcctgtcccagaccagcc

SEQ ID NO: 5491904 - DNA, 25 bp, Homo sapien
acagcctgaagaatctgtgcctgca

SEQ ID NO: 5491905 - DNA, 25 bp, Homo sapien
cagagcctcagtgactgccaccctg

SEQ ID NO: 5491906 - DNA, 25 bp, Homo sapien
tgtgcctgcactcacagcccagtcc

SEQ ID NO: 5491907 - DNA, 25 bp, Homo sapien
agaccagccagacacgtaccatgtc

SEQ ID NO: 5491908 - DNA, 25 bp, Homo sapien
ggacagggcacaacaaccgtttctg

SEQ ID NO: 5491909 - DNA, 25 bp, Homo sapien
atgtggggtaagaagtcttcttcgt

SEQ ID NO: 5491910 - DNA, 25 bp, Homo sapien
tttcctaagcacttgggctatatca

SEQ ID NO: 5491911 - DNA, 25 bp, Homo sapien
acttgggctatatcagagaacagaa

SEQ ID NO: 5491912 - DNA, 25 bp, Homo sapien
cagagaacagaataataccatacat

SEQ ID NO: 5491913 - DNA, 25 bp, Homo sapien
tagaatgtggctttcatcagttggt

SEQ ID NO: 5491914 - DNA, 25 bp, Homo sapien
tgcttcagaacaccttgtggagctc

SEQ ID NO: 5491915 - DNA, 25 bp, Homo sapien
accttgtggagctcttgaaacttct

SEQ ID NO: 5491916 - DNA, 25 bp, Homo sapien
tctatccgcagaaaccatagaatgt

SEQ ID NO: 5491917 - DNA, 25 bp, Homo sapien
atcttcagcttaatactaaaaccct

SEQ ID NO: 5491918 - DNA, 25 bp, Homo sapien
ctcttgaaacttctggcgagggcgt

SEQ ID NO: 5491919 - DNA, 25 bp, Homo sapien
catcagttggttgaccaggttggct

SEQ ID NO: 5491920 - DNA, 25 bp, Homo sapien
aattacatgtgtcttctgcggggct

SEQ ID NO: 5491921 - DNA, 25 bp, Homo sapien
agaactcatgagtgactggtttaac

SEQ ID NO: 5491922 - DNA, 25 bp, Homo sapien
gtcgctactgccaaagcccatggtt

SEQ ID NO: 5491923 - DNA, 25 bp, Homo sapien
cctttggaggtgtcgctactgccaa

SEQ ID NO: 5491924 - DNA, 25 bp, Homo sapien
ggcagctgccacaatcacagtaggc

SEQ ID NO: 5491925 - DNA, 25 bp, Homo sapien
ttcaaggtgaagaactcatgagtga

SEQ ID NO: 5491926 - DNA, 25 bp, Homo sapien
aggcaggtgatacaaccaagccagt

SEQ ID NO: 5491927 - DNA, 25 bp, Homo sapien
cacagtaggcacgattgattaatta

SEQ ID NO: 5491928 - DNA, 25 bp, Homo sapien
acaaccaagccagtcacggagctgg

SEQ ID NO: 5491929 - DNA, 25 bp, Homo sapien
cctcttggccggattcctcctcagc

SEQ ID NO: 5491930 - DNA, 25 bp, Homo sapien
tggttttgatgctaggccacagtgc

SEQ ID NO: 5491931 - DNA, 25 bp, Homo sapien
acctccgccccaccggattcaggtg

SEQ ID NO: 5491932 - DNA, 25 bp, Homo sapien
ggagggatagtgcactccaatgcac

SEQ ID NO: 5491933 - DNA, 25 bp, Homo sapien
gaagcacttctgtggagggatagtg

SEQ ID NO: 5491934 - DNA, 25 bp, Homo sapien
aaagcaaaagttcagcaagacactt

SEQ ID NO: 5491935 - DNA, 25 bp, Homo sapien
caagacacttagtaacttggggggc

SEQ ID NO: 5491936 - DNA, 25 bp, Homo sapien
ccctccacataagaactagagttgt

SEQ ID NO: 5491937 - DNA, 25 bp, Homo sapien
ggccttcactccatgatcgtcagac

SEQ ID NO: 5491938 - DNA, 25 bp, Homo sapien
atcgtcagactcagaaatacctggg

SEQ ID NO: 5491939 - DNA, 25 bp, Homo sapien
cttggggggcattatttgattctcc

SEQ ID NO: 5491940 - DNA, 25 bp, Homo sapien
cagcctcaaggttaggttttaaatg

SEQ ID NO: 5491941 - DNA, 25 bp, Homo sapien
ttcctgcactgtctcgagttatctc

SEQ ID NO: 5491942 - DNA, 25 bp, Homo sapien
cccagctgataggagagctttgatg

SEQ ID NO: 5491943 - DNA, 25 bp, Homo sapien
catggcaccccccgcatggtgctgg

SEQ ID NO: 5491944 - DNA, 25 bp, Homo sapien
gacaaggtgcacccagccttgctcc

SEQ ID NO: 5491945 - DNA, 25 bp, Homo sapien
tgagcacacaactgcaggtgcacaa

SEQ ID NO: 5491946 - DNA, 25 bp, Homo sapien
ggaaggcacttggcaagtgtgtgca

SEQ ID NO: 5491947 - DNA, 25 bp, Homo sapien
atggaaaccccatatgtgttgctag

SEQ ID NO: 5491948 - DNA, 25 bp, Homo sapien
gtgtgcagattgcatgacaaggtgc

SEQ ID NO: 5491949 - DNA, 25 bp, Homo sapien
atgcctgcctaatttctgtacttgt

SEQ ID NO: 5491950 - DNA, 25 bp, Homo sapien
gctgataggagagctttgatggaaa

SEQ ID NO: 5491951 - DNA, 25 bp, Homo sapien
atgtgttgctagagtgtgagctcca

SEQ ID NO: 5491952 - DNA, 25 bp, Homo sapien
ccttgctccaagaaatcctgagcac

SEQ ID NO: 5491953 - DNA, 25 bp, Homo sapien
ggcttcagctccctccaccagcagc

SEQ ID NO: 5491954 - DNA, 25 bp, Homo sapien
cctccaccagcagccccagagctgc

SEQ ID NO: 5491955 - DNA, 25 bp, Homo sapien
gctctacagagatgtggcttcagct

SEQ ID NO: 5491956 - DNA, 25 bp, Homo sapien
tgtccatggaatttgaatctcaagc

SEQ ID NO: 5491957 - DNA, 25 bp, Homo sapien
accatattggtcaggctggtgtcga

SEQ ID NO: 5491958 - DNA, 25 bp, Homo sapien
ggacgctctacagagatgtggcttc

SEQ ID NO: 5491959 - DNA, 25 bp, Homo sapien
acattttactcaaactgggacattt

SEQ ID NO: 5491960 - DNA, 25 bp, Homo sapien
ctgacctcaggcgatccgcctgcct

SEQ ID NO: 5491961 - DNA, 25 bp, Homo sapien
tttctgatagaagcaacccagtttt

SEQ ID NO: 5491962 - DNA, 25 bp, Homo sapien
agagctgcccagcgtccacctttct

SEQ ID NO: 5491963 - DNA, 25 bp, Homo sapien
tgtattctgaatagagacggggttt

SEQ ID NO: 5491964 - DNA, 25 bp, Homo sapien
tggtgcgatcttggcctactgcaaa

SEQ ID NO: 5491965 - DNA, 25 bp, Homo sapien
aactcctgtccttaagcgatccttc

SEQ ID NO: 5491966 - DNA, 25 bp, Homo sapien
cctactgcaaactccacctcctggg

SEQ ID NO: 5491967 - DNA, 25 bp, Homo sapien
tgggctccagcaatcctcctccttc

SEQ ID NO: 5491968 - DNA, 25 bp, Homo sapien
agccaccatgcctggtcatgttttc

SEQ ID NO: 5491969 - DNA, 25 bp, Homo sapien
gagtgcagtgtcacagtcatggctc

SEQ ID NO: 5491970 - DNA, 25 bp, Homo sapien
taagcgatccttcctcccggctttc

SEQ ID NO: 5491971 - DNA, 25 bp, Homo sapien
agggtctggatctgttgcttaggct

SEQ ID NO: 5491972 - DNA, 25 bp, Homo sapien
agagagccactgcccctggcctcat

SEQ ID NO: 5491973 - DNA, 25 bp, Homo sapien
gaccaaaggtgtacgccaccacacc

SEQ ID NO: 5491974 - DNA, 25 bp, Homo sapien
cctcccggctttcctgaagtgttgg

SEQ ID NO: 5491975 - DNA, 25 bp, Homo sapien
actgagtctgtgatctgaaattcct

SEQ ID NO: 5491976 - DNA, 25 bp, Homo sapien
tgaataacagcatcaagaccaactt

SEQ ID NO: 5491977 - DNA, 25 bp, Homo sapien
gctggccaggcttactgagtctgtg

SEQ ID NO: 5491978 - DNA, 25 bp, Homo sapien
tttctgaaaagtgagtgtgagaaga

SEQ ID NO: 5491979 - DNA, 25 bp, Homo sapien
gagataatacagagatcccaacttt

SEQ ID NO: 5491980 - DNA, 25 bp, Homo sapien
tgtgagaagacaaagcaatcctaca

SEQ ID NO: 5491981 - DNA, 25 bp, Homo sapien
gcatgcgccactacacccggctaat

SEQ ID NO: 5491982 - DNA, 25 bp, Homo sapien
cttgtcaggtttgaaaatgggaaat

SEQ ID NO: 5491983 - DNA, 25 bp, Homo sapien
accgcgcctggcaatacttacattt

SEQ ID NO: 5491984 - DNA, 25 bp, Homo sapien
tgggatttctccatgttggccaggc

SEQ ID NO: 5491985 - DNA, 25 bp, Homo sapien
ctttaaggaagacacagccttgggg

SEQ ID NO: 5491986 - DNA, 25 bp, Homo sapien
tctaggagtgtgctgaataactcag

SEQ ID NO: 5491987 - DNA, 25 bp, Homo sapien
cagctccctgcaacttccaactcct

SEQ ID NO: 5491988 - DNA, 25 bp, Homo sapien
agtttgaccaacaatcagaccccac

SEQ ID NO: 5491989 - DNA, 25 bp, Homo sapien
ctgggccgtcctccacaggttatta

SEQ ID NO: 5491990 - DNA, 25 bp, Homo sapien
cagaccccacatctaggagtgtgct

SEQ ID NO: 5491991 - DNA, 25 bp, Homo sapien
tctcgagtccttcagtttgaccaac

SEQ ID NO: 5491992 - DNA, 25 bp, Homo sapien
ccaaagagcctgggcctgctccttt

SEQ ID NO: 5491993 - DNA, 25 bp, Homo sapien
ggcccaacacccactcacatgtctc

SEQ ID NO: 5491994 - DNA, 25 bp, Homo sapien
cgcccagccaagggacattacttct

SEQ ID NO: 5491995 - DNA, 25 bp, Homo sapien
attataaagaagacatccatgagga

SEQ ID NO: 5491996 - DNA, 25 bp, Homo sapien
agaagacatccatgaggacgaatgt

SEQ ID NO: 5491997 - DNA, 25 bp, Homo sapien
catgcatgtaaaacagatgtaacct

SEQ ID NO: 5491998 - DNA, 25 bp, Homo sapien
ccgcgcctggctgtattgtcatttt

SEQ ID NO: 5491999 - DNA, 25 bp, Homo sapien
tttccacattggctaggctgatctt

SEQ ID NO: 5492000 - DNA, 25 bp, Homo sapien
atagaagtgatgtactctaaccacc

SEQ ID NO: 5492001 - DNA, 25 bp, Homo sapien
catctgcgtggtattacatgcatgt

SEQ ID NO: 5492002 - DNA, 25 bp, Homo sapien
taatagaagtttacatctgcgtggt

SEQ ID NO: 5492003 - DNA, 25 bp, Homo sapien
ccagcgactggcacgattttgtttc

SEQ ID NO: 5492004 - DNA, 25 bp, Homo sapien
cagataaactgtaagagggaacatg

SEQ ID NO: 5492005 - DNA, 25 bp, Homo sapien
aatggcacagtgctctgtatatcct

SEQ ID NO: 5492006 - DNA, 25 bp, Homo sapien
agcaagacgtattccagcgactggc

SEQ ID NO: 5492007 - DNA, 25 bp, Homo sapien
tttttagagcaagacgtattccagc

SEQ ID NO: 5492008 - DNA, 25 bp, Homo sapien
aaccatgtggtcaagcacctactgc

SEQ ID NO: 5492009 - DNA, 25 bp, Homo sapien
catatgcaagttttggttcggttac

SEQ ID NO: 5492010 - DNA, 25 bp, Homo sapien
ctggcattccctaaaggtgaccatg

SEQ ID NO: 5492011 - DNA, 25 bp, Homo sapien
tatgaaagacattatgatacagttc

SEQ ID NO: 5492012 - DNA, 25 bp, Homo sapien
cagacgcacacacaacccactacgt

SEQ ID NO: 5492013 - DNA, 25 bp, Homo sapien
gagcacacaactgccactcgtctcc

SEQ ID NO: 5492014 - DNA, 25 bp, Homo sapien
aacccactacgtgccaaccactgtt

SEQ ID NO: 5492015 - DNA, 25 bp, Homo sapien
tcagagattgctaggaataatttac

SEQ ID NO: 5492016 - DNA, 25 bp, Homo sapien
cagggctctttggaacccaaaattc

SEQ ID NO: 5492017 - DNA, 25 bp, Homo sapien
cctactgcagaaattgacagaacac

SEQ ID NO: 5492018 - DNA, 25 bp, Homo sapien
aaaggtgaccatgtatgacttgtgc

SEQ ID NO: 5492019 - DNA, 25 bp, Homo sapien
tactcctgaggtacgtaagaccctc

SEQ ID NO: 5492020 - DNA, 25 bp, Homo sapien
tataaagccaaggtccctggaagag

SEQ ID NO: 5492021 - DNA, 25 bp, Homo sapien
agaagaggaaagataccaaacctga

SEQ ID NO: 5492022 - DNA, 25 bp, Homo sapien
caagaagatttccaagccagaccta

SEQ ID NO: 5492023 - DNA, 25 bp, Homo sapien
agtcatctgagaagcccccagagaa

SEQ ID NO: 5492024 - DNA, 25 bp, Homo sapien
aggagagcctcaaagccactaccaa

SEQ ID NO: 5492025 - DNA, 25 bp, Homo sapien
agccagacctaaagccctttactcc

SEQ ID NO: 5492026 - DNA, 25 bp, Homo sapien
aagaaaagatatcaaagctggaaga

SEQ ID NO: 5492027 - DNA, 25 bp, Homo sapien
aggcaaaagagtcatctgagaagcc

SEQ ID NO: 5492028 - DNA, 25 bp, Homo sapien
ccaaacctgagctcaagaagatttc

SEQ ID NO: 5492029 - DNA, 25 bp, Homo sapien
ggccgtgagcaagttggccaaacgg

SEQ ID NO: 5492030 - DNA, 25 bp, Homo sapien
atcatcgtcactatcttgcagaatt

SEQ ID NO: 5492031 - DNA, 25 bp, Homo sapien
ccataaggtaaaggtttgacattaa

SEQ ID NO: 5492032 - DNA, 25 bp, Homo sapien
tgcctggccataatttctcaaagta

SEQ ID NO: 5492033 - DNA, 25 bp, Homo sapien
atcctgtaatatgtttgatgagcac

SEQ ID NO: 5492034 - DNA, 25 bp, Homo sapien
ttttgtccaacttatcaggtcttat

SEQ ID NO: 5492035 - DNA, 25 bp, Homo sapien
acacaatcatcaaatctagcaagtt

SEQ ID NO: 5492036 - DNA, 25 bp, Homo sapien
tcaaagtacaatataccataaggta

SEQ ID NO: 5492037 - DNA, 25 bp, Homo sapien
atataactaagcagatatagaatgc

SEQ ID NO: 5492038 - DNA, 25 bp, Homo sapien
gacattaatgacagtgaatatagat

SEQ ID NO: 5492039 - DNA, 25 bp, Homo sapien
atgtttgatgagcacagagtaggaa

SEQ ID NO: 5492040 - DNA, 25 bp, Homo sapien
gcagatatagaatgcaaaatgctca

SEQ ID NO: 5492041 - DNA, 25 bp, Homo sapien
taatagataaaagtagaactgcatt

SEQ ID NO: 5492042 - DNA, 25 bp, Homo sapien
ccggccgaggatcatgttcttaatc

SEQ ID NO: 5492043 - DNA, 25 bp, Homo sapien
tggtgacaagaaccattgcaaaaca

SEQ ID NO: 5492044 - DNA, 25 bp, Homo sapien
gaggggcacctgatattaggaacaa

SEQ ID NO: 5492045 - DNA, 25 bp, Homo sapien
ccattttcacacactggaggggcac

SEQ ID NO: 5492046 - DNA, 25 bp, Homo sapien
aaaaaaaagtctagagctgagcaaa

SEQ ID NO: 5492047 - DNA, 25 bp, Homo sapien
tattaggaacaataaagacaagaga

SEQ ID NO: 5492048 - DNA, 25 bp, Homo sapien
cctgaggcacaaatgcaaacagcag

SEQ ID NO: 5492049 - DNA, 25 bp, Homo sapien
gctgagcaaaaatggtctgtccctt

SEQ ID NO: 5492050 - DNA, 25 bp, Homo sapien
caggcaggtggcacttagaaattat

SEQ ID NO: 5492051 - DNA, 25 bp, Homo sapien
gcttctttgggccctgaggcacaaa

SEQ ID NO: 5492052 - DNA, 25 bp, Homo sapien
gctgaggaggtgtccatctcacaga

SEQ ID NO: 5492053 - DNA, 25 bp, Homo sapien
ccatctcacagatacggagcccctg

SEQ ID NO: 5492054 - DNA, 25 bp, Homo sapien
atcagtggtttgcagacttgagtgt

SEQ ID NO: 5492055 - DNA, 25 bp, Homo sapien
cctccaactcctaccacccactccc

SEQ ID NO: 5492056 - DNA, 25 bp, Homo sapien
gcagtgactgatgccaatggtacac

SEQ ID NO: 5492057 - DNA, 25 bp, Homo sapien
ggagcccctgctaagtgctagacat

SEQ ID NO: 5492058 - DNA, 25 bp, Homo sapien
cctggcacagggacacctcttttgg

SEQ ID NO: 5492059 - DNA, 25 bp, Homo sapien
tgctagacattgaactggatgccgg

SEQ ID NO: 5492060 - DNA, 25 bp, Homo sapien
acacagatcacatgctgagcagcac

SEQ ID NO: 5492061 - DNA, 25 bp, Homo sapien
aggagtacttataagcagggcttgc

SEQ ID NO: 5492062 - DNA, 25 bp, Homo sapien
gtcttggcttaaatgcagcagtact

SEQ ID NO: 5492063 - DNA, 25 bp, Homo sapien
caggattacatggtgataaagagtt

SEQ ID NO: 5492064 - DNA, 25 bp, Homo sapien
caactgctgttggctagatctaggt

SEQ ID NO: 5492065 - DNA, 25 bp, Homo sapien
cggaagtgcttgtgattgtacagga

SEQ ID NO: 5492066 - DNA, 25 bp, Homo sapien
tttaatgcaggtgggatccaacttt

SEQ ID NO: 5492067 - DNA, 25 bp, Homo sapien
ttgtaatgtgctaggacagtagttt

SEQ ID NO: 5492068 - DNA, 25 bp, Homo sapien
cggagtttgggaaatttagagctag

SEQ ID NO: 5492069 - DNA, 25 bp, Homo sapien
ggctagatctaggtgtgctgacttc

SEQ ID NO: 5492070 - DNA, 25 bp, Homo sapien
ggctgggtatgcttccgtgaattta

SEQ ID NO: 5492071 - DNA, 25 bp, Homo sapien
aggataatgctgttttcggaagtgc

SEQ ID NO: 5492072 - DNA, 25 bp, Homo sapien
gagctaggaaatcatgtggtcgatc

SEQ ID NO: 5492073 - DNA, 25 bp, Homo sapien
ccagtttctgagggagttctgtgct

SEQ ID NO: 5492074 - DNA, 25 bp, Homo sapien
tactagaagatgattgcgctgatgc

SEQ ID NO: 5492075 - DNA, 25 bp, Homo sapien
actgagagtttttgaggaagagtga

SEQ ID NO: 5492076 - DNA, 25 bp, Homo sapien
tgacagatgcaaagccgtgttacta

SEQ ID NO: 5492077 - DNA, 25 bp, Homo sapien
gaccaaggagtgtattctaggcaga

SEQ ID NO: 5492078 - DNA, 25 bp, Homo sapien
tcacaggaaatggcctgaccaagga

SEQ ID NO: 5492079 - DNA, 25 bp, Homo sapien
gtaggctgccctcacggaatttatt

SEQ ID NO: 5492080 - DNA, 25 bp, Homo sapien
tggaaaatagagttggataaatgca

SEQ ID NO: 5492081 - DNA, 25 bp, Homo sapien
gggaaatctagtcacaggaaatggc

SEQ ID NO: 5492082 - DNA, 25 bp, Homo sapien
tatttgagaaggactactggaaaat

SEQ ID NO: 5492083 - DNA, 25 bp, Homo sapien
aggattcagatgaacaggaaaaaag

SEQ ID NO: 5492084 - DNA, 25 bp, Homo sapien
gctaggagctaatagcaggaacaag

SEQ ID NO: 5492085 - DNA, 25 bp, Homo sapien
aatttctaacagtagaccaaaacga

SEQ ID NO: 5492086 - DNA, 25 bp, Homo sapien
tcgttttggtctactgttagaaatt

SEQ ID NO: 5492087 - DNA, 25 bp, Homo sapien
tggctgtgcattggtctaatggaac

SEQ ID NO: 5492088 - DNA, 25 bp, Homo sapien
aggatacacctaaagatgagaagct

SEQ ID NO: 5492089 - DNA, 25 bp, Homo sapien
agaggtgcaaaggtcttgaaaaaat

SEQ ID NO: 5492090 - DNA, 25 bp, Homo sapien
gctggaataattgggcatcagatgc

SEQ ID NO: 5492091 - DNA, 25 bp, Homo sapien
acatatgtaacagtgccggagtttt

SEQ ID NO: 5492092 - DNA, 25 bp, Homo sapien
ccaacatgtatgtggacaactggtt

SEQ ID NO: 5492093 - DNA, 25 bp, Homo sapien
ggtcttgaaaaaatgatgctggaat

SEQ ID NO: 5492094 - DNA, 25 bp, Homo sapien
acactacgtagaggcccctttttgc

SEQ ID NO: 5492095 - DNA, 25 bp, Homo sapien
gacaactggtttttgacagaggtgc

SEQ ID NO: 5492096 - DNA, 25 bp, Homo sapien
taacactggcaaagattaaagtcca

SEQ ID NO: 5492097 - DNA, 25 bp, Homo sapien
actgtttggtatatgtaggtccccc

SEQ ID NO: 5492098 - DNA, 25 bp, Homo sapien
acgtttcacgtccatgcgtgctgtc

SEQ ID NO: 5492099 - DNA, 25 bp, Homo sapien
gacagcacgcatggacgtgaaacgt

SEQ ID NO: 5492100 - DNA, 25 bp, Homo sapien
actttatagactcattgtctattag

SEQ ID NO: 5492101 - DNA, 25 bp, Homo sapien
ctaatagacaatgagtctataaagt

SEQ ID NO: 5492102 - DNA, 25 bp, Homo sapien
gtagtagtagttggaaatttctcaa

SEQ ID NO: 5492103 - DNA, 25 bp, Homo sapien
ttgagaaatttccaactactactac

SEQ ID NO: 5492104 - DNA, 25 bp, Homo sapien
gaagtgatgaagatatccctctgac

SEQ ID NO: 5492105 - DNA, 25 bp, Homo sapien
cagaaaacagctgctactggaatta

SEQ ID NO: 5492106 - DNA, 25 bp, Homo sapien
agggaagctctgggtacatttcatg

SEQ ID NO: 5492107 - DNA, 25 bp, Homo sapien
tttcatgaagagaagtgatgaagat

SEQ ID NO: 5492108 - DNA, 25 bp, Homo sapien
catgcagaaacagaatgagtcaatc

SEQ ID NO: 5492109 - DNA, 25 bp, Homo sapien
gaaaatgtttcaatcagggaagctc

SEQ ID NO: 5492110 - DNA, 25 bp, Homo sapien
tcaaataagtaagtagaaatgcatg

SEQ ID NO: 5492111 - DNA, 25 bp, Homo sapien
gaattagtacccagaaatgaagtta

SEQ ID NO: 5492112 - DNA, 25 bp, Homo sapien
tacaaacaagaagtgaacattaatt

SEQ ID NO: 5492113 - DNA, 25 bp, Homo sapien
gctggaagtgtaaagttgttagcac

SEQ ID NO: 5492114 - DNA, 25 bp, Homo sapien
gacagcttagtgtgcaccatggttc

SEQ ID NO: 5492115 - DNA, 25 bp, Homo sapien
atataaaattagggaaaatcagaaa

SEQ ID NO: 5492116 - DNA, 25 bp, Homo sapien
tcatgatccaaattacttagtctgt

SEQ ID NO: 5492117 - DNA, 25 bp, Homo sapien
tcccggcctgagatgtttatcttct

SEQ ID NO: 5492118 - DNA, 25 bp, Homo sapien
ttagccagggtgatcttgaacttct

SEQ ID NO: 5492119 - DNA, 25 bp, Homo sapien
ttctccaaagcctacaaagagatta

SEQ ID NO: 5492120 - DNA, 25 bp, Homo sapien
aaacacaaattgctcatcagacata

SEQ ID NO: 5492121 - DNA, 25 bp, Homo sapien
ttacaagccaccatcagtgacttct

SEQ ID NO: 5492122 - DNA, 25 bp, Homo sapien
ctcaagtagatggaattacaggcac

SEQ ID NO: 5492123 - DNA, 25 bp, Homo sapien
tctgcctccccagttcaagcacttc

SEQ ID NO: 5492124 - DNA, 25 bp, Homo sapien
ctgagctcaagcatctgcccacctc

SEQ ID NO: 5492125 - DNA, 25 bp, Homo sapien
caagcacttctcctacctaagcctc

SEQ ID NO: 5492126 - DNA, 25 bp, Homo sapien
aaatctgtagatgccagtctggctc

SEQ ID NO: 5492127 - DNA, 25 bp, Homo sapien
atccgccagttgatgactgtccatc

SEQ ID NO: 5492128 - DNA, 25 bp, Homo sapien
ttcaaatgatgatggatggatagac

SEQ ID NO: 5492129 - DNA, 25 bp, Homo sapien
agctcagttacagctcaacaaaagc

SEQ ID NO: 5492130 - DNA, 25 bp, Homo sapien
agaggtacatcaaagaagctattcc

SEQ ID NO: 5492131 - DNA, 25 bp, Homo sapien
aatgcataccatgtgagtacttggc

SEQ ID NO: 5492132 - DNA, 25 bp, Homo sapien
atccatgatgatattgcctagtttt

SEQ ID NO: 5492133 - DNA, 25 bp, Homo sapien
aaaggcccaatgaatgattgtaaat

SEQ ID NO: 5492134 - DNA, 25 bp, Homo sapien
atggatagacagataaaaggcccaa

SEQ ID NO: 5492135 - DNA, 25 bp, Homo sapien
tatgtaccgctatatccgccagttg

SEQ ID NO: 5492136 - DNA, 25 bp, Homo sapien
gcaatttaaggcaaagaggtacatc

SEQ ID NO: 5492137 - DNA, 25 bp, Homo sapien
gtcccgacctcaccctcggtgtccg

SEQ ID NO: 5492138 - DNA, 25 bp, Homo sapien
cggacaccgagggtgaggtcgggac

SEQ ID NO: 5492139 - DNA, 25 bp, Homo sapien
gcatctcctgagaatggacactgaa

SEQ ID NO: 5492140 - DNA, 25 bp, Homo sapien
ttgactgtgtggtttttaggggcaa

SEQ ID NO: 5492141 - DNA, 25 bp, Homo sapien
tcaggctgcctgtggaatagttttt

SEQ ID NO: 5492142 - DNA, 25 bp, Homo sapien
ttaggggcaactttttcaggcaaga

SEQ ID NO: 5492143 - DNA, 25 bp, Homo sapien
tgttggctgttttgactgtgtggtt

SEQ ID NO: 5492144 - DNA, 25 bp, Homo sapien
gtctatgaccagtgctacttagcat

SEQ ID NO: 5492145 - DNA, 25 bp, Homo sapien
tgaattgtaactgtaccactcttat

SEQ ID NO: 5492146 - DNA, 25 bp, Homo sapien
gatcacaaggttagcagttcaagac

SEQ ID NO: 5492147 - DNA, 25 bp, Homo sapien
tcaggcaagagtctatgaccagtgc

SEQ ID NO: 5492148 - DNA, 25 bp, Homo sapien
tttgcagttggggtgcatttttgtt

SEQ ID NO: 5492149 - DNA, 25 bp, Homo sapien
ttaaaactagtagtatgggctgggc

SEQ ID NO: 5492150 - DNA, 25 bp, Homo sapien
caaaatagatcgcggattcaggtgt

SEQ ID NO: 5492151 - DNA, 25 bp, Homo sapien
ggtcggatcatgctaaaaggagata

SEQ ID NO: 5492152 - DNA, 25 bp, Homo sapien
tatgagcaagtgaatatgcggatag

SEQ ID NO: 5492153 - DNA, 25 bp, Homo sapien
aatgaagtgagaaattgttgagaag

SEQ ID NO: 5492154 - DNA, 25 bp, Homo sapien
acaaagtcaagaaaacaactgggtc

SEQ ID NO: 5492155 - DNA, 25 bp, Homo sapien
tagatgatgcagaagagattcattc

SEQ ID NO: 5492156 - DNA, 25 bp, Homo sapien
tgttgagaaggatacagtttgtttt

SEQ ID NO: 5492157 - DNA, 25 bp, Homo sapien
ttttgatgagtatatgaaccttgta

SEQ ID NO: 5492158 - DNA, 25 bp, Homo sapien
gattcaggtgtggctctatgagcaa

SEQ ID NO: 5492159 - DNA, 25 bp, Homo sapien
aactagaaatgatcaatgaagtgag

SEQ ID NO: 5492160 - DNA, 25 bp, Homo sapien
gaaggttatggtgcagcccatcaac

SEQ ID NO: 5492161 - DNA, 25 bp, Homo sapien
ggggccccctagatgcgaggacgtc

SEQ ID NO: 5492162 - DNA, 25 bp, Homo sapien
gacgtcctcgcatctagggggcccc

SEQ ID NO: 5492163 - DNA, 25 bp, Homo sapien
aagtccagcagtggtggcctaatta

SEQ ID NO: 5492164 - DNA, 25 bp, Homo sapien
ggggcagccatgtttatctccaggt

SEQ ID NO: 5492165 - DNA, 25 bp, Homo sapien
ccctgaaaattacatgctggagcac

SEQ ID NO: 5492166 - DNA, 25 bp, Homo sapien
acgttatgtaaacaaggaatgaaac

SEQ ID NO: 5492167 - DNA, 25 bp, Homo sapien
gagagtgatttggcaacacacagga

SEQ ID NO: 5492168 - DNA, 25 bp, Homo sapien
gctatatgaatagagagaggaaatg

SEQ ID NO: 5492169 - DNA, 25 bp, Homo sapien
tggagattaatgttcacaaggcttt

SEQ ID NO: 5492170 - DNA, 25 bp, Homo sapien
gaagtctctgaacgaattctgagtt

SEQ ID NO: 5492171 - DNA, 25 bp, Homo sapien
ctaacattcaggagagtgatttggc

SEQ ID NO: 5492172 - DNA, 25 bp, Homo sapien
gcactgtagactactctagagcccc

SEQ ID NO: 5492173 - DNA, 25 bp, Homo sapien
tctgtaaggtaaggatactggaatg

SEQ ID NO: 5492174 - DNA, 25 bp, Homo sapien
catggttcatgtccagttgaaaagt

SEQ ID NO: 5492175 - DNA, 25 bp, Homo sapien
tttgatgtgaatatctacgtgccat

SEQ ID NO: 5492176 - DNA, 25 bp, Homo sapien
agttgaaaagtacagctgcagacaa

SEQ ID NO: 5492177 - DNA, 25 bp, Homo sapien
tacgtgccataaaagtacatggttc

SEQ ID NO: 5492178 - DNA, 25 bp, Homo sapien
acaagaacttccagatgctcactgc

SEQ ID NO: 5492179 - DNA, 25 bp, Homo sapien
taaaaataaaatcggtctgcaaatc

SEQ ID NO: 5492180 - DNA, 25 bp, Homo sapien
caactaacaaagaaaaagcttagga

SEQ ID NO: 5492181 - DNA, 25 bp, Homo sapien
gtaacagctactcaaaataacatgc

SEQ ID NO: 5492182 - DNA, 25 bp, Homo sapien
aaaagcgctttagttcaaaagccac

SEQ ID NO: 5492183 - DNA, 25 bp, Homo sapien
ttccatatttggacaaaaggctttc

SEQ ID NO: 5492184 - DNA, 25 bp, Homo sapien
atcacaacagattttagtaacagct

SEQ ID NO: 5492185 - DNA, 25 bp, Homo sapien
gctctctaagaaggcatcggaagtg

SEQ ID NO: 5492186 - DNA, 25 bp, Homo sapien
gtgcagcaactctgccccggctctc

SEQ ID NO: 5492187 - DNA, 25 bp, Homo sapien
cttctctgaagacaagacggacaag

SEQ ID NO: 5492188 - DNA, 25 bp, Homo sapien
ttcacaagctgcgtcaaggtgagaa

SEQ ID NO: 5492189 - DNA, 25 bp, Homo sapien
tcctgggtttcagcattggaggtgg

SEQ ID NO: 5492190 - DNA, 25 bp, Homo sapien
tcctcactgaccatatgtgctggga

SEQ ID NO: 5492191 - DNA, 25 bp, Homo sapien
cgtggtgcaaagagttgaaattcac

SEQ ID NO: 5492192 - DNA, 25 bp, Homo sapien
atcggaagtgacctagtgagaataa

SEQ ID NO: 5492193 - DNA, 25 bp, Homo sapien
cagggtcgagatgtcctacatcccg

SEQ ID NO: 5492194 - DNA, 25 bp, Homo sapien
tgagaacttaatcctgggtttcagc

SEQ ID NO: 5492195 - DNA, 25 bp, Homo sapien
atgtgccatgctggcttccgctgtg

SEQ ID NO: 5492196 - DNA, 25 bp, Homo sapien
gtgtcgccaccggcgcccggacccc

SEQ ID NO: 5492197 - DNA, 25 bp, Homo sapien
ggggtccgggcgccggtggcgacac

SEQ ID NO: 5492198 - DNA, 25 bp, Homo sapien
tgtgtcgccaccggcgcccggaccc

SEQ ID NO: 5492199 - DNA, 25 bp, Homo sapien
gggtccgggcgccggtggcgacaca

SEQ ID NO: 5492200 - DNA, 25 bp, Homo sapien
tcaaagcaacaaggttaaatgaaga

SEQ ID NO: 5492201 - DNA, 25 bp, Homo sapien
aagggcactggagttttgtaaaaca

SEQ ID NO: 5492202 - DNA, 25 bp, Homo sapien
caaatgagaattatgcaactaaatc

SEQ ID NO: 5492203 - DNA, 25 bp, Homo sapien
aatagttgactccacattatgcaat

SEQ ID NO: 5492204 - DNA, 25 bp, Homo sapien
tatgcaatatactatagcaaaggaa

SEQ ID NO: 5492205 - DNA, 25 bp, Homo sapien
gaaaataaagtaatgatctacaatt

SEQ ID NO: 5492206 - DNA, 25 bp, Homo sapien
tataacaaggagtatcttgggatat

SEQ ID NO: 5492207 - DNA, 25 bp, Homo sapien
aaatttaaaattcatggtccaccaa

SEQ ID NO: 5492208 - DNA, 25 bp, Homo sapien
taggaactttcagatcaacacgtac

SEQ ID NO: 5492209 - DNA, 25 bp, Homo sapien
tagaaaagtggtatagcaaatgaga

SEQ ID NO: 5492210 - DNA, 25 bp, Homo sapien
aagctttaggagtactcaaagcaac

SEQ ID NO: 5492211 - DNA, 25 bp, Homo sapien
ccctaatggaataccactggtgtcc

SEQ ID NO: 5492212 - DNA, 25 bp, Homo sapien
gaatatgttatgggatgaagtgttt

SEQ ID NO: 5492213 - DNA, 25 bp, Homo sapien
gtgtgatgtcattgtctgctaagtc

SEQ ID NO: 5492214 - DNA, 25 bp, Homo sapien
tccaaaaagaggagattagatacac

SEQ ID NO: 5492215 - DNA, 25 bp, Homo sapien
aagatcacgtgaagacagcatgtga

SEQ ID NO: 5492216 - DNA, 25 bp, Homo sapien
tatgagctgaatatgttatgggatg

SEQ ID NO: 5492217 - DNA, 25 bp, Homo sapien
cagctcagactgtctctcgagaccc

SEQ ID NO: 5492218 - DNA, 25 bp, Homo sapien
acagggcctttcaaagaggtaatta

SEQ ID NO: 5492219 - DNA, 25 bp, Homo sapien
atttaggctccttcaaaagcagttt

SEQ ID NO: 5492220 - DNA, 25 bp, Homo sapien
ggtcatatgagtgggccctaatgga

SEQ ID NO: 5492221 - DNA, 25 bp, Homo sapien
tcacagattgaagtcctaacctcca

SEQ ID NO: 5492222 - DNA, 25 bp, Homo sapien
ttgagtcattagtgtgccacaaaac

SEQ ID NO: 5492223 - DNA, 25 bp, Homo sapien
acaagaaagaaaattaaccatgctc

SEQ ID NO: 5492224 - DNA, 25 bp, Homo sapien
actgagttgtctggaatcaacctcc

SEQ ID NO: 5492225 - DNA, 25 bp, Homo sapien
acaaatgccatgccagctgagtcct

SEQ ID NO: 5492226 - DNA, 25 bp, Homo sapien
cagtttggtccgggaatgaatcctt

SEQ ID NO: 5492227 - DNA, 25 bp, Homo sapien
tgctaattgatgtgactgagttgtc

SEQ ID NO: 5492228 - DNA, 25 bp, Homo sapien
acgttctatggaagcagtttggtcc

SEQ ID NO: 5492229 - DNA, 25 bp, Homo sapien
tccttggtgcaaatgactgagactg

SEQ ID NO: 5492230 - DNA, 25 bp, Homo sapien
gactgagactgtgacgttctatgga

SEQ ID NO: 5492231 - DNA, 25 bp, Homo sapien
ccaagaaatggtgcgtcatcaaata

SEQ ID NO: 5492232 - DNA, 25 bp, Homo sapien
ttacaatggtagctgtaaacgggac

SEQ ID NO: 5492233 - DNA, 25 bp, Homo sapien
gaggtttgcctaagaagtcgcatac

SEQ ID NO: 5492234 - DNA, 25 bp, Homo sapien
agctgccatacaacctgggaggctc

SEQ ID NO: 5492235 - DNA, 25 bp, Homo sapien
ggacatctagttgcaaaggcacctc

SEQ ID NO: 5492236 - DNA, 25 bp, Homo sapien
aaaggaaacatattagggatctgaa

SEQ ID NO: 5492237 - DNA, 25 bp, Homo sapien
tttctaaatggcagagtaaaggtag

SEQ ID NO: 5492238 - DNA, 25 bp, Homo sapien
aacctaaaacacaagaaagatgagt

SEQ ID NO: 5492239 - DNA, 25 bp, Homo sapien
caggtcaagtaagctaaaggaaaca

SEQ ID NO: 5492240 - DNA, 25 bp, Homo sapien
ggacaatttcctgagggcagagcca

SEQ ID NO: 5492241 - DNA, 25 bp, Homo sapien
aggctctgaggttggacaatttcct

SEQ ID NO: 5492242 - DNA, 25 bp, Homo sapien
tctgaaggagataatcaacaagctc

SEQ ID NO: 5492243 - DNA, 25 bp, Homo sapien
accaaatctcaggacgaggtttgcc

SEQ ID NO: 5492244 - DNA, 25 bp, Homo sapien
taagatcaatgggtagaaactataa

SEQ ID NO: 5492245 - DNA, 25 bp, Homo sapien
tctgctcaaaatagggaggaacttt

SEQ ID NO: 5492246 - DNA, 25 bp, Homo sapien
gttgtgagggtagacctaagatcaa

SEQ ID NO: 5492247 - DNA, 25 bp, Homo sapien
ctaggacagaaggaatgttctccag

SEQ ID NO: 5492248 - DNA, 25 bp, Homo sapien
aagagaaacctagaggacagttgtg

SEQ ID NO: 5492249 - DNA, 25 bp, Homo sapien
agggtccccatggaggacctgactg

SEQ ID NO: 5492250 - DNA, 25 bp, Homo sapien
ggggcagagactggcatttttcaga

SEQ ID NO: 5492251 - DNA, 25 bp, Homo sapien
gcagggctagaccagacaacattta

SEQ ID NO: 5492252 - DNA, 25 bp, Homo sapien
aagctctatgtgggtaaattggtct

SEQ ID NO: 5492253 - DNA, 25 bp, Homo sapien
tggactagcctacctaaggggatgg

SEQ ID NO: 5492254 - DNA, 25 bp, Homo sapien
tccaggaatttagacgcaggatgca

SEQ ID NO: 5492255 - DNA, 25 bp, Homo sapien
ggaagaagtgagactcccaactacc

SEQ ID NO: 5492256 - DNA, 25 bp, Homo sapien
ccccagtcccctggagaagatgagt

SEQ ID NO: 5492257 - DNA, 25 bp, Homo sapien
gactgtgactgcttccagggttgga

SEQ ID NO: 5492258 - DNA, 25 bp, Homo sapien
tcccgtgtgcccaaagtagttgatc

SEQ ID NO: 5492259 - DNA, 25 bp, Homo sapien
tttgtctttgaaggagccccagtcc

SEQ ID NO: 5492260 - DNA, 25 bp, Homo sapien
caggaaacaaattagaggttgccag

SEQ ID NO: 5492261 - DNA, 25 bp, Homo sapien
cctgtggcagaagctcaatgtttgt

SEQ ID NO: 5492262 - DNA, 25 bp, Homo sapien
agtggagtgtgggtcaatcacattt

SEQ ID NO: 5492263 - DNA, 25 bp, Homo sapien
cagggtagagattgagacctactct

SEQ ID NO: 5492264 - DNA, 25 bp, Homo sapien
atttacaaataaaagggtgctgagg

SEQ ID NO: 5492265 - DNA, 25 bp, Homo sapien
gctctgatcagttggtgctaggtgt

SEQ ID NO: 5492266 - DNA, 25 bp, Homo sapien
ttgattaggagaatagcaaagacag

SEQ ID NO: 5492267 - DNA, 25 bp, Homo sapien
tcaattttgcagggggatatcaact

SEQ ID NO: 5492268 - DNA, 25 bp, Homo sapien
ttggaaagatacgctgaagcctaag

SEQ ID NO: 5492269 - DNA, 25 bp, Homo sapien
tcaaagaagagcagtttggatgaga

SEQ ID NO: 5492270 - DNA, 25 bp, Homo sapien
gacatgaatgtggatgttggtgcag

SEQ ID NO: 5492271 - DNA, 25 bp, Homo sapien
ggatgtaattcaagtggagaggtcc

SEQ ID NO: 5492272 - DNA, 25 bp, Homo sapien
atttacatgtgaagagttaggggag

SEQ ID NO: 5492273 - DNA, 25 bp, Homo sapien
atgtgatgaatctgaggtgcctatg

SEQ ID NO: 5492274 - DNA, 25 bp, Homo sapien
agagggtgataagtttggtgtttat

SEQ ID NO: 5492275 - DNA, 25 bp, Homo sapien
atcaactgaacttggtggctgggta

SEQ ID NO: 5492276 - DNA, 25 bp, Homo sapien
aggtccagttggcagttggaaagat

SEQ ID NO: 5492277 - DNA, 25 bp, Homo sapien
gggaagcgctgacatcatggtccct

SEQ ID NO: 5492278 - DNA, 25 bp, Homo sapien
tggggctctcgcgcctccatgcgag

SEQ ID NO: 5492279 - DNA, 25 bp, Homo sapien
cgttagcaatgaaaaccccattttc

SEQ ID NO: 5492280 - DNA, 25 bp, Homo sapien
ccatttccttcgtgctgggtgagtt

SEQ ID NO: 5492281 - DNA, 25 bp, Homo sapien
tgggtgagttcccccttctggctgt

SEQ ID NO: 5492282 - DNA, 25 bp, Homo sapien
tgcctgcctctcgctcccgagcgcc

SEQ ID NO: 5492283 - DNA, 25 bp, Homo sapien
gcctccatgcgaggctctgcctgcc

SEQ ID NO: 5492284 - DNA, 25 bp, Homo sapien
ctcgcgcctccatgcgaggctctgc

SEQ ID NO: 5492285 - DNA, 25 bp, Homo sapien
ctcgctcccgagcgccttccaggag

SEQ ID NO: 5492286 - DNA, 25 bp, Homo sapien
accccattttctgagggaagcgctg

SEQ ID NO: 5492287 - DNA, 25 bp, Homo sapien
gtgctgggtgagttcccccttctgg

SEQ ID NO: 5492288 - DNA, 25 bp, Homo sapien
agagatggggttctcactgcattgc

SEQ ID NO: 5492289 - DNA, 25 bp, Homo sapien
ctggatcttggactgtccggtctcc

SEQ ID NO: 5492290 - DNA, 25 bp, Homo sapien
cactgtgctaacttcatgttgaaat

SEQ ID NO: 5492291 - DNA, 25 bp, Homo sapien
cttcaactcttgtccccaagtagct

SEQ ID NO: 5492292 - DNA, 25 bp, Homo sapien
taatgttatgaaagggtaagtccag

SEQ ID NO: 5492293 - DNA, 25 bp, Homo sapien
cttgccctccagtgttcaaagcacc

SEQ ID NO: 5492294 - DNA, 25 bp, Homo sapien
agggctccactctccaagggcggag

SEQ ID NO: 5492295 - DNA, 25 bp, Homo sapien
aaagggtaagtccagcccgcttgtg

SEQ ID NO: 5492296 - DNA, 25 bp, Homo sapien
agttcctggatcttggactgtccgg

SEQ ID NO: 5492297 - DNA, 25 bp, Homo sapien
gcccgcttgtgcctctcttgccctc

SEQ ID NO: 5492298 - DNA, 25 bp, Homo sapien
ctccaagggcggagttaatgttatg

SEQ ID NO: 5492299 - DNA, 25 bp, Homo sapien
cctggcccaagcaaggtcttcagta

SEQ ID NO: 5492300 - DNA, 25 bp, Homo sapien
gagagcaaactctcctgctggctta

SEQ ID NO: 5492301 - DNA, 25 bp, Homo sapien
tctcaccggagagagcaaactctcc

SEQ ID NO: 5492302 - DNA, 25 bp, Homo sapien
caaggtcttcagtagcaaaacattt

SEQ ID NO: 5492303 - DNA, 25 bp, Homo sapien
gatagtgccgcattactgtagtttt

SEQ ID NO: 5492304 - DNA, 25 bp, Homo sapien
ggtggtgatagtgccgcattactgt

SEQ ID NO: 5492305 - DNA, 25 bp, Homo sapien
ggcccaagcaaggtcttcagtagca

SEQ ID NO: 5492306 - DNA, 25 bp, Homo sapien
gatggctttcactgagtctcaccgg

SEQ ID NO: 5492307 - DNA, 25 bp, Homo sapien
agtgccaatctcattacatcatatc

SEQ ID NO: 5492308 - DNA, 25 bp, Homo sapien
tacatcatatcaagactaccactac

SEQ ID NO: 5492309 - DNA, 25 bp, Homo sapien
tgctggcttatgagttcatagctaa

SEQ ID NO: 5492310 - DNA, 25 bp, Homo sapien
aagctgagttgatacattggggatt

SEQ ID NO: 5492311 - DNA, 25 bp, Homo sapien
cccttctaggaggctccaccctggt

SEQ ID NO: 5492312 - DNA, 25 bp, Homo sapien
ctctccaggccactccccaaggatg

SEQ ID NO: 5492313 - DNA, 25 bp, Homo sapien
ggatggtgcgtccctgcccttctag

SEQ ID NO: 5492314 - DNA, 25 bp, Homo sapien
ccccaaaacagtgcactgcctcctc

SEQ ID NO: 5492315 - DNA, 25 bp, Homo sapien
tcaacacgcacctctgcggcgtcct

SEQ ID NO: 5492316 - DNA, 25 bp, Homo sapien
ccaccctggtgcgacccactcatca

SEQ ID NO: 5492317 - DNA, 25 bp, Homo sapien
gctgggacatatggtctcccggcca

SEQ ID NO: 5492318 - DNA, 25 bp, Homo sapien
ccccttcccgaggcctctccaggcc

SEQ ID NO: 5492319 - DNA, 25 bp, Homo sapien
ctcctcacctgccatgagggccggt

SEQ ID NO: 5492320 - DNA, 25 bp, Homo sapien
ctggagagcatctgccactatggct

SEQ ID NO: 5492321 - DNA, 25 bp, Homo sapien
ctgggctcaagcagtccttccacct

SEQ ID NO: 5492322 - DNA, 25 bp, Homo sapien
ggacagtaagtgggttgatatcatt

SEQ ID NO: 5492323 - DNA, 25 bp, Homo sapien
gttgttaaggtgtttcaggatggag

SEQ ID NO: 5492324 - DNA, 25 bp, Homo sapien
cagagcactgggtttacaggtgtga

SEQ ID NO: 5492325 - DNA, 25 bp, Homo sapien
tataggtagtgctttcaaataaaac

SEQ ID NO: 5492326 - DNA, 25 bp, Homo sapien
tgagtagccaggactataggcacat

SEQ ID NO: 5492327 - DNA, 25 bp, Homo sapien
tgtgagccactgtgcagcctccttt

SEQ ID NO: 5492328 - DNA, 25 bp, Homo sapien
tctgcctgctagaaagggacagtaa

SEQ ID NO: 5492329 - DNA, 25 bp, Homo sapien
cttgctgtgttacccaggctggtct

SEQ ID NO: 5492330 - DNA, 25 bp, Homo sapien
atggaggaatcagttcctgagatag

SEQ ID NO: 5492331 - DNA, 25 bp, Homo sapien
gtcgtccaggctaaagtacagtggc

SEQ ID NO: 5492332 - DNA, 25 bp, Homo sapien
tcccgtcggttccaatcgtgccccg

SEQ ID NO: 5492333 - DNA, 25 bp, Homo sapien
cggggcacgattggaaccgacggga

SEQ ID NO: 5492334 - DNA, 25 bp, Homo sapien
cagccacctgaatagctaggattac

SEQ ID NO: 5492335 - DNA, 25 bp, Homo sapien
tgagtcactcacataattgtcaatc

SEQ ID NO: 5492336 - DNA, 25 bp, Homo sapien
ctgtgtagacagagctttattgccc

SEQ ID NO: 5492337 - DNA, 25 bp, Homo sapien
gggctctcccttaaagacacatggc

SEQ ID NO: 5492338 - DNA, 25 bp, Homo sapien
tcccctgcggccttccgtggtcaca

SEQ ID NO: 5492339 - DNA, 25 bp, Homo sapien
acacatggccacagacacctccttc

SEQ ID NO: 5492340 - DNA, 25 bp, Homo sapien
ggcgtgagtggtggccctattttta

SEQ ID NO: 5492341 - DNA, 25 bp, Homo sapien
tctgtgattgaagcagacttctcgc

SEQ ID NO: 5492342 - DNA, 25 bp, Homo sapien
taggctcatttttctgtgggctctc

SEQ ID NO: 5492343 - DNA, 25 bp, Homo sapien
caccgtgttgatcaggctggtctcg

SEQ ID NO: 5492344 - DNA, 25 bp, Homo sapien
tctcatgcagttcagtctttccatc

SEQ ID NO: 5492345 - DNA, 25 bp, Homo sapien
atggactagctgaggctacacagtc

SEQ ID NO: 5492346 - DNA, 25 bp, Homo sapien
attcccagtaagagacagtcacaag

SEQ ID NO: 5492347 - DNA, 25 bp, Homo sapien
atgaggaggcgtgttcgttctttta

SEQ ID NO: 5492348 - DNA, 25 bp, Homo sapien
caggccaggaggatcattcttctca

SEQ ID NO: 5492349 - DNA, 25 bp, Homo sapien
gcggttctgctcagggagtaattgc

SEQ ID NO: 5492350 - DNA, 25 bp, Homo sapien
cagtttcttgacagagtacggagcc

SEQ ID NO: 5492351 - DNA, 25 bp, Homo sapien
tacggagccctctgaaaaatgacaa

SEQ ID NO: 5492352 - DNA, 25 bp, Homo sapien
tgtccagtcaaaaaaggtatgggcc

SEQ ID NO: 5492353 - DNA, 25 bp, Homo sapien
catgagactgatggacatggactag

SEQ ID NO: 5492354 - DNA, 25 bp, Homo sapien
cacaagatgtaaagaacagtagcac

SEQ ID NO: 5492355 - DNA, 25 bp, Homo sapien
agcaaccagaggagtataaagactg

SEQ ID NO: 5492356 - DNA, 25 bp, Homo sapien
ttcaaaccaccactgagtagttctt

SEQ ID NO: 5492357 - DNA, 25 bp, Homo sapien
attcttgatcatccctcgagagggt

SEQ ID NO: 5492358 - DNA, 25 bp, Homo sapien
agcagagccctctaaggccaaatgg

SEQ ID NO: 5492359 - DNA, 25 bp, Homo sapien
aattcagatccccagaacaagattt

SEQ ID NO: 5492360 - DNA, 25 bp, Homo sapien
agtcagagcgggaattccttaagtc

SEQ ID NO: 5492361 - DNA, 25 bp, Homo sapien
tttccccagtcagagcgggaattcc

SEQ ID NO: 5492362 - DNA, 25 bp, Homo sapien
cttaagtctgctgcaaggcttcaaa

SEQ ID NO: 5492363 - DNA, 25 bp, Homo sapien
tggtggcaacatattagggagcttt

SEQ ID NO: 5492364 - DNA, 25 bp, Homo sapien
tttgaatcttaatgagcacacctcc

SEQ ID NO: 5492365 - DNA, 25 bp, Homo sapien
ttggccacaggttataatctgctcc

SEQ ID NO: 5492366 - DNA, 25 bp, Homo sapien
cctcgagagggtactctcaggtcca

SEQ ID NO: 5492367 - DNA, 25 bp, Homo sapien
tacctgtatggctgacaaagatgtc

SEQ ID NO: 5492368 - DNA, 25 bp, Homo sapien
gcagaagcatctgcagtatggggct

SEQ ID NO: 5492369 - DNA, 25 bp, Homo sapien
gtgaggcctcttgtcagaaatggtt

SEQ ID NO: 5492370 - DNA, 25 bp, Homo sapien
acccaaaccgtcatggccattcgtc

SEQ ID NO: 5492371 - DNA, 25 bp, Homo sapien
tgcctgcaccacagaaaaaagcaat

SEQ ID NO: 5492372 - DNA, 25 bp, Homo sapien
tgtggaatttgtacaaacgaggtga

SEQ ID NO: 5492373 - DNA, 25 bp, Homo sapien
atcggatctgtactggaatgactga

SEQ ID NO: 5492374 - DNA, 25 bp, Homo sapien
gtgaacgatgatcaggatgccatct

SEQ ID NO: 5492375 - DNA, 25 bp, Homo sapien
agaataatgtatatgggggtgcttt

SEQ ID NO: 5492376 - DNA, 25 bp, Homo sapien
gtccatctgcagtgggcagtgatgc

SEQ ID NO: 5492377 - DNA, 25 bp, Homo sapien
tgcgtactagagaaacttttggtcc

SEQ ID NO: 5492378 - DNA, 25 bp, Homo sapien
gatgctgaattatggttgaacggtc

SEQ ID NO: 5492379 - DNA, 25 bp, Homo sapien
tgaacggtcaccgaaggctttccca

SEQ ID NO: 5492380 - DNA, 25 bp, Homo sapien
gggaggttaggtatatgtgttctta

SEQ ID NO: 5492381 - DNA, 25 bp, Homo sapien
tgatgttctgtaagagacgagcttc

SEQ ID NO: 5492382 - DNA, 25 bp, Homo sapien
ataataagggatgagcttcgactga

SEQ ID NO: 5492383 - DNA, 25 bp, Homo sapien
agacgagcttcgactgaacactttc

SEQ ID NO: 5492384 - DNA, 25 bp, Homo sapien
agggatgagcttcgactgaagccct

SEQ ID NO: 5492385 - DNA, 25 bp, Homo sapien
aggcctttcttgagtatgagttcgc

SEQ ID NO: 5492386 - DNA, 25 bp, Homo sapien
tgctgactaaggttagtgcttcggc

SEQ ID NO: 5492387 - DNA, 25 bp, Homo sapien
cagtaagcgatgagatccaactgaa

SEQ ID NO: 5492388 - DNA, 25 bp, Homo sapien
tgatgttcagtaagcgatgagatcc

SEQ ID NO: 5492389 - DNA, 25 bp, Homo sapien
tgtctcggtacctccccgggaggac

SEQ ID NO: 5492390 - DNA, 25 bp, Homo sapien
gtcctcccggggaggtaccgagaca

SEQ ID NO: 5492391 - DNA, 25 bp, Homo sapien
atccaggatcttagggttaggagac

SEQ ID NO: 5492392 - DNA, 25 bp, Homo sapien
cagtggagagactttgatctgtgtc

SEQ ID NO: 5492393 - DNA, 25 bp, Homo sapien
gaaaccagagtcctgaatgtgtatc

SEQ ID NO: 5492394 - DNA, 25 bp, Homo sapien
tagtcaaagaaactgggtcattgtc

SEQ ID NO: 5492395 - DNA, 25 bp, Homo sapien
gtcaggggagatgtcctttaatgga

SEQ ID NO: 5492396 - DNA, 25 bp, Homo sapien
gatggcaggtcattcaagcttggac

SEQ ID NO: 5492397 - DNA, 25 bp, Homo sapien
gatttgtagttgatggaagaagtcc

SEQ ID NO: 5492398 - DNA, 25 bp, Homo sapien
taagctcacataaacatagactccc

SEQ ID NO: 5492399 - DNA, 25 bp, Homo sapien
gaggaagcagattacctgccatcca

SEQ ID NO: 5492400 - DNA, 25 bp, Homo sapien
tttgaggattgagtcatgccctgtc

SEQ ID NO: 5492401 - DNA, 25 bp, Homo sapien
actcccaaggcactgacgtcaatga

SEQ ID NO: 5492402 - DNA, 25 bp, Homo sapien
gctcaaacatgaaagtctggctggc

SEQ ID NO: 5492403 - DNA, 25 bp, Homo sapien
tgggtctaatgcaatcacagcgtcc

SEQ ID NO: 5492404 - DNA, 25 bp, Homo sapien
ctggaagagtcaagaaaacagattc

SEQ ID NO: 5492405 - DNA, 25 bp, Homo sapien
gcatggtaaccgctgaatgacaagt

SEQ ID NO: 5492406 - DNA, 25 bp, Homo sapien
gaagacataagaagccatgagtgaa

SEQ ID NO: 5492407 - DNA, 25 bp, Homo sapien
agggaagcagaagaatcactatcta

SEQ ID NO: 5492408 - DNA, 25 bp, Homo sapien
agagcctcctgaaaggaacacagtc

SEQ ID NO: 5492409 - DNA, 25 bp, Homo sapien
ggcaattggaagaagatacccatgc

SEQ ID NO: 5492410 - DNA, 25 bp, Homo sapien
gtggacagactctagaagctggaag

SEQ ID NO: 5492411 - DNA, 25 bp, Homo sapien
tcctggagagaaagacctaactatt

SEQ ID NO: 5492412 - DNA, 25 bp, Homo sapien
gcgtccttaaatgcggaagagggaa

SEQ ID NO: 5492413 - DNA, 25 bp, Homo sapien
ccaagttagtccaatgggcgttggc

SEQ ID NO: 5492414 - DNA, 25 bp, Homo sapien
ggccctcggactttcgctggcgcca

SEQ ID NO: 5492415 - DNA, 25 bp, Homo sapien
ctatttctgcatgcaggggtgaggt

SEQ ID NO: 5492416 - DNA, 25 bp, Homo sapien
gcgccattaagaaagcctcccttgc

SEQ ID NO: 5492417 - DNA, 25 bp, Homo sapien
ggctggagtctgatcagaagttgca

SEQ ID NO: 5492418 - DNA, 25 bp, Homo sapien
aaagcctcccttgccgggagcggtg

SEQ ID NO: 5492419 - DNA, 25 bp, Homo sapien
cagacccagtgactacttcagagac

SEQ ID NO: 5492420 - DNA, 25 bp, Homo sapien
tgcccggagacacacagctttgtgt

SEQ ID NO: 5492421 - DNA, 25 bp, Homo sapien
cagacacaaagtctgaatgggaacc

SEQ ID NO: 5492422 - DNA, 25 bp, Homo sapien
ggtctgtcccaggtcatttcggtac

SEQ ID NO: 5492423 - DNA, 25 bp, Homo sapien
ctaaacaggagtatgtcgtccaagc

SEQ ID NO: 5492424 - DNA, 25 bp, Homo sapien
aataaatgattatttgggtaaacat

SEQ ID NO: 5492425 - DNA, 25 bp, Homo sapien
gctgtactggagcaaattcgcaagt

SEQ ID NO: 5492426 - DNA, 25 bp, Homo sapien
tgggcaagatcctgtctgtataaaa

SEQ ID NO: 5492427 - DNA, 25 bp, Homo sapien
ctgcagttagtcatgattacaccac

SEQ ID NO: 5492428 - DNA, 25 bp, Homo sapien
agaatatgctttatgctgtactgga

SEQ ID NO: 5492429 - DNA, 25 bp, Homo sapien
catgctgtcctcataatagtgagtt

SEQ ID NO: 5492430 - DNA, 25 bp, Homo sapien
ggggtggttacctccatgctgtcct

SEQ ID NO: 5492431 - DNA, 25 bp, Homo sapien
tataatgacattttggggtggggat

SEQ ID NO: 5492432 - DNA, 25 bp, Homo sapien
actggagcaaattcgcaagtactat

SEQ ID NO: 5492433 - DNA, 25 bp, Homo sapien
aatcatgggggtggttacctccatg

SEQ ID NO: 5492434 - DNA, 25 bp, Homo sapien
gggaagctgcagttagtcatgatta

SEQ ID NO: 5492435 - DNA, 25 bp, Homo sapien
gaaagtgtgaacacgactattccga

SEQ ID NO: 5492436 - DNA, 25 bp, Homo sapien
tcggaatagtcgtgttcacactttc

SEQ ID NO: 5492437 - DNA, 25 bp, Homo sapien
aaatgttcatgctgcccaaagcact

SEQ ID NO: 5492438 - DNA, 25 bp, Homo sapien
aggtggaatctgttgctcttggagc

SEQ ID NO: 5492439 - DNA, 25 bp, Homo sapien
tatatagattcagtgcattccctcc

SEQ ID NO: 5492440 - DNA, 25 bp, Homo sapien
ctgggttttggttgattagtctttc

SEQ ID NO: 5492441 - DNA, 25 bp, Homo sapien
ctgagtgggagtctttatctgttgt

SEQ ID NO: 5492442 - DNA, 25 bp, Homo sapien
tggattggaaggattaatattatta

SEQ ID NO: 5492443 - DNA, 25 bp, Homo sapien
aatcacatctctgagtgggagtctt

SEQ ID NO: 5492444 - DNA, 25 bp, Homo sapien
gctcttggagctacgtactgttgac

SEQ ID NO: 5492445 - DNA, 25 bp, Homo sapien
ctcttattgaggtggaatctgttgc

SEQ ID NO: 5492446 - DNA, 25 bp, Homo sapien
gtatgcctgccttaggtagcctagc

SEQ ID NO: 5492447 - DNA, 25 bp, Homo sapien
cagaaattggagatgtatgcctgcc

SEQ ID NO: 5492448 - DNA, 25 bp, Homo sapien
gacccagcctttagtcgggcaagtc

SEQ ID NO: 5492449 - DNA, 25 bp, Homo sapien
ttacttgaacgagaaaatgcactgt

SEQ ID NO: 5492450 - DNA, 25 bp, Homo sapien
cgggcaagtcgacgatactagaaga

SEQ ID NO: 5492451 - DNA, 25 bp, Homo sapien
actagaagaaaatcagaacccctac

SEQ ID NO: 5492452 - DNA, 25 bp, Homo sapien
ttgatgtatgcagtaagagaagaag

SEQ ID NO: 5492453 - DNA, 25 bp, Homo sapien
tccacagcagccgaatgtctcctca

SEQ ID NO: 5492454 - DNA, 25 bp, Homo sapien
acagcgcaccaacaagtctaccaca

SEQ ID NO: 5492455 - DNA, 25 bp, Homo sapien
taacacctatgaacagtctggccac

SEQ ID NO: 5492456 - DNA, 25 bp, Homo sapien
gggaggtgttgtagccattgacaac

SEQ ID NO: 5492457 - DNA, 25 bp, Homo sapien
tagaacaagcaatggatctggtgaa

SEQ ID NO: 5492458 - DNA, 25 bp, Homo sapien
gcagattccctggcaaacccccttc

SEQ ID NO: 5492459 - DNA, 25 bp, Homo sapien
aggtaaacccctcggtggatagatg

SEQ ID NO: 5492460 - DNA, 25 bp, Homo sapien
tcatgaatgggccccttgtatccac

SEQ ID NO: 5492461 - DNA, 25 bp, Homo sapien
tccaaacatggttcctggaggaggt

SEQ ID NO: 5492462 - DNA, 25 bp, Homo sapien
ggtggaaaataacctcgagaagctc

SEQ ID NO: 5492463 - DNA, 25 bp, Homo sapien
gagccctgtgaggatcgattaacct

SEQ ID NO: 5492464 - DNA, 25 bp, Homo sapien
ggtcctgttccaccggagatgacag

SEQ ID NO: 5492465 - DNA, 25 bp, Homo sapien
ggagagatgaatcaggcacatttaa

SEQ ID NO: 5492466 - DNA, 25 bp, Homo sapien
aataaggccagggccagttgcttca

SEQ ID NO: 5492467 - DNA, 25 bp, Homo sapien
tcattgcaaatggagcatgtggtgg

SEQ ID NO: 5492468 - DNA, 25 bp, Homo sapien
actggaaacaatggaccgctgattg

SEQ ID NO: 5492469 - DNA, 25 bp, Homo sapien
ctgggttctgctggtccagacagtc

SEQ ID NO: 5492470 - DNA, 25 bp, Homo sapien
ggggtcagagaccccacacacagtc

SEQ ID NO: 5492471 - DNA, 25 bp, Homo sapien
agccactcccaaccatgactgacag

SEQ ID NO: 5492472 - DNA, 25 bp, Homo sapien
cacagaagtcaagaactggggtttg

SEQ ID NO: 5492473 - DNA, 25 bp, Homo sapien
acagtccctactggggcaccaccta

SEQ ID NO: 5492474 - DNA, 25 bp, Homo sapien
taacaggagccaaatgctaattccc

SEQ ID NO: 5492475 - DNA, 25 bp, Homo sapien
gcaagctccaagccttgacagcttc

SEQ ID NO: 5492476 - DNA, 25 bp, Homo sapien
accttcgcctagattaaagaggatg

SEQ ID NO: 5492477 - DNA, 25 bp, Homo sapien
gaaatttgcatgagtaacaggagcc

SEQ ID NO: 5492478 - DNA, 25 bp, Homo sapien
cagggcatgtcagaggtctttatgg

SEQ ID NO: 5492479 - DNA, 25 bp, Homo sapien
cctcatggagatcctctgccagggc

SEQ ID NO: 5492480 - DNA, 25 bp, Homo sapien
cacaggtccagagatatcaggaaaa

SEQ ID NO: 5492481 - DNA, 25 bp, Homo sapien
agacctttccagggaatggaggcaa

SEQ ID NO: 5492482 - DNA, 25 bp, Homo sapien
taccgctctactgggaagagcacac

SEQ ID NO: 5492483 - DNA, 25 bp, Homo sapien
gccctctaaggcactaagaaaaggc

SEQ ID NO: 5492484 - DNA, 25 bp, Homo sapien
agaggtgttggctgtctcagcagcc

SEQ ID NO: 5492485 - DNA, 25 bp, Homo sapien
agcagccacgccctccgcttccttc

SEQ ID NO: 5492486 - DNA, 25 bp, Homo sapien
gaggcaacaccaaggaaggccttgg

SEQ ID NO: 5492487 - DNA, 25 bp, Homo sapien
cgcttccttcgagccagagcctctg

SEQ ID NO: 5492488 - DNA, 25 bp, Homo sapien
accaggtatggtagcatgcctctgt

SEQ ID NO: 5492489 - DNA, 25 bp, Homo sapien
tgtgcccagagtaacctaccgctct

SEQ ID NO: 5492490 - DNA, 25 bp, Homo sapien
cttcaaggtgttggtattaggaggt

SEQ ID NO: 5492491 - DNA, 25 bp, Homo sapien
gggaagagcacactgaaatgtaaaa

SEQ ID NO: 5492492 - DNA, 25 bp, Homo sapien
tgcaggtatccaatggaaaacacca

SEQ ID NO: 5492493 - DNA, 25 bp, Homo sapien
ggcatgcaggtatccaatggaaaac

SEQ ID NO: 5492494 - DNA, 25 bp, Homo sapien
aaaaggctaaagacctatgtaagta

SEQ ID NO: 5492495 - DNA, 25 bp, Homo sapien
cacaacacttggcatgcaggtatcc

SEQ ID NO: 5492496 - DNA, 25 bp, Homo sapien
ctgcacctggccccatacttcataa

SEQ ID NO: 5492497 - DNA, 25 bp, Homo sapien
ataaagaacataggactaagaaaaa

SEQ ID NO: 5492498 - DNA, 25 bp, Homo sapien
tcagtaatactgtagcacaacactt

SEQ ID NO: 5492499 - DNA, 25 bp, Homo sapien
tcaattataaaagctgtcaaacaga

SEQ ID NO: 5492500 - DNA, 25 bp, Homo sapien
agaacataggactaagaaaaataac

SEQ ID NO: 5492501 - DNA, 25 bp, Homo sapien
aaaagctgtcaaacagaaatccttt

SEQ ID NO: 5492502 - DNA, 25 bp, Homo sapien
tgtagcacaacacttggcatgcagg

SEQ ID NO: 5492503 - DNA, 25 bp, Homo sapien
cttagatccatctttgagggtctct

SEQ ID NO: 5492504 - DNA, 25 bp, Homo sapien
tcataactggtaagtagcaggatca

SEQ ID NO: 5492505 - DNA, 25 bp, Homo sapien
ggaagtaggcaaaacagacattatc

SEQ ID NO: 5492506 - DNA, 25 bp, Homo sapien
catttcacctggccttagatccatc

SEQ ID NO: 5492507 - DNA, 25 bp, Homo sapien
acttgctcagcgtctcataactggt

SEQ ID NO: 5492508 - DNA, 25 bp, Homo sapien
tttgagggtctctttatctgatagg

SEQ ID NO: 5492509 - DNA, 25 bp, Homo sapien
ttcactctggtaatataagtaatac

SEQ ID NO: 5492510 - DNA, 25 bp, Homo sapien
tatgaggtattggatgctaaatgac

SEQ ID NO: 5492511 - DNA, 25 bp, Homo sapien
cccacccactgtccgcaggactcgc

SEQ ID NO: 5492512 - DNA, 25 bp, Homo sapien
gataggcttctcgtcttggataggc

SEQ ID NO: 5492513 - DNA, 25 bp, Homo sapien
tctcgtcttggataggcaaaggaag

SEQ ID NO: 5492514 - DNA, 25 bp, Homo sapien
gacatccacgagtcgcggaggtggt

SEQ ID NO: 5492515 - DNA, 25 bp, Homo sapien
accacctccgcgactcgtggatgtc

SEQ ID NO: 5492516 - DNA, 25 bp, Homo sapien
cgggccagtgagtccccgggtgcac

SEQ ID NO: 5492517 - DNA, 25 bp, Homo sapien
gtgcacccggggactcactggcccg

SEQ ID NO: 5492518 - DNA, 25 bp, Homo sapien
tgcccgggccagtgagtccccgggt

SEQ ID NO: 5492519 - DNA, 25 bp, Homo sapien
acccggggactcactggcccgggca

SEQ ID NO: 5492520 - DNA, 25 bp, Homo sapien
tactaagcattaatgggtggtgaaa

SEQ ID NO: 5492521 - DNA, 25 bp, Homo sapien
tttttgtcaaggactgatgagccct

SEQ ID NO: 5492522 - DNA, 25 bp, Homo sapien
gggtttagatacgtgaggtccatag

SEQ ID NO: 5492523 - DNA, 25 bp, Homo sapien
tgctaatctgtcagggcccagaaac

SEQ ID NO: 5492524 - DNA, 25 bp, Homo sapien
gcagtgttgtgatcacagcgcacta

SEQ ID NO: 5492525 - DNA, 25 bp, Homo sapien
accatactccagatggggagagaag

SEQ ID NO: 5492526 - DNA, 25 bp, Homo sapien
cccattggagtggtatgaaaagaga

SEQ ID NO: 5492527 - DNA, 25 bp, Homo sapien
ttattgaggtgatcggctgcactca

SEQ ID NO: 5492528 - DNA, 25 bp, Homo sapien
gaaacaaatcaacaggagttcccat

SEQ ID NO: 5492529 - DNA, 25 bp, Homo sapien
tgagccctgccttctggaaacattc

SEQ ID NO: 5492530 - DNA, 25 bp, Homo sapien
tcaaaatccgggacttaagtgatcc

SEQ ID NO: 5492531 - DNA, 25 bp, Homo sapien
aaagtagaaataacagaagttactg

SEQ ID NO: 5492532 - DNA, 25 bp, Homo sapien
ttactgagtttgattaagagatgac

SEQ ID NO: 5492533 - DNA, 25 bp, Homo sapien
ggtactcaatatgctgtgcctcgca

SEQ ID NO: 5492534 - DNA, 25 bp, Homo sapien
gtgcccagccctcataaagttataa

SEQ ID NO: 5492535 - DNA, 25 bp, Homo sapien
gattaagagatgactccaaaacctt

SEQ ID NO: 5492536 - DNA, 25 bp, Homo sapien
agcttttcagacgactttgggttta

SEQ ID NO: 5492537 - DNA, 25 bp, Homo sapien
ttagacctaaaagttctgcatatac

SEQ ID NO: 5492538 - DNA, 25 bp, Homo sapien
gtctgccagtaaatcagtcaaatgc

SEQ ID NO: 5492539 - DNA, 25 bp, Homo sapien
agttataatatggtagcctagggct

SEQ ID NO: 5492540 - DNA, 25 bp, Homo sapien
aaaatccaagtaatattgtagaagg

SEQ ID NO: 5492541 - DNA, 25 bp, Homo sapien
atgctgtgcctcgcagtataatatt

SEQ ID NO: 5492542 - DNA, 25 bp, Homo sapien
ggaccaagagtctccgtcggacagg

SEQ ID NO: 5492543 - DNA, 25 bp, Homo sapien
cctgtccgacggagactcttggtcc

SEQ ID NO: 5492544 - DNA, 25 bp, Homo sapien
ccaggcttgtccggaactcctgacc

SEQ ID NO: 5492545 - DNA, 25 bp, Homo sapien
taagccttgtatagcctgggcaaca

SEQ ID NO: 5492546 - DNA, 25 bp, Homo sapien
tcaaggctgcagtaagctgtgatca

SEQ ID NO: 5492547 - DNA, 25 bp, Homo sapien
tacagttagagtctccatgcccggc

SEQ ID NO: 5492548 - DNA, 25 bp, Homo sapien
gtgtggtggcccatggcctgttatc

SEQ ID NO: 5492549 - DNA, 25 bp, Homo sapien
aattaaccaggtgtggtgatgtgtg

SEQ ID NO: 5492550 - DNA, 25 bp, Homo sapien
gcctgtagttccagcgactggggag

SEQ ID NO: 5492551 - DNA, 25 bp, Homo sapien
atcccttgagcccaggaggtcaagg

SEQ ID NO: 5492552 - DNA, 25 bp, Homo sapien
gcgctgggattacagttagagtctc

SEQ ID NO: 5492553 - DNA, 25 bp, Homo sapien
gccggagtacagtagtgctatcttg

SEQ ID NO: 5492554 - DNA, 25 bp, Homo sapien
tcctccagtctgggtgacaaagcaa

SEQ ID NO: 5492555 - DNA, 25 bp, Homo sapien
ataccttgatcagagagtggaattg

SEQ ID NO: 5492556 - DNA, 25 bp, Homo sapien
gaggtaagagtaatgttgtatacct

SEQ ID NO: 5492557 - DNA, 25 bp, Homo sapien
ttaagttctagattcaggaaaacta

SEQ ID NO: 5492558 - DNA, 25 bp, Homo sapien
caacattctttagggattgggggca

SEQ ID NO: 5492559 - DNA, 25 bp, Homo sapien
tgcccccacacacatctactgtatg

SEQ ID NO: 5492560 - DNA, 25 bp, Homo sapien
agagagtggaattgtctgtgtatac

SEQ ID NO: 5492561 - DNA, 25 bp, Homo sapien
ctgtatttccagtcttccatctagt

SEQ ID NO: 5492562 - DNA, 25 bp, Homo sapien
ttgtataccttgatcagagagtgga

SEQ ID NO: 5492563 - DNA, 25 bp, Homo sapien
ttttatattaagatcatgcccccac

SEQ ID NO: 5492564 - DNA, 25 bp, Homo sapien
ctcagcttccttaagaaccaacatt

SEQ ID NO: 5492565 - DNA, 25 bp, Homo sapien
atattaagatcatgcccccacacac

SEQ ID NO: 5492566 - DNA, 25 bp, Homo sapien
ggttcctttcaactcgtatccagac

SEQ ID NO: 5492567 - DNA, 25 bp, Homo sapien
gtctggatacgagttgaaaggaacc

SEQ ID NO: 5492568 - DNA, 25 bp, Homo sapien
gcagggggtaaatctaagacaataa

SEQ ID NO: 5492569 - DNA, 25 bp, Homo sapien
tgtcagaaatcagtgcctgtaaatc

SEQ ID NO: 5492570 - DNA, 25 bp, Homo sapien
caaaatgggctgttcaagcagattt

SEQ ID NO: 5492571 - DNA, 25 bp, Homo sapien
taagacaataaacactgacacagag

SEQ ID NO: 5492572 - DNA, 25 bp, Homo sapien
ggatgtattgtcagaaatcagtgcc

SEQ ID NO: 5492573 - DNA, 25 bp, Homo sapien
agctctccaaacagatttcaaactc

SEQ ID NO: 5492574 - DNA, 25 bp, Homo sapien
acttctgcatgcagggggtaaatct

SEQ ID NO: 5492575 - DNA, 25 bp, Homo sapien
agtgcctgtaaatcaggctcatgcc

SEQ ID NO: 5492576 - DNA, 25 bp, Homo sapien
acagaaatagaatagtatcgtagga

SEQ ID NO: 5492577 - DNA, 25 bp, Homo sapien
gatatatagtaaggatgtattgtca

SEQ ID NO: 5492578 - DNA, 25 bp, Homo sapien
aatgtcaaaatgggctgttcaagca

SEQ ID NO: 5492579 - DNA, 25 bp, Homo sapien
gctgaggaaacctcaaggattggac

SEQ ID NO: 5492580 - DNA, 25 bp, Homo sapien
gtagactcttcaggtctggccaccc

SEQ ID NO: 5492581 - DNA, 25 bp, Homo sapien
taaaacgggcagcttcctcaatggt

SEQ ID NO: 5492582 - DNA, 25 bp, Homo sapien
aagagggatcggtgtctttacctaa

SEQ ID NO: 5492583 - DNA, 25 bp, Homo sapien
taaatagaattgtagtgtccagagt

SEQ ID NO: 5492584 - DNA, 25 bp, Homo sapien
ttaaaagatttgctcaggaaagaga

SEQ ID NO: 5492585 - DNA, 25 bp, Homo sapien
cccatgtgcttggagtaggatgtag

SEQ ID NO: 5492586 - DNA, 25 bp, Homo sapien
gtaagggaagtgaaagcctcacttc

SEQ ID NO: 5492587 - DNA, 25 bp, Homo sapien
tggccaccctactatacggggagac

SEQ ID NO: 5492588 - DNA, 25 bp, Homo sapien
tgtgatcctaatcaggggactcaac

SEQ ID NO: 5492589 - DNA, 25 bp, Homo sapien
ggaaagagaaattagaccaactctg

SEQ ID NO: 5492590 - DNA, 25 bp, Homo sapien
tccttcccggccagtctaacctaga

SEQ ID NO: 5492591 - DNA, 25 bp, Homo sapien
atggccggttgtgtgtccggaattg

SEQ ID NO: 5492592 - DNA, 25 bp, Homo sapien
tgctttgcgctgtgctggcctcagc

SEQ ID NO: 5492593 - DNA, 25 bp, Homo sapien
gggcagcagcatccatcaacagaaa

SEQ ID NO: 5492594 - DNA, 25 bp, Homo sapien
caactaggtagaccagggttctgtg

SEQ ID NO: 5492595 - DNA, 25 bp, Homo sapien
agctacagacctttgtggtgagtgt

SEQ ID NO: 5492596 - DNA, 25 bp, Homo sapien
aagccatggaccctcacagtgagtg

SEQ ID NO: 5492597 - DNA, 25 bp, Homo sapien
ccctgagcctgtcacatggccggtt

SEQ ID NO: 5492598 - DNA, 25 bp, Homo sapien
gggctcgggctcccctcttgctgtg

SEQ ID NO: 5492599 - DNA, 25 bp, Homo sapien
cactggcctgccttgagtcacatgt

SEQ ID NO: 5492600 - DNA, 25 bp, Homo sapien
gaggttgtctgtagtgcagagtgtg

SEQ ID NO: 5492601 - DNA, 25 bp, Homo sapien
ggatgactgtagaggattagatgat

SEQ ID NO: 5492602 - DNA, 25 bp, Homo sapien
tcagcttggacattctaggagcctt

SEQ ID NO: 5492603 - DNA, 25 bp, Homo sapien
ttagacaatgaatcagatggactcc

SEQ ID NO: 5492604 - DNA, 25 bp, Homo sapien
gtcagccctctgtaccctcgggttc

SEQ ID NO: 5492605 - DNA, 25 bp, Homo sapien
cctcgggttccaaatttgcagattc

SEQ ID NO: 5492606 - DNA, 25 bp, Homo sapien
ctgagcatcccagggctttggtatc

SEQ ID NO: 5492607 - DNA, 25 bp, Homo sapien
agatggactccaacaaagcagatac

SEQ ID NO: 5492608 - DNA, 25 bp, Homo sapien
aaggtatatgagaatgtatgtaggt

SEQ ID NO: 5492609 - DNA, 25 bp, Homo sapien
atttcatataggggacctgagcatc

SEQ ID NO: 5492610 - DNA, 25 bp, Homo sapien
ctccaacaaagcagatacagtcagc

SEQ ID NO: 5492611 - DNA, 25 bp, Homo sapien
tctgtggtatcaatccctggtggat

SEQ ID NO: 5492612 - DNA, 25 bp, Homo sapien
gtgtcgagtccccatcgagcgtcgc

SEQ ID NO: 5492613 - DNA, 25 bp, Homo sapien
gcgacgctcgatggggactcgacac

SEQ ID NO: 5492614 - DNA, 25 bp, Homo sapien
ggcaacacagtaagatcccacctcc

SEQ ID NO: 5492615 - DNA, 25 bp, Homo sapien
agctaagactacaagtatgtgccac

SEQ ID NO: 5492616 - DNA, 25 bp, Homo sapien
aacaggtatgtgctccaagtccttc

SEQ ID NO: 5492617 - DNA, 25 bp, Homo sapien
ggtggcatgtgtctacagtcccagc

SEQ ID NO: 5492618 - DNA, 25 bp, Homo sapien
aatcctggctactcaggagggtgag

SEQ ID NO: 5492619 - DNA, 25 bp, Homo sapien
aggcaggaaattcaagaccagtctg

SEQ ID NO: 5492620 - DNA, 25 bp, Homo sapien
gagcattgcttgaggcaggaaattc

SEQ ID NO: 5492621 - DNA, 25 bp, Homo sapien
aaaataaatcagctgggcctggtgg

SEQ ID NO: 5492622 - DNA, 25 bp, Homo sapien
taaacccgtaacaggtatgtgctcc

SEQ ID NO: 5492623 - DNA, 25 bp, Homo sapien
gagctatgatcgtggcactgcactc

SEQ ID NO: 5492624 - DNA, 25 bp, Homo sapien
cacccggccaagactaaagtaggct

SEQ ID NO: 5492625 - DNA, 25 bp, Homo sapien
ggcatgagacatcacgcccagactc

SEQ ID NO: 5492626 - DNA, 25 bp, Homo sapien
ctgacctcaaacagtcctcacgcct

SEQ ID NO: 5492627 - DNA, 25 bp, Homo sapien
tgtgatctgggcttactgaagcatc

SEQ ID NO: 5492628 - DNA, 25 bp, Homo sapien
atgagacatcacgcccagactcttt

SEQ ID NO: 5492629 - DNA, 25 bp, Homo sapien
cctcaaacagtcctcacgccttggc

SEQ ID NO: 5492630 - DNA, 25 bp, Homo sapien
tcgtgcctcagccttgccagtggct

SEQ ID NO: 5492631 - DNA, 25 bp, Homo sapien
ttttcttaagacataatctcactct

SEQ ID NO: 5492632 - DNA, 25 bp, Homo sapien
gtgatctcacctcaccgcagcctcc

SEQ ID NO: 5492633 - DNA, 25 bp, Homo sapien
gtgtgatctgggcttactgaagcat

SEQ ID NO: 5492634 - DNA, 25 bp, Homo sapien
caggcgcctggctctatgtcttttt

SEQ ID NO: 5492635 - DNA, 25 bp, Homo sapien
tcctgacctcaaacagtcctcacgc

SEQ ID NO: 5492636 - DNA, 25 bp, Homo sapien
agagcaaagcctaagacatctcaat

SEQ ID NO: 5492637 - DNA, 25 bp, Homo sapien
acaagcgcctgcaagagccttataa

SEQ ID NO: 5492638 - DNA, 25 bp, Homo sapien
tgctgaaagctcctagcagagaagg

SEQ ID NO: 5492639 - DNA, 25 bp, Homo sapien
tgagaaatgaagcaacttttcaggc

SEQ ID NO: 5492640 - DNA, 25 bp, Homo sapien
aaaacgggaaacatttgcagattac

SEQ ID NO: 5492641 - DNA, 25 bp, Homo sapien
cacacaaaaccctcaacagcattca

SEQ ID NO: 5492642 - DNA, 25 bp, Homo sapien
ttttcaggctctagaggacgccaga

SEQ ID NO: 5492643 - DNA, 25 bp, Homo sapien
ttctctgacattcaaaacgggaaac

SEQ ID NO: 5492644 - DNA, 25 bp, Homo sapien
taaacgtttactgagtgccagacac

SEQ ID NO: 5492645 - DNA, 25 bp, Homo sapien
ataagtggttggtaaatgctgctga

SEQ ID NO: 5492646 - DNA, 25 bp, Homo sapien
tgcagattacgtaggacaccctcca

SEQ ID NO: 5492647 - DNA, 25 bp, Homo sapien
cagcaaaaaagggtgccgttacata

SEQ ID NO: 5492648 - DNA, 25 bp, Homo sapien
tacataggtcattggatgctatcac

SEQ ID NO: 5492649 - DNA, 25 bp, Homo sapien
gccgttacataggtcattggatgct

SEQ ID NO: 5492650 - DNA, 25 bp, Homo sapien
ttggatgctatcactggaatgtctg

SEQ ID NO: 5492651 - DNA, 25 bp, Homo sapien
taggtcattggatgctatcactgga

SEQ ID NO: 5492652 - DNA, 25 bp, Homo sapien
taccatctgtagacacatgagggcg

SEQ ID NO: 5492653 - DNA, 25 bp, Homo sapien
aagggtgccgttacataggtcattg

SEQ ID NO: 5492654 - DNA, 25 bp, Homo sapien
tttaccatctgtagacacatgaggg

SEQ ID NO: 5492655 - DNA, 25 bp, Homo sapien
ctcaaaaaacgcgtacagcaaaaaa

SEQ ID NO: 5492656 - DNA, 25 bp, Homo sapien
tccatctcaaaaaacgcgtacagca

SEQ ID NO: 5492657 - DNA, 25 bp, Homo sapien
actggaatgtctgttgagaaataaa

SEQ ID NO: 5492658 - DNA, 25 bp, Homo sapien
tccgtgttaatagcatgtgtcagaa

SEQ ID NO: 5492659 - DNA, 25 bp, Homo sapien
ctgttctgcctcataaaagtacctc

SEQ ID NO: 5492660 - DNA, 25 bp, Homo sapien
catccattgatgaacacttgatcac

SEQ ID NO: 5492661 - DNA, 25 bp, Homo sapien
aaatgacccattgtatgtacgtatc

SEQ ID NO: 5492662 - DNA, 25 bp, Homo sapien
gccatcaccgtcatctatctccaga

SEQ ID NO: 5492663 - DNA, 25 bp, Homo sapien
ctcatggttcatccgtgttaatagc

SEQ ID NO: 5492664 - DNA, 25 bp, Homo sapien
actcagcataatgtcctcatggttc

SEQ ID NO: 5492665 - DNA, 25 bp, Homo sapien
actgaaattctgtacccgtaaacag

SEQ ID NO: 5492666 - DNA, 25 bp, Homo sapien
aaaagtacctcatgtgaatggaatc

SEQ ID NO: 5492667 - DNA, 25 bp, Homo sapien
cattgtatgtacgtatcactgttta

SEQ ID NO: 5492668 - DNA, 25 bp, Homo sapien
tctgcagcattggcaatcaccattc

SEQ ID NO: 5492669 - DNA, 25 bp, Homo sapien
agttgaggcacttccacaataaccg

SEQ ID NO: 5492670 - DNA, 25 bp, Homo sapien
cggttattgtggaagtgcctcaact

SEQ ID NO: 5492671 - DNA, 25 bp, Homo sapien
caatatgatgtacagtaaaggaatt

SEQ ID NO: 5492672 - DNA, 25 bp, Homo sapien
atgatgtacagtaaaggaatttaat

SEQ ID NO: 5492673 - DNA, 25 bp, Homo sapien
tcctcatggcatgcttaagtgacct

SEQ ID NO: 5492674 - DNA, 25 bp, Homo sapien
tttaactcagagatgtctacattct

SEQ ID NO: 5492675 - DNA, 25 bp, Homo sapien
gacaagccacgccatccaactcctc

SEQ ID NO: 5492676 - DNA, 25 bp, Homo sapien
aattcaatatgatgtacagtaaagg

SEQ ID NO: 5492677 - DNA, 25 bp, Homo sapien
ttttgagtatatgtttaaagcatcc

SEQ ID NO: 5492678 - DNA, 25 bp, Homo sapien
gtatatgtttaaagcatccaagcac

SEQ ID NO: 5492679 - DNA, 25 bp, Homo sapien
gggcctgacaagccacgccatccaa

SEQ ID NO: 5492680 - DNA, 25 bp, Homo sapien
catccaactcctcatggcatgctta

SEQ ID NO: 5492681 - DNA, 25 bp, Homo sapien
atggcatgcttaagtgacctggaca

SEQ ID NO: 5492682 - DNA, 25 bp, Homo sapien
aagatatcctcctgccctggcctcc

SEQ ID NO: 5492683 - DNA, 25 bp, Homo sapien
actgcagtctagatctcctggaccc

SEQ ID NO: 5492684 - DNA, 25 bp, Homo sapien
ctgttccccaggcttcgagtgctgt

SEQ ID NO: 5492685 - DNA, 25 bp, Homo sapien
tagccctcgcctgtggtcccagcta

SEQ ID NO: 5492686 - DNA, 25 bp, Homo sapien
ctagaaccacaggtgtgccaccaca

SEQ ID NO: 5492687 - DNA, 25 bp, Homo sapien
caaaaatattctgggcatggtagcc

SEQ ID NO: 5492688 - DNA, 25 bp, Homo sapien
ttgaactcccgggctcaagatatcc

SEQ ID NO: 5492689 - DNA, 25 bp, Homo sapien
gggtgacagagcaaaactccctctc

SEQ ID NO: 5492690 - DNA, 25 bp, Homo sapien
tcagcctcacagagtagctagaacc

SEQ ID NO: 5492691 - DNA, 25 bp, Homo sapien
gcttcgagtgctgtagcatgatcac

SEQ ID NO: 5492692 - DNA, 25 bp, Homo sapien
agacagggtctcactatgctgccta

SEQ ID NO: 5492693 - DNA, 25 bp, Homo sapien
tgcctgttagatgtccaagtggaga

SEQ ID NO: 5492694 - DNA, 25 bp, Homo sapien
tcctgtgcttggcactgagcaaagt

SEQ ID NO: 5492695 - DNA, 25 bp, Homo sapien
ttgaataaacaacctctagtggaac

SEQ ID NO: 5492696 - DNA, 25 bp, Homo sapien
atttaagatgcctgttagatgtcca

SEQ ID NO: 5492697 - DNA, 25 bp, Homo sapien
ctgcgaggaccatcagccaaaattt

SEQ ID NO: 5492698 - DNA, 25 bp, Homo sapien
tgagcaaagtaaacaaacataaagc

SEQ ID NO: 5492699 - DNA, 25 bp, Homo sapien
atgtccaagtggagagtcagttttg

SEQ ID NO: 5492700 - DNA, 25 bp, Homo sapien
atacggatggctataataattactt

SEQ ID NO: 5492701 - DNA, 25 bp, Homo sapien
tgtaaagcattcatatacggatggc

SEQ ID NO: 5492702 - DNA, 25 bp, Homo sapien
atcaggcatgattctaatttggcaa

SEQ ID NO: 5492703 - DNA, 25 bp, Homo sapien
ggagatggtcaagttgaagacataa

SEQ ID NO: 5492704 - DNA, 25 bp, Homo sapien
tatatttaccagttcagcatcccta

SEQ ID NO: 5492705 - DNA, 25 bp, Homo sapien
gctgtaggactataaaagcatcccc

SEQ ID NO: 5492706 - DNA, 25 bp, Homo sapien
aacgcaaagtacatactgcttaacc

SEQ ID NO: 5492707 - DNA, 25 bp, Homo sapien
taacatgaatttccagagcatagtt

SEQ ID NO: 5492708 - DNA, 25 bp, Homo sapien
atgcaggatacactttaacgcaaag

SEQ ID NO: 5492709 - DNA, 25 bp, Homo sapien
ccattgagcacttcctttgagcatc

SEQ ID NO: 5492710 - DNA, 25 bp, Homo sapien
cccacccacactgataaactggtat

SEQ ID NO: 5492711 - DNA, 25 bp, Homo sapien
cttaaagatatgctgacttacagtt

SEQ ID NO: 5492712 - DNA, 25 bp, Homo sapien
gttccatagaacacatgcaggatac

SEQ ID NO: 5492713 - DNA, 25 bp, Homo sapien
atccaaactctgaaatgctccattg

SEQ ID NO: 5492714 - DNA, 25 bp, Homo sapien
cttaccagaccacggaactcttttc

SEQ ID NO: 5492715 - DNA, 25 bp, Homo sapien
tggtttctactaacaaagtgtctac

SEQ ID NO: 5492716 - DNA, 25 bp, Homo sapien
tagcaggatggctgacacaaaaata

SEQ ID NO: 5492717 - DNA, 25 bp, Homo sapien
cagggtaattacacttaacacttta

SEQ ID NO: 5492718 - DNA, 25 bp, Homo sapien
ttaattggacaaatgagatagcagg

SEQ ID NO: 5492719 - DNA, 25 bp, Homo sapien
gggaggtaggccatcatgccctcta

SEQ ID NO: 5492720 - DNA, 25 bp, Homo sapien
cagaccaaatctgagaggactactg

SEQ ID NO: 5492721 - DNA, 25 bp, Homo sapien
tttgtatcagctgaccctcaccaca

SEQ ID NO: 5492722 - DNA, 25 bp, Homo sapien
tctgagaggactactgatgagttct

SEQ ID NO: 5492723 - DNA, 25 bp, Homo sapien
aaaaatggtttgagaaagtatgaaa

SEQ ID NO: 5492724 - DNA, 25 bp, Homo sapien
ccctcaccacaatgcagggaggtag

SEQ ID NO: 5492725 - DNA, 25 bp, Homo sapien
gaaagtatgaaaagtagcattttta

SEQ ID NO: 5492726 - DNA, 25 bp, Homo sapien
ggaagttgtaggcagaattatgtct

SEQ ID NO: 5492727 - DNA, 25 bp, Homo sapien
ctgtcacccaaagggctccagctgg

SEQ ID NO: 5492728 - DNA, 25 bp, Homo sapien
ggtgtaggaagattcgtctttgttc

SEQ ID NO: 5492729 - DNA, 25 bp, Homo sapien
ggatctagcttgaagttctggattc

SEQ ID NO: 5492730 - DNA, 25 bp, Homo sapien
ggacagggctcttaaacagaggaag

SEQ ID NO: 5492731 - DNA, 25 bp, Homo sapien
taacagttggtgctagcaatcccct

SEQ ID NO: 5492732 - DNA, 25 bp, Homo sapien
gattggatgaatgttcctagtgaac

SEQ ID NO: 5492733 - DNA, 25 bp, Homo sapien
ttcagttatgtagcgaaaggacagg

SEQ ID NO: 5492734 - DNA, 25 bp, Homo sapien
cttacagtgtagagataattcagtt

SEQ ID NO: 5492735 - DNA, 25 bp, Homo sapien
ccttacttgggcataatgggcagat

SEQ ID NO: 5492736 - DNA, 25 bp, Homo sapien
actctgtctggcctctggatctagc

SEQ ID NO: 5492737 - DNA, 25 bp, Homo sapien
tcttacaggatttctcagcccccat

SEQ ID NO: 5492738 - DNA, 25 bp, Homo sapien
tctctcttggagcaaggatactctc

SEQ ID NO: 5492739 - DNA, 25 bp, Homo sapien
cagggtctctagtttgcagacaacc

SEQ ID NO: 5492740 - DNA, 25 bp, Homo sapien
caacttgttgcatggggaagcaatc

SEQ ID NO: 5492741 - DNA, 25 bp, Homo sapien
taggactccaggacttagcccagca

SEQ ID NO: 5492742 - DNA, 25 bp, Homo sapien
caacttgactggattaaggaatacc

SEQ ID NO: 5492743 - DNA, 25 bp, Homo sapien
tggggaagcaatctgtgatggttaa

SEQ ID NO: 5492744 - DNA, 25 bp, Homo sapien
tctctggttctgaggcgtttggact

SEQ ID NO: 5492745 - DNA, 25 bp, Homo sapien
cagcagccctgctttagccaggcct

SEQ ID NO: 5492746 - DNA, 25 bp, Homo sapien
catactaccagcatcccagggtctc

SEQ ID NO: 5492747 - DNA, 25 bp, Homo sapien
cctcagactgagaattggaccattg

SEQ ID NO: 5492748 - DNA, 25 bp, Homo sapien
tgcatgttatagagaaacttcacct

SEQ ID NO: 5492749 - DNA, 25 bp, Homo sapien
tcttggtctctgcatgatgatatat

SEQ ID NO: 5492750 - DNA, 25 bp, Homo sapien
ctataccatggaacttttaaaagga

SEQ ID NO: 5492751 - DNA, 25 bp, Homo sapien
tgctagttaaaagatttagagggat

SEQ ID NO: 5492752 - DNA, 25 bp, Homo sapien
taaaagatttagagggatttggctg

SEQ ID NO: 5492753 - DNA, 25 bp, Homo sapien
agaatattgcatgttatagagaaac

SEQ ID NO: 5492754 - DNA, 25 bp, Homo sapien
ctgttgatttagcaggtgccattgt

SEQ ID NO: 5492755 - DNA, 25 bp, Homo sapien
gttcttgtggtttttgcaatgtaaa

SEQ ID NO: 5492756 - DNA, 25 bp, Homo sapien
ttatgatacaggatgttattgttct

SEQ ID NO: 5492757 - DNA, 25 bp, Homo sapien
ggtgccattgtgtagatgctaagca

SEQ ID NO: 5492758 - DNA, 25 bp, Homo sapien
tgtgtagatgctaagcaaatcttaa

SEQ ID NO: 5492759 - DNA, 25 bp, Homo sapien
ggcgtttaggtcaatggctgtctgc

SEQ ID NO: 5492760 - DNA, 25 bp, Homo sapien
ggatgccagtcactgcccagcaaca

SEQ ID NO: 5492761 - DNA, 25 bp, Homo sapien
agacctccattgacgaagggctgga

SEQ ID NO: 5492762 - DNA, 25 bp, Homo sapien
ggcatttcagtccacacgcagcggg

SEQ ID NO: 5492763 - DNA, 25 bp, Homo sapien
taatgatgactcagagaaacctggg

SEQ ID NO: 5492764 - DNA, 25 bp, Homo sapien
ttctagttcgccacaagtcttgaca

SEQ ID NO: 5492765 - DNA, 25 bp, Homo sapien
gaggaagaccccgctcatgcctttg

SEQ ID NO: 5492766 - DNA, 25 bp, Homo sapien
cagcagtgccagtttgggtcatcat

SEQ ID NO: 5492767 - DNA, 25 bp, Homo sapien
cagcaacatgatggagacctccatt

SEQ ID NO: 5492768 - DNA, 25 bp, Homo sapien
tgggtcatcatgggcttctgtctca

SEQ ID NO: 5492769 - DNA, 25 bp, Homo sapien
tcagcagtgcagaaactgagtttcc

SEQ ID NO: 5492770 - DNA, 25 bp, Homo sapien
ttaagacttaatgatgcctacaacc

SEQ ID NO: 5492771 - DNA, 25 bp, Homo sapien
tataaatgacgtagacctaaactcc

SEQ ID NO: 5492772 - DNA, 25 bp, Homo sapien
tgagtggagaattaaaggaattatc

SEQ ID NO: 5492773 - DNA, 25 bp, Homo sapien
tcacacacatggaataaactcaaga

SEQ ID NO: 5492774 - DNA, 25 bp, Homo sapien
ctcctaaataggctttgatcagaaa

SEQ ID NO: 5492775 - DNA, 25 bp, Homo sapien
gtttacatacacaggagaagtgccc

SEQ ID NO: 5492776 - DNA, 25 bp, Homo sapien
acaggagaagtgcccaaaataattg

SEQ ID NO: 5492777 - DNA, 25 bp, Homo sapien
taaagtcagatttgagtggagaatt

SEQ ID NO: 5492778 - DNA, 25 bp, Homo sapien
aggcagtgtccatccactcaggtct

SEQ ID NO: 5492779 - DNA, 25 bp, Homo sapien
atccactcaggtctacaggctctta

SEQ ID NO: 5492780 - DNA, 25 bp, Homo sapien
ttggtgcagataataaattggaaga

SEQ ID NO: 5492781 - DNA, 25 bp, Homo sapien
ggggaaacagagtctgaatccacaa

SEQ ID NO: 5492782 - DNA, 25 bp, Homo sapien
ggatgggtgtctctgtgtttctgca

SEQ ID NO: 5492783 - DNA, 25 bp, Homo sapien
atttaaggactggggtcccaggcaa

SEQ ID NO: 5492784 - DNA, 25 bp, Homo sapien
tgtgatgtctgctgctttggggatg

SEQ ID NO: 5492785 - DNA, 25 bp, Homo sapien
catcccataagtgtgaggggtacgt

SEQ ID NO: 5492786 - DNA, 25 bp, Homo sapien
tgggtgttcctgtctgtgtatgtgc

SEQ ID NO: 5492787 - DNA, 25 bp, Homo sapien
aagatcaagctatggtctaggaacc

SEQ ID NO: 5492788 - DNA, 25 bp, Homo sapien
tatgatgtatgcaggcagctcgtga

SEQ ID NO: 5492789 - DNA, 25 bp, Homo sapien
gaggggtacgtctgtgtatgttttg

SEQ ID NO: 5492790 - DNA, 25 bp, Homo sapien
tcccttggggcttcacatgtctctc

SEQ ID NO: 5492791 - DNA, 25 bp, Homo sapien
gtcagtggtaggtactatgcccctg

SEQ ID NO: 5492792 - DNA, 25 bp, Homo sapien
cgtttccactcacaagctatagaaa

SEQ ID NO: 5492793 - DNA, 25 bp, Homo sapien
tttctatagcttgtgagtggaaacg

SEQ ID NO: 5492794 - DNA, 25 bp, Homo sapien
gtcttagtatggaaatatgcatgag

SEQ ID NO: 5492795 - DNA, 25 bp, Homo sapien
tgttagtctcttgtgtagtgaattt

SEQ ID NO: 5492796 - DNA, 25 bp, Homo sapien
agccacactgcacccggctccctgt

SEQ ID NO: 5492797 - DNA, 25 bp, Homo sapien
tcagagtgaactgtgtgatacacac

SEQ ID NO: 5492798 - DNA, 25 bp, Homo sapien
ttaaagtgttcgtaatgagccaacc

SEQ ID NO: 5492799 - DNA, 25 bp, Homo sapien
cgtaatgagccaaccgttgtaaggt

SEQ ID NO: 5492800 - DNA, 25 bp, Homo sapien
tgcagtgatgcaaccttggcccact

SEQ ID NO: 5492801 - DNA, 25 bp, Homo sapien
tttcctgccagatttgtggttagaa

SEQ ID NO: 5492802 - DNA, 25 bp, Homo sapien
aaaaagccagattcaaatacagttg

SEQ ID NO: 5492803 - DNA, 25 bp, Homo sapien
aaacacacacaagtatatatgaagt

SEQ ID NO: 5492804 - DNA, 25 bp, Homo sapien
tgcacccggctccctgtacccttct

SEQ ID NO: 5492805 - DNA, 25 bp, Homo sapien
cccctgccatggacatgcctgaggt

SEQ ID NO: 5492806 - DNA, 25 bp, Homo sapien
ctattgaaagaatctggctggatgc

SEQ ID NO: 5492807 - DNA, 25 bp, Homo sapien
cagggggtcctattgaaagaatctg

SEQ ID NO: 5492808 - DNA, 25 bp, Homo sapien
aggtgacctgcattgattggctgcc

SEQ ID NO: 5492809 - DNA, 25 bp, Homo sapien
gggtctgaagcagaggctttccttg

SEQ ID NO: 5492810 - DNA, 25 bp, Homo sapien
gaggtcctcaagtccctgctggagc

SEQ ID NO: 5492811 - DNA, 25 bp, Homo sapien
tggttctcagtggcccctgccatgg

SEQ ID NO: 5492812 - DNA, 25 bp, Homo sapien
aggcatgtgtcacaccggctctggg

SEQ ID NO: 5492813 - DNA, 25 bp, Homo sapien
ggtgcgcccttggtctcagggtgca

SEQ ID NO: 5492814 - DNA, 25 bp, Homo sapien
ctccccctgtacgctgggggtggca

SEQ ID NO: 5492815 - DNA, 25 bp, Homo sapien
cagaggctttccttggtgcgcctgc

SEQ ID NO: 5492816 - DNA, 25 bp, Homo sapien
tccacaagcccaaaacagccctagg

SEQ ID NO: 5492817 - DNA, 25 bp, Homo sapien
ccatgccccatccttggggccaggg

SEQ ID NO: 5492818 - DNA, 25 bp, Homo sapien
tgagctactgcacgccactggtttt

SEQ ID NO: 5492819 - DNA, 25 bp, Homo sapien
tcagtgttttcagagccgcctagat

SEQ ID NO: 5492820 - DNA, 25 bp, Homo sapien
gcctccagttgaagtggggaggtga

SEQ ID NO: 5492821 - DNA, 25 bp, Homo sapien
gtcaccaggagcctccagttgaagt

SEQ ID NO: 5492822 - DNA, 25 bp, Homo sapien
acagccctagggtactcagtgtttt

SEQ ID NO: 5492823 - DNA, 25 bp, Homo sapien
gtgcagtagtgagccatcccctcac

SEQ ID NO: 5492824 - DNA, 25 bp, Homo sapien
gccgcctagatgcaggactgtttgt

SEQ ID NO: 5492825 - DNA, 25 bp, Homo sapien
tgcctgtgctcggcccctccacaag

SEQ ID NO: 5492826 - DNA, 25 bp, Homo sapien
tacaggtttgagctactgcacgcca

SEQ ID NO: 5492827 - DNA, 25 bp, Homo sapien
attagggtcctcgtattcatgcgtt

SEQ ID NO: 5492828 - DNA, 25 bp, Homo sapien
aaacaggcaaatattggctgtacta

SEQ ID NO: 5492829 - DNA, 25 bp, Homo sapien
tgagacacagccagtgttgtacagc

SEQ ID NO: 5492830 - DNA, 25 bp, Homo sapien
cataaaaaccacacactggccccca

SEQ ID NO: 5492831 - DNA, 25 bp, Homo sapien
cgttgaaagcaataattagggtcct

SEQ ID NO: 5492832 - DNA, 25 bp, Homo sapien
ttggcccatggtctgtagtttgttg

SEQ ID NO: 5492833 - DNA, 25 bp, Homo sapien
tatggaaacttcagaacagaaatac

SEQ ID NO: 5492834 - DNA, 25 bp, Homo sapien
ctaaggcatctgtatggaaacttca

SEQ ID NO: 5492835 - DNA, 25 bp, Homo sapien
ttgagctctaccagggaacaacaaa

SEQ ID NO: 5492836 - DNA, 25 bp, Homo sapien
gtttaccacactgggcacagtaaca

SEQ ID NO: 5492837 - DNA, 25 bp, Homo sapien
ggcacagtaacaaggcttttctcca

SEQ ID NO: 5492838 - DNA, 25 bp, Homo sapien
gacgcatcacgccagtgcacagtgt

SEQ ID NO: 5492839 - DNA, 25 bp, Homo sapien
agaactaggaccatgagaagcataa

SEQ ID NO: 5492840 - DNA, 25 bp, Homo sapien
ccaagtagaaagatcagcatgagaa

SEQ ID NO: 5492841 - DNA, 25 bp, Homo sapien
tgtctgtgaggctgatccatgtgcc

SEQ ID NO: 5492842 - DNA, 25 bp, Homo sapien
gttcatggatgtgaacaagggtctg

SEQ ID NO: 5492843 - DNA, 25 bp, Homo sapien
ggcctcctccaaacacagacccagc

SEQ ID NO: 5492844 - DNA, 25 bp, Homo sapien
tccctggtgatccacagccaagttc

SEQ ID NO: 5492845 - DNA, 25 bp, Homo sapien
aggcccccagcctacgggctggcct

SEQ ID NO: 5492846 - DNA, 25 bp, Homo sapien
tggatggcagaacctcacccagttt

SEQ ID NO: 5492847 - DNA, 25 bp, Homo sapien
tgcatttaggcctagggaatcttac

SEQ ID NO: 5492848 - DNA, 25 bp, Homo sapien
ctggtaagagctacagactcacctg

SEQ ID NO: 5492849 - DNA, 25 bp, Homo sapien
caggaaaaatagccgggctcctctg

SEQ ID NO: 5492850 - DNA, 25 bp, Homo sapien
ggcacaggctcctcatgacgttccc

SEQ ID NO: 5492851 - DNA, 25 bp, Homo sapien
caatgcctcgctccaggaggagaca

SEQ ID NO: 5492852 - DNA, 25 bp, Homo sapien
gggtgttaccaggctgacttcctgc

SEQ ID NO: 5492853 - DNA, 25 bp, Homo sapien
gggtgccctgaagaaccaccacaga

SEQ ID NO: 5492854 - DNA, 25 bp, Homo sapien
acgaaccagggctgacatcacctga

SEQ ID NO: 5492855 - DNA, 25 bp, Homo sapien
ggccacacagcccacaatcatccac

SEQ ID NO: 5492856 - DNA, 25 bp, Homo sapien
acaagcacaccagcccctagacttt

SEQ ID NO: 5492857 - DNA, 25 bp, Homo sapien
gccacatggtgacaagcacaccagc

SEQ ID NO: 5492858 - DNA, 25 bp, Homo sapien
accaggaagcccagatcctcatctc

SEQ ID NO: 5492859 - DNA, 25 bp, Homo sapien
ttcctgcccttggggccatgccctg

SEQ ID NO: 5492860 - DNA, 25 bp, Homo sapien
tcagactaacaaagaaacgaagacc

SEQ ID NO: 5492861 - DNA, 25 bp, Homo sapien
ccccaagctcatgccagcagtgcag

SEQ ID NO: 5492862 - DNA, 25 bp, Homo sapien
ccaacaaacagaaccccaagctcat

SEQ ID NO: 5492863 - DNA, 25 bp, Homo sapien
acagagtttccctgagaagaggctc

SEQ ID NO: 5492864 - DNA, 25 bp, Homo sapien
ggcatacgacagccccttggccact

SEQ ID NO: 5492865 - DNA, 25 bp, Homo sapien
ccacatttcttggaggtggagcccc

SEQ ID NO: 5492866 - DNA, 25 bp, Homo sapien
atatggagaggagaccaacctctcc

SEQ ID NO: 5492867 - DNA, 25 bp, Homo sapien
aggctcccaaaggcatacgacagcc

SEQ ID NO: 5492868 - DNA, 25 bp, Homo sapien
cctaggggcaatcaaaagcctctct

SEQ ID NO: 5492869 - DNA, 25 bp, Homo sapien
tgccatggaacagtacttgctaccc

SEQ ID NO: 5492870 - DNA, 25 bp, Homo sapien
tcatgaatgcagaacagtcacccca

SEQ ID NO: 5492871 - DNA, 25 bp, Homo sapien
gggtggcaagagtagacactcttag

SEQ ID NO: 5492872 - DNA, 25 bp, Homo sapien
actcttagcttgttggaggggacat

SEQ ID NO: 5492873 - DNA, 25 bp, Homo sapien
acgttgaccttatatctggagacct

SEQ ID NO: 5492874 - DNA, 25 bp, Homo sapien
tgcaaagggagatggtttcatttct

SEQ ID NO: 5492875 - DNA, 25 bp, Homo sapien
ctggagaccttgcttaaacacactt

SEQ ID NO: 5492876 - DNA, 25 bp, Homo sapien
ggaggggacattctgatgcttaaca

SEQ ID NO: 5492877 - DNA, 25 bp, Homo sapien
ctcaagcacaatgatgacagggtgg

SEQ ID NO: 5492878 - DNA, 25 bp, Homo sapien
agtttgcagcaaacagaatgtgcac

SEQ ID NO: 5492879 - DNA, 25 bp, Homo sapien
tcccagagtctccagttttggtgat

SEQ ID NO: 5492880 - DNA, 25 bp, Homo sapien
cccctctggcctggatggtttttca

SEQ ID NO: 5492881 - DNA, 25 bp, Homo sapien
ttggtgatagtgtctcggttcttga

SEQ ID NO: 5492882 - DNA, 25 bp, Homo sapien
acgcggcgctctaggcggggccgga

SEQ ID NO: 5492883 - DNA, 25 bp, Homo sapien
tccggccccgcctagagcgccgcgt

SEQ ID NO: 5492884 - DNA, 25 bp, Homo sapien
ggaacctatcaacagagtgaacaga

SEQ ID NO: 5492885 - DNA, 25 bp, Homo sapien
ttaatagagatacctcagtaatttc

SEQ ID NO: 5492886 - DNA, 25 bp, Homo sapien
aactctagagctttgtcagagcaaa

SEQ ID NO: 5492887 - DNA, 25 bp, Homo sapien
aagcataagaattccacattaaaac

SEQ ID NO: 5492888 - DNA, 25 bp, Homo sapien
taaaacacagaactgagattcctac

SEQ ID NO: 5492889 - DNA, 25 bp, Homo sapien
aggtggttgcaacgaaagcaaaaat

SEQ ID NO: 5492890 - DNA, 25 bp, Homo sapien
ggcaaagatttcatgatgaagacac

SEQ ID NO: 5492891 - DNA, 25 bp, Homo sapien
acaacctacagattgggggaaaata

SEQ ID NO: 5492892 - DNA, 25 bp, Homo sapien
gagcaaaggaacctatcaacagagt

SEQ ID NO: 5492893 - DNA, 25 bp, Homo sapien
caaaaattggcaaatgggatctaat

SEQ ID NO: 5492894 - DNA, 25 bp, Homo sapien
gatgaagacacaaaaggtggttgca

SEQ ID NO: 5492895 - DNA, 25 bp, Homo sapien
aaagggaacaccagagtcttcagtt

SEQ ID NO: 5492896 - DNA, 25 bp, Homo sapien
gagctggaacatgaccagatctgtc

SEQ ID NO: 5492897 - DNA, 25 bp, Homo sapien
gatgtagatatctttggggggctat

SEQ ID NO: 5492898 - DNA, 25 bp, Homo sapien
gttgacaaagcaagaatctgaggct

SEQ ID NO: 5492899 - DNA, 25 bp, Homo sapien
cagatctgtctgccaagtaagccca

SEQ ID NO: 5492900 - DNA, 25 bp, Homo sapien
cactaggtacaagtccaggtgtcag

SEQ ID NO: 5492901 - DNA, 25 bp, Homo sapien
ccagcaatgtcaggctgagccttcc

SEQ ID NO: 5492902 - DNA, 25 bp, Homo sapien
ccgaagacattctgcaagtaggaga

SEQ ID NO: 5492903 - DNA, 25 bp, Homo sapien
gtgatgacattggacccacccagat

SEQ ID NO: 5492904 - DNA, 25 bp, Homo sapien
catagtcacaggttccaaggattag

SEQ ID NO: 5492905 - DNA, 25 bp, Homo sapien
tgcacagttttggaggtctgaagtc

SEQ ID NO: 5492906 - DNA, 25 bp, Homo sapien
tccctaaagaaagctgtgagaggac

SEQ ID NO: 5492907 - DNA, 25 bp, Homo sapien
atggaggagggtactatttcccatc

SEQ ID NO: 5492908 - DNA, 25 bp, Homo sapien
acaagttagcgaggtcacagtttag

SEQ ID NO: 5492909 - DNA, 25 bp, Homo sapien
acacactagtcaggctcaaggcatg

SEQ ID NO: 5492910 - DNA, 25 bp, Homo sapien
agtggaaatgggtttagactccttc

SEQ ID NO: 5492911 - DNA, 25 bp, Homo sapien
cgtgcacatttggaaaagtggaaat

SEQ ID NO: 5492912 - DNA, 25 bp, Homo sapien
agggtaaaaaagaacacactagtca

SEQ ID NO: 5492913 - DNA, 25 bp, Homo sapien
ggcatgaatggctcccttggctgta

SEQ ID NO: 5492914 - DNA, 25 bp, Homo sapien
aacctgagatggccacattgcaaac

SEQ ID NO: 5492915 - DNA, 25 bp, Homo sapien
acaccaagaggagcaatattttaaa

SEQ ID NO: 5492916 - DNA, 25 bp, Homo sapien
ctagacacaaggcaataaacaagtt

SEQ ID NO: 5492917 - DNA, 25 bp, Homo sapien
gggccaggtcgtgcttctgtccctg

SEQ ID NO: 5492918 - DNA, 25 bp, Homo sapien
gatgtgttacaagccatgaggacaa

SEQ ID NO: 5492919 - DNA, 25 bp, Homo sapien
atgaggacaattgtacaacatgcac

SEQ ID NO: 5492920 - DNA, 25 bp, Homo sapien
agacagtatttaatcgtgagcatgc

SEQ ID NO: 5492921 - DNA, 25 bp, Homo sapien
aatgtgctctaaatggaaaggaggg

SEQ ID NO: 5492922 - DNA, 25 bp, Homo sapien
tgtttaaggctgatatggtttgaag

SEQ ID NO: 5492923 - DNA, 25 bp, Homo sapien
tgcccagctgcttcttaaccccttc

SEQ ID NO: 5492924 - DNA, 25 bp, Homo sapien
gtgagcatgcccttctgacggaaac

SEQ ID NO: 5492925 - DNA, 25 bp, Homo sapien
tgacctctccagatggaatgtgctc

SEQ ID NO: 5492926 - DNA, 25 bp, Homo sapien
tttcaaagtgagataagagaaatgg

SEQ ID NO: 5492927 - DNA, 25 bp, Homo sapien
tgacggaaacacgcactgtaatgat

SEQ ID NO: 5492928 - DNA, 25 bp, Homo sapien
ctacattgtgtgtaaggagggaaaa

SEQ ID NO: 5492929 - DNA, 25 bp, Homo sapien
aagaaaacatattgataaagtttgc

SEQ ID NO: 5492930 - DNA, 25 bp, Homo sapien
ttgaacccttatagccaacagttag

SEQ ID NO: 5492931 - DNA, 25 bp, Homo sapien
aagtcccccaaaatcagttctagta

SEQ ID NO: 5492932 - DNA, 25 bp, Homo sapien
agtaagagtggataaagtcccccaa

SEQ ID NO: 5492933 - DNA, 25 bp, Homo sapien
aacatgccaaataagcaactgttgc

SEQ ID NO: 5492934 - DNA, 25 bp, Homo sapien
ttcaattaaacttagccacactttc

SEQ ID NO: 5492935 - DNA, 25 bp, Homo sapien
tcatgggtggagcttacaaaattta

SEQ ID NO: 5492936 - DNA, 25 bp, Homo sapien
ttctacaggaaatcagctaaaacag

SEQ ID NO: 5492937 - DNA, 25 bp, Homo sapien
acagttagtgttccaagtaagagtg

SEQ ID NO: 5492938 - DNA, 25 bp, Homo sapien
ggaaatcagctaaaacagtgaagtc

SEQ ID NO: 5492939 - DNA, 25 bp, Homo sapien
cttttgaagaaatccatcgcacgaa

SEQ ID NO: 5492940 - DNA, 25 bp, Homo sapien
agaggggaaacctgacattgtttga

SEQ ID NO: 5492941 - DNA, 25 bp, Homo sapien
ttcgcatgacttgaaccactgaatc

SEQ ID NO: 5492942 - DNA, 25 bp, Homo sapien
acctgacattgtttgagcccctgca

SEQ ID NO: 5492943 - DNA, 25 bp, Homo sapien
gagcccctgcagtcagctgccatca

SEQ ID NO: 5492944 - DNA, 25 bp, Homo sapien
acacccggcctgaattgtcttttat

SEQ ID NO: 5492945 - DNA, 25 bp, Homo sapien
acagccacatcatcggagagcttgc

SEQ ID NO: 5492946 - DNA, 25 bp, Homo sapien
ctttctcaggagagagctgtctttt

SEQ ID NO: 5492947 - DNA, 25 bp, Homo sapien
gctccacaacccagcacagccacat

SEQ ID NO: 5492948 - DNA, 25 bp, Homo sapien
aatccatcgcacgaaaagcaggcga

SEQ ID NO: 5492949 - DNA, 25 bp, Homo sapien
tgctactcaaagtgtgctccacaac

SEQ ID NO: 5492950 - DNA, 25 bp, Homo sapien
aaggatctggggcactgcttataag

SEQ ID NO: 5492951 - DNA, 25 bp, Homo sapien
tctgataaccggcttcaagaggaga

SEQ ID NO: 5492952 - DNA, 25 bp, Homo sapien
aaacccctgtggcaatcgtccctct

SEQ ID NO: 5492953 - DNA, 25 bp, Homo sapien
ttcaagcacagagagctataggagt

SEQ ID NO: 5492954 - DNA, 25 bp, Homo sapien
atcctgaataaacgggtaagagaaa

SEQ ID NO: 5492955 - DNA, 25 bp, Homo sapien
gtgaggttcccccattagaaggatc

SEQ ID NO: 5492956 - DNA, 25 bp, Homo sapien
cacatgatgaaagaaccagaatacc

SEQ ID NO: 5492957 - DNA, 25 bp, Homo sapien
ttcaggagattaagaacacaggaaa

SEQ ID NO: 5492958 - DNA, 25 bp, Homo sapien
agggtgtaaccatgaggtcctcaag

SEQ ID NO: 5492959 - DNA, 25 bp, Homo sapien
ccaagaagatagggatcactagtat

SEQ ID NO: 5492960 - DNA, 25 bp, Homo sapien
cagcctctcagactggaaggttcct

SEQ ID NO: 5492961 - DNA, 25 bp, Homo sapien
caatgttagcaagagaatgataagt

SEQ ID NO: 5492962 - DNA, 25 bp, Homo sapien
tagtagtaaacagtttcaaatgctg

SEQ ID NO: 5492963 - DNA, 25 bp, Homo sapien
aatgtcttctacaaggcaccgaaaa

SEQ ID NO: 5492964 - DNA, 25 bp, Homo sapien
gctaagcaagctatatcaggaatgt

SEQ ID NO: 5492965 - DNA, 25 bp, Homo sapien
gggactacaaggcacctactgctgc

SEQ ID NO: 5492966 - DNA, 25 bp, Homo sapien
caaggcacctactgctgcacttagc

SEQ ID NO: 5492967 - DNA, 25 bp, Homo sapien
gcaagagaatgataagtttgggagc

SEQ ID NO: 5492968 - DNA, 25 bp, Homo sapien
atatgatgctttagaagtgtaaatt

SEQ ID NO: 5492969 - DNA, 25 bp, Homo sapien
agtttgggagcttcatatgatgctt

SEQ ID NO: 5492970 - DNA, 25 bp, Homo sapien
tgagatggtcttgcgttgttgccca

SEQ ID NO: 5492971 - DNA, 25 bp, Homo sapien
caaggcaccgaaaaataagtagttg

SEQ ID NO: 5492972 - DNA, 25 bp, Homo sapien
aaacctgtggatagacaacgtctct

SEQ ID NO: 5492973 - DNA, 25 bp, Homo sapien
aagaagcaaagaaaatgtctcattg

SEQ ID NO: 5492974 - DNA, 25 bp, Homo sapien
cagtgtccgcagggaatcatattag

SEQ ID NO: 5492975 - DNA, 25 bp, Homo sapien
cttgggttggaagttgaaatgaaaa

SEQ ID NO: 5492976 - DNA, 25 bp, Homo sapien
aatacgatgcaagaagtaaaaaaat

SEQ ID NO: 5492977 - DNA, 25 bp, Homo sapien
tgcagaaaacctgtggatagacaac

SEQ ID NO: 5492978 - DNA, 25 bp, Homo sapien
aaacagcaaaatgaacacaatatac

SEQ ID NO: 5492979 - DNA, 25 bp, Homo sapien
aaagtgagttcatagaatacgatgc

SEQ ID NO: 5492980 - DNA, 25 bp, Homo sapien
tgtttggtgtttgaaaggcaactcc

SEQ ID NO: 5492981 - DNA, 25 bp, Homo sapien
atcactgaagggctttcaactgatc

SEQ ID NO: 5492982 - DNA, 25 bp, Homo sapien
tgcagttactgctatgccctcaagc

SEQ ID NO: 5492983 - DNA, 25 bp, Homo sapien
attgtcataagaggacagcatgttt

SEQ ID NO: 5492984 - DNA, 25 bp, Homo sapien
gatccctggatggaattggttattc

SEQ ID NO: 5492985 - DNA, 25 bp, Homo sapien
agcgtttggggccttctctgcacat

SEQ ID NO: 5492986 - DNA, 25 bp, Homo sapien
ggcaccacggctacaatcacatcta

SEQ ID NO: 5492987 - DNA, 25 bp, Homo sapien
caggaataacgtgctatggaacaat

SEQ ID NO: 5492988 - DNA, 25 bp, Homo sapien
gtaacaaaagccaggaataacgtgc

SEQ ID NO: 5492989 - DNA, 25 bp, Homo sapien
gcacatgttaagtgaatgcggaaca

SEQ ID NO: 5492990 - DNA, 25 bp, Homo sapien
agtgaatgcggaacagaacataaat

SEQ ID NO: 5492991 - DNA, 25 bp, Homo sapien
acgaccattacagtgccaatatcgc

SEQ ID NO: 5492992 - DNA, 25 bp, Homo sapien
ttattctgagctgtgacaagggtgt

SEQ ID NO: 5492993 - DNA, 25 bp, Homo sapien
taccatctgcccaggcaccacggct

SEQ ID NO: 5492994 - DNA, 25 bp, Homo sapien
ccagtatcggggtgaacctgtttta

SEQ ID NO: 5492995 - DNA, 25 bp, Homo sapien
ggagcttgtatacttggtgacagcc

SEQ ID NO: 5492996 - DNA, 25 bp, Homo sapien
aacccttcttcggagcaggagctga

SEQ ID NO: 5492997 - DNA, 25 bp, Homo sapien
gccttggtcacagccttcttggaac

SEQ ID NO: 5492998 - DNA, 25 bp, Homo sapien
ggagtagctctccttacgactgcgc

SEQ ID NO: 5492999 - DNA, 25 bp, Homo sapien
agcacacatttacttggagcttgta

SEQ ID NO: 5493000 - DNA, 25 bp, Homo sapien
ggtgacagccttggtaccttcggac

SEQ ID NO: 5493001 - DNA, 25 bp, Homo sapien
tggtaccttcggacactgcgtgctt

SEQ ID NO: 5493002 - DNA, 25 bp, Homo sapien
tatcggggtgaacctgttttagcac

SEQ ID NO: 5493003 - DNA, 25 bp, Homo sapien
tcttggaacccttcttcggagcagg

SEQ ID NO: 5493004 - DNA, 25 bp, Homo sapien
tctccttacgactgcgcttgcgctt

SEQ ID NO: 5493005 - DNA, 25 bp, Homo sapien
acggggtcgttatggtctacgacac

SEQ ID NO: 5493006 - DNA, 25 bp, Homo sapien
gtgtcgtagaccataacgaccccgt

SEQ ID NO: 5493007 - DNA, 25 bp, Homo sapien
attcacaagttttgggagatgctga

SEQ ID NO: 5493008 - DNA, 25 bp, Homo sapien
tgggtaggtgatgactttaaaagta

SEQ ID NO: 5493009 - DNA, 25 bp, Homo sapien
tttggaggcaattcaggtctttttc

SEQ ID NO: 5493010 - DNA, 25 bp, Homo sapien
taaccttttgtggcttggctgtaat

SEQ ID NO: 5493011 - DNA, 25 bp, Homo sapien
gatggacaagacagacatgatctct

SEQ ID NO: 5493012 - DNA, 25 bp, Homo sapien
agcatagtggcaatgagactcaata

SEQ ID NO: 5493013 - DNA, 25 bp, Homo sapien
gccctaaaaaagctcatcaaggaac

SEQ ID NO: 5493014 - DNA, 25 bp, Homo sapien
tgctgataatcagaagaggaacttc

SEQ ID NO: 5493015 - DNA, 25 bp, Homo sapien
aatcaagcctcaagtggttatttgt

SEQ ID NO: 5493016 - DNA, 25 bp, Homo sapien
tgggagatgctgactcataatgtgt

SEQ ID NO: 5493017 - DNA, 25 bp, Homo sapien
aaggatttataagacacaaaatgcc

SEQ ID NO: 5493018 - DNA, 25 bp, Homo sapien
tggtgcccctgtggtgaactcttga

SEQ ID NO: 5493019 - DNA, 25 bp, Homo sapien
tattaagtggatgtgtctcaaaaac

SEQ ID NO: 5493020 - DNA, 25 bp, Homo sapien
acaatattctccagagtttgagctc

SEQ ID NO: 5493021 - DNA, 25 bp, Homo sapien
tatctatggtgcccctgtggtgaac

SEQ ID NO: 5493022 - DNA, 25 bp, Homo sapien
agtacaataattaaatgggttagct

SEQ ID NO: 5493023 - DNA, 25 bp, Homo sapien
tccctgactatgtgtggtcaaacac

SEQ ID NO: 5493024 - DNA, 25 bp, Homo sapien
gagaggttagatcaaactccctgac

SEQ ID NO: 5493025 - DNA, 25 bp, Homo sapien
aactacataatatctatggtgcccc

SEQ ID NO: 5493026 - DNA, 25 bp, Homo sapien
ggtaagcacttagaagtatgtgaac

SEQ ID NO: 5493027 - DNA, 25 bp, Homo sapien
tgtgtctcaaaaacttaggtaagca

SEQ ID NO: 5493028 - DNA, 25 bp, Homo sapien
tatcataaaagtccagtagtacaat

SEQ ID NO: 5493029 - DNA, 25 bp, Homo sapien
tttgtaaaatgcagacacggaaagc

SEQ ID NO: 5493030 - DNA, 25 bp, Homo sapien
aatgaaagcaggagttttgttctag

SEQ ID NO: 5493031 - DNA, 25 bp, Homo sapien
tccagtgtaagcaagatgaacaaaa

SEQ ID NO: 5493032 - DNA, 25 bp, Homo sapien
agggtatggtatgtatcatggactc

SEQ ID NO: 5493033 - DNA, 25 bp, Homo sapien
tgttgctcttgtcttggcacatgcc

SEQ ID NO: 5493034 - DNA, 25 bp, Homo sapien
gcagacacggaaagctgatttagtg

SEQ ID NO: 5493035 - DNA, 25 bp, Homo sapien
tcatggactcagaaaaactaagacc

SEQ ID NO: 5493036 - DNA, 25 bp, Homo sapien
tgaaatacttcagactacagcatac

SEQ ID NO: 5493037 - DNA, 25 bp, Homo sapien
acaaaccaaaatagggtatggtatg

SEQ ID NO: 5493038 - DNA, 25 bp, Homo sapien
tcagactacagcatacacaaatttt

SEQ ID NO: 5493039 - DNA, 25 bp, Homo sapien
ttttgttctagacaatgggatgtac

SEQ ID NO: 5493040 - DNA, 25 bp, Homo sapien
ctgtttggccaaagtaagacatttt

SEQ ID NO: 5493041 - DNA, 25 bp, Homo sapien
gcagcagctgtgaaccttgactgtc

SEQ ID NO: 5493042 - DNA, 25 bp, Homo sapien
ttaaagctattgccttccaaggaca

SEQ ID NO: 5493043 - DNA, 25 bp, Homo sapien
tctcaagcccatggagtagacgaag

SEQ ID NO: 5493044 - DNA, 25 bp, Homo sapien
acattcgaaagaaaaactctgaaat

SEQ ID NO: 5493045 - DNA, 25 bp, Homo sapien
gtaaccaagcaacaacttgaccctc

SEQ ID NO: 5493046 - DNA, 25 bp, Homo sapien
ttgatagaatgaaccaaatcctttg

SEQ ID NO: 5493047 - DNA, 25 bp, Homo sapien
aataaagactgccaacaaggccgga

SEQ ID NO: 5493048 - DNA, 25 bp, Homo sapien
ctccccacaggtgtacatatccctc

SEQ ID NO: 5493049 - DNA, 25 bp, Homo sapien
agaaagacagcaccacaactactct

SEQ ID NO: 5493050 - DNA, 25 bp, Homo sapien
caaggacacattctgctgtttggcc

SEQ ID NO: 5493051 - DNA, 25 bp, Homo sapien
caccatctgtacctgtgagagcggc

SEQ ID NO: 5493052 - DNA, 25 bp, Homo sapien
gacgccaggatgtcagatacagtgt

SEQ ID NO: 5493053 - DNA, 25 bp, Homo sapien
gtgttcccagtgtcagggcacagca

SEQ ID NO: 5493054 - DNA, 25 bp, Homo sapien
tcagctctccctgcgttgggaaccc

SEQ ID NO: 5493055 - DNA, 25 bp, Homo sapien
ggcgaacctgacctatgagctgcac

SEQ ID NO: 5493056 - DNA, 25 bp, Homo sapien
cacctcagtcagcatcagcatgggg

SEQ ID NO: 5493057 - DNA, 25 bp, Homo sapien
tctggccatgccagcacctcagtca

SEQ ID NO: 5493058 - DNA, 25 bp, Homo sapien
gcagagtcactgtcaggcctgtctc

SEQ ID NO: 5493059 - DNA, 25 bp, Homo sapien
ctgcagtgcatgtcaatggccttga

SEQ ID NO: 5493060 - DNA, 25 bp, Homo sapien
gatgtcagatacagtgtgaggtgtt

SEQ ID NO: 5493061 - DNA, 25 bp, Homo sapien
gcgctcaccacacctgcagtgcatg

SEQ ID NO: 5493062 - DNA, 25 bp, Homo sapien
acagattctggttaacacgagttac

SEQ ID NO: 5493063 - DNA, 25 bp, Homo sapien
agcacttagtcaggctgatgaggcc

SEQ ID NO: 5493064 - DNA, 25 bp, Homo sapien
tcttcattaatcctggggggagtag

SEQ ID NO: 5493065 - DNA, 25 bp, Homo sapien
agagcccttggattacagagacact

SEQ ID NO: 5493066 - DNA, 25 bp, Homo sapien
tgatgaggccaggatgacttataaa

SEQ ID NO: 5493067 - DNA, 25 bp, Homo sapien
tccagaaattgagtcgaaatgttta

SEQ ID NO: 5493068 - DNA, 25 bp, Homo sapien
ggcagctctggacagttagtgtttg

SEQ ID NO: 5493069 - DNA, 25 bp, Homo sapien
tgttgatgagactctgtgggcacaa

SEQ ID NO: 5493070 - DNA, 25 bp, Homo sapien
tagcctatgatggtcatgggccttt

SEQ ID NO: 5493071 - DNA, 25 bp, Homo sapien
aggagagatgcaagacaattcacta

SEQ ID NO: 5493072 - DNA, 25 bp, Homo sapien
gggggagtagcctctatgtttcagg

SEQ ID NO: 5493073 - DNA, 25 bp, Homo sapien
aagtggactcctatagcctgggcaa

SEQ ID NO: 5493074 - DNA, 25 bp, Homo sapien
tcgataaacattgtggagtgactaa

SEQ ID NO: 5493075 - DNA, 25 bp, Homo sapien
atgacaggaatgtaagactggcctg

SEQ ID NO: 5493076 - DNA, 25 bp, Homo sapien
actggatgaccaaaagtggactcct

SEQ ID NO: 5493077 - DNA, 25 bp, Homo sapien
ggatgacaaacccagctgatacgcc

SEQ ID NO: 5493078 - DNA, 25 bp, Homo sapien
atctttgaggcctggcataagacgt

SEQ ID NO: 5493079 - DNA, 25 bp, Homo sapien
cttttgagtggagacctgaatgaca

SEQ ID NO: 5493080 - DNA, 25 bp, Homo sapien
aatttcaggtataataggtgctatt

SEQ ID NO: 5493081 - DNA, 25 bp, Homo sapien
gggtagtgcctggtctgattcatct

SEQ ID NO: 5493082 - DNA, 25 bp, Homo sapien
catttcctgcgtgtgctaatggggg

SEQ ID NO: 5493083 - DNA, 25 bp, Homo sapien
ggcataagacgtggctcgataaaca

SEQ ID NO: 5493084 - DNA, 25 bp, Homo sapien
gatgcttctgaagagaaacaaagac

SEQ ID NO: 5493085 - DNA, 25 bp, Homo sapien
aatccataagctaggggtacaacag

SEQ ID NO: 5493086 - DNA, 25 bp, Homo sapien
tgtaatagaatagcaaatttccacc

SEQ ID NO: 5493087 - DNA, 25 bp, Homo sapien
aatcagtggagagctatgcaattta

SEQ ID NO: 5493088 - DNA, 25 bp, Homo sapien
ttagagatccttagagtaacacatc

SEQ ID NO: 5493089 - DNA, 25 bp, Homo sapien
tatacgagtagaagtgacttgccta

SEQ ID NO: 5493090 - DNA, 25 bp, Homo sapien
tccgacttgaggaaagcaaatcttt

SEQ ID NO: 5493091 - DNA, 25 bp, Homo sapien
ccaccatggaatcagtggagagcta

SEQ ID NO: 5493092 - DNA, 25 bp, Homo sapien
aaatgagaagggctttccgacttga

SEQ ID NO: 5493093 - DNA, 25 bp, Homo sapien
acttgcactaggaacatcacgacat

SEQ ID NO: 5493094 - DNA, 25 bp, Homo sapien
atgtatacatgtgacctggctacct

SEQ ID NO: 5493095 - DNA, 25 bp, Homo sapien
tcaatgatctatgtggaaggtggga

SEQ ID NO: 5493096 - DNA, 25 bp, Homo sapien
actgaaagtacgggttgtcatcctt

SEQ ID NO: 5493097 - DNA, 25 bp, Homo sapien
aagttatacccttgtgattgaaaat

SEQ ID NO: 5493098 - DNA, 25 bp, Homo sapien
agtgctactaggagacaaaaataat

SEQ ID NO: 5493099 - DNA, 25 bp, Homo sapien
aacacgtttagtgctactaggagac

SEQ ID NO: 5493100 - DNA, 25 bp, Homo sapien
ccactttacctggcccataaatata

SEQ ID NO: 5493101 - DNA, 25 bp, Homo sapien
cagaatgaatcatgaatggttacgt

SEQ ID NO: 5493102 - DNA, 25 bp, Homo sapien
attaaatgtgtgcaggcatcagcca

SEQ ID NO: 5493103 - DNA, 25 bp, Homo sapien
tttattgagtatcttgccacagaat

SEQ ID NO: 5493104 - DNA, 25 bp, Homo sapien
aaggtgggagattaaattaaatgtg

SEQ ID NO: 5493105 - DNA, 25 bp, Homo sapien
ctgtttactgaaagtacgggttgtc

SEQ ID NO: 5493106 - DNA, 25 bp, Homo sapien
atgggtcaggtttattgagaacaac

SEQ ID NO: 5493107 - DNA, 25 bp, Homo sapien
gaaatggttggtatctatggacccc

SEQ ID NO: 5493108 - DNA, 25 bp, Homo sapien
tatatgggagtcctaacgatcaccc

SEQ ID NO: 5493109 - DNA, 25 bp, Homo sapien
tgcccaacgacatcgatggcctgga

SEQ ID NO: 5493110 - DNA, 25 bp, Homo sapien
ttgcaggccaaaattctagggattc

SEQ ID NO: 5493111 - DNA, 25 bp, Homo sapien
atctgtacagatgatgacgcagagc

SEQ ID NO: 5493112 - DNA, 25 bp, Homo sapien
ccagcagctacagatggatgtctac

SEQ ID NO: 5493113 - DNA, 25 bp, Homo sapien
ctggagaaggtaaacgcttacacct

SEQ ID NO: 5493114 - DNA, 25 bp, Homo sapien
tggggagcattaaatagtatgggtc

SEQ ID NO: 5493115 - DNA, 25 bp, Homo sapien
ccagcagtgtcaaatagaaagtgtt

SEQ ID NO: 5493116 - DNA, 25 bp, Homo sapien
tggatgtctactggggagcattaaa

SEQ ID NO: 5493117 - DNA, 25 bp, Homo sapien
atcgaaactctaccacccccacacc

SEQ ID NO: 5493118 - DNA, 25 bp, Homo sapien
atgcgtgagaaatctgcccctgtga

SEQ ID NO: 5493119 - DNA, 25 bp, Homo sapien
aaaagctggtgaagcagtcatttta

SEQ ID NO: 5493120 - DNA, 25 bp, Homo sapien
aaatgccaaggaatcagctggagtt

SEQ ID NO: 5493121 - DNA, 25 bp, Homo sapien
gacagtgccaagatgatggtgctaa

SEQ ID NO: 5493122 - DNA, 25 bp, Homo sapien
gcctcagggagtgtaccatcatggc

SEQ ID NO: 5493123 - DNA, 25 bp, Homo sapien
ttgctgtggggaacttccaaggaaa

SEQ ID NO: 5493124 - DNA, 25 bp, Homo sapien
cacacccgtgagcacagtcagtttc

SEQ ID NO: 5493125 - DNA, 25 bp, Homo sapien
ctggggactccagttcaacatgaga

SEQ ID NO: 5493126 - DNA, 25 bp, Homo sapien
gggcaaggacaaatatcgaaactct

SEQ ID NO: 5493127 - DNA, 25 bp, Homo sapien
taaatggccccggatctcatgagaa

SEQ ID NO: 5493128 - DNA, 25 bp, Homo sapien
ttctttggtgaagcacaagtttctt

SEQ ID NO: 5493129 - DNA, 25 bp, Homo sapien
gggcagtctctttagcttggtgggc

SEQ ID NO: 5493130 - DNA, 25 bp, Homo sapien
ggagtgactctggagacttgagcat

SEQ ID NO: 5493131 - DNA, 25 bp, Homo sapien
acaccggtggcactgttaactgctt

SEQ ID NO: 5493132 - DNA, 25 bp, Homo sapien
ggtgggcttgtagtacagctacagc

SEQ ID NO: 5493133 - DNA, 25 bp, Homo sapien
catcaaccttagaatggagtgactc

SEQ ID NO: 5493134 - DNA, 25 bp, Homo sapien
aacagaagtgacattttgagctatt

SEQ ID NO: 5493135 - DNA, 25 bp, Homo sapien
tgctcggtacatacggttcagtttc

SEQ ID NO: 5493136 - DNA, 25 bp, Homo sapien
aacaacacgccagtgattttaccgg

SEQ ID NO: 5493137 - DNA, 25 bp, Homo sapien
cttgagcatatgaagaagttctgaa

SEQ ID NO: 5493138 - DNA, 25 bp, Homo sapien
gctagacctggcatttgctcggtac

SEQ ID NO: 5493139 - DNA, 25 bp, Homo sapien
tttaattaaggttctatattagagt

SEQ ID NO: 5493140 - DNA, 25 bp, Homo sapien
actctaatatagaaccttaattaaa

SEQ ID NO: 5493141 - DNA, 25 bp, Homo sapien
agtttaattaaggttctatattaga

SEQ ID NO: 5493142 - DNA, 25 bp, Homo sapien
tctaatatagaaccttaattaaact

SEQ ID NO: 5493143 - DNA, 25 bp, Homo sapien
tgacactaacgatgacagctaaaac

SEQ ID NO: 5493144 - DNA, 25 bp, Homo sapien
tcaggtcatgtctgacaggtcactt

SEQ ID NO: 5493145 - DNA, 25 bp, Homo sapien
aactgctgacctcgtatcctcccac

SEQ ID NO: 5493146 - DNA, 25 bp, Homo sapien
ttccttgccaagtacctgggttata

SEQ ID NO: 5493147 - DNA, 25 bp, Homo sapien
gggtgagccagaaacttcattccca

SEQ ID NO: 5493148 - DNA, 25 bp, Homo sapien
tttacaagtgaaaagactgaagtct

SEQ ID NO: 5493149 - DNA, 25 bp, Homo sapien
attacatgcttgagccaccataccc

SEQ ID NO: 5493150 - DNA, 25 bp, Homo sapien
tgcaagaatggaccaatacaagggg

SEQ ID NO: 5493151 - DNA, 25 bp, Homo sapien
catagcagctgtatgaagcagttac

SEQ ID NO: 5493152 - DNA, 25 bp, Homo sapien
aaaagactgaagtcttgagagggca

SEQ ID NO: 5493153 - DNA, 25 bp, Homo sapien
ctgggttatataggtgctttacatt

SEQ ID NO: 5493154 - DNA, 25 bp, Homo sapien
gataaagcctcggtccggaagaaga

SEQ ID NO: 5493155 - DNA, 25 bp, Homo sapien
ccggggacttcttgattgaggttaa

SEQ ID NO: 5493156 - DNA, 25 bp, Homo sapien
tgaggttaacaatgagaatgttgtc

SEQ ID NO: 5493157 - DNA, 25 bp, Homo sapien
tgagggctttggattcgtgcttcga

SEQ ID NO: 5493158 - DNA, 25 bp, Homo sapien
gtccttaaggtggtcacggtgacca

SEQ ID NO: 5493159 - DNA, 25 bp, Homo sapien
tgaagaattcacaccaacaccggct

SEQ ID NO: 5493160 - DNA, 25 bp, Homo sapien
cccccgcctccaaagcgggcaccga

SEQ ID NO: 5493161 - DNA, 25 bp, Homo sapien
caagtccatgacctcggagctggag

SEQ ID NO: 5493162 - DNA, 25 bp, Homo sapien
cctgcgctccaagtccatgacctcg

SEQ ID NO: 5493163 - DNA, 25 bp, Homo sapien
ccaacaccggctttcccagccctac

SEQ ID NO: 5493164 - DNA, 25 bp, Homo sapien
tgtccccggaattctctctacagtg

SEQ ID NO: 5493165 - DNA, 25 bp, Homo sapien
tggctggataacttgaaagtcaagt

SEQ ID NO: 5493166 - DNA, 25 bp, Homo sapien
agagtctcgttgccccgcttggagt

SEQ ID NO: 5493167 - DNA, 25 bp, Homo sapien
ctatagtatgtagacatccaacttc

SEQ ID NO: 5493168 - DNA, 25 bp, Homo sapien
tatacttcagatgcaatagataggc

SEQ ID NO: 5493169 - DNA, 25 bp, Homo sapien
gtctcgttgccccgcttggagtgca

SEQ ID NO: 5493170 - DNA, 25 bp, Homo sapien
caatagataggcattcataggaatt

SEQ ID NO: 5493171 - DNA, 25 bp, Homo sapien
tagatgccagagtttaggtttaatt

SEQ ID NO: 5493172 - DNA, 25 bp, Homo sapien
gtagttactatagtatgtagacatc

SEQ ID NO: 5493173 - DNA, 25 bp, Homo sapien
ccacacctggccttagccaagtttt

SEQ ID NO: 5493174 - DNA, 25 bp, Homo sapien
tataaggtaggtatcctgtcaagta

SEQ ID NO: 5493175 - DNA, 25 bp, Homo sapien
ggtaggtatcctgtcaagtagttac

SEQ ID NO: 5493176 - DNA, 25 bp, Homo sapien
cagctcccaagggctctgtgctgca

SEQ ID NO: 5493177 - DNA, 25 bp, Homo sapien
ctccccgccccctcccatatcaagt

SEQ ID NO: 5493178 - DNA, 25 bp, Homo sapien
ccatatcaagtagaatgctggcggc

SEQ ID NO: 5493179 - DNA, 25 bp, Homo sapien
ctcccatatcaagtagaatgctggc

SEQ ID NO: 5493180 - DNA, 25 bp, Homo sapien
cagactgaagatgcatatttgtgta

SEQ ID NO: 5493181 - DNA, 25 bp, Homo sapien
ggataaggaggccattcaggcctat

SEQ ID NO: 5493182 - DNA, 25 bp, Homo sapien
ggcggcttacagactgaagatgcat

SEQ ID NO: 5493183 - DNA, 25 bp, Homo sapien
tcaacgtcaactataaattagcttg

SEQ ID NO: 5493184 - DNA, 25 bp, Homo sapien
gctggcggcttacagactgaagatg

SEQ ID NO: 5493185 - DNA, 25 bp, Homo sapien
tttatgtggcttcaacgtcaactat

SEQ ID NO: 5493186 - DNA, 25 bp, Homo sapien
agcttggttatcttctaggagaaat

SEQ ID NO: 5493187 - DNA, 25 bp, Homo sapien
gtggcaagcgcctgtaattccaact

SEQ ID NO: 5493188 - DNA, 25 bp, Homo sapien
ggagctaaactgccaggttgaaatc

SEQ ID NO: 5493189 - DNA, 25 bp, Homo sapien
gacagggcgagactactccgtctca

SEQ ID NO: 5493190 - DNA, 25 bp, Homo sapien
gactggttgatatggtgaaaccctg

SEQ ID NO: 5493191 - DNA, 25 bp, Homo sapien
tacaggttctggagctaaactgcca

SEQ ID NO: 5493192 - DNA, 25 bp, Homo sapien
aattagctgtgcacagtggcaagcg

SEQ ID NO: 5493193 - DNA, 25 bp, Homo sapien
agctgtgtgggaatgttacagaact

SEQ ID NO: 5493194 - DNA, 25 bp, Homo sapien
gtgtgggaatgttacagaactactc

SEQ ID NO: 5493195 - DNA, 25 bp, Homo sapien
tttctcagctgtgtgggaatgttac

SEQ ID NO: 5493196 - DNA, 25 bp, Homo sapien
tgaggcagaagaactgcttgaacct

SEQ ID NO: 5493197 - DNA, 25 bp, Homo sapien
actgccaggttgaaatcttgcctcc

SEQ ID NO: 5493198 - DNA, 25 bp, Homo sapien
acactacaactaaagaccatgtcat

SEQ ID NO: 5493199 - DNA, 25 bp, Homo sapien
atgacatggtctttagttgtagtgt

SEQ ID NO: 5493200 - DNA, 25 bp, Homo sapien
tccatgacagagcaccatgcaggga

SEQ ID NO: 5493201 - DNA, 25 bp, Homo sapien
acggctgagattcgacaggttcatt

SEQ ID NO: 5493202 - DNA, 25 bp, Homo sapien
ctgcccagtcctgtggtgacctcag

SEQ ID NO: 5493203 - DNA, 25 bp, Homo sapien
cctggagattccggtctcaggagca

SEQ ID NO: 5493204 - DNA, 25 bp, Homo sapien
ctcagatgctatggctctcgcaggc

SEQ ID NO: 5493205 - DNA, 25 bp, Homo sapien
gaggcccaggaataccgtctggtta

SEQ ID NO: 5493206 - DNA, 25 bp, Homo sapien
gaacaaggccggattctccatccca

SEQ ID NO: 5493207 - DNA, 25 bp, Homo sapien
gcagggagataccgctgttactact

SEQ ID NO: 5493208 - DNA, 25 bp, Homo sapien
ggagagaacgtgaccctccagtgtg

SEQ ID NO: 5493209 - DNA, 25 bp, Homo sapien
tggtggtgacaggattctacaacaa

SEQ ID NO: 5493210 - DNA, 25 bp, Homo sapien
caggagcagctgataacctcagtcc

SEQ ID NO: 5493211 - DNA, 25 bp, Homo sapien
tacggtatgaggaacccaaggttgt

SEQ ID NO: 5493212 - DNA, 25 bp, Homo sapien
acaaccttgggttcctcataccgta

SEQ ID NO: 5493213 - DNA, 25 bp, Homo sapien
ataattacatgataaagggtgggtg

SEQ ID NO: 5493214 - DNA, 25 bp, Homo sapien
aagacttaagacatacaaccagata

SEQ ID NO: 5493215 - DNA, 25 bp, Homo sapien
gtgggtgctatggctcacacttgtc

SEQ ID NO: 5493216 - DNA, 25 bp, Homo sapien
ccagatatatgtagagagagtgaac

SEQ ID NO: 5493217 - DNA, 25 bp, Homo sapien
cggggaacatagtgagaccccatct

SEQ ID NO: 5493218 - DNA, 25 bp, Homo sapien
attcaagatcagcccggggaacata

SEQ ID NO: 5493219 - DNA, 25 bp, Homo sapien
caagagggaagtaacaaaataatta

SEQ ID NO: 5493220 - DNA, 25 bp, Homo sapien
gaggccaggaattcaagatcagccc

SEQ ID NO: 5493221 - DNA, 25 bp, Homo sapien
aaggttaaattacaagctactacta

SEQ ID NO: 5493222 - DNA, 25 bp, Homo sapien
ctccagcctggagtacagaatgaga

SEQ ID NO: 5493223 - DNA, 25 bp, Homo sapien
tgatagtgtcactgtcactccagcc

SEQ ID NO: 5493224 - DNA, 25 bp, Homo sapien
cctccactaaagtgagacaagatga

SEQ ID NO: 5493225 - DNA, 25 bp, Homo sapien
ctgtaagtgcgtacatgtccaaaat

SEQ ID NO: 5493226 - DNA, 25 bp, Homo sapien
cattccagatacaagcagcattaca

SEQ ID NO: 5493227 - DNA, 25 bp, Homo sapien
ttacaaatgtactgtaagtgcgtac

SEQ ID NO: 5493228 - DNA, 25 bp, Homo sapien
tcaccacctgataccatacatactt

SEQ ID NO: 5493229 - DNA, 25 bp, Homo sapien
tttgtacagtaaatatgtcctccac

SEQ ID NO: 5493230 - DNA, 25 bp, Homo sapien
tatgtgggaaaccattagatgggaa

SEQ ID NO: 5493231 - DNA, 25 bp, Homo sapien
ataacacattccaaggccaggtgtg

SEQ ID NO: 5493232 - DNA, 25 bp, Homo sapien
agaaataccagagtgttattgttac

SEQ ID NO: 5493233 - DNA, 25 bp, Homo sapien
aaaaaatcagtgctatgtgggaaac

SEQ ID NO: 5493234 - DNA, 25 bp, Homo sapien
tacctggctcattgtagaaatacca

SEQ ID NO: 5493235 - DNA, 25 bp, Homo sapien
attgtaaattgtgtagtgaaacatt

SEQ ID NO: 5493236 - DNA, 25 bp, Homo sapien
tatacctgagagttcttgagttttt

SEQ ID NO: 5493237 - DNA, 25 bp, Homo sapien
ttcttttgagaattacctgcttata

SEQ ID NO: 5493238 - DNA, 25 bp, Homo sapien
atttaccataaatgggccgggtgca

SEQ ID NO: 5493239 - DNA, 25 bp, Homo sapien
attttgatggggagaaaagtttctc

SEQ ID NO: 5493240 - DNA, 25 bp, Homo sapien
agataaatatccccaaattgccttc

SEQ ID NO: 5493241 - DNA, 25 bp, Homo sapien
tttgctattttgatggggagaaaag

SEQ ID NO: 5493242 - DNA, 25 bp, Homo sapien
atcccagccctttgagaggccgagg

SEQ ID NO: 5493243 - DNA, 25 bp, Homo sapien
atgtggggaaaccctgcctctacta

SEQ ID NO: 5493244 - DNA, 25 bp, Homo sapien
aaatgatatatgagactactgtttc

SEQ ID NO: 5493245 - DNA, 25 bp, Homo sapien
tcgacaccagcctggccaatgtggg

SEQ ID NO: 5493246 - DNA, 25 bp, Homo sapien
attgcaaagtcaaggaaagataagt

SEQ ID NO: 5493247 - DNA, 25 bp, Homo sapien
cctgaatgaacaatccggttgagtg

SEQ ID NO: 5493248 - DNA, 25 bp, Homo sapien
cggttgagtgtggatgtcaaacaaa

SEQ ID NO: 5493249 - DNA, 25 bp, Homo sapien
caatttactagacatagaaggggac

SEQ ID NO: 5493250 - DNA, 25 bp, Homo sapien
ttggtgtagacctttggcaactcac

SEQ ID NO: 5493251 - DNA, 25 bp, Homo sapien
ttacaacatgagatgacttgctaat

SEQ ID NO: 5493252 - DNA, 25 bp, Homo sapien
acaaaagtaagagaattgcaaagtc

SEQ ID NO: 5493253 - DNA, 25 bp, Homo sapien
aggatggggcttgtcataaaatttc

SEQ ID NO: 5493254 - DNA, 25 bp, Homo sapien
acacggaaaatgactctgaggtaat

SEQ ID NO: 5493255 - DNA, 25 bp, Homo sapien
atctgccagtaagttggtgtagacc

SEQ ID NO: 5493256 - DNA, 25 bp, Homo sapien
aaagtatagacacggaaaatgactc

SEQ ID NO: 5493257 - DNA, 25 bp, Homo sapien
aatgtcaatttgaggaagatatcac

SEQ ID NO: 5493258 - DNA, 25 bp, Homo sapien
tggagttgtatatgttagggtttgc

SEQ ID NO: 5493259 - DNA, 25 bp, Homo sapien
tgccttgcagcatgagcaaagaaaa

SEQ ID NO: 5493260 - DNA, 25 bp, Homo sapien
cagaatcatagaaaggataaggttt

SEQ ID NO: 5493261 - DNA, 25 bp, Homo sapien
gtcagagcacacatgccttgcagca

SEQ ID NO: 5493262 - DNA, 25 bp, Homo sapien
ctctgataaatgaagtgggctaatt

SEQ ID NO: 5493263 - DNA, 25 bp, Homo sapien
gctaaacaaaactacagtcagaatc

SEQ ID NO: 5493264 - DNA, 25 bp, Homo sapien
aacacgtggtcacttagcaagcagt

SEQ ID NO: 5493265 - DNA, 25 bp, Homo sapien
gttagggtttgctattgagaagtat

SEQ ID NO: 5493266 - DNA, 25 bp, Homo sapien
atgagcaaagaaaatgtgctaaaca

SEQ ID NO: 5493267 - DNA, 25 bp, Homo sapien
ttgagaagtataggagtgtattaac

SEQ ID NO: 5493268 - DNA, 25 bp, Homo sapien
cctgtccagtccagtgtctgagcag

SEQ ID NO: 5493269 - DNA, 25 bp, Homo sapien
gtgtctgagcagagtcagaatccac

SEQ ID NO: 5493270 - DNA, 25 bp, Homo sapien
tcatagacagctctcgcccaccttc

SEQ ID NO: 5493271 - DNA, 25 bp, Homo sapien
cagatgtaaatccggaagcctccag

SEQ ID NO: 5493272 - DNA, 25 bp, Homo sapien
ttacccaccaacacagcagctgtga

SEQ ID NO: 5493273 - DNA, 25 bp, Homo sapien
ggtggccacagtttcagtgcagatg

SEQ ID NO: 5493274 - DNA, 25 bp, Homo sapien
tgtgaggcacacacggctattgaaa

SEQ ID NO: 5493275 - DNA, 25 bp, Homo sapien
aattagcccgagcatgttgttgcat

SEQ ID NO: 5493276 - DNA, 25 bp, Homo sapien
aattcatggaaattgctgggtgtgg

SEQ ID NO: 5493277 - DNA, 25 bp, Homo sapien
ttctccactgtacgatggggaatgc

SEQ ID NO: 5493278 - DNA, 25 bp, Homo sapien
gtgtgtgggggccatttacccacca

SEQ ID NO: 5493279 - DNA, 25 bp, Homo sapien
tagactgcgttacacgcgttgaaac

SEQ ID NO: 5493280 - DNA, 25 bp, Homo sapien
gtttcaacgcgtgtaacgcagtcta

SEQ ID NO: 5493281 - DNA, 25 bp, Homo sapien
cctgtccctgtccgggctgtctctg

SEQ ID NO: 5493282 - DNA, 25 bp, Homo sapien
ctcaggcaagtgacttcgcctcccc

SEQ ID NO: 5493283 - DNA, 25 bp, Homo sapien
agtaggtgacaggctccattcaaca

SEQ ID NO: 5493284 - DNA, 25 bp, Homo sapien
ccatgccggcaagtttggcaaactg

SEQ ID NO: 5493285 - DNA, 25 bp, Homo sapien
gcaaactgcagcttcagggaatagc

SEQ ID NO: 5493286 - DNA, 25 bp, Homo sapien
gcatccatacggagggtcttggaga

SEQ ID NO: 5493287 - DNA, 25 bp, Homo sapien
gaatagcccctacaagactaccctc

SEQ ID NO: 5493288 - DNA, 25 bp, Homo sapien
tttcagaaaaactagatccggcacc

SEQ ID NO: 5493289 - DNA, 25 bp, Homo sapien
cttctaaaggacaggtgtttgggag

SEQ ID NO: 5493290 - DNA, 25 bp, Homo sapien
ttgtggtgcacagtccccaccagcg

SEQ ID NO: 5493291 - DNA, 25 bp, Homo sapien
acaggccatcgagccagtaaaatga

SEQ ID NO: 5493292 - DNA, 25 bp, Homo sapien
ttagattgctccccgtgcgtgtcca

SEQ ID NO: 5493293 - DNA, 25 bp, Homo sapien
tgtcagtgagaaggtctagtcacca

SEQ ID NO: 5493294 - DNA, 25 bp, Homo sapien
ctgggaattgagaggtaatagtctc

SEQ ID NO: 5493295 - DNA, 25 bp, Homo sapien
cccaccacagcttaccattggcctc

SEQ ID NO: 5493296 - DNA, 25 bp, Homo sapien
tgcagatggtgcaccttagattgct

SEQ ID NO: 5493297 - DNA, 25 bp, Homo sapien
ggaaaaaggatgtcagagctcatca

SEQ ID NO: 5493298 - DNA, 25 bp, Homo sapien
tggcttgtgggtacctaacactttc

SEQ ID NO: 5493299 - DNA, 25 bp, Homo sapien
ttctaaaggtgaaatcagagttcct

SEQ ID NO: 5493300 - DNA, 25 bp, Homo sapien
ctcatttatggtggcttgtgggtac

SEQ ID NO: 5493301 - DNA, 25 bp, Homo sapien
taatagtctccaggcatgtcagtga

SEQ ID NO: 5493302 - DNA, 25 bp, Homo sapien
gtggcacgatctcaagtctgctttt

SEQ ID NO: 5493303 - DNA, 25 bp, Homo sapien
cacgtggtacaggagctattactag

SEQ ID NO: 5493304 - DNA, 25 bp, Homo sapien
caaaagaacacatatgtggggcctc

SEQ ID NO: 5493305 - DNA, 25 bp, Homo sapien
catgaggctaagagggcttattata

SEQ ID NO: 5493306 - DNA, 25 bp, Homo sapien
acttacgaatcaaccaatgggccaa

SEQ ID NO: 5493307 - DNA, 25 bp, Homo sapien
gactagtttgtcaacaggctgagaa

SEQ ID NO: 5493308 - DNA, 25 bp, Homo sapien
cggcctgaatgtatgacgggcatga

SEQ ID NO: 5493309 - DNA, 25 bp, Homo sapien
tgaaaagcccagttggcacgtggta

SEQ ID NO: 5493310 - DNA, 25 bp, Homo sapien
gtggggcctcctgctaagatatact

SEQ ID NO: 5493311 - DNA, 25 bp, Homo sapien
gaggagaagaacacaaccattgctg

SEQ ID NO: 5493312 - DNA, 25 bp, Homo sapien
cagaccaagtacccggaaagctaaa

SEQ ID NO: 5493313 - DNA, 25 bp, Homo sapien
gggccagagttgttacaccagggca

SEQ ID NO: 5493314 - DNA, 25 bp, Homo sapien
aaacagaagtgcagattttcgttaa

SEQ ID NO: 5493315 - DNA, 25 bp, Homo sapien
aagacagtatattttatcacagccc

SEQ ID NO: 5493316 - DNA, 25 bp, Homo sapien
aattcctgctaaaaacagaagtgca

SEQ ID NO: 5493317 - DNA, 25 bp, Homo sapien
gcatgagctactgtgcctggccaga

SEQ ID NO: 5493318 - DNA, 25 bp, Homo sapien
acctcagcatcacaaacccagttat

SEQ ID NO: 5493319 - DNA, 25 bp, Homo sapien
ggtgggaaaagaaagacatctccta

SEQ ID NO: 5493320 - DNA, 25 bp, Homo sapien
caaatgaacaaatctcaacagtgga

SEQ ID NO: 5493321 - DNA, 25 bp, Homo sapien
tgagcacattccttagaaaacagac

SEQ ID NO: 5493322 - DNA, 25 bp, Homo sapien
tcacagcccaatacacctcagcatc

SEQ ID NO: 5493323 - DNA, 25 bp, Homo sapien
atctcaacagtggagaaatggtggg

SEQ ID NO: 5493324 - DNA, 25 bp, Homo sapien
gtgcaatggcgtgatctcgactcac

SEQ ID NO: 5493325 - DNA, 25 bp, Homo sapien
tgtgtacaagttgtagaactaaatt

SEQ ID NO: 5493326 - DNA, 25 bp, Homo sapien
aatttagttctacaacttgtacaca

SEQ ID NO: 5493327 - DNA, 25 bp, Homo sapien
ttggcacaaaagtttgatcgctgta

SEQ ID NO: 5493328 - DNA, 25 bp, Homo sapien
gttgaggtagattaactgggcctcc

SEQ ID NO: 5493329 - DNA, 25 bp, Homo sapien
ggcagattcaactcctggggaaggc

SEQ ID NO: 5493330 - DNA, 25 bp, Homo sapien
gtccagcctgtgttacaaaagggtc

SEQ ID NO: 5493331 - DNA, 25 bp, Homo sapien
aggctgctgtaacagggtaacatac

SEQ ID NO: 5493332 - DNA, 25 bp, Homo sapien
tacaaaagggtcatgttgaggtaga

SEQ ID NO: 5493333 - DNA, 25 bp, Homo sapien
acacattggaaaactctagatactg

SEQ ID NO: 5493334 - DNA, 25 bp, Homo sapien
tgggcctccagtatcatcttagctc

SEQ ID NO: 5493335 - DNA, 25 bp, Homo sapien
gtaacagggtaacatacagtggttc

SEQ ID NO: 5493336 - DNA, 25 bp, Homo sapien
agagagaaagagtatgtggtctctg

SEQ ID NO: 5493337 - DNA, 25 bp, Homo sapien
acagtggttcagacaacaggcattt

SEQ ID NO: 5493338 - DNA, 25 bp, Homo sapien
ccagagcatcagcatacctgagttc

SEQ ID NO: 5493339 - DNA, 25 bp, Homo sapien
ggtgctgcggtctcatcttagtgcc

SEQ ID NO: 5493340 - DNA, 25 bp, Homo sapien
gtggcctggacaatcccagagcatc

SEQ ID NO: 5493341 - DNA, 25 bp, Homo sapien
tggcacagccattaggctcaggccc

SEQ ID NO: 5493342 - DNA, 25 bp, Homo sapien
cttcatcacagggtggtattggcac

SEQ ID NO: 5493343 - DNA, 25 bp, Homo sapien
ccccatcccccttgggtgccgtggc

SEQ ID NO: 5493344 - DNA, 25 bp, Homo sapien
gctctaggaaccagaaccctgggct

SEQ ID NO: 5493345 - DNA, 25 bp, Homo sapien
ttgagcccattatggccgagagagg

SEQ ID NO: 5493346 - DNA, 25 bp, Homo sapien
acctgagttcaggattgagcccatt

SEQ ID NO: 5493347 - DNA, 25 bp, Homo sapien
acctcagccagtgtacagccttggg

SEQ ID NO: 5493348 - DNA, 25 bp, Homo sapien
gaggccctggtccccgtctcaggaa

SEQ ID NO: 5493349 - DNA, 25 bp, Homo sapien
ccacttgcaactcagatgggaccgg

SEQ ID NO: 5493350 - DNA, 25 bp, Homo sapien
cagtgacttacttgggcgttattgt

SEQ ID NO: 5493351 - DNA, 25 bp, Homo sapien
ccttctccggaaggcttgtcaaggg

SEQ ID NO: 5493352 - DNA, 25 bp, Homo sapien
aaaacaggtaagaggctctccagtg

SEQ ID NO: 5493353 - DNA, 25 bp, Homo sapien
tgtcctagtacgagctctggtgacc

SEQ ID NO: 5493354 - DNA, 25 bp, Homo sapien
agagacgcaaacacaaaagtggaaa

SEQ ID NO: 5493355 - DNA, 25 bp, Homo sapien
ggttctcagggcgctttgctccttg

SEQ ID NO: 5493356 - DNA, 25 bp, Homo sapien
cggcaccgagcgctgctttgttcgg

SEQ ID NO: 5493357 - DNA, 25 bp, Homo sapien
gggactttgatccggagccccacat

SEQ ID NO: 5493358 - DNA, 25 bp, Homo sapien
cccaggactctgcgctgctgcgctt

SEQ ID NO: 5493359 - DNA, 25 bp, Homo sapien
ggagacgatgtcctagtacgagctc

SEQ ID NO: 5493360 - DNA, 25 bp, Homo sapien
cagtggaaagccaaattccaaaagg

SEQ ID NO: 5493361 - DNA, 25 bp, Homo sapien
cttgtccaactcgcagctcgtcggc

SEQ ID NO: 5493362 - DNA, 25 bp, Homo sapien
agcaaagtggcttataaagtaaatg

SEQ ID NO: 5493363 - DNA, 25 bp, Homo sapien
cacggtaagttacaaaacatccaaa

SEQ ID NO: 5493364 - DNA, 25 bp, Homo sapien
ctaatgtgaagtagaatcctaaata

SEQ ID NO: 5493365 - DNA, 25 bp, Homo sapien
aaggaatttgcatttagtgaaaaac

SEQ ID NO: 5493366 - DNA, 25 bp, Homo sapien
gcaagctattcaatgggaaagctgc

SEQ ID NO: 5493367 - DNA, 25 bp, Homo sapien
aatgttatctgtgtagcaagctatt

SEQ ID NO: 5493368 - DNA, 25 bp, Homo sapien
gctgtcaggctgattattaaagtcc

SEQ ID NO: 5493369 - DNA, 25 bp, Homo sapien
aggacatgcagcccagaatagcttt

SEQ ID NO: 5493370 - DNA, 25 bp, Homo sapien
tattctggttcatgtggccgatatt

SEQ ID NO: 5493371 - DNA, 25 bp, Homo sapien
agaaagtatgaggccatgactaaac

SEQ ID NO: 5493372 - DNA, 25 bp, Homo sapien
gagacccacggttggtgctcaaata

SEQ ID NO: 5493373 - DNA, 25 bp, Homo sapien
catgcgtaataaacgggtcacagac

SEQ ID NO: 5493374 - DNA, 25 bp, Homo sapien
cctcagatgactttcggcaggctcc

SEQ ID NO: 5493375 - DNA, 25 bp, Homo sapien
acttctctaaggaagagtgggaaaa

SEQ ID NO: 5493376 - DNA, 25 bp, Homo sapien
ccagagaagatacaaaaggccttcg

SEQ ID NO: 5493377 - DNA, 25 bp, Homo sapien
ccaggggaatgatttggataatgac

SEQ ID NO: 5493378 - DNA, 25 bp, Homo sapien
aaagtctcggagaaaatcgtctatg

SEQ ID NO: 5493379 - DNA, 25 bp, Homo sapien
gtgggaatcaggttcaacgtcctca

SEQ ID NO: 5493380 - DNA, 25 bp, Homo sapien
atgaacggagatgacacctttgcaa

SEQ ID NO: 5493381 - DNA, 25 bp, Homo sapien
gataatgaccctaaccgtgggaatc

SEQ ID NO: 5493382 - DNA, 25 bp, Homo sapien
aggattttactgagatcaccagagc

SEQ ID NO: 5493383 - DNA, 25 bp, Homo sapien
ccttataattaaaacaacgacaaca

SEQ ID NO: 5493384 - DNA, 25 bp, Homo sapien
agcaacagaacagggtacttagcct

SEQ ID NO: 5493385 - DNA, 25 bp, Homo sapien
cggctcactgcaagatccgactccc

SEQ ID NO: 5493386 - DNA, 25 bp, Homo sapien
tgcaagatccgactcccaggttcac

SEQ ID NO: 5493387 - DNA, 25 bp, Homo sapien
gatctatcatcaagcctacattgtc

SEQ ID NO: 5493388 - DNA, 25 bp, Homo sapien
cagggtacttagcctacttcagctc

SEQ ID NO: 5493389 - DNA, 25 bp, Homo sapien
tccaaaaaatacagtgagttgcttt

SEQ ID NO: 5493390 - DNA, 25 bp, Homo sapien
aaaatacagtgagttgctttgtctt

SEQ ID NO: 5493391 - DNA, 25 bp, Homo sapien
taaattctgatgcatagggccctgc

SEQ ID NO: 5493392 - DNA, 25 bp, Homo sapien
ctgagatcaccagagcaacagaaca

SEQ ID NO: 5493393 - DNA, 25 bp, Homo sapien
atcaattctgactgcttacgtggtt

SEQ ID NO: 5493394 - DNA, 25 bp, Homo sapien
tcaggctggtctggaactctcgacc

SEQ ID NO: 5493395 - DNA, 25 bp, Homo sapien
cgcgtccggcccacaagctaaattt

SEQ ID NO: 5493396 - DNA, 25 bp, Homo sapien
tcagaaataaatggacagcagtgca

SEQ ID NO: 5493397 - DNA, 25 bp, Homo sapien
tccatggctatgcaataaacttcag

SEQ ID NO: 5493398 - DNA, 25 bp, Homo sapien
attacagacgtgaaccaccgcgtcc

SEQ ID NO: 5493399 - DNA, 25 bp, Homo sapien
tcggattgtcaatgtcaaagatagt

SEQ ID NO: 5493400 - DNA, 25 bp, Homo sapien
tgtcaaagatagtttccagggggac

SEQ ID NO: 5493401 - DNA, 25 bp, Homo sapien
cagcagtgcatttatgacccaggta

SEQ ID NO: 5493402 - DNA, 25 bp, Homo sapien
ctggaactctcgacctcaggtgatc

SEQ ID NO: 5493403 - DNA, 25 bp, Homo sapien
actgcttacgtggttagaaaaatag

SEQ ID NO: 5493404 - DNA, 25 bp, Homo sapien
agcatgaagagcaactagaactttc

SEQ ID NO: 5493405 - DNA, 25 bp, Homo sapien
acatcagtactcatcagggaaatgc

SEQ ID NO: 5493406 - DNA, 25 bp, Homo sapien
taggtatgtatatgtgacaaaggat

SEQ ID NO: 5493407 - DNA, 25 bp, Homo sapien
tgactaaaatcaaatggagaacaat

SEQ ID NO: 5493408 - DNA, 25 bp, Homo sapien
atcagatgttagtgagcatgaagag

SEQ ID NO: 5493409 - DNA, 25 bp, Homo sapien
tgtgacaaaggatttctagtgataa

SEQ ID NO: 5493410 - DNA, 25 bp, Homo sapien
aagcaaatgaaaagttctcaacatc

SEQ ID NO: 5493411 - DNA, 25 bp, Homo sapien
aaatgaataagcaagacatgccttt

SEQ ID NO: 5493412 - DNA, 25 bp, Homo sapien
atgtgactggctaacaagcaaatga

SEQ ID NO: 5493413 - DNA, 25 bp, Homo sapien
ggtggcaggaaaggttgattgccac

SEQ ID NO: 5493414 - DNA, 25 bp, Homo sapien
gaacatgtaaaagattggaacagtc

SEQ ID NO: 5493415 - DNA, 25 bp, Homo sapien
gggtcgaatacatctgcagtgagga

SEQ ID NO: 5493416 - DNA, 25 bp, Homo sapien
aatcagttctcagggctggagcaaa

SEQ ID NO: 5493417 - DNA, 25 bp, Homo sapien
tccagatagggtctcctccgcaact

SEQ ID NO: 5493418 - DNA, 25 bp, Homo sapien
ctggatggctgtggagttatccatg

SEQ ID NO: 5493419 - DNA, 25 bp, Homo sapien
gttgttagcctacctgcacgccctc

SEQ ID NO: 5493420 - DNA, 25 bp, Homo sapien
caaagatgagctttggttgggccaa

SEQ ID NO: 5493421 - DNA, 25 bp, Homo sapien
ccatgatatgaaatagcagctgagc

SEQ ID NO: 5493422 - DNA, 25 bp, Homo sapien
gggcagaggacatccttcagttgtt

SEQ ID NO: 5493423 - DNA, 25 bp, Homo sapien
atgatagatccaactccaggagaac

SEQ ID NO: 5493424 - DNA, 25 bp, Homo sapien
taaatttactgcaaggggtcgaata

SEQ ID NO: 5493425 - DNA, 25 bp, Homo sapien
tgactcactagatcacctggctact

SEQ ID NO: 5493426 - DNA, 25 bp, Homo sapien
agtaagtggcctatagcatcattcc

SEQ ID NO: 5493427 - DNA, 25 bp, Homo sapien
ctgccttactaaggtgtgtgcacca

SEQ ID NO: 5493428 - DNA, 25 bp, Homo sapien
ctggagacagctgcatttagtaatc

SEQ ID NO: 5493429 - DNA, 25 bp, Homo sapien
agtgaaactttcctaagaggtagag

SEQ ID NO: 5493430 - DNA, 25 bp, Homo sapien
aaggtgtgtgcaccagtagaaaggt

SEQ ID NO: 5493431 - DNA, 25 bp, Homo sapien
tccactgttgcaaacggcagctagt

SEQ ID NO: 5493432 - DNA, 25 bp, Homo sapien
ttcagaactggtcagaattaaatcc

SEQ ID NO: 5493433 - DNA, 25 bp, Homo sapien
ccagaagtcccaagtaaacacagtg

SEQ ID NO: 5493434 - DNA, 25 bp, Homo sapien
tggcaaactggtaagtccactgttg

SEQ ID NO: 5493435 - DNA, 25 bp, Homo sapien
gcagctagtccagaagtcccaagta

SEQ ID NO: 5493436 - DNA, 25 bp, Homo sapien
atggttttagagagccactcactgc

SEQ ID NO: 5493437 - DNA, 25 bp, Homo sapien
atagtgtgactgattttggtaattc

SEQ ID NO: 5493438 - DNA, 25 bp, Homo sapien
tcttataaggggcttggagtatata

SEQ ID NO: 5493439 - DNA, 25 bp, Homo sapien
aatattacccagcagttcaaaggaa

SEQ ID NO: 5493440 - DNA, 25 bp, Homo sapien
caaaaagataagctgagtaaccata

SEQ ID NO: 5493441 - DNA, 25 bp, Homo sapien
caactgatgagtagataaatgtgat

SEQ ID NO: 5493442 - DNA, 25 bp, Homo sapien
gagtaaccatatgacccagaaattt

SEQ ID NO: 5493443 - DNA, 25 bp, Homo sapien
ttcacacctgctaggatggctataa

SEQ ID NO: 5493444 - DNA, 25 bp, Homo sapien
ataatcagaaagaacaggtaagtgt

SEQ ID NO: 5493445 - DNA, 25 bp, Homo sapien
cgctaggaatgtaagatagtgtgac

SEQ ID NO: 5493446 - DNA, 25 bp, Homo sapien
acttaacagaatgaagacaggatac

SEQ ID NO: 5493447 - DNA, 25 bp, Homo sapien
gtaagtgttggtgagcattgtagaa

SEQ ID NO: 5493448 - DNA, 25 bp, Homo sapien
aactgcccatcaaccttggctcacc

SEQ ID NO: 5493449 - DNA, 25 bp, Homo sapien
tgaacaccttcatacagccctgctg

SEQ ID NO: 5493450 - DNA, 25 bp, Homo sapien
ccggaaggttgctttctgctcccca

SEQ ID NO: 5493451 - DNA, 25 bp, Homo sapien
gaaaggggtgttttctagctcctgc

SEQ ID NO: 5493452 - DNA, 25 bp, Homo sapien
tctgctccccagaagaagtggtgta

SEQ ID NO: 5493453 - DNA, 25 bp, Homo sapien
aaacacttggtacggtcagtcattc

SEQ ID NO: 5493454 - DNA, 25 bp, Homo sapien
ggctcacctgtacccggaaggttgc

SEQ ID NO: 5493455 - DNA, 25 bp, Homo sapien
aactttgccagtagaggtgctggag

SEQ ID NO: 5493456 - DNA, 25 bp, Homo sapien
gcacaggtacacacagtgatatccc

SEQ ID NO: 5493457 - DNA, 25 bp, Homo sapien
cccaactccctctgcataactgccc

SEQ ID NO: 5493458 - DNA, 25 bp, Homo sapien
ctcccaccagcagtatatgaaaatt

SEQ ID NO: 5493459 - DNA, 25 bp, Homo sapien
cgaacctggtcgtacaagccttcag

SEQ ID NO: 5493460 - DNA, 25 bp, Homo sapien
ctgaaggcttgtacgaccaggttcg

SEQ ID NO: 5493461 - DNA, 25 bp, Homo sapien
tgtaagccacggcttctgtgaaggc

SEQ ID NO: 5493462 - DNA, 25 bp, Homo sapien
cccgcccctgcgttaccacaagttc

SEQ ID NO: 5493463 - DNA, 25 bp, Homo sapien
tggcgatgatgacgtccgtcacagc

SEQ ID NO: 5493464 - DNA, 25 bp, Homo sapien
gcctggatgtaagccacggcttctg

SEQ ID NO: 5493465 - DNA, 25 bp, Homo sapien
tcctcaagtgcaaagagtggtctga

SEQ ID NO: 5493466 - DNA, 25 bp, Homo sapien
agccccgcaggtttttggcgatgat

SEQ ID NO: 5493467 - DNA, 25 bp, Homo sapien
tgtgggctgacttgttcttgctctc

SEQ ID NO: 5493468 - DNA, 25 bp, Homo sapien
tgctgtcaaaaagcttcagggattc

SEQ ID NO: 5493469 - DNA, 25 bp, Homo sapien
tgacgtccgtcacagcatcaaagac

SEQ ID NO: 5493470 - DNA, 25 bp, Homo sapien
tgggctcagtagagtccacagcccc

SEQ ID NO: 5493471 - DNA, 25 bp, Homo sapien
ctcctccctcccttggtgccagcct

SEQ ID NO: 5493472 - DNA, 25 bp, Homo sapien
ataggctagcaaatgaaaactgaca

SEQ ID NO: 5493473 - DNA, 25 bp, Homo sapien
tgcctgggaccgtttcctgcacatc

SEQ ID NO: 5493474 - DNA, 25 bp, Homo sapien
gggaatgaatgaaggcattattgct

SEQ ID NO: 5493475 - DNA, 25 bp, Homo sapien
tttcctcctggcatagacaactcta

SEQ ID NO: 5493476 - DNA, 25 bp, Homo sapien
ggtaaaatgtgcatgacaaatgttt

SEQ ID NO: 5493477 - DNA, 25 bp, Homo sapien
tggagctgtggtctcagaagcagct

SEQ ID NO: 5493478 - DNA, 25 bp, Homo sapien
ttgctggtttttggctgaaggctgc

SEQ ID NO: 5493479 - DNA, 25 bp, Homo sapien
tgctatgcaccaccaggagatgctg

SEQ ID NO: 5493480 - DNA, 25 bp, Homo sapien
gcagtggttgccttctgcagggctg

SEQ ID NO: 5493481 - DNA, 25 bp, Homo sapien
acaggcagcacagaactgtaattct

SEQ ID NO: 5493482 - DNA, 25 bp, Homo sapien
aagggtttccagaagtcttgatgaa

SEQ ID NO: 5493483 - DNA, 25 bp, Homo sapien
catgaggcgtctacacttttgaacg

SEQ ID NO: 5493484 - DNA, 25 bp, Homo sapien
cgttcaaaagtgtagacgcctcatg

SEQ ID NO: 5493485 - DNA, 25 bp, Homo sapien
tgaagacttaagggtttgagcagat

SEQ ID NO: 5493486 - DNA, 25 bp, Homo sapien
aagtagaaacgtatccggcatgact

SEQ ID NO: 5493487 - DNA, 25 bp, Homo sapien
tcatagcagcaagaattgaagactt

SEQ ID NO: 5493488 - DNA, 25 bp, Homo sapien
ccaggagcaaagtctgagctttcct

SEQ ID NO: 5493489 - DNA, 25 bp, Homo sapien
gggcctgatgctgtttgtgctgatc

SEQ ID NO: 5493490 - DNA, 25 bp, Homo sapien
tttaggtggctaagatcagtcttct

SEQ ID NO: 5493491 - DNA, 25 bp, Homo sapien
agttggatatgaccgaggaaattac

SEQ ID NO: 5493492 - DNA, 25 bp, Homo sapien
ctcaactagcatggatttgggtcat

SEQ ID NO: 5493493 - DNA, 25 bp, Homo sapien
actaagcatagagtgcagttggata

SEQ ID NO: 5493494 - DNA, 25 bp, Homo sapien
tgtctccttggacgaggtttgctgc

SEQ ID NO: 5493495 - DNA, 25 bp, Homo sapien
tgggtcatggaattaaagtagaaac

SEQ ID NO: 5493496 - DNA, 25 bp, Homo sapien
tgatccatcgagacatcaaggggca

SEQ ID NO: 5493497 - DNA, 25 bp, Homo sapien
ccacattgaccgatcccggaagaag

SEQ ID NO: 5493498 - DNA, 25 bp, Homo sapien
tcatcaagacttacctgagccgccc

SEQ ID NO: 5493499 - DNA, 25 bp, Homo sapien
tgggcagacggaacactttcattgg

SEQ ID NO: 5493500 - DNA, 25 bp, Homo sapien
aatgctgaggtcaagctagtggatt

SEQ ID NO: 5493501 - DNA, 25 bp, Homo sapien
atgattacaggagtgatatttggtc

SEQ ID NO: 5493502 - DNA, 25 bp, Homo sapien
acatgcaccccatgcgagccctctt

SEQ ID NO: 5493503 - DNA, 25 bp, Homo sapien
ctcggaaccctccgcccaggctcaa

SEQ ID NO: 5493504 - DNA, 25 bp, Homo sapien
ctaggaatcacagccatcgagatgg

SEQ ID NO: 5493505 - DNA, 25 bp, Homo sapien
gcccaggctcaagtccaagaagtgg

SEQ ID NO: 5493506 - DNA, 25 bp, Homo sapien
acccacggagcagctactgaagttt

SEQ ID NO: 5493507 - DNA, 25 bp, Homo sapien
tgcggggcacggaggcggaccgtcg

SEQ ID NO: 5493508 - DNA, 25 bp, Homo sapien
cgacggtccgcctccgtgccccgca

SEQ ID NO: 5493509 - DNA, 25 bp, Homo sapien
ggaaggtcttggtttgcggggcacg

SEQ ID NO: 5493510 - DNA, 25 bp, Homo sapien
cgtgccccgcaaaccaagaccttcc

SEQ ID NO: 5493511 - DNA, 25 bp, Homo sapien
cggccgggtgtatcatttttaaaca

SEQ ID NO: 5493512 - DNA, 25 bp, Homo sapien
taaaaagcataaggttcaaaatatc

SEQ ID NO: 5493513 - DNA, 25 bp, Homo sapien
agttatgctgttgagaatgaatgtc

SEQ ID NO: 5493514 - DNA, 25 bp, Homo sapien
tgacaacaacagtaccttccttcta

SEQ ID NO: 5493515 - DNA, 25 bp, Homo sapien
tagtcatctttgggtgacgggttgt

SEQ ID NO: 5493516 - DNA, 25 bp, Homo sapien
tgttgagaatgaatgtcgcatgtac

SEQ ID NO: 5493517 - DNA, 25 bp, Homo sapien
gtgacgggttgtagtgaatttcatt

SEQ ID NO: 5493518 - DNA, 25 bp, Homo sapien
gatgtatcctagtatttgaatagtc

SEQ ID NO: 5493519 - DNA, 25 bp, Homo sapien
gaatgtcgcatgtacaaagcacttc

SEQ ID NO: 5493520 - DNA, 25 bp, Homo sapien
caaagcacttcgcaacatgcctcac

SEQ ID NO: 5493521 - DNA, 25 bp, Homo sapien
agtactcaataaatggcacttatga

SEQ ID NO: 5493522 - DNA, 25 bp, Homo sapien
cgcacccacacgcaggggcctcgcg

SEQ ID NO: 5493523 - DNA, 25 bp, Homo sapien
cgcgaggcccctgcgtgtgggtgcg

SEQ ID NO: 5493524 - DNA, 25 bp, Homo sapien
ataagatatggataccagaagagcc

SEQ ID NO: 5493525 - DNA, 25 bp, Homo sapien
taccagaagagccatcacaggtacc

SEQ ID NO: 5493526 - DNA, 25 bp, Homo sapien
tcacaggtaccagcagcactgtcac

SEQ ID NO: 5493527 - DNA, 25 bp, Homo sapien
acggataggtgttgtgtataagata

SEQ ID NO: 5493528 - DNA, 25 bp, Homo sapien
gctccgagcagttctgcggaagttc

SEQ ID NO: 5493529 - DNA, 25 bp, Homo sapien
aatgtatgttgatgagaaccgcagg

SEQ ID NO: 5493530 - DNA, 25 bp, Homo sapien
agtttgacctgatccctgagctccg

SEQ ID NO: 5493531 - DNA, 25 bp, Homo sapien
aacacgaaaccagcagcctgtcctg

SEQ ID NO: 5493532 - DNA, 25 bp, Homo sapien
ggaggcctggacaagtctcttgttg

SEQ ID NO: 5493533 - DNA, 25 bp, Homo sapien
ctgtgaattctgagagccatcggga

SEQ ID NO: 5493534 - DNA, 25 bp, Homo sapien
tttcatagaaacaaggagttggcat

SEQ ID NO: 5493535 - DNA, 25 bp, Homo sapien
aggggacgagtgacaggaacagtcc

SEQ ID NO: 5493536 - DNA, 25 bp, Homo sapien
ggactgttcctgtcactcgtcccct

SEQ ID NO: 5493537 - DNA, 25 bp, Homo sapien
aaatgctcagaatatgtgtgctcgt

SEQ ID NO: 5493538 - DNA, 25 bp, Homo sapien
taaatgggggcttactttgtgcatt

SEQ ID NO: 5493539 - DNA, 25 bp, Homo sapien
aaaaggacattgcaatgactggctg

SEQ ID NO: 5493540 - DNA, 25 bp, Homo sapien
tggctgaaagacatgggactttttg

SEQ ID NO: 5493541 - DNA, 25 bp, Homo sapien
caagggcttcagtgacagaatttgt

SEQ ID NO: 5493542 - DNA, 25 bp, Homo sapien
cactgtgccaaatgttgggaggaag

SEQ ID NO: 5493543 - DNA, 25 bp, Homo sapien
tttgtaaagctacctggaaaagtgc

SEQ ID NO: 5493544 - DNA, 25 bp, Homo sapien
cacaaaaggtattgtttggggtcca

SEQ ID NO: 5493545 - DNA, 25 bp, Homo sapien
ctggcgagaacacaagtaactattt

SEQ ID NO: 5493546 - DNA, 25 bp, Homo sapien
ttcaaagtagtctatggcaagggct

SEQ ID NO: 5493547 - DNA, 25 bp, Homo sapien
aaaaggtgaataacactggcgagaa

SEQ ID NO: 5493548 - DNA, 25 bp, Homo sapien
ttcactctgtggtaagctgaggaat

SEQ ID NO: 5493549 - DNA, 25 bp, Homo sapien
gcgctgatgaccgtgctcttcacta

SEQ ID NO: 5493550 - DNA, 25 bp, Homo sapien
aagctgaggaatatgtcacattttc

SEQ ID NO: 5493551 - DNA, 25 bp, Homo sapien
gagccggtgcagcaattccactaac

SEQ ID NO: 5493552 - DNA, 25 bp, Homo sapien
cagaagacctccgagccttgcgatt

SEQ ID NO: 5493553 - DNA, 25 bp, Homo sapien
atggaatccagtctgtgacagtgtt

SEQ ID NO: 5493554 - DNA, 25 bp, Homo sapien
tcactatgtgttctctgcccgtaat

SEQ ID NO: 5493555 - DNA, 25 bp, Homo sapien
ggagcatttaaggatgtcaaggaga

SEQ ID NO: 5493556 - DNA, 25 bp, Homo sapien
tctgtgatttcaattgtggaccctt

SEQ ID NO: 5493557 - DNA, 25 bp, Homo sapien
aattgtggacccttggatttttatc

SEQ ID NO: 5493558 - DNA, 25 bp, Homo sapien
tagacctcttaggtacaggagccgg

SEQ ID NO: 5493559 - DNA, 25 bp, Homo sapien
agtacacaataagtggaatgtgctt

SEQ ID NO: 5493560 - DNA, 25 bp, Homo sapien
tacatgatggtgagttatagaattg

SEQ ID NO: 5493561 - DNA, 25 bp, Homo sapien
acaatgcgataataaagtacacaat

SEQ ID NO: 5493562 - DNA, 25 bp, Homo sapien
ccacccccgcacccctctatccgta

SEQ ID NO: 5493563 - DNA, 25 bp, Homo sapien
tttgcctctcaaatgcccctgggaa

SEQ ID NO: 5493564 - DNA, 25 bp, Homo sapien
ggaaccactgccttggcaccaagtc

SEQ ID NO: 5493565 - DNA, 25 bp, Homo sapien
tctcaaatgcccctgggaagctggt

SEQ ID NO: 5493566 - DNA, 25 bp, Homo sapien
cacctccagatgggaccacctagtt

SEQ ID NO: 5493567 - DNA, 25 bp, Homo sapien
tggcaccaagtctaaaacaacactc

SEQ ID NO: 5493568 - DNA, 25 bp, Homo sapien
ctctatccgtagaaaaattgccttc

SEQ ID NO: 5493569 - DNA, 25 bp, Homo sapien
cacaaaaccagtccgtggtgtccaa

SEQ ID NO: 5493570 - DNA, 25 bp, Homo sapien
agcgttgagcattctagagtctttc

SEQ ID NO: 5493571 - DNA, 25 bp, Homo sapien
atttcagaccacaggaatgcaggat

SEQ ID NO: 5493572 - DNA, 25 bp, Homo sapien
ttggaatttgaaaagatgatggaaa

SEQ ID NO: 5493573 - DNA, 25 bp, Homo sapien
agccttgaaaacgaggaaaacagtg

SEQ ID NO: 5493574 - DNA, 25 bp, Homo sapien
ttgtcgcctgaactatggttgaagt

SEQ ID NO: 5493575 - DNA, 25 bp, Homo sapien
aggattccaaggcgccaatttacct

SEQ ID NO: 5493576 - DNA, 25 bp, Homo sapien
cagagcagctggtcacagctctgcc

SEQ ID NO: 5493577 - DNA, 25 bp, Homo sapien
ccaaggaactcagcgttgagcattc

SEQ ID NO: 5493578 - DNA, 25 bp, Homo sapien
tctgcccaggcatttctgtgtctgc

SEQ ID NO: 5493579 - DNA, 25 bp, Homo sapien
atgaccaactgagagcaaccatgga

SEQ ID NO: 5493580 - DNA, 25 bp, Homo sapien
acaacacatttggttcaggaactgc

SEQ ID NO: 5493581 - DNA, 25 bp, Homo sapien
atttgtgaaattggaaatggtggtg

SEQ ID NO: 5493582 - DNA, 25 bp, Homo sapien
ttgactatatagtgaagggctagtt

SEQ ID NO: 5493583 - DNA, 25 bp, Homo sapien
agagtgctgtacaaaggtaacctgc

SEQ ID NO: 5493584 - DNA, 25 bp, Homo sapien
catgtggtacttaaagaggcagcag

SEQ ID NO: 5493585 - DNA, 25 bp, Homo sapien
gcaatgcaaaaatggcctaatacac

SEQ ID NO: 5493586 - DNA, 25 bp, Homo sapien
aaatgaaggcaatatcagtgtcttc

SEQ ID NO: 5493587 - DNA, 25 bp, Homo sapien
gaggcagcagagcctaccagaataa

SEQ ID NO: 5493588 - DNA, 25 bp, Homo sapien
ttgctgtagagtcccttgaagttta

SEQ ID NO: 5493589 - DNA, 25 bp, Homo sapien
tgcagtcgttttagtcatgtggtac

SEQ ID NO: 5493590 - DNA, 25 bp, Homo sapien
aatgtgggggtagtttgactatata

SEQ ID NO: 5493591 - DNA, 25 bp, Homo sapien
ttgagataagtgtccttgagcaagt

SEQ ID NO: 5493592 - DNA, 25 bp, Homo sapien
tcgtcgtcgacacccctcgcccggt

SEQ ID NO: 5493593 - DNA, 25 bp, Homo sapien
accgggcgaggggtgtcgacgacga

SEQ ID NO: 5493594 - DNA, 25 bp, Homo sapien
ctcgtcgtcgacacccctcgcccgg

SEQ ID NO: 5493595 - DNA, 25 bp, Homo sapien
ccgggcgaggggtgtcgacgacgag

SEQ ID NO: 5493596 - DNA, 25 bp, Homo sapien
gtaatgggggctgtctctcctttgc

SEQ ID NO: 5493597 - DNA, 25 bp, Homo sapien
tcaagtaataagttggtgaaaattc

SEQ ID NO: 5493598 - DNA, 25 bp, Homo sapien
caagccccaggcaaaaatggtattt

SEQ ID NO: 5493599 - DNA, 25 bp, Homo sapien
ttggtgaaaattcaacgaagttgct

SEQ ID NO: 5493600 - DNA, 25 bp, Homo sapien
tatcacaatcaaaacccccttctct

SEQ ID NO: 5493601 - DNA, 25 bp, Homo sapien
aaccactaggaaaatatatcacagc

SEQ ID NO: 5493602 - DNA, 25 bp, Homo sapien
cagcaaacggacaggctatattata

SEQ ID NO: 5493603 - DNA, 25 bp, Homo sapien
agggagtcagctcatcctagcccaa

SEQ ID NO: 5493604 - DNA, 25 bp, Homo sapien
gttgtaatcaagtagccaactgctc

SEQ ID NO: 5493605 - DNA, 25 bp, Homo sapien
ctttgctctaagggagtcagctcat

SEQ ID NO: 5493606 - DNA, 25 bp, Homo sapien
tcaaaacaataaggtgccatgctgg

SEQ ID NO: 5493607 - DNA, 25 bp, Homo sapien
cccgagggccgggtgtgcaggtgtt

SEQ ID NO: 5493608 - DNA, 25 bp, Homo sapien
aacacctgcacacccggccctcggg

SEQ ID NO: 5493609 - DNA, 25 bp, Homo sapien
gagaatcctcgtcttgtcgttggac

SEQ ID NO: 5493610 - DNA, 25 bp, Homo sapien
gttaatgcgtttggcgtctgtgagc

SEQ ID NO: 5493611 - DNA, 25 bp, Homo sapien
ggactggacgttgagaatcctcgtc

SEQ ID NO: 5493612 - DNA, 25 bp, Homo sapien
gttagctgaaagattgtgatccctc

SEQ ID NO: 5493613 - DNA, 25 bp, Homo sapien
cctctgttacattcagccgatcatc

SEQ ID NO: 5493614 - DNA, 25 bp, Homo sapien
tgtcgttggacgttagttcctctgt

SEQ ID NO: 5493615 - DNA, 25 bp, Homo sapien
agcactgttcgccagttaatgcgtt

SEQ ID NO: 5493616 - DNA, 25 bp, Homo sapien
ctgccgccactcagcactgttcgcc

SEQ ID NO: 5493617 - DNA, 25 bp, Homo sapien
gctcctcagcgaactccaggagaac

SEQ ID NO: 5493618 - DNA, 25 bp, Homo sapien
cggagtagaataagttagctgaaag

SEQ ID NO: 5493619 - DNA, 25 bp, Homo sapien
ccctctgactattccctcgcccacc

SEQ ID NO: 5493620 - DNA, 25 bp, Homo sapien
aagattctcttgagggctaggaagc

SEQ ID NO: 5493621 - DNA, 25 bp, Homo sapien
ttcctgagacaggaatcccaaagtg

SEQ ID NO: 5493622 - DNA, 25 bp, Homo sapien
gtgctaggttcttgaaccaggagaa

SEQ ID NO: 5493623 - DNA, 25 bp, Homo sapien
acatttgacaagtttagtgaagtac

SEQ ID NO: 5493624 - DNA, 25 bp, Homo sapien
ggtatgcaaaatagcttgggcgcta

SEQ ID NO: 5493625 - DNA, 25 bp, Homo sapien
agggaaggaatcctggtatgcaaaa

SEQ ID NO: 5493626 - DNA, 25 bp, Homo sapien
gggctaggaagcattatgtgctagg

SEQ ID NO: 5493627 - DNA, 25 bp, Homo sapien
aagaatcactttgaaggccagtaat

SEQ ID NO: 5493628 - DNA, 25 bp, Homo sapien
agcttgggcgctatccttgcacatt

SEQ ID NO: 5493629 - DNA, 25 bp, Homo sapien
aatgttttaaaggtctggaagattc

SEQ ID NO: 5493630 - DNA, 25 bp, Homo sapien
tactgccaagcatgaaagaatcact

SEQ ID NO: 5493631 - DNA, 25 bp, Homo sapien
catcaacaccaaacaggaggagaag

SEQ ID NO: 5493632 - DNA, 25 bp, Homo sapien
ggagaagtctgcactgctagaccac

SEQ ID NO: 5493633 - DNA, 25 bp, Homo sapien
tacgatctgtggacctggcagagta

SEQ ID NO: 5493634 - DNA, 25 bp, Homo sapien
gagcggcccgcacaccttattgaca

SEQ ID NO: 5493635 - DNA, 25 bp, Homo sapien
tggagtccatggaggcctcattatc

SEQ ID NO: 5493636 - DNA, 25 bp, Homo sapien
cactccacaggaagaagcttgtttt

SEQ ID NO: 5493637 - DNA, 25 bp, Homo sapien
tccttcagaagttgtacagtggtcc

SEQ ID NO: 5493638 - DNA, 25 bp, Homo sapien
atgaatctagagttgacggacgaat

SEQ ID NO: 5493639 - DNA, 25 bp, Homo sapien
agaccacatttgggtgacaaggagg

SEQ ID NO: 5493640 - DNA, 25 bp, Homo sapien
tgacggacgaatgctgcaataccta

SEQ ID NO: 5493641 - DNA, 25 bp, Homo sapien
aggagctaggaattaagcacccact

SEQ ID NO: 5493642 - DNA, 25 bp, Homo sapien
aaggggacaacttagatgattgctc

SEQ ID NO: 5493643 - DNA, 25 bp, Homo sapien
ctgttgatgaatgtcagctgcaggc

SEQ ID NO: 5493644 - DNA, 25 bp, Homo sapien
aaacagtgaccatgatcttcttttc

SEQ ID NO: 5493645 - DNA, 25 bp, Homo sapien
ttcgtgcaagtttggccttggggag

SEQ ID NO: 5493646 - DNA, 25 bp, Homo sapien
tgttgcatagaataagacaagatgc

SEQ ID NO: 5493647 - DNA, 25 bp, Homo sapien
aaatgccaaaggaccatagagtggt

SEQ ID NO: 5493648 - DNA, 25 bp, Homo sapien
catcacattgatttgctgggcatac

SEQ ID NO: 5493649 - DNA, 25 bp, Homo sapien
actgagctggtagtcaccagttttc

SEQ ID NO: 5493650 - DNA, 25 bp, Homo sapien
ttcttgtatagttgtaaggggacaa

SEQ ID NO: 5493651 - DNA, 25 bp, Homo sapien
tagagtggtcaacgttgagttcctt

SEQ ID NO: 5493652 - DNA, 25 bp, Homo sapien
ggatcagaccgtcagcagactacca

SEQ ID NO: 5493653 - DNA, 25 bp, Homo sapien
ttacacctaccttctcagggacctg

SEQ ID NO: 5493654 - DNA, 25 bp, Homo sapien
ccaagtccagagtccttacacctac

SEQ ID NO: 5493655 - DNA, 25 bp, Homo sapien
aaaacataggatgttgtcgggcatg

SEQ ID NO: 5493656 - DNA, 25 bp, Homo sapien
gtaagccaagattgtaccgctacac

SEQ ID NO: 5493657 - DNA, 25 bp, Homo sapien
tcccaacgatcagatgctgtcctcc

SEQ ID NO: 5493658 - DNA, 25 bp, Homo sapien
ggctcacgcatgtgatcccagtgct

SEQ ID NO: 5493659 - DNA, 25 bp, Homo sapien
gccaagctttcagcctgggggctaa

SEQ ID NO: 5493660 - DNA, 25 bp, Homo sapien
agaacaaaagaaacctggccattcc

SEQ ID NO: 5493661 - DNA, 25 bp, Homo sapien
cattccaacaagtgatcccaacgat

SEQ ID NO: 5493662 - DNA, 25 bp, Homo sapien
cagcctgggggctaaaattccaata

SEQ ID NO: 5493663 - DNA, 25 bp, Homo sapien
aaaaaaaagatgctgtttatgtaca

SEQ ID NO: 5493664 - DNA, 25 bp, Homo sapien
atagggcaattatagttaacaatca

SEQ ID NO: 5493665 - DNA, 25 bp, Homo sapien
ctaagtagactgacaacgtaactct

SEQ ID NO: 5493666 - DNA, 25 bp, Homo sapien
gggcagggacaaacacattatttta

SEQ ID NO: 5493667 - DNA, 25 bp, Homo sapien
tccaaaaacttacaccacctcagac

SEQ ID NO: 5493668 - DNA, 25 bp, Homo sapien
aatgtaccatcaaccagcctcaccc

SEQ ID NO: 5493669 - DNA, 25 bp, Homo sapien
ttctcagcaaacttccaggtaaata

SEQ ID NO: 5493670 - DNA, 25 bp, Homo sapien
tttatccttgtgggttcacgggtgc

SEQ ID NO: 5493671 - DNA, 25 bp, Homo sapien
tccacctggaatttgcgtaaattac

SEQ ID NO: 5493672 - DNA, 25 bp, Homo sapien
ttgctaggccactaagtagactgac

SEQ ID NO: 5493673 - DNA, 25 bp, Homo sapien
ccaggtaaataaaattccgcaatta

SEQ ID NO: 5493674 - DNA, 25 bp, Homo sapien
atgctttaggcaatggatactccaa

SEQ ID NO: 5493675 - DNA, 25 bp, Homo sapien
attctggagcctctaagaagggtat

SEQ ID NO: 5493676 - DNA, 25 bp, Homo sapien
agaaaagctgaactcgtgtgtcatc

SEQ ID NO: 5493677 - DNA, 25 bp, Homo sapien
ctacacctaggatatgagtggctgg

SEQ ID NO: 5493678 - DNA, 25 bp, Homo sapien
caaaaaacaacatagagcaatagtc

SEQ ID NO: 5493679 - DNA, 25 bp, Homo sapien
ataatagctaacagtaacagagtgc

SEQ ID NO: 5493680 - DNA, 25 bp, Homo sapien
ttctcatacaaggttaagagcccat

SEQ ID NO: 5493681 - DNA, 25 bp, Homo sapien
agaagggtataatgcaatggaacct

SEQ ID NO: 5493682 - DNA, 25 bp, Homo sapien
gaacttagctccagaaaagctgaac

SEQ ID NO: 5493683 - DNA, 25 bp, Homo sapien
taacagagtgcttgctatgacaggc

SEQ ID NO: 5493684 - DNA, 25 bp, Homo sapien
tggaacctagagactttcgactgcc

SEQ ID NO: 5493685 - DNA, 25 bp, Homo sapien
actgccatgtgaacacaaaacagac

SEQ ID NO: 5493686 - DNA, 25 bp, Homo sapien
tactacgccttgtgggaattgcttt

SEQ ID NO: 5493687 - DNA, 25 bp, Homo sapien
tgacaactaataactgagggtgccc

SEQ ID NO: 5493688 - DNA, 25 bp, Homo sapien
aatcaggcctagtaagagactgctg

SEQ ID NO: 5493689 - DNA, 25 bp, Homo sapien
ccatgtctagtgagtctacggaacc

SEQ ID NO: 5493690 - DNA, 25 bp, Homo sapien
tatcaggcgctgcctctaaaccccc

SEQ ID NO: 5493691 - DNA, 25 bp, Homo sapien
tgcccggaatccttcaccccatgtc

SEQ ID NO: 5493692 - DNA, 25 bp, Homo sapien
gtctacggaaccagggtaattgaga

SEQ ID NO: 5493693 - DNA, 25 bp, Homo sapien
ggtggaatatctgacagggaatctc

SEQ ID NO: 5493694 - DNA, 25 bp, Homo sapien
tatagcaccttcagggtggaatatc

SEQ ID NO: 5493695 - DNA, 25 bp, Homo sapien
ctctcattaggtagggaatgttgtt

SEQ ID NO: 5493696 - DNA, 25 bp, Homo sapien
acttgagtcaaagcctggaaagctg

SEQ ID NO: 5493697 - DNA, 25 bp, Homo sapien
aacaccaatgtgccatccatcagca

SEQ ID NO: 5493698 - DNA, 25 bp, Homo sapien
cccacggtcacacacctagttggtg

SEQ ID NO: 5493699 - DNA, 25 bp, Homo sapien
tgtgtgccaagcatcgtgtgtagag

SEQ ID NO: 5493700 - DNA, 25 bp, Homo sapien
ccagaggacagcatctcatccactg

SEQ ID NO: 5493701 - DNA, 25 bp, Homo sapien
atatggtgaatactagtggtggaag

SEQ ID NO: 5493702 - DNA, 25 bp, Homo sapien
tcctacgaggcttgtcctgcatttc

SEQ ID NO: 5493703 - DNA, 25 bp, Homo sapien
actgggaccttgcttcctacgaggc

SEQ ID NO: 5493704 - DNA, 25 bp, Homo sapien
aaggaggccattagcaaagtccaat

SEQ ID NO: 5493705 - DNA, 25 bp, Homo sapien
ctagttggtggtgaattgccgtaat

SEQ ID NO: 5493706 - DNA, 25 bp, Homo sapien
cctactcacatcatagaggggaggc

SEQ ID NO: 5493707 - DNA, 25 bp, Homo sapien
aatgtagttatctagtggtgctgat

SEQ ID NO: 5493708 - DNA, 25 bp, Homo sapien
gccaatatctgggtgtttaggggac

SEQ ID NO: 5493709 - DNA, 25 bp, Homo sapien
agggaaaccactgtagtctgggaca

SEQ ID NO: 5493710 - DNA, 25 bp, Homo sapien
gtcaagtccaagacaggccttccac

SEQ ID NO: 5493711 - DNA, 25 bp, Homo sapien
agtctgctgcattggtgggacaaat

SEQ ID NO: 5493712 - DNA, 25 bp, Homo sapien
tggaatgggataaacaactctgcga

SEQ ID NO: 5493713 - DNA, 25 bp, Homo sapien
caatgtgagaaaagttcaaaaggcc

SEQ ID NO: 5493714 - DNA, 25 bp, Homo sapien
gtggtgtggcttgatctaagaaccc

SEQ ID NO: 5493715 - DNA, 25 bp, Homo sapien
tattggtgtcagcaaccagagggaa

SEQ ID NO: 5493716 - DNA, 25 bp, Homo sapien
cttatttggagtttgacaggaggag

SEQ ID NO: 5493717 - DNA, 25 bp, Homo sapien
cagtgcagtgaaacttcgttggctc

SEQ ID NO: 5493718 - DNA, 25 bp, Homo sapien
gagtcaatggaggtgtccactgtac

SEQ ID NO: 5493719 - DNA, 25 bp, Homo sapien
tatggatcatcagaattgcttgtat

SEQ ID NO: 5493720 - DNA, 25 bp, Homo sapien
agcactatttagacagagcaggcct

SEQ ID NO: 5493721 - DNA, 25 bp, Homo sapien
tgatctcagatccaggctcacctgc

SEQ ID NO: 5493722 - DNA, 25 bp, Homo sapien
gagaaagaggtgaaacttacattaa

SEQ ID NO: 5493723 - DNA, 25 bp, Homo sapien
tagtgtagagtttcctaaagtatgc

SEQ ID NO: 5493724 - DNA, 25 bp, Homo sapien
agaccctgctgttcctggaagcact

SEQ ID NO: 5493725 - DNA, 25 bp, Homo sapien
cttgacccactagggagagaatgag

SEQ ID NO: 5493726 - DNA, 25 bp, Homo sapien
gagcaggcctcaatagatctggaac

SEQ ID NO: 5493727 - DNA, 25 bp, Homo sapien
ctggaacaatcttggaggaagtcat

SEQ ID NO: 5493728 - DNA, 25 bp, Homo sapien
gaaaaaataggacaaaatccatcac

SEQ ID NO: 5493729 - DNA, 25 bp, Homo sapien
tttgacatgcctaatattctggttt

SEQ ID NO: 5493730 - DNA, 25 bp, Homo sapien
ctgtaaataaaggtatctcctttat

SEQ ID NO: 5493731 - DNA, 25 bp, Homo sapien
ataaaggagatacctttatttacag

SEQ ID NO: 5493732 - DNA, 25 bp, Homo sapien
cgcccacggcgagatgaaatctcgc

SEQ ID NO: 5493733 - DNA, 25 bp, Homo sapien
gattacaggtgcgtgccaccacgca

SEQ ID NO: 5493734 - DNA, 25 bp, Homo sapien
cagtggcgccatctccgctcactgc

SEQ ID NO: 5493735 - DNA, 25 bp, Homo sapien
tgccgcagcctcccgtgtggctggg

SEQ ID NO: 5493736 - DNA, 25 bp, Homo sapien
cgccatctccgctcactgcaagctc

SEQ ID NO: 5493737 - DNA, 25 bp, Homo sapien
cgagatgaaatctcgctctgtcgcc

SEQ ID NO: 5493738 - DNA, 25 bp, Homo sapien
gcagcctcccgtgtggctgggacta

SEQ ID NO: 5493739 - DNA, 25 bp, Homo sapien
gtcgccgcccacggcgagatgaaat

SEQ ID NO: 5493740 - DNA, 25 bp, Homo sapien
tgcgtgccaccacgcacggctaatt

SEQ ID NO: 5493741 - DNA, 25 bp, Homo sapien
tcacgccattttcctgccgcagcct

SEQ ID NO: 5493742 - DNA, 25 bp, Homo sapien
cgggttcacgccattttcctgccgc

SEQ ID NO: 5493743 - DNA, 25 bp, Homo sapien
gtagtcgggaccagtcacagacccc

SEQ ID NO: 5493744 - DNA, 25 bp, Homo sapien
ggggtctgtgactggtcccgactac

SEQ ID NO: 5493745 - DNA, 25 bp, Homo sapien
ttagaaaaattacaggatatgagtc

SEQ ID NO: 5493746 - DNA, 25 bp, Homo sapien
ttgcagcaggtacacaacaaatgtc

SEQ ID NO: 5493747 - DNA, 25 bp, Homo sapien
gtacacgtagacagctcacaaggtc

SEQ ID NO: 5493748 - DNA, 25 bp, Homo sapien
aacaaggaaacaataccatgccatg

SEQ ID NO: 5493749 - DNA, 25 bp, Homo sapien
atttgctgtggtgtgaacaaggaaa

SEQ ID NO: 5493750 - DNA, 25 bp, Homo sapien
ttaaacataatggactcagacactc

SEQ ID NO: 5493751 - DNA, 25 bp, Homo sapien
tgaaatgcaatggtgatatcatacc

SEQ ID NO: 5493752 - DNA, 25 bp, Homo sapien
tcctgagacatagagtacacgtaga

SEQ ID NO: 5493753 - DNA, 25 bp, Homo sapien
agaccacatggagacgccatttaga

SEQ ID NO: 5493754 - DNA, 25 bp, Homo sapien
ggacagacttaaacccaatgaggtc

SEQ ID NO: 5493755 - DNA, 25 bp, Homo sapien
ttgaaagtaaaaggatagagaatcc

SEQ ID NO: 5493756 - DNA, 25 bp, Homo sapien
cgggagaagtcccttccaagcctgc

SEQ ID NO: 5493757 - DNA, 25 bp, Homo sapien
ggtgggagactccttcactgtgacg

SEQ ID NO: 5493758 - DNA, 25 bp, Homo sapien
gggagtcacttagccaagcgacacc

SEQ ID NO: 5493759 - DNA, 25 bp, Homo sapien
ctcatctctggcagtgtgccgcctt

SEQ ID NO: 5493760 - DNA, 25 bp, Homo sapien
cagtgacgtcggtgacaaatacgtg

SEQ ID NO: 5493761 - DNA, 25 bp, Homo sapien
cttcactgtgacggtgatgaggttg

SEQ ID NO: 5493762 - DNA, 25 bp, Homo sapien
gtgacaaatacgtgctcgatgaggc

SEQ ID NO: 5493763 - DNA, 25 bp, Homo sapien
gcccgtatgtcactgggacagagtg

SEQ ID NO: 5493764 - DNA, 25 bp, Homo sapien
gccggggctctcagtaatgcctcag

SEQ ID NO: 5493765 - DNA, 25 bp, Homo sapien
agtaatgcctcaggttgaagaagcc

SEQ ID NO: 5493766 - DNA, 25 bp, Homo sapien
ggggtagcactgcccttgacacagt

SEQ ID NO: 5493767 - DNA, 25 bp, Homo sapien
gatcgtcgatcctgggttacggccc

SEQ ID NO: 5493768 - DNA, 25 bp, Homo sapien
gggccgtaacccaggatcgacgatc

SEQ ID NO: 5493769 - DNA, 25 bp, Homo sapien
agaaatttgccttcactatcaagag

SEQ ID NO: 5493770 - DNA, 25 bp, Homo sapien
ctcttgatagtgaaggcaaatttct

SEQ ID NO: 5493771 - DNA, 25 bp, Homo sapien
attctgtagattttagccatgccat

SEQ ID NO: 5493772 - DNA, 25 bp, Homo sapien
agtcattgcttggtagaatccagtc

SEQ ID NO: 5493773 - DNA, 25 bp, Homo sapien
gttgactatttgcaatgaccccaag

SEQ ID NO: 5493774 - DNA, 25 bp, Homo sapien
ttttgtaaacaggtcgcagacaacc

SEQ ID NO: 5493775 - DNA, 25 bp, Homo sapien
gaatccagtctgtcaataagttagc

SEQ ID NO: 5493776 - DNA, 25 bp, Homo sapien
ccacaaggactgatgtgaattgttc

SEQ ID NO: 5493777 - DNA, 25 bp, Homo sapien
attgtttgctgacttggtaccatgt

SEQ ID NO: 5493778 - DNA, 25 bp, Homo sapien
gtaaatgtaatccacaaggactgat

SEQ ID NO: 5493779 - DNA, 25 bp, Homo sapien
tgaccccaagaaaaccacctatgac

SEQ ID NO: 5493780 - DNA, 25 bp, Homo sapien
caacactaactcccacaattctgcc

SEQ ID NO: 5493781 - DNA, 25 bp, Homo sapien
gctctaacagttaacattgaagtct

SEQ ID NO: 5493782 - DNA, 25 bp, Homo sapien
ccctaccggacatcgtcacgggacg

SEQ ID NO: 5493783 - DNA, 25 bp, Homo sapien
cgtcccgtgacgatgtccggtaggg

SEQ ID NO: 5493784 - DNA, 25 bp, Homo sapien
acagcattgctctggtctgagcccc

SEQ ID NO: 5493785 - DNA, 25 bp, Homo sapien
caccaatccctgtggtgggcctgtg

SEQ ID NO: 5493786 - DNA, 25 bp, Homo sapien
gtcccctcaatgctggtcaccaatc

SEQ ID NO: 5493787 - DNA, 25 bp, Homo sapien
ctgtggctactgcagtgtcagagac

SEQ ID NO: 5493788 - DNA, 25 bp, Homo sapien
gaactctctcaggtgccagcatagc

SEQ ID NO: 5493789 - DNA, 25 bp, Homo sapien
gccctctagcagtgcaccaacagcc

SEQ ID NO: 5493790 - DNA, 25 bp, Homo sapien
agtaccaggactctcacagcattgc

SEQ ID NO: 5493791 - DNA, 25 bp, Homo sapien
ccaacagcctgagttggaaggaaga

SEQ ID NO: 5493792 - DNA, 25 bp, Homo sapien
ccagctcaagctcgactgtggctac

SEQ ID NO: 5493793 - DNA, 25 bp, Homo sapien
gaaggaagaatacaaagccactctg

SEQ ID NO: 5493794 - DNA, 25 bp, Homo sapien
tgtcagagacagcagccctctagca

SEQ ID NO: 5493795 - DNA, 25 bp, Homo sapien
tgaggaaatgcctgcctacccacca

SEQ ID NO: 5493796 - DNA, 25 bp, Homo sapien
ttttgactgctctaaacagggttgg

SEQ ID NO: 5493797 - DNA, 25 bp, Homo sapien
ctgcctccagagctagtgctcacac

SEQ ID NO: 5493798 - DNA, 25 bp, Homo sapien
taagcttttaggctacgatggcacc

SEQ ID NO: 5493799 - DNA, 25 bp, Homo sapien
gcctgaatgtaccatctgggggcct

SEQ ID NO: 5493800 - DNA, 25 bp, Homo sapien
gggcctggagattgactcatctgcc

SEQ ID NO: 5493801 - DNA, 25 bp, Homo sapien
ttatctagaaatgcataggaatatg

SEQ ID NO: 5493802 - DNA, 25 bp, Homo sapien
tgtcactacgacagaggttatctag

SEQ ID NO: 5493803 - DNA, 25 bp, Homo sapien
agctgatgagggttagttgtattaa

SEQ ID NO: 5493804 - DNA, 25 bp, Homo sapien
ggaatatgctggtgcctgaatgtac

SEQ ID NO: 5493805 - DNA, 25 bp, Homo sapien
acttactactgagaggcctgaggaa

SEQ ID NO: 5493806 - DNA, 25 bp, Homo sapien
ggtatcaagtgtacaagaggagtga

SEQ ID NO: 5493807 - DNA, 25 bp, Homo sapien
aactcttccaattcagaaatgaggt

SEQ ID NO: 5493808 - DNA, 25 bp, Homo sapien
gcacaggtatcaagtgtacaagagg

SEQ ID NO: 5493809 - DNA, 25 bp, Homo sapien
tactctactatgctgcacaggtatc

SEQ ID NO: 5493810 - DNA, 25 bp, Homo sapien
tatcaatggctacaaggaaagaatg

SEQ ID NO: 5493811 - DNA, 25 bp, Homo sapien
gcaggtggctaatggctactctact

SEQ ID NO: 5493812 - DNA, 25 bp, Homo sapien
gaaatgaggtaagtatatcaatggc

SEQ ID NO: 5493813 - DNA, 25 bp, Homo sapien
tcatgaagaaaggaatgatcaggaa

SEQ ID NO: 5493814 - DNA, 25 bp, Homo sapien
gggaaaaacatactactgaggctca

SEQ ID NO: 5493815 - DNA, 25 bp, Homo sapien
ccgcacccagcccttcatgtagtct

SEQ ID NO: 5493816 - DNA, 25 bp, Homo sapien
gtttaaatagctgcaggtggctaat

SEQ ID NO: 5493817 - DNA, 25 bp, Homo sapien
gctaaaagaattaacgtgggatgga

SEQ ID NO: 5493818 - DNA, 25 bp, Homo sapien
cagggaagtgcctgaagacgtttag

SEQ ID NO: 5493819 - DNA, 25 bp, Homo sapien
tgtgcaaatggcaagatccgaattt

SEQ ID NO: 5493820 - DNA, 25 bp, Homo sapien
cgagcgctgcctgatggccttcaag

SEQ ID NO: 5493821 - DNA, 25 bp, Homo sapien
tgggaactgtatgaaggtgataaaa

SEQ ID NO: 5493822 - DNA, 25 bp, Homo sapien
gccaggtaaaagtatgggatgtaga

SEQ ID NO: 5493823 - DNA, 25 bp, Homo sapien
gttggtaaagactctcagtggccac

SEQ ID NO: 5493824 - DNA, 25 bp, Homo sapien
gatggaatggaatcgaaccaagtgc

SEQ ID NO: 5493825 - DNA, 25 bp, Homo sapien
ctacattgtgagcagctgtgagcga

SEQ ID NO: 5493826 - DNA, 25 bp, Homo sapien
tggtgaaagtgtggcacattgccat

SEQ ID NO: 5493827 - DNA, 25 bp, Homo sapien
tgataaaaaccaatggcagaggcga

SEQ ID NO: 5493828 - DNA, 25 bp, Homo sapien
tttccactgaggggcctcaaaatcc

SEQ ID NO: 5493829 - DNA, 25 bp, Homo sapien
agcacagaaagtaggtcagtgaatt

SEQ ID NO: 5493830 - DNA, 25 bp, Homo sapien
agaaagtaggtcagtgaatttgcac

SEQ ID NO: 5493831 - DNA, 25 bp, Homo sapien
aaaacatattggagataaccctacc

SEQ ID NO: 5493832 - DNA, 25 bp, Homo sapien
ccatgaagcttaagaaactaaattt

SEQ ID NO: 5493833 - DNA, 25 bp, Homo sapien
tcaaaatccaaatggcactcaattt

SEQ ID NO: 5493834 - DNA, 25 bp, Homo sapien
aaaaaagattattcgattcagcatt

SEQ ID NO: 5493835 - DNA, 25 bp, Homo sapien
attcagcatttccagaagcacagaa

SEQ ID NO: 5493836 - DNA, 25 bp, Homo sapien
taaaaagggaatgatcttcacgatc

SEQ ID NO: 5493837 - DNA, 25 bp, Homo sapien
gcactcaatttgaatccatgaagct

SEQ ID NO: 5493838 - DNA, 25 bp, Homo sapien
ggctacagatcacgccgccacactc

SEQ ID NO: 5493839 - DNA, 25 bp, Homo sapien
aatgaatacatttgctctcgaggat

SEQ ID NO: 5493840 - DNA, 25 bp, Homo sapien
caccagacataagcctcagaaaatc

SEQ ID NO: 5493841 - DNA, 25 bp, Homo sapien
gaaatactatgcaggaaaatcaatc

SEQ ID NO: 5493842 - DNA, 25 bp, Homo sapien
atgacttggaaataaggtcagattc

SEQ ID NO: 5493843 - DNA, 25 bp, Homo sapien
ctccaaatagaaggtttcaggttac

SEQ ID NO: 5493844 - DNA, 25 bp, Homo sapien
gggaggtggcatattttaagaaagc

SEQ ID NO: 5493845 - DNA, 25 bp, Homo sapien
aggggttgttaaagagagaactata

SEQ ID NO: 5493846 - DNA, 25 bp, Homo sapien
atgtaaatatgactaatgaggcgat

SEQ ID NO: 5493847 - DNA, 25 bp, Homo sapien
ggccctacatttttgggaggtggca

SEQ ID NO: 5493848 - DNA, 25 bp, Homo sapien
agccgcagtgataattgggccctac

SEQ ID NO: 5493849 - DNA, 25 bp, Homo sapien
atttccatgggttactgcagttctt

SEQ ID NO: 5493850 - DNA, 25 bp, Homo sapien
ctactcatcttttgggaccggaagg

SEQ ID NO: 5493851 - DNA, 25 bp, Homo sapien
ccttccggtcccaaaagatgagtag

SEQ ID NO: 5493852 - DNA, 25 bp, Homo sapien
gctgtctctggctatgttggtggga

SEQ ID NO: 5493853 - DNA, 25 bp, Homo sapien
aagtgggatcaagatcctggaggtt

SEQ ID NO: 5493854 - DNA, 25 bp, Homo sapien
gaggatgccaaaacagttgtgccca

SEQ ID NO: 5493855 - DNA, 25 bp, Homo sapien
tctcagaggaacgactgtgcctgaa

SEQ ID NO: 5493856 - DNA, 25 bp, Homo sapien
caacgatcctgaaggcaaaccacat

SEQ ID NO: 5493857 - DNA, 25 bp, Homo sapien
ggcaacagtatttggggatgtgcaa

SEQ ID NO: 5493858 - DNA, 25 bp, Homo sapien
caaagcaatggctactgagaagtgg

SEQ ID NO: 5493859 - DNA, 25 bp, Homo sapien
gcagaactttgaatggaaatgggac

SEQ ID NO: 5493860 - DNA, 25 bp, Homo sapien
gttttagcagaagaatgcccagaaa

SEQ ID NO: 5493861 - DNA, 25 bp, Homo sapien
ttctagagtgccaatgaaccataac

SEQ ID NO: 5493862 - DNA, 25 bp, Homo sapien
cccagaaatgcttgatcagagtcct

SEQ ID NO: 5493863 - DNA, 25 bp, Homo sapien
agtgatacgaaggtacacagtgtac

SEQ ID NO: 5493864 - DNA, 25 bp, Homo sapien
acatggacacatgtgggaatgtaag

SEQ ID NO: 5493865 - DNA, 25 bp, Homo sapien
ctatccagaggtgtgtcatcatgtc

SEQ ID NO: 5493866 - DNA, 25 bp, Homo sapien
agggctgaaaggagatcctaattcc

SEQ ID NO: 5493867 - DNA, 25 bp, Homo sapien
tttcacatgtgtggcaagctagact

SEQ ID NO: 5493868 - DNA, 25 bp, Homo sapien
atgtcacaagggaataagttgctct

SEQ ID NO: 5493869 - DNA, 25 bp, Homo sapien
gggaagatgccagatacagacttct

SEQ ID NO: 5493870 - DNA, 25 bp, Homo sapien
gcagatgcagcaatgaaatgtaagt

SEQ ID NO: 5493871 - DNA, 25 bp, Homo sapien
aagtcagtcccaagatagggctgaa

SEQ ID NO: 5493872 - DNA, 25 bp, Homo sapien
cagacaggtaataggatactaggga

SEQ ID NO: 5493873 - DNA, 25 bp, Homo sapien
ccacctgtgaactgggaatgatttc

SEQ ID NO: 5493874 - DNA, 25 bp, Homo sapien
atatggttctctaaggtgggattgg

SEQ ID NO: 5493875 - DNA, 25 bp, Homo sapien
aagaaacgcatgaaataaagtaaat

SEQ ID NO: 5493876 - DNA, 25 bp, Homo sapien
agtagctggcactgtgtctgacaaa

SEQ ID NO: 5493877 - DNA, 25 bp, Homo sapien
taaaacaaataaagacagcttctga

SEQ ID NO: 5493878 - DNA, 25 bp, Homo sapien
agaatcattaagtccctgcagaact

SEQ ID NO: 5493879 - DNA, 25 bp, Homo sapien
cacaaagcttttcagcaggaggcag

SEQ ID NO: 5493880 - DNA, 25 bp, Homo sapien
ttggtaccttgctaagatctagtat

SEQ ID NO: 5493881 - DNA, 25 bp, Homo sapien
aagtacgtaaaacaaaaatcatgtc

SEQ ID NO: 5493882 - DNA, 25 bp, Homo sapien
gcaggaggcagctatttttggtacc

SEQ ID NO: 5493883 - DNA, 25 bp, Homo sapien
agacagcttctgaggtacatttgca

SEQ ID NO: 5493884 - DNA, 25 bp, Homo sapien
tacgagaccctacaaaaacacacaa

SEQ ID NO: 5493885 - DNA, 25 bp, Homo sapien
tccagcagtttggggtggattttga

SEQ ID NO: 5493886 - DNA, 25 bp, Homo sapien
ccatttgagctggtgaagatggagt

SEQ ID NO: 5493887 - DNA, 25 bp, Homo sapien
tcacccccgacatggcctttgaagc

SEQ ID NO: 5493888 - DNA, 25 bp, Homo sapien
agtacaagaactttcggcccgacga

SEQ ID NO: 5493889 - DNA, 25 bp, Homo sapien
acgggagatcagctatgccattaag

SEQ ID NO: 5493890 - DNA, 25 bp, Homo sapien
ttccacgagcggttcccatttgagc

SEQ ID NO: 5493891 - DNA, 25 bp, Homo sapien
agacagagcgaatcgtcaccactta

SEQ ID NO: 5493892 - DNA, 25 bp, Homo sapien
gtggacactctggagctctccgggg

SEQ ID NO: 5493893 - DNA, 25 bp, Homo sapien
aagccctgctgcagatggtccagca

SEQ ID NO: 5493894 - DNA, 25 bp, Homo sapien
ggggcgcccgaatcaatcgcatctt

SEQ ID NO: 5493895 - DNA, 25 bp, Homo sapien
gagaacgaaggaccagattcttctg

SEQ ID NO: 5493896 - DNA, 25 bp, Homo sapien
tattcatactgcacgtggatgtcac

SEQ ID NO: 5493897 - DNA, 25 bp, Homo sapien
ctacgacacaaatggcctgccttca

SEQ ID NO: 5493898 - DNA, 25 bp, Homo sapien
ggatgtcactgaatgtcctttctct

SEQ ID NO: 5493899 - DNA, 25 bp, Homo sapien
tccaggtcttcaaacggaagactac

SEQ ID NO: 5493900 - DNA, 25 bp, Homo sapien
tcttcaacaggtaacttgcttagcc

SEQ ID NO: 5493901 - DNA, 25 bp, Homo sapien
gccttcaccgtgctgcaatttcttc

SEQ ID NO: 5493902 - DNA, 25 bp, Homo sapien
catactgcacgtggatgtcactgaa

SEQ ID NO: 5493903 - DNA, 25 bp, Homo sapien
tctcacaatgacatctccaggtctt

SEQ ID NO: 5493904 - DNA, 25 bp, Homo sapien
tagcctgtgctacgtattcatactg

SEQ ID NO: 5493905 - DNA, 25 bp, Homo sapien
aaacggaagactacgacacaaatgg

SEQ ID NO: 5493906 - DNA, 25 bp, Homo sapien
cttcaaacggaagactacgacacaa

SEQ ID NO: 5493907 - DNA, 25 bp, Homo sapien
atatatgacataggtgctattattt

SEQ ID NO: 5493908 - DNA, 25 bp, Homo sapien
ggattaggacctgatgtcttggggg

SEQ ID NO: 5493909 - DNA, 25 bp, Homo sapien
tccacgtaaggtaacatagggttca

SEQ ID NO: 5493910 - DNA, 25 bp, Homo sapien
atagggttcatggattaggacctga

SEQ ID NO: 5493911 - DNA, 25 bp, Homo sapien
ctagataatccaagaaaatctcccc

SEQ ID NO: 5493912 - DNA, 25 bp, Homo sapien
ttgtgcctggatgagttctcagtac

SEQ ID NO: 5493913 - DNA, 25 bp, Homo sapien
tctgattaaagacacttgtgattgc

SEQ ID NO: 5493914 - DNA, 25 bp, Homo sapien
tatatacttgtgcctggatgagttc

SEQ ID NO: 5493915 - DNA, 25 bp, Homo sapien
tctccctgcctctgattaaagacac

SEQ ID NO: 5493916 - DNA, 25 bp, Homo sapien
tttcagatggtaaagctgaggcaga

SEQ ID NO: 5493917 - DNA, 25 bp, Homo sapien
cttgtgattgcatttaggacctacc

SEQ ID NO: 5493918 - DNA, 25 bp, Homo sapien
gtcggttgacgtgtcgccctgcggg

SEQ ID NO: 5493919 - DNA, 25 bp, Homo sapien
cccgcagggcgacacgtcaaccgac

SEQ ID NO: 5493920 - DNA, 25 bp, Homo sapien
gggctcggtgcgtgcggacgcgccg

SEQ ID NO: 5493921 - DNA, 25 bp, Homo sapien
cggcgcgtccgcacgcaccgagccc

SEQ ID NO: 5493922 - DNA, 25 bp, Homo sapien
acggggactacactgtgtctgctac

SEQ ID NO: 5493923 - DNA, 25 bp, Homo sapien
tttttgatacaggatcttggccggg

SEQ ID NO: 5493924 - DNA, 25 bp, Homo sapien
gtatattaaaagctgagattccacc

SEQ ID NO: 5493925 - DNA, 25 bp, Homo sapien
gcatgggaaagccacagtcttcagt

SEQ ID NO: 5493926 - DNA, 25 bp, Homo sapien
tcccaatgtggctctgtgactgtga

SEQ ID NO: 5493927 - DNA, 25 bp, Homo sapien
aacaaatgcagtgtggttgctggat

SEQ ID NO: 5493928 - DNA, 25 bp, Homo sapien
ttcagttagtgtggtctgcagagtg

SEQ ID NO: 5493929 - DNA, 25 bp, Homo sapien
tgtgactgtgacacataacaccaca

SEQ ID NO: 5493930 - DNA, 25 bp, Homo sapien
ctgcagagtgtcccaatgtggctct

SEQ ID NO: 5493931 - DNA, 25 bp, Homo sapien
aaaaaaccaaacaaatgcagtgtgg

SEQ ID NO: 5493932 - DNA, 25 bp, Homo sapien
taacaccacagtgaagaacagtgac

SEQ ID NO: 5493933 - DNA, 25 bp, Homo sapien
ctgggattaaaggcatgtgccacca

SEQ ID NO: 5493934 - DNA, 25 bp, Homo sapien
atcaaaaagaaaaaaagaagtagca

SEQ ID NO: 5493935 - DNA, 25 bp, Homo sapien
tgggaccccatccagcaaccacact

SEQ ID NO: 5493936 - DNA, 25 bp, Homo sapien
ctggcctcccttggtgtggtcactg

SEQ ID NO: 5493937 - DNA, 25 bp, Homo sapien
tctgcagaccacactaactgaagac

SEQ ID NO: 5493938 - DNA, 25 bp, Homo sapien
agccacattgggacactctgcagac

SEQ ID NO: 5493939 - DNA, 25 bp, Homo sapien
actgaagactgtggctttcccatgc

SEQ ID NO: 5493940 - DNA, 25 bp, Homo sapien
ttacccagagtgcactggtggaatc

SEQ ID NO: 5493941 - DNA, 25 bp, Homo sapien
gtcacagtcacagagccacattggg

SEQ ID NO: 5493942 - DNA, 25 bp, Homo sapien
agaagtagcagacacagtgtagtcc

SEQ ID NO: 5493943 - DNA, 25 bp, Homo sapien
agtgtagtccccgtggaccctgcac

SEQ ID NO: 5493944 - DNA, 25 bp, Homo sapien
gtggtcccatcggcgccagacaaag

SEQ ID NO: 5493945 - DNA, 25 bp, Homo sapien
ctttgtctggcgccgatgggaccac

SEQ ID NO: 5493946 - DNA, 25 bp, Homo sapien
tggagatccccacttcgtgttcctc

SEQ ID NO: 5493947 - DNA, 25 bp, Homo sapien
gcccttccgaagtttgtggacactc

SEQ ID NO: 5493948 - DNA, 25 bp, Homo sapien
gctgaccaccccaagtggagatccc

SEQ ID NO: 5493949 - DNA, 25 bp, Homo sapien
ttggcggagctcaccctactccacc

SEQ ID NO: 5493950 - DNA, 25 bp, Homo sapien
tctaagcaggagaaatcaaaagaaa

SEQ ID NO: 5493951 - DNA, 25 bp, Homo sapien
ctgccacaccaaaagtttcaccatc

SEQ ID NO: 5493952 - DNA, 25 bp, Homo sapien
actccacctgctcagcccaggctcc

SEQ ID NO: 5493953 - DNA, 25 bp, Homo sapien
accatcagctgcgatgccgactgag

SEQ ID NO: 5493954 - DNA, 25 bp, Homo sapien
ggaccaggcagtgactttgctgggc

SEQ ID NO: 5493955 - DNA, 25 bp, Homo sapien
ccacgttccacatccaaagttctct

SEQ ID NO: 5493956 - DNA, 25 bp, Homo sapien
atgcggcctcctgtgccgccctggg

SEQ ID NO: 5493957 - DNA, 25 bp, Homo sapien
ttaaaagtaacagtgtaacggcagc

SEQ ID NO: 5493958 - DNA, 25 bp, Homo sapien
aaaacagaaatatcagagaaccacc

SEQ ID NO: 5493959 - DNA, 25 bp, Homo sapien
ggatgcacctccaccaaagacactg

SEQ ID NO: 5493960 - DNA, 25 bp, Homo sapien
agaaccaccaccagacgcacctttt

SEQ ID NO: 5493961 - DNA, 25 bp, Homo sapien
cacataaaaaagttagaaagatctc

SEQ ID NO: 5493962 - DNA, 25 bp, Homo sapien
ttgcacttaatgtacgaagaggtat

SEQ ID NO: 5493963 - DNA, 25 bp, Homo sapien
acagtgtaacggcagctaatggatg

SEQ ID NO: 5493964 - DNA, 25 bp, Homo sapien
taactctagagtgaaagaaacccaa

SEQ ID NO: 5493965 - DNA, 25 bp, Homo sapien
ccaaagacactgcaaaagtacccat

SEQ ID NO: 5493966 - DNA, 25 bp, Homo sapien
gtacgaagaggtatataaaacagaa

SEQ ID NO: 5493967 - DNA, 25 bp, Homo sapien
aatagctgaagccaactaggtttta

SEQ ID NO: 5493968 - DNA, 25 bp, Homo sapien
ggcaagagggctgcaccctcccttg

SEQ ID NO: 5493969 - DNA, 25 bp, Homo sapien
gcccacgagctggtttcctaggagg

SEQ ID NO: 5493970 - DNA, 25 bp, Homo sapien
gggctgcaccctcccttggagacct

SEQ ID NO: 5493971 - DNA, 25 bp, Homo sapien
ctctatctagggaatgaaaaatggg

SEQ ID NO: 5493972 - DNA, 25 bp, Homo sapien
agcccccaaaaatataatcaccgac

SEQ ID NO: 5493973 - DNA, 25 bp, Homo sapien
tacaaactgaaggaagcaggttttg

SEQ ID NO: 5493974 - DNA, 25 bp, Homo sapien
tgtcccacacccacctggaagggca

SEQ ID NO: 5493975 - DNA, 25 bp, Homo sapien
accgactttacaaactgaaggaagc

SEQ ID NO: 5493976 - DNA, 25 bp, Homo sapien
tctcccccattcccagcccacgagc

SEQ ID NO: 5493977 - DNA, 25 bp, Homo sapien
ggagaccttctcccaggtgtcccac

SEQ ID NO: 5493978 - DNA, 25 bp, Homo sapien
ctggtttcctaggaggagccaccag

SEQ ID NO: 5493979 - DNA, 25 bp, Homo sapien
gtctggtggtggttctctgatattt

SEQ ID NO: 5493980 - DNA, 25 bp, Homo sapien
ggaggtgcatccattagctgccgtt

SEQ ID NO: 5493981 - DNA, 25 bp, Homo sapien
tttaatcaaaaggtgcgtctggtgg

SEQ ID NO: 5493982 - DNA, 25 bp, Homo sapien
cttttgcagtgtctttggtggaggt

SEQ ID NO: 5493983 - DNA, 25 bp, Homo sapien
gtctttggtggaggtgcatccatta

SEQ ID NO: 5493984 - DNA, 25 bp, Homo sapien
taagaatcaatcaattatgggtact

SEQ ID NO: 5493985 - DNA, 25 bp, Homo sapien
tatgtgggcgtttaaatttagtgct

SEQ ID NO: 5493986 - DNA, 25 bp, Homo sapien
cccagagattctgatatgttggatc

SEQ ID NO: 5493987 - DNA, 25 bp, Homo sapien
tcttcgtacattaagtgcaaactac

SEQ ID NO: 5493988 - DNA, 25 bp, Homo sapien
actgccttagctgtgtcccagagat

SEQ ID NO: 5493989 - DNA, 25 bp, Homo sapien
attagctgccgttacactgttactt

SEQ ID NO: 5493990 - DNA, 25 bp, Homo sapien
caggtttggcccatgggcagtagtt

SEQ ID NO: 5493991 - DNA, 25 bp, Homo sapien
taaggcatatagtttagcacagcgc

SEQ ID NO: 5493992 - DNA, 25 bp, Homo sapien
gggagcgctgtgttcatcattgtca

SEQ ID NO: 5493993 - DNA, 25 bp, Homo sapien
aagccttggtttaaagccctcatat

SEQ ID NO: 5493994 - DNA, 25 bp, Homo sapien
agcacagcgcttagcaaaataggga

SEQ ID NO: 5493995 - DNA, 25 bp, Homo sapien
ctctccaggtctggctgatgtgagg

SEQ ID NO: 5493996 - DNA, 25 bp, Homo sapien
tcaagatgatcgttctctccaggtc

SEQ ID NO: 5493997 - DNA, 25 bp, Homo sapien
tagacattaagatgagttaaggcat

SEQ ID NO: 5493998 - DNA, 25 bp, Homo sapien
tgggctatacagaactagatgatgg

SEQ ID NO: 5493999 - DNA, 25 bp, Homo sapien
tcttggcttgtgggctatacagaac

SEQ ID NO: 5494000 - DNA, 25 bp, Homo sapien
catgggcagtagtttaccaagcctt

SEQ ID NO: 5494001 - DNA, 25 bp, Homo sapien
ataataccacctcagtggcaggcta

SEQ ID NO: 5494002 - DNA, 25 bp, Homo sapien
taccacctcagtggcaggctagcat

SEQ ID NO: 5494003 - DNA, 25 bp, Homo sapien
gatacatctgcaacgctcaaaaaaa

SEQ ID NO: 5494004 - DNA, 25 bp, Homo sapien
tggcaggctagcatgctgcactgta

SEQ ID NO: 5494005 - DNA, 25 bp, Homo sapien
ccaaatagcctggaccgtaagtgcg

SEQ ID NO: 5494006 - DNA, 25 bp, Homo sapien
ggcacgatacatctgcaacgctcaa

SEQ ID NO: 5494007 - DNA, 25 bp, Homo sapien
atcacaagtttaatcttctctccac

SEQ ID NO: 5494008 - DNA, 25 bp, Homo sapien
caggctagcatgctgcactgtaatc

SEQ ID NO: 5494009 - DNA, 25 bp, Homo sapien
gcctcccaaatagcctggaccgtaa

SEQ ID NO: 5494010 - DNA, 25 bp, Homo sapien
accacagcacttttataataccacc

SEQ ID NO: 5494011 - DNA, 25 bp, Homo sapien
gccacgtgcccacaccacagcactt

SEQ ID NO: 5494012 - DNA, 25 bp, Homo sapien
tgatagcttgggactacaataggta

SEQ ID NO: 5494013 - DNA, 25 bp, Homo sapien
ttatggaacataaattagatctaaa

SEQ ID NO: 5494014 - DNA, 25 bp, Homo sapien
aagctagaagacagtttatggaaca

SEQ ID NO: 5494015 - DNA, 25 bp, Homo sapien
caaataactgtgaaaatactaccat

SEQ ID NO: 5494016 - DNA, 25 bp, Homo sapien
ttttgataatgatatccgggatata

SEQ ID NO: 5494017 - DNA, 25 bp, Homo sapien
tcaaccatagcaatataaaatagat

SEQ ID NO: 5494018 - DNA, 25 bp, Homo sapien
acaataggtagataacccaaatatt

SEQ ID NO: 5494019 - DNA, 25 bp, Homo sapien
aatctgatgcttgagctagaatctc

SEQ ID NO: 5494020 - DNA, 25 bp, Homo sapien
atttgttgctagaaatagaagtaaa

SEQ ID NO: 5494021 - DNA, 25 bp, Homo sapien
tcttcgacaatcaaaaaccactgaa

SEQ ID NO: 5494022 - DNA, 25 bp, Homo sapien
tccgggatataggaaaatgaagatt

SEQ ID NO: 5494023 - DNA, 25 bp, Homo sapien
tgttagatgaactgtggtaatttgc

SEQ ID NO: 5494024 - DNA, 25 bp, Homo sapien
tcatataatgagtgaggaagtgttc

SEQ ID NO: 5494025 - DNA, 25 bp, Homo sapien
cagtgaaatcatttagggtagagat

SEQ ID NO: 5494026 - DNA, 25 bp, Homo sapien
tggttttggtattagggcaatgctt

SEQ ID NO: 5494027 - DNA, 25 bp, Homo sapien
tagttattggaccattcaggttatc

SEQ ID NO: 5494028 - DNA, 25 bp, Homo sapien
ctgaaagttgtttagaactggagtt

SEQ ID NO: 5494029 - DNA, 25 bp, Homo sapien
tatgttcatgagggttattggtctg

SEQ ID NO: 5494030 - DNA, 25 bp, Homo sapien
atgagtgaggaagtgttccctcttc

SEQ ID NO: 5494031 - DNA, 25 bp, Homo sapien
atggtagattacactgattgatttt

SEQ ID NO: 5494032 - DNA, 25 bp, Homo sapien
cttcagactgttaatatggtagatt

SEQ ID NO: 5494033 - DNA, 25 bp, Homo sapien
tgagggttattggtctgtaggtttc

SEQ ID NO: 5494034 - DNA, 25 bp, Homo sapien
actgcttgcataaaaggagaggcat

SEQ ID NO: 5494035 - DNA, 25 bp, Homo sapien
atattgtaatgtcactgaaagtccc

SEQ ID NO: 5494036 - DNA, 25 bp, Homo sapien
tgaagttggagaaactcactattac

SEQ ID NO: 5494037 - DNA, 25 bp, Homo sapien
acaacaaagaaacttatggtgataa

SEQ ID NO: 5494038 - DNA, 25 bp, Homo sapien
taatggagctaacaaagtcattttc

SEQ ID NO: 5494039 - DNA, 25 bp, Homo sapien
acaaagatgcataatagataaggtt

SEQ ID NO: 5494040 - DNA, 25 bp, Homo sapien
aaggagaggcataccacatatgaag

SEQ ID NO: 5494041 - DNA, 25 bp, Homo sapien
gaaaaaaagtgactctactgcttgc

SEQ ID NO: 5494042 - DNA, 25 bp, Homo sapien
aacagaaaatcttaatggagctaac

SEQ ID NO: 5494043 - DNA, 25 bp, Homo sapien
taggtccaagctatcagaaagtgag

SEQ ID NO: 5494044 - DNA, 25 bp, Homo sapien
caaacctagttgataggtccaagct

SEQ ID NO: 5494045 - DNA, 25 bp, Homo sapien
ttcagttccagataagatggagaag

SEQ ID NO: 5494046 - DNA, 25 bp, Homo sapien
ttctgagggcacattcacctcgggg

SEQ ID NO: 5494047 - DNA, 25 bp, Homo sapien
aaaaatgttcatggcagcaccgttt

SEQ ID NO: 5494048 - DNA, 25 bp, Homo sapien
gggagaaactatttgaggactctgg

SEQ ID NO: 5494049 - DNA, 25 bp, Homo sapien
ggaaaaagttggtgacatgttgcta

SEQ ID NO: 5494050 - DNA, 25 bp, Homo sapien
ttagacatagtggtaacctagcttc

SEQ ID NO: 5494051 - DNA, 25 bp, Homo sapien
tggcgtggagcatttccgaactttc

SEQ ID NO: 5494052 - DNA, 25 bp, Homo sapien
gcagcaccgtttaaaatggggagaa

SEQ ID NO: 5494053 - DNA, 25 bp, Homo sapien
gcagcatagttaatcagcagcttgc

SEQ ID NO: 5494054 - DNA, 25 bp, Homo sapien
agatggagaaggcatactcctttca

SEQ ID NO: 5494055 - DNA, 25 bp, Homo sapien
ataaatcctggagagtagacaggga

SEQ ID NO: 5494056 - DNA, 25 bp, Homo sapien
attgacatggacaaaattgcgtatt

SEQ ID NO: 5494057 - DNA, 25 bp, Homo sapien
ctaagagagttgacaatgggctttt

SEQ ID NO: 5494058 - DNA, 25 bp, Homo sapien
cagcacatgatacatctgaggcacc

SEQ ID NO: 5494059 - DNA, 25 bp, Homo sapien
tgttgtactggtatagaacagtcta

SEQ ID NO: 5494060 - DNA, 25 bp, Homo sapien
aacagtccagaaatgcttaagcagt

SEQ ID NO: 5494061 - DNA, 25 bp, Homo sapien
ggaaggaacactgtagagaatcagt

SEQ ID NO: 5494062 - DNA, 25 bp, Homo sapien
ttgatgaagttctaagagagttgac

SEQ ID NO: 5494063 - DNA, 25 bp, Homo sapien
tctgaggcaccaacacacaaaaaga

SEQ ID NO: 5494064 - DNA, 25 bp, Homo sapien
tcatcagcttgagactaggaaggaa

SEQ ID NO: 5494065 - DNA, 25 bp, Homo sapien
agagaatcagttcaagcagcacatg

SEQ ID NO: 5494066 - DNA, 25 bp, Homo sapien
gcttaagcagttgaattaccgaaac

SEQ ID NO: 5494067 - DNA, 25 bp, Homo sapien
gctttagacgttgccaggacatgta

SEQ ID NO: 5494068 - DNA, 25 bp, Homo sapien
agtggagatctgttaaacgagttga

SEQ ID NO: 5494069 - DNA, 25 bp, Homo sapien
ggaccctgaccatgtaaagacctac

SEQ ID NO: 5494070 - DNA, 25 bp, Homo sapien
tgaagcagatgccggttcaacttac

SEQ ID NO: 5494071 - DNA, 25 bp, Homo sapien
ttacttaaagatgtgggacaagctc

SEQ ID NO: 5494072 - DNA, 25 bp, Homo sapien
gacatggcccatgtggtcctcctgt

SEQ ID NO: 5494073 - DNA, 25 bp, Homo sapien
gcaccattgaagcaagaacagaaac

SEQ ID NO: 5494074 - DNA, 25 bp, Homo sapien
gcccaggcaccagcatcttcaaacc

SEQ ID NO: 5494075 - DNA, 25 bp, Homo sapien
gccaggacatgtagaaactcactca

SEQ ID NO: 5494076 - DNA, 25 bp, Homo sapien
cttctgagctgtgagctatgggcaa

SEQ ID NO: 5494077 - DNA, 25 bp, Homo sapien
aggacaaggaattgctgtggcttta

SEQ ID NO: 5494078 - DNA, 25 bp, Homo sapien
cagaaaagtagggagcttgttctaa

SEQ ID NO: 5494079 - DNA, 25 bp, Homo sapien
cccatcataaggcagtggctgttat

SEQ ID NO: 5494080 - DNA, 25 bp, Homo sapien
tccaccaaaaacccaatgttgcatc

SEQ ID NO: 5494081 - DNA, 25 bp, Homo sapien
gaacaaaatggaagagttcctgccc

SEQ ID NO: 5494082 - DNA, 25 bp, Homo sapien
tccagggatactagacatatacgtt

SEQ ID NO: 5494083 - DNA, 25 bp, Homo sapien
actaactccttgtggggaactggga

SEQ ID NO: 5494084 - DNA, 25 bp, Homo sapien
cttgacttgagtacccgccttgcca

SEQ ID NO: 5494085 - DNA, 25 bp, Homo sapien
gctcagttattaagcaacgactact

SEQ ID NO: 5494086 - DNA, 25 bp, Homo sapien
aagccagacaaaatatctatagccc

SEQ ID NO: 5494087 - DNA, 25 bp, Homo sapien
caggcagtggagacgttattttctc

SEQ ID NO: 5494088 - DNA, 25 bp, Homo sapien
tttaacaaggtgtaagccagacaaa

SEQ ID NO: 5494089 - DNA, 25 bp, Homo sapien
ggccgctccaccgcggctgtctgcg

SEQ ID NO: 5494090 - DNA, 25 bp, Homo sapien
ctgccctcgtcaggtggaacatgta

SEQ ID NO: 5494091 - DNA, 25 bp, Homo sapien
tcaggctgtaaccgctacccagagc

SEQ ID NO: 5494092 - DNA, 25 bp, Homo sapien
ccaaatatctggctgggtagctgcc

SEQ ID NO: 5494093 - DNA, 25 bp, Homo sapien
tcgtgtacgtgcactgcaacgctgg

SEQ ID NO: 5494094 - DNA, 25 bp, Homo sapien
gctgtctgcggctggctccagtatg

SEQ ID NO: 5494095 - DNA, 25 bp, Homo sapien
gtctacattgacgaagaggccttgg

SEQ ID NO: 5494096 - DNA, 25 bp, Homo sapien
atctgaggaaggtgcagtatttcct

SEQ ID NO: 5494097 - DNA, 25 bp, Homo sapien
tataggaagaaggcttggcctacat

SEQ ID NO: 5494098 - DNA, 25 bp, Homo sapien
aaactgaagcatgaattggggatta

SEQ ID NO: 5494099 - DNA, 25 bp, Homo sapien
ctacccagagcccatgactccagac

SEQ ID NO: 5494100 - DNA, 25 bp, Homo sapien
gggcatcggaccatgaacccctgtc

SEQ ID NO: 5494101 - DNA, 25 bp, Homo sapien
gccctctgttccggcaggaagatga

SEQ ID NO: 5494102 - DNA, 25 bp, Homo sapien
cgctcttcgcttctcggggcttgtc

SEQ ID NO: 5494103 - DNA, 25 bp, Homo sapien
acagagggattacctaccggatccc

SEQ ID NO: 5494104 - DNA, 25 bp, Homo sapien
ctggcctttgcagagaagcgttcca

SEQ ID NO: 5494105 - DNA, 25 bp, Homo sapien
cgccccatggaagaatccccggcgt

SEQ ID NO: 5494106 - DNA, 25 bp, Homo sapien
ctcttccgggcttcggcgaatgaga

SEQ ID NO: 5494107 - DNA, 25 bp, Homo sapien
ccctgtcctgtatgggagcagaaga

SEQ ID NO: 5494108 - DNA, 25 bp, Homo sapien
gccatgtcacagagcgtcaacagat

SEQ ID NO: 5494109 - DNA, 25 bp, Homo sapien
ccagctctgccccgacagagacgga

SEQ ID NO: 5494110 - DNA, 25 bp, Homo sapien
ggggcttgtctccgtgtcctccgtc

SEQ ID NO: 5494111 - DNA, 25 bp, Homo sapien
agacgggtagcacgtctacgacgaa

SEQ ID NO: 5494112 - DNA, 25 bp, Homo sapien
ttcgtcgtagacgtgctacccgtct

SEQ ID NO: 5494113 - DNA, 25 bp, Homo sapien
gattgaagaaaaataaagaagaaga

SEQ ID NO: 5494114 - DNA, 25 bp, Homo sapien
tctggtaaatgagttagcccgtttc

SEQ ID NO: 5494115 - DNA, 25 bp, Homo sapien
aaagagggcctgctcattcaaagat

SEQ ID NO: 5494116 - DNA, 25 bp, Homo sapien
aacccaaaagagaaaactgcaatgt

SEQ ID NO: 5494117 - DNA, 25 bp, Homo sapien
ctctttgcgcactagctcgccggcg

SEQ ID NO: 5494118 - DNA, 25 bp, Homo sapien
aagaagaactcaaagatacacaaag

SEQ ID NO: 5494119 - DNA, 25 bp, Homo sapien
ggagagacaagggctttagcttact

SEQ ID NO: 5494120 - DNA, 25 bp, Homo sapien
gagggacacagcagtttggtcaata

SEQ ID NO: 5494121 - DNA, 25 bp, Homo sapien
ataaacttctggattaaagagggcc

SEQ ID NO: 5494122 - DNA, 25 bp, Homo sapien
aatttgaccaaggctcagaagtttt

SEQ ID NO: 5494123 - DNA, 25 bp, Homo sapien
ggggccgctctttgcgcactagctc

SEQ ID NO: 5494124 - DNA, 25 bp, Homo sapien
gtgccttggtgaactgaccacagtt

SEQ ID NO: 5494125 - DNA, 25 bp, Homo sapien
aataagagaatataaaagtcagatt

SEQ ID NO: 5494126 - DNA, 25 bp, Homo sapien
aactaagcaggaatccccatctctc

SEQ ID NO: 5494127 - DNA, 25 bp, Homo sapien
gctgagctcctgaactggtacttcc

SEQ ID NO: 5494128 - DNA, 25 bp, Homo sapien
aaaggatcgaagcaaaagtgtcttc

SEQ ID NO: 5494129 - DNA, 25 bp, Homo sapien
aatcagacactacctcatgtgagtc

SEQ ID NO: 5494130 - DNA, 25 bp, Homo sapien
gcctccaggactctcaatcagacac

SEQ ID NO: 5494131 - DNA, 25 bp, Homo sapien
cttccctcggacatgcaggctaagg

SEQ ID NO: 5494132 - DNA, 25 bp, Homo sapien
gtgagtctccagtcctacaggcatg

SEQ ID NO: 5494133 - DNA, 25 bp, Homo sapien
atttagtaactccaggacctgagga

SEQ ID NO: 5494134 - DNA, 25 bp, Homo sapien
taaagaagtctaactgcctccagga

SEQ ID NO: 5494135 - DNA, 25 bp, Homo sapien
aacatactacagtgcctaggggctt

SEQ ID NO: 5494136 - DNA, 25 bp, Homo sapien
ctgacctagaaacagtaacctagca

SEQ ID NO: 5494137 - DNA, 25 bp, Homo sapien
cattatggtgcaagtctgaaacaaa

SEQ ID NO: 5494138 - DNA, 25 bp, Homo sapien
acagtgcctaggggcttaaactaat

SEQ ID NO: 5494139 - DNA, 25 bp, Homo sapien
tactatagggagatagccagtctat

SEQ ID NO: 5494140 - DNA, 25 bp, Homo sapien
caggtgcctgcacactgtgggattt

SEQ ID NO: 5494141 - DNA, 25 bp, Homo sapien
taacctagcaagaattttgagtagc

SEQ ID NO: 5494142 - DNA, 25 bp, Homo sapien
caaactctggctactatagggagat

SEQ ID NO: 5494143 - DNA, 25 bp, Homo sapien
aagaaaaaaagacctactcaaatca

SEQ ID NO: 5494144 - DNA, 25 bp, Homo sapien
taaacattgctgaataacatactac

SEQ ID NO: 5494145 - DNA, 25 bp, Homo sapien
aaaccatgtggatgtattggctttc

SEQ ID NO: 5494146 - DNA, 25 bp, Homo sapien
gttctcttgaggcagcagtatttgg

SEQ ID NO: 5494147 - DNA, 25 bp, Homo sapien
tacatgtcatctatcaacaggatta

SEQ ID NO: 5494148 - DNA, 25 bp, Homo sapien
gccacatacagggttactgcatctt

SEQ ID NO: 5494149 - DNA, 25 bp, Homo sapien
ccacacccggccatctactgatatt

SEQ ID NO: 5494150 - DNA, 25 bp, Homo sapien
tgacaaaatgccacatacagggtta

SEQ ID NO: 5494151 - DNA, 25 bp, Homo sapien
cttagaatccagtcctaaaaacatc

SEQ ID NO: 5494152 - DNA, 25 bp, Homo sapien
aaaccacccttagaatccagtccta

SEQ ID NO: 5494153 - DNA, 25 bp, Homo sapien
aaaatgccacatacagggttactgc

SEQ ID NO: 5494154 - DNA, 25 bp, Homo sapien
aaaattgttctcttgaggcagcagt

SEQ ID NO: 5494155 - DNA, 25 bp, Homo sapien
cttaattaacctgacaaaatgccac

SEQ ID NO: 5494156 - DNA, 25 bp, Homo sapien
acaggattatgaacctgaaagcctg

SEQ ID NO: 5494157 - DNA, 25 bp, Homo sapien
aatgatggtgactggtgacacctct

SEQ ID NO: 5494158 - DNA, 25 bp, Homo sapien
gcaggactggtatccatgctgtggc

SEQ ID NO: 5494159 - DNA, 25 bp, Homo sapien
agatagcaggaatggctgagttttt

SEQ ID NO: 5494160 - DNA, 25 bp, Homo sapien
tactaaagccctgggaaaagagaca

SEQ ID NO: 5494161 - DNA, 25 bp, Homo sapien
cttcagcatgagcatttggggaatg

SEQ ID NO: 5494162 - DNA, 25 bp, Homo sapien
aacccgggttctgagtagcataggg

SEQ ID NO: 5494163 - DNA, 25 bp, Homo sapien
gctggagacttggcactgctcccag

SEQ ID NO: 5494164 - DNA, 25 bp, Homo sapien
ctggctaccagtgtccttggagggg

SEQ ID NO: 5494165 - DNA, 25 bp, Homo sapien
tagccctgccacctacctgggggcc

SEQ ID NO: 5494166 - DNA, 25 bp, Homo sapien
tgcttaaggctccacagggccaagg

SEQ ID NO: 5494167 - DNA, 25 bp, Homo sapien
agtatagattgggccctatgggact

SEQ ID NO: 5494168 - DNA, 25 bp, Homo sapien
gcagtattaaataaagggagatctc

SEQ ID NO: 5494169 - DNA, 25 bp, Homo sapien
gagctgagtttactaagaacatccc

SEQ ID NO: 5494170 - DNA, 25 bp, Homo sapien
gcatcactaaatagagaaaaaaggt

SEQ ID NO: 5494171 - DNA, 25 bp, Homo sapien
gagagagaagtgattgctcaagaaa

SEQ ID NO: 5494172 - DNA, 25 bp, Homo sapien
ccagaatcatgaattggagagagaa

SEQ ID NO: 5494173 - DNA, 25 bp, Homo sapien
gatatatgtgtttgagctgagttta

SEQ ID NO: 5494174 - DNA, 25 bp, Homo sapien
aaataatgaatgaaatgttgcagta

SEQ ID NO: 5494175 - DNA, 25 bp, Homo sapien
aaacttactctactcaatctgctcc

SEQ ID NO: 5494176 - DNA, 25 bp, Homo sapien
tctttgctacgaaaagctgccacaa

SEQ ID NO: 5494177 - DNA, 25 bp, Homo sapien
gaagtgattgctcaagaaaagaaat

SEQ ID NO: 5494178 - DNA, 25 bp, Homo sapien
tacaggaggagctaaaaacttactc

SEQ ID NO: 5494179 - DNA, 25 bp, Homo sapien
agggtctcgtgaacctgactaaaat

SEQ ID NO: 5494180 - DNA, 25 bp, Homo sapien
attttagtcaggttcacgagaccct

SEQ ID NO: 5494181 - DNA, 25 bp, Homo sapien
ggataggattagtaggctgcatata

SEQ ID NO: 5494182 - DNA, 25 bp, Homo sapien
ttcacagaagcagtgtaaactcgaa

SEQ ID NO: 5494183 - DNA, 25 bp, Homo sapien
agatgacattcaaccagaggaaggg

SEQ ID NO: 5494184 - DNA, 25 bp, Homo sapien
cctagctctccaagggaggctgaga

SEQ ID NO: 5494185 - DNA, 25 bp, Homo sapien
ggaggctgagaaattgtcttctagc

SEQ ID NO: 5494186 - DNA, 25 bp, Homo sapien
taaactcgaaactagggctggtata

SEQ ID NO: 5494187 - DNA, 25 bp, Homo sapien
ttccaccctcaaggtcagaaattcc

SEQ ID NO: 5494188 - DNA, 25 bp, Homo sapien
ctcattggctggaacctagctctcc

SEQ ID NO: 5494189 - DNA, 25 bp, Homo sapien
gcaggccaaaccaagcacacctttc

SEQ ID NO: 5494190 - DNA, 25 bp, Homo sapien
tctcagccatctggtactcagcctc

SEQ ID NO: 5494191 - DNA, 25 bp, Homo sapien
aaaagagctgtagtaaaccttattc

SEQ ID NO: 5494192 - DNA, 25 bp, Homo sapien
gccaagaggatttcaaaaggattgt

SEQ ID NO: 5494193 - DNA, 25 bp, Homo sapien
accaattgacagaacaagcaaacaa

SEQ ID NO: 5494194 - DNA, 25 bp, Homo sapien
acattgacagaactacaaggagaaa

SEQ ID NO: 5494195 - DNA, 25 bp, Homo sapien
aagtagtgagtacacacatgccctc

SEQ ID NO: 5494196 - DNA, 25 bp, Homo sapien
gccatgtgtgaaagtagtgagtaca

SEQ ID NO: 5494197 - DNA, 25 bp, Homo sapien
gacgatctatggagccaagaggatt

SEQ ID NO: 5494198 - DNA, 25 bp, Homo sapien
acttgaccaaataatgccatgtgtg

SEQ ID NO: 5494199 - DNA, 25 bp, Homo sapien
ttaaaatgacgatctatggagccaa

SEQ ID NO: 5494200 - DNA, 25 bp, Homo sapien
catgccctcacacagagtacctatc

SEQ ID NO: 5494201 - DNA, 25 bp, Homo sapien
atcatagatagtgtgtccttagacc

SEQ ID NO: 5494202 - DNA, 25 bp, Homo sapien
aacaaaaagtaggatatagacattt

SEQ ID NO: 5494203 - DNA, 25 bp, Homo sapien
catctcagcctcttaaagtgttggg

SEQ ID NO: 5494204 - DNA, 25 bp, Homo sapien
atcatcatatgctagaaactgagaa

SEQ ID NO: 5494205 - DNA, 25 bp, Homo sapien
attatttaaagaaagctaggacatt

SEQ ID NO: 5494206 - DNA, 25 bp, Homo sapien
agaaagctaggacattttcactatt

SEQ ID NO: 5494207 - DNA, 25 bp, Homo sapien
catatgctagaaactgagaaggaac

SEQ ID NO: 5494208 - DNA, 25 bp, Homo sapien
ggactcatgagttatttagaagaat

SEQ ID NO: 5494209 - DNA, 25 bp, Homo sapien
tgtgagccattatgcccagcccctc

SEQ ID NO: 5494210 - DNA, 25 bp, Homo sapien
ggctggtttcaaactcctgggctga

SEQ ID NO: 5494211 - DNA, 25 bp, Homo sapien
ttcaaactcctgggctgaaggaatc

SEQ ID NO: 5494212 - DNA, 25 bp, Homo sapien
tgggctgaaggaatccttccatctc

SEQ ID NO: 5494213 - DNA, 25 bp, Homo sapien
gctagaaactgagaaggaactcttc

SEQ ID NO: 5494214 - DNA, 25 bp, Homo sapien
aacgagcaagccatatctgaatttc

SEQ ID NO: 5494215 - DNA, 25 bp, Homo sapien
agtagcctaataggaacctgttggc

SEQ ID NO: 5494216 - DNA, 25 bp, Homo sapien
tatgaccctgtcagatttggcctaa

SEQ ID NO: 5494217 - DNA, 25 bp, Homo sapien
aacaaaaactccacaactgactgtc

SEQ ID NO: 5494218 - DNA, 25 bp, Homo sapien
aaagctgtgaatactggaataaatt

SEQ ID NO: 5494219 - DNA, 25 bp, Homo sapien
acctcctcttgtgactgatggacac

SEQ ID NO: 5494220 - DNA, 25 bp, Homo sapien
ataagttaacaaacgagcaagccat

SEQ ID NO: 5494221 - DNA, 25 bp, Homo sapien
aaaaattataggagctgggattgtt

SEQ ID NO: 5494222 - DNA, 25 bp, Homo sapien
atgttctaaagagtatgatcttggc

SEQ ID NO: 5494223 - DNA, 25 bp, Homo sapien
tagtaggatgagttcgagtagccta

SEQ ID NO: 5494224 - DNA, 25 bp, Homo sapien
tctgattggagcgaagaaaaattat

SEQ ID NO: 5494225 - DNA, 25 bp, Homo sapien
accaaaaggagataattccagcccc

SEQ ID NO: 5494226 - DNA, 25 bp, Homo sapien
acgaagtttgcctatctggaaccat

SEQ ID NO: 5494227 - DNA, 25 bp, Homo sapien
tctttctgagatagggtgttaatga

SEQ ID NO: 5494228 - DNA, 25 bp, Homo sapien
atgaatccttactgaggcacagacc

SEQ ID NO: 5494229 - DNA, 25 bp, Homo sapien
cactccaccctaaaccctggcctcc

SEQ ID NO: 5494230 - DNA, 25 bp, Homo sapien
tggcctcctgaggcaacgaagtttg

SEQ ID NO: 5494231 - DNA, 25 bp, Homo sapien
agtggccggcctcataaatcatcat

SEQ ID NO: 5494232 - DNA, 25 bp, Homo sapien
ccctctctgcgtctcaaaagtgatc

SEQ ID NO: 5494233 - DNA, 25 bp, Homo sapien
tatgctggccggttctgcttcctac

SEQ ID NO: 5494234 - DNA, 25 bp, Homo sapien
ttttcattggcccagtggccggcct

SEQ ID NO: 5494235 - DNA, 25 bp, Homo sapien
gaggcacagacctctggcctcctgc

SEQ ID NO: 5494236 - DNA, 25 bp, Homo sapien
cacatcagttagaataatatcgccc

SEQ ID NO: 5494237 - DNA, 25 bp, Homo sapien
aaagagcctgctagatgtattcatt

SEQ ID NO: 5494238 - DNA, 25 bp, Homo sapien
catgagaatgggtcacaaaccttgc

SEQ ID NO: 5494239 - DNA, 25 bp, Homo sapien
acaaaatcacagaatggatccacat

SEQ ID NO: 5494240 - DNA, 25 bp, Homo sapien
ttggagctcccacaaagagtagaaa

SEQ ID NO: 5494241 - DNA, 25 bp, Homo sapien
aggtacaccattcacatgcgtgcac

SEQ ID NO: 5494242 - DNA, 25 bp, Homo sapien
tgcgtgcacaagcctcaaagcatgt

SEQ ID NO: 5494243 - DNA, 25 bp, Homo sapien
gctgagatacagatgctaaagagcc

SEQ ID NO: 5494244 - DNA, 25 bp, Homo sapien
aagagtagaaattgtaaacgttaga

SEQ ID NO: 5494245 - DNA, 25 bp, Homo sapien
taagatctaacaatggcttgctgta

SEQ ID NO: 5494246 - DNA, 25 bp, Homo sapien
agcaccaatgcaattcaatggggaa

SEQ ID NO: 5494247 - DNA, 25 bp, Homo sapien
cttactggtccctgtgctgcagcct

SEQ ID NO: 5494248 - DNA, 25 bp, Homo sapien
cgggacctagtggtcattggcttct

SEQ ID NO: 5494249 - DNA, 25 bp, Homo sapien
atggagcagcacgcttgttccctgc

SEQ ID NO: 5494250 - DNA, 25 bp, Homo sapien
ggtggtctttcaagctctcccaagc

SEQ ID NO: 5494251 - DNA, 25 bp, Homo sapien
ccatcccccagatgccccgtggtgt

SEQ ID NO: 5494252 - DNA, 25 bp, Homo sapien
ggggcactcacggccccatccccca

SEQ ID NO: 5494253 - DNA, 25 bp, Homo sapien
agctctcccaagccttactggtccc

SEQ ID NO: 5494254 - DNA, 25 bp, Homo sapien
tacgctcaagttcttccgcaatggg

SEQ ID NO: 5494255 - DNA, 25 bp, Homo sapien
gacctagtggtcattggcttcttcc

SEQ ID NO: 5494256 - DNA, 25 bp, Homo sapien
gttcttccgcaatgggaaccgcacg

SEQ ID NO: 5494257 - DNA, 25 bp, Homo sapien
tgtgacggagtaccctacgctcaag

SEQ ID NO: 5494258 - DNA, 25 bp, Homo sapien
cttgaggcgcagctactgttctcta

SEQ ID NO: 5494259 - DNA, 25 bp, Homo sapien
gagagacacacctctgaaacagagc

SEQ ID NO: 5494260 - DNA, 25 bp, Homo sapien
ctagaaggcagactgcgactgttct

SEQ ID NO: 5494261 - DNA, 25 bp, Homo sapien
gaacaaaacaggatggaatctagaa

SEQ ID NO: 5494262 - DNA, 25 bp, Homo sapien
tggctgcagtaggccttagctgata

SEQ ID NO: 5494263 - DNA, 25 bp, Homo sapien
ctctgaaacagagcaatgcttgagg

SEQ ID NO: 5494264 - DNA, 25 bp, Homo sapien
aagaaatctcgtgtagaagcaggga

SEQ ID NO: 5494265 - DNA, 25 bp, Homo sapien
ctcgaactgactgaccagagagaca

SEQ ID NO: 5494266 - DNA, 25 bp, Homo sapien
tctctagtggagagacccttctggt

SEQ ID NO: 5494267 - DNA, 25 bp, Homo sapien
tgaacccaagagttagaacaaaaca

SEQ ID NO: 5494268 - DNA, 25 bp, Homo sapien
tatgttcctagcctaggaggcctga

SEQ ID NO: 5494269 - DNA, 25 bp, Homo sapien
aagaaaccaggcccaaccattttgc

SEQ ID NO: 5494270 - DNA, 25 bp, Homo sapien
taccagtgatgaaaatgccaggaaa

SEQ ID NO: 5494271 - DNA, 25 bp, Homo sapien
ctgaatgcaaaggcctgtgtgcaca

SEQ ID NO: 5494272 - DNA, 25 bp, Homo sapien
agccaagggagattataccagtgat

SEQ ID NO: 5494273 - DNA, 25 bp, Homo sapien
actggctgcagttagatcaccgagt

SEQ ID NO: 5494274 - DNA, 25 bp, Homo sapien
catagatgacacaggtcagcagaac

SEQ ID NO: 5494275 - DNA, 25 bp, Homo sapien
gtgaggttttacattgagagcatat

SEQ ID NO: 5494276 - DNA, 25 bp, Homo sapien
tcttcaggagcatccatcccttgcc

SEQ ID NO: 5494277 - DNA, 25 bp, Homo sapien
ccacgatttgcccaagaaaccaggc

SEQ ID NO: 5494278 - DNA, 25 bp, Homo sapien
cagcccaaacttctagcaagagagt

SEQ ID NO: 5494279 - DNA, 25 bp, Homo sapien
caccgagttcttgaccacgatttgc

SEQ ID NO: 5494280 - DNA, 25 bp, Homo sapien
cagtgacggaagtccagaagtctag

SEQ ID NO: 5494281 - DNA, 25 bp, Homo sapien
ctagacttctggacttccgtcactg

SEQ ID NO: 5494282 - DNA, 25 bp, Homo sapien
cacacccggctgatccttttttctt

SEQ ID NO: 5494283 - DNA, 25 bp, Homo sapien
ctaatctggtgacctagaaaatttt

SEQ ID NO: 5494284 - DNA, 25 bp, Homo sapien
gtccaatgtggtcgctattagagcc

SEQ ID NO: 5494285 - DNA, 25 bp, Homo sapien
ggtcgctattagagccactgtggct

SEQ ID NO: 5494286 - DNA, 25 bp, Homo sapien
tttttgttacgagcactggcctgga

SEQ ID NO: 5494287 - DNA, 25 bp, Homo sapien
ttcagcaatctatatggacacagtc

SEQ ID NO: 5494288 - DNA, 25 bp, Homo sapien
aaattacttacttgtgtggtttgta

SEQ ID NO: 5494289 - DNA, 25 bp, Homo sapien
cccaatagcaactgtatatagacac

SEQ ID NO: 5494290 - DNA, 25 bp, Homo sapien
tatggacacagtctagatctgcact

SEQ ID NO: 5494291 - DNA, 25 bp, Homo sapien
aaattgagatgttttgtaagtgtaa

SEQ ID NO: 5494292 - DNA, 25 bp, Homo sapien
gatctgcactgtccaatgtggtcgc

SEQ ID NO: 5494293 - DNA, 25 bp, Homo sapien
cgggcctctcacagagcacgtcttc

SEQ ID NO: 5494294 - DNA, 25 bp, Homo sapien
gccgcggagcaactgctcctcccga

SEQ ID NO: 5494295 - DNA, 25 bp, Homo sapien
caacccgtcccagtccacagaggag

SEQ ID NO: 5494296 - DNA, 25 bp, Homo sapien
gacaccccagtgctagacaaggggc

SEQ ID NO: 5494297 - DNA, 25 bp, Homo sapien
gtgctgagcctggtgcatgtcaaag

SEQ ID NO: 5494298 - DNA, 25 bp, Homo sapien
aactggaagaagtgcctgcactcca

SEQ ID NO: 5494299 - DNA, 25 bp, Homo sapien
tgcactccatcaagctgaaggattc

SEQ ID NO: 5494300 - DNA, 25 bp, Homo sapien
aggtcaacccgtcccagtccacaga

SEQ ID NO: 5494301 - DNA, 25 bp, Homo sapien
agcaactgctcctcccgaggggaca

SEQ ID NO: 5494302 - DNA, 25 bp, Homo sapien
aagctgaaggattctgtgctgagcc

SEQ ID NO: 5494303 - DNA, 25 bp, Homo sapien
cgtcttcactgacccagccccgacc

SEQ ID NO: 5494304 - DNA, 25 bp, Homo sapien
cattgtacaatggcatcagagcagc

SEQ ID NO: 5494305 - DNA, 25 bp, Homo sapien
aataagcactgataaaagcacaaag

SEQ ID NO: 5494306 - DNA, 25 bp, Homo sapien
gagtagaagtgctaaatgctgtgca

SEQ ID NO: 5494307 - DNA, 25 bp, Homo sapien
cacagttggatcgagctatagctct

SEQ ID NO: 5494308 - DNA, 25 bp, Homo sapien
atgcccaagagtttagtgggaggaa

SEQ ID NO: 5494309 - DNA, 25 bp, Homo sapien
ggcgctatcagatcaccccagtccc

SEQ ID NO: 5494310 - DNA, 25 bp, Homo sapien
gacctagaagccacagagttggtga

SEQ ID NO: 5494311 - DNA, 25 bp, Homo sapien
tggtctacatcgggacctagaagcc

SEQ ID NO: 5494312 - DNA, 25 bp, Homo sapien
tcattaggccagagtcccacagttg

SEQ ID NO: 5494313 - DNA, 25 bp, Homo sapien
ggtcaggctatgctgggaattgttt

SEQ ID NO: 5494314 - DNA, 25 bp, Homo sapien
gctgtgcattgcatggaacaattcc

SEQ ID NO: 5494315 - DNA, 25 bp, Homo sapien
caggtgctcaataacaaatggatgg

SEQ ID NO: 5494316 - DNA, 25 bp, Homo sapien
cagggtctactacacaacaggtgct

SEQ ID NO: 5494317 - DNA, 25 bp, Homo sapien
agacagatgacccctgaggatgttc

SEQ ID NO: 5494318 - DNA, 25 bp, Homo sapien
atggatggatagatgttgcctgtcc

SEQ ID NO: 5494319 - DNA, 25 bp, Homo sapien
gccccctccagcctatgtggcagcc

SEQ ID NO: 5494320 - DNA, 25 bp, Homo sapien
tcccgacttaccagcctggcagggg

SEQ ID NO: 5494321 - DNA, 25 bp, Homo sapien
ccacaggcagggacctgtctgtttt

SEQ ID NO: 5494322 - DNA, 25 bp, Homo sapien
aaaagaaacacacagcttcaggcat

SEQ ID NO: 5494323 - DNA, 25 bp, Homo sapien
gtcaccaatgccaggacaagcaaca

SEQ ID NO: 5494324 - DNA, 25 bp, Homo sapien
ggcagccccagctggctgtcaccaa

SEQ ID NO: 5494325 - DNA, 25 bp, Homo sapien
gcttcaggcatccggccctgcagtg

SEQ ID NO: 5494326 - DNA, 25 bp, Homo sapien
tggcctggagtttttaccttccgca

SEQ ID NO: 5494327 - DNA, 25 bp, Homo sapien
agaggacttagtgacaagcactgtc

SEQ ID NO: 5494328 - DNA, 25 bp, Homo sapien
gtgcccggcccaccctgtgctttta

SEQ ID NO: 5494329 - DNA, 25 bp, Homo sapien
catgaaaatatgacccctgtgccca

SEQ ID NO: 5494330 - DNA, 25 bp, Homo sapien
gcctgctcctcacttgcctgccttt

SEQ ID NO: 5494331 - DNA, 25 bp, Homo sapien
ttcatgaaaatatgacccctgtgcc

SEQ ID NO: 5494332 - DNA, 25 bp, Homo sapien
ttagtgacaagcactgtctgctacc

SEQ ID NO: 5494333 - DNA, 25 bp, Homo sapien
ccctgtgcccatatttctagaatcc

SEQ ID NO: 5494334 - DNA, 25 bp, Homo sapien
agcactgtctgctaccatcacctct

SEQ ID NO: 5494335 - DNA, 25 bp, Homo sapien
ttcggcctgctcctcacttgcctgc

SEQ ID NO: 5494336 - DNA, 25 bp, Homo sapien
agagaggacttagtgacaagcactg

SEQ ID NO: 5494337 - DNA, 25 bp, Homo sapien
ttcctggttccagagccccacgaga

SEQ ID NO: 5494338 - DNA, 25 bp, Homo sapien
ttgctgctgaggtcgagtttccgaa

SEQ ID NO: 5494339 - DNA, 25 bp, Homo sapien
cagatgccacactaggtgggtgctg

SEQ ID NO: 5494340 - DNA, 25 bp, Homo sapien
gaactttgccaggacagttggagaa

SEQ ID NO: 5494341 - DNA, 25 bp, Homo sapien
tcctactgataaagaagcaggggga

SEQ ID NO: 5494342 - DNA, 25 bp, Homo sapien
tgcatgacacccctgggagcacaaa

SEQ ID NO: 5494343 - DNA, 25 bp, Homo sapien
gttcaagctctcactgtggggcttc

SEQ ID NO: 5494344 - DNA, 25 bp, Homo sapien
tgcagcctagcagcgttcctgcctc

SEQ ID NO: 5494345 - DNA, 25 bp, Homo sapien
ttccgaattgaggtgctgctttgct

SEQ ID NO: 5494346 - DNA, 25 bp, Homo sapien
gagactgtgagcagatgccacacta

SEQ ID NO: 5494347 - DNA, 25 bp, Homo sapien
gtgcagtctggtctccccgtgttca

SEQ ID NO: 5494348 - DNA, 25 bp, Homo sapien
agtggtacgatctgagcttgttgca

SEQ ID NO: 5494349 - DNA, 25 bp, Homo sapien
tggcattagccaagttagtaaagcc

SEQ ID NO: 5494350 - DNA, 25 bp, Homo sapien
caaagtgctggtacagtggcattag

SEQ ID NO: 5494351 - DNA, 25 bp, Homo sapien
ctcagttctgtcagactccaaaccc

SEQ ID NO: 5494352 - DNA, 25 bp, Homo sapien
atttacaggtgcgtgcctccacgcc

SEQ ID NO: 5494353 - DNA, 25 bp, Homo sapien
acccagaattagcaataactcagtt

SEQ ID NO: 5494354 - DNA, 25 bp, Homo sapien
aggtgcgtgcctccacgcctgccta

SEQ ID NO: 5494355 - DNA, 25 bp, Homo sapien
gccaagacttgcactcagttctgtc

SEQ ID NO: 5494356 - DNA, 25 bp, Homo sapien
agttagtaaagccaagacttgcact

SEQ ID NO: 5494357 - DNA, 25 bp, Homo sapien
tcctgtgctgtgctacccagaatta

SEQ ID NO: 5494358 - DNA, 25 bp, Homo sapien
ccaagcacgctctcctgtgctgtgc

SEQ ID NO: 5494359 - DNA, 25 bp, Homo sapien
tgtcactagacttgaaggcagagct

SEQ ID NO: 5494360 - DNA, 25 bp, Homo sapien
tacatgccagtaaatataggaatcc

SEQ ID NO: 5494361 - DNA, 25 bp, Homo sapien
ggtggtcaggactgtcactagactt

SEQ ID NO: 5494362 - DNA, 25 bp, Homo sapien
ggcaccacctcagtgggagtaccac

SEQ ID NO: 5494363 - DNA, 25 bp, Homo sapien
tcatcccgtgggtcttgagcttgta

SEQ ID NO: 5494364 - DNA, 25 bp, Homo sapien
tgagatgaatagagtttctgacccc

SEQ ID NO: 5494365 - DNA, 25 bp, Homo sapien
aggccccatccagaggactaagtca

SEQ ID NO: 5494366 - DNA, 25 bp, Homo sapien
tctgcaggtctcagagatggtcagg

SEQ ID NO: 5494367 - DNA, 25 bp, Homo sapien
gttgtggcttagcacctgtgaggcc

SEQ ID NO: 5494368 - DNA, 25 bp, Homo sapien
cagaacctaagtggtaggaaccatc

SEQ ID NO: 5494369 - DNA, 25 bp, Homo sapien
catagcctcacgtgtagcaggtggt

SEQ ID NO: 5494370 - DNA, 25 bp, Homo sapien
ctggaccagatgtttgaggcccagg

SEQ ID NO: 5494371 - DNA, 25 bp, Homo sapien
gttgtaggctgtgaaataggtataa

SEQ ID NO: 5494372 - DNA, 25 bp, Homo sapien
ggcctcaaactcctcgctccaagtg

SEQ ID NO: 5494373 - DNA, 25 bp, Homo sapien
gatgactgaattatggaggcaggtc

SEQ ID NO: 5494374 - DNA, 25 bp, Homo sapien
cttcaagaattcaaaggcagagcag

SEQ ID NO: 5494375 - DNA, 25 bp, Homo sapien
aaaaaggaacaaagactatggtcag

SEQ ID NO: 5494376 - DNA, 25 bp, Homo sapien
ctcctcgctccaagtgatcatcctg

SEQ ID NO: 5494377 - DNA, 25 bp, Homo sapien
aagactatggtcagaaaaatgttat

SEQ ID NO: 5494378 - DNA, 25 bp, Homo sapien
ggcagagcagttctcagctgatatg

SEQ ID NO: 5494379 - DNA, 25 bp, Homo sapien
aataggtataacaggactggcatgg

SEQ ID NO: 5494380 - DNA, 25 bp, Homo sapien
gtcttgctttgctggaccagatgtt

SEQ ID NO: 5494381 - DNA, 25 bp, Homo sapien
cgaaacacactttagcccaaattac

SEQ ID NO: 5494382 - DNA, 25 bp, Homo sapien
ggctcaagctatgcacccagattta

SEQ ID NO: 5494383 - DNA, 25 bp, Homo sapien
tctaagtccgaaacacactttagcc

SEQ ID NO: 5494384 - DNA, 25 bp, Homo sapien
gctgggattactccgaaagtgctgg

SEQ ID NO: 5494385 - DNA, 25 bp, Homo sapien
gacagttgactattgcacaaatttc

SEQ ID NO: 5494386 - DNA, 25 bp, Homo sapien
agtgctgggattactccgaaagtgc

SEQ ID NO: 5494387 - DNA, 25 bp, Homo sapien
aattactggctcaagctatgcaccc

SEQ ID NO: 5494388 - DNA, 25 bp, Homo sapien
cccaaattactggctcaagctatgc

SEQ ID NO: 5494389 - DNA, 25 bp, Homo sapien
gtgtgtctcacattatagttctatt

SEQ ID NO: 5494390 - DNA, 25 bp, Homo sapien
ttgcaacatattgggttaagtcctt

SEQ ID NO: 5494391 - DNA, 25 bp, Homo sapien
aacaacactgctttagacagttgac

SEQ ID NO: 5494392 - DNA, 25 bp, Homo sapien
gtggttccctgtgtgattgtgatgt

SEQ ID NO: 5494393 - DNA, 25 bp, Homo sapien
agcccatagctcagctgtgagctgc

SEQ ID NO: 5494394 - DNA, 25 bp, Homo sapien
cctggtgagtctccatcctgccggt

SEQ ID NO: 5494395 - DNA, 25 bp, Homo sapien
cactggactgactaggaacctgatg

SEQ ID NO: 5494396 - DNA, 25 bp, Homo sapien
tcctgccggttgatgctcaagtctg

SEQ ID NO: 5494397 - DNA, 25 bp, Homo sapien
catctgtcaaatgggagctttagac

SEQ ID NO: 5494398 - DNA, 25 bp, Homo sapien
tctacagcaaatcttgtgagaagga

SEQ ID NO: 5494399 - DNA, 25 bp, Homo sapien
ccacatcacagagaggaactagtca

SEQ ID NO: 5494400 - DNA, 25 bp, Homo sapien
atgattaaagtgacagtggttccct

SEQ ID NO: 5494401 - DNA, 25 bp, Homo sapien
tgggagctttagacaagatgatctc

SEQ ID NO: 5494402 - DNA, 25 bp, Homo sapien
taggtaaactggcagttgaggatac

SEQ ID NO: 5494403 - DNA, 25 bp, Homo sapien
tcctcgctttctggtatggtaagat

SEQ ID NO: 5494404 - DNA, 25 bp, Homo sapien
tcagtccagatctgaaatcagtcat

SEQ ID NO: 5494405 - DNA, 25 bp, Homo sapien
ctctgttacttaggctggaatacag

SEQ ID NO: 5494406 - DNA, 25 bp, Homo sapien
caaggagccctggttttgttggaaa

SEQ ID NO: 5494407 - DNA, 25 bp, Homo sapien
cctaattctgtcttcggtcagtgga

SEQ ID NO: 5494408 - DNA, 25 bp, Homo sapien
ggtatttagcaaccagtctgggcaa

SEQ ID NO: 5494409 - DNA, 25 bp, Homo sapien
tggtatggtaagatttccaggatca

SEQ ID NO: 5494410 - DNA, 25 bp, Homo sapien
cacttgtttggtcataggccttttc

SEQ ID NO: 5494411 - DNA, 25 bp, Homo sapien
ttgttggaaatggtatttagcaacc

SEQ ID NO: 5494412 - DNA, 25 bp, Homo sapien
gcctggccttctaatcaatgatacc

SEQ ID NO: 5494413 - DNA, 25 bp, Homo sapien
ggtcagtggaactcaactcaatttg

SEQ ID NO: 5494414 - DNA, 25 bp, Homo sapien
agatgtgccgccaagtcacgaatat

SEQ ID NO: 5494415 - DNA, 25 bp, Homo sapien
tgagtcacaccagcgaggcttttgt

SEQ ID NO: 5494416 - DNA, 25 bp, Homo sapien
agaagtgttaagactagcccagact

SEQ ID NO: 5494417 - DNA, 25 bp, Homo sapien
ggctggtcaaagtagagttctcacc

SEQ ID NO: 5494418 - DNA, 25 bp, Homo sapien
gaggacccctgacctacaggccaca

SEQ ID NO: 5494419 - DNA, 25 bp, Homo sapien
gtgctcaataagggtgcctgctgag

SEQ ID NO: 5494420 - DNA, 25 bp, Homo sapien
cccagataaagcagcccaagctatc

SEQ ID NO: 5494421 - DNA, 25 bp, Homo sapien
ctgttgttcaaagtgtggtaggagg

SEQ ID NO: 5494422 - DNA, 25 bp, Homo sapien
ttctcacctaggagatgtgggaact

SEQ ID NO: 5494423 - DNA, 25 bp, Homo sapien
atgaagcacctgagagcatcctgct

SEQ ID NO: 5494424 - DNA, 25 bp, Homo sapien
acattatcagggcctaggaacgact

SEQ ID NO: 5494425 - DNA, 25 bp, Homo sapien
gaccagcaagcattagactacacag

SEQ ID NO: 5494426 - DNA, 25 bp, Homo sapien
ccaaagagggaactgcccataattc

SEQ ID NO: 5494427 - DNA, 25 bp, Homo sapien
agtgccacaacccaaagagggaact

SEQ ID NO: 5494428 - DNA, 25 bp, Homo sapien
gctagagagaagatgtttgcaacca

SEQ ID NO: 5494429 - DNA, 25 bp, Homo sapien
atgcacttgtctaagagcaagcctc

SEQ ID NO: 5494430 - DNA, 25 bp, Homo sapien
aatatctagagctcagggatgtgaa

SEQ ID NO: 5494431 - DNA, 25 bp, Homo sapien
gactacacagacacataaaccacat

SEQ ID NO: 5494432 - DNA, 25 bp, Homo sapien
aaacaatgaaagatctaaaggagaa

SEQ ID NO: 5494433 - DNA, 25 bp, Homo sapien
gtttgcaaccagaccttgaaccctg

SEQ ID NO: 5494434 - DNA, 25 bp, Homo sapien
tgtagcaactagaatatggccacct

SEQ ID NO: 5494435 - DNA, 25 bp, Homo sapien
gagcagcctccaaatagaccagcaa

SEQ ID NO: 5494436 - DNA, 25 bp, Homo sapien
gaatgggatgtttgttgcctggcca

SEQ ID NO: 5494437 - DNA, 25 bp, Homo sapien
taaagacaatcaagaatgggatgtt

SEQ ID NO: 5494438 - DNA, 25 bp, Homo sapien
cctggccaagtttgtgggctgctat

SEQ ID NO: 5494439 - DNA, 25 bp, Homo sapien
gttgcctggccaagtttgtgggctg

SEQ ID NO: 5494440 - DNA, 25 bp, Homo sapien
gtgggctgctatttagatctattac

SEQ ID NO: 5494441 - DNA, 25 bp, Homo sapien
accataaccagataatgtttgtatt

SEQ ID NO: 5494442 - DNA, 25 bp, Homo sapien
ccaaccagaccccagtaattctgac

SEQ ID NO: 5494443 - DNA, 25 bp, Homo sapien
tgccagaaacacagtatttgacatg

SEQ ID NO: 5494444 - DNA, 25 bp, Homo sapien
tcagaagtagaattacattggttta

SEQ ID NO: 5494445 - DNA, 25 bp, Homo sapien
ttgaaatgtcttgccactcaggagg

SEQ ID NO: 5494446 - DNA, 25 bp, Homo sapien
attctgacttgaaatgtcttgccac

SEQ ID NO: 5494447 - DNA, 25 bp, Homo sapien
gtgtcctggtagggcatttttgaca

SEQ ID NO: 5494448 - DNA, 25 bp, Homo sapien
aggtgagtactaaactgggtgttta

SEQ ID NO: 5494449 - DNA, 25 bp, Homo sapien
tgtgttattgtcactatgttgtgtc

SEQ ID NO: 5494450 - DNA, 25 bp, Homo sapien
gacagtgaatgttgagaaagcatat

SEQ ID NO: 5494451 - DNA, 25 bp, Homo sapien
gtaagttcttagctggttccctctc

SEQ ID NO: 5494452 - DNA, 25 bp, Homo sapien
ggcggatttgttagaagcagtggaa

SEQ ID NO: 5494453 - DNA, 25 bp, Homo sapien
attatccttaaattgaatgtgttat

SEQ ID NO: 5494454 - DNA, 25 bp, Homo sapien
ttaaaatgcaagcttcagctgggca

SEQ ID NO: 5494455 - DNA, 25 bp, Homo sapien
tttgacagtgaatgttgagaaagca

SEQ ID NO: 5494456 - DNA, 25 bp, Homo sapien
cggatttgttagaagcagtggaaag

SEQ ID NO: 5494457 - DNA, 25 bp, Homo sapien
agtgaatgttgagaaagcatatgca

SEQ ID NO: 5494458 - DNA, 25 bp, Homo sapien
gcccaacaccacgccctctggcaca

SEQ ID NO: 5494459 - DNA, 25 bp, Homo sapien
tggagtaagtgctatgagactagga

SEQ ID NO: 5494460 - DNA, 25 bp, Homo sapien
gatagtggtacctcttcccctgccc

SEQ ID NO: 5494461 - DNA, 25 bp, Homo sapien
aagcaccagttcctggcctgcagac

SEQ ID NO: 5494462 - DNA, 25 bp, Homo sapien
agccctgcttaaagaaagcaccagt

SEQ ID NO: 5494463 - DNA, 25 bp, Homo sapien
ccccacatacgtgaccccagggcag

SEQ ID NO: 5494464 - DNA, 25 bp, Homo sapien
gcctgcagacccactaaatgaagat

SEQ ID NO: 5494465 - DNA, 25 bp, Homo sapien
aaatgaagatgatagtggtacctct

SEQ ID NO: 5494466 - DNA, 25 bp, Homo sapien
atgagtggtcattcattgcacatct

SEQ ID NO: 5494467 - DNA, 25 bp, Homo sapien
gtctaaccacaatccctgctgcctt

SEQ ID NO: 5494468 - DNA, 25 bp, Homo sapien
acccccgcatcctggctgtctaacc

SEQ ID NO: 5494469 - DNA, 25 bp, Homo sapien
ggggtcagttctggtctgcacacca

SEQ ID NO: 5494470 - DNA, 25 bp, Homo sapien
gcatccaaagttaaaagggttgtgc

SEQ ID NO: 5494471 - DNA, 25 bp, Homo sapien
ttgatgctgagcaacgaatgaagaa

SEQ ID NO: 5494472 - DNA, 25 bp, Homo sapien
gaaaagtaagtagaagaactcatta

SEQ ID NO: 5494473 - DNA, 25 bp, Homo sapien
atagctggtagcactggtaacatat

SEQ ID NO: 5494474 - DNA, 25 bp, Homo sapien
gcctgcttagagaatttagagagtt

SEQ ID NO: 5494475 - DNA, 25 bp, Homo sapien
attaagagattgtttgggggttatg

SEQ ID NO: 5494476 - DNA, 25 bp, Homo sapien
tgggtgctgaggttttctgcttgta

SEQ ID NO: 5494477 - DNA, 25 bp, Homo sapien
gttgtgcaactagctcgagaggaaa

SEQ ID NO: 5494478 - DNA, 25 bp, Homo sapien
atggatgtgtattgcgttaaggttt

SEQ ID NO: 5494479 - DNA, 25 bp, Homo sapien
gagagcggtttcagcaagctgcaga

SEQ ID NO: 5494480 - DNA, 25 bp, Homo sapien
cgaccaactcgaagtcgtgaagact

SEQ ID NO: 5494481 - DNA, 25 bp, Homo sapien
agtcttcacgacttcgagttggtcg

SEQ ID NO: 5494482 - DNA, 25 bp, Homo sapien
cgcccggcccccagtttatgtgcag

SEQ ID NO: 5494483 - DNA, 25 bp, Homo sapien
taggataacaggtgtgctccaccac

SEQ ID NO: 5494484 - DNA, 25 bp, Homo sapien
tagcacttcaatgacaaatgccacc

SEQ ID NO: 5494485 - DNA, 25 bp, Homo sapien
ctccccaggactgcttcatagaccc

SEQ ID NO: 5494486 - DNA, 25 bp, Homo sapien
aggagatcgaagataaacttggctt

SEQ ID NO: 5494487 - DNA, 25 bp, Homo sapien
aatgccacctgtcttgatgtcctcc

SEQ ID NO: 5494488 - DNA, 25 bp, Homo sapien
gtttatgtgcagataaggcttaggg

SEQ ID NO: 5494489 - DNA, 25 bp, Homo sapien
caggaagtcagaactacttgatgga

SEQ ID NO: 5494490 - DNA, 25 bp, Homo sapien
caaacactgcgaatctgtcctcccc

SEQ ID NO: 5494491 - DNA, 25 bp, Homo sapien
ttttgaactatcagaaactgcagga

SEQ ID NO: 5494492 - DNA, 25 bp, Homo sapien
actgcttcatagacccctcctgccc

SEQ ID NO: 5494493 - DNA, 25 bp, Homo sapien
ccctgaggagaagatccactctctg

SEQ ID NO: 5494494 - DNA, 25 bp, Homo sapien
ttgtctatggaagtgccacgttgtc

SEQ ID NO: 5494495 - DNA, 25 bp, Homo sapien
tcttcctgttggacagaaggtgcct

SEQ ID NO: 5494496 - DNA, 25 bp, Homo sapien
gtccttcttagcccagagagcagcc

SEQ ID NO: 5494497 - DNA, 25 bp, Homo sapien
agtctccagaccctgcagagggatc

SEQ ID NO: 5494498 - DNA, 25 bp, Homo sapien
atatggtagatgcccctgccccttt

SEQ ID NO: 5494499 - DNA, 25 bp, Homo sapien
ctgcagtggctacccttcctgtgcc

SEQ ID NO: 5494500 - DNA, 25 bp, Homo sapien
tgaaactccacatctgctggggtcc

SEQ ID NO: 5494501 - DNA, 25 bp, Homo sapien
gcagagggatcaggctattccatga

SEQ ID NO: 5494502 - DNA, 25 bp, Homo sapien
cctcaagtcaaggacagctcaagtc

SEQ ID NO: 5494503 - DNA, 25 bp, Homo sapien
gccactccatgaggtttgcccagcc

SEQ ID NO: 5494504 - DNA, 25 bp, Homo sapien
acgagctgcagttccgatggcttca

SEQ ID NO: 5494505 - DNA, 25 bp, Homo sapien
gcggaaaacgagctgcagttccgat

SEQ ID NO: 5494506 - DNA, 25 bp, Homo sapien
aaacctaagaataaaggagaagcca

SEQ ID NO: 5494507 - DNA, 25 bp, Homo sapien
ctgcagttccgatggcttcatgggg

SEQ ID NO: 5494508 - DNA, 25 bp, Homo sapien
aaaaactaatggaccccaatatata

SEQ ID NO: 5494509 - DNA, 25 bp, Homo sapien
tgtgcatggcctaaaaaccattttc

SEQ ID NO: 5494510 - DNA, 25 bp, Homo sapien
agtgaggtaaacagcatttgtcagc

SEQ ID NO: 5494511 - DNA, 25 bp, Homo sapien
atagcaactgtcaggccaaaaccta

SEQ ID NO: 5494512 - DNA, 25 bp, Homo sapien
aggtcagagtccacccagggtggaa

SEQ ID NO: 5494513 - DNA, 25 bp, Homo sapien
atttgtcagctgaaagaaatggcga

SEQ ID NO: 5494514 - DNA, 25 bp, Homo sapien
ctcggcttactgccacctttgcctc

SEQ ID NO: 5494515 - DNA, 25 bp, Homo sapien
attctggcctcaaagtgaaggacag

SEQ ID NO: 5494516 - DNA, 25 bp, Homo sapien
gtgaatgaatagcctgcaaaatgcc

SEQ ID NO: 5494517 - DNA, 25 bp, Homo sapien
gaagtcactgagattgttagttcct

SEQ ID NO: 5494518 - DNA, 25 bp, Homo sapien
acttgtgatgttgcaagaaagagta

SEQ ID NO: 5494519 - DNA, 25 bp, Homo sapien
caaagtactaggatatggcataagc

SEQ ID NO: 5494520 - DNA, 25 bp, Homo sapien
aaatagtctatctgcctcagctgcc

SEQ ID NO: 5494521 - DNA, 25 bp, Homo sapien
cacgaattctagtgaatgaatagcc

SEQ ID NO: 5494522 - DNA, 25 bp, Homo sapien
tgcaagaaagagtacccactgaaat

SEQ ID NO: 5494523 - DNA, 25 bp, Homo sapien
ggacagatggtgacatttgcaaggt

SEQ ID NO: 5494524 - DNA, 25 bp, Homo sapien
aggatatggcataagccacagcacc

SEQ ID NO: 5494525 - DNA, 25 bp, Homo sapien
ttaccataggctaagttatcacttc

SEQ ID NO: 5494526 - DNA, 25 bp, Homo sapien
tgacaatattggcagtagcacagga

SEQ ID NO: 5494527 - DNA, 25 bp, Homo sapien
tagaaatatagtatccaacactctc

SEQ ID NO: 5494528 - DNA, 25 bp, Homo sapien
cagcttatccatgcacagttgtaat

SEQ ID NO: 5494529 - DNA, 25 bp, Homo sapien
gcacaggaaaaagcaatcattaaaa

SEQ ID NO: 5494530 - DNA, 25 bp, Homo sapien
tccataacctgcaacacacattttc

SEQ ID NO: 5494531 - DNA, 25 bp, Homo sapien
agctagagggtgtctatgacctata

SEQ ID NO: 5494532 - DNA, 25 bp, Homo sapien
gctaatgctcagtttaagtgctaca

SEQ ID NO: 5494533 - DNA, 25 bp, Homo sapien
aagtgctacacaatgtactgacatt

SEQ ID NO: 5494534 - DNA, 25 bp, Homo sapien
ttgatctgggtcttaaagcagtatt

SEQ ID NO: 5494535 - DNA, 25 bp, Homo sapien
tatttccagtgggtcaaagtagcac

SEQ ID NO: 5494536 - DNA, 25 bp, Homo sapien
aaagtagcactgatgcaaactctta

SEQ ID NO: 5494537 - DNA, 25 bp, Homo sapien
aacatggagcatgtgtccaggtgtg

SEQ ID NO: 5494538 - DNA, 25 bp, Homo sapien
gtccatgaacatcctggaggagagc

SEQ ID NO: 5494539 - DNA, 25 bp, Homo sapien
tccaccagaggactttgatttacac

SEQ ID NO: 5494540 - DNA, 25 bp, Homo sapien
ctgctgtgaagtttgctgcctagat

SEQ ID NO: 5494541 - DNA, 25 bp, Homo sapien
agccgtgggaccctttgttccacca

SEQ ID NO: 5494542 - DNA, 25 bp, Homo sapien
ttataggttcaacagaagaggtgga

SEQ ID NO: 5494543 - DNA, 25 bp, Homo sapien
gatatgacacatgaacatggagcat

SEQ ID NO: 5494544 - DNA, 25 bp, Homo sapien
gtccaggtgtggaacttggcttata

SEQ ID NO: 5494545 - DNA, 25 bp, Homo sapien
cctgtttgtctgctgtgaagtttgc

SEQ ID NO: 5494546 - DNA, 25 bp, Homo sapien
aactccaggctggattcggtcttgc

SEQ ID NO: 5494547 - DNA, 25 bp, Homo sapien
ttgatttacactgaggttgcccctt

SEQ ID NO: 5494548 - DNA, 25 bp, Homo sapien
attagagactctaaaaagtcacaat

SEQ ID NO: 5494549 - DNA, 25 bp, Homo sapien
attgaggttcaaaaccagttgattc

SEQ ID NO: 5494550 - DNA, 25 bp, Homo sapien
aatttaaggttgctcatgaatatac

SEQ ID NO: 5494551 - DNA, 25 bp, Homo sapien
ttcatcactgatctaggtcgctttg

SEQ ID NO: 5494552 - DNA, 25 bp, Homo sapien
ccagaaaatagaacataataattaa

SEQ ID NO: 5494553 - DNA, 25 bp, Homo sapien
gagaaatcagtaaaaggagatccca

SEQ ID NO: 5494554 - DNA, 25 bp, Homo sapien
aagtcacaataggctaagtgtggtg

SEQ ID NO: 5494555 - DNA, 25 bp, Homo sapien
cacccaaatgaataccaactggatc

SEQ ID NO: 5494556 - DNA, 25 bp, Homo sapien
ctaggtcgctttgagtatctggaac

SEQ ID NO: 5494557 - DNA, 25 bp, Homo sapien
tgccctaaaagaaagtattagagac

SEQ ID NO: 5494558 - DNA, 25 bp, Homo sapien
tcatgaatatacagagaaatcagta

SEQ ID NO: 5494559 - DNA, 25 bp, Homo sapien
tggcactctcgagaagaaaggtatg

SEQ ID NO: 5494560 - DNA, 25 bp, Homo sapien
cttcccgggatcctaggtatgaaca

SEQ ID NO: 5494561 - DNA, 25 bp, Homo sapien
ctgagaccagagatactcaaaatgc

SEQ ID NO: 5494562 - DNA, 25 bp, Homo sapien
tgtttacccagggcacctgggcacc

SEQ ID NO: 5494563 - DNA, 25 bp, Homo sapien
tacagcgcctacaggaaactaatac

SEQ ID NO: 5494564 - DNA, 25 bp, Homo sapien
aggtatgaacaagaacacatgggag

SEQ ID NO: 5494565 - DNA, 25 bp, Homo sapien
actcaaaatgcagacctcagatccc

SEQ ID NO: 5494566 - DNA, 25 bp, Homo sapien
gtgcccggccatgtctgttgtttta

SEQ ID NO: 5494567 - DNA, 25 bp, Homo sapien
ctccattcccgtggagtcaggtggc

SEQ ID NO: 5494568 - DNA, 25 bp, Homo sapien
tggagtcaggtggctttgtttaccc

SEQ ID NO: 5494569 - DNA, 25 bp, Homo sapien
aagcatgccaagtctcaacacagcc

SEQ ID NO: 5494570 - DNA, 25 bp, Homo sapien
taacaacctacagaagacggaagtc

SEQ ID NO: 5494571 - DNA, 25 bp, Homo sapien
aggaatttggagtcaaccagtgctc

SEQ ID NO: 5494572 - DNA, 25 bp, Homo sapien
gctggttcaggaaaccaaaggcaag

SEQ ID NO: 5494573 - DNA, 25 bp, Homo sapien
tgggaaccccaaatcaagatgctcg

SEQ ID NO: 5494574 - DNA, 25 bp, Homo sapien
gaccctcctgggattctgagaggtc

SEQ ID NO: 5494575 - DNA, 25 bp, Homo sapien
tggcaagccccaagtgcaactaaca

SEQ ID NO: 5494576 - DNA, 25 bp, Homo sapien
atctaggtatcaaaatggtggcaag

SEQ ID NO: 5494577 - DNA, 25 bp, Homo sapien
gaagtggatgcccaagactagtttc

SEQ ID NO: 5494578 - DNA, 25 bp, Homo sapien
gacagtctgactgtgtagctggttc

SEQ ID NO: 5494579 - DNA, 25 bp, Homo sapien
tagtcaacactcagggagtggggat

SEQ ID NO: 5494580 - DNA, 25 bp, Homo sapien
ctccgcaccgttaatctgggaaccc

SEQ ID NO: 5494581 - DNA, 25 bp, Homo sapien
ctgagcgctcattaaaggaacgcac

SEQ ID NO: 5494582 - DNA, 25 bp, Homo sapien
aggaacgcactttaatgacagccac

SEQ ID NO: 5494583 - DNA, 25 bp, Homo sapien
gccaccctgccacaagcagcgctct

SEQ ID NO: 5494584 - DNA, 25 bp, Homo sapien
cagccccaccccatggcatagcagc

SEQ ID NO: 5494585 - DNA, 25 bp, Homo sapien
gcggatccttcagacctcagcgggg

SEQ ID NO: 5494586 - DNA, 25 bp, Homo sapien
tgatgggatcaaccccctgccctgc

SEQ ID NO: 5494587 - DNA, 25 bp, Homo sapien
gtgtggagagatcagaaccatctcc

SEQ ID NO: 5494588 - DNA, 25 bp, Homo sapien
tccttgggactagagccctgccaga

SEQ ID NO: 5494589 - DNA, 25 bp, Homo sapien
cattcacagaagatctcgctgggcg

SEQ ID NO: 5494590 - DNA, 25 bp, Homo sapien
aggtggttttgaggtggtttcctga

SEQ ID NO: 5494591 - DNA, 25 bp, Homo sapien
tgtagacagcggcccttgatcattc

SEQ ID NO: 5494592 - DNA, 25 bp, Homo sapien
tactatgccccaaaagagctgtgac

SEQ ID NO: 5494593 - DNA, 25 bp, Homo sapien
taggctctgaattgaagcgtgtcac

SEQ ID NO: 5494594 - DNA, 25 bp, Homo sapien
ctgttgagcagggcacttctactac

SEQ ID NO: 5494595 - DNA, 25 bp, Homo sapien
atggcccagtttactgtggcgggga

SEQ ID NO: 5494596 - DNA, 25 bp, Homo sapien
gaagaaacccaccatagagaggaag

SEQ ID NO: 5494597 - DNA, 25 bp, Homo sapien
agggcagcagatggcccagtttact

SEQ ID NO: 5494598 - DNA, 25 bp, Homo sapien
cagtgccagtatagcagctggcctg

SEQ ID NO: 5494599 - DNA, 25 bp, Homo sapien
cctgcaaaatcgaggcagcaaacca

SEQ ID NO: 5494600 - DNA, 25 bp, Homo sapien
ccctggcacatgcagccaacctggg

SEQ ID NO: 5494601 - DNA, 25 bp, Homo sapien
acaccagggaagcagtcttggtttg

SEQ ID NO: 5494602 - DNA, 25 bp, Homo sapien
acggcagctgtccgacatgtgtcac

SEQ ID NO: 5494603 - DNA, 25 bp, Homo sapien
tcatcttggctcattgcaacctctg

SEQ ID NO: 5494604 - DNA, 25 bp, Homo sapien
gctatgttggttgatcttgaactcc

SEQ ID NO: 5494605 - DNA, 25 bp, Homo sapien
gtgacccacccgccttagcctcgca

SEQ ID NO: 5494606 - DNA, 25 bp, Homo sapien
ctgcctcagcctccctagtagttgg

SEQ ID NO: 5494607 - DNA, 25 bp, Homo sapien
gggctggcatgcaatggcatcatct

SEQ ID NO: 5494608 - DNA, 25 bp, Homo sapien
ttctcataacactttaggtagctta

SEQ ID NO: 5494609 - DNA, 25 bp, Homo sapien
cttagcctcgcaaagtgttgggatt

SEQ ID NO: 5494610 - DNA, 25 bp, Homo sapien
cttatcattcttggtcaggctggtc

SEQ ID NO: 5494611 - DNA, 25 bp, Homo sapien
agacagggtcttgctatgttggttg

SEQ ID NO: 5494612 - DNA, 25 bp, Homo sapien
tagtagagacagggtcttatcattc

SEQ ID NO: 5494613 - DNA, 25 bp, Homo sapien
gtgagccaccatgtccggcctcatt

SEQ ID NO: 5494614 - DNA, 25 bp, Homo sapien
aggatgtactcaaagatttagctgc

SEQ ID NO: 5494615 - DNA, 25 bp, Homo sapien
gaggctcttagctaacacagtggtt

SEQ ID NO: 5494616 - DNA, 25 bp, Homo sapien
tcttctgaagggactgataaggtaa

SEQ ID NO: 5494617 - DNA, 25 bp, Homo sapien
gataggtcattaaaaacagacaggt

SEQ ID NO: 5494618 - DNA, 25 bp, Homo sapien
cacagtggttaagtgtataggtttc

SEQ ID NO: 5494619 - DNA, 25 bp, Homo sapien
aaggtaaatgattgtgtaaatgcac

SEQ ID NO: 5494620 - DNA, 25 bp, Homo sapien
aacagacaggtattaggatgtactc

SEQ ID NO: 5494621 - DNA, 25 bp, Homo sapien
ttagctgcaaggatgtaagtgataa

SEQ ID NO: 5494622 - DNA, 25 bp, Homo sapien
cctcctgagcttaagccatccttcc

SEQ ID NO: 5494623 - DNA, 25 bp, Homo sapien
taagtgtataggtttcaaaggattc

SEQ ID NO: 5494624 - DNA, 25 bp, Homo sapien
agtgattcactcgcctcggactccc

SEQ ID NO: 5494625 - DNA, 25 bp, Homo sapien
tgaaaaggagaaaatgaatgccaaa

SEQ ID NO: 5494626 - DNA, 25 bp, Homo sapien
gatactgccgtgcaaatccacacac

SEQ ID NO: 5494627 - DNA, 25 bp, Homo sapien
gagtttgctaaatttgaaaaggaga

SEQ ID NO: 5494628 - DNA, 25 bp, Homo sapien
ccaaactacggacgtaaagctggtc

SEQ ID NO: 5494629 - DNA, 25 bp, Homo sapien
ctaaattgccggtgaaaatcctatt

SEQ ID NO: 5494630 - DNA, 25 bp, Homo sapien
atccacacactgattgcaagtaggc

SEQ ID NO: 5494631 - DNA, 25 bp, Homo sapien
actgattgcaagtaggcaatttcct

SEQ ID NO: 5494632 - DNA, 25 bp, Homo sapien
atcctatttataagagtgccgtaac

SEQ ID NO: 5494633 - DNA, 25 bp, Homo sapien
agctggtctctaaattgccggtgaa

SEQ ID NO: 5494634 - DNA, 25 bp, Homo sapien
actacggacgtaaagctggtctcta

SEQ ID NO: 5494635 - DNA, 25 bp, Homo sapien
aaatgaatgccaaatgggacacgca

SEQ ID NO: 5494636 - DNA, 25 bp, Homo sapien
tgcttttggcgcagcacagaagttt

SEQ ID NO: 5494637 - DNA, 25 bp, Homo sapien
ctgccacgatgaagattggaacgag

SEQ ID NO: 5494638 - DNA, 25 bp, Homo sapien
cagcacagaagttttggccccagtt

SEQ ID NO: 5494639 - DNA, 25 bp, Homo sapien
aaatgttctgatggatgccagtgcc

SEQ ID NO: 5494640 - DNA, 25 bp, Homo sapien
caagcccgcttcctcctgatgatgc

SEQ ID NO: 5494641 - DNA, 25 bp, Homo sapien
ccagtgagaacccattgggaccgag

SEQ ID NO: 5494642 - DNA, 25 bp, Homo sapien
taattgcccgtcttagccctgcttt

SEQ ID NO: 5494643 - DNA, 25 bp, Homo sapien
cttccagatgtagagttattgattt

SEQ ID NO: 5494644 - DNA, 25 bp, Homo sapien
ctgtgaatgcagacttctatagtat

SEQ ID NO: 5494645 - DNA, 25 bp, Homo sapien
tgtatgcttggactgttcagaacat

SEQ ID NO: 5494646 - DNA, 25 bp, Homo sapien
ccctgcagaccatcaccagtgagaa

SEQ ID NO: 5494647 - DNA, 25 bp, Homo sapien
tagtggctagcatattggaccacac

SEQ ID NO: 5494648 - DNA, 25 bp, Homo sapien
cagtagctacaaatggctagtggct

SEQ ID NO: 5494649 - DNA, 25 bp, Homo sapien
cattatgatggctgtcttttgtcct

SEQ ID NO: 5494650 - DNA, 25 bp, Homo sapien
ggtggttcttctagagctgtgctat

SEQ ID NO: 5494651 - DNA, 25 bp, Homo sapien
agttcttcagtcaaaataaccccat

SEQ ID NO: 5494652 - DNA, 25 bp, Homo sapien
ttgtaaatggtggttcttctagagc

SEQ ID NO: 5494653 - DNA, 25 bp, Homo sapien
ggaaaggaaaatggacattatgatg

SEQ ID NO: 5494654 - DNA, 25 bp, Homo sapien
ccccatttcaaggttcagtagctac

SEQ ID NO: 5494655 - DNA, 25 bp, Homo sapien
agctacaaatggctagtggctagca

SEQ ID NO: 5494656 - DNA, 25 bp, Homo sapien
aaagacaaaaatttgcctggtgtgg

SEQ ID NO: 5494657 - DNA, 25 bp, Homo sapien
agatacagactgttttcatcattgc

SEQ ID NO: 5494658 - DNA, 25 bp, Homo sapien
gacagacaagttggtagaactaacc

SEQ ID NO: 5494659 - DNA, 25 bp, Homo sapien
ggttagttctaccaacttgtctgtc

SEQ ID NO: 5494660 - DNA, 25 bp, Homo sapien
gtacttaagtctaacaactaccgaa

SEQ ID NO: 5494661 - DNA, 25 bp, Homo sapien
ttcggtagttgttagacttaagtac

SEQ ID NO: 5494662 - DNA, 25 bp, Homo sapien
gcgccagaactaacgtagaggtgag

SEQ ID NO: 5494663 - DNA, 25 bp, Homo sapien
ctcacctctacgttagttctggcgc

SEQ ID NO: 5494664 - DNA, 25 bp, Homo sapien
accttagcaagtcacatagccaaac

SEQ ID NO: 5494665 - DNA, 25 bp, Homo sapien
ctcatggaaatggcacagatagaaa

SEQ ID NO: 5494666 - DNA, 25 bp, Homo sapien
tggagtgaacataaggaaaagtaaa

SEQ ID NO: 5494667 - DNA, 25 bp, Homo sapien
catagccaaacacaaagtcaaggag

SEQ ID NO: 5494668 - DNA, 25 bp, Homo sapien
aggcttaggcttgaaactgatatgt

SEQ ID NO: 5494669 - DNA, 25 bp, Homo sapien
acccaaggcctcttaaggcttaggc

SEQ ID NO: 5494670 - DNA, 25 bp, Homo sapien
gaaaagtaaagcactagggtcaata

SEQ ID NO: 5494671 - DNA, 25 bp, Homo sapien
tcaaggagtagggaaatatctctgt

SEQ ID NO: 5494672 - DNA, 25 bp, Homo sapien
aataatgcaattggtagtggtgatc

SEQ ID NO: 5494673 - DNA, 25 bp, Homo sapien
attaacagaccatcctgaagttcac

SEQ ID NO: 5494674 - DNA, 25 bp, Homo sapien
tggtagtggtgatcattgcacaacc

SEQ ID NO: 5494675 - DNA, 25 bp, Homo sapien
gaagagcatttggtggctaaaggag

SEQ ID NO: 5494676 - DNA, 25 bp, Homo sapien
gcaaaaagggcagctagctgtagaa

SEQ ID NO: 5494677 - DNA, 25 bp, Homo sapien
tcgagccgaaggacatatggtttat

SEQ ID NO: 5494678 - DNA, 25 bp, Homo sapien
tatgcagaataaagctcgagccgaa

SEQ ID NO: 5494679 - DNA, 25 bp, Homo sapien
gagcgccaacagattaaagccaaac

SEQ ID NO: 5494680 - DNA, 25 bp, Homo sapien
gtttatctggcaagactgaggcaaa

SEQ ID NO: 5494681 - DNA, 25 bp, Homo sapien
agagaaatatatggtcgaggtcttc

SEQ ID NO: 5494682 - DNA, 25 bp, Homo sapien
tggctaaaggagttaagagttctga

SEQ ID NO: 5494683 - DNA, 25 bp, Homo sapien
agagctaaacaagtagaagagttcc

SEQ ID NO: 5494684 - DNA, 25 bp, Homo sapien
tcagctttgaaagaagttggcgtgg

SEQ ID NO: 5494685 - DNA, 25 bp, Homo sapien
aagaacaactagaacgaaagagaaa

SEQ ID NO: 5494686 - DNA, 25 bp, Homo sapien
atttagagactgcagttagtttttc

SEQ ID NO: 5494687 - DNA, 25 bp, Homo sapien
tcagaccacctacccagatatttac

SEQ ID NO: 5494688 - DNA, 25 bp, Homo sapien
aaaggaaggtaatgattgagcctac

SEQ ID NO: 5494689 - DNA, 25 bp, Homo sapien
ctgtgatcccaggtcaactttagta

SEQ ID NO: 5494690 - DNA, 25 bp, Homo sapien
cggaagggaatattgtacaatgcca

SEQ ID NO: 5494691 - DNA, 25 bp, Homo sapien
tgtaccagtttctgggagccaaggt

SEQ ID NO: 5494692 - DNA, 25 bp, Homo sapien
gtgagaaatatcatgtaccagtttc

SEQ ID NO: 5494693 - DNA, 25 bp, Homo sapien
ttgagcctacatatttagagactgc

SEQ ID NO: 5494694 - DNA, 25 bp, Homo sapien
tagagaccccaattttagatggtta

SEQ ID NO: 5494695 - DNA, 25 bp, Homo sapien
gcctgtttgctgttacctgtccatg

SEQ ID NO: 5494696 - DNA, 25 bp, Homo sapien
catttggaaaaggaaggtaatgatt

SEQ ID NO: 5494697 - DNA, 25 bp, Homo sapien
tgtatatgtatgtcaagagtgagag

SEQ ID NO: 5494698 - DNA, 25 bp, Homo sapien
gagacataaagactgtctgatattt

SEQ ID NO: 5494699 - DNA, 25 bp, Homo sapien
tcctggtacaatgaatagatttatg

SEQ ID NO: 5494700 - DNA, 25 bp, Homo sapien
ggcccagggattcttatccagggga

SEQ ID NO: 5494701 - DNA, 25 bp, Homo sapien
taagatgacaaaacactcctggtac

SEQ ID NO: 5494702 - DNA, 25 bp, Homo sapien
aacactcctggtacaatgaatagat

SEQ ID NO: 5494703 - DNA, 25 bp, Homo sapien
tctgccttggctcccactctgctgg

SEQ ID NO: 5494704 - DNA, 25 bp, Homo sapien
taaataagatgacaaaacactcctg

SEQ ID NO: 5494705 - DNA, 25 bp, Homo sapien
atatgtatgtcaagagtgagagaga

SEQ ID NO: 5494706 - DNA, 25 bp, Homo sapien
ccagggattcttatccaggggaggg

SEQ ID NO: 5494707 - DNA, 25 bp, Homo sapien
tggctcccactctgctgggactata

SEQ ID NO: 5494708 - DNA, 25 bp, Homo sapien
gataccaggtcacagctcaaatttc

SEQ ID NO: 5494709 - DNA, 25 bp, Homo sapien
aaggcagccaagagtcgttctaata

SEQ ID NO: 5494710 - DNA, 25 bp, Homo sapien
aaagacaaccttcttgcttctggga

SEQ ID NO: 5494711 - DNA, 25 bp, Homo sapien
cacgagaatctgcctcagggacttg

SEQ ID NO: 5494712 - DNA, 25 bp, Homo sapien
gacagccaccaaacagttgcatcgt

SEQ ID NO: 5494713 - DNA, 25 bp, Homo sapien
acagttgcatcgtccaagaatcacg

SEQ ID NO: 5494714 - DNA, 25 bp, Homo sapien
agcattgttgcactgtcctgaaatt

SEQ ID NO: 5494715 - DNA, 25 bp, Homo sapien
tccacatccttgctatttactgcca

SEQ ID NO: 5494716 - DNA, 25 bp, Homo sapien
atacctggcccttctgaagtgacca

SEQ ID NO: 5494717 - DNA, 25 bp, Homo sapien
tgaagtattctcgagctctatacct

SEQ ID NO: 5494718 - DNA, 25 bp, Homo sapien
gctaatctcacagctcttgcagcta

SEQ ID NO: 5494719 - DNA, 25 bp, Homo sapien
caagtccctgaggcagattctcgtg

SEQ ID NO: 5494720 - DNA, 25 bp, Homo sapien
cgtgattcttggacgatgcaactgt

SEQ ID NO: 5494721 - DNA, 25 bp, Homo sapien
acgatgcaactgtttggtggctgtc

SEQ ID NO: 5494722 - DNA, 25 bp, Homo sapien
tcccagaagcaagaaggttgtcttt

SEQ ID NO: 5494723 - DNA, 25 bp, Homo sapien
tagctgcaagagctgtgagattagc

SEQ ID NO: 5494724 - DNA, 25 bp, Homo sapien
aggtatagagctcgagaatacttca

SEQ ID NO: 5494725 - DNA, 25 bp, Homo sapien
tggtcacttcagaagggccaggtat

SEQ ID NO: 5494726 - DNA, 25 bp, Homo sapien
tggcagtaaatagcaaggatgtgga

SEQ ID NO: 5494727 - DNA, 25 bp, Homo sapien
tattagaacgactcttggctgcctt

SEQ ID NO: 5494728 - DNA, 25 bp, Homo sapien
gaaatttgagctgtgacctggtatc

SEQ ID NO: 5494729 - DNA, 25 bp, Homo sapien
aatttcaggacagtgcaacaatgct

SEQ ID NO: 5494730 - DNA, 25 bp, Homo sapien
cctctcttgggaatgaatgaattgt

SEQ ID NO: 5494731 - DNA, 25 bp, Homo sapien
tgaggccctcactaaatgcgcaaac

SEQ ID NO: 5494732 - DNA, 25 bp, Homo sapien
tccaagagagctagttgttaaaaag

SEQ ID NO: 5494733 - DNA, 25 bp, Homo sapien
caggtatgtgtctctggcagctagc

SEQ ID NO: 5494734 - DNA, 25 bp, Homo sapien
accatttgggtcatggtgaccaatc

SEQ ID NO: 5494735 - DNA, 25 bp, Homo sapien
ttttatgaatagagagatactgccc

SEQ ID NO: 5494736 - DNA, 25 bp, Homo sapien
tctgatgcccactgtgggacgtggg

SEQ ID NO: 5494737 - DNA, 25 bp, Homo sapien
aaaagaccctggcaacttcctactc

SEQ ID NO: 5494738 - DNA, 25 bp, Homo sapien
tatccaggatccactcagccaagag

SEQ ID NO: 5494739 - DNA, 25 bp, Homo sapien
acgtggggcctaatggccaccattt

SEQ ID NO: 5494740 - DNA, 25 bp, Homo sapien
ggcagctagccaccgttcttaagat

SEQ ID NO: 5494741 - DNA, 25 bp, Homo sapien
cctgatctcatgatccgcccgcctc

SEQ ID NO: 5494742 - DNA, 25 bp, Homo sapien
tatcgagctttccaactcgcatctc

SEQ ID NO: 5494743 - DNA, 25 bp, Homo sapien
tcctgctgggattttgatagggatt

SEQ ID NO: 5494744 - DNA, 25 bp, Homo sapien
gtgaacaaacactgctgtcttccta

SEQ ID NO: 5494745 - DNA, 25 bp, Homo sapien
aacctatagatctactgggggagaa

SEQ ID NO: 5494746 - DNA, 25 bp, Homo sapien
aggatggtctggatctcctgatctc

SEQ ID NO: 5494747 - DNA, 25 bp, Homo sapien
tctgcctaccgggttcatgccattt

SEQ ID NO: 5494748 - DNA, 25 bp, Homo sapien
ttttgatagggattgtgttgaacct

SEQ ID NO: 5494749 - DNA, 25 bp, Homo sapien
ccgcgcccggcctattttgtcaatt

SEQ ID NO: 5494750 - DNA, 25 bp, Homo sapien
agggattgtgttgaacctatagatc

SEQ ID NO: 5494751 - DNA, 25 bp, Homo sapien
tgggggagaactgccatcttaacag

SEQ ID NO: 5494752 - DNA, 25 bp, Homo sapien
gagttgatcaagagccagaagttct

SEQ ID NO: 5494753 - DNA, 25 bp, Homo sapien
cacgggaacaaaaattcatattgag

SEQ ID NO: 5494754 - DNA, 25 bp, Homo sapien
tttccacggacgataagtacctgag

SEQ ID NO: 5494755 - DNA, 25 bp, Homo sapien
ccagggctcccaagccttggccatc

SEQ ID NO: 5494756 - DNA, 25 bp, Homo sapien
agagccagaagttctcacgggaaca

SEQ ID NO: 5494757 - DNA, 25 bp, Homo sapien
ccttcctgggtttccacggacgata

SEQ ID NO: 5494758 - DNA, 25 bp, Homo sapien
ggaggagtggttgccctcaatgaag

SEQ ID NO: 5494759 - DNA, 25 bp, Homo sapien
cgatcctcagcagcctgaagctccc

SEQ ID NO: 5494760 - DNA, 25 bp, Homo sapien
caggtgtgctttcatggttacccac

SEQ ID NO: 5494761 - DNA, 25 bp, Homo sapien
catcgcttcatagagccagcgggag

SEQ ID NO: 5494762 - DNA, 25 bp, Homo sapien
ggggaatgtggccaattatatgcac

SEQ ID NO: 5494763 - DNA, 25 bp, Homo sapien
cagctggaggcagttaacatcactg

SEQ ID NO: 5494764 - DNA, 25 bp, Homo sapien
cagcaagatgcaagccttcagaatc

SEQ ID NO: 5494765 - DNA, 25 bp, Homo sapien
aagaaaagatagatgtggtacccat

SEQ ID NO: 5494766 - DNA, 25 bp, Homo sapien
ggattcacaagacgatctgccgacc

SEQ ID NO: 5494767 - DNA, 25 bp, Homo sapien
caagagcaagcatgtaccgctgaaa

SEQ ID NO: 5494768 - DNA, 25 bp, Homo sapien
agctgacttgtatgaagaaggaggt

SEQ ID NO: 5494769 - DNA, 25 bp, Homo sapien
gccggatacttgcaaggaccaaatg

SEQ ID NO: 5494770 - DNA, 25 bp, Homo sapien
gggaagatgtgcctgtcctgtgtca

SEQ ID NO: 5494771 - DNA, 25 bp, Homo sapien
accgctgaaaacacaagataactgc

SEQ ID NO: 5494772 - DNA, 25 bp, Homo sapien
ggtgatgagaccagactccagctgg

SEQ ID NO: 5494773 - DNA, 25 bp, Homo sapien
tgttcttgggaatccatggagggaa

SEQ ID NO: 5494774 - DNA, 25 bp, Homo sapien
gttcgctctcgccgaggaacaagtc

SEQ ID NO: 5494775 - DNA, 25 bp, Homo sapien
aggttctaagacgtgggatcgtttc

SEQ ID NO: 5494776 - DNA, 25 bp, Homo sapien
agaattcacaagcgactcattgact

SEQ ID NO: 5494777 - DNA, 25 bp, Homo sapien
gctcctgactcaccgctgttcgctc

SEQ ID NO: 5494778 - DNA, 25 bp, Homo sapien
actttgagaagtgtagtcgaatccc

SEQ ID NO: 5494779 - DNA, 25 bp, Homo sapien
gggccagcagtacactttgagaagt

SEQ ID NO: 5494780 - DNA, 25 bp, Homo sapien
caggagttgagttgatcgaatctac

SEQ ID NO: 5494781 - DNA, 25 bp, Homo sapien
ccggaggtggcaattcaccgaattc

SEQ ID NO: 5494782 - DNA, 25 bp, Homo sapien
gaccagttcgaatgcctaccaagac

SEQ ID NO: 5494783 - DNA, 25 bp, Homo sapien
tgggatcgtttccagatgagaattc

SEQ ID NO: 5494784 - DNA, 25 bp, Homo sapien
tgaggatttttggtccgcacgctcc

SEQ ID NO: 5494785 - DNA, 25 bp, Homo sapien
acacgcccggcacatttcaggatac

SEQ ID NO: 5494786 - DNA, 25 bp, Homo sapien
tgggcttgagctgaccatactccct

SEQ ID NO: 5494787 - DNA, 25 bp, Homo sapien
ctccctatggaatgtaagaccccga

SEQ ID NO: 5494788 - DNA, 25 bp, Homo sapien
ctgagagggttgagatctctgttta

SEQ ID NO: 5494789 - DNA, 25 bp, Homo sapien
cccctcaagatggctgtgctgtcag

SEQ ID NO: 5494790 - DNA, 25 bp, Homo sapien
gagcctgatggatttacagtgatgt

SEQ ID NO: 5494791 - DNA, 25 bp, Homo sapien
cttacagcttggatgtccatggggg

SEQ ID NO: 5494792 - DNA, 25 bp, Homo sapien
aaccatgcactggaatgacacacgc

SEQ ID NO: 5494793 - DNA, 25 bp, Homo sapien
gtgatgttcagtggtctggggaata

SEQ ID NO: 5494794 - DNA, 25 bp, Homo sapien
gctgtcagctgcatggagcttcgtt

SEQ ID NO: 5494795 - DNA, 25 bp, Homo sapien
ctgatgcacgttccatccggcgctc

SEQ ID NO: 5494796 - DNA, 25 bp, Homo sapien
ctattaagcagaaggtcagtaacag

SEQ ID NO: 5494797 - DNA, 25 bp, Homo sapien
aatacatctgtagagggacgagata

SEQ ID NO: 5494798 - DNA, 25 bp, Homo sapien
tctgaagaggctatggatcagttgg

SEQ ID NO: 5494799 - DNA, 25 bp, Homo sapien
atcagttggcattacagtgggaaga

SEQ ID NO: 5494800 - DNA, 25 bp, Homo sapien
cgagatagaaggacctagatctaac

SEQ ID NO: 5494801 - DNA, 25 bp, Homo sapien
tcgacaactgtgtcaggcagaaagc

SEQ ID NO: 5494802 - DNA, 25 bp, Homo sapien
tgaagcaaggttgacaataggtctt

SEQ ID NO: 5494803 - DNA, 25 bp, Homo sapien
cagtgattgtaagacagtgagccac

SEQ ID NO: 5494804 - DNA, 25 bp, Homo sapien
agtagggccatcactagaggtgaaa

SEQ ID NO: 5494805 - DNA, 25 bp, Homo sapien
gtgaaaagaaacaagtatcaggacc

SEQ ID NO: 5494806 - DNA, 25 bp, Homo sapien
ggaccaaattagagaagatatgagt

SEQ ID NO: 5494807 - DNA, 25 bp, Homo sapien
agaagaagattttcccagacaactt

SEQ ID NO: 5494808 - DNA, 25 bp, Homo sapien
aagttgtctgggaaaatcttcttct

SEQ ID NO: 5494809 - DNA, 25 bp, Homo sapien
agaaggagaagatttctgacctcct

SEQ ID NO: 5494810 - DNA, 25 bp, Homo sapien
aggaggtcagaaatcttctccttct

SEQ ID NO: 5494811 - DNA, 25 bp, Homo sapien
cgagggtcaccggtgacttcgaaga

SEQ ID NO: 5494812 - DNA, 25 bp, Homo sapien
atcgaggtgctgcactacctgctgc

SEQ ID NO: 5494813 - DNA, 25 bp, Homo sapien
cctgctgcagtcttggccaggtgag

SEQ ID NO: 5494814 - DNA, 25 bp, Homo sapien
catgaccccacagaacttggccgtg

SEQ ID NO: 5494815 - DNA, 25 bp, Homo sapien
ctgcaccaccaatctgagccagccc

SEQ ID NO: 5494816 - DNA, 25 bp, Homo sapien
gggatttcctgtccgggccagacta

SEQ ID NO: 5494817 - DNA, 25 bp, Homo sapien
tctccagatgtcgcgccttacttgc

SEQ ID NO: 5494818 - DNA, 25 bp, Homo sapien
cttacttgcgacccaaacgacagcc

SEQ ID NO: 5494819 - DNA, 25 bp, Homo sapien
ccgcctgccccgacaatctccagat

SEQ ID NO: 5494820 - DNA, 25 bp, Homo sapien
ttgccagtgcagtggacttcaagca

SEQ ID NO: 5494821 - DNA, 25 bp, Homo sapien
ccacgctgacgcttctcctggacca

SEQ ID NO: 5494822 - DNA, 25 bp, Homo sapien
gctcacaaggcaccagtggattcat

SEQ ID NO: 5494823 - DNA, 25 bp, Homo sapien
gtatgcatccaatgtgggaaagcct

SEQ ID NO: 5494824 - DNA, 25 bp, Homo sapien
gcccagtgagtgcagtgaatatgga

SEQ ID NO: 5494825 - DNA, 25 bp, Homo sapien
acggattcatagtggaagaaaccct

SEQ ID NO: 5494826 - DNA, 25 bp, Homo sapien
atggaaacgccttcaattgccgctc

SEQ ID NO: 5494827 - DNA, 25 bp, Homo sapien
gagagaagccgtatgtatgcatcca

SEQ ID NO: 5494828 - DNA, 25 bp, Homo sapien
acgaacccatccagagtgggaacgt

SEQ ID NO: 5494829 - DNA, 25 bp, Homo sapien
gtgggaacgtttcttgtgagagcac

SEQ ID NO: 5494830 - DNA, 25 bp, Homo sapien
tacccgcatgtcagggctcacaagg

SEQ ID NO: 5494831 - DNA, 25 bp, Homo sapien
attgtaacagatgtggaaagacttt

SEQ ID NO: 5494832 - DNA, 25 bp, Homo sapien
accgcaggtcacccctcacaaggca

SEQ ID NO: 5494833 - DNA, 25 bp, Homo sapien
cagagaggaattcaaaaccaggctg

SEQ ID NO: 5494834 - DNA, 25 bp, Homo sapien
gctgagtacaacagtgacctccatc

SEQ ID NO: 5494835 - DNA, 25 bp, Homo sapien
ttcaggtttggccgctgccggccag

SEQ ID NO: 5494836 - DNA, 25 bp, Homo sapien
agagctacaagggcaatgaccctct

SEQ ID NO: 5494837 - DNA, 25 bp, Homo sapien
gaccctcttggtgaatgggaaagat

SEQ ID NO: 5494838 - DNA, 25 bp, Homo sapien
cccctctgtacattgcctgggcggg

SEQ ID NO: 5494839 - DNA, 25 bp, Homo sapien
ccaggctgaacccagagagttcctg

SEQ ID NO: 5494840 - DNA, 25 bp, Homo sapien
acaaccatgggattggaaccctgtc

SEQ ID NO: 5494841 - DNA, 25 bp, Homo sapien
atgggaaagatacatacagtgggta

SEQ ID NO: 5494842 - DNA, 25 bp, Homo sapien
gcttgaagcccacatgcagagctac

SEQ ID NO: 5494843 - DNA, 25 bp, Homo sapien
gccatggacaccccggaaaatgtcc

SEQ ID NO: 5494844 - DNA, 25 bp, Homo sapien
aactgtaccaagacagtccaaaaaa

SEQ ID NO: 5494845 - DNA, 25 bp, Homo sapien
gttcagcctgctagcacagtgttcc

SEQ ID NO: 5494846 - DNA, 25 bp, Homo sapien
attcccgcaaaattgttcagcctgc

SEQ ID NO: 5494847 - DNA, 25 bp, Homo sapien
ttaatatgatgccatgtcatgacaa

SEQ ID NO: 5494848 - DNA, 25 bp, Homo sapien
gtgggtgtcctgtacttagagtagt

SEQ ID NO: 5494849 - DNA, 25 bp, Homo sapien
tgttacctgctactagtggacacta

SEQ ID NO: 5494850 - DNA, 25 bp, Homo sapien
tagtggacactatgaaagcttcagt

SEQ ID NO: 5494851 - DNA, 25 bp, Homo sapien
ttagagtagtatccaagcaggactt

SEQ ID NO: 5494852 - DNA, 25 bp, Homo sapien
tgagttgtgctctgcttaatatgat

SEQ ID NO: 5494853 - DNA, 25 bp, Homo sapien
ttgctgcactgctgcaatatgcatc

SEQ ID NO: 5494854 - DNA, 25 bp, Homo sapien
attccattgagtgggtgtcctgtac

SEQ ID NO: 5494855 - DNA, 25 bp, Homo sapien
ccctgtgaattggcttcctcctggt

SEQ ID NO: 5494856 - DNA, 25 bp, Homo sapien
aatgacaaaagactgcatgctggcg

SEQ ID NO: 5494857 - DNA, 25 bp, Homo sapien
agccgcatggtggtgtcaatatttg

SEQ ID NO: 5494858 - DNA, 25 bp, Homo sapien
aaggtcagcaactgtaatctgtatc

SEQ ID NO: 5494859 - DNA, 25 bp, Homo sapien
tgacaaaagactgcatgctggcgaa

SEQ ID NO: 5494860 - DNA, 25 bp, Homo sapien
atcaagacaaaagcaacacagataa

SEQ ID NO: 5494861 - DNA, 25 bp, Homo sapien
tttgatccccctgtgaattggcttc

SEQ ID NO: 5494862 - DNA, 25 bp, Homo sapien
tggtggtgtcaatatttgatccccc

SEQ ID NO: 5494863 - DNA, 25 bp, Homo sapien
tcctggttatgtagtaaatcaagac

SEQ ID NO: 5494864 - DNA, 25 bp, Homo sapien
tctgtatcgccttggaaaaaagaag

SEQ ID NO: 5494865 - DNA, 25 bp, Homo sapien
tagtaaatcaagacaaaagcaacac

SEQ ID NO: 5494866 - DNA, 25 bp, Homo sapien
gtcaaacgctagtgatggatttaac

SEQ ID NO: 5494867 - DNA, 25 bp, Homo sapien
cggcttgaaatgcttggcgatctcc

SEQ ID NO: 5494868 - DNA, 25 bp, Homo sapien
ggatttaacctggagcggcttgaaa

SEQ ID NO: 5494869 - DNA, 25 bp, Homo sapien
gcatgagggccgcctttcatatatg

SEQ ID NO: 5494870 - DNA, 25 bp, Homo sapien
tctattgggtactcctcaaggactc

SEQ ID NO: 5494871 - DNA, 25 bp, Homo sapien
tgaggaaactatagagccagacaaa

SEQ ID NO: 5494872 - DNA, 25 bp, Homo sapien
aaaatagtaacactaggggcatgga

SEQ ID NO: 5494873 - DNA, 25 bp, Homo sapien
ccagaggccctcaaaatagtaacac

SEQ ID NO: 5494874 - DNA, 25 bp, Homo sapien
tcaaggactcttggccccaatcctg

SEQ ID NO: 5494875 - DNA, 25 bp, Homo sapien
gaggaagcatctgcacctggaatta

SEQ ID NO: 5494876 - DNA, 25 bp, Homo sapien
tgagcagagcccttctattgggtac

SEQ ID NO: 5494877 - DNA, 25 bp, Homo sapien
tcaggatatagattacttgtggcga

SEQ ID NO: 5494878 - DNA, 25 bp, Homo sapien
aataccaagaacattttagacaaaa

SEQ ID NO: 5494879 - DNA, 25 bp, Homo sapien
aacagtgacccttctctaaagtacc

SEQ ID NO: 5494880 - DNA, 25 bp, Homo sapien
ccaataccaaggaggtctaactttc

SEQ ID NO: 5494881 - DNA, 25 bp, Homo sapien
acatagaagaaaacagtatctagtc

SEQ ID NO: 5494882 - DNA, 25 bp, Homo sapien
tagtccattggtacatcagcacatt

SEQ ID NO: 5494883 - DNA, 25 bp, Homo sapien
ctaaagtaccaataccaaggaggtc

SEQ ID NO: 5494884 - DNA, 25 bp, Homo sapien
ggaagtgactcaacagtgacccttc

SEQ ID NO: 5494885 - DNA, 25 bp, Homo sapien
ttagtggagctttccatatgctgtc

SEQ ID NO: 5494886 - DNA, 25 bp, Homo sapien
tagattacttgtggcgagaaaaaaa

SEQ ID NO: 5494887 - DNA, 25 bp, Homo sapien
ataattagacccaaatgaaatagac

SEQ ID NO: 5494888 - DNA, 25 bp, Homo sapien
taagcaagtggtcagagttaatatt

SEQ ID NO: 5494889 - DNA, 25 bp, Homo sapien
ggatgaagcctggcaatcatcactt

SEQ ID NO: 5494890 - DNA, 25 bp, Homo sapien
gctccagttggaagagacttaaaac

SEQ ID NO: 5494891 - DNA, 25 bp, Homo sapien
tttggggatgataatgcatgattac

SEQ ID NO: 5494892 - DNA, 25 bp, Homo sapien
taaaatgcaagaagactcctgaagt

SEQ ID NO: 5494893 - DNA, 25 bp, Homo sapien
ttagtgatatttgaaggggatccga

SEQ ID NO: 5494894 - DNA, 25 bp, Homo sapien
aacccaagttagagcacagtctgca

SEQ ID NO: 5494895 - DNA, 25 bp, Homo sapien
aatcaaaaccatatgcaagaagact

SEQ ID NO: 5494896 - DNA, 25 bp, Homo sapien
caagatcatgaaagacaaggaaaga

SEQ ID NO: 5494897 - DNA, 25 bp, Homo sapien
tctaaggacattaatgggccagtta

SEQ ID NO: 5494898 - DNA, 25 bp, Homo sapien
acaatacatgagacaaacccaagtt

SEQ ID NO: 5494899 - DNA, 25 bp, Homo sapien
gtctccgtctgaactgactgtgtaa

SEQ ID NO: 5494900 - DNA, 25 bp, Homo sapien
ttacacagtcagttcagacggagac

SEQ ID NO: 5494901 - DNA, 25 bp, Homo sapien
ttgatctgcctgcagtttggctagc

SEQ ID NO: 5494902 - DNA, 25 bp, Homo sapien
tgtgccccggcctcttctgccattc

SEQ ID NO: 5494903 - DNA, 25 bp, Homo sapien
catcaaaggcatttaatctcagggc

SEQ ID NO: 5494904 - DNA, 25 bp, Homo sapien
ctgcctgcagtttggctagcatttc

SEQ ID NO: 5494905 - DNA, 25 bp, Homo sapien
ggcctcccgggttcacatcattctc

SEQ ID NO: 5494906 - DNA, 25 bp, Homo sapien
agggcttgtttctattgactgttgt

SEQ ID NO: 5494907 - DNA, 25 bp, Homo sapien
aaaggcatttaatctcagggcttgt

SEQ ID NO: 5494908 - DNA, 25 bp, Homo sapien
tataactgccttaaaatccttgtct

SEQ ID NO: 5494909 - DNA, 25 bp, Homo sapien
ctgaaaatttcaacatcaaaggcat

SEQ ID NO: 5494910 - DNA, 25 bp, Homo sapien
gctctggcctcccgggttcacatca

SEQ ID NO: 5494911 - DNA, 25 bp, Homo sapien
gagccactgtgccccggcctcttct

SEQ ID NO: 5494912 - DNA, 25 bp, Homo sapien
tgctgcatgtaaactcctaaaggga

SEQ ID NO: 5494913 - DNA, 25 bp, Homo sapien
tcctgtcatacagaggcactcaatt

SEQ ID NO: 5494914 - DNA, 25 bp, Homo sapien
atgaattctaaggcgtaactttacc

SEQ ID NO: 5494915 - DNA, 25 bp, Homo sapien
gcacaggtagttgagggattctgta

SEQ ID NO: 5494916 - DNA, 25 bp, Homo sapien
tacatgaatgtgcgtcagttgctgc

SEQ ID NO: 5494917 - DNA, 25 bp, Homo sapien
aagggggtctgttatctgccacttc

SEQ ID NO: 5494918 - DNA, 25 bp, Homo sapien
gccttgcgtggccttaggtcttgtt

SEQ ID NO: 5494919 - DNA, 25 bp, Homo sapien
gtgcctggaaggtgtaagttccatt

SEQ ID NO: 5494920 - DNA, 25 bp, Homo sapien
agctggttgagagtgttgaatcttt

SEQ ID NO: 5494921 - DNA, 25 bp, Homo sapien
gttgccacaaggagtctgtttttcc

SEQ ID NO: 5494922 - DNA, 25 bp, Homo sapien
taactttacctttgccttgcgtggc

SEQ ID NO: 5494923 - DNA, 25 bp, Homo sapien
tgataagcagctgtagaccttgagc

SEQ ID NO: 5494924 - DNA, 25 bp, Homo sapien
gagtcacaacccagaccactgcaac

SEQ ID NO: 5494925 - DNA, 25 bp, Homo sapien
ttgatgtaaagagccaaatgccatt

SEQ ID NO: 5494926 - DNA, 25 bp, Homo sapien
tacctacaggttgaaggttcagggc

SEQ ID NO: 5494927 - DNA, 25 bp, Homo sapien
ctgtcggggcaaatcctctaagttc

SEQ ID NO: 5494928 - DNA, 25 bp, Homo sapien
ggtgaggcataaaagccaacctgtc

SEQ ID NO: 5494929 - DNA, 25 bp, Homo sapien
tcatagaggctgcatacagactgtc

SEQ ID NO: 5494930 - DNA, 25 bp, Homo sapien
ggccagaggaccagccttgaaaaca

SEQ ID NO: 5494931 - DNA, 25 bp, Homo sapien
aagtgaacatgggatgtatggtaca

SEQ ID NO: 5494932 - DNA, 25 bp, Homo sapien
agcttgcaaaccgataacccccata

SEQ ID NO: 5494933 - DNA, 25 bp, Homo sapien
tgatacagacctggtgaggcataaa

SEQ ID NO: 5494934 - DNA, 25 bp, Homo sapien
cggcgtcggttgtccagggtaccac

SEQ ID NO: 5494935 - DNA, 25 bp, Homo sapien
gtggtaccctggacaaccgacgccg

SEQ ID NO: 5494936 - DNA, 25 bp, Homo sapien
gctgtggggcagcatttttccatac

SEQ ID NO: 5494937 - DNA, 25 bp, Homo sapien
agcagcagcaccttgcattgccaaa

SEQ ID NO: 5494938 - DNA, 25 bp, Homo sapien
ctctccctcaggcagaagagtccag

SEQ ID NO: 5494939 - DNA, 25 bp, Homo sapien
ctgccatgccctgttgcctgcctgc

SEQ ID NO: 5494940 - DNA, 25 bp, Homo sapien
atcttatctgggaacggtttgaggc

SEQ ID NO: 5494941 - DNA, 25 bp, Homo sapien
atgtggggtcgtttgcctctccctc

SEQ ID NO: 5494942 - DNA, 25 bp, Homo sapien
aattggcactttgggggctgcctaa

SEQ ID NO: 5494943 - DNA, 25 bp, Homo sapien
gcggggtatgatctgttgatgaatc

SEQ ID NO: 5494944 - DNA, 25 bp, Homo sapien
tgccatcactgctgccatgccctgt

SEQ ID NO: 5494945 - DNA, 25 bp, Homo sapien
ttgcattgccaaaatcagagctgtg

SEQ ID NO: 5494946 - DNA, 25 bp, Homo sapien
tgcctaagaattgataagcggggta

SEQ ID NO: 5494947 - DNA, 25 bp, Homo sapien
agggtctctctcccagcctgtgctg

SEQ ID NO: 5494948 - DNA, 25 bp, Homo sapien
tgggcacagtagctacatcatcgca

SEQ ID NO: 5494949 - DNA, 25 bp, Homo sapien
agcctgtgctgactcaatcatcctc

SEQ ID NO: 5494950 - DNA, 25 bp, Homo sapien
tgaagcttgaaggtagtggaagcta

SEQ ID NO: 5494951 - DNA, 25 bp, Homo sapien
gggatcctcggtcaagctcacctgc

SEQ ID NO: 5494952 - DNA, 25 bp, Homo sapien
tgattattactgtgagacctgggac

SEQ ID NO: 5494953 - DNA, 25 bp, Homo sapien
gggctgaccgctacctcaccatctc

SEQ ID NO: 5494954 - DNA, 25 bp, Homo sapien
acctgcactctgagcagtgggcaca

SEQ ID NO: 5494955 - DNA, 25 bp, Homo sapien
ttgaaggtagtggaagctacaacaa

SEQ ID NO: 5494956 - DNA, 25 bp, Homo sapien
catcatcgcatggcatcagcagcag

SEQ ID NO: 5494957 - DNA, 25 bp, Homo sapien
gggagcggagttcctgatcgcttct

SEQ ID NO: 5494958 - DNA, 25 bp, Homo sapien
cgcgacgtggcggtctcagtgagaa

SEQ ID NO: 5494959 - DNA, 25 bp, Homo sapien
ttctcactgagaccgccacgtcgcg

SEQ ID NO: 5494960 - DNA, 25 bp, Homo sapien
gcggtcttcggtcctcagccagctt

SEQ ID NO: 5494961 - DNA, 25 bp, Homo sapien
agtccttcccgcccagacggtgtct

SEQ ID NO: 5494962 - DNA, 25 bp, Homo sapien
ggggaagaataagcctccccagctc

SEQ ID NO: 5494963 - DNA, 25 bp, Homo sapien
agccagcttcatgacgtaaccaatc

SEQ ID NO: 5494964 - DNA, 25 bp, Homo sapien
accgccctgtccagtccttcccgcc

SEQ ID NO: 5494965 - DNA, 25 bp, Homo sapien
agtcttgcattccgatcaccgtggc

SEQ ID NO: 5494966 - DNA, 25 bp, Homo sapien
gagaactaccgaagtaggataagga

SEQ ID NO: 5494967 - DNA, 25 bp, Homo sapien
tgccaaacacagatggaggtagtga

SEQ ID NO: 5494968 - DNA, 25 bp, Homo sapien
agacggtgtctctcgaaagccatat

SEQ ID NO: 5494969 - DNA, 25 bp, Homo sapien
ggtagtgagtaccttcaagagaagc

SEQ ID NO: 5494970 - DNA, 25 bp, Homo sapien
taggataaggaagtattgccaaaca

SEQ ID NO: 5494971 - DNA, 25 bp, Homo sapien
tttgttggatgtatagtttgcagat

SEQ ID NO: 5494972 - DNA, 25 bp, Homo sapien
tcttatagatgctgaatattagatc

SEQ ID NO: 5494973 - DNA, 25 bp, Homo sapien
tgtgcaggagctctttagttttatt

SEQ ID NO: 5494974 - DNA, 25 bp, Homo sapien
accacactgtcaaccacaatgattg

SEQ ID NO: 5494975 - DNA, 25 bp, Homo sapien
tgattggtggtgttgagcctttttc

SEQ ID NO: 5494976 - DNA, 25 bp, Homo sapien
ggtatatacccagtagtagcattgc

SEQ ID NO: 5494977 - DNA, 25 bp, Homo sapien
agtagcattgctaggtagaattata

SEQ ID NO: 5494978 - DNA, 25 bp, Homo sapien
accaacagtgcataagcattgcctt

SEQ ID NO: 5494979 - DNA, 25 bp, Homo sapien
taatgattggtggtgttgagccttt

SEQ ID NO: 5494980 - DNA, 25 bp, Homo sapien
tctgtagttgtctgttcactctgtt

SEQ ID NO: 5494981 - DNA, 25 bp, Homo sapien
catcagccattctgactagtgtgag

SEQ ID NO: 5494982 - DNA, 25 bp, Homo sapien
ggcattcacagacgcctcacgcgcg

SEQ ID NO: 5494983 - DNA, 25 bp, Homo sapien
cgcgcgtgaggcgtctgtgaatgcc

SEQ ID NO: 5494984 - DNA, 25 bp, Homo sapien
attactgataccatgaagttctttc

SEQ ID NO: 5494985 - DNA, 25 bp, Homo sapien
aagttgcagaactggaaaattctga

SEQ ID NO: 5494986 - DNA, 25 bp, Homo sapien
aatagggtttatttagacactgtgt

SEQ ID NO: 5494987 - DNA, 25 bp, Homo sapien
gtgcctttaaaagaggtcctatgga

SEQ ID NO: 5494988 - DNA, 25 bp, Homo sapien
tagacactgtgtcaggtagcctcac

SEQ ID NO: 5494989 - DNA, 25 bp, Homo sapien
caagacacagatatgcacttatacc

SEQ ID NO: 5494990 - DNA, 25 bp, Homo sapien
atgtgcttggtcattcaagacacag

SEQ ID NO: 5494991 - DNA, 25 bp, Homo sapien
gtattgtgctgtatatgaatggtat

SEQ ID NO: 5494992 - DNA, 25 bp, Homo sapien
ttccatgtaccaagcaatgtgcctt

SEQ ID NO: 5494993 - DNA, 25 bp, Homo sapien
gagtatgaaatggaatcgccaaata

SEQ ID NO: 5494994 - DNA, 25 bp, Homo sapien
tatgaatggtattctgaaatgtgac

SEQ ID NO: 5494995 - DNA, 25 bp, Homo sapien
tgtggtcattgccagcccagctcca

SEQ ID NO: 5494996 - DNA, 25 bp, Homo sapien
agacccccaccgtcagccagttggt

SEQ ID NO: 5494997 - DNA, 25 bp, Homo sapien
attcccagcatgccagggatcagca

SEQ ID NO: 5494998 - DNA, 25 bp, Homo sapien
cccagctgttgttgaacgcccaggg

SEQ ID NO: 5494999 - DNA, 25 bp, Homo sapien
cccagatcctggggtccctcactac

SEQ ID NO: 5495000 - DNA, 25 bp, Homo sapien
cttccatgggtagtgaactcagcta

SEQ ID NO: 5495001 - DNA, 25 bp, Homo sapien
gggccaggtgattgcgaccctggct

SEQ ID NO: 5495002 - DNA, 25 bp, Homo sapien
cctcaccaatgctcagggacaggtt

SEQ ID NO: 5495003 - DNA, 25 bp, Homo sapien
cagggacaggttattggaacccttc

SEQ ID NO: 5495004 - DNA, 25 bp, Homo sapien
gagtcccctgctaagagtgaggtgc

SEQ ID NO: 5495005 - DNA, 25 bp, Homo sapien
ttagcccaggaatcatcagtgctgc

SEQ ID NO: 5495006 - DNA, 25 bp, Homo sapien
tcagaagatgccaatgcaagactcc

SEQ ID NO: 5495007 - DNA, 25 bp, Homo sapien
ccagtctagacacctagggagatgc

SEQ ID NO: 5495008 - DNA, 25 bp, Homo sapien
caagtaacattaaaagaaagcatat

SEQ ID NO: 5495009 - DNA, 25 bp, Homo sapien
ataaataaaacattaggggcacacc

SEQ ID NO: 5495010 - DNA, 25 bp, Homo sapien
gggcacaccgtgtagccccagctac

SEQ ID NO: 5495011 - DNA, 25 bp, Homo sapien
gagatgccctccctacaaaaaacaa

SEQ ID NO: 5495012 - DNA, 25 bp, Homo sapien
tgccagagaatctggaagcagagaa

SEQ ID NO: 5495013 - DNA, 25 bp, Homo sapien
tagatgttgaaagggtcatgatgag

SEQ ID NO: 5495014 - DNA, 25 bp, Homo sapien
aggaattgagaccagtctagacacc

SEQ ID NO: 5495015 - DNA, 25 bp, Homo sapien
tatctttaaagatggccgagtgtgg

SEQ ID NO: 5495016 - DNA, 25 bp, Homo sapien
tggagatagatttgaagtttgagaa

SEQ ID NO: 5495017 - DNA, 25 bp, Homo sapien
acggtcaaaaagatgtctcatctca

SEQ ID NO: 5495018 - DNA, 25 bp, Homo sapien
tgagatgagacatctttttgaccgt

SEQ ID NO: 5495019 - DNA, 25 bp, Homo sapien
gaggtaccacagatttagtcgggag

SEQ ID NO: 5495020 - DNA, 25 bp, Homo sapien
gctgaacacagagcacatatgtgac

SEQ ID NO: 5495021 - DNA, 25 bp, Homo sapien
tcactaccaccatgctggcctcagg

SEQ ID NO: 5495022 - DNA, 25 bp, Homo sapien
ccaaagcccaagtgctcccctatgc

SEQ ID NO: 5495023 - DNA, 25 bp, Homo sapien
tcctaaatccacagccctggggcac

SEQ ID NO: 5495024 - DNA, 25 bp, Homo sapien
tgtgactccatcatgaagatcagtg

SEQ ID NO: 5495025 - DNA, 25 bp, Homo sapien
ctctgttcagcttccctggggtccc

SEQ ID NO: 5495026 - DNA, 25 bp, Homo sapien
tcttgatgtcagtctggcagcagag

SEQ ID NO: 5495027 - DNA, 25 bp, Homo sapien
ctggttgtgtccaaagctaggtggg

SEQ ID NO: 5495028 - DNA, 25 bp, Homo sapien
tttttttcaggcagtataaaggcaa

SEQ ID NO: 5495029 - DNA, 25 bp, Homo sapien
tagtcgggaggtaccctctctgttc

SEQ ID NO: 5495030 - DNA, 25 bp, Homo sapien
ggggaagagaaatccatggtatgtt

SEQ ID NO: 5495031 - DNA, 25 bp, Homo sapien
ctccagtcaccatacacaggttacc

SEQ ID NO: 5495032 - DNA, 25 bp, Homo sapien
ttaccagtgtcgaacctgatgaagt

SEQ ID NO: 5495033 - DNA, 25 bp, Homo sapien
atggtgaggcagataccttttcctt

SEQ ID NO: 5495034 - DNA, 25 bp, Homo sapien
aagtggcaaagctgttgccattggc

SEQ ID NO: 5495035 - DNA, 25 bp, Homo sapien
aagagatccagggtgcctctctctg

SEQ ID NO: 5495036 - DNA, 25 bp, Homo sapien
ctctcttcagcaatggtgaggcaga

SEQ ID NO: 5495037 - DNA, 25 bp, Homo sapien
cttttccttggggaagagaaatcca

SEQ ID NO: 5495038 - DNA, 25 bp, Homo sapien
ttcccaggttggcacctccagtcac

SEQ ID NO: 5495039 - DNA, 25 bp, Homo sapien
aaaatgttggaaagtcaagtggcaa

SEQ ID NO: 5495040 - DNA, 25 bp, Homo sapien
catgtgaaccacgtcaagagatcca

SEQ ID NO: 5495041 - DNA, 25 bp, Homo sapien
gacccagatgtaggcattaactccc

SEQ ID NO: 5495042 - DNA, 25 bp, Homo sapien
taaaggttccttcgtgggcaacatc

SEQ ID NO: 5495043 - DNA, 25 bp, Homo sapien
ggcaacatcgctaacgacctggggc

SEQ ID NO: 5495044 - DNA, 25 bp, Homo sapien
tactcggtgtctgaggagctagata

SEQ ID NO: 5495045 - DNA, 25 bp, Homo sapien
tggctgtgaatagcgtctctgaggg

SEQ ID NO: 5495046 - DNA, 25 bp, Homo sapien
gctgtgtctgaggaattggaaataa

SEQ ID NO: 5495047 - DNA, 25 bp, Homo sapien
gggccaagtatccagagctggtgct

SEQ ID NO: 5495048 - DNA, 25 bp, Homo sapien
cctgcagaactacaagcttagcccc

SEQ ID NO: 5495049 - DNA, 25 bp, Homo sapien
gaatccgcaaagcggcagcttggtc

SEQ ID NO: 5495050 - DNA, 25 bp, Homo sapien
tccgcatcgtctccagaggtaggac

SEQ ID NO: 5495051 - DNA, 25 bp, Homo sapien
gaaacaggatccggtcagatccgct

SEQ ID NO: 5495052 - DNA, 25 bp, Homo sapien
gccgtcccgtcccgcgagggcggcg

SEQ ID NO: 5495053 - DNA, 25 bp, Homo sapien
cgccgccctcgcgggacgggacggc

SEQ ID NO: 5495054 - DNA, 25 bp, Homo sapien
tcccgtcccgcgagggcggcgccac

SEQ ID NO: 5495055 - DNA, 25 bp, Homo sapien
gtggcgccgccctcgcgggacggga

SEQ ID NO: 5495056 - DNA, 25 bp, Homo sapien
gtcccgtcccgcgagggcggcgcca

SEQ ID NO: 5495057 - DNA, 25 bp, Homo sapien
tggcgccgccctcgcgggacgggac

SEQ ID NO: 5495058 - DNA, 25 bp, Homo sapien
gtcagacaaccttcgaactgaaggt

SEQ ID NO: 5495059 - DNA, 25 bp, Homo sapien
accttcagttcgaaggttgtctgac

SEQ ID NO: 5495060 - DNA, 25 bp, Homo sapien
atgcatggcagaaactgaatcaggt

SEQ ID NO: 5495061 - DNA, 25 bp, Homo sapien
tccagggtcataaatcccttcaggc

SEQ ID NO: 5495062 - DNA, 25 bp, Homo sapien
agctgcaaatcgagtctggctaggt

SEQ ID NO: 5495063 - DNA, 25 bp, Homo sapien
atggtagagcaaaactggaactttt

SEQ ID NO: 5495064 - DNA, 25 bp, Homo sapien
atcatacagatcacatactcccaga

SEQ ID NO: 5495065 - DNA, 25 bp, Homo sapien
aactgaatcaggtccccataaacaa

SEQ ID NO: 5495066 - DNA, 25 bp, Homo sapien
tggaactttttcctgatgtgacagc

SEQ ID NO: 5495067 - DNA, 25 bp, Homo sapien
atgataaatgtgcatgcatggcaga

SEQ ID NO: 5495068 - DNA, 25 bp, Homo sapien
tattctttgagctgttgtattttgc

SEQ ID NO: 5495069 - DNA, 25 bp, Homo sapien
agtcaactgagctgcaaatcgagtc

SEQ ID NO: 5495070 - DNA, 25 bp, Homo sapien
cagatgttgtataaggcttattctt

SEQ ID NO: 5495071 - DNA, 25 bp, Homo sapien
ggcaagaaatacccagagctcgtgc

SEQ ID NO: 5495072 - DNA, 25 bp, Homo sapien
ttgtgcggtgacatagatccatgta

SEQ ID NO: 5495073 - DNA, 25 bp, Homo sapien
ggacagcggctcttttgtggccaac

SEQ ID NO: 5495074 - DNA, 25 bp, Homo sapien
tcaaggtgaactacagctccaagat

SEQ ID NO: 5495075 - DNA, 25 bp, Homo sapien
aacttagcaaaagatctggggctgg

SEQ ID NO: 5495076 - DNA, 25 bp, Homo sapien
gtattcagttctagaagagagggac

SEQ ID NO: 5495077 - DNA, 25 bp, Homo sapien
tcgcaatcacagcgacggcaagaaa

SEQ ID NO: 5495078 - DNA, 25 bp, Homo sapien
ctcaagatttggacgtaggtagcaa

SEQ ID NO: 5495079 - DNA, 25 bp, Homo sapien
ctgaaaatctccgaaggcagccatc

SEQ ID NO: 5495080 - DNA, 25 bp, Homo sapien
aaaaggcaagtgaccgccattattt

SEQ ID NO: 5495081 - DNA, 25 bp, Homo sapien
gtatttgcagctcgaacggaagagt

SEQ ID NO: 5495082 - DNA, 25 bp, Homo sapien
gatctggacacaccagaaggcgtga

SEQ ID NO: 5495083 - DNA, 25 bp, Homo sapien
ttgaactgagtctaaaaggtgtaaa

SEQ ID NO: 5495084 - DNA, 25 bp, Homo sapien
gagccagaagcctctacaaggaata

SEQ ID NO: 5495085 - DNA, 25 bp, Homo sapien
cggggccagttgtctttagggcttg

SEQ ID NO: 5495086 - DNA, 25 bp, Homo sapien
cttcctgtatcctgaggctggcggg

SEQ ID NO: 5495087 - DNA, 25 bp, Homo sapien
gagcagccaggcttatccctaccct

SEQ ID NO: 5495088 - DNA, 25 bp, Homo sapien
gcgcatctagggaaatgtcaagtgg

SEQ ID NO: 5495089 - DNA, 25 bp, Homo sapien
tgtaaagagcttgcacgtgtggaaa

SEQ ID NO: 5495090 - DNA, 25 bp, Homo sapien
tgtggaaatcaagtaggccagtagt

SEQ ID NO: 5495091 - DNA, 25 bp, Homo sapien
ctgggaggcgctttccacattacca

SEQ ID NO: 5495092 - DNA, 25 bp, Homo sapien
gtggagaacctgatgcttgaactga

SEQ ID NO: 5495093 - DNA, 25 bp, Homo sapien
cgacggaagtattctctagggaaaa

SEQ ID NO: 5495094 - DNA, 25 bp, Homo sapien
tagacttcctcttagaagaggactg

SEQ ID NO: 5495095 - DNA, 25 bp, Homo sapien
gggttctaatcttggcattggcctc

SEQ ID NO: 5495096 - DNA, 25 bp, Homo sapien
aagaggactgacacctgagtacatc

SEQ ID NO: 5495097 - DNA, 25 bp, Homo sapien
ctgacacctgagtacatcctgcgaa

SEQ ID NO: 5495098 - DNA, 25 bp, Homo sapien
acacctgagtacatcctgcgaagac

SEQ ID NO: 5495099 - DNA, 25 bp, Homo sapien
agtacatcctgcgaagacaaacgac

SEQ ID NO: 5495100 - DNA, 25 bp, Homo sapien
tgtgggttctaatcttggcattggc

SEQ ID NO: 5495101 - DNA, 25 bp, Homo sapien
aagacaaacgacggaagtattctct

SEQ ID NO: 5495102 - DNA, 25 bp, Homo sapien
ctgagtacatcctgcgaagacaaac

SEQ ID NO: 5495103 - DNA, 25 bp, Homo sapien
atcgatctcaaatgtgggttctaat

SEQ ID NO: 5495104 - DNA, 25 bp, Homo sapien
agtgaacccccagttagccagcaaa

SEQ ID NO: 5495105 - DNA, 25 bp, Homo sapien
aacgtgccaaatatgtctcagatgc

SEQ ID NO: 5495106 - DNA, 25 bp, Homo sapien
ccctagagaatacttccgtcgtttg

SEQ ID NO: 5495107 - DNA, 25 bp, Homo sapien
gccctttagtcaagctggagggcag

SEQ ID NO: 5495108 - DNA, 25 bp, Homo sapien
agaatacttcagtcaccaacgtgcc

SEQ ID NO: 5495109 - DNA, 25 bp, Homo sapien
gagccactggagtgaacccccagtt

SEQ ID NO: 5495110 - DNA, 25 bp, Homo sapien
gcaaacatcagtgggaattgtaccc

SEQ ID NO: 5495111 - DNA, 25 bp, Homo sapien
ctaagaggaagtctaaagatgaaga

SEQ ID NO: 5495112 - DNA, 25 bp, Homo sapien
tgtcttcgcaggatgtactcaggtg

SEQ ID NO: 5495113 - DNA, 25 bp, Homo sapien
ttgtacccacacaagcaattgcaac

SEQ ID NO: 5495114 - DNA, 25 bp, Homo sapien
acagagcatggtcaacagtttgccc

SEQ ID NO: 5495115 - DNA, 25 bp, Homo sapien
gtgcgagagggtattattatgattc

SEQ ID NO: 5495116 - DNA, 25 bp, Homo sapien
ggccaggtctccatctcagtcgaca

SEQ ID NO: 5495117 - DNA, 25 bp, Homo sapien
gaggcttcggacaccgccatgtatt

SEQ ID NO: 5495118 - DNA, 25 bp, Homo sapien
actctgacaccagatacagcccgtc

SEQ ID NO: 5495119 - DNA, 25 bp, Homo sapien
gagtggatggggatcatctatcctg

SEQ ID NO: 5495120 - DNA, 25 bp, Homo sapien
cttcctgcagtggaacaccctggag

SEQ ID NO: 5495121 - DNA, 25 bp, Homo sapien
ttccgactactggatcggctgggtg

SEQ ID NO: 5495122 - DNA, 25 bp, Homo sapien
tatgattcggggacttattataagt

SEQ ID NO: 5495123 - DNA, 25 bp, Homo sapien
gtcgacaagtccatcaacaccgcct

SEQ ID NO: 5495124 - DNA, 25 bp, Homo sapien
tacagcccgtccttccagggccagg

SEQ ID NO: 5495125 - DNA, 25 bp, Homo sapien
tcatctatcctggtgactctgacac

SEQ ID NO: 5495126 - DNA, 25 bp, Homo sapien
gctggtaccaggttgcataaaactt

SEQ ID NO: 5495127 - DNA, 25 bp, Homo sapien
tgtcccatggccacagacacaacag

SEQ ID NO: 5495128 - DNA, 25 bp, Homo sapien
gttccctgagctggagccagagaat

SEQ ID NO: 5495129 - DNA, 25 bp, Homo sapien
tggtcaaggaagctgtgttccctga

SEQ ID NO: 5495130 - DNA, 25 bp, Homo sapien
atcttccgcctgagccccagtgatg

SEQ ID NO: 5495131 - DNA, 25 bp, Homo sapien
ttttaccatagacgacaagaacagg

SEQ ID NO: 5495132 - DNA, 25 bp, Homo sapien
ccactgctgtcccgagaattacagt

SEQ ID NO: 5495133 - DNA, 25 bp, Homo sapien
tgaggctgtctccttggcatgtgat

SEQ ID NO: 5495134 - DNA, 25 bp, Homo sapien
ggcatgtgatcttgattgtctgtcc

SEQ ID NO: 5495135 - DNA, 25 bp, Homo sapien
gagccagagaatcggtctgggattc

SEQ ID NO: 5495136 - DNA, 25 bp, Homo sapien
ggcctgccctggcttctgctggtac

SEQ ID NO: 5495137 - DNA, 25 bp, Homo sapien
cggccctcaggaatcccagaccgat

SEQ ID NO: 5495138 - DNA, 25 bp, Homo sapien
aagccagggcaggcccctgttcttg

SEQ ID NO: 5495139 - DNA, 25 bp, Homo sapien
cagctcagggaacacagcttccttg

SEQ ID NO: 5495140 - DNA, 25 bp, Homo sapien
gggacagcagtggtaaccatgtatt

SEQ ID NO: 5495141 - DNA, 25 bp, Homo sapien
ggaagatgaggctgactattactgt

SEQ ID NO: 5495142 - DNA, 25 bp, Homo sapien
ctgtaattctcgggacagcagtggt

SEQ ID NO: 5495143 - DNA, 25 bp, Homo sapien
aaccatgtattattcggcggaggga

SEQ ID NO: 5495144 - DNA, 25 bp, Homo sapien
atgcaacctggtaccagcagaagcc

SEQ ID NO: 5495145 - DNA, 25 bp, Homo sapien
aggagacagcctcaaaaagttttat

SEQ ID NO: 5495146 - DNA, 25 bp, Homo sapien
ccttgaccatcactggggctcaggc

SEQ ID NO: 5495147 - DNA, 25 bp, Homo sapien
tcaagatcacatgccaaggagacag

SEQ ID NO: 5495148 - DNA, 25 bp, Homo sapien
aattcctacagtttctggctggctt

SEQ ID NO: 5495149 - DNA, 25 bp, Homo sapien
acccagaaagaatgttcagaaagcc

SEQ ID NO: 5495150 - DNA, 25 bp, Homo sapien
cctggctcctgcctggaagaattcc

SEQ ID NO: 5495151 - DNA, 25 bp, Homo sapien
ctgcctggaagaattccgagccagc

SEQ ID NO: 5495152 - DNA, 25 bp, Homo sapien
gcccatttctagaatgtcatggaag

SEQ ID NO: 5495153 - DNA, 25 bp, Homo sapien
tcatcatgttcacaagtgcaggttc

SEQ ID NO: 5495154 - DNA, 25 bp, Homo sapien
gaattccgagccagcccatttctag

SEQ ID NO: 5495155 - DNA, 25 bp, Homo sapien
tgttcacaagtgcaggttctgaggg

SEQ ID NO: 5495156 - DNA, 25 bp, Homo sapien
acggacaagaccttgatgcactgtt

SEQ ID NO: 5495157 - DNA, 25 bp, Homo sapien
tggcttcattaaacccagaaagaat

SEQ ID NO: 5495158 - DNA, 25 bp, Homo sapien
gaagaggaacgtgcaactactattc

SEQ ID NO: 5495159 - DNA, 25 bp, Homo sapien
cgacacagtcaaaccacagcaattc

SEQ ID NO: 5495160 - DNA, 25 bp, Homo sapien
aaggtcctgcgatcgccatagccgt

SEQ ID NO: 5495161 - DNA, 25 bp, Homo sapien
taagtcgctgtcaggtgtgcatgaa

SEQ ID NO: 5495162 - DNA, 25 bp, Homo sapien
ccatcaactgtgaaagctggggaat

SEQ ID NO: 5495163 - DNA, 25 bp, Homo sapien
ccatgtcctcacggctggatttctc

SEQ ID NO: 5495164 - DNA, 25 bp, Homo sapien
tccttcatgtccagaggggacagtg

SEQ ID NO: 5495165 - DNA, 25 bp, Homo sapien
ccatagccgttcacagccaaaccac

SEQ ID NO: 5495166 - DNA, 25 bp, Homo sapien
gacagtgccactctacagtgggttt

SEQ ID NO: 5495167 - DNA, 25 bp, Homo sapien
ttttgtacaaggaaatcaacgagcc

SEQ ID NO: 5495168 - DNA, 25 bp, Homo sapien
agaaaaaataataagtcgctgtcag

SEQ ID NO: 5495169 - DNA, 25 bp, Homo sapien
gatgcactgtttgtgaaggtcctgc

SEQ ID NO: 5495170 - DNA, 25 bp, Homo sapien
gagtcgcgggtgtccgggcacgccc

SEQ ID NO: 5495171 - DNA, 25 bp, Homo sapien
gggcgtgcccggacacccgcgactc

SEQ ID NO: 5495172 - DNA, 25 bp, Homo sapien
aagaaatgaaagcagactcctatgc

SEQ ID NO: 5495173 - DNA, 25 bp, Homo sapien
ttctgcataggtaatggtatgatta

SEQ ID NO: 5495174 - DNA, 25 bp, Homo sapien
gactcctatgcaaaggtggaactcc

SEQ ID NO: 5495175 - DNA, 25 bp, Homo sapien
caatcctataacacctctgagcatc

SEQ ID NO: 5495176 - DNA, 25 bp, Homo sapien
ctccgtctttctgcataggtaatgg

SEQ ID NO: 5495177 - DNA, 25 bp, Homo sapien
gttcctattacactaaatgcaattc

SEQ ID NO: 5495178 - DNA, 25 bp, Homo sapien
ggtaatggtatgattataagctgtg

SEQ ID NO: 5495179 - DNA, 25 bp, Homo sapien
ggcttcaaagacttgagaaagaaat

SEQ ID NO: 5495180 - DNA, 25 bp, Homo sapien
cattatactgcttcctccgtctttc

SEQ ID NO: 5495181 - DNA, 25 bp, Homo sapien
tatgcaaaggtggaactccgttttc

SEQ ID NO: 5495182 - DNA, 25 bp, Homo sapien
gcagactcctatgcaaaggtggaac

SEQ ID NO: 5495183 - DNA, 25 bp, Homo sapien
attataaagacactctattagaaac

SEQ ID NO: 5495184 - DNA, 25 bp, Homo sapien
gtttctaatagagtgtctttataat

SEQ ID NO: 5495185 - DNA, 25 bp, Homo sapien
agagatgcgtatgattggcaagctt

SEQ ID NO: 5495186 - DNA, 25 bp, Homo sapien
cagcgactcgtccagcagctgagca

SEQ ID NO: 5495187 - DNA, 25 bp, Homo sapien
gagatgcgtatgattggcaagctta

SEQ ID NO: 5495188 - DNA, 25 bp, Homo sapien
gactcgtccagcagctgagcagcag

SEQ ID NO: 5495189 - DNA, 25 bp, Homo sapien
accactgttctggaagtgctggaag

SEQ ID NO: 5495190 - DNA, 25 bp, Homo sapien
cagacagcgactcgtccagcagctg

SEQ ID NO: 5495191 - DNA, 25 bp, Homo sapien
cactgttctggaagtgctggaagaa

SEQ ID NO: 5495192 - DNA, 25 bp, Homo sapien
gcgtatgattggcaagcttaggcac

SEQ ID NO: 5495193 - DNA, 25 bp, Homo sapien
cagctgagcagcagctgctccgggg

SEQ ID NO: 5495194 - DNA, 25 bp, Homo sapien
atgcgtatgattggcaagcttaggc

SEQ ID NO: 5495195 - DNA, 25 bp, Homo sapien
cgtccagcagctgagcagcagctgc

SEQ ID NO: 5495196 - DNA, 25 bp, Homo sapien
ggactacacctcccccagactcctc

SEQ ID NO: 5495197 - DNA, 25 bp, Homo sapien
tcgcacaataatatacaccgttgtc

SEQ ID NO: 5495198 - DNA, 25 bp, Homo sapien
ccccagactcctcgaactgcacctg

SEQ ID NO: 5495199 - DNA, 25 bp, Homo sapien
gtctggcggatccagtgcatgtcag

SEQ ID NO: 5495200 - DNA, 25 bp, Homo sapien
atttgcaaatacaatgtgttctcga

SEQ ID NO: 5495201 - DNA, 25 bp, Homo sapien
catgtgatattactgccatccactc

SEQ ID NO: 5495202 - DNA, 25 bp, Homo sapien
atccagtgcatgtcagacctgctga

SEQ ID NO: 5495203 - DNA, 25 bp, Homo sapien
tgtcgtcgactttcagccaattcat

SEQ ID NO: 5495204 - DNA, 25 bp, Homo sapien
ccaggctggactacacctcccccag

SEQ ID NO: 5495205 - DNA, 25 bp, Homo sapien
atgtgttctcgaaattgtctctgga

SEQ ID NO: 5495206 - DNA, 25 bp, Homo sapien
aatatacaccgttgtcgtcgacttt

SEQ ID NO: 5495207 - DNA, 25 bp, Homo sapien
gacacgtgtccggcgggagaggacg

SEQ ID NO: 5495208 - DNA, 25 bp, Homo sapien
cgtcctctcccgccggacacgtgtc

SEQ ID NO: 5495209 - DNA, 25 bp, Homo sapien
gttgtccataaattccacgcgcacc

SEQ ID NO: 5495210 - DNA, 25 bp, Homo sapien
ccttttacactgcggatgctggagc

SEQ ID NO: 5495211 - DNA, 25 bp, Homo sapien
gcgcacctgcgtgcagtgtccctga

SEQ ID NO: 5495212 - DNA, 25 bp, Homo sapien
gagagccggtcctgcccaggacctc

SEQ ID NO: 5495213 - DNA, 25 bp, Homo sapien
tcacacacggggccttttacactgc

SEQ ID NO: 5495214 - DNA, 25 bp, Homo sapien
ggtcctgcccaggacctcggtgacc

SEQ ID NO: 5495215 - DNA, 25 bp, Homo sapien
gaccctggccagcttgataggctgc

SEQ ID NO: 5495216 - DNA, 25 bp, Homo sapien
tggagcggctcgtgttgtccataaa

SEQ ID NO: 5495217 - DNA, 25 bp, Homo sapien
gcacgtccccctcacacacggggcc

SEQ ID NO: 5495218 - DNA, 25 bp, Homo sapien
agggtgagcacgtccccctcacaca

SEQ ID NO: 5495219 - DNA, 25 bp, Homo sapien
cagcttgataggctgcacgtggctg

SEQ ID NO: 5495220 - DNA, 25 bp, Homo sapien
ctgcagcagcaacgtatgcagctgg

SEQ ID NO: 5495221 - DNA, 25 bp, Homo sapien
ggtcctggagtacagacaaaccaag

SEQ ID NO: 5495222 - DNA, 25 bp, Homo sapien
caccttctaggacaggtggcaatcc

SEQ ID NO: 5495223 - DNA, 25 bp, Homo sapien
agcagcaccttctaggacaggtggc

SEQ ID NO: 5495224 - DNA, 25 bp, Homo sapien
gggtcctggagtacagacaaaccaa

SEQ ID NO: 5495225 - DNA, 25 bp, Homo sapien
tcttcgaagcctcggacctgattca

SEQ ID NO: 5495226 - DNA, 25 bp, Homo sapien
tgcagcagcaacgtatgcagctggc

SEQ ID NO: 5495227 - DNA, 25 bp, Homo sapien
agctgcagcagcaacgtatgcagct

SEQ ID NO: 5495228 - DNA, 25 bp, Homo sapien
gcagcagcaccttctaggacaggtg

SEQ ID NO: 5495229 - DNA, 25 bp, Homo sapien
agcaccttctaggacaggtggcaat

SEQ ID NO: 5495230 - DNA, 25 bp, Homo sapien
tcgaagcctcggacctgattcaagg

SEQ ID NO: 5495231 - DNA, 25 bp, Homo sapien
tcccagttctgggtaacggtgcaga

SEQ ID NO: 5495232 - DNA, 25 bp, Homo sapien
tgttctcttttgaggccagcgccgc

SEQ ID NO: 5495233 - DNA, 25 bp, Homo sapien
gcctcctacgtgctgagggtggagg

SEQ ID NO: 5495234 - DNA, 25 bp, Homo sapien
tgtggcctgcatgcctcctacgtgc

SEQ ID NO: 5495235 - DNA, 25 bp, Homo sapien
ttccaggcagatgagactgccatcc

SEQ ID NO: 5495236 - DNA, 25 bp, Homo sapien
cctttccagacggcacagggaaatg

SEQ ID NO: 5495237 - DNA, 25 bp, Homo sapien
gctcctgtcctggccctacactctg

SEQ ID NO: 5495238 - DNA, 25 bp, Homo sapien
gactctcctgaccatgggagcccag

SEQ ID NO: 5495239 - DNA, 25 bp, Homo sapien
tctgttgcattgctatggccgggac

SEQ ID NO: 5495240 - DNA, 25 bp, Homo sapien
gccgggacaaggtcatgttctcttt

SEQ ID NO: 5495241 - DNA, 25 bp, Homo sapien
gggaaatgacatcttccaggcagat

SEQ ID NO: 5495242 - DNA, 25 bp, Homo sapien
ggtagactgctggatcgataacacc

SEQ ID NO: 5495243 - DNA, 25 bp, Homo sapien
cgtcatcctcgtgcccggctgcctg

SEQ ID NO: 5495244 - DNA, 25 bp, Homo sapien
cctggtcaacaatggctacgtgcgg

SEQ ID NO: 5495245 - DNA, 25 bp, Homo sapien
ggtgtccagatccgcgtccctggct

SEQ ID NO: 5495246 - DNA, 25 bp, Homo sapien
acacactggtgcagaacctggtcaa

SEQ ID NO: 5495247 - DNA, 25 bp, Homo sapien
gctggacaaaccagatgtggtgaac

SEQ ID NO: 5495248 - DNA, 25 bp, Homo sapien
ggggaatcagctagaagccaagctg

SEQ ID NO: 5495249 - DNA, 25 bp, Homo sapien
ggctcgtgtccaacgcccctggtgt

SEQ ID NO: 5495250 - DNA, 25 bp, Homo sapien
gaactggatgtgctaccgcaagaca

SEQ ID NO: 5495251 - DNA, 25 bp, Homo sapien
ggctgagctcagtaaccacacacgg

SEQ ID NO: 5495252 - DNA, 25 bp, Homo sapien
tactctgtggagtacctggacagca

SEQ ID NO: 5495253 - DNA, 25 bp, Homo sapien
cacaaaacggatccacctgtcgtct

SEQ ID NO: 5495254 - DNA, 25 bp, Homo sapien
agacgacaggtggatccgttttgtg

SEQ ID NO: 5495255 - DNA, 25 bp, Homo sapien
cttgtccgctttcccgacacgagga

SEQ ID NO: 5495256 - DNA, 25 bp, Homo sapien
tcctcgtgtcgggaaagcggacaag

SEQ ID NO: 5495257 - DNA, 25 bp, Homo sapien
aagcccaagagtactgaaggaatga

SEQ ID NO: 5495258 - DNA, 25 bp, Homo sapien
ttgcctcggaaacactgacgaaacc

SEQ ID NO: 5495259 - DNA, 25 bp, Homo sapien
aagcagaagttcagagtaaacgcaa

SEQ ID NO: 5495260 - DNA, 25 bp, Homo sapien
ggagccaccaaaacccctgctgcca

SEQ ID NO: 5495261 - DNA, 25 bp, Homo sapien
agtgaagatccctaaaaagtccgct

SEQ ID NO: 5495262 - DNA, 25 bp, Homo sapien
agtcgtaagagcgtatgcatcaacc

SEQ ID NO: 5495263 - DNA, 25 bp, Homo sapien
gcctcagaaagccacgaataggaag

SEQ ID NO: 5495264 - DNA, 25 bp, Homo sapien
cctccagatagtaagaacaaggggc

SEQ ID NO: 5495265 - DNA, 25 bp, Homo sapien
gtggatgcagatgggtttcctgtta

SEQ ID NO: 5495266 - DNA, 25 bp, Homo sapien
cctcaacgaaaaccccagagagcag

SEQ ID NO: 5495267 - DNA, 25 bp, Homo sapien
tttgaaagagaataaagtgaagatc

SEQ ID NO: 5495268 - DNA, 25 bp, Homo sapien
gatgtacactggtaccagcagcttc

SEQ ID NO: 5495269 - DNA, 25 bp, Homo sapien
gtctggcacctcagcctccctggcc

SEQ ID NO: 5495270 - DNA, 25 bp, Homo sapien
atgctaatagcaaccggccctcagg

SEQ ID NO: 5495271 - DNA, 25 bp, Homo sapien
cggggcaggttatgaagtaccttgg

SEQ ID NO: 5495272 - DNA, 25 bp, Homo sapien
tctctggctccaagtctggcacctc

SEQ ID NO: 5495273 - DNA, 25 bp, Homo sapien
gcagcttccaggaaaagcccccaaa

SEQ ID NO: 5495274 - DNA, 25 bp, Homo sapien
tgaagtaccttggtatgatgtacac

SEQ ID NO: 5495275 - DNA, 25 bp, Homo sapien
agtcttatgacagcagcgtgagtgg

SEQ ID NO: 5495276 - DNA, 25 bp, Homo sapien
gaggctgattaatactgccagtctt

SEQ ID NO: 5495277 - DNA, 25 bp, Homo sapien
ggtccctgaccgattctctggctcc

SEQ ID NO: 5495278 - DNA, 25 bp, Homo sapien
ccatcactgggcttcaggctgagga

SEQ ID NO: 5495279 - DNA, 25 bp, Homo sapien
tcagtcacctcgagaagctgcagga

SEQ ID NO: 5495280 - DNA, 25 bp, Homo sapien
gcggcccgcgttaaacgtcgtcatc

SEQ ID NO: 5495281 - DNA, 25 bp, Homo sapien
tgtctgccacgtacagggcccttga

SEQ ID NO: 5495282 - DNA, 25 bp, Homo sapien
ccacggctctctcatggggactgtt

SEQ ID NO: 5495283 - DNA, 25 bp, Homo sapien
ggcctgttcccggctgccgtgctcc

SEQ ID NO: 5495284 - DNA, 25 bp, Homo sapien
ctgaccgacgtcatccgggacgtcc

SEQ ID NO: 5495285 - DNA, 25 bp, Homo sapien
gacgccagggacccttggtttgtca

SEQ ID NO: 5495286 - DNA, 25 bp, Homo sapien
tccgctgaccgcctgtctctggttc

SEQ ID NO: 5495287 - DNA, 25 bp, Homo sapien
gccgcccatcggtctcagtcacctc

SEQ ID NO: 5495288 - DNA, 25 bp, Homo sapien
gtggccacccatgtaatccgctgac

SEQ ID NO: 5495289 - DNA, 25 bp, Homo sapien
ggcctctctcccggccagccacgcc

SEQ ID NO: 5495290 - DNA, 25 bp, Homo sapien
gactaagggaatcctcttgcttctg

SEQ ID NO: 5495291 - DNA, 25 bp, Homo sapien
cagaagcaagaggattcccttagtc

SEQ ID NO: 5495292 - DNA, 25 bp, Homo sapien
gcttatgcccctacccctggctatc

SEQ ID NO: 5495293 - DNA, 25 bp, Homo sapien
tgtgagcatatcagcatggagtacc

SEQ ID NO: 5495294 - DNA, 25 bp, Homo sapien
tttcactgtaccaggcatgaggatg

SEQ ID NO: 5495295 - DNA, 25 bp, Homo sapien
catcacagacaaatggagaaatggg

SEQ ID NO: 5495296 - DNA, 25 bp, Homo sapien
atggagaaatgggacaacttgtcca

SEQ ID NO: 5495297 - DNA, 25 bp, Homo sapien
tggcaatgcacacttcaacctcctc

SEQ ID NO: 5495298 - DNA, 25 bp, Homo sapien
cagaaattgtgagcatatcagcatg

SEQ ID NO: 5495299 - DNA, 25 bp, Homo sapien
atgctgcctgatcttgcctagaacc

SEQ ID NO: 5495300 - DNA, 25 bp, Homo sapien
tgtttatgcaaactggctgcacctg

SEQ ID NO: 5495301 - DNA, 25 bp, Homo sapien
tcttgcctagaaccggctgcacctg

SEQ ID NO: 5495302 - DNA, 25 bp, Homo sapien
ggagtacctctggtgtggcaatgca

SEQ ID NO: 5495303 - DNA, 25 bp, Homo sapien
gctatagtcactaggttactcctgc

SEQ ID NO: 5495304 - DNA, 25 bp, Homo sapien
aaacaaggatgcaggtacctgccat

SEQ ID NO: 5495305 - DNA, 25 bp, Homo sapien
ggaagtgaggcaattgcagccatat

SEQ ID NO: 5495306 - DNA, 25 bp, Homo sapien
gcaggtacctgccatagctatagtc

SEQ ID NO: 5495307 - DNA, 25 bp, Homo sapien
tcccaatgtggatgggtcatgtgat

SEQ ID NO: 5495308 - DNA, 25 bp, Homo sapien
aaagggcaattggcttcctccgagt

SEQ ID NO: 5495309 - DNA, 25 bp, Homo sapien
ataaaattctggagggtatatgtga

SEQ ID NO: 5495310 - DNA, 25 bp, Homo sapien
ctcctgcaagtaattctggcttccc

SEQ ID NO: 5495311 - DNA, 25 bp, Homo sapien
gtcatgtgatgactaggagagtcac

SEQ ID NO: 5495312 - DNA, 25 bp, Homo sapien
cagagtctctgaaggatagaggatc

SEQ ID NO: 5495313 - DNA, 25 bp, Homo sapien
acctcagggtcactagacgaggaga

SEQ ID NO: 5495314 - DNA, 25 bp, Homo sapien
acacctctgtgatgctcccgggctg

SEQ ID NO: 5495315 - DNA, 25 bp, Homo sapien
ctccatccgccgccatgtagttgat

SEQ ID NO: 5495316 - DNA, 25 bp, Homo sapien
ccacgcactttaatcttgaagtctc

SEQ ID NO: 5495317 - DNA, 25 bp, Homo sapien
gcacacctctgtgatgctcccgggc

SEQ ID NO: 5495318 - DNA, 25 bp, Homo sapien
tgatgcacacctctgtgatgctccc

SEQ ID NO: 5495319 - DNA, 25 bp, Homo sapien
tgtccgtctggcagcttgatggtca

SEQ ID NO: 5495320 - DNA, 25 bp, Homo sapien
tcatgtccgtctggcagcttgatgg

SEQ ID NO: 5495321 - DNA, 25 bp, Homo sapien
aatcttgaagtctccatccgccgcc

SEQ ID NO: 5495322 - DNA, 25 bp, Homo sapien
cttgaattcatgtccgtctggcagc

SEQ ID NO: 5495323 - DNA, 25 bp, Homo sapien
tgaagtctccatccgccgccatgta

SEQ ID NO: 5495324 - DNA, 25 bp, Homo sapien
tgaattcatgtccgtctggcagctt

SEQ ID NO: 5495325 - DNA, 25 bp, Homo sapien
atgcttccttcacaggcaacacatc

SEQ ID NO: 5495326 - DNA, 25 bp, Homo sapien
tcacatttagtttggccagagtcat

SEQ ID NO: 5495327 - DNA, 25 bp, Homo sapien
ttatcaaaacagtggattctcattt

SEQ ID NO: 5495328 - DNA, 25 bp, Homo sapien
ggcctggctctctcattgatttctc

SEQ ID NO: 5495329 - DNA, 25 bp, Homo sapien
tgtttcaaagtggtattttagattc

SEQ ID NO: 5495330 - DNA, 25 bp, Homo sapien
catttaggcagtgtaggtcctcttt

SEQ ID NO: 5495331 - DNA, 25 bp, Homo sapien
atctgcagaaacactaccggtaatt

SEQ ID NO: 5495332 - DNA, 25 bp, Homo sapien
aacacatctgctactggcttattca

SEQ ID NO: 5495333 - DNA, 25 bp, Homo sapien
taggattaatggaaatggcctggct

SEQ ID NO: 5495334 - DNA, 25 bp, Homo sapien
ttagtaacagatatctcccttagct

SEQ ID NO: 5495335 - DNA, 25 bp, Homo sapien
tagtcccagcctttgaaaaactgct

SEQ ID NO: 5495336 - DNA, 25 bp, Homo sapien
cagccatggctacctgcacccttcc

SEQ ID NO: 5495337 - DNA, 25 bp, Homo sapien
gtgtgtttcacaagcggcacgacag

SEQ ID NO: 5495338 - DNA, 25 bp, Homo sapien
tgcctggcctttgtgttggagactg

SEQ ID NO: 5495339 - DNA, 25 bp, Homo sapien
tgcagatggatagtgtgcattggga

SEQ ID NO: 5495340 - DNA, 25 bp, Homo sapien
cagagctgagtcagcagagtcatgg

SEQ ID NO: 5495341 - DNA, 25 bp, Homo sapien
gtgccctgcataagagtggccagat

SEQ ID NO: 5495342 - DNA, 25 bp, Homo sapien
gcgtctgagagccttggtttgagtc

SEQ ID NO: 5495343 - DNA, 25 bp, Homo sapien
ggccaagagaatcaccaggctcctg

SEQ ID NO: 5495344 - DNA, 25 bp, Homo sapien
ccttccctggtggcctagcaggtga

SEQ ID NO: 5495345 - DNA, 25 bp, Homo sapien
taccctgttagaaatgggctgagcc

SEQ ID NO: 5495346 - DNA, 25 bp, Homo sapien
tacctccactgcttgctgggggact

SEQ ID NO: 5495347 - DNA, 25 bp, Homo sapien
tcccgagaaagtggaccatgagctt

SEQ ID NO: 5495348 - DNA, 25 bp, Homo sapien
aagctcatggtccactttctcggga

SEQ ID NO: 5495349 - DNA, 25 bp, Homo sapien
taatttaagtataaacatgatcagt

SEQ ID NO: 5495350 - DNA, 25 bp, Homo sapien
actgatcatgtttatacttaaatta

SEQ ID NO: 5495351 - DNA, 25 bp, Homo sapien
tccaggaatgtacttttggagattc

SEQ ID NO: 5495352 - DNA, 25 bp, Homo sapien
aggaatgtacttttggagattctcc

SEQ ID NO: 5495353 - DNA, 25 bp, Homo sapien
acccagattagcccagtcttgcgct

SEQ ID NO: 5495354 - DNA, 25 bp, Homo sapien
gcctcccttttccatggtgtgacac

SEQ ID NO: 5495355 - DNA, 25 bp, Homo sapien
tcttatgggcatctgtgtaagagaa

SEQ ID NO: 5495356 - DNA, 25 bp, Homo sapien
catctgtgtaagagaatccaacggc

SEQ ID NO: 5495357 - DNA, 25 bp, Homo sapien
gctttgttcttatgggcatctgtgt

SEQ ID NO: 5495358 - DNA, 25 bp, Homo sapien
agagaccacccagattagcccagtc

SEQ ID NO: 5495359 - DNA, 25 bp, Homo sapien
gcccagtcttgcgcttttgcctccc

SEQ ID NO: 5495360 - DNA, 25 bp, Homo sapien
cccttttccatggtgtgacactggg

SEQ ID NO: 5495361 - DNA, 25 bp, Homo sapien
accacccagattagcccagtcttgc

SEQ ID NO: 5495362 - DNA, 25 bp, Homo sapien
tgtgagtccaactggcaccaaggag

SEQ ID NO: 5495363 - DNA, 25 bp, Homo sapien
ttgattgggatctgctccacgtgtc

SEQ ID NO: 5495364 - DNA, 25 bp, Homo sapien
ggttcatgccggacttgtggttgat

SEQ ID NO: 5495365 - DNA, 25 bp, Homo sapien
ctcatgaagacccactgaaggaatg

SEQ ID NO: 5495366 - DNA, 25 bp, Homo sapien
cccgggtcaggatcttagttctgcc

SEQ ID NO: 5495367 - DNA, 25 bp, Homo sapien
gctcaaggatctatgggttggttgt

SEQ ID NO: 5495368 - DNA, 25 bp, Homo sapien
gctgatctagttgcatggctggttc

SEQ ID NO: 5495369 - DNA, 25 bp, Homo sapien
tatgatttatgcagaggaagcctgg

SEQ ID NO: 5495370 - DNA, 25 bp, Homo sapien
gcaagaacagctgtcagtggtcatc

SEQ ID NO: 5495371 - DNA, 25 bp, Homo sapien
ttcagaggcttgtttgacagcagat

SEQ ID NO: 5495372 - DNA, 25 bp, Homo sapien
ggtacatcacagactcatggggcag

SEQ ID NO: 5495373 - DNA, 25 bp, Homo sapien
cggtccctggtgaggtacatattga

SEQ ID NO: 5495374 - DNA, 25 bp, Homo sapien
tcatccgccggttctgaaaccagat

SEQ ID NO: 5495375 - DNA, 25 bp, Homo sapien
ctgaaaccagattttgacttgtctc

SEQ ID NO: 5495376 - DNA, 25 bp, Homo sapien
gcgctttttccgggaagagcgagcg

SEQ ID NO: 5495377 - DNA, 25 bp, Homo sapien
ctcactcagattgaggagtctggcc

SEQ ID NO: 5495378 - DNA, 25 bp, Homo sapien
cttcgtgcctacggtccctggtgag

SEQ ID NO: 5495379 - DNA, 25 bp, Homo sapien
ggccacttcgtgcctacggtccctg

SEQ ID NO: 5495380 - DNA, 25 bp, Homo sapien
aactccttctctagctccagcgtct

SEQ ID NO: 5495381 - DNA, 25 bp, Homo sapien
gaggagtctggccacttcgtgccta

SEQ ID NO: 5495382 - DNA, 25 bp, Homo sapien
ggtgaggtacatattgaacagaaac

SEQ ID NO: 5495383 - DNA, 25 bp, Homo sapien
cgtctggtatttggtgtagggacag

SEQ ID NO: 5495384 - DNA, 25 bp, Homo sapien
tgcactttcccctagtctcgcctcc

SEQ ID NO: 5495385 - DNA, 25 bp, Homo sapien
gcaagggttcaagttaagctgagaa

SEQ ID NO: 5495386 - DNA, 25 bp, Homo sapien
gactgtcacaagaactggatgaggg

SEQ ID NO: 5495387 - DNA, 25 bp, Homo sapien
ccattgcaccctgtggatgccactg

SEQ ID NO: 5495388 - DNA, 25 bp, Homo sapien
gaagaagtccgactgtcacaagaac

SEQ ID NO: 5495389 - DNA, 25 bp, Homo sapien
tgggctctgtataatgggtggccag

SEQ ID NO: 5495390 - DNA, 25 bp, Homo sapien
tttctatggtagaaacagcacatgc

SEQ ID NO: 5495391 - DNA, 25 bp, Homo sapien
tgtgtgccatgacatggaaggctga

SEQ ID NO: 5495392 - DNA, 25 bp, Homo sapien
tagtctcgcctccaaattacccatt

SEQ ID NO: 5495393 - DNA, 25 bp, Homo sapien
gttcaagttaagctgagaaaggaaa

SEQ ID NO: 5495394 - DNA, 25 bp, Homo sapien
gatgccactgtttcctatgtgtgcc

SEQ ID NO: 5495395 - DNA, 25 bp, Homo sapien
cataaaagctatcggaagttggtgg

SEQ ID NO: 5495396 - DNA, 25 bp, Homo sapien
gcccttcatcaaaccactggggcaa

SEQ ID NO: 5495397 - DNA, 25 bp, Homo sapien
gaggtggtccaagtactccaagatg

SEQ ID NO: 5495398 - DNA, 25 bp, Homo sapien
tcactaactaggtgagacagccagg

SEQ ID NO: 5495399 - DNA, 25 bp, Homo sapien
tttctggtggtcagagcataaaagc

SEQ ID NO: 5495400 - DNA, 25 bp, Homo sapien
acctacgacagagatactgcccttc

SEQ ID NO: 5495401 - DNA, 25 bp, Homo sapien
attcacaacggcagcacctacgaca

SEQ ID NO: 5495402 - DNA, 25 bp, Homo sapien
gctcatgccaggtaaagtcactaac

SEQ ID NO: 5495403 - DNA, 25 bp, Homo sapien
agtactccaagatgttgggtgagag

SEQ ID NO: 5495404 - DNA, 25 bp, Homo sapien
ttacatttgctcctcccctggctct

SEQ ID NO: 5495405 - DNA, 25 bp, Homo sapien
ttttcgtagagacagagatctcgct

SEQ ID NO: 5495406 - DNA, 25 bp, Homo sapien
tggccacagtctcaagtggacatac

SEQ ID NO: 5495407 - DNA, 25 bp, Homo sapien
tcaaaaccacacgtttcgcgcaggc

SEQ ID NO: 5495408 - DNA, 25 bp, Homo sapien
tcaaatctcccacacccccaacctc

SEQ ID NO: 5495409 - DNA, 25 bp, Homo sapien
atgccagcaattctctgagcccacc

SEQ ID NO: 5495410 - DNA, 25 bp, Homo sapien
ccagctcaggtaagtcctatgtcac

SEQ ID NO: 5495411 - DNA, 25 bp, Homo sapien
ttcagagaagctccttaacaccaac

SEQ ID NO: 5495412 - DNA, 25 bp, Homo sapien
cacccagccctctgaaccagcagtc

SEQ ID NO: 5495413 - DNA, 25 bp, Homo sapien
caccaccacaccatgccagcaattc

SEQ ID NO: 5495414 - DNA, 25 bp, Homo sapien
ctttgcctgttggcagcgccatcac

SEQ ID NO: 5495415 - DNA, 25 bp, Homo sapien
tcaagaaccagcacccctgtgtgac

SEQ ID NO: 5495416 - DNA, 25 bp, Homo sapien
ctgatcacctcaagcctcccactct

SEQ ID NO: 5495417 - DNA, 25 bp, Homo sapien
cacttactgtatgcgcgagtgtggg

SEQ ID NO: 5495418 - DNA, 25 bp, Homo sapien
cctttggaatggattgaggttagcg

SEQ ID NO: 5495419 - DNA, 25 bp, Homo sapien
ctcagggtggaacctgacacccttt

SEQ ID NO: 5495420 - DNA, 25 bp, Homo sapien
ggagcgaacgggcatttattgtgca

SEQ ID NO: 5495421 - DNA, 25 bp, Homo sapien
gcccccagctgatgcctcaggctca

SEQ ID NO: 5495422 - DNA, 25 bp, Homo sapien
cggtccgaatcgcagtcctctggtc

SEQ ID NO: 5495423 - DNA, 25 bp, Homo sapien
cctggtttgtagaggatgaaccctg

SEQ ID NO: 5495424 - DNA, 25 bp, Homo sapien
caggctcagcatctcgagaaagtcc

SEQ ID NO: 5495425 - DNA, 25 bp, Homo sapien
gcttggtgcttcctcgtggccctga

SEQ ID NO: 5495426 - DNA, 25 bp, Homo sapien
agggagtatgggtacttgttcttcc

SEQ ID NO: 5495427 - DNA, 25 bp, Homo sapien
agacgagctatcccggtccgaatcg

SEQ ID NO: 5495428 - DNA, 25 bp, Homo sapien
ctcacgctgctgtcataagactggc

SEQ ID NO: 5495429 - DNA, 25 bp, Homo sapien
ccgatgtcggagctgctcccagtgc

SEQ ID NO: 5495430 - DNA, 25 bp, Homo sapien
cctggaagctgctggtaccagtgta

SEQ ID NO: 5495431 - DNA, 25 bp, Homo sapien
agctgctcccagtgcaggagatggt

SEQ ID NO: 5495432 - DNA, 25 bp, Homo sapien
tattagcatagatgaggagtttggg

SEQ ID NO: 5495433 - DNA, 25 bp, Homo sapien
gagggccggttgctattagcataga

SEQ ID NO: 5495434 - DNA, 25 bp, Homo sapien
cataagactggcagtattaatcagc

SEQ ID NO: 5495435 - DNA, 25 bp, Homo sapien
ccagtgtacatcataccaaggtact

SEQ ID NO: 5495436 - DNA, 25 bp, Homo sapien
accaaggtacttcataacctgcccc

SEQ ID NO: 5495437 - DNA, 25 bp, Homo sapien
tcctcagcctgaagcccagtgatgg

SEQ ID NO: 5495438 - DNA, 25 bp, Homo sapien
ataacctgccccgatgtcggagctg

SEQ ID NO: 5495439 - DNA, 25 bp, Homo sapien
gggctgtcacaaaccaggctctcac

SEQ ID NO: 5495440 - DNA, 25 bp, Homo sapien
aacaaatattggggctgatcagatc

SEQ ID NO: 5495441 - DNA, 25 bp, Homo sapien
ttgaagtgattgcagagtacagttt

SEQ ID NO: 5495442 - DNA, 25 bp, Homo sapien
gtgtgcaggatggtaacctcaacac

SEQ ID NO: 5495443 - DNA, 25 bp, Homo sapien
tctgtggacagatcagtgatgatac

SEQ ID NO: 5495444 - DNA, 25 bp, Homo sapien
ggactttcctagagagagtgtgcag

SEQ ID NO: 5495445 - DNA, 25 bp, Homo sapien
gagactagactttaggttgtggggc

SEQ ID NO: 5495446 - DNA, 25 bp, Homo sapien
tattgatgtgtttcaggggccaaga

SEQ ID NO: 5495447 - DNA, 25 bp, Homo sapien
ggaagtccaagtaaagacatgagac

SEQ ID NO: 5495448 - DNA, 25 bp, Homo sapien
gtaagccatgagaatggatggactt

SEQ ID NO: 5495449 - DNA, 25 bp, Homo sapien
gcccacatggtggtatcacagctgt

SEQ ID NO: 5495450 - DNA, 25 bp, Homo sapien
tccaggcttaagagtgcgtatctca

SEQ ID NO: 5495451 - DNA, 25 bp, Homo sapien
cttcttagggcaacactggccagtc

SEQ ID NO: 5495452 - DNA, 25 bp, Homo sapien
tgagactgccatctagtagtgggat

SEQ ID NO: 5495453 - DNA, 25 bp, Homo sapien
tacctgattgccttggtggggaaaa

SEQ ID NO: 5495454 - DNA, 25 bp, Homo sapien
agtgggatatgcattgtgtggctaa

SEQ ID NO: 5495455 - DNA, 25 bp, Homo sapien
aaagtgagggtcagacactcaatac

SEQ ID NO: 5495456 - DNA, 25 bp, Homo sapien
gggcccatgggatatacctgattgc

SEQ ID NO: 5495457 - DNA, 25 bp, Homo sapien
gtggatggtaataaggatgctcttc

SEQ ID NO: 5495458 - DNA, 25 bp, Homo sapien
agtacctcaccggaagagtgacttg

SEQ ID NO: 5495459 - DNA, 25 bp, Homo sapien
gacttgtccaaggttgtggtcaggg

SEQ ID NO: 5495460 - DNA, 25 bp, Homo sapien
caagcagtgaacgccaggcatttgt

SEQ ID NO: 5495461 - DNA, 25 bp, Homo sapien
gttttcattctcacgatcctcagag

SEQ ID NO: 5495462 - DNA, 25 bp, Homo sapien
ctctgaggatcgtgagaatgaaaac

SEQ ID NO: 5495463 - DNA, 25 bp, Homo sapien
ggacctgggctgccctgcccattcc

SEQ ID NO: 5495464 - DNA, 25 bp, Homo sapien
cagtgtggcatgtgtcaggcactgg

SEQ ID NO: 5495465 - DNA, 25 bp, Homo sapien
gggagaactgccagcacctcctggc

SEQ ID NO: 5495466 - DNA, 25 bp, Homo sapien
gcccattcccttccgggggtgatga

SEQ ID NO: 5495467 - DNA, 25 bp, Homo sapien
tgtcctgtcccctcgatgggctgcc

SEQ ID NO: 5495468 - DNA, 25 bp, Homo sapien
gtcttgggttcgcagatccccaggg

SEQ ID NO: 5495469 - DNA, 25 bp, Homo sapien
gctgctcctgcccatccgctaccgg

SEQ ID NO: 5495470 - DNA, 25 bp, Homo sapien
atctaaatcagggcgatgcctggca

SEQ ID NO: 5495471 - DNA, 25 bp, Homo sapien
ttcccggatgttctgtgatgggcag

SEQ ID NO: 5495472 - DNA, 25 bp, Homo sapien
ggggtgatgattgccttggcttgca

SEQ ID NO: 5495473 - DNA, 25 bp, Homo sapien
gtgggcgaactccaacccagctctg

SEQ ID NO: 5495474 - DNA, 25 bp, Homo sapien
ttgttatgtacagtggaagagatta

SEQ ID NO: 5495475 - DNA, 25 bp, Homo sapien
tttaaatccaagataaggtgcatac

SEQ ID NO: 5495476 - DNA, 25 bp, Homo sapien
gaaatgtttgagcagtgtcagtgtc

SEQ ID NO: 5495477 - DNA, 25 bp, Homo sapien
tgtatgtggctttgggttttggtaa

SEQ ID NO: 5495478 - DNA, 25 bp, Homo sapien
caaaaggagaattcagaaatgtttg

SEQ ID NO: 5495479 - DNA, 25 bp, Homo sapien
gaacaagctgaggggtataatttta

SEQ ID NO: 5495480 - DNA, 25 bp, Homo sapien
aagtagtcactttacgaggtcataa

SEQ ID NO: 5495481 - DNA, 25 bp, Homo sapien
gtctttgaaataagcgcagaacttc

SEQ ID NO: 5495482 - DNA, 25 bp, Homo sapien
tacaagatatgagtacaaggtaatg

SEQ ID NO: 5495483 - DNA, 25 bp, Homo sapien
aaatgaaatgatgatagtataccta

SEQ ID NO: 5495484 - DNA, 25 bp, Homo sapien
acaaggtaatgaaactaggtattct

SEQ ID NO: 5495485 - DNA, 25 bp, Homo sapien
cggtggattctgtaatcagtctctc

SEQ ID NO: 5495486 - DNA, 25 bp, Homo sapien
agtgaccctgaaaatattgtaaaac

SEQ ID NO: 5495487 - DNA, 25 bp, Homo sapien
ttactggggcaatgtgatttccttt

SEQ ID NO: 5495488 - DNA, 25 bp, Homo sapien
ctctctgatgagtaagaaagaagac

SEQ ID NO: 5495489 - DNA, 25 bp, Homo sapien
agaaagaagactgggactatctgta

SEQ ID NO: 5495490 - DNA, 25 bp, Homo sapien
tgattaactgggatcttactggggc

SEQ ID NO: 5495491 - DNA, 25 bp, Homo sapien
ggacgtcagaaagccaacgatgttt

SEQ ID NO: 5495492 - DNA, 25 bp, Homo sapien
aatggaataacacggctgtgtgtat

SEQ ID NO: 5495493 - DNA, 25 bp, Homo sapien
ggtgattaaagtcttcggtggattc

SEQ ID NO: 5495494 - DNA, 25 bp, Homo sapien
gtggcatctgcttgttaggatattc

SEQ ID NO: 5495495 - DNA, 25 bp, Homo sapien
aaatggtccagcagaaagttgttac

SEQ ID NO: 5495496 - DNA, 25 bp, Homo sapien
gcatagggaagcatctgtacctggt

SEQ ID NO: 5495497 - DNA, 25 bp, Homo sapien
tgtgtcaaagatagaagcaaagtgt

SEQ ID NO: 5495498 - DNA, 25 bp, Homo sapien
aaagtgttagaaatccagaggaaga

SEQ ID NO: 5495499 - DNA, 25 bp, Homo sapien
ctgcgaactgcgatacatgtaaggc

SEQ ID NO: 5495500 - DNA, 25 bp, Homo sapien
tggacattagcagcagttaagtctt

SEQ ID NO: 5495501 - DNA, 25 bp, Homo sapien
ccctgagtaccaaccagaacccagc

SEQ ID NO: 5495502 - DNA, 25 bp, Homo sapien
agtagaaagatcgtagggttctgga

SEQ ID NO: 5495503 - DNA, 25 bp, Homo sapien
cagaacccagccatagatggggaag

SEQ ID NO: 5495504 - DNA, 25 bp, Homo sapien
cttccttaggtggactggttgtagc

SEQ ID NO: 5495505 - DNA, 25 bp, Homo sapien
aagggagaattaagctacagtagaa

SEQ ID NO: 5495506 - DNA, 25 bp, Homo sapien
cctgtaagcgaagctaagaaacctg

SEQ ID NO: 5495507 - DNA, 25 bp, Homo sapien
tcaatagctacaggagtaagtggag

SEQ ID NO: 5495508 - DNA, 25 bp, Homo sapien
gattcctcaaaaagatgcaattgct

SEQ ID NO: 5495509 - DNA, 25 bp, Homo sapien
tctcgtgtatcaggcaactaccaac

SEQ ID NO: 5495510 - DNA, 25 bp, Homo sapien
gagtaagtggagttcctgacatctc

SEQ ID NO: 5495511 - DNA, 25 bp, Homo sapien
ttttgcatctcagtgcaggggttgg

SEQ ID NO: 5495512 - DNA, 25 bp, Homo sapien
cagctggatgataggaaatttgata

SEQ ID NO: 5495513 - DNA, 25 bp, Homo sapien
gagatacgtggccaaaactaagtcc

SEQ ID NO: 5495514 - DNA, 25 bp, Homo sapien
ttctatggagatacgtggccaaaac

SEQ ID NO: 5495515 - DNA, 25 bp, Homo sapien
cagttggcataaaatgtgcaagcac

SEQ ID NO: 5495516 - DNA, 25 bp, Homo sapien
aggggttggacagcataatttcttc

SEQ ID NO: 5495517 - DNA, 25 bp, Homo sapien
ggaaatggtaccaatccagttggca

SEQ ID NO: 5495518 - DNA, 25 bp, Homo sapien
agccccacctcagagaacagtctgg

SEQ ID NO: 5495519 - DNA, 25 bp, Homo sapien
ttaatgtcaggtatgtattgtgtat

SEQ ID NO: 5495520 - DNA, 25 bp, Homo sapien
agtaaaaaatagggatgatttctta

SEQ ID NO: 5495521 - DNA, 25 bp, Homo sapien
gtcaggtatgtattgtgtattcagg

SEQ ID NO: 5495522 - DNA, 25 bp, Homo sapien
gatttcttaatgtcaggtatgtatt

SEQ ID NO: 5495523 - DNA, 25 bp, Homo sapien
ccccacctcagagaacagtctggcc

SEQ ID NO: 5495524 - DNA, 25 bp, Homo sapien
gaatggactctgttaaaaatgtgtt

SEQ ID NO: 5495525 - DNA, 25 bp, Homo sapien
gagagactctgctctgaaccgaatg

SEQ ID NO: 5495526 - DNA, 25 bp, Homo sapien
ggtggctcgcatcggtaattccagc

SEQ ID NO: 5495527 - DNA, 25 bp, Homo sapien
gactctgctctgaaccgaatggact

SEQ ID NO: 5495528 - DNA, 25 bp, Homo sapien
tgctctgaaccgaatggactctgtt

SEQ ID NO: 5495529 - DNA, 25 bp, Homo sapien
tttggagactcctgtacttgaatgg

SEQ ID NO: 5495530 - DNA, 25 bp, Homo sapien
cattagaagagcggacctactatgt

SEQ ID NO: 5495531 - DNA, 25 bp, Homo sapien
atcttagtgaaaagtccttgggaaa

SEQ ID NO: 5495532 - DNA, 25 bp, Homo sapien
tacagcttcagtgaggcagttctac

SEQ ID NO: 5495533 - DNA, 25 bp, Homo sapien
aaatcggatgtagttttagggagaa

SEQ ID NO: 5495534 - DNA, 25 bp, Homo sapien
tgaagaaaataagtatgagatctcc

SEQ ID NO: 5495535 - DNA, 25 bp, Homo sapien
catgtactggaatttgctgtctttt

SEQ ID NO: 5495536 - DNA, 25 bp, Homo sapien
catccaggatacagcttcagtgagg

SEQ ID NO: 5495537 - DNA, 25 bp, Homo sapien
tctggaactgtctaggaaatcggat

SEQ ID NO: 5495538 - DNA, 25 bp, Homo sapien
tgtgaggtgaacacattagaagagc

SEQ ID NO: 5495539 - DNA, 25 bp, Homo sapien
ttgatgtgaagaattgcacttcaga

SEQ ID NO: 5495540 - DNA, 25 bp, Homo sapien
tcgaggtcagctgcgagtgacctac

SEQ ID NO: 5495541 - DNA, 25 bp, Homo sapien
gtaggtcactcgcagctgacctcga

SEQ ID NO: 5495542 - DNA, 25 bp, Homo sapien
atgagaagttagacaaatcccagtt

SEQ ID NO: 5495543 - DNA, 25 bp, Homo sapien
aatcccagttgaggagcattccaca

SEQ ID NO: 5495544 - DNA, 25 bp, Homo sapien
ggaaagccagagaaactattacagc

SEQ ID NO: 5495545 - DNA, 25 bp, Homo sapien
aggagcattaggagacatgactaaa

SEQ ID NO: 5495546 - DNA, 25 bp, Homo sapien
gtgtgggttttgtatagtgacatcc

SEQ ID NO: 5495547 - DNA, 25 bp, Homo sapien
agtatgtaaaaagtaaggaaatctg

SEQ ID NO: 5495548 - DNA, 25 bp, Homo sapien
ctcttaaggaggtatagtataactc

SEQ ID NO: 5495549 - DNA, 25 bp, Homo sapien
gatgttatgagaatggtacctttac

SEQ ID NO: 5495550 - DNA, 25 bp, Homo sapien
ttacagccacaaggagcattaggag

SEQ ID NO: 5495551 - DNA, 25 bp, Homo sapien
ccatcaaggccataaataacaagtc

SEQ ID NO: 5495552 - DNA, 25 bp, Homo sapien
ccaaagagtacagtatagaaagggg

SEQ ID NO: 5495553 - DNA, 25 bp, Homo sapien
cagaaggtcctaaagaagacgaaga

SEQ ID NO: 5495554 - DNA, 25 bp, Homo sapien
agaagaggccaatggtgatgtattt

SEQ ID NO: 5495555 - DNA, 25 bp, Homo sapien
tagaggaaccaaaaacaacttcaga

SEQ ID NO: 5495556 - DNA, 25 bp, Homo sapien
aaatccccagaactaaagaagaggc

SEQ ID NO: 5495557 - DNA, 25 bp, Homo sapien
aggaggtccctccagaactagcaac

SEQ ID NO: 5495558 - DNA, 25 bp, Homo sapien
aagaagccagcatgccaaatgaaaa

SEQ ID NO: 5495559 - DNA, 25 bp, Homo sapien
cagaactagcaacccctgcccctgc

SEQ ID NO: 5495560 - DNA, 25 bp, Homo sapien
ttgaagactgctcagacctaacacc

SEQ ID NO: 5495561 - DNA, 25 bp, Homo sapien
gacaagtgagccgagtttcacctct

SEQ ID NO: 5495562 - DNA, 25 bp, Homo sapien
agacatacaactgaagacaagtgag

SEQ ID NO: 5495563 - DNA, 25 bp, Homo sapien
atgagagattctgcagaaggtccta

SEQ ID NO: 5495564 - DNA, 25 bp, Homo sapien
caccacataggtggtacacaggtgc

SEQ ID NO: 5495565 - DNA, 25 bp, Homo sapien
cctcctctgggacatcaggaggatc

SEQ ID NO: 5495566 - DNA, 25 bp, Homo sapien
gtatgacacttcaccccaagcagcc

SEQ ID NO: 5495567 - DNA, 25 bp, Homo sapien
tcccagggtttcaggccctcacaat

SEQ ID NO: 5495568 - DNA, 25 bp, Homo sapien
ctcccacatgtggaacattccctcc

SEQ ID NO: 5495569 - DNA, 25 bp, Homo sapien
agccacatccagccgtgcaaacgtg

SEQ ID NO: 5495570 - DNA, 25 bp, Homo sapien
aatgtgactgcatgaaactgcgatt

SEQ ID NO: 5495571 - DNA, 25 bp, Homo sapien
gatcctccccatgagagcgagggtg

SEQ ID NO: 5495572 - DNA, 25 bp, Homo sapien
ttccaccattctgagtggggggacc

SEQ ID NO: 5495573 - DNA, 25 bp, Homo sapien
gggtttgagatcaggctcagccaca

SEQ ID NO: 5495574 - DNA, 25 bp, Homo sapien
cactgttaatgtcagtgcatggggg

SEQ ID NO: 5495575 - DNA, 25 bp, Homo sapien
aaatgacaatgtggcaaacccaatc

SEQ ID NO: 5495576 - DNA, 25 bp, Homo sapien
cagctgctgggtcttagccatagtg

SEQ ID NO: 5495577 - DNA, 25 bp, Homo sapien
acccaatcaacgtggtccctgcagc

SEQ ID NO: 5495578 - DNA, 25 bp, Homo sapien
ataaggaagaaaaagtctattgtga

SEQ ID NO: 5495579 - DNA, 25 bp, Homo sapien
ttgtgaaactgcaaagagcaaaaaa

SEQ ID NO: 5495580 - DNA, 25 bp, Homo sapien
agctggctgcttaactcaaatactc

SEQ ID NO: 5495581 - DNA, 25 bp, Homo sapien
acattggccaagctagttaggctgc

SEQ ID NO: 5495582 - DNA, 25 bp, Homo sapien
gttaggctgcttatacgtgtatggt

SEQ ID NO: 5495583 - DNA, 25 bp, Homo sapien
tcttagccatagtgcagcagctgag

SEQ ID NO: 5495584 - DNA, 25 bp, Homo sapien
aagggtacacatacactgcaaagtt

SEQ ID NO: 5495585 - DNA, 25 bp, Homo sapien
aaagagactgtaaaacctccctgct

SEQ ID NO: 5495586 - DNA, 25 bp, Homo sapien
catcagacagggctgattcgacctg

SEQ ID NO: 5495587 - DNA, 25 bp, Homo sapien
aggcctgacttgctcccataggaga

SEQ ID NO: 5495588 - DNA, 25 bp, Homo sapien
ccggcaagagaagatcccttgatca

SEQ ID NO: 5495589 - DNA, 25 bp, Homo sapien
ttgggagatcaatcccctgtcttcc

SEQ ID NO: 5495590 - DNA, 25 bp, Homo sapien
agactttagccctaggggaactgtc

SEQ ID NO: 5495591 - DNA, 25 bp, Homo sapien
tggcaaggagcaacctgctctctcc

SEQ ID NO: 5495592 - DNA, 25 bp, Homo sapien
agagctccttagagaagtcgtggga

SEQ ID NO: 5495593 - DNA, 25 bp, Homo sapien
acactcaagttggcaagaagagctc

SEQ ID NO: 5495594 - DNA, 25 bp, Homo sapien
gatcaccatggacactcaagttggc

SEQ ID NO: 5495595 - DNA, 25 bp, Homo sapien
ggctgattcgacctgagcacccctt

SEQ ID NO: 5495596 - DNA, 25 bp, Homo sapien
gcaacctgctctctccacgggcctc

SEQ ID NO: 5495597 - DNA, 25 bp, Homo sapien
tcctccatgggctcctcaacagttt

SEQ ID NO: 5495598 - DNA, 25 bp, Homo sapien
tcataagttcccagtcccagacagt

SEQ ID NO: 5495599 - DNA, 25 bp, Homo sapien
ctcaacagtttcagtcttgctgctc

SEQ ID NO: 5495600 - DNA, 25 bp, Homo sapien
ttcctccatgggctcctcaacagtt

SEQ ID NO: 5495601 - DNA, 25 bp, Homo sapien
tcaacagtttcagtcttgctgctcc

SEQ ID NO: 5495602 - DNA, 25 bp, Homo sapien
cctccatgggctcctcaacagtttc

SEQ ID NO: 5495603 - DNA, 25 bp, Homo sapien
aaataggaaagtttatgaacgatat

SEQ ID NO: 5495604 - DNA, 25 bp, Homo sapien
aggaaagtttatgaacgatatcatt

SEQ ID NO: 5495605 - DNA, 25 bp, Homo sapien
ataagttcccagtcccagacagttt

SEQ ID NO: 5495606 - DNA, 25 bp, Homo sapien
cataagttcccagtcccagacagtt

SEQ ID NO: 5495607 - DNA, 25 bp, Homo sapien
aataggaaagtttatgaacgatatc

SEQ ID NO: 5495608 - DNA, 25 bp, Homo sapien
tttatgtatggagcagcaagactga

SEQ ID NO: 5495609 - DNA, 25 bp, Homo sapien
tatttatgtatggagcagcaagact

SEQ ID NO: 5495610 - DNA, 25 bp, Homo sapien
gcagcaagactgaaactgttgagga

SEQ ID NO: 5495611 - DNA, 25 bp, Homo sapien
ttgaaaaaactgtctgggactggga

SEQ ID NO: 5495612 - DNA, 25 bp, Homo sapien
gaagagaaagaagaatctgatgatg

SEQ ID NO: 5495613 - DNA, 25 bp, Homo sapien
tgaaaaaactgtctgggactgggaa

SEQ ID NO: 5495614 - DNA, 25 bp, Homo sapien
gagtcggaagacaaacctgaaattg

SEQ ID NO: 5495615 - DNA, 25 bp, Homo sapien
agaaagaagaatctgatgatgaagc

SEQ ID NO: 5495616 - DNA, 25 bp, Homo sapien
ggactgggaacttatgaatgatatc

SEQ ID NO: 5495617 - DNA, 25 bp, Homo sapien
tctgatgatgaagctgcagtagagg

SEQ ID NO: 5495618 - DNA, 25 bp, Homo sapien
gggactgggaacttatgaatgatat

SEQ ID NO: 5495619 - DNA, 25 bp, Homo sapien
gtgtgtggtggctttgtatctccct

SEQ ID NO: 5495620 - DNA, 25 bp, Homo sapien
cccctgtggtcatcccagtgggcga

SEQ ID NO: 5495621 - DNA, 25 bp, Homo sapien
acagagacatcaaaccagacaacct

SEQ ID NO: 5495622 - DNA, 25 bp, Homo sapien
gagcaaaattgatgtagagggcaat

SEQ ID NO: 5495623 - DNA, 25 bp, Homo sapien
ccaggggacatgatgaccttgttga

SEQ ID NO: 5495624 - DNA, 25 bp, Homo sapien
ggcgagctgtgacctgccttgtcat

SEQ ID NO: 5495625 - DNA, 25 bp, Homo sapien
ttatatggcagaaacagtattagcc

SEQ ID NO: 5495626 - DNA, 25 bp, Homo sapien
ctctgaaaggctatggttctgtaat

SEQ ID NO: 5495627 - DNA, 25 bp, Homo sapien
tgaaaaaagacactctgacagaaga

SEQ ID NO: 5495628 - DNA, 25 bp, Homo sapien
ggggcattggcatgaactatgcacg

SEQ ID NO: 5495629 - DNA, 25 bp, Homo sapien
tcttttggacagcaaggtattgggg

SEQ ID NO: 5495630 - DNA, 25 bp, Homo sapien
tgcccccagaagctctatcaaggac

SEQ ID NO: 5495631 - DNA, 25 bp, Homo sapien
cacatagagaatacgagattgacct

SEQ ID NO: 5495632 - DNA, 25 bp, Homo sapien
ctgatgctttgaagtaggagtgctg

SEQ ID NO: 5495633 - DNA, 25 bp, Homo sapien
tatcaaggacttaagccccagtttc

SEQ ID NO: 5495634 - DNA, 25 bp, Homo sapien
ggcatctatttggtgaggggtttcc

SEQ ID NO: 5495635 - DNA, 25 bp, Homo sapien
acaggatggctaaatgacttggtga

SEQ ID NO: 5495636 - DNA, 25 bp, Homo sapien
tggtctgttaaggtaggtgaatgta

SEQ ID NO: 5495637 - DNA, 25 bp, Homo sapien
ttcccaagataccccagaggaagac

SEQ ID NO: 5495638 - DNA, 25 bp, Homo sapien
gaatgtactataaagaaaaggtgct

SEQ ID NO: 5495639 - DNA, 25 bp, Homo sapien
gacttggtgaccaaagtgagtgtga

SEQ ID NO: 5495640 - DNA, 25 bp, Homo sapien
ctcgatttaagaaagtgtaggcatc

SEQ ID NO: 5495641 - DNA, 25 bp, Homo sapien
cttcaccggccaggccaaggtcaag

SEQ ID NO: 5495642 - DNA, 25 bp, Homo sapien
gaacgtgggtcctcagtacatgcca

SEQ ID NO: 5495643 - DNA, 25 bp, Homo sapien
agtaccacatagggctcctggtggg

SEQ ID NO: 5495644 - DNA, 25 bp, Homo sapien
ctaccagcgcttcgtggtgccgctg

SEQ ID NO: 5495645 - DNA, 25 bp, Homo sapien
cacttgttgagggtcccacagccag

SEQ ID NO: 5495646 - DNA, 25 bp, Homo sapien
acctccgcgccaactgctaccagcg

SEQ ID NO: 5495647 - DNA, 25 bp, Homo sapien
ccaggccctgagaatcgtcctgcac

SEQ ID NO: 5495648 - DNA, 25 bp, Homo sapien
agacagggactgttgtgattttgca

SEQ ID NO: 5495649 - DNA, 25 bp, Homo sapien
acatggcacaccgataatgctggtc

SEQ ID NO: 5495650 - DNA, 25 bp, Homo sapien
gcatcagcgctgacttctacgtgcg

SEQ ID NO: 5495651 - DNA, 25 bp, Homo sapien
gagctggccctgagcctgtacttgt

SEQ ID NO: 5495652 - DNA, 25 bp, Homo sapien
ggcctcggtcgcggcgctgggcgga

SEQ ID NO: 5495653 - DNA, 25 bp, Homo sapien
tccgcccagcgccgcgaccgaggcc

SEQ ID NO: 5495654 - DNA, 25 bp, Homo sapien
gggcctcggtcgcggcgctgggcgg

SEQ ID NO: 5495655 - DNA, 25 bp, Homo sapien
ccgcccagcgccgcgaccgaggccc

SEQ ID NO: 5495656 - DNA, 25 bp, Homo sapien
gacagcaaggccccacttgtgggca

SEQ ID NO: 5495657 - DNA, 25 bp, Homo sapien
ggagtcctggtcttcagcaaggctc

SEQ ID NO: 5495658 - DNA, 25 bp, Homo sapien
agactttgagttctggcagctgggc

SEQ ID NO: 5495659 - DNA, 25 bp, Homo sapien
ccttgtgtccagcgttgcatgggga

SEQ ID NO: 5495660 - DNA, 25 bp, Homo sapien
gggggatacatccacagactgtgaa

SEQ ID NO: 5495661 - DNA, 25 bp, Homo sapien
ccctgccctggagtcgcttacatct

SEQ ID NO: 5495662 - DNA, 25 bp, Homo sapien
tgaggtgcaactagatgaaactgcc

SEQ ID NO: 5495663 - DNA, 25 bp, Homo sapien
gtcccacagtgagaaaagtcagtag

SEQ ID NO: 5495664 - DNA, 25 bp, Homo sapien
ctgtgcactgtgacatgccagcctc

SEQ ID NO: 5495665 - DNA, 25 bp, Homo sapien
gaacaagcgtgaaccacacatggtc

SEQ ID NO: 5495666 - DNA, 25 bp, Homo sapien
ttcccagataaggaagatgcacagg

SEQ ID NO: 5495667 - DNA, 25 bp, Homo sapien
gagtaactccctcaggatacgacac

SEQ ID NO: 5495668 - DNA, 25 bp, Homo sapien
ttgatgagcaagacatacttaatgc

SEQ ID NO: 5495669 - DNA, 25 bp, Homo sapien
cttagtgtgccaagagttcgatgtt

SEQ ID NO: 5495670 - DNA, 25 bp, Homo sapien
tgcacctaccttagaaaacaagtat

SEQ ID NO: 5495671 - DNA, 25 bp, Homo sapien
tatggatatgaccagatcatgccca

SEQ ID NO: 5495672 - DNA, 25 bp, Homo sapien
tggtttgtgtatccatgcacctacc

SEQ ID NO: 5495673 - DNA, 25 bp, Homo sapien
ggcccacaaaatgatgggaaagagc

SEQ ID NO: 5495674 - DNA, 25 bp, Homo sapien
gtgccaagagttcgatgttagcgtt

SEQ ID NO: 5495675 - DNA, 25 bp, Homo sapien
gaaagcaagtgttcacaacagtgaa

SEQ ID NO: 5495676 - DNA, 25 bp, Homo sapien
tgcatagcaagtgaaagcaagtgtt

SEQ ID NO: 5495677 - DNA, 25 bp, Homo sapien
aacagtgaaaagttgagcgtcattt

SEQ ID NO: 5495678 - DNA, 25 bp, Homo sapien
gataaggcttaaaatcatctctcta

SEQ ID NO: 5495679 - DNA, 25 bp, Homo sapien
cctcacaagtctaggttaagtgttt

SEQ ID NO: 5495680 - DNA, 25 bp, Homo sapien
cacaaaacctagcatgataaggctt

SEQ ID NO: 5495681 - DNA, 25 bp, Homo sapien
tcagtgttgtttctagaaaagcctt

SEQ ID NO: 5495682 - DNA, 25 bp, Homo sapien
ttcaagagaagcactaattaccatt

SEQ ID NO: 5495683 - DNA, 25 bp, Homo sapien
cttgggtgcctctcagtgccatacc

SEQ ID NO: 5495684 - DNA, 25 bp, Homo sapien
atctatgtggcttctgaggcttttc

SEQ ID NO: 5495685 - DNA, 25 bp, Homo sapien
gtgccatacccaaactcagcttttc

SEQ ID NO: 5495686 - DNA, 25 bp, Homo sapien
cacacgccaccacgctgactaattt

SEQ ID NO: 5495687 - DNA, 25 bp, Homo sapien
agctaccgcaccctgcccctttttc

SEQ ID NO: 5495688 - DNA, 25 bp, Homo sapien
tctgttactggaatgtatcactatc

SEQ ID NO: 5495689 - DNA, 25 bp, Homo sapien
tctccctgtgctagatgcccaggca

SEQ ID NO: 5495690 - DNA, 25 bp, Homo sapien
gcccaggcatcacctccagatagtc

SEQ ID NO: 5495691 - DNA, 25 bp, Homo sapien
aaaattgaatgaaagatacagatat

SEQ ID NO: 5495692 - DNA, 25 bp, Homo sapien
agccactgagcttgccacttggttt

SEQ ID NO: 5495693 - DNA, 25 bp, Homo sapien
tcccatttatccccagcacccacac

SEQ ID NO: 5495694 - DNA, 25 bp, Homo sapien
tgaaaatacaaagacaattagggaa

SEQ ID NO: 5495695 - DNA, 25 bp, Homo sapien
cacctccagatagtcacacaagcca

SEQ ID NO: 5495696 - DNA, 25 bp, Homo sapien
gcacccacacatgtacagcctcccc

SEQ ID NO: 5495697 - DNA, 25 bp, Homo sapien
acccccctgcccaagggtgctgcta

SEQ ID NO: 5495698 - DNA, 25 bp, Homo sapien
gagatgagatgccacgcactaccat

SEQ ID NO: 5495699 - DNA, 25 bp, Homo sapien
gacaatgtacagtgttaggtctgat

SEQ ID NO: 5495700 - DNA, 25 bp, Homo sapien
gacactattcatacgggattagagc

SEQ ID NO: 5495701 - DNA, 25 bp, Homo sapien
catcctgagatactaggggttggga

SEQ ID NO: 5495702 - DNA, 25 bp, Homo sapien
ttatagtaggcaaatgtggaaacaa

SEQ ID NO: 5495703 - DNA, 25 bp, Homo sapien
tataaggacactattcatacgggat

SEQ ID NO: 5495704 - DNA, 25 bp, Homo sapien
ttcagcctataataataatggagag

SEQ ID NO: 5495705 - DNA, 25 bp, Homo sapien
aattatgaatttggtggagccacag

SEQ ID NO: 5495706 - DNA, 25 bp, Homo sapien
agttacatcctgagatactaggggt

SEQ ID NO: 5495707 - DNA, 25 bp, Homo sapien
taaatacagttacatcctgagatac

SEQ ID NO: 5495708 - DNA, 25 bp, Homo sapien
ggtggagccacagttcagcctataa

SEQ ID NO: 5495709 - DNA, 25 bp, Homo sapien
ttatttatagtaggcaaatgtggaa

SEQ ID NO: 5495710 - DNA, 25 bp, Homo sapien
ctaggggttgggacttcaaattatg

SEQ ID NO: 5495711 - DNA, 25 bp, Homo sapien
tggctccaccactcaatgaagggcc

SEQ ID NO: 5495712 - DNA, 25 bp, Homo sapien
acgcccggccagacattgttatttt

SEQ ID NO: 5495713 - DNA, 25 bp, Homo sapien
ttttggtgaccaactgaaaactgag

SEQ ID NO: 5495714 - DNA, 25 bp, Homo sapien
aaactgagctaggcagccaaactca

SEQ ID NO: 5495715 - DNA, 25 bp, Homo sapien
cagcagaccccataccacacaaaaa

SEQ ID NO: 5495716 - DNA, 25 bp, Homo sapien
cagagagctgaagccaaaacaattt

SEQ ID NO: 5495717 - DNA, 25 bp, Homo sapien
caaaattctgccacagccctcagct

SEQ ID NO: 5495718 - DNA, 25 bp, Homo sapien
agggccaaacgcactaccacatgac

SEQ ID NO: 5495719 - DNA, 25 bp, Homo sapien
acgcactaccacatgactccagcag

SEQ ID NO: 5495720 - DNA, 25 bp, Homo sapien
tccaccactcaatgaagggccaaac

SEQ ID NO: 5495721 - DNA, 25 bp, Homo sapien
gttcaagcagggaattgaagcaatt

SEQ ID NO: 5495722 - DNA, 25 bp, Homo sapien
ttcgtgaggaatctaggtcatagat

SEQ ID NO: 5495723 - DNA, 25 bp, Homo sapien
atctatgacctagattcctcacgaa

SEQ ID NO: 5495724 - DNA, 25 bp, Homo sapien
tccaaaaagacaagtgctcaagcag

SEQ ID NO: 5495725 - DNA, 25 bp, Homo sapien
ttgttcaagtacccactggaccgtg

SEQ ID NO: 5495726 - DNA, 25 bp, Homo sapien
gacaagtgctcaagcagcaaaatcc

SEQ ID NO: 5495727 - DNA, 25 bp, Homo sapien
agcagccagagtgatacagtttatg

SEQ ID NO: 5495728 - DNA, 25 bp, Homo sapien
aaatgtgaatctcaggagagagcag

SEQ ID NO: 5495729 - DNA, 25 bp, Homo sapien
acttgatggaagaaaatggaattac

SEQ ID NO: 5495730 - DNA, 25 bp, Homo sapien
cgcggtgcatcaagcttgctatggc

SEQ ID NO: 5495731 - DNA, 25 bp, Homo sapien
ggaattactccaaaaagacaagtgc

SEQ ID NO: 5495732 - DNA, 25 bp, Homo sapien
actggaccgtggttttgcaggaaat

SEQ ID NO: 5495733 - DNA, 25 bp, Homo sapien
ttgctatggcattgttcaagtaccc

SEQ ID NO: 5495734 - DNA, 25 bp, Homo sapien
tttgcaggaaatgtgaatctcagga

SEQ ID NO: 5495735 - DNA, 25 bp, Homo sapien
gaaaccctacaagtgcagcgagtgt

SEQ ID NO: 5495736 - DNA, 25 bp, Homo sapien
ataaatgtaatgaatgtgggaaatt

SEQ ID NO: 5495737 - DNA, 25 bp, Homo sapien
aaaccatcagaggactcacactggg

SEQ ID NO: 5495738 - DNA, 25 bp, Homo sapien
cacaccggagaaaaaccttatgagt

SEQ ID NO: 5495739 - DNA, 25 bp, Homo sapien
gtaatgagtgtggtaaagcgtttaa

SEQ ID NO: 5495740 - DNA, 25 bp, Homo sapien
cggggagaagccatataaatgtaat

SEQ ID NO: 5495741 - DNA, 25 bp, Homo sapien
gtgggaaattcttcagtgagagctc

SEQ ID NO: 5495742 - DNA, 25 bp, Homo sapien
cataatccaccaaaagacccacacc

SEQ ID NO: 5495743 - DNA, 25 bp, Homo sapien
cttcagccagagtgcaaaccatcag

SEQ ID NO: 5495744 - DNA, 25 bp, Homo sapien
ggaaggccttcagccagagtaccaa

SEQ ID NO: 5495745 - DNA, 25 bp, Homo sapien
agtgagagctcagccctcattcggc

SEQ ID NO: 5495746 - DNA, 25 bp, Homo sapien
atgtggattgagaaatgacactgga

SEQ ID NO: 5495747 - DNA, 25 bp, Homo sapien
cagtgcacctcaaaaatgggggcaa

SEQ ID NO: 5495748 - DNA, 25 bp, Homo sapien
atcaagccccaaatagaaggggagc

SEQ ID NO: 5495749 - DNA, 25 bp, Homo sapien
gttacaatcagatctggtgcaacac

SEQ ID NO: 5495750 - DNA, 25 bp, Homo sapien
gacgagactctagagaggcatagag

SEQ ID NO: 5495751 - DNA, 25 bp, Homo sapien
ctggaaggaacatcaaagccccagc

SEQ ID NO: 5495752 - DNA, 25 bp, Homo sapien
ctataagctggcctgagcactgtgt

SEQ ID NO: 5495753 - DNA, 25 bp, Homo sapien
tttttcatcagagcccaagggagag

SEQ ID NO: 5495754 - DNA, 25 bp, Homo sapien
aagccccagctacaaaaagaaagtc

SEQ ID NO: 5495755 - DNA, 25 bp, Homo sapien
tacaaaaagaaagtcatcaagcccc

SEQ ID NO: 5495756 - DNA, 25 bp, Homo sapien
gtgggagagggcacttatttctctc

SEQ ID NO: 5495757 - DNA, 25 bp, Homo sapien
cgacgtccgcatcgtccgtgacgac

SEQ ID NO: 5495758 - DNA, 25 bp, Homo sapien
tctacaccgcccagatcggagcgga

SEQ ID NO: 5495759 - DNA, 25 bp, Homo sapien
atgatgagcgcctcccaccgccatt

SEQ ID NO: 5495760 - DNA, 25 bp, Homo sapien
accagctgctgccggtcagcaggat

SEQ ID NO: 5495761 - DNA, 25 bp, Homo sapien
ataccaccttggcgcctacacggga

SEQ ID NO: 5495762 - DNA, 25 bp, Homo sapien
atccacccccagtgggtgctgaccg

SEQ ID NO: 5495763 - DNA, 25 bp, Homo sapien
ggagcagcacctctactaccaggac

SEQ ID NO: 5495764 - DNA, 25 bp, Homo sapien
cagagaccttccccccggggatgcc

SEQ ID NO: 5495765 - DNA, 25 bp, Homo sapien
caggtgaaggtccccataatggaaa

SEQ ID NO: 5495766 - DNA, 25 bp, Homo sapien
cggtgaacgtctccagccacgtcca

SEQ ID NO: 5495767 - DNA, 25 bp, Homo sapien
agcaggatcatcgtgcacccacagt

SEQ ID NO: 5495768 - DNA, 25 bp, Homo sapien
atggtttgcactctggctgaaggcc

SEQ ID NO: 5495769 - DNA, 25 bp, Homo sapien
ttatatgatgccgaatgagggctga

SEQ ID NO: 5495770 - DNA, 25 bp, Homo sapien
gaatcctctggtgctgaatgaacgc

SEQ ID NO: 5495771 - DNA, 25 bp, Homo sapien
ctcgctgcacttgtagggtttctcc

SEQ ID NO: 5495772 - DNA, 25 bp, Homo sapien
tttggtggattatgagattggtact

SEQ ID NO: 5495773 - DNA, 25 bp, Homo sapien
aggccttcccacacgcggcacatct

SEQ ID NO: 5495774 - DNA, 25 bp, Homo sapien
gaaggccttcccacactcgctgcac

SEQ ID NO: 5495775 - DNA, 25 bp, Homo sapien
atggcttctccccggtgtgggtctt

SEQ ID NO: 5495776 - DNA, 25 bp, Homo sapien
atgagggctgagctctcactgaaga

SEQ ID NO: 5495777 - DNA, 25 bp, Homo sapien
attggtactctggctgaaggccttc

SEQ ID NO: 5495778 - DNA, 25 bp, Homo sapien
gggcttctccccggtgtgaatcctc

SEQ ID NO: 5495779 - DNA, 25 bp, Homo sapien
tgcttactgcaatggaaaagggaga

SEQ ID NO: 5495780 - DNA, 25 bp, Homo sapien
agagaatcacagaaagctaaaacta

SEQ ID NO: 5495781 - DNA, 25 bp, Homo sapien
tagactgagatccttgcagagaaac

SEQ ID NO: 5495782 - DNA, 25 bp, Homo sapien
gagggattctcagagcaccagccca

SEQ ID NO: 5495783 - DNA, 25 bp, Homo sapien
aagtagagaaatttgcgcagaatgt

SEQ ID NO: 5495784 - DNA, 25 bp, Homo sapien
gaatgtggaagacaaactgcccatt

SEQ ID NO: 5495785 - DNA, 25 bp, Homo sapien
caccagcccaagtgaagattgctgc

SEQ ID NO: 5495786 - DNA, 25 bp, Homo sapien
tgcagagaaactggcatgcacaaaa

SEQ ID NO: 5495787 - DNA, 25 bp, Homo sapien
ggagacagttagcattgggttaata

SEQ ID NO: 5495788 - DNA, 25 bp, Homo sapien
aataaaggattaaaagctggagaga

SEQ ID NO: 5495789 - DNA, 25 bp, Homo sapien
ttacaaaagaaggattaatggaatc

SEQ ID NO: 5495790 - DNA, 25 bp, Homo sapien
ggcctagtccggtcttgcccgtcct

SEQ ID NO: 5495791 - DNA, 25 bp, Homo sapien
aggacgggcaagaccggactaggcc

SEQ ID NO: 5495792 - DNA, 25 bp, Homo sapien
gggcctagtccggtcttgcccgtcc

SEQ ID NO: 5495793 - DNA, 25 bp, Homo sapien
ggacgggcaagaccggactaggccc

SEQ ID NO: 5495794 - DNA, 25 bp, Homo sapien
gctgacgtatgagctgaagaactgg

SEQ ID NO: 5495795 - DNA, 25 bp, Homo sapien
aggcctcaaggtaattctgggaatt

SEQ ID NO: 5495796 - DNA, 25 bp, Homo sapien
gagttcaagaacaaagacgacatgc

SEQ ID NO: 5495797 - DNA, 25 bp, Homo sapien
agtcctacaagcaggacgaacagct

SEQ ID NO: 5495798 - DNA, 25 bp, Homo sapien
gctggccatgaaactgctgacgtat

SEQ ID NO: 5495799 - DNA, 25 bp, Homo sapien
tgctgctcaccgacatgtggatggg

SEQ ID NO: 5495800 - DNA, 25 bp, Homo sapien
catcgcgcacacgtgcagccagatg

SEQ ID NO: 5495801 - DNA, 25 bp, Homo sapien
ggctgccaaacaccgcgacttcatc

SEQ ID NO: 5495802 - DNA, 25 bp, Homo sapien
aagttcagagcaagcaccggttaat

SEQ ID NO: 5495803 - DNA, 25 bp, Homo sapien
tgtggagctcctggaccagtcctac

SEQ ID NO: 5495804 - DNA, 25 bp, Homo sapien
agctcacagcaatgttgggacgaaa

SEQ ID NO: 5495805 - DNA, 25 bp, Homo sapien
gcggtcacagagctcagcttcaggg

SEQ ID NO: 5495806 - DNA, 25 bp, Homo sapien
ggggttgtagttggtgctcccactg

SEQ ID NO: 5495807 - DNA, 25 bp, Homo sapien
actccagtcccttcccggcgggctg

SEQ ID NO: 5495808 - DNA, 25 bp, Homo sapien
ctactgacatggtgactcgactctt

SEQ ID NO: 5495809 - DNA, 25 bp, Homo sapien
gtagtaactactgatggagccacca

SEQ ID NO: 5495810 - DNA, 25 bp, Homo sapien
ggcttcaccagtcctgggcccgact

SEQ ID NO: 5495811 - DNA, 25 bp, Homo sapien
ggtatagatacgcccaatccactcc

SEQ ID NO: 5495812 - DNA, 25 bp, Homo sapien
gggtctccgaaggcttcaccagtcc

SEQ ID NO: 5495813 - DNA, 25 bp, Homo sapien
tgccggatccagctccagtagtaac

SEQ ID NO: 5495814 - DNA, 25 bp, Homo sapien
tcgcacagtaatacacggccgtgtc

SEQ ID NO: 5495815 - DNA, 25 bp, Homo sapien
ggagaactggttcttggacgtgtct

SEQ ID NO: 5495816 - DNA, 25 bp, Homo sapien
cctgcgctgtcactcagaactggcc

SEQ ID NO: 5495817 - DNA, 25 bp, Homo sapien
tttccatgggtcctgtaacgcctgc

SEQ ID NO: 5495818 - DNA, 25 bp, Homo sapien
ggtttcaagccagacaatggggatc

SEQ ID NO: 5495819 - DNA, 25 bp, Homo sapien
tttccgggagaaccccacatctcat

SEQ ID NO: 5495820 - DNA, 25 bp, Homo sapien
tcaaagcacagagtaattcccattt

SEQ ID NO: 5495821 - DNA, 25 bp, Homo sapien
cactcccgctatgagtggtcggctc

SEQ ID NO: 5495822 - DNA, 25 bp, Homo sapien
caggagcctacagatgctgtggttg

SEQ ID NO: 5495823 - DNA, 25 bp, Homo sapien
cagggaacctaagtccagcagtgtg

SEQ ID NO: 5495824 - DNA, 25 bp, Homo sapien
atctcagcgcacccaagctccctgg

SEQ ID NO: 5495825 - DNA, 25 bp, Homo sapien
ttcaccctgaggtctcaggcgaggg

SEQ ID NO: 5495826 - DNA, 25 bp, Homo sapien
gggatccattacgtcgaggctgtct

SEQ ID NO: 5495827 - DNA, 25 bp, Homo sapien
gtcggggcgcggcccagccccggag

SEQ ID NO: 5495828 - DNA, 25 bp, Homo sapien
ctccggggctgggccgcgccccgac

SEQ ID NO: 5495829 - DNA, 25 bp, Homo sapien
gcgtcggggcgcggcccagccccgg

SEQ ID NO: 5495830 - DNA, 25 bp, Homo sapien
ccggggctgggccgcgccccgacgc

SEQ ID NO: 5495831 - DNA, 25 bp, Homo sapien
ggcgtcggggcgcggcccagccccg

SEQ ID NO: 5495832 - DNA, 25 bp, Homo sapien
cggggctgggccgcgccccgacgcc

SEQ ID NO: 5495833 - DNA, 25 bp, Homo sapien
gctgaggtagaggctgattattaca

SEQ ID NO: 5495834 - DNA, 25 bp, Homo sapien
ggtccctgaccgattctctggctcc

SEQ ID NO: 5495835 - DNA, 25 bp, Homo sapien
tattacagccagtcctatgacagca

SEQ ID NO: 5495836 - DNA, 25 bp, Homo sapien
cggggcaggttatgatgtacactgg

SEQ ID NO: 5495837 - DNA, 25 bp, Homo sapien
tccaagtctgccacctcagcctccc

SEQ ID NO: 5495838 - DNA, 25 bp, Homo sapien
tatggtaacaacaatcgggcctcag

SEQ ID NO: 5495839 - DNA, 25 bp, Homo sapien
tctgcaacttccaggaacagccccc

SEQ ID NO: 5495840 - DNA, 25 bp, Homo sapien
ctgcactgggagcagctccaacatc

SEQ ID NO: 5495841 - DNA, 25 bp, Homo sapien
ggccatcactgggctccaggctgag

SEQ ID NO: 5495842 - DNA, 25 bp, Homo sapien
cagtcctatgacagcagcctgggag

SEQ ID NO: 5495843 - DNA, 25 bp, Homo sapien
tgatgtacactggtatctgcaactt

SEQ ID NO: 5495844 - DNA, 25 bp, Homo sapien
tccgcccaagcaggttgcatataaa

SEQ ID NO: 5495845 - DNA, 25 bp, Homo sapien
acactgttgggaaaatttaccgaga

SEQ ID NO: 5495846 - DNA, 25 bp, Homo sapien
tgttgggaaaatttaccgagatggc

SEQ ID NO: 5495847 - DNA, 25 bp, Homo sapien
tgataatggatgacacacaagcttc

SEQ ID NO: 5495848 - DNA, 25 bp, Homo sapien
aattccacgattttgcttgagtaat

SEQ ID NO: 5495849 - DNA, 25 bp, Homo sapien
ttatcaccaataattccacgatttt

SEQ ID NO: 5495850 - DNA, 25 bp, Homo sapien
tctccgcccaagcaggttgcatata

SEQ ID NO: 5495851 - DNA, 25 bp, Homo sapien
cacgattttgcttgagtaatccctt

SEQ ID NO: 5495852 - DNA, 25 bp, Homo sapien
aatggatgacacacaagcttcattc

SEQ ID NO: 5495853 - DNA, 25 bp, Homo sapien
atttaccgagatggcttcagagtag

SEQ ID NO: 5495854 - DNA, 25 bp, Homo sapien
cttctccgcccaagcaggttgcata

SEQ ID NO: 5495855 - DNA, 25 bp, Homo sapien
ggccttgatagcctcagctcgcatg

SEQ ID NO: 5495856 - DNA, 25 bp, Homo sapien
gaaatcaatctttgtgatcaggatt

SEQ ID NO: 5495857 - DNA, 25 bp, Homo sapien
tgatcaggatttcttgatgtgtttc

SEQ ID NO: 5495858 - DNA, 25 bp, Homo sapien
ggcgaagtgcatgttcttcgggaac

SEQ ID NO: 5495859 - DNA, 25 bp, Homo sapien
ctcgttgtgcttctaggcgaagtgc

SEQ ID NO: 5495860 - DNA, 25 bp, Homo sapien
ttcaggactggttgtttgtagtgtt

SEQ ID NO: 5495861 - DNA, 25 bp, Homo sapien
gaaccctgggctggacttccatagg

SEQ ID NO: 5495862 - DNA, 25 bp, Homo sapien
ctgggctggacttccataggctttg

SEQ ID NO: 5495863 - DNA, 25 bp, Homo sapien
tggggtccatccctttaagaaatca

SEQ ID NO: 5495864 - DNA, 25 bp, Homo sapien
gtgcttctaggcgaagtgcatgttc

SEQ ID NO: 5495865 - DNA, 25 bp, Homo sapien
agctcgcatgttgttgtcctgcatc

SEQ ID NO: 5495866 - DNA, 25 bp, Homo sapien
ttgggccctagaggaattagaatgt

SEQ ID NO: 5495867 - DNA, 25 bp, Homo sapien
tggaggaggagtgtatcctctgaag

SEQ ID NO: 5495868 - DNA, 25 bp, Homo sapien
gtatcctctgaagcacgccgatctc

SEQ ID NO: 5495869 - DNA, 25 bp, Homo sapien
gcggtggaggctgcaattttcagca

SEQ ID NO: 5495870 - DNA, 25 bp, Homo sapien
caccacacccggcaaatgtactgta

SEQ ID NO: 5495871 - DNA, 25 bp, Homo sapien
tactttgaaaccatggaggtgcagc

SEQ ID NO: 5495872 - DNA, 25 bp, Homo sapien
tggctggtgtgagagtttaccttct

SEQ ID NO: 5495873 - DNA, 25 bp, Homo sapien
atcccttgaggctggtccctaactc

SEQ ID NO: 5495874 - DNA, 25 bp, Homo sapien
gaagcacgccgatctccagagattc

SEQ ID NO: 5495875 - DNA, 25 bp, Homo sapien
cctagaggaattagaatgtgaggtg

SEQ ID NO: 5495876 - DNA, 25 bp, Homo sapien
ttgctccagccagtggaagtatggc

SEQ ID NO: 5495877 - DNA, 25 bp, Homo sapien
gtggcctttgagtgaagccagccag

SEQ ID NO: 5495878 - DNA, 25 bp, Homo sapien
caggctgacctgaccatcaagctgc

SEQ ID NO: 5495879 - DNA, 25 bp, Homo sapien
cctcaacatggaggccatcaactac

SEQ ID NO: 5495880 - DNA, 25 bp, Homo sapien
agcatcacagaggtgtgcatcacct

SEQ ID NO: 5495881 - DNA, 25 bp, Homo sapien
atcaagctgccagacggacatgaat

SEQ ID NO: 5495882 - DNA, 25 bp, Homo sapien
tgcatcacctttgaccaggctgacc

SEQ ID NO: 5495883 - DNA, 25 bp, Homo sapien
ccatcaactacatggcggcggatgg

SEQ ID NO: 5495884 - DNA, 25 bp, Homo sapien
caagttccccaaccgcctcaacatg

SEQ ID NO: 5495885 - DNA, 25 bp, Homo sapien
ggcggatggagacttcaagattaaa

SEQ ID NO: 5495886 - DNA, 25 bp, Homo sapien
cttcaagattaaagtgcgtggcctt

SEQ ID NO: 5495887 - DNA, 25 bp, Homo sapien
agacggacatgaattcaagttcccc

SEQ ID NO: 5495888 - DNA, 25 bp, Homo sapien
tgccagacaacagatgacctcatcc

SEQ ID NO: 5495889 - DNA, 25 bp, Homo sapien
gcctacgatgaccgcaagaaaagca

SEQ ID NO: 5495890 - DNA, 25 bp, Homo sapien
ggggagacactctgcagagtgacca

SEQ ID NO: 5495891 - DNA, 25 bp, Homo sapien
ggccaacatcccggtgatccactgc

SEQ ID NO: 5495892 - DNA, 25 bp, Homo sapien
acgtgtgcaaccagagcctgatgaa

SEQ ID NO: 5495893 - DNA, 25 bp, Homo sapien
gaggcgcacgacttccgtgacatcc

SEQ ID NO: 5495894 - DNA, 25 bp, Homo sapien
ttatgaaagacacacagattgaggg

SEQ ID NO: 5495895 - DNA, 25 bp, Homo sapien
cagctgacagccatgtgctggatgc

SEQ ID NO: 5495896 - DNA, 25 bp, Homo sapien
gggccgcgtcatgctgccttactcc

SEQ ID NO: 5495897 - DNA, 25 bp, Homo sapien
aaatgcagtgtgagatcctggaaca

SEQ ID NO: 5495898 - DNA, 25 bp, Homo sapien
ccctactcgtgagaaaacgtgagac

SEQ ID NO: 5495899 - DNA, 25 bp, Homo sapien
tggggttatgagactaaggtatgtc

SEQ ID NO: 5495900 - DNA, 25 bp, Homo sapien
cagccaacctgggaaaaatagcaag

SEQ ID NO: 5495901 - DNA, 25 bp, Homo sapien
caagagcctgaaatggctaggtgtg

SEQ ID NO: 5495902 - DNA, 25 bp, Homo sapien
agcctagccccttcagagggggtcc

SEQ ID NO: 5495903 - DNA, 25 bp, Homo sapien
aaggtatgtccagatgagcctagcc

SEQ ID NO: 5495904 - DNA, 25 bp, Homo sapien
gggtctgagacagcaaatctgccca

SEQ ID NO: 5495905 - DNA, 25 bp, Homo sapien
tgtcgaggttaataagaagtgaagg

SEQ ID NO: 5495906 - DNA, 25 bp, Homo sapien
gctttgatgagggctatatgtcgag

SEQ ID NO: 5495907 - DNA, 25 bp, Homo sapien
gaggctatgcaggactgtcactttt

SEQ ID NO: 5495908 - DNA, 25 bp, Homo sapien
ggaacctcatttgggaatggccttc

SEQ ID NO: 5495909 - DNA, 25 bp, Homo sapien
tgaagtcaggagtaacgaaatatct

SEQ ID NO: 5495910 - DNA, 25 bp, Homo sapien
cccgtcgcaataaaccagcgggttc

SEQ ID NO: 5495911 - DNA, 25 bp, Homo sapien
tacttgaacaatgccatagcaagct

SEQ ID NO: 5495912 - DNA, 25 bp, Homo sapien
tttcctgcaaaaccacggtccagtg

SEQ ID NO: 5495913 - DNA, 25 bp, Homo sapien
ccgtgcccgtcgcaataaaccagcg

SEQ ID NO: 5495914 - DNA, 25 bp, Homo sapien
tccagtgggtacttgaacaatgcca

SEQ ID NO: 5495915 - DNA, 25 bp, Homo sapien
tgcaaaaccacggtccagtgggtac

SEQ ID NO: 5495916 - DNA, 25 bp, Homo sapien
cctgcaaaaccacggtccagtgggt

SEQ ID NO: 5495917 - DNA, 25 bp, Homo sapien
gtgggtacttgaacaatgccatagc

SEQ ID NO: 5495918 - DNA, 25 bp, Homo sapien
gtcgcaataaaccagcgggttctcg

SEQ ID NO: 5495919 - DNA, 25 bp, Homo sapien
accacggtccagtgggtacttgaac

SEQ ID NO: 5495920 - DNA, 25 bp, Homo sapien
aaaccacggtccagtgggtacttga

SEQ ID NO: 5495921 - DNA, 25 bp, Homo sapien
gaagggtgtcattttggtaatctgc

SEQ ID NO: 5495922 - DNA, 25 bp, Homo sapien
gcctgcccaggtgtgtgacattttg

SEQ ID NO: 5495923 - DNA, 25 bp, Homo sapien
ctgggtctggagaatctgcatttcc

SEQ ID NO: 5495924 - DNA, 25 bp, Homo sapien
ccttgcttaccccgcacaggcctgg

SEQ ID NO: 5495925 - DNA, 25 bp, Homo sapien
ggggcagtccgtcatcaagctctac

SEQ ID NO: 5495926 - DNA, 25 bp, Homo sapien
cagggacagacgtttgcttcagcct

SEQ ID NO: 5495927 - DNA, 25 bp, Homo sapien
atctacaacatgctggaggtaaggg

SEQ ID NO: 5495928 - DNA, 25 bp, Homo sapien
tctgatttaggagatctaggctggg

SEQ ID NO: 5495929 - DNA, 25 bp, Homo sapien
gtgctgtcatcacttgggggctctt

SEQ ID NO: 5495930 - DNA, 25 bp, Homo sapien
tgagagtcaagaatgctctaccgac

SEQ ID NO: 5495931 - DNA, 25 bp, Homo sapien
agttctgaaggtacctgagagtcaa

SEQ ID NO: 5495932 - DNA, 25 bp, Homo sapien
tgcaggaaatgtgaatctcaggaga

SEQ ID NO: 5495933 - DNA, 25 bp, Homo sapien
tgtgccctgtatattccagaggtac

SEQ ID NO: 5495934 - DNA, 25 bp, Homo sapien
agctgggacttacagagatgtgaac

SEQ ID NO: 5495935 - DNA, 25 bp, Homo sapien
gtggagtggcgcaatcattgctcac

SEQ ID NO: 5495936 - DNA, 25 bp, Homo sapien
cgcggtgcatcaagcttgctatggc

SEQ ID NO: 5495937 - DNA, 25 bp, Homo sapien
attccagaggtacaatttgccaatg

SEQ ID NO: 5495938 - DNA, 25 bp, Homo sapien
actggaccgtggttttgcaggaaat

SEQ ID NO: 5495939 - DNA, 25 bp, Homo sapien
tgagctcaagagatcctcctgccgc

SEQ ID NO: 5495940 - DNA, 25 bp, Homo sapien
actgcagccttgaagtcctgagctc

SEQ ID NO: 5495941 - DNA, 25 bp, Homo sapien
ctttgtccccataaggatggagctt

SEQ ID NO: 5495942 - DNA, 25 bp, Homo sapien
ggttgggcccatgtggtttgtgccc

SEQ ID NO: 5495943 - DNA, 25 bp, Homo sapien
catttgcagatacagcgtgttcttg

SEQ ID NO: 5495944 - DNA, 25 bp, Homo sapien
atacggccgtgtcctcggctctcag

SEQ ID NO: 5495945 - DNA, 25 bp, Homo sapien
ctcccactaatagctgagacccact

SEQ ID NO: 5495946 - DNA, 25 bp, Homo sapien
gcgtagtatgtggtacctgcactcc

SEQ ID NO: 5495947 - DNA, 25 bp, Homo sapien
gatacagcgtgttcttggaattgtc

SEQ ID NO: 5495948 - DNA, 25 bp, Homo sapien
gagtctgcgtagtatgtggtacctg

SEQ ID NO: 5495949 - DNA, 25 bp, Homo sapien
accggcccttcacggagtctgcgta

SEQ ID NO: 5495950 - DNA, 25 bp, Homo sapien
tacctgcactcccactaatagctga

SEQ ID NO: 5495951 - DNA, 25 bp, Homo sapien
gggatttcgcacagtaatatacggc

SEQ ID NO: 5495952 - DNA, 25 bp, Homo sapien
tggaattgtctctggaggtggtgaa

SEQ ID NO: 5495953 - DNA, 25 bp, Homo sapien
tcgcacagtaatatacggccgtgtc

SEQ ID NO: 5495954 - DNA, 25 bp, Homo sapien
taccccaacatgacagtagacacct

SEQ ID NO: 5495955 - DNA, 25 bp, Homo sapien
aaacggagttccacctttgcatagg

SEQ ID NO: 5495956 - DNA, 25 bp, Homo sapien
tttagtgtaataggaactgaggagt

SEQ ID NO: 5495957 - DNA, 25 bp, Homo sapien
tgtggttctgaaggtataccccaac

SEQ ID NO: 5495958 - DNA, 25 bp, Homo sapien
gatgagaatcggaatgtggttctga

SEQ ID NO: 5495959 - DNA, 25 bp, Homo sapien
agtagacacctgtgcctgcagataa

SEQ ID NO: 5495960 - DNA, 25 bp, Homo sapien
cggaggaagcagtataatgatgctc

SEQ ID NO: 5495961 - DNA, 25 bp, Homo sapien
ctgtgtaccagaaaagatgtcctca

SEQ ID NO: 5495962 - DNA, 25 bp, Homo sapien
atccagagtatagtgagagctgtgg

SEQ ID NO: 5495963 - DNA, 25 bp, Homo sapien
aatgatgctcagaggtgttatagga

SEQ ID NO: 5495964 - DNA, 25 bp, Homo sapien
cctgggattcctgagccttgctgtg

SEQ ID NO: 5495965 - DNA, 25 bp, Homo sapien
agtatgtttccctgggtggagcagg

SEQ ID NO: 5495966 - DNA, 25 bp, Homo sapien
tggttctcacaaagtatgtttccct

SEQ ID NO: 5495967 - DNA, 25 bp, Homo sapien
tgggtaacactgtagattcttccaa

SEQ ID NO: 5495968 - DNA, 25 bp, Homo sapien
tatgtgttttaggaagccgtctcgg

SEQ ID NO: 5495969 - DNA, 25 bp, Homo sapien
tcttctaagtttgcatgtacatggc

SEQ ID NO: 5495970 - DNA, 25 bp, Homo sapien
tgtacatggccaaatgaacaactcc

SEQ ID NO: 5495971 - DNA, 25 bp, Homo sapien
aagccgtctcggcacttagagtgct

SEQ ID NO: 5495972 - DNA, 25 bp, Homo sapien
cacatgaattcccttggcaagaatc

SEQ ID NO: 5495973 - DNA, 25 bp, Homo sapien
gaacaggactcattcccttgatgtc

SEQ ID NO: 5495974 - DNA, 25 bp, Homo sapien
caaatagactggagaacatgtatca

SEQ ID NO: 5495975 - DNA, 25 bp, Homo sapien
tggagaacatgtatcagtgcctatc

SEQ ID NO: 5495976 - DNA, 25 bp, Homo sapien
ttcatgctggaaacagtggattctg

SEQ ID NO: 5495977 - DNA, 25 bp, Homo sapien
tcaggaactgctagaaaaagcatca

SEQ ID NO: 5495978 - DNA, 25 bp, Homo sapien
gacaaagtgaacagttcctggcaga

SEQ ID NO: 5495979 - DNA, 25 bp, Homo sapien
agaccatagccatcgtggagcacat

SEQ ID NO: 5495980 - DNA, 25 bp, Homo sapien
ccagattaacaccagcggagaagag

SEQ ID NO: 5495981 - DNA, 25 bp, Homo sapien
tggagcacataaacgccaagtgtcc

SEQ ID NO: 5495982 - DNA, 25 bp, Homo sapien
ataggaagctttgggcatgatctta

SEQ ID NO: 5495983 - DNA, 25 bp, Homo sapien
ctgaaaggttaaaggttatggtcca

SEQ ID NO: 5495984 - DNA, 25 bp, Homo sapien
gaggagctgtgtaaaaagctgaaca

SEQ ID NO: 5495985 - DNA, 25 bp, Homo sapien
ggcgagaactacgttcaggaactgc

SEQ ID NO: 5495986 - DNA, 25 bp, Homo sapien
tattgtccctccgggaggagctgtg

SEQ ID NO: 5495987 - DNA, 25 bp, Homo sapien
tgaagtagtgcagcctcaaactgtt

SEQ ID NO: 5495988 - DNA, 25 bp, Homo sapien
tgtatttctagtagagacggggtgt

SEQ ID NO: 5495989 - DNA, 25 bp, Homo sapien
agggcccccggccgtatatataaca

SEQ ID NO: 5495990 - DNA, 25 bp, Homo sapien
gttgttaaaactctggctgtatccc

SEQ ID NO: 5495991 - DNA, 25 bp, Homo sapien
cacacagactggaatgaagtagtgc

SEQ ID NO: 5495992 - DNA, 25 bp, Homo sapien
caaactgttgggctcaagtaatccc

SEQ ID NO: 5495993 - DNA, 25 bp, Homo sapien
cccaggttcaagggattcccctgcc

SEQ ID NO: 5495994 - DNA, 25 bp, Homo sapien
tcccccaacctcagcgtccccagta

SEQ ID NO: 5495995 - DNA, 25 bp, Homo sapien
ttggctcactgaacctgcacctccc

SEQ ID NO: 5495996 - DNA, 25 bp, Homo sapien
gggattacaagcatgtgccactaca

SEQ ID NO: 5495997 - DNA, 25 bp, Homo sapien
gagtctcactgtcaccaggctggag

SEQ ID NO: 5495998 - DNA, 25 bp, Homo sapien
tatggcactgtggtccaagagtgtg

SEQ ID NO: 5495999 - DNA, 25 bp, Homo sapien
ccactacacctggccggtatttcag

SEQ ID NO: 5496000 - DNA, 25 bp, Homo sapien
tacccaagtcattcaggagtagatt

SEQ ID NO: 5496001 - DNA, 25 bp, Homo sapien
aagcaattctcgtgactcaacctcc

SEQ ID NO: 5496002 - DNA, 25 bp, Homo sapien
gtaccatgtgcagctgaaaagaatg

SEQ ID NO: 5496003 - DNA, 25 bp, Homo sapien
tgttgagaattgctttctggccaat

SEQ ID NO: 5496004 - DNA, 25 bp, Homo sapien
tgtggtcgattttaagagtatgtac

SEQ ID NO: 5496005 - DNA, 25 bp, Homo sapien
gagtatgtaccatgtgcagctgaaa

SEQ ID NO: 5496006 - DNA, 25 bp, Homo sapien
tcgtgactcaacctccgaagtagct

SEQ ID NO: 5496007 - DNA, 25 bp, Homo sapien
ctggccaataaagcaattgtggtcg

SEQ ID NO: 5496008 - DNA, 25 bp, Homo sapien
ggtccaagagtgtggttggtatttc

SEQ ID NO: 5496009 - DNA, 25 bp, Homo sapien
tgggagaattctaagttaggtgaaa

SEQ ID NO: 5496010 - DNA, 25 bp, Homo sapien
tcccactgagatttagccgtttttc

SEQ ID NO: 5496011 - DNA, 25 bp, Homo sapien
gaatggagcccaggtatgttaaaac

SEQ ID NO: 5496012 - DNA, 25 bp, Homo sapien
aagaacctatatcaagaatgcaggc

SEQ ID NO: 5496013 - DNA, 25 bp, Homo sapien
gggaaccaacagacaggtcaaaaca

SEQ ID NO: 5496014 - DNA, 25 bp, Homo sapien
gaatgcaggctgttgtcttcaaggc

SEQ ID NO: 5496015 - DNA, 25 bp, Homo sapien
agctgcttcagccctgggagaattc

SEQ ID NO: 5496016 - DNA, 25 bp, Homo sapien
ctgctccctcgaacactaagaacct

SEQ ID NO: 5496017 - DNA, 25 bp, Homo sapien
tccttcagggaaccaacagacaggt

SEQ ID NO: 5496018 - DNA, 25 bp, Homo sapien
aaacaggcaaccacaatcctttgag

SEQ ID NO: 5496019 - DNA, 25 bp, Homo sapien
tccaaatgccccaggtagctgcttc

SEQ ID NO: 5496020 - DNA, 25 bp, Homo sapien
gattctaagtagaccatggaaaggt

SEQ ID NO: 5496021 - DNA, 25 bp, Homo sapien
atggaatagagaactccaaaactcc

SEQ ID NO: 5496022 - DNA, 25 bp, Homo sapien
agaaatgataccagaagttaacttg

SEQ ID NO: 5496023 - DNA, 25 bp, Homo sapien
agaatggtatcagcaaaaatggaat

SEQ ID NO: 5496024 - DNA, 25 bp, Homo sapien
gaaatggtaaagatctgaggtaatg

SEQ ID NO: 5496025 - DNA, 25 bp, Homo sapien
taaaatggtagacacaaatccaacc

SEQ ID NO: 5496026 - DNA, 25 bp, Homo sapien
ttcagacagatgagaaatgatacca

SEQ ID NO: 5496027 - DNA, 25 bp, Homo sapien
catggaaaggtaaagacgtatattg

SEQ ID NO: 5496028 - DNA, 25 bp, Homo sapien
gttaacttggaatatcaggaatgaa

SEQ ID NO: 5496029 - DNA, 25 bp, Homo sapien
aacaaacagaactatacaagcagat

SEQ ID NO: 5496030 - DNA, 25 bp, Homo sapien
aaagatctgaggtaatgcaacattc

SEQ ID NO: 5496031 - DNA, 25 bp, Homo sapien
aactcagggactgagttagggagtg

SEQ ID NO: 5496032 - DNA, 25 bp, Homo sapien
ctggagaaattatcggggccagaga

SEQ ID NO: 5496033 - DNA, 25 bp, Homo sapien
ctcaggtcagacaatacagaggaga

SEQ ID NO: 5496034 - DNA, 25 bp, Homo sapien
ctaattgcaggcggacattattgga

SEQ ID NO: 5496035 - DNA, 25 bp, Homo sapien
agctgctatacgccaggtggcctct

SEQ ID NO: 5496036 - DNA, 25 bp, Homo sapien
ggggaagctgtagatctccagactt

SEQ ID NO: 5496037 - DNA, 25 bp, Homo sapien
tgcagaagaactaattgcaggcgga

SEQ ID NO: 5496038 - DNA, 25 bp, Homo sapien
ttggcctttgtgggaaactcaggga

SEQ ID NO: 5496039 - DNA, 25 bp, Homo sapien
agacactggagctgctatacgccag

SEQ ID NO: 5496040 - DNA, 25 bp, Homo sapien
agctgttatgtgaagaaggcaatct

SEQ ID NO: 5496041 - DNA, 25 bp, Homo sapien
ttattggacagtcagggaaatgaga

SEQ ID NO: 5496042 - DNA, 25 bp, Homo sapien
agaaaagagaggctgccaatttggc

SEQ ID NO: 5496043 - DNA, 25 bp, Homo sapien
taggtaagttgtgtatgaaagataa

SEQ ID NO: 5496044 - DNA, 25 bp, Homo sapien
aaccaaagcatttcaggcctctcgt

SEQ ID NO: 5496045 - DNA, 25 bp, Homo sapien
tttgacacagatgaagacacacttc

SEQ ID NO: 5496046 - DNA, 25 bp, Homo sapien
gatgacatcaaaccctaccgtagac

SEQ ID NO: 5496047 - DNA, 25 bp, Homo sapien
gtcaagggcacatagacatactgtc

SEQ ID NO: 5496048 - DNA, 25 bp, Homo sapien
tgaaagataaaggaatgcaaaccaa

SEQ ID NO: 5496049 - DNA, 25 bp, Homo sapien
gtttggatgagtactgatcaggtat

SEQ ID NO: 5496050 - DNA, 25 bp, Homo sapien
gtcaagcccaccagtagccagttct

SEQ ID NO: 5496051 - DNA, 25 bp, Homo sapien
ttgacttctgggacaacaccctttc

SEQ ID NO: 5496052 - DNA, 25 bp, Homo sapien
ttgaggagtgaggaacttattccca

SEQ ID NO: 5496053 - DNA, 25 bp, Homo sapien
catttgctcaagaggaagactcagc

SEQ ID NO: 5496054 - DNA, 25 bp, Homo sapien
agctcatctttggaactggcactct

SEQ ID NO: 5496055 - DNA, 25 bp, Homo sapien
ttccacctgaagaaaccatttgctc

SEQ ID NO: 5496056 - DNA, 25 bp, Homo sapien
ggaactggcactctgcttgctgtcc

SEQ ID NO: 5496057 - DNA, 25 bp, Homo sapien
ctgctgaccttaacaaaggcgagac

SEQ ID NO: 5496058 - DNA, 25 bp, Homo sapien
tgctgtccagccaaaataagttctt

SEQ ID NO: 5496059 - DNA, 25 bp, Homo sapien
aacaaaggcgagacatctttccacc

SEQ ID NO: 5496060 - DNA, 25 bp, Homo sapien
agaggaagactcagccatgtattac

SEQ ID NO: 5496061 - DNA, 25 bp, Homo sapien
tggtggtgctacaaacaagctcatc

SEQ ID NO: 5496062 - DNA, 25 bp, Homo sapien
tttgtttgctctggacacccactgc

SEQ ID NO: 5496063 - DNA, 25 bp, Homo sapien
acagtcatgttggggacttcttctc

SEQ ID NO: 5496064 - DNA, 25 bp, Homo sapien
cgaggaagtcgttaatatctcctaa

SEQ ID NO: 5496065 - DNA, 25 bp, Homo sapien
ttaggagatattaacgacttcctcg

SEQ ID NO: 5496066 - DNA, 25 bp, Homo sapien
gtatttacctagaaagttactatgt

SEQ ID NO: 5496067 - DNA, 25 bp, Homo sapien
acatagtaactttctaggtaaatac

SEQ ID NO: 5496068 - DNA, 25 bp, Homo sapien
cctctgcagttctttggcactatcc

SEQ ID NO: 5496069 - DNA, 25 bp, Homo sapien
cccaaagaagtaaattctcgctttc

SEQ ID NO: 5496070 - DNA, 25 bp, Homo sapien
tgtgatgcgaatataagcttgtcct

SEQ ID NO: 5496071 - DNA, 25 bp, Homo sapien
taagcagcagtatttttgctccttc

SEQ ID NO: 5496072 - DNA, 25 bp, Homo sapien
aatggcactcataccccaaagaagt

SEQ ID NO: 5496073 - DNA, 25 bp, Homo sapien
atggccattttgtctgtgtgatgcg

SEQ ID NO: 5496074 - DNA, 25 bp, Homo sapien
ccactaaatgaagccctatagattc

SEQ ID NO: 5496075 - DNA, 25 bp, Homo sapien
aaaaagagatcttcagtttcatcac

SEQ ID NO: 5496076 - DNA, 25 bp, Homo sapien
tctcacccttcttgtatggccattt

SEQ ID NO: 5496077 - DNA, 25 bp, Homo sapien
ccctatagattcctcaatggcactc

SEQ ID NO: 5496078 - DNA, 25 bp, Homo sapien
ttctaatgttaaggattcatgttcc

SEQ ID NO: 5496079 - DNA, 25 bp, Homo sapien
gaaagcataggttttaaactggcca

SEQ ID NO: 5496080 - DNA, 25 bp, Homo sapien
atgcagttgctggtggagcatttca

SEQ ID NO: 5496081 - DNA, 25 bp, Homo sapien
gctggtggagcatttcatatacgtc

SEQ ID NO: 5496082 - DNA, 25 bp, Homo sapien
acatttatccggatggaggtgtagt

SEQ ID NO: 5496083 - DNA, 25 bp, Homo sapien
tgatgctgatgatgcagttgctggt

SEQ ID NO: 5496084 - DNA, 25 bp, Homo sapien
cagccacatttatccggatggaggt

SEQ ID NO: 5496085 - DNA, 25 bp, Homo sapien
tggaggtgtagtctttgatgctgat

SEQ ID NO: 5496086 - DNA, 25 bp, Homo sapien
catatacgtccacaaactcactagc

SEQ ID NO: 5496087 - DNA, 25 bp, Homo sapien
ggccattaaacctgctcgtgacttt

SEQ ID NO: 5496088 - DNA, 25 bp, Homo sapien
tgctcgtgactttatcaacctcagc

SEQ ID NO: 5496089 - DNA, 25 bp, Homo sapien
gtccacaaactcactagcattattc

SEQ ID NO: 5496090 - DNA, 25 bp, Homo sapien
gcattggagcagaggtttaccacaa

SEQ ID NO: 5496091 - DNA, 25 bp, Homo sapien
aagactgctattgggaaagctggct

SEQ ID NO: 5496092 - DNA, 25 bp, Homo sapien
cagcaaacttcagggaagccatgcg

SEQ ID NO: 5496093 - DNA, 25 bp, Homo sapien
gggggatgatctcacagtgaccaac

SEQ ID NO: 5496094 - DNA, 25 bp, Homo sapien
atcaaggactacccagtggtgtcta

SEQ ID NO: 5496095 - DNA, 25 bp, Homo sapien
gaaatatgggaaagatgccaccaat

SEQ ID NO: 5496096 - DNA, 25 bp, Homo sapien
cgagtctcttcaggcgtgcaagctg

SEQ ID NO: 5496097 - DNA, 25 bp, Homo sapien
gcagaagttcacagccagtgcagga

SEQ ID NO: 5496098 - DNA, 25 bp, Homo sapien
aggtctgggaagtatgacctggact

SEQ ID NO: 5496099 - DNA, 25 bp, Homo sapien
acactgataaggtggtcatcggcat

SEQ ID NO: 5496100 - DNA, 25 bp, Homo sapien
gattggctccgtgaccgagtctctt

SEQ ID NO: 5496101 - DNA, 25 bp, Homo sapien
cagttgaaggttttgcctcctgatc

SEQ ID NO: 5496102 - DNA, 25 bp, Homo sapien
tgagtttcttgagatgtgttgtcat

SEQ ID NO: 5496103 - DNA, 25 bp, Homo sapien
tcgctgctatcctgtccaatgactt

SEQ ID NO: 5496104 - DNA, 25 bp, Homo sapien
gagtagcagcaattctctgatcttc

SEQ ID NO: 5496105 - DNA, 25 bp, Homo sapien
tcctccaagtcatcagttgaaggtt

SEQ ID NO: 5496106 - DNA, 25 bp, Homo sapien
tgaattcattggaactccctgcctt

SEQ ID NO: 5496107 - DNA, 25 bp, Homo sapien
actttgaagtgaatctcgctgctat

SEQ ID NO: 5496108 - DNA, 25 bp, Homo sapien
aaagacaaatctgagtgaattcatt

SEQ ID NO: 5496109 - DNA, 25 bp, Homo sapien
ttgacagtatgattctttgagtttc

SEQ ID NO: 5496110 - DNA, 25 bp, Homo sapien
tggaactccctgcctttgacagtat

SEQ ID NO: 5496111 - DNA, 25 bp, Homo sapien
tttatagtatgagtagcagcaattc

SEQ ID NO: 5496112 - DNA, 25 bp, Homo sapien
aatcggcccttcacgaagtctctat

SEQ ID NO: 5496113 - DNA, 25 bp, Homo sapien
ccttcacgaagtctctatagaattc

SEQ ID NO: 5496114 - DNA, 25 bp, Homo sapien
atgaatcctataaaagtcacccatt

SEQ ID NO: 5496115 - DNA, 25 bp, Homo sapien
ataaaagtcacccattccagcccct

SEQ ID NO: 5496116 - DNA, 25 bp, Homo sapien
acgaagtctctatagaattcatgac

SEQ ID NO: 5496117 - DNA, 25 bp, Homo sapien
gataaatcggcccttcacgaagtct

SEQ ID NO: 5496118 - DNA, 25 bp, Homo sapien
tataaaagtcacccattccagcccc

SEQ ID NO: 5496119 - DNA, 25 bp, Homo sapien
cttctatgaatcctataaaagtcac

SEQ ID NO: 5496120 - DNA, 25 bp, Homo sapien
tggagatgataaatcggcccttcac

SEQ ID NO: 5496121 - DNA, 25 bp, Homo sapien
ctataaaagtcacccattccagccc

SEQ ID NO: 5496122 - DNA, 25 bp, Homo sapien
ctggagatgataaatcggcccttca

SEQ ID NO: 5496123 - DNA, 25 bp, Homo sapien
taggggtcagagcttctgcctccaa

SEQ ID NO: 5496124 - DNA, 25 bp, Homo sapien
ttagcaatcaacagcatgggtgcaa

SEQ ID NO: 5496125 - DNA, 25 bp, Homo sapien
tgttgtaacctgtagcttccctgtc

SEQ ID NO: 5496126 - DNA, 25 bp, Homo sapien
ttgtagcagctaggccctgccacca

SEQ ID NO: 5496127 - DNA, 25 bp, Homo sapien
ctgccactgccatagctactactgc

SEQ ID NO: 5496128 - DNA, 25 bp, Homo sapien
gtggtttggcaaagtattgtcctcc

SEQ ID NO: 5496129 - DNA, 25 bp, Homo sapien
ctaagctttgtttcccggcagtaat

SEQ ID NO: 5496130 - DNA, 25 bp, Homo sapien
ctgctactggaacctccatggccac

SEQ ID NO: 5496131 - DNA, 25 bp, Homo sapien
caccactgtgcttggctgcattcac

SEQ ID NO: 5496132 - DNA, 25 bp, Homo sapien
catgggtgcaaaaaaaaaatctact

SEQ ID NO: 5496133 - DNA, 25 bp, Homo sapien
tcctccaccaccataggggtcagag

SEQ ID NO: 5496134 - DNA, 25 bp, Homo sapien
tcttgctgatgttggagtcacgcat

SEQ ID NO: 5496135 - DNA, 25 bp, Homo sapien
ttgctgatgttggagtcacgcatgc

SEQ ID NO: 5496136 - DNA, 25 bp, Homo sapien
agctttccagtgagatcccaatatc

SEQ ID NO: 5496137 - DNA, 25 bp, Homo sapien
tcacgcatgccaggaaaggcttgaa

SEQ ID NO: 5496138 - DNA, 25 bp, Homo sapien
aggcttgaaggatctttctctgctc

SEQ ID NO: 5496139 - DNA, 25 bp, Homo sapien
agtgagatcccaatatcttgctgat

SEQ ID NO: 5496140 - DNA, 25 bp, Homo sapien
ccaggaaaggcttgaaggatctttc

SEQ ID NO: 5496141 - DNA, 25 bp, Homo sapien
tatcttgctgatgttggagtcacgc

SEQ ID NO: 5496142 - DNA, 25 bp, Homo sapien
aggaaaggcttgaaggatctttctc

SEQ ID NO: 5496143 - DNA, 25 bp, Homo sapien
aatatcttgctgatgttggagtcac

SEQ ID NO: 5496144 - DNA, 25 bp, Homo sapien
tgaaggatctttctctgctcatctt

SEQ ID NO: 5496145 - DNA, 25 bp, Homo sapien
taaagaaaaacctgagaagcgatct

SEQ ID NO: 5496146 - DNA, 25 bp, Homo sapien
ttaaagaaaaggacattgagaagat

SEQ ID NO: 5496147 - DNA, 25 bp, Homo sapien
attgaggaatctatagggcttcatt

SEQ ID NO: 5496148 - DNA, 25 bp, Homo sapien
ggtatgagtgccattgaggaatcta

SEQ ID NO: 5496149 - DNA, 25 bp, Homo sapien
ggagtgtggaatttgatagagaatt

SEQ ID NO: 5496150 - DNA, 25 bp, Homo sapien
taaaagtgatgaaactgaagatctc

SEQ ID NO: 5496151 - DNA, 25 bp, Homo sapien
caaaatggccatacaagaagggtga

SEQ ID NO: 5496152 - DNA, 25 bp, Homo sapien
agggcttcatttagtggaaaaggaa

SEQ ID NO: 5496153 - DNA, 25 bp, Homo sapien
ggacaagcttatattcgcatcacac

SEQ ID NO: 5496154 - DNA, 25 bp, Homo sapien
aaatcaaccaaggaaaagcatgtgt

SEQ ID NO: 5496155 - DNA, 25 bp, Homo sapien
aactaaggatagtgccaaagaactg

SEQ ID NO: 5496156 - DNA, 25 bp, Homo sapien
accagagagtataggagaatagaag

SEQ ID NO: 5496157 - DNA, 25 bp, Homo sapien
cttctattctcctatactctctggt

SEQ ID NO: 5496158 - DNA, 25 bp, Homo sapien
atgttggtggttataactatgtctc

SEQ ID NO: 5496159 - DNA, 25 bp, Homo sapien
cagctcaaatgcaggcagtttttat

SEQ ID NO: 5496160 - DNA, 25 bp, Homo sapien
tttatgatgtcattaagcggccctc

SEQ ID NO: 5496161 - DNA, 25 bp, Homo sapien
tccggatctcctggacagtcagtca

SEQ ID NO: 5496162 - DNA, 25 bp, Homo sapien
gaaccagcagtgatgttggtggtta

SEQ ID NO: 5496163 - DNA, 25 bp, Homo sapien
agcagtgatgttggtggttataact

SEQ ID NO: 5496164 - DNA, 25 bp, Homo sapien
cggatctcctggacagtcagtcacc

SEQ ID NO: 5496165 - DNA, 25 bp, Homo sapien
ccccacactcatgatttatgatgtc

SEQ ID NO: 5496166 - DNA, 25 bp, Homo sapien
agtttttatgtcttcggaactggga

SEQ ID NO: 5496167 - DNA, 25 bp, Homo sapien
tgaggctgattattattgcagctca

SEQ ID NO: 5496168 - DNA, 25 bp, Homo sapien
atgatgtcattaagcggccctcagg

SEQ ID NO: 5496169 - DNA, 25 bp, Homo sapien
tcccatcacgggtttcaatcttctt

SEQ ID NO: 5496170 - DNA, 25 bp, Homo sapien
tcaatcttcttcacaaccatggccc

SEQ ID NO: 5496171 - DNA, 25 bp, Homo sapien
ttcaatcttcttcacaaccatggcc

SEQ ID NO: 5496172 - DNA, 25 bp, Homo sapien
cttcttcacaaccatggccctggag

SEQ ID NO: 5496173 - DNA, 25 bp, Homo sapien
caccagcttcccatcacgggtttca

SEQ ID NO: 5496174 - DNA, 25 bp, Homo sapien
tcttcacaaccatggccctggagga

SEQ ID NO: 5496175 - DNA, 25 bp, Homo sapien
aatcttcttcacaaccatggccctg

SEQ ID NO: 5496176 - DNA, 25 bp, Homo sapien
ttcttcacaaccatggccctggagg

SEQ ID NO: 5496177 - DNA, 25 bp, Homo sapien
cttcacaaccatggccctggaggag

SEQ ID NO: 5496178 - DNA, 25 bp, Homo sapien
atcttcttcacaaccatggccctgg

SEQ ID NO: 5496179 - DNA, 25 bp, Homo sapien
cagcttcccatcacgggtttcaatc

SEQ ID NO: 5496180 - DNA, 25 bp, Homo sapien
tagctctggcacaagtgtcctctct

SEQ ID NO: 5496181 - DNA, 25 bp, Homo sapien
ttgcaccgattaacttcatgtagtc

SEQ ID NO: 5496182 - DNA, 25 bp, Homo sapien
ataagtgcgagtgtaaaccgcagtg

SEQ ID NO: 5496183 - DNA, 25 bp, Homo sapien
cacttctgcaggtgaaaaagtttgc

SEQ ID NO: 5496184 - DNA, 25 bp, Homo sapien
tgtctcatcgaaccccatccccagc

SEQ ID NO: 5496185 - DNA, 25 bp, Homo sapien
gtggtaggctttgtcatgctagcca

SEQ ID NO: 5496186 - DNA, 25 bp, Homo sapien
gcgcaggcagacgatacctctttct

SEQ ID NO: 5496187 - DNA, 25 bp, Homo sapien
gcctgatagcaaaacttgcaccgat

SEQ ID NO: 5496188 - DNA, 25 bp, Homo sapien
tcatgctagccacctgcctgatagc

SEQ ID NO: 5496189 - DNA, 25 bp, Homo sapien
ttttaaggtgataatgtccccattc

SEQ ID NO: 5496190 - DNA, 25 bp, Homo sapien
tgagagcttccaggtgcacaggaag

SEQ ID NO: 5496191 - DNA, 25 bp, Homo sapien
gacacccatggctacatgccaccat

SEQ ID NO: 5496192 - DNA, 25 bp, Homo sapien
cccggctccgagatgtctttgggtg

SEQ ID NO: 5496193 - DNA, 25 bp, Homo sapien
aaaggtctattcaccgccatcaacc

SEQ ID NO: 5496194 - DNA, 25 bp, Homo sapien
gttacatcgcatagtgccccggctc

SEQ ID NO: 5496195 - DNA, 25 bp, Homo sapien
gaatgcatccctgatggagagggtg

SEQ ID NO: 5496196 - DNA, 25 bp, Homo sapien
cctgcccaatctgcaaaggtctatt

SEQ ID NO: 5496197 - DNA, 25 bp, Homo sapien
ccgccatcaacctcgggctgaaggt

SEQ ID NO: 5496198 - DNA, 25 bp, Homo sapien
cctttggggacacccatggctacat

SEQ ID NO: 5496199 - DNA, 25 bp, Homo sapien
caatccatcactgagtttgctcccc

SEQ ID NO: 5496200 - DNA, 25 bp, Homo sapien
agagggtggcatctacaatccatca

SEQ ID NO: 5496201 - DNA, 25 bp, Homo sapien
cgctgggctcagaatgcatccctga

SEQ ID NO: 5496202 - DNA, 25 bp, Homo sapien
atcacagatctggggtcttcactcc

SEQ ID NO: 5496203 - DNA, 25 bp, Homo sapien
cttcactcctcataatagcactgcc

SEQ ID NO: 5496204 - DNA, 25 bp, Homo sapien
tgatcacagatctggggtcttcact

SEQ ID NO: 5496205 - DNA, 25 bp, Homo sapien
tctggggtcttcactcctcataata

SEQ ID NO: 5496206 - DNA, 25 bp, Homo sapien
ttgatcacagatctggggtcttcac

SEQ ID NO: 5496207 - DNA, 25 bp, Homo sapien
acagatctggggtcttcactcctca

SEQ ID NO: 5496208 - DNA, 25 bp, Homo sapien
gatcacagatctggggtcttcactc

SEQ ID NO: 5496209 - DNA, 25 bp, Homo sapien
tcacagatctggggtcttcactcct

SEQ ID NO: 5496210 - DNA, 25 bp, Homo sapien
tcactcctcataatagcactgccag

SEQ ID NO: 5496211 - DNA, 25 bp, Homo sapien
tggggtcttcactcctcataatagc

SEQ ID NO: 5496212 - DNA, 25 bp, Homo sapien
cactcctcataatagcactgccaga

SEQ ID NO: 5496213 - DNA, 25 bp, Homo sapien
cagtaatagttatggacgtggtgag

SEQ ID NO: 5496214 - DNA, 25 bp, Homo sapien
gttttgatcaggtgtcttggagctt

SEQ ID NO: 5496215 - DNA, 25 bp, Homo sapien
tggtgagctgagaatcaattaggca

SEQ ID NO: 5496216 - DNA, 25 bp, Homo sapien
gtgtcttggagcttgggtgattcca

SEQ ID NO: 5496217 - DNA, 25 bp, Homo sapien
agcttgggtgattccagcctccact

SEQ ID NO: 5496218 - DNA, 25 bp, Homo sapien
ttgtaacaataactagaggggctga

SEQ ID NO: 5496219 - DNA, 25 bp, Homo sapien
gctgacttggagttcgtaggtacca

SEQ ID NO: 5496220 - DNA, 25 bp, Homo sapien
tcgtaggtaccaggacacacagtta

SEQ ID NO: 5496221 - DNA, 25 bp, Homo sapien
cccctagctccgtgtttgactcagt

SEQ ID NO: 5496222 - DNA, 25 bp, Homo sapien
cacacagttatgcccagaggcaggg

SEQ ID NO: 5496223 - DNA, 25 bp, Homo sapien
caggggagcatctcagtgtcacttg

SEQ ID NO: 5496224 - DNA, 25 bp, Homo sapien
tgctaacactggtgtgctgcggtca

SEQ ID NO: 5496225 - DNA, 25 bp, Homo sapien
tacaaatctaactgatgggggagct

SEQ ID NO: 5496226 - DNA, 25 bp, Homo sapien
agcttctgggtatttgggtccactt

SEQ ID NO: 5496227 - DNA, 25 bp, Homo sapien
ggtgtgctgcggtcatccaccatcc

SEQ ID NO: 5496228 - DNA, 25 bp, Homo sapien
tttgctaacactggtgtgctgcggt

SEQ ID NO: 5496229 - DNA, 25 bp, Homo sapien
aggccccagttaatcataccattgc

SEQ ID NO: 5496230 - DNA, 25 bp, Homo sapien
ctttaaggccccagttaatcatacc

SEQ ID NO: 5496231 - DNA, 25 bp, Homo sapien
actggtgtgctgcggtcatccacca

SEQ ID NO: 5496232 - DNA, 25 bp, Homo sapien
gggtccactttctattttcaggcta

SEQ ID NO: 5496233 - DNA, 25 bp, Homo sapien
gtgctgcggtcatccaccatcccac

SEQ ID NO: 5496234 - DNA, 25 bp, Homo sapien
atcatctttaaggccccagttaatc

SEQ ID NO: 5496235 - DNA, 25 bp, Homo sapien
agagtgcgttttagccttggcgcga

SEQ ID NO: 5496236 - DNA, 25 bp, Homo sapien
acgcgggtcttcttgtctcgggccg

SEQ ID NO: 5496237 - DNA, 25 bp, Homo sapien
cgccctgcgcgatagtaactttgcc

SEQ ID NO: 5496238 - DNA, 25 bp, Homo sapien
tgagcttctcgtcgtggatggcgag

SEQ ID NO: 5496239 - DNA, 25 bp, Homo sapien
ctgcgcgatagtaactttgcccaac

SEQ ID NO: 5496240 - DNA, 25 bp, Homo sapien
tgcccaacagcttgttgagcttctc

SEQ ID NO: 5496241 - DNA, 25 bp, Homo sapien
tgttgagcttctcgtcgtggatggc

SEQ ID NO: 5496242 - DNA, 25 bp, Homo sapien
gttgcccgccaactccaggatcttg

SEQ ID NO: 5496243 - DNA, 25 bp, Homo sapien
accgccctgcgcgatagtaactttg

SEQ ID NO: 5496244 - DNA, 25 bp, Homo sapien
ccaactccaggatcttggcggtcag

SEQ ID NO: 5496245 - DNA, 25 bp, Homo sapien
cgcgatagtaactttgcccaacagc

SEQ ID NO: 5496246 - DNA, 25 bp, Homo sapien
tcggcccactgacgtctcgcccggc

SEQ ID NO: 5496247 - DNA, 25 bp, Homo sapien
gccgggcgagacgtcagtgggccga

SEQ ID NO: 5496248 - DNA, 25 bp, Homo sapien
gggcccgctcggcccactgacgtct

SEQ ID NO: 5496249 - DNA, 25 bp, Homo sapien
agacgtcagtgggccgagcgggccc

SEQ ID NO: 5496250 - DNA, 25 bp, Homo sapien
ccacgtagggccaactctaacctgg

SEQ ID NO: 5496251 - DNA, 25 bp, Homo sapien
tcccggcacctgtctgataaggttc

SEQ ID NO: 5496252 - DNA, 25 bp, Homo sapien
cccaacttgagataaccctaggagc

SEQ ID NO: 5496253 - DNA, 25 bp, Homo sapien
gacccagctcacttctcccggcacc

SEQ ID NO: 5496254 - DNA, 25 bp, Homo sapien
gattctggaaacttgcaaaacgtcc

SEQ ID NO: 5496255 - DNA, 25 bp, Homo sapien
gataaggttcacagcaagggctatt

SEQ ID NO: 5496256 - DNA, 25 bp, Homo sapien
ccttatgcttcgagaggcctgagga

SEQ ID NO: 5496257 - DNA, 25 bp, Homo sapien
cattaccaaaccccacgtagggcca

SEQ ID NO: 5496258 - DNA, 25 bp, Homo sapien
cacccccataaaagatgaaattccc

SEQ ID NO: 5496259 - DNA, 25 bp, Homo sapien
tgagataaccctaggagcaaaatca

SEQ ID NO: 5496260 - DNA, 25 bp, Homo sapien
ccagtgttgccgaaaaatatctccc

SEQ ID NO: 5496261 - DNA, 25 bp, Homo sapien
gtacccagctcagttttataaagac

SEQ ID NO: 5496262 - DNA, 25 bp, Homo sapien
gtctttataaaactgagctgggtac

SEQ ID NO: 5496263 - DNA, 25 bp, Homo sapien
atattggtatttccgagcatggatg

SEQ ID NO: 5496264 - DNA, 25 bp, Homo sapien
tggtatttccgagcatggatgtttt

SEQ ID NO: 5496265 - DNA, 25 bp, Homo sapien
tgagatcaaacaaaacatacccaat

SEQ ID NO: 5496266 - DNA, 25 bp, Homo sapien
gaagaccctcatccatataccacca

SEQ ID NO: 5496267 - DNA, 25 bp, Homo sapien
cactcttcaggtcagcccaccgggt

SEQ ID NO: 5496268 - DNA, 25 bp, Homo sapien
tagggcactcttcaggtcagcccac

SEQ ID NO: 5496269 - DNA, 25 bp, Homo sapien
gtgaaagtaatgaagactagggcac

SEQ ID NO: 5496270 - DNA, 25 bp, Homo sapien
catacccaatcagtgaagaagccag

SEQ ID NO: 5496271 - DNA, 25 bp, Homo sapien
aagtaatgaagactagggcactctt

SEQ ID NO: 5496272 - DNA, 25 bp, Homo sapien
ctcatccatataccaccagataacc

SEQ ID NO: 5496273 - DNA, 25 bp, Homo sapien
aaaacatacccaatcagtgaagaag

SEQ ID NO: 5496274 - DNA, 25 bp, Homo sapien
gtacggtctaagagagaacatgttt

SEQ ID NO: 5496275 - DNA, 25 bp, Homo sapien
gtgataagtacggtctaagagagaa

SEQ ID NO: 5496276 - DNA, 25 bp, Homo sapien
tgttgaagctatatcccaataagtg

SEQ ID NO: 5496277 - DNA, 25 bp, Homo sapien
atttactcaaatgggaactactgat

SEQ ID NO: 5496278 - DNA, 25 bp, Homo sapien
cccaataagtgataagtacggtcta

SEQ ID NO: 5496279 - DNA, 25 bp, Homo sapien
ataagcaaggctacaataaatatct

SEQ ID NO: 5496280 - DNA, 25 bp, Homo sapien
gatatcatattgggccacgcatggt

SEQ ID NO: 5496281 - DNA, 25 bp, Homo sapien
tttccagcataagcaaggctacaat

SEQ ID NO: 5496282 - DNA, 25 bp, Homo sapien
cacctggccactgttctcaaattgt

SEQ ID NO: 5496283 - DNA, 25 bp, Homo sapien
caaatgggaactactgataagcagt

SEQ ID NO: 5496284 - DNA, 25 bp, Homo sapien
tttgaatatatgtactgatgctttt

SEQ ID NO: 5496285 - DNA, 25 bp, Homo sapien
gggtcctgcggcaccggaccactag

SEQ ID NO: 5496286 - DNA, 25 bp, Homo sapien
ctagtggtccggtgccgcaggaccc

SEQ ID NO: 5496287 - DNA, 25 bp, Homo sapien
ccctccccaggactccacgtcccga

SEQ ID NO: 5496288 - DNA, 25 bp, Homo sapien
tcgggacgtggagtcctggggaggg

SEQ ID NO: 5496289 - DNA, 25 bp, Homo sapien
gaccctggagggatgaccctccact

SEQ ID NO: 5496290 - DNA, 25 bp, Homo sapien
cacacagggccctgctcactggtgg

SEQ ID NO: 5496291 - DNA, 25 bp, Homo sapien
cagatccccccaagagtccgggaag

SEQ ID NO: 5496292 - DNA, 25 bp, Homo sapien
ggccattgtcagcgccacctccacc

SEQ ID NO: 5496293 - DNA, 25 bp, Homo sapien
caccctgtgtgtaagtggtgacagc

SEQ ID NO: 5496294 - DNA, 25 bp, Homo sapien
tgcagacacgatggctccgtggtca

SEQ ID NO: 5496295 - DNA, 25 bp, Homo sapien
ttccattcctaacgggcctgactcc

SEQ ID NO: 5496296 - DNA, 25 bp, Homo sapien
gcctgccctcggtcacttagccctc

SEQ ID NO: 5496297 - DNA, 25 bp, Homo sapien
gcgtcacctgatcgggccgactcta

SEQ ID NO: 5496298 - DNA, 25 bp, Homo sapien
gctcactcccccaggggaccaggag

SEQ ID NO: 5496299 - DNA, 25 bp, Homo sapien
ccatcaggctctggacaccctcgag

SEQ ID NO: 5496300 - DNA, 25 bp, Homo sapien
gtgtgggccttgcaaaatgatcaag

SEQ ID NO: 5496301 - DNA, 25 bp, Homo sapien
tgcttcagagtgtgaagtcaaatgc

SEQ ID NO: 5496302 - DNA, 25 bp, Homo sapien
tgaagccaccattaatgaattagtc

SEQ ID NO: 5496303 - DNA, 25 bp, Homo sapien
acaaaaggtgggtgaattttctgga

SEQ ID NO: 5496304 - DNA, 25 bp, Homo sapien
ttgtagtagttgacttctcagccac

SEQ ID NO: 5496305 - DNA, 25 bp, Homo sapien
gaagtcaaatgcatgccaacattcc

SEQ ID NO: 5496306 - DNA, 25 bp, Homo sapien
ctgcaggtgataaacttgtagtagt

SEQ ID NO: 5496307 - DNA, 25 bp, Homo sapien
gacgctgcaggtgataaacttgtag

SEQ ID NO: 5496308 - DNA, 25 bp, Homo sapien
tcatgatgttgcttcagagtgtgaa

SEQ ID NO: 5496309 - DNA, 25 bp, Homo sapien
tagtagttgacttctcagccacgtg

SEQ ID NO: 5496310 - DNA, 25 bp, Homo sapien
aataaggaaaagcttgaagccacca

SEQ ID NO: 5496311 - DNA, 25 bp, Homo sapien
catcattatggatacatgcagggtt

SEQ ID NO: 5496312 - DNA, 25 bp, Homo sapien
taacaggaagaagcatcattatgga

SEQ ID NO: 5496313 - DNA, 25 bp, Homo sapien
atccaaggtttggcatcagttgaaa

SEQ ID NO: 5496314 - DNA, 25 bp, Homo sapien
gtggcgactcacagggtcatccaaa

SEQ ID NO: 5496315 - DNA, 25 bp, Homo sapien
gactgtcggtatccagtggcgactc

SEQ ID NO: 5496316 - DNA, 25 bp, Homo sapien
gtaaatttaacaggaagaagcatca

SEQ ID NO: 5496317 - DNA, 25 bp, Homo sapien
tcctacagttaagtgatgggtttcc

SEQ ID NO: 5496318 - DNA, 25 bp, Homo sapien
ggaaaaaggaaccattgaatgtcca

SEQ ID NO: 5496319 - DNA, 25 bp, Homo sapien
acagggtcatccaaatcggtttaac

SEQ ID NO: 5496320 - DNA, 25 bp, Homo sapien
tggaaggctagaaatctgccatttt

SEQ ID NO: 5496321 - DNA, 25 bp, Homo sapien
taagcaccacagcagactgtcggta

SEQ ID NO: 5496322 - DNA, 25 bp, Homo sapien
aagatgaagccactatccccaggcc

SEQ ID NO: 5496323 - DNA, 25 bp, Homo sapien
tgatataacccctgattttaaagac

SEQ ID NO: 5496324 - DNA, 25 bp, Homo sapien
tctgatagagagatcactggtcatc

SEQ ID NO: 5496325 - DNA, 25 bp, Homo sapien
agagatcactggtcatcagttcatt

SEQ ID NO: 5496326 - DNA, 25 bp, Homo sapien
gcaggcaccccaaaagtgacttcac

SEQ ID NO: 5496327 - DNA, 25 bp, Homo sapien
cattcaccaatgtttcagtggcttc

SEQ ID NO: 5496328 - DNA, 25 bp, Homo sapien
aagacaaagaatcttgaagccccaa

SEQ ID NO: 5496329 - DNA, 25 bp, Homo sapien
caaaagatgaagccactatccccag

SEQ ID NO: 5496330 - DNA, 25 bp, Homo sapien
ggcaggcaccccaaaagtgacttca

SEQ ID NO: 5496331 - DNA, 25 bp, Homo sapien
tcttgaagccccaaaagatgaagcc

SEQ ID NO: 5496332 - DNA, 25 bp, Homo sapien
tgaagccactatccccaggccaccc

SEQ ID NO: 5496333 - DNA, 25 bp, Homo sapien
tctggacctgcccctgaacatttat

SEQ ID NO: 5496334 - DNA, 25 bp, Homo sapien
ggcgcccgccaccatgcttggctaa

SEQ ID NO: 5496335 - DNA, 25 bp, Homo sapien
gtggcctctctcacttggcataata

SEQ ID NO: 5496336 - DNA, 25 bp, Homo sapien
ccattttgtgggtacaaatttaatc

SEQ ID NO: 5496337 - DNA, 25 bp, Homo sapien
atgaaataatatagtatgtgttgcc

SEQ ID NO: 5496338 - DNA, 25 bp, Homo sapien
cgtgcccggcccaaatttaatctat

SEQ ID NO: 5496339 - DNA, 25 bp, Homo sapien
tatagtatgtgttgcctttcgtggt

SEQ ID NO: 5496340 - DNA, 25 bp, Homo sapien
catgtggtaacatgtatcagtactt

SEQ ID NO: 5496341 - DNA, 25 bp, Homo sapien
taatgtccatccatgtggtaacatg

SEQ ID NO: 5496342 - DNA, 25 bp, Homo sapien
gtgttgcctttcgtggtggcctctc

SEQ ID NO: 5496343 - DNA, 25 bp, Homo sapien
tgccctctggacctgcccctgaaca

SEQ ID NO: 5496344 - DNA, 25 bp, Homo sapien
gaccacatgatggagatttggggtg

SEQ ID NO: 5496345 - DNA, 25 bp, Homo sapien
agatccaggcaaaggatgtgctttg

SEQ ID NO: 5496346 - DNA, 25 bp, Homo sapien
cctgtgcatattaaagccacgttcc

SEQ ID NO: 5496347 - DNA, 25 bp, Homo sapien
gcgatcgctgtcctaggtttcaggc

SEQ ID NO: 5496348 - DNA, 25 bp, Homo sapien
tcaggcacttcaatgtaacgttgac

SEQ ID NO: 5496349 - DNA, 25 bp, Homo sapien
acttcgtcatttcagcgatcgctgt

SEQ ID NO: 5496350 - DNA, 25 bp, Homo sapien
ggtgtttggttctcagttcatagga

SEQ ID NO: 5496351 - DNA, 25 bp, Homo sapien
gtaacgttgacatgagcccttcctt

SEQ ID NO: 5496352 - DNA, 25 bp, Homo sapien
ctatggaactctaagtcaaaatcat

SEQ ID NO: 5496353 - DNA, 25 bp, Homo sapien
cttcctggattctgcctaagcctcc

SEQ ID NO: 5496354 - DNA, 25 bp, Homo sapien
ggccggaaaccagttcacttcgtca

SEQ ID NO: 5496355 - DNA, 25 bp, Homo sapien
tacttaagatgacacaggcagcaag

SEQ ID NO: 5496356 - DNA, 25 bp, Homo sapien
gtaggtgacctacttaagatgacac

SEQ ID NO: 5496357 - DNA, 25 bp, Homo sapien
cagcaagcagtacagtcaaaacctg

SEQ ID NO: 5496358 - DNA, 25 bp, Homo sapien
agtcaaaacctgaacctcatgcttt

SEQ ID NO: 5496359 - DNA, 25 bp, Homo sapien
aaatacagatttgttgtcccagtct

SEQ ID NO: 5496360 - DNA, 25 bp, Homo sapien
cagggctcacaaaacctcgtgtggt

SEQ ID NO: 5496361 - DNA, 25 bp, Homo sapien
tggaaatatttcagggctcacaaaa

SEQ ID NO: 5496362 - DNA, 25 bp, Homo sapien
aataccctatagttcaccaaagagt

SEQ ID NO: 5496363 - DNA, 25 bp, Homo sapien
ccattagccaatgacagatgtcctc

SEQ ID NO: 5496364 - DNA, 25 bp, Homo sapien
gatgtcctctgaggctcgaagcagg

SEQ ID NO: 5496365 - DNA, 25 bp, Homo sapien
acctcgtgtggtagtcattgttctt

SEQ ID NO: 5496366 - DNA, 25 bp, Homo sapien
tggggccttgctaatgacggcaaaa

SEQ ID NO: 5496367 - DNA, 25 bp, Homo sapien
ctagtcagtatgagtgactgtggcc

SEQ ID NO: 5496368 - DNA, 25 bp, Homo sapien
tgtggcccaggttattcagcctcaa

SEQ ID NO: 5496369 - DNA, 25 bp, Homo sapien
aatgacggcaaaatccgggttctgc

SEQ ID NO: 5496370 - DNA, 25 bp, Homo sapien
gatggtcaggcttgcaggttaattt

SEQ ID NO: 5496371 - DNA, 25 bp, Homo sapien
agctatgttggctgcactgcacgct

SEQ ID NO: 5496372 - DNA, 25 bp, Homo sapien
gcgagatcctgcctccaaaaagaaa

SEQ ID NO: 5496373 - DNA, 25 bp, Homo sapien
ctccaaagggtttacacctcatggg

SEQ ID NO: 5496374 - DNA, 25 bp, Homo sapien
gcctcaagaggtcctgtgaaagtgc

SEQ ID NO: 5496375 - DNA, 25 bp, Homo sapien
agagaaagatatacacgggttcctc

SEQ ID NO: 5496376 - DNA, 25 bp, Homo sapien
ttcaggtaaagtcataaatcaggct

SEQ ID NO: 5496377 - DNA, 25 bp, Homo sapien
tatgtgagcaaacaaagaaggtaaa

SEQ ID NO: 5496378 - DNA, 25 bp, Homo sapien
gaaggtaaactattaatgaggatcc

SEQ ID NO: 5496379 - DNA, 25 bp, Homo sapien
cataaatgtggggattgattgatta

SEQ ID NO: 5496380 - DNA, 25 bp, Homo sapien
aaataaattatgagatgcgggaaat

SEQ ID NO: 5496381 - DNA, 25 bp, Homo sapien
agcacatagtgccagacagaaagta

SEQ ID NO: 5496382 - DNA, 25 bp, Homo sapien
gaatcagacagtgtgggttcatatc

SEQ ID NO: 5496383 - DNA, 25 bp, Homo sapien
gagatgcgggaaattgaatattgta

SEQ ID NO: 5496384 - DNA, 25 bp, Homo sapien
gtaaagatggtgatgatacaaaccc

SEQ ID NO: 5496385 - DNA, 25 bp, Homo sapien
acccctaaagcaaggtgttgtactc

SEQ ID NO: 5496386 - DNA, 25 bp, Homo sapien
agaaccactggaacttatagatcac

SEQ ID NO: 5496387 - DNA, 25 bp, Homo sapien
gtctgtcgggtaaaatactaagcac

SEQ ID NO: 5496388 - DNA, 25 bp, Homo sapien
acctggctgccaatcgattttcaac

SEQ ID NO: 5496389 - DNA, 25 bp, Homo sapien
tagtcattagggacaatgaaaatca

SEQ ID NO: 5496390 - DNA, 25 bp, Homo sapien
caaagatgccaagaccatttacaca

SEQ ID NO: 5496391 - DNA, 25 bp, Homo sapien
agcttaagcgatctgcccagcgcag

SEQ ID NO: 5496392 - DNA, 25 bp, Homo sapien
aatgggacaaccaccacatacccac

SEQ ID NO: 5496393 - DNA, 25 bp, Homo sapien
ccacatacccactagagtaactaac

SEQ ID NO: 5496394 - DNA, 25 bp, Homo sapien
catttacacaggaaagaatagtctc

SEQ ID NO: 5496395 - DNA, 25 bp, Homo sapien
gggacaactggatattagatgctca

SEQ ID NO: 5496396 - DNA, 25 bp, Homo sapien
tggtgcagccattgcagaaaacagt

SEQ ID NO: 5496397 - DNA, 25 bp, Homo sapien
aataccaagtgttggcagggatatg

SEQ ID NO: 5496398 - DNA, 25 bp, Homo sapien
atatggagaaactggaatcctgtac

SEQ ID NO: 5496399 - DNA, 25 bp, Homo sapien
aaatcttccagccaggcgccagtgg

SEQ ID NO: 5496400 - DNA, 25 bp, Homo sapien
atgttagctgtgggtatttcatgaa

SEQ ID NO: 5496401 - DNA, 25 bp, Homo sapien
gaatctgtagattactttgtgtagt

SEQ ID NO: 5496402 - DNA, 25 bp, Homo sapien
tgttcattgggtatgatgttagctg

SEQ ID NO: 5496403 - DNA, 25 bp, Homo sapien
tctatatacaaatttcttcctgggt

SEQ ID NO: 5496404 - DNA, 25 bp, Homo sapien
gattactttgtgtagtattgccatc

SEQ ID NO: 5496405 - DNA, 25 bp, Homo sapien
cagtgttttttggtgtgtaagattt

SEQ ID NO: 5496406 - DNA, 25 bp, Homo sapien
gttgtcccagtgctccagcctggct

SEQ ID NO: 5496407 - DNA, 25 bp, Homo sapien
tggtgtgtaagattttgactcctgt

SEQ ID NO: 5496408 - DNA, 25 bp, Homo sapien
ctttttggattgttcattgggtatg

SEQ ID NO: 5496409 - DNA, 25 bp, Homo sapien
gcctgttgtcccagtgctccagcct

SEQ ID NO: 5496410 - DNA, 25 bp, Homo sapien
tctccaccctcaagcaggccttggt

SEQ ID NO: 5496411 - DNA, 25 bp, Homo sapien
ttgcctgtcacaggggtttggtgta

SEQ ID NO: 5496412 - DNA, 25 bp, Homo sapien
ccaccctcaagcaggccttggtgtc

SEQ ID NO: 5496413 - DNA, 25 bp, Homo sapien
ttaagctgtcacttctgagtaagaa

SEQ ID NO: 5496414 - DNA, 25 bp, Homo sapien
tgttctcgttgttaagctgtcactt

SEQ ID NO: 5496415 - DNA, 25 bp, Homo sapien
aattttgtcacctgggtaataagca

SEQ ID NO: 5496416 - DNA, 25 bp, Homo sapien
tatatttgcctgtcacaggggtttg

SEQ ID NO: 5496417 - DNA, 25 bp, Homo sapien
tgtgtacattagttatatatttgcc

SEQ ID NO: 5496418 - DNA, 25 bp, Homo sapien
cttctgagtaagaatatgtggtatt

SEQ ID NO: 5496419 - DNA, 25 bp, Homo sapien
ggtgtctgctgttcccctcctagtt

SEQ ID NO: 5496420 - DNA, 25 bp, Homo sapien
ccctcaagcaggccttggtgtctgc

SEQ ID NO: 5496421 - DNA, 25 bp, Homo sapien
cgcacgtgtgccgtcgtccccctcg

SEQ ID NO: 5496422 - DNA, 25 bp, Homo sapien
cgagggggacgacggcacacgtgcg

SEQ ID NO: 5496423 - DNA, 25 bp, Homo sapien
gggaacgaccataggatctcaacag

SEQ ID NO: 5496424 - DNA, 25 bp, Homo sapien
ctgttgagatcctatggtcgttccc

SEQ ID NO: 5496425 - DNA, 25 bp, Homo sapien
tccccggtcagacaaagcgtcgcgg

SEQ ID NO: 5496426 - DNA, 25 bp, Homo sapien
ccgcgacgctttgtctgaccgggga

SEQ ID NO: 5496427 - DNA, 25 bp, Homo sapien
ggaaaaatgcctgttcatgagactt

SEQ ID NO: 5496428 - DNA, 25 bp, Homo sapien
agggtcacctcgggctctatctctc

SEQ ID NO: 5496429 - DNA, 25 bp, Homo sapien
ggctgagtttgtctaaagtgctggg

SEQ ID NO: 5496430 - DNA, 25 bp, Homo sapien
gcaggcccctgaactttagccccac

SEQ ID NO: 5496431 - DNA, 25 bp, Homo sapien
ctaagaccctgctcagtcccagttc

SEQ ID NO: 5496432 - DNA, 25 bp, Homo sapien
aaaagctgggactggccatattgaa

SEQ ID NO: 5496433 - DNA, 25 bp, Homo sapien
tgctcacaggtgcaccccttgttga

SEQ ID NO: 5496434 - DNA, 25 bp, Homo sapien
gctcccaacaggaatagggtcacct

SEQ ID NO: 5496435 - DNA, 25 bp, Homo sapien
ggccccatcagagctcccaacagga

SEQ ID NO: 5496436 - DNA, 25 bp, Homo sapien
tttagccccacctcagtggagccgg

SEQ ID NO: 5496437 - DNA, 25 bp, Homo sapien
tggtctggcaagtgatttgctgaac

SEQ ID NO: 5496438 - DNA, 25 bp, Homo sapien
gaacacagtgagcattgaagaaaac

SEQ ID NO: 5496439 - DNA, 25 bp, Homo sapien
aagaaagcagaacagaagctgcctt

SEQ ID NO: 5496440 - DNA, 25 bp, Homo sapien
cctttcaagggattacagtgagagg

SEQ ID NO: 5496441 - DNA, 25 bp, Homo sapien
gaccaacatggtcaaatacaaagac

SEQ ID NO: 5496442 - DNA, 25 bp, Homo sapien
ggaccagtaaggtggcttcaactca

SEQ ID NO: 5496443 - DNA, 25 bp, Homo sapien
aagaaaacaagatagcagcttcacc

SEQ ID NO: 5496444 - DNA, 25 bp, Homo sapien
agacatagtggtaaacagttctctt

SEQ ID NO: 5496445 - DNA, 25 bp, Homo sapien
ttcactgaattgagacagtttggtt

SEQ ID NO: 5496446 - DNA, 25 bp, Homo sapien
tgaattgacaagtagactgagaatt

SEQ ID NO: 5496447 - DNA, 25 bp, Homo sapien
actgagaatttcacaaaaggctttt

SEQ ID NO: 5496448 - DNA, 25 bp, Homo sapien
gctaagatttatattatggcacgtc

SEQ ID NO: 5496449 - DNA, 25 bp, Homo sapien
agaaaaggacagagcatttaccttc

SEQ ID NO: 5496450 - DNA, 25 bp, Homo sapien
ccctgggtaccctgtgacctacatg

SEQ ID NO: 5496451 - DNA, 25 bp, Homo sapien
gtctcattttgggccagaggctgtt

SEQ ID NO: 5496452 - DNA, 25 bp, Homo sapien
caacacctcagaaaaacgcctcatc

SEQ ID NO: 5496453 - DNA, 25 bp, Homo sapien
gctggaaaattaggctagaaagacc

SEQ ID NO: 5496454 - DNA, 25 bp, Homo sapien
aatctgggtgcttctgaatgaatcc

SEQ ID NO: 5496455 - DNA, 25 bp, Homo sapien
atgggtgtggcctagatactttcca

SEQ ID NO: 5496456 - DNA, 25 bp, Homo sapien
actattctgaaacatgggtgtggcc

SEQ ID NO: 5496457 - DNA, 25 bp, Homo sapien
tcgtcagatgggttcagatcctaac

SEQ ID NO: 5496458 - DNA, 25 bp, Homo sapien
caaggcagggaaatgttactaatta

SEQ ID NO: 5496459 - DNA, 25 bp, Homo sapien
ataaaaggacaaacatatgatgagt

SEQ ID NO: 5496460 - DNA, 25 bp, Homo sapien
atagagaagttgtgatatttggaat

SEQ ID NO: 5496461 - DNA, 25 bp, Homo sapien
atatacctctaggggtgcagtaagg

SEQ ID NO: 5496462 - DNA, 25 bp, Homo sapien
agcctgcggtgtagatgccatttaa

SEQ ID NO: 5496463 - DNA, 25 bp, Homo sapien
atagccaaagaatgagtctagtgtc

SEQ ID NO: 5496464 - DNA, 25 bp, Homo sapien
aagctggtggaccttaaagtttctc

SEQ ID NO: 5496465 - DNA, 25 bp, Homo sapien
atagggaaacatgaagtaacaagta

SEQ ID NO: 5496466 - DNA, 25 bp, Homo sapien
ctgcatcttgagagtagatccaatc

SEQ ID NO: 5496467 - DNA, 25 bp, Homo sapien
gataacggacacagccatagccaaa

SEQ ID NO: 5496468 - DNA, 25 bp, Homo sapien
taaagatagagtttgggataacgga

SEQ ID NO: 5496469 - DNA, 25 bp, Homo sapien
tattctttacagtaggcatggtaga

SEQ ID NO: 5496470 - DNA, 25 bp, Homo sapien
ttcagccccatgtccgcttgctagc

SEQ ID NO: 5496471 - DNA, 25 bp, Homo sapien
aggcctcgggtctcacacagtcccg

SEQ ID NO: 5496472 - DNA, 25 bp, Homo sapien
gaaggcacaacctggagtgtaacta

SEQ ID NO: 5496473 - DNA, 25 bp, Homo sapien
tgccatgcagtggactagccacgga

SEQ ID NO: 5496474 - DNA, 25 bp, Homo sapien
taccactctgtggaagtgagcctga

SEQ ID NO: 5496475 - DNA, 25 bp, Homo sapien
aacgcatcttggccagaatagaagg

SEQ ID NO: 5496476 - DNA, 25 bp, Homo sapien
agaggcctccttagaccctcgggtc

SEQ ID NO: 5496477 - DNA, 25 bp, Homo sapien
cccctgtcctgttctggagacgtgg

SEQ ID NO: 5496478 - DNA, 25 bp, Homo sapien
ctcaggtgctcctgaggaatggagg

SEQ ID NO: 5496479 - DNA, 25 bp, Homo sapien
ttaaggaatctgacctctggaggcc

SEQ ID NO: 5496480 - DNA, 25 bp, Homo sapien
gagccacactggagagctgaatata

SEQ ID NO: 5496481 - DNA, 25 bp, Homo sapien
ttgtctgcccatgagcaggacggta

SEQ ID NO: 5496482 - DNA, 25 bp, Homo sapien
gtgcaccggcaaaagccgaagcggt

SEQ ID NO: 5496483 - DNA, 25 bp, Homo sapien
accgcttcggcttttgccggtgcac

SEQ ID NO: 5496484 - DNA, 25 bp, Homo sapien
aatagcccccctgcattagtctgtt

SEQ ID NO: 5496485 - DNA, 25 bp, Homo sapien
ggtacgcaacataacgcctggctaa

SEQ ID NO: 5496486 - DNA, 25 bp, Homo sapien
ctgtgattggcaacataatagcccc

SEQ ID NO: 5496487 - DNA, 25 bp, Homo sapien
caccacgcctggccgcctaaatact

SEQ ID NO: 5496488 - DNA, 25 bp, Homo sapien
tgttcaggaacagtatgcacttctc

SEQ ID NO: 5496489 - DNA, 25 bp, Homo sapien
tatagataagagaaaaggattaagg

SEQ ID NO: 5496490 - DNA, 25 bp, Homo sapien
atgaacattgcaaagacgtcaatat

SEQ ID NO: 5496491 - DNA, 25 bp, Homo sapien
atttcaaaagcagtatgtgtattcc

SEQ ID NO: 5496492 - DNA, 25 bp, Homo sapien
agtatgcacttctcagggctgtcct

SEQ ID NO: 5496493 - DNA, 25 bp, Homo sapien
attaagggaaatcctaccacttaga

SEQ ID NO: 5496494 - DNA, 25 bp, Homo sapien
ctgagaggtggattaatgaacattg

SEQ ID NO: 5496495 - DNA, 25 bp, Homo sapien
cacaatagtccagagaattagcctc

SEQ ID NO: 5496496 - DNA, 25 bp, Homo sapien
agaattagacacagatagaaaaggg

SEQ ID NO: 5496497 - DNA, 25 bp, Homo sapien
gtcctcaggaagcagtgatacctca

SEQ ID NO: 5496498 - DNA, 25 bp, Homo sapien
gagagggcccatattaatgttgaga

SEQ ID NO: 5496499 - DNA, 25 bp, Homo sapien
taggcagcattgagcttacatgttg

SEQ ID NO: 5496500 - DNA, 25 bp, Homo sapien
ttgcaccacctagaaaatatgaccc

SEQ ID NO: 5496501 - DNA, 25 bp, Homo sapien
tgaaggttgacagggttatcccaat

SEQ ID NO: 5496502 - DNA, 25 bp, Homo sapien
catgacttaggactcaaaagcaatt

SEQ ID NO: 5496503 - DNA, 25 bp, Homo sapien
tgagtctatttgaatgagagggccc

SEQ ID NO: 5496504 - DNA, 25 bp, Homo sapien
aatgttgagataaagcagtattgcc

SEQ ID NO: 5496505 - DNA, 25 bp, Homo sapien
aggcccagagtagaaatttgagctt

SEQ ID NO: 5496506 - DNA, 25 bp, Homo sapien
tgagttgccagagttcttgcattgg

SEQ ID NO: 5496507 - DNA, 25 bp, Homo sapien
gtctttggttttacagcagggatat

SEQ ID NO: 5496508 - DNA, 25 bp, Homo sapien
ttcacagggctgaagctttgtgcag

SEQ ID NO: 5496509 - DNA, 25 bp, Homo sapien
ttggatgttttcacagggctgaagc

SEQ ID NO: 5496510 - DNA, 25 bp, Homo sapien
gccgactcagcctcgttaagagccc

SEQ ID NO: 5496511 - DNA, 25 bp, Homo sapien
acaaggagtgatcgtttcgaggatg

SEQ ID NO: 5496512 - DNA, 25 bp, Homo sapien
tgtggtgtaaattgaatacagtcaa

SEQ ID NO: 5496513 - DNA, 25 bp, Homo sapien
gaggatggaagtcactctggccatt

SEQ ID NO: 5496514 - DNA, 25 bp, Homo sapien
ctgtcattcctgccgactcagcctc

SEQ ID NO: 5496515 - DNA, 25 bp, Homo sapien
tctctaccaggtcagttaggttctt

SEQ ID NO: 5496516 - DNA, 25 bp, Homo sapien
cagggatatgttagtgaggcatttt

SEQ ID NO: 5496517 - DNA, 25 bp, Homo sapien
acagtcgtctggactccacgaggac

SEQ ID NO: 5496518 - DNA, 25 bp, Homo sapien
gtcctcgtggagtccagacgactgt

SEQ ID NO: 5496519 - DNA, 25 bp, Homo sapien
gtccaagacacagattcacccaggc

SEQ ID NO: 5496520 - DNA, 25 bp, Homo sapien
atggggagccttcgctctccaccac

SEQ ID NO: 5496521 - DNA, 25 bp, Homo sapien
agctggccacctagtgtcacgggtg

SEQ ID NO: 5496522 - DNA, 25 bp, Homo sapien
attcacccaggcagactctcacggt

SEQ ID NO: 5496523 - DNA, 25 bp, Homo sapien
gcccgagccgagttcccctctggct

SEQ ID NO: 5496524 - DNA, 25 bp, Homo sapien
cttgggatcccctaaccagagcctt

SEQ ID NO: 5496525 - DNA, 25 bp, Homo sapien
ctgcccgtccagtccaagacacaga

SEQ ID NO: 5496526 - DNA, 25 bp, Homo sapien
tcactgtgtcagtaaccgaggactc

SEQ ID NO: 5496527 - DNA, 25 bp, Homo sapien
tttgccatagggctgcacactggtc

SEQ ID NO: 5496528 - DNA, 25 bp, Homo sapien
agtaaccgaggactctcctgaagcc

SEQ ID NO: 5496529 - DNA, 25 bp, Homo sapien
ctggtcaaatcagtactgcccgtcc

SEQ ID NO: 5496530 - DNA, 25 bp, Homo sapien
gcggccccacttcccacactggcag

SEQ ID NO: 5496531 - DNA, 25 bp, Homo sapien
gtgaggtctttgcccaaggagggta

SEQ ID NO: 5496532 - DNA, 25 bp, Homo sapien
gattcggctccaccctcacgggctg

SEQ ID NO: 5496533 - DNA, 25 bp, Homo sapien
tgacacagagaccccagtccacata

SEQ ID NO: 5496534 - DNA, 25 bp, Homo sapien
cgggaactcctgccccacgcaggct

SEQ ID NO: 5496535 - DNA, 25 bp, Homo sapien
tcccgtcccttgctgcgccgggaac

SEQ ID NO: 5496536 - DNA, 25 bp, Homo sapien
tgcttctccacgggtgtgctctgtg

SEQ ID NO: 5496537 - DNA, 25 bp, Homo sapien
ggcttgttcctgggtgatgagattc

SEQ ID NO: 5496538 - DNA, 25 bp, Homo sapien
tgcctgtgagtgttctgagagataa

SEQ ID NO: 5496539 - DNA, 25 bp, Homo sapien
ccagtccacatagtcagggctgggc

SEQ ID NO: 5496540 - DNA, 25 bp, Homo sapien
ccagagctcatgggttagcttccac

SEQ ID NO: 5496541 - DNA, 25 bp, Homo sapien
cagcatcgagaagatgctggccacc

SEQ ID NO: 5496542 - DNA, 25 bp, Homo sapien
gacaccaacaagttcagtccgtttc

SEQ ID NO: 5496543 - DNA, 25 bp, Homo sapien
gtacaccaactgcctgcagaagatc

SEQ ID NO: 5496544 - DNA, 25 bp, Homo sapien
agcggaactcgtacaccaactgcct

SEQ ID NO: 5496545 - DNA, 25 bp, Homo sapien
gttcagtccgtttctgcagacagcg

SEQ ID NO: 5496546 - DNA, 25 bp, Homo sapien
agaagatcacctgtccccactgtcc

SEQ ID NO: 5496547 - DNA, 25 bp, Homo sapien
tccgtttctgcagacagcggaggac

SEQ ID NO: 5496548 - DNA, 25 bp, Homo sapien
actcgtacaccaactgcctgcagaa

SEQ ID NO: 5496549 - DNA, 25 bp, Homo sapien
gggagtttgccagcatcgagaagat

SEQ ID NO: 5496550 - DNA, 25 bp, Homo sapien
acagacaccaacaagttcagtccgt

SEQ ID NO: 5496551 - DNA, 25 bp, Homo sapien
agtccgtttctgcagacagcggagg

SEQ ID NO: 5496552 - DNA, 25 bp, Homo sapien
acacacactggtcagaacccttccc

SEQ ID NO: 5496553 - DNA, 25 bp, Homo sapien
cccttgtcacaaatgcgatgccttc

SEQ ID NO: 5496554 - DNA, 25 bp, Homo sapien
tgttggatcccatgatagcacagac

SEQ ID NO: 5496555 - DNA, 25 bp, Homo sapien
tgagaagaaacgggcttatccccca

SEQ ID NO: 5496556 - DNA, 25 bp, Homo sapien
cgccaccagttgcgcaaacacggag

SEQ ID NO: 5496557 - DNA, 25 bp, Homo sapien
cgaagtgctagacctcacctcacgg

SEQ ID NO: 5496558 - DNA, 25 bp, Homo sapien
cagtcaaaagagagtgatgttggat

SEQ ID NO: 5496559 - DNA, 25 bp, Homo sapien
tgatagcacagacagtcagtcggat

SEQ ID NO: 5496560 - DNA, 25 bp, Homo sapien
gcaaacacggagttaccacctgttc

SEQ ID NO: 5496561 - DNA, 25 bp, Homo sapien
tgttccctgagaagaaacgggctta

SEQ ID NO: 5496562 - DNA, 25 bp, Homo sapien
accaaatctaactgtgtgcgccacc

SEQ ID NO: 5496563 - DNA, 25 bp, Homo sapien
cttcctcaccgtgaggggtgtggat

SEQ ID NO: 5496564 - DNA, 25 bp, Homo sapien
agcccagaacacaacttggagagca

SEQ ID NO: 5496565 - DNA, 25 bp, Homo sapien
tgccagcccagtatgctctaacctc

SEQ ID NO: 5496566 - DNA, 25 bp, Homo sapien
gcaccgagcccccagtccttgcttc

SEQ ID NO: 5496567 - DNA, 25 bp, Homo sapien
gggtccgtctagagatcctggagga

SEQ ID NO: 5496568 - DNA, 25 bp, Homo sapien
gctttacgagcacacagtggaagga

SEQ ID NO: 5496569 - DNA, 25 bp, Homo sapien
gggcattgctagtccataaaggtcc

SEQ ID NO: 5496570 - DNA, 25 bp, Homo sapien
cctctgcccaagctggcacaggtga

SEQ ID NO: 5496571 - DNA, 25 bp, Homo sapien
gtccttgcttcagaggtacaggccc

SEQ ID NO: 5496572 - DNA, 25 bp, Homo sapien
tcacggtccaatgtgacactgccag

SEQ ID NO: 5496573 - DNA, 25 bp, Homo sapien
tgcccagcctctgaatgatgccagc

SEQ ID NO: 5496574 - DNA, 25 bp, Homo sapien
aggtcttcctggccgagtgctacaa

SEQ ID NO: 5496575 - DNA, 25 bp, Homo sapien
gcagcatgagcacattgtcaagttc

SEQ ID NO: 5496576 - DNA, 25 bp, Homo sapien
ggggaccccctcatcatggtctttg

SEQ ID NO: 5496577 - DNA, 25 bp, Homo sapien
ctctgtctccccgcctgaagagcac

SEQ ID NO: 5496578 - DNA, 25 bp, Homo sapien
ctgctcaccaacctgcagcatgagc

SEQ ID NO: 5496579 - DNA, 25 bp, Homo sapien
tacaacctcagcccgaccaaggaca

SEQ ID NO: 5496580 - DNA, 25 bp, Homo sapien
ccgagtgctacaacctcagcccgac

SEQ ID NO: 5496581 - DNA, 25 bp, Homo sapien
catgcccattgggagaatagcagat

SEQ ID NO: 5496582 - DNA, 25 bp, Homo sapien
agcacgccatgcccattgggagaat

SEQ ID NO: 5496583 - DNA, 25 bp, Homo sapien
cgaccaaggacaagatgcttgtggc

SEQ ID NO: 5496584 - DNA, 25 bp, Homo sapien
ttgtcaagttctatggagtgtgcgg

SEQ ID NO: 5496585 - DNA, 25 bp, Homo sapien
gggaagacctggcttacatgaacca

SEQ ID NO: 5496586 - DNA, 25 bp, Homo sapien
ggaagggaagcccatcaacctctct

SEQ ID NO: 5496587 - DNA, 25 bp, Homo sapien
ctgaacccccggcactccgtggatt

SEQ ID NO: 5496588 - DNA, 25 bp, Homo sapien
ctcccatggagaataatcactgccc

SEQ ID NO: 5496589 - DNA, 25 bp, Homo sapien
tggagaataatcactgcccagcgtc

SEQ ID NO: 5496590 - DNA, 25 bp, Homo sapien
aacctctctcatcgggaagacctgg

SEQ ID NO: 5496591 - DNA, 25 bp, Homo sapien
aatcactgcccagcgtcctccgagt

SEQ ID NO: 5496592 - DNA, 25 bp, Homo sapien
gcactccgtggatttcaaacagtcc

SEQ ID NO: 5496593 - DNA, 25 bp, Homo sapien
aaacagtccaggctctccgaggacg

SEQ ID NO: 5496594 - DNA, 25 bp, Homo sapien
gatttcaaacagtccaggctctccg

SEQ ID NO: 5496595 - DNA, 25 bp, Homo sapien
catgcaccctctgatcctgaacccc

SEQ ID NO: 5496596 - DNA, 25 bp, Homo sapien
tgtttcacgaatcaaagtagtcact

SEQ ID NO: 5496597 - DNA, 25 bp, Homo sapien
ttttgctgctgtctgaaacattcaa

SEQ ID NO: 5496598 - DNA, 25 bp, Homo sapien
cataaggaaaatacattgtttcacg

SEQ ID NO: 5496599 - DNA, 25 bp, Homo sapien
tgggagtgctgattataggaaattt

SEQ ID NO: 5496600 - DNA, 25 bp, Homo sapien
tgagaaaaactattcataaggaaaa

SEQ ID NO: 5496601 - DNA, 25 bp, Homo sapien
cttttaaatatgggagtgctgatta

SEQ ID NO: 5496602 - DNA, 25 bp, Homo sapien
gcaacagcagttagtctgatacaga

SEQ ID NO: 5496603 - DNA, 25 bp, Homo sapien
ggtattaaaagaatgcaacagcagt

SEQ ID NO: 5496604 - DNA, 25 bp, Homo sapien
aaaataactatcatggccaggagtg

SEQ ID NO: 5496605 - DNA, 25 bp, Homo sapien
aaaagaataaatacaccatgagaaa

SEQ ID NO: 5496606 - DNA, 25 bp, Homo sapien
atcagacaaattaagaggtaggtat

SEQ ID NO: 5496607 - DNA, 25 bp, Homo sapien
agccgctttgggaagtacattgaca

SEQ ID NO: 5496608 - DNA, 25 bp, Homo sapien
ctttaaccccagcggggtgatcgag

SEQ ID NO: 5496609 - DNA, 25 bp, Homo sapien
ccgcaacgacaactcaagccgcttt

SEQ ID NO: 5496610 - DNA, 25 bp, Homo sapien
tggaaatgccaagacaatccgcaac

SEQ ID NO: 5496611 - DNA, 25 bp, Homo sapien
aggcctcactggataatgagggccc

SEQ ID NO: 5496612 - DNA, 25 bp, Homo sapien
cttcctcttagcgggcgcttggctt

SEQ ID NO: 5496613 - DNA, 25 bp, Homo sapien
gcttccgtcactgtctggtgcagcc

SEQ ID NO: 5496614 - DNA, 25 bp, Homo sapien
tgggcatcgcccgcttaccttcagc

SEQ ID NO: 5496615 - DNA, 25 bp, Homo sapien
gcgcgcgcatcgagcaatttctcct

SEQ ID NO: 5496616 - DNA, 25 bp, Homo sapien
ttcttcaattcgaggcttggccacc

SEQ ID NO: 5496617 - DNA, 25 bp, Homo sapien
atttctcctggagaagtcccgggtc

SEQ ID NO: 5496618 - DNA, 25 bp, Homo sapien
atcatgcttctggagctgcagtccc

SEQ ID NO: 5496619 - DNA, 25 bp, Homo sapien
caaagtttacctaggcaagcacgcc

SEQ ID NO: 5496620 - DNA, 25 bp, Homo sapien
ccacctgaaccacgaccatgacatc

SEQ ID NO: 5496621 - DNA, 25 bp, Homo sapien
accccaaatgggtcctcactgccgc

SEQ ID NO: 5496622 - DNA, 25 bp, Homo sapien
ggcaggctgccctactagtgcaagg

SEQ ID NO: 5496623 - DNA, 25 bp, Homo sapien
ggtgagggaagttgtccactctatc

SEQ ID NO: 5496624 - DNA, 25 bp, Homo sapien
cctggcaccacctgtcgggtgtctg

SEQ ID NO: 5496625 - DNA, 25 bp, Homo sapien
gccctagtgatcgcctccctgacct

SEQ ID NO: 5496626 - DNA, 25 bp, Homo sapien
cggtccagctcacaggctacatcca

SEQ ID NO: 5496627 - DNA, 25 bp, Homo sapien
tgggtttctcccaggtggctacacc

SEQ ID NO: 5496628 - DNA, 25 bp, Homo sapien
gaccttggccttgtcaggaggtgtc

SEQ ID NO: 5496629 - DNA, 25 bp, Homo sapien
cccacgtcctctccaggaggggaca

SEQ ID NO: 5496630 - DNA, 25 bp, Homo sapien
cccacgccctctccaggaggggaca

SEQ ID NO: 5496631 - DNA, 25 bp, Homo sapien
ggtcacgaactgcccacgtcctctc

SEQ ID NO: 5496632 - DNA, 25 bp, Homo sapien
tcacgaactgcccacgccctctcca

SEQ ID NO: 5496633 - DNA, 25 bp, Homo sapien
tgcccacgtcgtctccaggaaggga

SEQ ID NO: 5496634 - DNA, 25 bp, Homo sapien
gggttcatgagctgcccacgtcctc

SEQ ID NO: 5496635 - DNA, 25 bp, Homo sapien
cccacgtcctctccaggaagggacc

SEQ ID NO: 5496636 - DNA, 25 bp, Homo sapien
gcccacgccctctccaggaagggac

SEQ ID NO: 5496637 - DNA, 25 bp, Homo sapien
gcccacgtcctctccaggaggggac

SEQ ID NO: 5496638 - DNA, 25 bp, Homo sapien
gggttcatgagctgcccacgccctt

SEQ ID NO: 5496639 - DNA, 25 bp, Homo sapien
tcacgagctgcccacgtcctctcca

SEQ ID NO: 5496640 - DNA, 25 bp, Homo sapien
cacaatgaacgacctgaactctgat

SEQ ID NO: 5496641 - DNA, 25 bp, Homo sapien
ctctgatgcggacacaccgccagga

SEQ ID NO: 5496642 - DNA, 25 bp, Homo sapien
tccacttagatgtaaaagatgcacc

SEQ ID NO: 5496643 - DNA, 25 bp, Homo sapien
agatataagcctggcccacaagggg

SEQ ID NO: 5496644 - DNA, 25 bp, Homo sapien
caccgccaggagacttttgagacgg

SEQ ID NO: 5496645 - DNA, 25 bp, Homo sapien
caggttcagaggtctccaggaccat

SEQ ID NO: 5496646 - DNA, 25 bp, Homo sapien
caaatacggcttaaaaaggagtcca

SEQ ID NO: 5496647 - DNA, 25 bp, Homo sapien
agggaaagccaactaggtctcaaat

SEQ ID NO: 5496648 - DNA, 25 bp, Homo sapien
gtctagtagctggacacccaggttc

SEQ ID NO: 5496649 - DNA, 25 bp, Homo sapien
ggtgcacaccagcatgttccactaa

SEQ ID NO: 5496650 - DNA, 25 bp, Homo sapien
gacctgaactctgatgcggacacac

SEQ ID NO: 5496651 - DNA, 25 bp, Homo sapien
ctccgaaaacaccagagagttcaca

SEQ ID NO: 5496652 - DNA, 25 bp, Homo sapien
ctggatcaagaccctatgagtgcag

SEQ ID NO: 5496653 - DNA, 25 bp, Homo sapien
tgcccagggcccatgtcagatttat

SEQ ID NO: 5496654 - DNA, 25 bp, Homo sapien
gagaaagtccttgagtacacagtga

SEQ ID NO: 5496655 - DNA, 25 bp, Homo sapien
atctgttagcaccctggagaaagtc

SEQ ID NO: 5496656 - DNA, 25 bp, Homo sapien
ataacagctctgaaggagatccctt

SEQ ID NO: 5496657 - DNA, 25 bp, Homo sapien
gccacacagttcacaagggaaagac

SEQ ID NO: 5496658 - DNA, 25 bp, Homo sapien
agggtggcatcagcctgaattgaac

SEQ ID NO: 5496659 - DNA, 25 bp, Homo sapien
aggtatgtgtgaactgcattgcacc

SEQ ID NO: 5496660 - DNA, 25 bp, Homo sapien
gagtggcaaatgtggaaatctgtta

SEQ ID NO: 5496661 - DNA, 25 bp, Homo sapien
ggagatcccttatgagggtggcatc

SEQ ID NO: 5496662 - DNA, 25 bp, Homo sapien
cagctatttgctgggacaggtcatt

SEQ ID NO: 5496663 - DNA, 25 bp, Homo sapien
cccatcttgtaggagggcatctgtc

SEQ ID NO: 5496664 - DNA, 25 bp, Homo sapien
ggcacagaacctggagtccagtcac

SEQ ID NO: 5496665 - DNA, 25 bp, Homo sapien
aagggaagtcgttaggaactattca

SEQ ID NO: 5496666 - DNA, 25 bp, Homo sapien
tacctactgcacaggactatgggga

SEQ ID NO: 5496667 - DNA, 25 bp, Homo sapien
tccagaggcttccagggtaacttgg

SEQ ID NO: 5496668 - DNA, 25 bp, Homo sapien
attagcacagaggtcctggctgatt

SEQ ID NO: 5496669 - DNA, 25 bp, Homo sapien
gtagccagggagaaataatacctac

SEQ ID NO: 5496670 - DNA, 25 bp, Homo sapien
atggggacagccaaaagccttttat

SEQ ID NO: 5496671 - DNA, 25 bp, Homo sapien
ttctcaggcctgcacgcacatatgc

SEQ ID NO: 5496672 - DNA, 25 bp, Homo sapien
caggccactgaagcacactggctgg

SEQ ID NO: 5496673 - DNA, 25 bp, Homo sapien
tacttaggactcacagattggtttg

SEQ ID NO: 5496674 - DNA, 25 bp, Homo sapien
gtcggctccttactgcacctgtggc

SEQ ID NO: 5496675 - DNA, 25 bp, Homo sapien
tttgaacacgattggcacaactgcc

SEQ ID NO: 5496676 - DNA, 25 bp, Homo sapien
aggaaaacttgcaatgatggagtcc

SEQ ID NO: 5496677 - DNA, 25 bp, Homo sapien
tccccgaccctcaagatccagtgca

SEQ ID NO: 5496678 - DNA, 25 bp, Homo sapien
gctggccgccccaccctaagcttat

SEQ ID NO: 5496679 - DNA, 25 bp, Homo sapien
atacccggggtttgccatcccatgc

SEQ ID NO: 5496680 - DNA, 25 bp, Homo sapien
tggaggcagatgagccgaatttata

SEQ ID NO: 5496681 - DNA, 25 bp, Homo sapien
aatgaactctctcggagggtgccat

SEQ ID NO: 5496682 - DNA, 25 bp, Homo sapien
ggagggtgccattttgtcggctcct

SEQ ID NO: 5496683 - DNA, 25 bp, Homo sapien
gaggcggcgtctgatttacttagga

SEQ ID NO: 5496684 - DNA, 25 bp, Homo sapien
tccagaccaaaaggccgtgttaaca

SEQ ID NO: 5496685 - DNA, 25 bp, Homo sapien
cactgagtgagtcacaacagcaaca

SEQ ID NO: 5496686 - DNA, 25 bp, Homo sapien
gatgaactgttcacaagaaggtgat

SEQ ID NO: 5496687 - DNA, 25 bp, Homo sapien
cacacatagtaccctttaagccggc

SEQ ID NO: 5496688 - DNA, 25 bp, Homo sapien
tagaactctttaaggccaatttgcc

SEQ ID NO: 5496689 - DNA, 25 bp, Homo sapien
agaaggtgatgagtgtcaacactga

SEQ ID NO: 5496690 - DNA, 25 bp, Homo sapien
tctcaatacgtaaaacacacatagt

SEQ ID NO: 5496691 - DNA, 25 bp, Homo sapien
tgagtcacaacagcaacaagaggtg

SEQ ID NO: 5496692 - DNA, 25 bp, Homo sapien
ttgtataacagatgtgtgcatattt

SEQ ID NO: 5496693 - DNA, 25 bp, Homo sapien
aagccggcaattgcacttgtaggaa

SEQ ID NO: 5496694 - DNA, 25 bp, Homo sapien
ataaaatggactagtgtctacacat

SEQ ID NO: 5496695 - DNA, 25 bp, Homo sapien
gaaccacctctggaactgtggtcat

SEQ ID NO: 5496696 - DNA, 25 bp, Homo sapien
gttgataacatccgccccccaggtg

SEQ ID NO: 5496697 - DNA, 25 bp, Homo sapien
gctccttccagcagtcataatctgt

SEQ ID NO: 5496698 - DNA, 25 bp, Homo sapien
acttgcgtaacaaattccagcctcc

SEQ ID NO: 5496699 - DNA, 25 bp, Homo sapien
taacatccgccccccaggtgcggaa

SEQ ID NO: 5496700 - DNA, 25 bp, Homo sapien
ctggaactgtggtcatgttgataac

SEQ ID NO: 5496701 - DNA, 25 bp, Homo sapien
ccatggcgatacttgcgtaacaaat

SEQ ID NO: 5496702 - DNA, 25 bp, Homo sapien
cacctctggaactgtggtcatgttg

SEQ ID NO: 5496703 - DNA, 25 bp, Homo sapien
cttcctcgtgctccttccagcagtc

SEQ ID NO: 5496704 - DNA, 25 bp, Homo sapien
cagcctccttagcaagaaccacctc

SEQ ID NO: 5496705 - DNA, 25 bp, Homo sapien
ttccagcctccttagcaagaaccac

SEQ ID NO: 5496706 - DNA, 25 bp, Homo sapien
ttcctccctgactcagtgcacagtc

SEQ ID NO: 5496707 - DNA, 25 bp, Homo sapien
tcccagttccggctggccactgtgg

SEQ ID NO: 5496708 - DNA, 25 bp, Homo sapien
gccactgtggtttatgcctatgatt

SEQ ID NO: 5496709 - DNA, 25 bp, Homo sapien
tatgccagcctgggtaaccaagtga

SEQ ID NO: 5496710 - DNA, 25 bp, Homo sapien
ggctcaggagtcacaccgacctgga

SEQ ID NO: 5496711 - DNA, 25 bp, Homo sapien
actgcatagcaaattgccccagatc

SEQ ID NO: 5496712 - DNA, 25 bp, Homo sapien
tgccccagatcttagcagctttgta

SEQ ID NO: 5496713 - DNA, 25 bp, Homo sapien
gtgcacagtcttaagcaagtgtatc

SEQ ID NO: 5496714 - DNA, 25 bp, Homo sapien
aaggaagaaatctcagtttcctccc

SEQ ID NO: 5496715 - DNA, 25 bp, Homo sapien
tgggtaaccaagtgagattctgtca

SEQ ID NO: 5496716 - DNA, 25 bp, Homo sapien
tttatgtactgatgacacctgtatt

SEQ ID NO: 5496717 - DNA, 25 bp, Homo sapien
acaagacctggtctgcaccacgaat

SEQ ID NO: 5496718 - DNA, 25 bp, Homo sapien
ctgtgaaatggggattccaattcct

SEQ ID NO: 5496719 - DNA, 25 bp, Homo sapien
gtagggacaatgatggaagtgtcct

SEQ ID NO: 5496720 - DNA, 25 bp, Homo sapien
ctgtattcccagcagagatgaggtt

SEQ ID NO: 5496721 - DNA, 25 bp, Homo sapien
acattggttgaagagatgaataggg

SEQ ID NO: 5496722 - DNA, 25 bp, Homo sapien
cctgaataaagcactgagagaagaa

SEQ ID NO: 5496723 - DNA, 25 bp, Homo sapien
cgttccccatgagaaccggctgaga

SEQ ID NO: 5496724 - DNA, 25 bp, Homo sapien
caccacgaatgcagcagcctgaata

SEQ ID NO: 5496725 - DNA, 25 bp, Homo sapien
acaggacaatggctcagcacatgct

SEQ ID NO: 5496726 - DNA, 25 bp, Homo sapien
tgaatagggcaatgactataaagcc

SEQ ID NO: 5496727 - DNA, 25 bp, Homo sapien
gtgtcctgaatgagggcatcagatc

SEQ ID NO: 5496728 - DNA, 25 bp, Homo sapien
tgagccccaacaataggaaaacaca

SEQ ID NO: 5496729 - DNA, 25 bp, Homo sapien
tcgccccttccccctggccaggcca

SEQ ID NO: 5496730 - DNA, 25 bp, Homo sapien
gggagggactgtgacctcttccagg

SEQ ID NO: 5496731 - DNA, 25 bp, Homo sapien
tcatcatgccagagcgccaaacttt

SEQ ID NO: 5496732 - DNA, 25 bp, Homo sapien
gaggggtcccactcaggctttggac

SEQ ID NO: 5496733 - DNA, 25 bp, Homo sapien
tagtcatctgtaaggaagttggaga

SEQ ID NO: 5496734 - DNA, 25 bp, Homo sapien
ctcaacctagtggtctcgccccttc

SEQ ID NO: 5496735 - DNA, 25 bp, Homo sapien
gcacagtcatccaatagggggcttt

SEQ ID NO: 5496736 - DNA, 25 bp, Homo sapien
ggtctgaagcctggtcctccacaca

SEQ ID NO: 5496737 - DNA, 25 bp, Homo sapien
gccatcacccagtggggtctgaagc

SEQ ID NO: 5496738 - DNA, 25 bp, Homo sapien
gggagagggtcttaagacaattgca

SEQ ID NO: 5496739 - DNA, 25 bp, Homo sapien
gggcctcgtccttgccccggtgccg

SEQ ID NO: 5496740 - DNA, 25 bp, Homo sapien
cggcaccggggcaaggacgaggccc

SEQ ID NO: 5496741 - DNA, 25 bp, Homo sapien
aatgaagcacagagactaggttctc

SEQ ID NO: 5496742 - DNA, 25 bp, Homo sapien
gggcactatgctggccagcacaggg

SEQ ID NO: 5496743 - DNA, 25 bp, Homo sapien
cgtcctacaaggaaccaggtagacc

SEQ ID NO: 5496744 - DNA, 25 bp, Homo sapien
ataatcggattgcctgacacctgcg

SEQ ID NO: 5496745 - DNA, 25 bp, Homo sapien
cctgccttaaagccaaggggaagtg

SEQ ID NO: 5496746 - DNA, 25 bp, Homo sapien
gggtcttcaggagtccgtgtcatcc

SEQ ID NO: 5496747 - DNA, 25 bp, Homo sapien
cccttggggacaacttcagtcagct

SEQ ID NO: 5496748 - DNA, 25 bp, Homo sapien
tcatcccagcatgagagaaaggatc

SEQ ID NO: 5496749 - DNA, 25 bp, Homo sapien
cgcaggtgcacatgtggcttctaaa

SEQ ID NO: 5496750 - DNA, 25 bp, Homo sapien
agaaggtatctcctgaaagggactc

SEQ ID NO: 5496751 - DNA, 25 bp, Homo sapien
gtgcatatgggctctctggctgtga

SEQ ID NO: 5496752 - DNA, 25 bp, Homo sapien
aagtcccgaagtcctgcgttgctgt

SEQ ID NO: 5496753 - DNA, 25 bp, Homo sapien
gacgctggattcagcggccccagaa

SEQ ID NO: 5496754 - DNA, 25 bp, Homo sapien
aactccagaatgcactgccccgcta

SEQ ID NO: 5496755 - DNA, 25 bp, Homo sapien
tgagtcccctgagacgctggattca

SEQ ID NO: 5496756 - DNA, 25 bp, Homo sapien
gtgtcactgacccatgctctgctcc

SEQ ID NO: 5496757 - DNA, 25 bp, Homo sapien
ctgcaacacaggatcatctggctgc

SEQ ID NO: 5496758 - DNA, 25 bp, Homo sapien
attatccccatgaagtcccgaagtc

SEQ ID NO: 5496759 - DNA, 25 bp, Homo sapien
tcctgcgttgctgtgaccatgaaga

SEQ ID NO: 5496760 - DNA, 25 bp, Homo sapien
gttccaccagctactgctgtctggc

SEQ ID NO: 5496761 - DNA, 25 bp, Homo sapien
ctggctccccggaccttcggggtga

SEQ ID NO: 5496762 - DNA, 25 bp, Homo sapien
ttatgttcaagctcctgcaagtggc

SEQ ID NO: 5496763 - DNA, 25 bp, Homo sapien
gacatggaattactcaaaatgatct

SEQ ID NO: 5496764 - DNA, 25 bp, Homo sapien
ctcactgctacactcccaccagctc

SEQ ID NO: 5496765 - DNA, 25 bp, Homo sapien
gtctggatcgggacctctttcctgt

SEQ ID NO: 5496766 - DNA, 25 bp, Homo sapien
ttgtgcaagatccaagaaccctctc

SEQ ID NO: 5496767 - DNA, 25 bp, Homo sapien
caccagctctgcctatggaatagtc

SEQ ID NO: 5496768 - DNA, 25 bp, Homo sapien
tttcctgtaacactgggaggccaat

SEQ ID NO: 5496769 - DNA, 25 bp, Homo sapien
tgtgtggatgacatggaattactca

SEQ ID NO: 5496770 - DNA, 25 bp, Homo sapien
cttataaagcaagccacagggttgt

SEQ ID NO: 5496771 - DNA, 25 bp, Homo sapien
ccctctcttgggtctggatcgggac

SEQ ID NO: 5496772 - DNA, 25 bp, Homo sapien
tactctatggactcgccctgaattc

SEQ ID NO: 5496773 - DNA, 25 bp, Homo sapien
gatctaggttcatttgtttcgacat

SEQ ID NO: 5496774 - DNA, 25 bp, Homo sapien
tacaagaaaattaatgtggttggat

SEQ ID NO: 5496775 - DNA, 25 bp, Homo sapien
cacctggtttgcacacgtgtcgttt

SEQ ID NO: 5496776 - DNA, 25 bp, Homo sapien
ggggaagctcgacatgaattatgta

SEQ ID NO: 5496777 - DNA, 25 bp, Homo sapien
ggattcgtggctgtaaggacgataa

SEQ ID NO: 5496778 - DNA, 25 bp, Homo sapien
gtcatgttctggagccacctggttt

SEQ ID NO: 5496779 - DNA, 25 bp, Homo sapien
aaaagaatttgctgcttgccccaac

SEQ ID NO: 5496780 - DNA, 25 bp, Homo sapien
gtggttggattcttaaggaaagcat

SEQ ID NO: 5496781 - DNA, 25 bp, Homo sapien
aacatacgtgtgtaatgccccggtg

SEQ ID NO: 5496782 - DNA, 25 bp, Homo sapien
aatgcacatcaaagagagatcactt

SEQ ID NO: 5496783 - DNA, 25 bp, Homo sapien
gctgtaaggacgataagaaattgca

SEQ ID NO: 5496784 - DNA, 25 bp, Homo sapien
ctggaagctaagactatgaaacaac

SEQ ID NO: 5496785 - DNA, 25 bp, Homo sapien
aagatttggtggccattgatgttgc

SEQ ID NO: 5496786 - DNA, 25 bp, Homo sapien
actctggtctcccacacagctggct

SEQ ID NO: 5496787 - DNA, 25 bp, Homo sapien
cagcactcctggctcactggcttcc

SEQ ID NO: 5496788 - DNA, 25 bp, Homo sapien
tggcaccccctacccaggaactgac

SEQ ID NO: 5496789 - DNA, 25 bp, Homo sapien
cagatgcacaggaggttattcttgc

SEQ ID NO: 5496790 - DNA, 25 bp, Homo sapien
cttgatgaattggctctgtctaggc

SEQ ID NO: 5496791 - DNA, 25 bp, Homo sapien
gttgatgcaggacccacagcaatta

SEQ ID NO: 5496792 - DNA, 25 bp, Homo sapien
cagctggctccatgtgaattactct

SEQ ID NO: 5496793 - DNA, 25 bp, Homo sapien
gttacagtggtatgggacaaaatta

SEQ ID NO: 5496794 - DNA, 25 bp, Homo sapien
tgacgagtatatgtgatccagatgc

SEQ ID NO: 5496795 - DNA, 25 bp, Homo sapien
ttgcaaccagcctattggaccagat

SEQ ID NO: 5496796 - DNA, 25 bp, Homo sapien
tcataataccacagtgacacagacc

SEQ ID NO: 5496797 - DNA, 25 bp, Homo sapien
cacttcaaacctacctctggcctgg

SEQ ID NO: 5496798 - DNA, 25 bp, Homo sapien
cccccaaacgtaatcataataccac

SEQ ID NO: 5496799 - DNA, 25 bp, Homo sapien
ccagacgtccataccgtagtcttac

SEQ ID NO: 5496800 - DNA, 25 bp, Homo sapien
agtcttacccccaaacgtaatcata

SEQ ID NO: 5496801 - DNA, 25 bp, Homo sapien
ataataccacagtgacacagacctc

SEQ ID NO: 5496802 - DNA, 25 bp, Homo sapien
cgtaatcataataccacagtgacac

SEQ ID NO: 5496803 - DNA, 25 bp, Homo sapien
caaacctacctctggcctggggaaa

SEQ ID NO: 5496804 - DNA, 25 bp, Homo sapien
acagacctcacttcaaacctacctc

SEQ ID NO: 5496805 - DNA, 25 bp, Homo sapien
cgtccataccgtagtcttaccccca

SEQ ID NO: 5496806 - DNA, 25 bp, Homo sapien
ttcaaacctacctctggcctgggga

SEQ ID NO: 5496807 - DNA, 25 bp, Homo sapien
gtctcaagccctgtcccgcaggaag

SEQ ID NO: 5496808 - DNA, 25 bp, Homo sapien
ggctgcaggtctcaagccctgtccc

SEQ ID NO: 5496809 - DNA, 25 bp, Homo sapien
gctgtgggcctgtactcctcagccc

SEQ ID NO: 5496810 - DNA, 25 bp, Homo sapien
ctgaagggctcatcaagtgccacca

SEQ ID NO: 5496811 - DNA, 25 bp, Homo sapien
ctgccagtcccacgctgtgggcctg

SEQ ID NO: 5496812 - DNA, 25 bp, Homo sapien
gctggcgcttcttcctccacacctc

SEQ ID NO: 5496813 - DNA, 25 bp, Homo sapien
agtcccacgctgtgggcctgtactc

SEQ ID NO: 5496814 - DNA, 25 bp, Homo sapien
cggttcccgctggcgcttcttcctc

SEQ ID NO: 5496815 - DNA, 25 bp, Homo sapien
acgctgtgggcctgtactcctcagc

SEQ ID NO: 5496816 - DNA, 25 bp, Homo sapien
cccagtacacactccgcagccgctg

SEQ ID NO: 5496817 - DNA, 25 bp, Homo sapien
gaagggctcatcaagtgccaccaaa

SEQ ID NO: 5496818 - DNA, 25 bp, Homo sapien
gaaattagagaaaggtattcatgag

SEQ ID NO: 5496819 - DNA, 25 bp, Homo sapien
accttaatagagtcttagcagtttc

SEQ ID NO: 5496820 - DNA, 25 bp, Homo sapien
gaagcaaatatttgttggggcaagc

SEQ ID NO: 5496821 - DNA, 25 bp, Homo sapien
agggtgaagtttatctatgggtgga

SEQ ID NO: 5496822 - DNA, 25 bp, Homo sapien
tctgggattaaacttgtagggtgaa

SEQ ID NO: 5496823 - DNA, 25 bp, Homo sapien
acatcctagcttggattgggaggca

SEQ ID NO: 5496824 - DNA, 25 bp, Homo sapien
ctgagtggttctgggattaaacttg

SEQ ID NO: 5496825 - DNA, 25 bp, Homo sapien
gaattactaaaaggtagaatgctac

SEQ ID NO: 5496826 - DNA, 25 bp, Homo sapien
gggaggcacagaacaatgtcttgaa

SEQ ID NO: 5496827 - DNA, 25 bp, Homo sapien
tgtcttgaaagaaatcttgaagaat

SEQ ID NO: 5496828 - DNA, 25 bp, Homo sapien
gagaaaggtattcatgaggtttgac

SEQ ID NO: 5496829 - DNA, 25 bp, Homo sapien
cggaaagctcacaccctgaagactt

SEQ ID NO: 5496830 - DNA, 25 bp, Homo sapien
ggagaagtgggtccagaattatatg

SEQ ID NO: 5496831 - DNA, 25 bp, Homo sapien
tgtgaatgtgaggtgttgctaaata

SEQ ID NO: 5496832 - DNA, 25 bp, Homo sapien
ttatatgaaacacctgggccggaaa

SEQ ID NO: 5496833 - DNA, 25 bp, Homo sapien
aggaaggagagctctttgtgaatgt

SEQ ID NO: 5496834 - DNA, 25 bp, Homo sapien
ccactatgagctgctggcagtgggt

SEQ ID NO: 5496835 - DNA, 25 bp, Homo sapien
tctaaagcaaggccttgagcaagta

SEQ ID NO: 5496836 - DNA, 25 bp, Homo sapien
aatcaagctggagtacgtgaaatga

SEQ ID NO: 5496837 - DNA, 25 bp, Homo sapien
agtaagaagatctccttgcagaggc

SEQ ID NO: 5496838 - DNA, 25 bp, Homo sapien
ctgaagagctatgtgatcaccacca

SEQ ID NO: 5496839 - DNA, 25 bp, Homo sapien
tgtattcggttcccaggggttgaga

SEQ ID NO: 5496840 - DNA, 25 bp, Homo sapien
tagcagaacgggtaaactctgtttc

SEQ ID NO: 5496841 - DNA, 25 bp, Homo sapien
gcaatcgcagatacgcccttccggc

SEQ ID NO: 5496842 - DNA, 25 bp, Homo sapien
ttcctttgtccgtcctgttgtgagt

SEQ ID NO: 5496843 - DNA, 25 bp, Homo sapien
agcagaacgggtaaactctgtttcc

SEQ ID NO: 5496844 - DNA, 25 bp, Homo sapien
cgtcctgttgtgagtaactgaagcc

SEQ ID NO: 5496845 - DNA, 25 bp, Homo sapien
ctgttgtgagtaactgaagcctagg

SEQ ID NO: 5496846 - DNA, 25 bp, Homo sapien
gccccgtccccacctcaaatcacac

SEQ ID NO: 5496847 - DNA, 25 bp, Homo sapien
tcgcagatacgcccttccggccaca

SEQ ID NO: 5496848 - DNA, 25 bp, Homo sapien
tccccacctcaaatcacacacaccc

SEQ ID NO: 5496849 - DNA, 25 bp, Homo sapien
gtccgtcctgttgtgagtaactgaa

SEQ ID NO: 5496850 - DNA, 25 bp, Homo sapien
ctctgtttcctttgtccgtcctgtt

SEQ ID NO: 5496851 - DNA, 25 bp, Homo sapien
gctttgactgaatcacttctgcctc

SEQ ID NO: 5496852 - DNA, 25 bp, Homo sapien
gggtcctgggaactgaaccatatca

SEQ ID NO: 5496853 - DNA, 25 bp, Homo sapien
aggcattgtggtgcagaagtctcta

SEQ ID NO: 5496854 - DNA, 25 bp, Homo sapien
tccacccctgaagaactgagggtcc

SEQ ID NO: 5496855 - DNA, 25 bp, Homo sapien
tactggaaagaatgctttagtatct

SEQ ID NO: 5496856 - DNA, 25 bp, Homo sapien
ctgcctcttggtggccattgcctta

SEQ ID NO: 5496857 - DNA, 25 bp, Homo sapien
ggtgcagaagtctctagtgaagctt

SEQ ID NO: 5496858 - DNA, 25 bp, Homo sapien
aaggtgcatacctaatggtttccca

SEQ ID NO: 5496859 - DNA, 25 bp, Homo sapien
atgtcttgagcatcccagaaaactg

SEQ ID NO: 5496860 - DNA, 25 bp, Homo sapien
ccaaatctggactgtaaggtgcata

SEQ ID NO: 5496861 - DNA, 25 bp, Homo sapien
tctagtgaagctttcccaggcattt

SEQ ID NO: 5496862 - DNA, 25 bp, Homo sapien
gcctgaggtgtgtctcagaagcagc

SEQ ID NO: 5496863 - DNA, 25 bp, Homo sapien
gactgaactcccacaaagatgtcct

SEQ ID NO: 5496864 - DNA, 25 bp, Homo sapien
catgcatctcgttcatcagtgcctt

SEQ ID NO: 5496865 - DNA, 25 bp, Homo sapien
aagtttggatgtgattgctctgaac

SEQ ID NO: 5496866 - DNA, 25 bp, Homo sapien
gagtggatcttttggaacctagaca

SEQ ID NO: 5496867 - DNA, 25 bp, Homo sapien
aagagctcttgcctcagagcattgc

SEQ ID NO: 5496868 - DNA, 25 bp, Homo sapien
aagatgtcctgcaccagtctcatgc

SEQ ID NO: 5496869 - DNA, 25 bp, Homo sapien
ttttggaacctagacagagcacaac

SEQ ID NO: 5496870 - DNA, 25 bp, Homo sapien
tgctctgaacaagctgctttgccac

SEQ ID NO: 5496871 - DNA, 25 bp, Homo sapien
agagcacaactgaaagggttgactg

SEQ ID NO: 5496872 - DNA, 25 bp, Homo sapien
agcattgctatgcctgaggtgtgtc

SEQ ID NO: 5496873 - DNA, 25 bp, Homo sapien
ttttggggaagatagattatgtctc

SEQ ID NO: 5496874 - DNA, 25 bp, Homo sapien
cttcctttaggttgagacaaacagg

SEQ ID NO: 5496875 - DNA, 25 bp, Homo sapien
cttaaagtctagttgagtggttggc

SEQ ID NO: 5496876 - DNA, 25 bp, Homo sapien
caaaggccaaatccatcctgccgcc

SEQ ID NO: 5496877 - DNA, 25 bp, Homo sapien
tacccttatgttgggggaatgtctc

SEQ ID NO: 5496878 - DNA, 25 bp, Homo sapien
ctttagccagtaagtttagtcctct

SEQ ID NO: 5496879 - DNA, 25 bp, Homo sapien
tcctgccgccttgtacagccagaga

SEQ ID NO: 5496880 - DNA, 25 bp, Homo sapien
gacaaacagggtgaatgttcactct

SEQ ID NO: 5496881 - DNA, 25 bp, Homo sapien
ctagttgagtggttggcaaactaca

SEQ ID NO: 5496882 - DNA, 25 bp, Homo sapien
ttagatgacattgttaggtacattc

SEQ ID NO: 5496883 - DNA, 25 bp, Homo sapien
aatccattctggcaagctgtccttt

SEQ ID NO: 5496884 - DNA, 25 bp, Homo sapien
aagtttgaggtgtgtttgaaagaac

SEQ ID NO: 5496885 - DNA, 25 bp, Homo sapien
gcactctactcggggtgagtaggcc

SEQ ID NO: 5496886 - DNA, 25 bp, Homo sapien
ttaaccaagacacggctccagattc

SEQ ID NO: 5496887 - DNA, 25 bp, Homo sapien
aggaaattagataccgaggaatgtt

SEQ ID NO: 5496888 - DNA, 25 bp, Homo sapien
gttgcacgcattagtgaggataggc

SEQ ID NO: 5496889 - DNA, 25 bp, Homo sapien
cggctccagattcaaggccagacga

SEQ ID NO: 5496890 - DNA, 25 bp, Homo sapien
tattcagtacagacagacaccatta

SEQ ID NO: 5496891 - DNA, 25 bp, Homo sapien
tataaacaagattgcaaagtgccat

SEQ ID NO: 5496892 - DNA, 25 bp, Homo sapien
ttgaaagaacaatagcatgacagat

SEQ ID NO: 5496893 - DNA, 25 bp, Homo sapien
gaagggctgaaagcactctactcgg

SEQ ID NO: 5496894 - DNA, 25 bp, Homo sapien
ggccagacgaatgatgcaaaattta

SEQ ID NO: 5496895 - DNA, 25 bp, Homo sapien
attttaggtatctctgagcaaaagg

SEQ ID NO: 5496896 - DNA, 25 bp, Homo sapien
aactggcatcatgaaagagttcatc

SEQ ID NO: 5496897 - DNA, 25 bp, Homo sapien
accagaagatgaagtcaatcagtgt

SEQ ID NO: 5496898 - DNA, 25 bp, Homo sapien
aaaactatggagatatataaatgcc

SEQ ID NO: 5496899 - DNA, 25 bp, Homo sapien
gccaaattaagcaactgaaagattc

SEQ ID NO: 5496900 - DNA, 25 bp, Homo sapien
atcagtgtagtaactgtaagcactc

SEQ ID NO: 5496901 - DNA, 25 bp, Homo sapien
taggagagatggatttaaaactgat

SEQ ID NO: 5496902 - DNA, 25 bp, Homo sapien
ccaggatagaaaagtaagactgggg

SEQ ID NO: 5496903 - DNA, 25 bp, Homo sapien
gaaaaacatagaactggcatcatga

SEQ ID NO: 5496904 - DNA, 25 bp, Homo sapien
tgtgcatgcccacacaagtatgtgt

SEQ ID NO: 5496905 - DNA, 25 bp, Homo sapien
caaaagtgtttgcccccaggataga

SEQ ID NO: 5496906 - DNA, 25 bp, Homo sapien
acacaaagaagcaaaatttccatac

SEQ ID NO: 5496907 - DNA, 25 bp, Homo sapien
aaacccatagagagctggaatggaa

SEQ ID NO: 5496908 - DNA, 25 bp, Homo sapien
aaaagctctccaactggtcagtatc

SEQ ID NO: 5496909 - DNA, 25 bp, Homo sapien
gagctgtgctataaaggagaaatac

SEQ ID NO: 5496910 - DNA, 25 bp, Homo sapien
ccagatactggctcacccatgtatt

SEQ ID NO: 5496911 - DNA, 25 bp, Homo sapien
ccacagattgctaggtttctccacc

SEQ ID NO: 5496912 - DNA, 25 bp, Homo sapien
tttatcaaacaaaaagctctccaac

SEQ ID NO: 5496913 - DNA, 25 bp, Homo sapien
aacagaggtgacaaaacccatagag

SEQ ID NO: 5496914 - DNA, 25 bp, Homo sapien
tggaatggaattgaggacaaaatta

SEQ ID NO: 5496915 - DNA, 25 bp, Homo sapien
gagaaatacagaggcacatctttta

SEQ ID NO: 5496916 - DNA, 25 bp, Homo sapien
catacgtgggtttccagatactggc

SEQ ID NO: 5496917 - DNA, 25 bp, Homo sapien
aggttctctgtggcaactctttggc

SEQ ID NO: 5496918 - DNA, 25 bp, Homo sapien
ctatgaaagaccagaaagtaatatt

SEQ ID NO: 5496919 - DNA, 25 bp, Homo sapien
gctggagtatgaaaacggccatata

SEQ ID NO: 5496920 - DNA, 25 bp, Homo sapien
aggatatggttgttgctataaagca

SEQ ID NO: 5496921 - DNA, 25 bp, Homo sapien
ggcttcatgggtcacaggttctctg

SEQ ID NO: 5496922 - DNA, 25 bp, Homo sapien
gcaaactcctggtgagcaagaactt

SEQ ID NO: 5496923 - DNA, 25 bp, Homo sapien
ggctgaatttggccagcaggcaaac

SEQ ID NO: 5496924 - DNA, 25 bp, Homo sapien
tttggctctgctgctggagtatgaa

SEQ ID NO: 5496925 - DNA, 25 bp, Homo sapien
tatgaacagatgagcatggatatgt

SEQ ID NO: 5496926 - DNA, 25 bp, Homo sapien
cccggcaggtcagaaacattttcta

SEQ ID NO: 5496927 - DNA, 25 bp, Homo sapien
aggtgattggctgaatttggccagc

SEQ ID NO: 5496928 - DNA, 25 bp, Homo sapien
cttttttgagggctgccagagtctc

SEQ ID NO: 5496929 - DNA, 25 bp, Homo sapien
aagctgtccattctgtgacctagcc

SEQ ID NO: 5496930 - DNA, 25 bp, Homo sapien
cagactgctgactccctactcattc

SEQ ID NO: 5496931 - DNA, 25 bp, Homo sapien
gctattgtggagtctggcagtcaca

SEQ ID NO: 5496932 - DNA, 25 bp, Homo sapien
caaatcctagaatcccacccctgtg

SEQ ID NO: 5496933 - DNA, 25 bp, Homo sapien
gcttgaccccaacctatgatcttct

SEQ ID NO: 5496934 - DNA, 25 bp, Homo sapien
cagcccaactcagcatggggagaga

SEQ ID NO: 5496935 - DNA, 25 bp, Homo sapien
cacccctgtggacctcgtttgcttc

SEQ ID NO: 5496936 - DNA, 25 bp, Homo sapien
tgtgcaagttcctcagagtctcttc

SEQ ID NO: 5496937 - DNA, 25 bp, Homo sapien
gagagtgccatacagaagctgtcca

SEQ ID NO: 5496938 - DNA, 25 bp, Homo sapien
tcttggtggtcacacaccagcccaa

SEQ ID NO: 5496939 - DNA, 25 bp, Homo sapien
tggcggcacctctcaccctgaccca

SEQ ID NO: 5496940 - DNA, 25 bp, Homo sapien
caaggactccaaagctggaaagcag

SEQ ID NO: 5496941 - DNA, 25 bp, Homo sapien
gtgcccgcagcctgctaagggctgc

SEQ ID NO: 5496942 - DNA, 25 bp, Homo sapien
cccggaggactcagctgttctgttt

SEQ ID NO: 5496943 - DNA, 25 bp, Homo sapien
gttctgtttacatcgtggcggcacc

SEQ ID NO: 5496944 - DNA, 25 bp, Homo sapien
aagggtcagtttaggaagtaaatga

SEQ ID NO: 5496945 - DNA, 25 bp, Homo sapien
gggtagggctttcagcatatgataa

SEQ ID NO: 5496946 - DNA, 25 bp, Homo sapien
tgacccacgcaaaggttctggagat

SEQ ID NO: 5496947 - DNA, 25 bp, Homo sapien
gaatgcaggtgtcgtgtttataacc

SEQ ID NO: 5496948 - DNA, 25 bp, Homo sapien
gtgcgctctaggctgtgcttgagcc

SEQ ID NO: 5496949 - DNA, 25 bp, Homo sapien
aaccttgtggttcgagtccctctta

SEQ ID NO: 5496950 - DNA, 25 bp, Homo sapien
ccaggcattagttagtttaagtatc

SEQ ID NO: 5496951 - DNA, 25 bp, Homo sapien
aaggaatatctgtgggtaactcaaa

SEQ ID NO: 5496952 - DNA, 25 bp, Homo sapien
gtagattcagagactaaagaggtac

SEQ ID NO: 5496953 - DNA, 25 bp, Homo sapien
tgagcaaagatggtagagtttaata

SEQ ID NO: 5496954 - DNA, 25 bp, Homo sapien
agcattttagtgtaaagcaggatac

SEQ ID NO: 5496955 - DNA, 25 bp, Homo sapien
tcttgggaagattttgagcaaagat

SEQ ID NO: 5496956 - DNA, 25 bp, Homo sapien
cttatcgaaaacagttgagagattt

SEQ ID NO: 5496957 - DNA, 25 bp, Homo sapien
aactacattatgcagagagagaggg

SEQ ID NO: 5496958 - DNA, 25 bp, Homo sapien
aagaggtacaaaagttggacaaatc

SEQ ID NO: 5496959 - DNA, 25 bp, Homo sapien
tttgggagggaattattgtagattc

SEQ ID NO: 5496960 - DNA, 25 bp, Homo sapien
agatattgtagaagacaatggcttc

SEQ ID NO: 5496961 - DNA, 25 bp, Homo sapien
gttagtcatcagaagagcaagaaga

SEQ ID NO: 5496962 - DNA, 25 bp, Homo sapien
tttttatgcggttggaggcaaacca

SEQ ID NO: 5496963 - DNA, 25 bp, Homo sapien
agaggatgtgaccacactgaggata

SEQ ID NO: 5496964 - DNA, 25 bp, Homo sapien
attactgtagcaaccaaggccagca

SEQ ID NO: 5496965 - DNA, 25 bp, Homo sapien
tccagtgcacctggttggaagagag

SEQ ID NO: 5496966 - DNA, 25 bp, Homo sapien
gaggcaaaccaggagatgatattac

SEQ ID NO: 5496967 - DNA, 25 bp, Homo sapien
aggctctagggaaagccaagagtta

SEQ ID NO: 5496968 - DNA, 25 bp, Homo sapien
tgagaaccagtgtgatttggcatgc

SEQ ID NO: 5496969 - DNA, 25 bp, Homo sapien
aggcaggcaaccagctctcactaca

SEQ ID NO: 5496970 - DNA, 25 bp, Homo sapien
acagccttctcaggtccgggaactt

SEQ ID NO: 5496971 - DNA, 25 bp, Homo sapien
aattctatggtaaccctggcaggcc

SEQ ID NO: 5496972 - DNA, 25 bp, Homo sapien
aactattggtaagaaacgtatatta

SEQ ID NO: 5496973 - DNA, 25 bp, Homo sapien
gtggttcagtatgggctaatagtgt

SEQ ID NO: 5496974 - DNA, 25 bp, Homo sapien
atgggctaatagtgttcacagtatc

SEQ ID NO: 5496975 - DNA, 25 bp, Homo sapien
cctaatgagcattccacccccttat

SEQ ID NO: 5496976 - DNA, 25 bp, Homo sapien
aaacaaggtgtctgtagataaaaac

SEQ ID NO: 5496977 - DNA, 25 bp, Homo sapien
tcaccaaggccatgcttcttgcatc

SEQ ID NO: 5496978 - DNA, 25 bp, Homo sapien
ttcctgcacccaccaaggccatgac

SEQ ID NO: 5496979 - DNA, 25 bp, Homo sapien
ccaaggccatgactcttccaggtaa

SEQ ID NO: 5496980 - DNA, 25 bp, Homo sapien
ggcgtggaagctaaccctgtatttc

SEQ ID NO: 5496981 - DNA, 25 bp, Homo sapien
tagagaacatactccagcactcacc

SEQ ID NO: 5496982 - DNA, 25 bp, Homo sapien
catcacagctatgcttcctgcaccc

SEQ ID NO: 5496983 - DNA, 25 bp, Homo sapien
aaagtgtgctcttgagaggagcgta

SEQ ID NO: 5496984 - DNA, 25 bp, Homo sapien
gcatcacaagaacgaattcaggggg

SEQ ID NO: 5496985 - DNA, 25 bp, Homo sapien
gcgaaagtgtgctcttgagaggagc

SEQ ID NO: 5496986 - DNA, 25 bp, Homo sapien
ttgacagcatcacaagaacgaattc

SEQ ID NO: 5496987 - DNA, 25 bp, Homo sapien
tgcaaagcgaaagtgtgctcttgag

SEQ ID NO: 5496988 - DNA, 25 bp, Homo sapien
tccattgcaaagcgaaagtgtgctc

SEQ ID NO: 5496989 - DNA, 25 bp, Homo sapien
gcaaggcgagaagcttccattgcaa

SEQ ID NO: 5496990 - DNA, 25 bp, Homo sapien
ggaaggtctctggatgccagtgaga

SEQ ID NO: 5496991 - DNA, 25 bp, Homo sapien
catgcccgtgagaacaagtcaggca

SEQ ID NO: 5496992 - DNA, 25 bp, Homo sapien
tgtttatatctcgagagaaagaggc

SEQ ID NO: 5496993 - DNA, 25 bp, Homo sapien
cttccattgcaaagcgaaagtgtgc

SEQ ID NO: 5496994 - DNA, 25 bp, Homo sapien
aaaactgataaacactaataaatag

SEQ ID NO: 5496995 - DNA, 25 bp, Homo sapien
cctctgctttctgggttcaagtgat

SEQ ID NO: 5496996 - DNA, 25 bp, Homo sapien
caaagccagataagttcttgagtag

SEQ ID NO: 5496997 - DNA, 25 bp, Homo sapien
cccgagtagctacaattacaggcac

SEQ ID NO: 5496998 - DNA, 25 bp, Homo sapien
agtggtgagtttaaagaaaactgat

SEQ ID NO: 5496999 - DNA, 25 bp, Homo sapien
ctgcgcccggccaagtttttagatt

SEQ ID NO: 5497000 - DNA, 25 bp, Homo sapien
tcttgagtagaaggctaaatttatt

SEQ ID NO: 5497001 - DNA, 25 bp, Homo sapien
gataagttcttgagtagaaggctaa

SEQ ID NO: 5497002 - DNA, 25 bp, Homo sapien
tattcatcaaaaagtggtgagttta

SEQ ID NO: 5497003 - DNA, 25 bp, Homo sapien
ttacattaagacaaagccagataag

SEQ ID NO: 5497004 - DNA, 25 bp, Homo sapien
tttatttatttagagacggagtctc

SEQ ID NO: 5497005 - DNA, 25 bp, Homo sapien
gaaatagaggagcactttgcagaga

SEQ ID NO: 5497006 - DNA, 25 bp, Homo sapien
ccagggtcgcatgccactttcagag

SEQ ID NO: 5497007 - DNA, 25 bp, Homo sapien
gcttccagactgggccttggtgttt

SEQ ID NO: 5497008 - DNA, 25 bp, Homo sapien
ggcaaggatccccaagggaaataga

SEQ ID NO: 5497009 - DNA, 25 bp, Homo sapien
ccttactgagcatcatggacagggg

SEQ ID NO: 5497010 - DNA, 25 bp, Homo sapien
cactgtaatgatgagcccccaagag

SEQ ID NO: 5497011 - DNA, 25 bp, Homo sapien
tgcggcctggctgcctatgctctca

SEQ ID NO: 5497012 - DNA, 25 bp, Homo sapien
tcctcccgcccctgcagatgctgat

SEQ ID NO: 5497013 - DNA, 25 bp, Homo sapien
gggtctgaggccatccagatccttc

SEQ ID NO: 5497014 - DNA, 25 bp, Homo sapien
gccccaggcccaatattccaggatt

SEQ ID NO: 5497015 - DNA, 25 bp, Homo sapien
gtgggagggaatttctgtctactca

SEQ ID NO: 5497016 - DNA, 25 bp, Homo sapien
ttgagctgaatagtgcttcagaatt

SEQ ID NO: 5497017 - DNA, 25 bp, Homo sapien
taaaaatgaatggttaagggcatat

SEQ ID NO: 5497018 - DNA, 25 bp, Homo sapien
caagctaaatccattacagtgccat

SEQ ID NO: 5497019 - DNA, 25 bp, Homo sapien
cccagcctcaagtacctttatttat

SEQ ID NO: 5497020 - DNA, 25 bp, Homo sapien
agatgagaacattcattaagccttc

SEQ ID NO: 5497021 - DNA, 25 bp, Homo sapien
atttatcaagttgcaagctaaatcc

SEQ ID NO: 5497022 - DNA, 25 bp, Homo sapien
aatgaatggttaagggcatattacc

SEQ ID NO: 5497023 - DNA, 25 bp, Homo sapien
catttgttgagctgaatagtgcttc

SEQ ID NO: 5497024 - DNA, 25 bp, Homo sapien
cattacagtgccatgcagatatcag

SEQ ID NO: 5497025 - DNA, 25 bp, Homo sapien
gatatcagacattcaataactcatt

SEQ ID NO: 5497026 - DNA, 25 bp, Homo sapien
gatattaatttagatgagaacattc

SEQ ID NO: 5497027 - DNA, 25 bp, Homo sapien
ctggaggacatcaaaaaataccgct

SEQ ID NO: 5497028 - DNA, 25 bp, Homo sapien
aggccaagagatcactgagaaaata

SEQ ID NO: 5497029 - DNA, 25 bp, Homo sapien
agaaaataaatggtagagcttgggc

SEQ ID NO: 5497030 - DNA, 25 bp, Homo sapien
aggtgaagctgcaaggtattagatg

SEQ ID NO: 5497031 - DNA, 25 bp, Homo sapien
caaggagacagtgatgcttttgaag

SEQ ID NO: 5497032 - DNA, 25 bp, Homo sapien
tccagaagtgactgtggacaattcc

SEQ ID NO: 5497033 - DNA, 25 bp, Homo sapien
tgtcctcataggaggtgatggctga

SEQ ID NO: 5497034 - DNA, 25 bp, Homo sapien
atgcttttgaagaagtcagaggagg

SEQ ID NO: 5497035 - DNA, 25 bp, Homo sapien
aggccccatcagcaatcagaggatt

SEQ ID NO: 5497036 - DNA, 25 bp, Homo sapien
tgattggcacctcagagctggagga

SEQ ID NO: 5497037 - DNA, 25 bp, Homo sapien
agcttgggcaaaatcagtgctgccc

SEQ ID NO: 5497038 - DNA, 25 bp, Homo sapien
aattaaatagcagaagagcaagctc

SEQ ID NO: 5497039 - DNA, 25 bp, Homo sapien
ataaactcagagaggccctgacaaa

SEQ ID NO: 5497040 - DNA, 25 bp, Homo sapien
aagaaaacaagcagtgctgatcacc

SEQ ID NO: 5497041 - DNA, 25 bp, Homo sapien
agagcgcaggtgcaaattcctcctg

SEQ ID NO: 5497042 - DNA, 25 bp, Homo sapien
cctgacaaaccagggttgggctttg

SEQ ID NO: 5497043 - DNA, 25 bp, Homo sapien
caaggggaaaatagaccacatcccc

SEQ ID NO: 5497044 - DNA, 25 bp, Homo sapien
tgggtctccttttgggaggcagaac

SEQ ID NO: 5497045 - DNA, 25 bp, Homo sapien
ggacgcaatgccaatgcctagggtt

SEQ ID NO: 5497046 - DNA, 25 bp, Homo sapien
ggggtaccaacaggcatctactttc

SEQ ID NO: 5497047 - DNA, 25 bp, Homo sapien
ctagttgcccaaaagctgctctgct

SEQ ID NO: 5497048 - DNA, 25 bp, Homo sapien
caaatcaccagttaggggtaccttc

SEQ ID NO: 5497049 - DNA, 25 bp, Homo sapien
ttgttcagaaattagatgcctcctc

SEQ ID NO: 5497050 - DNA, 25 bp, Homo sapien
gaacagaagagattgctggcttgtt

SEQ ID NO: 5497051 - DNA, 25 bp, Homo sapien
ttggttgctaagtcagcgataggtt

SEQ ID NO: 5497052 - DNA, 25 bp, Homo sapien
gacctggccattttgtatagagtgt

SEQ ID NO: 5497053 - DNA, 25 bp, Homo sapien
tgtatagagtgttcactgcagcatg

SEQ ID NO: 5497054 - DNA, 25 bp, Homo sapien
atgctcagcaagttagatatttttc

SEQ ID NO: 5497055 - DNA, 25 bp, Homo sapien
actgcagcatgattgcgataatgac

SEQ ID NO: 5497056 - DNA, 25 bp, Homo sapien
aaaaatcacagtggaaaaagcgtgc

SEQ ID NO: 5497057 - DNA, 25 bp, Homo sapien
agtggaaaaagcgtgctggttttat

SEQ ID NO: 5497058 - DNA, 25 bp, Homo sapien
gcctaacgatggaggctttggttgc

SEQ ID NO: 5497059 - DNA, 25 bp, Homo sapien
caataagttgtgtaccaaatggaag

SEQ ID NO: 5497060 - DNA, 25 bp, Homo sapien
agtgaaaagcatgttgagtgaaatc

SEQ ID NO: 5497061 - DNA, 25 bp, Homo sapien
ttaatgctctcaacccccaactgcc

SEQ ID NO: 5497062 - DNA, 25 bp, Homo sapien
atgtaaatgttctctcaggggactg

SEQ ID NO: 5497063 - DNA, 25 bp, Homo sapien
ccccaactgccgttgagtggggaaa

SEQ ID NO: 5497064 - DNA, 25 bp, Homo sapien
cagagacatgcgatctgagatccct

SEQ ID NO: 5497065 - DNA, 25 bp, Homo sapien
tcctgagccctcagagacatgcgat

SEQ ID NO: 5497066 - DNA, 25 bp, Homo sapien
tgctggagaaacactgattatcccc

SEQ ID NO: 5497067 - DNA, 25 bp, Homo sapien
aggctagagaggctacataactaat

SEQ ID NO: 5497068 - DNA, 25 bp, Homo sapien
tcacccagcacagagtgaaaagcat

SEQ ID NO: 5497069 - DNA, 25 bp, Homo sapien
aggtcagggacctggtcttcccact

SEQ ID NO: 5497070 - DNA, 25 bp, Homo sapien
acccctcagcaaaatgtaaatgttc

SEQ ID NO: 5497071 - DNA, 25 bp, Homo sapien
attagagttcattaattttgtagat

SEQ ID NO: 5497072 - DNA, 25 bp, Homo sapien
atctacaaaattaatgaactctaat

SEQ ID NO: 5497073 - DNA, 25 bp, Homo sapien
ttattagagttcattaattttgtag

SEQ ID NO: 5497074 - DNA, 25 bp, Homo sapien
ctacaaaattaatgaactctaataa

SEQ ID NO: 5497075 - DNA, 25 bp, Homo sapien
atgcaatgggagtcctctcttggga

SEQ ID NO: 5497076 - DNA, 25 bp, Homo sapien
tagggaactaaaaacacgcattgtc

SEQ ID NO: 5497077 - DNA, 25 bp, Homo sapien
tagtaaacctgctttgcactgacaa

SEQ ID NO: 5497078 - DNA, 25 bp, Homo sapien
aagattacaccaaatggcaacaccc

SEQ ID NO: 5497079 - DNA, 25 bp, Homo sapien
ctaaggatgatctttgctattcccc

SEQ ID NO: 5497080 - DNA, 25 bp, Homo sapien
cttgtctgcaaccctggaaaaccct

SEQ ID NO: 5497081 - DNA, 25 bp, Homo sapien
tgggactggtaattagtaaacctgc

SEQ ID NO: 5497082 - DNA, 25 bp, Homo sapien
tcacagaaatattaaagtatagaaa

SEQ ID NO: 5497083 - DNA, 25 bp, Homo sapien
gtatagaaatacatatctagggaac

SEQ ID NO: 5497084 - DNA, 25 bp, Homo sapien
tattccccatgcaatgggagtcctc

SEQ ID NO: 5497085 - DNA, 25 bp, Homo sapien
ttccctctggagctaatgatggtgc

SEQ ID NO: 5497086 - DNA, 25 bp, Homo sapien
tgaacagtttgagattaatcagggt

SEQ ID NO: 5497087 - DNA, 25 bp, Homo sapien
ggcgcccgccactacatccagctaa

SEQ ID NO: 5497088 - DNA, 25 bp, Homo sapien
aaggtatgcggatgtgtgtatatat

SEQ ID NO: 5497089 - DNA, 25 bp, Homo sapien
gtatatgtgtatgcgaaggtatgcg

SEQ ID NO: 5497090 - DNA, 25 bp, Homo sapien
tggcgccatctccgttcactgcaac

SEQ ID NO: 5497091 - DNA, 25 bp, Homo sapien
tcgaacttctgggctcaactaatcc

SEQ ID NO: 5497092 - DNA, 25 bp, Homo sapien
tttaaggcagggtctcactatgtca

SEQ ID NO: 5497093 - DNA, 25 bp, Homo sapien
ggaactataggcacatgccaccaca

SEQ ID NO: 5497094 - DNA, 25 bp, Homo sapien
ttgagattaatcagggtaaggagat

SEQ ID NO: 5497095 - DNA, 25 bp, Homo sapien
ggagatgtcatgatgcttaccctct

SEQ ID NO: 5497096 - DNA, 25 bp, Homo sapien
caaccgtgcccagcctgcatttgct

SEQ ID NO: 5497097 - DNA, 25 bp, Homo sapien
ctaatcagaagttgacaagtgtcac

SEQ ID NO: 5497098 - DNA, 25 bp, Homo sapien
atggtgggctagacataaacgtata

SEQ ID NO: 5497099 - DNA, 25 bp, Homo sapien
tcagcagctcatagaatggtgggct

SEQ ID NO: 5497100 - DNA, 25 bp, Homo sapien
atcatgaatgagagaaactgaacag

SEQ ID NO: 5497101 - DNA, 25 bp, Homo sapien
ttagtggcacatactcatggccatg

SEQ ID NO: 5497102 - DNA, 25 bp, Homo sapien
agaaaaatcactctgcgaagatgac

SEQ ID NO: 5497103 - DNA, 25 bp, Homo sapien
ctgcgaagatgacactgactttctc

SEQ ID NO: 5497104 - DNA, 25 bp, Homo sapien
aaaataaggaagagactctaatcag

SEQ ID NO: 5497105 - DNA, 25 bp, Homo sapien
aattggcctgtgataacactgaatt

SEQ ID NO: 5497106 - DNA, 25 bp, Homo sapien
tgtaagaaaatgtcctattagtggc

SEQ ID NO: 5497107 - DNA, 25 bp, Homo sapien
taaacgtatacaaggaaattgccac

SEQ ID NO: 5497108 - DNA, 25 bp, Homo sapien
ctagaaacagccatggagtgatttt

SEQ ID NO: 5497109 - DNA, 25 bp, Homo sapien
gtaagtaattaaagcaccatcactc

SEQ ID NO: 5497110 - DNA, 25 bp, Homo sapien
tagtgacatttggaaggcaagtata

SEQ ID NO: 5497111 - DNA, 25 bp, Homo sapien
gataatctagacatagagggagtga

SEQ ID NO: 5497112 - DNA, 25 bp, Homo sapien
ctgccctcgtcttcaggtgataatc

SEQ ID NO: 5497113 - DNA, 25 bp, Homo sapien
acacggtacccgtccctcattccac

SEQ ID NO: 5497114 - DNA, 25 bp, Homo sapien
ttatggaattaggtatgctagttat

SEQ ID NO: 5497115 - DNA, 25 bp, Homo sapien
agttctgtttggtttatagggagga

SEQ ID NO: 5497116 - DNA, 25 bp, Homo sapien
tcagccatgggcattccctagtttc

SEQ ID NO: 5497117 - DNA, 25 bp, Homo sapien
ggagtgagccaacaagttgctgtta

SEQ ID NO: 5497118 - DNA, 25 bp, Homo sapien
tggaaggcaagtatattgtcagatc

SEQ ID NO: 5497119 - DNA, 25 bp, Homo sapien
cagaattgcgcctgtttgctcagct

SEQ ID NO: 5497120 - DNA, 25 bp, Homo sapien
ctagcaccctaaggaatccagtttg

SEQ ID NO: 5497121 - DNA, 25 bp, Homo sapien
agtgattaggttttctgacgtattc

SEQ ID NO: 5497122 - DNA, 25 bp, Homo sapien
ggaagccctagcaccctaaggaatc

SEQ ID NO: 5497123 - DNA, 25 bp, Homo sapien
ctttttaggaaatcaggtcttacta

SEQ ID NO: 5497124 - DNA, 25 bp, Homo sapien
tgtagatagccttaatcagtagccc

SEQ ID NO: 5497125 - DNA, 25 bp, Homo sapien
tgctcagctctatctaccccgagga

SEQ ID NO: 5497126 - DNA, 25 bp, Homo sapien
tctatctaccccgaggaagccctag

SEQ ID NO: 5497127 - DNA, 25 bp, Homo sapien
tttaaagatgataactacctccttc

SEQ ID NO: 5497128 - DNA, 25 bp, Homo sapien
ccagtttgaaagacagtgattaggt

SEQ ID NO: 5497129 - DNA, 25 bp, Homo sapien
gacagtgccccagaattgcgcctgt

SEQ ID NO: 5497130 - DNA, 25 bp, Homo sapien
gaagaggcacacaactttgggaatt

SEQ ID NO: 5497131 - DNA, 25 bp, Homo sapien
attttggtaacattagtgagggatc

SEQ ID NO: 5497132 - DNA, 25 bp, Homo sapien
tagaatgaacgtgcacgcctgattt

SEQ ID NO: 5497133 - DNA, 25 bp, Homo sapien
tcagttgtaagggcatagaatgaac

SEQ ID NO: 5497134 - DNA, 25 bp, Homo sapien
tgtcttgcaactgctgttggcaaac

SEQ ID NO: 5497135 - DNA, 25 bp, Homo sapien
aggttagaaggcaaacgactctatt

SEQ ID NO: 5497136 - DNA, 25 bp, Homo sapien
gcaagtataatgaagagatacatac

SEQ ID NO: 5497137 - DNA, 25 bp, Homo sapien
tttatagataagaggttagaaggca

SEQ ID NO: 5497138 - DNA, 25 bp, Homo sapien
ctttagctcagcctcgatggactct

SEQ ID NO: 5497139 - DNA, 25 bp, Homo sapien
aaaactaatatcatgtgaggacatt

SEQ ID NO: 5497140 - DNA, 25 bp, Homo sapien
attagtgagggatcaggtttaaaaa

SEQ ID NO: 5497141 - DNA, 25 bp, Homo sapien
gtatttcaggacttaggggacatga

SEQ ID NO: 5497142 - DNA, 25 bp, Homo sapien
tcatgtcccctaagtcctgaaatac

SEQ ID NO: 5497143 - DNA, 25 bp, Homo sapien
gcaggcccattcctaccggagcatc

SEQ ID NO: 5497144 - DNA, 25 bp, Homo sapien
aagatgcccatgatcgtgggatgcc

SEQ ID NO: 5497145 - DNA, 25 bp, Homo sapien
ggttttaggatctcaggactctcgt

SEQ ID NO: 5497146 - DNA, 25 bp, Homo sapien
attggggaccctacaatgccttacc

SEQ ID NO: 5497147 - DNA, 25 bp, Homo sapien
gggtgagaggccctatttgtgcaac

SEQ ID NO: 5497148 - DNA, 25 bp, Homo sapien
gcccaggctatgccccctccgtggc

SEQ ID NO: 5497149 - DNA, 25 bp, Homo sapien
gaggcaaggccttactgctgcaact

SEQ ID NO: 5497150 - DNA, 25 bp, Homo sapien
gatgttgcccccacaagatgcccat

SEQ ID NO: 5497151 - DNA, 25 bp, Homo sapien
tgagcgtagatgacatacgtgggta

SEQ ID NO: 5497152 - DNA, 25 bp, Homo sapien
tacgagaactgcggaaaagcttata

SEQ ID NO: 5497153 - DNA, 25 bp, Homo sapien
caccagtgcaagcacatgggtgaga

SEQ ID NO: 5497154 - DNA, 25 bp, Homo sapien
gaaaccgagacacagagatctctca

SEQ ID NO: 5497155 - DNA, 25 bp, Homo sapien
agtcaaacagccaatcagcagcaga

SEQ ID NO: 5497156 - DNA, 25 bp, Homo sapien
cccctaggcccaagcaaaccttcca

SEQ ID NO: 5497157 - DNA, 25 bp, Homo sapien
agcaaaccttccacctcagacttct

SEQ ID NO: 5497158 - DNA, 25 bp, Homo sapien
atattcaacaggaagtcaaggtgga

SEQ ID NO: 5497159 - DNA, 25 bp, Homo sapien
aagctttttgttaaagcagggtgac

SEQ ID NO: 5497160 - DNA, 25 bp, Homo sapien
atcagagtcaaacagccaatcagca

SEQ ID NO: 5497161 - DNA, 25 bp, Homo sapien
cactatgttgcccggattggagtac

SEQ ID NO: 5497162 - DNA, 25 bp, Homo sapien
ccaaggcttgtgcagccttgacccc

SEQ ID NO: 5497163 - DNA, 25 bp, Homo sapien
cagtggcacaacaccaaggcttgtg

SEQ ID NO: 5497164 - DNA, 25 bp, Homo sapien
agggaaacacttgtcaggacatgtc

SEQ ID NO: 5497165 - DNA, 25 bp, Homo sapien
tcataagatcacccatagccagctc

SEQ ID NO: 5497166 - DNA, 25 bp, Homo sapien
atctctatgctggacttctgggacc

SEQ ID NO: 5497167 - DNA, 25 bp, Homo sapien
tgagaattccagtcccgatacaaac

SEQ ID NO: 5497168 - DNA, 25 bp, Homo sapien
ccgatacaaacattagtgacaactc

SEQ ID NO: 5497169 - DNA, 25 bp, Homo sapien
atgctggacttctgggacctcaaat

SEQ ID NO: 5497170 - DNA, 25 bp, Homo sapien
gacaactcactcataagatcaccca

SEQ ID NO: 5497171 - DNA, 25 bp, Homo sapien
tgacttgcaaccatctgagaattcc

SEQ ID NO: 5497172 - DNA, 25 bp, Homo sapien
atctgcccacaatctccctatctct

SEQ ID NO: 5497173 - DNA, 25 bp, Homo sapien
ggcaatacagtgaggacctcatctc

SEQ ID NO: 5497174 - DNA, 25 bp, Homo sapien
ctgggacctcaaatgacttgcaacc

SEQ ID NO: 5497175 - DNA, 25 bp, Homo sapien
gcaattcttactcaccacaaatgtc

SEQ ID NO: 5497176 - DNA, 25 bp, Homo sapien
ttaattcagcaatgggaaaagatct

SEQ ID NO: 5497177 - DNA, 25 bp, Homo sapien
agaaagcatggggataagttttata

SEQ ID NO: 5497178 - DNA, 25 bp, Homo sapien
ccgtagtacctagtgttgttggata

SEQ ID NO: 5497179 - DNA, 25 bp, Homo sapien
aatgtaaacacaggtagtggaggta

SEQ ID NO: 5497180 - DNA, 25 bp, Homo sapien
ttatattgcattaagagggtagagg

SEQ ID NO: 5497181 - DNA, 25 bp, Homo sapien
tgctggaaagtaacctcagacttcc

SEQ ID NO: 5497182 - DNA, 25 bp, Homo sapien
gaagggatgaaaatggttatactac

SEQ ID NO: 5497183 - DNA, 25 bp, Homo sapien
tcttacacagtgaagggatgaaaat

SEQ ID NO: 5497184 - DNA, 25 bp, Homo sapien
aatagtgacgctctgcaggatttct

SEQ ID NO: 5497185 - DNA, 25 bp, Homo sapien
gggttgtcaagatatgggtagtaga

SEQ ID NO: 5497186 - DNA, 25 bp, Homo sapien
tgcacaaggagcaatgtaaacacag

SEQ ID NO: 5497187 - DNA, 25 bp, Homo sapien
cgtaacgacaacttcctgttgagtc

SEQ ID NO: 5497188 - DNA, 25 bp, Homo sapien
gactcaacaggaagttgtcgttacg

SEQ ID NO: 5497189 - DNA, 25 bp, Homo sapien
aaaaagaagttctgatactctcatt

SEQ ID NO: 5497190 - DNA, 25 bp, Homo sapien
aagtggttggtgttgttagaactac

SEQ ID NO: 5497191 - DNA, 25 bp, Homo sapien
ctaaagtctgaccaaaagttctcat

SEQ ID NO: 5497192 - DNA, 25 bp, Homo sapien
gtagaatatattcggacttcctgac

SEQ ID NO: 5497193 - DNA, 25 bp, Homo sapien
atccacactggcctttcaaactttg

SEQ ID NO: 5497194 - DNA, 25 bp, Homo sapien
ggccgtgcaccaaagtatgacatca

SEQ ID NO: 5497195 - DNA, 25 bp, Homo sapien
taactctgttttgtggcttgattcc

SEQ ID NO: 5497196 - DNA, 25 bp, Homo sapien
aatacagactcaaatggttttttcc

SEQ ID NO: 5497197 - DNA, 25 bp, Homo sapien
gtttgaaggcagtctactgtagaat

SEQ ID NO: 5497198 - DNA, 25 bp, Homo sapien
tagaactactgaaaaatacagactc

SEQ ID NO: 5497199 - DNA, 25 bp, Homo sapien
ccactgcgcccggcgataacctgaa

SEQ ID NO: 5497200 - DNA, 25 bp, Homo sapien
aactatatgtagatgacagaagaga

SEQ ID NO: 5497201 - DNA, 25 bp, Homo sapien
atttttctagggccatggggtttga

SEQ ID NO: 5497202 - DNA, 25 bp, Homo sapien
tcagctgtgcccctgaccacactgc

SEQ ID NO: 5497203 - DNA, 25 bp, Homo sapien
tggtgtggaatgagtgtttctgaac

SEQ ID NO: 5497204 - DNA, 25 bp, Homo sapien
gtttgctcaggaccggacaactata

SEQ ID NO: 5497205 - DNA, 25 bp, Homo sapien
agggtagaggaatgtgcctccaata

SEQ ID NO: 5497206 - DNA, 25 bp, Homo sapien
tgctgtccaagcaggctcactctgt

SEQ ID NO: 5497207 - DNA, 25 bp, Homo sapien
gcctgtcccggcaaccatcattccc

SEQ ID NO: 5497208 - DNA, 25 bp, Homo sapien
gagataagcatgcaggtgcctcaaa

SEQ ID NO: 5497209 - DNA, 25 bp, Homo sapien
aggggagtggtttctatactgctgt

SEQ ID NO: 5497210 - DNA, 25 bp, Homo sapien
tgcccccacaaccactggatcttgc

SEQ ID NO: 5497211 - DNA, 25 bp, Homo sapien
tcatatgaatgtcaaggggcttgtt

SEQ ID NO: 5497212 - DNA, 25 bp, Homo sapien
tggtacaagatgctaaggacacaaa

SEQ ID NO: 5497213 - DNA, 25 bp, Homo sapien
gagaaggttaggaactggtcctcta

SEQ ID NO: 5497214 - DNA, 25 bp, Homo sapien
gtactagggttcagtcacgagaatt

SEQ ID NO: 5497215 - DNA, 25 bp, Homo sapien
aatttaggagaatggctgctactat

SEQ ID NO: 5497216 - DNA, 25 bp, Homo sapien
aactatagtacagcgtgaaccattc

SEQ ID NO: 5497217 - DNA, 25 bp, Homo sapien
ccatgtgccagagatggtacaagat

SEQ ID NO: 5497218 - DNA, 25 bp, Homo sapien
tagaagaaagctaagacatgcagta

SEQ ID NO: 5497219 - DNA, 25 bp, Homo sapien
aaggggaagagtcactactcatcca

SEQ ID NO: 5497220 - DNA, 25 bp, Homo sapien
tagaagaaacagagtagtaataact

SEQ ID NO: 5497221 - DNA, 25 bp, Homo sapien
tctgatgaaagacacacaaggaaaa

SEQ ID NO: 5497222 - DNA, 25 bp, Homo sapien
catttcccaatgaggcagaaactga

SEQ ID NO: 5497223 - DNA, 25 bp, Homo sapien
cttaaacctcaaagaatgtgggctc

SEQ ID NO: 5497224 - DNA, 25 bp, Homo sapien
gaactaccctgcatgatggagatat

SEQ ID NO: 5497225 - DNA, 25 bp, Homo sapien
taaacacaaaacaggatggctaaca

SEQ ID NO: 5497226 - DNA, 25 bp, Homo sapien
gtagtgatgatagaggcactgatga

SEQ ID NO: 5497227 - DNA, 25 bp, Homo sapien
gaggcactgatgacaattaagttgc

SEQ ID NO: 5497228 - DNA, 25 bp, Homo sapien
tacatgccagggacttcatacatta

SEQ ID NO: 5497229 - DNA, 25 bp, Homo sapien
agttcctgatgacaggcaccacctc

SEQ ID NO: 5497230 - DNA, 25 bp, Homo sapien
gcatggcattggtgaagattctcca

SEQ ID NO: 5497231 - DNA, 25 bp, Homo sapien
gtcacgttgacactgttacagcctc

SEQ ID NO: 5497232 - DNA, 25 bp, Homo sapien
ctgtcttgtttagtgggaattaccc

SEQ ID NO: 5497233 - DNA, 25 bp, Homo sapien
acaacaagttgccctgagtaggctc

SEQ ID NO: 5497234 - DNA, 25 bp, Homo sapien
gagaaagatcgtgttgcaaaaaatg

SEQ ID NO: 5497235 - DNA, 25 bp, Homo sapien
gcagcactgaaaagcagatggtaga

SEQ ID NO: 5497236 - DNA, 25 bp, Homo sapien
ttctttgaggatagggtccatcctt

SEQ ID NO: 5497237 - DNA, 25 bp, Homo sapien
aagattactccatgattgacaaaac

SEQ ID NO: 5497238 - DNA, 25 bp, Homo sapien
gcagaatcaacatggttgggagagc

SEQ ID NO: 5497239 - DNA, 25 bp, Homo sapien
gttatcagttctccaggaagaagag

SEQ ID NO: 5497240 - DNA, 25 bp, Homo sapien
gaggggcagacatcttacacatttc

SEQ ID NO: 5497241 - DNA, 25 bp, Homo sapien
aggatgattgtacttgagaaagatc

SEQ ID NO: 5497242 - DNA, 25 bp, Homo sapien
aatagtgcccaacttaggatgattg

SEQ ID NO: 5497243 - DNA, 25 bp, Homo sapien
actgtgtgcaaggccctctatctca

SEQ ID NO: 5497244 - DNA, 25 bp, Homo sapien
ataataggaaatatgaatttgcctt

SEQ ID NO: 5497245 - DNA, 25 bp, Homo sapien
taagaagcagtctgttgaagaccag

SEQ ID NO: 5497246 - DNA, 25 bp, Homo sapien
gcagaatatggcagtaatacccaat

SEQ ID NO: 5497247 - DNA, 25 bp, Homo sapien
ttcaaatgcagaagagctaagttgc

SEQ ID NO: 5497248 - DNA, 25 bp, Homo sapien
tcttccatgaagagcagtaacattt

SEQ ID NO: 5497249 - DNA, 25 bp, Homo sapien
caattgaaacactagttggttgtat

SEQ ID NO: 5497250 - DNA, 25 bp, Homo sapien
cttcctgacttccatagccagcatc

SEQ ID NO: 5497251 - DNA, 25 bp, Homo sapien
acccgggcatacacaacagtggttt

SEQ ID NO: 5497252 - DNA, 25 bp, Homo sapien
tgtctaccttcacagcagtgcttct

SEQ ID NO: 5497253 - DNA, 25 bp, Homo sapien
gcaaagatagcagaactgtccaatc

SEQ ID NO: 5497254 - DNA, 25 bp, Homo sapien
ttatctaagaagacccgggcataca

SEQ ID NO: 5497255 - DNA, 25 bp, Homo sapien
attataagactgaggtaggtgaact

SEQ ID NO: 5497256 - DNA, 25 bp, Homo sapien
taacaaaacatctggctaggcgagg

SEQ ID NO: 5497257 - DNA, 25 bp, Homo sapien
aaaatctccttaatgaaaagtaaca

SEQ ID NO: 5497258 - DNA, 25 bp, Homo sapien
aggtgaactcgaatatcataaagtc

SEQ ID NO: 5497259 - DNA, 25 bp, Homo sapien
aaatagtattataagactgaggtag

SEQ ID NO: 5497260 - DNA, 25 bp, Homo sapien
ctatagcagagagagaaattcatga

SEQ ID NO: 5497261 - DNA, 25 bp, Homo sapien
atagcagagagagaaattcatgatt

SEQ ID NO: 5497262 - DNA, 25 bp, Homo sapien
tgaaaagtaacaaaacatctggcta

SEQ ID NO: 5497263 - DNA, 25 bp, Homo sapien
gtattataagactgaggtaggtgaa

SEQ ID NO: 5497264 - DNA, 25 bp, Homo sapien
ctgaggtaggtgaactcgaatatca

SEQ ID NO: 5497265 - DNA, 25 bp, Homo sapien
tctgtcgcccagcaatctcggctca

SEQ ID NO: 5497266 - DNA, 25 bp, Homo sapien
aaaactgtgtcgataaatgcataag

SEQ ID NO: 5497267 - DNA, 25 bp, Homo sapien
tttcagtaatgatctggttgttctc

SEQ ID NO: 5497268 - DNA, 25 bp, Homo sapien
tatgtgcattgaaaactgtgtcgat

SEQ ID NO: 5497269 - DNA, 25 bp, Homo sapien
ctacagacgcctgccacctggctaa

SEQ ID NO: 5497270 - DNA, 25 bp, Homo sapien
tcaccatgttagccacagtggtctc

SEQ ID NO: 5497271 - DNA, 25 bp, Homo sapien
ttagccacagtggtctcgatctcct

SEQ ID NO: 5497272 - DNA, 25 bp, Homo sapien
caaaacctgcccaatacacattatc

SEQ ID NO: 5497273 - DNA, 25 bp, Homo sapien
gcataagttatgatttccaagccac

SEQ ID NO: 5497274 - DNA, 25 bp, Homo sapien
gatttccaagccacagtgaaaatat

SEQ ID NO: 5497275 - DNA, 25 bp, Homo sapien
caaggatgttgaaatataatgtaat

SEQ ID NO: 5497276 - DNA, 25 bp, Homo sapien
ttttagcatacaaaacctgcccaat

SEQ ID NO: 5497277 - DNA, 25 bp, Homo sapien
ccgtgcctggacacatttttcctat

SEQ ID NO: 5497278 - DNA, 25 bp, Homo sapien
tctctcacagatgcaatgacttatc

SEQ ID NO: 5497279 - DNA, 25 bp, Homo sapien
taaagttcttctgagctaatggctt

SEQ ID NO: 5497280 - DNA, 25 bp, Homo sapien
cctttcccttctctggccactagga

SEQ ID NO: 5497281 - DNA, 25 bp, Homo sapien
tctggccactaggaaacctgaggca

SEQ ID NO: 5497282 - DNA, 25 bp, Homo sapien
ccacaggatttcatggcaggtgctt

SEQ ID NO: 5497283 - DNA, 25 bp, Homo sapien
caggatttcatggcaggtgcttcac

SEQ ID NO: 5497284 - DNA, 25 bp, Homo sapien
acagatgcaatgacttatcctttcc

SEQ ID NO: 5497285 - DNA, 25 bp, Homo sapien
ggtgcttcacaaaccagcttctcac

SEQ ID NO: 5497286 - DNA, 25 bp, Homo sapien
ccctgcagactaccaccagcaaggc

SEQ ID NO: 5497287 - DNA, 25 bp, Homo sapien
agccctgcagactaccaccagcaag

SEQ ID NO: 5497288 - DNA, 25 bp, Homo sapien
aggaagttcactcagagcaggctct

SEQ ID NO: 5497289 - DNA, 25 bp, Homo sapien
gatgcaaggaacggaaacttattca

SEQ ID NO: 5497290 - DNA, 25 bp, Homo sapien
gatctggctgtcacaggagtagaac

SEQ ID NO: 5497291 - DNA, 25 bp, Homo sapien
agaacgtcatcaggcagctcccttc

SEQ ID NO: 5497292 - DNA, 25 bp, Homo sapien
gttattgttcagagatgagggatgt

SEQ ID NO: 5497293 - DNA, 25 bp, Homo sapien
gtatacccatggagtgttgtagggg

SEQ ID NO: 5497294 - DNA, 25 bp, Homo sapien
gactgtagatgttaccaggaagttc

SEQ ID NO: 5497295 - DNA, 25 bp, Homo sapien
gaggatggctgcattgtgtcaactt

SEQ ID NO: 5497296 - DNA, 25 bp, Homo sapien
gtcggaaatttctgggatgcaagga

SEQ ID NO: 5497297 - DNA, 25 bp, Homo sapien
ctctgatgtgatgataggagctctg

SEQ ID NO: 5497298 - DNA, 25 bp, Homo sapien
gctctgggagccactcacctacttc

SEQ ID NO: 5497299 - DNA, 25 bp, Homo sapien
gttatggtccgaatgcttgtctctc

SEQ ID NO: 5497300 - DNA, 25 bp, Homo sapien
cataagggtggggtcctcattaatg

SEQ ID NO: 5497301 - DNA, 25 bp, Homo sapien
gagaacatagcaagatggtaccatc

SEQ ID NO: 5497302 - DNA, 25 bp, Homo sapien
tttattggggccttgatctcagact

SEQ ID NO: 5497303 - DNA, 25 bp, Homo sapien
tattaagacagttggtcaggtgctt

SEQ ID NO: 5497304 - DNA, 25 bp, Homo sapien
attcgtgcactaataaaaagaggcc

SEQ ID NO: 5497305 - DNA, 25 bp, Homo sapien
ttagccaccagaaccgtgagaaata

SEQ ID NO: 5497306 - DNA, 25 bp, Homo sapien
ccaatgtgatcgtattgggaggcgt

SEQ ID NO: 5497307 - DNA, 25 bp, Homo sapien
catctacgaatcacgaaacaggccc

SEQ ID NO: 5497308 - DNA, 25 bp, Homo sapien
tgcttgtaatgaacaggagttggtc

SEQ ID NO: 5497309 - DNA, 25 bp, Homo sapien
cacgaaacaggccctcatcagaggc

SEQ ID NO: 5497310 - DNA, 25 bp, Homo sapien
ggaaagaaaccaacactagacatat

SEQ ID NO: 5497311 - DNA, 25 bp, Homo sapien
agttccgtaagtgaacgtttgacac

SEQ ID NO: 5497312 - DNA, 25 bp, Homo sapien
ctctggtcgaaatcacagtgataca

SEQ ID NO: 5497313 - DNA, 25 bp, Homo sapien
tacacggtacgttagtctcaccagc

SEQ ID NO: 5497314 - DNA, 25 bp, Homo sapien
gtgatcattggcaaaggagtagtac

SEQ ID NO: 5497315 - DNA, 25 bp, Homo sapien
tacagctattgtacaacagcccaac

SEQ ID NO: 5497316 - DNA, 25 bp, Homo sapien
aggagtagtacatgtgaggattaaa

SEQ ID NO: 5497317 - DNA, 25 bp, Homo sapien
cctggcagagctttactggcagtgt

SEQ ID NO: 5497318 - DNA, 25 bp, Homo sapien
aatggaccataacctaggacataac

SEQ ID NO: 5497319 - DNA, 25 bp, Homo sapien
tgacacttggaaagacaacaaatgt

SEQ ID NO: 5497320 - DNA, 25 bp, Homo sapien
actttagctgtcatgccagtgcctc

SEQ ID NO: 5497321 - DNA, 25 bp, Homo sapien
atgaattcacccaaggatgtaagtc

SEQ ID NO: 5497322 - DNA, 25 bp, Homo sapien
ctactgaaaaactgtggcaaacttt

SEQ ID NO: 5497323 - DNA, 25 bp, Homo sapien
gccttgatctagtgacgcagcagtg

SEQ ID NO: 5497324 - DNA, 25 bp, Homo sapien
gtcatttcagacagcgttccccacc

SEQ ID NO: 5497325 - DNA, 25 bp, Homo sapien
ctgcattaatagtagggaagtcctt

SEQ ID NO: 5497326 - DNA, 25 bp, Homo sapien
agttcctagctggtaagggtttctc

SEQ ID NO: 5497327 - DNA, 25 bp, Homo sapien
tcaggtagattgaaagctttgttcc

SEQ ID NO: 5497328 - DNA, 25 bp, Homo sapien
tgtcctgggctttagggcatctgta

SEQ ID NO: 5497329 - DNA, 25 bp, Homo sapien
caaggttagcatcaagactccatga

SEQ ID NO: 5497330 - DNA, 25 bp, Homo sapien
gtgacgcagcagtgatgtagtttta

SEQ ID NO: 5497331 - DNA, 25 bp, Homo sapien
atgtagttttaggaggcagaaatat

SEQ ID NO: 5497332 - DNA, 25 bp, Homo sapien
gaggagcaagagcttttcactgaga

SEQ ID NO: 5497333 - DNA, 25 bp, Homo sapien
agaacgcaggcatttcacctgcggc

SEQ ID NO: 5497334 - DNA, 25 bp, Homo sapien
gcatgaggagcaagagcttttcact

SEQ ID NO: 5497335 - DNA, 25 bp, Homo sapien
cgccctggataagatgcatgaggag

SEQ ID NO: 5497336 - DNA, 25 bp, Homo sapien
gaaccacaaggttgccgtgcggttc

SEQ ID NO: 5497337 - DNA, 25 bp, Homo sapien
caggcatttcacctgcggcagaacc

SEQ ID NO: 5497338 - DNA, 25 bp, Homo sapien
atttcacctgcggcagaacctgagc

SEQ ID NO: 5497339 - DNA, 25 bp, Homo sapien
gctgtggcagccgagatcgccacag

SEQ ID NO: 5497340 - DNA, 25 bp, Homo sapien
tgtccagacgcctatttgcagagct

SEQ ID NO: 5497341 - DNA, 25 bp, Homo sapien
gcgccctggataagatgcatgagga

SEQ ID NO: 5497342 - DNA, 25 bp, Homo sapien
ccaggccgtgtccagacgcctattt

SEQ ID NO: 5497343 - DNA, 25 bp, Homo sapien
tgggaactacactggcaatgaattt

SEQ ID NO: 5497344 - DNA, 25 bp, Homo sapien
gaggctgttgaatttgtctaagtaa

SEQ ID NO: 5497345 - DNA, 25 bp, Homo sapien
atgaattttaaaaggtgatgcgggt

SEQ ID NO: 5497346 - DNA, 25 bp, Homo sapien
agaagccaggctcatctagcaagac

SEQ ID NO: 5497347 - DNA, 25 bp, Homo sapien
ttgccaccaggtaaaattcacacac

SEQ ID NO: 5497348 - DNA, 25 bp, Homo sapien
atctgaagtcagtatgaggccatat

SEQ ID NO: 5497349 - DNA, 25 bp, Homo sapien
atacactggggtatctgaagtcagt

SEQ ID NO: 5497350 - DNA, 25 bp, Homo sapien
ttcaagagaatcaccacgttggttt

SEQ ID NO: 5497351 - DNA, 25 bp, Homo sapien
attgaagaatcattgtacctagagg

SEQ ID NO: 5497352 - DNA, 25 bp, Homo sapien
agtatgaggccatattgggaactac

SEQ ID NO: 5497353 - DNA, 25 bp, Homo sapien
ggggttggctccaagcatgtccata

SEQ ID NO: 5497354 - DNA, 25 bp, Homo sapien
agagattctgcatttacggtctatt

SEQ ID NO: 5497355 - DNA, 25 bp, Homo sapien
gaaggaatatgagatcagtcaagac

SEQ ID NO: 5497356 - DNA, 25 bp, Homo sapien
atcaaatcccaaaaacacctatctt

SEQ ID NO: 5497357 - DNA, 25 bp, Homo sapien
tgggagagtgaagatttactgcttg

SEQ ID NO: 5497358 - DNA, 25 bp, Homo sapien
gttgtcaatgactagcctgtttcca

SEQ ID NO: 5497359 - DNA, 25 bp, Homo sapien
tatctttgtggtggacaaaatgaac

SEQ ID NO: 5497360 - DNA, 25 bp, Homo sapien
aatgaacacttggctgacggcagtg

SEQ ID NO: 5497361 - DNA, 25 bp, Homo sapien
ttccttcatgcaacctatcaaatcc

SEQ ID NO: 5497362 - DNA, 25 bp, Homo sapien
atccttaaaggtgttgtcaatgact

SEQ ID NO: 5497363 - DNA, 25 bp, Homo sapien
gagctatgcccaagaaggaatatga

SEQ ID NO: 5497364 - DNA, 25 bp, Homo sapien
ttccaagtaaacacagagattctgc

SEQ ID NO: 5497365 - DNA, 25 bp, Homo sapien
ctttgagtcagagtcacagaagaat

SEQ ID NO: 5497366 - DNA, 25 bp, Homo sapien
acatgtggacatcaggatgacaagg

SEQ ID NO: 5497367 - DNA, 25 bp, Homo sapien
ctacagtaggggataatgtaacctt

SEQ ID NO: 5497368 - DNA, 25 bp, Homo sapien
gaggccacctctgaccagctaggtc

SEQ ID NO: 5497369 - DNA, 25 bp, Homo sapien
aggaaccttatgcgaggactcaacc

SEQ ID NO: 5497370 - DNA, 25 bp, Homo sapien
atgacaaggcttctgaagcagaggc

SEQ ID NO: 5497371 - DNA, 25 bp, Homo sapien
tggactgagatgacatgtggacatc

SEQ ID NO: 5497372 - DNA, 25 bp, Homo sapien
ggagcagtcgtggaactgcatcatt

SEQ ID NO: 5497373 - DNA, 25 bp, Homo sapien
cagtctctggatgtacaagcaaggt

SEQ ID NO: 5497374 - DNA, 25 bp, Homo sapien
tcacacaatgagttagagccagagt

SEQ ID NO: 5497375 - DNA, 25 bp, Homo sapien
agtgaagtcaaaacccagtctctgg

SEQ ID NO: 5497376 - DNA, 25 bp, Homo sapien
atccctaaaaggctagcaggggaca

SEQ ID NO: 5497377 - DNA, 25 bp, Homo sapien
tcctaagaaggaatcaagtggtcaa

SEQ ID NO: 5497378 - DNA, 25 bp, Homo sapien
cattcagagacccttgagatgtcat

SEQ ID NO: 5497379 - DNA, 25 bp, Homo sapien
ggaatcaagtggtcaaacctatccc

SEQ ID NO: 5497380 - DNA, 25 bp, Homo sapien
catcataaggtaagaacaaaccaag

SEQ ID NO: 5497381 - DNA, 25 bp, Homo sapien
gtggtgtatcaccttggaaagttca

SEQ ID NO: 5497382 - DNA, 25 bp, Homo sapien
ttcctcaaagtgttagagctgcccc

SEQ ID NO: 5497383 - DNA, 25 bp, Homo sapien
ttggaaagttcatcataaggtaaga

SEQ ID NO: 5497384 - DNA, 25 bp, Homo sapien
gaaatcacacactaaagcagagaga

SEQ ID NO: 5497385 - DNA, 25 bp, Homo sapien
agtgttagagctgcccctacagtgg

SEQ ID NO: 5497386 - DNA, 25 bp, Homo sapien
agagagaagctgaagttcctcaaag

SEQ ID NO: 5497387 - DNA, 25 bp, Homo sapien
aagatctccctaagtgcagtgtgtg

SEQ ID NO: 5497388 - DNA, 25 bp, Homo sapien
cctgccccacctccgcactaccccg

SEQ ID NO: 5497389 - DNA, 25 bp, Homo sapien
aagtgcagtgtgtgggataaactgc

SEQ ID NO: 5497390 - DNA, 25 bp, Homo sapien
aagcacgggaataacaagtcttgtt

SEQ ID NO: 5497391 - DNA, 25 bp, Homo sapien
aggtagttcattaggataggctggg

SEQ ID NO: 5497392 - DNA, 25 bp, Homo sapien
gaggattttaagcacgggaataaca

SEQ ID NO: 5497393 - DNA, 25 bp, Homo sapien
ccgccctgccatcggatagctggga

SEQ ID NO: 5497394 - DNA, 25 bp, Homo sapien
gactcacaccaccatgagtgaagcc

SEQ ID NO: 5497395 - DNA, 25 bp, Homo sapien
tgtttgcgctttagaaagatctccc

SEQ ID NO: 5497396 - DNA, 25 bp, Homo sapien
gcgcccagcccattggaggattttt

SEQ ID NO: 5497397 - DNA, 25 bp, Homo sapien
ccgcactaccccgccctgccatcgg

SEQ ID NO: 5497398 - DNA, 25 bp, Homo sapien
cagatggcttcctagagaagacagc

SEQ ID NO: 5497399 - DNA, 25 bp, Homo sapien
aggggctggatctaagcatcctcat

SEQ ID NO: 5497400 - DNA, 25 bp, Homo sapien
agaagacagccacattgggtcctga

SEQ ID NO: 5497401 - DNA, 25 bp, Homo sapien
aagacttcacaaggtatgacagggg

SEQ ID NO: 5497402 - DNA, 25 bp, Homo sapien
ggaattaggtacatgaaagaaagga

SEQ ID NO: 5497403 - DNA, 25 bp, Homo sapien
gagagtgcaactccttcaagggact

SEQ ID NO: 5497404 - DNA, 25 bp, Homo sapien
cctcatgagccatgatgaggagctg

SEQ ID NO: 5497405 - DNA, 25 bp, Homo sapien
tgggaggtccagaacagactcctaa

SEQ ID NO: 5497406 - DNA, 25 bp, Homo sapien
tactgacatgtatgagatagatgat

SEQ ID NO: 5497407 - DNA, 25 bp, Homo sapien
gagatagatgattaaacaagacttc

SEQ ID NO: 5497408 - DNA, 25 bp, Homo sapien
gcctgaaaacaccaactggaccatc

SEQ ID NO: 5497409 - DNA, 25 bp, Homo sapien
tctcccagattgtctccccacattt

SEQ ID NO: 5497410 - DNA, 25 bp, Homo sapien
cctggaccccaactaataagtaatg

SEQ ID NO: 5497411 - DNA, 25 bp, Homo sapien
ctgagttttatggagcgtcagggtg

SEQ ID NO: 5497412 - DNA, 25 bp, Homo sapien
attaatctcaagttccggtttggga

SEQ ID NO: 5497413 - DNA, 25 bp, Homo sapien
aagtaatggataattaacaggttta

SEQ ID NO: 5497414 - DNA, 25 bp, Homo sapien
ggtggttcagaggctgagttttatg

SEQ ID NO: 5497415 - DNA, 25 bp, Homo sapien
tccccctcagaccccactctggccc

SEQ ID NO: 5497416 - DNA, 25 bp, Homo sapien
atccaggcactcaacagcacccctt

SEQ ID NO: 5497417 - DNA, 25 bp, Homo sapien
tatatatacagagagggaacttgga

SEQ ID NO: 5497418 - DNA, 25 bp, Homo sapien
gtagtcttgtctggggtggttcaga

SEQ ID NO: 5497419 - DNA, 25 bp, Homo sapien
agggggaggagctcttctcccagat

SEQ ID NO: 5497420 - DNA, 25 bp, Homo sapien
caggcacatgctggcatgcccagtt

SEQ ID NO: 5497421 - DNA, 25 bp, Homo sapien
tctaagctgattccgattgcctatt

SEQ ID NO: 5497422 - DNA, 25 bp, Homo sapien
cgtgagtgcccggcagcattctttc

SEQ ID NO: 5497423 - DNA, 25 bp, Homo sapien
ctacgctgtcctcagtaaattcttc

SEQ ID NO: 5497424 - DNA, 25 bp, Homo sapien
gaccagcactcggagaaaagtttct

SEQ ID NO: 5497425 - DNA, 25 bp, Homo sapien
gctgcccagacctgtaccaaaagca

SEQ ID NO: 5497426 - DNA, 25 bp, Homo sapien
agtttcttagcaaggcaaagtttac

SEQ ID NO: 5497427 - DNA, 25 bp, Homo sapien
tctttttcaagcctacgctgtcctc

SEQ ID NO: 5497428 - DNA, 25 bp, Homo sapien
gcacacctaataaaggagagcaggg

SEQ ID NO: 5497429 - DNA, 25 bp, Homo sapien
aagttcttggtgccacagagagaga

SEQ ID NO: 5497430 - DNA, 25 bp, Homo sapien
cagacctgtaccaaaagcacaccta

SEQ ID NO: 5497431 - DNA, 25 bp, Homo sapien
ctgcagtcgtgaccactgatgtgcc

SEQ ID NO: 5497432 - DNA, 25 bp, Homo sapien
acaccaatgtgaaggacagtaagat

SEQ ID NO: 5497433 - DNA, 25 bp, Homo sapien
ggcgctcatcaggacagcagattct

SEQ ID NO: 5497434 - DNA, 25 bp, Homo sapien
acatagtggcacatcatggacctca

SEQ ID NO: 5497435 - DNA, 25 bp, Homo sapien
ctctatcgggtcctgaggaaaagca

SEQ ID NO: 5497436 - DNA, 25 bp, Homo sapien
gtgagggctcttttggaagtgcaca

SEQ ID NO: 5497437 - DNA, 25 bp, Homo sapien
tagtgtagggcctgacacgatgtaa

SEQ ID NO: 5497438 - DNA, 25 bp, Homo sapien
gccttttgtggtgagacaaggcgct

SEQ ID NO: 5497439 - DNA, 25 bp, Homo sapien
agcaggtggttctggcatcttcctt

SEQ ID NO: 5497440 - DNA, 25 bp, Homo sapien
ggatgaggatccaattgatgccata

SEQ ID NO: 5497441 - DNA, 25 bp, Homo sapien
gaagtgcacacctagctgacctgcc

SEQ ID NO: 5497442 - DNA, 25 bp, Homo sapien
aacaagaaagccatgttgctgtgat

SEQ ID NO: 5497443 - DNA, 25 bp, Homo sapien
gaaagattcatggggcagtattctt

SEQ ID NO: 5497444 - DNA, 25 bp, Homo sapien
tttaaaaatgcttgcgaaaaacaca

SEQ ID NO: 5497445 - DNA, 25 bp, Homo sapien
aaggttttggtgagctcaactgtat

SEQ ID NO: 5497446 - DNA, 25 bp, Homo sapien
aagagaatatcaaaccatccatcgt

SEQ ID NO: 5497447 - DNA, 25 bp, Homo sapien
tgagtggttctatatagtagctgtc

SEQ ID NO: 5497448 - DNA, 25 bp, Homo sapien
caacattggcttgcttaactgtgcc

SEQ ID NO: 5497449 - DNA, 25 bp, Homo sapien
gataagtgtataatagagaaacgtg

SEQ ID NO: 5497450 - DNA, 25 bp, Homo sapien
ttaaatgccagtatacctaacagca

SEQ ID NO: 5497451 - DNA, 25 bp, Homo sapien
ccccacagcaggtaaggttttggtg

SEQ ID NO: 5497452 - DNA, 25 bp, Homo sapien
atagagaaacgtgtgaaagattcat

SEQ ID NO: 5497453 - DNA, 25 bp, Homo sapien
aggcctgtacggaagtgttacttct

SEQ ID NO: 5497454 - DNA, 25 bp, Homo sapien
ttcgttttctgttctgcgccgttac

SEQ ID NO: 5497455 - DNA, 25 bp, Homo sapien
gcaaatcaaagaactgctcctcagt

SEQ ID NO: 5497456 - DNA, 25 bp, Homo sapien
atttcaggtcccggatccggtggtg

SEQ ID NO: 5497457 - DNA, 25 bp, Homo sapien
caaagaactgctcctcagtggatgt

SEQ ID NO: 5497458 - DNA, 25 bp, Homo sapien
tgtcttttatttcaggtcccggatc

SEQ ID NO: 5497459 - DNA, 25 bp, Homo sapien
cctcagtggatgttgcctttacttc

SEQ ID NO: 5497460 - DNA, 25 bp, Homo sapien
ctgttctgcgccgttacagatccaa

SEQ ID NO: 5497461 - DNA, 25 bp, Homo sapien
ttacttctaggcctgtacggaagtg

SEQ ID NO: 5497462 - DNA, 25 bp, Homo sapien
actgctcctcagtggatgttgcctt

SEQ ID NO: 5497463 - DNA, 25 bp, Homo sapien
cttctaggcctgtacggaagtgtta

SEQ ID NO: 5497464 - DNA, 25 bp, Homo sapien
gccgccatccacgccggttgagtcg

SEQ ID NO: 5497465 - DNA, 25 bp, Homo sapien
cgcctgtggtgcctcctgaactgcg

SEQ ID NO: 5497466 - DNA, 25 bp, Homo sapien
cgccgtctaggtaagtttaaagctc

SEQ ID NO: 5497467 - DNA, 25 bp, Homo sapien
ctcctgaactgcgtccgccgtctag

SEQ ID NO: 5497468 - DNA, 25 bp, Homo sapien
tgtccggcgctcccttggagcctac

SEQ ID NO: 5497469 - DNA, 25 bp, Homo sapien
tggagcctacctagactcagccggc

SEQ ID NO: 5497470 - DNA, 25 bp, Homo sapien
aagtttaaagctcaggtcgagaccg

SEQ ID NO: 5497471 - DNA, 25 bp, Homo sapien
ggacacacacatgcctattgaattt

SEQ ID NO: 5497472 - DNA, 25 bp, Homo sapien
agactcagccggctctccacgcttt

SEQ ID NO: 5497473 - DNA, 25 bp, Homo sapien
ccacgctttgcctgaccctgcttgc

SEQ ID NO: 5497474 - DNA, 25 bp, Homo sapien
gttggcctactggagaaatagatgt

SEQ ID NO: 5497475 - DNA, 25 bp, Homo sapien
agccagacatatattaaagagattt

SEQ ID NO: 5497476 - DNA, 25 bp, Homo sapien
gccagccagctgtcttctaataagc

SEQ ID NO: 5497477 - DNA, 25 bp, Homo sapien
atgtgtgatatgcaaagccagccag

SEQ ID NO: 5497478 - DNA, 25 bp, Homo sapien
atgcagtccattgggtcaaaagtat

SEQ ID NO: 5497479 - DNA, 25 bp, Homo sapien
ctctggagatccccgagaccattta

SEQ ID NO: 5497480 - DNA, 25 bp, Homo sapien
gtcctcagtgtatggtctggggacc

SEQ ID NO: 5497481 - DNA, 25 bp, Homo sapien
tccaaaggctgcataatgtgtgata

SEQ ID NO: 5497482 - DNA, 25 bp, Homo sapien
taagacattgtctgccacttcactc

SEQ ID NO: 5497483 - DNA, 25 bp, Homo sapien
tctcttgagtgtatagtggggtttt

SEQ ID NO: 5497484 - DNA, 25 bp, Homo sapien
ccccgagaccatttaatgcagtcca

SEQ ID NO: 5497485 - DNA, 25 bp, Homo sapien
ttgcatcgctggtcctcagtgtatg

SEQ ID NO: 5497486 - DNA, 25 bp, Homo sapien
ggacatcacgagctgtccaggaggc

SEQ ID NO: 5497487 - DNA, 25 bp, Homo sapien
acttgctgcttcaccacgaaggagt

SEQ ID NO: 5497488 - DNA, 25 bp, Homo sapien
gaatgccatgctccgagaacagctg

SEQ ID NO: 5497489 - DNA, 25 bp, Homo sapien
gtgaatgccatgctccgagaacagc

SEQ ID NO: 5497490 - DNA, 25 bp, Homo sapien
cttcaccacgaaggagttcccgtgc

SEQ ID NO: 5497491 - DNA, 25 bp, Homo sapien
tgctgcttcaccacgaaggagttcc

SEQ ID NO: 5497492 - DNA, 25 bp, Homo sapien
tgcttcaccacgaaggagttcccgt

SEQ ID NO: 5497493 - DNA, 25 bp, Homo sapien
ccggacatcacgagctgtccaggag

SEQ ID NO: 5497494 - DNA, 25 bp, Homo sapien
gctgcttcgccacttgctgcttcac

SEQ ID NO: 5497495 - DNA, 25 bp, Homo sapien
ctgctgcttcgccacttgctgcttc

SEQ ID NO: 5497496 - DNA, 25 bp, Homo sapien
tggcccggacatcacgagctgtcca

SEQ ID NO: 5497497 - DNA, 25 bp, Homo sapien
gttggaaacaacctgcaggtccatc

SEQ ID NO: 5497498 - DNA, 25 bp, Homo sapien
tatgatagtgaaaggttggaaacaa

SEQ ID NO: 5497499 - DNA, 25 bp, Homo sapien
taaaatgatgctgtagagcagtctc

SEQ ID NO: 5497500 - DNA, 25 bp, Homo sapien
gccacacaaagggacactatgcagt

SEQ ID NO: 5497501 - DNA, 25 bp, Homo sapien
aatcatggacttattgtgaccactc

SEQ ID NO: 5497502 - DNA, 25 bp, Homo sapien
gattattgaggatcccaaagaactt

SEQ ID NO: 5497503 - DNA, 25 bp, Homo sapien
tctccagcgttcagtctcaggatca

SEQ ID NO: 5497504 - DNA, 25 bp, Homo sapien
atcattaaggaaatggggtaaacaa

SEQ ID NO: 5497505 - DNA, 25 bp, Homo sapien
ctgctgtccatgaagtgtatttgat

SEQ ID NO: 5497506 - DNA, 25 bp, Homo sapien
actttacatgagtactgagtgattg

SEQ ID NO: 5497507 - DNA, 25 bp, Homo sapien
gtagagcagtctcgttctccagcgt

SEQ ID NO: 5497508 - DNA, 25 bp, Homo sapien
acgtgaagactgattaatatctgct

SEQ ID NO: 5497509 - DNA, 25 bp, Homo sapien
agtgcctaggtaactcctgtacttc

SEQ ID NO: 5497510 - DNA, 25 bp, Homo sapien
tatgtttcaacgtgaagactgatta

SEQ ID NO: 5497511 - DNA, 25 bp, Homo sapien
tcatcttcagtgcctaggtaactcc

SEQ ID NO: 5497512 - DNA, 25 bp, Homo sapien
gaacatgctgcagttgttccaccac

SEQ ID NO: 5497513 - DNA, 25 bp, Homo sapien
tcagagaaactctgcatcttcagat

SEQ ID NO: 5497514 - DNA, 25 bp, Homo sapien
ttcagattagatcatggaatttatc

SEQ ID NO: 5497515 - DNA, 25 bp, Homo sapien
tgttccaccacaggtcctttgccca

SEQ ID NO: 5497516 - DNA, 25 bp, Homo sapien
cttagatcctggaacatgctgcagt

SEQ ID NO: 5497517 - DNA, 25 bp, Homo sapien
agccatgtggatacaaagattgtgt

SEQ ID NO: 5497518 - DNA, 25 bp, Homo sapien
cttcaattgtaagccatgtggatac

SEQ ID NO: 5497519 - DNA, 25 bp, Homo sapien
atgaaaatgaacaatccaagaagtc

SEQ ID NO: 5497520 - DNA, 25 bp, Homo sapien
ccaagaagacaaacactgaattcct

SEQ ID NO: 5497521 - DNA, 25 bp, Homo sapien
cccatttacacagctgccagggaac

SEQ ID NO: 5497522 - DNA, 25 bp, Homo sapien
atacaaagaacaatccaaagaaaga

SEQ ID NO: 5497523 - DNA, 25 bp, Homo sapien
agaaggccagaaaccagctcataaa

SEQ ID NO: 5497524 - DNA, 25 bp, Homo sapien
cagctcataaatggataaggcattc

SEQ ID NO: 5497525 - DNA, 25 bp, Homo sapien
gaaaaaaggaggttcatatgcaaca

SEQ ID NO: 5497526 - DNA, 25 bp, Homo sapien
ctgccagggaacagactccattcag

SEQ ID NO: 5497527 - DNA, 25 bp, Homo sapien
agatgaaaaaggaggaacacctttg

SEQ ID NO: 5497528 - DNA, 25 bp, Homo sapien
gaatccaagcaaatagtagaagaga

SEQ ID NO: 5497529 - DNA, 25 bp, Homo sapien
gaaaaattttgcaatggccacccat

SEQ ID NO: 5497530 - DNA, 25 bp, Homo sapien
cgaccgatgaggcaacaaagcttcc

SEQ ID NO: 5497531 - DNA, 25 bp, Homo sapien
ggaagctttgttgcctcatcggtcg

SEQ ID NO: 5497532 - DNA, 25 bp, Homo sapien
tgggtcggtgccatctttaagagct

SEQ ID NO: 5497533 - DNA, 25 bp, Homo sapien
ctcgcgggttcatgccactttcctg

SEQ ID NO: 5497534 - DNA, 25 bp, Homo sapien
agttccgttcttggtcagctagacc

SEQ ID NO: 5497535 - DNA, 25 bp, Homo sapien
tctcactgcgaaagtccccagttcc

SEQ ID NO: 5497536 - DNA, 25 bp, Homo sapien
gggcatgcgtaaaagcctgctccgg

SEQ ID NO: 5497537 - DNA, 25 bp, Homo sapien
ggcctgggtcggtgccatctttaag

SEQ ID NO: 5497538 - DNA, 25 bp, Homo sapien
ttattgcaagctctgcctcgcgggt

SEQ ID NO: 5497539 - DNA, 25 bp, Homo sapien
ctgcgaaagtccccagttccgttct

SEQ ID NO: 5497540 - DNA, 25 bp, Homo sapien
tgtaactctcactgcgaaagtcccc

SEQ ID NO: 5497541 - DNA, 25 bp, Homo sapien
ttcttggtcagctagaccgcgaacc

SEQ ID NO: 5497542 - DNA, 25 bp, Homo sapien
gagctgtaactctcactgcgaaagt

SEQ ID NO: 5497543 - DNA, 25 bp, Homo sapien
gaaggtaacctcgaattaagttcag

SEQ ID NO: 5497544 - DNA, 25 bp, Homo sapien
ctgaacttaattcgaggttaccttc

SEQ ID NO: 5497545 - DNA, 25 bp, Homo sapien
gggactttcgcagtgagagttacag

SEQ ID NO: 5497546 - DNA, 25 bp, Homo sapien
cgcgcccccttgtgtccggaattta

SEQ ID NO: 5497547 - DNA, 25 bp, Homo sapien
cggtctagctgaccaagaacggaac

SEQ ID NO: 5497548 - DNA, 25 bp, Homo sapien
gctcttaaagatggcaccgacccag

SEQ ID NO: 5497549 - DNA, 25 bp, Homo sapien
ggactttcgcagtgagagttacagc

SEQ ID NO: 5497550 - DNA, 25 bp, Homo sapien
tcgcggtctagctgaccaagaacgg

SEQ ID NO: 5497551 - DNA, 25 bp, Homo sapien
cgcggtctagctgaccaagaacgga

SEQ ID NO: 5497552 - DNA, 25 bp, Homo sapien
actttcgcagtgagagttacagctc

SEQ ID NO: 5497553 - DNA, 25 bp, Homo sapien
ctcttaaagatggcaccgacccagg

SEQ ID NO: 5497554 - DNA, 25 bp, Homo sapien
tgggttcgcggtctagctgaccaag

SEQ ID NO: 5497555 - DNA, 25 bp, Homo sapien
gttcgcggtctagctgaccaagaac

SEQ ID NO: 5497556 - DNA, 25 bp, Homo sapien
gtccaccgatcaggtacgtcgacgt

SEQ ID NO: 5497557 - DNA, 25 bp, Homo sapien
acgtcgacgtacctgatcggtggac

SEQ ID NO: 5497558 - DNA, 25 bp, Homo sapien
atacacaactatcaccaggaacatt

SEQ ID NO: 5497559 - DNA, 25 bp, Homo sapien
cttgaggtataatttgcatgtcatg

SEQ ID NO: 5497560 - DNA, 25 bp, Homo sapien
atggtatcatacaatacagagccct

SEQ ID NO: 5497561 - DNA, 25 bp, Homo sapien
acgtttagtggctttcttgaggtat

SEQ ID NO: 5497562 - DNA, 25 bp, Homo sapien
aaaaccaatctccatgctgccaccc

SEQ ID NO: 5497563 - DNA, 25 bp, Homo sapien
gagtggccacccacgtttagtggct

SEQ ID NO: 5497564 - DNA, 25 bp, Homo sapien
acccaaactgttccgctgtgcctgt

SEQ ID NO: 5497565 - DNA, 25 bp, Homo sapien
cctacacccaggcaaagtactgatc

SEQ ID NO: 5497566 - DNA, 25 bp, Homo sapien
taagtacacaattgcacacgttttc

SEQ ID NO: 5497567 - DNA, 25 bp, Homo sapien
ctgatctgatctaaggttttgcctg

SEQ ID NO: 5497568 - DNA, 25 bp, Homo sapien
cctgaatggtcatcttaaagagaat

SEQ ID NO: 5497569 - DNA, 25 bp, Homo sapien
cgccctagatcatggtcgagaggag

SEQ ID NO: 5497570 - DNA, 25 bp, Homo sapien
ctcctctcgaccatgatctagggcg

SEQ ID NO: 5497571 - DNA, 25 bp, Homo sapien
attttccatggtgtggcactgggca

SEQ ID NO: 5497572 - DNA, 25 bp, Homo sapien
tgtaagataatccaatggcctgacc

SEQ ID NO: 5497573 - DNA, 25 bp, Homo sapien
atgctggaaaagatcatttttgttc

SEQ ID NO: 5497574 - DNA, 25 bp, Homo sapien
gtgtatcctctccccaggtgatgcc

SEQ ID NO: 5497575 - DNA, 25 bp, Homo sapien
atcggtgtctatgtaagataatcca

SEQ ID NO: 5497576 - DNA, 25 bp, Homo sapien
gcccagtcttgtgcttgcctccatt

SEQ ID NO: 5497577 - DNA, 25 bp, Homo sapien
tcttccacctgaagagaccatggag

SEQ ID NO: 5497578 - DNA, 25 bp, Homo sapien
cttcctgggattctcaaaatacttc

SEQ ID NO: 5497579 - DNA, 25 bp, Homo sapien
tggcactgggcacacttctgaacaa

SEQ ID NO: 5497580 - DNA, 25 bp, Homo sapien
aatccaatggcctgacctatcttcc

SEQ ID NO: 5497581 - DNA, 25 bp, Homo sapien
accatggagattaggcccagtcttg

SEQ ID NO: 5497582 - DNA, 25 bp, Homo sapien
cggggcaggtgactggtctcggtag

SEQ ID NO: 5497583 - DNA, 25 bp, Homo sapien
ctaccgagaccagtcacctgccccg

SEQ ID NO: 5497584 - DNA, 25 bp, Homo sapien
gagtaagacgggacaccggcagact

SEQ ID NO: 5497585 - DNA, 25 bp, Homo sapien
agtctgccggtgtcccgtcttactc

SEQ ID NO: 5497586 - DNA, 25 bp, Homo sapien
agtgacccaaatgaaataaaccctg

SEQ ID NO: 5497587 - DNA, 25 bp, Homo sapien
tccaaaagatgggagtacactgaag

SEQ ID NO: 5497588 - DNA, 25 bp, Homo sapien
aatgcctccatgacctagtgaccca

SEQ ID NO: 5497589 - DNA, 25 bp, Homo sapien
ccccaaatgggccttcaaagaagtc

SEQ ID NO: 5497590 - DNA, 25 bp, Homo sapien
gaagacggaatgttaagccaaactc

SEQ ID NO: 5497591 - DNA, 25 bp, Homo sapien
tcaaatgacttggaaataatgcctc

SEQ ID NO: 5497592 - DNA, 25 bp, Homo sapien
taggagttgatatagatttgaagtt

SEQ ID NO: 5497593 - DNA, 25 bp, Homo sapien
aacacctcacacacctcactactcc

SEQ ID NO: 5497594 - DNA, 25 bp, Homo sapien
ttcaggattatctgggtggcaattc

SEQ ID NO: 5497595 - DNA, 25 bp, Homo sapien
aatggccccatccctcggcttctgt

SEQ ID NO: 5497596 - DNA, 25 bp, Homo sapien
cttcaaagaagtcagatggaaatgg

SEQ ID NO: 5497597 - DNA, 25 bp, Homo sapien
cctgaactgggagttgaatattgcc

SEQ ID NO: 5497598 - DNA, 25 bp, Homo sapien
tttctttcaacaccaggctttcttc

SEQ ID NO: 5497599 - DNA, 25 bp, Homo sapien
aactgggagttgaatattgcctctc

SEQ ID NO: 5497600 - DNA, 25 bp, Homo sapien
ctctttgccttctgaccctctagtc

SEQ ID NO: 5497601 - DNA, 25 bp, Homo sapien
tgctgttgtatcttctaggcactgc

SEQ ID NO: 5497602 - DNA, 25 bp, Homo sapien
tttgtactagaggtatgtgcagaga

SEQ ID NO: 5497603 - DNA, 25 bp, Homo sapien
ggatttgtaaattgtgctgttgtat

SEQ ID NO: 5497604 - DNA, 25 bp, Homo sapien
gatccagatatagagctgttgctct

SEQ ID NO: 5497605 - DNA, 25 bp, Homo sapien
tctaggcactgcagtgatccagata

SEQ ID NO: 5497606 - DNA, 25 bp, Homo sapien
catcttttgtactagaggtatgtgc

SEQ ID NO: 5497607 - DNA, 25 bp, Homo sapien
tttgacctgaactgggagttgaata

SEQ ID NO: 5497608 - DNA, 25 bp, Homo sapien
tgggcgttggtgcaccgggccccgt

SEQ ID NO: 5497609 - DNA, 25 bp, Homo sapien
acggggcccggtgcaccaacgccca

SEQ ID NO: 5497610 - DNA, 25 bp, Homo sapien
ccaaccccgtctcgtgcgcgggtga

SEQ ID NO: 5497611 - DNA, 25 bp, Homo sapien
tcacccgcgcacgagacggggttgg

SEQ ID NO: 5497612 - DNA, 25 bp, Homo sapien
agccccagcaacgaagtgaatttat

SEQ ID NO: 5497613 - DNA, 25 bp, Homo sapien
gttggatctccaatgaaggtgcttc

SEQ ID NO: 5497614 - DNA, 25 bp, Homo sapien
gggctcccctctggacgtgccttct

SEQ ID NO: 5497615 - DNA, 25 bp, Homo sapien
ggtcagagatgtaggacctctaagc

SEQ ID NO: 5497616 - DNA, 25 bp, Homo sapien
gatgatcagaatgggagaaacatca

SEQ ID NO: 5497617 - DNA, 25 bp, Homo sapien
atggaacagaatcagaataactggc

SEQ ID NO: 5497618 - DNA, 25 bp, Homo sapien
attggattcacgcactgtcatgggg

SEQ ID NO: 5497619 - DNA, 25 bp, Homo sapien
caagtatgcaaagtgatggaacaga

SEQ ID NO: 5497620 - DNA, 25 bp, Homo sapien
gaagtggatgaaaattatgccccta

SEQ ID NO: 5497621 - DNA, 25 bp, Homo sapien
gaaactgaatacagaggtcagagat

SEQ ID NO: 5497622 - DNA, 25 bp, Homo sapien
atttaccctgcgggactgcaacagc

SEQ ID NO: 5497623 - DNA, 25 bp, Homo sapien
gctggaggcagctaaactaccacta

SEQ ID NO: 5497624 - DNA, 25 bp, Homo sapien
cacaacaagcggaactatttgccct

SEQ ID NO: 5497625 - DNA, 25 bp, Homo sapien
actaccactagaggccgtcattatc

SEQ ID NO: 5497626 - DNA, 25 bp, Homo sapien
gggacaccaaaaggctacagatgcc

SEQ ID NO: 5497627 - DNA, 25 bp, Homo sapien
ggcaggcagcccttagaacactatt

SEQ ID NO: 5497628 - DNA, 25 bp, Homo sapien
actcatacacaagccgctggaggca

SEQ ID NO: 5497629 - DNA, 25 bp, Homo sapien
actacaaaaagaaccgccataataa

SEQ ID NO: 5497630 - DNA, 25 bp, Homo sapien
ggaaagagggtcaacatttacacca

SEQ ID NO: 5497631 - DNA, 25 bp, Homo sapien
cttcttagcagattcggcagcctgg

SEQ ID NO: 5497632 - DNA, 25 bp, Homo sapien
agatgccataaccaagggaaacttc

SEQ ID NO: 5497633 - DNA, 25 bp, Homo sapien
ccagggctgttcataacgaaagctg

SEQ ID NO: 5497634 - DNA, 25 bp, Homo sapien
taactggaatggctcccctagaaga

SEQ ID NO: 5497635 - DNA, 25 bp, Homo sapien
agagggacctcttttaactggaatg

SEQ ID NO: 5497636 - DNA, 25 bp, Homo sapien
ctcttttaactggaatggctcccct

SEQ ID NO: 5497637 - DNA, 25 bp, Homo sapien
aactggaatggctcccctagaagaa

SEQ ID NO: 5497638 - DNA, 25 bp, Homo sapien
cttttaactggaatggctcccctag

SEQ ID NO: 5497639 - DNA, 25 bp, Homo sapien
agggacctcttttaactggaatggc

SEQ ID NO: 5497640 - DNA, 25 bp, Homo sapien
ctcgacttcttgaagagggacctct

SEQ ID NO: 5497641 - DNA, 25 bp, Homo sapien
actcgacttcttgaagagggacctc

SEQ ID NO: 5497642 - DNA, 25 bp, Homo sapien
gacctcttttaactggaatggctcc

SEQ ID NO: 5497643 - DNA, 25 bp, Homo sapien
tcgacttcttgaagagggacctctt

SEQ ID NO: 5497644 - DNA, 25 bp, Homo sapien
tttaactggaatggctcccctagaa

SEQ ID NO: 5497645 - DNA, 25 bp, Homo sapien
tttataatgtcccaaataaagtaca

SEQ ID NO: 5497646 - DNA, 25 bp, Homo sapien
tgtactttatttgggacattataaa

SEQ ID NO: 5497647 - DNA, 25 bp, Homo sapien
gaagccaggatccacagacccttta

SEQ ID NO: 5497648 - DNA, 25 bp, Homo sapien
tttttagctggacggcaccgttgca

SEQ ID NO: 5497649 - DNA, 25 bp, Homo sapien
aatcatggttcaggtttgggcagat

SEQ ID NO: 5497650 - DNA, 25 bp, Homo sapien
cacatgaccatgaagactgaaggag

SEQ ID NO: 5497651 - DNA, 25 bp, Homo sapien
gctcccaaggttgtggtttggagat

SEQ ID NO: 5497652 - DNA, 25 bp, Homo sapien
ttggtgatctcctgaagactccagc

SEQ ID NO: 5497653 - DNA, 25 bp, Homo sapien
cttcactcctgctaaggcaaggggc

SEQ ID NO: 5497654 - DNA, 25 bp, Homo sapien
gtcaggaaacccagctgtgaccttg

SEQ ID NO: 5497655 - DNA, 25 bp, Homo sapien
acctcacaggctctggtgaagtcct

SEQ ID NO: 5497656 - DNA, 25 bp, Homo sapien
gatagggcaggtcacatgaccatga

SEQ ID NO: 5497657 - DNA, 25 bp, Homo sapien
gcaaggggcgctattcgtaccctgt

SEQ ID NO: 5497658 - DNA, 25 bp, Homo sapien
caaggagacagtctcagaagttatt

SEQ ID NO: 5497659 - DNA, 25 bp, Homo sapien
acagtagtggtaaccacccccattg

SEQ ID NO: 5497660 - DNA, 25 bp, Homo sapien
tactgttactcccgggacagtagtg

SEQ ID NO: 5497661 - DNA, 25 bp, Homo sapien
ctgttactcccgggacagtagtggt

SEQ ID NO: 5497662 - DNA, 25 bp, Homo sapien
cttgtcatctatggaaagactaggc

SEQ ID NO: 5497663 - DNA, 25 bp, Homo sapien
tgttcttgtcatctatggaaagact

SEQ ID NO: 5497664 - DNA, 25 bp, Homo sapien
cacccccattgggtgttcggcggag

SEQ ID NO: 5497665 - DNA, 25 bp, Homo sapien
aggagacagtctcagaagttattat

SEQ ID NO: 5497666 - DNA, 25 bp, Homo sapien
caggggtcccagagcgattctctgg

SEQ ID NO: 5497667 - DNA, 25 bp, Homo sapien
gtcatctatggaaagactaggccct

SEQ ID NO: 5497668 - DNA, 25 bp, Homo sapien
ggtcccagagcgattctctggctcc

SEQ ID NO: 5497669 - DNA, 25 bp, Homo sapien
tctggctccagctcaggaaacacag

SEQ ID NO: 5497670 - DNA, 25 bp, Homo sapien
atgcaagctggtaccagcagaagcc

SEQ ID NO: 5497671 - DNA, 25 bp, Homo sapien
aaggagacagcctcagaagctatta

SEQ ID NO: 5497672 - DNA, 25 bp, Homo sapien
tcagggatcccagaccgattctctg

SEQ ID NO: 5497673 - DNA, 25 bp, Homo sapien
gaagtatgtcttcggagttgggacc

SEQ ID NO: 5497674 - DNA, 25 bp, Homo sapien
ctatggtaaaaacaaccggccctca

SEQ ID NO: 5497675 - DNA, 25 bp, Homo sapien
agtcaggatcacatgccaaggagac

SEQ ID NO: 5497676 - DNA, 25 bp, Homo sapien
ccttgaccatcactggggctcaggc

SEQ ID NO: 5497677 - DNA, 25 bp, Homo sapien
ccaggacaggcccctctacttgtca

SEQ ID NO: 5497678 - DNA, 25 bp, Homo sapien
ggaagatgaggctgactattactgt

SEQ ID NO: 5497679 - DNA, 25 bp, Homo sapien
actgtcactcccgggacagcagtgg

SEQ ID NO: 5497680 - DNA, 25 bp, Homo sapien
gatggtcaaggaagctgtgtttcct

SEQ ID NO: 5497681 - DNA, 25 bp, Homo sapien
ctgagggccggttgtttttaccata

SEQ ID NO: 5497682 - DNA, 25 bp, Homo sapien
aggctgtctccttggcatgtgatcc

SEQ ID NO: 5497683 - DNA, 25 bp, Homo sapien
tcccactgctgtcccgggagtgaca

SEQ ID NO: 5497684 - DNA, 25 bp, Homo sapien
atcttccgcctgagccccagtgatg

SEQ ID NO: 5497685 - DNA, 25 bp, Homo sapien
gcataatagcttctgaggctgtctc

SEQ ID NO: 5497686 - DNA, 25 bp, Homo sapien
aggggcctgtcctggcttctgctgg

SEQ ID NO: 5497687 - DNA, 25 bp, Homo sapien
tcctgactgtctgtcccaaggccac

SEQ ID NO: 5497688 - DNA, 25 bp, Homo sapien
ttaccatagatgacaagtagagggg

SEQ ID NO: 5497689 - DNA, 25 bp, Homo sapien
tttcctgagctggagccagagaatc

SEQ ID NO: 5497690 - DNA, 25 bp, Homo sapien
gggagtgacagtaatagtcagcctc

SEQ ID NO: 5497691 - DNA, 25 bp, Homo sapien
gctgcagcagatcctggacctacac

SEQ ID NO: 5497692 - DNA, 25 bp, Homo sapien
ccagccacagtctacctgcagatct

SEQ ID NO: 5497693 - DNA, 25 bp, Homo sapien
ttgagcaaactgcggctcaaggagg

SEQ ID NO: 5497694 - DNA, 25 bp, Homo sapien
cgtcattagcatggcccaggagacg

SEQ ID NO: 5497695 - DNA, 25 bp, Homo sapien
ggccggcgtcacatccgtatccgct

SEQ ID NO: 5497696 - DNA, 25 bp, Homo sapien
gcgcctagagagcatcaagtcgcag

SEQ ID NO: 5497697 - DNA, 25 bp, Homo sapien
ctgtaccccgcccagccacagtcta

SEQ ID NO: 5497698 - DNA, 25 bp, Homo sapien
cacgccaccaccgagaccgtcatta

SEQ ID NO: 5497699 - DNA, 25 bp, Homo sapien
gcagatcttgcgactaaaaccccta

SEQ ID NO: 5497700 - DNA, 25 bp, Homo sapien
cccaaggtgatgttcacaaaggtac

SEQ ID NO: 5497701 - DNA, 25 bp, Homo sapien
ggacctacacgacttccagggcgac

SEQ ID NO: 5497702 - DNA, 25 bp, Homo sapien
ttacctatttgatgaagatgtcttt

SEQ ID NO: 5497703 - DNA, 25 bp, Homo sapien
tgatgaagatgtcttttgaaaggtg

SEQ ID NO: 5497704 - DNA, 25 bp, Homo sapien
agagtatagcgccactatgactccg

SEQ ID NO: 5497705 - DNA, 25 bp, Homo sapien
agagaaccaattctggagaacagcc

SEQ ID NO: 5497706 - DNA, 25 bp, Homo sapien
gttttgacctgtagcagagaaccaa

SEQ ID NO: 5497707 - DNA, 25 bp, Homo sapien
actatgactccgccggaaaaattac

SEQ ID NO: 5497708 - DNA, 25 bp, Homo sapien
aaaatcgccaaaaattacttggagc

SEQ ID NO: 5497709 - DNA, 25 bp, Homo sapien
tagcagagaaccaattctggagaac

SEQ ID NO: 5497710 - DNA, 25 bp, Homo sapien
tagcgccactatgactccgccggaa

SEQ ID NO: 5497711 - DNA, 25 bp, Homo sapien
tggagaacagcctcacttctttgat

SEQ ID NO: 5497712 - DNA, 25 bp, Homo sapien
caaaaattacttggagcaaagggca

SEQ ID NO: 5497713 - DNA, 25 bp, Homo sapien
gccgagattgcagcctctgcccggc

SEQ ID NO: 5497714 - DNA, 25 bp, Homo sapien
cgccgccacgcctgactggtttttc

SEQ ID NO: 5497715 - DNA, 25 bp, Homo sapien
gagggagtctcgttcactcaatgct

SEQ ID NO: 5497716 - DNA, 25 bp, Homo sapien
agctcctaaccgcgagtgatctgcc

SEQ ID NO: 5497717 - DNA, 25 bp, Homo sapien
ctccctctgatgccaagccgaagct

SEQ ID NO: 5497718 - DNA, 25 bp, Homo sapien
aagctggactgtactcccgccatct

SEQ ID NO: 5497719 - DNA, 25 bp, Homo sapien
ggccgggctggtctccagctcctaa

SEQ ID NO: 5497720 - DNA, 25 bp, Homo sapien
actcaatgctcaatgttgcccaggc

SEQ ID NO: 5497721 - DNA, 25 bp, Homo sapien
tgcctcagcctgccaagtgcctggg

SEQ ID NO: 5497722 - DNA, 25 bp, Homo sapien
ggcctcccaaagtgccgagattgca

SEQ ID NO: 5497723 - DNA, 25 bp, Homo sapien
cgtgatctcggctcgctacaacctc

SEQ ID NO: 5497724 - DNA, 25 bp, Homo sapien
gtcagcaaataaacaagtgaacaga

SEQ ID NO: 5497725 - DNA, 25 bp, Homo sapien
tgacccgttctcagtgagctgttgg

SEQ ID NO: 5497726 - DNA, 25 bp, Homo sapien
tacagaacaaagtggagtctcctgt

SEQ ID NO: 5497727 - DNA, 25 bp, Homo sapien
aagtggagtctcctgtgtctacttc

SEQ ID NO: 5497728 - DNA, 25 bp, Homo sapien
catcatgacccgttctcagtgagct

SEQ ID NO: 5497729 - DNA, 25 bp, Homo sapien
tcatgacccgttctcagtgagctgt

SEQ ID NO: 5497730 - DNA, 25 bp, Homo sapien
tttctacacagacacagcaacaatc

SEQ ID NO: 5497731 - DNA, 25 bp, Homo sapien
agaacaaagtggagtctcctgtgtc

SEQ ID NO: 5497732 - DNA, 25 bp, Homo sapien
caaataaacaagtgaacagaggtct

SEQ ID NO: 5497733 - DNA, 25 bp, Homo sapien
agacacagcaacaatctgatttctc

SEQ ID NO: 5497734 - DNA, 25 bp, Homo sapien
tcgtcatcatgacccgttctcagtg

SEQ ID NO: 5497735 - DNA, 25 bp, Homo sapien
gaagtagtattaataaaaaggcgta

SEQ ID NO: 5497736 - DNA, 25 bp, Homo sapien
tacgcctttttattaatactacttc

SEQ ID NO: 5497737 - DNA, 25 bp, Homo sapien
gaagcgacgcctttctgacaagggt

SEQ ID NO: 5497738 - DNA, 25 bp, Homo sapien
caagaagcgacgcctttctgacaag

SEQ ID NO: 5497739 - DNA, 25 bp, Homo sapien
gcgacgcctttctgacaagggtctc

SEQ ID NO: 5497740 - DNA, 25 bp, Homo sapien
aagcgacgcctttctgacaagggtc

SEQ ID NO: 5497741 - DNA, 25 bp, Homo sapien
gctcaagaagcgacgcctttctgac

SEQ ID NO: 5497742 - DNA, 25 bp, Homo sapien
tcaagaagcgacgcctttctgacaa

SEQ ID NO: 5497743 - DNA, 25 bp, Homo sapien
cggccccacctcgctgttcgcggtg

SEQ ID NO: 5497744 - DNA, 25 bp, Homo sapien
agctcaagaagcgacgcctttctga

SEQ ID NO: 5497745 - DNA, 25 bp, Homo sapien
ggaggaaggaatctccgctctggac

SEQ ID NO: 5497746 - DNA, 25 bp, Homo sapien
cctttctgacaagggtctcaaggcc

SEQ ID NO: 5497747 - DNA, 25 bp, Homo sapien
cgcctttctgacaagggtctcaagg

SEQ ID NO: 5497748 - DNA, 25 bp, Homo sapien
cccggatgagtacgataccgaagcg

SEQ ID NO: 5497749 - DNA, 25 bp, Homo sapien
tggatcagaatggatgacgccttta

SEQ ID NO: 5497750 - DNA, 25 bp, Homo sapien
ttcgaaaggtgctattgtggatcaa

SEQ ID NO: 5497751 - DNA, 25 bp, Homo sapien
ggctgctcagttcggacatacctca

SEQ ID NO: 5497752 - DNA, 25 bp, Homo sapien
catgggacatagtcaaggctacaca

SEQ ID NO: 5497753 - DNA, 25 bp, Homo sapien
tgatgtacggcaaccggacaaagaa

SEQ ID NO: 5497754 - DNA, 25 bp, Homo sapien
acaggagtagatatgatggatcaga

SEQ ID NO: 5497755 - DNA, 25 bp, Homo sapien
aactaatgaaatatggtgcagatcc

SEQ ID NO: 5497756 - DNA, 25 bp, Homo sapien
atatgaacgctgtcgagaattggtg

SEQ ID NO: 5497757 - DNA, 25 bp, Homo sapien
ctgggccacaagacaaggccatcta

SEQ ID NO: 5497758 - DNA, 25 bp, Homo sapien
tctcatagcaaaaggacaggagtag

SEQ ID NO: 5497759 - DNA, 25 bp, Homo sapien
ctctgtcctgtgaaagctgctggtc

SEQ ID NO: 5497760 - DNA, 25 bp, Homo sapien
ctgtgccgctgctggtcggcactgg

SEQ ID NO: 5497761 - DNA, 25 bp, Homo sapien
tgcagtggtgagatctggctcactg

SEQ ID NO: 5497762 - DNA, 25 bp, Homo sapien
tggggctatttcacgtggaagttca

SEQ ID NO: 5497763 - DNA, 25 bp, Homo sapien
gtccttcagctcaggtcaaccctct

SEQ ID NO: 5497764 - DNA, 25 bp, Homo sapien
ggggccttggccgcttcctcttctc

SEQ ID NO: 5497765 - DNA, 25 bp, Homo sapien
tgtgcccggccctggggctatttca

SEQ ID NO: 5497766 - DNA, 25 bp, Homo sapien
gggctgctgcggcttcctcttctct

SEQ ID NO: 5497767 - DNA, 25 bp, Homo sapien
cttctctgtcctgtgcccgctgctg

SEQ ID NO: 5497768 - DNA, 25 bp, Homo sapien
ggggcctggccgcttcctcttctct

SEQ ID NO: 5497769 - DNA, 25 bp, Homo sapien
tctctgtcctgtgcccgctgctggt

SEQ ID NO: 5497770 - DNA, 25 bp, Homo sapien
gacttaggtgccgtgtccgtgttcg

SEQ ID NO: 5497771 - DNA, 25 bp, Homo sapien
cgaacacggacacggcacctaagtc

SEQ ID NO: 5497772 - DNA, 25 bp, Homo sapien
tcagattgtgatgtgcaaggaaaag

SEQ ID NO: 5497773 - DNA, 25 bp, Homo sapien
gtgtcccaccgcaaggactggagaa

SEQ ID NO: 5497774 - DNA, 25 bp, Homo sapien
attaagagcggtcatcaaagctgat

SEQ ID NO: 5497775 - DNA, 25 bp, Homo sapien
tgccaaagaactcaatgttgaccat

SEQ ID NO: 5497776 - DNA, 25 bp, Homo sapien
gagtgtagtggctgaccattggaaa

SEQ ID NO: 5497777 - DNA, 25 bp, Homo sapien
caatgacacaagaagttgccaaaga

SEQ ID NO: 5497778 - DNA, 25 bp, Homo sapien
tgacaacaaccaattaagagcggtc

SEQ ID NO: 5497779 - DNA, 25 bp, Homo sapien
gctaatgaatgtacagtggagtggt

SEQ ID NO: 5497780 - DNA, 25 bp, Homo sapien
acgcaacaacagtgaaccatttctc

SEQ ID NO: 5497781 - DNA, 25 bp, Homo sapien
aggacacaaagcaaattcgagcgat

SEQ ID NO: 5497782 - DNA, 25 bp, Homo sapien
tgaccattggaaattgacaacaacc

SEQ ID NO: 5497783 - DNA, 25 bp, Homo sapien
ctgagctgaaggacatgaacttcca

SEQ ID NO: 5497784 - DNA, 25 bp, Homo sapien
cggctgcagctccagtgccaaccag

SEQ ID NO: 5497785 - DNA, 25 bp, Homo sapien
atgaacttccacgtgaaatagcccc

SEQ ID NO: 5497786 - DNA, 25 bp, Homo sapien
gaacttccacgtgaaatagccccag

SEQ ID NO: 5497787 - DNA, 25 bp, Homo sapien
gcccgaccagcagctttcacaggac

SEQ ID NO: 5497788 - DNA, 25 bp, Homo sapien
gaccagcagctttcacaggacagag

SEQ ID NO: 5497789 - DNA, 25 bp, Homo sapien
ctgcagctccagtgccaaccagcag

SEQ ID NO: 5497790 - DNA, 25 bp, Homo sapien
gacatgaacttccacgtgaaatagc

SEQ ID NO: 5497791 - DNA, 25 bp, Homo sapien
agtgcccgaccagcagctttcacag

SEQ ID NO: 5497792 - DNA, 25 bp, Homo sapien
acttccacgtgaaatagccccaggg

SEQ ID NO: 5497793 - DNA, 25 bp, Homo sapien
agcagctttcacaggacagagaaga

SEQ ID NO: 5497794 - DNA, 25 bp, Homo sapien
ggcgtctatgggccaaaagcatatg

SEQ ID NO: 5497795 - DNA, 25 bp, Homo sapien
ttgtaatggcctgccgagaatttga

SEQ ID NO: 5497796 - DNA, 25 bp, Homo sapien
gcatatgtagcaactcaaggacctt

SEQ ID NO: 5497797 - DNA, 25 bp, Homo sapien
ccatggcgtctatgggccaaaagca

SEQ ID NO: 5497798 - DNA, 25 bp, Homo sapien
atgtagcaactcaaggacctttagc

SEQ ID NO: 5497799 - DNA, 25 bp, Homo sapien
cagtaatagatttttggaggatggt

SEQ ID NO: 5497800 - DNA, 25 bp, Homo sapien
gggccaaaagcatatgtagcaactc

SEQ ID NO: 5497801 - DNA, 25 bp, Homo sapien
atagatttttggaggatggtatggg

SEQ ID NO: 5497802 - DNA, 25 bp, Homo sapien
gtatgggagtataatgttgtgatca

SEQ ID NO: 5497803 - DNA, 25 bp, Homo sapien
gttgtgatcattgtaatggcctgcc

SEQ ID NO: 5497804 - DNA, 25 bp, Homo sapien
atggtatgggagtataatgttgtga

SEQ ID NO: 5497805 - DNA, 25 bp, Homo sapien
cccacctgttccatgacgggcgggt

SEQ ID NO: 5497806 - DNA, 25 bp, Homo sapien
ttcggctcctggacctacgacaagg

SEQ ID NO: 5497807 - DNA, 25 bp, Homo sapien
cccggccatttacaagagctcctgc

SEQ ID NO: 5497808 - DNA, 25 bp, Homo sapien
cctacaacaccaggaagtacgagtg

SEQ ID NO: 5497809 - DNA, 25 bp, Homo sapien
tacctgccctccgagtgtggcgaga

SEQ ID NO: 5497810 - DNA, 25 bp, Homo sapien
gccaagatcgacctggtgaacatgc

SEQ ID NO: 5497811 - DNA, 25 bp, Homo sapien
tgtgggggtctcacacccttcgctc

SEQ ID NO: 5497812 - DNA, 25 bp, Homo sapien
gcgagaagatcacgctgtgcatctc

SEQ ID NO: 5497813 - DNA, 25 bp, Homo sapien
tatgccttcgtcatccggcggctgc

SEQ ID NO: 5497814 - DNA, 25 bp, Homo sapien
gcgccgagatctacccggacatcac

SEQ ID NO: 5497815 - DNA, 25 bp, Homo sapien
tcctgcagcatcgacgtcaccttct

SEQ ID NO: 5497816 - DNA, 25 bp, Homo sapien
ggagacgtccttgtcccggaacgtg

SEQ ID NO: 5497817 - DNA, 25 bp, Homo sapien
cacgttccgggacaaggacgtctcc

SEQ ID NO: 5497818 - DNA, 25 bp, Homo sapien
cgtccttgtcccggaacgtggagga

SEQ ID NO: 5497819 - DNA, 25 bp, Homo sapien
tcctccacgttccgggacaaggacg

SEQ ID NO: 5497820 - DNA, 25 bp, Homo sapien
acatggctcccattactggcatagc

SEQ ID NO: 5497821 - DNA, 25 bp, Homo sapien
catactggctgtcaacaccagctct

SEQ ID NO: 5497822 - DNA, 25 bp, Homo sapien
tctgatgccaatgaacatggctccc

SEQ ID NO: 5497823 - DNA, 25 bp, Homo sapien
ccttggaactcttggcagctgcctg

SEQ ID NO: 5497824 - DNA, 25 bp, Homo sapien
aaagacagcagaactcgtatttttc

SEQ ID NO: 5497825 - DNA, 25 bp, Homo sapien
acggacaagaccttggaactcttgg

SEQ ID NO: 5497826 - DNA, 25 bp, Homo sapien
ctgcctgcagcgatttaccacaatg

SEQ ID NO: 5497827 - DNA, 25 bp, Homo sapien
ctaaagaacaaagtaatgacagaac

SEQ ID NO: 5497828 - DNA, 25 bp, Homo sapien
aacaaagtaatgacagaacatgctg

SEQ ID NO: 5497829 - DNA, 25 bp, Homo sapien
agctaaaaaagacagcagaactcgt

SEQ ID NO: 5497830 - DNA, 25 bp, Homo sapien
tactggcatagcccttgagccttat

SEQ ID NO: 5497831 - DNA, 25 bp, Homo sapien
gtggccagcgtcccactgccctttc

SEQ ID NO: 5497832 - DNA, 25 bp, Homo sapien
gccctttctccaagccgcctgcaac

SEQ ID NO: 5497833 - DNA, 25 bp, Homo sapien
acggactgtccattaaagctctggg

SEQ ID NO: 5497834 - DNA, 25 bp, Homo sapien
gtggggtcaccctgactgtcccagc

SEQ ID NO: 5497835 - DNA, 25 bp, Homo sapien
ctggcttccctcctctcggctctgc

SEQ ID NO: 5497836 - DNA, 25 bp, Homo sapien
tgtccattaaagctctgggtgtggg

SEQ ID NO: 5497837 - DNA, 25 bp, Homo sapien
ggctctgcttggtacggactgtcca

SEQ ID NO: 5497838 - DNA, 25 bp, Homo sapien
ctgactgtcccagcgccagtgaaca

SEQ ID NO: 5497839 - DNA, 25 bp, Homo sapien
gggtcaccctgactgtcccagcgcc

SEQ ID NO: 5497840 - DNA, 25 bp, Homo sapien
ctctttagttgtagagaggtaggcg

SEQ ID NO: 5497841 - DNA, 25 bp, Homo sapien
actgtcccagcgccagtgaacagtg

SEQ ID NO: 5497842 - DNA, 25 bp, Homo sapien
ttgatgaaactggtcacctggattc

SEQ ID NO: 5497843 - DNA, 25 bp, Homo sapien
gtccagatgtccctagaactccagt

SEQ ID NO: 5497844 - DNA, 25 bp, Homo sapien
caggaagtgcatttagctgggatga

SEQ ID NO: 5497845 - DNA, 25 bp, Homo sapien
gattcttcaggacttcaggaagtgc

SEQ ID NO: 5497846 - DNA, 25 bp, Homo sapien
ctaagcattttgtctggaggaaccc

SEQ ID NO: 5497847 - DNA, 25 bp, Homo sapien
gatgacaatggaaacttggtggaca

SEQ ID NO: 5497848 - DNA, 25 bp, Homo sapien
tttcgaatcttagcagtggggagat

SEQ ID NO: 5497849 - DNA, 25 bp, Homo sapien
tggggagataactgccactcagctt

SEQ ID NO: 5497850 - DNA, 25 bp, Homo sapien
aaaatccaaacctaggagaagacca

SEQ ID NO: 5497851 - DNA, 25 bp, Homo sapien
cctagaactccagtgggcaaatttc

SEQ ID NO: 5497852 - DNA, 25 bp, Homo sapien
cctgaaagatcaagaagcaaaggtg

SEQ ID NO: 5497853 - DNA, 25 bp, Homo sapien
agatcctcatggtcacgagtgtagt

SEQ ID NO: 5497854 - DNA, 25 bp, Homo sapien
actacactcgtgaccatgaggatct

SEQ ID NO: 5497855 - DNA, 25 bp, Homo sapien
catcggctcccagacaccagctgaa

SEQ ID NO: 5497856 - DNA, 25 bp, Homo sapien
acgggtctttagatcgcagagtgag

SEQ ID NO: 5497857 - DNA, 25 bp, Homo sapien
acagaccgctctggagtgttagatg

SEQ ID NO: 5497858 - DNA, 25 bp, Homo sapien
ggagtaagtacagcatccacgtctg

SEQ ID NO: 5497859 - DNA, 25 bp, Homo sapien
ccacgtctggacacacgggtcttta

SEQ ID NO: 5497860 - DNA, 25 bp, Homo sapien
gagcaaagtgccaagaataagatct

SEQ ID NO: 5497861 - DNA, 25 bp, Homo sapien
aggtgacagtgagagcgtcaccttc

SEQ ID NO: 5497862 - DNA, 25 bp, Homo sapien
agatgagctatttgggaagaaatgg

SEQ ID NO: 5497863 - DNA, 25 bp, Homo sapien
caggccctcccaggctgtcaaggcc

SEQ ID NO: 5497864 - DNA, 25 bp, Homo sapien
ccccttgtgaagttgccatagagcc

SEQ ID NO: 5497865 - DNA, 25 bp, Homo sapien
aaggccattggccctggccaggtac

SEQ ID NO: 5497866 - DNA, 25 bp, Homo sapien
aagaagctcagcaagaatgagatcc

SEQ ID NO: 5497867 - DNA, 25 bp, Homo sapien
ccacacatcccccggacaagaagct

SEQ ID NO: 5497868 - DNA, 25 bp, Homo sapien
tcatcaagggttttctccgaggtcc

SEQ ID NO: 5497869 - DNA, 25 bp, Homo sapien
aatgagatcctccgcctggccatga

SEQ ID NO: 5497870 - DNA, 25 bp, Homo sapien
gaagggccttggcactgctcctttg

SEQ ID NO: 5497871 - DNA, 25 bp, Homo sapien
tgggcttagacctggagttcccttc

SEQ ID NO: 5497872 - DNA, 25 bp, Homo sapien
cctttgccgagctccgcaagctgat

SEQ ID NO: 5497873 - DNA, 25 bp, Homo sapien
gtgaagaggagaccttccccctatg

SEQ ID NO: 5497874 - DNA, 25 bp, Homo sapien
tgatggcactgaccctcagggattc

SEQ ID NO: 5497875 - DNA, 25 bp, Homo sapien
ccacaccaaagttgtgcggcgtatc

SEQ ID NO: 5497876 - DNA, 25 bp, Homo sapien
cgaggtccctacacagtaggctccc

SEQ ID NO: 5497877 - DNA, 25 bp, Homo sapien
agggggtctaaagacacatgatgac

SEQ ID NO: 5497878 - DNA, 25 bp, Homo sapien
atggatattaggtaaaaacgaagga

SEQ ID NO: 5497879 - DNA, 25 bp, Homo sapien
acccgtggagctttgcctctgtggt

SEQ ID NO: 5497880 - DNA, 25 bp, Homo sapien
ctgcagcaatgagctttgggatgga

SEQ ID NO: 5497881 - DNA, 25 bp, Homo sapien
aggcaaattctgatagaggagcatc

SEQ ID NO: 5497882 - DNA, 25 bp, Homo sapien
catggcatatgggaactctgaacta

SEQ ID NO: 5497883 - DNA, 25 bp, Homo sapien
tgctgtgatgcaatacccgtggagc

SEQ ID NO: 5497884 - DNA, 25 bp, Homo sapien
ctctccaggaaatttggtgagctat

SEQ ID NO: 5497885 - DNA, 25 bp, Homo sapien
ggtattaataataggggcatggcat

SEQ ID NO: 5497886 - DNA, 25 bp, Homo sapien
ggacagcctgtgaaccagactctcc

SEQ ID NO: 5497887 - DNA, 25 bp, Homo sapien
atccaaacccgagtcagaaactgtc

SEQ ID NO: 5497888 - DNA, 25 bp, Homo sapien
aggaatatgataaaacgccgcagac

SEQ ID NO: 5497889 - DNA, 25 bp, Homo sapien
ccccgcctgtaacacgagcaggggt

SEQ ID NO: 5497890 - DNA, 25 bp, Homo sapien
ggacaaacgggcaacataccttgat

SEQ ID NO: 5497891 - DNA, 25 bp, Homo sapien
tttgtacagcaacatgagggaaaca

SEQ ID NO: 5497892 - DNA, 25 bp, Homo sapien
tcgtagcaaggattctatgaggtac

SEQ ID NO: 5497893 - DNA, 25 bp, Homo sapien
tggggactgcgaattttggccaaga

SEQ ID NO: 5497894 - DNA, 25 bp, Homo sapien
gcaggttttgcagggtcccgtactg

SEQ ID NO: 5497895 - DNA, 25 bp, Homo sapien
agtccagaagaaccaataagaagat

SEQ ID NO: 5497896 - DNA, 25 bp, Homo sapien
ttgcgaaagcccaagatgatgggat

SEQ ID NO: 5497897 - DNA, 25 bp, Homo sapien
gcaggggtcctaggaatcctgatgt

SEQ ID NO: 5497898 - DNA, 25 bp, Homo sapien
gaggtactctaacctgaggggagac

SEQ ID NO: 5497899 - DNA, 25 bp, Homo sapien
tgaagttgagcgtaataccagtctt

SEQ ID NO: 5497900 - DNA, 25 bp, Homo sapien
tctgaagttgagcgtaataccagtc

SEQ ID NO: 5497901 - DNA, 25 bp, Homo sapien
tttgtcaagatcagcaagaagcaat

SEQ ID NO: 5497902 - DNA, 25 bp, Homo sapien
tgagcgtaataccagtctttttcct

SEQ ID NO: 5497903 - DNA, 25 bp, Homo sapien
attcttttagtgagattctgaagtt

SEQ ID NO: 5497904 - DNA, 25 bp, Homo sapien
tgagattctgaagttgagcgtaata

SEQ ID NO: 5497905 - DNA, 25 bp, Homo sapien
agattctgaagttgagcgtaatacc

SEQ ID NO: 5497906 - DNA, 25 bp, Homo sapien
ttctttgtcaagatcagcaagaagc

SEQ ID NO: 5497907 - DNA, 25 bp, Homo sapien
ttttagtgagattctgaagttgagc

SEQ ID NO: 5497908 - DNA, 25 bp, Homo sapien
gtcaagatcagcaagaagcaatgac

SEQ ID NO: 5497909 - DNA, 25 bp, Homo sapien
tagtgagattctgaagttgagcgta

SEQ ID NO: 5497910 - DNA, 25 bp, Homo sapien
gctgcgtgtttgtgttctaggaggc

SEQ ID NO: 5497911 - DNA, 25 bp, Homo sapien
agtgcatgggatgctgcatgcctta

SEQ ID NO: 5497912 - DNA, 25 bp, Homo sapien
taggtgtagtcaccagagacagtgg

SEQ ID NO: 5497913 - DNA, 25 bp, Homo sapien
gtggggtcctagatgctgcatctaa

SEQ ID NO: 5497914 - DNA, 25 bp, Homo sapien
gatgctgcatgccttaatgtgggac

SEQ ID NO: 5497915 - DNA, 25 bp, Homo sapien
gtgtttgtgttctaggaggccaacg

SEQ ID NO: 5497916 - DNA, 25 bp, Homo sapien
gctggatagactgctgcgtgtttgt

SEQ ID NO: 5497917 - DNA, 25 bp, Homo sapien
agccactcattctcttgtggggtcc

SEQ ID NO: 5497918 - DNA, 25 bp, Homo sapien
attctcttgtggggtcctagatgct

SEQ ID NO: 5497919 - DNA, 25 bp, Homo sapien
gcatgccttaatgtgggactgggcc

SEQ ID NO: 5497920 - DNA, 25 bp, Homo sapien
gtgcaaagataggtgtagtcaccag

SEQ ID NO: 5497921 - DNA, 25 bp, Homo sapien
ttaagaccacttcctatgacacact

SEQ ID NO: 5497922 - DNA, 25 bp, Homo sapien
agtgtgtcataggaagtggtcttaa

SEQ ID NO: 5497923 - DNA, 25 bp, Homo sapien
cctgggaaacttcactgagagcaca

SEQ ID NO: 5497924 - DNA, 25 bp, Homo sapien
gcctgcgaatgaagatcacagagct

SEQ ID NO: 5497925 - DNA, 25 bp, Homo sapien
gcctacagtcagaaaaccatcgcct

SEQ ID NO: 5497926 - DNA, 25 bp, Homo sapien
tcaccctgagaacaaacccagatgc

SEQ ID NO: 5497927 - DNA, 25 bp, Homo sapien
aacgcagaacaggcgattccagttc

SEQ ID NO: 5497928 - DNA, 25 bp, Homo sapien
ggtcaccatgcagctgcaggacaca

SEQ ID NO: 5497929 - DNA, 25 bp, Homo sapien
taaacagaaccactaccaagagctc

SEQ ID NO: 5497930 - DNA, 25 bp, Homo sapien
cagctacagtggaacacaacagagc

SEQ ID NO: 5497931 - DNA, 25 bp, Homo sapien
ctcggtcaccagtgtgaaccaagcc

SEQ ID NO: 5497932 - DNA, 25 bp, Homo sapien
acacaccagaaaagaccacctacat

SEQ ID NO: 5497933 - DNA, 25 bp, Homo sapien
gaacacatccagcgtcggctgtccc

SEQ ID NO: 5497934 - DNA, 25 bp, Homo sapien
gggttcctcgtgggtatcgtcctca

SEQ ID NO: 5497935 - DNA, 25 bp, Homo sapien
ttgtgccctaggcctagacattggc

SEQ ID NO: 5497936 - DNA, 25 bp, Homo sapien
ggcctagacattggcctggtggggt

SEQ ID NO: 5497937 - DNA, 25 bp, Homo sapien
tccaccaccagatgccatggagacc

SEQ ID NO: 5497938 - DNA, 25 bp, Homo sapien
gtccagtgtccctaggtaatgatcc

SEQ ID NO: 5497939 - DNA, 25 bp, Homo sapien
gccatggagaccctagtttgtgccc

SEQ ID NO: 5497940 - DNA, 25 bp, Homo sapien
cgtcctcatcatcatgggcacatat

SEQ ID NO: 5497941 - DNA, 25 bp, Homo sapien
cagatgccatggagaccctagtttg

SEQ ID NO: 5497942 - DNA, 25 bp, Homo sapien
catgggcacatatgtgtccagtgtc

SEQ ID NO: 5497943 - DNA, 25 bp, Homo sapien
tgcctattccaccaccagatgccat

SEQ ID NO: 5497944 - DNA, 25 bp, Homo sapien
aatgatccttctgagagaaatgact

SEQ ID NO: 5497945 - DNA, 25 bp, Homo sapien
ggtgagggcgcccaagggtcgcagg

SEQ ID NO: 5497946 - DNA, 25 bp, Homo sapien
cctgcgacccttgggcgccctcacc

SEQ ID NO: 5497947 - DNA, 25 bp, Homo sapien
cgggcggcgtaggtcgtgccggtgc

SEQ ID NO: 5497948 - DNA, 25 bp, Homo sapien
gcaccggcacgacctacgccgcccg

SEQ ID NO: 5497949 - DNA, 25 bp, Homo sapien
tcttgggcatgacaaattgaccact

SEQ ID NO: 5497950 - DNA, 25 bp, Homo sapien
agtggtcaatttgtcatgcccaaga

SEQ ID NO: 5497951 - DNA, 25 bp, Homo sapien
actggcctagtgatcaatttcctgc

SEQ ID NO: 5497952 - DNA, 25 bp, Homo sapien
agcaagactttctagccccagagtt

SEQ ID NO: 5497953 - DNA, 25 bp, Homo sapien
gtgggcaatcacatttgtttcctac

SEQ ID NO: 5497954 - DNA, 25 bp, Homo sapien
ctcagatgccattttcatgaaagtc

SEQ ID NO: 5497955 - DNA, 25 bp, Homo sapien
tttgacattatcgaaggactcctga

SEQ ID NO: 5497956 - DNA, 25 bp, Homo sapien
cccagagttgccaataagaagtaac

SEQ ID NO: 5497957 - DNA, 25 bp, Homo sapien
gtgtcccctagttgaagcttgatta

SEQ ID NO: 5497958 - DNA, 25 bp, Homo sapien
ttcctggcctgttgtgtcccctagt

SEQ ID NO: 5497959 - DNA, 25 bp, Homo sapien
gcatcaccagctgttgctctagtcc

SEQ ID NO: 5497960 - DNA, 25 bp, Homo sapien
gctgtgttcttagcaccagtttcca

SEQ ID NO: 5497961 - DNA, 25 bp, Homo sapien
cttaggctcctgtgtaataactgga

SEQ ID NO: 5497962 - DNA, 25 bp, Homo sapien
ctaccctagcatcacacacgcaatc

SEQ ID NO: 5497963 - DNA, 25 bp, Homo sapien
gaatcttggtcttgacagacatgtc

SEQ ID NO: 5497964 - DNA, 25 bp, Homo sapien
cactgatggcagaaaaccaacactt

SEQ ID NO: 5497965 - DNA, 25 bp, Homo sapien
gacagacatgtcaacgatcatttct

SEQ ID NO: 5497966 - DNA, 25 bp, Homo sapien
gcaggttttggctcgtaagaaggcc

SEQ ID NO: 5497967 - DNA, 25 bp, Homo sapien
cctgcccagcttctgaatcttggtc

SEQ ID NO: 5497968 - DNA, 25 bp, Homo sapien
gacaatctgcccgcatagccctgcc

SEQ ID NO: 5497969 - DNA, 25 bp, Homo sapien
acatcggattctaccctagcatcac

SEQ ID NO: 5497970 - DNA, 25 bp, Homo sapien
aagaaggccaacatacatcggattc

SEQ ID NO: 5497971 - DNA, 25 bp, Homo sapien
gctcgtaagaaggccaacatacatc

SEQ ID NO: 5497972 - DNA, 25 bp, Homo sapien
ctcgccaatgcgcacaatccttttt

SEQ ID NO: 5497973 - DNA, 25 bp, Homo sapien
tgcagccggcaccccggctgtgcac

SEQ ID NO: 5497974 - DNA, 25 bp, Homo sapien
gcttttgttgatttcctgagtgatg

SEQ ID NO: 5497975 - DNA, 25 bp, Homo sapien
tttcaacattaacaacagcatccca

SEQ ID NO: 5497976 - DNA, 25 bp, Homo sapien
cctccctaagatgtctggaggttgg

SEQ ID NO: 5497977 - DNA, 25 bp, Homo sapien
aagcgaaattagtgcggaaagttgc

SEQ ID NO: 5497978 - DNA, 25 bp, Homo sapien
tcctgcagccggcaccccggctgtg

SEQ ID NO: 5497979 - DNA, 25 bp, Homo sapien
ctgagtgatgaaattaaggaggaaa

SEQ ID NO: 5497980 - DNA, 25 bp, Homo sapien
aagaaaaattcagaagcataaaacc

SEQ ID NO: 5497981 - DNA, 25 bp, Homo sapien
ccaccaacatttgatggtgaggagg

SEQ ID NO: 5497982 - DNA, 25 bp, Homo sapien
aaattcagaagcataaaaccctccc

SEQ ID NO: 5497983 - DNA, 25 bp, Homo sapien
aaaaaatcacggtcactttcaacat

SEQ ID NO: 5497984 - DNA, 25 bp, Homo sapien
tcattatccagaggatgaggttgga

SEQ ID NO: 5497985 - DNA, 25 bp, Homo sapien
gaacaggagcctgaactgacatcaa

SEQ ID NO: 5497986 - DNA, 25 bp, Homo sapien
aatttcgtggttgaagttataaaga

SEQ ID NO: 5497987 - DNA, 25 bp, Homo sapien
ggactgtcattatccagaggatgag

SEQ ID NO: 5497988 - DNA, 25 bp, Homo sapien
atggcaagaaggcccttgtgttgga

SEQ ID NO: 5497989 - DNA, 25 bp, Homo sapien
ctgacatcaactcccaatttcgtgg

SEQ ID NO: 5497990 - DNA, 25 bp, Homo sapien
gaaggcccttgtgttggactgtcat

SEQ ID NO: 5497991 - DNA, 25 bp, Homo sapien
agaacaggagcctgaactgacatca

SEQ ID NO: 5497992 - DNA, 25 bp, Homo sapien
caggagcctgaactgacatcaactc

SEQ ID NO: 5497993 - DNA, 25 bp, Homo sapien
gcaagaaggcccttgtgttggactg

SEQ ID NO: 5497994 - DNA, 25 bp, Homo sapien
actcccaatttcgtggttgaagtta

SEQ ID NO: 5497995 - DNA, 25 bp, Homo sapien
caaccccaaccactgcaactgcatc

SEQ ID NO: 5497996 - DNA, 25 bp, Homo sapien
tggagctggacatgacccctttcat

SEQ ID NO: 5497997 - DNA, 25 bp, Homo sapien
cgggttgcagtcagacgtcacctgc

SEQ ID NO: 5497998 - DNA, 25 bp, Homo sapien
gttgccatagctaccaggagtccac

SEQ ID NO: 5497999 - DNA, 25 bp, Homo sapien
ggcggaagatcaccacgtatgtgtc

SEQ ID NO: 5498000 - DNA, 25 bp, Homo sapien
gactgcctgcgacgattcaccagac

SEQ ID NO: 5498001 - DNA, 25 bp, Homo sapien
atgaagaaactgcccatagtagcct

SEQ ID NO: 5498002 - DNA, 25 bp, Homo sapien
accgacactgcaaaggtgatgacaa

SEQ ID NO: 5498003 - DNA, 25 bp, Homo sapien
gaccagatcttcacaggcgggttgc

SEQ ID NO: 5498004 - DNA, 25 bp, Homo sapien
ttgaacactcagccaagctgcggcg

SEQ ID NO: 5498005 - DNA, 25 bp, Homo sapien
acaaagcagctcactatgaagaaac

SEQ ID NO: 5498006 - DNA, 25 bp, Homo sapien
agtctatactatgtccaggtatcca

SEQ ID NO: 5498007 - DNA, 25 bp, Homo sapien
tggatacctggacatagtatagact

SEQ ID NO: 5498008 - DNA, 25 bp, Homo sapien
tgaagcccctgttgccgatggggtg

SEQ ID NO: 5498009 - DNA, 25 bp, Homo sapien
gaccggattttccagtgagatgaac

SEQ ID NO: 5498010 - DNA, 25 bp, Homo sapien
gctgttgaaaaaaatgatgacgacc

SEQ ID NO: 5498011 - DNA, 25 bp, Homo sapien
gacgaccaaaagattgaacaagatg

SEQ ID NO: 5498012 - DNA, 25 bp, Homo sapien
ccgtggacacataacaaggaaaaag

SEQ ID NO: 5498013 - DNA, 25 bp, Homo sapien
gcaggatatgatctcctggtgcgcc

SEQ ID NO: 5498014 - DNA, 25 bp, Homo sapien
aggctgaagctaataagaaggatga

SEQ ID NO: 5498015 - DNA, 25 bp, Homo sapien
cataaggccgcaaccaaaattcagg

SEQ ID NO: 5498016 - DNA, 25 bp, Homo sapien
accagaagataaagctcataaggcc

SEQ ID NO: 5498017 - DNA, 25 bp, Homo sapien
ggagaaggcaccactactgccgaag

SEQ ID NO: 5498018 - DNA, 25 bp, Homo sapien
aattcaggctagcttccgtggacac

SEQ ID NO: 5498019 - DNA, 25 bp, Homo sapien
tcagaaccgggtggttcttagaagt

SEQ ID NO: 5498020 - DNA, 25 bp, Homo sapien
acttctaagaaccacccggttctga

SEQ ID NO: 5498021 - DNA, 25 bp, Homo sapien
cccatggctgtccgatgacaccact

SEQ ID NO: 5498022 - DNA, 25 bp, Homo sapien
gaagtcacagtcctacccacacacc

SEQ ID NO: 5498023 - DNA, 25 bp, Homo sapien
atccagaatgagaaacccccacaaa

SEQ ID NO: 5498024 - DNA, 25 bp, Homo sapien
ctagagtcagaattcagctcggaaa

SEQ ID NO: 5498025 - DNA, 25 bp, Homo sapien
cacccacaccagaaactaaacctcc

SEQ ID NO: 5498026 - DNA, 25 bp, Homo sapien
ggcattgaaagacccagttgggaga

SEQ ID NO: 5498027 - DNA, 25 bp, Homo sapien
ccaacagaagatgagttacaacaac

SEQ ID NO: 5498028 - DNA, 25 bp, Homo sapien
aacacggaagtctgtctatggttta

SEQ ID NO: 5498029 - DNA, 25 bp, Homo sapien
ggaagatccttgacagccaagagag

SEQ ID NO: 5498030 - DNA, 25 bp, Homo sapien
gcacaggcccgtgcctggatgtgta

SEQ ID NO: 5498031 - DNA, 25 bp, Homo sapien
caactgaagtggacattaagaagtc

SEQ ID NO: 5498032 - DNA, 25 bp, Homo sapien
acagtgatagggattcgtcgccgcc

SEQ ID NO: 5498033 - DNA, 25 bp, Homo sapien
ggcggcgacgaatccctatcactgt

SEQ ID NO: 5498034 - DNA, 25 bp, Homo sapien
tagcagccaaaatgtgtagccaagt

SEQ ID NO: 5498035 - DNA, 25 bp, Homo sapien
atgatgatctcagctggttgtggaa

SEQ ID NO: 5498036 - DNA, 25 bp, Homo sapien
ttctggaattgtaatatggggaacc

SEQ ID NO: 5498037 - DNA, 25 bp, Homo sapien
tggggaaccctcagtataatgcgaa

SEQ ID NO: 5498038 - DNA, 25 bp, Homo sapien
tctatgtgcgcaatcgagttcggga

SEQ ID NO: 5498039 - DNA, 25 bp, Homo sapien
cagtacgtggaaaaccgacacttga

SEQ ID NO: 5498040 - DNA, 25 bp, Homo sapien
aaggtggaaagttcacagtacgtgg

SEQ ID NO: 5498041 - DNA, 25 bp, Homo sapien
taatcaacgtcacactagcagccaa

SEQ ID NO: 5498042 - DNA, 25 bp, Homo sapien
gcgaaactgttgctctgggtgcttc

SEQ ID NO: 5498043 - DNA, 25 bp, Homo sapien
gttgtggaatgaaagcactgctctt

SEQ ID NO: 5498044 - DNA, 25 bp, Homo sapien
gtgtagccaagtgctttgccaggag

SEQ ID NO: 5498045 - DNA, 25 bp, Homo sapien
tctttccttggatgctgaattgctc

SEQ ID NO: 5498046 - DNA, 25 bp, Homo sapien
tacttgcatcattatcaggtctctt

SEQ ID NO: 5498047 - DNA, 25 bp, Homo sapien
gataattccttataggccgtcagcc

SEQ ID NO: 5498048 - DNA, 25 bp, Homo sapien
gccgtcagccctatcaacaatgaac

SEQ ID NO: 5498049 - DNA, 25 bp, Homo sapien
tccttggatgctgaattgctctgca

SEQ ID NO: 5498050 - DNA, 25 bp, Homo sapien
aagctgtcagtctttccttggatgc

SEQ ID NO: 5498051 - DNA, 25 bp, Homo sapien
caatgaacagatttccaaaacatcc

SEQ ID NO: 5498052 - DNA, 25 bp, Homo sapien
aggtctctttcaaagctgtcagtct

SEQ ID NO: 5498053 - DNA, 25 bp, Homo sapien
ttggatgctgaattgctctgcaagt

SEQ ID NO: 5498054 - DNA, 25 bp, Homo sapien
cttataggccgtcagccctatcaac

SEQ ID NO: 5498055 - DNA, 25 bp, Homo sapien
ccttttagggagtgataattcctta

SEQ ID NO: 5498056 - DNA, 25 bp, Homo sapien
tttctaaagtggaaaattcagcgat

SEQ ID NO: 5498057 - DNA, 25 bp, Homo sapien
tctaaagtggaaaattcagcgataa

SEQ ID NO: 5498058 - DNA, 25 bp, Homo sapien
ggaaaagagagctaagcgatcattt

SEQ ID NO: 5498059 - DNA, 25 bp, Homo sapien
tcagcgataatacctaaaactaaac

SEQ ID NO: 5498060 - DNA, 25 bp, Homo sapien
aaaagagagctaagcgatcattttc

SEQ ID NO: 5498061 - DNA, 25 bp, Homo sapien
taaaactaaacactccacaggcagc

SEQ ID NO: 5498062 - DNA, 25 bp, Homo sapien
aaacactccacaggcagcaatttaa

SEQ ID NO: 5498063 - DNA, 25 bp, Homo sapien
agtggaaaattcagcgataatacct

SEQ ID NO: 5498064 - DNA, 25 bp, Homo sapien
ctaaacactccacaggcagcaattt

SEQ ID NO: 5498065 - DNA, 25 bp, Homo sapien
aaagtggaaaattcagcgataatac

SEQ ID NO: 5498066 - DNA, 25 bp, Homo sapien
aatacctaaaactaaacactccaca

SEQ ID NO: 5498067 - DNA, 25 bp, Homo sapien
caggaaacccctcatgcaaccagtc

SEQ ID NO: 5498068 - DNA, 25 bp, Homo sapien
tggagcccctgttaccacggcagct

SEQ ID NO: 5498069 - DNA, 25 bp, Homo sapien
ctgtttgcctggaaatggccacgct

SEQ ID NO: 5498070 - DNA, 25 bp, Homo sapien
cagaaacctccagtaggaccagtgg

SEQ ID NO: 5498071 - DNA, 25 bp, Homo sapien
gatcccacaccgtgacaggtggaac

SEQ ID NO: 5498072 - DNA, 25 bp, Homo sapien
ccctgagctcaaagatgtacaccac

SEQ ID NO: 5498073 - DNA, 25 bp, Homo sapien
aggtggaaccataacaacgaactct

SEQ ID NO: 5498074 - DNA, 25 bp, Homo sapien
gggaccagacctcagccctacctcc

SEQ ID NO: 5498075 - DNA, 25 bp, Homo sapien
ggtctctactagcgagcccctgagc

SEQ ID NO: 5498076 - DNA, 25 bp, Homo sapien
aagatgtcatcagtgccccaggaaa

SEQ ID NO: 5498077 - DNA, 25 bp, Homo sapien
cacccacctccggagagcctttggt

SEQ ID NO: 5498078 - DNA, 25 bp, Homo sapien
ccactttagaaaatgatcgcttagc

SEQ ID NO: 5498079 - DNA, 25 bp, Homo sapien
tttcctccccagcctatgccacacg

SEQ ID NO: 5498080 - DNA, 25 bp, Homo sapien
ttagaaaatgatcgcttagctctct

SEQ ID NO: 5498081 - DNA, 25 bp, Homo sapien
tcctccccagcctatgccacacgta

SEQ ID NO: 5498082 - DNA, 25 bp, Homo sapien
actttagaaaatgatcgcttagctc

SEQ ID NO: 5498083 - DNA, 25 bp, Homo sapien
cacgtatttcttatcaccctccttt

SEQ ID NO: 5498084 - DNA, 25 bp, Homo sapien
taggtattatcgctgaattttccac

SEQ ID NO: 5498085 - DNA, 25 bp, Homo sapien
tcttttcctccccagcctatgccac

SEQ ID NO: 5498086 - DNA, 25 bp, Homo sapien
ttccactttagaaaatgatcgctta

SEQ ID NO: 5498087 - DNA, 25 bp, Homo sapien
ctccccagcctatgccacacgtatt

SEQ ID NO: 5498088 - DNA, 25 bp, Homo sapien
ccccagcctatgccacacgtatttc

SEQ ID NO: 5498089 - DNA, 25 bp, Homo sapien
tggagtagatatcgcagctggaaat

SEQ ID NO: 5498090 - DNA, 25 bp, Homo sapien
ttaagagcagctaatcaaatggata

SEQ ID NO: 5498091 - DNA, 25 bp, Homo sapien
gtgccatagctttcctccagcagcc

SEQ ID NO: 5498092 - DNA, 25 bp, Homo sapien
ttccagatcaggctgtaaagttgat

SEQ ID NO: 5498093 - DNA, 25 bp, Homo sapien
taaaagcagctggtttcaaagatcc

SEQ ID NO: 5498094 - DNA, 25 bp, Homo sapien
gctggaaatatgctggtcaagaaaa

SEQ ID NO: 5498095 - DNA, 25 bp, Homo sapien
caaagatccccttctggcctctgga

SEQ ID NO: 5498096 - DNA, 25 bp, Homo sapien
cttggaggttttgctggtctttttg

SEQ ID NO: 5498097 - DNA, 25 bp, Homo sapien
cccagctatgcaataaacatgatac

SEQ ID NO: 5498098 - DNA, 25 bp, Homo sapien
acagatggcgttggaactaaactaa

SEQ ID NO: 5498099 - DNA, 25 bp, Homo sapien
ccaggagtttgacttacaaggaatc

SEQ ID NO: 5498100 - DNA, 25 bp, Homo sapien
aatgtttatgtaacctaagtccaac

SEQ ID NO: 5498101 - DNA, 25 bp, Homo sapien
gttggacttaggttacataaacatt

SEQ ID NO: 5498102 - DNA, 25 bp, Homo sapien
ataaatgtttatgtaacctaagtcc

SEQ ID NO: 5498103 - DNA, 25 bp, Homo sapien
ggacttaggttacataaacatttat

SEQ ID NO: 5498104 - DNA, 25 bp, Homo sapien
agaagctggcctccatgctggagac

SEQ ID NO: 5498105 - DNA, 25 bp, Homo sapien
ttctgctcttcaaggaggagggtga

SEQ ID NO: 5498106 - DNA, 25 bp, Homo sapien
ctccatgctggagactctgcgggag

SEQ ID NO: 5498107 - DNA, 25 bp, Homo sapien
ccttggcgcagctgctggccaaggc

SEQ ID NO: 5498108 - DNA, 25 bp, Homo sapien
tcgaagtcacagcgaatcagcctca

SEQ ID NO: 5498109 - DNA, 25 bp, Homo sapien
gacaccaccagcaacaccttggcgc

SEQ ID NO: 5498110 - DNA, 25 bp, Homo sapien
gccagcgctttccagaaggcaccag

SEQ ID NO: 5498111 - DNA, 25 bp, Homo sapien
aaggatgcaattcgaagtcacagcg

SEQ ID NO: 5498112 - DNA, 25 bp, Homo sapien
gcgggaagctccacgttctgctctt

SEQ ID NO: 5498113 - DNA, 25 bp, Homo sapien
ccggattgcagaaggatgcaattcg

SEQ ID NO: 5498114 - DNA, 25 bp, Homo sapien
gtgaagtcccagccagcgctttcca

SEQ ID NO: 5498115 - DNA, 25 bp, Homo sapien
aagattactagaagcactgatacac

SEQ ID NO: 5498116 - DNA, 25 bp, Homo sapien
gatgagggcaaataatgcacacaat

SEQ ID NO: 5498117 - DNA, 25 bp, Homo sapien
tcagtaccaagacaatagcaagatt

SEQ ID NO: 5498118 - DNA, 25 bp, Homo sapien
ttatggaaacaagtaagttacgcta

SEQ ID NO: 5498119 - DNA, 25 bp, Homo sapien
tgttttggtctgtttggggagatga

SEQ ID NO: 5498120 - DNA, 25 bp, Homo sapien
gtttagcatacaaaggattcctggg

SEQ ID NO: 5498121 - DNA, 25 bp, Homo sapien
taaactacaaagataagacaaatcc

SEQ ID NO: 5498122 - DNA, 25 bp, Homo sapien
ctagattatgaaatgacaattggtc

SEQ ID NO: 5498123 - DNA, 25 bp, Homo sapien
acaatggatgtaaatggcagttttc

SEQ ID NO: 5498124 - DNA, 25 bp, Homo sapien
gattcctgggcaaattatattggtc

SEQ ID NO: 5498125 - DNA, 25 bp, Homo sapien
atgaaacgatgtaatggtaatatat

SEQ ID NO: 5498126 - DNA, 25 bp, Homo sapien
tgattaccatagggaaagccatatt

SEQ ID NO: 5498127 - DNA, 25 bp, Homo sapien
ctgaatattgcaatggggaccttcc

SEQ ID NO: 5498128 - DNA, 25 bp, Homo sapien
cgatggaggctgtatcaggatttat

SEQ ID NO: 5498129 - DNA, 25 bp, Homo sapien
ctcagcgtatgttcaggactcaggg

SEQ ID NO: 5498130 - DNA, 25 bp, Homo sapien
tcatatggaattgaaccgatggagg

SEQ ID NO: 5498131 - DNA, 25 bp, Homo sapien
ttgtaggaaatcagttggtaaagaa

SEQ ID NO: 5498132 - DNA, 25 bp, Homo sapien
cagttggtaaagaatgcgatttcac

SEQ ID NO: 5498133 - DNA, 25 bp, Homo sapien
tataatggatatgttgcgggtattc

SEQ ID NO: 5498134 - DNA, 25 bp, Homo sapien
cagagaagatttcatcatcggatgc

SEQ ID NO: 5498135 - DNA, 25 bp, Homo sapien
cagagtatcaagtcagaaaaagttc

SEQ ID NO: 5498136 - DNA, 25 bp, Homo sapien
tcggatgcaaaaacagatccagaac

SEQ ID NO: 5498137 - DNA, 25 bp, Homo sapien
cttcacccagagacgggtcccttca

SEQ ID NO: 5498138 - DNA, 25 bp, Homo sapien
tgggccaaatcatatgaggggccag

SEQ ID NO: 5498139 - DNA, 25 bp, Homo sapien
cagtggccacgaacattttggtcac

SEQ ID NO: 5498140 - DNA, 25 bp, Homo sapien
ggtccttcaggctccttgcactttc

SEQ ID NO: 5498141 - DNA, 25 bp, Homo sapien
cattttggtcacgagatggagtcca

SEQ ID NO: 5498142 - DNA, 25 bp, Homo sapien
gggtcccttcagtggccacgaacat

SEQ ID NO: 5498143 - DNA, 25 bp, Homo sapien
ttctctcacttgggccgtgtgtctc

SEQ ID NO: 5498144 - DNA, 25 bp, Homo sapien
gagtccaggtgtcgtcctcactccc

SEQ ID NO: 5498145 - DNA, 25 bp, Homo sapien
gccgtgtgtctctgggccctcagtt

SEQ ID NO: 5498146 - DNA, 25 bp, Homo sapien
tttgcaaggattaaatgggccaaat

SEQ ID NO: 5498147 - DNA, 25 bp, Homo sapien
tgtaaagtgggtctaataacagttc

SEQ ID NO: 5498148 - DNA, 25 bp, Homo sapien
cagaagctggttccagggcatttgc

SEQ ID NO: 5498149 - DNA, 25 bp, Homo sapien
ctcaggtacagatccctcgccttcc

SEQ ID NO: 5498150 - DNA, 25 bp, Homo sapien
cagaaccttcaggcccttaggcatc

SEQ ID NO: 5498151 - DNA, 25 bp, Homo sapien
aggcagaatcacagttgcagcccct

SEQ ID NO: 5498152 - DNA, 25 bp, Homo sapien
gttcttgatgagtctgggaagagca

SEQ ID NO: 5498153 - DNA, 25 bp, Homo sapien
gctggctccgcacagcaaacctgtt

SEQ ID NO: 5498154 - DNA, 25 bp, Homo sapien
cttaggcatcttagaacccaccccc

SEQ ID NO: 5498155 - DNA, 25 bp, Homo sapien
gaggccctagtcctgaggtctctgg

SEQ ID NO: 5498156 - DNA, 25 bp, Homo sapien
accctgacagtctcagagcaggctc

SEQ ID NO: 5498157 - DNA, 25 bp, Homo sapien
gcacacccagggctaggttaattcc

SEQ ID NO: 5498158 - DNA, 25 bp, Homo sapien
ctgttgacatgcacaggtatgggga

SEQ ID NO: 5498159 - DNA, 25 bp, Homo sapien
tgtggaatcaacctgaagatgtcta

SEQ ID NO: 5498160 - DNA, 25 bp, Homo sapien
attttaagtaatatgaaagcatttt

SEQ ID NO: 5498161 - DNA, 25 bp, Homo sapien
actgctctgtggaatcaacctgaag

SEQ ID NO: 5498162 - DNA, 25 bp, Homo sapien
aagaagtatatttaggttctccctc

SEQ ID NO: 5498163 - DNA, 25 bp, Homo sapien
aaggaaacaactgctctgtggaatc

SEQ ID NO: 5498164 - DNA, 25 bp, Homo sapien
ccgcacccggccatttgtatgtaat

SEQ ID NO: 5498165 - DNA, 25 bp, Homo sapien
acgatcctctctacaaagaagtata

SEQ ID NO: 5498166 - DNA, 25 bp, Homo sapien
tcctctgatgccaccagacttaaag

SEQ ID NO: 5498167 - DNA, 25 bp, Homo sapien
cttaaagcagttcacgatcctctct

SEQ ID NO: 5498168 - DNA, 25 bp, Homo sapien
tgaaaaaggaaacaactgctctgtg

SEQ ID NO: 5498169 - DNA, 25 bp, Homo sapien
ttctatgtaagtcaagtgaaaaagg

SEQ ID NO: 5498170 - DNA, 25 bp, Homo sapien
cccagagtcaccctaggaggatctg

SEQ ID NO: 5498171 - DNA, 25 bp, Homo sapien
ttggagaaaacctcagctctgcctc

SEQ ID NO: 5498172 - DNA, 25 bp, Homo sapien
gatgttgtggtcacgctggatcatg

SEQ ID NO: 5498173 - DNA, 25 bp, Homo sapien
ggagagtcagagtttatggcaattt

SEQ ID NO: 5498174 - DNA, 25 bp, Homo sapien
gttcccagagagtaaactgtgtggc

SEQ ID NO: 5498175 - DNA, 25 bp, Homo sapien
gtagacacagattttgacaggttca

SEQ ID NO: 5498176 - DNA, 25 bp, Homo sapien
aggatctgagtgaccctgggttttg

SEQ ID NO: 5498177 - DNA, 25 bp, Homo sapien
tgttggaggaacagttgagatttta

SEQ ID NO: 5498178 - DNA, 25 bp, Homo sapien
gagccctttgtggcagcctggtctg

SEQ ID NO: 5498179 - DNA, 25 bp, Homo sapien
taattaaatgccaggtagagctagc

SEQ ID NO: 5498180 - DNA, 25 bp, Homo sapien
ctttgagtctgtggagagtcagagt

SEQ ID NO: 5498181 - DNA, 25 bp, Homo sapien
gtttcccgcggcacttctggatacc

SEQ ID NO: 5498182 - DNA, 25 bp, Homo sapien
gagcgacgagctcagcaacatcgct

SEQ ID NO: 5498183 - DNA, 25 bp, Homo sapien
gagggtcaagaattgccgcttcctt

SEQ ID NO: 5498184 - DNA, 25 bp, Homo sapien
acgttatcttggagcctcgggttcc

SEQ ID NO: 5498185 - DNA, 25 bp, Homo sapien
ccacagccaggattttgagaggtga

SEQ ID NO: 5498186 - DNA, 25 bp, Homo sapien
ggcagtcctcagagccctcgcttgt

SEQ ID NO: 5498187 - DNA, 25 bp, Homo sapien
ggtcactactccaggaagccacctt

SEQ ID NO: 5498188 - DNA, 25 bp, Homo sapien
gcaacatcgctatgcaggtgcggaa

SEQ ID NO: 5498189 - DNA, 25 bp, Homo sapien
cagaaagcagcagttaaagttcgtt

SEQ ID NO: 5498190 - DNA, 25 bp, Homo sapien
accatctcctcggtgggctcttggc

SEQ ID NO: 5498191 - DNA, 25 bp, Homo sapien
ggcccactggaatcaggtagtgtca

SEQ ID NO: 5498192 - DNA, 25 bp, Homo sapien
gggaggtgatgttacacatccagcc

SEQ ID NO: 5498193 - DNA, 25 bp, Homo sapien
tggaactgggtaggtcacctccata

SEQ ID NO: 5498194 - DNA, 25 bp, Homo sapien
aggcacagaagtgtgaatactcacc

SEQ ID NO: 5498195 - DNA, 25 bp, Homo sapien
gagagttcatcaggcacagaagtgt

SEQ ID NO: 5498196 - DNA, 25 bp, Homo sapien
gaatgggctcataaaaacagctgtc

SEQ ID NO: 5498197 - DNA, 25 bp, Homo sapien
ataaagtacatggagaatgagagtt

SEQ ID NO: 5498198 - DNA, 25 bp, Homo sapien
cccagcagtggtgacactgacattg

SEQ ID NO: 5498199 - DNA, 25 bp, Homo sapien
acagctgtcattgtaggcccagcag

SEQ ID NO: 5498200 - DNA, 25 bp, Homo sapien
agcaataacactagcaagaatgggc

SEQ ID NO: 5498201 - DNA, 25 bp, Homo sapien
ccacacttatgggaggtgatgttac

SEQ ID NO: 5498202 - DNA, 25 bp, Homo sapien
tgacattgatgtggtactctacggt

SEQ ID NO: 5498203 - DNA, 25 bp, Homo sapien
cctgcactggcttctgaggagttgt

SEQ ID NO: 5498204 - DNA, 25 bp, Homo sapien
catctggatggaactcctcaatgat

SEQ ID NO: 5498205 - DNA, 25 bp, Homo sapien
caattccctagcatctgtagagtgc

SEQ ID NO: 5498206 - DNA, 25 bp, Homo sapien
agtagcgataaaagtttctgaaagc

SEQ ID NO: 5498207 - DNA, 25 bp, Homo sapien
ggaactagaaacaacagtagcgata

SEQ ID NO: 5498208 - DNA, 25 bp, Homo sapien
caacggccactgttgagatggcagg

SEQ ID NO: 5498209 - DNA, 25 bp, Homo sapien
caggcaatacatcaaggcaacggcc

SEQ ID NO: 5498210 - DNA, 25 bp, Homo sapien
ttctgccatgtacaggcaatacatc

SEQ ID NO: 5498211 - DNA, 25 bp, Homo sapien
caacatcctcaaagtttgcagtagc

SEQ ID NO: 5498212 - DNA, 25 bp, Homo sapien
gaggagttgtttagtcttctgccat

SEQ ID NO: 5498213 - DNA, 25 bp, Homo sapien
caccagctggaactagaaacaacag

SEQ ID NO: 5498214 - DNA, 25 bp, Homo sapien
gcacaggctcaaaggaaaataaaag

SEQ ID NO: 5498215 - DNA, 25 bp, Homo sapien
tctaaggaggttctaccatctgtga

SEQ ID NO: 5498216 - DNA, 25 bp, Homo sapien
ttagtagaactgaagttgcaaaaat

SEQ ID NO: 5498217 - DNA, 25 bp, Homo sapien
tttgctctaaggaggttctaccatc

SEQ ID NO: 5498218 - DNA, 25 bp, Homo sapien
ttaactgctgtgtccttttgctcta

SEQ ID NO: 5498219 - DNA, 25 bp, Homo sapien
tggaagattcttcagggaggtttag

SEQ ID NO: 5498220 - DNA, 25 bp, Homo sapien
tactcagcagctggaagattcttca

SEQ ID NO: 5498221 - DNA, 25 bp, Homo sapien
cagggaggtttagtagaactgaagt

SEQ ID NO: 5498222 - DNA, 25 bp, Homo sapien
caaagaatgcaatgtccagagcctt

SEQ ID NO: 5498223 - DNA, 25 bp, Homo sapien
ttgaacaatcaggtatgtcacattt

SEQ ID NO: 5498224 - DNA, 25 bp, Homo sapien
ccagagccttgcattttgaacaatc

SEQ ID NO: 5498225 - DNA, 25 bp, Homo sapien
gttaacaattcatggatcagtggcc

SEQ ID NO: 5498226 - DNA, 25 bp, Homo sapien
gtttcagtacatccttcccaaatgc

SEQ ID NO: 5498227 - DNA, 25 bp, Homo sapien
agctactactccgtctgtatgatcc

SEQ ID NO: 5498228 - DNA, 25 bp, Homo sapien
cccaaatgctgtatataagtcccct

SEQ ID NO: 5498229 - DNA, 25 bp, Homo sapien
ttgcccgtgtagcaagggtttttgc

SEQ ID NO: 5498230 - DNA, 25 bp, Homo sapien
agtccagcagcacaagctactactc

SEQ ID NO: 5498231 - DNA, 25 bp, Homo sapien
catggatcagtggcctagcttctac

SEQ ID NO: 5498232 - DNA, 25 bp, Homo sapien
gatcctcatctccagcaatgtggtc

SEQ ID NO: 5498233 - DNA, 25 bp, Homo sapien
aagtcccctattagtccagcagcac

SEQ ID NO: 5498234 - DNA, 25 bp, Homo sapien
tgttcgtcttcgatctccgccgttc

SEQ ID NO: 5498235 - DNA, 25 bp, Homo sapien
atctccgccgttcagttaacaattc

SEQ ID NO: 5498236 - DNA, 25 bp, Homo sapien
gagtttttcgggctgctggaaagac

SEQ ID NO: 5498237 - DNA, 25 bp, Homo sapien
cctgaggtaggaccaagcctcatct

SEQ ID NO: 5498238 - DNA, 25 bp, Homo sapien
tgacatcaaagagcaggtgacatta

SEQ ID NO: 5498239 - DNA, 25 bp, Homo sapien
gaatgataagaagcatgcagtgatc

SEQ ID NO: 5498240 - DNA, 25 bp, Homo sapien
agtgatctatagtgatcggggggaa

SEQ ID NO: 5498241 - DNA, 25 bp, Homo sapien
aagccaaagctagaatgataagaag

SEQ ID NO: 5498242 - DNA, 25 bp, Homo sapien
ggccagtgctgttggaacagagtga

SEQ ID NO: 5498243 - DNA, 25 bp, Homo sapien
gtgctgttggaacagagtgaactgg

SEQ ID NO: 5498244 - DNA, 25 bp, Homo sapien
gcaacaagccaggaaagacttctaa

SEQ ID NO: 5498245 - DNA, 25 bp, Homo sapien
gagcaggtgacattaaagccaaagc

SEQ ID NO: 5498246 - DNA, 25 bp, Homo sapien
gccaggaaagacttctaagggcagg

SEQ ID NO: 5498247 - DNA, 25 bp, Homo sapien
tcggttcaacgtttgggagaccctc

SEQ ID NO: 5498248 - DNA, 25 bp, Homo sapien
gagggtctcccaaacgttgaaccga

SEQ ID NO: 5498249 - DNA, 25 bp, Homo sapien
ttttaacttggtatcagaagaagcc

SEQ ID NO: 5498250 - DNA, 25 bp, Homo sapien
actttcaccatcgccagcctgcagc

SEQ ID NO: 5498251 - DNA, 25 bp, Homo sapien
taacttggtatcagaagaagccagg

SEQ ID NO: 5498252 - DNA, 25 bp, Homo sapien
agcctgcagcctgacgattttgcaa

SEQ ID NO: 5498253 - DNA, 25 bp, Homo sapien
aatgatcaccccctcactttcggcc

SEQ ID NO: 5498254 - DNA, 25 bp, Homo sapien
gcagcctgacgattttgcaacatat

SEQ ID NO: 5498255 - DNA, 25 bp, Homo sapien
tgagacgaactgtgccgcaccatct

SEQ ID NO: 5498256 - DNA, 25 bp, Homo sapien
gtcaacaatataatgatcaccccct

SEQ ID NO: 5498257 - DNA, 25 bp, Homo sapien
cgagtcaggacattagtaatttttt

SEQ ID NO: 5498258 - DNA, 25 bp, Homo sapien
ttactttcaccatcgccagcctgca

SEQ ID NO: 5498259 - DNA, 25 bp, Homo sapien
gatcaccccctcactttcggccctg

SEQ ID NO: 5498260 - DNA, 25 bp, Homo sapien
atttcaactctgtgaccgccgcgga

SEQ ID NO: 5498261 - DNA, 25 bp, Homo sapien
accatttcagtggacacggccaagg

SEQ ID NO: 5498262 - DNA, 25 bp, Homo sapien
agtggattgggagtgtctattatac

SEQ ID NO: 5498263 - DNA, 25 bp, Homo sapien
aagttgcactgtttccggtggctcc

SEQ ID NO: 5498264 - DNA, 25 bp, Homo sapien
tctattatactgggagcaccaacta

SEQ ID NO: 5498265 - DNA, 25 bp, Homo sapien
gcagaggcagttactactgggcctg

SEQ ID NO: 5498266 - DNA, 25 bp, Homo sapien
ctcagcagtcgaggcaccatttcag

SEQ ID NO: 5498267 - DNA, 25 bp, Homo sapien
gcctgggtccgccagtccccaggga

SEQ ID NO: 5498268 - DNA, 25 bp, Homo sapien
tacagcccgtccctcagcagtcgag

SEQ ID NO: 5498269 - DNA, 25 bp, Homo sapien
agactctgtccctaagttgcactgt

SEQ ID NO: 5498270 - DNA, 25 bp, Homo sapien
ccaatctttgagtactggggccagg

SEQ ID NO: 5498271 - DNA, 25 bp, Homo sapien
tctccgaaaaagcacgaggcccaat

SEQ ID NO: 5498272 - DNA, 25 bp, Homo sapien
attgggcctcgtgctttttcggaga

SEQ ID NO: 5498273 - DNA, 25 bp, Homo sapien
taaactcctgatctatgctgcaagc

SEQ ID NO: 5498274 - DNA, 25 bp, Homo sapien
caaacgaactgtgggcccaccatct

SEQ ID NO: 5498275 - DNA, 25 bp, Homo sapien
tttgcaaagtggggtcccatcaagg

SEQ ID NO: 5498276 - DNA, 25 bp, Homo sapien
tcactctctctatcagcagcctgca

SEQ ID NO: 5498277 - DNA, 25 bp, Homo sapien
gtgttagcaggtggttagcctggta

SEQ ID NO: 5498278 - DNA, 25 bp, Homo sapien
tggttagcctggtatcaacagaaac

SEQ ID NO: 5498279 - DNA, 25 bp, Homo sapien
cctgaagatttcgcaacttactttt

SEQ ID NO: 5498280 - DNA, 25 bp, Homo sapien
gatctgggacagatttcactctctc

SEQ ID NO: 5498281 - DNA, 25 bp, Homo sapien
tcaacagactaacagtttcccgctc

SEQ ID NO: 5498282 - DNA, 25 bp, Homo sapien
ctgcaagcagtttgcaaagtggggt

SEQ ID NO: 5498283 - DNA, 25 bp, Homo sapien
tcccgctcactttcggcggagggac

SEQ ID NO: 5498284 - DNA, 25 bp, Homo sapien
cagtggtagaattcagcgctgtacc

SEQ ID NO: 5498285 - DNA, 25 bp, Homo sapien
agaattcagcgctgtacctagtgcc

SEQ ID NO: 5498286 - DNA, 25 bp, Homo sapien
aattcagcgctgtacctagtgccaa

SEQ ID NO: 5498287 - DNA, 25 bp, Homo sapien
agcgctgtacctagtgccaacaata

SEQ ID NO: 5498288 - DNA, 25 bp, Homo sapien
caggtgggctgattggttctccctg

SEQ ID NO: 5498289 - DNA, 25 bp, Homo sapien
tctccctgctacagtggtagaattc

SEQ ID NO: 5498290 - DNA, 25 bp, Homo sapien
cctgctacagtggtagaattcagcg

SEQ ID NO: 5498291 - DNA, 25 bp, Homo sapien
gctacagtggtagaattcagcgctg

SEQ ID NO: 5498292 - DNA, 25 bp, Homo sapien
tgcctactggttgacggtcaggtgg

SEQ ID NO: 5498293 - DNA, 25 bp, Homo sapien
tggttctccctgctacagtggtaga

SEQ ID NO: 5498294 - DNA, 25 bp, Homo sapien
ggtgggctgattggttctccctgct

SEQ ID NO: 5498295 - DNA, 25 bp, Homo sapien
ctgaagcctagggtcactctgagga

SEQ ID NO: 5498296 - DNA, 25 bp, Homo sapien
ttccccctgaagcctagggtcactc

SEQ ID NO: 5498297 - DNA, 25 bp, Homo sapien
tgaagcctagggtcactctgaggaa

SEQ ID NO: 5498298 - DNA, 25 bp, Homo sapien
gggcagaagttccccctgaagccta

SEQ ID NO: 5498299 - DNA, 25 bp, Homo sapien
gcagaagttccccctgaagcctagg

SEQ ID NO: 5498300 - DNA, 25 bp, Homo sapien
ggcttccagtttgcagtgggaagag

SEQ ID NO: 5498301 - DNA, 25 bp, Homo sapien
cctgaagcctagggtcactctgagg

SEQ ID NO: 5498302 - DNA, 25 bp, Homo sapien
ccccctgaagcctagggtcactctg

SEQ ID NO: 5498303 - DNA, 25 bp, Homo sapien
ggggcttccagtttgcagtgggaag

SEQ ID NO: 5498304 - DNA, 25 bp, Homo sapien
agttccccctgaagcctagggtcac

SEQ ID NO: 5498305 - DNA, 25 bp, Homo sapien
ggcagaagttccccctgaagcctag

SEQ ID NO: 5498306 - DNA, 25 bp, Homo sapien
tgtcggtgacattgcccagtttaac

SEQ ID NO: 5498307 - DNA, 25 bp, Homo sapien
cactgctgggcaacgtccttccctg

SEQ ID NO: 5498308 - DNA, 25 bp, Homo sapien
gggcattgccaactgcactgcgcca

SEQ ID NO: 5498309 - DNA, 25 bp, Homo sapien
ttgaggggggtcatattccctcctc

SEQ ID NO: 5498310 - DNA, 25 bp, Homo sapien
tgccttcgatgtctgcaaggggagg

SEQ ID NO: 5498311 - DNA, 25 bp, Homo sapien
gtacccacacctccagaatgccctg

SEQ ID NO: 5498312 - DNA, 25 bp, Homo sapien
tttaacctgtgggaccacgccctga

SEQ ID NO: 5498313 - DNA, 25 bp, Homo sapien
ttggcccaggataccctgggtggcc

SEQ ID NO: 5498314 - DNA, 25 bp, Homo sapien
gcctgccactttggggacttgaggg

SEQ ID NO: 5498315 - DNA, 25 bp, Homo sapien
gggtgcaacaaaggctgccttcgat

SEQ ID NO: 5498316 - DNA, 25 bp, Homo sapien
ccacctggcactgcactggagttgt

SEQ ID NO: 5498317 - DNA, 25 bp, Homo sapien
gtcattgcggagcgatttgtcagca

SEQ ID NO: 5498318 - DNA, 25 bp, Homo sapien
tccagaagtcctggagacacagctt

SEQ ID NO: 5498319 - DNA, 25 bp, Homo sapien
ttcttccctgccagaggttgagccg

SEQ ID NO: 5498320 - DNA, 25 bp, Homo sapien
agtggccggtctccaaccagtactg

SEQ ID NO: 5498321 - DNA, 25 bp, Homo sapien
gaggacagcaagtccagtggctttg

SEQ ID NO: 5498322 - DNA, 25 bp, Homo sapien
ttctggggatggaccccccaggtga

SEQ ID NO: 5498323 - DNA, 25 bp, Homo sapien
cagacacagaatctccagaagtcct

SEQ ID NO: 5498324 - DNA, 25 bp, Homo sapien
agcgcatgagcttcgagtccatttc

SEQ ID NO: 5498325 - DNA, 25 bp, Homo sapien
acagcaagtccagtggctttgggag

SEQ ID NO: 5498326 - DNA, 25 bp, Homo sapien
ccaaccagtactgagaagcgcatga

SEQ ID NO: 5498327 - DNA, 25 bp, Homo sapien
agacacagcttgatgcccaccaggg

SEQ ID NO: 5498328 - DNA, 25 bp, Homo sapien
caatgatgcatcagcagcctccttc

SEQ ID NO: 5498329 - DNA, 25 bp, Homo sapien
ccatatgcctatgcagggacctgga

SEQ ID NO: 5498330 - DNA, 25 bp, Homo sapien
tcacagagcatgccagtacagaatc

SEQ ID NO: 5498331 - DNA, 25 bp, Homo sapien
agatgcctgggcctaaccatatgcc

SEQ ID NO: 5498332 - DNA, 25 bp, Homo sapien
cagggacctggacccaatcaactca

SEQ ID NO: 5498333 - DNA, 25 bp, Homo sapien
agggacaaccaatgggaaactatgg

SEQ ID NO: 5498334 - DNA, 25 bp, Homo sapien
ctcagaataaaggaaagacctcaga

SEQ ID NO: 5498335 - DNA, 25 bp, Homo sapien
gtacagaatcagatgacaatgagtc

SEQ ID NO: 5498336 - DNA, 25 bp, Homo sapien
gcaccgcacatgcagaaccagatga

SEQ ID NO: 5498337 - DNA, 25 bp, Homo sapien
tgccttcagatggaatggtaggtgg

SEQ ID NO: 5498338 - DNA, 25 bp, Homo sapien
agtatgcagccaaaccaaggtccaa

SEQ ID NO: 5498339 - DNA, 25 bp, Homo sapien
gcagatcatgaggtcagaagttcga

SEQ ID NO: 5498340 - DNA, 25 bp, Homo sapien
gatcatgaggtcagaagttcgagac

SEQ ID NO: 5498341 - DNA, 25 bp, Homo sapien
ggtggcacacgcctgtaatcacggc

SEQ ID NO: 5498342 - DNA, 25 bp, Homo sapien
gcatggtggctcacacttgtggtcc

SEQ ID NO: 5498343 - DNA, 25 bp, Homo sapien
ttttgtaggaacaatctcactttgt

SEQ ID NO: 5498344 - DNA, 25 bp, Homo sapien
tctcatcaacctaggatctctcttt

SEQ ID NO: 5498345 - DNA, 25 bp, Homo sapien
aactcctggcctcaatccatcctcc

SEQ ID NO: 5498346 - DNA, 25 bp, Homo sapien
gtacaccaccatgcccacctaattt

SEQ ID NO: 5498347 - DNA, 25 bp, Homo sapien
cttgtggtcccagcactttgggtgg

SEQ ID NO: 5498348 - DNA, 25 bp, Homo sapien
ggaccgcaggtgtacaccaccatgc

SEQ ID NO: 5498349 - DNA, 25 bp, Homo sapien
tctactggatcattctcatcaacct

SEQ ID NO: 5498350 - DNA, 25 bp, Homo sapien
cacacccaccccatcctcccacgtc

SEQ ID NO: 5498351 - DNA, 25 bp, Homo sapien
cacctgaccgtcaaccagtaggcag

SEQ ID NO: 5498352 - DNA, 25 bp, Homo sapien
cctgaccgtcaaccagtaggcaggc

SEQ ID NO: 5498353 - DNA, 25 bp, Homo sapien
ttctaccactgtagcagggagaacc

SEQ ID NO: 5498354 - DNA, 25 bp, Homo sapien
gaaccaatcagcccacctgaccgtc

SEQ ID NO: 5498355 - DNA, 25 bp, Homo sapien
cccacctgaccgtcaaccagtaggc

SEQ ID NO: 5498356 - DNA, 25 bp, Homo sapien
gggagaaccaatcagcccacctgac

SEQ ID NO: 5498357 - DNA, 25 bp, Homo sapien
cagggagaaccaatcagcccacctg

SEQ ID NO: 5498358 - DNA, 25 bp, Homo sapien
tcagcccacctgaccgtcaaccagt

SEQ ID NO: 5498359 - DNA, 25 bp, Homo sapien
caggcacacccaccccatcctccca

SEQ ID NO: 5498360 - DNA, 25 bp, Homo sapien
tcctcccacgtctggagggtcccag

SEQ ID NO: 5498361 - DNA, 25 bp, Homo sapien
accaaagtgcaaggtctgtcgtact

SEQ ID NO: 5498362 - DNA, 25 bp, Homo sapien
agtacgacagaccttgcactttggt

SEQ ID NO: 5498363 - DNA, 25 bp, Homo sapien
tgtgtaacaccaatgcaggcaaatc

SEQ ID NO: 5498364 - DNA, 25 bp, Homo sapien
acacggctgagtacttctgtgctgt

SEQ ID NO: 5498365 - DNA, 25 bp, Homo sapien
ggctgggagttaccaactcactttc

SEQ ID NO: 5498366 - DNA, 25 bp, Homo sapien
accaaaggcctgagtcaaggttatt

SEQ ID NO: 5498367 - DNA, 25 bp, Homo sapien
tcggtcataccaaaggcctgagtca

SEQ ID NO: 5498368 - DNA, 25 bp, Homo sapien
gaaggggaccaaactctcggtcata

SEQ ID NO: 5498369 - DNA, 25 bp, Homo sapien
gcaatagcactaaagactgtgtaac

SEQ ID NO: 5498370 - DNA, 25 bp, Homo sapien
tccatataagcgacacggctgagta

SEQ ID NO: 5498371 - DNA, 25 bp, Homo sapien
atgggactacgctcactgtgaagcc

SEQ ID NO: 5498372 - DNA, 25 bp, Homo sapien
cctgagtcaaggttattgcaatagc

SEQ ID NO: 5498373 - DNA, 25 bp, Homo sapien
caatgcaggcaaatcagcctttggg

SEQ ID NO: 5498374 - DNA, 25 bp, Homo sapien
ttggtccccaatgggtttgttgtga

SEQ ID NO: 5498375 - DNA, 25 bp, Homo sapien
ccgtggagttgctatcttctttgga

SEQ ID NO: 5498376 - DNA, 25 bp, Homo sapien
actgcttgatttgctctccgtggag

SEQ ID NO: 5498377 - DNA, 25 bp, Homo sapien
tcaactggccatcttcctcactgct

SEQ ID NO: 5498378 - DNA, 25 bp, Homo sapien
gctctccgtggagttgctatcttct

SEQ ID NO: 5498379 - DNA, 25 bp, Homo sapien
aatgggtttgttgtgataggcatca

SEQ ID NO: 5498380 - DNA, 25 bp, Homo sapien
gtgataggcatcaactgttaatttc

SEQ ID NO: 5498381 - DNA, 25 bp, Homo sapien
catcaactgttaatttccggctctc

SEQ ID NO: 5498382 - DNA, 25 bp, Homo sapien
ttccggctctctatctcaatgtttt

SEQ ID NO: 5498383 - DNA, 25 bp, Homo sapien
gtttttcaactggccatcttcctca

SEQ ID NO: 5498384 - DNA, 25 bp, Homo sapien
ccccaatgggtttgttgtgataggc

SEQ ID NO: 5498385 - DNA, 25 bp, Homo sapien
tggcctcccagtgttacaggaaaga

SEQ ID NO: 5498386 - DNA, 25 bp, Homo sapien
tcagacaaccctgtggcttgcttta

SEQ ID NO: 5498387 - DNA, 25 bp, Homo sapien
agaatgaacagaggtcgtacctgtc

SEQ ID NO: 5498388 - DNA, 25 bp, Homo sapien
ttgagtaattccatgtcatccacac

SEQ ID NO: 5498389 - DNA, 25 bp, Homo sapien
agatcattttgagtaattccatgtc

SEQ ID NO: 5498390 - DNA, 25 bp, Homo sapien
aacagaggtcgtacctgtcaccatc

SEQ ID NO: 5498391 - DNA, 25 bp, Homo sapien
ctcccagtgttacaggaaagaggtc

SEQ ID NO: 5498392 - DNA, 25 bp, Homo sapien
tccttcagacaaccctgtggcttgc

SEQ ID NO: 5498393 - DNA, 25 bp, Homo sapien
atgtcgaaacaaatgaacctagatc

SEQ ID NO: 5498394 - DNA, 25 bp, Homo sapien
gctttataaggtatgtcgaaacaaa

SEQ ID NO: 5498395 - DNA, 25 bp, Homo sapien
taaggtatgtcgaaacaaatgaacc

SEQ ID NO: 5498396 - DNA, 25 bp, Homo sapien
cgtcccggaggtgcgtcccacggcg

SEQ ID NO: 5498397 - DNA, 25 bp, Homo sapien
cgccgtgggacgcacctccgggacg

SEQ ID NO: 5498398 - DNA, 25 bp, Homo sapien
gcctgcctcgattcgcccctgtggt

SEQ ID NO: 5498399 - DNA, 25 bp, Homo sapien
ccactcctgttaaggccgaggtgtc

SEQ ID NO: 5498400 - DNA, 25 bp, Homo sapien
cgatgactctccagctgagcctgag

SEQ ID NO: 5498401 - DNA, 25 bp, Homo sapien
cgattcgcccctgtggtcaccactc

SEQ ID NO: 5498402 - DNA, 25 bp, Homo sapien
gcctcgattcgcccctgtggtcacc

SEQ ID NO: 5498403 - DNA, 25 bp, Homo sapien
ctgccgatgactctccagctgagcc

SEQ ID NO: 5498404 - DNA, 25 bp, Homo sapien
ctcctcctgccgatgactctccagc

SEQ ID NO: 5498405 - DNA, 25 bp, Homo sapien
ctcagcctgcctcgattcgcccctg

SEQ ID NO: 5498406 - DNA, 25 bp, Homo sapien
ctcctgccgatgactctccagctga

SEQ ID NO: 5498407 - DNA, 25 bp, Homo sapien
tcaccactcctgttaaggccgaggt

SEQ ID NO: 5498408 - DNA, 25 bp, Homo sapien
ggtcaccactcctgttaaggccgag

SEQ ID NO: 5498409 - DNA, 25 bp, Homo sapien
agtatcactgcggccaagacctcaa

SEQ ID NO: 5498410 - DNA, 25 bp, Homo sapien
agctccttatacctgggcccacgtc

SEQ ID NO: 5498411 - DNA, 25 bp, Homo sapien
actatgcctcggtggtgtttgattc

SEQ ID NO: 5498412 - DNA, 25 bp, Homo sapien
aacgtcaatgacacccgcaagtatc

SEQ ID NO: 5498413 - DNA, 25 bp, Homo sapien
atagcttgctcagaggccttcggga

SEQ ID NO: 5498414 - DNA, 25 bp, Homo sapien
ctaccctgtttgcagtgggtgccac

SEQ ID NO: 5498415 - DNA, 25 bp, Homo sapien
aggaggaaccacgattcagattaca

SEQ ID NO: 5498416 - DNA, 25 bp, Homo sapien
ctaacaccaacaggatagcttgctc

SEQ ID NO: 5498417 - DNA, 25 bp, Homo sapien
gtcctgccttgccatcgagcttctc

SEQ ID NO: 5498418 - DNA, 25 bp, Homo sapien
tggtgaactcacagctcccgctgct

SEQ ID NO: 5498419 - DNA, 25 bp, Homo sapien
ccagggaagaacttcactatgcctc

SEQ ID NO: 5498420 - DNA, 25 bp, Homo sapien
gtcgacgtagagacctgagcacgtc

SEQ ID NO: 5498421 - DNA, 25 bp, Homo sapien
gacgtgctcaggtctctacgtcgac

SEQ ID NO: 5498422 - DNA, 25 bp, Homo sapien
ggggcacaggcataataaactgccg

SEQ ID NO: 5498423 - DNA, 25 bp, Homo sapien
gcacaggcataataaactgccggat

SEQ ID NO: 5498424 - DNA, 25 bp, Homo sapien
aggggcacaggcataataaactgcc

SEQ ID NO: 5498425 - DNA, 25 bp, Homo sapien
cataataaactgccggatattcttc

SEQ ID NO: 5498426 - DNA, 25 bp, Homo sapien
acaggcataataaactgccggatat

SEQ ID NO: 5498427 - DNA, 25 bp, Homo sapien
gggcacaggcataataaactgccgg

SEQ ID NO: 5498428 - DNA, 25 bp, Homo sapien
actgccggatattcttcaggaaggt

SEQ ID NO: 5498429 - DNA, 25 bp, Homo sapien
aggcataataaactgccggatattc

SEQ ID NO: 5498430 - DNA, 25 bp, Homo sapien
aaactgccggatattcttcaggaag

SEQ ID NO: 5498431 - DNA, 25 bp, Homo sapien
ggcacaggcataataaactgccgga

SEQ ID NO: 5498432 - DNA, 25 bp, Homo sapien
aataaactgccggatattcttcagg

SEQ ID NO: 5498433 - DNA, 25 bp, Homo sapien
tggttaacacaacccaaagaacgag

SEQ ID NO: 5498434 - DNA, 25 bp, Homo sapien
ctcgttctttgggttgtgttaacca

SEQ ID NO: 5498435 - DNA, 25 bp, Homo sapien
ctgaagctccacaactttggcctaa

SEQ ID NO: 5498436 - DNA, 25 bp, Homo sapien
gcagtccagtccacaccttcagctt

SEQ ID NO: 5498437 - DNA, 25 bp, Homo sapien
cacaactttggcctaatcatctctc

SEQ ID NO: 5498438 - DNA, 25 bp, Homo sapien
caaaccccatactgaaaaacacagg

SEQ ID NO: 5498439 - DNA, 25 bp, Homo sapien
aatcatctctctcaggggttctcct

SEQ ID NO: 5498440 - DNA, 25 bp, Homo sapien
agtcaaccccagtgtgaacaatgtc

SEQ ID NO: 5498441 - DNA, 25 bp, Homo sapien
cccagtgtgaacaatgtcaagtttc

SEQ ID NO: 5498442 - DNA, 25 bp, Homo sapien
gtccacaccttcagcttcaaacccc

SEQ ID NO: 5498443 - DNA, 25 bp, Homo sapien
ctctctcaggggttctcctctcccc

SEQ ID NO: 5498444 - DNA, 25 bp, Homo sapien
gaggaaacaagacaagtcaacccca

SEQ ID NO: 5498445 - DNA, 25 bp, Homo sapien
aagacaagtcaaccccagtgtgaac

SEQ ID NO: 5498446 - DNA, 25 bp, Homo sapien
gagagatgattaggccaaagttgtg

SEQ ID NO: 5498447 - DNA, 25 bp, Homo sapien
ttttcagtatggggtttgaagctga

SEQ ID NO: 5498448 - DNA, 25 bp, Homo sapien
gagcatcaagcaagatatttagatt

SEQ ID NO: 5498449 - DNA, 25 bp, Homo sapien
gattaggccaaagttgtggagcttc

SEQ ID NO: 5498450 - DNA, 25 bp, Homo sapien
gtggactggactgctcagagcatca

SEQ ID NO: 5498451 - DNA, 25 bp, Homo sapien
actggggttgacttgtcttgtttcc

SEQ ID NO: 5498452 - DNA, 25 bp, Homo sapien
gctgaccccagccctgtgtttttca

SEQ ID NO: 5498453 - DNA, 25 bp, Homo sapien
agaacccctgagagagatgattagg

SEQ ID NO: 5498454 - DNA, 25 bp, Homo sapien
ttaggccaaagttgtggagcttcag

SEQ ID NO: 5498455 - DNA, 25 bp, Homo sapien
ttcagtatggggtttgaagctgaag

SEQ ID NO: 5498456 - DNA, 25 bp, Homo sapien
ttcacactggggttgacttgtcttg

SEQ ID NO: 5498457 - DNA, 25 bp, Homo sapien
aatggctttgttgttagaaagacct

SEQ ID NO: 5498458 - DNA, 25 bp, Homo sapien
caaaacaagtagaaaggacaaataa

SEQ ID NO: 5498459 - DNA, 25 bp, Homo sapien
aagacctaaaatgaaggaattctac

SEQ ID NO: 5498460 - DNA, 25 bp, Homo sapien
aggagaaaattaatagctgtaaatg

SEQ ID NO: 5498461 - DNA, 25 bp, Homo sapien
attatgtaagagtagaaatgagaag

SEQ ID NO: 5498462 - DNA, 25 bp, Homo sapien
tgcaaacctgattaaagaaaggaga

SEQ ID NO: 5498463 - DNA, 25 bp, Homo sapien
ctaaatgctagaaattaagaaaccc

SEQ ID NO: 5498464 - DNA, 25 bp, Homo sapien
caggtacttgacaatgaagaaaaat

SEQ ID NO: 5498465 - DNA, 25 bp, Homo sapien
tatgtccaaaatcaatcaggtactt

SEQ ID NO: 5498466 - DNA, 25 bp, Homo sapien
taaaaatgataaatgtagactcctt

SEQ ID NO: 5498467 - DNA, 25 bp, Homo sapien
ccagctaaagctgtactcaggagaa

SEQ ID NO: 5498468 - DNA, 25 bp, Homo sapien
ggaatggacagaccacaagttacgc

SEQ ID NO: 5498469 - DNA, 25 bp, Homo sapien
ccgttcgaccgacagaactgctcca

SEQ ID NO: 5498470 - DNA, 25 bp, Homo sapien
cttgtagatgtggatgaaaagaatc

SEQ ID NO: 5498471 - DNA, 25 bp, Homo sapien
tggatcctggacttatgatggcacc

SEQ ID NO: 5498472 - DNA, 25 bp, Homo sapien
ttcttcgataacggagaatgggaaa

SEQ ID NO: 5498473 - DNA, 25 bp, Homo sapien
gctgatgacaaccaatgtgtggctc

SEQ ID NO: 5498474 - DNA, 25 bp, Homo sapien
atcaaacggaactgttgtctggacc

SEQ ID NO: 5498475 - DNA, 25 bp, Homo sapien
gaaggctccctgatgaccaaggtca

SEQ ID NO: 5498476 - DNA, 25 bp, Homo sapien
tgaaaatgtcgacagaaaagacttc

SEQ ID NO: 5498477 - DNA, 25 bp, Homo sapien
tgatggcaccatggttgacctcatt

SEQ ID NO: 5498478 - DNA, 25 bp, Homo sapien
tcctgcaccatggacgtcacgtttt

SEQ ID NO: 5498479 - DNA, 25 bp, Homo sapien
ggtgccatgctatcgaaaagaactc

SEQ ID NO: 5498480 - DNA, 25 bp, Homo sapien
atcaggaacattgtatgcagattct

SEQ ID NO: 5498481 - DNA, 25 bp, Homo sapien
ggcactacgcacctgttctggactc

SEQ ID NO: 5498482 - DNA, 25 bp, Homo sapien
ccatcaaaattgaggggaaaccata

SEQ ID NO: 5498483 - DNA, 25 bp, Homo sapien
cgcgggcccacgccacttattccat

SEQ ID NO: 5498484 - DNA, 25 bp, Homo sapien
cttttaccaaggatatgctgcagac

SEQ ID NO: 5498485 - DNA, 25 bp, Homo sapien
atgtatgcttatatgggctccacgg

SEQ ID NO: 5498486 - DNA, 25 bp, Homo sapien
aaaatcagttgtggcactacgcacc

SEQ ID NO: 5498487 - DNA, 25 bp, Homo sapien
ggcagttgcagttgagaaagttttc

SEQ ID NO: 5498488 - DNA, 25 bp, Homo sapien
caaatcagacataaattcaggtgcc

SEQ ID NO: 5498489 - DNA, 25 bp, Homo sapien
ctggactcagaggattactgcagtt

SEQ ID NO: 5498490 - DNA, 25 bp, Homo sapien
aaataagctaggaacttgaggacat

SEQ ID NO: 5498491 - DNA, 25 bp, Homo sapien
attgcacaaaaatcaaaaaggcttg

SEQ ID NO: 5498492 - DNA, 25 bp, Homo sapien
attagaagaaagtttatggatccat

SEQ ID NO: 5498493 - DNA, 25 bp, Homo sapien
tatctttagtgcctggaagaagttt

SEQ ID NO: 5498494 - DNA, 25 bp, Homo sapien
ttgaggacatcccaaagccatcttc

SEQ ID NO: 5498495 - DNA, 25 bp, Homo sapien
aaaggcttgagaacttcttgcagga

SEQ ID NO: 5498496 - DNA, 25 bp, Homo sapien
ttccacaggaatgatatcttgctta

SEQ ID NO: 5498497 - DNA, 25 bp, Homo sapien
taattggcactaagtcctaatgact

SEQ ID NO: 5498498 - DNA, 25 bp, Homo sapien
gaatgaacaaataaacgagtggtac

SEQ ID NO: 5498499 - DNA, 25 bp, Homo sapien
aatgcctaaaacatgatagtcctcc

SEQ ID NO: 5498500 - DNA, 25 bp, Homo sapien
aaaactagctggataaacaaatgaa

SEQ ID NO: 5498501 - DNA, 25 bp, Homo sapien
ggttgatgcaaagtcggtgctcaat

SEQ ID NO: 5498502 - DNA, 25 bp, Homo sapien
aatataacttgaggacgacgccaaa

SEQ ID NO: 5498503 - DNA, 25 bp, Homo sapien
cctagaatagtaagttggccaaagc

SEQ ID NO: 5498504 - DNA, 25 bp, Homo sapien
cgggaggacacgattctaatataac

SEQ ID NO: 5498505 - DNA, 25 bp, Homo sapien
atcagggcctcgcaaatagaaagta

SEQ ID NO: 5498506 - DNA, 25 bp, Homo sapien
aaattgtgactgaatgaaggaatca

SEQ ID NO: 5498507 - DNA, 25 bp, Homo sapien
gttatcttcagcaagaggttgatgc

SEQ ID NO: 5498508 - DNA, 25 bp, Homo sapien
ggagtacaatggcgctatcttatct

SEQ ID NO: 5498509 - DNA, 25 bp, Homo sapien
cgcctggccaggacagtacttttat

SEQ ID NO: 5498510 - DNA, 25 bp, Homo sapien
tactatataagctctgagggcaggg

SEQ ID NO: 5498511 - DNA, 25 bp, Homo sapien
gggcagggctgtatattgtcagcac

SEQ ID NO: 5498512 - DNA, 25 bp, Homo sapien
tttgaacggtataagacttaattta

SEQ ID NO: 5498513 - DNA, 25 bp, Homo sapien
taaattaagtcttataccgttcaaa

SEQ ID NO: 5498514 - DNA, 25 bp, Homo sapien
cccatttaatccttgcaaagagggc

SEQ ID NO: 5498515 - DNA, 25 bp, Homo sapien
gagggcaagaactgttattagaccc

SEQ ID NO: 5498516 - DNA, 25 bp, Homo sapien
cagtctttaccttggtgagacattg

SEQ ID NO: 5498517 - DNA, 25 bp, Homo sapien
tcgtgaccaaaatgttcgtggccac

SEQ ID NO: 5498518 - DNA, 25 bp, Homo sapien
aaaatgttcgtggccactgaaggga

SEQ ID NO: 5498519 - DNA, 25 bp, Homo sapien
cctggcccctcatatgatttggccc

SEQ ID NO: 5498520 - DNA, 25 bp, Homo sapien
cacctggactccatctcgtgaccaa

SEQ ID NO: 5498521 - DNA, 25 bp, Homo sapien
atctcgtgaccaaaatgttcgtggc

SEQ ID NO: 5498522 - DNA, 25 bp, Homo sapien
agaactgttattagacccactttac

SEQ ID NO: 5498523 - DNA, 25 bp, Homo sapien
gagggcccagtctttaccttggtga

SEQ ID NO: 5498524 - DNA, 25 bp, Homo sapien
gacgacacctggactccatctcgtg

SEQ ID NO: 5498525 - DNA, 25 bp, Homo sapien
gagaaaaagtgaacccataatatac

SEQ ID NO: 5498526 - DNA, 25 bp, Homo sapien
atttgcgaggccctgataaaagtac

SEQ ID NO: 5498527 - DNA, 25 bp, Homo sapien
ccctgataaaagtactgtcctggcc

SEQ ID NO: 5498528 - DNA, 25 bp, Homo sapien
aagataagatagcgccattgtactc

SEQ ID NO: 5498529 - DNA, 25 bp, Homo sapien
cctcccggctttggccaacttacta

SEQ ID NO: 5498530 - DNA, 25 bp, Homo sapien
cagagcttatatagtagaggagaaa

SEQ ID NO: 5498531 - DNA, 25 bp, Homo sapien
tgagcaccgactttgcatcaacctc

SEQ ID NO: 5498532 - DNA, 25 bp, Homo sapien
agtgctgacaatatacagccctgcc

SEQ ID NO: 5498533 - DNA, 25 bp, Homo sapien
ctcttgctgaagataacagtgctga

SEQ ID NO: 5498534 - DNA, 25 bp, Homo sapien
tatacagtcagtagcgagtatttac

SEQ ID NO: 5498535 - DNA, 25 bp, Homo sapien
aagtactttctatttgcgaggccct

SEQ ID NO: 5498536 - DNA, 25 bp, Homo sapien
ggcatctcggtcatggagctgtccg

SEQ ID NO: 5498537 - DNA, 25 bp, Homo sapien
ctcgctagtgctggacctgaagcag

SEQ ID NO: 5498538 - DNA, 25 bp, Homo sapien
ctcctggctgactttgctggtggtg

SEQ ID NO: 5498539 - DNA, 25 bp, Homo sapien
gtcatggagaaactccagctgggcc

SEQ ID NO: 5498540 - DNA, 25 bp, Homo sapien
cagtcaggaagcttctgccggttag

SEQ ID NO: 5498541 - DNA, 25 bp, Homo sapien
gggcccgttctgtgctatggtcctg

SEQ ID NO: 5498542 - DNA, 25 bp, Homo sapien
tggagcccttccgccgcggtgtcat

SEQ ID NO: 5498543 - DNA, 25 bp, Homo sapien
ggtggccttatgtgtgcactgggca

SEQ ID NO: 5498544 - DNA, 25 bp, Homo sapien
tgccggttagctggccacgatatca

SEQ ID NO: 5498545 - DNA, 25 bp, Homo sapien
gtgagaatccgtatgccccgctgaa

SEQ ID NO: 5498546 - DNA, 25 bp, Homo sapien
cgcacacgcactgacaagggtcagg

SEQ ID NO: 5498547 - DNA, 25 bp, Homo sapien
taaagaaggactctaaaagtagaaa

SEQ ID NO: 5498548 - DNA, 25 bp, Homo sapien
tttctacttttagagtccttcttta

SEQ ID NO: 5498549 - DNA, 25 bp, Homo sapien
cttaatggcacttctactagggagc

SEQ ID NO: 5498550 - DNA, 25 bp, Homo sapien
cctgtaagggtataactgaggaaac

SEQ ID NO: 5498551 - DNA, 25 bp, Homo sapien
atgactggaatagcattgcacgatt

SEQ ID NO: 5498552 - DNA, 25 bp, Homo sapien
ccaaaaggctctggaccgctctctt

SEQ ID NO: 5498553 - DNA, 25 bp, Homo sapien
ccacatcaaggagtgcaagtggaag

SEQ ID NO: 5498554 - DNA, 25 bp, Homo sapien
tggaaggtgatggcttcagccatgc

SEQ ID NO: 5498555 - DNA, 25 bp, Homo sapien
gattacaaggtagaaataaccgcac

SEQ ID NO: 5498556 - DNA, 25 bp, Homo sapien
gcaaggaccatcccggcacgtttac

SEQ ID NO: 5498557 - DNA, 25 bp, Homo sapien
tgtaggacttcggttggagttgtcc

SEQ ID NO: 5498558 - DNA, 25 bp, Homo sapien
ataaccgcacttgggtagcagagtt

SEQ ID NO: 5498559 - DNA, 25 bp, Homo sapien
accaccaagggaagctcaattagta

SEQ ID NO: 5498560 - DNA, 25 bp, Homo sapien
gagctgatgttaatgcccaggacaa

SEQ ID NO: 5498561 - DNA, 25 bp, Homo sapien
cttatgggtagtaaaagttggattc

SEQ ID NO: 5498562 - DNA, 25 bp, Homo sapien
acctggcagcaggctataataacct

SEQ ID NO: 5498563 - DNA, 25 bp, Homo sapien
agagacacccagggcagaaattcaa

SEQ ID NO: 5498564 - DNA, 25 bp, Homo sapien
ggatctggcaacagctgacgatatc

SEQ ID NO: 5498565 - DNA, 25 bp, Homo sapien
aaatgcaacagataagtgggcgttt

SEQ ID NO: 5498566 - DNA, 25 bp, Homo sapien
ccctcctcctagcgcatggtgcaga

SEQ ID NO: 5498567 - DNA, 25 bp, Homo sapien
caggacaagggtggtttaattcctc

SEQ ID NO: 5498568 - DNA, 25 bp, Homo sapien
atgcaagcatgttgacatagcggct

SEQ ID NO: 5498569 - DNA, 25 bp, Homo sapien
gagaatatcaactgcagagacaccc

SEQ ID NO: 5498570 - DNA, 25 bp, Homo sapien
atgagaccatgcatgtggaaattgc

SEQ ID NO: 5498571 - DNA, 25 bp, Homo sapien
taaccaggaaagttggtaaccagca

SEQ ID NO: 5498572 - DNA, 25 bp, Homo sapien
tggtctgaaagtaacaagtgaattt

SEQ ID NO: 5498573 - DNA, 25 bp, Homo sapien
aaaactgtactcaggagtttgtttg

SEQ ID NO: 5498574 - DNA, 25 bp, Homo sapien
tcagtcttatggaagaatcttgatt

SEQ ID NO: 5498575 - DNA, 25 bp, Homo sapien
gttggtaaccagcacttcagtctta

SEQ ID NO: 5498576 - DNA, 25 bp, Homo sapien
agttccagacttagagagaaaatgc

SEQ ID NO: 5498577 - DNA, 25 bp, Homo sapien
cccacaacaggccctggtgggtgat

SEQ ID NO: 5498578 - DNA, 25 bp, Homo sapien
aggagtgccaagatcgcatgatttg

SEQ ID NO: 5498579 - DNA, 25 bp, Homo sapien
agagagaaaatgcttttgctgaatg

SEQ ID NO: 5498580 - DNA, 25 bp, Homo sapien
agatcgcatgatttgtgtaaaacac

SEQ ID NO: 5498581 - DNA, 25 bp, Homo sapien
tgagagctcagcacaaaaactgtac

SEQ ID NO: 5498582 - DNA, 25 bp, Homo sapien
ccaaaacactggacaccccgattta

SEQ ID NO: 5498583 - DNA, 25 bp, Homo sapien
ttcctcagctactaagacaactctc

SEQ ID NO: 5498584 - DNA, 25 bp, Homo sapien
gaagccaactctgagccggaatgca

SEQ ID NO: 5498585 - DNA, 25 bp, Homo sapien
tacccgctgttaagggtgaagccaa

SEQ ID NO: 5498586 - DNA, 25 bp, Homo sapien
tccacagagtcccagtacccgctgt

SEQ ID NO: 5498587 - DNA, 25 bp, Homo sapien
atcttacgtacgacaaggaagctga

SEQ ID NO: 5498588 - DNA, 25 bp, Homo sapien
ctggtggcgtgtgtcatcaatctta

SEQ ID NO: 5498589 - DNA, 25 bp, Homo sapien
ttcatcaaaagacctagaacgcctt

SEQ ID NO: 5498590 - DNA, 25 bp, Homo sapien
tcacatcaggcaagaaattagctat

SEQ ID NO: 5498591 - DNA, 25 bp, Homo sapien
taagtaaagttgtccatgtgtccac

SEQ ID NO: 5498592 - DNA, 25 bp, Homo sapien
gtgtgaaaagtggtgcccacccact

SEQ ID NO: 5498593 - DNA, 25 bp, Homo sapien
gtgggtaaacttctggtgactcatc

SEQ ID NO: 5498594 - DNA, 25 bp, Homo sapien
caaatactgatggaaacactggtgg

SEQ ID NO: 5498595 - DNA, 25 bp, Homo sapien
tgggtatataccttggataattcat

SEQ ID NO: 5498596 - DNA, 25 bp, Homo sapien
gaaacactggtggcacacattgagg

SEQ ID NO: 5498597 - DNA, 25 bp, Homo sapien
tggtggcacacattgaggccgtatt

SEQ ID NO: 5498598 - DNA, 25 bp, Homo sapien
gtgagaaccctgactgaattattgt

SEQ ID NO: 5498599 - DNA, 25 bp, Homo sapien
cctgactgaattattgtgggtaaac

SEQ ID NO: 5498600 - DNA, 25 bp, Homo sapien
ccatgccagtttgagtaaacttgac

SEQ ID NO: 5498601 - DNA, 25 bp, Homo sapien
tgaggccgtatttctggattaaacc

SEQ ID NO: 5498602 - DNA, 25 bp, Homo sapien
ggataattcattcaaagaagatcac

SEQ ID NO: 5498603 - DNA, 25 bp, Homo sapien
gtaaacttgacaagagtgagaaccc

SEQ ID NO: 5498604 - DNA, 25 bp, Homo sapien
aactattggactaaagaaaagaaca

SEQ ID NO: 5498605 - DNA, 25 bp, Homo sapien
aaactatcagtaggaaaagcagatt

SEQ ID NO: 5498606 - DNA, 25 bp, Homo sapien
aatctggataggcttttgtcaatag

SEQ ID NO: 5498607 - DNA, 25 bp, Homo sapien
taaatgagaaatgagttataactat

SEQ ID NO: 5498608 - DNA, 25 bp, Homo sapien
aataatgattagaagattacatatc

SEQ ID NO: 5498609 - DNA, 25 bp, Homo sapien
tgataagtagtaaatctggataggc

SEQ ID NO: 5498610 - DNA, 25 bp, Homo sapien
atcttacaagatagaactaaaacta

SEQ ID NO: 5498611 - DNA, 25 bp, Homo sapien
tagtgttctggcaaattctggaaag

SEQ ID NO: 5498612 - DNA, 25 bp, Homo sapien
aataaaagcaaagattaatgaaagc

SEQ ID NO: 5498613 - DNA, 25 bp, Homo sapien
ataactatagatatgagagactctt

SEQ ID NO: 5498614 - DNA, 25 bp, Homo sapien
ttattagagcatgagtaacataaaa

SEQ ID NO: 5498615 - DNA, 25 bp, Homo sapien
tccagaggtggttcttgctaaggag

SEQ ID NO: 5498616 - DNA, 25 bp, Homo sapien
caagagtcacccttctacagaggac

SEQ ID NO: 5498617 - DNA, 25 bp, Homo sapien
cacgaggaagcaatgatcaagttcc

SEQ ID NO: 5498618 - DNA, 25 bp, Homo sapien
gttacgcaagtatcgccatggcgac

SEQ ID NO: 5498619 - DNA, 25 bp, Homo sapien
cctcagtgagggataccatcctttc

SEQ ID NO: 5498620 - DNA, 25 bp, Homo sapien
acagaggactcctagacttcccatc

SEQ ID NO: 5498621 - DNA, 25 bp, Homo sapien
agttccagatgatcctcagtgaggg

SEQ ID NO: 5498622 - DNA, 25 bp, Homo sapien
ccatggcgacagattatgactgctg

SEQ ID NO: 5498623 - DNA, 25 bp, Homo sapien
aggaggctggaatttgttacgcaag

SEQ ID NO: 5498624 - DNA, 25 bp, Homo sapien
caacatgaccacagttccagaggtg

SEQ ID NO: 5498625 - DNA, 25 bp, Homo sapien
acagattatgactgctggaaggagc

SEQ ID NO: 5498626 - DNA, 25 bp, Homo sapien
gggcagagagacttgtacacatgct

SEQ ID NO: 5498627 - DNA, 25 bp, Homo sapien
ggtaccattcacaaacagagacatc

SEQ ID NO: 5498628 - DNA, 25 bp, Homo sapien
ttgccttcttgaagtggtggaggtc

SEQ ID NO: 5498629 - DNA, 25 bp, Homo sapien
ggtggaggtccaggtatttctgcca

SEQ ID NO: 5498630 - DNA, 25 bp, Homo sapien
tccaggtatttctgccagccattcc

SEQ ID NO: 5498631 - DNA, 25 bp, Homo sapien
attcctggtctggttctggttgggg

SEQ ID NO: 5498632 - DNA, 25 bp, Homo sapien
tcacaaacagagacatcacctcctt

SEQ ID NO: 5498633 - DNA, 25 bp, Homo sapien
aaaggggcagtcctgtagttcttga

SEQ ID NO: 5498634 - DNA, 25 bp, Homo sapien
ctgccagccattcctggtctggttc

SEQ ID NO: 5498635 - DNA, 25 bp, Homo sapien
acacatgctggtaccattcacaaac

SEQ ID NO: 5498636 - DNA, 25 bp, Homo sapien
atcacctcctttagcagtcattgcc

SEQ ID NO: 5498637 - DNA, 25 bp, Homo sapien
ctgtatgctttcggatgaggttctc

SEQ ID NO: 5498638 - DNA, 25 bp, Homo sapien
cagaacctgtatgctttcggatgag

SEQ ID NO: 5498639 - DNA, 25 bp, Homo sapien
tggcttccacaatattcacacgttc

SEQ ID NO: 5498640 - DNA, 25 bp, Homo sapien
gacggtgatgtcaaaaaagacgacg

SEQ ID NO: 5498641 - DNA, 25 bp, Homo sapien
gctattcctgtacccaaagtgctcc

SEQ ID NO: 5498642 - DNA, 25 bp, Homo sapien
gtacccaaagtgctccatggcttcc

SEQ ID NO: 5498643 - DNA, 25 bp, Homo sapien
atgtcaaaaaagacgacggagttga

SEQ ID NO: 5498644 - DNA, 25 bp, Homo sapien
ggcttgccgtcgacggtgatgtcaa

SEQ ID NO: 5498645 - DNA, 25 bp, Homo sapien
cagagcacgaaagttttccgctgtc

SEQ ID NO: 5498646 - DNA, 25 bp, Homo sapien
cttgctggtcttgctattcctgtac

SEQ ID NO: 5498647 - DNA, 25 bp, Homo sapien
ccgctgtctttagaatcttgtctgc

SEQ ID NO: 5498648 - DNA, 25 bp, Homo sapien
ggcaatgagggctctcttttggttc

SEQ ID NO: 5498649 - DNA, 25 bp, Homo sapien
ttggcaatgagggctctcttttggt

SEQ ID NO: 5498650 - DNA, 25 bp, Homo sapien
cttggcaatgagggctctcttttgg

SEQ ID NO: 5498651 - DNA, 25 bp, Homo sapien
catatggctagccagctttccacca

SEQ ID NO: 5498652 - DNA, 25 bp, Homo sapien
catgatgttttggttactgtagcct

SEQ ID NO: 5498653 - DNA, 25 bp, Homo sapien
tggcaatgagggctctcttttggtt

SEQ ID NO: 5498654 - DNA, 25 bp, Homo sapien
tatggctagccagctttccaccacc

SEQ ID NO: 5498655 - DNA, 25 bp, Homo sapien
ttcacgagattgattcttcctccta

SEQ ID NO: 5498656 - DNA, 25 bp, Homo sapien
gctagccagctttccaccaccattt

SEQ ID NO: 5498657 - DNA, 25 bp, Homo sapien
acgagattgattcttcctcctaccc

SEQ ID NO: 5498658 - DNA, 25 bp, Homo sapien
gacttggcaatgagggctctctttt

SEQ ID NO: 5498659 - DNA, 25 bp, Homo sapien
cctgaccatctctgggctccaggct

SEQ ID NO: 5498660 - DNA, 25 bp, Homo sapien
tctggctccaagtctggcaacacgg

SEQ ID NO: 5498661 - DNA, 25 bp, Homo sapien
caccatctcctgcactggaaccagc

SEQ ID NO: 5498662 - DNA, 25 bp, Homo sapien
ccaggcaaagcccccaaactcatga

SEQ ID NO: 5498663 - DNA, 25 bp, Homo sapien
gccctcaggggtttctaatcgcttc

SEQ ID NO: 5498664 - DNA, 25 bp, Homo sapien
tggcaacacggcctccctgaccatc

SEQ ID NO: 5498665 - DNA, 25 bp, Homo sapien
tcctggacagtcgatcaccatctcc

SEQ ID NO: 5498666 - DNA, 25 bp, Homo sapien
tcagtaatcggccctcaggggtttc

SEQ ID NO: 5498667 - DNA, 25 bp, Homo sapien
tgcactggaaccagcagtgacgttg

SEQ ID NO: 5498668 - DNA, 25 bp, Homo sapien
ctaatcgcttctctggctccaagtc

SEQ ID NO: 5498669 - DNA, 25 bp, Homo sapien
gggtctcctggacagtcgatcacca

SEQ ID NO: 5498670 - DNA, 25 bp, Homo sapien
gtcttaggtaagaaggatgaatcga

SEQ ID NO: 5498671 - DNA, 25 bp, Homo sapien
aatgaggccaccaaactctgtcccg

SEQ ID NO: 5498672 - DNA, 25 bp, Homo sapien
aatgtcgaaatctatgttgcagtcc

SEQ ID NO: 5498673 - DNA, 25 bp, Homo sapien
tctggtaaatgaggccaccaaactc

SEQ ID NO: 5498674 - DNA, 25 bp, Homo sapien
gctgtccaggtgagattgacagcag

SEQ ID NO: 5498675 - DNA, 25 bp, Homo sapien
ttgatacctggctttagggtctgag

SEQ ID NO: 5498676 - DNA, 25 bp, Homo sapien
atctatgttgcagtccagggtaatg

SEQ ID NO: 5498677 - DNA, 25 bp, Homo sapien
ctgggtcactccggactttgcagtc

SEQ ID NO: 5498678 - DNA, 25 bp, Homo sapien
caggcttcagggtcaatcaaatact

SEQ ID NO: 5498679 - DNA, 25 bp, Homo sapien
tggctgctatttcgaaacgcgtgtt

SEQ ID NO: 5498680 - DNA, 25 bp, Homo sapien
gcagtccagggtaatgtgctcctgc

SEQ ID NO: 5498681 - DNA, 25 bp, Homo sapien
aattcatctggtagccggccagcca

SEQ ID NO: 5498682 - DNA, 25 bp, Homo sapien
ttgcagtctcaaaattcatctggta

SEQ ID NO: 5498683 - DNA, 25 bp, Homo sapien
cgcgtgttactgtttcctgctgtcc

SEQ ID NO: 5498684 - DNA, 25 bp, Homo sapien
gcttcagtccacgtgcaagctgatc

SEQ ID NO: 5498685 - DNA, 25 bp, Homo sapien
cagtccacgtgcaagctgatcttcc

SEQ ID NO: 5498686 - DNA, 25 bp, Homo sapien
tgacgttcttgccatccagaagagc

SEQ ID NO: 5498687 - DNA, 25 bp, Homo sapien
gttcttgccatccagaagagctgac

SEQ ID NO: 5498688 - DNA, 25 bp, Homo sapien
gaaggatgaatcgaaggtcagcttc

SEQ ID NO: 5498689 - DNA, 25 bp, Homo sapien
ttgccatccagaagagctgacagtg

SEQ ID NO: 5498690 - DNA, 25 bp, Homo sapien
caccagcattgacgttcttgccatc

SEQ ID NO: 5498691 - DNA, 25 bp, Homo sapien
cacgtgcaagctgatcttccacagt

SEQ ID NO: 5498692 - DNA, 25 bp, Homo sapien
gaagacagcaaagccgttctcttgc

SEQ ID NO: 5498693 - DNA, 25 bp, Homo sapien
gccgagctggtgtccagtaacgttt

SEQ ID NO: 5498694 - DNA, 25 bp, Homo sapien
ggtgagagagcacttcagaaccata

SEQ ID NO: 5498695 - DNA, 25 bp, Homo sapien
gagaccggccttttctggcggtgcc

SEQ ID NO: 5498696 - DNA, 25 bp, Homo sapien
ccgcggagcagttctgtgcgttttt

SEQ ID NO: 5498697 - DNA, 25 bp, Homo sapien
cagaaccataggtttgccggaagac

SEQ ID NO: 5498698 - DNA, 25 bp, Homo sapien
ggctgaccgtgctgatgtgtgccaa

SEQ ID NO: 5498699 - DNA, 25 bp, Homo sapien
agggctttcaaaggcatccagcacc

SEQ ID NO: 5498700 - DNA, 25 bp, Homo sapien
cccgtcgcctataaggcccagggga

SEQ ID NO: 5498701 - DNA, 25 bp, Homo sapien
ggtttacaacgctgatgagaccggc

SEQ ID NO: 5498702 - DNA, 25 bp, Homo sapien
gcggtgcctgccaaatcccactccg

SEQ ID NO: 5498703 - DNA, 25 bp, Homo sapien
gatctcccaattactttcggccctg

SEQ ID NO: 5498704 - DNA, 25 bp, Homo sapien
gctgcatccaatttggatacagggg

SEQ ID NO: 5498705 - DNA, 25 bp, Homo sapien
catcggcagcttccagcctgacgac

SEQ ID NO: 5498706 - DNA, 25 bp, Homo sapien
gcagcttccagcctgacgacgttgc

SEQ ID NO: 5498707 - DNA, 25 bp, Homo sapien
tcaccatcggcagcttccagcctga

SEQ ID NO: 5498708 - DNA, 25 bp, Homo sapien
actgtcaacactatgatgatctccc

SEQ ID NO: 5498709 - DNA, 25 bp, Homo sapien
gatctgggacagaatttactttcac

SEQ ID NO: 5498710 - DNA, 25 bp, Homo sapien
ccagcctgacgacgttgcaacatat

SEQ ID NO: 5498711 - DNA, 25 bp, Homo sapien
taaactcctgatctacgctgcatcc

SEQ ID NO: 5498712 - DNA, 25 bp, Homo sapien
cgagtcaggacattaccaactcttt

SEQ ID NO: 5498713 - DNA, 25 bp, Homo sapien
gcttccagcctgacgacgttgcaac

SEQ ID NO: 5498714 - DNA, 25 bp, Homo sapien
gatcagttactgtaaacaccacttc

SEQ ID NO: 5498715 - DNA, 25 bp, Homo sapien
ccatgttgcccctagactggtatga

SEQ ID NO: 5498716 - DNA, 25 bp, Homo sapien
gttgcccctagactggtatgaactc

SEQ ID NO: 5498717 - DNA, 25 bp, Homo sapien
acctagaccagcctgagtatttttc

SEQ ID NO: 5498718 - DNA, 25 bp, Homo sapien
cacttcacctagaccagcctgagta

SEQ ID NO: 5498719 - DNA, 25 bp, Homo sapien
cccctagactggtatgaactcctgg

SEQ ID NO: 5498720 - DNA, 25 bp, Homo sapien
gcagcggcgtgatcatgctattgca

SEQ ID NO: 5498721 - DNA, 25 bp, Homo sapien
ttgctagttgcaaaatgaacatatt

SEQ ID NO: 5498722 - DNA, 25 bp, Homo sapien
aaatctgtaactggtggtgatcagt

SEQ ID NO: 5498723 - DNA, 25 bp, Homo sapien
tcatgctattgcagcctcatctcct

SEQ ID NO: 5498724 - DNA, 25 bp, Homo sapien
taaacaccacttcacctagaccagc

SEQ ID NO: 5498725 - DNA, 25 bp, Homo sapien
aggtacaagaagaacatcaaggcct

SEQ ID NO: 5498726 - DNA, 25 bp, Homo sapien
tactcagggagactgttgcctactt

SEQ ID NO: 5498727 - DNA, 25 bp, Homo sapien
tttggagtctcgctgcagcacctcc

SEQ ID NO: 5498728 - DNA, 25 bp, Homo sapien
cctgtcccaccacgcctgctcctga

SEQ ID NO: 5498729 - DNA, 25 bp, Homo sapien
tcaaggccttgtacatcgtgcatcc

SEQ ID NO: 5498730 - DNA, 25 bp, Homo sapien
ggggatccctcgccaagtgctcaaa

SEQ ID NO: 5498731 - DNA, 25 bp, Homo sapien
gggaccctagcgtggcacctgtccc

SEQ ID NO: 5498732 - DNA, 25 bp, Homo sapien
ctcaccaccgagggcatcttccgga

SEQ ID NO: 5498733 - DNA, 25 bp, Homo sapien
tgcccaaccagcagtttggagtctc

SEQ ID NO: 5498734 - DNA, 25 bp, Homo sapien
tatgtgaattacctgagcgagctga

SEQ ID NO: 5498735 - DNA, 25 bp, Homo sapien
cagcttcaagttcgggcagaagatc

SEQ ID NO: 5498736 - DNA, 25 bp, Homo sapien
caattagcatacatggaaccaccat

SEQ ID NO: 5498737 - DNA, 25 bp, Homo sapien
ctccttgatgaagaaagcatgtttg

SEQ ID NO: 5498738 - DNA, 25 bp, Homo sapien
taggaaagcccatgatgatacgtca

SEQ ID NO: 5498739 - DNA, 25 bp, Homo sapien
ataggctctgctgacacattttttc

SEQ ID NO: 5498740 - DNA, 25 bp, Homo sapien
gatgatacgtcaaatgctggaccat

SEQ ID NO: 5498741 - DNA, 25 bp, Homo sapien
tttaggtctcacagcacaaactcct

SEQ ID NO: 5498742 - DNA, 25 bp, Homo sapien
gcatgtttgatcctgtcatggacac

SEQ ID NO: 5498743 - DNA, 25 bp, Homo sapien
tgtcatggacacaattagcatacat

SEQ ID NO: 5498744 - DNA, 25 bp, Homo sapien
gcatgccacgtggagattttggtgc

SEQ ID NO: 5498745 - DNA, 25 bp, Homo sapien
cttgaaatctacttggaggcatgcc

SEQ ID NO: 5498746 - DNA, 25 bp, Homo sapien
tattgtaggaaagcccatgatgata

SEQ ID NO: 5498747 - DNA, 25 bp, Homo sapien
tgcgggcacgtgactgcctcattca

SEQ ID NO: 5498748 - DNA, 25 bp, Homo sapien
atcccctcttgcgggcacgtgactg

SEQ ID NO: 5498749 - DNA, 25 bp, Homo sapien
ctgagcccgaagacggctccaatgt

SEQ ID NO: 5498750 - DNA, 25 bp, Homo sapien
tcagacttgctaaaataccgttcat

SEQ ID NO: 5498751 - DNA, 25 bp, Homo sapien
cttaggaggcatcttcagacttgct

SEQ ID NO: 5498752 - DNA, 25 bp, Homo sapien
aggcagcctcatacttcttgagccc

SEQ ID NO: 5498753 - DNA, 25 bp, Homo sapien
cgaagacggctccaatgtctccctc

SEQ ID NO: 5498754 - DNA, 25 bp, Homo sapien
atacttcttgagcccgtccactatc

SEQ ID NO: 5498755 - DNA, 25 bp, Homo sapien
ctggcttggggtgaactcttttcca

SEQ ID NO: 5498756 - DNA, 25 bp, Homo sapien
tgaactcttttccataggcagcctc

SEQ ID NO: 5498757 - DNA, 25 bp, Homo sapien
aagatcccctcttgcgggcacgtga

SEQ ID NO: 5498758 - DNA, 25 bp, Homo sapien
gagagagtgaaatctgtcccagatc

SEQ ID NO: 5498759 - DNA, 25 bp, Homo sapien
gtcccagatccactgccgctgaacc

SEQ ID NO: 5498760 - DNA, 25 bp, Homo sapien
gagcgggaaactgttagtctgttga

SEQ ID NO: 5498761 - DNA, 25 bp, Homo sapien
cccgacaagtgatggtgactctgtc

SEQ ID NO: 5498762 - DNA, 25 bp, Homo sapien
agcatagatcaggagtttaggggct

SEQ ID NO: 5498763 - DNA, 25 bp, Homo sapien
gttgacaaaagtaagttgcgaaatc

SEQ ID NO: 5498764 - DNA, 25 bp, Homo sapien
gcgaaatcttcaggctgcaggctgc

SEQ ID NO: 5498765 - DNA, 25 bp, Homo sapien
ttctgttgataccaggctaaccacc

SEQ ID NO: 5498766 - DNA, 25 bp, Homo sapien
ggctaaccacctgctaacaccctga

SEQ ID NO: 5498767 - DNA, 25 bp, Homo sapien
gatgggaccccactttgcaaactgc

SEQ ID NO: 5498768 - DNA, 25 bp, Homo sapien
cctatagatgcagaaacagaagatg

SEQ ID NO: 5498769 - DNA, 25 bp, Homo sapien
gtggtcggctaagggccccgcagga

SEQ ID NO: 5498770 - DNA, 25 bp, Homo sapien
tcctgcggggcccttagccgaccac

SEQ ID NO: 5498771 - DNA, 25 bp, Homo sapien
tcatccagagcgtccctggcttctg

SEQ ID NO: 5498772 - DNA, 25 bp, Homo sapien
gctcggcgtcgatgtgactctttgg

SEQ ID NO: 5498773 - DNA, 25 bp, Homo sapien
tgctgttggatgacataatggcgga

SEQ ID NO: 5498774 - DNA, 25 bp, Homo sapien
gaccccagagtctgcactggaggag

SEQ ID NO: 5498775 - DNA, 25 bp, Homo sapien
aagccccacctagaccgcagagggc

SEQ ID NO: 5498776 - DNA, 25 bp, Homo sapien
gtcgatgtgactctttggggaacaa

SEQ ID NO: 5498777 - DNA, 25 bp, Homo sapien
cttcggcctttctagtggagaggtg

SEQ ID NO: 5498778 - DNA, 25 bp, Homo sapien
ccctgggccatgaccccagagtctg

SEQ ID NO: 5498779 - DNA, 25 bp, Homo sapien
ggcttctgggccaatgttgtatcct

SEQ ID NO: 5498780 - DNA, 25 bp, Homo sapien
cttttctcggcagcgggaaaagatg

SEQ ID NO: 5498781 - DNA, 25 bp, Homo sapien
ccttggtgtgtgcgagtgccaagga

SEQ ID NO: 5498782 - DNA, 25 bp, Homo sapien
ctaccctgctggatcaagaacgtct

SEQ ID NO: 5498783 - DNA, 25 bp, Homo sapien
gctcagtgtgtgaactaggcagaga

SEQ ID NO: 5498784 - DNA, 25 bp, Homo sapien
gccagagaaagctgtactggagaga

SEQ ID NO: 5498785 - DNA, 25 bp, Homo sapien
gctcgcatgtgcgagtggctcagtg

SEQ ID NO: 5498786 - DNA, 25 bp, Homo sapien
gcaagaggaaaaacaggcttgctgt

SEQ ID NO: 5498787 - DNA, 25 bp, Homo sapien
agtacctatgcttctgctgccaccc

SEQ ID NO: 5498788 - DNA, 25 bp, Homo sapien
tccagaaatgttccatgggcttgta

SEQ ID NO: 5498789 - DNA, 25 bp, Homo sapien
gacttgctgtctgctcacagggagc

SEQ ID NO: 5498790 - DNA, 25 bp, Homo sapien
agagaaccagcccttgccctacctg

SEQ ID NO: 5498791 - DNA, 25 bp, Homo sapien
gaaggaatgtgctcgcatgtgcgag

SEQ ID NO: 5498792 - DNA, 25 bp, Homo sapien
tgccctacctgagctgaagtaccta

SEQ ID NO: 5498793 - DNA, 25 bp, Homo sapien
gcttgtgtccacaactgcctctgac

SEQ ID NO: 5498794 - DNA, 25 bp, Homo sapien
ctatgtcgattaagctgccagactc

SEQ ID NO: 5498795 - DNA, 25 bp, Homo sapien
ttggggactatgtcgattaagctgc

SEQ ID NO: 5498796 - DNA, 25 bp, Homo sapien
ccacaactgcctctgacatggtggg

SEQ ID NO: 5498797 - DNA, 25 bp, Homo sapien
cattagcgttcccgttagcatgggc

SEQ ID NO: 5498798 - DNA, 25 bp, Homo sapien
gagagtttggggactatgtcgatta

SEQ ID NO: 5498799 - DNA, 25 bp, Homo sapien
ggggactatgtcgattaagctgcca

SEQ ID NO: 5498800 - DNA, 25 bp, Homo sapien
gtcgattaagctgccagactctgag

SEQ ID NO: 5498801 - DNA, 25 bp, Homo sapien
gatccgatgcaagggattaagaaga

SEQ ID NO: 5498802 - DNA, 25 bp, Homo sapien
tccgatgcaagggattaagaagaaa

SEQ ID NO: 5498803 - DNA, 25 bp, Homo sapien
tagcgttcccgttagcatgggcgtc

SEQ ID NO: 5498804 - DNA, 25 bp, Homo sapien
ggcgacccaattcataccatgatca

SEQ ID NO: 5498805 - DNA, 25 bp, Homo sapien
tcataccatgatcaccagaagtgga

SEQ ID NO: 5498806 - DNA, 25 bp, Homo sapien
accatgatcaccagaagtggaacca

SEQ ID NO: 5498807 - DNA, 25 bp, Homo sapien
ggaaccagaacatgtataggagggt

SEQ ID NO: 5498808 - DNA, 25 bp, Homo sapien
ctgtatcgagcctcccccagattcc

SEQ ID NO: 5498809 - DNA, 25 bp, Homo sapien
ggtggctgtatcgagcctcccccag

SEQ ID NO: 5498810 - DNA, 25 bp, Homo sapien
aaccagaacatgtataggagggtct

SEQ ID NO: 5498811 - DNA, 25 bp, Homo sapien
attgcataccttttaaaataccaac

SEQ ID NO: 5498812 - DNA, 25 bp, Homo sapien
gttgcacctcacattgcataccttt

SEQ ID NO: 5498813 - DNA, 25 bp, Homo sapien
cagaacatgtataggagggtctctg

SEQ ID NO: 5498814 - DNA, 25 bp, Homo sapien
cagaagtggaaccagaacatgtata

SEQ ID NO: 5498815 - DNA, 25 bp, Homo sapien
atgatgaaactacaagagtcaagat

SEQ ID NO: 5498816 - DNA, 25 bp, Homo sapien
tcgtggctacacaattgagaagaat

SEQ ID NO: 5498817 - DNA, 25 bp, Homo sapien
aatggtggaggatttctgttccctc

SEQ ID NO: 5498818 - DNA, 25 bp, Homo sapien
ataaatatgaagacaatcctggaag

SEQ ID NO: 5498819 - DNA, 25 bp, Homo sapien
gatttgatgtcattcctggagatcc

SEQ ID NO: 5498820 - DNA, 25 bp, Homo sapien
agaattgtgttgggcatattatgac

SEQ ID NO: 5498821 - DNA, 25 bp, Homo sapien
tcatgaggtgactgtgttgacatct

SEQ ID NO: 5498822 - DNA, 25 bp, Homo sapien
tgtggtgagctactgtcagagctac

SEQ ID NO: 5498823 - DNA, 25 bp, Homo sapien
gtaacaagctctgtaaagatgcagt

SEQ ID NO: 5498824 - DNA, 25 bp, Homo sapien
tacaggtctcgcatctctcgtggct

SEQ ID NO: 5498825 - DNA, 25 bp, Homo sapien
caatcctggaagagcttgttcagag

SEQ ID NO: 5498826 - DNA, 25 bp, Homo sapien
tgtcaccgcgacaaaaactgtatca

SEQ ID NO: 5498827 - DNA, 25 bp, Homo sapien
cccagttccctcaacctgacccagt

SEQ ID NO: 5498828 - DNA, 25 bp, Homo sapien
tcctcgggtctacaagccatgcttc

SEQ ID NO: 5498829 - DNA, 25 bp, Homo sapien
gacccagtatgtagaagccagtctc

SEQ ID NO: 5498830 - DNA, 25 bp, Homo sapien
caatgacaagtcctctggctaccac

SEQ ID NO: 5498831 - DNA, 25 bp, Homo sapien
gctccatccaagagactgcccgacg

SEQ ID NO: 5498832 - DNA, 25 bp, Homo sapien
cactatggggtcagctcttgtgaag

SEQ ID NO: 5498833 - DNA, 25 bp, Homo sapien
gcttcgtgtgcaatgacaagtcctc

SEQ ID NO: 5498834 - DNA, 25 bp, Homo sapien
gctacagaagtgcttcgaagtgggc

SEQ ID NO: 5498835 - DNA, 25 bp, Homo sapien
ctccgcctcctcgggtctacaagcc

SEQ ID NO: 5498836 - DNA, 25 bp, Homo sapien
cccggacattgcgacgctccatcca

SEQ ID NO: 5498837 - DNA, 25 bp, Homo sapien
cactcaggctgctatcccatgttcc

SEQ ID NO: 5498838 - DNA, 25 bp, Homo sapien
atatcccccggccaccactcaggct

SEQ ID NO: 5498839 - DNA, 25 bp, Homo sapien
cgcagtaataatcggcctcgtcccc

SEQ ID NO: 5498840 - DNA, 25 bp, Homo sapien
gcaagagatggtgaccctctgtcct

SEQ ID NO: 5498841 - DNA, 25 bp, Homo sapien
tgggagttgctggtaccaggataca

SEQ ID NO: 5498842 - DNA, 25 bp, Homo sapien
tcaggaatccctgagggtcgcttat

SEQ ID NO: 5498843 - DNA, 25 bp, Homo sapien
cagagaatcggtcaggaatccctga

SEQ ID NO: 5498844 - DNA, 25 bp, Homo sapien
tccccagtctggagtctggtgatgc

SEQ ID NO: 5498845 - DNA, 25 bp, Homo sapien
ggagctgcttccagagcaagagatg

SEQ ID NO: 5498846 - DNA, 25 bp, Homo sapien
tcttcccaatgttggagctgcttcc

SEQ ID NO: 5498847 - DNA, 25 bp, Homo sapien
atttttatagatgaggagtttgggg

SEQ ID NO: 5498848 - DNA, 25 bp, Homo sapien
cgtcagccaccctgggcatcaccag

SEQ ID NO: 5498849 - DNA, 25 bp, Homo sapien
gacgaggccgattattactgcggaa

SEQ ID NO: 5498850 - DNA, 25 bp, Homo sapien
gccaccctgggcatcaccagactcc

SEQ ID NO: 5498851 - DNA, 25 bp, Homo sapien
tgggaagaattatgtatcctggtac

SEQ ID NO: 5498852 - DNA, 25 bp, Homo sapien
ggtaccagcaactcccaggaacagc

SEQ ID NO: 5498853 - DNA, 25 bp, Homo sapien
gctccaacattgggaagaattatgt

SEQ ID NO: 5498854 - DNA, 25 bp, Homo sapien
gcatcaccagactccagactgggga

SEQ ID NO: 5498855 - DNA, 25 bp, Homo sapien
tgtatcctggtaccagcaactccca

SEQ ID NO: 5498856 - DNA, 25 bp, Homo sapien
attattactgcggaacatgggatag

SEQ ID NO: 5498857 - DNA, 25 bp, Homo sapien
tataaaaataataagcgaccctcag

SEQ ID NO: 5498858 - DNA, 25 bp, Homo sapien
aaataataagcgaccctcagggatt

SEQ ID NO: 5498859 - DNA, 25 bp, Homo sapien
tcctccccatcgccacggagctggg

SEQ ID NO: 5498860 - DNA, 25 bp, Homo sapien
tttgccacaaccaggacggctacag

SEQ ID NO: 5498861 - DNA, 25 bp, Homo sapien
tccttctatggaagaactggcggct

SEQ ID NO: 5498862 - DNA, 25 bp, Homo sapien
agaccaaagcattgcctgccagagc

SEQ ID NO: 5498863 - DNA, 25 bp, Homo sapien
cccatgcaatggcttgggttgggat

SEQ ID NO: 5498864 - DNA, 25 bp, Homo sapien
ctacccctcgagacagatggtcagt

SEQ ID NO: 5498865 - DNA, 25 bp, Homo sapien
gtggcgtgaacatctgcctggagtc

SEQ ID NO: 5498866 - DNA, 25 bp, Homo sapien
ctgagacctcgccggccttgtttta

SEQ ID NO: 5498867 - DNA, 25 bp, Homo sapien
ctggcggcttaagaacatcaacagc

SEQ ID NO: 5498868 - DNA, 25 bp, Homo sapien
agcgtgcctctccctacggtgctcc

SEQ ID NO: 5498869 - DNA, 25 bp, Homo sapien
aggcttcggacagtgcccatgcaat

SEQ ID NO: 5498870 - DNA, 25 bp, Homo sapien
agttcggaagtcttaacggaagcat

SEQ ID NO: 5498871 - DNA, 25 bp, Homo sapien
atgcttccgttaagacttccgaact

SEQ ID NO: 5498872 - DNA, 25 bp, Homo sapien
ctccctgcatccatggagcgccaga

SEQ ID NO: 5498873 - DNA, 25 bp, Homo sapien
tcaggatctctagcctctccaccat

SEQ ID NO: 5498874 - DNA, 25 bp, Homo sapien
cctggttcctgtccaagagcaagtt

SEQ ID NO: 5498875 - DNA, 25 bp, Homo sapien
cagacgagaccaatcatcaggatct

SEQ ID NO: 5498876 - DNA, 25 bp, Homo sapien
cctctccctgcatccatggagcgcc

SEQ ID NO: 5498877 - DNA, 25 bp, Homo sapien
tgtccaagagcaagttaggagcaaa

SEQ ID NO: 5498878 - DNA, 25 bp, Homo sapien
agcctctccaccatgccctctacac

SEQ ID NO: 5498879 - DNA, 25 bp, Homo sapien
gatctctagcctctccaccatgccc

SEQ ID NO: 5498880 - DNA, 25 bp, Homo sapien
ccctctacacattttccctggttcc

SEQ ID NO: 5498881 - DNA, 25 bp, Homo sapien
cctgtccaagagcaagttaggagca

SEQ ID NO: 5498882 - DNA, 25 bp, Homo sapien
ttccctggttcctgtccaagagcaa

SEQ ID NO: 5498883 - DNA, 25 bp, Homo sapien
cgccgacaaccttcaccgggcacca

SEQ ID NO: 5498884 - DNA, 25 bp, Homo sapien
tggtgcccggtgaaggttgtcggcg

SEQ ID NO: 5498885 - DNA, 25 bp, Homo sapien
cgtcgccgacaaccttcaccgggca

SEQ ID NO: 5498886 - DNA, 25 bp, Homo sapien
tgcccggtgaaggttgtcggcgacg

SEQ ID NO: 5498887 - DNA, 25 bp, Homo sapien
gacgattcactgaagcgcagtagaa

SEQ ID NO: 5498888 - DNA, 25 bp, Homo sapien
ttctgacgattcactgaagcgcagt

SEQ ID NO: 5498889 - DNA, 25 bp, Homo sapien
ggagcaggtaatgcccccttctgac

SEQ ID NO: 5498890 - DNA, 25 bp, Homo sapien
gtaatgcccccttctgacgattcac

SEQ ID NO: 5498891 - DNA, 25 bp, Homo sapien
ggtgctccacccaggagcaggtaat

SEQ ID NO: 5498892 - DNA, 25 bp, Homo sapien
atcctggtgctccacccaggagcag

SEQ ID NO: 5498893 - DNA, 25 bp, Homo sapien
aggagcaggtaatgcccccttctga

SEQ ID NO: 5498894 - DNA, 25 bp, Homo sapien
cccttctgacgattcactgaagcgc

SEQ ID NO: 5498895 - DNA, 25 bp, Homo sapien
gctccacccaggagcaggtaatgcc

SEQ ID NO: 5498896 - DNA, 25 bp, Homo sapien
cctggtgctccacccaggagcaggt

SEQ ID NO: 5498897 - DNA, 25 bp, Homo sapien
attcactgaagcgcagtagaaaggt

SEQ ID NO: 5498898 - DNA, 25 bp, Homo sapien
ccgcacccggcctttttatagcata

SEQ ID NO: 5498899 - DNA, 25 bp, Homo sapien
atttgacatggttatttgctcctat

SEQ ID NO: 5498900 - DNA, 25 bp, Homo sapien
aatgaggctgtttaatgcttcgaca

SEQ ID NO: 5498901 - DNA, 25 bp, Homo sapien
aagaatctcttaacaaaaggatttc

SEQ ID NO: 5498902 - DNA, 25 bp, Homo sapien
tctgaacagggtatttgacatggtt

SEQ ID NO: 5498903 - DNA, 25 bp, Homo sapien
atgcttcgacaaatttaccattgct

SEQ ID NO: 5498904 - DNA, 25 bp, Homo sapien
gtgcctgccacctggccccgctaat

SEQ ID NO: 5498905 - DNA, 25 bp, Homo sapien
cactgaacattagtcaatgctgggc

SEQ ID NO: 5498906 - DNA, 25 bp, Homo sapien
ttaacaaaaggatttcactgaacat

SEQ ID NO: 5498907 - DNA, 25 bp, Homo sapien
cattagtcaatgctgggcacatagt

SEQ ID NO: 5498908 - DNA, 25 bp, Homo sapien
atctaactttggacgtgtggtaccg

SEQ ID NO: 5498909 - DNA, 25 bp, Homo sapien
aagttttgagtgacggggagatacc

SEQ ID NO: 5498910 - DNA, 25 bp, Homo sapien
ggtatctccccgtcactcaaaactt

SEQ ID NO: 5498911 - DNA, 25 bp, Homo sapien
aaccctgcatgtatccataatgatg

SEQ ID NO: 5498912 - DNA, 25 bp, Homo sapien
agagggacatcagacagttccagat

SEQ ID NO: 5498913 - DNA, 25 bp, Homo sapien
ttgccagatatcctgctgaacagaa

SEQ ID NO: 5498914 - DNA, 25 bp, Homo sapien
taattctcaaaaggagttaccgctc

SEQ ID NO: 5498915 - DNA, 25 bp, Homo sapien
gagactggcctatggcatcacgcca

SEQ ID NO: 5498916 - DNA, 25 bp, Homo sapien
cctgctgaacagaaatccctgaagc

SEQ ID NO: 5498917 - DNA, 25 bp, Homo sapien
ctatggcatcacgccagagaacgag

SEQ ID NO: 5498918 - DNA, 25 bp, Homo sapien
tcagacagttccagatgaaaacgag

SEQ ID NO: 5498919 - DNA, 25 bp, Homo sapien
gaacagaaatccctgaagctgcctt

SEQ ID NO: 5498920 - DNA, 25 bp, Homo sapien
gagctaccaactcttgccagatatc

SEQ ID NO: 5498921 - DNA, 25 bp, Homo sapien
tcaaaaggagttaccgctcagctgg

SEQ ID NO: 5498922 - DNA, 25 bp, Homo sapien
taatgtgagactgaagcattcttac

SEQ ID NO: 5498923 - DNA, 25 bp, Homo sapien
ggtctgcagctgactagctgggtgg

SEQ ID NO: 5498924 - DNA, 25 bp, Homo sapien
gcctggggatagtggcttcatcttt

SEQ ID NO: 5498925 - DNA, 25 bp, Homo sapien
tatgatctgttttctagcctcgcta

SEQ ID NO: 5498926 - DNA, 25 bp, Homo sapien
catcttttggggcttcaagattctt

SEQ ID NO: 5498927 - DNA, 25 bp, Homo sapien
tagtaaagaagcccattgaactcac

SEQ ID NO: 5498928 - DNA, 25 bp, Homo sapien
ttacagacttgggtctgcagctgac

SEQ ID NO: 5498929 - DNA, 25 bp, Homo sapien
tgtctttaaaatcaggggttatatc

SEQ ID NO: 5498930 - DNA, 25 bp, Homo sapien
aagcacagcatatagttttacagac

SEQ ID NO: 5498931 - DNA, 25 bp, Homo sapien
ccttcgaaagccaccgaagagagaa

SEQ ID NO: 5498932 - DNA, 25 bp, Homo sapien
agcctcgctaatgtgagactgaagc

SEQ ID NO: 5498933 - DNA, 25 bp, Homo sapien
acacaccagaggtcattgagaaatc

SEQ ID NO: 5498934 - DNA, 25 bp, Homo sapien
acttagaacactggcatggcaggaa

SEQ ID NO: 5498935 - DNA, 25 bp, Homo sapien
aaatcagtgagggacttagaacact

SEQ ID NO: 5498936 - DNA, 25 bp, Homo sapien
accagaggtcattgagaaatcagtg

SEQ ID NO: 5498937 - DNA, 25 bp, Homo sapien
tgaaggcttcttacacaccagaggt

SEQ ID NO: 5498938 - DNA, 25 bp, Homo sapien
tacacaccagaggtcattgagaaat

SEQ ID NO: 5498939 - DNA, 25 bp, Homo sapien
ggagacaaagagcctcatgaaggct

SEQ ID NO: 5498940 - DNA, 25 bp, Homo sapien
agacaaagagcctcatgaaggcttc

SEQ ID NO: 5498941 - DNA, 25 bp, Homo sapien
gacttagaacactggcatggcagga

SEQ ID NO: 5498942 - DNA, 25 bp, Homo sapien
acaccagaggtcattgagaaatcag

SEQ ID NO: 5498943 - DNA, 25 bp, Homo sapien
catgaaggcttcttacacaccagag

SEQ ID NO: 5498944 - DNA, 25 bp, Homo sapien
gtcccaggaaaggacgcacgtcgat

SEQ ID NO: 5498945 - DNA, 25 bp, Homo sapien
atcgacgtgcgtcctttcctgggac

SEQ ID NO: 5498946 - DNA, 25 bp, Homo sapien
tctagaaaatataacgactgggcat

SEQ ID NO: 5498947 - DNA, 25 bp, Homo sapien
ttacttctaaacgagcaggagactg

SEQ ID NO: 5498948 - DNA, 25 bp, Homo sapien
tcccagcaccatcagaatctgtccc

SEQ ID NO: 5498949 - DNA, 25 bp, Homo sapien
tgtccctctgtacagctgccctcat

SEQ ID NO: 5498950 - DNA, 25 bp, Homo sapien
gtgaaactgtacacaacaagcatct

SEQ ID NO: 5498951 - DNA, 25 bp, Homo sapien
tgttggcctactggcgaatgcacct

SEQ ID NO: 5498952 - DNA, 25 bp, Homo sapien
ctgagtagagatcgtttgaacatgg

SEQ ID NO: 5498953 - DNA, 25 bp, Homo sapien
aaatccgaaggctctgtgaaactgt

SEQ ID NO: 5498954 - DNA, 25 bp, Homo sapien
cgactgggcatttagctatggatac

SEQ ID NO: 5498955 - DNA, 25 bp, Homo sapien
tggatcttgatagagctagcttgga

SEQ ID NO: 5498956 - DNA, 25 bp, Homo sapien
tggaactggaacaagatgcttcatc

SEQ ID NO: 5498957 - DNA, 25 bp, Homo sapien
gaccatcctagattaggggtggcct

SEQ ID NO: 5498958 - DNA, 25 bp, Homo sapien
gccccagaggctgtccctgggaact

SEQ ID NO: 5498959 - DNA, 25 bp, Homo sapien
agcccctagagctgacctggatgag

SEQ ID NO: 5498960 - DNA, 25 bp, Homo sapien
tgcctcccagtgggtgcctcttgct

SEQ ID NO: 5498961 - DNA, 25 bp, Homo sapien
ggggacacacaaactcaaaccacag

SEQ ID NO: 5498962 - DNA, 25 bp, Homo sapien
ttcccaagcgcttcaatggggaccc

SEQ ID NO: 5498963 - DNA, 25 bp, Homo sapien
cacgcgtggacctgatccaagttac

SEQ ID NO: 5498964 - DNA, 25 bp, Homo sapien
ttgctgtgtcctctcccggcggaag

SEQ ID NO: 5498965 - DNA, 25 bp, Homo sapien
tgtgacacgctgtgacaaaggaaag

SEQ ID NO: 5498966 - DNA, 25 bp, Homo sapien
tgtggatgtaattaaggacctcaac

SEQ ID NO: 5498967 - DNA, 25 bp, Homo sapien
ttccaacatatgaaggctggggaca

SEQ ID NO: 5498968 - DNA, 25 bp, Homo sapien
gaagaatctttcagaacaccagttc

SEQ ID NO: 5498969 - DNA, 25 bp, Homo sapien
gaagactatccccaggtgacaatcc

SEQ ID NO: 5498970 - DNA, 25 bp, Homo sapien
ggcaaatttgctgtgaaaacatatc

SEQ ID NO: 5498971 - DNA, 25 bp, Homo sapien
gaagcattcacaggattttccatac

SEQ ID NO: 5498972 - DNA, 25 bp, Homo sapien
tttagtacaaatgggctttcactat

SEQ ID NO: 5498973 - DNA, 25 bp, Homo sapien
acttgctgccctaaggaaaatgtgc

SEQ ID NO: 5498974 - DNA, 25 bp, Homo sapien
gaaaatgtgcaatagaagaatcttt

SEQ ID NO: 5498975 - DNA, 25 bp, Homo sapien
tgcctggctgctattcttgaagact

SEQ ID NO: 5498976 - DNA, 25 bp, Homo sapien
acatatatgaaaggaagcattcaca

SEQ ID NO: 5498977 - DNA, 25 bp, Homo sapien
actgcagcaagattaaagccaatct

SEQ ID NO: 5498978 - DNA, 25 bp, Homo sapien
agtaatgaataagtaccccaagaac

SEQ ID NO: 5498979 - DNA, 25 bp, Homo sapien
cggtagaacctgtctgtggcggtag

SEQ ID NO: 5498980 - DNA, 25 bp, Homo sapien
ctaccgccacagacaggttctaccg

SEQ ID NO: 5498981 - DNA, 25 bp, Homo sapien
gcggcccaacagttgttgtcagacg

SEQ ID NO: 5498982 - DNA, 25 bp, Homo sapien
cgtctgacaacaactgttgggccgc

SEQ ID NO: 5498983 - DNA, 25 bp, Homo sapien
atcgacaagaaggcacctgactttg

SEQ ID NO: 5498984 - DNA, 25 bp, Homo sapien
tgagaatcaacaagcggatcctgca

SEQ ID NO: 5498985 - DNA, 25 bp, Homo sapien
gatcctgcagctctgcatgggcaac

SEQ ID NO: 5498986 - DNA, 25 bp, Homo sapien
ttatgccccacgtctgagaatcaac

SEQ ID NO: 5498987 - DNA, 25 bp, Homo sapien
tggcttggagttgatgcccttggac

SEQ ID NO: 5498988 - DNA, 25 bp, Homo sapien
attaaacccatcgacaagaaggcac

SEQ ID NO: 5498989 - DNA, 25 bp, Homo sapien
cttggagtgaaatcaggaacatctc

SEQ ID NO: 5498990 - DNA, 25 bp, Homo sapien
ggaagcctgacaccatcgaggtgca

SEQ ID NO: 5498991 - DNA, 25 bp, Homo sapien
catgggcaaccatgagttgtatatg

SEQ ID NO: 5498992 - DNA, 25 bp, Homo sapien
agttgtatatgcgccgcaggaagcc

SEQ ID NO: 5498993 - DNA, 25 bp, Homo sapien
aggaacagacctttggcttggagtt

SEQ ID NO: 5498994 - DNA, 25 bp, Homo sapien
agacataaaaactgcctgcatttga

SEQ ID NO: 5498995 - DNA, 25 bp, Homo sapien
catcataaatcatgagtgtgggggc

SEQ ID NO: 5498996 - DNA, 25 bp, Homo sapien
tcactgctggttccggtgcaggaga

SEQ ID NO: 5498997 - DNA, 25 bp, Homo sapien
gactgtccaggagatccggacactg

SEQ ID NO: 5498998 - DNA, 25 bp, Homo sapien
atcctcagcctggagcccagagatg

SEQ ID NO: 5498999 - DNA, 25 bp, Homo sapien
gttgccagatttggagccagagaag

SEQ ID NO: 5499000 - DNA, 25 bp, Homo sapien
ctgagggccgcttaatgacatcata

SEQ ID NO: 5499001 - DNA, 25 bp, Homo sapien
tcagcctcatcctcagcctggagcc

SEQ ID NO: 5499002 - DNA, 25 bp, Homo sapien
tgcctgggtgctgttggtaccagga

SEQ ID NO: 5499003 - DNA, 25 bp, Homo sapien
tggtaccaggagacatagttataac

SEQ ID NO: 5499004 - DNA, 25 bp, Homo sapien
gcatttgagctgcaataataatcag

SEQ ID NO: 5499005 - DNA, 25 bp, Homo sapien
actccagtcccttaccggcgggctg

SEQ ID NO: 5499006 - DNA, 25 bp, Homo sapien
ggagaactggttcttggacgtgtct

SEQ ID NO: 5499007 - DNA, 25 bp, Homo sapien
tcgcacagtaatatacggccgtgtc

SEQ ID NO: 5499008 - DNA, 25 bp, Homo sapien
gggtctccgaaggcttgaccagtcc

SEQ ID NO: 5499009 - DNA, 25 bp, Homo sapien
agtaaccactccggccctctcgcac

SEQ ID NO: 5499010 - DNA, 25 bp, Homo sapien
gtagtaactactgatggagaaacca

SEQ ID NO: 5499011 - DNA, 25 bp, Homo sapien
ggccagactccagcaactgcacctc

SEQ ID NO: 5499012 - DNA, 25 bp, Homo sapien
cagacgtccataccgagtaaccact

SEQ ID NO: 5499013 - DNA, 25 bp, Homo sapien
ggccgtgtccacggcggtcatagag

SEQ ID NO: 5499014 - DNA, 25 bp, Homo sapien
cacctctctagactgcagctgcacc

SEQ ID NO: 5499015 - DNA, 25 bp, Homo sapien
actgacatggtgactcgactctgga

SEQ ID NO: 5499016 - DNA, 25 bp, Homo sapien
ggaatctacataacctgtgttgacc

SEQ ID NO: 5499017 - DNA, 25 bp, Homo sapien
tctaccgtaagcctaaatccatcat

SEQ ID NO: 5499018 - DNA, 25 bp, Homo sapien
gttgaccacatgcacttatagcttc

SEQ ID NO: 5499019 - DNA, 25 bp, Homo sapien
tgatattggcggctcacaatctgga

SEQ ID NO: 5499020 - DNA, 25 bp, Homo sapien
tagatatgctgcttattgttccgcc

SEQ ID NO: 5499021 - DNA, 25 bp, Homo sapien
ctcctcctggtgatgatattggcgg

SEQ ID NO: 5499022 - DNA, 25 bp, Homo sapien
atagcttctgcataggtcccccatt

SEQ ID NO: 5499023 - DNA, 25 bp, Homo sapien
tggaaaagttcattgcaagccctat

SEQ ID NO: 5499024 - DNA, 25 bp, Homo sapien
ttctgaatgtgtccagtgatcaatc

SEQ ID NO: 5499025 - DNA, 25 bp, Homo sapien
caaagtctgtcattgatactgtttc

SEQ ID NO: 5499026 - DNA, 25 bp, Homo sapien
gtgcagacaaacatacatgaccccc

SEQ ID NO: 5499027 - DNA, 25 bp, Homo sapien
gacagggtagatttcctcgagggac

SEQ ID NO: 5499028 - DNA, 25 bp, Homo sapien
gtccctcgaggaaatctaccctgtc

SEQ ID NO: 5499029 - DNA, 25 bp, Homo sapien
ggcccatcacggagtctgcatagta

SEQ ID NO: 5499030 - DNA, 25 bp, Homo sapien
gcgttgtctctggagatggtgaatc

SEQ ID NO: 5499031 - DNA, 25 bp, Homo sapien
agtaccaatagctgatacccactcc

SEQ ID NO: 5499032 - DNA, 25 bp, Homo sapien
gagtctgcatagtatgtatcaccac

SEQ ID NO: 5499033 - DNA, 25 bp, Homo sapien
gagatggtgaatcggcccatcacgg

SEQ ID NO: 5499034 - DNA, 25 bp, Homo sapien
ttcttggcgttgtctctggagatgg

SEQ ID NO: 5499035 - DNA, 25 bp, Homo sapien
gatacaaggacttcttggcgttgtc

SEQ ID NO: 5499036 - DNA, 25 bp, Homo sapien
ctgttcatatgaagatacaaggact

SEQ ID NO: 5499037 - DNA, 25 bp, Homo sapien
tatcaccaccagtaccaatagctga

SEQ ID NO: 5499038 - DNA, 25 bp, Homo sapien
tagctgatacccactccaaaccctt

SEQ ID NO: 5499039 - DNA, 25 bp, Homo sapien
tgcatagtatgtatcaccaccagta

SEQ ID NO: 5499040 - DNA, 25 bp, Homo sapien
caggctgatgccaccctcataaggg

SEQ ID NO: 5499041 - DNA, 25 bp, Homo sapien
tacctgaatacactgggatgggtga

SEQ ID NO: 5499042 - DNA, 25 bp, Homo sapien
agagacataaatctgacatgggccc

SEQ ID NO: 5499043 - DNA, 25 bp, Homo sapien
aaaaacggaataaatgcttgggcta

SEQ ID NO: 5499044 - DNA, 25 bp, Homo sapien
ggcaaaaggtgcaatgcagttcaca

SEQ ID NO: 5499045 - DNA, 25 bp, Homo sapien
atgagatatggccttcagctgaagc

SEQ ID NO: 5499046 - DNA, 25 bp, Homo sapien
ggtagaggtaaaatggcttccacta

SEQ ID NO: 5499047 - DNA, 25 bp, Homo sapien
ctccagggtgctaacagatttccac

SEQ ID NO: 5499048 - DNA, 25 bp, Homo sapien
tccactatagtatcagcagagacat

SEQ ID NO: 5499049 - DNA, 25 bp, Homo sapien
gatataggatgttcaattcaggctg

SEQ ID NO: 5499050 - DNA, 25 bp, Homo sapien
cttgtgaactgtgtggcactcaatg

SEQ ID NO: 5499051 - DNA, 25 bp, Homo sapien
ctggatcttgcattggaggagaaaa

SEQ ID NO: 5499052 - DNA, 25 bp, Homo sapien
ataggagtctttagaagaagcaacc

SEQ ID NO: 5499053 - DNA, 25 bp, Homo sapien
aggagactaagaagacataacaact

SEQ ID NO: 5499054 - DNA, 25 bp, Homo sapien
aaacgcgatcagaaaaagccaagaa

SEQ ID NO: 5499055 - DNA, 25 bp, Homo sapien
ggatggttgattagatggaagtatt

SEQ ID NO: 5499056 - DNA, 25 bp, Homo sapien
gtgcttcctggagaggtatagatgc

SEQ ID NO: 5499057 - DNA, 25 bp, Homo sapien
agtgtatgcaatggtatgaggaact

SEQ ID NO: 5499058 - DNA, 25 bp, Homo sapien
ataaaaggtatcactgagacagtta

SEQ ID NO: 5499059 - DNA, 25 bp, Homo sapien
tgcaatgtgtgattctggactggat

SEQ ID NO: 5499060 - DNA, 25 bp, Homo sapien
tcattggaacatggatggttgatta

SEQ ID NO: 5499061 - DNA, 25 bp, Homo sapien
gaagcaaccagccggactgtcttga

SEQ ID NO: 5499062 - DNA, 25 bp, Homo sapien
tcaatgtgacatacgtagaagaccc

SEQ ID NO: 5499063 - DNA, 25 bp, Homo sapien
tgacatacgtagaagacccacaaga

SEQ ID NO: 5499064 - DNA, 25 bp, Homo sapien
catacgtagaagacccacaagattt

SEQ ID NO: 5499065 - DNA, 25 bp, Homo sapien
agatggggttgttcaggaaaaatct

SEQ ID NO: 5499066 - DNA, 25 bp, Homo sapien
tggggttgttcaggaaaaatctgtg

SEQ ID NO: 5499067 - DNA, 25 bp, Homo sapien
gaatgtgtgaatcaatgtgacatac

SEQ ID NO: 5499068 - DNA, 25 bp, Homo sapien
ttgtgagactgccagaattctacag

SEQ ID NO: 5499069 - DNA, 25 bp, Homo sapien
gaagacccacaagatttttgagaat

SEQ ID NO: 5499070 - DNA, 25 bp, Homo sapien
aagattgtgagactgccagaattct

SEQ ID NO: 5499071 - DNA, 25 bp, Homo sapien
ctcttttctgaatgtgtgaatcaat

SEQ ID NO: 5499072 - DNA, 25 bp, Homo sapien
atctgtgaggaccctcttttctgaa

SEQ ID NO: 5499073 - DNA, 25 bp, Homo sapien
gaatgaatgtgaaccaagtgattgc

SEQ ID NO: 5499074 - DNA, 25 bp, Homo sapien
aggagggcatcagctatcccaccct

SEQ ID NO: 5499075 - DNA, 25 bp, Homo sapien
tttaaaatgcctgtgggaagcagtg

SEQ ID NO: 5499076 - DNA, 25 bp, Homo sapien
gatatatggcatatgctgttccacc

SEQ ID NO: 5499077 - DNA, 25 bp, Homo sapien
caagtgattgctgggatgattgaag

SEQ ID NO: 5499078 - DNA, 25 bp, Homo sapien
ctgcccaatctgatgaagagccagc

SEQ ID NO: 5499079 - DNA, 25 bp, Homo sapien
gggaagcagtgcttatggtcctctg

SEQ ID NO: 5499080 - DNA, 25 bp, Homo sapien
ctttattgggaaatgaagccacagc

SEQ ID NO: 5499081 - DNA, 25 bp, Homo sapien
gaaatgaagccacagccagctgata

SEQ ID NO: 5499082 - DNA, 25 bp, Homo sapien
caactgtaagaatcatggtggctct

SEQ ID NO: 5499083 - DNA, 25 bp, Homo sapien
gggatgattgaagtcactcctttat

SEQ ID NO: 5499084 - DNA, 25 bp, Homo sapien
cggcacagcccccaaactcctcatc

SEQ ID NO: 5499085 - DNA, 25 bp, Homo sapien
gctgaggatgaggctgattattact

SEQ ID NO: 5499086 - DNA, 25 bp, Homo sapien
ggtccctgaccgattctctggctcc

SEQ ID NO: 5499087 - DNA, 25 bp, Homo sapien
tcggccctcaggggtccctgaccga

SEQ ID NO: 5499088 - DNA, 25 bp, Homo sapien
ccatcactgggctccaggctgagga

SEQ ID NO: 5499089 - DNA, 25 bp, Homo sapien
gtcctatgacagcagcctgagtggt

SEQ ID NO: 5499090 - DNA, 25 bp, Homo sapien
actggtaccggcaacttcccggcac

SEQ ID NO: 5499091 - DNA, 25 bp, Homo sapien
ctggctccaagtctggcatctcagc

SEQ ID NO: 5499092 - DNA, 25 bp, Homo sapien
tctatggtaacaccgatcggccctc

SEQ ID NO: 5499093 - DNA, 25 bp, Homo sapien
cggggcaggttatgatgtacactgg

SEQ ID NO: 5499094 - DNA, 25 bp, Homo sapien
gcctgagtggtgtcctattcggagg

SEQ ID NO: 5499095 - DNA, 25 bp, Homo sapien
aagagccagaatagtcaagacactc

SEQ ID NO: 5499096 - DNA, 25 bp, Homo sapien
caatggccccaaatataaaatccta

SEQ ID NO: 5499097 - DNA, 25 bp, Homo sapien
actgacccacaaaatggaagctaat

SEQ ID NO: 5499098 - DNA, 25 bp, Homo sapien
aacgtacaacatggtgaagacggtt

SEQ ID NO: 5499099 - DNA, 25 bp, Homo sapien
tggtgaagacggttaacaatactgt

SEQ ID NO: 5499100 - DNA, 25 bp, Homo sapien
cacaaaatggaagctaataaagaga

SEQ ID NO: 5499101 - DNA, 25 bp, Homo sapien
aagtgcatcattgttgttggaattg

SEQ ID NO: 5499102 - DNA, 25 bp, Homo sapien
aatttctggagctctaacgtacaac

SEQ ID NO: 5499103 - DNA, 25 bp, Homo sapien
aatactgtattgcaggccaggtgcg

SEQ ID NO: 5499104 - DNA, 25 bp, Homo sapien
ttacatgaaaatacaaagagccaga

SEQ ID NO: 5499105 - DNA, 25 bp, Homo sapien
gaaaactcaatattgtaaagacgtc

SEQ ID NO: 5499106 - DNA, 25 bp, Homo sapien
caaggtcatgaagatagtctcttag

SEQ ID NO: 5499107 - DNA, 25 bp, Homo sapien
gtgtgaggtaaggattcactttcat

SEQ ID NO: 5499108 - DNA, 25 bp, Homo sapien
attgagatctgataaagtaagtctt

SEQ ID NO: 5499109 - DNA, 25 bp, Homo sapien
tgggaaaattgacgtctttacaata

SEQ ID NO: 5499110 - DNA, 25 bp, Homo sapien
gttcttgtgccaatatcaagctgtc

SEQ ID NO: 5499111 - DNA, 25 bp, Homo sapien
tctccatagggttacacacctgtcc

SEQ ID NO: 5499112 - DNA, 25 bp, Homo sapien
gtaatctaactttctgcgcccatct

SEQ ID NO: 5499113 - DNA, 25 bp, Homo sapien
ttgagagtgtcttgactattctggc

SEQ ID NO: 5499114 - DNA, 25 bp, Homo sapien
ccattagtctgtctgttcttgtgcc

SEQ ID NO: 5499115 - DNA, 25 bp, Homo sapien
gatgcacttgatagtttgggaattt

SEQ ID NO: 5499116 - DNA, 25 bp, Homo sapien
caattccaacaacaatgatgcactt

SEQ ID NO: 5499117 - DNA, 25 bp, Homo sapien
gacacgagggctatgaccaccgacg

SEQ ID NO: 5499118 - DNA, 25 bp, Homo sapien
cgtcggtggtcatagccctcgtgtc

SEQ ID NO: 5499119 - DNA, 25 bp, Homo sapien
ttaggcagtatacatgagagaacat

SEQ ID NO: 5499120 - DNA, 25 bp, Homo sapien
ttagaaggagcagagtgtatccttt

SEQ ID NO: 5499121 - DNA, 25 bp, Homo sapien
agtgtgattccatggagatggagat

SEQ ID NO: 5499122 - DNA, 25 bp, Homo sapien
aatgagagaaaacgtggaacattta

SEQ ID NO: 5499123 - DNA, 25 bp, Homo sapien
atctgcttgggtctgaatatggctt

SEQ ID NO: 5499124 - DNA, 25 bp, Homo sapien
actagctataggactttgggaaacc

SEQ ID NO: 5499125 - DNA, 25 bp, Homo sapien
ctctaaggaagctcaagtgtgattc

SEQ ID NO: 5499126 - DNA, 25 bp, Homo sapien
atttatccaagggtaaaagtagata

SEQ ID NO: 5499127 - DNA, 25 bp, Homo sapien
tcacagcaactcagtgaggattaaa

SEQ ID NO: 5499128 - DNA, 25 bp, Homo sapien
gtaaattagacatagctcacagcaa

SEQ ID NO: 5499129 - DNA, 25 bp, Homo sapien
tttagaatagtgtgtgacaaattat

SEQ ID NO: 5499130 - DNA, 25 bp, Homo sapien
ggtggccaacataaagcaagatgaa

SEQ ID NO: 5499131 - DNA, 25 bp, Homo sapien
gcaagatgaaagtgagaaatactat

SEQ ID NO: 5499132 - DNA, 25 bp, Homo sapien
gctgtgtattactgtgcgagagccg

SEQ ID NO: 5499133 - DNA, 25 bp, Homo sapien
tctggattcacctttagtagcaatt

SEQ ID NO: 5499134 - DNA, 25 bp, Homo sapien
tgcaaatgaacagcctgagagtcga

SEQ ID NO: 5499135 - DNA, 25 bp, Homo sapien
tcgaggacacggctgtgtattactg

SEQ ID NO: 5499136 - DNA, 25 bp, Homo sapien
tttagtagcaattggatgagctggg

SEQ ID NO: 5499137 - DNA, 25 bp, Homo sapien
gacaacgccaagaactcactgtatc

SEQ ID NO: 5499138 - DNA, 25 bp, Homo sapien
tactatgtagactctgtgaagggcc

SEQ ID NO: 5499139 - DNA, 25 bp, Homo sapien
tgaagggccgattcaccatctccag

SEQ ID NO: 5499140 - DNA, 25 bp, Homo sapien
ccatctccagagacaacgccaagaa

SEQ ID NO: 5499141 - DNA, 25 bp, Homo sapien
ggccctgacctcgagctgtgtcctg

SEQ ID NO: 5499142 - DNA, 25 bp, Homo sapien
tgtgtcctgattctgtctctgcccc

SEQ ID NO: 5499143 - DNA, 25 bp, Homo sapien
gtcctagcacctccctttctgtctc

SEQ ID NO: 5499144 - DNA, 25 bp, Homo sapien
ttgccccctctcactctaggccctc

SEQ ID NO: 5499145 - DNA, 25 bp, Homo sapien
ccccccttgccttgccccctctcac

SEQ ID NO: 5499146 - DNA, 25 bp, Homo sapien
tcactctaggccctcagctccagcc

SEQ ID NO: 5499147 - DNA, 25 bp, Homo sapien
cttcctctcccccccttgccttgcc

SEQ ID NO: 5499148 - DNA, 25 bp, Homo sapien
cctctgcttccctgatagggccacc

SEQ ID NO: 5499149 - DNA, 25 bp, Homo sapien
ctccaggatctgtgtctcagctcct

SEQ ID NO: 5499150 - DNA, 25 bp, Homo sapien
cctgatagggccacctttcgagttt

SEQ ID NO: 5499151 - DNA, 25 bp, Homo sapien
ggatctgtgtctcagctcctgcctc

SEQ ID NO: 5499152 - DNA, 25 bp, Homo sapien
tatattcttctaagacaatgggaat

SEQ ID NO: 5499153 - DNA, 25 bp, Homo sapien
attcccattgtcttagaagaatata

SEQ ID NO: 5499154 - DNA, 25 bp, Homo sapien
gccatcatcaagggctgctgagcag

SEQ ID NO: 5499155 - DNA, 25 bp, Homo sapien
gtctaggtgctgaccacctggagca

SEQ ID NO: 5499156 - DNA, 25 bp, Homo sapien
cctggagcacttggccagcaagtgg

SEQ ID NO: 5499157 - DNA, 25 bp, Homo sapien
catggggtgggactatcccactcac

SEQ ID NO: 5499158 - DNA, 25 bp, Homo sapien
aagaccggccagtgtgccatcatca

SEQ ID NO: 5499159 - DNA, 25 bp, Homo sapien
ggtcacttccaccaacaggagctcc

SEQ ID NO: 5499160 - DNA, 25 bp, Homo sapien
gacagatcaggctgggactcttaag

SEQ ID NO: 5499161 - DNA, 25 bp, Homo sapien
cgtggggccttcagtgctttatccc

SEQ ID NO: 5499162 - DNA, 25 bp, Homo sapien
ggggctgcatatcaggtgatctcag

SEQ ID NO: 5499163 - DNA, 25 bp, Homo sapien
cccagataacagtgggttgctggac

SEQ ID NO: 5499164 - DNA, 25 bp, Homo sapien
ggtgcacgttatcccaagggagccc

SEQ ID NO: 5499165 - DNA, 25 bp, Homo sapien
ttccggtgtcagtcgagccgggtgt

SEQ ID NO: 5499166 - DNA, 25 bp, Homo sapien
acacccggctcgactgacaccggaa

SEQ ID NO: 5499167 - DNA, 25 bp, Homo sapien
agccccctctgacctacccccactc

SEQ ID NO: 5499168 - DNA, 25 bp, Homo sapien
aaataaaccacagggtgtgtgcaag

SEQ ID NO: 5499169 - DNA, 25 bp, Homo sapien
cctggagtcatgtgagatttctgtc

SEQ ID NO: 5499170 - DNA, 25 bp, Homo sapien
cttagcagcaaagacgttccttact

SEQ ID NO: 5499171 - DNA, 25 bp, Homo sapien
atgatggcacactggccggtctttt

SEQ ID NO: 5499172 - DNA, 25 bp, Homo sapien
gagcacaggacagatgctcaggtac

SEQ ID NO: 5499173 - DNA, 25 bp, Homo sapien
tgcaagcatcaagagtgcccagtga

SEQ ID NO: 5499174 - DNA, 25 bp, Homo sapien
ggccagctccagtggtccacgactc

SEQ ID NO: 5499175 - DNA, 25 bp, Homo sapien
ttttctctgggactcagccaaccgc

SEQ ID NO: 5499176 - DNA, 25 bp, Homo sapien
tgacctggccttgtccccaatgccc

SEQ ID NO: 5499177 - DNA, 25 bp, Homo sapien
caaccgccccacctgacacacagtg

SEQ ID NO: 5499178 - DNA, 25 bp, Homo sapien
ctttctaatggctgggagcaatgac

SEQ ID NO: 5499179 - DNA, 25 bp, Homo sapien
ctttacctggacagggctaccccta

SEQ ID NO: 5499180 - DNA, 25 bp, Homo sapien
tacaaaagggagttcataggattaa

SEQ ID NO: 5499181 - DNA, 25 bp, Homo sapien
atactctctgtctggctgtgactcc

SEQ ID NO: 5499182 - DNA, 25 bp, Homo sapien
actctggcagagtgatgcattcctt

SEQ ID NO: 5499183 - DNA, 25 bp, Homo sapien
gctacccctacagattggccctttc

SEQ ID NO: 5499184 - DNA, 25 bp, Homo sapien
ttggaactgtgtaaccctgagctta

SEQ ID NO: 5499185 - DNA, 25 bp, Homo sapien
acagtctgtctgaaaagccccttcc

SEQ ID NO: 5499186 - DNA, 25 bp, Homo sapien
tcttgctatgtggtagttggtctcc

SEQ ID NO: 5499187 - DNA, 25 bp, Homo sapien
ttatctcagcagaaagcaaacagtc

SEQ ID NO: 5499188 - DNA, 25 bp, Homo sapien
taacagtagacatgaggctgaaaac

SEQ ID NO: 5499189 - DNA, 25 bp, Homo sapien
gtctggtcaggcaacaacacatcct

SEQ ID NO: 5499190 - DNA, 25 bp, Homo sapien
aatgtccatcgggatgcttgagtgc

SEQ ID NO: 5499191 - DNA, 25 bp, Homo sapien
gaaggaagagtgctgtttccaccca

SEQ ID NO: 5499192 - DNA, 25 bp, Homo sapien
ggaagttaggagatctggactccac

SEQ ID NO: 5499193 - DNA, 25 bp, Homo sapien
gcccagccccttatgttgcctcaac

SEQ ID NO: 5499194 - DNA, 25 bp, Homo sapien
tcaatttgccatggacgtaagtcac

SEQ ID NO: 5499195 - DNA, 25 bp, Homo sapien
tgctcccctgcctggtcatcaaatg

SEQ ID NO: 5499196 - DNA, 25 bp, Homo sapien
gttctagtatggaagttaggagatc

SEQ ID NO: 5499197 - DNA, 25 bp, Homo sapien
gaaacttcaggcaggtaccatcaac

SEQ ID NO: 5499198 - DNA, 25 bp, Homo sapien
cacctataaaagtaaaggactggcc

SEQ ID NO: 5499199 - DNA, 25 bp, Homo sapien
ttctggcctcaaggtgtctggtcag

SEQ ID NO: 5499200 - DNA, 25 bp, Homo sapien
gtcacctggtgaaatcagaagagac

SEQ ID NO: 5499201 - DNA, 25 bp, Homo sapien
gggacctacagatgcttcggctctt

SEQ ID NO: 5499202 - DNA, 25 bp, Homo sapien
tcccggagctcctatgacatgtacc

SEQ ID NO: 5499203 - DNA, 25 bp, Homo sapien
ggcccatgaacgtaggctccctgca

SEQ ID NO: 5499204 - DNA, 25 bp, Homo sapien
gtaccatctatccagggaaggggag

SEQ ID NO: 5499205 - DNA, 25 bp, Homo sapien
cagtgaccctctggacatggtgatc

SEQ ID NO: 5499206 - DNA, 25 bp, Homo sapien
ctgcaatgttggtcggatgtcatgt

SEQ ID NO: 5499207 - DNA, 25 bp, Homo sapien
ttccttctgcacagagagggaacct

SEQ ID NO: 5499208 - DNA, 25 bp, Homo sapien
gagggaacctacagatgctacggtt

SEQ ID NO: 5499209 - DNA, 25 bp, Homo sapien
tgcgcagcatcaacggaacattcca

SEQ ID NO: 5499210 - DNA, 25 bp, Homo sapien
cagaagagacagtcatcctgcaatg

SEQ ID NO: 5499211 - DNA, 25 bp, Homo sapien
agtgtaagtcttgggtgtacgaagt

SEQ ID NO: 5499212 - DNA, 25 bp, Homo sapien
gaccaatgagcacgacccagtgcgt

SEQ ID NO: 5499213 - DNA, 25 bp, Homo sapien
gagagaagcccaaagttctgcctcg

SEQ ID NO: 5499214 - DNA, 25 bp, Homo sapien
gcaacgcaaagaatcgccagattta

SEQ ID NO: 5499215 - DNA, 25 bp, Homo sapien
atagtgcgagagtttccctgctttc

SEQ ID NO: 5499216 - DNA, 25 bp, Homo sapien
ctgcctcgagaagcatagaaaggct

SEQ ID NO: 5499217 - DNA, 25 bp, Homo sapien
tcatcaggagtatatcaaacgaggg

SEQ ID NO: 5499218 - DNA, 25 bp, Homo sapien
atgagtatgtttcggcatgatggcc

SEQ ID NO: 5499219 - DNA, 25 bp, Homo sapien
atccctaaagtaacgagcagagtgg

SEQ ID NO: 5499220 - DNA, 25 bp, Homo sapien
gaacttgcaacgtgcccgactcagc

SEQ ID NO: 5499221 - DNA, 25 bp, Homo sapien
cgacagcaaacattggtgctgggcc

SEQ ID NO: 5499222 - DNA, 25 bp, Homo sapien
agctgagcggaaatcaaaactatcg

SEQ ID NO: 5499223 - DNA, 25 bp, Homo sapien
acagaagaactcagcgttgactatt

SEQ ID NO: 5499224 - DNA, 25 bp, Homo sapien
tctacggtcattagggtcgttcagc

SEQ ID NO: 5499225 - DNA, 25 bp, Homo sapien
agttttgcaaggaagagagccttga

SEQ ID NO: 5499226 - DNA, 25 bp, Homo sapien
atcagtaacacatttggcccaggaa

SEQ ID NO: 5499227 - DNA, 25 bp, Homo sapien
aggtcatggtcactgttcggtggtc

SEQ ID NO: 5499228 - DNA, 25 bp, Homo sapien
tgtgacatgtaatgaaaagtgaatt

SEQ ID NO: 5499229 - DNA, 25 bp, Homo sapien
ccatgggaagttgacaacgaccaat

SEQ ID NO: 5499230 - DNA, 25 bp, Homo sapien
gcagcgaagacaactcaaaacatca

SEQ ID NO: 5499231 - DNA, 25 bp, Homo sapien
gtcgttcagcattcgaagcaaattg

SEQ ID NO: 5499232 - DNA, 25 bp, Homo sapien
gtggtggcttaagaagttttgcaag

SEQ ID NO: 5499233 - DNA, 25 bp, Homo sapien
gcccctaccaaagccagcctgctgc

SEQ ID NO: 5499234 - DNA, 25 bp, Homo sapien
tgtccttcaggcctaagaaactccc

SEQ ID NO: 5499235 - DNA, 25 bp, Homo sapien
agaggttttccacaggttctgatca

SEQ ID NO: 5499236 - DNA, 25 bp, Homo sapien
tccttgggtcacatggcccagtcgt

SEQ ID NO: 5499237 - DNA, 25 bp, Homo sapien
acatggcccagtcgtcaggttctgg

SEQ ID NO: 5499238 - DNA, 25 bp, Homo sapien
gctgctccacggcacctggacacta

SEQ ID NO: 5499239 - DNA, 25 bp, Homo sapien
tcattctgaacagaggccagaggtt

SEQ ID NO: 5499240 - DNA, 25 bp, Homo sapien
cttggtaaggatccctccttgggtc

SEQ ID NO: 5499241 - DNA, 25 bp, Homo sapien
acctggacactaccactgagggagg

SEQ ID NO: 5499242 - DNA, 25 bp, Homo sapien
acaggttctgatcaacagagttgtt

SEQ ID NO: 5499243 - DNA, 25 bp, Homo sapien
cggggaatcccatgggactcattct

SEQ ID NO: 5499244 - DNA, 25 bp, Homo sapien
ctaaacaacgttgcaactacatttg

SEQ ID NO: 5499245 - DNA, 25 bp, Homo sapien
caaatgtagttgcaacgttgtttag

SEQ ID NO: 5499246 - DNA, 25 bp, Homo sapien
tttgtgatgaaaatacctacctctt

SEQ ID NO: 5499247 - DNA, 25 bp, Homo sapien
ggtgtgagccaccactcctggccat

SEQ ID NO: 5499248 - DNA, 25 bp, Homo sapien
tcctggccatgatagttattttgtg

SEQ ID NO: 5499249 - DNA, 25 bp, Homo sapien
ttgaatgtttcagacagcagcaaaa

SEQ ID NO: 5499250 - DNA, 25 bp, Homo sapien
gcattcttttaataccagtgactac

SEQ ID NO: 5499251 - DNA, 25 bp, Homo sapien
tctgtatcagactaactgctgttgc

SEQ ID NO: 5499252 - DNA, 25 bp, Homo sapien
cagtgactactttgattcgtgaaac

SEQ ID NO: 5499253 - DNA, 25 bp, Homo sapien
gggacctatcaggacagagttcaca

SEQ ID NO: 5499254 - DNA, 25 bp, Homo sapien
aatttcctataatcagcactcccat

SEQ ID NO: 5499255 - DNA, 25 bp, Homo sapien
gacctatcaggacagagttcacatc

SEQ ID NO: 5499256 - DNA, 25 bp, Homo sapien
tttgattcgtgaaacaatgtatttt

SEQ ID NO: 5499257 - DNA, 25 bp, Homo sapien
ccgacgacgacagcaacaccgtgta

SEQ ID NO: 5499258 - DNA, 25 bp, Homo sapien
tacacggtgttgctgtcgtcgtcgg

SEQ ID NO: 5499259 - DNA, 25 bp, Homo sapien
ggcccgaagtactgatcgtagcgta

SEQ ID NO: 5499260 - DNA, 25 bp, Homo sapien
ggtcctctgtgaccgtgagcctggt

SEQ ID NO: 5499261 - DNA, 25 bp, Homo sapien
ccctaaccggcctgggcacctttga

SEQ ID NO: 5499262 - DNA, 25 bp, Homo sapien
gcctgggcacctttgaagctgctgg

SEQ ID NO: 5499263 - DNA, 25 bp, Homo sapien
tgatcgtagcgtactcccccctaac

SEQ ID NO: 5499264 - DNA, 25 bp, Homo sapien
cacggctgagtccccctgctctgtg

SEQ ID NO: 5499265 - DNA, 25 bp, Homo sapien
gaacacgtttttcaggtcctctgtg

SEQ ID NO: 5499266 - DNA, 25 bp, Homo sapien
ttcaggtcctctgtgaccgtgagcc

SEQ ID NO: 5499267 - DNA, 25 bp, Homo sapien
ccctgctctgtgcgctggatcttca

SEQ ID NO: 5499268 - DNA, 25 bp, Homo sapien
ggcacctttgaagctgctggcacgg

SEQ ID NO: 5499269 - DNA, 25 bp, Homo sapien
gtactgatcgtagcgtactcccccc

SEQ ID NO: 5499270 - DNA, 25 bp, Homo sapien
tacgctacgatcagtacttcgggcc

SEQ ID NO: 5499271 - DNA, 25 bp, Homo sapien
cacggtcacagaggacctgaaaaac

SEQ ID NO: 5499272 - DNA, 25 bp, Homo sapien
gaggtcgctgtgtttgagccatcag

SEQ ID NO: 5499273 - DNA, 25 bp, Homo sapien
tcagccgtgtatctccgtgccagca

SEQ ID NO: 5499274 - DNA, 25 bp, Homo sapien
gctcacggtcacagaggacctgaaa

SEQ ID NO: 5499275 - DNA, 25 bp, Homo sapien
tcacagaggacctgaaaaacgtgtt

SEQ ID NO: 5499276 - DNA, 25 bp, Homo sapien
ggtcgctgtgtttgagccatcagaa

SEQ ID NO: 5499277 - DNA, 25 bp, Homo sapien
ggggagtacgctacgatcagtactt

SEQ ID NO: 5499278 - DNA, 25 bp, Homo sapien
agaggacctgaaaaacgtgttccca

SEQ ID NO: 5499279 - DNA, 25 bp, Homo sapien
cgtgtatctccgtgccagcagcttc

SEQ ID NO: 5499280 - DNA, 25 bp, Homo sapien
cgctacgatcagtacttcgggccgg

SEQ ID NO: 5499281 - DNA, 25 bp, Homo sapien
ctggtggctctgccttgccattgtt

SEQ ID NO: 5499282 - DNA, 25 bp, Homo sapien
atcaggtgtacctttctggtggctc

SEQ ID NO: 5499283 - DNA, 25 bp, Homo sapien
gtgttgctacacttgtccatacagc

SEQ ID NO: 5499284 - DNA, 25 bp, Homo sapien
aacaggggatgggttccattctatt

SEQ ID NO: 5499285 - DNA, 25 bp, Homo sapien
ttggagacgacttgagtgtgttttt

SEQ ID NO: 5499286 - DNA, 25 bp, Homo sapien
gctgaatgcttcgaacttggagacg

SEQ ID NO: 5499287 - DNA, 25 bp, Homo sapien
tccatacagcagtacagaaagtggc

SEQ ID NO: 5499288 - DNA, 25 bp, Homo sapien
gcagtacagaaagtggctccactag

SEQ ID NO: 5499289 - DNA, 25 bp, Homo sapien
atctgtcatgaaaatcaggtgtacc

SEQ ID NO: 5499290 - DNA, 25 bp, Homo sapien
gagtgtgtttttgaccaagagaaac

SEQ ID NO: 5499291 - DNA, 25 bp, Homo sapien
gctccactagctaatacagcattac

SEQ ID NO: 5499292 - DNA, 25 bp, Homo sapien
gtggcagcaagagtttgcagccatg

SEQ ID NO: 5499293 - DNA, 25 bp, Homo sapien
ggtggcaccagattgcctgacaggc

SEQ ID NO: 5499294 - DNA, 25 bp, Homo sapien
aacctcggcgcactttgggattcag

SEQ ID NO: 5499295 - DNA, 25 bp, Homo sapien
ggaagcacagaaagctacaaacaag

SEQ ID NO: 5499296 - DNA, 25 bp, Homo sapien
gggccagacagtgtggccttgactc

SEQ ID NO: 5499297 - DNA, 25 bp, Homo sapien
agccatggatagttctgagaccctg

SEQ ID NO: 5499298 - DNA, 25 bp, Homo sapien
gagaggagcgtgaatgctctgtttc

SEQ ID NO: 5499299 - DNA, 25 bp, Homo sapien
acaaacaagcagccgggattgctta

SEQ ID NO: 5499300 - DNA, 25 bp, Homo sapien
ccctgtttccaagagtgcagcagcc

SEQ ID NO: 5499301 - DNA, 25 bp, Homo sapien
ccttgactcgagaggcctcttggtc

SEQ ID NO: 5499302 - DNA, 25 bp, Homo sapien
accacctgcagcgtgctttcggagg

SEQ ID NO: 5499303 - DNA, 25 bp, Homo sapien
ggacgccacctgtcctcggacttgt

SEQ ID NO: 5499304 - DNA, 25 bp, Homo sapien
acaagtccgaggacaggtggcgtcc

SEQ ID NO: 5499305 - DNA, 25 bp, Homo sapien
ggtgcagatccaggcactgatcagc

SEQ ID NO: 5499306 - DNA, 25 bp, Homo sapien
catagagcagctccagataagcagg

SEQ ID NO: 5499307 - DNA, 25 bp, Homo sapien
tgagtgacaggcaaagccaatatga

SEQ ID NO: 5499308 - DNA, 25 bp, Homo sapien
aatatgagatcatggccaagcagaa

SEQ ID NO: 5499309 - DNA, 25 bp, Homo sapien
aggaaatcaatgccctgaggggcca

SEQ ID NO: 5499310 - DNA, 25 bp, Homo sapien
gaggtcactgacctgcagtgcaccc

SEQ ID NO: 5499311 - DNA, 25 bp, Homo sapien
attcagctcggacctgccaagatcc

SEQ ID NO: 5499312 - DNA, 25 bp, Homo sapien
tggttcaccagctggactgaggaac

SEQ ID NO: 5499313 - DNA, 25 bp, Homo sapien
gcgtgaaagctcccttagaaggcac

SEQ ID NO: 5499314 - DNA, 25 bp, Homo sapien
cagcagtattgaagcccagctgggc

SEQ ID NO: 5499315 - DNA, 25 bp, Homo sapien
caatgctcaactggctgcagatgac

SEQ ID NO: 5499316 - DNA, 25 bp, Homo sapien
aaggcacagtcgtcctaggactcgc

SEQ ID NO: 5499317 - DNA, 25 bp, Homo sapien
gcgagtcctaggacgactgtgcctt

SEQ ID NO: 5499318 - DNA, 25 bp, Homo sapien
gttgtagtggtgagctgatacattc

SEQ ID NO: 5499319 - DNA, 25 bp, Homo sapien
gttctgtgacttgacagtggctccc

SEQ ID NO: 5499320 - DNA, 25 bp, Homo sapien
ggagacctccctttccaagcctgcc

SEQ ID NO: 5499321 - DNA, 25 bp, Homo sapien
tccatcccgtcctgagagccccagg

SEQ ID NO: 5499322 - DNA, 25 bp, Homo sapien
tcgacctctaaacagatccctcctc

SEQ ID NO: 5499323 - DNA, 25 bp, Homo sapien
gcctgcctggacggctgttctgtga

SEQ ID NO: 5499324 - DNA, 25 bp, Homo sapien
catcaacacgaccaccgtcagcacg

SEQ ID NO: 5499325 - DNA, 25 bp, Homo sapien
cccaaagccagcccccttcatctgt

SEQ ID NO: 5499326 - DNA, 25 bp, Homo sapien
atcgggtcaggcaagtccatcccgt

SEQ ID NO: 5499327 - DNA, 25 bp, Homo sapien
cggggtccccagaatcactatcagt

SEQ ID NO: 5499328 - DNA, 25 bp, Homo sapien
gcatcatcggcaacatcaacacgac

SEQ ID NO: 5499329 - DNA, 25 bp, Homo sapien
cccacagctaccaaaaatgcagcaa

SEQ ID NO: 5499330 - DNA, 25 bp, Homo sapien
acaccaacaaaggaaacattgtttg

SEQ ID NO: 5499331 - DNA, 25 bp, Homo sapien
gtttcattgcagccccatggatacc

SEQ ID NO: 5499332 - DNA, 25 bp, Homo sapien
taccttagcccttatgcagccagca

SEQ ID NO: 5499333 - DNA, 25 bp, Homo sapien
aaagccacccacgtatctccaagtt

SEQ ID NO: 5499334 - DNA, 25 bp, Homo sapien
ttgcagccccatggataccttagcc

SEQ ID NO: 5499335 - DNA, 25 bp, Homo sapien
gcatctggacagtttctaatggtgt

SEQ ID NO: 5499336 - DNA, 25 bp, Homo sapien
caggtaatattcagcccccacagct

SEQ ID NO: 5499337 - DNA, 25 bp, Homo sapien
gcccttatgcagccagcatctggac

SEQ ID NO: 5499338 - DNA, 25 bp, Homo sapien
atgcagccagcatctggacagtttc

SEQ ID NO: 5499339 - DNA, 25 bp, Homo sapien
gctaccaaaaatgcagcaaatcctc

SEQ ID NO: 5499340 - DNA, 25 bp, Homo sapien
gcttcccagtatccggaaggcctgc

SEQ ID NO: 5499341 - DNA, 25 bp, Homo sapien
gcacgttcccgaatgtggaaggtgg

SEQ ID NO: 5499342 - DNA, 25 bp, Homo sapien
catgttcgtaatttcgcggctggcc

SEQ ID NO: 5499343 - DNA, 25 bp, Homo sapien
cggcccttcaagtagaatgaggctc

SEQ ID NO: 5499344 - DNA, 25 bp, Homo sapien
ccagcgcagacttcatggtgtggag

SEQ ID NO: 5499345 - DNA, 25 bp, Homo sapien
gtagctgccgacgacatccttcacc

SEQ ID NO: 5499346 - DNA, 25 bp, Homo sapien
tgctggacgaactcctcggtgatga

SEQ ID NO: 5499347 - DNA, 25 bp, Homo sapien
aggcctgtcaggaccctgctgttgc

SEQ ID NO: 5499348 - DNA, 25 bp, Homo sapien
gagcctgaatatgcccctccatcac

SEQ ID NO: 5499349 - DNA, 25 bp, Homo sapien
gtcagcctctgcggtgcatcccgaa

SEQ ID NO: 5499350 - DNA, 25 bp, Homo sapien
tgctcagagccaccctgtccatgct

SEQ ID NO: 5499351 - DNA, 25 bp, Homo sapien
ttcattgcaaagcactgtcagtgaa

SEQ ID NO: 5499352 - DNA, 25 bp, Homo sapien
ctgccggatcatctttcatggtggc

SEQ ID NO: 5499353 - DNA, 25 bp, Homo sapien
cataaccaccataatctgccggatc

SEQ ID NO: 5499354 - DNA, 25 bp, Homo sapien
ttccaaggaaatacacacatctcaa

SEQ ID NO: 5499355 - DNA, 25 bp, Homo sapien
tcctcctccaggaaccacacctttc

SEQ ID NO: 5499356 - DNA, 25 bp, Homo sapien
ttcatggtggcttttaatcctcctc

SEQ ID NO: 5499357 - DNA, 25 bp, Homo sapien
ttcaagtcatcaatttccaaggaaa

SEQ ID NO: 5499358 - DNA, 25 bp, Homo sapien
actaagacttccaaaaaactggcat

SEQ ID NO: 5499359 - DNA, 25 bp, Homo sapien
aaaactggcataatatagtgacttt

SEQ ID NO: 5499360 - DNA, 25 bp, Homo sapien
acacacatctcaaactaagacttcc

SEQ ID NO: 5499361 - DNA, 25 bp, Homo sapien
gcactgtcagtgaattggcaatttt

SEQ ID NO: 5499362 - DNA, 25 bp, Homo sapien
ttcataaaaccaatagtagacctgt

SEQ ID NO: 5499363 - DNA, 25 bp, Homo sapien
acaggtctactattggttttatgaa

SEQ ID NO: 5499364 - DNA, 25 bp, Homo sapien
caacaaggaagtgatccctagcaca

SEQ ID NO: 5499365 - DNA, 25 bp, Homo sapien
cttaaaactccggccccactcaaca

SEQ ID NO: 5499366 - DNA, 25 bp, Homo sapien
cctcttaaaactccggccccactca

SEQ ID NO: 5499367 - DNA, 25 bp, Homo sapien
tgatccctagcacagaagacagtag

SEQ ID NO: 5499368 - DNA, 25 bp, Homo sapien
gtgactgaagatgtgtcttagggga

SEQ ID NO: 5499369 - DNA, 25 bp, Homo sapien
ggaagtgatccctagcacagaagac

SEQ ID NO: 5499370 - DNA, 25 bp, Homo sapien
caaggaagtgatccctagcacagaa

SEQ ID NO: 5499371 - DNA, 25 bp, Homo sapien
agtgatccctagcacagaagacagt

SEQ ID NO: 5499372 - DNA, 25 bp, Homo sapien
agatcctcttaaaactccggcccca

SEQ ID NO: 5499373 - DNA, 25 bp, Homo sapien
aaactccggccccactcaacaagga

SEQ ID NO: 5499374 - DNA, 25 bp, Homo sapien
gaggaggagcagaagatcctcttaa

SEQ ID NO: 5499375 - DNA, 25 bp, Homo sapien
atgtccaaagctgagaagaatggtg

SEQ ID NO: 5499376 - DNA, 25 bp, Homo sapien
aagtttgatgagaatgccaagactg

SEQ ID NO: 5499377 - DNA, 25 bp, Homo sapien
catgataatagcagattggcacttc

SEQ ID NO: 5499378 - DNA, 25 bp, Homo sapien
tcaaagacctaatgtccaaagctga

SEQ ID NO: 5499379 - DNA, 25 bp, Homo sapien
gtgctcaacaacatggcggtaggaa

SEQ ID NO: 5499380 - DNA, 25 bp, Homo sapien
ggacaaagtcaatgagatgattatt

SEQ ID NO: 5499381 - DNA, 25 bp, Homo sapien
tgatgagaatgccaagactggccaa

SEQ ID NO: 5499382 - DNA, 25 bp, Homo sapien
aatggtgtgaagattaccttgcctg

SEQ ID NO: 5499383 - DNA, 25 bp, Homo sapien
atgagatgattattggtggtggaat

SEQ ID NO: 5499384 - DNA, 25 bp, Homo sapien
agggagccaagattgtcaaagacct

SEQ ID NO: 5499385 - DNA, 25 bp, Homo sapien
aatgccaagtggatgtgaaatagct

SEQ ID NO: 5499386 - DNA, 25 bp, Homo sapien
gcaccggcccttcacggagtctgca

SEQ ID NO: 5499387 - DNA, 25 bp, Homo sapien
ttgcagatacagcgtgtttttggaa

SEQ ID NO: 5499388 - DNA, 25 bp, Homo sapien
actaccactaataagtgagacccac

SEQ ID NO: 5499389 - DNA, 25 bp, Homo sapien
gccctcgactctcagggaattcatt

SEQ ID NO: 5499390 - DNA, 25 bp, Homo sapien
cggagtctgcataatatgtggtttc

SEQ ID NO: 5499391 - DNA, 25 bp, Homo sapien
tctcagggaattcatttgcagatac

SEQ ID NO: 5499392 - DNA, 25 bp, Homo sapien
ggacccacctcatggcagagctggt

SEQ ID NO: 5499393 - DNA, 25 bp, Homo sapien
tccagccccttccctggcgcctggc

SEQ ID NO: 5499394 - DNA, 25 bp, Homo sapien
gtttttggaattgtctctggagatg

SEQ ID NO: 5499395 - DNA, 25 bp, Homo sapien
aagtgagacccactccagccccttc

SEQ ID NO: 5499396 - DNA, 25 bp, Homo sapien
gaattgtctctggagatggtgcacc

SEQ ID NO: 5499397 - DNA, 25 bp, Homo sapien
tcaccacaactcagatgtgggtaac

SEQ ID NO: 5499398 - DNA, 25 bp, Homo sapien
tgattagtggcagagattacctgga

SEQ ID NO: 5499399 - DNA, 25 bp, Homo sapien
ttgtcacggctgctatgcctgttgt

SEQ ID NO: 5499400 - DNA, 25 bp, Homo sapien
actcagatgtgggtaacaccctttc

SEQ ID NO: 5499401 - DNA, 25 bp, Homo sapien
cttggcattcagaaattcctctgtg

SEQ ID NO: 5499402 - DNA, 25 bp, Homo sapien
ctgtgcattaatgcctgtgcccttc

SEQ ID NO: 5499403 - DNA, 25 bp, Homo sapien
gtgttgttgtaggatgctctaatgt

SEQ ID NO: 5499404 - DNA, 25 bp, Homo sapien
gctctaatgtgtgcagttgggatct

SEQ ID NO: 5499405 - DNA, 25 bp, Homo sapien
cctttcctgcagcttttgtcacggc

SEQ ID NO: 5499406 - DNA, 25 bp, Homo sapien
tagtggcagagattacctggatctg

SEQ ID NO: 5499407 - DNA, 25 bp, Homo sapien
gcctgttgtctgtgcattaatgcct

SEQ ID NO: 5499408 - DNA, 25 bp, Homo sapien
tcttcagctctggcgccttcatccc

SEQ ID NO: 5499409 - DNA, 25 bp, Homo sapien
tccaaacccctctcggccgggtgca

SEQ ID NO: 5499410 - DNA, 25 bp, Homo sapien
gctggtcttcagctctggcgccttc

SEQ ID NO: 5499411 - DNA, 25 bp, Homo sapien
cctctaccttcattccaaacccctc

SEQ ID NO: 5499412 - DNA, 25 bp, Homo sapien
ttctcgcctggccccctacccacat

SEQ ID NO: 5499413 - DNA, 25 bp, Homo sapien
ccacatcctgccaccacccgagggg

SEQ ID NO: 5499414 - DNA, 25 bp, Homo sapien
ccagtacgtcaaggacctgctcatc

SEQ ID NO: 5499415 - DNA, 25 bp, Homo sapien
cccctacccacatcctgccaccacc

SEQ ID NO: 5499416 - DNA, 25 bp, Homo sapien
cacctcaaccttctcgcctggcccc

SEQ ID NO: 5499417 - DNA, 25 bp, Homo sapien
cgagatccagtacgtcaaggacctg

SEQ ID NO: 5499418 - DNA, 25 bp, Homo sapien
cctgctcatcgaggtttacaaggcc

SEQ ID NO: 5499419 - DNA, 25 bp, Homo sapien
ccggtgtctctggagatgcagagtc

SEQ ID NO: 5499420 - DNA, 25 bp, Homo sapien
catctgcacatgcagggagttctgg

SEQ ID NO: 5499421 - DNA, 25 bp, Homo sapien
cagaatcttcaaaagtgaatccaga

SEQ ID NO: 5499422 - DNA, 25 bp, Homo sapien
agcgacccactccagccccttccct

SEQ ID NO: 5499423 - DNA, 25 bp, Homo sapien
atttacaccactaccagcgacccac

SEQ ID NO: 5499424 - DNA, 25 bp, Homo sapien
agccccttccctggaggttggcgga

SEQ ID NO: 5499425 - DNA, 25 bp, Homo sapien
aaggccgtgtcctcgcctctcagac

SEQ ID NO: 5499426 - DNA, 25 bp, Homo sapien
tctcagactgttcatctgcacatgc

SEQ ID NO: 5499427 - DNA, 25 bp, Homo sapien
gagtcggcccttcacagagtctgtg

SEQ ID NO: 5499428 - DNA, 25 bp, Homo sapien
gttggcggacccactccatgtcaga

SEQ ID NO: 5499429 - DNA, 25 bp, Homo sapien
gagtctgtgtaatctgtggtatcac

SEQ ID NO: 5499430 - DNA, 25 bp, Homo sapien
ttattgtgagaacatgggatatctg

SEQ ID NO: 5499431 - DNA, 25 bp, Homo sapien
tgtcactggggctagctaaacaata

SEQ ID NO: 5499432 - DNA, 25 bp, Homo sapien
gggctagctggctcagacttgtcac

SEQ ID NO: 5499433 - DNA, 25 bp, Homo sapien
gctggctcagacttgtcactggggc

SEQ ID NO: 5499434 - DNA, 25 bp, Homo sapien
gggctagctaaacaataaagagtta

SEQ ID NO: 5499435 - DNA, 25 bp, Homo sapien
acttgtcactggggctagctaaaca

SEQ ID NO: 5499436 - DNA, 25 bp, Homo sapien
aaagagttattgtgagaacatggga

SEQ ID NO: 5499437 - DNA, 25 bp, Homo sapien
ataagatgcataaagtcactggggc

SEQ ID NO: 5499438 - DNA, 25 bp, Homo sapien
tgtgagaacatgggatatctgtctc

SEQ ID NO: 5499439 - DNA, 25 bp, Homo sapien
gctcagacttgtcactggggctagc

SEQ ID NO: 5499440 - DNA, 25 bp, Homo sapien
agatgcataaagtcactggggctag

SEQ ID NO: 5499441 - DNA, 25 bp, Homo sapien
tctctccattcaccaagtccagctg

SEQ ID NO: 5499442 - DNA, 25 bp, Homo sapien
tcgcccacatttgaacgaatgtcta

SEQ ID NO: 5499443 - DNA, 25 bp, Homo sapien
aatgtaacagcaattcgttggtctt

SEQ ID NO: 5499444 - DNA, 25 bp, Homo sapien
gtttggctgtcttgttcaatgtaac

SEQ ID NO: 5499445 - DNA, 25 bp, Homo sapien
gcagccacaggaatataaatacagc

SEQ ID NO: 5499446 - DNA, 25 bp, Homo sapien
cttcaggttgggtctctgtgatgtg

SEQ ID NO: 5499447 - DNA, 25 bp, Homo sapien
ggcactgtctgaataagtacacttg

SEQ ID NO: 5499448 - DNA, 25 bp, Homo sapien
taaatacagctcgaatggatgtcat

SEQ ID NO: 5499449 - DNA, 25 bp, Homo sapien
ggaagtagtttgaggcactgtctga

SEQ ID NO: 5499450 - DNA, 25 bp, Homo sapien
tgcttataccaagggaagtagtttg

SEQ ID NO: 5499451 - DNA, 25 bp, Homo sapien
gtacacttgataacagcgctgtctc

SEQ ID NO: 5499452 - DNA, 25 bp, Homo sapien
ccactcgtagatctgggacagagtg

SEQ ID NO: 5499453 - DNA, 25 bp, Homo sapien
ccgggtccagctccacttcgagcgg

SEQ ID NO: 5499454 - DNA, 25 bp, Homo sapien
cttgccctccgggtgccagcacccg

SEQ ID NO: 5499455 - DNA, 25 bp, Homo sapien
cactcgtagatctgggacagagtga

SEQ ID NO: 5499456 - DNA, 25 bp, Homo sapien
ccgcgacgaacatttcctcggctgc

SEQ ID NO: 5499457 - DNA, 25 bp, Homo sapien
gcgacgaacatttcctcggctgccc

SEQ ID NO: 5499458 - DNA, 25 bp, Homo sapien
gcagcgcctgtgtacccccgctcag

SEQ ID NO: 5499459 - DNA, 25 bp, Homo sapien
cctcctcctcggggatcatggagtc

SEQ ID NO: 5499460 - DNA, 25 bp, Homo sapien
ctccgggtccagctccacttcgagc

SEQ ID NO: 5499461 - DNA, 25 bp, Homo sapien
ttccgccgcgacgaacatttcctcg

SEQ ID NO: 5499462 - DNA, 25 bp, Homo sapien
ggtccagctccacttcgagcggaga

SEQ ID NO: 5499463 - DNA, 25 bp, Homo sapien
tgtaatatcatgacttttcccttgc

SEQ ID NO: 5499464 - DNA, 25 bp, Homo sapien
gcacacttcaccacactagtcttga

SEQ ID NO: 5499465 - DNA, 25 bp, Homo sapien
gatggctctctattaccaagcaatt

SEQ ID NO: 5499466 - DNA, 25 bp, Homo sapien
actagtcttgatcttggttggcctc

SEQ ID NO: 5499467 - DNA, 25 bp, Homo sapien
acattcaaggtttacaagattgcac

SEQ ID NO: 5499468 - DNA, 25 bp, Homo sapien
ggcactccgtatgggtctcgtggtg

SEQ ID NO: 5499469 - DNA, 25 bp, Homo sapien
caaggtttacaagattgcacacttc

SEQ ID NO: 5499470 - DNA, 25 bp, Homo sapien
cataattttcaccatcttcggctct

SEQ ID NO: 5499471 - DNA, 25 bp, Homo sapien
tctcgtggtgttatttaagatttac

SEQ ID NO: 5499472 - DNA, 25 bp, Homo sapien
tgaccgacctgcaaacctctgatgg

SEQ ID NO: 5499473 - DNA, 25 bp, Homo sapien
gacctgcaaacctctgatggctctc

SEQ ID NO: 5499474 - DNA, 25 bp, Homo sapien
gctgagaaagaagtacctacgcatg

SEQ ID NO: 5499475 - DNA, 25 bp, Homo sapien
gctaccaggcccgatgctatgctaa

SEQ ID NO: 5499476 - DNA, 25 bp, Homo sapien
ggaaaccatccgaatcagtgcggcc

SEQ ID NO: 5499477 - DNA, 25 bp, Homo sapien
cgtgccggtcaagtggcctatctag

SEQ ID NO: 5499478 - DNA, 25 bp, Homo sapien
cattcacgtttgatgagaagagggc

SEQ ID NO: 5499479 - DNA, 25 bp, Homo sapien
agcatgtggtgtcctggaaaccatc

SEQ ID NO: 5499480 - DNA, 25 bp, Homo sapien
gcctgcatccggatccagaagacca

SEQ ID NO: 5499481 - DNA, 25 bp, Homo sapien
tactggcgcatgtatgtggtccgca

SEQ ID NO: 5499482 - DNA, 25 bp, Homo sapien
tttctgcgcagaaccaaggcagcaa

SEQ ID NO: 5499483 - DNA, 25 bp, Homo sapien
gccatcaccatgcagagatacgtgc

SEQ ID NO: 5499484 - DNA, 25 bp, Homo sapien
actgatactggacaaggacaaatac

SEQ ID NO: 5499485 - DNA, 25 bp, Homo sapien
acacaccagatcagcctgcacgtgg

SEQ ID NO: 5499486 - DNA, 25 bp, Homo sapien
gcacacgtaccccagcgagtgcatg

SEQ ID NO: 5499487 - DNA, 25 bp, Homo sapien
cccgtccccatgcctcggggtgcag

SEQ ID NO: 5499488 - DNA, 25 bp, Homo sapien
gcgtgtgcccctctgaatgcgtggc

SEQ ID NO: 5499489 - DNA, 25 bp, Homo sapien
aggcgtgctcgagcctctacgatcc

SEQ ID NO: 5499490 - DNA, 25 bp, Homo sapien
gcccctctgaatgcgtggctttggc

SEQ ID NO: 5499491 - DNA, 25 bp, Homo sapien
cgctgcgtgtgcccctctgaatgcg

SEQ ID NO: 5499492 - DNA, 25 bp, Homo sapien
acgcctgcacacaccagatcagcct

SEQ ID NO: 5499493 - DNA, 25 bp, Homo sapien
ggcaggcagcgtgtgaatgcctgca

SEQ ID NO: 5499494 - DNA, 25 bp, Homo sapien
cctctacgatcctgtgtgcggcagc

SEQ ID NO: 5499495 - DNA, 25 bp, Homo sapien
cacgtaccccagcgagtgcatgctg

SEQ ID NO: 5499496 - DNA, 25 bp, Homo sapien
gcggcctgctgttgtgatgcagggc

SEQ ID NO: 5499497 - DNA, 25 bp, Homo sapien
gagcgagtgcatgagatcttcaaac

SEQ ID NO: 5499498 - DNA, 25 bp, Homo sapien
atcttcaaacgcatctcagatgagg

SEQ ID NO: 5499499 - DNA, 25 bp, Homo sapien
ccagagtcgatgattgtcacagtgc

SEQ ID NO: 5499500 - DNA, 25 bp, Homo sapien
atgattgtcacagtgctgcccgtgc

SEQ ID NO: 5499501 - DNA, 25 bp, Homo sapien
gctctgcccgtaaccaggtcagtgg

SEQ ID NO: 5499502 - DNA, 25 bp, Homo sapien
gagaagaagatcctgctgagtccag

SEQ ID NO: 5499503 - DNA, 25 bp, Homo sapien
gaagatcctgctgagtccagagcga

SEQ ID NO: 5499504 - DNA, 25 bp, Homo sapien
ttgtgatgcagggctctgcccgtaa

SEQ ID NO: 5499505 - DNA, 25 bp, Homo sapien
tgggcatcgagccccgctatgcacg

SEQ ID NO: 5499506 - DNA, 25 bp, Homo sapien
ggaagcacgttaatgaggactctca

SEQ ID NO: 5499507 - DNA, 25 bp, Homo sapien
ctctgacaagctttcgtatggtttt

SEQ ID NO: 5499508 - DNA, 25 bp, Homo sapien
tatgacccgaatgaaaagagtaaac

SEQ ID NO: 5499509 - DNA, 25 bp, Homo sapien
caaaaagcatatccgttcaaaaatt

SEQ ID NO: 5499510 - DNA, 25 bp, Homo sapien
tgacccagggtcaactgtgactgtt

SEQ ID NO: 5499511 - DNA, 25 bp, Homo sapien
tggcctcaaaaaaatcaagggtgta

SEQ ID NO: 5499512 - DNA, 25 bp, Homo sapien
gttggtctgaatatattggtagtaa

SEQ ID NO: 5499513 - DNA, 25 bp, Homo sapien
ttcagatatggaagctgtgtggaaa

SEQ ID NO: 5499514 - DNA, 25 bp, Homo sapien
cagcacctcgccggtactgtgtgag

SEQ ID NO: 5499515 - DNA, 25 bp, Homo sapien
tcaaagtgaagactacagcacctcg

SEQ ID NO: 5499516 - DNA, 25 bp, Homo sapien
gtgaggcccaacagtggaattattg

SEQ ID NO: 5499517 - DNA, 25 bp, Homo sapien
gaggcaaaacctgatgaattaatgg

SEQ ID NO: 5499518 - DNA, 25 bp, Homo sapien
cctgcatcacaacagcaggccgcac

SEQ ID NO: 5499519 - DNA, 25 bp, Homo sapien
acgtgcttccattccgcatacagct

SEQ ID NO: 5499520 - DNA, 25 bp, Homo sapien
ttacgggcagagccctgcatcacaa

SEQ ID NO: 5499521 - DNA, 25 bp, Homo sapien
tccgcatacagctctaggccagaac

SEQ ID NO: 5499522 - DNA, 25 bp, Homo sapien
cgctctggactcagcaggatcttct

SEQ ID NO: 5499523 - DNA, 25 bp, Homo sapien
atgcgtttgaagatctcatgcactc

SEQ ID NO: 5499524 - DNA, 25 bp, Homo sapien
tccattccgcatacagctctaggcc

SEQ ID NO: 5499525 - DNA, 25 bp, Homo sapien
gatctcatgcactcgctctggactc

SEQ ID NO: 5499526 - DNA, 25 bp, Homo sapien
tgcccagcacaaaacactcctcatc

SEQ ID NO: 5499527 - DNA, 25 bp, Homo sapien
tgagagtcctcattaacgtgcttcc

SEQ ID NO: 5499528 - DNA, 25 bp, Homo sapien
ctcatctgagatgcgtttgaagatc

SEQ ID NO: 5499529 - DNA, 25 bp, Homo sapien
ctaccagagaagattgtggtgtacc

SEQ ID NO: 5499530 - DNA, 25 bp, Homo sapien
tacaataacaagctgtgagtgggtg

SEQ ID NO: 5499531 - DNA, 25 bp, Homo sapien
gcccatcatgtacggcagggctgtg

SEQ ID NO: 5499532 - DNA, 25 bp, Homo sapien
gccctgatcatatgcagaggctgac

SEQ ID NO: 5499533 - DNA, 25 bp, Homo sapien
gtactggaattggcctggcaccatc

SEQ ID NO: 5499534 - DNA, 25 bp, Homo sapien
cagggctgtggcattcctacgcatt

SEQ ID NO: 5499535 - DNA, 25 bp, Homo sapien
caccgcaaacctgagccctgatcat

SEQ ID NO: 5499536 - DNA, 25 bp, Homo sapien
ttccaggctacacaatgcgagtggg

SEQ ID NO: 5499537 - DNA, 25 bp, Homo sapien
ctcctggaactgtggtagatcatac

SEQ ID NO: 5499538 - DNA, 25 bp, Homo sapien
gtccgtagcctgagggctctgtgag

SEQ ID NO: 5499539 - DNA, 25 bp, Homo sapien
gtgggcctctcactgactgtggtcc

SEQ ID NO: 5499540 - DNA, 25 bp, Homo sapien
ctgtggacatctaacaagccagttc

SEQ ID NO: 5499541 - DNA, 25 bp, Homo sapien
taaaagaaggatagaatacaaagta

SEQ ID NO: 5499542 - DNA, 25 bp, Homo sapien
gccaagtgccagaataatgtaacat

SEQ ID NO: 5499543 - DNA, 25 bp, Homo sapien
atgggaataacgttgccaagtgcca

SEQ ID NO: 5499544 - DNA, 25 bp, Homo sapien
tggaggccattgcagccaatttcca

SEQ ID NO: 5499545 - DNA, 25 bp, Homo sapien
gttaagtacctggacatgcgactcc

SEQ ID NO: 5499546 - DNA, 25 bp, Homo sapien
acagtcttattgtaggggcaacctc

SEQ ID NO: 5499547 - DNA, 25 bp, Homo sapien
ggcagaagatgtagggtctctgtaa

SEQ ID NO: 5499548 - DNA, 25 bp, Homo sapien
gactggacagataaaacgatgtagt

SEQ ID NO: 5499549 - DNA, 25 bp, Homo sapien
aattggaaggaatgcattgctgcag

SEQ ID NO: 5499550 - DNA, 25 bp, Homo sapien
tgggctaaggcaaagacttgctttc

SEQ ID NO: 5499551 - DNA, 25 bp, Homo sapien
ccgaggttaaatggtccacgtttca

SEQ ID NO: 5499552 - DNA, 25 bp, Homo sapien
cgtagacatgcgctttgggaaaaaa

SEQ ID NO: 5499553 - DNA, 25 bp, Homo sapien
aaactggaagcctctaggtgctatc

SEQ ID NO: 5499554 - DNA, 25 bp, Homo sapien
tcaagtgagtgagttcccctctact

SEQ ID NO: 5499555 - DNA, 25 bp, Homo sapien
atgaaattggctgaataattactcc

SEQ ID NO: 5499556 - DNA, 25 bp, Homo sapien
ctataatgaagaatactggcacagg

SEQ ID NO: 5499557 - DNA, 25 bp, Homo sapien
caggcaatgctcactcgaaacttca

SEQ ID NO: 5499558 - DNA, 25 bp, Homo sapien
gaagaatactggcacaggcaatgct

SEQ ID NO: 5499559 - DNA, 25 bp, Homo sapien
ttggttttggaatgcttgataagtt

SEQ ID NO: 5499560 - DNA, 25 bp, Homo sapien
tagctaatgaactcatcaccaggac

SEQ ID NO: 5499561 - DNA, 25 bp, Homo sapien
tactcctctgcctggcgtagacatg

SEQ ID NO: 5499562 - DNA, 25 bp, Homo sapien
agtgctgagcggaactagaccccgg

SEQ ID NO: 5499563 - DNA, 25 bp, Homo sapien
ccggggtctagttccgctcagcact

SEQ ID NO: 5499564 - DNA, 25 bp, Homo sapien
tgtttgaaaacgggacccacagatg

SEQ ID NO: 5499565 - DNA, 25 bp, Homo sapien
tgtgccatgcaacaaactgggtcac

SEQ ID NO: 5499566 - DNA, 25 bp, Homo sapien
acatcatgaaaaagcccgttccggc

SEQ ID NO: 5499567 - DNA, 25 bp, Homo sapien
gtaaacacaacgcaggaacatcatg

SEQ ID NO: 5499568 - DNA, 25 bp, Homo sapien
aacaagtgcagtatctgcgaggcac

SEQ ID NO: 5499569 - DNA, 25 bp, Homo sapien
tatgaagtgagcacaagctgtttga

SEQ ID NO: 5499570 - DNA, 25 bp, Homo sapien
gatgtgccccaacggagttaccaca

SEQ ID NO: 5499571 - DNA, 25 bp, Homo sapien
acaaagcagctcacagcgcatctct

SEQ ID NO: 5499572 - DNA, 25 bp, Homo sapien
attacagagtaaaatcgaagatcac

SEQ ID NO: 5499573 - DNA, 25 bp, Homo sapien
aatgtgaaacagagatatgaagtga

SEQ ID NO: 5499574 - DNA, 25 bp, Homo sapien
gaagtaacgcggtcagattcacctt

SEQ ID NO: 5499575 - DNA, 25 bp, Homo sapien
catcagcacctttgggaccagcatc

SEQ ID NO: 5499576 - DNA, 25 bp, Homo sapien
ttgggaccagcatcacctctgtcac

SEQ ID NO: 5499577 - DNA, 25 bp, Homo sapien
gtcagaccacggacgccatctttgc

SEQ ID NO: 5499578 - DNA, 25 bp, Homo sapien
gacgccatctttgccaggagagcca

SEQ ID NO: 5499579 - DNA, 25 bp, Homo sapien
gccatctttgccaggagagccatca

SEQ ID NO: 5499580 - DNA, 25 bp, Homo sapien
gtcccccttgtcaccaggggcacca

SEQ ID NO: 5499581 - DNA, 25 bp, Homo sapien
aggagagccatcagcacctttggga

SEQ ID NO: 5499582 - DNA, 25 bp, Homo sapien
ccccttgtcaccaggggcaccagca

SEQ ID NO: 5499583 - DNA, 25 bp, Homo sapien
ctcataaagctcctcgggaatgggg

SEQ ID NO: 5499584 - DNA, 25 bp, Homo sapien
gcacctttgggaccagcatcacctc

SEQ ID NO: 5499585 - DNA, 25 bp, Homo sapien
atcacctctgtcacccttaggccct

SEQ ID NO: 5499586 - DNA, 25 bp, Homo sapien
ttcgtctgggtgaaaaatgtaagtc

SEQ ID NO: 5499587 - DNA, 25 bp, Homo sapien
aattcgtctgggtgaaaaatgtaag

SEQ ID NO: 5499588 - DNA, 25 bp, Homo sapien
ggtgaaaaatgtaagtccagaccca

SEQ ID NO: 5499589 - DNA, 25 bp, Homo sapien
aaaatgtaagtccagacccacgtac

SEQ ID NO: 5499590 - DNA, 25 bp, Homo sapien
ccacgtacaattcgtctgggtgaaa

SEQ ID NO: 5499591 - DNA, 25 bp, Homo sapien
gtacaattcgttcagctccatggat

SEQ ID NO: 5499592 - DNA, 25 bp, Homo sapien
tacaattcgtctgggtgaaaaatgt

SEQ ID NO: 5499593 - DNA, 25 bp, Homo sapien
taagtccagacccacgtacaattcg

SEQ ID NO: 5499594 - DNA, 25 bp, Homo sapien
cgtctgggtgaaaaatgtaagtcca

SEQ ID NO: 5499595 - DNA, 25 bp, Homo sapien
caattcgttcagctccatggatggc

SEQ ID NO: 5499596 - DNA, 25 bp, Homo sapien
tgggtgaaaaatgtaagtccagacc

SEQ ID NO: 5499597 - DNA, 25 bp, Homo sapien
cagcaaagctgttgacaaaggcaga

SEQ ID NO: 5499598 - DNA, 25 bp, Homo sapien
aggaagagcagtttgggactattta

SEQ ID NO: 5499599 - DNA, 25 bp, Homo sapien
cagtaactatgagccctgaagcttc

SEQ ID NO: 5499600 - DNA, 25 bp, Homo sapien
cagctatctggtccaaggctaggtc

SEQ ID NO: 5499601 - DNA, 25 bp, Homo sapien
gtcctcatgggaaaagtctgaagct

SEQ ID NO: 5499602 - DNA, 25 bp, Homo sapien
tgaaaatgtctggaattgcaagttc

SEQ ID NO: 5499603 - DNA, 25 bp, Homo sapien
tgacaacagtcacatgcacagcaga

SEQ ID NO: 5499604 - DNA, 25 bp, Homo sapien
tgattggaatatagcagaagaccta

SEQ ID NO: 5499605 - DNA, 25 bp, Homo sapien
atatgtgcagtttggtggtgctttc

SEQ ID NO: 5499606 - DNA, 25 bp, Homo sapien
ctatatgaagttagaggtagaaaaa

SEQ ID NO: 5499607 - DNA, 25 bp, Homo sapien
aggtcatcgataaagctgaacactc

SEQ ID NO: 5499608 - DNA, 25 bp, Homo sapien
ctgatggctctcctggcaaagatgg

SEQ ID NO: 5499609 - DNA, 25 bp, Homo sapien
gaccccattcccgaggagctttatg

SEQ ID NO: 5499610 - DNA, 25 bp, Homo sapien
cattcccgaggagctttatgagatg

SEQ ID NO: 5499611 - DNA, 25 bp, Homo sapien
ggtctgaccggccccattggtcctc

SEQ ID NO: 5499612 - DNA, 25 bp, Homo sapien
tatgagatgctgagtgaccactcga

SEQ ID NO: 5499613 - DNA, 25 bp, Homo sapien
gctttatgagatgctgagtgaccac

SEQ ID NO: 5499614 - DNA, 25 bp, Homo sapien
agtgaccactcgatccgctcctttg

SEQ ID NO: 5499615 - DNA, 25 bp, Homo sapien
gagatgctgagtgaccactcgatcc

SEQ ID NO: 5499616 - DNA, 25 bp, Homo sapien
ccattggtcctcctggccctgctgg

SEQ ID NO: 5499617 - DNA, 25 bp, Homo sapien
gtgctgatggctctcctggcaaaga

SEQ ID NO: 5499618 - DNA, 25 bp, Homo sapien
gctgagtgaccactcgatccgctcc

SEQ ID NO: 5499619 - DNA, 25 bp, Homo sapien
tacctaaaacatggatctgtcccac

SEQ ID NO: 5499620 - DNA, 25 bp, Homo sapien
cacggtcctaatccatgcaagccac

SEQ ID NO: 5499621 - DNA, 25 bp, Homo sapien
cttgctcccccaaagttgaagtctt

SEQ ID NO: 5499622 - DNA, 25 bp, Homo sapien
gtttagggaataagtgtgcacttct

SEQ ID NO: 5499623 - DNA, 25 bp, Homo sapien
cgcgcctggctctgcttgcactttc

SEQ ID NO: 5499624 - DNA, 25 bp, Homo sapien
atgcaagccacccactgtctgtgct

SEQ ID NO: 5499625 - DNA, 25 bp, Homo sapien
acgagccatatccaattcacggtcc

SEQ ID NO: 5499626 - DNA, 25 bp, Homo sapien
cttctagtgttgaaccccaagtaac

SEQ ID NO: 5499627 - DNA, 25 bp, Homo sapien
ttcttagacccatgtgcaacgagcc

SEQ ID NO: 5499628 - DNA, 25 bp, Homo sapien
cccaagtaacttgtccagccacata

SEQ ID NO: 5499629 - DNA, 25 bp, Homo sapien
ccttgctcagcttggaatcttcttc

SEQ ID NO: 5499630 - DNA, 25 bp, Homo sapien
catgccccagtcctcggggaacatc

SEQ ID NO: 5499631 - DNA, 25 bp, Homo sapien
tgcagctgataactacgggacctgt

SEQ ID NO: 5499632 - DNA, 25 bp, Homo sapien
agtagctgctgttgcaatgggtctc

SEQ ID NO: 5499633 - DNA, 25 bp, Homo sapien
aaagactgagaccaaaacccaaatc

SEQ ID NO: 5499634 - DNA, 25 bp, Homo sapien
agaatcccactggaacgctgtgcca

SEQ ID NO: 5499635 - DNA, 25 bp, Homo sapien
ttgccagagaccacatgagcactga

SEQ ID NO: 5499636 - DNA, 25 bp, Homo sapien
cagaatacactgagccctaaaggtc

SEQ ID NO: 5499637 - DNA, 25 bp, Homo sapien
ggggaacatctgcagatcagtggtt

SEQ ID NO: 5499638 - DNA, 25 bp, Homo sapien
atgatgcaaatcagcctagccacca

SEQ ID NO: 5499639 - DNA, 25 bp, Homo sapien
agggcattggttccaagcaagtcac

SEQ ID NO: 5499640 - DNA, 25 bp, Homo sapien
ttgtcttggaataggccatgggaaa

SEQ ID NO: 5499641 - DNA, 25 bp, Homo sapien
atagagatacatagatgaaaagatt

SEQ ID NO: 5499642 - DNA, 25 bp, Homo sapien
taaacaaatgcttcaatagagatac

SEQ ID NO: 5499643 - DNA, 25 bp, Homo sapien
agcagaatagttttgaaatagagtt

SEQ ID NO: 5499644 - DNA, 25 bp, Homo sapien
atgacacataacaattagctgactt

SEQ ID NO: 5499645 - DNA, 25 bp, Homo sapien
tacagtatgaaataagatagctcaa

SEQ ID NO: 5499646 - DNA, 25 bp, Homo sapien
atccaaatgagtgtagctagaaaat

SEQ ID NO: 5499647 - DNA, 25 bp, Homo sapien
caaaatctagaaagaaatgacacat

SEQ ID NO: 5499648 - DNA, 25 bp, Homo sapien
atagatgaaaagattagattctgta

SEQ ID NO: 5499649 - DNA, 25 bp, Homo sapien
ggagagaactgtcctaacatattaa

SEQ ID NO: 5499650 - DNA, 25 bp, Homo sapien
agatagctcaacatagcagaatagt

SEQ ID NO: 5499651 - DNA, 25 bp, Homo sapien
atttaagaaaccacaataagcccca

SEQ ID NO: 5499652 - DNA, 25 bp, Homo sapien
tgctaggcacaggtaaaccactcat

SEQ ID NO: 5499653 - DNA, 25 bp, Homo sapien
tcacacaaggttgcaagagaagttg

SEQ ID NO: 5499654 - DNA, 25 bp, Homo sapien
gagaaggaaggtctttgttgcactt

SEQ ID NO: 5499655 - DNA, 25 bp, Homo sapien
gctgttgctacactgtgagggtcgc

SEQ ID NO: 5499656 - DNA, 25 bp, Homo sapien
tgtagtgtgcaactaagtgagggaa

SEQ ID NO: 5499657 - DNA, 25 bp, Homo sapien
agtgagggaatctcctaagccgtgt

SEQ ID NO: 5499658 - DNA, 25 bp, Homo sapien
tgattaggccagaccctccccatcc

SEQ ID NO: 5499659 - DNA, 25 bp, Homo sapien
acacaccaactgcgatgattaggcc

SEQ ID NO: 5499660 - DNA, 25 bp, Homo sapien
tgtgctaggaggtttgctaggcaca

SEQ ID NO: 5499661 - DNA, 25 bp, Homo sapien
catctcttagggcccaccaaggaca

SEQ ID NO: 5499662 - DNA, 25 bp, Homo sapien
cggcaatccagtgtaagaagatcca

SEQ ID NO: 5499663 - DNA, 25 bp, Homo sapien
tattctcactcggacctggggaaac

SEQ ID NO: 5499664 - DNA, 25 bp, Homo sapien
agtacgagtccaaagaggtttctac

SEQ ID NO: 5499665 - DNA, 25 bp, Homo sapien
tctaccctggaatctcactgagtgc

SEQ ID NO: 5499666 - DNA, 25 bp, Homo sapien
acttccgcatctctggggcaccaga

SEQ ID NO: 5499667 - DNA, 25 bp, Homo sapien
cccagagctggacctgagctattct

SEQ ID NO: 5499668 - DNA, 25 bp, Homo sapien
ggacaaccctcccgtcctgttcagc

SEQ ID NO: 5499669 - DNA, 25 bp, Homo sapien
gaggagctagctgagtatgctgaaa

SEQ ID NO: 5499670 - DNA, 25 bp, Homo sapien
ccaaggacagctacacgctgacgga

SEQ ID NO: 5499671 - DNA, 25 bp, Homo sapien
tatgctgaaatccgggtcaagtgaa

SEQ ID NO: 5499672 - DNA, 25 bp, Homo sapien
cgtcctgttcagcagcgacttccgc

SEQ ID NO: 5499673 - DNA, 25 bp, Homo sapien
ggaatctcactgagtgccccaggag

SEQ ID NO: 5499674 - DNA, 25 bp, Homo sapien
agtcagttctcgttggaaagggacg

SEQ ID NO: 5499675 - DNA, 25 bp, Homo sapien
cgtccctttccaacgagaactgact

SEQ ID NO: 5499676 - DNA, 25 bp, Homo sapien
actgcactagcaaaatcgtttaacc

SEQ ID NO: 5499677 - DNA, 25 bp, Homo sapien
ccttaacagcctctaggatgccaac

SEQ ID NO: 5499678 - DNA, 25 bp, Homo sapien
ggatgccaactgcactagcaaaatc

SEQ ID NO: 5499679 - DNA, 25 bp, Homo sapien
ctggaaccggatcatagctaacaag

SEQ ID NO: 5499680 - DNA, 25 bp, Homo sapien
acagcctctaggatgccaactgcac

SEQ ID NO: 5499681 - DNA, 25 bp, Homo sapien
gttgcagtcaccgcgcagcggtgga

SEQ ID NO: 5499682 - DNA, 25 bp, Homo sapien
gttgaagtatgttactcagagagca

SEQ ID NO: 5499683 - DNA, 25 bp, Homo sapien
ccggatcatagctaacaagtgtgtt

SEQ ID NO: 5499684 - DNA, 25 bp, Homo sapien
tgcagtcaccgcgcagcggtggaaa

SEQ ID NO: 5499685 - DNA, 25 bp, Homo sapien
gttactcagagagcatcaaactcct

SEQ ID NO: 5499686 - DNA, 25 bp, Homo sapien
ggctctggaaccggatcatagctaa

SEQ ID NO: 5499687 - DNA, 25 bp, Homo sapien
ctgtattaggtatttgagagcaaga

SEQ ID NO: 5499688 - DNA, 25 bp, Homo sapien
tccccaactgtgccagctctgaatt

SEQ ID NO: 5499689 - DNA, 25 bp, Homo sapien
gggtttaggagcacccagcctcaaa

SEQ ID NO: 5499690 - DNA, 25 bp, Homo sapien
tctgaattttgtagggtttaggagc

SEQ ID NO: 5499691 - DNA, 25 bp, Homo sapien
taataaatggtaccagctccaatac

SEQ ID NO: 5499692 - DNA, 25 bp, Homo sapien
ccgtcccctgggatctcacggtggg

SEQ ID NO: 5499693 - DNA, 25 bp, Homo sapien
caaggaaggtcagtccccaactgtg

SEQ ID NO: 5499694 - DNA, 25 bp, Homo sapien
atttgtggatgagaaaactggttct

SEQ ID NO: 5499695 - DNA, 25 bp, Homo sapien
gcacagactgaccgtgtgctaaggc

SEQ ID NO: 5499696 - DNA, 25 bp, Homo sapien
tcatcacttcaccccagcacagact

SEQ ID NO: 5499697 - DNA, 25 bp, Homo sapien
gttctggatgctcgagctgagtttc

SEQ ID NO: 5499698 - DNA, 25 bp, Homo sapien
gagcggaatacgcactccagatgcc

SEQ ID NO: 5499699 - DNA, 25 bp, Homo sapien
cagagaatcaaaaggcttccaggtc

SEQ ID NO: 5499700 - DNA, 25 bp, Homo sapien
ggatccgagggatacacactctaga

SEQ ID NO: 5499701 - DNA, 25 bp, Homo sapien
ggttacaggaagcaatttggatccc

SEQ ID NO: 5499702 - DNA, 25 bp, Homo sapien
ctccagataagatggggtttagagg

SEQ ID NO: 5499703 - DNA, 25 bp, Homo sapien
catttctggtagagctgttggtggt

SEQ ID NO: 5499704 - DNA, 25 bp, Homo sapien
ctttgagagttaaaaaagccgaggc

SEQ ID NO: 5499705 - DNA, 25 bp, Homo sapien
aacaccattgcatgggagtgtgggt

SEQ ID NO: 5499706 - DNA, 25 bp, Homo sapien
cagactcctggagatgaacagcttt

SEQ ID NO: 5499707 - DNA, 25 bp, Homo sapien
attgaccatgagatggggtcaggaa

SEQ ID NO: 5499708 - DNA, 25 bp, Homo sapien
tgggctttccaggactcagagaatc

SEQ ID NO: 5499709 - DNA, 25 bp, Homo sapien
gtgctgggtcctttctggacacccc

SEQ ID NO: 5499710 - DNA, 25 bp, Homo sapien
gtgtgagtgctgaggtacttttcct

SEQ ID NO: 5499711 - DNA, 25 bp, Homo sapien
cctccctctgggctaaagcagaagg

SEQ ID NO: 5499712 - DNA, 25 bp, Homo sapien
gcctggcttggtttgaccctccctc

SEQ ID NO: 5499713 - DNA, 25 bp, Homo sapien
ggaattcacaaaagcttcctgggct

SEQ ID NO: 5499714 - DNA, 25 bp, Homo sapien
agggaagagctcaccacactcctgt

SEQ ID NO: 5499715 - DNA, 25 bp, Homo sapien
ctcccttcaggagagggtctaggtt

SEQ ID NO: 5499716 - DNA, 25 bp, Homo sapien
ttatagacaggtgtactgcaggaat

SEQ ID NO: 5499717 - DNA, 25 bp, Homo sapien
gtgtactgcaggaataaactgtcac

SEQ ID NO: 5499718 - DNA, 25 bp, Homo sapien
ggtgtagagatgctaggaattcaca

SEQ ID NO: 5499719 - DNA, 25 bp, Homo sapien
gtgggttcagtttccaagaggactc

SEQ ID NO: 5499720 - DNA, 25 bp, Homo sapien
ccaccttctttctgtgagcagttcc

SEQ ID NO: 5499721 - DNA, 25 bp, Homo sapien
ttgcctgcagtttggcgagtttttc

SEQ ID NO: 5499722 - DNA, 25 bp, Homo sapien
atttgctgtggctgttctgtgaacc

SEQ ID NO: 5499723 - DNA, 25 bp, Homo sapien
ttcaatgccagagatttctaacttc

SEQ ID NO: 5499724 - DNA, 25 bp, Homo sapien
accaatgggcacttttgcctgcagt

SEQ ID NO: 5499725 - DNA, 25 bp, Homo sapien
tctaacttctttaaggagaactgac

SEQ ID NO: 5499726 - DNA, 25 bp, Homo sapien
tctgtgagcagttccaccaatgggc

SEQ ID NO: 5499727 - DNA, 25 bp, Homo sapien
gtgagcagttccaccaatgggcact

SEQ ID NO: 5499728 - DNA, 25 bp, Homo sapien
tgtggctgttctgtgaaccaccttc

SEQ ID NO: 5499729 - DNA, 25 bp, Homo sapien
aggagaactgacgttttttatcatt

SEQ ID NO: 5499730 - DNA, 25 bp, Homo sapien
ttggcgagtttttcctggttcatga

SEQ ID NO: 5499731 - DNA, 25 bp, Homo sapien
tcggctctgcatagttgcacttggc

SEQ ID NO: 5499732 - DNA, 25 bp, Homo sapien
tgaagattatgccagtgcagaagca

SEQ ID NO: 5499733 - DNA, 25 bp, Homo sapien
aagattatgccagtgcagaagcaga

SEQ ID NO: 5499734 - DNA, 25 bp, Homo sapien
gcctctctcaaggatgaggttttga

SEQ ID NO: 5499735 - DNA, 25 bp, Homo sapien
gtgtgactttcgtaacggggagaga

SEQ ID NO: 5499736 - DNA, 25 bp, Homo sapien
ggcttgccgggactctctcggctct

SEQ ID NO: 5499737 - DNA, 25 bp, Homo sapien
tgcatagttgcacttggcttcaccc

SEQ ID NO: 5499738 - DNA, 25 bp, Homo sapien
ccgtgtgactttcgtaacggggaga

SEQ ID NO: 5499739 - DNA, 25 bp, Homo sapien
ttgcacttggcttcacccgtgtgac

SEQ ID NO: 5499740 - DNA, 25 bp, Homo sapien
ttgccgggactctctcggctctgca

SEQ ID NO: 5499741 - DNA, 25 bp, Homo sapien
cgggactctctcggctctgcatagt

SEQ ID NO: 5499742 - DNA, 25 bp, Homo sapien
aagccacacaggaaattgcaaaacc

SEQ ID NO: 5499743 - DNA, 25 bp, Homo sapien
aatagaaaactatgtgcagattgat

SEQ ID NO: 5499744 - DNA, 25 bp, Homo sapien
aaacatggtggtatgggaacatacc

SEQ ID NO: 5499745 - DNA, 25 bp, Homo sapien
gtaagagcatacatgaccgtactcc

SEQ ID NO: 5499746 - DNA, 25 bp, Homo sapien
attgttgggatgactatgtataatc

SEQ ID NO: 5499747 - DNA, 25 bp, Homo sapien
tcctgcaatgaaagcgtttgtgaac

SEQ ID NO: 5499748 - DNA, 25 bp, Homo sapien
caagtcagcaatggccatatagcat

SEQ ID NO: 5499749 - DNA, 25 bp, Homo sapien
atcagaactactaggcccatatggt

SEQ ID NO: 5499750 - DNA, 25 bp, Homo sapien
gacagtcatggagagccaaccatta

SEQ ID NO: 5499751 - DNA, 25 bp, Homo sapien
cttaagaaacttgtggtggagaatg

SEQ ID NO: 5499752 - DNA, 25 bp, Homo sapien
taagtgaaagccttatgtggcatat

SEQ ID NO: 5499753 - DNA, 25 bp, Homo sapien
agaggcgcttctccgtctccacctt

SEQ ID NO: 5499754 - DNA, 25 bp, Homo sapien
agctgctaactgagcacaggatgac

SEQ ID NO: 5499755 - DNA, 25 bp, Homo sapien
cgccaaccactccgacgcccctttc

SEQ ID NO: 5499756 - DNA, 25 bp, Homo sapien
gacgaccctcgcttcctcaggctgc

SEQ ID NO: 5499757 - DNA, 25 bp, Homo sapien
gatcgcctccctcacctgcgggcgc

SEQ ID NO: 5499758 - DNA, 25 bp, Homo sapien
gtgagcaacgtgatcgcctccctca

SEQ ID NO: 5499759 - DNA, 25 bp, Homo sapien
gccgcctgcctttgtgccgccttcg

SEQ ID NO: 5499760 - DNA, 25 bp, Homo sapien
ggctggcaaggtcctacgcttccaa

SEQ ID NO: 5499761 - DNA, 25 bp, Homo sapien
atatcccagcgctggctggcaaggt

SEQ ID NO: 5499762 - DNA, 25 bp, Homo sapien
cgcttcgagtacgacgaccctcgct

SEQ ID NO: 5499763 - DNA, 25 bp, Homo sapien
ggtctcttggacaaagccgtgagca

SEQ ID NO: 5499764 - DNA, 25 bp, Homo sapien
gaagagaaagaatacataggattat

SEQ ID NO: 5499765 - DNA, 25 bp, Homo sapien
atagaatagcaaaagttaagcatga

SEQ ID NO: 5499766 - DNA, 25 bp, Homo sapien
ccttcagtgaatgggtgaagaagaa

SEQ ID NO: 5499767 - DNA, 25 bp, Homo sapien
agaaaacgagtcttgggattctttg

SEQ ID NO: 5499768 - DNA, 25 bp, Homo sapien
tccagcactgcattgctcaggagat

SEQ ID NO: 5499769 - DNA, 25 bp, Homo sapien
ggcgaggatctcatgttgctgaaga

SEQ ID NO: 5499770 - DNA, 25 bp, Homo sapien
ggattataataggtttggcgaggat

SEQ ID NO: 5499771 - DNA, 25 bp, Homo sapien
aaggagaagaaaactagaaatttga

SEQ ID NO: 5499772 - DNA, 25 bp, Homo sapien
caaaggcagtaatgaatagaatagc

SEQ ID NO: 5499773 - DNA, 25 bp, Homo sapien
ctttgtagtgggtcttcagaacagg

SEQ ID NO: 5499774 - DNA, 25 bp, Homo sapien
gaaatggttacgagtgaggatacca

SEQ ID NO: 5499775 - DNA, 25 bp, Homo sapien
caaagtggagcacacctatgagctc

SEQ ID NO: 5499776 - DNA, 25 bp, Homo sapien
gccctgtactgtggtgcagtgtgac

SEQ ID NO: 5499777 - DNA, 25 bp, Homo sapien
tcacccggcccatcacaagcgggat

SEQ ID NO: 5499778 - DNA, 25 bp, Homo sapien
gcgggatcgcagacagatcttcctg

SEQ ID NO: 5499779 - DNA, 25 bp, Homo sapien
agatcttcctgccagagcccgagca

SEQ ID NO: 5499780 - DNA, 25 bp, Homo sapien
tatgagctccacaacactggccctg

SEQ ID NO: 5499781 - DNA, 25 bp, Homo sapien
gggggcgcttcagtgcttcccacag

SEQ ID NO: 5499782 - DNA, 25 bp, Homo sapien
aggtcagccttgccgaacccctttc

SEQ ID NO: 5499783 - DNA, 25 bp, Homo sapien
cagttctcgtaagctgcgactcggc

SEQ ID NO: 5499784 - DNA, 25 bp, Homo sapien
gcagccctcgaggcttcaggatcca

SEQ ID NO: 5499785 - DNA, 25 bp, Homo sapien
cagcatccaccttccgggacagtcc

SEQ ID NO: 5499786 - DNA, 25 bp, Homo sapien
gagattcatggcaagcagccgtacg

SEQ ID NO: 5499787 - DNA, 25 bp, Homo sapien
cataagaagtgatggaactacacat

SEQ ID NO: 5499788 - DNA, 25 bp, Homo sapien
cgtgcagtcgctccccagccatgca

SEQ ID NO: 5499789 - DNA, 25 bp, Homo sapien
gtctaagaataacccagtggaaatc

SEQ ID NO: 5499790 - DNA, 25 bp, Homo sapien
ggagtcccatgttagaggccctctg

SEQ ID NO: 5499791 - DNA, 25 bp, Homo sapien
atgagcctgcatggcatagtgagtc

SEQ ID NO: 5499792 - DNA, 25 bp, Homo sapien
aagctgcatgtcaccacggagactt

SEQ ID NO: 5499793 - DNA, 25 bp, Homo sapien
tccagagcctggagatcccagacta

SEQ ID NO: 5499794 - DNA, 25 bp, Homo sapien
ctgtgaactcgggaaatcctgtacc

SEQ ID NO: 5499795 - DNA, 25 bp, Homo sapien
gccgtacgaaataacagaagcccca

SEQ ID NO: 5499796 - DNA, 25 bp, Homo sapien
ccagccatgcaggtatttccagagc

SEQ ID NO: 5499797 - DNA, 25 bp, Homo sapien
tgatacggaaacatacaacgcgctt

SEQ ID NO: 5499798 - DNA, 25 bp, Homo sapien
caaaacagttcagcacaaagaagct

SEQ ID NO: 5499799 - DNA, 25 bp, Homo sapien
gagagagaaatccaaccccacattt

SEQ ID NO: 5499800 - DNA, 25 bp, Homo sapien
tgccacgctccatgagaatgcactt

SEQ ID NO: 5499801 - DNA, 25 bp, Homo sapien
tcaggaggcattaatatcaggattg

SEQ ID NO: 5499802 - DNA, 25 bp, Homo sapien
ttgaaaggctcaacgtataagcgaa

SEQ ID NO: 5499803 - DNA, 25 bp, Homo sapien
ttcctgcaagacatgcacgaagggt

SEQ ID NO: 5499804 - DNA, 25 bp, Homo sapien
gtataagcgaagagcatcccgtaaa

SEQ ID NO: 5499805 - DNA, 25 bp, Homo sapien
aaacacttcagagagactgccgggt

SEQ ID NO: 5499806 - DNA, 25 bp, Homo sapien
aggattgtggtgatgaacaacgttt

SEQ ID NO: 5499807 - DNA, 25 bp, Homo sapien
caaaatgtgcctgatgctaagcgga

SEQ ID NO: 5499808 - DNA, 25 bp, Homo sapien
agtgagtaccctgctgttggccatg

SEQ ID NO: 5499809 - DNA, 25 bp, Homo sapien
ctgcaataggaccttttcatgtgtc

SEQ ID NO: 5499810 - DNA, 25 bp, Homo sapien
aaacagcaggtattttatatagcat

SEQ ID NO: 5499811 - DNA, 25 bp, Homo sapien
gtgaattctgtcattgccaaccttc

SEQ ID NO: 5499812 - DNA, 25 bp, Homo sapien
atctgataacgaggatgatcttgcc

SEQ ID NO: 5499813 - DNA, 25 bp, Homo sapien
tggccatggaagatagtagtctttt

SEQ ID NO: 5499814 - DNA, 25 bp, Homo sapien
tcttgtagtctgcctgtgaatagcc

SEQ ID NO: 5499815 - DNA, 25 bp, Homo sapien
gggcaacatagcaagctatgcctct

SEQ ID NO: 5499816 - DNA, 25 bp, Homo sapien
tttcacacctaaaacagcaggtatt

SEQ ID NO: 5499817 - DNA, 25 bp, Homo sapien
aagcataatttattcagtgagtacc

SEQ ID NO: 5499818 - DNA, 25 bp, Homo sapien
ctgctgttggccatggaagatagta

SEQ ID NO: 5499819 - DNA, 25 bp, Homo sapien
tatagagagagaaaatatttgaggc

SEQ ID NO: 5499820 - DNA, 25 bp, Homo sapien
tttgacctaggaaaccagcaatttc

SEQ ID NO: 5499821 - DNA, 25 bp, Homo sapien
tcaagagaacaaaaataaatatata

SEQ ID NO: 5499822 - DNA, 25 bp, Homo sapien
acacaaaaacttagccaggtgtggt

SEQ ID NO: 5499823 - DNA, 25 bp, Homo sapien
cacagtggaagaaattaacacattc

SEQ ID NO: 5499824 - DNA, 25 bp, Homo sapien
aaacacaatcacagtggaagaaatt

SEQ ID NO: 5499825 - DNA, 25 bp, Homo sapien
cggcacagtggttcacgcctgtaat

SEQ ID NO: 5499826 - DNA, 25 bp, Homo sapien
gaaaatatttgaggcccggcacagt

SEQ ID NO: 5499827 - DNA, 25 bp, Homo sapien
tccatggcataatgcaagaaaatac

SEQ ID NO: 5499828 - DNA, 25 bp, Homo sapien
attgtgaagatactcttaagtgccc

SEQ ID NO: 5499829 - DNA, 25 bp, Homo sapien
ttaagtgcccatataatagttacaa

SEQ ID NO: 5499830 - DNA, 25 bp, Homo sapien
gagtccagaaatagaaccacacatc

SEQ ID NO: 5499831 - DNA, 25 bp, Homo sapien
agttttttaaacagtgctggaccac

SEQ ID NO: 5499832 - DNA, 25 bp, Homo sapien
gatagacaaatcagagagtccagaa

SEQ ID NO: 5499833 - DNA, 25 bp, Homo sapien
gccaaccatcacttaagcccagcag

SEQ ID NO: 5499834 - DNA, 25 bp, Homo sapien
gtgctggaccactggatacccataa

SEQ ID NO: 5499835 - DNA, 25 bp, Homo sapien
aaaatgcagctcaggagaaaaagaa

SEQ ID NO: 5499836 - DNA, 25 bp, Homo sapien
aattagtcaggcacggttgcatgtg

SEQ ID NO: 5499837 - DNA, 25 bp, Homo sapien
aagttatagtaatcaagacatgtag

SEQ ID NO: 5499838 - DNA, 25 bp, Homo sapien
atcaagacatgtagtaatgccaact

SEQ ID NO: 5499839 - DNA, 25 bp, Homo sapien
catctatgataaatggtcaactgat

SEQ ID NO: 5499840 - DNA, 25 bp, Homo sapien
taatgccaactaagatagacaaatc

SEQ ID NO: 5499841 - DNA, 25 bp, Homo sapien
gtgaggagctttggaacactgaaaa

SEQ ID NO: 5499842 - DNA, 25 bp, Homo sapien
acacaaaaagtcaagatgcacatcc

SEQ ID NO: 5499843 - DNA, 25 bp, Homo sapien
ggtattgaccctcagagtggagcag

SEQ ID NO: 5499844 - DNA, 25 bp, Homo sapien
gaagctcctagaaaaaatgggtggc

SEQ ID NO: 5499845 - DNA, 25 bp, Homo sapien
agatatgtcattctgggaggtcacc

SEQ ID NO: 5499846 - DNA, 25 bp, Homo sapien
ggaacgggacatgaaaatcaattgc

SEQ ID NO: 5499847 - DNA, 25 bp, Homo sapien
cagagggcgatctagtgtatgttaa

SEQ ID NO: 5499848 - DNA, 25 bp, Homo sapien
atgtgataggtactctcagaggagc

SEQ ID NO: 5499849 - DNA, 25 bp, Homo sapien
agaggaagtctcaaagtgccctaca

SEQ ID NO: 5499850 - DNA, 25 bp, Homo sapien
gcagtggaaccagacagatatgtca

SEQ ID NO: 5499851 - DNA, 25 bp, Homo sapien
taactatgcacgaactgaagacttc

SEQ ID NO: 5499852 - DNA, 25 bp, Homo sapien
agtctgtttcgacgcggcacatagt

SEQ ID NO: 5499853 - DNA, 25 bp, Homo sapien
actatgtgccgcgtcgaaacagact

SEQ ID NO: 5499854 - DNA, 25 bp, Homo sapien
ctgaccccggctacgacaacggaca

SEQ ID NO: 5499855 - DNA, 25 bp, Homo sapien
tgtccgttgtcgtagccggggtcag

SEQ ID NO: 5499856 - DNA, 25 bp, Homo sapien
ttctacctgccacgcgtcggtgaag

SEQ ID NO: 5499857 - DNA, 25 bp, Homo sapien
caaaggaatattaagaagacgtgcc

SEQ ID NO: 5499858 - DNA, 25 bp, Homo sapien
ctaagcactgcagtgaaggagttag

SEQ ID NO: 5499859 - DNA, 25 bp, Homo sapien
gaaggagttagtagaaaacagtctg

SEQ ID NO: 5499860 - DNA, 25 bp, Homo sapien
accacagtcagcgtgaagcagttat

SEQ ID NO: 5499861 - DNA, 25 bp, Homo sapien
aagtttcagacaatggatgtggggt

SEQ ID NO: 5499862 - DNA, 25 bp, Homo sapien
atgggaaaatcatccaggaaacccc

SEQ ID NO: 5499863 - DNA, 25 bp, Homo sapien
cagtctggatgctggtgccactaat

SEQ ID NO: 5499864 - DNA, 25 bp, Homo sapien
ggccagtggtactgagtctaagcac

SEQ ID NO: 5499865 - DNA, 25 bp, Homo sapien
tcactgtgtgcactgagcgatgtca

SEQ ID NO: 5499866 - DNA, 25 bp, Homo sapien
aaagcttaaggactatggagtggat

SEQ ID NO: 5499867 - DNA, 25 bp, Homo sapien
tcacactcagagtaaagttaaagtc

SEQ ID NO: 5499868 - DNA, 25 bp, Homo sapien
actaggatgtaacaccattgcaagt

SEQ ID NO: 5499869 - DNA, 25 bp, Homo sapien
cttactatgggtttatcggggcatt

SEQ ID NO: 5499870 - DNA, 25 bp, Homo sapien
aagtcaaggggcatctatacttgct

SEQ ID NO: 5499871 - DNA, 25 bp, Homo sapien
aggctaaagcatgagagtcacttga

SEQ ID NO: 5499872 - DNA, 25 bp, Homo sapien
gggtttatcggggcattgaatgcat

SEQ ID NO: 5499873 - DNA, 25 bp, Homo sapien
agttaaagtctttccaggctgggtg

SEQ ID NO: 5499874 - DNA, 25 bp, Homo sapien
tttatgatgggattactaggatgta

SEQ ID NO: 5499875 - DNA, 25 bp, Homo sapien
aaaaccagccaatcactcccatcac

SEQ ID NO: 5499876 - DNA, 25 bp, Homo sapien
acaccattgcaagtcaaggggcatc

SEQ ID NO: 5499877 - DNA, 25 bp, Homo sapien
aaatcaggtcttgtcgcttccgtat

SEQ ID NO: 5499878 - DNA, 25 bp, Homo sapien
ccgtcgacagaagagggcgtcggga

SEQ ID NO: 5499879 - DNA, 25 bp, Homo sapien
tcccgacgccctcttctgtcgacgg

SEQ ID NO: 5499880 - DNA, 25 bp, Homo sapien
ttttccactgaaaatggcaaattct

SEQ ID NO: 5499881 - DNA, 25 bp, Homo sapien
agggtgtagcaaatgcagatccaaa

SEQ ID NO: 5499882 - DNA, 25 bp, Homo sapien
aaatggcaaattcttcccagggccc

SEQ ID NO: 5499883 - DNA, 25 bp, Homo sapien
agtggctcctacggaccacagaggt

SEQ ID NO: 5499884 - DNA, 25 bp, Homo sapien
tgcagatccaaagtacaaacacatc

SEQ ID NO: 5499885 - DNA, 25 bp, Homo sapien
tcctacggaccacagaggttgtgaa

SEQ ID NO: 5499886 - DNA, 25 bp, Homo sapien
agctagtaacgaccacttgttttcc

SEQ ID NO: 5499887 - DNA, 25 bp, Homo sapien
aggttgtgaacctccggatgctctg

SEQ ID NO: 5499888 - DNA, 25 bp, Homo sapien
cttcccagggccctcctcacagtgg

SEQ ID NO: 5499889 - DNA, 25 bp, Homo sapien
cagggccctcctcacagtggctcct

SEQ ID NO: 5499890 - DNA, 25 bp, Homo sapien
aaacacatcttagctagtaacgacc

SEQ ID NO: 5499891 - DNA, 25 bp, Homo sapien
gtgaagatgacaatcatgttgcagc

SEQ ID NO: 5499892 - DNA, 25 bp, Homo sapien
ttgctatgggatttcctgcagaaag

SEQ ID NO: 5499893 - DNA, 25 bp, Homo sapien
aattcactgtaaagctggaaaggga

SEQ ID NO: 5499894 - DNA, 25 bp, Homo sapien
ttgaccaatggctaagtgaagatga

SEQ ID NO: 5499895 - DNA, 25 bp, Homo sapien
atgatgtagtaaggtttttggattc

SEQ ID NO: 5499896 - DNA, 25 bp, Homo sapien
tgctgaaagacattatgacaccgcc

SEQ ID NO: 5499897 - DNA, 25 bp, Homo sapien
aagaggatggattcgacttagactt

SEQ ID NO: 5499898 - DNA, 25 bp, Homo sapien
ttgtgaagatcttgaccaatggcta

SEQ ID NO: 5499899 - DNA, 25 bp, Homo sapien
ttgaaggcgtatacaggaacaatat

SEQ ID NO: 5499900 - DNA, 25 bp, Homo sapien
ggattcaaagcataaaaaccattac

SEQ ID NO: 5499901 - DNA, 25 bp, Homo sapien
gaccataacccaccacagctagaac

SEQ ID NO: 5499902 - DNA, 25 bp, Homo sapien
ggagcctgacaccttacctgaagac

SEQ ID NO: 5499903 - DNA, 25 bp, Homo sapien
aggctctgatcttggggctagcttt

SEQ ID NO: 5499904 - DNA, 25 bp, Homo sapien
attgtgccttggagagcagatccaa

SEQ ID NO: 5499905 - DNA, 25 bp, Homo sapien
catggtagatctgaaacctgcttaa

SEQ ID NO: 5499906 - DNA, 25 bp, Homo sapien
tgaacaaaagggaatgctggttaaa

SEQ ID NO: 5499907 - DNA, 25 bp, Homo sapien
gcccatttgttgtgaagtttgcccc

SEQ ID NO: 5499908 - DNA, 25 bp, Homo sapien
caaagtctctggttggtgaggaaag

SEQ ID NO: 5499909 - DNA, 25 bp, Homo sapien
tcaggtcccatgttgctgtggtgta

SEQ ID NO: 5499910 - DNA, 25 bp, Homo sapien
cccattctgagactttggagaagtg

SEQ ID NO: 5499911 - DNA, 25 bp, Homo sapien
aaagcagggacctaaagtttagata

SEQ ID NO: 5499912 - DNA, 25 bp, Homo sapien
aatgaaatggtaatagtttgatcac

SEQ ID NO: 5499913 - DNA, 25 bp, Homo sapien
ataaacagttgaattcttacagctg

SEQ ID NO: 5499914 - DNA, 25 bp, Homo sapien
ttgttgaagtaagttgacttcacac

SEQ ID NO: 5499915 - DNA, 25 bp, Homo sapien
gacttcacacagatacgcagttgga

SEQ ID NO: 5499916 - DNA, 25 bp, Homo sapien
accacaccaagactacaagtgattt

SEQ ID NO: 5499917 - DNA, 25 bp, Homo sapien
gctaattgtggctattctttgatac

SEQ ID NO: 5499918 - DNA, 25 bp, Homo sapien
ccaaaacaatccaaggagaagggtg

SEQ ID NO: 5499919 - DNA, 25 bp, Homo sapien
tacagctgcttctacatccaaactt

SEQ ID NO: 5499920 - DNA, 25 bp, Homo sapien
atctagattaaggttaatgcacttt

SEQ ID NO: 5499921 - DNA, 25 bp, Homo sapien
acacagatacgcagttggaaaagtt

SEQ ID NO: 5499922 - DNA, 25 bp, Homo sapien
ccatgcccagcccacgttaacattt

SEQ ID NO: 5499923 - DNA, 25 bp, Homo sapien
agggtggcattttacagtctcttta

SEQ ID NO: 5499924 - DNA, 25 bp, Homo sapien
tctgatacagcaacatggtcatgag

SEQ ID NO: 5499925 - DNA, 25 bp, Homo sapien
ggggaacatcaggttgttgttacca

SEQ ID NO: 5499926 - DNA, 25 bp, Homo sapien
actaggaatttcacacaagaacttc

SEQ ID NO: 5499927 - DNA, 25 bp, Homo sapien
tgcattggtcccagcaaaagaccac

SEQ ID NO: 5499928 - DNA, 25 bp, Homo sapien
gaacttcagacgagcctgatgtcat

SEQ ID NO: 5499929 - DNA, 25 bp, Homo sapien
attagggctggatatagtctctagc

SEQ ID NO: 5499930 - DNA, 25 bp, Homo sapien
acatggtcatgagatcacagttatc

SEQ ID NO: 5499931 - DNA, 25 bp, Homo sapien
tataacggtcatcaggtgaaaattc

SEQ ID NO: 5499932 - DNA, 25 bp, Homo sapien
aaacaaacacgcacaagtagaagaa

SEQ ID NO: 5499933 - DNA, 25 bp, Homo sapien
ataacacatgtgcaaacaaacacgc

SEQ ID NO: 5499934 - DNA, 25 bp, Homo sapien
actctgcagatggctttaagctgag

SEQ ID NO: 5499935 - DNA, 25 bp, Homo sapien
tttaaatgtccaattcctgctagct

SEQ ID NO: 5499936 - DNA, 25 bp, Homo sapien
agtaaatagagagtaccataaagta

SEQ ID NO: 5499937 - DNA, 25 bp, Homo sapien
aactagaccaagtaaatccaccttc

SEQ ID NO: 5499938 - DNA, 25 bp, Homo sapien
ccgtaaccatctttgcaccgtattt

SEQ ID NO: 5499939 - DNA, 25 bp, Homo sapien
cataaagtaccactataaagggaaa

SEQ ID NO: 5499940 - DNA, 25 bp, Homo sapien
ttcaatcatataaccagacagtatc

SEQ ID NO: 5499941 - DNA, 25 bp, Homo sapien
gacacctagctaccatttacatcca

SEQ ID NO: 5499942 - DNA, 25 bp, Homo sapien
ttcctacatgcttgactaagacacc

SEQ ID NO: 5499943 - DNA, 25 bp, Homo sapien
aaccgttcttagcataaaccaatat

SEQ ID NO: 5499944 - DNA, 25 bp, Homo sapien
tgcttgactaagacacctagctacc

SEQ ID NO: 5499945 - DNA, 25 bp, Homo sapien
gtaagctctttgaaccgtaaccatc

SEQ ID NO: 5499946 - DNA, 25 bp, Homo sapien
taagcatagcaatctggcctctgtc

SEQ ID NO: 5499947 - DNA, 25 bp, Homo sapien
gatggatttgtaggtggttgaaatt

SEQ ID NO: 5499948 - DNA, 25 bp, Homo sapien
ttttgatgagaaagtggtgattaga

SEQ ID NO: 5499949 - DNA, 25 bp, Homo sapien
tggtgattagaaggatacagcataa

SEQ ID NO: 5499950 - DNA, 25 bp, Homo sapien
ggtggttgaaattgtatctaagcat

SEQ ID NO: 5499951 - DNA, 25 bp, Homo sapien
ttaaagaatggacaatgatgcagat

SEQ ID NO: 5499952 - DNA, 25 bp, Homo sapien
atgtgagcaagtctttaaggtatac

SEQ ID NO: 5499953 - DNA, 25 bp, Homo sapien
ggagattggatagatgcctaaccta

SEQ ID NO: 5499954 - DNA, 25 bp, Homo sapien
ggtcatgtaggtaattagatggatt

SEQ ID NO: 5499955 - DNA, 25 bp, Homo sapien
ctgtagaattactggcatgggagat

SEQ ID NO: 5499956 - DNA, 25 bp, Homo sapien
caatgatgcagatgatttgtgagca

SEQ ID NO: 5499957 - DNA, 25 bp, Homo sapien
tttactgtctggaaaatgggttgca

SEQ ID NO: 5499958 - DNA, 25 bp, Homo sapien
tagagacttcgtgccttcccggttc

SEQ ID NO: 5499959 - DNA, 25 bp, Homo sapien
cttgggttccttatgacctggtgcc

SEQ ID NO: 5499960 - DNA, 25 bp, Homo sapien
gtaggggtcttctggatgctttaga

SEQ ID NO: 5499961 - DNA, 25 bp, Homo sapien
tgccttcccggttcccattccctgc

SEQ ID NO: 5499962 - DNA, 25 bp, Homo sapien
ccttatgacctggtgcctgacggag

SEQ ID NO: 5499963 - DNA, 25 bp, Homo sapien
ctggatgctttagagacttcgtgcc

SEQ ID NO: 5499964 - DNA, 25 bp, Homo sapien
ggttccttatgacctggtgcctgac

SEQ ID NO: 5499965 - DNA, 25 bp, Homo sapien
gatgctttagagacttcgtgccttc

SEQ ID NO: 5499966 - DNA, 25 bp, Homo sapien
gaccctggtgtaggggtcttctgga

SEQ ID NO: 5499967 - DNA, 25 bp, Homo sapien
gactcttgggttccttatgacctgg

SEQ ID NO: 5499968 - DNA, 25 bp, Homo sapien
catagaaattccgaggtttctcccc

SEQ ID NO: 5499969 - DNA, 25 bp, Homo sapien
aggccctccccacctccagaagcgt

SEQ ID NO: 5499970 - DNA, 25 bp, Homo sapien
ccccacctccagaagcgtggggggc

SEQ ID NO: 5499971 - DNA, 25 bp, Homo sapien
gcaccaggggacacccatctgtcca

SEQ ID NO: 5499972 - DNA, 25 bp, Homo sapien
gacacccatctgtccagaggccctc

SEQ ID NO: 5499973 - DNA, 25 bp, Homo sapien
atctgtccagaggccctccccacct

SEQ ID NO: 5499974 - DNA, 25 bp, Homo sapien
accaggggacacccatctgtccaga

SEQ ID NO: 5499975 - DNA, 25 bp, Homo sapien
ctccccacctccagaagcgtggggg

SEQ ID NO: 5499976 - DNA, 25 bp, Homo sapien
ccccctccctgggggaggtctcata

SEQ ID NO: 5499977 - DNA, 25 bp, Homo sapien
ggtctcatagaaattccgaggtttc

SEQ ID NO: 5499978 - DNA, 25 bp, Homo sapien
gggggaggtctcatagaaattccga

SEQ ID NO: 5499979 - DNA, 25 bp, Homo sapien
tctcttccacgcctgagtcccggcc

SEQ ID NO: 5499980 - DNA, 25 bp, Homo sapien
tatagtggattctggtcccaacgtt

SEQ ID NO: 5499981 - DNA, 25 bp, Homo sapien
cagcccaggaaaagcaatctgtaac

SEQ ID NO: 5499982 - DNA, 25 bp, Homo sapien
acaagacacagcctccccggtgaat

SEQ ID NO: 5499983 - DNA, 25 bp, Homo sapien
tccgtgtctccgaagaatgaaactt

SEQ ID NO: 5499984 - DNA, 25 bp, Homo sapien
ggagtctcagaagaccccaggatca

SEQ ID NO: 5499985 - DNA, 25 bp, Homo sapien
aacctcctagctggatttggctccc

SEQ ID NO: 5499986 - DNA, 25 bp, Homo sapien
caggatcaggctctctcgaagtctt

SEQ ID NO: 5499987 - DNA, 25 bp, Homo sapien
gccctctccggctcctggtggagtc

SEQ ID NO: 5499988 - DNA, 25 bp, Homo sapien
ctccccggtgaataaggagaagatt

SEQ ID NO: 5499989 - DNA, 25 bp, Homo sapien
gaggacagataaggtgacaccttct

SEQ ID NO: 5499990 - DNA, 25 bp, Homo sapien
ctgcagttagtaggtgcaactgggg

SEQ ID NO: 5499991 - DNA, 25 bp, Homo sapien
ggaggcctcccagggatattcagtt

SEQ ID NO: 5499992 - DNA, 25 bp, Homo sapien
cagggcatctcctgcatgggcccct

SEQ ID NO: 5499993 - DNA, 25 bp, Homo sapien
gagtggtataagatctcgagctggc

SEQ ID NO: 5499994 - DNA, 25 bp, Homo sapien
tggaagccagagttctgttagtgtg

SEQ ID NO: 5499995 - DNA, 25 bp, Homo sapien
tctgcactgaactaagtcatgctcc

SEQ ID NO: 5499996 - DNA, 25 bp, Homo sapien
tggtgcctgcacctctgtgtctgct

SEQ ID NO: 5499997 - DNA, 25 bp, Homo sapien
ctttattggtgcctagccctgtgct

SEQ ID NO: 5499998 - DNA, 25 bp, Homo sapien
aagggcaaacaagctagataaacgt

SEQ ID NO: 5499999 - DNA, 25 bp, Homo sapien
cctgttggaggtcctactggccagg

SEQ ID NO: 5500000 - DNA, 25 bp, Homo sapien
ctcttgtacaaaagacggcagacag

SEQ ID NO: 5500001 - DNA, 25 bp, Homo sapien
tccactgggagtctcaccacttctc

SEQ ID NO: 5500002 - DNA, 25 bp, Homo sapien
aagattcagaaaagagttagaattg

SEQ ID NO: 5500003 - DNA, 25 bp, Homo sapien
cattcaaataccaagtgccacagtt

SEQ ID NO: 5500004 - DNA, 25 bp, Homo sapien
atgaaagaaatacccatagccactt

SEQ ID NO: 5500005 - DNA, 25 bp, Homo sapien
ggagagagggatattgatactttaa

SEQ ID NO: 5500006 - DNA, 25 bp, Homo sapien
ggtgtctccactgggagtctcacca

SEQ ID NO: 5500007 - DNA, 25 bp, Homo sapien
acaattttatgcagtccgtggagac

SEQ ID NO: 5500008 - DNA, 25 bp, Homo sapien
ttttcatctggacaatggagagagg

SEQ ID NO: 5500009 - DNA, 25 bp, Homo sapien
taaattaagaaaggccatcagtgag

SEQ ID NO: 5500010 - DNA, 25 bp, Homo sapien
gaaaagagttagaattgtggcacac

SEQ ID NO: 5500011 - DNA, 25 bp, Homo sapien
ttttggtgcattatatcaggatatt

SEQ ID NO: 5500012 - DNA, 25 bp, Homo sapien
taaattgtatgtgcagagtgtggga

SEQ ID NO: 5500013 - DNA, 25 bp, Homo sapien
accaagaccctgccaggtccctaaa

SEQ ID NO: 5500014 - DNA, 25 bp, Homo sapien
ggagcagactccagatcagcctaac

SEQ ID NO: 5500015 - DNA, 25 bp, Homo sapien
catggtccctgaccccagcttgccc

SEQ ID NO: 5500016 - DNA, 25 bp, Homo sapien
gactctgccagatacaactgcctcc

SEQ ID NO: 5500017 - DNA, 25 bp, Homo sapien
gactccagatcagcctaacaacttc

SEQ ID NO: 5500018 - DNA, 25 bp, Homo sapien
aggttcagccacccaaggctgctgg

SEQ ID NO: 5500019 - DNA, 25 bp, Homo sapien
tctgtcccactaggttcagccaccc

SEQ ID NO: 5500020 - DNA, 25 bp, Homo sapien
tgccaggtccctaaattgtatgtgc

SEQ ID NO: 5500021 - DNA, 25 bp, Homo sapien
ggaatgaatacgaacaggtccctcc

SEQ ID NO: 5500022 - DNA, 25 bp, Homo sapien
agcaccatggtccctgaccccagct

SEQ ID NO: 5500023 - DNA, 25 bp, Homo sapien
cattggtcatgccagctctaagccc

SEQ ID NO: 5500024 - DNA, 25 bp, Homo sapien
agctctaagcccatgctgatgctgt

SEQ ID NO: 5500025 - DNA, 25 bp, Homo sapien
tcatgcctcttgctggtgaggggca

SEQ ID NO: 5500026 - DNA, 25 bp, Homo sapien
tttgaatgacattagaagctccatc

SEQ ID NO: 5500027 - DNA, 25 bp, Homo sapien
tgcggtgggctagcccttctccacc

SEQ ID NO: 5500028 - DNA, 25 bp, Homo sapien
atcacagccttggaggaataagggt

SEQ ID NO: 5500029 - DNA, 25 bp, Homo sapien
gcagggcctgtccagctacttcctc

SEQ ID NO: 5500030 - DNA, 25 bp, Homo sapien
gcactttttgaggtggttcctgacc

SEQ ID NO: 5500031 - DNA, 25 bp, Homo sapien
tagaagctccatccaatcatgcctc

SEQ ID NO: 5500032 - DNA, 25 bp, Homo sapien
gagattttaatgtcctgcaggtggg

SEQ ID NO: 5500033 - DNA, 25 bp, Homo sapien
gacaggcactgaccaggcctttttg

SEQ ID NO: 5500034 - DNA, 25 bp, Homo sapien
ccccacactgtggtctgcctgcctg

SEQ ID NO: 5500035 - DNA, 25 bp, Homo sapien
tgaaagcagtcccccagccactgcc

SEQ ID NO: 5500036 - DNA, 25 bp, Homo sapien
tggggcacctgtagcctgaccccca

SEQ ID NO: 5500037 - DNA, 25 bp, Homo sapien
ttcccagccccctccctgcctagct

SEQ ID NO: 5500038 - DNA, 25 bp, Homo sapien
tccttgcccagggctgagccttgtg

SEQ ID NO: 5500039 - DNA, 25 bp, Homo sapien
gtttctgagtcacgaacagcaggca

SEQ ID NO: 5500040 - DNA, 25 bp, Homo sapien
gcctgacccccaccttgctgcttcc

SEQ ID NO: 5500041 - DNA, 25 bp, Homo sapien
gagccttgtggggcaccccccacac

SEQ ID NO: 5500042 - DNA, 25 bp, Homo sapien
ggctggagaaaggctctctactgca

SEQ ID NO: 5500043 - DNA, 25 bp, Homo sapien
ggctctctactgcacaggggcctca

SEQ ID NO: 5500044 - DNA, 25 bp, Homo sapien
cccagggagaccctccgcctttaga

SEQ ID NO: 5500045 - DNA, 25 bp, Homo sapien
ggcaaatccccagtactggaggctg

SEQ ID NO: 5500046 - DNA, 25 bp, Homo sapien
aaataagatttggtatgcagagagc

SEQ ID NO: 5500047 - DNA, 25 bp, Homo sapien
tggaggctgaaaccgttctgcttct

SEQ ID NO: 5500048 - DNA, 25 bp, Homo sapien
tggtcagaaataagatttggtatgc

SEQ ID NO: 5500049 - DNA, 25 bp, Homo sapien
gcagagagcaagaaatagcctaatg

SEQ ID NO: 5500050 - DNA, 25 bp, Homo sapien
ctgcttctgtcatgggatggactgc

SEQ ID NO: 5500051 - DNA, 25 bp, Homo sapien
agaaacacttaccttttggcaaatc

SEQ ID NO: 5500052 - DNA, 25 bp, Homo sapien
acagggcttggccacttccagccaa

SEQ ID NO: 5500053 - DNA, 25 bp, Homo sapien
gatcagtacacacacacagggcttg

SEQ ID NO: 5500054 - DNA, 25 bp, Homo sapien
aatagcctaatggcatagaaaattt

SEQ ID NO: 5500055 - DNA, 25 bp, Homo sapien
atgggatggactgctctcctcttgc

SEQ ID NO: 5500056 - DNA, 25 bp, Homo sapien
taactatgcaaacttgaccaggaag

SEQ ID NO: 5500057 - DNA, 25 bp, Homo sapien
atgagatgagaggacttgaatctga

SEQ ID NO: 5500058 - DNA, 25 bp, Homo sapien
aagtgaagttatttaccaggatgaa

SEQ ID NO: 5500059 - DNA, 25 bp, Homo sapien
aaataaacagtacaaaagtttgctc

SEQ ID NO: 5500060 - DNA, 25 bp, Homo sapien
atgaggttttacaccaaagtgaagt

SEQ ID NO: 5500061 - DNA, 25 bp, Homo sapien
caaaagtttgctcacaattccactc

SEQ ID NO: 5500062 - DNA, 25 bp, Homo sapien
ttagcatgtctaagtccggtgtgcc

SEQ ID NO: 5500063 - DNA, 25 bp, Homo sapien
gtctaagtccggtgtgcctcttcac

SEQ ID NO: 5500064 - DNA, 25 bp, Homo sapien
gcattctgaatgctgtacatgattc

SEQ ID NO: 5500065 - DNA, 25 bp, Homo sapien
atgagaggacttgaatctgagactt

SEQ ID NO: 5500066 - DNA, 25 bp, Homo sapien
cttgaatctgagactttagcatgtc

SEQ ID NO: 5500067 - DNA, 25 bp, Homo sapien
acacactggtgcaaagtcacagagc

SEQ ID NO: 5500068 - DNA, 25 bp, Homo sapien
ggggttactggctcaatggcagccc

SEQ ID NO: 5500069 - DNA, 25 bp, Homo sapien
agagctgtgtagaaaactcagtgac

SEQ ID NO: 5500070 - DNA, 25 bp, Homo sapien
agaccacttgaagggccttgcacat

SEQ ID NO: 5500071 - DNA, 25 bp, Homo sapien
ttttagatggcaattaggtaggcaa

SEQ ID NO: 5500072 - DNA, 25 bp, Homo sapien
ttagagccacggtttcagaccactt

SEQ ID NO: 5500073 - DNA, 25 bp, Homo sapien
cattccccaaactggagcgaagagc

SEQ ID NO: 5500074 - DNA, 25 bp, Homo sapien
cacggatgacaatgcacaaacctca

SEQ ID NO: 5500075 - DNA, 25 bp, Homo sapien
ttgaagttcccttgaaggcgtgtgc

SEQ ID NO: 5500076 - DNA, 25 bp, Homo sapien
gtcacagagcttagacttgggaagc

SEQ ID NO: 5500077 - DNA, 25 bp, Homo sapien
tgacaaggaatagcaccaagaacaa

SEQ ID NO: 5500078 - DNA, 25 bp, Homo sapien
tcaggctatcttagggaatgagcat

SEQ ID NO: 5500079 - DNA, 25 bp, Homo sapien
atacgctatgagataataataactc

SEQ ID NO: 5500080 - DNA, 25 bp, Homo sapien
attggtgccatacaagcaaacaaac

SEQ ID NO: 5500081 - DNA, 25 bp, Homo sapien
aagcaaacaaacagataccagagtt

SEQ ID NO: 5500082 - DNA, 25 bp, Homo sapien
tctgaagtcataacgaaaatttgtg

SEQ ID NO: 5500083 - DNA, 25 bp, Homo sapien
tagtgtctaccccaagaatagttcc

SEQ ID NO: 5500084 - DNA, 25 bp, Homo sapien
cagataccagagttaatgatccttc

SEQ ID NO: 5500085 - DNA, 25 bp, Homo sapien
gaagaaatctgcttattggtgccat

SEQ ID NO: 5500086 - DNA, 25 bp, Homo sapien
aacatcccagaggtcaatcaaaatt

SEQ ID NO: 5500087 - DNA, 25 bp, Homo sapien
acgaaaatttgtgagaatagaagga

SEQ ID NO: 5500088 - DNA, 25 bp, Homo sapien
aggaacgttaggctttaataacatc

SEQ ID NO: 5500089 - DNA, 25 bp, Homo sapien
gtgtgcacctgtggtcccagctact

SEQ ID NO: 5500090 - DNA, 25 bp, Homo sapien
attaagtcagattattctcaattcc

SEQ ID NO: 5500091 - DNA, 25 bp, Homo sapien
aaaatacaaaaattggctgggtgtg

SEQ ID NO: 5500092 - DNA, 25 bp, Homo sapien
tttcacagagtataaattaagtcag

SEQ ID NO: 5500093 - DNA, 25 bp, Homo sapien
aaattagcaggcattctgttggttt

SEQ ID NO: 5500094 - DNA, 25 bp, Homo sapien
cacagagtataaattaagtcagatt

SEQ ID NO: 5500095 - DNA, 25 bp, Homo sapien
tcttaaattagcaggcattctgttg

SEQ ID NO: 5500096 - DNA, 25 bp, Homo sapien
ttcattgatttcacagagtataaat

SEQ ID NO: 5500097 - DNA, 25 bp, Homo sapien
tgtttcttaaattagcaggcattct

SEQ ID NO: 5500098 - DNA, 25 bp, Homo sapien
tggtttaaaaagatagatgttggcc

SEQ ID NO: 5500099 - DNA, 25 bp, Homo sapien
gcaggcattctgttggtttaaaaag

SEQ ID NO: 5500100 - DNA, 25 bp, Homo sapien
accagctggacttcagcactgtgta

SEQ ID NO: 5500101 - DNA, 25 bp, Homo sapien
gctggacttcagcactgtgtagtgt

SEQ ID NO: 5500102 - DNA, 25 bp, Homo sapien
aaagctgaacagctaacaggagaag

SEQ ID NO: 5500103 - DNA, 25 bp, Homo sapien
ttaaataagcaatcaaaaagcaacc

SEQ ID NO: 5500104 - DNA, 25 bp, Homo sapien
aaaccatgcccagccgatttctctc

SEQ ID NO: 5500105 - DNA, 25 bp, Homo sapien
aggaaaagctgaacagctaacagga

SEQ ID NO: 5500106 - DNA, 25 bp, Homo sapien
aacagctaacaggagaagatgtaaa

SEQ ID NO: 5500107 - DNA, 25 bp, Homo sapien
aactgcagaacaagataattcatac

SEQ ID NO: 5500108 - DNA, 25 bp, Homo sapien
catgagaaaccatgcccagccgatt

SEQ ID NO: 5500109 - DNA, 25 bp, Homo sapien
gtgtagtgttctcaatatgaaagga

SEQ ID NO: 5500110 - DNA, 25 bp, Homo sapien
ctaacaggagaagatgtaaaatatc

SEQ ID NO: 5500111 - DNA, 25 bp, Homo sapien
atttagcaaccagtacagcccagca

SEQ ID NO: 5500112 - DNA, 25 bp, Homo sapien
cagcccagcatcaaccaattagaag

SEQ ID NO: 5500113 - DNA, 25 bp, Homo sapien
caatatttagcaaccagtacagccc

SEQ ID NO: 5500114 - DNA, 25 bp, Homo sapien
attagaagaagtgtctgactgttga

SEQ ID NO: 5500115 - DNA, 25 bp, Homo sapien
tagttttaaaatgatgtgcaatatt

SEQ ID NO: 5500116 - DNA, 25 bp, Homo sapien
agtacagcccagcatcaaccaatta

SEQ ID NO: 5500117 - DNA, 25 bp, Homo sapien
aaatgatgtgcaatatttagcaacc

SEQ ID NO: 5500118 - DNA, 25 bp, Homo sapien
cctcctgagtacaaaagtgcatctc

SEQ ID NO: 5500119 - DNA, 25 bp, Homo sapien
aaagtgcatctcaaatagttttaaa

SEQ ID NO: 5500120 - DNA, 25 bp, Homo sapien
ggtgtcaccccggtgtgtaccagct

SEQ ID NO: 5500121 - DNA, 25 bp, Homo sapien
ttagaagaagtgtctgactgttgag

SEQ ID NO: 5500122 - DNA, 25 bp, Homo sapien
tgtgacctctatatcccccttcccc

SEQ ID NO: 5500123 - DNA, 25 bp, Homo sapien
aaaaacagagccagctaatcatttc

SEQ ID NO: 5500124 - DNA, 25 bp, Homo sapien
aaaacaaactcagaataacatcttt

SEQ ID NO: 5500125 - DNA, 25 bp, Homo sapien
ctatcatccataataaccaaggcaa

SEQ ID NO: 5500126 - DNA, 25 bp, Homo sapien
cagagccagctaatcatttccaaag

SEQ ID NO: 5500127 - DNA, 25 bp, Homo sapien
ccctgcccttggtaagtaactcttg

SEQ ID NO: 5500128 - DNA, 25 bp, Homo sapien
ttagttaaggcattataagggctat

SEQ ID NO: 5500129 - DNA, 25 bp, Homo sapien
ggtaagtaactcttgatggagaaag

SEQ ID NO: 5500130 - DNA, 25 bp, Homo sapien
ttccaaaggttagtatctccctgct

SEQ ID NO: 5500131 - DNA, 25 bp, Homo sapien
aaagatgaaagatgatttttatttc

SEQ ID NO: 5500132 - DNA, 25 bp, Homo sapien
tgagcattagcagtgagatttcatc

SEQ ID NO: 5500133 - DNA, 25 bp, Homo sapien
ggctgcaatggcattcctcatcgcc

SEQ ID NO: 5500134 - DNA, 25 bp, Homo sapien
tttctaggctgcaatggcattcctc

SEQ ID NO: 5500135 - DNA, 25 bp, Homo sapien
ggtcactgctattcccacagcaatg

SEQ ID NO: 5500136 - DNA, 25 bp, Homo sapien
attcctcatcgcccatgctgccctt

SEQ ID NO: 5500137 - DNA, 25 bp, Homo sapien
tcaaaatcaggctaaacctccagaa

SEQ ID NO: 5500138 - DNA, 25 bp, Homo sapien
aaccgaatttctaggctgcaatggc

SEQ ID NO: 5500139 - DNA, 25 bp, Homo sapien
caggctaaacctccagaaaccgaat

SEQ ID NO: 5500140 - DNA, 25 bp, Homo sapien
tccagaaaccgaatttctaggctgc

SEQ ID NO: 5500141 - DNA, 25 bp, Homo sapien
acagcaatggtttgcctcatgcctc

SEQ ID NO: 5500142 - DNA, 25 bp, Homo sapien
gctattcccacagcaatggtttgcc

SEQ ID NO: 5500143 - DNA, 25 bp, Homo sapien
acctggtctggagccctctgttctt

SEQ ID NO: 5500144 - DNA, 25 bp, Homo sapien
tctgtacccgtcattggtcaacatc

SEQ ID NO: 5500145 - DNA, 25 bp, Homo sapien
ggtcggtctgcattctctaaaagcc

SEQ ID NO: 5500146 - DNA, 25 bp, Homo sapien
aaccaacccaccactgggaccagtg

SEQ ID NO: 5500147 - DNA, 25 bp, Homo sapien
acgggctctttgggaattaactgaa

SEQ ID NO: 5500148 - DNA, 25 bp, Homo sapien
ctctaaaagcctctgtacccgtcat

SEQ ID NO: 5500149 - DNA, 25 bp, Homo sapien
tcttacggacaccagagatggatga

SEQ ID NO: 5500150 - DNA, 25 bp, Homo sapien
gagctgtggtcacactatcacactc

SEQ ID NO: 5500151 - DNA, 25 bp, Homo sapien
aactgaagtacatacgagtggtaac

SEQ ID NO: 5500152 - DNA, 25 bp, Homo sapien
ggaccagtgagcttcttacggacac

SEQ ID NO: 5500153 - DNA, 25 bp, Homo sapien
acgagtggtaactcacacctgtgat

SEQ ID NO: 5500154 - DNA, 25 bp, Homo sapien
ggcaagagaatacgggctctttggg

SEQ ID NO: 5500155 - DNA, 25 bp, Homo sapien
ccccgacacgtctgcggtcgccccc

SEQ ID NO: 5500156 - DNA, 25 bp, Homo sapien
gggggcgaccgcagacgtgtcgggg

SEQ ID NO: 5500157 - DNA, 25 bp, Homo sapien
cccccgacacgtctgcggtcgcccc

SEQ ID NO: 5500158 - DNA, 25 bp, Homo sapien
ggggcgaccgcagacgtgtcggggg

SEQ ID NO: 5500159 - DNA, 25 bp, Homo sapien
gcccccgacacgtctgcggtcgccc

SEQ ID NO: 5500160 - DNA, 25 bp, Homo sapien
gggcgaccgcagacgtgtcgggggc

SEQ ID NO: 5500161 - DNA, 25 bp, Homo sapien
tctttctctcattagcacctggggc

SEQ ID NO: 5500162 - DNA, 25 bp, Homo sapien
atgaggaaattgttatagtctttta

SEQ ID NO: 5500163 - DNA, 25 bp, Homo sapien
cgtcttctcgcagccgtatagtagt

SEQ ID NO: 5500164 - DNA, 25 bp, Homo sapien
ctcgcagccgtatagtagtagtagg

SEQ ID NO: 5500165 - DNA, 25 bp, Homo sapien
tctcattagcacctggggctgatgg

SEQ ID NO: 5500166 - DNA, 25 bp, Homo sapien
ggctgatggcttatgaggaaattgt

SEQ ID NO: 5500167 - DNA, 25 bp, Homo sapien
gctgatggcttatgaggaaattgtt

SEQ ID NO: 5500168 - DNA, 25 bp, Homo sapien
gccgtatagtagtagtaggcggccg

SEQ ID NO: 5500169 - DNA, 25 bp, Homo sapien
gtccctatagtccccttctgtcgtc

SEQ ID NO: 5500170 - DNA, 25 bp, Homo sapien
ttctgtcgtcttctcgcagccgtat

SEQ ID NO: 5500171 - DNA, 25 bp, Homo sapien
ttctctcattagcacctggggctga

SEQ ID NO: 5500172 - DNA, 25 bp, Homo sapien
acaatttcctcataagccatcagcc

SEQ ID NO: 5500173 - DNA, 25 bp, Homo sapien
cttacctactaaaagactataacaa

SEQ ID NO: 5500174 - DNA, 25 bp, Homo sapien
aaagattaagaaagaggttacagtg

SEQ ID NO: 5500175 - DNA, 25 bp, Homo sapien
aagccatcagccccaggtgctaatg

SEQ ID NO: 5500176 - DNA, 25 bp, Homo sapien
tttcctcataagccatcagccccag

SEQ ID NO: 5500177 - DNA, 25 bp, Homo sapien
ctatagggacaaaacttacctacta

SEQ ID NO: 5500178 - DNA, 25 bp, Homo sapien
ctcataagccatcagccccaggtgc

SEQ ID NO: 5500179 - DNA, 25 bp, Homo sapien
ggtgacagaatgagacgccatctca

SEQ ID NO: 5500180 - DNA, 25 bp, Homo sapien
atcagccccaggtgctaatgagaga

SEQ ID NO: 5500181 - DNA, 25 bp, Homo sapien
aagattaagaaagaggttacagtga

SEQ ID NO: 5500182 - DNA, 25 bp, Homo sapien
actaaaagactataacaatttcctc

SEQ ID NO: 5500183 - DNA, 25 bp, Homo sapien
cagaggtaggaggttcttatttcta

SEQ ID NO: 5500184 - DNA, 25 bp, Homo sapien
tgggttcaagtgagtattttgtatt

SEQ ID NO: 5500185 - DNA, 25 bp, Homo sapien
ctgatttcaacagaggtaggaggtt

SEQ ID NO: 5500186 - DNA, 25 bp, Homo sapien
aaggggtgtatatgtattctgattt

SEQ ID NO: 5500187 - DNA, 25 bp, Homo sapien
tatttctatgcaactgaaatccatc

SEQ ID NO: 5500188 - DNA, 25 bp, Homo sapien
tgaatgaaggggtgtatatgtattc

SEQ ID NO: 5500189 - DNA, 25 bp, Homo sapien
tgaatgaatattcatagagtgaatg

SEQ ID NO: 5500190 - DNA, 25 bp, Homo sapien
cttgtaggttcatggaatgaatgaa

SEQ ID NO: 5500191 - DNA, 25 bp, Homo sapien
ccatcttgtagccatcaccatccac

SEQ ID NO: 5500192 - DNA, 25 bp, Homo sapien
tattcatagagtgaatgaaggggtg

SEQ ID NO: 5500193 - DNA, 25 bp, Homo sapien
aaaccttgtaggttcatggaatgaa

SEQ ID NO: 5500194 - DNA, 25 bp, Homo sapien
gctacaagatggatttcagttgcat

SEQ ID NO: 5500195 - DNA, 25 bp, Homo sapien
gagccagcactcttaaccacacttc

SEQ ID NO: 5500196 - DNA, 25 bp, Homo sapien
tgcatagaaataagaacctcctacc

SEQ ID NO: 5500197 - DNA, 25 bp, Homo sapien
agaacctcctacctctgttgaaatc

SEQ ID NO: 5500198 - DNA, 25 bp, Homo sapien
catgaacctacaaggtttttaggtc

SEQ ID NO: 5500199 - DNA, 25 bp, Homo sapien
tgaaatcagaatacatatacacccc

SEQ ID NO: 5500200 - DNA, 25 bp, Homo sapien
tcagttgcatagaaataagaacctc

SEQ ID NO: 5500201 - DNA, 25 bp, Homo sapien
ttaaataagaactataggctgggcg

SEQ ID NO: 5500202 - DNA, 25 bp, Homo sapien
gctccagagccagcactcttaacca

SEQ ID NO: 5500203 - DNA, 25 bp, Homo sapien
aaatacaaaatactcacttgaaccc

SEQ ID NO: 5500204 - DNA, 25 bp, Homo sapien
ggtgatggctacaagatggatttca

SEQ ID NO: 5500205 - DNA, 25 bp, Homo sapien
cctgtcgaatcaccgacgggccccg

SEQ ID NO: 5500206 - DNA, 25 bp, Homo sapien
cggggcccgtcggtgattcgacagg

SEQ ID NO: 5500207 - DNA, 25 bp, Homo sapien
gccaggctggtctcttcgaaatctt

SEQ ID NO: 5500208 - DNA, 25 bp, Homo sapien
tatagctcatcagcatgtaagtgtc

SEQ ID NO: 5500209 - DNA, 25 bp, Homo sapien
ctagatcccttgctcaggcgaatcc

SEQ ID NO: 5500210 - DNA, 25 bp, Homo sapien
gctcaggcgaatcctttcatctttc

SEQ ID NO: 5500211 - DNA, 25 bp, Homo sapien
cttctagatcccttgctcaggcgaa

SEQ ID NO: 5500212 - DNA, 25 bp, Homo sapien
ctcatcagcatgtaagtgtcttgac

SEQ ID NO: 5500213 - DNA, 25 bp, Homo sapien
ctcttcgaaatcttaaatccaaaca

SEQ ID NO: 5500214 - DNA, 25 bp, Homo sapien
atcccttgctcaggcgaatcctttc

SEQ ID NO: 5500215 - DNA, 25 bp, Homo sapien
ccttccctattagctctctactctc

SEQ ID NO: 5500216 - DNA, 25 bp, Homo sapien
gcatgtaagtgtcttgacatctctc

SEQ ID NO: 5500217 - DNA, 25 bp, Homo sapien
tctttcccttatagctcatcagcat

SEQ ID NO: 5500218 - DNA, 25 bp, Homo sapien
ggccaatatggtgacaccccgtctc

SEQ ID NO: 5500219 - DNA, 25 bp, Homo sapien
gacacttacatgctgatgagctata

SEQ ID NO: 5500220 - DNA, 25 bp, Homo sapien
atgctgatgagctataagggaaaga

SEQ ID NO: 5500221 - DNA, 25 bp, Homo sapien
gatcacaccactgcattccaacctg

SEQ ID NO: 5500222 - DNA, 25 bp, Homo sapien
gaagagagatgtcaagacacttaca

SEQ ID NO: 5500223 - DNA, 25 bp, Homo sapien
ctgcattccaacctggcgacagagc

SEQ ID NO: 5500224 - DNA, 25 bp, Homo sapien
ctagaagaatagaaatgtttggatt

SEQ ID NO: 5500225 - DNA, 25 bp, Homo sapien
ggatttaagatttcgaagagaccag

SEQ ID NO: 5500226 - DNA, 25 bp, Homo sapien
tttaagatttcgaagagaccagcct

SEQ ID NO: 5500227 - DNA, 25 bp, Homo sapien
agcaagggatctagaagaatagaaa

SEQ ID NO: 5500228 - DNA, 25 bp, Homo sapien
tacatgctgatgagctataagggaa

SEQ ID NO: 5500229 - DNA, 25 bp, Homo sapien
accctcccgtgctccgaacaagcct

SEQ ID NO: 5500230 - DNA, 25 bp, Homo sapien
aaggatctcgccagtcgacaccaat

SEQ ID NO: 5500231 - DNA, 25 bp, Homo sapien
gttctgtacagtgacaggcaacatc

SEQ ID NO: 5500232 - DNA, 25 bp, Homo sapien
atttagtaaagtaacaagaatacac

SEQ ID NO: 5500233 - DNA, 25 bp, Homo sapien
gccaggcagtcacagtttagaactt

SEQ ID NO: 5500234 - DNA, 25 bp, Homo sapien
ccaacacatgcggcaaaggtttgca

SEQ ID NO: 5500235 - DNA, 25 bp, Homo sapien
catcacacccagccagttatattta

SEQ ID NO: 5500236 - DNA, 25 bp, Homo sapien
ggcgcaccccaacacatgcggcaaa

SEQ ID NO: 5500237 - DNA, 25 bp, Homo sapien
tgttaatgttggtaaggatttagta

SEQ ID NO: 5500238 - DNA, 25 bp, Homo sapien
aacttatcagtgttggttgggccag

SEQ ID NO: 5500239 - DNA, 25 bp, Homo sapien
ccgaacaagcctgccatagtcagtt

SEQ ID NO: 5500240 - DNA, 25 bp, Homo sapien
tatatgtaaaaaacacagacccaaa

SEQ ID NO: 5500241 - DNA, 25 bp, Homo sapien
agttctggaatatgagattcactac

SEQ ID NO: 5500242 - DNA, 25 bp, Homo sapien
aaacacagacccaaattacatattc

SEQ ID NO: 5500243 - DNA, 25 bp, Homo sapien
aaaaacctgcaagaaaatataccta

SEQ ID NO: 5500244 - DNA, 25 bp, Homo sapien
cattcagatgatagaattatggatt

SEQ ID NO: 5500245 - DNA, 25 bp, Homo sapien
tgtcacaaatagcatcaaatcaatc

SEQ ID NO: 5500246 - DNA, 25 bp, Homo sapien
ctaataatgaaaactgcagtagcag

SEQ ID NO: 5500247 - DNA, 25 bp, Homo sapien
ggctaccatgctaatattcacaacc

SEQ ID NO: 5500248 - DNA, 25 bp, Homo sapien
cactgaaattgatataaaccactgc

SEQ ID NO: 5500249 - DNA, 25 bp, Homo sapien
tcacaaccatgtggcactagcctaa

SEQ ID NO: 5500250 - DNA, 25 bp, Homo sapien
cagtagcagaactattaagcagatc

SEQ ID NO: 5500251 - DNA, 25 bp, Homo sapien
tgtaaatgtcaaaaagtccctctta

SEQ ID NO: 5500252 - DNA, 25 bp, Homo sapien
aatatttgagtacagcaatcatttc

SEQ ID NO: 5500253 - DNA, 25 bp, Homo sapien
attcagcatccacccataaagcgca

SEQ ID NO: 5500254 - DNA, 25 bp, Homo sapien
gctacatggtagacaatatgatcac

SEQ ID NO: 5500255 - DNA, 25 bp, Homo sapien
atgaataagttactgaacacgcctc

SEQ ID NO: 5500256 - DNA, 25 bp, Homo sapien
attgaaagctggctacatggtagac

SEQ ID NO: 5500257 - DNA, 25 bp, Homo sapien
ttacatataattgaaagctggctac

SEQ ID NO: 5500258 - DNA, 25 bp, Homo sapien
gtgtaggcaatcaactatggttttc

SEQ ID NO: 5500259 - DNA, 25 bp, Homo sapien
ctgaacacgcctcccatctgcttgc

SEQ ID NO: 5500260 - DNA, 25 bp, Homo sapien
cacccataaagcgcaactaaaaact

SEQ ID NO: 5500261 - DNA, 25 bp, Homo sapien
ccaagtgctggtgctttcagatatc

SEQ ID NO: 5500262 - DNA, 25 bp, Homo sapien
gaaccttggagtaccgatgaagatg

SEQ ID NO: 5500263 - DNA, 25 bp, Homo sapien
gagtgactgagcctgctccactggg

SEQ ID NO: 5500264 - DNA, 25 bp, Homo sapien
ggctaggcggtgtcaccccatacga

SEQ ID NO: 5500265 - DNA, 25 bp, Homo sapien
tgactgagcctgctccactgggagg

SEQ ID NO: 5500266 - DNA, 25 bp, Homo sapien
aggcggtgtcaccccatacgatgtg

SEQ ID NO: 5500267 - DNA, 25 bp, Homo sapien
ggagtaccgatgaagatggtttcct

SEQ ID NO: 5500268 - DNA, 25 bp, Homo sapien
cggtgtcaccccatacgatgtgtac

SEQ ID NO: 5500269 - DNA, 25 bp, Homo sapien
tggagtaccgatgaagatggtttcc

SEQ ID NO: 5500270 - DNA, 25 bp, Homo sapien
caccccatacgatgtgtactggagg

SEQ ID NO: 5500271 - DNA, 25 bp, Homo sapien
tggagtgactgagcctgctccactg

SEQ ID NO: 5500272 - DNA, 25 bp, Homo sapien
cccatacgatgtgtactggaggagg

SEQ ID NO: 5500273 - DNA, 25 bp, Homo sapien
aatacgaataactcactagatacac

SEQ ID NO: 5500274 - DNA, 25 bp, Homo sapien
gtgtatctagtgagttattcgtatt

SEQ ID NO: 5500275 - DNA, 25 bp, Homo sapien
tgagtaagacatgagcaggtattaa

SEQ ID NO: 5500276 - DNA, 25 bp, Homo sapien
aggcttgaacaagatataaagactt

SEQ ID NO: 5500277 - DNA, 25 bp, Homo sapien
caggtacattgaggtctgagcagtg

SEQ ID NO: 5500278 - DNA, 25 bp, Homo sapien
agacatgagcaggtattaaaggctt

SEQ ID NO: 5500279 - DNA, 25 bp, Homo sapien
tggtttgaaaggcttgaacaagata

SEQ ID NO: 5500280 - DNA, 25 bp, Homo sapien
tttgtaggatttttctcaggtatga

SEQ ID NO: 5500281 - DNA, 25 bp, Homo sapien
ttatggtttgaaaggcttgaacaag

SEQ ID NO: 5500282 - DNA, 25 bp, Homo sapien
ctctggtcctgagtaagacatgagc

SEQ ID NO: 5500283 - DNA, 25 bp, Homo sapien
cttttatgtagagttaggtatgaga

SEQ ID NO: 5500284 - DNA, 25 bp, Homo sapien
ttttctcaggtacattgaggtctga

SEQ ID NO: 5500285 - DNA, 25 bp, Homo sapien
gttcaatatgaactctggtcctgag

SEQ ID NO: 5500286 - DNA, 25 bp, Homo sapien
catccctagggagctagtttcagtt

SEQ ID NO: 5500287 - DNA, 25 bp, Homo sapien
acccagaatctgggcatcattcttg

SEQ ID NO: 5500288 - DNA, 25 bp, Homo sapien
ctgctaaacagcaggtcacccggaa

SEQ ID NO: 5500289 - DNA, 25 bp, Homo sapien
atcactacttgtgcaccacagcact

SEQ ID NO: 5500290 - DNA, 25 bp, Homo sapien
tcacccggaaacataacatcactac

SEQ ID NO: 5500291 - DNA, 25 bp, Homo sapien
ggctgggctcctgctaaacagcagg

SEQ ID NO: 5500292 - DNA, 25 bp, Homo sapien
agcaggtcacccggaaacataacat

SEQ ID NO: 5500293 - DNA, 25 bp, Homo sapien
cagccctggggccctgttcttatcc

SEQ ID NO: 5500294 - DNA, 25 bp, Homo sapien
atagaccagacccctctagcctctc

SEQ ID NO: 5500295 - DNA, 25 bp, Homo sapien
cttcgtctccccccaggtcctgttg

SEQ ID NO: 5500296 - DNA, 25 bp, Homo sapien
attcttgatcccttcgtctcccccc

SEQ ID NO: 5500297 - DNA, 25 bp, Homo sapien
aggctggtcttaacctccttagctc

SEQ ID NO: 5500298 - DNA, 25 bp, Homo sapien
ggccttgtgggaggcataattccat

SEQ ID NO: 5500299 - DNA, 25 bp, Homo sapien
atgcaagtatcttgccccaggcctt

SEQ ID NO: 5500300 - DNA, 25 bp, Homo sapien
ttctgcactttgaagctggcccacc

SEQ ID NO: 5500301 - DNA, 25 bp, Homo sapien
ccaccacacccagttccttctgcac

SEQ ID NO: 5500302 - DNA, 25 bp, Homo sapien
gctgcaagcaagttaatggagatgt

SEQ ID NO: 5500303 - DNA, 25 bp, Homo sapien
ttgctgcaagcaagttaatggagat

SEQ ID NO: 5500304 - DNA, 25 bp, Homo sapien
tgtgggaggcataattccatctcat

SEQ ID NO: 5500305 - DNA, 25 bp, Homo sapien
agggggcacctatgcaagtatcttg

SEQ ID NO: 5500306 - DNA, 25 bp, Homo sapien
ggcccacctgccaactggattgaac

SEQ ID NO: 5500307 - DNA, 25 bp, Homo sapien
tgaagctggcccacctgccaactgg

SEQ ID NO: 5500308 - DNA, 25 bp, Homo sapien
cagcaggaatccacgttcactaatc

SEQ ID NO: 5500309 - DNA, 25 bp, Homo sapien
gctaatacttggtggcctagagtcc

SEQ ID NO: 5500310 - DNA, 25 bp, Homo sapien
tggtggcctagagtccccaaaataa

SEQ ID NO: 5500311 - DNA, 25 bp, Homo sapien
gattagtagagaaaacataagtatg

SEQ ID NO: 5500312 - DNA, 25 bp, Homo sapien
ttgccatattatgggatgcactccc

SEQ ID NO: 5500313 - DNA, 25 bp, Homo sapien
ttaaggagcaaatacttgtcaattc

SEQ ID NO: 5500314 - DNA, 25 bp, Homo sapien
gggatgcactccctcagcaggaatc

SEQ ID NO: 5500315 - DNA, 25 bp, Homo sapien
aaatgaaagctttgtcctgtggtcc

SEQ ID NO: 5500316 - DNA, 25 bp, Homo sapien
tgaggacctggaccagattagtaga

SEQ ID NO: 5500317 - DNA, 25 bp, Homo sapien
catactgcagtcacatcgaactttc

SEQ ID NO: 5500318 - DNA, 25 bp, Homo sapien
tcctgtggtccatgaggacctggac

SEQ ID NO: 5500319 - DNA, 25 bp, Homo sapien
gcaaggcaatcaaattgtgcagctg

SEQ ID NO: 5500320 - DNA, 25 bp, Homo sapien
caacaagacaacagaactagaaagc

SEQ ID NO: 5500321 - DNA, 25 bp, Homo sapien
gaagcaggtaatttgcaaggcaatc

SEQ ID NO: 5500322 - DNA, 25 bp, Homo sapien
atccttgaagcaggtaatttgcaag

SEQ ID NO: 5500323 - DNA, 25 bp, Homo sapien
gatgactgctgtgagattggatgtc

SEQ ID NO: 5500324 - DNA, 25 bp, Homo sapien
aggaccggctgtagttctggatcct

SEQ ID NO: 5500325 - DNA, 25 bp, Homo sapien
ttgaagcaggtaatttgcaaggcaa

SEQ ID NO: 5500326 - DNA, 25 bp, Homo sapien
gacaacaagacaacagaactagaaa

SEQ ID NO: 5500327 - DNA, 25 bp, Homo sapien
ggacgaggaatattgagacatctgt

SEQ ID NO: 5500328 - DNA, 25 bp, Homo sapien
gaccggctgtagttctggatcctct

SEQ ID NO: 5500329 - DNA, 25 bp, Homo sapien
ttgcaaggcaatcaaattgtgcagc

SEQ ID NO: 5500330 - DNA, 25 bp, Homo sapien
tatattctgaatccatacaaaagta

SEQ ID NO: 5500331 - DNA, 25 bp, Homo sapien
gtttagaaaatatcgaaagcggcca

SEQ ID NO: 5500332 - DNA, 25 bp, Homo sapien
aatccatacaaaagtaagctagtac

SEQ ID NO: 5500333 - DNA, 25 bp, Homo sapien
gttttttatatagaacacagcacaa

SEQ ID NO: 5500334 - DNA, 25 bp, Homo sapien
aagtttagaaaatatcgaaagcggc

SEQ ID NO: 5500335 - DNA, 25 bp, Homo sapien
tatatagaacacagcacaaagtgct

SEQ ID NO: 5500336 - DNA, 25 bp, Homo sapien
tgaattaaagtttagaaaatatcga

SEQ ID NO: 5500337 - DNA, 25 bp, Homo sapien
ctgaatccatacaaaagtaagctag

SEQ ID NO: 5500338 - DNA, 25 bp, Homo sapien
agtttagaaaatatcgaaagcggcc

SEQ ID NO: 5500339 - DNA, 25 bp, Homo sapien
gcacaaagtgcttttgaattaaagt

SEQ ID NO: 5500340 - DNA, 25 bp, Homo sapien
ttaatttagtatattctgaatccat

SEQ ID NO: 5500341 - DNA, 25 bp, Homo sapien
cagatcagcttaagtgagaaagcaa

SEQ ID NO: 5500342 - DNA, 25 bp, Homo sapien
ctcataaaggcagtaccaaatcatc

SEQ ID NO: 5500343 - DNA, 25 bp, Homo sapien
tgtagttacctaccagagggcaatt

SEQ ID NO: 5500344 - DNA, 25 bp, Homo sapien
agtagggtctgcaaattgtgcttaa

SEQ ID NO: 5500345 - DNA, 25 bp, Homo sapien
ccagagggcaattttgctccatacc

SEQ ID NO: 5500346 - DNA, 25 bp, Homo sapien
ttctaggatgcaggaactatgaaaa

SEQ ID NO: 5500347 - DNA, 25 bp, Homo sapien
tagcagtaaatgatcacctaggcac

SEQ ID NO: 5500348 - DNA, 25 bp, Homo sapien
ggcatttaaaagggtatgatcagtt

SEQ ID NO: 5500349 - DNA, 25 bp, Homo sapien
ctttcctgtgaatttggtgagcatt

SEQ ID NO: 5500350 - DNA, 25 bp, Homo sapien
tgatcagttaaatagaagtagggtc

SEQ ID NO: 5500351 - DNA, 25 bp, Homo sapien
taccaggaagcagtaaatagcagta

SEQ ID NO: 5500352 - DNA, 25 bp, Homo sapien
tggctcccggcgcttcagttcctat

SEQ ID NO: 5500353 - DNA, 25 bp, Homo sapien
ccaaagcagctctagagcctggctt

SEQ ID NO: 5500354 - DNA, 25 bp, Homo sapien
cttccattcctgttgccatgttgcc

SEQ ID NO: 5500355 - DNA, 25 bp, Homo sapien
ccaaattggtgactcaactcctttc

SEQ ID NO: 5500356 - DNA, 25 bp, Homo sapien
cagttcctattaatccatggctttt

SEQ ID NO: 5500357 - DNA, 25 bp, Homo sapien
aatggttcatgatccaaagcagctc

SEQ ID NO: 5500358 - DNA, 25 bp, Homo sapien
atggaagaacagaaacttgaaaatg

SEQ ID NO: 5500359 - DNA, 25 bp, Homo sapien
tctgcattgtagctcctgctgcctc

SEQ ID NO: 5500360 - DNA, 25 bp, Homo sapien
gagcctggcttatcttgtcaccccc

SEQ ID NO: 5500361 - DNA, 25 bp, Homo sapien
tctgcccccctcgatgctagcccat

SEQ ID NO: 5500362 - DNA, 25 bp, Homo sapien
actgactaacttctttctgcccccc

SEQ ID NO: 5500363 - DNA, 25 bp, Homo sapien
acttcacttgtaaacgttccgcaga

SEQ ID NO: 5500364 - DNA, 25 bp, Homo sapien
ctggatattgtcacactgaggtggc

SEQ ID NO: 5500365 - DNA, 25 bp, Homo sapien
tttggatttaaagcccaggagaatc

SEQ ID NO: 5500366 - DNA, 25 bp, Homo sapien
cagcatgatctgacttaaaatttct

SEQ ID NO: 5500367 - DNA, 25 bp, Homo sapien
acaacaccaacactaacattaagac

SEQ ID NO: 5500368 - DNA, 25 bp, Homo sapien
tacgtgctataaatacgacaatgaa

SEQ ID NO: 5500369 - DNA, 25 bp, Homo sapien
agcccaggagaatccaacttcactt

SEQ ID NO: 5500370 - DNA, 25 bp, Homo sapien
cactgaggtggctacttgatgttat

SEQ ID NO: 5500371 - DNA, 25 bp, Homo sapien
tttgcacattaattagaagttccat

SEQ ID NO: 5500372 - DNA, 25 bp, Homo sapien
taaacgttccgcagaaaccacaaca

SEQ ID NO: 5500373 - DNA, 25 bp, Homo sapien
ttataggaccaaggattaaattctc

SEQ ID NO: 5500374 - DNA, 25 bp, Homo sapien
ctgctctctgctctctatggttgtc

SEQ ID NO: 5500375 - DNA, 25 bp, Homo sapien
ttgaggcctcatatctcacctgcac

SEQ ID NO: 5500376 - DNA, 25 bp, Homo sapien
gtgctgataaatattgatgaattct

SEQ ID NO: 5500377 - DNA, 25 bp, Homo sapien
acactgcagagttgaggcctcatat

SEQ ID NO: 5500378 - DNA, 25 bp, Homo sapien
cttcagtccatcgtccacacagcac

SEQ ID NO: 5500379 - DNA, 25 bp, Homo sapien
ttgtagttcataaacacagagctgt

SEQ ID NO: 5500380 - DNA, 25 bp, Homo sapien
catcgtccacacagcactggggaag

SEQ ID NO: 5500381 - DNA, 25 bp, Homo sapien
cagagctgtttgtgtcccctgtatc

SEQ ID NO: 5500382 - DNA, 25 bp, Homo sapien
ttgatgaattctgctctctgctctc

SEQ ID NO: 5500383 - DNA, 25 bp, Homo sapien
tggtcccttgctcccagccttctcc

SEQ ID NO: 5500384 - DNA, 25 bp, Homo sapien
acaactggttgtagttcataaacac

SEQ ID NO: 5500385 - DNA, 25 bp, Homo sapien
tacatagggaatgcagattacagag

SEQ ID NO: 5500386 - DNA, 25 bp, Homo sapien
agagaagtcagtgaggctgaccata

SEQ ID NO: 5500387 - DNA, 25 bp, Homo sapien
cagagccaaatcatacatagggaat

SEQ ID NO: 5500388 - DNA, 25 bp, Homo sapien
acttcatagatgagtagagttggcc

SEQ ID NO: 5500389 - DNA, 25 bp, Homo sapien
ataaatatggttggaaagagataag

SEQ ID NO: 5500390 - DNA, 25 bp, Homo sapien
gaactgcactaagatatgcctaagc

SEQ ID NO: 5500391 - DNA, 25 bp, Homo sapien
gaggctgaccatacaaacacagtcc

SEQ ID NO: 5500392 - DNA, 25 bp, Homo sapien
ataaaaactgtagaatgtcattact

SEQ ID NO: 5500393 - DNA, 25 bp, Homo sapien
atcaatacagtaacaagaaataatt

SEQ ID NO: 5500394 - DNA, 25 bp, Homo sapien
cattactggccagaatggcaagcac

SEQ ID NO: 5500395 - DNA, 25 bp, Homo sapien
aataattgatgagaactgcactaag

SEQ ID NO: 5500396 - DNA, 25 bp, Homo sapien
ggcaccaatcaggccctcggcaaca

SEQ ID NO: 5500397 - DNA, 25 bp, Homo sapien
ccgtcaagctcaagtctggaactgc

SEQ ID NO: 5500398 - DNA, 25 bp, Homo sapien
gccctcggcaacactgccttcccca

SEQ ID NO: 5500399 - DNA, 25 bp, Homo sapien
ctcctgcttaatgagggagtggatg

SEQ ID NO: 5500400 - DNA, 25 bp, Homo sapien
ctcaagtctggaactgcctgagctg

SEQ ID NO: 5500401 - DNA, 25 bp, Homo sapien
gcacccggcgttttgcaaactttga

SEQ ID NO: 5500402 - DNA, 25 bp, Homo sapien
cagtgcctggcaccaatcaggccct

SEQ ID NO: 5500403 - DNA, 25 bp, Homo sapien
cggcaacactgccttccccaggtgc

SEQ ID NO: 5500404 - DNA, 25 bp, Homo sapien
ggctcctgcttaatgagggagtgga

SEQ ID NO: 5500405 - DNA, 25 bp, Homo sapien
cctggcaccaatcaggccctcggca

SEQ ID NO: 5500406 - DNA, 25 bp, Homo sapien
accactgcacccggcgttttgcaaa

SEQ ID NO: 5500407 - DNA, 25 bp, Homo sapien
agatgcccaagaggcagtgatttca

SEQ ID NO: 5500408 - DNA, 25 bp, Homo sapien
acggggcctagatttgctaccagat

SEQ ID NO: 5500409 - DNA, 25 bp, Homo sapien
atgtccccctgaggtttagcagagc

SEQ ID NO: 5500410 - DNA, 25 bp, Homo sapien
gatagagttcacaaatgacagcatt

SEQ ID NO: 5500411 - DNA, 25 bp, Homo sapien
ctgtcaaggcacagcattaccatgt

SEQ ID NO: 5500412 - DNA, 25 bp, Homo sapien
taaaaagatgcacaataggtaactg

SEQ ID NO: 5500413 - DNA, 25 bp, Homo sapien
tgtatgtcttccatggagcctttcc

SEQ ID NO: 5500414 - DNA, 25 bp, Homo sapien
caccaatgtcaatagggtggctgac

SEQ ID NO: 5500415 - DNA, 25 bp, Homo sapien
ataggtaactgcaatgagcttgttc

SEQ ID NO: 5500416 - DNA, 25 bp, Homo sapien
taccagataagccaatgagacatgc

SEQ ID NO: 5500417 - DNA, 25 bp, Homo sapien
ttcagtatcaagaaggatgcctata

SEQ ID NO: 5500418 - DNA, 25 bp, Homo sapien
cacaacatgaaaagtaagcagtata

SEQ ID NO: 5500419 - DNA, 25 bp, Homo sapien
accagtaccccagctggtacggatt

SEQ ID NO: 5500420 - DNA, 25 bp, Homo sapien
aagtaccatgtacggaaaaagtgta

SEQ ID NO: 5500421 - DNA, 25 bp, Homo sapien
tccacatcagtaggtggtgctggag

SEQ ID NO: 5500422 - DNA, 25 bp, Homo sapien
gccagcaggcacaaagttatccaca

SEQ ID NO: 5500423 - DNA, 25 bp, Homo sapien
tttgtaatattggacctggaccttc

SEQ ID NO: 5500424 - DNA, 25 bp, Homo sapien
aagcagtataacatgagtgaaggat

SEQ ID NO: 5500425 - DNA, 25 bp, Homo sapien
tgctcttatgtcagggtgccaacgg

SEQ ID NO: 5500426 - DNA, 25 bp, Homo sapien
aatgacatcctagtgggcagcttcc

SEQ ID NO: 5500427 - DNA, 25 bp, Homo sapien
gtgccaacgggaagcttcccagtta

SEQ ID NO: 5500428 - DNA, 25 bp, Homo sapien
caagaaagtgctcaactcctggttc

SEQ ID NO: 5500429 - DNA, 25 bp, Homo sapien
acacataagcacataggcaagccta

SEQ ID NO: 5500430 - DNA, 25 bp, Homo sapien
aatttaattgcaaaagacacagaat

SEQ ID NO: 5500431 - DNA, 25 bp, Homo sapien
gcctagtccaccaaaaatacagtat

SEQ ID NO: 5500432 - DNA, 25 bp, Homo sapien
ttgcaaaagacacagaatattaagg

SEQ ID NO: 5500433 - DNA, 25 bp, Homo sapien
aaaagctacacataagcacataggc

SEQ ID NO: 5500434 - DNA, 25 bp, Homo sapien
ctgagtttgcagatagtgttttaaa

SEQ ID NO: 5500435 - DNA, 25 bp, Homo sapien
aatacagtattagtaaatggatgaa

SEQ ID NO: 5500436 - DNA, 25 bp, Homo sapien
ataggcaagcctagtccaccaaaaa

SEQ ID NO: 5500437 - DNA, 25 bp, Homo sapien
gttaaagtgtcctgagtttgcagat

SEQ ID NO: 5500438 - DNA, 25 bp, Homo sapien
cttaggaaggactgtaaggttttga

SEQ ID NO: 5500439 - DNA, 25 bp, Homo sapien
gagtattctgccctgttaaagtgtc

SEQ ID NO: 5500440 - DNA, 25 bp, Homo sapien
aatacaaaaatttgccaggcatggt

SEQ ID NO: 5500441 - DNA, 25 bp, Homo sapien
ttggatttgaaaatacaagcaaggc

SEQ ID NO: 5500442 - DNA, 25 bp, Homo sapien
aaatacaagcaaggcataataattc

SEQ ID NO: 5500443 - DNA, 25 bp, Homo sapien
cagaggctgcagtaaactgagatca

SEQ ID NO: 5500444 - DNA, 25 bp, Homo sapien
ggtcagaaatcaagactagaaattt

SEQ ID NO: 5500445 - DNA, 25 bp, Homo sapien
caggcatggtggcacacacctgtaa

SEQ ID NO: 5500446 - DNA, 25 bp, Homo sapien
gccaagatggcgaaacccaatctct

SEQ ID NO: 5500447 - DNA, 25 bp, Homo sapien
tatattataggttgccgagacggat

SEQ ID NO: 5500448 - DNA, 25 bp, Homo sapien
tataggttgccgagacggataataa

SEQ ID NO: 5500449 - DNA, 25 bp, Homo sapien
agctggaggtcagaaatcaagacta

SEQ ID NO: 5500450 - DNA, 25 bp, Homo sapien
ccgagacggataataaaagcgtttg

SEQ ID NO: 5500451 - DNA, 25 bp, Homo sapien
accaaccaggttctttctacataat

SEQ ID NO: 5500452 - DNA, 25 bp, Homo sapien
tggccaacatagtaaaaccccatcc

SEQ ID NO: 5500453 - DNA, 25 bp, Homo sapien
gcggatccatctgaggtcaggagtt

SEQ ID NO: 5500454 - DNA, 25 bp, Homo sapien
atatacaaaacgtttcatttcctat

SEQ ID NO: 5500455 - DNA, 25 bp, Homo sapien
acttacaaaggccacctacaaatcc

SEQ ID NO: 5500456 - DNA, 25 bp, Homo sapien
ataaattacttacaaaggccaccta

SEQ ID NO: 5500457 - DNA, 25 bp, Homo sapien
caaaggccacctacaaatccaaatt

SEQ ID NO: 5500458 - DNA, 25 bp, Homo sapien
ttttggaaaaatcagtggcagctgg

SEQ ID NO: 5500459 - DNA, 25 bp, Homo sapien
ttattttggaaaaatcagtggcagc

SEQ ID NO: 5500460 - DNA, 25 bp, Homo sapien
ttcccagggatgcataattattttg

SEQ ID NO: 5500461 - DNA, 25 bp, Homo sapien
tccttcccagggatgcataattatt

SEQ ID NO: 5500462 - DNA, 25 bp, Homo sapien
agggaaatgtctctcttgggaagct

SEQ ID NO: 5500463 - DNA, 25 bp, Homo sapien
tgtgcttggccttgacaggttcttt

SEQ ID NO: 5500464 - DNA, 25 bp, Homo sapien
caagaaaattaaataggaatccctc

SEQ ID NO: 5500465 - DNA, 25 bp, Homo sapien
cagattataaaacagtggcaccgtg

SEQ ID NO: 5500466 - DNA, 25 bp, Homo sapien
tgaactaaaaagcatgaactgcatt

SEQ ID NO: 5500467 - DNA, 25 bp, Homo sapien
tcccactgcagttgatagattttaa

SEQ ID NO: 5500468 - DNA, 25 bp, Homo sapien
attacaagctgacccaagaaaatta

SEQ ID NO: 5500469 - DNA, 25 bp, Homo sapien
aaaattatctggacgtggtgtcgcg

SEQ ID NO: 5500470 - DNA, 25 bp, Homo sapien
aggaatccctcaaagcagctgagtc

SEQ ID NO: 5500471 - DNA, 25 bp, Homo sapien
ttataaaacagtggcaccgtgaggg

SEQ ID NO: 5500472 - DNA, 25 bp, Homo sapien
agcagctgagtcatgctttgtcaag

SEQ ID NO: 5500473 - DNA, 25 bp, Homo sapien
gattcaaactgtttaattacttaaa

SEQ ID NO: 5500474 - DNA, 25 bp, Homo sapien
tttaagtaattaaacagtttgaatc

SEQ ID NO: 5500475 - DNA, 25 bp, Homo sapien
acatgtaaaacgtgttgttcatctt

SEQ ID NO: 5500476 - DNA, 25 bp, Homo sapien
accactggccttcttgggtttcact

SEQ ID NO: 5500477 - DNA, 25 bp, Homo sapien
ttggtcataagtaggaagagaaata

SEQ ID NO: 5500478 - DNA, 25 bp, Homo sapien
agtaaaaattcagcccccgtcactc

SEQ ID NO: 5500479 - DNA, 25 bp, Homo sapien
ttccactttaggagccaatttggtc

SEQ ID NO: 5500480 - DNA, 25 bp, Homo sapien
catttggatgtgtttcttgcctgag

SEQ ID NO: 5500481 - DNA, 25 bp, Homo sapien
caatttggtcataagtaggaagaga

SEQ ID NO: 5500482 - DNA, 25 bp, Homo sapien
agtaggaagagaaataacatctgat

SEQ ID NO: 5500483 - DNA, 25 bp, Homo sapien
tgctgtgaaacaaatgtctcctctc

SEQ ID NO: 5500484 - DNA, 25 bp, Homo sapien
tctccacgaggttttaccttgcttc

SEQ ID NO: 5500485 - DNA, 25 bp, Homo sapien
gcccccgtcactctaaggacatctc

SEQ ID NO: 5500486 - DNA, 25 bp, Homo sapien
cttaataaattatgcatggcccagc

SEQ ID NO: 5500487 - DNA, 25 bp, Homo sapien
ataaattatgcatggcccagccaag

SEQ ID NO: 5500488 - DNA, 25 bp, Homo sapien
gggccattgctgatgcacaatctgc

SEQ ID NO: 5500489 - DNA, 25 bp, Homo sapien
taaatgggccattgctgatgcacaa

SEQ ID NO: 5500490 - DNA, 25 bp, Homo sapien
aagtattagggtacaaagtggacta

SEQ ID NO: 5500491 - DNA, 25 bp, Homo sapien
aattgataaatgggccattgctgat

SEQ ID NO: 5500492 - DNA, 25 bp, Homo sapien
ggtacaaagtggactaccatgtatc

SEQ ID NO: 5500493 - DNA, 25 bp, Homo sapien
catccttcgttgaaggaagtattag

SEQ ID NO: 5500494 - DNA, 25 bp, Homo sapien
ctgctatagaaaaacgaaaacgaag

SEQ ID NO: 5500495 - DNA, 25 bp, Homo sapien
atatattgtggctgtactagagtat

SEQ ID NO: 5500496 - DNA, 25 bp, Homo sapien
ttttactgcctgtggacaaaatcca

SEQ ID NO: 5500497 - DNA, 25 bp, Homo sapien
atccagtgacccaagatctcgccac

SEQ ID NO: 5500498 - DNA, 25 bp, Homo sapien
aaaatcaggttcaataatgcgtgct

SEQ ID NO: 5500499 - DNA, 25 bp, Homo sapien
ggctgagcatccagtgacccaagat

SEQ ID NO: 5500500 - DNA, 25 bp, Homo sapien
gatgctgatgtacaactctatgact

SEQ ID NO: 5500501 - DNA, 25 bp, Homo sapien
acaaggtgtttctgagggataagat

SEQ ID NO: 5500502 - DNA, 25 bp, Homo sapien
gtacgtgaaaattagctgctgggga

SEQ ID NO: 5500503 - DNA, 25 bp, Homo sapien
tcagatttggggtacttaaactgta

SEQ ID NO: 5500504 - DNA, 25 bp, Homo sapien
ctatgacttgaagattgagttgctt

SEQ ID NO: 5500505 - DNA, 25 bp, Homo sapien
gttgcttctatgggaatatgacacc

SEQ ID NO: 5500506 - DNA, 25 bp, Homo sapien
gagtatccagtgtttacaaggtgtt

SEQ ID NO: 5500507 - DNA, 25 bp, Homo sapien
cactgactatgtaagatgctgatgt

SEQ ID NO: 5500508 - DNA, 25 bp, Homo sapien
aaagcacgcattattgaacctgatt

SEQ ID NO: 5500509 - DNA, 25 bp, Homo sapien
tttcaaccaaataaggatctgactt

SEQ ID NO: 5500510 - DNA, 25 bp, Homo sapien
agtcatagagttgtacatcagcatc

SEQ ID NO: 5500511 - DNA, 25 bp, Homo sapien
agagaaagatgcagtcctagaaaaa

SEQ ID NO: 5500512 - DNA, 25 bp, Homo sapien
aaaatccttaaaatgtgggagtcca

SEQ ID NO: 5500513 - DNA, 25 bp, Homo sapien
cttgcaactgcatagtatcaacttc

SEQ ID NO: 5500514 - DNA, 25 bp, Homo sapien
acatagtcagtgatagtcatgcagt

SEQ ID NO: 5500515 - DNA, 25 bp, Homo sapien
attcccatagaagcaactcaatctt

SEQ ID NO: 5500516 - DNA, 25 bp, Homo sapien
tgtgggagtccatgttacatattcc

SEQ ID NO: 5500517 - DNA, 25 bp, Homo sapien
aatgatagcgtaaaaagcacgcatt

SEQ ID NO: 5500518 - DNA, 25 bp, Homo sapien
acttagaaggtacacaccatctgcc

SEQ ID NO: 5500519 - DNA, 25 bp, Homo sapien
tataggacttcctggtcaatacagt

SEQ ID NO: 5500520 - DNA, 25 bp, Homo sapien
ctctgttacccaggatggagtgcag

SEQ ID NO: 5500521 - DNA, 25 bp, Homo sapien
atacagtaatgtaagtttgagctct

SEQ ID NO: 5500522 - DNA, 25 bp, Homo sapien
gtgccaccatgcccaactcttaaaa

SEQ ID NO: 5500523 - DNA, 25 bp, Homo sapien
tttgagctcttgattcttcatcgcc

SEQ ID NO: 5500524 - DNA, 25 bp, Homo sapien
cactgcagcctcaacctcccaatct

SEQ ID NO: 5500525 - DNA, 25 bp, Homo sapien
ttcttcatcgccataattcccttct

SEQ ID NO: 5500526 - DNA, 25 bp, Homo sapien
gctatgggggtctcactttgttgtc

SEQ ID NO: 5500527 - DNA, 25 bp, Homo sapien
ttgttgtccaggctgacagaactgc

SEQ ID NO: 5500528 - DNA, 25 bp, Homo sapien
gtccaggctgacagaactgcatttt

SEQ ID NO: 5500529 - DNA, 25 bp, Homo sapien
acctcccaatctcaagcaatcctcc

SEQ ID NO: 5500530 - DNA, 25 bp, Homo sapien
gaattaaaaatgcagttctgtcagc

SEQ ID NO: 5500531 - DNA, 25 bp, Homo sapien
tgtcagcctggacaacaaagtgaga

SEQ ID NO: 5500532 - DNA, 25 bp, Homo sapien
cattactgtattgaccaggaagtcc

SEQ ID NO: 5500533 - DNA, 25 bp, Homo sapien
agtcctagcttctcgggaggctgag

SEQ ID NO: 5500534 - DNA, 25 bp, Homo sapien
ggtggcacacgcctgtagtcctagc

SEQ ID NO: 5500535 - DNA, 25 bp, Homo sapien
accactgcactccatcctgggtaac

SEQ ID NO: 5500536 - DNA, 25 bp, Homo sapien
taacagagtgagaccacttaaatta

SEQ ID NO: 5500537 - DNA, 25 bp, Homo sapien
aaaatgcagttctgtcagcctggac

SEQ ID NO: 5500538 - DNA, 25 bp, Homo sapien
attgaccaggaagtcctataaagaa

SEQ ID NO: 5500539 - DNA, 25 bp, Homo sapien
ccaggaagtcctataaagaattata

SEQ ID NO: 5500540 - DNA, 25 bp, Homo sapien
tccatcctgggtaacagagtgagac

SEQ ID NO: 5500541 - DNA, 25 bp, Homo sapien
cattggtttctagtcccagatctgc

SEQ ID NO: 5500542 - DNA, 25 bp, Homo sapien
acatatttgctgaatgcaacccttc

SEQ ID NO: 5500543 - DNA, 25 bp, Homo sapien
tacaaaatcaggggcttgctaaagg

SEQ ID NO: 5500544 - DNA, 25 bp, Homo sapien
actatcaccagttacctgatctcac

SEQ ID NO: 5500545 - DNA, 25 bp, Homo sapien
ggcacgagcaaccatgctgagcata

SEQ ID NO: 5500546 - DNA, 25 bp, Homo sapien
tacctgatctcacattcgttctctc

SEQ ID NO: 5500547 - DNA, 25 bp, Homo sapien
gtcccagatctgcaactatcaccag

SEQ ID NO: 5500548 - DNA, 25 bp, Homo sapien
tctcttccgagctttaaaattctac

SEQ ID NO: 5500549 - DNA, 25 bp, Homo sapien
ctcacctacaaaatcaggggcttgc

SEQ ID NO: 5500550 - DNA, 25 bp, Homo sapien
aggggcttgctaaaggtctcttccg

SEQ ID NO: 5500551 - DNA, 25 bp, Homo sapien
tgctgaatgcaacccttcctgtgcc

SEQ ID NO: 5500552 - DNA, 25 bp, Homo sapien
caccacacctggccaaaagatttcc

SEQ ID NO: 5500553 - DNA, 25 bp, Homo sapien
cctgcagcctggaccttctggtttc

SEQ ID NO: 5500554 - DNA, 25 bp, Homo sapien
gtggtgcagtcacagttccctgcag

SEQ ID NO: 5500555 - DNA, 25 bp, Homo sapien
tcggcttcccagagtgttgggctta

SEQ ID NO: 5500556 - DNA, 25 bp, Homo sapien
ccaccatgcccagctgatctttgta

SEQ ID NO: 5500557 - DNA, 25 bp, Homo sapien
gttgggcttacagatgtgagccacc

SEQ ID NO: 5500558 - DNA, 25 bp, Homo sapien
ttctacgaaggctctttaaccacac

SEQ ID NO: 5500559 - DNA, 25 bp, Homo sapien
aatgtgggattttttctacgaaggc

SEQ ID NO: 5500560 - DNA, 25 bp, Homo sapien
ttaaccacacaagcacagaatacta

SEQ ID NO: 5500561 - DNA, 25 bp, Homo sapien
gcaactacattatacgacaactccc

SEQ ID NO: 5500562 - DNA, 25 bp, Homo sapien
gttggccaggatggttttgtactcc

SEQ ID NO: 5500563 - DNA, 25 bp, Homo sapien
tgtccctggacacatgacttctccc

SEQ ID NO: 5500564 - DNA, 25 bp, Homo sapien
gactgggtcccaagtcccaattgtg

SEQ ID NO: 5500565 - DNA, 25 bp, Homo sapien
catgtaattagaaaatggagtaaaa

SEQ ID NO: 5500566 - DNA, 25 bp, Homo sapien
gacagcagtatcatggttaggtttt

SEQ ID NO: 5500567 - DNA, 25 bp, Homo sapien
tgaaacatggggctaatagcaagcc

SEQ ID NO: 5500568 - DNA, 25 bp, Homo sapien
tagcaagcccttctggagtagtcct

SEQ ID NO: 5500569 - DNA, 25 bp, Homo sapien
tattggtctgggatttgctgtaaaa

SEQ ID NO: 5500570 - DNA, 25 bp, Homo sapien
tccctctgcccaccctgttgccctc

SEQ ID NO: 5500571 - DNA, 25 bp, Homo sapien
ggctgagctcagttctccctctgcc

SEQ ID NO: 5500572 - DNA, 25 bp, Homo sapien
ccaacttgggacccagttgggactg

SEQ ID NO: 5500573 - DNA, 25 bp, Homo sapien
gccctccacaagaaccgtagctcag

SEQ ID NO: 5500574 - DNA, 25 bp, Homo sapien
actatatggctcaaagtgacatcag

SEQ ID NO: 5500575 - DNA, 25 bp, Homo sapien
ggctcaaagtgacatcaggtgtgtt

SEQ ID NO: 5500576 - DNA, 25 bp, Homo sapien
agcttaggttaggtagacctcaacc

SEQ ID NO: 5500577 - DNA, 25 bp, Homo sapien
agggtggggctattcatcacagtag

SEQ ID NO: 5500578 - DNA, 25 bp, Homo sapien
aacatgaagctttccaggaagcagc

SEQ ID NO: 5500579 - DNA, 25 bp, Homo sapien
aaaagtccacatggtgccacccata

SEQ ID NO: 5500580 - DNA, 25 bp, Homo sapien
tccaggaagcagcttaggttaggta

SEQ ID NO: 5500581 - DNA, 25 bp, Homo sapien
ggtgccacccataggttctttcaac

SEQ ID NO: 5500582 - DNA, 25 bp, Homo sapien
taacaagcaggaattcagtactgac

SEQ ID NO: 5500583 - DNA, 25 bp, Homo sapien
aattcgtgcatatcataaggcctat

SEQ ID NO: 5500584 - DNA, 25 bp, Homo sapien
ttcatcacagtagggacagaaaagt

SEQ ID NO: 5500585 - DNA, 25 bp, Homo sapien
tggagttgcgtaaagcgagcaataa

SEQ ID NO: 5500586 - DNA, 25 bp, Homo sapien
ctcaattagtagtaccggggctttc

SEQ ID NO: 5500587 - DNA, 25 bp, Homo sapien
tatgaagactcttaagcagatcatc

SEQ ID NO: 5500588 - DNA, 25 bp, Homo sapien
gctatgccattttaagggagggaaa

SEQ ID NO: 5500589 - DNA, 25 bp, Homo sapien
ataggaaagcaatttggagttgcgt

SEQ ID NO: 5500590 - DNA, 25 bp, Homo sapien
agtaccggggctttctcagctatgc

SEQ ID NO: 5500591 - DNA, 25 bp, Homo sapien
gcacccggccgaaatcagtttctta

SEQ ID NO: 5500592 - DNA, 25 bp, Homo sapien
aagtgcagcgatctcggcatactgc

SEQ ID NO: 5500593 - DNA, 25 bp, Homo sapien
accaaggtgaagcttgagtgatttc

SEQ ID NO: 5500594 - DNA, 25 bp, Homo sapien
tgagttcagtttaccaaggtgaagc

SEQ ID NO: 5500595 - DNA, 25 bp, Homo sapien
taaaaggcctttcgagttcagaata

SEQ ID NO: 5500596 - DNA, 25 bp, Homo sapien
aggcaagaggagaattcaaatacct

SEQ ID NO: 5500597 - DNA, 25 bp, Homo sapien
ataatatagatggcaacccctggtc

SEQ ID NO: 5500598 - DNA, 25 bp, Homo sapien
atggagagaatagactttagagtgt

SEQ ID NO: 5500599 - DNA, 25 bp, Homo sapien
agtttagggtatatcatggagagaa

SEQ ID NO: 5500600 - DNA, 25 bp, Homo sapien
gcaggcatacctagtgggtgctcaa

SEQ ID NO: 5500601 - DNA, 25 bp, Homo sapien
gcttggtagcagttgccccagtcat

SEQ ID NO: 5500602 - DNA, 25 bp, Homo sapien
tcctttaagtgagctggtctggaag

SEQ ID NO: 5500603 - DNA, 25 bp, Homo sapien
tctccacagggtatgttcacagagc

SEQ ID NO: 5500604 - DNA, 25 bp, Homo sapien
atcctggggtcaataaaactgaatg

SEQ ID NO: 5500605 - DNA, 25 bp, Homo sapien
taacacatcaggtggtcaggttgag

SEQ ID NO: 5500606 - DNA, 25 bp, Homo sapien
cctggtctaagataagagataacac

SEQ ID NO: 5500607 - DNA, 25 bp, Homo sapien
tgtcgaactcacacaccacttgccc

SEQ ID NO: 5500608 - DNA, 25 bp, Homo sapien
caccacatagtgctgggctgtatcc

SEQ ID NO: 5500609 - DNA, 25 bp, Homo sapien
tgaaatgtcgaactcacacaccact

SEQ ID NO: 5500610 - DNA, 25 bp, Homo sapien
ttctggaaaaccacatggaagtttc

SEQ ID NO: 5500611 - DNA, 25 bp, Homo sapien
ccagtgggcaccttccgtgctggta

SEQ ID NO: 5500612 - DNA, 25 bp, Homo sapien
gcccacctctaggatggggatgggc

SEQ ID NO: 5500613 - DNA, 25 bp, Homo sapien
cctaaaaagcaacaccacatagtgc

SEQ ID NO: 5500614 - DNA, 25 bp, Homo sapien
tttatgtgaaatgtcgaactcacac

SEQ ID NO: 5500615 - DNA, 25 bp, Homo sapien
gagagcccacctctaggatggggat

SEQ ID NO: 5500616 - DNA, 25 bp, Homo sapien
gcaacaccacatagtgctgggctgt

SEQ ID NO: 5500617 - DNA, 25 bp, Homo sapien
gcagagagcccacctctaggatggg

SEQ ID NO: 5500618 - DNA, 25 bp, Homo sapien
aatacagtctgtctaggcttttctt

SEQ ID NO: 5500619 - DNA, 25 bp, Homo sapien
agcctcattcaagaaatgaatggga

SEQ ID NO: 5500620 - DNA, 25 bp, Homo sapien
aattacaagaagacgtataatgttt

SEQ ID NO: 5500621 - DNA, 25 bp, Homo sapien
ttttatgttctgtgactggaaatac

SEQ ID NO: 5500622 - DNA, 25 bp, Homo sapien
ctgtaggacaataactttgctctgt

SEQ ID NO: 5500623 - DNA, 25 bp, Homo sapien
tttgctctgtccataagatgtagcc

SEQ ID NO: 5500624 - DNA, 25 bp, Homo sapien
tagttttaagaatctgtaggacaat

SEQ ID NO: 5500625 - DNA, 25 bp, Homo sapien
taagaaaacactaggccaagtgcgg

SEQ ID NO: 5500626 - DNA, 25 bp, Homo sapien
tctgtgactggaaatacagtctgtc

SEQ ID NO: 5500627 - DNA, 25 bp, Homo sapien
ctgtccataagatgtagcctcattc

SEQ ID NO: 5500628 - DNA, 25 bp, Homo sapien
acaagaagacgtataatgttttgat

SEQ ID NO: 5500629 - DNA, 25 bp, Homo sapien
gaaaccatgtaacaagtaatgccac

SEQ ID NO: 5500630 - DNA, 25 bp, Homo sapien
gcaaacgcagatgtagaaaccatgt

SEQ ID NO: 5500631 - DNA, 25 bp, Homo sapien
aacgcagatgtagaaaccatgtaac

SEQ ID NO: 5500632 - DNA, 25 bp, Homo sapien
atataaacagtttgggatcagagaa

SEQ ID NO: 5500633 - DNA, 25 bp, Homo sapien
aagagtttaggcttttgcaggctcg

SEQ ID NO: 5500634 - DNA, 25 bp, Homo sapien
aaagtaggcttttgcataccttcac

SEQ ID NO: 5500635 - DNA, 25 bp, Homo sapien
acaagtaatgccacaaaaaagagtt

SEQ ID NO: 5500636 - DNA, 25 bp, Homo sapien
taatgccacaaaaaagagtttaggc

SEQ ID NO: 5500637 - DNA, 25 bp, Homo sapien
gtaacaagtaatgccacaaaaaaga

SEQ ID NO: 5500638 - DNA, 25 bp, Homo sapien
aacagtttgggatcagagaacttac

SEQ ID NO: 5500639 - DNA, 25 bp, Homo sapien
tacaaaaaggcaaacgcagatgtag

SEQ ID NO: 5500640 - DNA, 25 bp, Homo sapien
cagtgtttcagtgcctatgtgccag

SEQ ID NO: 5500641 - DNA, 25 bp, Homo sapien
tccgcccgcctggccaacgtactta

SEQ ID NO: 5500642 - DNA, 25 bp, Homo sapien
agccaaagccctcattggcagttac

SEQ ID NO: 5500643 - DNA, 25 bp, Homo sapien
gtatggtctttctaaaacatcagct

SEQ ID NO: 5500644 - DNA, 25 bp, Homo sapien
atttgtacctagaatgtatggtctt

SEQ ID NO: 5500645 - DNA, 25 bp, Homo sapien
ctgaagctctttgggtaacctgatg

SEQ ID NO: 5500646 - DNA, 25 bp, Homo sapien
gggtgtggattaacatgcagtgttt

SEQ ID NO: 5500647 - DNA, 25 bp, Homo sapien
cacttaccagctttgactacactca

SEQ ID NO: 5500648 - DNA, 25 bp, Homo sapien
aacctgatgcccaacattaggtcag

SEQ ID NO: 5500649 - DNA, 25 bp, Homo sapien
ctcagagctttatagtcggtacgtt

SEQ ID NO: 5500650 - DNA, 25 bp, Homo sapien
acgaaagcccttgtcacttaccagc

SEQ ID NO: 5500651 - DNA, 25 bp, Homo sapien
aatgaccattattaacagactgaat

SEQ ID NO: 5500652 - DNA, 25 bp, Homo sapien
agtaaatacagtgtgagggtaaaat

SEQ ID NO: 5500653 - DNA, 25 bp, Homo sapien
caactggagaaaaacttaaatgacc

SEQ ID NO: 5500654 - DNA, 25 bp, Homo sapien
gaagatcactgtaaaagtttcaggt

SEQ ID NO: 5500655 - DNA, 25 bp, Homo sapien
cactcccaacccagaagatcactgt

SEQ ID NO: 5500656 - DNA, 25 bp, Homo sapien
tacatgtatacatctacgtgcatat

SEQ ID NO: 5500657 - DNA, 25 bp, Homo sapien
gtaagagtaaatacagtgtgagggt

SEQ ID NO: 5500658 - DNA, 25 bp, Homo sapien
actgtacgccaattgtaagagtaaa

SEQ ID NO: 5500659 - DNA, 25 bp, Homo sapien
ataagtaatacatggtacattctgt

SEQ ID NO: 5500660 - DNA, 25 bp, Homo sapien
aggcccttttgtcactcccaaccca

SEQ ID NO: 5500661 - DNA, 25 bp, Homo sapien
aagtttcaggtgcatttttccaggc

SEQ ID NO: 5500662 - DNA, 25 bp, Homo sapien
ctgtgtgtcacttcagtaggcttgt

SEQ ID NO: 5500663 - DNA, 25 bp, Homo sapien
ggccatggtcaagtaggtcctttag

SEQ ID NO: 5500664 - DNA, 25 bp, Homo sapien
tccattgcaggtaggtctgtgtgtc

SEQ ID NO: 5500665 - DNA, 25 bp, Homo sapien
ttggttggcagctgcaattgtccat

SEQ ID NO: 5500666 - DNA, 25 bp, Homo sapien
ttggacactgggtactgttcaattc

SEQ ID NO: 5500667 - DNA, 25 bp, Homo sapien
ataggatatgtaccagtgtcagcat

SEQ ID NO: 5500668 - DNA, 25 bp, Homo sapien
ccacagcaaacaaggaatacttatt

SEQ ID NO: 5500669 - DNA, 25 bp, Homo sapien
gacggcatcatcacacttgaaccac

SEQ ID NO: 5500670 - DNA, 25 bp, Homo sapien
tactggccttagtgatgacggcatc

SEQ ID NO: 5500671 - DNA, 25 bp, Homo sapien
tctgtcaggcccatgggccatggtc

SEQ ID NO: 5500672 - DNA, 25 bp, Homo sapien
tcaggaccttttggacactgggtac

SEQ ID NO: 5500673 - DNA, 25 bp, Homo sapien
gataagagcaagatataccacacag

SEQ ID NO: 5500674 - DNA, 25 bp, Homo sapien
aggagtacaaaaggtgcaaaaataa

SEQ ID NO: 5500675 - DNA, 25 bp, Homo sapien
attattcaaattattggggaccagg

SEQ ID NO: 5500676 - DNA, 25 bp, Homo sapien
agggcagttccaactatttgtgagc

SEQ ID NO: 5500677 - DNA, 25 bp, Homo sapien
gctttgagtaatatttgctagttat

SEQ ID NO: 5500678 - DNA, 25 bp, Homo sapien
atataccacacaggagggttcccat

SEQ ID NO: 5500679 - DNA, 25 bp, Homo sapien
atatatatagtttttagacagggtc

SEQ ID NO: 5500680 - DNA, 25 bp, Homo sapien
acaggagggttcccatctcaatacc

SEQ ID NO: 5500681 - DNA, 25 bp, Homo sapien
ctctggctccagacaaacctctgtc

SEQ ID NO: 5500682 - DNA, 25 bp, Homo sapien
gagcaagatataccacacaggaggg

SEQ ID NO: 5500683 - DNA, 25 bp, Homo sapien
ccaactatttgtgagctctggctcc

SEQ ID NO: 5500684 - DNA, 25 bp, Homo sapien
attcttaccacttcctgcctcgcct

SEQ ID NO: 5500685 - DNA, 25 bp, Homo sapien
cacagcttgttctacctctggtgtt

SEQ ID NO: 5500686 - DNA, 25 bp, Homo sapien
caaacacataacacagcttgttcta

SEQ ID NO: 5500687 - DNA, 25 bp, Homo sapien
agtacccactctgtcaggaactgcc

SEQ ID NO: 5500688 - DNA, 25 bp, Homo sapien
caaacacggaacacacgactccttc

SEQ ID NO: 5500689 - DNA, 25 bp, Homo sapien
tacacattacagttcaagctcccaa

SEQ ID NO: 5500690 - DNA, 25 bp, Homo sapien
ttcctgcctcgcctatgatacacca

SEQ ID NO: 5500691 - DNA, 25 bp, Homo sapien
tcaagctcccaaacacggaacacac

SEQ ID NO: 5500692 - DNA, 25 bp, Homo sapien
tctggtgtttgttcacagtacccac

SEQ ID NO: 5500693 - DNA, 25 bp, Homo sapien
tgtcaggaactgccataaccctcat

SEQ ID NO: 5500694 - DNA, 25 bp, Homo sapien
gaacttaaaatggtagtctcaattc

SEQ ID NO: 5500695 - DNA, 25 bp, Homo sapien
cagaatgtcatggcttctgggcaga

SEQ ID NO: 5500696 - DNA, 25 bp, Homo sapien
ctcccaaaaggcaatcagctataaa

SEQ ID NO: 5500697 - DNA, 25 bp, Homo sapien
gacactcgttttatagcatcaggct

SEQ ID NO: 5500698 - DNA, 25 bp, Homo sapien
atgcccggccgtgacactcgtttta

SEQ ID NO: 5500699 - DNA, 25 bp, Homo sapien
tggagtccaatgccgtggtctcggc

SEQ ID NO: 5500700 - DNA, 25 bp, Homo sapien
atgccgtgtcctgtcttcctagtgc

SEQ ID NO: 5500701 - DNA, 25 bp, Homo sapien
gaggccagcttccatgccgtgtcct

SEQ ID NO: 5500702 - DNA, 25 bp, Homo sapien
tggggagtagccgattccccagcac

SEQ ID NO: 5500703 - DNA, 25 bp, Homo sapien
tcttcctagtgcagatgtccccagc

SEQ ID NO: 5500704 - DNA, 25 bp, Homo sapien
ccagctgcagtgagtaccagcgtga

SEQ ID NO: 5500705 - DNA, 25 bp, Homo sapien
gagtccaatgccgtggtctcggctc

SEQ ID NO: 5500706 - DNA, 25 bp, Homo sapien
ggcagaggtgccttgcctaaggttt

SEQ ID NO: 5500707 - DNA, 25 bp, Homo sapien
ataacccatatggcctggtaacagc

SEQ ID NO: 5500708 - DNA, 25 bp, Homo sapien
gcaagagacaggctcttcccatgtt

SEQ ID NO: 5500709 - DNA, 25 bp, Homo sapien
tataacccacatacggactgtcccg

SEQ ID NO: 5500710 - DNA, 25 bp, Homo sapien
aagctagcctgagacaagaactttc

SEQ ID NO: 5500711 - DNA, 25 bp, Homo sapien
tctgctaacatactaccatcacccc

SEQ ID NO: 5500712 - DNA, 25 bp, Homo sapien
ttggtccccaaagctagcctgagac

SEQ ID NO: 5500713 - DNA, 25 bp, Homo sapien
ccatttgagtgcctacatgggagtg

SEQ ID NO: 5500714 - DNA, 25 bp, Homo sapien
cgtgcccagctaagatatttcaatc

SEQ ID NO: 5500715 - DNA, 25 bp, Homo sapien
cactcctcacaaccactctgctaac

SEQ ID NO: 5500716 - DNA, 25 bp, Homo sapien
tacatgggagtgcttcatttggtcc

SEQ ID NO: 5500717 - DNA, 25 bp, Homo sapien
catgatgcatggttctgtacccatc

SEQ ID NO: 5500718 - DNA, 25 bp, Homo sapien
tgtcatgtgctaagtcaagttttcc

SEQ ID NO: 5500719 - DNA, 25 bp, Homo sapien
ctgtacccatcaatcatgctgttta

SEQ ID NO: 5500720 - DNA, 25 bp, Homo sapien
cacgcctggccaactgaagtgttct

SEQ ID NO: 5500721 - DNA, 25 bp, Homo sapien
cctttggcaataacggtttctttca

SEQ ID NO: 5500722 - DNA, 25 bp, Homo sapien
taaacttattgcctagaaaaatctc

SEQ ID NO: 5500723 - DNA, 25 bp, Homo sapien
ctagaaaaatctcaggcagttagcc

SEQ ID NO: 5500724 - DNA, 25 bp, Homo sapien
gagacaagaaagtagatttgaattc

SEQ ID NO: 5500725 - DNA, 25 bp, Homo sapien
tcataaggagctcatgatgcatggt

SEQ ID NO: 5500726 - DNA, 25 bp, Homo sapien
gtaagagacaagaaagtagatttga

SEQ ID NO: 5500727 - DNA, 25 bp, Homo sapien
ttgttccattgttttggaggatggt

SEQ ID NO: 5500728 - DNA, 25 bp, Homo sapien
aaaaaaaaatgtggtctctgccctc

SEQ ID NO: 5500729 - DNA, 25 bp, Homo sapien
tgtaagaaaggctgtgatgtcatac

SEQ ID NO: 5500730 - DNA, 25 bp, Homo sapien
atgtcatacaagaagacaagtggga

SEQ ID NO: 5500731 - DNA, 25 bp, Homo sapien
catgcaatgtaagaaaggctgtgat

SEQ ID NO: 5500732 - DNA, 25 bp, Homo sapien
gtggacaggtgattacatgcaatgt

SEQ ID NO: 5500733 - DNA, 25 bp, Homo sapien
tgtggtctctgccctcaaagcgctc

SEQ ID NO: 5500734 - DNA, 25 bp, Homo sapien
tgggagtatggttttgaccagttcc

SEQ ID NO: 5500735 - DNA, 25 bp, Homo sapien
cctcaaagcgctcatagtccaggag

SEQ ID NO: 5500736 - DNA, 25 bp, Homo sapien
tgccagtaatcctatcagtttggga

SEQ ID NO: 5500737 - DNA, 25 bp, Homo sapien
tcagacatcatgccaggcacgggga

SEQ ID NO: 5500738 - DNA, 25 bp, Homo sapien
acatttcagacatcatgccaggcac

SEQ ID NO: 5500739 - DNA, 25 bp, Homo sapien
agcccagcagacttccagcaatctc

SEQ ID NO: 5500740 - DNA, 25 bp, Homo sapien
atcctgtcaataaagctgggttccc

SEQ ID NO: 5500741 - DNA, 25 bp, Homo sapien
tggctacatgctgagtgaatggcta

SEQ ID NO: 5500742 - DNA, 25 bp, Homo sapien
tcctgtcaatcaagcgagtgggaat

SEQ ID NO: 5500743 - DNA, 25 bp, Homo sapien
aatggggtgtgcattctctattacc

SEQ ID NO: 5500744 - DNA, 25 bp, Homo sapien
ttgcgggttcgaatgatcctcttgc

SEQ ID NO: 5500745 - DNA, 25 bp, Homo sapien
tgggttcccacagcgtcattcatcc

SEQ ID NO: 5500746 - DNA, 25 bp, Homo sapien
acttcaaagggctatgttggcatgg

SEQ ID NO: 5500747 - DNA, 25 bp, Homo sapien
accgttggctggaatcatctgttgc

SEQ ID NO: 5500748 - DNA, 25 bp, Homo sapien
gaatggctacatgctgagtgaatga

SEQ ID NO: 5500749 - DNA, 25 bp, Homo sapien
tcctaagggaataactatatgaacc

SEQ ID NO: 5500750 - DNA, 25 bp, Homo sapien
agttgtcaagagacaaagacaggtt

SEQ ID NO: 5500751 - DNA, 25 bp, Homo sapien
gtagcaacgatagttaggcatggtg

SEQ ID NO: 5500752 - DNA, 25 bp, Homo sapien
taatgtgcacacctagaggagcaag

SEQ ID NO: 5500753 - DNA, 25 bp, Homo sapien
gagaaggatctgaaatgctacttcc

SEQ ID NO: 5500754 - DNA, 25 bp, Homo sapien
actgtaaacagactaaatcagggct

SEQ ID NO: 5500755 - DNA, 25 bp, Homo sapien
tgatgaaaattcaagcagcatgtac

SEQ ID NO: 5500756 - DNA, 25 bp, Homo sapien
agttttagggactatgatggctctc

SEQ ID NO: 5500757 - DNA, 25 bp, Homo sapien
gagcagcatgagctacatccacact

SEQ ID NO: 5500758 - DNA, 25 bp, Homo sapien
tctccacataatgcagactgtaaac

SEQ ID NO: 5500759 - DNA, 25 bp, Homo sapien
ttccaatagaaagtagcaacgatag

SEQ ID NO: 5500760 - DNA, 25 bp, Homo sapien
tgtcctgctgggttaactggcaagg

SEQ ID NO: 5500761 - DNA, 25 bp, Homo sapien
aatttcgttacaatgagaggaggaa

SEQ ID NO: 5500762 - DNA, 25 bp, Homo sapien
cattattaaacataggccaggcgtg

SEQ ID NO: 5500763 - DNA, 25 bp, Homo sapien
aagataaaatcttaagccattcatt

SEQ ID NO: 5500764 - DNA, 25 bp, Homo sapien
cacatagagcaaatggttaagtcac

SEQ ID NO: 5500765 - DNA, 25 bp, Homo sapien
taaacatcacatagagcaaatggtt

SEQ ID NO: 5500766 - DNA, 25 bp, Homo sapien
agaatcgcttgaacttgggaagtgg

SEQ ID NO: 5500767 - DNA, 25 bp, Homo sapien
ataataaacatcacatagagcaaat

SEQ ID NO: 5500768 - DNA, 25 bp, Homo sapien
ctgcagctggaattaatttcgttac

SEQ ID NO: 5500769 - DNA, 25 bp, Homo sapien
ctcactgcagctggaattaatttcg

SEQ ID NO: 5500770 - DNA, 25 bp, Homo sapien
aagttttctcactgcagctggaatt

SEQ ID NO: 5500771 - DNA, 25 bp, Homo sapien
ggctgcagttagccaagatcgcgcc

SEQ ID NO: 5500772 - DNA, 25 bp, Homo sapien
agcaatgggggaaaaatatgtcccc

SEQ ID NO: 5500773 - DNA, 25 bp, Homo sapien
aacaatagctaccaattcattcctt

SEQ ID NO: 5500774 - DNA, 25 bp, Homo sapien
cagaagaggacctcaaaggtgtctt

SEQ ID NO: 5500775 - DNA, 25 bp, Homo sapien
ctcccaagctttctggtgcagagga

SEQ ID NO: 5500776 - DNA, 25 bp, Homo sapien
tgacacaatctcggtggctcactgc

SEQ ID NO: 5500777 - DNA, 25 bp, Homo sapien
tctttgagatggagatttgctcttg

SEQ ID NO: 5500778 - DNA, 25 bp, Homo sapien
ggagtgcaatgacacaatctcggtg

SEQ ID NO: 5500779 - DNA, 25 bp, Homo sapien
tttctggtgcagaggaccagaagag

SEQ ID NO: 5500780 - DNA, 25 bp, Homo sapien
ttgcagcacacatctagttactagg

SEQ ID NO: 5500781 - DNA, 25 bp, Homo sapien
tatgtccccactctcccaagctttc

SEQ ID NO: 5500782 - DNA, 25 bp, Homo sapien
tagttactaggaatgcagcaatggg

SEQ ID NO: 5500783 - DNA, 25 bp, Homo sapien
ctgacatttctctgatagagagatc

SEQ ID NO: 5500784 - DNA, 25 bp, Homo sapien
tatgaaaatgtgttaccctccaaag

SEQ ID NO: 5500785 - DNA, 25 bp, Homo sapien
ttatattccacaaagagaacaactt

SEQ ID NO: 5500786 - DNA, 25 bp, Homo sapien
gaggaactattgaatgtccagaaaa

SEQ ID NO: 5500787 - DNA, 25 bp, Homo sapien
aatctgcatgacattggaacagtcc

SEQ ID NO: 5500788 - DNA, 25 bp, Homo sapien
acaaataccaagtgtttctggcatc

SEQ ID NO: 5500789 - DNA, 25 bp, Homo sapien
atgacattggaacagtccatgacac

SEQ ID NO: 5500790 - DNA, 25 bp, Homo sapien
taaaatccatatcagacacagaaat

SEQ ID NO: 5500791 - DNA, 25 bp, Homo sapien
agaaagaggaactattgaatgtcca

SEQ ID NO: 5500792 - DNA, 25 bp, Homo sapien
cacagaaatctgcatgacattggaa

SEQ ID NO: 5500793 - DNA, 25 bp, Homo sapien
aaaatgtgttaccctccaaagcctc

SEQ ID NO: 5500794 - DNA, 25 bp, Homo sapien
tctgaagtcatctaaccacattgcc

SEQ ID NO: 5500795 - DNA, 25 bp, Homo sapien
caaatcagggtcaacacaaggttca

SEQ ID NO: 5500796 - DNA, 25 bp, Homo sapien
acattgccaatatcacacctcacaa

SEQ ID NO: 5500797 - DNA, 25 bp, Homo sapien
aaggttcacacttgacattgagttg

SEQ ID NO: 5500798 - DNA, 25 bp, Homo sapien
attgcttgctcaaatcagggtcaac

SEQ ID NO: 5500799 - DNA, 25 bp, Homo sapien
tacacatcacctagacccaagttat

SEQ ID NO: 5500800 - DNA, 25 bp, Homo sapien
aaacccatacacatcacctagaccc

SEQ ID NO: 5500801 - DNA, 25 bp, Homo sapien
ttagatgttgccatacttgcttaac

SEQ ID NO: 5500802 - DNA, 25 bp, Homo sapien
agaggacagtataatgaaacccata

SEQ ID NO: 5500803 - DNA, 25 bp, Homo sapien
taactatcatcaaatgtgaaattca

SEQ ID NO: 5500804 - DNA, 25 bp, Homo sapien
tagacccaagttattagatgttgcc

SEQ ID NO: 5500805 - DNA, 25 bp, Homo sapien
ccggcctggttgtggaacttcacgg

SEQ ID NO: 5500806 - DNA, 25 bp, Homo sapien
tttttcgtgtgctgtaaactgaggt

SEQ ID NO: 5500807 - DNA, 25 bp, Homo sapien
tgccagtaccaggtgtcactgattg

SEQ ID NO: 5500808 - DNA, 25 bp, Homo sapien
accaggtgtcactgattgactagtc

SEQ ID NO: 5500809 - DNA, 25 bp, Homo sapien
tgttggcaagatatttttttcgtgt

SEQ ID NO: 5500810 - DNA, 25 bp, Homo sapien
ccaggctggttgtggaacttttgtt

SEQ ID NO: 5500811 - DNA, 25 bp, Homo sapien
tcctgaagcccaacggccttatgcc

SEQ ID NO: 5500812 - DNA, 25 bp, Homo sapien
ctggttgtggaacttcacgggaatt

SEQ ID NO: 5500813 - DNA, 25 bp, Homo sapien
agtttatgtcatgtcaccaggtcct

SEQ ID NO: 5500814 - DNA, 25 bp, Homo sapien
tgtgctgtaaactgaggttctgtct

SEQ ID NO: 5500815 - DNA, 25 bp, Homo sapien
gaggttctgtcttggagtttatgtc

SEQ ID NO: 5500816 - DNA, 25 bp, Homo sapien
ttgacggcttcttgttgagcagggc

SEQ ID NO: 5500817 - DNA, 25 bp, Homo sapien
ggcgacagagcgtctccaaaaaaaa

SEQ ID NO: 5500818 - DNA, 25 bp, Homo sapien
aatcattgtagattcctgtacagtt

SEQ ID NO: 5500819 - DNA, 25 bp, Homo sapien
ccatgtgcctagagtggccttaatt

SEQ ID NO: 5500820 - DNA, 25 bp, Homo sapien
accccacaggccatgtgcctagagt

SEQ ID NO: 5500821 - DNA, 25 bp, Homo sapien
tgcctagagtggccttaattgaaat

SEQ ID NO: 5500822 - DNA, 25 bp, Homo sapien
cagttataagaaataaaacagccgg

SEQ ID NO: 5500823 - DNA, 25 bp, Homo sapien
ccacaggccatgtgcctagagtggc

SEQ ID NO: 5500824 - DNA, 25 bp, Homo sapien
acggcttcttgttgagcagggctac

SEQ ID NO: 5500825 - DNA, 25 bp, Homo sapien
cacggtgaagccccgcctctactaa

SEQ ID NO: 5500826 - DNA, 25 bp, Homo sapien
ggctaccccacaggccatgtgccta

SEQ ID NO: 5500827 - DNA, 25 bp, Homo sapien
atgttgggtaaggtagccatacatt

SEQ ID NO: 5500828 - DNA, 25 bp, Homo sapien
gccatacctataagactaacattcc

SEQ ID NO: 5500829 - DNA, 25 bp, Homo sapien
attgctaaagccatacctataagac

SEQ ID NO: 5500830 - DNA, 25 bp, Homo sapien
ctaatgtggcaagatctgcattttg

SEQ ID NO: 5500831 - DNA, 25 bp, Homo sapien
ttacggtcttacacttttatgctcc

SEQ ID NO: 5500832 - DNA, 25 bp, Homo sapien
aatttaccattgaatagtcagatat

SEQ ID NO: 5500833 - DNA, 25 bp, Homo sapien
atgatgaatggcgcgctcatactct

SEQ ID NO: 5500834 - DNA, 25 bp, Homo sapien
gaacaaggtttgaagcacgactgaa

SEQ ID NO: 5500835 - DNA, 25 bp, Homo sapien
tggcgcgctcatactctttacggtc

SEQ ID NO: 5500836 - DNA, 25 bp, Homo sapien
aaaacaggactgacattgaatgctt

SEQ ID NO: 5500837 - DNA, 25 bp, Homo sapien
gaatgctttctaatgtggcaagatc

SEQ ID NO: 5500838 - DNA, 25 bp, Homo sapien
aagggacatctagaaacagcaatat

SEQ ID NO: 5500839 - DNA, 25 bp, Homo sapien
aaaactagctcaaccacagaaggga

SEQ ID NO: 5500840 - DNA, 25 bp, Homo sapien
gaattaagtacccagaagtgccttc

SEQ ID NO: 5500841 - DNA, 25 bp, Homo sapien
ttgatcatataacacccccacctcc

SEQ ID NO: 5500842 - DNA, 25 bp, Homo sapien
taagaagcccaacagctgaacatct

SEQ ID NO: 5500843 - DNA, 25 bp, Homo sapien
cacagatgtgtttccagaacagccc

SEQ ID NO: 5500844 - DNA, 25 bp, Homo sapien
atccagtgctgaaatataaagaaat

SEQ ID NO: 5500845 - DNA, 25 bp, Homo sapien
ttctgaacatccaatccgagtcctt

SEQ ID NO: 5500846 - DNA, 25 bp, Homo sapien
ctcagggaagtaaactgcctcttag

SEQ ID NO: 5500847 - DNA, 25 bp, Homo sapien
tctctgtggcaattggctatgattc

SEQ ID NO: 5500848 - DNA, 25 bp, Homo sapien
gtggcctcaccggaggcttggttct

SEQ ID NO: 5500849 - DNA, 25 bp, Homo sapien
ggctgagtgataggctgtcctagta

SEQ ID NO: 5500850 - DNA, 25 bp, Homo sapien
ctgtcctagtaaagacccagggtgg

SEQ ID NO: 5500851 - DNA, 25 bp, Homo sapien
gtctgttatctagaagcaagtggct

SEQ ID NO: 5500852 - DNA, 25 bp, Homo sapien
tgtcctcctaatcaacagtgtgaag

SEQ ID NO: 5500853 - DNA, 25 bp, Homo sapien
ccaggtaggtggacaccactttgca

SEQ ID NO: 5500854 - DNA, 25 bp, Homo sapien
gttggggctactgtccacaggattt

SEQ ID NO: 5500855 - DNA, 25 bp, Homo sapien
aaaggatggctcagatggcatcaat

SEQ ID NO: 5500856 - DNA, 25 bp, Homo sapien
ggatttgctgatctcaccatgtgtc

SEQ ID NO: 5500857 - DNA, 25 bp, Homo sapien
ggctcagatggcatcaatgacccac

SEQ ID NO: 5500858 - DNA, 25 bp, Homo sapien
tatctagaagcaagtggctgagtga

SEQ ID NO: 5500859 - DNA, 25 bp, Homo sapien
ctctgtactaactttgcaatgcctc

SEQ ID NO: 5500860 - DNA, 25 bp, Homo sapien
ttctcaaagacatccttaaggctgt

SEQ ID NO: 5500861 - DNA, 25 bp, Homo sapien
acagccttaaggatgtctttgagaa

SEQ ID NO: 5500862 - DNA, 25 bp, Homo sapien
atatcagatggtaacgtttatgttc

SEQ ID NO: 5500863 - DNA, 25 bp, Homo sapien
caccgtttacagaatgagaagacaa

SEQ ID NO: 5500864 - DNA, 25 bp, Homo sapien
aagaaagaaattctgacgcagctac

SEQ ID NO: 5500865 - DNA, 25 bp, Homo sapien
acacacatagataatactcagcata

SEQ ID NO: 5500866 - DNA, 25 bp, Homo sapien
catggaatcgacctaaatgtctatc

SEQ ID NO: 5500867 - DNA, 25 bp, Homo sapien
tgtggtacatatgtgtggggattat

SEQ ID NO: 5500868 - DNA, 25 bp, Homo sapien
tgacgcagctacacacagattaagc

SEQ ID NO: 5500869 - DNA, 25 bp, Homo sapien
tatcagggtattcaaattcagagac

SEQ ID NO: 5500870 - DNA, 25 bp, Homo sapien
tctatcaacgaaagactggataaag

SEQ ID NO: 5500871 - DNA, 25 bp, Homo sapien
atgaaaaaaagacaccgtttacaga

SEQ ID NO: 5500872 - DNA, 25 bp, Homo sapien
caattcgagatttaggtgtggacac

SEQ ID NO: 5500873 - DNA, 25 bp, Homo sapien
gcgcatgactgcagtgccccactgc

SEQ ID NO: 5500874 - DNA, 25 bp, Homo sapien
atttctacaggtgaacaccagcggc

SEQ ID NO: 5500875 - DNA, 25 bp, Homo sapien
aagcgctcactaacctgccgtgctc

SEQ ID NO: 5500876 - DNA, 25 bp, Homo sapien
atatcatttagaggccaatcatctc

SEQ ID NO: 5500877 - DNA, 25 bp, Homo sapien
acagccacatgggaaatatcattta

SEQ ID NO: 5500878 - DNA, 25 bp, Homo sapien
tgcagtgccccactgcacggacgca

SEQ ID NO: 5500879 - DNA, 25 bp, Homo sapien
cacggagacactggtgatctcaaac

SEQ ID NO: 5500880 - DNA, 25 bp, Homo sapien
gagaagccttgatgtgcaagttcaa

SEQ ID NO: 5500881 - DNA, 25 bp, Homo sapien
cggcctcggcaatgctaggttgtta

SEQ ID NO: 5500882 - DNA, 25 bp, Homo sapien
atgtaccagacatccacggagacac

SEQ ID NO: 5500883 - DNA, 25 bp, Homo sapien
ctaggttgttaggaattcggcctta

SEQ ID NO: 5500884 - DNA, 25 bp, Homo sapien
cgtggtatgtcagacgtagcaatgc

SEQ ID NO: 5500885 - DNA, 25 bp, Homo sapien
ttgaacatttctgactctgtgcccc

SEQ ID NO: 5500886 - DNA, 25 bp, Homo sapien
ctgtgccccccttccatgcccgttc

SEQ ID NO: 5500887 - DNA, 25 bp, Homo sapien
gggtacgtggtatgtcagacgtagc

SEQ ID NO: 5500888 - DNA, 25 bp, Homo sapien
catgcccgttcagcaaccacctccc

SEQ ID NO: 5500889 - DNA, 25 bp, Homo sapien
ggtatgtcagacgtagcaatgctct

SEQ ID NO: 5500890 - DNA, 25 bp, Homo sapien
agcaatgctctcaagcttattgaac

SEQ ID NO: 5500891 - DNA, 25 bp, Homo sapien
gactctgtgccccccttccatgccc

SEQ ID NO: 5500892 - DNA, 25 bp, Homo sapien
catttctgactctgtgccccccttc

SEQ ID NO: 5500893 - DNA, 25 bp, Homo sapien
tcagcaaccacctcccacttcttcc

SEQ ID NO: 5500894 - DNA, 25 bp, Homo sapien
cttccatgcccgttcagcaaccacc

SEQ ID NO: 5500895 - DNA, 25 bp, Homo sapien
ctaaaaaacaaagcatccaagctct

SEQ ID NO: 5500896 - DNA, 25 bp, Homo sapien
tttcagcatctcaaagctaaaaaac

SEQ ID NO: 5500897 - DNA, 25 bp, Homo sapien
aaacagagggcagactttgtctttc

SEQ ID NO: 5500898 - DNA, 25 bp, Homo sapien
catccttaacacaaagaaggttctt

SEQ ID NO: 5500899 - DNA, 25 bp, Homo sapien
caaagcatccaagctcttctggggc

SEQ ID NO: 5500900 - DNA, 25 bp, Homo sapien
cttccactgtgacctaagggaccag

SEQ ID NO: 5500901 - DNA, 25 bp, Homo sapien
ccactgtgacctaagggaccagaaa

SEQ ID NO: 5500902 - DNA, 25 bp, Homo sapien
catccaagctcttctggggcaagcc

SEQ ID NO: 5500903 - DNA, 25 bp, Homo sapien
cagagggcagactttgtctttcagc

SEQ ID NO: 5500904 - DNA, 25 bp, Homo sapien
ccctccctccatccttaacacaaag

SEQ ID NO: 5500905 - DNA, 25 bp, Homo sapien
agctcttctggggcaagcccagacc

SEQ ID NO: 5500906 - DNA, 25 bp, Homo sapien
aagtatgggaagatccctgcatggc

SEQ ID NO: 5500907 - DNA, 25 bp, Homo sapien
tggattgagaaggacctatgaaatc

SEQ ID NO: 5500908 - DNA, 25 bp, Homo sapien
tggagaatcctccctgtccccaccc

SEQ ID NO: 5500909 - DNA, 25 bp, Homo sapien
cccacccactcaggcacactcagct

SEQ ID NO: 5500910 - DNA, 25 bp, Homo sapien
ggggataaccctgagttcctggtgc

SEQ ID NO: 5500911 - DNA, 25 bp, Homo sapien
ccccttgagggcatcctaatgggac

SEQ ID NO: 5500912 - DNA, 25 bp, Homo sapien
aaaacacaggttggatgaccatcat

SEQ ID NO: 5500913 - DNA, 25 bp, Homo sapien
catccactcagaggccaaccagtca

SEQ ID NO: 5500914 - DNA, 25 bp, Homo sapien
gaaatcaagatagacctggagaatc

SEQ ID NO: 5500915 - DNA, 25 bp, Homo sapien
acactcagctcaaccaagagggagg

SEQ ID NO: 5500916 - DNA, 25 bp, Homo sapien
gccaagctgtggatatgtcagagtt

SEQ ID NO: 5500917 - DNA, 25 bp, Homo sapien
atctgacccatgtggggtcttgggc

SEQ ID NO: 5500918 - DNA, 25 bp, Homo sapien
actgataagggagagattcttgatc

SEQ ID NO: 5500919 - DNA, 25 bp, Homo sapien
ttcagttaacgagtagcaagcttct

SEQ ID NO: 5500920 - DNA, 25 bp, Homo sapien
tcacctgctagagagagtgaaagta

SEQ ID NO: 5500921 - DNA, 25 bp, Homo sapien
aaagtagtgcgtggcctccactttt

SEQ ID NO: 5500922 - DNA, 25 bp, Homo sapien
tagctggttccatagtgcccgtcac

SEQ ID NO: 5500923 - DNA, 25 bp, Homo sapien
gcttacactcagctggatgccttgc

SEQ ID NO: 5500924 - DNA, 25 bp, Homo sapien
ccgtcacgagggtccatttcagttt

SEQ ID NO: 5500925 - DNA, 25 bp, Homo sapien
ttctagtaggggctgcttatctgac

SEQ ID NO: 5500926 - DNA, 25 bp, Homo sapien
atggagatatcaaatggtgtaattc

SEQ ID NO: 5500927 - DNA, 25 bp, Homo sapien
ttacacggagtgactgttgccatca

SEQ ID NO: 5500928 - DNA, 25 bp, Homo sapien
gaggcctgaggcagaattatcactt

SEQ ID NO: 5500929 - DNA, 25 bp, Homo sapien
tccccatcagatacagcagaacaaa

SEQ ID NO: 5500930 - DNA, 25 bp, Homo sapien
tgtgggcaatgaaagtcagttagca

SEQ ID NO: 5500931 - DNA, 25 bp, Homo sapien
tgcagaagacatctagcactccatg

SEQ ID NO: 5500932 - DNA, 25 bp, Homo sapien
tgtagcaatgccactgatggaatac

SEQ ID NO: 5500933 - DNA, 25 bp, Homo sapien
gatggaatactatgacctcagaagc

SEQ ID NO: 5500934 - DNA, 25 bp, Homo sapien
ataaaatcaggtaaatgaagggtta

SEQ ID NO: 5500935 - DNA, 25 bp, Homo sapien
ctagcactccatgcctgcgtggctc

SEQ ID NO: 5500936 - DNA, 25 bp, Homo sapien
cagcagaacaaatgttagcgtgtgg

SEQ ID NO: 5500937 - DNA, 25 bp, Homo sapien
ctgcgtggctcaacccttccccatc

SEQ ID NO: 5500938 - DNA, 25 bp, Homo sapien
gtcagttagcaggctgtagcaatgc

SEQ ID NO: 5500939 - DNA, 25 bp, Homo sapien
ctagaaacttgcctaacctcttccc

SEQ ID NO: 5500940 - DNA, 25 bp, Homo sapien
caggttcaagtgatcctcttgcctc

SEQ ID NO: 5500941 - DNA, 25 bp, Homo sapien
gcagtctggcattctagaaacttgc

SEQ ID NO: 5500942 - DNA, 25 bp, Homo sapien
tgttagaaagcgtgcaatgaaatgg

SEQ ID NO: 5500943 - DNA, 25 bp, Homo sapien
atgcccggctaatgtttgtgttttt

SEQ ID NO: 5500944 - DNA, 25 bp, Homo sapien
gaaagcagtctggcattctagaaac

SEQ ID NO: 5500945 - DNA, 25 bp, Homo sapien
tggtataaatgttagaaagcgtgca

SEQ ID NO: 5500946 - DNA, 25 bp, Homo sapien
gtgatccactcaccttggtctccca

SEQ ID NO: 5500947 - DNA, 25 bp, Homo sapien
gcatgagccaccatacccagccttt

SEQ ID NO: 5500948 - DNA, 25 bp, Homo sapien
actttctagaaagcagtctggcatt

SEQ ID NO: 5500949 - DNA, 25 bp, Homo sapien
agcgtgcaatgaaatgggcattttc

SEQ ID NO: 5500950 - DNA, 25 bp, Homo sapien
ggcaattataacaggagtgtttcaa

SEQ ID NO: 5500951 - DNA, 25 bp, Homo sapien
aaaccagaaggtagaagctgataaa

SEQ ID NO: 5500952 - DNA, 25 bp, Homo sapien
aacaggagtgtttcaatggagactt

SEQ ID NO: 5500953 - DNA, 25 bp, Homo sapien
ttcaatggagactttaggcaactag

SEQ ID NO: 5500954 - DNA, 25 bp, Homo sapien
ttaggcaactagaactcagcatgaa

SEQ ID NO: 5500955 - DNA, 25 bp, Homo sapien
atacaaattttgactaggaggagaa

SEQ ID NO: 5500956 - DNA, 25 bp, Homo sapien
atggagactttaggcaactagaact

SEQ ID NO: 5500957 - DNA, 25 bp, Homo sapien
gggggagtggatttatgattttatg

SEQ ID NO: 5500958 - DNA, 25 bp, Homo sapien
tcagcatgaaaccagaaggtagaag

SEQ ID NO: 5500959 - DNA, 25 bp, Homo sapien
aactcagcatgaaaccagaaggtag

SEQ ID NO: 5500960 - DNA, 25 bp, Homo sapien
caaattttgactaggaggagaaagg

SEQ ID NO: 5500961 - DNA, 25 bp, Homo sapien
tcccagcattgagagctgctctggt

SEQ ID NO: 5500962 - DNA, 25 bp, Homo sapien
ggattcccagcattgagagctgctc

SEQ ID NO: 5500963 - DNA, 25 bp, Homo sapien
caggattcccagcattgagagctgc

SEQ ID NO: 5500964 - DNA, 25 bp, Homo sapien
gcggtcatcatcagtctcccaggat

SEQ ID NO: 5500965 - DNA, 25 bp, Homo sapien
ccacacaagagtgagtgatgtaaat

SEQ ID NO: 5500966 - DNA, 25 bp, Homo sapien
acatttggaattctgcacacccttc

SEQ ID NO: 5500967 - DNA, 25 bp, Homo sapien
caaagacaattatgcactccacaca

SEQ ID NO: 5500968 - DNA, 25 bp, Homo sapien
catcagtctcccaggattcccagca

SEQ ID NO: 5500969 - DNA, 25 bp, Homo sapien
ttgagagctgctctggtgtctgagt

SEQ ID NO: 5500970 - DNA, 25 bp, Homo sapien
cagcattgagagctgctctggtgtc

SEQ ID NO: 5500971 - DNA, 25 bp, Homo sapien
actccacacaagagtgagtgatgta

SEQ ID NO: 5500972 - DNA, 25 bp, Homo sapien
agatgaagtaatatatatgagatca

SEQ ID NO: 5500973 - DNA, 25 bp, Homo sapien
aaaggtacaactaagctgcatgctc

SEQ ID NO: 5500974 - DNA, 25 bp, Homo sapien
tatatatgagatcaggcacaagtgg

SEQ ID NO: 5500975 - DNA, 25 bp, Homo sapien
ccgataacttggtaaccacggaaga

SEQ ID NO: 5500976 - DNA, 25 bp, Homo sapien
tggtaaccacggaagaaatatttca

SEQ ID NO: 5500977 - DNA, 25 bp, Homo sapien
gcacaagtgggtcccaaaggtacaa

SEQ ID NO: 5500978 - DNA, 25 bp, Homo sapien
ccacactgaggatcttgtggggagt

SEQ ID NO: 5500979 - DNA, 25 bp, Homo sapien
caagtggctcagttatctatagtag

SEQ ID NO: 5500980 - DNA, 25 bp, Homo sapien
ctcaaatgtggagtgtctctgagcg

SEQ ID NO: 5500981 - DNA, 25 bp, Homo sapien
aagctgcatgctcaagtggctcagt

SEQ ID NO: 5500982 - DNA, 25 bp, Homo sapien
ttcaggcctgatttatgggtggttc

SEQ ID NO: 5500983 - DNA, 25 bp, Homo sapien
agtattaagtaatccgcccgccttg

SEQ ID NO: 5500984 - DNA, 25 bp, Homo sapien
aaaaatgagcggctgctcccacttc

SEQ ID NO: 5500985 - DNA, 25 bp, Homo sapien
tgcagaaaatctggctggatgctgg

SEQ ID NO: 5500986 - DNA, 25 bp, Homo sapien
tgccgaattcttggcctcgagggcc

SEQ ID NO: 5500987 - DNA, 25 bp, Homo sapien
ccaggatggggattcatgatttaat

SEQ ID NO: 5500988 - DNA, 25 bp, Homo sapien
cgcctcctcggttcaagggattctc

SEQ ID NO: 5500989 - DNA, 25 bp, Homo sapien
ctggcgggattcatgatttaaagca

SEQ ID NO: 5500990 - DNA, 25 bp, Homo sapien
ggcctcgagggccaaattccctata

SEQ ID NO: 5500991 - DNA, 25 bp, Homo sapien
agccaccgtacctggcgggattcat

SEQ ID NO: 5500992 - DNA, 25 bp, Homo sapien
tgggacctacctcttccaggatggg

SEQ ID NO: 5500993 - DNA, 25 bp, Homo sapien
tcaaattggtaacacctcgtgccga

SEQ ID NO: 5500994 - DNA, 25 bp, Homo sapien
atgtagatacgcagtttatagggat

SEQ ID NO: 5500995 - DNA, 25 bp, Homo sapien
atggggcccctagttcaagcccacc

SEQ ID NO: 5500996 - DNA, 25 bp, Homo sapien
gattagacagatatatgggtgtaat

SEQ ID NO: 5500997 - DNA, 25 bp, Homo sapien
tggtatcaggattgtgcagaaaaac

SEQ ID NO: 5500998 - DNA, 25 bp, Homo sapien
ttggcaaatctaggcaaaggttatc

SEQ ID NO: 5500999 - DNA, 25 bp, Homo sapien
ttatagggataagagttaacatgac

SEQ ID NO: 5501000 - DNA, 25 bp, Homo sapien
cttggtaccctctcacagacacatc

SEQ ID NO: 5501001 - DNA, 25 bp, Homo sapien
ttctgcattgcgaaggcactttact

SEQ ID NO: 5501002 - DNA, 25 bp, Homo sapien
cacgtggtcccatgaaaaaagaaat

SEQ ID NO: 5501003 - DNA, 25 bp, Homo sapien
ctacagatgtatagattagacagat

SEQ ID NO: 5501004 - DNA, 25 bp, Homo sapien
ggccacggtgtctacagcttacttt

SEQ ID NO: 5501005 - DNA, 25 bp, Homo sapien
gagagttccaaaacacgtatcacat

SEQ ID NO: 5501006 - DNA, 25 bp, Homo sapien
atgtgatacgtgttttggaactctc

SEQ ID NO: 5501007 - DNA, 25 bp, Homo sapien
ggaggccggtaaggtagtatcccga

SEQ ID NO: 5501008 - DNA, 25 bp, Homo sapien
tcgggatactaccttaccggcctcc

SEQ ID NO: 5501009 - DNA, 25 bp, Homo sapien
caagtgcctaagcctcccaagtagc

SEQ ID NO: 5501010 - DNA, 25 bp, Homo sapien
cctgggtccaagtgattctcattca

SEQ ID NO: 5501011 - DNA, 25 bp, Homo sapien
gaaatagtcccaactctcaatgagt

SEQ ID NO: 5501012 - DNA, 25 bp, Homo sapien
gttgctcaggttgatctcgaactcc

SEQ ID NO: 5501013 - DNA, 25 bp, Homo sapien
gatgtggattttaaaatgcctcccc

SEQ ID NO: 5501014 - DNA, 25 bp, Homo sapien
gattctcattcaagtgcctaagcct

SEQ ID NO: 5501015 - DNA, 25 bp, Homo sapien
ttcaccatgttgctcaggttgatct

SEQ ID NO: 5501016 - DNA, 25 bp, Homo sapien
tgtatgtgtgaaatagtcccaactc

SEQ ID NO: 5501017 - DNA, 25 bp, Homo sapien
cattaagtcccttctacatgccagg

SEQ ID NO: 5501018 - DNA, 25 bp, Homo sapien
cccccatgctcagctaatgtttgta

SEQ ID NO: 5501019 - DNA, 25 bp, Homo sapien
ccactcccaaacagaacaacatttt

SEQ ID NO: 5501020 - DNA, 25 bp, Homo sapien
caaagcttgtgggaactaaagcaga

SEQ ID NO: 5501021 - DNA, 25 bp, Homo sapien
gactgaagggacttaaatgtggtta

SEQ ID NO: 5501022 - DNA, 25 bp, Homo sapien
gaagggatgatggagtctctacaaa

SEQ ID NO: 5501023 - DNA, 25 bp, Homo sapien
agtctctcagtagcttccatgcccc

SEQ ID NO: 5501024 - DNA, 25 bp, Homo sapien
ccaatgtctccaagcgcaggaagtg

SEQ ID NO: 5501025 - DNA, 25 bp, Homo sapien
gaactagtaaacactgctgcagatc

SEQ ID NO: 5501026 - DNA, 25 bp, Homo sapien
aaaggtaggaagattactgtcagac

SEQ ID NO: 5501027 - DNA, 25 bp, Homo sapien
aatgtggttaactgaagagattttc

SEQ ID NO: 5501028 - DNA, 25 bp, Homo sapien
gtaccacaaattatcaaggactgac

SEQ ID NO: 5501029 - DNA, 25 bp, Homo sapien
gaaggagcaacccaaagcttgtggg

SEQ ID NO: 5501030 - DNA, 25 bp, Homo sapien
ggctggcaagaatgactagctctta

SEQ ID NO: 5501031 - DNA, 25 bp, Homo sapien
gacaagagaggtaatgaaacttggc

SEQ ID NO: 5501032 - DNA, 25 bp, Homo sapien
gcaaagtcaggatcaacacatacat

SEQ ID NO: 5501033 - DNA, 25 bp, Homo sapien
ccgaggcaacagtgcttgactctca

SEQ ID NO: 5501034 - DNA, 25 bp, Homo sapien
gtgtcccgccagcaaatgaatttac

SEQ ID NO: 5501035 - DNA, 25 bp, Homo sapien
atacatgttgtatgaccgaggcaac

SEQ ID NO: 5501036 - DNA, 25 bp, Homo sapien
gggatcacgcacacatcaggaatca

SEQ ID NO: 5501037 - DNA, 25 bp, Homo sapien
cttctccactggggtgagaatagga

SEQ ID NO: 5501038 - DNA, 25 bp, Homo sapien
gaataggacctggtgcaaagtcagg

SEQ ID NO: 5501039 - DNA, 25 bp, Homo sapien
acagattaactgatagctcgtgttt

SEQ ID NO: 5501040 - DNA, 25 bp, Homo sapien
gcaaaaaaagatgtggctatgctca

SEQ ID NO: 5501041 - DNA, 25 bp, Homo sapien
gaaacttggcattggttatacagat

SEQ ID NO: 5501042 - DNA, 25 bp, Homo sapien
taagacagattcctcatggtaaaac

SEQ ID NO: 5501043 - DNA, 25 bp, Homo sapien
tgctgagaagaacatgaatatgaac

SEQ ID NO: 5501044 - DNA, 25 bp, Homo sapien
ttcaatggtactaataacttatccc

SEQ ID NO: 5501045 - DNA, 25 bp, Homo sapien
catggtaaaactgctgagaagaaca

SEQ ID NO: 5501046 - DNA, 25 bp, Homo sapien
gctgtgacttgaaccagccagggcc

SEQ ID NO: 5501047 - DNA, 25 bp, Homo sapien
tacaggcacaagctgccaggtctga

SEQ ID NO: 5501048 - DNA, 25 bp, Homo sapien
ggacagagctgtgacttgaaccagc

SEQ ID NO: 5501049 - DNA, 25 bp, Homo sapien
aggcacaagctgccaggtctgacca

SEQ ID NO: 5501050 - DNA, 25 bp, Homo sapien
caatattaagagaatccccaggtat

SEQ ID NO: 5501051 - DNA, 25 bp, Homo sapien
tcccaatggtaaaaaatgcagccgg

SEQ ID NO: 5501052 - DNA, 25 bp, Homo sapien
aataacgctattgacaactgacatt

SEQ ID NO: 5501053 - DNA, 25 bp, Homo sapien
gcagaaagctgcacatctatccacc

SEQ ID NO: 5501054 - DNA, 25 bp, Homo sapien
aaagggcctcttagtgatgcacact

SEQ ID NO: 5501055 - DNA, 25 bp, Homo sapien
atgcacactggatgcatccatcacc

SEQ ID NO: 5501056 - DNA, 25 bp, Homo sapien
ctggggaagttattttcagttgtct

SEQ ID NO: 5501057 - DNA, 25 bp, Homo sapien
gggccacctgctcacggagatttca

SEQ ID NO: 5501058 - DNA, 25 bp, Homo sapien
cacggagatttcagagacagcctcc

SEQ ID NO: 5501059 - DNA, 25 bp, Homo sapien
cttgggaaagaactacaaacgtcat

SEQ ID NO: 5501060 - DNA, 25 bp, Homo sapien
cctggaatttcacagatcacaagcc

SEQ ID NO: 5501061 - DNA, 25 bp, Homo sapien
gcctgctcactggggaagttatttt

SEQ ID NO: 5501062 - DNA, 25 bp, Homo sapien
agccttcacacaagacatctccttc

SEQ ID NO: 5501063 - DNA, 25 bp, Homo sapien
agagacagcctccactttagccttc

SEQ ID NO: 5501064 - DNA, 25 bp, Homo sapien
ggactcaggagatcctcccgcctca

SEQ ID NO: 5501065 - DNA, 25 bp, Homo sapien
agtaattcagtcgttgtaaagtcat

SEQ ID NO: 5501066 - DNA, 25 bp, Homo sapien
aatgtggagcataattaacactttc

SEQ ID NO: 5501067 - DNA, 25 bp, Homo sapien
cagggtctcgctttgctacttagtc

SEQ ID NO: 5501068 - DNA, 25 bp, Homo sapien
gcagtggtgcagtcttggcttactg

SEQ ID NO: 5501069 - DNA, 25 bp, Homo sapien
actgcaacctcgaactcctggactc

SEQ ID NO: 5501070 - DNA, 25 bp, Homo sapien
cttaaaaagtgtgcctcttgaggat

SEQ ID NO: 5501071 - DNA, 25 bp, Homo sapien
tagctgggactacatgtgtgcacca

SEQ ID NO: 5501072 - DNA, 25 bp, Homo sapien
tgagtgtaaagacctattatgggta

SEQ ID NO: 5501073 - DNA, 25 bp, Homo sapien
gcctcttgaggataaagcaaacttt

SEQ ID NO: 5501074 - DNA, 25 bp, Homo sapien
gattacaggcatgaactgctgtgcc

SEQ ID NO: 5501075 - DNA, 25 bp, Homo sapien
tataacttccaaatcagagatatac

SEQ ID NO: 5501076 - DNA, 25 bp, Homo sapien
ggcaaaaatatggtacagcccctac

SEQ ID NO: 5501077 - DNA, 25 bp, Homo sapien
cacaagttgtttttggtattcgctt

SEQ ID NO: 5501078 - DNA, 25 bp, Homo sapien
ttactgccagcaatagggaaaagca

SEQ ID NO: 5501079 - DNA, 25 bp, Homo sapien
gttttactgccagcaatagggaaaa

SEQ ID NO: 5501080 - DNA, 25 bp, Homo sapien
aaacccatgttttactgccagcaat

SEQ ID NO: 5501081 - DNA, 25 bp, Homo sapien
aaagcatggtaaatgccaatcctgc

SEQ ID NO: 5501082 - DNA, 25 bp, Homo sapien
atatacagtgtaaattctgaaaaac

SEQ ID NO: 5501083 - DNA, 25 bp, Homo sapien
gtaaatgccaatcctgcccaaataa

SEQ ID NO: 5501084 - DNA, 25 bp, Homo sapien
tccaaatcagagatatacagtgtaa

SEQ ID NO: 5501085 - DNA, 25 bp, Homo sapien
tggtacagcccctacctcagaagtt

SEQ ID NO: 5501086 - DNA, 25 bp, Homo sapien
ctctggtgacatgacaatgatcctg

SEQ ID NO: 5501087 - DNA, 25 bp, Homo sapien
agactggcacatgctcagcctgatc

SEQ ID NO: 5501088 - DNA, 25 bp, Homo sapien
ctctgtgtacgttataaatggctat

SEQ ID NO: 5501089 - DNA, 25 bp, Homo sapien
gcttccttgaggtgagctcccctga

SEQ ID NO: 5501090 - DNA, 25 bp, Homo sapien
ctgactgtctcattagctcggcttc

SEQ ID NO: 5501091 - DNA, 25 bp, Homo sapien
aacccctgtgctcaagcgctctgcc

SEQ ID NO: 5501092 - DNA, 25 bp, Homo sapien
cctgggagcacttccttcgccacca

SEQ ID NO: 5501093 - DNA, 25 bp, Homo sapien
gctcggcttccttgaggtgagctcc

SEQ ID NO: 5501094 - DNA, 25 bp, Homo sapien
caagacccaccctgagtctcccttg

SEQ ID NO: 5501095 - DNA, 25 bp, Homo sapien
tgacatgacaatgatcctgggagca

SEQ ID NO: 5501096 - DNA, 25 bp, Homo sapien
gggatgttgtcaagacccaccctga

SEQ ID NO: 5501097 - DNA, 25 bp, Homo sapien
ctgaacccacccaactgacgtgttc

SEQ ID NO: 5501098 - DNA, 25 bp, Homo sapien
tctgaaagtcctgtgagatctggcg

SEQ ID NO: 5501099 - DNA, 25 bp, Homo sapien
gcttgatatggtaacgcgattgtaa

SEQ ID NO: 5501100 - DNA, 25 bp, Homo sapien
ttggagtcgtacctgattttattac

SEQ ID NO: 5501101 - DNA, 25 bp, Homo sapien
atggtaacgcgattgtaatgctcac

SEQ ID NO: 5501102 - DNA, 25 bp, Homo sapien
gcttaaatctgaaagtcctgtgaga

SEQ ID NO: 5501103 - DNA, 25 bp, Homo sapien
caactgacgtgttcatagcagattc

SEQ ID NO: 5501104 - DNA, 25 bp, Homo sapien
acgcgattgtaatgctcacacagca

SEQ ID NO: 5501105 - DNA, 25 bp, Homo sapien
tcttggccaggtattgcttaaatct

SEQ ID NO: 5501106 - DNA, 25 bp, Homo sapien
attccttatagaccccgcttcgttc

SEQ ID NO: 5501107 - DNA, 25 bp, Homo sapien
atttccaacactccagatagtggtg

SEQ ID NO: 5501108 - DNA, 25 bp, Homo sapien
ctcatatctgctacgggacacatct

SEQ ID NO: 5501109 - DNA, 25 bp, Homo sapien
tggagttgggctacatgttcagtta

SEQ ID NO: 5501110 - DNA, 25 bp, Homo sapien
tatgagtacattccatgaccaaatt

SEQ ID NO: 5501111 - DNA, 25 bp, Homo sapien
aggcgtgacgaccacttaagcttat

SEQ ID NO: 5501112 - DNA, 25 bp, Homo sapien
tttgtagtaatagaaccaaaactca

SEQ ID NO: 5501113 - DNA, 25 bp, Homo sapien
ggacacatctttcctgtggtgctac

SEQ ID NO: 5501114 - DNA, 25 bp, Homo sapien
gactgttaagcatctccagggaagg

SEQ ID NO: 5501115 - DNA, 25 bp, Homo sapien
caaatttcacataaggcagtgtact

SEQ ID NO: 5501116 - DNA, 25 bp, Homo sapien
tgccaacatagtatctcatgggaat

SEQ ID NO: 5501117 - DNA, 25 bp, Homo sapien
ggtgctaccatgcctcagtggagat

SEQ ID NO: 5501118 - DNA, 25 bp, Homo sapien
tctgtaaaaatatgcctctcatgcc

SEQ ID NO: 5501119 - DNA, 25 bp, Homo sapien
ctctgagctgctggattgagagctc

SEQ ID NO: 5501120 - DNA, 25 bp, Homo sapien
gagggctcctagtccagaaaccttc

SEQ ID NO: 5501121 - DNA, 25 bp, Homo sapien
aagaatatgtgattgtaaggtgatc

SEQ ID NO: 5501122 - DNA, 25 bp, Homo sapien
gggaaatccccagtgtccatacttc

SEQ ID NO: 5501123 - DNA, 25 bp, Homo sapien
tttttgccaagattggggaagtcag

SEQ ID NO: 5501124 - DNA, 25 bp, Homo sapien
gagtggagtattaaaaagaatatgt

SEQ ID NO: 5501125 - DNA, 25 bp, Homo sapien
ggaagtcaggtcatgtggaaatatg

SEQ ID NO: 5501126 - DNA, 25 bp, Homo sapien
taaccccctctggagaataagcttc

SEQ ID NO: 5501127 - DNA, 25 bp, Homo sapien
ttggtttcacatcaggagggtttac

SEQ ID NO: 5501128 - DNA, 25 bp, Homo sapien
caggagggtttactctgagctgctg

SEQ ID NO: 5501129 - DNA, 25 bp, Homo sapien
gctgcctggcaatcgttggtaatct

SEQ ID NO: 5501130 - DNA, 25 bp, Homo sapien
agcctggtaaacatgtcgaaacccc

SEQ ID NO: 5501131 - DNA, 25 bp, Homo sapien
gctttggaagtttaataccagtgag

SEQ ID NO: 5501132 - DNA, 25 bp, Homo sapien
cagtctagttggcgatttcttggat

SEQ ID NO: 5501133 - DNA, 25 bp, Homo sapien
gagccttgaagttcgagactggtct

SEQ ID NO: 5501134 - DNA, 25 bp, Homo sapien
tgggtacgaggcaaaatcgtgatta

SEQ ID NO: 5501135 - DNA, 25 bp, Homo sapien
gcgagtggattattggagccttgaa

SEQ ID NO: 5501136 - DNA, 25 bp, Homo sapien
aacattgcaagacccggtctccacc

SEQ ID NO: 5501137 - DNA, 25 bp, Homo sapien
ggagaggctcgtttcagtctagttg

SEQ ID NO: 5501138 - DNA, 25 bp, Homo sapien
atcgtgattaacaagctttggaagt

SEQ ID NO: 5501139 - DNA, 25 bp, Homo sapien
gagactggtctggaaaacattgcaa

SEQ ID NO: 5501140 - DNA, 25 bp, Homo sapien
gatttcttggatagagaagtaagcc

SEQ ID NO: 5501141 - DNA, 25 bp, Homo sapien
aatgaaaatatccttaaagagtaac

SEQ ID NO: 5501142 - DNA, 25 bp, Homo sapien
gagataggggaacttgactattcct

SEQ ID NO: 5501143 - DNA, 25 bp, Homo sapien
aatctggatatattacaagttcaat

SEQ ID NO: 5501144 - DNA, 25 bp, Homo sapien
agaaggtatgcaaacagggcatttt

SEQ ID NO: 5501145 - DNA, 25 bp, Homo sapien
ttacagtatacaaagaagagaaggt

SEQ ID NO: 5501146 - DNA, 25 bp, Homo sapien
tctcaaaatagagcagtgagtggta

SEQ ID NO: 5501147 - DNA, 25 bp, Homo sapien
cctattatacaggagtttacagtat

SEQ ID NO: 5501148 - DNA, 25 bp, Homo sapien
gtgagtggtaaagatagtaagtatt

SEQ ID NO: 5501149 - DNA, 25 bp, Homo sapien
gtatacaaagaagagaaggtatgca

SEQ ID NO: 5501150 - DNA, 25 bp, Homo sapien
aaaagtgaaggacagcattcttagc

SEQ ID NO: 5501151 - DNA, 25 bp, Homo sapien
gctgcacttggcccatatgttaatc

SEQ ID NO: 5501152 - DNA, 25 bp, Homo sapien
ccccgcgcacccgctagtgtctgaa

SEQ ID NO: 5501153 - DNA, 25 bp, Homo sapien
gcgcacccgctagtgtctgaaccgg

SEQ ID NO: 5501154 - DNA, 25 bp, Homo sapien
tgatggatcagtttgagatttgttc

SEQ ID NO: 5501155 - DNA, 25 bp, Homo sapien
gatttgtctggtcgaacacaccttt

SEQ ID NO: 5501156 - DNA, 25 bp, Homo sapien
ctaggatttgtctggtcgaacacac

SEQ ID NO: 5501157 - DNA, 25 bp, Homo sapien
ggcctcacattctgatgtttggaca

SEQ ID NO: 5501158 - DNA, 25 bp, Homo sapien
cccgtcctctcccgccgtcctgggc

SEQ ID NO: 5501159 - DNA, 25 bp, Homo sapien
gctagctacatgactgatggatcag

SEQ ID NO: 5501160 - DNA, 25 bp, Homo sapien
caaaagtttaactctgatagaaggg

SEQ ID NO: 5501161 - DNA, 25 bp, Homo sapien
cacccgctagtgtctgaaccggggg

SEQ ID NO: 5501162 - DNA, 25 bp, Homo sapien
ggaagctctacagctagctacatga

SEQ ID NO: 5501163 - DNA, 25 bp, Homo sapien
cgacgtctcccaagggcgagtcccg

SEQ ID NO: 5501164 - DNA, 25 bp, Homo sapien
cgggactcgcccttgggagacgtcg

SEQ ID NO: 5501165 - DNA, 25 bp, Homo sapien
acccgacgtctcccaagggcgagtc

SEQ ID NO: 5501166 - DNA, 25 bp, Homo sapien
gactcgcccttgggagacgtcgggt

SEQ ID NO: 5501167 - DNA, 25 bp, Homo sapien
tttatctgaggaatctctggccagc

SEQ ID NO: 5501168 - DNA, 25 bp, Homo sapien
ttcttatcaaatggaaggaggtacg

SEQ ID NO: 5501169 - DNA, 25 bp, Homo sapien
ctaaaatttgggtgggacactcaat

SEQ ID NO: 5501170 - DNA, 25 bp, Homo sapien
aatttgggtgggacactcaattttc

SEQ ID NO: 5501171 - DNA, 25 bp, Homo sapien
gaggaatctctggccagcaactcat

SEQ ID NO: 5501172 - DNA, 25 bp, Homo sapien
ccctaaaatttgggtgggacactca

SEQ ID NO: 5501173 - DNA, 25 bp, Homo sapien
tctggccagcaactcataacatcta

SEQ ID NO: 5501174 - DNA, 25 bp, Homo sapien
atctgaggaatctctggccagcaac

SEQ ID NO: 5501175 - DNA, 25 bp, Homo sapien
accatgcccgctcaaaactcaattt

SEQ ID NO: 5501176 - DNA, 25 bp, Homo sapien
ttcaccatataaactggatggaaga

SEQ ID NO: 5501177 - DNA, 25 bp, Homo sapien
cactggaaatagcatcttcttatca

SEQ ID NO: 5501178 - DNA, 25 bp, Homo sapien
aatgtaaacagaggctatcaaggtg

SEQ ID NO: 5501179 - DNA, 25 bp, Homo sapien
aattaagcttaaatacacgtatagg

SEQ ID NO: 5501180 - DNA, 25 bp, Homo sapien
gtaactctgtaaacttgatcagcac

SEQ ID NO: 5501181 - DNA, 25 bp, Homo sapien
atatccactatgagcttcttcccag

SEQ ID NO: 5501182 - DNA, 25 bp, Homo sapien
aggactacctagagatcacactttt

SEQ ID NO: 5501183 - DNA, 25 bp, Homo sapien
gagccaccgtgccggacctatttaa

SEQ ID NO: 5501184 - DNA, 25 bp, Homo sapien
atacacgtataggtaataattattt

SEQ ID NO: 5501185 - DNA, 25 bp, Homo sapien
agtacagtactaataaactaaggac

SEQ ID NO: 5501186 - DNA, 25 bp, Homo sapien
agtaatgtaaacagaggctatcaag

SEQ ID NO: 5501187 - DNA, 25 bp, Homo sapien
aaactaaggactacctagagatcac

SEQ ID NO: 5501188 - DNA, 25 bp, Homo sapien
ttcctgactgaatggttaggaaagc

SEQ ID NO: 5501189 - DNA, 25 bp, Homo sapien
ggtgatccaccgcctcagcttccca

SEQ ID NO: 5501190 - DNA, 25 bp, Homo sapien
gatccaccgcctcagcttcccaaag

SEQ ID NO: 5501191 - DNA, 25 bp, Homo sapien
tgagctcaggtgatccaccgcctca

SEQ ID NO: 5501192 - DNA, 25 bp, Homo sapien
agaaagagtcttgctttgtcgccca

SEQ ID NO: 5501193 - DNA, 25 bp, Homo sapien
ccaccgcctcagcttcccaaagtgc

SEQ ID NO: 5501194 - DNA, 25 bp, Homo sapien
gagctcaggtgatccaccgcctcag

SEQ ID NO: 5501195 - DNA, 25 bp, Homo sapien
aacaaaaacccatcttttctgtctc

SEQ ID NO: 5501196 - DNA, 25 bp, Homo sapien
atccaccgcctcagcttcccaaagt

SEQ ID NO: 5501197 - DNA, 25 bp, Homo sapien
gtgatccaccgcctcagcttcccaa

SEQ ID NO: 5501198 - DNA, 25 bp, Homo sapien
gaaagagtcttgctttgtcgcccag

SEQ ID NO: 5501199 - DNA, 25 bp, Homo sapien
aaagagtcttgctttgtcgcccagg

SEQ ID NO: 5501200 - DNA, 25 bp, Homo sapien
ggggcagcacattggaagccctcat

SEQ ID NO: 5501201 - DNA, 25 bp, Homo sapien
tcgttagaagcttgaattcgagcag

SEQ ID NO: 5501202 - DNA, 25 bp, Homo sapien
ccgtacatcgttagaagcttgaatt

SEQ ID NO: 5501203 - DNA, 25 bp, Homo sapien
gcagcacattggaagccctcatgtc

SEQ ID NO: 5501204 - DNA, 25 bp, Homo sapien
tagaagcttgaattcgagcagtagt

SEQ ID NO: 5501205 - DNA, 25 bp, Homo sapien
attggaagccctcatgtccccgtac

SEQ ID NO: 5501206 - DNA, 25 bp, Homo sapien
tgaattcgagcagtagtagtagtag

SEQ ID NO: 5501207 - DNA, 25 bp, Homo sapien
cttgaattcgagcagtagtagtagt

SEQ ID NO: 5501208 - DNA, 25 bp, Homo sapien
tgtccccgtacatcgttagaagctt

SEQ ID NO: 5501209 - DNA, 25 bp, Homo sapien
ggaagccctcatgtccccgtacatc

SEQ ID NO: 5501210 - DNA, 25 bp, Homo sapien
gcacattggaagccctcatgtcccc

SEQ ID NO: 5501211 - DNA, 25 bp, Homo sapien
acagatgactaggtcccataggaca

SEQ ID NO: 5501212 - DNA, 25 bp, Homo sapien
ttgataaccataaattgacctcgtg

SEQ ID NO: 5501213 - DNA, 25 bp, Homo sapien
tcccataggacacaggaaaaaaagc

SEQ ID NO: 5501214 - DNA, 25 bp, Homo sapien
aagcaacatgttgcgaacaagtgtc

SEQ ID NO: 5501215 - DNA, 25 bp, Homo sapien
ttgataaaaactatttgaggccagc

SEQ ID NO: 5501216 - DNA, 25 bp, Homo sapien
gggctatagagcgacactcagtctc

SEQ ID NO: 5501217 - DNA, 25 bp, Homo sapien
aaactatttgaggccagcacagtgg

SEQ ID NO: 5501218 - DNA, 25 bp, Homo sapien
atgttgcgaacaagtgtcaaaataa

SEQ ID NO: 5501219 - DNA, 25 bp, Homo sapien
tctaacatacagatgactaggtccc

SEQ ID NO: 5501220 - DNA, 25 bp, Homo sapien
tgtcaaaataaagcactgaattagt

SEQ ID NO: 5501221 - DNA, 25 bp, Homo sapien
aaccactaattgaagtagctttgat

SEQ ID NO: 5501222 - DNA, 25 bp, Homo sapien
cagaggataggtctccaaagctatc

SEQ ID NO: 5501223 - DNA, 25 bp, Homo sapien
tcacgatcatattgcccaggagcct

SEQ ID NO: 5501224 - DNA, 25 bp, Homo sapien
ggtggcccagcacaatcacgatcat

SEQ ID NO: 5501225 - DNA, 25 bp, Homo sapien
aaagctatcaaagtaccgctgggtc

SEQ ID NO: 5501226 - DNA, 25 bp, Homo sapien
tatcaaagtaccgctgggtccaagg

SEQ ID NO: 5501227 - DNA, 25 bp, Homo sapien
ccattgttcacaggcaagagcagga

SEQ ID NO: 5501228 - DNA, 25 bp, Homo sapien
caggccatcgttaaaggcagttatc

SEQ ID NO: 5501229 - DNA, 25 bp, Homo sapien
ctgacagatgctctcttgggaacaa

SEQ ID NO: 5501230 - DNA, 25 bp, Homo sapien
acttcatcggcgttcacctttcccc

SEQ ID NO: 5501231 - DNA, 25 bp, Homo sapien
gaggctgtccaagtgattcaggcca

SEQ ID NO: 5501232 - DNA, 25 bp, Homo sapien
ttgccaacaactgacagatgctctc

SEQ ID NO: 5501233 - DNA, 25 bp, Homo sapien
acggctgaagcaatgctcttccatc

SEQ ID NO: 5501234 - DNA, 25 bp, Homo sapien
gatctgggctacctcgtggcaccag

SEQ ID NO: 5501235 - DNA, 25 bp, Homo sapien
aggtgtccatttacggctgaagcaa

SEQ ID NO: 5501236 - DNA, 25 bp, Homo sapien
tacaaatacagcaggaataattctg

SEQ ID NO: 5501237 - DNA, 25 bp, Homo sapien
gaagccaactcatatggtggagacc

SEQ ID NO: 5501238 - DNA, 25 bp, Homo sapien
tgagggagactatccatcggtgcaa

SEQ ID NO: 5501239 - DNA, 25 bp, Homo sapien
cgtggcaccagattacaaatacagc

SEQ ID NO: 5501240 - DNA, 25 bp, Homo sapien
gccacaggaaactggtgcttctggt

SEQ ID NO: 5501241 - DNA, 25 bp, Homo sapien
tctctattacatggccaggcacagt

SEQ ID NO: 5501242 - DNA, 25 bp, Homo sapien
ctgggctgcagtgatgtccataaca

SEQ ID NO: 5501243 - DNA, 25 bp, Homo sapien
atcggtgcaaggtttctgcaggtgt

SEQ ID NO: 5501244 - DNA, 25 bp, Homo sapien
ggcctggctgttcctaccgtggctc

SEQ ID NO: 5501245 - DNA, 25 bp, Homo sapien
ctgactcgcacgtctgctgatggcc

SEQ ID NO: 5501246 - DNA, 25 bp, Homo sapien
tgttcctaccgtggctctgtcctcg

SEQ ID NO: 5501247 - DNA, 25 bp, Homo sapien
cctgtgtcctgactcgcacgtctgc

SEQ ID NO: 5501248 - DNA, 25 bp, Homo sapien
tttccctgcagcggcatagcattcg

SEQ ID NO: 5501249 - DNA, 25 bp, Homo sapien
tgcagcggcatagcattcgtagcag

SEQ ID NO: 5501250 - DNA, 25 bp, Homo sapien
tggcctgtgtcctgactcgcacgtc

SEQ ID NO: 5501251 - DNA, 25 bp, Homo sapien
ctctgtcctcgccagctttccctgc

SEQ ID NO: 5501252 - DNA, 25 bp, Homo sapien
ccctgcagcggcatagcattcgtag

SEQ ID NO: 5501253 - DNA, 25 bp, Homo sapien
gtcctgactcgcacgtctgctgatg

SEQ ID NO: 5501254 - DNA, 25 bp, Homo sapien
tggctgttcctaccgtggctctgtc

SEQ ID NO: 5501255 - DNA, 25 bp, Homo sapien
ctgaattaacagcgggttgacatgc

SEQ ID NO: 5501256 - DNA, 25 bp, Homo sapien
ctcagatgccacctggaaagaggta

SEQ ID NO: 5501257 - DNA, 25 bp, Homo sapien
acatgccaatggccaccctgtggtg

SEQ ID NO: 5501258 - DNA, 25 bp, Homo sapien
ttaacagcaacacacgtctaacgtg

SEQ ID NO: 5501259 - DNA, 25 bp, Homo sapien
tctgctgaaatggcacttctcccaa

SEQ ID NO: 5501260 - DNA, 25 bp, Homo sapien
gccagagctctgaggctagtcctct

SEQ ID NO: 5501261 - DNA, 25 bp, Homo sapien
acctgcagagctgtcgcctcatgca

SEQ ID NO: 5501262 - DNA, 25 bp, Homo sapien
caatgaggtggagcccacttctctg

SEQ ID NO: 5501263 - DNA, 25 bp, Homo sapien
ataacaagcttgctagtcgggcgtg

SEQ ID NO: 5501264 - DNA, 25 bp, Homo sapien
ccacgaaaaagtcttaggaggtcat

SEQ ID NO: 5501265 - DNA, 25 bp, Homo sapien
gcctcatgcatgaccccggccacac

SEQ ID NO: 5501266 - DNA, 25 bp, Homo sapien
ttccaggtggcatctgagtacatca

SEQ ID NO: 5501267 - DNA, 25 bp, Homo sapien
gtgtgttgctgttaagtaaggggaa

SEQ ID NO: 5501268 - DNA, 25 bp, Homo sapien
ccccataaatgggtgtcctcgaggc

SEQ ID NO: 5501269 - DNA, 25 bp, Homo sapien
ggtggccattggcatgtcaacccgc

SEQ ID NO: 5501270 - DNA, 25 bp, Homo sapien
agaggactagcctcagagctctggc

SEQ ID NO: 5501271 - DNA, 25 bp, Homo sapien
ttgggagaagtgccatttcagcaga

SEQ ID NO: 5501272 - DNA, 25 bp, Homo sapien
gtgacagccatcttgctcatgtacc

SEQ ID NO: 5501273 - DNA, 25 bp, Homo sapien
ccatggaaatgacctcctaagactt

SEQ ID NO: 5501274 - DNA, 25 bp, Homo sapien
ggccgtctagaaaaacagaacctgc

SEQ ID NO: 5501275 - DNA, 25 bp, Homo sapien
gaagtgggctccacctcattgggag

SEQ ID NO: 5501276 - DNA, 25 bp, Homo sapien
tccacctcattgggagaagtgccat

SEQ ID NO: 5501277 - DNA, 25 bp, Homo sapien
gcctctcttgcctgggaggatggtt

SEQ ID NO: 5501278 - DNA, 25 bp, Homo sapien
aaccatcctcccaggcaagagaggc

SEQ ID NO: 5501279 - DNA, 25 bp, Homo sapien
cttttaatataggagggtgtaccag

SEQ ID NO: 5501280 - DNA, 25 bp, Homo sapien
agccgtaaatggacacctgcagaaa

SEQ ID NO: 5501281 - DNA, 25 bp, Homo sapien
accttgcaccgatggatagtctccc

SEQ ID NO: 5501282 - DNA, 25 bp, Homo sapien
accagaagcaccagtttcctgtggc

SEQ ID NO: 5501283 - DNA, 25 bp, Homo sapien
cgtgccatcgctgcagaggctgtta

SEQ ID NO: 5501284 - DNA, 25 bp, Homo sapien
gaggtagcccagatcccttcagctc

SEQ ID NO: 5501285 - DNA, 25 bp, Homo sapien
gttatggacatcactgcagcccagt

SEQ ID NO: 5501286 - DNA, 25 bp, Homo sapien
accacaggcgcgcgaatttttgtat

SEQ ID NO: 5501287 - DNA, 25 bp, Homo sapien
gtgcctggccatgtaatagagactt

SEQ ID NO: 5501288 - DNA, 25 bp, Homo sapien
tttgtaatctggtgccacgaggtag

SEQ ID NO: 5501289 - DNA, 25 bp, Homo sapien
ctgatggaagagcattgcttcagcc

SEQ ID NO: 5501290 - DNA, 25 bp, Homo sapien
gaggatgatgcgttatggcctcctc

SEQ ID NO: 5501291 - DNA, 25 bp, Homo sapien
tcagaaaagaggcttatgtacataa

SEQ ID NO: 5501292 - DNA, 25 bp, Homo sapien
atggcctcctcccaaccgagagggc

SEQ ID NO: 5501293 - DNA, 25 bp, Homo sapien
gtgtcagggcagtatatttttataa

SEQ ID NO: 5501294 - DNA, 25 bp, Homo sapien
tgaaatcattattggagatgaacac

SEQ ID NO: 5501295 - DNA, 25 bp, Homo sapien
aaactgaatattgatgtggacatgg

SEQ ID NO: 5501296 - DNA, 25 bp, Homo sapien
acagcaattacaagaatgatgtcat

SEQ ID NO: 5501297 - DNA, 25 bp, Homo sapien
tacaagaatgatgtcatgatcagaa

SEQ ID NO: 5501298 - DNA, 25 bp, Homo sapien
caggagcttgaaatcattattggag

SEQ ID NO: 5501299 - DNA, 25 bp, Homo sapien
atcctgtccaggaccctgaagtgtt

SEQ ID NO: 5501300 - DNA, 25 bp, Homo sapien
catgatcagaaaagaggcttatgta

SEQ ID NO: 5501301 - DNA, 25 bp, Homo sapien
ggctgacgggcgcagtcccgaggtg

SEQ ID NO: 5501302 - DNA, 25 bp, Homo sapien
cacctcgggactgcgcccgtcagcc

SEQ ID NO: 5501303 - DNA, 25 bp, Homo sapien
ggtttggaaacttctagtatctcac

SEQ ID NO: 5501304 - DNA, 25 bp, Homo sapien
ttcataaagcaaggagtaaatggga

SEQ ID NO: 5501305 - DNA, 25 bp, Homo sapien
tcacaagagtaagctattatttttc

SEQ ID NO: 5501306 - DNA, 25 bp, Homo sapien
tgagactcgctaggtttggaaactt

SEQ ID NO: 5501307 - DNA, 25 bp, Homo sapien
agcaaggagtaaatgggatcatatt

SEQ ID NO: 5501308 - DNA, 25 bp, Homo sapien
ctcctatctgtttgtgaagtgaaac

SEQ ID NO: 5501309 - DNA, 25 bp, Homo sapien
aatacgctcacaagagtaagctatt

SEQ ID NO: 5501310 - DNA, 25 bp, Homo sapien
ttgtaatacgctcacaagagtaagc

SEQ ID NO: 5501311 - DNA, 25 bp, Homo sapien
ttactgagactcgctaggtttggaa

SEQ ID NO: 5501312 - DNA, 25 bp, Homo sapien
taaatcatgcttctgatccactatc

SEQ ID NO: 5501313 - DNA, 25 bp, Homo sapien
gaagtgaaacttcttactgagactc

SEQ ID NO: 5501314 - DNA, 25 bp, Homo sapien
ctgttctgcctcctacaatactggt

SEQ ID NO: 5501315 - DNA, 25 bp, Homo sapien
caaacattaattgggcgtggtggtg

SEQ ID NO: 5501316 - DNA, 25 bp, Homo sapien
taccatagtgaaaaagacctctgtt

SEQ ID NO: 5501317 - DNA, 25 bp, Homo sapien
ttactgtttctggctgggtgcagtg

SEQ ID NO: 5501318 - DNA, 25 bp, Homo sapien
caaacttaccatagtgaaaaagacc

SEQ ID NO: 5501319 - DNA, 25 bp, Homo sapien
caatactggtagagattactgtttc

SEQ ID NO: 5501320 - DNA, 25 bp, Homo sapien
agtggcttatgcctgtaaccccagc

SEQ ID NO: 5501321 - DNA, 25 bp, Homo sapien
tctctgtgagccaatttaaattttc

SEQ ID NO: 5501322 - DNA, 25 bp, Homo sapien
ggtgtgtgcctgtaatctgagctac

SEQ ID NO: 5501323 - DNA, 25 bp, Homo sapien
tgggtgcagtggcttatgcctgtaa

SEQ ID NO: 5501324 - DNA, 25 bp, Homo sapien
tcaactgcttattagacatattaac

SEQ ID NO: 5501325 - DNA, 25 bp, Homo sapien
cctcggcagcctttcccctcccgtc

SEQ ID NO: 5501326 - DNA, 25 bp, Homo sapien
tcccactctcacctcctctgcatgc

SEQ ID NO: 5501327 - DNA, 25 bp, Homo sapien
ccaggtttggcccccacaaacttca

SEQ ID NO: 5501328 - DNA, 25 bp, Homo sapien
tgcctttcaccctcttccagccagg

SEQ ID NO: 5501329 - DNA, 25 bp, Homo sapien
gcaggcacccgttacctccctccca

SEQ ID NO: 5501330 - DNA, 25 bp, Homo sapien
cccacaaacttcaggctggggtgcc

SEQ ID NO: 5501331 - DNA, 25 bp, Homo sapien
tcacccacccaagatttgttcaggg

SEQ ID NO: 5501332 - DNA, 25 bp, Homo sapien
tctgcatgctccagtgccagacaag

SEQ ID NO: 5501333 - DNA, 25 bp, Homo sapien
cccaagatttgttcagggtggggag

SEQ ID NO: 5501334 - DNA, 25 bp, Homo sapien
agggtcctcggcagcctttcccctc

SEQ ID NO: 5501335 - DNA, 25 bp, Homo sapien
ttggcccccacaaacttcaggctgg

SEQ ID NO: 5501336 - DNA, 25 bp, Homo sapien
ttcctttcagggtctccactggctg

SEQ ID NO: 5501337 - DNA, 25 bp, Homo sapien
atacagatagaggaagccacatttt

SEQ ID NO: 5501338 - DNA, 25 bp, Homo sapien
taaaacccatttatacagctgcctc

SEQ ID NO: 5501339 - DNA, 25 bp, Homo sapien
tgcggtcgccagaattactcaaagt

SEQ ID NO: 5501340 - DNA, 25 bp, Homo sapien
atcaaaactacgatgtaaaagattc

SEQ ID NO: 5501341 - DNA, 25 bp, Homo sapien
ttggtcacaattagaaaatgagctt

SEQ ID NO: 5501342 - DNA, 25 bp, Homo sapien
taagaaatacagggatacagataga

SEQ ID NO: 5501343 - DNA, 25 bp, Homo sapien
atgtggagaaaaatcatgatgtaaa

SEQ ID NO: 5501344 - DNA, 25 bp, Homo sapien
ccctcatttctctgatgcggtcgcc

SEQ ID NO: 5501345 - DNA, 25 bp, Homo sapien
gggactgatcacgtgagctgtctca

SEQ ID NO: 5501346 - DNA, 25 bp, Homo sapien
agctgcctcagggatctgttataaa

SEQ ID NO: 5501347 - DNA, 25 bp, Homo sapien
tgttggtctaaagttagtacatttc

SEQ ID NO: 5501348 - DNA, 25 bp, Homo sapien
aagacttgtttaaaatcgagaatgt

SEQ ID NO: 5501349 - DNA, 25 bp, Homo sapien
tgggtataattgagacacagctttt

SEQ ID NO: 5501350 - DNA, 25 bp, Homo sapien
taacatgcatttatctaggggcctt

SEQ ID NO: 5501351 - DNA, 25 bp, Homo sapien
gagagaagcaaagatatactctgaa

SEQ ID NO: 5501352 - DNA, 25 bp, Homo sapien
atcgagaatgtcatgattgatgaaa

SEQ ID NO: 5501353 - DNA, 25 bp, Homo sapien
gacgcgcaagaatcgcccgattccg

SEQ ID NO: 5501354 - DNA, 25 bp, Homo sapien
aagtaatatcttaggaacatcattt

SEQ ID NO: 5501355 - DNA, 25 bp, Homo sapien
taaaaatcagtctgggtataattga

SEQ ID NO: 5501356 - DNA, 25 bp, Homo sapien
gatgaaaagaactggttatcaatat

SEQ ID NO: 5501357 - DNA, 25 bp, Homo sapien
atttatctaggggcctttgtcagaa

SEQ ID NO: 5501358 - DNA, 25 bp, Homo sapien
attgtaccgaatgtgcagtaaggag

SEQ ID NO: 5501359 - DNA, 25 bp, Homo sapien
tcatattgagatgtgcctaaactgc

SEQ ID NO: 5501360 - DNA, 25 bp, Homo sapien
aacagaggatgtaagttattctcat

SEQ ID NO: 5501361 - DNA, 25 bp, Homo sapien
cccaactgggtttaacagaggatgt

SEQ ID NO: 5501362 - DNA, 25 bp, Homo sapien
atatacaggaagcacataagacact

SEQ ID NO: 5501363 - DNA, 25 bp, Homo sapien
gcctaaactgcaagtgatgtgttcc

SEQ ID NO: 5501364 - DNA, 25 bp, Homo sapien
taagtgagattatatacaggaagca

SEQ ID NO: 5501365 - DNA, 25 bp, Homo sapien
gcaagtgatgtgttccgtgcatacc

SEQ ID NO: 5501366 - DNA, 25 bp, Homo sapien
gcagtaaggaggctgtgtttatctc

SEQ ID NO: 5501367 - DNA, 25 bp, Homo sapien
taagacactggcacattgtaccgaa

SEQ ID NO: 5501368 - DNA, 25 bp, Homo sapien
ccgtgcatacccaatgcagtggctc

SEQ ID NO: 5501369 - DNA, 25 bp, Homo sapien
tatagtcaaaccctagaacctagct

SEQ ID NO: 5501370 - DNA, 25 bp, Homo sapien
tcccctctcaggttcccttctcacc

SEQ ID NO: 5501371 - DNA, 25 bp, Homo sapien
ccccatgcttaggggtagacatccc

SEQ ID NO: 5501372 - DNA, 25 bp, Homo sapien
ctggacccactttaatcaatggcac

SEQ ID NO: 5501373 - DNA, 25 bp, Homo sapien
ggtagacatcccctatagtcaaacc

SEQ ID NO: 5501374 - DNA, 25 bp, Homo sapien
cctcactctgcccccttccccatgc

SEQ ID NO: 5501375 - DNA, 25 bp, Homo sapien
ccccaccgctcctggacccacttta

SEQ ID NO: 5501376 - DNA, 25 bp, Homo sapien
cctagaacctagctcccctctcagg

SEQ ID NO: 5501377 - DNA, 25 bp, Homo sapien
ctttaatcaatggcacagtcctcac

SEQ ID NO: 5501378 - DNA, 25 bp, Homo sapien
cccttccccatgcttaggggtagac

SEQ ID NO: 5501379 - DNA, 25 bp, Homo sapien
atcaatggcacagtcctcactctgc

SEQ ID NO: 5501380 - DNA, 25 bp, Homo sapien
aacaatatttaaatggacgaaggat

SEQ ID NO: 5501381 - DNA, 25 bp, Homo sapien
ggacgaaggataagctaagatatcc

SEQ ID NO: 5501382 - DNA, 25 bp, Homo sapien
aagctaagatatccataaaagcact

SEQ ID NO: 5501383 - DNA, 25 bp, Homo sapien
tctttgccatctttgttactgtctt

SEQ ID NO: 5501384 - DNA, 25 bp, Homo sapien
aggcatgttcccggctaaaactaac

SEQ ID NO: 5501385 - DNA, 25 bp, Homo sapien
tatttaaatggacgaaggataagct

SEQ ID NO: 5501386 - DNA, 25 bp, Homo sapien
ggactacaggcatgttcccggctaa

SEQ ID NO: 5501387 - DNA, 25 bp, Homo sapien
taaaagcactttcaggtaatacagc

SEQ ID NO: 5501388 - DNA, 25 bp, Homo sapien
tacaggcatgttcccggctaaaact

SEQ ID NO: 5501389 - DNA, 25 bp, Homo sapien
gcactttcaggtaatacagcatact

SEQ ID NO: 5501390 - DNA, 25 bp, Homo sapien
aactcctggtctcaagtggtctgcc

SEQ ID NO: 5501391 - DNA, 25 bp, Homo sapien
ccgcacctttcgctcagggtccccg

SEQ ID NO: 5501392 - DNA, 25 bp, Homo sapien
tccacagccttggaactctggcagg

SEQ ID NO: 5501393 - DNA, 25 bp, Homo sapien
gcctccgcacctttcgctcagggtc

SEQ ID NO: 5501394 - DNA, 25 bp, Homo sapien
aggccgcctccgcacctttcgctca

SEQ ID NO: 5501395 - DNA, 25 bp, Homo sapien
cacagccttggaactctggcagggg

SEQ ID NO: 5501396 - DNA, 25 bp, Homo sapien
tgggaagattcgaatgtgcccagag

SEQ ID NO: 5501397 - DNA, 25 bp, Homo sapien
ctccgcacctttcgctcagggtccc

SEQ ID NO: 5501398 - DNA, 25 bp, Homo sapien
ttgggaagattcgaatgtgcccaga

SEQ ID NO: 5501399 - DNA, 25 bp, Homo sapien
aacctgtcctacgcccaacaaccat

SEQ ID NO: 5501400 - DNA, 25 bp, Homo sapien
gccaccttctctggggtccacagcc

SEQ ID NO: 5501401 - DNA, 25 bp, Homo sapien
acctgccaccttctctggggtccac

SEQ ID NO: 5501402 - DNA, 25 bp, Homo sapien
aattcctgacctcgggtgatctgcc

SEQ ID NO: 5501403 - DNA, 25 bp, Homo sapien
tttgcatgttagaaacctggggagg

SEQ ID NO: 5501404 - DNA, 25 bp, Homo sapien
gctggaattacaggtccctgccacc

SEQ ID NO: 5501405 - DNA, 25 bp, Homo sapien
gggaggcccaggaattccatatcct

SEQ ID NO: 5501406 - DNA, 25 bp, Homo sapien
ctgaggtgctttctgccagtgactc

SEQ ID NO: 5501407 - DNA, 25 bp, Homo sapien
tccacctccagggttcaagcaattc

SEQ ID NO: 5501408 - DNA, 25 bp, Homo sapien
ccaccttggactcccaaagggctgg

SEQ ID NO: 5501409 - DNA, 25 bp, Homo sapien
tatgattctagagcagaagggtgta

SEQ ID NO: 5501410 - DNA, 25 bp, Homo sapien
tgggctacagtgcctggcctgctta

SEQ ID NO: 5501411 - DNA, 25 bp, Homo sapien
gaagggtgtacaatctccctggcac

SEQ ID NO: 5501412 - DNA, 25 bp, Homo sapien
attacaggcatgggctacagtgcct

SEQ ID NO: 5501413 - DNA, 25 bp, Homo sapien
aaaaccactgtgcaaccaattcaac

SEQ ID NO: 5501414 - DNA, 25 bp, Homo sapien
ccagcctcatttctattaggggaaa

SEQ ID NO: 5501415 - DNA, 25 bp, Homo sapien
actcctgccttcaagtgatccgccc

SEQ ID NO: 5501416 - DNA, 25 bp, Homo sapien
tcctgcctcagcctcgcaagtaact

SEQ ID NO: 5501417 - DNA, 25 bp, Homo sapien
gcaaccaattcaaccagtcactctc

SEQ ID NO: 5501418 - DNA, 25 bp, Homo sapien
aaaaagctaataacaacctgagact

SEQ ID NO: 5501419 - DNA, 25 bp, Homo sapien
gagccaccacacccagcctcatttc

SEQ ID NO: 5501420 - DNA, 25 bp, Homo sapien
atctttagttagaaatagtacttat

SEQ ID NO: 5501421 - DNA, 25 bp, Homo sapien
agattatactattgaaaaccactgt

SEQ ID NO: 5501422 - DNA, 25 bp, Homo sapien
tcgcaagtaactgggattacaggca

SEQ ID NO: 5501423 - DNA, 25 bp, Homo sapien
aacctgagacttacaaagattatac

SEQ ID NO: 5501424 - DNA, 25 bp, Homo sapien
gctccccctcgcccagtctgtccca

SEQ ID NO: 5501425 - DNA, 25 bp, Homo sapien
tgtcccatgtgagtgttgtatcttg

SEQ ID NO: 5501426 - DNA, 25 bp, Homo sapien
cagggttcgccatgtttctcaggct

SEQ ID NO: 5501427 - DNA, 25 bp, Homo sapien
ctgggggtggttcttaagcatcccc

SEQ ID NO: 5501428 - DNA, 25 bp, Homo sapien
tcgcccagtctgtcccatgtgagtg

SEQ ID NO: 5501429 - DNA, 25 bp, Homo sapien
gtctgtcccatgtgagtgttgtatc

SEQ ID NO: 5501430 - DNA, 25 bp, Homo sapien
gatggaggtatcgctctatagccca

SEQ ID NO: 5501431 - DNA, 25 bp, Homo sapien
gcccagtctgtcccatgtgagtgtt

SEQ ID NO: 5501432 - DNA, 25 bp, Homo sapien
gagatggaggtatcgctctatagcc

SEQ ID NO: 5501433 - DNA, 25 bp, Homo sapien
ccccaaatctgtatggatgtatatc

SEQ ID NO: 5501434 - DNA, 25 bp, Homo sapien
cccctcgcccagtctgtcccatgtg

SEQ ID NO: 5501435 - DNA, 25 bp, Homo sapien
attgcttgaacctaaggaggctggt

SEQ ID NO: 5501436 - DNA, 25 bp, Homo sapien
ctggagaagaaagggtactttttga

SEQ ID NO: 5501437 - DNA, 25 bp, Homo sapien
ttgagacaagcctgaccaacaggga

SEQ ID NO: 5501438 - DNA, 25 bp, Homo sapien
aggcaggttgtttgttggagtaaaa

SEQ ID NO: 5501439 - DNA, 25 bp, Homo sapien
ataaggcaggttgtttgttggagta

SEQ ID NO: 5501440 - DNA, 25 bp, Homo sapien
aaatacattataggctgagcacggt

SEQ ID NO: 5501441 - DNA, 25 bp, Homo sapien
atgatttaaatctttgggaaatggg

SEQ ID NO: 5501442 - DNA, 25 bp, Homo sapien
cccagtactttgggaggtcaaggca

SEQ ID NO: 5501443 - DNA, 25 bp, Homo sapien
gagtttgagacaagcctgaccaaca

SEQ ID NO: 5501444 - DNA, 25 bp, Homo sapien
agaagaaagggtactttttgaatga

SEQ ID NO: 5501445 - DNA, 25 bp, Homo sapien
gtaaaaatacattataggctgagca

SEQ ID NO: 5501446 - DNA, 25 bp, Homo sapien
tagattgattaccaacctgaacacc

SEQ ID NO: 5501447 - DNA, 25 bp, Homo sapien
aacctgaacacctttggagccaaaa

SEQ ID NO: 5501448 - DNA, 25 bp, Homo sapien
ttatagcatcagtgtacttagtaac

SEQ ID NO: 5501449 - DNA, 25 bp, Homo sapien
tcaataagagtaatttgataatgtc

SEQ ID NO: 5501450 - DNA, 25 bp, Homo sapien
ctaaactacagtctcttggactctc

SEQ ID NO: 5501451 - DNA, 25 bp, Homo sapien
atgaagagattgtggcttatcagtt

SEQ ID NO: 5501452 - DNA, 25 bp, Homo sapien
caccagtgtaatgggtcaatgaatt

SEQ ID NO: 5501453 - DNA, 25 bp, Homo sapien
tccctggttgactcattacaataac

SEQ ID NO: 5501454 - DNA, 25 bp, Homo sapien
caataacaaatgaagagattgtggc

SEQ ID NO: 5501455 - DNA, 25 bp, Homo sapien
tttggagccaaaattcaccagtgta

SEQ ID NO: 5501456 - DNA, 25 bp, Homo sapien
ttatccaggccataactcaaattca

SEQ ID NO: 5501457 - DNA, 25 bp, Homo sapien
ctcgggtgagcttaaatccagaggg

SEQ ID NO: 5501458 - DNA, 25 bp, Homo sapien
cttctccagcagccgcatggtgtca

SEQ ID NO: 5501459 - DNA, 25 bp, Homo sapien
caagccgttcttctccagcagccgc

SEQ ID NO: 5501460 - DNA, 25 bp, Homo sapien
ctgcggtctacaacgcctgccctca

SEQ ID NO: 5501461 - DNA, 25 bp, Homo sapien
cagagggcactataaacccagcccc

SEQ ID NO: 5501462 - DNA, 25 bp, Homo sapien
ggtgagcttaaatccagagggcact

SEQ ID NO: 5501463 - DNA, 25 bp, Homo sapien
tcatccatcctcgggtgagcttaaa

SEQ ID NO: 5501464 - DNA, 25 bp, Homo sapien
gcccctcccctatgctggcctgcgg

SEQ ID NO: 5501465 - DNA, 25 bp, Homo sapien
ttaaatccagagggcactataaacc

SEQ ID NO: 5501466 - DNA, 25 bp, Homo sapien
aatgggaaagtcaagccgttcttct

SEQ ID NO: 5501467 - DNA, 25 bp, Homo sapien
gtgtcatccccgcacaggctcgtga

SEQ ID NO: 5501468 - DNA, 25 bp, Homo sapien
aacagtctcatttctgtctgagcac

SEQ ID NO: 5501469 - DNA, 25 bp, Homo sapien
tgagcacagggagttttaagttcct

SEQ ID NO: 5501470 - DNA, 25 bp, Homo sapien
ggatgggaaaggctgtatcttaaag

SEQ ID NO: 5501471 - DNA, 25 bp, Homo sapien
ttcctttgtagattaggatgggaaa

SEQ ID NO: 5501472 - DNA, 25 bp, Homo sapien
gggaaaggctgtatcttaaaggcat

SEQ ID NO: 5501473 - DNA, 25 bp, Homo sapien
tcaagccctatccatctcgcaattc

SEQ ID NO: 5501474 - DNA, 25 bp, Homo sapien
ctgtctgagcacagggagttttaag

SEQ ID NO: 5501475 - DNA, 25 bp, Homo sapien
cctttgtagattaggatgggaaagg

SEQ ID NO: 5501476 - DNA, 25 bp, Homo sapien
aacagcacagaagcaggctgtaaca

SEQ ID NO: 5501477 - DNA, 25 bp, Homo sapien
acagaagcaggctgtaacagtctca

SEQ ID NO: 5501478 - DNA, 25 bp, Homo sapien
gctgggggcactcaagccctatcca

SEQ ID NO: 5501479 - DNA, 25 bp, Homo sapien
atatagttgacaacctaacttttca

SEQ ID NO: 5501480 - DNA, 25 bp, Homo sapien
tgaaaagttaggttgtcaactatat

SEQ ID NO: 5501481 - DNA, 25 bp, Homo sapien
agaacaaacaagtggaattgtcaac

SEQ ID NO: 5501482 - DNA, 25 bp, Homo sapien
tagcagtaattgtatattaacttgc

SEQ ID NO: 5501483 - DNA, 25 bp, Homo sapien
catttattgagactcattcagtgtc

SEQ ID NO: 5501484 - DNA, 25 bp, Homo sapien
gtctctagaaatgtgagaatgcaca

SEQ ID NO: 5501485 - DNA, 25 bp, Homo sapien
ctggtctctagaaatgtgagaatgc

SEQ ID NO: 5501486 - DNA, 25 bp, Homo sapien
ttcagtgtctcaatttatggaactt

SEQ ID NO: 5501487 - DNA, 25 bp, Homo sapien
ggctcggaccgcaccttgatttcag

SEQ ID NO: 5501488 - DNA, 25 bp, Homo sapien
acctaggaaaataatactcccaatc

SEQ ID NO: 5501489 - DNA, 25 bp, Homo sapien
tgtggctcggaccgcaccttgattt

SEQ ID NO: 5501490 - DNA, 25 bp, Homo sapien
cacaaaattggaggtatgtaccttt

SEQ ID NO: 5501491 - DNA, 25 bp, Homo sapien
acaagtggaattgtcaacacaacac

SEQ ID NO: 5501492 - DNA, 25 bp, Homo sapien
aatccatagaaatggcaatgctttc

SEQ ID NO: 5501493 - DNA, 25 bp, Homo sapien
gagtgtagtggcactatctaggctc

SEQ ID NO: 5501494 - DNA, 25 bp, Homo sapien
tcccaagaagctgggacttcaggca

SEQ ID NO: 5501495 - DNA, 25 bp, Homo sapien
tgagctcaagtgattctccgcccac

SEQ ID NO: 5501496 - DNA, 25 bp, Homo sapien
cctagtggctaaaagcacgagccac

SEQ ID NO: 5501497 - DNA, 25 bp, Homo sapien
caggttcaagcaattatgctgcctc

SEQ ID NO: 5501498 - DNA, 25 bp, Homo sapien
gcactatctaggctcactgcaaccc

SEQ ID NO: 5501499 - DNA, 25 bp, Homo sapien
cacgcccagcctgcaacgctttctt

SEQ ID NO: 5501500 - DNA, 25 bp, Homo sapien
agcctcccaagaagctgggacttca

SEQ ID NO: 5501501 - DNA, 25 bp, Homo sapien
gtggctaaaagcacgagccacggag

SEQ ID NO: 5501502 - DNA, 25 bp, Homo sapien
tttacacagcaaagcctagtggcta

SEQ ID NO: 5501503 - DNA, 25 bp, Homo sapien
ggtccactatgataatcatgtaggt

SEQ ID NO: 5501504 - DNA, 25 bp, Homo sapien
acctacatgattatcatagtggacc

SEQ ID NO: 5501505 - DNA, 25 bp, Homo sapien
gtcctgctcagtccgagccgcctga

SEQ ID NO: 5501506 - DNA, 25 bp, Homo sapien
ttctgtcgtcttctcgcagccgtgt

SEQ ID NO: 5501507 - DNA, 25 bp, Homo sapien
cgtcttctcgcagccgtgtcgcgcg

SEQ ID NO: 5501508 - DNA, 25 bp, Homo sapien
tccagtagcatctggtaagattggg

SEQ ID NO: 5501509 - DNA, 25 bp, Homo sapien
tgtcgtcttctcgcagccgtgtcgc

SEQ ID NO: 5501510 - DNA, 25 bp, Homo sapien
cagtagcatctggtaagattgggat

SEQ ID NO: 5501511 - DNA, 25 bp, Homo sapien
agcatctggtaagattgggatgggt

SEQ ID NO: 5501512 - DNA, 25 bp, Homo sapien
gccgcctgaccacactctccccttc

SEQ ID NO: 5501513 - DNA, 25 bp, Homo sapien
tctgtcgtcttctcgcagccgtgtc

SEQ ID NO: 5501514 - DNA, 25 bp, Homo sapien
gaccacactctccccttctgtcgtc

SEQ ID NO: 5501515 - DNA, 25 bp, Homo sapien
gtagcatctggtaagattgggatgg

SEQ ID NO: 5501516 - DNA, 25 bp, Homo sapien
agcctcaaactccagggctcaagcg

SEQ ID NO: 5501517 - DNA, 25 bp, Homo sapien
cactggtgccatcatagctcactgc

SEQ ID NO: 5501518 - DNA, 25 bp, Homo sapien
gttgcccaggctgcacattctctta

SEQ ID NO: 5501519 - DNA, 25 bp, Homo sapien
gtgcacactgccaagcttggctaat

SEQ ID NO: 5501520 - DNA, 25 bp, Homo sapien
tcactgcagcctcaaactccagggc

SEQ ID NO: 5501521 - DNA, 25 bp, Homo sapien
atctgaacccagagcattccttttc

SEQ ID NO: 5501522 - DNA, 25 bp, Homo sapien
tcttccctaggcagtcatcagaatc

SEQ ID NO: 5501523 - DNA, 25 bp, Homo sapien
ttccagttcaaaatgacaccatcat

SEQ ID NO: 5501524 - DNA, 25 bp, Homo sapien
tgcccaggctgaaatgcactggtgc

SEQ ID NO: 5501525 - DNA, 25 bp, Homo sapien
ccctaggcagtcatcagaatcttca

SEQ ID NO: 5501526 - DNA, 25 bp, Homo sapien
cagggtttcatttgtgttgcccagg

SEQ ID NO: 5501527 - DNA, 25 bp, Homo sapien
gacccaaaggccctccgcgtccggc

SEQ ID NO: 5501528 - DNA, 25 bp, Homo sapien
gccggacgcggagggcctttgggtc

SEQ ID NO: 5501529 - DNA, 25 bp, Homo sapien
ggtccacccgtatcgacgcggtgcc

SEQ ID NO: 5501530 - DNA, 25 bp, Homo sapien
ggcaccgcgtcgatacgggtggacc

SEQ ID NO: 5501531 - DNA, 25 bp, Homo sapien
aactgttattacatacattacatgt

SEQ ID NO: 5501532 - DNA, 25 bp, Homo sapien
acatgtaatgtatgtaataacagtt

SEQ ID NO: 5501533 - DNA, 25 bp, Homo sapien
ttcgtcgaggacaaatgtgtcgaag

SEQ ID NO: 5501534 - DNA, 25 bp, Homo sapien
cttcgacacatttgtcctcgacgaa

SEQ ID NO: 5501535 - DNA, 25 bp, Homo sapien
ggaaggggtacctgagaaccgtcca

SEQ ID NO: 5501536 - DNA, 25 bp, Homo sapien
tggacggttctcaggtaccccttcc

SEQ ID NO: 5501537 - DNA, 25 bp, Homo sapien
acctctcgtgtctcttagggtaaag

SEQ ID NO: 5501538 - DNA, 25 bp, Homo sapien
ctttaccctaagagacacgagaggt

SEQ ID NO: 5501539 - DNA, 25 bp, Homo sapien
tccacaacccgctccacggacgtcg

SEQ ID NO: 5501540 - DNA, 25 bp, Homo sapien
cgacgtccgtggagcgggttgtgga

SEQ ID NO: 5501541 - DNA, 25 bp, Homo sapien
cgcgacccctgcgtccgacccctcc

SEQ ID NO: 5501542 - DNA, 25 bp, Homo sapien
ggaggggtcggacgcaggggtcgcg

SEQ ID NO: 5501543 - DNA, 25 bp, Homo sapien
cgcacgccccgcgacccctgcgtcc

SEQ ID NO: 5501544 - DNA, 25 bp, Homo sapien
ggacgcaggggtcgcggggcgtgcg

SEQ ID NO: 5501545 - DNA, 25 bp, Homo sapien
agcgtctcggagtctcgggagtaac

SEQ ID NO: 5501546 - DNA, 25 bp, Homo sapien
gttactcccgagactccgagacgct

SEQ ID NO: 5501547 - DNA, 25 bp, Homo sapien
cccactcctcctggaataggccccc

SEQ ID NO: 5501548 - DNA, 25 bp, Homo sapien
gagggcatctgagctagatcacatc

SEQ ID NO: 5501549 - DNA, 25 bp, Homo sapien
ggccaggcataacctggggatagct

SEQ ID NO: 5501550 - DNA, 25 bp, Homo sapien
ggaggggcacagttctattgccacc

SEQ ID NO: 5501551 - DNA, 25 bp, Homo sapien
acagcattgctcccgtgatccgtac

SEQ ID NO: 5501552 - DNA, 25 bp, Homo sapien
tctaggaaacaaaccaccagtgtac

SEQ ID NO: 5501553 - DNA, 25 bp, Homo sapien
ccctggctggactcccgtctgttga

SEQ ID NO: 5501554 - DNA, 25 bp, Homo sapien
attgggtatttgtcaggtcctggcc

SEQ ID NO: 5501555 - DNA, 25 bp, Homo sapien
gggcagatggacacattaactcgct

SEQ ID NO: 5501556 - DNA, 25 bp, Homo sapien
agagatccagagacacaatgggttt

SEQ ID NO: 5501557 - DNA, 25 bp, Homo sapien
atgattgtccgcatggtggagtaag

SEQ ID NO: 5501558 - DNA, 25 bp, Homo sapien
ttaccgaaagctccgagtcttttag

SEQ ID NO: 5501559 - DNA, 25 bp, Homo sapien
ctaaaagactcggagctttcggtaa

SEQ ID NO: 5501560 - DNA, 25 bp, Homo sapien
gacattggggtgacggaacgggacc

SEQ ID NO: 5501561 - DNA, 25 bp, Homo sapien
ggtcccgttccgtcaccccaatgtc

SEQ ID NO: 5501562 - DNA, 25 bp, Homo sapien
gcccctcgggccacagctgggagtg

SEQ ID NO: 5501563 - DNA, 25 bp, Homo sapien
cactcccagctgtggcccgaggggc

SEQ ID NO: 5501564 - DNA, 25 bp, Homo sapien
ggagagaggttcggcccctcgggcc

SEQ ID NO: 5501565 - DNA, 25 bp, Homo sapien
ggcccgaggggccgaacctctctcc

SEQ ID NO: 5501566 - DNA, 25 bp, Homo sapien
gagactcagttaacagagcttattt

SEQ ID NO: 5501567 - DNA, 25 bp, Homo sapien
aaataagctctgttaactgagtctc

SEQ ID NO: 5501568 - DNA, 25 bp, Homo sapien
tcataattatcaaaagtcttaaaga

SEQ ID NO: 5501569 - DNA, 25 bp, Homo sapien
tctttaagacttttgataattatga

SEQ ID NO: 5501570 - DNA, 25 bp, Homo sapien
ggaaccgtttgagtgtaccccactg

SEQ ID NO: 5501571 - DNA, 25 bp, Homo sapien
cagtggggtacactcaaacggttcc

SEQ ID NO: 5501572 - DNA, 25 bp, Homo sapien
aataagtctcagtggtttccatgcc

SEQ ID NO: 5501573 - DNA, 25 bp, Homo sapien
ggcatggaaaccactgagacttatt

SEQ ID NO: 5501574 - DNA, 25 bp, Homo sapien
aagatgtcgtctatccgagtacacg

SEQ ID NO: 5501575 - DNA, 25 bp, Homo sapien
cgtgtactcggatagacgacatctt

SEQ ID NO: 5501576 - DNA, 25 bp, Homo sapien
cgcgaggcttcaccactccacgtgt

SEQ ID NO: 5501577 - DNA, 25 bp, Homo sapien
acacgtggagtggtgaagcctcgcg

SEQ ID NO: 5501578 - DNA, 25 bp, Homo sapien
aagagtatttacactcggaggagta

SEQ ID NO: 5501579 - DNA, 25 bp, Homo sapien
tactcctccgagtgtaaatactctt

SEQ ID NO: 5501580 - DNA, 25 bp, Homo sapien
accgttcgagaaacaaacagtttga

SEQ ID NO: 5501581 - DNA, 25 bp, Homo sapien
tcaaactgtttgtttctcgaacggt

SEQ ID NO: 5501582 - DNA, 25 bp, Homo sapien
aagtgtctctaaagaaactcattgt

SEQ ID NO: 5501583 - DNA, 25 bp, Homo sapien
acaatgagtttctttagagacactt

SEQ ID NO: 5501584 - DNA, 25 bp, Homo sapien
gatgagttcgaaatgtagtaggtat

SEQ ID NO: 5501585 - DNA, 25 bp, Homo sapien
atacctactacatttcgaactcatc

SEQ ID NO: 5501586 - DNA, 25 bp, Homo sapien
tggcaccttctgttgcccggttaag

SEQ ID NO: 5501587 - DNA, 25 bp, Homo sapien
cttaaccgggcaacagaaggtgcca

SEQ ID NO: 5501588 - DNA, 25 bp, Homo sapien
cggctaaaataaccgtgatataaaa

SEQ ID NO: 5501589 - DNA, 25 bp, Homo sapien
ttttatatcacggttattttagccg

SEQ ID NO: 5501590 - DNA, 25 bp, Homo sapien
atcctgggttgacgaggggcctccg

SEQ ID NO: 5501591 - DNA, 25 bp, Homo sapien
cggaggcccctcgtcaacccaggat

SEQ ID NO: 5501592 - DNA, 25 bp, Homo sapien
acatgtgcgagtcttggtgtgtcac

SEQ ID NO: 5501593 - DNA, 25 bp, Homo sapien
gtgacacaccaagactcgcacatgt

SEQ ID NO: 5501594 - DNA, 25 bp, Homo sapien
tgaccacagcaaagaggtcattgaa

SEQ ID NO: 5501595 - DNA, 25 bp, Homo sapien
ttcaatgacctctttgctgtggtca

SEQ ID NO: 5501596 - DNA, 25 bp, Homo sapien
actttccagtgaccacagcaaagag

SEQ ID NO: 5501597 - DNA, 25 bp, Homo sapien
ctctttgctgtggtcactggaaagt

SEQ ID NO: 5501598 - DNA, 25 bp, Homo sapien
cggtggcgtcggtccaggccgatcg

SEQ ID NO: 5501599 - DNA, 25 bp, Homo sapien
cgatcggcctggaccgacgccaccg

SEQ ID NO: 5501600 - DNA, 25 bp, Homo sapien
ccaccagcattctagccaggagtac

SEQ ID NO: 5501601 - DNA, 25 bp, Homo sapien
agagaaattcgcaaaggactagaca

SEQ ID NO: 5501602 - DNA, 25 bp, Homo sapien
agcaagagcagcacctaaatctcca

SEQ ID NO: 5501603 - DNA, 25 bp, Homo sapien
gagtgtggacaagtcactgagctaa

SEQ ID NO: 5501604 - DNA, 25 bp, Homo sapien
aacgtaagtgctaagacgagtgtgg

SEQ ID NO: 5501605 - DNA, 25 bp, Homo sapien
caggagtacaaaataggagctcttc

SEQ ID NO: 5501606 - DNA, 25 bp, Homo sapien
agaggcaactggaaatagtgcaact

SEQ ID NO: 5501607 - DNA, 25 bp, Homo sapien
ggcccaggagccttcaagccatcca

SEQ ID NO: 5501608 - DNA, 25 bp, Homo sapien
tgtggggaaacttcataactgtgcc

SEQ ID NO: 5501609 - DNA, 25 bp, Homo sapien
gggaatgactccaagggtttgtgac

SEQ ID NO: 5501610 - DNA, 25 bp, Homo sapien
ctgagctaatgaagaatagacccac

SEQ ID NO: 5501611 - DNA, 25 bp, Homo sapien
gacgcgggaccacactgccggggtc

SEQ ID NO: 5501612 - DNA, 25 bp, Homo sapien
gaccccggcagtgtggtcccgcgtc

SEQ ID NO: 5501613 - DNA, 25 bp, Homo sapien
atagagacggtaatctaacagtcgt

SEQ ID NO: 5501614 - DNA, 25 bp, Homo sapien
acgactgttagattaccgtctctat

SEQ ID NO: 5501615 - DNA, 25 bp, Homo sapien
aatacaaacatatagatagagacgg

SEQ ID NO: 5501616 - DNA, 25 bp, Homo sapien
ccgtctctatctatatgtttgtatt

SEQ ID NO: 5501617 - DNA, 25 bp, Homo sapien
gaagactctagactcctgtacctgt

SEQ ID NO: 5501618 - DNA, 25 bp, Homo sapien
acaggtacaggagtctagagtcttc

SEQ ID NO: 5501619 - DNA, 25 bp, Homo sapien
atataatatcagtgctttggccatc

SEQ ID NO: 5501620 - DNA, 25 bp, Homo sapien
tctacaagacggcagctagagatta

SEQ ID NO: 5501621 - DNA, 25 bp, Homo sapien
tcgttcatatctacaagacggcagc

SEQ ID NO: 5501622 - DNA, 25 bp, Homo sapien
tacgaaatgtaactcttcaagtgga

SEQ ID NO: 5501623 - DNA, 25 bp, Homo sapien
atacatgcttggtgaacattcgttc

SEQ ID NO: 5501624 - DNA, 25 bp, Homo sapien
cacgcacctaatatatgtcgattcc

SEQ ID NO: 5501625 - DNA, 25 bp, Homo sapien
gcttattagttgcagtgtacaatgc

SEQ ID NO: 5501626 - DNA, 25 bp, Homo sapien
tcctacaagcaattagcattacatc

SEQ ID NO: 5501627 - DNA, 25 bp, Homo sapien
ttttagaaacagtacacgcacctaa

SEQ ID NO: 5501628 - DNA, 25 bp, Homo sapien
caaaagagtgtagtaaaattagcaa

SEQ ID NO: 5501629 - DNA, 25 bp, Homo sapien
ctttggccatcttaagttaaaggcc

SEQ ID NO: 5501630 - DNA, 25 bp, Homo sapien
actgccactatgtacaaaagatctg

SEQ ID NO: 5501631 - DNA, 25 bp, Homo sapien
actagtgcttcaacaagcagggctc

SEQ ID NO: 5501632 - DNA, 25 bp, Homo sapien
agatctgatgataaatgtgcacaca

SEQ ID NO: 5501633 - DNA, 25 bp, Homo sapien
gtgagatgctaagacataatgtgac

SEQ ID NO: 5501634 - DNA, 25 bp, Homo sapien
aagcagggctctgtagattggtatc

SEQ ID NO: 5501635 - DNA, 25 bp, Homo sapien
caatagatgaatggacccccgattg

SEQ ID NO: 5501636 - DNA, 25 bp, Homo sapien
gggtgcaaccagcaaatacaaaggc

SEQ ID NO: 5501637 - DNA, 25 bp, Homo sapien
acatgtgcaaaatgtatggcattca

SEQ ID NO: 5501638 - DNA, 25 bp, Homo sapien
aaaaaacaacataaaggcaatagat

SEQ ID NO: 5501639 - DNA, 25 bp, Homo sapien
tcccgatcagctacaatactgccac

SEQ ID NO: 5501640 - DNA, 25 bp, Homo sapien
tatggattgatttcaggggtgcaac

SEQ ID NO: 5501641 - DNA, 25 bp, Homo sapien
ccaggccgtactgctccctaagaag

SEQ ID NO: 5501642 - DNA, 25 bp, Homo sapien
gcacctgtgaactcaaaaggctctt

SEQ ID NO: 5501643 - DNA, 25 bp, Homo sapien
cccgtctacatggctgcggtcctcg

SEQ ID NO: 5501644 - DNA, 25 bp, Homo sapien
cctcgagtatctgaccgccgagatc

SEQ ID NO: 5501645 - DNA, 25 bp, Homo sapien
actgctccctaagaagacggagagt

SEQ ID NO: 5501646 - DNA, 25 bp, Homo sapien
ggctgcggtcctcgagtatctgacc

SEQ ID NO: 5501647 - DNA, 25 bp, Homo sapien
tgctgggcaaagtcaccatcgccca

SEQ ID NO: 5501648 - DNA, 25 bp, Homo sapien
acgcgcatcatccctcgtcacctcc

SEQ ID NO: 5501649 - DNA, 25 bp, Homo sapien
gctgtcatgtctggtcgtggcaagc

SEQ ID NO: 5501650 - DNA, 25 bp, Homo sapien
tcttttcagagccacccacgttttc

SEQ ID NO: 5501651 - DNA, 25 bp, Homo sapien
tctcggtgactactatcgctgtcat

SEQ ID NO: 5501652 - DNA, 25 bp, Homo sapien
ccgtcggagattccagagaccacct

SEQ ID NO: 5501653 - DNA, 25 bp, Homo sapien
aggtggtctctggaatctccgacgg

SEQ ID NO: 5501654 - DNA, 25 bp, Homo sapien
taataatccaaagtggagacccaac

SEQ ID NO: 5501655 - DNA, 25 bp, Homo sapien
agatgaaaatttcagtccacattta

SEQ ID NO: 5501656 - DNA, 25 bp, Homo sapien
ttgctttaggccacgtatatgatac

SEQ ID NO: 5501657 - DNA, 25 bp, Homo sapien
caaaatacacaccttgctttaggcc

SEQ ID NO: 5501658 - DNA, 25 bp, Homo sapien
aaaggccactgggatatttagtatt

SEQ ID NO: 5501659 - DNA, 25 bp, Homo sapien
caatgaaatccacgtatactcaggc

SEQ ID NO: 5501660 - DNA, 25 bp, Homo sapien
aaaaaggccactgggatatttagta

SEQ ID NO: 5501661 - DNA, 25 bp, Homo sapien
attacctgttaacatagtggggaaa

SEQ ID NO: 5501662 - DNA, 25 bp, Homo sapien
ttagtatttgtccagatgcaaaaca

SEQ ID NO: 5501663 - DNA, 25 bp, Homo sapien
atagattctcaaacaaaagatgaaa

SEQ ID NO: 5501664 - DNA, 25 bp, Homo sapien
taggccacgtatatgatacacttca

SEQ ID NO: 5501665 - DNA, 25 bp, Homo sapien
tttccgtaactcataaatatttagt

SEQ ID NO: 5501666 - DNA, 25 bp, Homo sapien
actaaatatttatgagttacggaaa

SEQ ID NO: 5501667 - DNA, 25 bp, Homo sapien
ccggaaggcctgtggtcgaaacgaa

SEQ ID NO: 5501668 - DNA, 25 bp, Homo sapien
ttcgtttcgaccacaggccttccgg

SEQ ID NO: 5501669 - DNA, 25 bp, Homo sapien
actctgcgtcatcgccgggacgtga

SEQ ID NO: 5501670 - DNA, 25 bp, Homo sapien
tcacgtcccggcgatgacgcagagt

SEQ ID NO: 5501671 - DNA, 25 bp, Homo sapien
tctgtacaatctgggcaaaccgact

SEQ ID NO: 5501672 - DNA, 25 bp, Homo sapien
gcggtctacacagctggagagacaa

SEQ ID NO: 5501673 - DNA, 25 bp, Homo sapien
gtggtgtcaatgaagcggtctacac

SEQ ID NO: 5501674 - DNA, 25 bp, Homo sapien
gacaatgggttgatagccttccccc

SEQ ID NO: 5501675 - DNA, 25 bp, Homo sapien
gagagtctaggcgattccctggctt

SEQ ID NO: 5501676 - DNA, 25 bp, Homo sapien
ctgatgctgatctgacaatgggttg

SEQ ID NO: 5501677 - DNA, 25 bp, Homo sapien
ggggatggcctactgccctcctttc

SEQ ID NO: 5501678 - DNA, 25 bp, Homo sapien
ggagagacaattttcagtgcgagag

SEQ ID NO: 5501679 - DNA, 25 bp, Homo sapien
tctgtcattctcctgggggatggcc

SEQ ID NO: 5501680 - DNA, 25 bp, Homo sapien
agcaccaacagacttgataacagcc

SEQ ID NO: 5501681 - DNA, 25 bp, Homo sapien
accaggcgctgcaactccgcttcat

SEQ ID NO: 5501682 - DNA, 25 bp, Homo sapien
acgggacagaacacgtcgtctcgaa

SEQ ID NO: 5501683 - DNA, 25 bp, Homo sapien
ttcgagacgacgtgttctgtcccgt

SEQ ID NO: 5501684 - DNA, 25 bp, Homo sapien
gagggacgtcggccggggcaccctg

SEQ ID NO: 5501685 - DNA, 25 bp, Homo sapien
cagggtgccccggccgacgtccctc

SEQ ID NO: 5501686 - DNA, 25 bp, Homo sapien
tcagttcgactacacagaggctacg

SEQ ID NO: 5501687 - DNA, 25 bp, Homo sapien
cgtagcctctgtgtagtcgaactga

SEQ ID NO: 5501688 - DNA, 25 bp, Homo sapien
aatctccaggccacttcctccgact

SEQ ID NO: 5501689 - DNA, 25 bp, Homo sapien
agtcggaggaagtggcctggagatt

SEQ ID NO: 5501690 - DNA, 25 bp, Homo sapien
cgtcccttctggtcgcagtttcctt

SEQ ID NO: 5501691 - DNA, 25 bp, Homo sapien
aaggaaactgcgaccagaagggacg

SEQ ID NO: 5501692 - DNA, 25 bp, Homo sapien
aagggtgtttcctctgactttcgta

SEQ ID NO: 5501693 - DNA, 25 bp, Homo sapien
tacgaaagtcagaggaaacaccctt

SEQ ID NO: 5501694 - DNA, 25 bp, Homo sapien
gtccccgtagaggtagccagtacgg

SEQ ID NO: 5501695 - DNA, 25 bp, Homo sapien
ccgtactggctacctctacggggac

SEQ ID NO: 5501696 - DNA, 25 bp, Homo sapien
tgtacctcgtattaaatcaggaaag

SEQ ID NO: 5501697 - DNA, 25 bp, Homo sapien
ctttcctgatttaatacgaggtaca

SEQ ID NO: 5501698 - DNA, 25 bp, Homo sapien
gggcaatgttgataattccgagaag

SEQ ID NO: 5501699 - DNA, 25 bp, Homo sapien
cttctcggaattatcaacattgccc

SEQ ID NO: 5501700 - DNA, 25 bp, Homo sapien
gggccacggaaaggttaagaacaga

SEQ ID NO: 5501701 - DNA, 25 bp, Homo sapien
tctgttcttaacctttccgtggccc

SEQ ID NO: 5501702 - DNA, 25 bp, Homo sapien
tagccgtaccggtcttcagttacct

SEQ ID NO: 5501703 - DNA, 25 bp, Homo sapien
aggtaactgaagaccggtacggcta

SEQ ID NO: 5501704 - DNA, 25 bp, Homo sapien
cttctccgacctccagtcggtactt

SEQ ID NO: 5501705 - DNA, 25 bp, Homo sapien
aagtaccgactggaggtcggagaag

SEQ ID NO: 5501706 - DNA, 25 bp, Homo sapien
gaggacggcgcgctcaggacggacc

SEQ ID NO: 5501707 - DNA, 25 bp, Homo sapien
ggtccgtcctgagcgcgccgtcctc

SEQ ID NO: 5501708 - DNA, 25 bp, Homo sapien
ggcgcgctcaggacggacccgggcg

SEQ ID NO: 5501709 - DNA, 25 bp, Homo sapien
cgcccgggtccgtcctgagcgcgcc

SEQ ID NO: 5501710 - DNA, 25 bp, Homo sapien
gacggcgcgctcaggacggacccgg

SEQ ID NO: 5501711 - DNA, 25 bp, Homo sapien
ccgggtccgtcctgagcgcgccgtc

SEQ ID NO: 5501712 - DNA, 25 bp, Homo sapien
gagaactctctattagctcattgac

SEQ ID NO: 5501713 - DNA, 25 bp, Homo sapien
gtcaatgagctaatagagagttctc

SEQ ID NO: 5501714 - DNA, 25 bp, Homo sapien
tttagagaaatgacctcttgtaacg

SEQ ID NO: 5501715 - DNA, 25 bp, Homo sapien
cgttacaagaggtcatttctctaaa

SEQ ID NO: 5501716 - DNA, 25 bp, Homo sapien
actccggcacatatggcgtgaagag

SEQ ID NO: 5501717 - DNA, 25 bp, Homo sapien
ctcttcacgccatatgtgccggagt

SEQ ID NO: 5501718 - DNA, 25 bp, Homo sapien
tgtattatcattataagaaggacct

SEQ ID NO: 5501719 - DNA, 25 bp, Homo sapien
aggtccttcttataatgataataca

SEQ ID NO: 5501720 - DNA, 25 bp, Homo sapien
actttctccccgagctatatctccc

SEQ ID NO: 5501721 - DNA, 25 bp, Homo sapien
gggagatatagctcggggagaaagt

SEQ ID NO: 5501722 - DNA, 25 bp, Homo sapien
gggtggagccactgtgagcccttcc

SEQ ID NO: 5501723 - DNA, 25 bp, Homo sapien
ggaagggctcacagtggctccaccc

SEQ ID NO: 5501724 - DNA, 25 bp, Homo sapien
ctacactggtgctcctggcgcgcgg

SEQ ID NO: 5501725 - DNA, 25 bp, Homo sapien
ccgcgcgccaggagcaccagtgtag

SEQ ID NO: 5501726 - DNA, 25 bp, Homo sapien
agagctcatgacacacctggaggca

SEQ ID NO: 5501727 - DNA, 25 bp, Homo sapien
atcgatcctgagatccaggacggca

SEQ ID NO: 5501728 - DNA, 25 bp, Homo sapien
cccctgatgacagcaaggctcaggc

SEQ ID NO: 5501729 - DNA, 25 bp, Homo sapien
atcaagggctgccacgatcacctca

SEQ ID NO: 5501730 - DNA, 25 bp, Homo sapien
gcgatgccccattccgtgaccctgc

SEQ ID NO: 5501731 - DNA, 25 bp, Homo sapien
atccaggccatcaatggtgagagca

SEQ ID NO: 5501732 - DNA, 25 bp, Homo sapien
caggagacctgatccaggccatcaa

SEQ ID NO: 5501733 - DNA, 25 bp, Homo sapien
ctccatatggacaaccccctcgctt

SEQ ID NO: 5501734 - DNA, 25 bp, Homo sapien
ccatctcacgggtccatgctggcag

SEQ ID NO: 5501735 - DNA, 25 bp, Homo sapien
gcagaccaagcctgggatctccata

SEQ ID NO: 5501736 - DNA, 25 bp, Homo sapien
ctcaggcacacaggatccacatcga

SEQ ID NO: 5501737 - DNA, 25 bp, Homo sapien
gcggcgcaggaatccccgcccgagc

SEQ ID NO: 5501738 - DNA, 25 bp, Homo sapien
gctcgggcggggattcctgcgccgc

SEQ ID NO: 5501739 - DNA, 25 bp, Homo sapien
ctggtggagcgtcgcggcgcaggaa

SEQ ID NO: 5501740 - DNA, 25 bp, Homo sapien
ttcctgcgccgcgacgctccaccag

SEQ ID NO: 5501741 - DNA, 25 bp, Homo sapien
aataataataactcactaaattcgg

SEQ ID NO: 5501742 - DNA, 25 bp, Homo sapien
ccgaatttagtgagttattattatt

SEQ ID NO: 5501743 - DNA, 25 bp, Homo sapien
tggtgaacgtagtagaaattggaaa

SEQ ID NO: 5501744 - DNA, 25 bp, Homo sapien
ccggaagaagtgcatttaaactgaa

SEQ ID NO: 5501745 - DNA, 25 bp, Homo sapien
ataaaaattaaccggaagaagtgca

SEQ ID NO: 5501746 - DNA, 25 bp, Homo sapien
ttcaagcaactgactagatttccct

SEQ ID NO: 5501747 - DNA, 25 bp, Homo sapien
actaggcgagtaaccatcattgaac

SEQ ID NO: 5501748 - DNA, 25 bp, Homo sapien
tcttactagagatggtgaacgtagt

SEQ ID NO: 5501749 - DNA, 25 bp, Homo sapien
taagcactgtcaaagctgcagctct

SEQ ID NO: 5501750 - DNA, 25 bp, Homo sapien
acagaaaatgacaccaggatacact

SEQ ID NO: 5501751 - DNA, 25 bp, Homo sapien
cagaaggaggtgtcatctgctctgt

SEQ ID NO: 5501752 - DNA, 25 bp, Homo sapien
cattgaacatgctgtgtgccaaatc

SEQ ID NO: 5501753 - DNA, 25 bp, Homo sapien
atctgctctgtgtccaaaggtttct

SEQ ID NO: 5501754 - DNA, 25 bp, Homo sapien
aacaagttatcgatagtaaaaatag

SEQ ID NO: 5501755 - DNA, 25 bp, Homo sapien
ctatttttactatcgataacttgtt

SEQ ID NO: 5501756 - DNA, 25 bp, Homo sapien
cgccctctcgccgcggggtccgccc

SEQ ID NO: 5501757 - DNA, 25 bp, Homo sapien
gggcggaccccgcggcgagagggcg

SEQ ID NO: 5501758 - DNA, 25 bp, Homo sapien
tcgttaagatattctctataaatta

SEQ ID NO: 5501759 - DNA, 25 bp, Homo sapien
taatttatagagaatatcttaacga

SEQ ID NO: 5501760 - DNA, 25 bp, Homo sapien
gttaagatattctctataaattaaa

SEQ ID NO: 5501761 - DNA, 25 bp, Homo sapien
tttaatttatagagaatatcttaac

SEQ ID NO: 5501762 - DNA, 25 bp, Homo sapien
cgttaagatattctctataaattaa

SEQ ID NO: 5501763 - DNA, 25 bp, Homo sapien
ttaatttatagagaatatcttaacg

SEQ ID NO: 5501764 - DNA, 25 bp, Homo sapien
ctatcatgtccgttcaacgtcttat

SEQ ID NO: 5501765 - DNA, 25 bp, Homo sapien
ataagacgttgaacggacatgatag

SEQ ID NO: 5501766 - DNA, 25 bp, Homo sapien
cccggtcctcctacgtcggtgtgtg

SEQ ID NO: 5501767 - DNA, 25 bp, Homo sapien
cacacaccgacgtaggaggaccggg

SEQ ID NO: 5501768 - DNA, 25 bp, Homo sapien
actcccaaagtgtatgtgtacccac

SEQ ID NO: 5501769 - DNA, 25 bp, Homo sapien
gtgggtacacatacactttgggagt

SEQ ID NO: 5501770 - DNA, 25 bp, Homo sapien
gacccagcgggccacttcctcgtac

SEQ ID NO: 5501771 - DNA, 25 bp, Homo sapien
gtacgaggaagtggcccgctgggtc

SEQ ID NO: 5501772 - DNA, 25 bp, Homo sapien
ttgagagacaaagggatataaagac

SEQ ID NO: 5501773 - DNA, 25 bp, Homo sapien
gtctttatatccctttgtctctcaa

SEQ ID NO: 5501774 - DNA, 25 bp, Homo sapien
cgggagacccctgagggcgcgacgg

SEQ ID NO: 5501775 - DNA, 25 bp, Homo sapien
ccgtcgcgccctcaggggtctcccg

SEQ ID NO: 5501776 - DNA, 25 bp, Homo sapien
ccgagtcccgccactggtcgcaggg

SEQ ID NO: 5501777 - DNA, 25 bp, Homo sapien
ccctgcgaccagtggcgggactcgg

SEQ ID NO: 5501778 - DNA, 25 bp, Homo sapien
gcctcactgagcagaaagtaggttc

SEQ ID NO: 5501779 - DNA, 25 bp, Homo sapien
ctcgcataggcttaagaatggagtc

SEQ ID NO: 5501780 - DNA, 25 bp, Homo sapien
ctgaggctttggcattgtaggtagg

SEQ ID NO: 5501781 - DNA, 25 bp, Homo sapien
gagtccttaaatggtggtcaggtgt

SEQ ID NO: 5501782 - DNA, 25 bp, Homo sapien
ttggcccaagtgcaagccttctgcc

SEQ ID NO: 5501783 - DNA, 25 bp, Homo sapien
cctaaaacacttacagaggggagga

SEQ ID NO: 5501784 - DNA, 25 bp, Homo sapien
gaggataaggactccaggtttctgg

SEQ ID NO: 5501785 - DNA, 25 bp, Homo sapien
agtaggttccccagggagaattcca

SEQ ID NO: 5501786 - DNA, 25 bp, Homo sapien
ctgtccagtggaccttaggcccttt

SEQ ID NO: 5501787 - DNA, 25 bp, Homo sapien
ggagaattccaacacagggaccctg

SEQ ID NO: 5501788 - DNA, 25 bp, Homo sapien
gccctctgctgcatgggcagcgtgg

SEQ ID NO: 5501789 - DNA, 25 bp, Homo sapien
agattgtaccaactggccctcggtt

SEQ ID NO: 5501790 - DNA, 25 bp, Homo sapien
aaccgagggccagttggtacaatct

SEQ ID NO: 5501791 - DNA, 25 bp, Homo sapien
ttgccccatcgtctagggacctctc

SEQ ID NO: 5501792 - DNA, 25 bp, Homo sapien
gagaggtccctagacgatggggcaa

SEQ ID NO: 5501793 - DNA, 25 bp, Homo sapien
tcacaggagcccagtgtcgagagtc

SEQ ID NO: 5501794 - DNA, 25 bp, Homo sapien
gactctcgacactgggctcctgtga

SEQ ID NO: 5501795 - DNA, 25 bp, Homo sapien
gagtctacttacatggaccggacga

SEQ ID NO: 5501796 - DNA, 25 bp, Homo sapien
tcgtccggtccatgtaagtagactc

SEQ ID NO: 5501797 - DNA, 25 bp, Homo sapien
gtgaacaagaagcccagattgcaaa

SEQ ID NO: 5501798 - DNA, 25 bp, Homo sapien
cgcgtgcgtcaggttccaggcacgc

SEQ ID NO: 5501799 - DNA, 25 bp, Homo sapien
agaggcggtacacctgccgccagtg

SEQ ID NO: 5501800 - DNA, 25 bp, Homo sapien
aacaaagtcggcctcgtagagttta

SEQ ID NO: 5501801 - DNA, 25 bp, Homo sapien
gctttcagtctcggaggaggttttc

SEQ ID NO: 5501802 - DNA, 25 bp, Homo sapien
gtactcaatggatagaggcagtgga

SEQ ID NO: 5501803 - DNA, 25 bp, Homo sapien
cgagaaaaagcaacgcgaaagcttt

SEQ ID NO: 5501804 - DNA, 25 bp, Homo sapien
ggcgtcctcgtccagagtctccagc

SEQ ID NO: 5501805 - DNA, 25 bp, Homo sapien
cccacgaagtcgtagtcgatctggc

SEQ ID NO: 5501806 - DNA, 25 bp, Homo sapien
gcgccagcttctccgtgtgcgggtc

SEQ ID NO: 5501807 - DNA, 25 bp, Homo sapien
gatcttggcgaaccagtcctcctcc

SEQ ID NO: 5501808 - DNA, 25 bp, Homo sapien
gttctcagtcgtttatttcatggaa

SEQ ID NO: 5501809 - DNA, 25 bp, Homo sapien
ttccatgaaataaacgactgagaac

SEQ ID NO: 5501810 - DNA, 25 bp, Homo sapien
actaagtaccatcttgtgaaatgat

SEQ ID NO: 5501811 - DNA, 25 bp, Homo sapien
atcatttcacaagatggtacttagt

SEQ ID NO: 5501812 - DNA, 25 bp, Homo sapien
caccgatactgaggtctttttaaac

SEQ ID NO: 5501813 - DNA, 25 bp, Homo sapien
gtttaaaaagacctcagtatcggtg

SEQ ID NO: 5501814 - DNA, 25 bp, Homo sapien
gtcgctaccgcccagacacgaccga

SEQ ID NO: 5501815 - DNA, 25 bp, Homo sapien
tcggtcgtgtctgggcggtagcgac

SEQ ID NO: 5501816 - DNA, 25 bp, Homo sapien
ttggacacaagatgaaaatggacat

SEQ ID NO: 5501817 - DNA, 25 bp, Homo sapien
atgtccattttcatcttgtgtccaa

SEQ ID NO: 5501818 - DNA, 25 bp, Homo sapien
gaagaggaaccctcaagcccacggg

SEQ ID NO: 5501819 - DNA, 25 bp, Homo sapien
cccgtgggcttgagggttcctcttc

SEQ ID NO: 5501820 - DNA, 25 bp, Homo sapien
tcctttctcgaatcagatgagtctg

SEQ ID NO: 5501821 - DNA, 25 bp, Homo sapien
cagactcatctgattcgagaaagga

SEQ ID NO: 5501822 - DNA, 25 bp, Homo sapien
ggccaagaagattgaagccagagaa

SEQ ID NO: 5501823 - DNA, 25 bp, Homo sapien
gggctttggtcgatggaccttgcac

SEQ ID NO: 5501824 - DNA, 25 bp, Homo sapien
taaagttccagcaaaaaagatcacc

SEQ ID NO: 5501825 - DNA, 25 bp, Homo sapien
gcagaaggcagacatcaatacaaaa

SEQ ID NO: 5501826 - DNA, 25 bp, Homo sapien
tgcccaccagaagtatgtccgacaa

SEQ ID NO: 5501827 - DNA, 25 bp, Homo sapien
ccttgcactcaagtgaggagacagg

SEQ ID NO: 5501828 - DNA, 25 bp, Homo sapien
gcgagtaaaaaggctccagcccaga

SEQ ID NO: 5501829 - DNA, 25 bp, Homo sapien
gccgggtggcctatgtctcctttgg

SEQ ID NO: 5501830 - DNA, 25 bp, Homo sapien
cggaaaattggtcgcgattgtagat

SEQ ID NO: 5501831 - DNA, 25 bp, Homo sapien
atacaaaatgggcagccacacgatg

SEQ ID NO: 5501832 - DNA, 25 bp, Homo sapien
aagcacctggtactaagggtactgc

SEQ ID NO: 5501833 - DNA, 25 bp, Homo sapien
ctaccaagacagacactactacggg

SEQ ID NO: 5501834 - DNA, 25 bp, Homo sapien
cccgtagtagtgtctgtcttggtag

SEQ ID NO: 5501835 - DNA, 25 bp, Homo sapien
taggtgtagacatcgactctgaggt

SEQ ID NO: 5501836 - DNA, 25 bp, Homo sapien
acctcagagtcgatgtctacaccta

SEQ ID NO: 5501837 - DNA, 25 bp, Homo sapien
ggttggccgaagatttctcgcgact

SEQ ID NO: 5501838 - DNA, 25 bp, Homo sapien
agtcgcgagaaatcttcggccaacc

SEQ ID NO: 5501839 - DNA, 25 bp, Homo sapien
actgaaaagtttgaatatattagac

SEQ ID NO: 5501840 - DNA, 25 bp, Homo sapien
gtctaatatattcaaacttttcagt

SEQ ID NO: 5501841 - DNA, 25 bp, Homo sapien
cgtccgaggaactgagacctcggga

SEQ ID NO: 5501842 - DNA, 25 bp, Homo sapien
tcccgaggtctcagttcctcggacg

SEQ ID NO: 5501843 - DNA, 25 bp, Homo sapien
gtgggaggagcaccccgaccaggcc

SEQ ID NO: 5501844 - DNA, 25 bp, Homo sapien
ggcctggtcggggtgctcctcccac

SEQ ID NO: 5501845 - DNA, 25 bp, Homo sapien
agggatttgagttttcgtggcacac

SEQ ID NO: 5501846 - DNA, 25 bp, Homo sapien
ctggaagcaggcatagcccttccca

SEQ ID NO: 5501847 - DNA, 25 bp, Homo sapien
tttgagggtctcattcaaggtgaat

SEQ ID NO: 5501848 - DNA, 25 bp, Homo sapien
tatgctcccgaatatgcctctgctc

SEQ ID NO: 5501849 - DNA, 25 bp, Homo sapien
tttggtggagagatacaaaaatctc

SEQ ID NO: 5501850 - DNA, 25 bp, Homo sapien
gcaatactgacagacgaactccttc

SEQ ID NO: 5501851 - DNA, 25 bp, Homo sapien
tgccactcaaaggacaacattttcc

SEQ ID NO: 5501852 - DNA, 25 bp, Homo sapien
actccttcaagcccaggtggatgcg

SEQ ID NO: 5501853 - DNA, 25 bp, Homo sapien
tttccttgcaccgaaaagcaccgtc

SEQ ID NO: 5501854 - DNA, 25 bp, Homo sapien
cagaactgacagtggtaacgctttt

SEQ ID NO: 5501855 - DNA, 25 bp, Homo sapien
tgcaaattttggggcactggaagca

SEQ ID NO: 5501856 - DNA, 25 bp, Homo sapien
gtggtctcgtttcgccaacccagac

SEQ ID NO: 5501857 - DNA, 25 bp, Homo sapien
gtctgggttggcgaaacgagaccac

SEQ ID NO: 5501858 - DNA, 25 bp, Homo sapien
ttattctgtgtcagagaggaggtct

SEQ ID NO: 5501859 - DNA, 25 bp, Homo sapien
agacctcctctctgacacagaataa

SEQ ID NO: 5501860 - DNA, 25 bp, Homo sapien
gaatcgtaccgtcttaggcgaaggt

SEQ ID NO: 5501861 - DNA, 25 bp, Homo sapien
accttcgcctaagacggtacgattc

SEQ ID NO: 5501862 - DNA, 25 bp, Homo sapien
acctcttccctggtgaagtgggttc

SEQ ID NO: 5501863 - DNA, 25 bp, Homo sapien
gaacccacttcaccagggaagaggt

SEQ ID NO: 5501864 - DNA, 25 bp, Homo sapien
acagtcttgaaataaatgtagaaat

SEQ ID NO: 5501865 - DNA, 25 bp, Homo sapien
atgaaacacttaaaaatgcacacca

SEQ ID NO: 5501866 - DNA, 25 bp, Homo sapien
tatacagtataaacacattctcacc

SEQ ID NO: 5501867 - DNA, 25 bp, Homo sapien
gtagattggattttcgctgcatttt

SEQ ID NO: 5501868 - DNA, 25 bp, Homo sapien
gaagttagcacagcagaccaactct

SEQ ID NO: 5501869 - DNA, 25 bp, Homo sapien
acatgcacttgaaaaagtcactgaa

SEQ ID NO: 5501870 - DNA, 25 bp, Homo sapien
aaagaagccactggactctcgttcc

SEQ ID NO: 5501871 - DNA, 25 bp, Homo sapien
agctttagaaaagaggcattaggtt

SEQ ID NO: 5501872 - DNA, 25 bp, Homo sapien
ttggaataagaaacatgaagttagc

SEQ ID NO: 5501873 - DNA, 25 bp, Homo sapien
tgctagtaaagaagccactggactc

SEQ ID NO: 5501874 - DNA, 25 bp, Homo sapien
ttaaaactgcaatcacacagcaaac

SEQ ID NO: 5501875 - DNA, 25 bp, Homo sapien
gcatccactacaaaagggctggtgt

SEQ ID NO: 5501876 - DNA, 25 bp, Homo sapien
tcaacgccagacgcttgttatggag

SEQ ID NO: 5501877 - DNA, 25 bp, Homo sapien
aacacagtaaagcatggatccagtc

SEQ ID NO: 5501878 - DNA, 25 bp, Homo sapien
atgggaatgaacacctgctggtgac

SEQ ID NO: 5501879 - DNA, 25 bp, Homo sapien
ctgtttgtttgtaggggcaaagagt

SEQ ID NO: 5501880 - DNA, 25 bp, Homo sapien
aagaatggttctggcaagtactgct

SEQ ID NO: 5501881 - DNA, 25 bp, Homo sapien
aataaaacgaggttctgccatggct

SEQ ID NO: 5501882 - DNA, 25 bp, Homo sapien
ggcccctgtaagcagggccagagtc

SEQ ID NO: 5501883 - DNA, 25 bp, Homo sapien
tgggcctggcaactacacagatcca

SEQ ID NO: 5501884 - DNA, 25 bp, Homo sapien
cgcccgagctcctgaatcccaagaa

SEQ ID NO: 5501885 - DNA, 25 bp, Homo sapien
ggctaagccttgtggaaaccagacc

SEQ ID NO: 5501886 - DNA, 25 bp, Homo sapien
atatcgtgaaagaatgctgaaagtc

SEQ ID NO: 5501887 - DNA, 25 bp, Homo sapien
acagccgaggtaaaagcccttaatg

SEQ ID NO: 5501888 - DNA, 25 bp, Homo sapien
tcagctgaggtaggacacttcttga

SEQ ID NO: 5501889 - DNA, 25 bp, Homo sapien
caaatgcatgactggatgtggacag

SEQ ID NO: 5501890 - DNA, 25 bp, Homo sapien
gtgggagagcaccgttctttcggga

SEQ ID NO: 5501891 - DNA, 25 bp, Homo sapien
ctttgaaatagagtaagagtgggag

SEQ ID NO: 5501892 - DNA, 25 bp, Homo sapien
aaataaatgctcccgaggctgagac

SEQ ID NO: 5501893 - DNA, 25 bp, Homo sapien
gtcatcacatggtaccctgggctga

SEQ ID NO: 5501894 - DNA, 25 bp, Homo sapien
acctctatggggcacctacaggaat

SEQ ID NO: 5501895 - DNA, 25 bp, Homo sapien
atgaaacgaaccagatgagaaagtt

SEQ ID NO: 5501896 - DNA, 25 bp, Homo sapien
tgaaatctcaaggtagcacatgctc

SEQ ID NO: 5501897 - DNA, 25 bp, Homo sapien
aaaatctgtagtaggttttgcttat

SEQ ID NO: 5501898 - DNA, 25 bp, Homo sapien
ataagcaaaacctactacagatttt

SEQ ID NO: 5501899 - DNA, 25 bp, Homo sapien
gatgaaggcgcggtgccagtgcggg

SEQ ID NO: 5501900 - DNA, 25 bp, Homo sapien
cccgcactggcaccgcgccttcatc

SEQ ID NO: 5501901 - DNA, 25 bp, Homo sapien
tcccgcgacttcggccggtcgggag

SEQ ID NO: 5501902 - DNA, 25 bp, Homo sapien
ctcccgaccggccgaagtcgcggga

SEQ ID NO: 5501903 - DNA, 25 bp, Homo sapien
ccgaagtcggaaggctctgcagcga

SEQ ID NO: 5501904 - DNA, 25 bp, Homo sapien
tcgctgcagagccttccgacttcgg

SEQ ID NO: 5501905 - DNA, 25 bp, Homo sapien
aacaaatctgagtaaagagtcgaac

SEQ ID NO: 5501906 - DNA, 25 bp, Homo sapien
gttcgactctttactcagatttgtt

SEQ ID NO: 5501907 - DNA, 25 bp, Homo sapien
ggccgaaaggaagcgacgcgattcc

SEQ ID NO: 5501908 - DNA, 25 bp, Homo sapien
ggaatcgcgtcgcttcctttcggcc

SEQ ID NO: 5501909 - DNA, 25 bp, Homo sapien
gacgtcgacggggacacccgggctg

SEQ ID NO: 5501910 - DNA, 25 bp, Homo sapien
cagcccgggtgtccccgtcgacgtc

SEQ ID NO: 5501911 - DNA, 25 bp, Homo sapien
gagaccagagagggaggaacgcagg

SEQ ID NO: 5501912 - DNA, 25 bp, Homo sapien
cctgcgttcctccctctctggtctc

SEQ ID NO: 5501913 - DNA, 25 bp, Homo sapien
agagattggctattctttggtctcg

SEQ ID NO: 5501914 - DNA, 25 bp, Homo sapien
cgagaccaaagaatagccaatctct

SEQ ID NO: 5501915 - DNA, 25 bp, Homo sapien
gtctgtgggacggaagtagtaggag

SEQ ID NO: 5501916 - DNA, 25 bp, Homo sapien
ctcctactacttccgtcccacagac

SEQ ID NO: 5501917 - DNA, 25 bp, Homo sapien
gaccccgggagccggccgcgacgtc

SEQ ID NO: 5501918 - DNA, 25 bp, Homo sapien
gacgtcgcggccggctcccggggtc

SEQ ID NO: 5501919 - DNA, 25 bp, Homo sapien
gtccctccgcagcacatccacgatg

SEQ ID NO: 5501920 - DNA, 25 bp, Homo sapien
gggaccttcccagtactagtgcgca

SEQ ID NO: 5501921 - DNA, 25 bp, Homo sapien
cgctgggattacgacttccagcagg

SEQ ID NO: 5501922 - DNA, 25 bp, Homo sapien
actcggtgcccgcgttctaccgcga

SEQ ID NO: 5501923 - DNA, 25 bp, Homo sapien
acatccacgatggagcgtcttgtcg

SEQ ID NO: 5501924 - DNA, 25 bp, Homo sapien
cagcacatccacgatggagcgtctt

SEQ ID NO: 5501925 - DNA, 25 bp, Homo sapien
ctctcgctgcccgcgtttgcgcagc

SEQ ID NO: 5501926 - DNA, 25 bp, Homo sapien
gtcctctcctctctcgctgcccgcg

SEQ ID NO: 5501927 - DNA, 25 bp, Homo sapien
cagtactagtgcgcaccagcgcctg

SEQ ID NO: 5501928 - DNA, 25 bp, Homo sapien
accagaaccgctgggattacgactt

SEQ ID NO: 5501929 - DNA, 25 bp, Homo sapien
ccgcgttctaccgcgagacggtgca

SEQ ID NO: 5501930 - DNA, 25 bp, Homo sapien
gaaaggacgccctgaggtacccgga

SEQ ID NO: 5501931 - DNA, 25 bp, Homo sapien
tccgggtacctcagggcgtcctttc

SEQ ID NO: 5501932 - DNA, 25 bp, Homo sapien
ttcctgcatctagataataacatag

SEQ ID NO: 5501933 - DNA, 25 bp, Homo sapien
ctatgttattatctagatgcaggaa

SEQ ID NO: 5501934 - DNA, 25 bp, Homo sapien
acgacattactgatttagtctttca

SEQ ID NO: 5501935 - DNA, 25 bp, Homo sapien
tgaaagactaaatcagtaatgtcgt

SEQ ID NO: 5501936 - DNA, 25 bp, Homo sapien
gggtcagaggcggaacttcctcgac

SEQ ID NO: 5501937 - DNA, 25 bp, Homo sapien
gtcgaggaagttccgcctctgaccc

SEQ ID NO: 5501938 - DNA, 25 bp, Homo sapien
cgcggagaaactcgggggactggcc

SEQ ID NO: 5501939 - DNA, 25 bp, Homo sapien
ggccagtcccccgagtttctccgcg

SEQ ID NO: 5501940 - DNA, 25 bp, Homo sapien
atttcatatctgaatatttcgtaaa

SEQ ID NO: 5501941 - DNA, 25 bp, Homo sapien
tttacgaaatattcagatatgaaat

SEQ ID NO: 5501942 - DNA, 25 bp, Homo sapien
aatttcatatctgaatatttcgtaa

SEQ ID NO: 5501943 - DNA, 25 bp, Homo sapien
ttacgaaatattcagatatgaaatt

SEQ ID NO: 5501944 - DNA, 25 bp, Homo sapien
agaaacttgtatgcaagggtgattt

SEQ ID NO: 5501945 - DNA, 25 bp, Homo sapien
aacagtgaaacaaatatactagctt

SEQ ID NO: 5501946 - DNA, 25 bp, Homo sapien
agaacatcactggcaactagaaact

SEQ ID NO: 5501947 - DNA, 25 bp, Homo sapien
gttgtagatatttccagagaactta

SEQ ID NO: 5501948 - DNA, 25 bp, Homo sapien
agagaacttatgtagaagcaacaca

SEQ ID NO: 5501949 - DNA, 25 bp, Homo sapien
aatagagaatagacttgtaacaata

SEQ ID NO: 5501950 - DNA, 25 bp, Homo sapien
tggggtatgaattccaggatgtgtc

SEQ ID NO: 5501951 - DNA, 25 bp, Homo sapien
ttgttctacaaagaatgagcatttc

SEQ ID NO: 5501952 - DNA, 25 bp, Homo sapien
cacacatataaaagtcatgctctgc

SEQ ID NO: 5501953 - DNA, 25 bp, Homo sapien
tataaccgcagagtaaataaaatat

SEQ ID NO: 5501954 - DNA, 25 bp, Homo sapien
actgtccttgtggggtatgaattcc

SEQ ID NO: 5501955 - DNA, 25 bp, Homo sapien
gtctttgaagacagttaggtaatta

SEQ ID NO: 5501956 - DNA, 25 bp, Homo sapien
taattacctaactgtcttcaaagac

SEQ ID NO: 5501957 - DNA, 25 bp, Homo sapien
taagactaacaggtccgtcgacact

SEQ ID NO: 5501958 - DNA, 25 bp, Homo sapien
agtgtcgacggacctgttagtctta

SEQ ID NO: 5501959 - DNA, 25 bp, Homo sapien
gggcgctgcggcacgggccgaggcc

SEQ ID NO: 5501960 - DNA, 25 bp, Homo sapien
ggcctcggcccgtgccgcagcgccc

SEQ ID NO: 5501961 - DNA, 25 bp, Homo sapien
cgcgtcgagcccctgctcggcggag

SEQ ID NO: 5501962 - DNA, 25 bp, Homo sapien
ctccgccgagcaggggctcgacgcg

SEQ ID NO: 5501963 - DNA, 25 bp, Homo sapien
tcggtacttgctcgtcgagtttaac

SEQ ID NO: 5501964 - DNA, 25 bp, Homo sapien
gttaaactcgacgagcaagtaccga

SEQ ID NO: 5501965 - DNA, 25 bp, Homo sapien
tacaaaggtcaacattcccggacta

SEQ ID NO: 5501966 - DNA, 25 bp, Homo sapien
tagtccgggaatgttgacctttgta

SEQ ID NO: 5501967 - DNA, 25 bp, Homo sapien
gaaataatctaagtaatcgtgttaa

SEQ ID NO: 5501968 - DNA, 25 bp, Homo sapien
ttaacacgattacttagattatttc

SEQ ID NO: 5501969 - DNA, 25 bp, Homo sapien
catgtcagtcagcactctggccttc

SEQ ID NO: 5501970 - DNA, 25 bp, Homo sapien
cagtgtctgctgtgattgagatgcg

SEQ ID NO: 5501971 - DNA, 25 bp, Homo sapien
cagtttcccttggtccagacagtcc

SEQ ID NO: 5501972 - DNA, 25 bp, Homo sapien
tgcccctacctccactgccagaccc

SEQ ID NO: 5501973 - DNA, 25 bp, Homo sapien
tggccgtcacagtgtctgctgtgat

SEQ ID NO: 5501974 - DNA, 25 bp, Homo sapien
tgacgggttctcaggcagtcctgat

SEQ ID NO: 5501975 - DNA, 25 bp, Homo sapien
cagacagtcctgtttgtggagtgca

SEQ ID NO: 5501976 - DNA, 25 bp, Homo sapien
gcagccgtggctaggattccacttc

SEQ ID NO: 5501977 - DNA, 25 bp, Homo sapien
gattttacctgccgtggggtctgaa

SEQ ID NO: 5501978 - DNA, 25 bp, Homo sapien
ttgtggagtgcaatcagcctcctcc

SEQ ID NO: 5501979 - DNA, 25 bp, Homo sapien
aaaccaaggtcatgagcattcgtgc

SEQ ID NO: 5501980 - DNA, 25 bp, Homo sapien
aaagctttatatagttcggttcagt

SEQ ID NO: 5501981 - DNA, 25 bp, Homo sapien
actgaaccgaactatataaagcttt

SEQ ID NO: 5501982 - DNA, 25 bp, Homo sapien
ggtccagggtcctgtctcggtcatg

SEQ ID NO: 5501983 - DNA, 25 bp, Homo sapien
catgaccgagacaggaccctggacc

SEQ ID NO: 5501984 - DNA, 25 bp, Homo sapien
acccccgctacgaggtaggtagtca

SEQ ID NO: 5501985 - DNA, 25 bp, Homo sapien
tgactacctacctcgtagcgggggt

SEQ ID NO: 5501986 - DNA, 25 bp, Homo sapien
ggtgaggcctgaggttttacatttc

SEQ ID NO: 5501987 - DNA, 25 bp, Homo sapien
gctctcagtagaggcccataggaaa

SEQ ID NO: 5501988 - DNA, 25 bp, Homo sapien
gtgccccaggagatccctctctgcc

SEQ ID NO: 5501989 - DNA, 25 bp, Homo sapien
tgcgtatcaaaggtctagatgacat

SEQ ID NO: 5501990 - DNA, 25 bp, Homo sapien
gtaggtaggttatgccagctcacac

SEQ ID NO: 5501991 - DNA, 25 bp, Homo sapien
tccaacaagctgccaggtaaagcca

SEQ ID NO: 5501992 - DNA, 25 bp, Homo sapien
gtccaggaatcacactttgcgtatc

SEQ ID NO: 5501993 - DNA, 25 bp, Homo sapien
agcaggccagctaacgtggtattta

SEQ ID NO: 5501994 - DNA, 25 bp, Homo sapien
tctgcctttggagaccagcacctca

SEQ ID NO: 5501995 - DNA, 25 bp, Homo sapien
tcatactcagtgaaggcctggagtg

SEQ ID NO: 5501996 - DNA, 25 bp, Homo sapien
tggagtgcttaagagggatttcttc

SEQ ID NO: 5501997 - DNA, 25 bp, Homo sapien
gggtaacatgcctgggtccctctct

SEQ ID NO: 5501998 - DNA, 25 bp, Homo sapien
gagggttctgctagaccaggtttct

SEQ ID NO: 5501999 - DNA, 25 bp, Homo sapien
attgcctcatgttccctggggggga

SEQ ID NO: 5502000 - DNA, 25 bp, Homo sapien
gccagcttaggggcaatgtccttgt

SEQ ID NO: 5502001 - DNA, 25 bp, Homo sapien
gccagcccaggaaattcagaaatct

SEQ ID NO: 5502002 - DNA, 25 bp, Homo sapien
gcatctgagtggctgctctgcagtc

SEQ ID NO: 5502003 - DNA, 25 bp, Homo sapien
cccatcaggaccgctcactgagggg

SEQ ID NO: 5502004 - DNA, 25 bp, Homo sapien
tggatacggactggttgccaggtaa

SEQ ID NO: 5502005 - DNA, 25 bp, Homo sapien
gatgtgcagcagtaattctggcctc

SEQ ID NO: 5502006 - DNA, 25 bp, Homo sapien
gaaatctgtgggaccctctgagggt

SEQ ID NO: 5502007 - DNA, 25 bp, Homo sapien
tcctggagttcatactggggcttga

SEQ ID NO: 5502008 - DNA, 25 bp, Homo sapien
aagagaaggtgatggtgagactact

SEQ ID NO: 5502009 - DNA, 25 bp, Homo sapien
agtagtctcaccatcaccttctctt

SEQ ID NO: 5502010 - DNA, 25 bp, Homo sapien
cagaagggctaccctcggccccgtc

SEQ ID NO: 5502011 - DNA, 25 bp, Homo sapien
gacggggccgagggtagcccttctg

SEQ ID NO: 5502012 - DNA, 25 bp, Homo sapien
accaaactgcatcggccggaggaga

SEQ ID NO: 5502013 - DNA, 25 bp, Homo sapien
tctcctccggccgatgcagtttggt

SEQ ID NO: 5502014 - DNA, 25 bp, Homo sapien
acccttgaggtcgtacagggcccgc

SEQ ID NO: 5502015 - DNA, 25 bp, Homo sapien
gcgggccctgtacgacctcaagggt

SEQ ID NO: 5502016 - DNA, 25 bp, Homo sapien
tcgtccaccgcggtgcctgggttcc

SEQ ID NO: 5502017 - DNA, 25 bp, Homo sapien
ggaacccaggcaccgcggtggacga

SEQ ID NO: 5502018 - DNA, 25 bp, Homo sapien
aatccattatttaggactaaacaat

SEQ ID NO: 5502019 - DNA, 25 bp, Homo sapien
attgtttagtcctaaataatggatt

SEQ ID NO: 5502020 - DNA, 25 bp, Homo sapien
tggtcccccacccgcgtcagggagg

SEQ ID NO: 5502021 - DNA, 25 bp, Homo sapien
cctccctgacgcgggtgggggacca

SEQ ID NO: 5502022 - DNA, 25 bp, Homo sapien
cagactggaactaaaccatcagctc

SEQ ID NO: 5502023 - DNA, 25 bp, Homo sapien
atgggactccatcttgctgacttat

SEQ ID NO: 5502024 - DNA, 25 bp, Homo sapien
tagcctttggacaggaccatcagct

SEQ ID NO: 5502025 - DNA, 25 bp, Homo sapien
tgcagactgtcctcccaaatgtggg

SEQ ID NO: 5502026 - DNA, 25 bp, Homo sapien
aatcagtagactgagtaatgcagac

SEQ ID NO: 5502027 - DNA, 25 bp, Homo sapien
gcagatcttgggatttaaccgcctc

SEQ ID NO: 5502028 - DNA, 25 bp, Homo sapien
gcctgaatagaacaaaagagctaac

SEQ ID NO: 5502029 - DNA, 25 bp, Homo sapien
aaccgcctccataatcacgtgagcc

SEQ ID NO: 5502030 - DNA, 25 bp, Homo sapien
gtgagggtgtttcgcaatgacatta

SEQ ID NO: 5502031 - DNA, 25 bp, Homo sapien
ggcgtcaagcctgctgccatcagac

SEQ ID NO: 5502032 - DNA, 25 bp, Homo sapien
cacttaactgggtcacaagatgccc

SEQ ID NO: 5502033 - DNA, 25 bp, Homo sapien
ccccggtatacattctacagagact

SEQ ID NO: 5502034 - DNA, 25 bp, Homo sapien
agtctctgtagaatgtataccgggg

SEQ ID NO: 5502035 - DNA, 25 bp, Homo sapien
gaagtatccataaatctgttcattt

SEQ ID NO: 5502036 - DNA, 25 bp, Homo sapien
aaatgaacagatttatggatacttc

SEQ ID NO: 5502037 - DNA, 25 bp, Homo sapien
gtaccggtgaaaagagcctcgattc

SEQ ID NO: 5502038 - DNA, 25 bp, Homo sapien
gaatcgaggctcttttcaccggtac

SEQ ID NO: 5502039 - DNA, 25 bp, Homo sapien
ggagacccgccgtcgcgacgtgtac

SEQ ID NO: 5502040 - DNA, 25 bp, Homo sapien
gtacacgtcgcgacggcgggtctcc

SEQ ID NO: 5502041 - DNA, 25 bp, Homo sapien
aagagcaagacttgtgcagcagctc

SEQ ID NO: 5502042 - DNA, 25 bp, Homo sapien
tgcctcaaataggggttctgatccc

SEQ ID NO: 5502043 - DNA, 25 bp, Homo sapien
ctgatccctcaggaaagcaagggct

SEQ ID NO: 5502044 - DNA, 25 bp, Homo sapien
acaggatccagacagaacttggacc

SEQ ID NO: 5502045 - DNA, 25 bp, Homo sapien
cccttcccactagagggcactggac

SEQ ID NO: 5502046 - DNA, 25 bp, Homo sapien
tgctggagcaaattggaattcctga

SEQ ID NO: 5502047 - DNA, 25 bp, Homo sapien
gagggagctcagtccgcatctcctc

SEQ ID NO: 5502048 - DNA, 25 bp, Homo sapien
gctcttttgaggacaatcaggaggt

SEQ ID NO: 5502049 - DNA, 25 bp, Homo sapien
tctcctcggtttaaggccctgcctc

SEQ ID NO: 5502050 - DNA, 25 bp, Homo sapien
gagacacagacacacctgagcctga

SEQ ID NO: 5502051 - DNA, 25 bp, Homo sapien
gctcttcagcacacataacaggatc

SEQ ID NO: 5502052 - DNA, 25 bp, Homo sapien
ttactcattgtatcttttataaact

SEQ ID NO: 5502053 - DNA, 25 bp, Homo sapien
agtttataaaagatacaatgagtaa

SEQ ID NO: 5502054 - DNA, 25 bp, Homo sapien
aactgtaaaactcattactagggga

SEQ ID NO: 5502055 - DNA, 25 bp, Homo sapien
tcccctagtaatgagttttacagtt

SEQ ID NO: 5502056 - DNA, 25 bp, Homo sapien
ccgttgtggcgttccaggccgacgt

SEQ ID NO: 5502057 - DNA, 25 bp, Homo sapien
acgtcggcctggaacgccacaacgg

SEQ ID NO: 5502058 - DNA, 25 bp, Homo sapien
aatcctgtgttgtcgtggagctggt

SEQ ID NO: 5502059 - DNA, 25 bp, Homo sapien
accagctccacgacaacacaggatt

SEQ ID NO: 5502060 - DNA, 25 bp, Homo sapien
tcccgacagaggtcgttcgacaggt

SEQ ID NO: 5502061 - DNA, 25 bp, Homo sapien
acctgtcgaacgacctctgtcggga

SEQ ID NO: 5502062 - DNA, 25 bp, Homo sapien
tactagtaggattatagctcacatt

SEQ ID NO: 5502063 - DNA, 25 bp, Homo sapien
ctcttgtctttaggtggcagcttgg

SEQ ID NO: 5502064 - DNA, 25 bp, Homo sapien
tctaggcgttcacagattcccctcc

SEQ ID NO: 5502065 - DNA, 25 bp, Homo sapien
cgggcagcaacaactctgatgacct

SEQ ID NO: 5502066 - DNA, 25 bp, Homo sapien
tggcaggccccagtgactttctcta

SEQ ID NO: 5502067 - DNA, 25 bp, Homo sapien
ctgtgtggcctaatacgggcagcaa

SEQ ID NO: 5502068 - DNA, 25 bp, Homo sapien
taaggaccctgaagcaagcttttct

SEQ ID NO: 5502069 - DNA, 25 bp, Homo sapien
acagtggaactgcttagcatccttt

SEQ ID NO: 5502070 - DNA, 25 bp, Homo sapien
ggagctctcgtatataccaggcacc

SEQ ID NO: 5502071 - DNA, 25 bp, Homo sapien
tctactagcaaatgacacctgccac

SEQ ID NO: 5502072 - DNA, 25 bp, Homo sapien
tgctatgatataaatggggttccac

SEQ ID NO: 5502073 - DNA, 25 bp, Homo sapien
taatttggttgtcatttggtattgt

SEQ ID NO: 5502074 - DNA, 25 bp, Homo sapien
acaataccaaatgacaaccaaatta

SEQ ID NO: 5502075 - DNA, 25 bp, Homo sapien
aagcggcggactctccctgcgacaa

SEQ ID NO: 5502076 - DNA, 25 bp, Homo sapien
ttgtcgcagggagagtccgccgctt

SEQ ID NO: 5502077 - DNA, 25 bp, Homo sapien
gacctctaaaatgtctccttaataa

SEQ ID NO: 5502078 - DNA, 25 bp, Homo sapien
ttattaaggagacattttagaggtc

SEQ ID NO: 5502079 - DNA, 25 bp, Homo sapien
ctatcaccacaggccaccactatcc

SEQ ID NO: 5502080 - DNA, 25 bp, Homo sapien
cattgcccagatttaccaggggttc

SEQ ID NO: 5502081 - DNA, 25 bp, Homo sapien
ggtatctcactgtagctatcctttc

SEQ ID NO: 5502082 - DNA, 25 bp, Homo sapien
cagtttccaagtacaggtatctcac

SEQ ID NO: 5502083 - DNA, 25 bp, Homo sapien
gtagaaaataatatagtagacattg

SEQ ID NO: 5502084 - DNA, 25 bp, Homo sapien
gtctatattggtacatgcggatgga

SEQ ID NO: 5502085 - DNA, 25 bp, Homo sapien
tacagatatggctaaaaaccccatc

SEQ ID NO: 5502086 - DNA, 25 bp, Homo sapien
aaccccatcaccccatcccattccc

SEQ ID NO: 5502087 - DNA, 25 bp, Homo sapien
ccttgaagctggtgtgtctctgtct

SEQ ID NO: 5502088 - DNA, 25 bp, Homo sapien
agacattggggaactcattgcccag

SEQ ID NO: 5502089 - DNA, 25 bp, Homo sapien
tacatgcggatggagttcactttaa

SEQ ID NO: 5502090 - DNA, 25 bp, Homo sapien
gtctttcgagaccaaatcatagggt

SEQ ID NO: 5502091 - DNA, 25 bp, Homo sapien
accctatgatttggtctcgaaagac

SEQ ID NO: 5502092 - DNA, 25 bp, Homo sapien
ttccatagaacgagaagatgtcgaa

SEQ ID NO: 5502093 - DNA, 25 bp, Homo sapien
ttcgacatcttctcgttctatggaa

SEQ ID NO: 5502094 - DNA, 25 bp, Homo sapien
aagatttggtcttaaccttgtagac

SEQ ID NO: 5502095 - DNA, 25 bp, Homo sapien
gtctacaaggttaagaccaaatctt

SEQ ID NO: 5502096 - DNA, 25 bp, Homo sapien
tctccaccgggggtcgaccgccgtc

SEQ ID NO: 5502097 - DNA, 25 bp, Homo sapien
gacggcggtcgacccccggtggaga

SEQ ID NO: 5502098 - DNA, 25 bp, Homo sapien
gcaactcaagatccgtctgagcggc

SEQ ID NO: 5502099 - DNA, 25 bp, Homo sapien
tgggttgcatccagacctaccgcga

SEQ ID NO: 5502100 - DNA, 25 bp, Homo sapien
tggacatgagcatcaagggcatgta

SEQ ID NO: 5502101 - DNA, 25 bp, Homo sapien
gggtggaccgtctgcttcgcggtct

SEQ ID NO: 5502102 - DNA, 25 bp, Homo sapien
tggactccttaggtgaagccgtgga

SEQ ID NO: 5502103 - DNA, 25 bp, Homo sapien
gcgcgcctccacccccgccttctgc

SEQ ID NO: 5502104 - DNA, 25 bp, Homo sapien
gccaagtccgggatatccgacgtac

SEQ ID NO: 5502105 - DNA, 25 bp, Homo sapien
cgccacggcgaccttacccactttg

SEQ ID NO: 5502106 - DNA, 25 bp, Homo sapien
caagggcatgtacaccctgctggcg

SEQ ID NO: 5502107 - DNA, 25 bp, Homo sapien
attcccccaatcgaccccgaggtgc

SEQ ID NO: 5502108 - DNA, 25 bp, Homo sapien
ccgcgatgctgtggactccttaggt

SEQ ID NO: 5502109 - DNA, 25 bp, Homo sapien
ggcgtgaattacctgtccagtgtat

SEQ ID NO: 5502110 - DNA, 25 bp, Homo sapien
atacactggacaggtaattcacgcc

SEQ ID NO: 5502111 - DNA, 25 bp, Homo sapien
aatcgataaaggactctcacgtttc

SEQ ID NO: 5502112 - DNA, 25 bp, Homo sapien
gaaacgtgagagtcctttatcgatt

SEQ ID NO: 5502113 - DNA, 25 bp, Homo sapien
ttgctttggagagaacagaattatc

SEQ ID NO: 5502114 - DNA, 25 bp, Homo sapien
tggtgctcatgctagggaaactgag

SEQ ID NO: 5502115 - DNA, 25 bp, Homo sapien
tcagatttgcaggtgtgagtacatc

SEQ ID NO: 5502116 - DNA, 25 bp, Homo sapien
ttccaattgtacagagaggtggtcc

SEQ ID NO: 5502117 - DNA, 25 bp, Homo sapien
tcacgtgtgtctgggagattctgtg

SEQ ID NO: 5502118 - DNA, 25 bp, Homo sapien
ttgctctgacacgttggtggcagga

SEQ ID NO: 5502119 - DNA, 25 bp, Homo sapien
ttgagcactgacagaaattgagact

SEQ ID NO: 5502120 - DNA, 25 bp, Homo sapien
ggcctgttgtgaggtactgtccctc

SEQ ID NO: 5502121 - DNA, 25 bp, Homo sapien
ctgagagcctgacagttggacattg

SEQ ID NO: 5502122 - DNA, 25 bp, Homo sapien
ttggatgtgctgaaagacactacaa

SEQ ID NO: 5502123 - DNA, 25 bp, Homo sapien
ggtggaacgtttaacctcgcgatgc

SEQ ID NO: 5502124 - DNA, 25 bp, Homo sapien
ccccgcgaaatgattccagctgttc

SEQ ID NO: 5502125 - DNA, 25 bp, Homo sapien
ctccaagcacgaagaagaaaaatta

SEQ ID NO: 5502126 - DNA, 25 bp, Homo sapien
ggcagccttgtccgcggcatcacag

SEQ ID NO: 5502127 - DNA, 25 bp, Homo sapien
tgaaggaatgtatggtgagacttat

SEQ ID NO: 5502128 - DNA, 25 bp, Homo sapien
attgtgaaatgcttggatatgatgc

SEQ ID NO: 5502129 - DNA, 25 bp, Homo sapien
taacctagtagaagtgtgtatggca

SEQ ID NO: 5502130 - DNA, 25 bp, Homo sapien
agcaggaactgagtagtctgaaagc

SEQ ID NO: 5502131 - DNA, 25 bp, Homo sapien
gtaaaggatctgcagagcactaacc

SEQ ID NO: 5502132 - DNA, 25 bp, Homo sapien
gtgtatggcactgactgttgttagc

SEQ ID NO: 5502133 - DNA, 25 bp, Homo sapien
tctaaggagattgtacgaagaaaag

SEQ ID NO: 5502134 - DNA, 25 bp, Homo sapien
atcaagttagcccaacaaggaaacc

SEQ ID NO: 5502135 - DNA, 25 bp, Homo sapien
gtgtcgcggagggttctcagtcccg

SEQ ID NO: 5502136 - DNA, 25 bp, Homo sapien
cgggactgagaaccctccgcgacac

SEQ ID NO: 5502137 - DNA, 25 bp, Homo sapien
cgactcggtgcagctggggaagggg

SEQ ID NO: 5502138 - DNA, 25 bp, Homo sapien
ccccttccccagctgcaccgagtcg

SEQ ID NO: 5502139 - DNA, 25 bp, Homo sapien
tctattcctcgtagagtgaaaggga

SEQ ID NO: 5502140 - DNA, 25 bp, Homo sapien
tccctttcactctacgaggaataga

SEQ ID NO: 5502141 - DNA, 25 bp, Homo sapien
ctcttgatgatgaggactctgacct

SEQ ID NO: 5502142 - DNA, 25 bp, Homo sapien
acaagcaatcatggctgactccttt

SEQ ID NO: 5502143 - DNA, 25 bp, Homo sapien
ctgtactttttgtaggaagagaatc

SEQ ID NO: 5502144 - DNA, 25 bp, Homo sapien
ggagtctggaaacaaactgacaata

SEQ ID NO: 5502145 - DNA, 25 bp, Homo sapien
ctctctgctcttgtttaggtggttt

SEQ ID NO: 5502146 - DNA, 25 bp, Homo sapien
gtaggaagagaatcatacaatgaat

SEQ ID NO: 5502147 - DNA, 25 bp, Homo sapien
tccatgttgctgtgcatagcgatat

SEQ ID NO: 5502148 - DNA, 25 bp, Homo sapien
gtgcagtagtattcgaccctgtgac

SEQ ID NO: 5502149 - DNA, 25 bp, Homo sapien
cccctggcttctaacaccatggatc

SEQ ID NO: 5502150 - DNA, 25 bp, Homo sapien
ctcccctgttaactgttcccctggc

SEQ ID NO: 5502151 - DNA, 25 bp, Homo sapien
tactcgtgaaatcaacacccagatg

SEQ ID NO: 5502152 - DNA, 25 bp, Homo sapien
agaaagtgcacctgtaagaaaatta

SEQ ID NO: 5502153 - DNA, 25 bp, Homo sapien
atagttatactaaatgggaataaac

SEQ ID NO: 5502154 - DNA, 25 bp, Homo sapien
atgggaataaacatatggcacacat

SEQ ID NO: 5502155 - DNA, 25 bp, Homo sapien
ttcatgtactagaaagtgcacctgt

SEQ ID NO: 5502156 - DNA, 25 bp, Homo sapien
aaggcacattgaaggagaatgcttt

SEQ ID NO: 5502157 - DNA, 25 bp, Homo sapien
ttcaaataaatcactagtccaactt

SEQ ID NO: 5502158 - DNA, 25 bp, Homo sapien
ttcagggaattcactttacatgtaa

SEQ ID NO: 5502159 - DNA, 25 bp, Homo sapien
agaggacccctgttaaaatataaga

SEQ ID NO: 5502160 - DNA, 25 bp, Homo sapien
gtccaacttcaatgtcgtagaaccc

SEQ ID NO: 5502161 - DNA, 25 bp, Homo sapien
cacattaattacaaaggatacttca

SEQ ID NO: 5502162 - DNA, 25 bp, Homo sapien
attttcccatagaggacccctgtta

SEQ ID NO: 5502163 - DNA, 25 bp, Homo sapien
aggaccctactgagagatggaatca

SEQ ID NO: 5502164 - DNA, 25 bp, Homo sapien
tcttcagacagcatggacttcagga

SEQ ID NO: 5502165 - DNA, 25 bp, Homo sapien
gagtgcaatggcatgctatcagctc

SEQ ID NO: 5502166 - DNA, 25 bp, Homo sapien
cttgaactcccgaccacaggggatc

SEQ ID NO: 5502167 - DNA, 25 bp, Homo sapien
tgcgccaacaagcccggctagtttt

SEQ ID NO: 5502168 - DNA, 25 bp, Homo sapien
gtggcagtccctctgtcctggcaca

SEQ ID NO: 5502169 - DNA, 25 bp, Homo sapien
ttattcgtgttggtcaggctgatct

SEQ ID NO: 5502170 - DNA, 25 bp, Homo sapien
gcgtttaaaaggattgcagcttggc

SEQ ID NO: 5502171 - DNA, 25 bp, Homo sapien
ggggatccacccgcctcatccaccc

SEQ ID NO: 5502172 - DNA, 25 bp, Homo sapien
tctgccttgcaggttgaagcgattc

SEQ ID NO: 5502173 - DNA, 25 bp, Homo sapien
gggggagaccctgtgtcttcagaca

SEQ ID NO: 5502174 - DNA, 25 bp, Homo sapien
acttcttaattcaaactcaaattcg

SEQ ID NO: 5502175 - DNA, 25 bp, Homo sapien
cgaatttgagtttgaattaagaagt

SEQ ID NO: 5502176 - DNA, 25 bp, Homo sapien
accacaataaaaaaagtgagtcaat

SEQ ID NO: 5502177 - DNA, 25 bp, Homo sapien
tcagtttgggatgttgaaaaagttc

SEQ ID NO: 5502178 - DNA, 25 bp, Homo sapien
caagactttcagtttgggatgttga

SEQ ID NO: 5502179 - DNA, 25 bp, Homo sapien
tggaggtgttaaggcaccaagctat

SEQ ID NO: 5502180 - DNA, 25 bp, Homo sapien
gatggctgcacaacattgttaatgt

SEQ ID NO: 5502181 - DNA, 25 bp, Homo sapien
gtgttaaggcaccaagctattgttc

SEQ ID NO: 5502182 - DNA, 25 bp, Homo sapien
ccattggtcatctctctgtggaggt

SEQ ID NO: 5502183 - DNA, 25 bp, Homo sapien
ttgttaatgtacttatgccactgaa

SEQ ID NO: 5502184 - DNA, 25 bp, Homo sapien
tgcaggcttatgccaccacatctgg

SEQ ID NO: 5502185 - DNA, 25 bp, Homo sapien
aaaaaaagtgagtcaataatgatat

SEQ ID NO: 5502186 - DNA, 25 bp, Homo sapien
gtggcacaatttcggtttactgtaa

SEQ ID NO: 5502187 - DNA, 25 bp, Homo sapien
aaggtagctcacccactcagtggtt

SEQ ID NO: 5502188 - DNA, 25 bp, Homo sapien
ctgggtgggaggatcaactcccacc

SEQ ID NO: 5502189 - DNA, 25 bp, Homo sapien
ggggccccacacactgaatgagtgg

SEQ ID NO: 5502190 - DNA, 25 bp, Homo sapien
ctctaggagctcaggttctagtggc

SEQ ID NO: 5502191 - DNA, 25 bp, Homo sapien
cagtgtccctggacacgtgcagggc

SEQ ID NO: 5502192 - DNA, 25 bp, Homo sapien
gggtttgcccaaggtagctcaccca

SEQ ID NO: 5502193 - DNA, 25 bp, Homo sapien
ttattcaaggtttgccacgagccag

SEQ ID NO: 5502194 - DNA, 25 bp, Homo sapien
aggttctagtggcaatgcccagcct

SEQ ID NO: 5502195 - DNA, 25 bp, Homo sapien
tgcagggctgccagcactctgaaca

SEQ ID NO: 5502196 - DNA, 25 bp, Homo sapien
ccacacactgaatgagtgggagcac

SEQ ID NO: 5502197 - DNA, 25 bp, Homo sapien
gccacccacgtggcagtcagagtca

SEQ ID NO: 5502198 - DNA, 25 bp, Homo sapien
tgaagctcaccagtcccccagaaga

SEQ ID NO: 5502199 - DNA, 25 bp, Homo sapien
tgacgtctcagcaatggagaagaat

SEQ ID NO: 5502200 - DNA, 25 bp, Homo sapien
aagactatcctgagcccgaggaagt

SEQ ID NO: 5502201 - DNA, 25 bp, Homo sapien
atatggaccagttcatgcgcaagag

SEQ ID NO: 5502202 - DNA, 25 bp, Homo sapien
cgcgctcagcctgtctacctgcagc

SEQ ID NO: 5502203 - DNA, 25 bp, Homo sapien
aaaatagacatgccgcccttcttcc

SEQ ID NO: 5502204 - DNA, 25 bp, Homo sapien
gcgacgaagagtactacgccaagga

SEQ ID NO: 5502205 - DNA, 25 bp, Homo sapien
tgtgtgctgagcgcttttctgatcc

SEQ ID NO: 5502206 - DNA, 25 bp, Homo sapien
gatcctgcatctggtcacggtcgcg

SEQ ID NO: 5502207 - DNA, 25 bp, Homo sapien
ccccccggaggtgatttccatctac

SEQ ID NO: 5502208 - DNA, 25 bp, Homo sapien
cctgcagcacactcgatatggacca

SEQ ID NO: 5502209 - DNA, 25 bp, Homo sapien
ctgaacatccaaatcataacaggag

SEQ ID NO: 5502210 - DNA, 25 bp, Homo sapien
ctcctgttatgatttggatgttcag

SEQ ID NO: 5502211 - DNA, 25 bp, Homo sapien
gcttcgccaggggcacggggtccgt

SEQ ID NO: 5502212 - DNA, 25 bp, Homo sapien
acggaccccgtgcccctggcgaagc

SEQ ID NO: 5502213 - DNA, 25 bp, Homo sapien
tcggatacactatgctacagtgagt

SEQ ID NO: 5502214 - DNA, 25 bp, Homo sapien
actcactgtagcatagtgtatccga

SEQ ID NO: 5502215 - DNA, 25 bp, Homo sapien
tcgaggtgggggtccgacgaatcga

SEQ ID NO: 5502216 - DNA, 25 bp, Homo sapien
tcgattcgtcggacccccacctcga

SEQ ID NO: 5502217 - DNA, 25 bp, Homo sapien
gacctgcactggcaccggcctttga

SEQ ID NO: 5502218 - DNA, 25 bp, Homo sapien
gaaggtcagcaaaaaacatgtgagc

SEQ ID NO: 5502219 - DNA, 25 bp, Homo sapien
tgctcgaaacatgtctcgctcccac

SEQ ID NO: 5502220 - DNA, 25 bp, Homo sapien
taaagaataacaaggcagcattgct

SEQ ID NO: 5502221 - DNA, 25 bp, Homo sapien
aggcagagacagtggccttcctcta

SEQ ID NO: 5502222 - DNA, 25 bp, Homo sapien
accgagacattcagttcccaggggc

SEQ ID NO: 5502223 - DNA, 25 bp, Homo sapien
ggggcacagtcaggtctttctcatc

SEQ ID NO: 5502224 - DNA, 25 bp, Homo sapien
atgattaagttcaagggaaggtact

SEQ ID NO: 5502225 - DNA, 25 bp, Homo sapien
acatgtgagcaaaagaatctgtgtc

SEQ ID NO: 5502226 - DNA, 25 bp, Homo sapien
ggggaccagtattcgacacaccaag

SEQ ID NO: 5502227 - DNA, 25 bp, Homo sapien
ggatgtgcatgtaggccagatttat

SEQ ID NO: 5502228 - DNA, 25 bp, Homo sapien
tgagtgttacgggtgactcgtggtc

SEQ ID NO: 5502229 - DNA, 25 bp, Homo sapien
gaccacgagtcacccgtaacactca

SEQ ID NO: 5502230 - DNA, 25 bp, Homo sapien
aaatgtccaagtttatagacacagt

SEQ ID NO: 5502231 - DNA, 25 bp, Homo sapien
actgtgtctataaacttggacattt

SEQ ID NO: 5502232 - DNA, 25 bp, Homo sapien
ggcaggagccaccctctcatgcatc

SEQ ID NO: 5502233 - DNA, 25 bp, Homo sapien
ttgccattgtcgcccccacacattc

SEQ ID NO: 5502234 - DNA, 25 bp, Homo sapien
catcagccccctattggacaaagtc

SEQ ID NO: 5502235 - DNA, 25 bp, Homo sapien
agttcccgatctccgggcaggcaac

SEQ ID NO: 5502236 - DNA, 25 bp, Homo sapien
agcgccaccttgttcagggcaggac

SEQ ID NO: 5502237 - DNA, 25 bp, Homo sapien
gggtgggtgaattctggttcaattg

SEQ ID NO: 5502238 - DNA, 25 bp, Homo sapien
tccataacacctccgcagacaaatc

SEQ ID NO: 5502239 - DNA, 25 bp, Homo sapien
tcatgcatccctgggctctcggcac

SEQ ID NO: 5502240 - DNA, 25 bp, Homo sapien
gggcagggacacagttcagtccata

SEQ ID NO: 5502241 - DNA, 25 bp, Homo sapien
ggttcaattgtaggaggacctgtgg

SEQ ID NO: 5502242 - DNA, 25 bp, Homo sapien
ggccgggagtcccactccttgccat

SEQ ID NO: 5502243 - DNA, 25 bp, Homo sapien
gaaaaggttaaaccacctgtcagtg

SEQ ID NO: 5502244 - DNA, 25 bp, Homo sapien
cactgacaggtggtttaaccttttc

SEQ ID NO: 5502245 - DNA, 25 bp, Homo sapien
gcccagcccaactcgggtctgctgc

SEQ ID NO: 5502246 - DNA, 25 bp, Homo sapien
tgcaggcctcggtcatcaccctcta

SEQ ID NO: 5502247 - DNA, 25 bp, Homo sapien
gtttgtcacctggtcagccctatcc

SEQ ID NO: 5502248 - DNA, 25 bp, Homo sapien
ccatgtttgtcacctggtcagccct

SEQ ID NO: 5502249 - DNA, 25 bp, Homo sapien
tggtcagccctatccagtatccctg

SEQ ID NO: 5502250 - DNA, 25 bp, Homo sapien
acgcccagcccaactcgggtctgct

SEQ ID NO: 5502251 - DNA, 25 bp, Homo sapien
cagcccaactcgggtctgctgcagg

SEQ ID NO: 5502252 - DNA, 25 bp, Homo sapien
acaccatgtttgtcacctggtcagc

SEQ ID NO: 5502253 - DNA, 25 bp, Homo sapien
gatgccccgagcattgtgggcctca

SEQ ID NO: 5502254 - DNA, 25 bp, Homo sapien
tcaccctctacaccatgtttgtcac

SEQ ID NO: 5502255 - DNA, 25 bp, Homo sapien
gaacagaaatgcaacccccatttgc

SEQ ID NO: 5502256 - DNA, 25 bp, Homo sapien
taggggtggctctctagccatcctc

SEQ ID NO: 5502257 - DNA, 25 bp, Homo sapien
gtcctcccatgagatgggagggccc

SEQ ID NO: 5502258 - DNA, 25 bp, Homo sapien
tggttggctgtgtatctgtctgtct

SEQ ID NO: 5502259 - DNA, 25 bp, Homo sapien
gggccccgtctgttcctgagttgtc

SEQ ID NO: 5502260 - DNA, 25 bp, Homo sapien
ggggtcctcttgccaggacgcccag

SEQ ID NO: 5502261 - DNA, 25 bp, Homo sapien
cacttggctacctaggcctggcctg

SEQ ID NO: 5502262 - DNA, 25 bp, Homo sapien
cccatctccagaacagaaatgcaac

SEQ ID NO: 5502263 - DNA, 25 bp, Homo sapien
tgagggtgattgtgctcccatctcc

SEQ ID NO: 5502264 - DNA, 25 bp, Homo sapien
tccctggtaagtatgggcccaggct

SEQ ID NO: 5502265 - DNA, 25 bp, Homo sapien
tgagcgctctgttgctgggacttga

SEQ ID NO: 5502266 - DNA, 25 bp, Homo sapien
cgttcctgggtcagtatcagtctac

SEQ ID NO: 5502267 - DNA, 25 bp, Homo sapien
tttgctgtacatcgagtttaaaatg

SEQ ID NO: 5502268 - DNA, 25 bp, Homo sapien
cattttaaactcgatgtacagcaaa

SEQ ID NO: 5502269 - DNA, 25 bp, Homo sapien
ggtacctctctgcattatcccgcca

SEQ ID NO: 5502270 - DNA, 25 bp, Homo sapien
ggggaaaatcaagatggtacctctc

SEQ ID NO: 5502271 - DNA, 25 bp, Homo sapien
tctaagcttacagagaccagaccag

SEQ ID NO: 5502272 - DNA, 25 bp, Homo sapien
gtggcaagtgacctgccaataaagc

SEQ ID NO: 5502273 - DNA, 25 bp, Homo sapien
gggcagatgcaattgtggcaagtga

SEQ ID NO: 5502274 - DNA, 25 bp, Homo sapien
tagaagctggcataggtatatcctt

SEQ ID NO: 5502275 - DNA, 25 bp, Homo sapien
ggtgaatgtaactggggaaaatcaa

SEQ ID NO: 5502276 - DNA, 25 bp, Homo sapien
tgccaataaagcaggtgcagctata

SEQ ID NO: 5502277 - DNA, 25 bp, Homo sapien
catgtctaggatacagtgtgaaaat

SEQ ID NO: 5502278 - DNA, 25 bp, Homo sapien
gcaggtgcagctatagaagctggca

SEQ ID NO: 5502279 - DNA, 25 bp, Homo sapien
tgcattatcccgccagacactgtat

SEQ ID NO: 5502280 - DNA, 25 bp, Homo sapien
agcgctcctggccaatagtgatgag

SEQ ID NO: 5502281 - DNA, 25 bp, Homo sapien
gaaatgccgaggctcagcacttgct

SEQ ID NO: 5502282 - DNA, 25 bp, Homo sapien
gccaatagtgatgagtttgccgtcc

SEQ ID NO: 5502283 - DNA, 25 bp, Homo sapien
tggaggccttgtctgtggaaatgcc

SEQ ID NO: 5502284 - DNA, 25 bp, Homo sapien
cacgctgccccgctcctcaaactct

SEQ ID NO: 5502285 - DNA, 25 bp, Homo sapien
agccgccacacagtagcacgttggc

SEQ ID NO: 5502286 - DNA, 25 bp, Homo sapien
cttcttgatgtgctctatgatgtgc

SEQ ID NO: 5502287 - DNA, 25 bp, Homo sapien
catctcctccttgaagcccgtgtcc

SEQ ID NO: 5502288 - DNA, 25 bp, Homo sapien
aggtcttcctctcaggagcggcagc

SEQ ID NO: 5502289 - DNA, 25 bp, Homo sapien
gagctcgtagtccacgcgcagctcc

SEQ ID NO: 5502290 - DNA, 25 bp, Homo sapien
ggaagccatccagcatagtgcagcc

SEQ ID NO: 5502291 - DNA, 25 bp, Homo sapien
gaaaaagaaaagtagtgaatcatgc

SEQ ID NO: 5502292 - DNA, 25 bp, Homo sapien
ttaatgaacatgcccctgccagcca

SEQ ID NO: 5502293 - DNA, 25 bp, Homo sapien
gcataatgagcaaatcaatcttccc

SEQ ID NO: 5502294 - DNA, 25 bp, Homo sapien
ggcagggactgagttgctattcccc

SEQ ID NO: 5502295 - DNA, 25 bp, Homo sapien
gccagccacagactccacaagggca

SEQ ID NO: 5502296 - DNA, 25 bp, Homo sapien
gtagtgaatcatgcaataagttgtt

SEQ ID NO: 5502297 - DNA, 25 bp, Homo sapien
aggcacagtgatgtgtgcctgcggt

SEQ ID NO: 5502298 - DNA, 25 bp, Homo sapien
acttcaatcatgaatcaggccaggc

SEQ ID NO: 5502299 - DNA, 25 bp, Homo sapien
tacaccccagcccataaggagcaat

SEQ ID NO: 5502300 - DNA, 25 bp, Homo sapien
tcctctgcacattacaccccagccc

SEQ ID NO: 5502301 - DNA, 25 bp, Homo sapien
cccataaggagcaatgtgctacacc

SEQ ID NO: 5502302 - DNA, 25 bp, Homo sapien
gggcccgggcgcccggcacacggac

SEQ ID NO: 5502303 - DNA, 25 bp, Homo sapien
gtccgtgtgccgggcgcccgggccc

SEQ ID NO: 5502304 - DNA, 25 bp, Homo sapien
tgccttatgcagaagagagactcag

SEQ ID NO: 5502305 - DNA, 25 bp, Homo sapien
agaaaaagagattactgcatatgac

SEQ ID NO: 5502306 - DNA, 25 bp, Homo sapien
gaagaagaatgaatcaatctacacg

SEQ ID NO: 5502307 - DNA, 25 bp, Homo sapien
ctttggggagaacttccttagagaa

SEQ ID NO: 5502308 - DNA, 25 bp, Homo sapien
cacgatggctctgaccccagatgga

SEQ ID NO: 5502309 - DNA, 25 bp, Homo sapien
agagactcaggaactatgaggtgat

SEQ ID NO: 5502310 - DNA, 25 bp, Homo sapien
cctgaataagaatgctagaagaaga

SEQ ID NO: 5502311 - DNA, 25 bp, Homo sapien
atttgatccctgccagtgggactga

SEQ ID NO: 5502312 - DNA, 25 bp, Homo sapien
agaaataactgcctaccggtgggat

SEQ ID NO: 5502313 - DNA, 25 bp, Homo sapien
acacacagtggttgtaagaaataac

SEQ ID NO: 5502314 - DNA, 25 bp, Homo sapien
tgacctgagtgtgtaaagaaaaaga

SEQ ID NO: 5502315 - DNA, 25 bp, Homo sapien
gtcccgtcgccgacagcaccggggt

SEQ ID NO: 5502316 - DNA, 25 bp, Homo sapien
accccggtgctgtcggcgacgggac

SEQ ID NO: 5502317 - DNA, 25 bp, Homo sapien
tcgccgacagcaccggggtcgcagg

SEQ ID NO: 5502318 - DNA, 25 bp, Homo sapien
cctgcgaccccggtgctgtcggcga

SEQ ID NO: 5502319 - DNA, 25 bp, Homo sapien
gctccaagccttagctgggaagtct

SEQ ID NO: 5502320 - DNA, 25 bp, Homo sapien
tcctctaccagactggggactccca

SEQ ID NO: 5502321 - DNA, 25 bp, Homo sapien
gggtcccttgagcctggcccacatt

SEQ ID NO: 5502322 - DNA, 25 bp, Homo sapien
cagagggctctcctctctgggtccc

SEQ ID NO: 5502323 - DNA, 25 bp, Homo sapien
ccaaatgaactcctacctgtgctcc

SEQ ID NO: 5502324 - DNA, 25 bp, Homo sapien
gggaatgaggcattagctggatccc

SEQ ID NO: 5502325 - DNA, 25 bp, Homo sapien
actgcacctggccacgacttctact

SEQ ID NO: 5502326 - DNA, 25 bp, Homo sapien
cccacatacccagtctaggccaggc

SEQ ID NO: 5502327 - DNA, 25 bp, Homo sapien
cctaatccacccgaggcaattcctc

SEQ ID NO: 5502328 - DNA, 25 bp, Homo sapien
tgtttgcatctcatggggtgctggc

SEQ ID NO: 5502329 - DNA, 25 bp, Homo sapien
gagactgggttttagcatgtaagcc

SEQ ID NO: 5502330 - DNA, 25 bp, Homo sapien
tgcgagcccgacgaaactcagttac

SEQ ID NO: 5502331 - DNA, 25 bp, Homo sapien
gtaactgagtttcgtcgggctcgca

SEQ ID NO: 5502332 - DNA, 25 bp, Homo sapien
tacgagagtggaacccgtgaccgag

SEQ ID NO: 5502333 - DNA, 25 bp, Homo sapien
ctcggtcacgggttccactctcgta

SEQ ID NO: 5502334 - DNA, 25 bp, Homo sapien
ccgtccgataccgagtgacgggcat

SEQ ID NO: 5502335 - DNA, 25 bp, Homo sapien
atgcccgtcactcggtatcggacgg

SEQ ID NO: 5502336 - DNA, 25 bp, Homo sapien
gacgcaacgagaagggttgaacgga

SEQ ID NO: 5502337 - DNA, 25 bp, Homo sapien
tccgttcaacccttctcgttgcgtc

SEQ ID NO: 5502338 - DNA, 25 bp, Homo sapien
agtcatccgtttaccaggtcttcca

SEQ ID NO: 5502339 - DNA, 25 bp, Homo sapien
tggaagacctggtaaacggatgact

SEQ ID NO: 5502340 - DNA, 25 bp, Homo sapien
acaccaccgcggcccaaagagtccg

SEQ ID NO: 5502341 - DNA, 25 bp, Homo sapien
cggactctttgggccgcggtggtgt

SEQ ID NO: 5502342 - DNA, 25 bp, Homo sapien
agctactttaagaatccttggagtt

SEQ ID NO: 5502343 - DNA, 25 bp, Homo sapien
aatcaatgtgtaattagatgtgtaa

SEQ ID NO: 5502344 - DNA, 25 bp, Homo sapien
gctgcaattgctagtactccaactc

SEQ ID NO: 5502345 - DNA, 25 bp, Homo sapien
aacttggacagtattctttggcttt

SEQ ID NO: 5502346 - DNA, 25 bp, Homo sapien
gaaacaagttctagggcaccctgat

SEQ ID NO: 5502347 - DNA, 25 bp, Homo sapien
taggtaatctcaaagaagctgcaaa

SEQ ID NO: 5502348 - DNA, 25 bp, Homo sapien
ttgagtagttgaagaattcagctac

SEQ ID NO: 5502349 - DNA, 25 bp, Homo sapien
tagatgtgtaatcatttgagctctt

SEQ ID NO: 5502350 - DNA, 25 bp, Homo sapien
tggcacagcactttgataaacttgg

SEQ ID NO: 5502351 - DNA, 25 bp, Homo sapien
cacagctgatagattcatcaattcc

SEQ ID NO: 5502352 - DNA, 25 bp, Homo sapien
aagcacagtctttggacacagctga

SEQ ID NO: 5502353 - DNA, 25 bp, Homo sapien
ctgtcagataatctcagggtattct

SEQ ID NO: 5502354 - DNA, 25 bp, Homo sapien
agaataccctgagattatctgacag

SEQ ID NO: 5502355 - DNA, 25 bp, Homo sapien
aaccttggcaatgagttcatgtgat

SEQ ID NO: 5502356 - DNA, 25 bp, Homo sapien
tttggaagcaactttgaattctttc

SEQ ID NO: 5502357 - DNA, 25 bp, Homo sapien
ttatgtcttggctaacaaacagaaa

SEQ ID NO: 5502358 - DNA, 25 bp, Homo sapien
cataaagactaataggttaaaagta

SEQ ID NO: 5502359 - DNA, 25 bp, Homo sapien
tgtgataatggttaagaagagtaag

SEQ ID NO: 5502360 - DNA, 25 bp, Homo sapien
acagaaagctcaaagccagactaaa

SEQ ID NO: 5502361 - DNA, 25 bp, Homo sapien
tacagatatcccctagtaagatcat

SEQ ID NO: 5502362 - DNA, 25 bp, Homo sapien
aaagtctgtactccatgcaaattca

SEQ ID NO: 5502363 - DNA, 25 bp, Homo sapien
tacaaaattagcagtgaaggtataa

SEQ ID NO: 5502364 - DNA, 25 bp, Homo sapien
aagtattctatgagccaaagttttc

SEQ ID NO: 5502365 - DNA, 25 bp, Homo sapien
aaagccagactaaattaacagaatt

SEQ ID NO: 5502366 - DNA, 25 bp, Homo sapien
ttggtgaactggtggtcttctttgc

SEQ ID NO: 5502367 - DNA, 25 bp, Homo sapien
attcagtcccagattgtgcctcacc

SEQ ID NO: 5502368 - DNA, 25 bp, Homo sapien
tttacagcatgcccagggattgtct

SEQ ID NO: 5502369 - DNA, 25 bp, Homo sapien
tctcaccagagataaatgatgctca

SEQ ID NO: 5502370 - DNA, 25 bp, Homo sapien
gtggtgaagcatgtggttatactca

SEQ ID NO: 5502371 - DNA, 25 bp, Homo sapien
caccagcctgtcggtgccatgactg

SEQ ID NO: 5502372 - DNA, 25 bp, Homo sapien
tgagccataggaattatagggaaat

SEQ ID NO: 5502373 - DNA, 25 bp, Homo sapien
agataaggataaacaaaaagacaaa

SEQ ID NO: 5502374 - DNA, 25 bp, Homo sapien
aaaggctagatgatggattcagtcc

SEQ ID NO: 5502375 - DNA, 25 bp, Homo sapien
cccagcaatttgacttgtaggcaga

SEQ ID NO: 5502376 - DNA, 25 bp, Homo sapien
taggcagattagaagataaggataa

SEQ ID NO: 5502377 - DNA, 25 bp, Homo sapien
ttggataccaaaaactacaagcaaa

SEQ ID NO: 5502378 - DNA, 25 bp, Homo sapien
agttctgtgcaccaaccaggttctc

SEQ ID NO: 5502379 - DNA, 25 bp, Homo sapien
actacaagcaaacatctgtctagat

SEQ ID NO: 5502380 - DNA, 25 bp, Homo sapien
tttgtaaaagttctgtgcaccaacc

SEQ ID NO: 5502381 - DNA, 25 bp, Homo sapien
caggttctcattactgccagggctg

SEQ ID NO: 5502382 - DNA, 25 bp, Homo sapien
atgtgaaaagaaacttggtactgtt

SEQ ID NO: 5502383 - DNA, 25 bp, Homo sapien
gatccatatggaaagaataagttct

SEQ ID NO: 5502384 - DNA, 25 bp, Homo sapien
gccagggctgtgcctacaaaaaagg

SEQ ID NO: 5502385 - DNA, 25 bp, Homo sapien
tgtctagatgtattgatggaatttc

SEQ ID NO: 5502386 - DNA, 25 bp, Homo sapien
aaaaaagcaagatttgatccatatg

SEQ ID NO: 5502387 - DNA, 25 bp, Homo sapien
aaggcatctgtgcgatgtgtggaaa

SEQ ID NO: 5502388 - DNA, 25 bp, Homo sapien
tatataaggtaaggcctccagcaag

SEQ ID NO: 5502389 - DNA, 25 bp, Homo sapien
tatggtggttgtgacactgactgag

SEQ ID NO: 5502390 - DNA, 25 bp, Homo sapien
gcagttgggcaaatccaggtttact

SEQ ID NO: 5502391 - DNA, 25 bp, Homo sapien
catctctaaaagggactcgaaaatc

SEQ ID NO: 5502392 - DNA, 25 bp, Homo sapien
ttcaaatgattctcgagtggctggg

SEQ ID NO: 5502393 - DNA, 25 bp, Homo sapien
gggggagatgcaactcatcacattt

SEQ ID NO: 5502394 - DNA, 25 bp, Homo sapien
gtgcaagttatcttggaagggggac

SEQ ID NO: 5502395 - DNA, 25 bp, Homo sapien
actgactgtcctctggctgtgcaag

SEQ ID NO: 5502396 - DNA, 25 bp, Homo sapien
cctccagcaagagctatggtggttg

SEQ ID NO: 5502397 - DNA, 25 bp, Homo sapien
agaacagtaattcggagtctgggct

SEQ ID NO: 5502398 - DNA, 25 bp, Homo sapien
ggccagacttcatgtatgggaggag

SEQ ID NO: 5502399 - DNA, 25 bp, Homo sapien
taatgaacccccacctgcttctcac

SEQ ID NO: 5502400 - DNA, 25 bp, Homo sapien
ggtgcggctgttcaaactgtctgtt

SEQ ID NO: 5502401 - DNA, 25 bp, Homo sapien
aaagatagaatttacagggctggga

SEQ ID NO: 5502402 - DNA, 25 bp, Homo sapien
tttaggagactgctaagcccttgta

SEQ ID NO: 5502403 - DNA, 25 bp, Homo sapien
tgtacgtacgacaggtcaaatgatt

SEQ ID NO: 5502404 - DNA, 25 bp, Homo sapien
aaactgtctgttgtggaagatggag

SEQ ID NO: 5502405 - DNA, 25 bp, Homo sapien
tggatgcctcccaagggtaccagaa

SEQ ID NO: 5502406 - DNA, 25 bp, Homo sapien
aaacaaaggctgtaaagacactcaa

SEQ ID NO: 5502407 - DNA, 25 bp, Homo sapien
ccccccaaactgtcctgatgctgga

SEQ ID NO: 5502408 - DNA, 25 bp, Homo sapien
tgctagagtagaagcaactctcttc

SEQ ID NO: 5502409 - DNA, 25 bp, Homo sapien
cttttattaaacggatggatgcctc

SEQ ID NO: 5502410 - DNA, 25 bp, Homo sapien
aaattgcataaaatgtgatggaatt

SEQ ID NO: 5502411 - DNA, 25 bp, Homo sapien
tcggctaaccgcaacttctgcctcc

SEQ ID NO: 5502412 - DNA, 25 bp, Homo sapien
gatggaatttccaccagaagtttaa

SEQ ID NO: 5502413 - DNA, 25 bp, Homo sapien
agcaaaaacacttgcttaagtggtt

SEQ ID NO: 5502414 - DNA, 25 bp, Homo sapien
aaatgttaatcacatgcaaaagaat

SEQ ID NO: 5502415 - DNA, 25 bp, Homo sapien
atgcaaaagaatggttaaggaatat

SEQ ID NO: 5502416 - DNA, 25 bp, Homo sapien
taagtggttaatttcacaaatgtta

SEQ ID NO: 5502417 - DNA, 25 bp, Homo sapien
ggaatataatgtccatgtggcatta

SEQ ID NO: 5502418 - DNA, 25 bp, Homo sapien
gccaccacgccctgccaacaaattc

SEQ ID NO: 5502419 - DNA, 25 bp, Homo sapien
aagaatggttaaggaatataatgtc

SEQ ID NO: 5502420 - DNA, 25 bp, Homo sapien
agtttaatcaagtttgtagtaacat

SEQ ID NO: 5502421 - DNA, 25 bp, Homo sapien
gggaggaaaacttgacagcatttga

SEQ ID NO: 5502422 - DNA, 25 bp, Homo sapien
gctagttagagcttgaaatgtccag

SEQ ID NO: 5502423 - DNA, 25 bp, Homo sapien
taggtgagcaaggaattgttttggt

SEQ ID NO: 5502424 - DNA, 25 bp, Homo sapien
tccctaattgggacaaggcattgtc

SEQ ID NO: 5502425 - DNA, 25 bp, Homo sapien
gcaagtcaagaaaagccactggttg

SEQ ID NO: 5502426 - DNA, 25 bp, Homo sapien
agggagacaagatactgttgaagtg

SEQ ID NO: 5502427 - DNA, 25 bp, Homo sapien
agggaacgagcagtaccattcactg

SEQ ID NO: 5502428 - DNA, 25 bp, Homo sapien
actggttggtaaagatgatgaaatc

SEQ ID NO: 5502429 - DNA, 25 bp, Homo sapien
tctgattatagaggtgaagaagaaa

SEQ ID NO: 5502430 - DNA, 25 bp, Homo sapien
tgttgaagtggtatcagcatgagat

SEQ ID NO: 5502431 - DNA, 25 bp, Homo sapien
cagcatgagatgaaactagagtagg

SEQ ID NO: 5502432 - DNA, 25 bp, Homo sapien
cagaaaactgaattttgggcccaac

SEQ ID NO: 5502433 - DNA, 25 bp, Homo sapien
tgagaggtttgtactagattgcttc

SEQ ID NO: 5502434 - DNA, 25 bp, Homo sapien
ttccaagatccggttcagctctgta

SEQ ID NO: 5502435 - DNA, 25 bp, Homo sapien
cttagtttatggaactgaagcagag

SEQ ID NO: 5502436 - DNA, 25 bp, Homo sapien
caatatttttgagctggaagagacc

SEQ ID NO: 5502437 - DNA, 25 bp, Homo sapien
gcaaagtaaagactatcctcagatc

SEQ ID NO: 5502438 - DNA, 25 bp, Homo sapien
aaaaaaaaccaacctgagagtcaga

SEQ ID NO: 5502439 - DNA, 25 bp, Homo sapien
acagatgaaaagaggctgtaaagta

SEQ ID NO: 5502440 - DNA, 25 bp, Homo sapien
aggcctgagacatagcacctcgcct

SEQ ID NO: 5502441 - DNA, 25 bp, Homo sapien
aagaggctgtaaagtataatggaaa

SEQ ID NO: 5502442 - DNA, 25 bp, Homo sapien
agtgaaagcctgtgcaaattatctg

SEQ ID NO: 5502443 - DNA, 25 bp, Homo sapien
cccacccagtgatgctgtttgaggc

SEQ ID NO: 5502444 - DNA, 25 bp, Homo sapien
cagtattgaactaagaaaggttttc

SEQ ID NO: 5502445 - DNA, 25 bp, Homo sapien
gcagggccttagaaagcatctccca

SEQ ID NO: 5502446 - DNA, 25 bp, Homo sapien
tcttggtactcagcccccacccagt

SEQ ID NO: 5502447 - DNA, 25 bp, Homo sapien
cctgggcaggtcaccacacttcttg

SEQ ID NO: 5502448 - DNA, 25 bp, Homo sapien
gtgattttgtggggaacaatctggg

SEQ ID NO: 5502449 - DNA, 25 bp, Homo sapien
gcatctcccaaccacagagacgcgc

SEQ ID NO: 5502450 - DNA, 25 bp, Homo sapien
agttcagcagggccttagaaagcat

SEQ ID NO: 5502451 - DNA, 25 bp, Homo sapien
tgcttctcatggcctcttggagttc

SEQ ID NO: 5502452 - DNA, 25 bp, Homo sapien
ggggaacaatctgggcaacagtatt

SEQ ID NO: 5502453 - DNA, 25 bp, Homo sapien
cagagagtgctagagttaatgcttt

SEQ ID NO: 5502454 - DNA, 25 bp, Homo sapien
aaaataaggcctagtacatagtata

SEQ ID NO: 5502455 - DNA, 25 bp, Homo sapien
gacctgggcctattcttgacctttc

SEQ ID NO: 5502456 - DNA, 25 bp, Homo sapien
aaaatgagaatacctataaagcact

SEQ ID NO: 5502457 - DNA, 25 bp, Homo sapien
ggttgtgaagagaattaaaatgaga

SEQ ID NO: 5502458 - DNA, 25 bp, Homo sapien
acctcgtaaggttgtgaagagaatt

SEQ ID NO: 5502459 - DNA, 25 bp, Homo sapien
aatggaaataacaatacctacctcg

SEQ ID NO: 5502460 - DNA, 25 bp, Homo sapien
cacctcaactacagtgcccttccac

SEQ ID NO: 5502461 - DNA, 25 bp, Homo sapien
tttggcccgtttcctgcatgatctc

SEQ ID NO: 5502462 - DNA, 25 bp, Homo sapien
aagcgatccacccacatgggcctcc

SEQ ID NO: 5502463 - DNA, 25 bp, Homo sapien
atttggccatgggctgcattttttc

SEQ ID NO: 5502464 - DNA, 25 bp, Homo sapien
catttgatgtagtttggcccgtttc

SEQ ID NO: 5502465 - DNA, 25 bp, Homo sapien
gtttttgaaacaatggcttgatacc

SEQ ID NO: 5502466 - DNA, 25 bp, Homo sapien
caaatgaaagcaaaagtctaaaacc

SEQ ID NO: 5502467 - DNA, 25 bp, Homo sapien
cagcgtacagaagagtactatgttt

SEQ ID NO: 5502468 - DNA, 25 bp, Homo sapien
gataagacttttagatcacagcttc

SEQ ID NO: 5502469 - DNA, 25 bp, Homo sapien
agttggtcattacctacagagtgcc

SEQ ID NO: 5502470 - DNA, 25 bp, Homo sapien
cattgccgcttttgttaggtctggg

SEQ ID NO: 5502471 - DNA, 25 bp, Homo sapien
attggtaaaaacgtgaagataagac

SEQ ID NO: 5502472 - DNA, 25 bp, Homo sapien
tttgtgcaggttcataatatccata

SEQ ID NO: 5502473 - DNA, 25 bp, Homo sapien
cagagtgccatagtccacatgaacc

SEQ ID NO: 5502474 - DNA, 25 bp, Homo sapien
gttaggtctgggcaatttgtgcttc

SEQ ID NO: 5502475 - DNA, 25 bp, Homo sapien
attaagcaagcaatacctagccaat

SEQ ID NO: 5502476 - DNA, 25 bp, Homo sapien
tctggggctcatggaacctcttcaa

SEQ ID NO: 5502477 - DNA, 25 bp, Homo sapien
acctcacaggccagctcctaaggct

SEQ ID NO: 5502478 - DNA, 25 bp, Homo sapien
cctacagagtggtcaacctcacagg

SEQ ID NO: 5502479 - DNA, 25 bp, Homo sapien
tctgtcagtcccacgggtgatggag

SEQ ID NO: 5502480 - DNA, 25 bp, Homo sapien
gatactgaggtcatgaatgttagcc

SEQ ID NO: 5502481 - DNA, 25 bp, Homo sapien
gtcttaaagcctacgcagaactgct

SEQ ID NO: 5502482 - DNA, 25 bp, Homo sapien
atggagatactggttcatcaggcga

SEQ ID NO: 5502483 - DNA, 25 bp, Homo sapien
tctcttctcgggcgaggcttgtcca

SEQ ID NO: 5502484 - DNA, 25 bp, Homo sapien
atcaggcgagtaacctagtcaggtt

SEQ ID NO: 5502485 - DNA, 25 bp, Homo sapien
aggttcaggaggcaagttctattga

SEQ ID NO: 5502486 - DNA, 25 bp, Homo sapien
attgaaaccatgtgggtcgtgcttt

SEQ ID NO: 5502487 - DNA, 25 bp, Homo sapien
tcagactgaagggaaactgtactta

SEQ ID NO: 5502488 - DNA, 25 bp, Homo sapien
aaaatggttgatgagccaatggaag

SEQ ID NO: 5502489 - DNA, 25 bp, Homo sapien
catgttaaggaaggctatgagaaag

SEQ ID NO: 5502490 - DNA, 25 bp, Homo sapien
ggctatgagaaagcagatcctgcac

SEQ ID NO: 5502491 - DNA, 25 bp, Homo sapien
gtcatgatgaaggagttgttaaaga

SEQ ID NO: 5502492 - DNA, 25 bp, Homo sapien
caatgaaggtgttaaaaaaagcctc

SEQ ID NO: 5502493 - DNA, 25 bp, Homo sapien
aaggggaaatgctaccattcgctcc

SEQ ID NO: 5502494 - DNA, 25 bp, Homo sapien
ctggattttctcaggggaggagatg

SEQ ID NO: 5502495 - DNA, 25 bp, Homo sapien
tgctcaaggttcttggtcaggggtc

SEQ ID NO: 5502496 - DNA, 25 bp, Homo sapien
cggcgaggtaaatggtcttaaaatg

SEQ ID NO: 5502497 - DNA, 25 bp, Homo sapien
ttaaaagttcgagacagagttcgga

SEQ ID NO: 5502498 - DNA, 25 bp, Homo sapien
gccgcgctcgtcgggtgtaccggtg

SEQ ID NO: 5502499 - DNA, 25 bp, Homo sapien
caccggtacacccgacgagcgcggc

SEQ ID NO: 5502500 - DNA, 25 bp, Homo sapien
ggtggtgtcgtattttaggagcatc

SEQ ID NO: 5502501 - DNA, 25 bp, Homo sapien
ctgtcagtgtggtctacagaggtct

SEQ ID NO: 5502502 - DNA, 25 bp, Homo sapien
ctctaccgaagtggaataagagaga

SEQ ID NO: 5502503 - DNA, 25 bp, Homo sapien
ttaggagcatcacgtagttcaaatc

SEQ ID NO: 5502504 - DNA, 25 bp, Homo sapien
aggttaaagcccagataggtcgtga

SEQ ID NO: 5502505 - DNA, 25 bp, Homo sapien
gtagcagtgctgtcagtgtggtcta

SEQ ID NO: 5502506 - DNA, 25 bp, Homo sapien
tggtttttactgaggagtgcaacgg

SEQ ID NO: 5502507 - DNA, 25 bp, Homo sapien
agttgcaaatagtagcagtgctgtc

SEQ ID NO: 5502508 - DNA, 25 bp, Homo sapien
ataggtcgtgaccagttgcaaatag

SEQ ID NO: 5502509 - DNA, 25 bp, Homo sapien
agtgcaacggtggtgtcgtatttta

SEQ ID NO: 5502510 - DNA, 25 bp, Homo sapien
agcccacaagaaactagaaatcctc

SEQ ID NO: 5502511 - DNA, 25 bp, Homo sapien
tacaggggagccacaagagacgact

SEQ ID NO: 5502512 - DNA, 25 bp, Homo sapien
agtcgtctcttgtggctcccctgta

SEQ ID NO: 5502513 - DNA, 25 bp, Homo sapien
attagacaactgactctggcatttt

SEQ ID NO: 5502514 - DNA, 25 bp, Homo sapien
aggctgaactggaacgatcacttga

SEQ ID NO: 5502515 - DNA, 25 bp, Homo sapien
tttacctctatgtgtaggctggaat

SEQ ID NO: 5502516 - DNA, 25 bp, Homo sapien
tctatgtgtaggctggaataaagga

SEQ ID NO: 5502517 - DNA, 25 bp, Homo sapien
gctggaataaaggagacacttgaag

SEQ ID NO: 5502518 - DNA, 25 bp, Homo sapien
cttgctgaaagtttcctaggaatat

SEQ ID NO: 5502519 - DNA, 25 bp, Homo sapien
ataaaggagacacttgaagcaagta

SEQ ID NO: 5502520 - DNA, 25 bp, Homo sapien
tgactctggcattttataataggat

SEQ ID NO: 5502521 - DNA, 25 bp, Homo sapien
taataggatttaacttgctgaaagt

SEQ ID NO: 5502522 - DNA, 25 bp, Homo sapien
aggcagatcaccttaggtcacgagt

SEQ ID NO: 5502523 - DNA, 25 bp, Homo sapien
gaactggaacgatcacttgagcctg

SEQ ID NO: 5502524 - DNA, 25 bp, Homo sapien
taaaattttcaagggcatatgaggt

SEQ ID NO: 5502525 - DNA, 25 bp, Homo sapien
atgttactactgcaagaaggtcctt

SEQ ID NO: 5502526 - DNA, 25 bp, Homo sapien
ttcccttgtgtaagaaaatggagtg

SEQ ID NO: 5502527 - DNA, 25 bp, Homo sapien
agatgctataccatagtggcttccc

SEQ ID NO: 5502528 - DNA, 25 bp, Homo sapien
actcaactccagccatttgccactc

SEQ ID NO: 5502529 - DNA, 25 bp, Homo sapien
gcttgagtgctgcccttgtactgcc

SEQ ID NO: 5502530 - DNA, 25 bp, Homo sapien
ttggcccaacaaaactcttactggc

SEQ ID NO: 5502531 - DNA, 25 bp, Homo sapien
gaggtgttccagactatgttactac

SEQ ID NO: 5502532 - DNA, 25 bp, Homo sapien
aagaaggtccttgccacagaaagtt

SEQ ID NO: 5502533 - DNA, 25 bp, Homo sapien
ctgttgggctagaaacacctcccac

SEQ ID NO: 5502534 - DNA, 25 bp, Homo sapien
tcataatttatgttggaggtgttcc

SEQ ID NO: 5502535 - DNA, 25 bp, Homo sapien
aattaagttaatattggtctataaa

SEQ ID NO: 5502536 - DNA, 25 bp, Homo sapien
tttatagaccaatattaacttaatt

SEQ ID NO: 5502537 - DNA, 25 bp, Homo sapien
atgcacagtgataactcggcgatac

SEQ ID NO: 5502538 - DNA, 25 bp, Homo sapien
gtaaggttatggtaggagtcaataa

SEQ ID NO: 5502539 - DNA, 25 bp, Homo sapien
tttgaacaaaaagtggccacccatc

SEQ ID NO: 5502540 - DNA, 25 bp, Homo sapien
gcccagctttcgaagacacagtccc

SEQ ID NO: 5502541 - DNA, 25 bp, Homo sapien
ttctggagagatctgatgcacagtg

SEQ ID NO: 5502542 - DNA, 25 bp, Homo sapien
tcggctgaaaagatgtagccagtcc

SEQ ID NO: 5502543 - DNA, 25 bp, Homo sapien
gtgggtagttactgtctgggtacaa

SEQ ID NO: 5502544 - DNA, 25 bp, Homo sapien
gaagccactgttctggaaaggatgt

SEQ ID NO: 5502545 - DNA, 25 bp, Homo sapien
tggtggagggtttcagtaatttata

SEQ ID NO: 5502546 - DNA, 25 bp, Homo sapien
ctgcggacatcccgaatcggtcctc

SEQ ID NO: 5502547 - DNA, 25 bp, Homo sapien
ggagtgaggtcttgtaaatgagttc

SEQ ID NO: 5502548 - DNA, 25 bp, Homo sapien
gaaacaccggtcgacttgcctactg

SEQ ID NO: 5502549 - DNA, 25 bp, Homo sapien
cagtaggcaagtcgaccggtgtttc

SEQ ID NO: 5502550 - DNA, 25 bp, Homo sapien
taaagtagccaagtgtcagtttctt

SEQ ID NO: 5502551 - DNA, 25 bp, Homo sapien
taaaaataaggattgtgagagagaa

SEQ ID NO: 5502552 - DNA, 25 bp, Homo sapien
tatgggcaggttacttaaagtagcc

SEQ ID NO: 5502553 - DNA, 25 bp, Homo sapien
cttgatgtggaaggttaaattgttc

SEQ ID NO: 5502554 - DNA, 25 bp, Homo sapien
atatagggtaattgatgatggttat

SEQ ID NO: 5502555 - DNA, 25 bp, Homo sapien
atttgtaaatgagggataataccta

SEQ ID NO: 5502556 - DNA, 25 bp, Homo sapien
tggctgtgtaactatgggcaggtta

SEQ ID NO: 5502557 - DNA, 25 bp, Homo sapien
ccgtattgagttattgtaagggtta

SEQ ID NO: 5502558 - DNA, 25 bp, Homo sapien
tccaaagtaaccaacagcacctgac

SEQ ID NO: 5502559 - DNA, 25 bp, Homo sapien
gaacaacgttgcattaaagccagat

SEQ ID NO: 5502560 - DNA, 25 bp, Homo sapien
agaatggagcctagctaggttgatt

SEQ ID NO: 5502561 - DNA, 25 bp, Homo sapien
gtgtacaggtgcgacacaaggactc

SEQ ID NO: 5502562 - DNA, 25 bp, Homo sapien
gagtccttgtgtcgcacctgtacac

SEQ ID NO: 5502563 - DNA, 25 bp, Homo sapien
gagtaaatcttttaaaactgataaa

SEQ ID NO: 5502564 - DNA, 25 bp, Homo sapien
tttatcagttttaaaagatttactc

SEQ ID NO: 5502565 - DNA, 25 bp, Homo sapien
ataagacgagcaaatatcgggaaag

SEQ ID NO: 5502566 - DNA, 25 bp, Homo sapien
tctgagtattagaaaccgagtttgc

SEQ ID NO: 5502567 - DNA, 25 bp, Homo sapien
cctgggcacgctctgtgaaatgtgc

SEQ ID NO: 5502568 - DNA, 25 bp, Homo sapien
tgctctgagcaatttggacctcctc

SEQ ID NO: 5502569 - DNA, 25 bp, Homo sapien
agtttaaaaaccctggacatgatcc

SEQ ID NO: 5502570 - DNA, 25 bp, Homo sapien
taaatttctagcaaggaactggcct

SEQ ID NO: 5502571 - DNA, 25 bp, Homo sapien
gcatagaccgtttggggccttgtct

SEQ ID NO: 5502572 - DNA, 25 bp, Homo sapien
ttcagaacccgaaatggactgtcac

SEQ ID NO: 5502573 - DNA, 25 bp, Homo sapien
gcattgactgtccagtgcaggccac

SEQ ID NO: 5502574 - DNA, 25 bp, Homo sapien
tgtgtcacgggggccattttctata

SEQ ID NO: 5502575 - DNA, 25 bp, Homo sapien
aatatcgagagtaaatttcccagtc

SEQ ID NO: 5502576 - DNA, 25 bp, Homo sapien
taagtatttgggtgtctcaggctgt

SEQ ID NO: 5502577 - DNA, 25 bp, Homo sapien
gcttggataagtatttgggtgtctc

SEQ ID NO: 5502578 - DNA, 25 bp, Homo sapien
gctgcagtagtatagggagaataca

SEQ ID NO: 5502579 - DNA, 25 bp, Homo sapien
aggaagtggtgctttcaagagagca

SEQ ID NO: 5502580 - DNA, 25 bp, Homo sapien
catagggtgctcctttgatgtggtg

SEQ ID NO: 5502581 - DNA, 25 bp, Homo sapien
attcttgtgtcccatagggtgctcc

SEQ ID NO: 5502582 - DNA, 25 bp, Homo sapien
gtgatgtgatccattttcaggactc

SEQ ID NO: 5502583 - DNA, 25 bp, Homo sapien
cctcttcccctagggatagggcttc

SEQ ID NO: 5502584 - DNA, 25 bp, Homo sapien
agccacctagtggagatactgggct

SEQ ID NO: 5502585 - DNA, 25 bp, Homo sapien
gacttaagggctgctgttcacattc

SEQ ID NO: 5502586 - DNA, 25 bp, Homo sapien
agcttgccctagggttgcttggata

SEQ ID NO: 5502587 - DNA, 25 bp, Homo sapien
ccataccttgcttagttcgaggacc

SEQ ID NO: 5502588 - DNA, 25 bp, Homo sapien
attatattcagggccaaattcaggc

SEQ ID NO: 5502589 - DNA, 25 bp, Homo sapien
ctttcctgaccattgaaggcacttc

SEQ ID NO: 5502590 - DNA, 25 bp, Homo sapien
cttgggttgaaatgaagttggaaga

SEQ ID NO: 5502591 - DNA, 25 bp, Homo sapien
cattctgttgctatgtaggctattc

SEQ ID NO: 5502592 - DNA, 25 bp, Homo sapien
tgaagttggaagaagacacttctcc

SEQ ID NO: 5502593 - DNA, 25 bp, Homo sapien
attcaggctgccaaattagtatgtt

SEQ ID NO: 5502594 - DNA, 25 bp, Homo sapien
tacagatcagcgagaatttcaggga

SEQ ID NO: 5502595 - DNA, 25 bp, Homo sapien
caccgcgctcggccacatttttaat

SEQ ID NO: 5502596 - DNA, 25 bp, Homo sapien
ctagtctagaggttaatggaattat

SEQ ID NO: 5502597 - DNA, 25 bp, Homo sapien
gagaatttcagggatgacctagtct

SEQ ID NO: 5502598 - DNA, 25 bp, Homo sapien
gcgccgaaataagcaaatcgaaagc

SEQ ID NO: 5502599 - DNA, 25 bp, Homo sapien
aaaagctgcagcagtggaagtgtta

SEQ ID NO: 5502600 - DNA, 25 bp, Homo sapien
ttcaaccagccatgcgccgaaataa

SEQ ID NO: 5502601 - DNA, 25 bp, Homo sapien
gaaatgggtaagttcctggacacat

SEQ ID NO: 5502602 - DNA, 25 bp, Homo sapien
cctcccaagactaaaccaggaagaa

SEQ ID NO: 5502603 - DNA, 25 bp, Homo sapien
caaatagatgcaatagaaaatgata

SEQ ID NO: 5502604 - DNA, 25 bp, Homo sapien
acaagttctgaaattgaggtagcaa

SEQ ID NO: 5502605 - DNA, 25 bp, Homo sapien
atctagaagaaatgggtaagttcct

SEQ ID NO: 5502606 - DNA, 25 bp, Homo sapien
ttagcctaccaaccaaaaatgtcca

SEQ ID NO: 5502607 - DNA, 25 bp, Homo sapien
acataaaaagaatagggtataatta

SEQ ID NO: 5502608 - DNA, 25 bp, Homo sapien
atcctaccagaggcataaagaggag

SEQ ID NO: 5502609 - DNA, 25 bp, Homo sapien
ccctgttgacagaagccctagagtc

SEQ ID NO: 5502610 - DNA, 25 bp, Homo sapien
gtgcgccacctccttgctcctactc

SEQ ID NO: 5502611 - DNA, 25 bp, Homo sapien
actcaagggttgtcagtgcagtttg

SEQ ID NO: 5502612 - DNA, 25 bp, Homo sapien
tgcagtctcttgaaaggggctgctc

SEQ ID NO: 5502613 - DNA, 25 bp, Homo sapien
tggtaatacaggaaccttcaaggaa

SEQ ID NO: 5502614 - DNA, 25 bp, Homo sapien
atcctcctgttcatggtgcgccacc

SEQ ID NO: 5502615 - DNA, 25 bp, Homo sapien
agcaaggcctcccagattactcaag

SEQ ID NO: 5502616 - DNA, 25 bp, Homo sapien
acctggacctttctggactctcagc

SEQ ID NO: 5502617 - DNA, 25 bp, Homo sapien
agtcacccaaaagccctagagtcca

SEQ ID NO: 5502618 - DNA, 25 bp, Homo sapien
gagtcactgaggcagttctgaccct

SEQ ID NO: 5502619 - DNA, 25 bp, Homo sapien
gccctagagtccagacagctggagc

SEQ ID NO: 5502620 - DNA, 25 bp, Homo sapien
gtgcagagatagacaacttgatgaa

SEQ ID NO: 5502621 - DNA, 25 bp, Homo sapien
tatcctcgagaccttgggacagaaa

SEQ ID NO: 5502622 - DNA, 25 bp, Homo sapien
ttggaacactaagggcaagcctttg

SEQ ID NO: 5502623 - DNA, 25 bp, Homo sapien
acacagaactaggcaaaaaaagaat

SEQ ID NO: 5502624 - DNA, 25 bp, Homo sapien
aacttgatgaatagaatggaagagc

SEQ ID NO: 5502625 - DNA, 25 bp, Homo sapien
gaagagcccaacacagaactaggca

SEQ ID NO: 5502626 - DNA, 25 bp, Homo sapien
aaaaagtgctaatcatataagagac

SEQ ID NO: 5502627 - DNA, 25 bp, Homo sapien
atatgaatgcgtcaggcagctccta

SEQ ID NO: 5502628 - DNA, 25 bp, Homo sapien
aaatgacagatggcactctagccac

SEQ ID NO: 5502629 - DNA, 25 bp, Homo sapien
atgaaattggactactaccttaccc

SEQ ID NO: 5502630 - DNA, 25 bp, Homo sapien
ttccaaggaatttgataagctgatt

SEQ ID NO: 5502631 - DNA, 25 bp, Homo sapien
ttgataatagagctagaatggccaa

SEQ ID NO: 5502632 - DNA, 25 bp, Homo sapien
aagtgtggaactaaggtacaaatac

SEQ ID NO: 5502633 - DNA, 25 bp, Homo sapien
ctaagagttgaatggtatacaccct

SEQ ID NO: 5502634 - DNA, 25 bp, Homo sapien
agaagttgtgtgtctgtaagaaatt

SEQ ID NO: 5502635 - DNA, 25 bp, Homo sapien
ttagaaatgtgaaattggcttagtc

SEQ ID NO: 5502636 - DNA, 25 bp, Homo sapien
ctatccaaaaccagacaaaagccaa

SEQ ID NO: 5502637 - DNA, 25 bp, Homo sapien
gagctagaatggccaagtgatttac

SEQ ID NO: 5502638 - DNA, 25 bp, Homo sapien
tttgggagttcagaatatccatgta

SEQ ID NO: 5502639 - DNA, 25 bp, Homo sapien
gaagagaaaagacaaccaactatcc

SEQ ID NO: 5502640 - DNA, 25 bp, Homo sapien
attggcttagtcatgagattctctt

SEQ ID NO: 5502641 - DNA, 25 bp, Homo sapien
atgctgacaaattagccaacactgc

SEQ ID NO: 5502642 - DNA, 25 bp, Homo sapien
ggggcataggactacagacattttt

SEQ ID NO: 5502643 - DNA, 25 bp, Homo sapien
actgaagagtgagtagcaaatattc

SEQ ID NO: 5502644 - DNA, 25 bp, Homo sapien
attagaggaagcaatttcggaacaa

SEQ ID NO: 5502645 - DNA, 25 bp, Homo sapien
gaaggcaatattgtggggctttcag

SEQ ID NO: 5502646 - DNA, 25 bp, Homo sapien
caatgaaatggtttgagaaggcaat

SEQ ID NO: 5502647 - DNA, 25 bp, Homo sapien
aaacaaggagaaaaatctagtatgc

SEQ ID NO: 5502648 - DNA, 25 bp, Homo sapien
tcgagaagcccacactgccagtgaa

SEQ ID NO: 5502649 - DNA, 25 bp, Homo sapien
attatcgaacacttgccaggcactt

SEQ ID NO: 5502650 - DNA, 25 bp, Homo sapien
atccatgtccagggtaaggatcgag

SEQ ID NO: 5502651 - DNA, 25 bp, Homo sapien
ctaggtgcatgcatgggtttaacca

SEQ ID NO: 5502652 - DNA, 25 bp, Homo sapien
tttgtccaccctcaggcggggcata

SEQ ID NO: 5502653 - DNA, 25 bp, Homo sapien
tggataactggcaaaacaactcact

SEQ ID NO: 5502654 - DNA, 25 bp, Homo sapien
caaaaggatttgtcaggtaagtaat

SEQ ID NO: 5502655 - DNA, 25 bp, Homo sapien
tgcttctttgcaaggcaccgttttt

SEQ ID NO: 5502656 - DNA, 25 bp, Homo sapien
tcaggtaagtaataaagctcgggga

SEQ ID NO: 5502657 - DNA, 25 bp, Homo sapien
ttttccaagactcaacaaatgacta

SEQ ID NO: 5502658 - DNA, 25 bp, Homo sapien
actgaccaaaggtacaagagcaagt

SEQ ID NO: 5502659 - DNA, 25 bp, Homo sapien
ttttgcagcagtggataactggcaa

SEQ ID NO: 5502660 - DNA, 25 bp, Homo sapien
ctgagccgcacaagatacagactca

SEQ ID NO: 5502661 - DNA, 25 bp, Homo sapien
gctttccacaactgaccaaaggtac

SEQ ID NO: 5502662 - DNA, 25 bp, Homo sapien
aaagttgcagagttcgcttattcag

SEQ ID NO: 5502663 - DNA, 25 bp, Homo sapien
attttgataaaagtgaagaatctga

SEQ ID NO: 5502664 - DNA, 25 bp, Homo sapien
gcgtccgaatgtctgtcccgacaat

SEQ ID NO: 5502665 - DNA, 25 bp, Homo sapien
attgtcgggacagacattcggacgc

SEQ ID NO: 5502666 - DNA, 25 bp, Homo sapien
tagagaggctagcataaacctgcca

SEQ ID NO: 5502667 - DNA, 25 bp, Homo sapien
ggccacgcaggaaatacaaatggaa

SEQ ID NO: 5502668 - DNA, 25 bp, Homo sapien
gctaccattccgtgccagccccgtc

SEQ ID NO: 5502669 - DNA, 25 bp, Homo sapien
actgtagcttgaaagcgtgagagga

SEQ ID NO: 5502670 - DNA, 25 bp, Homo sapien
tgcttgacccttgtgaaggcgagga

SEQ ID NO: 5502671 - DNA, 25 bp, Homo sapien
aggcggccttctgcaatgtgatggg

SEQ ID NO: 5502672 - DNA, 25 bp, Homo sapien
atgcctcagagcctagatgacttgc

SEQ ID NO: 5502673 - DNA, 25 bp, Homo sapien
tggaaatgacttgttggagtgatag

SEQ ID NO: 5502674 - DNA, 25 bp, Homo sapien
aacttggagtgagagcatacatatt

SEQ ID NO: 5502675 - DNA, 25 bp, Homo sapien
ttgagctgagagacagtgtgtataa

SEQ ID NO: 5502676 - DNA, 25 bp, Homo sapien
ctccaagtggacgttttcagggtta

SEQ ID NO: 5502677 - DNA, 25 bp, Homo sapien
tgtctcagggagagtttatggaaaa

SEQ ID NO: 5502678 - DNA, 25 bp, Homo sapien
gggcaggaggactcgctcctaattc

SEQ ID NO: 5502679 - DNA, 25 bp, Homo sapien
ctccagagggtctgcctaacttcat

SEQ ID NO: 5502680 - DNA, 25 bp, Homo sapien
gccctggtgaggccactgaatttca

SEQ ID NO: 5502681 - DNA, 25 bp, Homo sapien
aaccgaagccgctcatcagaatgtc

SEQ ID NO: 5502682 - DNA, 25 bp, Homo sapien
cctggttccgagtcaaaggatgagg

SEQ ID NO: 5502683 - DNA, 25 bp, Homo sapien
aaaggatgaggccctgaatctgtta

SEQ ID NO: 5502684 - DNA, 25 bp, Homo sapien
cagtaattagctctctgggcaggag

SEQ ID NO: 5502685 - DNA, 25 bp, Homo sapien
tttgaccagttagaaattaggagct

SEQ ID NO: 5502686 - DNA, 25 bp, Homo sapien
agccctccttggtaaccccagccca

SEQ ID NO: 5502687 - DNA, 25 bp, Homo sapien
ctttcagataacagacaaacacgtc

SEQ ID NO: 5502688 - DNA, 25 bp, Homo sapien
cagttgctctgatagatggaaaatg

SEQ ID NO: 5502689 - DNA, 25 bp, Homo sapien
acaatgccagtttaatcaggtgatg

SEQ ID NO: 5502690 - DNA, 25 bp, Homo sapien
cagtttgaagtcaggattcttattc

SEQ ID NO: 5502691 - DNA, 25 bp, Homo sapien
gatcacttggtgagttgatgtctgc

SEQ ID NO: 5502692 - DNA, 25 bp, Homo sapien
attttagttttagtatcagtgatag

SEQ ID NO: 5502693 - DNA, 25 bp, Homo sapien
ctgtatcagtttgaagtcaggattc

SEQ ID NO: 5502694 - DNA, 25 bp, Homo sapien
ggtgagttgatgtctgccaggtttc

SEQ ID NO: 5502695 - DNA, 25 bp, Homo sapien
gtttcttgcctaaatcagttgctct

SEQ ID NO: 5502696 - DNA, 25 bp, Homo sapien
atcatatcatgaagcatacaatgcc

SEQ ID NO: 5502697 - DNA, 25 bp, Homo sapien
ttgaggaagacctgtccctttcctg

SEQ ID NO: 5502698 - DNA, 25 bp, Homo sapien
tctgatagatggaaaatggtaattt

SEQ ID NO: 5502699 - DNA, 25 bp, Homo sapien
atcagctccgatgtaggaggacttc

SEQ ID NO: 5502700 - DNA, 25 bp, Homo sapien
ttcccaagaacaacatcatggttac

SEQ ID NO: 5502701 - DNA, 25 bp, Homo sapien
ccaggtggttggtcttgacttatgt

SEQ ID NO: 5502702 - DNA, 25 bp, Homo sapien
tcatttcccaagtgtgaatctgact

SEQ ID NO: 5502703 - DNA, 25 bp, Homo sapien
tactcagacttagggatgaggatct

SEQ ID NO: 5502704 - DNA, 25 bp, Homo sapien
ctcgagggctcagacactttatgtt

SEQ ID NO: 5502705 - DNA, 25 bp, Homo sapien
tgcggcgtcccataagtggattcat

SEQ ID NO: 5502706 - DNA, 25 bp, Homo sapien
cccctcttgactggtgcaatcttcc

SEQ ID NO: 5502707 - DNA, 25 bp, Homo sapien
gtagcatgtctgcggcgtcccataa

SEQ ID NO: 5502708 - DNA, 25 bp, Homo sapien
ctcttcaaggtcagtccaagttctt

SEQ ID NO: 5502709 - DNA, 25 bp, Homo sapien
cattattagggtagcatgtctgcgg

SEQ ID NO: 5502710 - DNA, 25 bp, Homo sapien
ttgctgtccttactgataggccata

SEQ ID NO: 5502711 - DNA, 25 bp, Homo sapien
ccaggactattgaaaactatgccat

SEQ ID NO: 5502712 - DNA, 25 bp, Homo sapien
ggagaccagagattattacagaatc

SEQ ID NO: 5502713 - DNA, 25 bp, Homo sapien
taagctattatgcagatgaaagaat

SEQ ID NO: 5502714 - DNA, 25 bp, Homo sapien
catttaggaaacagacaaaagacga

SEQ ID NO: 5502715 - DNA, 25 bp, Homo sapien
agaaagaaaggaatgtctgcaatta

SEQ ID NO: 5502716 - DNA, 25 bp, Homo sapien
atcaaaaactaggctgaaatccata

SEQ ID NO: 5502717 - DNA, 25 bp, Homo sapien
ataacctagacaaggaataggaggc

SEQ ID NO: 5502718 - DNA, 25 bp, Homo sapien
ttcaataattaaagggcaatcaact

SEQ ID NO: 5502719 - DNA, 25 bp, Homo sapien
gaatcaacctgacaataacctagac

SEQ ID NO: 5502720 - DNA, 25 bp, Homo sapien
caccaccaagaggtccagtgcattt

SEQ ID NO: 5502721 - DNA, 25 bp, Homo sapien
agcggcatttgggtgctcatcaagt

SEQ ID NO: 5502722 - DNA, 25 bp, Homo sapien
gagtgaacaagaatgtatcctgtct

SEQ ID NO: 5502723 - DNA, 25 bp, Homo sapien
ggacagtcggcatgaaaaatatagc

SEQ ID NO: 5502724 - DNA, 25 bp, Homo sapien
aaaatatagcaagtcaaagggctgg

SEQ ID NO: 5502725 - DNA, 25 bp, Homo sapien
gagccagggaactccctcccctagc

SEQ ID NO: 5502726 - DNA, 25 bp, Homo sapien
caaaacctcctatcaacagggaaga

SEQ ID NO: 5502727 - DNA, 25 bp, Homo sapien
gagcattgcctttgagcggcatttg

SEQ ID NO: 5502728 - DNA, 25 bp, Homo sapien
gaaacactgcacacaaaacctacaa

SEQ ID NO: 5502729 - DNA, 25 bp, Homo sapien
atcccttgaggtattacaccagttt

SEQ ID NO: 5502730 - DNA, 25 bp, Homo sapien
tcgcctcatccgggaagtacaagga

SEQ ID NO: 5502731 - DNA, 25 bp, Homo sapien
taagaaatcagcaggaatagaaaca

SEQ ID NO: 5502732 - DNA, 25 bp, Homo sapien
aagacacagaagcccctaagtttgg

SEQ ID NO: 5502733 - DNA, 25 bp, Homo sapien
ttcaacgcaccacattcaacagaca

SEQ ID NO: 5502734 - DNA, 25 bp, Homo sapien
gaaaggcattttacaagacacagaa

SEQ ID NO: 5502735 - DNA, 25 bp, Homo sapien
aactccagctggtttaatgtgtagc

SEQ ID NO: 5502736 - DNA, 25 bp, Homo sapien
actatggtgataggattcaacgcac

SEQ ID NO: 5502737 - DNA, 25 bp, Homo sapien
tcaacagacatgtggccaaattctc

SEQ ID NO: 5502738 - DNA, 25 bp, Homo sapien
cttttctacaagggagaaaggcatt

SEQ ID NO: 5502739 - DNA, 25 bp, Homo sapien
agggtgactatggtgataggattca

SEQ ID NO: 5502740 - DNA, 25 bp, Homo sapien
tattttacctacaaccaactccagc

SEQ ID NO: 5502741 - DNA, 25 bp, Homo sapien
atggtggagaagaaagactttttca

SEQ ID NO: 5502742 - DNA, 25 bp, Homo sapien
tgtagcttacagaattgaacccact

SEQ ID NO: 5502743 - DNA, 25 bp, Homo sapien
catacgtaggtcgtgaagaacgcgt

SEQ ID NO: 5502744 - DNA, 25 bp, Homo sapien
acgcgttcttcacgacctacgtatg

SEQ ID NO: 5502745 - DNA, 25 bp, Homo sapien
atcgagaattactttgttaaattct

SEQ ID NO: 5502746 - DNA, 25 bp, Homo sapien
agaatttaacaaagtaattctcgat

SEQ ID NO: 5502747 - DNA, 25 bp, Homo sapien
gtatcgagaattactttgttaaatt

SEQ ID NO: 5502748 - DNA, 25 bp, Homo sapien
aatttaacaaagtaattctcgatac

SEQ ID NO: 5502749 - DNA, 25 bp, Homo sapien
gtgtatcgagaattactttgttaaa

SEQ ID NO: 5502750 - DNA, 25 bp, Homo sapien
tttaacaaagtaattctcgatacac

SEQ ID NO: 5502751 - DNA, 25 bp, Homo sapien
acgaggaggtgctcgtccggaccac

SEQ ID NO: 5502752 - DNA, 25 bp, Homo sapien
gtggtccggacgagcacctcctcgt

SEQ ID NO: 5502753 - DNA, 25 bp, Homo sapien
gtgagcgtaccgactcccgtccgga

SEQ ID NO: 5502754 - DNA, 25 bp, Homo sapien
tccggacgggagtcggtacgctcac

SEQ ID NO: 5502755 - DNA, 25 bp, Homo sapien
cttcacgttaccataagaacgaaag

SEQ ID NO: 5502756 - DNA, 25 bp, Homo sapien
ctttcgttcttatggtaacgtgaag

SEQ ID NO: 5502757 - DNA, 25 bp, Homo sapien
ccggagtccgccctgagacgtcccg

SEQ ID NO: 5502758 - DNA, 25 bp, Homo sapien
cgggacgtctcagggcggactccgg

SEQ ID NO: 5502759 - DNA, 25 bp, Homo sapien
gtcctcggtcccgttgcggtcgtgg

SEQ ID NO: 5502760 - DNA, 25 bp, Homo sapien
ccacgaccgcaacgggaccgaggac

SEQ ID NO: 5502761 - DNA, 25 bp, Homo sapien
accgcgcccgtgttctctttatcgt

SEQ ID NO: 5502762 - DNA, 25 bp, Homo sapien
acgataaagagaacacgggcgcggt

SEQ ID NO: 5502763 - DNA, 25 bp, Homo sapien
ccgtcgaggggactacattatccgg

SEQ ID NO: 5502764 - DNA, 25 bp, Homo sapien
ccggataatgtagtcccctcgacgg

SEQ ID NO: 5502765 - DNA, 25 bp, Homo sapien
ggaacacccctgaggcgtccgtctt

SEQ ID NO: 5502766 - DNA, 25 bp, Homo sapien
aagacggacgcctcaggggtgttcc

SEQ ID NO: 5502767 - DNA, 25 bp, Homo sapien
caccacctccctctcacccctaccc

SEQ ID NO: 5502768 - DNA, 25 bp, Homo sapien
gggtaggggtgagagggaggtggtg

SEQ ID NO: 5502769 - DNA, 25 bp, Homo sapien
gactctcaccggcccccttccccac

SEQ ID NO: 5502770 - DNA, 25 bp, Homo sapien
gtggggaagggggccggtgagagtc

SEQ ID NO: 5502771 - DNA, 25 bp, Homo sapien
gatagggtgtcgggcccagagggac

SEQ ID NO: 5502772 - DNA, 25 bp, Homo sapien
gtccctctgggcccgacaccctatc

SEQ ID NO: 5502773 - DNA, 25 bp, Homo sapien
gggcagtctctacgagaagaaaggc

SEQ ID NO: 5502774 - DNA, 25 bp, Homo sapien
gtgcatcaggttagtcaccagctcc

SEQ ID NO: 5502775 - DNA, 25 bp, Homo sapien
tgtaaggaggcttcagcacttgtgt

SEQ ID NO: 5502776 - DNA, 25 bp, Homo sapien
cgattcacaatctgggacgaccctg

SEQ ID NO: 5502777 - DNA, 25 bp, Homo sapien
tccctgcagccttcccacggtgttt

SEQ ID NO: 5502778 - DNA, 25 bp, Homo sapien
actcttaacgagcagcagaatcagg

SEQ ID NO: 5502779 - DNA, 25 bp, Homo sapien
agaatcaggcccagctcccaattcc

SEQ ID NO: 5502780 - DNA, 25 bp, Homo sapien
aggcacaatccaaggctcaggtact

SEQ ID NO: 5502781 - DNA, 25 bp, Homo sapien
gacgatggcttggacctctcgattc

SEQ ID NO: 5502782 - DNA, 25 bp, Homo sapien
gttcccaggctctcaggcacaatcc

SEQ ID NO: 5502783 - DNA, 25 bp, Homo sapien
ggcagacgctaaccgtgagatgcca

SEQ ID NO: 5502784 - DNA, 25 bp, Homo sapien
caagtatacatatgaaacggtctgt

SEQ ID NO: 5502785 - DNA, 25 bp, Homo sapien
gaaacggtctgtacattaatgcctc

SEQ ID NO: 5502786 - DNA, 25 bp, Homo sapien
aaatgacagctactcctggtccctc

SEQ ID NO: 5502787 - DNA, 25 bp, Homo sapien
ttaatgcctcataatagcagctctt

SEQ ID NO: 5502788 - DNA, 25 bp, Homo sapien
agcagctcttatttgggaaagggtt

SEQ ID NO: 5502789 - DNA, 25 bp, Homo sapien
ttctgctcccagatgccactagagt

SEQ ID NO: 5502790 - DNA, 25 bp, Homo sapien
atcgataactccaatgtaccttctc

SEQ ID NO: 5502791 - DNA, 25 bp, Homo sapien
ccagatgccactagagtagctttgt

SEQ ID NO: 5502792 - DNA, 25 bp, Homo sapien
tttgctatagctacgatacatatca

SEQ ID NO: 5502793 - DNA, 25 bp, Homo sapien
catgtgcttgcaaacaaagatttcc

SEQ ID NO: 5502794 - DNA, 25 bp, Homo sapien
tcaataagtgagaagcttgcacatt

SEQ ID NO: 5502795 - DNA, 25 bp, Homo sapien
aagggacctattccgagagagaaac

SEQ ID NO: 5502796 - DNA, 25 bp, Homo sapien
gtttctctctcggaataggtccctt

SEQ ID NO: 5502797 - DNA, 25 bp, Homo sapien
acagatctgtggcttgcctgacgtc

SEQ ID NO: 5502798 - DNA, 25 bp, Homo sapien
gaccgcccagcaagcaagctgtttt

SEQ ID NO: 5502799 - DNA, 25 bp, Homo sapien
tctccagctctgcgtgagccatggg

SEQ ID NO: 5502800 - DNA, 25 bp, Homo sapien
tgagctctcgatgggaatgggctca

SEQ ID NO: 5502801 - DNA, 25 bp, Homo sapien
tgcagtgtaaaggattcagacttgc

SEQ ID NO: 5502802 - DNA, 25 bp, Homo sapien
gtggccagagcccatctggattgac

SEQ ID NO: 5502803 - DNA, 25 bp, Homo sapien
tgggctgagtcctggcatatagttc

SEQ ID NO: 5502804 - DNA, 25 bp, Homo sapien
gcttagggcaaagttgggatttgaa

SEQ ID NO: 5502805 - DNA, 25 bp, Homo sapien
cttgcagtctgggaccgcccagcaa

SEQ ID NO: 5502806 - DNA, 25 bp, Homo sapien
tgacgtcacactgtagcttagggca

SEQ ID NO: 5502807 - DNA, 25 bp, Homo sapien
gtgcctaggatgagccaaatgctat

SEQ ID NO: 5502808 - DNA, 25 bp, Homo sapien
cctgttgtatttaacaatgatttct

SEQ ID NO: 5502809 - DNA, 25 bp, Homo sapien
agaaatcattgttaaatacaacagg

SEQ ID NO: 5502810 - DNA, 25 bp, Homo sapien
acagaggctgtattgtgtacaagct

SEQ ID NO: 5502811 - DNA, 25 bp, Homo sapien
cagttccatttgaaagtaggtcctc

SEQ ID NO: 5502812 - DNA, 25 bp, Homo sapien
attgtgtacaagcttctatggggca

SEQ ID NO: 5502813 - DNA, 25 bp, Homo sapien
tccatttgaaagtaggtcctcctct

SEQ ID NO: 5502814 - DNA, 25 bp, Homo sapien
tgtacaagcttctatggggcagcca

SEQ ID NO: 5502815 - DNA, 25 bp, Homo sapien
tcacagttccatttgaaagtaggtc

SEQ ID NO: 5502816 - DNA, 25 bp, Homo sapien
tgggccggtattcctgcagaacata

SEQ ID NO: 5502817 - DNA, 25 bp, Homo sapien
tcctgcagaacatatgtgtcacagt

SEQ ID NO: 5502818 - DNA, 25 bp, Homo sapien
tgaaagtaggtcctcctctctcccc

SEQ ID NO: 5502819 - DNA, 25 bp, Homo sapien
tgtgtacaagcttctatggggcagc

SEQ ID NO: 5502820 - DNA, 25 bp, Homo sapien
tgcagaacatatgtgtcacagttcc

SEQ ID NO: 5502821 - DNA, 25 bp, Homo sapien
cggaaaatatcgttgatatcgttgt

SEQ ID NO: 5502822 - DNA, 25 bp, Homo sapien
acaacgatatcaacgatattttccg

SEQ ID NO: 5502823 - DNA, 25 bp, Homo sapien
ctcgccgagccctggcggcccagcg

SEQ ID NO: 5502824 - DNA, 25 bp, Homo sapien
cgctgggccgccagggctcggcgag

SEQ ID NO: 5502825 - DNA, 25 bp, Homo sapien
tcttcccggacacaagggaagaatc

SEQ ID NO: 5502826 - DNA, 25 bp, Homo sapien
gattcttcccttgtgtccgggaaga

SEQ ID NO: 5502827 - DNA, 25 bp, Homo sapien
aatgagaaaccgattcacagatccc

SEQ ID NO: 5502828 - DNA, 25 bp, Homo sapien
tgcagccatgtgagttagtcctttt

SEQ ID NO: 5502829 - DNA, 25 bp, Homo sapien
caaggagagctggtattttaagaga

SEQ ID NO: 5502830 - DNA, 25 bp, Homo sapien
ccagctaacagccagcacttactgc

SEQ ID NO: 5502831 - DNA, 25 bp, Homo sapien
acagatcccagaaggaaaacacatc

SEQ ID NO: 5502832 - DNA, 25 bp, Homo sapien
agccatatggaagagaaccaaggca

SEQ ID NO: 5502833 - DNA, 25 bp, Homo sapien
catcccaagcagaataaacagaaat

SEQ ID NO: 5502834 - DNA, 25 bp, Homo sapien
tttaagagataactggcttcaggtt

SEQ ID NO: 5502835 - DNA, 25 bp, Homo sapien
gaaccaaggcacacctgttaacagc

SEQ ID NO: 5502836 - DNA, 25 bp, Homo sapien
agccttggttgtgcttccagctaac

SEQ ID NO: 5502837 - DNA, 25 bp, Homo sapien
agagtactgaaaacaaaagagaagc

SEQ ID NO: 5502838 - DNA, 25 bp, Homo sapien
atggtctgagctatgtcacagtact

SEQ ID NO: 5502839 - DNA, 25 bp, Homo sapien
cctgagccagaagaataatatgatc

SEQ ID NO: 5502840 - DNA, 25 bp, Homo sapien
tttggtggtcttggctattcctggc

SEQ ID NO: 5502841 - DNA, 25 bp, Homo sapien
ggcttgtcaagtgctcagataaatc

SEQ ID NO: 5502842 - DNA, 25 bp, Homo sapien
tgtactgtacatggaatataggaaa

SEQ ID NO: 5502843 - DNA, 25 bp, Homo sapien
cctagaagagatttctgtgcctaac

SEQ ID NO: 5502844 - DNA, 25 bp, Homo sapien
actgaacaggtactccttcccaccc

SEQ ID NO: 5502845 - DNA, 25 bp, Homo sapien
tgtgcctaacgtaaggtaggatcta

SEQ ID NO: 5502846 - DNA, 25 bp, Homo sapien
ttgtctgtgttttgggtctctattc

SEQ ID NO: 5502847 - DNA, 25 bp, Homo sapien
tgccagttgtcccagcagcagcatt

SEQ ID NO: 5502848 - DNA, 25 bp, Homo sapien
ccacaccctgagatgtgtgtgtatc

SEQ ID NO: 5502849 - DNA, 25 bp, Homo sapien
ggcgggtggagcgggcgtcttggta

SEQ ID NO: 5502850 - DNA, 25 bp, Homo sapien
taccaagacgcccgctccacccgcc

SEQ ID NO: 5502851 - DNA, 25 bp, Homo sapien
aggcgggtggagcgggcgtcttggt

SEQ ID NO: 5502852 - DNA, 25 bp, Homo sapien
accaagacgcccgctccacccgcct

SEQ ID NO: 5502853 - DNA, 25 bp, Homo sapien
gccccgcaggaggcgggtggagcgg

SEQ ID NO: 5502854 - DNA, 25 bp, Homo sapien
ccgctccacccgcctcctgcggggc

SEQ ID NO: 5502855 - DNA, 25 bp, Homo sapien
cacaggactttcaggtgcatgaacc

SEQ ID NO: 5502856 - DNA, 25 bp, Homo sapien
gcacacacttaagcacaggactttc

SEQ ID NO: 5502857 - DNA, 25 bp, Homo sapien
agtccacaaagcttccggctcctac

SEQ ID NO: 5502858 - DNA, 25 bp, Homo sapien
caggaaacttcatcacagtaacgtc

SEQ ID NO: 5502859 - DNA, 25 bp, Homo sapien
tgcatgaacctgagagtccacaaag

SEQ ID NO: 5502860 - DNA, 25 bp, Homo sapien
ttgtaatagtacatggagtctgttc

SEQ ID NO: 5502861 - DNA, 25 bp, Homo sapien
ggtgcttgagaattaaaggcttttg

SEQ ID NO: 5502862 - DNA, 25 bp, Homo sapien
gatgagctcagatttcaggaaactt

SEQ ID NO: 5502863 - DNA, 25 bp, Homo sapien
agtcattggatatgggtatacagat

SEQ ID NO: 5502864 - DNA, 25 bp, Homo sapien
taataaggcttgagaattgtgctag

SEQ ID NO: 5502865 - DNA, 25 bp, Homo sapien
tctgagcaagatcatgcacacactt

SEQ ID NO: 5502866 - DNA, 25 bp, Homo sapien
tgtgtgtgtagattgtgccattttg

SEQ ID NO: 5502867 - DNA, 25 bp, Homo sapien
aggtactcagtatctagaaaatgac

SEQ ID NO: 5502868 - DNA, 25 bp, Homo sapien
gagtgggggctttgtccatcttgtt

SEQ ID NO: 5502869 - DNA, 25 bp, Homo sapien
ctctaatggcatctagcctagaacc

SEQ ID NO: 5502870 - DNA, 25 bp, Homo sapien
ttactttgtaggtcttgggcaaata

SEQ ID NO: 5502871 - DNA, 25 bp, Homo sapien
ctcttctagacctagtggggtggga

SEQ ID NO: 5502872 - DNA, 25 bp, Homo sapien
tgtagcatctttagaagcactcacc

SEQ ID NO: 5502873 - DNA, 25 bp, Homo sapien
attctttgcctgataaccccgttag

SEQ ID NO: 5502874 - DNA, 25 bp, Homo sapien
ccccgttagtcgttgaggattcagc

SEQ ID NO: 5502875 - DNA, 25 bp, Homo sapien
ctagaaccaagcatatgataggtac

SEQ ID NO: 5502876 - DNA, 25 bp, Homo sapien
ttgaccataacccagtgtaaatcgg

SEQ ID NO: 5502877 - DNA, 25 bp, Homo sapien
agggtgggtatttgcgactttatag

SEQ ID NO: 5502878 - DNA, 25 bp, Homo sapien
cttcctggagggatttaggttcaat

SEQ ID NO: 5502879 - DNA, 25 bp, Homo sapien
agaacaagctgtgtggatatttgga

SEQ ID NO: 5502880 - DNA, 25 bp, Homo sapien
actgcacctagccttgtatgatttc

SEQ ID NO: 5502881 - DNA, 25 bp, Homo sapien
tataggttactcagagagacctcat

SEQ ID NO: 5502882 - DNA, 25 bp, Homo sapien
ttgagacattggtgacatttgagca

SEQ ID NO: 5502883 - DNA, 25 bp, Homo sapien
ttctatgagaacaccctccttcccc

SEQ ID NO: 5502884 - DNA, 25 bp, Homo sapien
gagttcaggtgacaaaaccctcaac

SEQ ID NO: 5502885 - DNA, 25 bp, Homo sapien
atttggaagaagagggttttcttga

SEQ ID NO: 5502886 - DNA, 25 bp, Homo sapien
cagcattgtgctgagttcaggtgac

SEQ ID NO: 5502887 - DNA, 25 bp, Homo sapien
ctcatttgcaggacatggcaggaag

SEQ ID NO: 5502888 - DNA, 25 bp, Homo sapien
aatagaacatttattacattgagaa

SEQ ID NO: 5502889 - DNA, 25 bp, Homo sapien
ttctcaatgtaataaatgttctatt

SEQ ID NO: 5502890 - DNA, 25 bp, Homo sapien
gtagcgtccgcgtacattacactgg

SEQ ID NO: 5502891 - DNA, 25 bp, Homo sapien
ccagtgtaatgtacgcggacgctac

SEQ ID NO: 5502892 - DNA, 25 bp, Homo sapien
aataggataaaatattcgatgttta

SEQ ID NO: 5502893 - DNA, 25 bp, Homo sapien
taaacatcgaatattttatcctatt

SEQ ID NO: 5502894 - DNA, 25 bp, Homo sapien
attggatgttcagaagtatgatgtt

SEQ ID NO: 5502895 - DNA, 25 bp, Homo sapien
aaagaaaaggtaatgtgttgtgctg

SEQ ID NO: 5502896 - DNA, 25 bp, Homo sapien
gtgctgagtcattaggctgctgcca

SEQ ID NO: 5502897 - DNA, 25 bp, Homo sapien
ccctagaagataaagcctactacac

SEQ ID NO: 5502898 - DNA, 25 bp, Homo sapien
agggatacatcctgcgaaatgcatt

SEQ ID NO: 5502899 - DNA, 25 bp, Homo sapien
atcacttaacgacagggatacatcc

SEQ ID NO: 5502900 - DNA, 25 bp, Homo sapien
aacaggactttttgagctagattac

SEQ ID NO: 5502901 - DNA, 25 bp, Homo sapien
tgtgctaacaaaatagagagtactt

SEQ ID NO: 5502902 - DNA, 25 bp, Homo sapien
atgggaccacagtagtatatgcagt

SEQ ID NO: 5502903 - DNA, 25 bp, Homo sapien
gccatgccactaggaaacaggactt

SEQ ID NO: 5502904 - DNA, 25 bp, Homo sapien
gcagttagtccctgatggaaatgtt

SEQ ID NO: 5502905 - DNA, 25 bp, Homo sapien
ccggacggcctggtgtacaacgtgt

SEQ ID NO: 5502906 - DNA, 25 bp, Homo sapien
acacgttgtacaccaggccgtccgg

SEQ ID NO: 5502907 - DNA, 25 bp, Homo sapien
tgagaaaggttcgtaaagttacaag

SEQ ID NO: 5502908 - DNA, 25 bp, Homo sapien
cttgtaactttacgaacctttctca

SEQ ID NO: 5502909 - DNA, 25 bp, Homo sapien
ttttacgagtcgtttcacaacaaag

SEQ ID NO: 5502910 - DNA, 25 bp, Homo sapien
ctttgttgtgaaacgactcgtaaaa

SEQ ID NO: 5502911 - DNA, 25 bp, Homo sapien
actaatgtgagttcattagaagaag

SEQ ID NO: 5502912 - DNA, 25 bp, Homo sapien
cttcttctaatgaactcacattagt

SEQ ID NO: 5502913 - DNA, 25 bp, Homo sapien
aagaaacaactttgatccaggctgt

SEQ ID NO: 5502914 - DNA, 25 bp, Homo sapien
tcaattagtgggtgtgtagccaatg

SEQ ID NO: 5502915 - DNA, 25 bp, Homo sapien
gctgtgagctctgggaatcaattag

SEQ ID NO: 5502916 - DNA, 25 bp, Homo sapien
tagccaagtatgatggcatgcacct

SEQ ID NO: 5502917 - DNA, 25 bp, Homo sapien
gcgcccagccttaggaaaatttcga

SEQ ID NO: 5502918 - DNA, 25 bp, Homo sapien
ggaatcaattagtgggtgtgtagcc

SEQ ID NO: 5502919 - DNA, 25 bp, Homo sapien
gagctctgggaatcaattagtgggt

SEQ ID NO: 5502920 - DNA, 25 bp, Homo sapien
ttcgaaaatattagccaagtatgat

SEQ ID NO: 5502921 - DNA, 25 bp, Homo sapien
actttgatccaggctgtgagctctg

SEQ ID NO: 5502922 - DNA, 25 bp, Homo sapien
ctgggaatcaattagtgggtgtgta

SEQ ID NO: 5502923 - DNA, 25 bp, Homo sapien
gatccaggctgtgagctctgggaat

SEQ ID NO: 5502924 - DNA, 25 bp, Homo sapien
cagctattagtggaaaatgtgcctc

SEQ ID NO: 5502925 - DNA, 25 bp, Homo sapien
tctggcattccagagggtcaatagg

SEQ ID NO: 5502926 - DNA, 25 bp, Homo sapien
agttactaagcagcctttggattct

SEQ ID NO: 5502927 - DNA, 25 bp, Homo sapien
tggcattagtgtttagagaagatta

SEQ ID NO: 5502928 - DNA, 25 bp, Homo sapien
aaatgaaaggacagaaatggcatta

SEQ ID NO: 5502929 - DNA, 25 bp, Homo sapien
ttaggcactacagttactaagcagc

SEQ ID NO: 5502930 - DNA, 25 bp, Homo sapien
catctgcctcagtctgggccaaatc

SEQ ID NO: 5502931 - DNA, 25 bp, Homo sapien
tccacgtgcttttgagggaaatgcc

SEQ ID NO: 5502932 - DNA, 25 bp, Homo sapien
acaccaccttgaacagactctaaac

SEQ ID NO: 5502933 - DNA, 25 bp, Homo sapien
tccagagggtcaataggttccttct

SEQ ID NO: 5502934 - DNA, 25 bp, Homo sapien
ggattaccaatagaaatgaaaggac

SEQ ID NO: 5502935 - DNA, 25 bp, Homo sapien
caggacgattcaagtgcattgcatt

SEQ ID NO: 5502936 - DNA, 25 bp, Homo sapien
ttcacaatagggctcgtgctgctat

SEQ ID NO: 5502937 - DNA, 25 bp, Homo sapien
cacagtgctggttccttccagaggc

SEQ ID NO: 5502938 - DNA, 25 bp, Homo sapien
ttctacaactcaccatcacagagac

SEQ ID NO: 5502939 - DNA, 25 bp, Homo sapien
gggagtggctataaatacagatgaa

SEQ ID NO: 5502940 - DNA, 25 bp, Homo sapien
caatttttccatggattggggtcgg

SEQ ID NO: 5502941 - DNA, 25 bp, Homo sapien
tggtttcaggacgattcaagtgcat

SEQ ID NO: 5502942 - DNA, 25 bp, Homo sapien
caccatcacagagactcagtgggag

SEQ ID NO: 5502943 - DNA, 25 bp, Homo sapien
atctaatgcccaccgctgatgtgac

SEQ ID NO: 5502944 - DNA, 25 bp, Homo sapien
agggagagaatgcgttttcttgcct

SEQ ID NO: 5502945 - DNA, 25 bp, Homo sapien
aatgcccaccgctgatgtgacagga

SEQ ID NO: 5502946 - DNA, 25 bp, Homo sapien
ccttccgtgcgtcgtctagtgttcc

SEQ ID NO: 5502947 - DNA, 25 bp, Homo sapien
ggaacactagacgacgcacggaagg

SEQ ID NO: 5502948 - DNA, 25 bp, Homo sapien
gtattttaagtcatgagtaaccacc

SEQ ID NO: 5502949 - DNA, 25 bp, Homo sapien
tccttctgcctccggctccaatggc

SEQ ID NO: 5502950 - DNA, 25 bp, Homo sapien
cctcaggtacaaaattaagggggca

SEQ ID NO: 5502951 - DNA, 25 bp, Homo sapien
gagtaaccaccatataactgagttc

SEQ ID NO: 5502952 - DNA, 25 bp, Homo sapien
ttaagaaacataacacattacacag

SEQ ID NO: 5502953 - DNA, 25 bp, Homo sapien
aaaatcaaatttatgcaaggtccat

SEQ ID NO: 5502954 - DNA, 25 bp, Homo sapien
ctccggctccaatggcaccaagatt

SEQ ID NO: 5502955 - DNA, 25 bp, Homo sapien
ggggcaccaaaaacctcagtaatga

SEQ ID NO: 5502956 - DNA, 25 bp, Homo sapien
ggaggtgtcggcacattactcaagt

SEQ ID NO: 5502957 - DNA, 25 bp, Homo sapien
gcaagatcacttatactcggaattc

SEQ ID NO: 5502958 - DNA, 25 bp, Homo sapien
ttacacagagatgtgactgggatga

SEQ ID NO: 5502959 - DNA, 25 bp, Homo sapien
gactacgaataggggtcattgtgct

SEQ ID NO: 5502960 - DNA, 25 bp, Homo sapien
gggtcattgtgctggtaaaagcctc

SEQ ID NO: 5502961 - DNA, 25 bp, Homo sapien
cacctggcagaatgactacgaatag

SEQ ID NO: 5502962 - DNA, 25 bp, Homo sapien
gtggcaagcagaacatgcgtaatat

SEQ ID NO: 5502963 - DNA, 25 bp, Homo sapien
gactgtaagtaagttggatgttggc

SEQ ID NO: 5502964 - DNA, 25 bp, Homo sapien
aaataggataaatgactagtacgtc

SEQ ID NO: 5502965 - DNA, 25 bp, Homo sapien
actagtacgtctttcaggtgggtgg

SEQ ID NO: 5502966 - DNA, 25 bp, Homo sapien
gcacacgtggcaagtgcctgaatcg

SEQ ID NO: 5502967 - DNA, 25 bp, Homo sapien
ggggtcccttcttacgcagcacacg

SEQ ID NO: 5502968 - DNA, 25 bp, Homo sapien
gagcaactgaacgagcctacgtgtg

SEQ ID NO: 5502969 - DNA, 25 bp, Homo sapien
ttctggcccaaaattgcagggttgt

SEQ ID NO: 5502970 - DNA, 25 bp, Homo sapien
taggaatagattgaaatagagattt

SEQ ID NO: 5502971 - DNA, 25 bp, Homo sapien
tttatctgaaacagcgctggatgaa

SEQ ID NO: 5502972 - DNA, 25 bp, Homo sapien
caaggaacacaaaaaggtcaacttg

SEQ ID NO: 5502973 - DNA, 25 bp, Homo sapien
ctcatgaagcttcggcacaatctag

SEQ ID NO: 5502974 - DNA, 25 bp, Homo sapien
gccactcgtccgtgcacagacgagg

SEQ ID NO: 5502975 - DNA, 25 bp, Homo sapien
gcttcggcacaatctaggaccctag

SEQ ID NO: 5502976 - DNA, 25 bp, Homo sapien
tgtaatgagttgtttggcatgagct

SEQ ID NO: 5502977 - DNA, 25 bp, Homo sapien
ggatgaatgcctcaaggggctcaca

SEQ ID NO: 5502978 - DNA, 25 bp, Homo sapien
gggctcacacaacctgttccgggac

SEQ ID NO: 5502979 - DNA, 25 bp, Homo sapien
gagttgtttggcatgagctccaggc

SEQ ID NO: 5502980 - DNA, 25 bp, Homo sapien
tccgggacttggtgaccattgtttg

SEQ ID NO: 5502981 - DNA, 25 bp, Homo sapien
ggccggtggagtgaccacctttgtg

SEQ ID NO: 5502982 - DNA, 25 bp, Homo sapien
gagcccaagctgttcggaggcttca

SEQ ID NO: 5502983 - DNA, 25 bp, Homo sapien
aacttgcccagctatgagagacaga

SEQ ID NO: 5502984 - DNA, 25 bp, Homo sapien
gaagcaacttgcccagctatgagag

SEQ ID NO: 5502985 - DNA, 25 bp, Homo sapien
gccaggatttgaaaccagatgagga

SEQ ID NO: 5502986 - DNA, 25 bp, Homo sapien
ccgtcacctccccgcagagggcggg

SEQ ID NO: 5502987 - DNA, 25 bp, Homo sapien
gagtgaccacctttgtggccctcta

SEQ ID NO: 5502988 - DNA, 25 bp, Homo sapien
gagcagggcctctatttcgagaccc

SEQ ID NO: 5502989 - DNA, 25 bp, Homo sapien
atttcgagacccctgactccacacc

SEQ ID NO: 5502990 - DNA, 25 bp, Homo sapien
gttcggaggcttcaactcctcggac

SEQ ID NO: 5502991 - DNA, 25 bp, Homo sapien
tcggacaccgtcacctccccgcaga

SEQ ID NO: 5502992 - DNA, 25 bp, Homo sapien
ggacgaggcaagagtttcaccttga

SEQ ID NO: 5502993 - DNA, 25 bp, Homo sapien
gcgggtaacgatgaaaattattctg

SEQ ID NO: 5502994 - DNA, 25 bp, Homo sapien
aagtagcaaggttcaacgatctgag

SEQ ID NO: 5502995 - DNA, 25 bp, Homo sapien
tcaacgatctgagatttgtgggccg

SEQ ID NO: 5502996 - DNA, 25 bp, Homo sapien
cgacaaccgcaccatggtggagatc

SEQ ID NO: 5502997 - DNA, 25 bp, Homo sapien
tgccctcgcactggcgctgcaacaa

SEQ ID NO: 5502998 - DNA, 25 bp, Homo sapien
ccaacttcctgtgctcggtgctgcc

SEQ ID NO: 5502999 - DNA, 25 bp, Homo sapien
aacaagaccctgcccgtggccttca

SEQ ID NO: 5503000 - DNA, 25 bp, Homo sapien
gtggttactgtcatggcgggtaacg

SEQ ID NO: 5503001 - DNA, 25 bp, Homo sapien
tggtggagatcatcgccgaccaccc

SEQ ID NO: 5503002 - DNA, 25 bp, Homo sapien
gtaccagatgggactgtggttactg

SEQ ID NO: 5503003 - DNA, 25 bp, Homo sapien
cgaacggtatcttgtaaaaaatgcc

SEQ ID NO: 5503004 - DNA, 25 bp, Homo sapien
gtccaaacgcaaacgtgccccctga

SEQ ID NO: 5503005 - DNA, 25 bp, Homo sapien
agaactggctttcagtgttaacgaa

SEQ ID NO: 5503006 - DNA, 25 bp, Homo sapien
agcctttcccgaacggtatcttgta

SEQ ID NO: 5503007 - DNA, 25 bp, Homo sapien
cgcacagtgaatacgcttccgtcct

SEQ ID NO: 5503008 - DNA, 25 bp, Homo sapien
tcagtgttaacgaaatggattctcc

SEQ ID NO: 5503009 - DNA, 25 bp, Homo sapien
cacatacgagatcgatgtgcacgtc

SEQ ID NO: 5503010 - DNA, 25 bp, Homo sapien
cctcccgtttaatatcagatgccac

SEQ ID NO: 5503011 - DNA, 25 bp, Homo sapien
cagatgccacacatacgagatcgat

SEQ ID NO: 5503012 - DNA, 25 bp, Homo sapien
gccccccatcttcagacacgctcat

SEQ ID NO: 5503013 - DNA, 25 bp, Homo sapien
ctggcgcacagtgaatacgcttccg

SEQ ID NO: 5503014 - DNA, 25 bp, Homo sapien
gagaccccaggatcatccatgggac

SEQ ID NO: 5503015 - DNA, 25 bp, Homo sapien
atgaagaacagaaagatgaaccttc

SEQ ID NO: 5503016 - DNA, 25 bp, Homo sapien
tccttaggaagtatgggaccataaa

SEQ ID NO: 5503017 - DNA, 25 bp, Homo sapien
taaaattaagatgagagagtgtcca

SEQ ID NO: 5503018 - DNA, 25 bp, Homo sapien
gtttctcatttgccgggtgtgcctc

SEQ ID NO: 5503019 - DNA, 25 bp, Homo sapien
catgggaccagcttggatatcctca

SEQ ID NO: 5503020 - DNA, 25 bp, Homo sapien
agtgtccagaagggtatataccaat

SEQ ID NO: 5503021 - DNA, 25 bp, Homo sapien
atagatacatatagcagagacccca

SEQ ID NO: 5503022 - DNA, 25 bp, Homo sapien
ggaagataagcaatggcactgagaa

SEQ ID NO: 5503023 - DNA, 25 bp, Homo sapien
cttcaaccagatgaagagtgggtga

SEQ ID NO: 5503024 - DNA, 25 bp, Homo sapien
acgctggcaaccttggcacaataga

SEQ ID NO: 5503025 - DNA, 25 bp, Homo sapien
cagggaagtggaaactgtgttttca

SEQ ID NO: 5503026 - DNA, 25 bp, Homo sapien
gaaagccaacagaatagccaagatt

SEQ ID NO: 5503027 - DNA, 25 bp, Homo sapien
tgaaggtggcattgcaaagtgcata

SEQ ID NO: 5503028 - DNA, 25 bp, Homo sapien
ctccacggtggtattagttggggta

SEQ ID NO: 5503029 - DNA, 25 bp, Homo sapien
tgtccacacagtgttggggatgcaa

SEQ ID NO: 5503030 - DNA, 25 bp, Homo sapien
atgcaaggtgcacaaaaggtgttaa

SEQ ID NO: 5503031 - DNA, 25 bp, Homo sapien
tagttggggtacatgagtcactttt

SEQ ID NO: 5503032 - DNA, 25 bp, Homo sapien
ggcccaagtgatgatgaaagccaac

SEQ ID NO: 5503033 - DNA, 25 bp, Homo sapien
aggtggagtcattggagctctcctt

SEQ ID NO: 5503034 - DNA, 25 bp, Homo sapien
atattagaggcaacagcactgactg

SEQ ID NO: 5503035 - DNA, 25 bp, Homo sapien
catgacattgtatggggcccaagtg

SEQ ID NO: 5503036 - DNA, 25 bp, Homo sapien
tatcataaactcaccaacaatttcg

SEQ ID NO: 5503037 - DNA, 25 bp, Homo sapien
cgaaattgttggtgagtttatgata

SEQ ID NO: 5503038 - DNA, 25 bp, Homo sapien
tacagaaaaaagcacgtattgttat

SEQ ID NO: 5503039 - DNA, 25 bp, Homo sapien
ataacaatacgtgcttttttctgta

SEQ ID NO: 5503040 - DNA, 25 bp, Homo sapien
gggccatctgcagggtctcatattt

SEQ ID NO: 5503041 - DNA, 25 bp, Homo sapien
gataacattgcgcagctggtcgaag

SEQ ID NO: 5503042 - DNA, 25 bp, Homo sapien
gttgttgaacgacgggataacattg

SEQ ID NO: 5503043 - DNA, 25 bp, Homo sapien
gacaaggcgttgatgtagatttggg

SEQ ID NO: 5503044 - DNA, 25 bp, Homo sapien
tccgagtcactgtaatgggaatggg

SEQ ID NO: 5503045 - DNA, 25 bp, Homo sapien
ctcctgcactggctgcaagatgctc

SEQ ID NO: 5503046 - DNA, 25 bp, Homo sapien
tggctgttcccctccgctgggcgtt

SEQ ID NO: 5503047 - DNA, 25 bp, Homo sapien
gccatcatcgctgtcagggcgctgt

SEQ ID NO: 5503048 - DNA, 25 bp, Homo sapien
cgcgcccccttcataggaggccgcg

SEQ ID NO: 5503049 - DNA, 25 bp, Homo sapien
tcctcgaaagtcgagaagtgcagag

SEQ ID NO: 5503050 - DNA, 25 bp, Homo sapien
cgccgctccctggcgttggctgcta

SEQ ID NO: 5503051 - DNA, 25 bp, Homo sapien
agctgtagacacacccggtggctca

SEQ ID NO: 5503052 - DNA, 25 bp, Homo sapien
gatctcacagaagaactgcgggatg

SEQ ID NO: 5503053 - DNA, 25 bp, Homo sapien
gagggctgttgccaggataatctgc

SEQ ID NO: 5503054 - DNA, 25 bp, Homo sapien
ctccacataccagctgcaggacagg

SEQ ID NO: 5503055 - DNA, 25 bp, Homo sapien
ggccggatcgtagctggccttaggg

SEQ ID NO: 5503056 - DNA, 25 bp, Homo sapien
ttgacctctgtgttccgcaggctgt

SEQ ID NO: 5503057 - DNA, 25 bp, Homo sapien
cacgccgacccagctagctgtagac

SEQ ID NO: 5503058 - DNA, 25 bp, Homo sapien
tcaaatctccataggcaccgttttc

SEQ ID NO: 5503059 - DNA, 25 bp, Homo sapien
cgaatatagataaagagtgcggtgc

SEQ ID NO: 5503060 - DNA, 25 bp, Homo sapien
agctggccttagggcgaatatagat

SEQ ID NO: 5503061 - DNA, 25 bp, Homo sapien
tgcagttcattaagcgaggtgtctc

SEQ ID NO: 5503062 - DNA, 25 bp, Homo sapien
tagtggatctctcgaggcccacaga

SEQ ID NO: 5503063 - DNA, 25 bp, Homo sapien
catttaggcctctgaaagggtctcc

SEQ ID NO: 5503064 - DNA, 25 bp, Homo sapien
tgaaagggttcatcataggtgtcag

SEQ ID NO: 5503065 - DNA, 25 bp, Homo sapien
gatcatacgccatcacggccaggat

SEQ ID NO: 5503066 - DNA, 25 bp, Homo sapien
ggctgcaggtacaccatagcaagcg

SEQ ID NO: 5503067 - DNA, 25 bp, Homo sapien
tcataggtgtcagcacagcatacat

SEQ ID NO: 5503068 - DNA, 25 bp, Homo sapien
aggtacaccatagcaagcgtcccat

SEQ ID NO: 5503069 - DNA, 25 bp, Homo sapien
gaaggatggttctgacaatacgtac

SEQ ID NO: 5503070 - DNA, 25 bp, Homo sapien
cgtacataggatgtggtcatgaacc

SEQ ID NO: 5503071 - DNA, 25 bp, Homo sapien
agcgtcccataaaagagggagacca

SEQ ID NO: 5503072 - DNA, 25 bp, Homo sapien
gaaagggtctccataggactcttcc

SEQ ID NO: 5503073 - DNA, 25 bp, Homo sapien
ttgtcacagaaggtagaaaccagga

SEQ ID NO: 5503074 - DNA, 25 bp, Homo sapien
ttatacggggtccatgtgatgatga

SEQ ID NO: 5503075 - DNA, 25 bp, Homo sapien
gtagtttggggtgtcatagtcactt

SEQ ID NO: 5503076 - DNA, 25 bp, Homo sapien
gactcttgggtctatgagcagctgc

SEQ ID NO: 5503077 - DNA, 25 bp, Homo sapien
accaggaccatgatgttatacgggg

SEQ ID NO: 5503078 - DNA, 25 bp, Homo sapien
gacatagcacaaccaatagcccaag

SEQ ID NO: 5503079 - DNA, 25 bp, Homo sapien
gttgggattgaggcctttcgttgaa

SEQ ID NO: 5503080 - DNA, 25 bp, Homo sapien
agggtgactgggacacacttgtcac

SEQ ID NO: 5503081 - DNA, 25 bp, Homo sapien
accaatcggaacttataggccacac

SEQ ID NO: 5503082 - DNA, 25 bp, Homo sapien
cgtttggtcatttgatggctggggt

SEQ ID NO: 5503083 - DNA, 25 bp, Homo sapien
ggggttgacagtgctattgacatag

SEQ ID NO: 5503084 - DNA, 25 bp, Homo sapien
gattcggtccagcttgaggccgaag

SEQ ID NO: 5503085 - DNA, 25 bp, Homo sapien
ctaacatcccaggccgctcatggag

SEQ ID NO: 5503086 - DNA, 25 bp, Homo sapien
ccgcgacttggtgtccacgcgcagg

SEQ ID NO: 5503087 - DNA, 25 bp, Homo sapien
gctcatggagccgattcggtccagc

SEQ ID NO: 5503088 - DNA, 25 bp, Homo sapien
accggtcgcccttgagattggcgcc

SEQ ID NO: 5503089 - DNA, 25 bp, Homo sapien
tcgcccttcttctgaccgccgcccg

SEQ ID NO: 5503090 - DNA, 25 bp, Homo sapien
gcccgcgacttggtgtccacgcgca

SEQ ID NO: 5503091 - DNA, 25 bp, Homo sapien
ggacaagcccttcttgttggctcct

SEQ ID NO: 5503092 - DNA, 25 bp, Homo sapien
cagtcgcgaccggtcgcccttgaga

SEQ ID NO: 5503093 - DNA, 25 bp, Homo sapien
gttggctcctttgtatttgcgcgcg

SEQ ID NO: 5503094 - DNA, 25 bp, Homo sapien
cctttgtatttgcgcgcgttggggt

SEQ ID NO: 5503095 - DNA, 25 bp, Homo sapien
gaagtatgcgtaaatgacggggtta

SEQ ID NO: 5503096 - DNA, 25 bp, Homo sapien
gagttggagtagcccagccaattga

SEQ ID NO: 5503097 - DNA, 25 bp, Homo sapien
ctggcggcagaagttacacttaatg

SEQ ID NO: 5503098 - DNA, 25 bp, Homo sapien
gcatgtggcagctgctctcgcagaa

SEQ ID NO: 5503099 - DNA, 25 bp, Homo sapien
atcgtcaccttgcctcaccgcgcca

SEQ ID NO: 5503100 - DNA, 25 bp, Homo sapien
tttgaccgtcttgcggatgcggaag

SEQ ID NO: 5503101 - DNA, 25 bp, Homo sapien
ccagggccatcttgcgcttcgcctc

SEQ ID NO: 5503102 - DNA, 25 bp, Homo sapien
gagttgcccactcggtgcacctcga

SEQ ID NO: 5503103 - DNA, 25 bp, Homo sapien
attgattatggcgcccaacagggtg

SEQ ID NO: 5503104 - DNA, 25 bp, Homo sapien
gcagaggcaagtgctctttggagtt

SEQ ID NO: 5503105 - DNA, 25 bp, Homo sapien
accgcgccattggcgcacagagcac

SEQ ID NO: 5503106 - DNA, 25 bp, Homo sapien
agggagtcaacgaccccagtgtagg

SEQ ID NO: 5503107 - DNA, 25 bp, Homo sapien
cctacactggggtcgttgactccct

SEQ ID NO: 5503108 - DNA, 25 bp, Homo sapien
gcggctgtgatgaccacaaaaggca

SEQ ID NO: 5503109 - DNA, 25 bp, Homo sapien
gaacgtctcacagagcacgatgtac

SEQ ID NO: 5503110 - DNA, 25 bp, Homo sapien
gggatgagtctggcatacagccaca

SEQ ID NO: 5503111 - DNA, 25 bp, Homo sapien
accagtagaggtcagtgtctgggtt

SEQ ID NO: 5503112 - DNA, 25 bp, Homo sapien
ccaggaaaaactggtacagggtgaa

SEQ ID NO: 5503113 - DNA, 25 bp, Homo sapien
tcctcgtcagccgtctgagcgttgc

SEQ ID NO: 5503114 - DNA, 25 bp, Homo sapien
gtagcacatagtagggtgcccagca

SEQ ID NO: 5503115 - DNA, 25 bp, Homo sapien
gaccaagcgtttgcggaacgtctca

SEQ ID NO: 5503116 - DNA, 25 bp, Homo sapien
gcaggatcctcacgtatgcggctgt

SEQ ID NO: 5503117 - DNA, 25 bp, Homo sapien
gctgatggacaactgggtcagctgt

SEQ ID NO: 5503118 - DNA, 25 bp, Homo sapien
atagcccaagctgatggccgcattg

SEQ ID NO: 5503119 - DNA, 25 bp, Homo sapien
ggcaggcacaatctcaatggctgtc

SEQ ID NO: 5503120 - DNA, 25 bp, Homo sapien
ctggatcttggaccatctggaggct

SEQ ID NO: 5503121 - DNA, 25 bp, Homo sapien
tgagctggactcattggaagtgtcc

SEQ ID NO: 5503122 - DNA, 25 bp, Homo sapien
gtgttcaccaggaccatgacgttgt

SEQ ID NO: 5503123 - DNA, 25 bp, Homo sapien
atgttccgatactggcacagcagca

SEQ ID NO: 5503124 - DNA, 25 bp, Homo sapien
tttttaaaggtggcgttgcacagag

SEQ ID NO: 5503125 - DNA, 25 bp, Homo sapien
tcttgcgcacctggttgcgagcgat

SEQ ID NO: 5503126 - DNA, 25 bp, Homo sapien
gaagtgtccttatcagccacggggc

SEQ ID NO: 5503127 - DNA, 25 bp, Homo sapien
gaatggcaaagatcgttcgtgtcac

SEQ ID NO: 5503128 - DNA, 25 bp, Homo sapien
acctggcagtgccgatgttccgata

SEQ ID NO: 5503129 - DNA, 25 bp, Homo sapien
cagtagccaatggaccacaccgtgt

SEQ ID NO: 5503130 - DNA, 25 bp, Homo sapien
cctgcagctcgttgctgtagacgcc

SEQ ID NO: 5503131 - DNA, 25 bp, Homo sapien
ttgctgtagacgccagcgaaagaga

SEQ ID NO: 5503132 - DNA, 25 bp, Homo sapien
ccaggacggtcaccttccgcctggc

SEQ ID NO: 5503133 - DNA, 25 bp, Homo sapien
gcaccgcaatatgctgcggaagttc

SEQ ID NO: 5503134 - DNA, 25 bp, Homo sapien
tccggaagttgtcatctagaaaggc

SEQ ID NO: 5503135 - DNA, 25 bp, Homo sapien
gtgatgacgtaggacatactgatga

SEQ ID NO: 5503136 - DNA, 25 bp, Homo sapien
tgtcatctagaaaggcgtagaggaa

SEQ ID NO: 5503137 - DNA, 25 bp, Homo sapien
gacgtaggacatactgatgaccagt

SEQ ID NO: 5503138 - DNA, 25 bp, Homo sapien
gtgtagagcacacagatggtgcaca

SEQ ID NO: 5503139 - DNA, 25 bp, Homo sapien
aggaggtctgtgtagagcacacaga

SEQ ID NO: 5503140 - DNA, 25 bp, Homo sapien
gcctggccttgcctagagccttggc

SEQ ID NO: 5503141 - DNA, 25 bp, Homo sapien
gaggaagtacatgaccttgcggatc

SEQ ID NO: 5503142 - DNA, 25 bp, Homo sapien
gactccgctggctgcagcagcttct

SEQ ID NO: 5503143 - DNA, 25 bp, Homo sapien
gtccagcacgacattccagcgctcg

SEQ ID NO: 5503144 - DNA, 25 bp, Homo sapien
agcgctcgaactgtagccgctgctg

SEQ ID NO: 5503145 - DNA, 25 bp, Homo sapien
cagggcgtcggcctcattccaatct

SEQ ID NO: 5503146 - DNA, 25 bp, Homo sapien
agtcctccttgcgccagaagatggc

SEQ ID NO: 5503147 - DNA, 25 bp, Homo sapien
ccacgcgtagccgcatctgcctggt

SEQ ID NO: 5503148 - DNA, 25 bp, Homo sapien
gggtccagcagctggcgtgtcatga

SEQ ID NO: 5503149 - DNA, 25 bp, Homo sapien
gctgcttcaggctctccacgcgtag

SEQ ID NO: 5503150 - DNA, 25 bp, Homo sapien
accctcgccaaaggtgacgaggaag

SEQ ID NO: 5503151 - DNA, 25 bp, Homo sapien
ggccctggtccaggaccagcggcat

SEQ ID NO: 5503152 - DNA, 25 bp, Homo sapien
tgcaagtgcagagcaacctgcagag

SEQ ID NO: 5503153 - DNA, 25 bp, Homo sapien
ctcctgttggcccagccagagactg

SEQ ID NO: 5503154 - DNA, 25 bp, Homo sapien
tggttgggcttatgttgcaagtgca

SEQ ID NO: 5503155 - DNA, 25 bp, Homo sapien
gtcatctcagcactggcagctactg

SEQ ID NO: 5503156 - DNA, 25 bp, Homo sapien
aaagcctcatggtgtttgggtatgc

SEQ ID NO: 5503157 - DNA, 25 bp, Homo sapien
cactctcacgtctcggtggaggtag

SEQ ID NO: 5503158 - DNA, 25 bp, Homo sapien
tgcagaggctgtggcttccacatca

SEQ ID NO: 5503159 - DNA, 25 bp, Homo sapien
ggtggaggtagatcccctcacctgg

SEQ ID NO: 5503160 - DNA, 25 bp, Homo sapien
tggtatggagaatgctgtagttttg

SEQ ID NO: 5503161 - DNA, 25 bp, Homo sapien
gcagcaattgatgtggttgggctta

SEQ ID NO: 5503162 - DNA, 25 bp, Homo sapien
gggcgttttgaatgttgtgagactc

SEQ ID NO: 5503163 - DNA, 25 bp, Homo sapien
tctgaacccagtctcatgtagttga

SEQ ID NO: 5503164 - DNA, 25 bp, Homo sapien
cttgtctgaagcctcctctgaaccc

SEQ ID NO: 5503165 - DNA, 25 bp, Homo sapien
ctgaacggattcgtagaactgcagc

SEQ ID NO: 5503166 - DNA, 25 bp, Homo sapien
agaaggccttctttcggccctccac

SEQ ID NO: 5503167 - DNA, 25 bp, Homo sapien
tttcggccctccactgaacggattc

SEQ ID NO: 5503168 - DNA, 25 bp, Homo sapien
agggttgataacagtgttgaaaact

SEQ ID NO: 5503169 - DNA, 25 bp, Homo sapien
agggttcagcatagggttgataaca

SEQ ID NO: 5503170 - DNA, 25 bp, Homo sapien
agagcaccctgaacatcagggtttc

SEQ ID NO: 5503171 - DNA, 25 bp, Homo sapien
aaccaaaggtgtgcctgccatgatg

SEQ ID NO: 5503172 - DNA, 25 bp, Homo sapien
agctgccacgtggctgtaggcagtg

SEQ ID NO: 5503173 - DNA, 25 bp, Homo sapien
tgcctgccatgatgaaacccacagc

SEQ ID NO: 5503174 - DNA, 25 bp, Homo sapien
ttggggtcactgccgtgtacattac

SEQ ID NO: 5503175 - DNA, 25 bp, Homo sapien
acagagaaaatgccaacccctaggt

SEQ ID NO: 5503176 - DNA, 25 bp, Homo sapien
agactcgaatataggagacaatgat

SEQ ID NO: 5503177 - DNA, 25 bp, Homo sapien
gggagggcattggcatttccaatca

SEQ ID NO: 5503178 - DNA, 25 bp, Homo sapien
ggctataattggtcaaagggcggaa

SEQ ID NO: 5503179 - DNA, 25 bp, Homo sapien
agggcggaaatacgtgcccatgact

SEQ ID NO: 5503180 - DNA, 25 bp, Homo sapien
ataatacaaagagacaaccgtgagg

SEQ ID NO: 5503181 - DNA, 25 bp, Homo sapien
agactgtggagaagactcgaatata

SEQ ID NO: 5503182 - DNA, 25 bp, Homo sapien
gatgaaaggatttaacattggggtc

SEQ ID NO: 5503183 - DNA, 25 bp, Homo sapien
gtggatgtcagaacaggataacttc

SEQ ID NO: 5503184 - DNA, 25 bp, Homo sapien
ttcacatgaaagtggatgtcagaac

SEQ ID NO: 5503185 - DNA, 25 bp, Homo sapien
ttttgatgcagtgcgtagacctgat

SEQ ID NO: 5503186 - DNA, 25 bp, Homo sapien
tggccgggacacataacattccacc

SEQ ID NO: 5503187 - DNA, 25 bp, Homo sapien
ccacttggataatgtagaagcggga

SEQ ID NO: 5503188 - DNA, 25 bp, Homo sapien
ttgggaacactgacccttggcaggt

SEQ ID NO: 5503189 - DNA, 25 bp, Homo sapien
gcgggagatgccttcctgccttctg

SEQ ID NO: 5503190 - DNA, 25 bp, Homo sapien
ccagggcatttcggaacaccacttg

SEQ ID NO: 5503191 - DNA, 25 bp, Homo sapien
ccacctccttgatgcaggggtagcg

SEQ ID NO: 5503192 - DNA, 25 bp, Homo sapien
aggggtagcggttacactcatacaa

SEQ ID NO: 5503193 - DNA, 25 bp, Homo sapien
gccaggttgagcacaacacagatgc

SEQ ID NO: 5503194 - DNA, 25 bp, Homo sapien
agcccctcgcacagccagcttgatc

SEQ ID NO: 5503195 - DNA, 25 bp, Homo sapien
atgggtgtggagtcagctccttaac

SEQ ID NO: 5503196 - DNA, 25 bp, Homo sapien
aaacatctacgtttcggagagaagg

SEQ ID NO: 5503197 - DNA, 25 bp, Homo sapien
ccttctctccgaaacgtagatgttt

SEQ ID NO: 5503198 - DNA, 25 bp, Homo sapien
aggcgcgcaaattacccactcccga

SEQ ID NO: 5503199 - DNA, 25 bp, Homo sapien
ggaggtagtgacgaaaataacaata

SEQ ID NO: 5503200 - DNA, 25 bp, Homo sapien
cggacgacgacccattcgaacgtct

SEQ ID NO: 5503201 - DNA, 25 bp, Homo sapien
cagatcaaaaccaaccctcagcccc

SEQ ID NO: 5503202 - DNA, 25 bp, Homo sapien
gctcgtagttggatcttgggagcgg

SEQ ID NO: 5503203 - DNA, 25 bp, Homo sapien
caactttcgatggtagtcgccgtgc

SEQ ID NO: 5503204 - DNA, 25 bp, Homo sapien
gggggatcggtgcatttatcagatc

SEQ ID NO: 5503205 - DNA, 25 bp, Homo sapien
cgtatagtaaagttgctgcaggtaa

SEQ ID NO: 5503206 - DNA, 25 bp, Homo sapien
tcgaggccctgtaattggaatgagt

SEQ ID NO: 5503207 - DNA, 25 bp, Homo sapien
ggctaccacatccaaggaaggcagc

SEQ ID NO: 5503208 - DNA, 25 bp, Homo sapien
tctagagctaatacatgccgacggg

SEQ ID NO: 5503209 - DNA, 25 bp, Homo sapien
taagtagtagcaaagcatctcccac

SEQ ID NO: 5503210 - DNA, 25 bp, Homo sapien
gaacagaacctgcttgtgcaaggcc

SEQ ID NO: 5503211 - DNA, 25 bp, Homo sapien
ataagccctggtatgctggaaagga

SEQ ID NO: 5503212 - DNA, 25 bp, Homo sapien
agagccagagctacccttggttcct

SEQ ID NO: 5503213 - DNA, 25 bp, Homo sapien
ggtcggaggcctacaatttggctcc

SEQ ID NO: 5503214 - DNA, 25 bp, Homo sapien
taggagctaaaaagtatatggtgtc

SEQ ID NO: 5503215 - DNA, 25 bp, Homo sapien
aaaagcagtgctcagtaccccatct

SEQ ID NO: 5503216 - DNA, 25 bp, Homo sapien
tgccacatgaagtgagctaagggaa

SEQ ID NO: 5503217 - DNA, 25 bp, Homo sapien
caacagtagggagttcccacgtgga

SEQ ID NO: 5503218 - DNA, 25 bp, Homo sapien
gtaggtcccatccctgagaagctgc

SEQ ID NO: 5503219 - DNA, 25 bp, Homo sapien
catctcccacagccatggtaggtcc

SEQ ID NO: 5503220 - DNA, 25 bp, Homo sapien
ctgtcaacagtagtaattcaccata

SEQ ID NO: 5503221 - DNA, 25 bp, Homo sapien
ccagggtctcttgtagatttgctgc

SEQ ID NO: 5503222 - DNA, 25 bp, Homo sapien
aagataatgaaaattgtagcgctgc

SEQ ID NO: 5503223 - DNA, 25 bp, Homo sapien
cacaggttctgtagaaatgtacaat

SEQ ID NO: 5503224 - DNA, 25 bp, Homo sapien
ctactggaaggagtaattcataact

SEQ ID NO: 5503225 - DNA, 25 bp, Homo sapien
tccctgctgattcaggagaaggggg

SEQ ID NO: 5503226 - DNA, 25 bp, Homo sapien
atcatgcgagaataatcacaggttc

SEQ ID NO: 5503227 - DNA, 25 bp, Homo sapien
attcaccatatgcaagtaccatcct

SEQ ID NO: 5503228 - DNA, 25 bp, Homo sapien
tgttggtccactgaaataggatttc

SEQ ID NO: 5503229 - DNA, 25 bp, Homo sapien
taggatttctgcggaaactgtcaac

SEQ ID NO: 5503230 - DNA, 25 bp, Homo sapien
aaatgttggcatttgctgccatgcc

SEQ ID NO: 5503231 - DNA, 25 bp, Homo sapien
tataataatgttaaacgtgtcatac

SEQ ID NO: 5503232 - DNA, 25 bp, Homo sapien
gtatgacacgtttaacattattata

SEQ ID NO: 5503233 - DNA, 25 bp, Homo sapien
aaagtctctgttgggtcaaggagtg

SEQ ID NO: 5503234 - DNA, 25 bp, Homo sapien
ctgatgttaggggccttacagaaga

SEQ ID NO: 5503235 - DNA, 25 bp, Homo sapien
tccgctccgtcagcagagctctctc

SEQ ID NO: 5503236 - DNA, 25 bp, Homo sapien
actgtgcactgtccatcaggccttc

SEQ ID NO: 5503237 - DNA, 25 bp, Homo sapien
tctgatcgatcgggtactgtctggt

SEQ ID NO: 5503238 - DNA, 25 bp, Homo sapien
gtgctgatacactgtccgctccgtc

SEQ ID NO: 5503239 - DNA, 25 bp, Homo sapien
ttccagagaagtgcttgcatcaggg

SEQ ID NO: 5503240 - DNA, 25 bp, Homo sapien
ggtgttgcagggcttgttaactgac

SEQ ID NO: 5503241 - DNA, 25 bp, Homo sapien
tgcctgaagatggtgattcatgatc

SEQ ID NO: 5503242 - DNA, 25 bp, Homo sapien
aggagtgctgtgcaacaactgcaga

SEQ ID NO: 5503243 - DNA, 25 bp, Homo sapien
tgtaaatgagcaaaagagtcttcca

SEQ ID NO: 5503244 - DNA, 25 bp, Homo sapien
cgcctggccctctcgcagtgtcggc

SEQ ID NO: 5503245 - DNA, 25 bp, Homo sapien
gccgacactgcgagagggccaggcg

SEQ ID NO: 5503246 - DNA, 25 bp, Homo sapien
gagaccagacctctgccgaaataag

SEQ ID NO: 5503247 - DNA, 25 bp, Homo sapien
cttatttcggcagaggtctggtctc

SEQ ID NO: 5503248 - DNA, 25 bp, Homo sapien
ggactaatccgcctgtccgaagaca

SEQ ID NO: 5503249 - DNA, 25 bp, Homo sapien
tgtcttcggacaggcggattagtcc

SEQ ID NO: 5503250 - DNA, 25 bp, Homo sapien
cggagaaggaccgaccaggtgtggg

SEQ ID NO: 5503251 - DNA, 25 bp, Homo sapien
cccacacctggtcggtccttctccg

SEQ ID NO: 5503252 - DNA, 25 bp, Homo sapien
ataaaaagtatcataggtaccatga

SEQ ID NO: 5503253 - DNA, 25 bp, Homo sapien
tcatggtacctatgatactttttat

SEQ ID NO: 5503254 - DNA, 25 bp, Homo sapien
ctgctagacaagtcacaaaggcctc

SEQ ID NO: 5503255 - DNA, 25 bp, Homo sapien
ccgtgcaagctgcccagatacaact

SEQ ID NO: 5503256 - DNA, 25 bp, Homo sapien
tccggagtgcataaatcagaggatc

SEQ ID NO: 5503257 - DNA, 25 bp, Homo sapien
gagatacaagttaaagtgagacatg

SEQ ID NO: 5503258 - DNA, 25 bp, Homo sapien
cctggccatcaggaacatgtggaca

SEQ ID NO: 5503259 - DNA, 25 bp, Homo sapien
ttatggtactggagagcatagaaga

SEQ ID NO: 5503260 - DNA, 25 bp, Homo sapien
ggcagatgatgacagcactactatc

SEQ ID NO: 5503261 - DNA, 25 bp, Homo sapien
acaaagacgccaatcaggatggtca

SEQ ID NO: 5503262 - DNA, 25 bp, Homo sapien
ggggatagcaacagatgatctcttt

SEQ ID NO: 5503263 - DNA, 25 bp, Homo sapien
agcatagaagatagtaaagtacctg

SEQ ID NO: 5503264 - DNA, 25 bp, Homo sapien
tgaaagcaggctgcaaatggatgca

SEQ ID NO: 5503265 - DNA, 25 bp, Homo sapien
ctttcagatagtgtatcggttggtg

SEQ ID NO: 5503266 - DNA, 25 bp, Homo sapien
caccaaccgatacactatctgaaag

SEQ ID NO: 5503267 - DNA, 25 bp, Homo sapien
gggattgaggaatgatttgaaagca

SEQ ID NO: 5503268 - DNA, 25 bp, Homo sapien
atttcaagcgtagtgagctcgccaa

SEQ ID NO: 5503269 - DNA, 25 bp, Homo sapien
ttggagagactgattatgatgcttt

SEQ ID NO: 5503270 - DNA, 25 bp, Homo sapien
agaggtcatcagaagattgagagaa

SEQ ID NO: 5503271 - DNA, 25 bp, Homo sapien
cggcgagatggacattctgaaatca

SEQ ID NO: 5503272 - DNA, 25 bp, Homo sapien
gaacttgaactggcagaggaaaaat

SEQ ID NO: 5503273 - DNA, 25 bp, Homo sapien
cacaccagaagttaacaagggattg

SEQ ID NO: 5503274 - DNA, 25 bp, Homo sapien
ctggagcttaaattctggcggcgag

SEQ ID NO: 5503275 - DNA, 25 bp, Homo sapien
ctacaagatacagccaaaagaggag

SEQ ID NO: 5503276 - DNA, 25 bp, Homo sapien
ccgtatactcagtgggttcgcggcc

SEQ ID NO: 5503277 - DNA, 25 bp, Homo sapien
aaagaggagaaccaatcagactatt

SEQ ID NO: 5503278 - DNA, 25 bp, Homo sapien
aacctctacagagactttcccaaga

SEQ ID NO: 5503279 - DNA, 25 bp, Homo sapien
tcttgggaaagtctctgtagaggtt

SEQ ID NO: 5503280 - DNA, 25 bp, Homo sapien
caaacctaaagtcacttccaactgt

SEQ ID NO: 5503281 - DNA, 25 bp, Homo sapien
acagttggaagtgactttaggtttg

SEQ ID NO: 5503282 - DNA, 25 bp, Homo sapien
agaaggctggtctggtaccacatta

SEQ ID NO: 5503283 - DNA, 25 bp, Homo sapien
tcattgtgatggcttttagggtgtc

SEQ ID NO: 5503284 - DNA, 25 bp, Homo sapien
ccaccagtttagatgggaagaccca

SEQ ID NO: 5503285 - DNA, 25 bp, Homo sapien
agctgaggtagaacctgctctttcc

SEQ ID NO: 5503286 - DNA, 25 bp, Homo sapien
agcagattcacaagcaaacaactcc

SEQ ID NO: 5503287 - DNA, 25 bp, Homo sapien
tctcagtaagtgctctgggctgatg

SEQ ID NO: 5503288 - DNA, 25 bp, Homo sapien
ctgggctgatggataaacacactaa

SEQ ID NO: 5503289 - DNA, 25 bp, Homo sapien
actagtctcaaggcacgctcagaag

SEQ ID NO: 5503290 - DNA, 25 bp, Homo sapien
ttcgcttaattaacacagtggccct

SEQ ID NO: 5503291 - DNA, 25 bp, Homo sapien
gggtggctagagcctctttactctc

SEQ ID NO: 5503292 - DNA, 25 bp, Homo sapien
ccttcataaaggcctccagctgagg

SEQ ID NO: 5503293 - DNA, 25 bp, Homo sapien
tagaacagcacggctgccttgcttt

SEQ ID NO: 5503294 - DNA, 25 bp, Homo sapien
gaggtaggattcattggaacacagc

SEQ ID NO: 5503295 - DNA, 25 bp, Homo sapien
ttactctgcctgggactgggcaaga

SEQ ID NO: 5503296 - DNA, 25 bp, Homo sapien
ggcgttccctgccttcggcctggtc

SEQ ID NO: 5503297 - DNA, 25 bp, Homo sapien
ttctccatggaatgatagaaacttc

SEQ ID NO: 5503298 - DNA, 25 bp, Homo sapien
atggaatgatagaaacttctggggc

SEQ ID NO: 5503299 - DNA, 25 bp, Homo sapien
ttgctcccggctcgtccccttcttc

SEQ ID NO: 5503300 - DNA, 25 bp, Homo sapien
ctctttcttggtccctaggtgggcc

SEQ ID NO: 5503301 - DNA, 25 bp, Homo sapien
ctgcttactctgcctgggactgggc

SEQ ID NO: 5503302 - DNA, 25 bp, Homo sapien
tgccttcggcctggtcatggcagtg

SEQ ID NO: 5503303 - DNA, 25 bp, Homo sapien
gaactagaacagcacggctgccttg

SEQ ID NO: 5503304 - DNA, 25 bp, Homo sapien
ataagactagacacaagaaacacac

SEQ ID NO: 5503305 - DNA, 25 bp, Homo sapien
gtgtgtttcttgtgtctagtcttat

SEQ ID NO: 5503306 - DNA, 25 bp, Homo sapien
agagcaagtgagaaatctggtttca

SEQ ID NO: 5503307 - DNA, 25 bp, Homo sapien
agggagattactcaggatggagtca

SEQ ID NO: 5503308 - DNA, 25 bp, Homo sapien
gcatgacaacagcaggagttcaaaa

SEQ ID NO: 5503309 - DNA, 25 bp, Homo sapien
gcaaagctgacaaatgaagctggtc

SEQ ID NO: 5503310 - DNA, 25 bp, Homo sapien
tcgatctgatctgagcaaagctgac

SEQ ID NO: 5503311 - DNA, 25 bp, Homo sapien
agaaactttgcaggggttaatagtc

SEQ ID NO: 5503312 - DNA, 25 bp, Homo sapien
aggatggagtcagtcttaaacaaac

SEQ ID NO: 5503313 - DNA, 25 bp, Homo sapien
cgcgcctggctggaacattttcttt

SEQ ID NO: 5503314 - DNA, 25 bp, Homo sapien
caggagttcaaaaaaagatgcatgc

SEQ ID NO: 5503315 - DNA, 25 bp, Homo sapien
tagtcctgaggaagattttagttac

SEQ ID NO: 5503316 - DNA, 25 bp, Homo sapien
gctggtcaaaaataaagggagatta

SEQ ID NO: 5503317 - DNA, 25 bp, Homo sapien
taagaaataagaaactctgagcagc

SEQ ID NO: 5503318 - DNA, 25 bp, Homo sapien
tggaatatagacaataatgaccttt

SEQ ID NO: 5503319 - DNA, 25 bp, Homo sapien
actctgagcagcaaatagttggcca

SEQ ID NO: 5503320 - DNA, 25 bp, Homo sapien
aatagttggccagatgagttgtttc

SEQ ID NO: 5503321 - DNA, 25 bp, Homo sapien
agtacaatgtagaatctgagaaatt

SEQ ID NO: 5503322 - DNA, 25 bp, Homo sapien
tcacatgaatataactgatgagttt

SEQ ID NO: 5503323 - DNA, 25 bp, Homo sapien
tcaaatgaagccacattagaacaaa

SEQ ID NO: 5503324 - DNA, 25 bp, Homo sapien
ggaaaatgttaggaatctctgtgac

SEQ ID NO: 5503325 - DNA, 25 bp, Homo sapien
tttttagccgcgatcacatgaatat

SEQ ID NO: 5503326 - DNA, 25 bp, Homo sapien
atactgactttttagccgcgatcac

SEQ ID NO: 5503327 - DNA, 25 bp, Homo sapien
aattagagcatcacagttctgatta

SEQ ID NO: 5503328 - DNA, 25 bp, Homo sapien
atttggcaagtaatagcaggttaga

SEQ ID NO: 5503329 - DNA, 25 bp, Homo sapien
tcttaggcccagttaattgctctac

SEQ ID NO: 5503330 - DNA, 25 bp, Homo sapien
gcaggttagatttgcttaaggcagg

SEQ ID NO: 5503331 - DNA, 25 bp, Homo sapien
aattagaaatacaggcaagagaaaa

SEQ ID NO: 5503332 - DNA, 25 bp, Homo sapien
tatgtcatggaaagcttcgaaattt

SEQ ID NO: 5503333 - DNA, 25 bp, Homo sapien
agaagaagactgtcaaagcattttt

SEQ ID NO: 5503334 - DNA, 25 bp, Homo sapien
aagcgtaaaggcagttgaactaatg

SEQ ID NO: 5503335 - DNA, 25 bp, Homo sapien
ccttgatttctgggcctaaaataac

SEQ ID NO: 5503336 - DNA, 25 bp, Homo sapien
gcagttgaactaatggcagaagaag

SEQ ID NO: 5503337 - DNA, 25 bp, Homo sapien
ttcatggttggaacaatccttgatt

SEQ ID NO: 5503338 - DNA, 25 bp, Homo sapien
tttgcttaaggcaggtgtcttaccc

SEQ ID NO: 5503339 - DNA, 25 bp, Homo sapien
ccctaagggagtaagcatggtccgg

SEQ ID NO: 5503340 - DNA, 25 bp, Homo sapien
ccggaccatgcttactcccttaggg

SEQ ID NO: 5503341 - DNA, 25 bp, Homo sapien
ggcctcgtgctgtgaaggtatatac

SEQ ID NO: 5503342 - DNA, 25 bp, Homo sapien
tatttgatcaccacgtccagagggc

SEQ ID NO: 5503343 - DNA, 25 bp, Homo sapien
gggagctagggagtttatttgatca

SEQ ID NO: 5503344 - DNA, 25 bp, Homo sapien
cttcggtggattgcttcatgtgtgc

SEQ ID NO: 5503345 - DNA, 25 bp, Homo sapien
ggatgaacagagtttcttcggtgga

SEQ ID NO: 5503346 - DNA, 25 bp, Homo sapien
tgaaggaattagttgagcgattcgc

SEQ ID NO: 5503347 - DNA, 25 bp, Homo sapien
aaaaaactacaaatgcggaaggcat

SEQ ID NO: 5503348 - DNA, 25 bp, Homo sapien
tggttacagagcataaagacacaga

SEQ ID NO: 5503349 - DNA, 25 bp, Homo sapien
gcggaaggcatatgtagtaaaaact

SEQ ID NO: 5503350 - DNA, 25 bp, Homo sapien
tacaaggagttcctgctgtgggagt

SEQ ID NO: 5503351 - DNA, 25 bp, Homo sapien
aagacacagaggattttagacaaga

SEQ ID NO: 5503352 - DNA, 25 bp, Homo sapien
ctgggagccatcgaccactataaat

SEQ ID NO: 5503353 - DNA, 25 bp, Homo sapien
atttatagtggtcgatggctcccag

SEQ ID NO: 5503354 - DNA, 25 bp, Homo sapien
atcctgcaacaggacattcgggaga

SEQ ID NO: 5503355 - DNA, 25 bp, Homo sapien
ccagttccagttccgcttccgccgc

SEQ ID NO: 5503356 - DNA, 25 bp, Homo sapien
gccacagcaaggcctttggacgcat

SEQ ID NO: 5503357 - DNA, 25 bp, Homo sapien
gtgttcgccatcactgcggccggcg

SEQ ID NO: 5503358 - DNA, 25 bp, Homo sapien
ctttggacgcatcctgcaacaggac

SEQ ID NO: 5503359 - DNA, 25 bp, Homo sapien
ccgctggaattgctccagccacagc

SEQ ID NO: 5503360 - DNA, 25 bp, Homo sapien
ttgcgctcgccgcgctcgcactgaa

SEQ ID NO: 5503361 - DNA, 25 bp, Homo sapien
agccccttggttatggaccctacca

SEQ ID NO: 5503362 - DNA, 25 bp, Homo sapien
gagacggccttcgtgttcgccatca

SEQ ID NO: 5503363 - DNA, 25 bp, Homo sapien
gaccctaccagcatctgcaggaagg

SEQ ID NO: 5503364 - DNA, 25 bp, Homo sapien
tccgcttccgccgctggaattgctc

SEQ ID NO: 5503365 - DNA, 25 bp, Homo sapien
gatctcttaggcccgtcggaccccg

SEQ ID NO: 5503366 - DNA, 25 bp, Homo sapien
cggggtccgacgggcctaagagatc

SEQ ID NO: 5503367 - DNA, 25 bp, Homo sapien
tgttgaatttgagttggcagaggat

SEQ ID NO: 5503368 - DNA, 25 bp, Homo sapien
gctgcagcagctatcgacaacatga

SEQ ID NO: 5503369 - DNA, 25 bp, Homo sapien
caggccagtttggtcagatgatgac

SEQ ID NO: 5503370 - DNA, 25 bp, Homo sapien
agatgatgactggttgaagaagttt

SEQ ID NO: 5503371 - DNA, 25 bp, Homo sapien
cctcccaaagcagagacccaggagg

SEQ ID NO: 5503372 - DNA, 25 bp, Homo sapien
gggagagcccattgctaaaaaggcc

SEQ ID NO: 5503373 - DNA, 25 bp, Homo sapien
aggaagtggacgacaaagttcttca

SEQ ID NO: 5503374 - DNA, 25 bp, Homo sapien
ctggcgatagctctggctgtgctta

SEQ ID NO: 5503375 - DNA, 25 bp, Homo sapien
tggccaaaccaatgagaattaagga

SEQ ID NO: 5503376 - DNA, 25 bp, Homo sapien
ttggagacatcacagatattcagat

SEQ ID NO: 5503377 - DNA, 25 bp, Homo sapien
agaagttttctgggaagacgcttga

SEQ ID NO: 5503378 - DNA, 25 bp, Homo sapien
cctcccaagaacgctccgagagatg

SEQ ID NO: 5503379 - DNA, 25 bp, Homo sapien
accaagggagactagttccacgatt

SEQ ID NO: 5503380 - DNA, 25 bp, Homo sapien
gatcctgaaggatatgggaatcaca

SEQ ID NO: 5503381 - DNA, 25 bp, Homo sapien
atccagtgtcgtgctgaccaatctt

SEQ ID NO: 5503382 - DNA, 25 bp, Homo sapien
tcacagagtatgaaccaagggttat

SEQ ID NO: 5503383 - DNA, 25 bp, Homo sapien
atgtgactacaattctggatgatgc

SEQ ID NO: 5503384 - DNA, 25 bp, Homo sapien
aatgttgatgcagatgatgtgagac

SEQ ID NO: 5503385 - DNA, 25 bp, Homo sapien
gatgtgagactggcaatccagtgtc

SEQ ID NO: 5503386 - DNA, 25 bp, Homo sapien
gatatgggaatcacagagtatgaac

SEQ ID NO: 5503387 - DNA, 25 bp, Homo sapien
tattcgagccatgctaagaaaccta

SEQ ID NO: 5503388 - DNA, 25 bp, Homo sapien
gatgccttggtgatggcacagatcc

SEQ ID NO: 5503389 - DNA, 25 bp, Homo sapien
gctccaaactataggctgaagtcct

SEQ ID NO: 5503390 - DNA, 25 bp, Homo sapien
ggacctagactgccacctgatagat

SEQ ID NO: 5503391 - DNA, 25 bp, Homo sapien
atatcgcaaggcagaaaaatcaaac

SEQ ID NO: 5503392 - DNA, 25 bp, Homo sapien
ctttgccactgattaagccatatgc

SEQ ID NO: 5503393 - DNA, 25 bp, Homo sapien
ttactggatatcgcaaggcagaaaa

SEQ ID NO: 5503394 - DNA, 25 bp, Homo sapien
gaaccacttgcagcaggagaaaaac

SEQ ID NO: 5503395 - DNA, 25 bp, Homo sapien
agactgccacctgatagatactgct

SEQ ID NO: 5503396 - DNA, 25 bp, Homo sapien
attaagccatatgcaggacctagac

SEQ ID NO: 5503397 - DNA, 25 bp, Homo sapien
caagagattttttactggatatcgc

SEQ ID NO: 5503398 - DNA, 25 bp, Homo sapien
agatactgcttaacagctccaaact

SEQ ID NO: 5503399 - DNA, 25 bp, Homo sapien
aaaatcaaacccctttgccactgat

SEQ ID NO: 5503400 - DNA, 25 bp, Homo sapien
tcacggttacgactacagaaagtcc

SEQ ID NO: 5503401 - DNA, 25 bp, Homo sapien
ggactttctgtagtcgtaaccgtga

SEQ ID NO: 5503402 - DNA, 25 bp, Homo sapien
gattcctatttaaacaaaatgtcct

SEQ ID NO: 5503403 - DNA, 25 bp, Homo sapien
aggacattttgtttaaataggaatc

SEQ ID NO: 5503404 - DNA, 25 bp, Homo sapien
gaagggcgcgaaggcgacggtcagg

SEQ ID NO: 5503405 - DNA, 25 bp, Homo sapien
cctgaccgtcgccttcgcgcccttc

SEQ ID NO: 5503406 - DNA, 25 bp, Homo sapien
tccccctcttggctcggcacaccgt

SEQ ID NO: 5503407 - DNA, 25 bp, Homo sapien
acggtgtgccgagccaagaggggga

SEQ ID NO: 5503408 - DNA, 25 bp, Homo sapien
cctcttggctcggcacaccgtcggt

SEQ ID NO: 5503409 - DNA, 25 bp, Homo sapien
accgacggtgtgccgagccaagagg

SEQ ID NO: 5503410 - DNA, 25 bp, Homo sapien
cacagatgcaatgcagacaggactt

SEQ ID NO: 5503411 - DNA, 25 bp, Homo sapien
tgtgcagacaaacagttgctgaagc

SEQ ID NO: 5503412 - DNA, 25 bp, Homo sapien
tgaggagaaacggagctttaattca

SEQ ID NO: 5503413 - DNA, 25 bp, Homo sapien
gttgctggtgacacatgagtgcttg

SEQ ID NO: 5503414 - DNA, 25 bp, Homo sapien
ggctcctggctaagcttggtgtgca

SEQ ID NO: 5503415 - DNA, 25 bp, Homo sapien
gttgctgaagcaagtgaactcttat

SEQ ID NO: 5503416 - DNA, 25 bp, Homo sapien
tgcccaggatggaaccactctgttc

SEQ ID NO: 5503417 - DNA, 25 bp, Homo sapien
ggcagagttgcctgatgactgatcc

SEQ ID NO: 5503418 - DNA, 25 bp, Homo sapien
agaaaaccctcgcagggactggtct

SEQ ID NO: 5503419 - DNA, 25 bp, Homo sapien
ataaagcaactaaagaggtaaactc

SEQ ID NO: 5503420 - DNA, 25 bp, Homo sapien
aactgccagtgtaatgtggaggtga

SEQ ID NO: 5503421 - DNA, 25 bp, Homo sapien
ttgttccactggtgagccaccggca

SEQ ID NO: 5503422 - DNA, 25 bp, Homo sapien
tgccggtggctcaccagtggaacaa

SEQ ID NO: 5503423 - DNA, 25 bp, Homo sapien
aggtgtaagatatattagttgtgac

SEQ ID NO: 5503424 - DNA, 25 bp, Homo sapien
gtcacaactaatatatcttacacct

SEQ ID NO: 5503425 - DNA, 25 bp, Homo sapien
agtcgggacacagaatcggttctcg

SEQ ID NO: 5503426 - DNA, 25 bp, Homo sapien
cgagaaccgattctgtgtcccgact

SEQ ID NO: 5503427 - DNA, 25 bp, Homo sapien
gatattaaaagtaatccgtttataa

SEQ ID NO: 5503428 - DNA, 25 bp, Homo sapien
ttataaacggattacttttaatatc

SEQ ID NO: 5503429 - DNA, 25 bp, Homo sapien
cttacatggaaacgacgatattaaa

SEQ ID NO: 5503430 - DNA, 25 bp, Homo sapien
tttaatatcgtcgtttccatgtaag

SEQ ID NO: 5503431 - DNA, 25 bp, Homo sapien
gctgttgtcgttttcatcaaggatt

SEQ ID NO: 5503432 - DNA, 25 bp, Homo sapien
tccaaaatctgatcagagagagaag

SEQ ID NO: 5503433 - DNA, 25 bp, Homo sapien
gaataaatcttgaatggaatgtctg

SEQ ID NO: 5503434 - DNA, 25 bp, Homo sapien
tccgtccttcgcttccacttccatg

SEQ ID NO: 5503435 - DNA, 25 bp, Homo sapien
ttcctccgaaatccagatcccgtgt

SEQ ID NO: 5503436 - DNA, 25 bp, Homo sapien
ttactttacactgggtagagagacc

SEQ ID NO: 5503437 - DNA, 25 bp, Homo sapien
aaatctgatcagagagagaagtgat

SEQ ID NO: 5503438 - DNA, 25 bp, Homo sapien
cagagagagaagtgatgattatttc

SEQ ID NO: 5503439 - DNA, 25 bp, Homo sapien
ggcaacaaccattcctggaggtgaa

SEQ ID NO: 5503440 - DNA, 25 bp, Homo sapien
cgaaatccagatcccgtgttttgaa

SEQ ID NO: 5503441 - DNA, 25 bp, Homo sapien
ggtagagagaccacctccgtccttc

SEQ ID NO: 5503442 - DNA, 25 bp, Homo sapien
agaaagcactatcttacggtctaag

SEQ ID NO: 5503443 - DNA, 25 bp, Homo sapien
cttagaccgtaagatagtgctttct

SEQ ID NO: 5503444 - DNA, 25 bp, Homo sapien
ggcatccctgcttctcagactcctc

SEQ ID NO: 5503445 - DNA, 25 bp, Homo sapien
aaccatcacacaagccaaccatttc

SEQ ID NO: 5503446 - DNA, 25 bp, Homo sapien
caaaaactaaactaggaagagccac

SEQ ID NO: 5503447 - DNA, 25 bp, Homo sapien
ataccacagaagacacttaaaatat

SEQ ID NO: 5503448 - DNA, 25 bp, Homo sapien
ccactccttaatggccctcccacat

SEQ ID NO: 5503449 - DNA, 25 bp, Homo sapien
taactttcaagagcagcccacattt

SEQ ID NO: 5503450 - DNA, 25 bp, Homo sapien
ctagctcattacacaaaaccatcac

SEQ ID NO: 5503451 - DNA, 25 bp, Homo sapien
ggcatgtgcttgtaataccagccac

SEQ ID NO: 5503452 - DNA, 25 bp, Homo sapien
gaatacggttatatggctggatgca

SEQ ID NO: 5503453 - DNA, 25 bp, Homo sapien
ttcttagaaggacacaagaacacgg

SEQ ID NO: 5503454 - DNA, 25 bp, Homo sapien
ccctcccacatataccacagaagac

SEQ ID NO: 5503455 - DNA, 25 bp, Homo sapien
tcaatcaacacaggagccagagaaa

SEQ ID NO: 5503456 - DNA, 25 bp, Homo sapien
atcctgttaaaaccaaagtccgcga

SEQ ID NO: 5503457 - DNA, 25 bp, Homo sapien
cccccgccccctcaatcaacacagg

SEQ ID NO: 5503458 - DNA, 25 bp, Homo sapien
ccctcaatcaacacaggagccagag

SEQ ID NO: 5503459 - DNA, 25 bp, Homo sapien
ctccctgctgtatactgccccccgc

SEQ ID NO: 5503460 - DNA, 25 bp, Homo sapien
ttcaataatttcaagagtttcccaa

SEQ ID NO: 5503461 - DNA, 25 bp, Homo sapien
gttctccctgctgtatactgccccc

SEQ ID NO: 5503462 - DNA, 25 bp, Homo sapien
aacacaggagccagagaaatcctgt

SEQ ID NO: 5503463 - DNA, 25 bp, Homo sapien
aagagtttcccaaagttctccctgc

SEQ ID NO: 5503464 - DNA, 25 bp, Homo sapien
cgccccctcaatcaacacaggagcc

SEQ ID NO: 5503465 - DNA, 25 bp, Homo sapien
ctgttaaaaccaaagtccgcgatct

SEQ ID NO: 5503466 - DNA, 25 bp, Homo sapien
cacggtatcgaagcccgtgaaacgt

SEQ ID NO: 5503467 - DNA, 25 bp, Homo sapien
acgtttcacgggcttcgataccgtg

SEQ ID NO: 5503468 - DNA, 25 bp, Homo sapien
agcggtctgggcctcgctcccggtt

SEQ ID NO: 5503469 - DNA, 25 bp, Homo sapien
aaccgggagcgaggcccagaccgct

SEQ ID NO: 5503470 - DNA, 25 bp, Homo sapien
ggaactccttatatctaaattaagg

SEQ ID NO: 5503471 - DNA, 25 bp, Homo sapien
ccttaatttagatataaggagttcc

SEQ ID NO: 5503472 - DNA, 25 bp, Homo sapien
cgtctaccgtctcgccctacccggc

SEQ ID NO: 5503473 - DNA, 25 bp, Homo sapien
gccgggtagggcgagacggtagacg

SEQ ID NO: 5503474 - DNA, 25 bp, Homo sapien
gtccgggacgtcactgccaagtcta

SEQ ID NO: 5503475 - DNA, 25 bp, Homo sapien
tagacttggcagtgacgtcccggac

SEQ ID NO: 5503476 - DNA, 25 bp, Homo sapien
ataacataaaaagttctcgtgataa

SEQ ID NO: 5503477 - DNA, 25 bp, Homo sapien
ttatcacgagaactttttatgttat

SEQ ID NO: 5503478 - DNA, 25 bp, Homo sapien
gactcgggcggtcgctgcacgcgga

SEQ ID NO: 5503479 - DNA, 25 bp, Homo sapien
tccgcgtgcagcgaccgcccgagtc

SEQ ID NO: 5503480 - DNA, 25 bp, Homo sapien
agagtttgttgcagagcatctatat

SEQ ID NO: 5503481 - DNA, 25 bp, Homo sapien
caatgatgaacgaacccaggttcct

SEQ ID NO: 5503482 - DNA, 25 bp, Homo sapien
ggcataaagcatgaaaaagtttctc

SEQ ID NO: 5503483 - DNA, 25 bp, Homo sapien
atttggccaagactacagatgtgtt

SEQ ID NO: 5503484 - DNA, 25 bp, Homo sapien
tagtacctcgccatgtgttgttcac

SEQ ID NO: 5503485 - DNA, 25 bp, Homo sapien
tttggacatgaatagtcattccttc

SEQ ID NO: 5503486 - DNA, 25 bp, Homo sapien
agagtgtactcacaagtaagaaact

SEQ ID NO: 5503487 - DNA, 25 bp, Homo sapien
aaagtttctcagttagtacctcgcc

SEQ ID NO: 5503488 - DNA, 25 bp, Homo sapien
ataaacaacaatgatgaacgaaccc

SEQ ID NO: 5503489 - DNA, 25 bp, Homo sapien
tttctgcaaggcctagctatcttat

SEQ ID NO: 5503490 - DNA, 25 bp, Homo sapien
caactacaagaggtaggcataaagc

SEQ ID NO: 5503491 - DNA, 25 bp, Homo sapien
gagcccgtttgggaatccagagaac

SEQ ID NO: 5503492 - DNA, 25 bp, Homo sapien
gtgctgaaggttgtgctgtacagcc

SEQ ID NO: 5503493 - DNA, 25 bp, Homo sapien
tgcgacagaacttcgagatcggcca

SEQ ID NO: 5503494 - DNA, 25 bp, Homo sapien
tcgtgcagacggtgatgctttcaga

SEQ ID NO: 5503495 - DNA, 25 bp, Homo sapien
gtcacacactggaagcaaacctcag

SEQ ID NO: 5503496 - DNA, 25 bp, Homo sapien
gtgcctgaggctcctacgacactgt

SEQ ID NO: 5503497 - DNA, 25 bp, Homo sapien
ggcagtgcccagagtgccctcttct

SEQ ID NO: 5503498 - DNA, 25 bp, Homo sapien
agatcggccacaactttgcccgtgt

SEQ ID NO: 5503499 - DNA, 25 bp, Homo sapien
gcacgcacgccagcgcctcgctgta

SEQ ID NO: 5503500 - DNA, 25 bp, Homo sapien
accgaggcaagcctagtggttctgg

SEQ ID NO: 5503501 - DNA, 25 bp, Homo sapien
tcttgcagcatggcctggccaccca

SEQ ID NO: 5503502 - DNA, 25 bp, Homo sapien
gagaactggcggcatgtttctgctt

SEQ ID NO: 5503503 - DNA, 25 bp, Homo sapien
tggctaatgtaaaggatgcagtata

SEQ ID NO: 5503504 - DNA, 25 bp, Homo sapien
tcagaaaatgttcggacctccccac

SEQ ID NO: 5503505 - DNA, 25 bp, Homo sapien
agaaaatgggaattcagaaaatgtt

SEQ ID NO: 5503506 - DNA, 25 bp, Homo sapien
cctccccacattgggggccagctgc

SEQ ID NO: 5503507 - DNA, 25 bp, Homo sapien
caagtggtacctaaatggatcctgg

SEQ ID NO: 5503508 - DNA, 25 bp, Homo sapien
cagaaactgtcatttagccgcgaac

SEQ ID NO: 5503509 - DNA, 25 bp, Homo sapien
tctttaaggcatgggtatgaagtag

SEQ ID NO: 5503510 - DNA, 25 bp, Homo sapien
aacacctttgggaaagatcggaatc

SEQ ID NO: 5503511 - DNA, 25 bp, Homo sapien
ggtatgaagtagccaagtgaaatgc

SEQ ID NO: 5503512 - DNA, 25 bp, Homo sapien
tccataggattctgtgaaaggtctt

SEQ ID NO: 5503513 - DNA, 25 bp, Homo sapien
caaaacttgaaaatggactgacttt

SEQ ID NO: 5503514 - DNA, 25 bp, Homo sapien
tgcctctggattacagcaaatggtt

SEQ ID NO: 5503515 - DNA, 25 bp, Homo sapien
gtgggggttggttcaacacattctg

SEQ ID NO: 5503516 - DNA, 25 bp, Homo sapien
tatactgcaacactagcctgaattc

SEQ ID NO: 5503517 - DNA, 25 bp, Homo sapien
caaatggttgaacatgaagtgcgtg

SEQ ID NO: 5503518 - DNA, 25 bp, Homo sapien
ctgggtgctcactcatgaacatgcc

SEQ ID NO: 5503519 - DNA, 25 bp, Homo sapien
catgaacatgccaaagctatactgc

SEQ ID NO: 5503520 - DNA, 25 bp, Homo sapien
ggcatgagaatgattcacaggctgc

SEQ ID NO: 5503521 - DNA, 25 bp, Homo sapien
aaaggtgataaaaaatctctgttcc

SEQ ID NO: 5503522 - DNA, 25 bp, Homo sapien
aacatgaagtgcgtgaaactcaagg

SEQ ID NO: 5503523 - DNA, 25 bp, Homo sapien
tgcagtcatagtcagtagttagggg

SEQ ID NO: 5503524 - DNA, 25 bp, Homo sapien
atgcaaatctgatagctccaaagca

SEQ ID NO: 5503525 - DNA, 25 bp, Homo sapien
gataccagccatcatgagcagcttc

SEQ ID NO: 5503526 - DNA, 25 bp, Homo sapien
ctcctgatagggagacttggtgaat

SEQ ID NO: 5503527 - DNA, 25 bp, Homo sapien
tagaaatggcatcaaaggtggcctt

SEQ ID NO: 5503528 - DNA, 25 bp, Homo sapien
tgtagcagtcatcgataccagccat

SEQ ID NO: 5503529 - DNA, 25 bp, Homo sapien
tttccgacccaatcaaagcccaaga

SEQ ID NO: 5503530 - DNA, 25 bp, Homo sapien
cgaggtggtcagtgaactcctgata

SEQ ID NO: 5503531 - DNA, 25 bp, Homo sapien
gcagcttcttaggcacaggtgcgga

SEQ ID NO: 5503532 - DNA, 25 bp, Homo sapien
gggtcaggtagctgtaggtcttaga

SEQ ID NO: 5503533 - DNA, 25 bp, Homo sapien
ctccactgagaccagagtcatttct

SEQ ID NO: 5503534 - DNA, 25 bp, Homo sapien
cttctgttcactcttcccggcttcc

SEQ ID NO: 5503535 - DNA, 25 bp, Homo sapien
tttattgcaattaagaaaaatcttc

SEQ ID NO: 5503536 - DNA, 25 bp, Homo sapien
ctggggaagatacaaagataaatct

SEQ ID NO: 5503537 - DNA, 25 bp, Homo sapien
gtctagtataggagcatacagtctc

SEQ ID NO: 5503538 - DNA, 25 bp, Homo sapien
gaaaaatcttcagccgggcacggtg

SEQ ID NO: 5503539 - DNA, 25 bp, Homo sapien
cgtaaaaagcataaatctgaaagtc

SEQ ID NO: 5503540 - DNA, 25 bp, Homo sapien
ctgacagactgccctcaaagagctt

SEQ ID NO: 5503541 - DNA, 25 bp, Homo sapien
gcttacagtctagtataggagcata

SEQ ID NO: 5503542 - DNA, 25 bp, Homo sapien
agtttagcagcttcacgtaaaaagc

SEQ ID NO: 5503543 - DNA, 25 bp, Homo sapien
tggagaagatattttaagtgtaact

SEQ ID NO: 5503544 - DNA, 25 bp, Homo sapien
aggagcatacagtctctggagaaga

SEQ ID NO: 5503545 - DNA, 25 bp, Homo sapien
tatgtgcaaggcactacactaggcg

SEQ ID NO: 5503546 - DNA, 25 bp, Homo sapien
atccagtccgaggattcccggttta

SEQ ID NO: 5503547 - DNA, 25 bp, Homo sapien
aattcgtcaggtgttttaggatgca

SEQ ID NO: 5503548 - DNA, 25 bp, Homo sapien
gtcttgatccacgtcctgccacagg

SEQ ID NO: 5503549 - DNA, 25 bp, Homo sapien
ttatgtctggtacttggaggatgat

SEQ ID NO: 5503550 - DNA, 25 bp, Homo sapien
tcttgtgggatgaaatatgtacctt

SEQ ID NO: 5503551 - DNA, 25 bp, Homo sapien
actgaacagccaagctttgtgctac

SEQ ID NO: 5503552 - DNA, 25 bp, Homo sapien
tgtgctactatgggatttcgttttc

SEQ ID NO: 5503553 - DNA, 25 bp, Homo sapien
tttcgagggtcttaactgcagttct

SEQ ID NO: 5503554 - DNA, 25 bp, Homo sapien
tttctgcggttccaagtcttgatcc

SEQ ID NO: 5503555 - DNA, 25 bp, Homo sapien
ttgaaataatgcatcctctgcgctt

SEQ ID NO: 5503556 - DNA, 25 bp, Homo sapien
ctcgccattagttcaaaagcttgca

SEQ ID NO: 5503557 - DNA, 25 bp, Homo sapien
ctgtgatacccagcaggaaaccggt

SEQ ID NO: 5503558 - DNA, 25 bp, Homo sapien
accggtttcctgctgggtatcacag

SEQ ID NO: 5503559 - DNA, 25 bp, Homo sapien
ctctacaaacatgaagcaaggggaa

SEQ ID NO: 5503560 - DNA, 25 bp, Homo sapien
tttgtcattggccgctagcacagga

SEQ ID NO: 5503561 - DNA, 25 bp, Homo sapien
attggccctggtagtgtgaggccaa

SEQ ID NO: 5503562 - DNA, 25 bp, Homo sapien
agcaacactgcctcttgggtcccca

SEQ ID NO: 5503563 - DNA, 25 bp, Homo sapien
gtgaggccaatgtggacttaaaatc

SEQ ID NO: 5503564 - DNA, 25 bp, Homo sapien
cccctctcaaagtgacaggcctggg

SEQ ID NO: 5503565 - DNA, 25 bp, Homo sapien
gttcagccagattccaaggtggaca

SEQ ID NO: 5503566 - DNA, 25 bp, Homo sapien
aagctccaagatccctcacagcagc

SEQ ID NO: 5503567 - DNA, 25 bp, Homo sapien
aaaatcctgagacgtgtgtcggcta

SEQ ID NO: 5503568 - DNA, 25 bp, Homo sapien
ggctacatgaagcctggcaagctcc

SEQ ID NO: 5503569 - DNA, 25 bp, Homo sapien
tggccggcacaaggttcctctacaa

SEQ ID NO: 5503570 - DNA, 25 bp, Homo sapien
ggtgcagattatgttggcagccggt

SEQ ID NO: 5503571 - DNA, 25 bp, Homo sapien
gtgagctcaagtctgcggctgtttc

SEQ ID NO: 5503572 - DNA, 25 bp, Homo sapien
gtggaggctgcatgttctgttctct

SEQ ID NO: 5503573 - DNA, 25 bp, Homo sapien
gtggtgttcttgatgtagtgagctc

SEQ ID NO: 5503574 - DNA, 25 bp, Homo sapien
tctgtgtacattctcgggttcaagt

SEQ ID NO: 5503575 - DNA, 25 bp, Homo sapien
gaggatcctattgtcttggaggccc

SEQ ID NO: 5503576 - DNA, 25 bp, Homo sapien
taccctgtgtgttggtgagcaatgt

SEQ ID NO: 5503577 - DNA, 25 bp, Homo sapien
agtgtctgctgccatgttgcgtctc

SEQ ID NO: 5503578 - DNA, 25 bp, Homo sapien
aaaacccatatggcgaggaatggag

SEQ ID NO: 5503579 - DNA, 25 bp, Homo sapien
ttggaggcccatggaatctacttcc

SEQ ID NO: 5503580 - DNA, 25 bp, Homo sapien
acgttctccgaaaagagcatcgctc

SEQ ID NO: 5503581 - DNA, 25 bp, Homo sapien
tgaaaggtgttcaaatgtaaaatag

SEQ ID NO: 5503582 - DNA, 25 bp, Homo sapien
ctattttacatttgaacacctttca

SEQ ID NO: 5503583 - DNA, 25 bp, Homo sapien
tggaccgtgccccatcctacgaggg

SEQ ID NO: 5503584 - DNA, 25 bp, Homo sapien
ccctcgtaggatggggcacggtcca

SEQ ID NO: 5503585 - DNA, 25 bp, Homo sapien
agagaagccctttactcagaaggtc

SEQ ID NO: 5503586 - DNA, 25 bp, Homo sapien
tgtgagcctgcttgggatccattac

SEQ ID NO: 5503587 - DNA, 25 bp, Homo sapien
tgcacagcagattggatactcacca

SEQ ID NO: 5503588 - DNA, 25 bp, Homo sapien
gtgggtgcctatggctgtatgacca

SEQ ID NO: 5503589 - DNA, 25 bp, Homo sapien
atctagtggtaggaaaataatctgt

SEQ ID NO: 5503590 - DNA, 25 bp, Homo sapien
caaaggggttcctcccacctggatg

SEQ ID NO: 5503591 - DNA, 25 bp, Homo sapien
tcaacattccatggtgactctcccc

SEQ ID NO: 5503592 - DNA, 25 bp, Homo sapien
gacagtgcccctcagagtgcaccat

SEQ ID NO: 5503593 - DNA, 25 bp, Homo sapien
tgagtaaactggtgaacatatagct

SEQ ID NO: 5503594 - DNA, 25 bp, Homo sapien
ttacctagccattcagagatcctgt

SEQ ID NO: 5503595 - DNA, 25 bp, Homo sapien
acctggatggggccaatctctagtt

SEQ ID NO: 5503596 - DNA, 25 bp, Homo sapien
agccgtgagggtttcttttgcatgc

SEQ ID NO: 5503597 - DNA, 25 bp, Homo sapien
gcaacatgctcaatttgggtctcaa

SEQ ID NO: 5503598 - DNA, 25 bp, Homo sapien
actatctggaatcaaagcgcaaagg

SEQ ID NO: 5503599 - DNA, 25 bp, Homo sapien
tgtctcaatgaaaagtgcccactgc

SEQ ID NO: 5503600 - DNA, 25 bp, Homo sapien
ccccctctggacaccctggagtttg

SEQ ID NO: 5503601 - DNA, 25 bp, Homo sapien
tgtctctaagtgccaggaatgggcc

SEQ ID NO: 5503602 - DNA, 25 bp, Homo sapien
gtcacacagacacaactcccagagc

SEQ ID NO: 5503603 - DNA, 25 bp, Homo sapien
ttgcatgctcgataaacacttccac

SEQ ID NO: 5503604 - DNA, 25 bp, Homo sapien
gcaggagatggatcactctcaggtc

SEQ ID NO: 5503605 - DNA, 25 bp, Homo sapien
tcaaagaccgaatataactagaacg

SEQ ID NO: 5503606 - DNA, 25 bp, Homo sapien
aactagaacgaaagattgctgagtt

SEQ ID NO: 5503607 - DNA, 25 bp, Homo sapien
acttggggtggactgttatttttca

SEQ ID NO: 5503608 - DNA, 25 bp, Homo sapien
aagaaaagatggccattatcccaac

SEQ ID NO: 5503609 - DNA, 25 bp, Homo sapien
cactgcattgagcaccaacacaggt

SEQ ID NO: 5503610 - DNA, 25 bp, Homo sapien
ggtccagtgtatgacttggggtgga

SEQ ID NO: 5503611 - DNA, 25 bp, Homo sapien
tcatcctcgccgatacggtgaaacc

SEQ ID NO: 5503612 - DNA, 25 bp, Homo sapien
aggcagagttgcagactacgtttca

SEQ ID NO: 5503613 - DNA, 25 bp, Homo sapien
gacacatgtataattgccgggaggc

SEQ ID NO: 5503614 - DNA, 25 bp, Homo sapien
gagaattgctttttgacatcctgac

SEQ ID NO: 5503615 - DNA, 25 bp, Homo sapien
gatagagatcatcctcgccgatacg

SEQ ID NO: 5503616 - DNA, 25 bp, Homo sapien
tcaggaatctgaacaatgaaagtta

SEQ ID NO: 5503617 - DNA, 25 bp, Homo sapien
cagctggtgttcaaatatggaatct

SEQ ID NO: 5503618 - DNA, 25 bp, Homo sapien
aaacagaaattgacccatgtccgct

SEQ ID NO: 5503619 - DNA, 25 bp, Homo sapien
ttgtagagcaatatcaatgagaaaa

SEQ ID NO: 5503620 - DNA, 25 bp, Homo sapien
ttaagccttggaaaacattagcatt

SEQ ID NO: 5503621 - DNA, 25 bp, Homo sapien
aaacggcttgcctacagtcattcag

SEQ ID NO: 5503622 - DNA, 25 bp, Homo sapien
atcaccacctctaacagatggagaa

SEQ ID NO: 5503623 - DNA, 25 bp, Homo sapien
cccaagaaattcaaaagtgtagccc

SEQ ID NO: 5503624 - DNA, 25 bp, Homo sapien
ctggtaaaaacctaagctgaaaata

SEQ ID NO: 5503625 - DNA, 25 bp, Homo sapien
tgatcaggtagggcaagtataatta

SEQ ID NO: 5503626 - DNA, 25 bp, Homo sapien
tgggactacataacaatggtacaga

SEQ ID NO: 5503627 - DNA, 25 bp, Homo sapien
caaaagtgtagcccaggttaagaac

SEQ ID NO: 5503628 - DNA, 25 bp, Homo sapien
agatggagaaattaggtctcaaagc

SEQ ID NO: 5503629 - DNA, 25 bp, Homo sapien
tacgtccccgacctgctacggggaa

SEQ ID NO: 5503630 - DNA, 25 bp, Homo sapien
ttccccgtagcaggtcggggacgta

SEQ ID NO: 5503631 - DNA, 25 bp, Homo sapien
agataaacaatgaagatgtggatgc

SEQ ID NO: 5503632 - DNA, 25 bp, Homo sapien
caggggaagcctatgtgcaatttga

SEQ ID NO: 5503633 - DNA, 25 bp, Homo sapien
atgtgcagaaagccttagagaagca

SEQ ID NO: 5503634 - DNA, 25 bp, Homo sapien
gctcaaggactgccctggtcatgca

SEQ ID NO: 5503635 - DNA, 25 bp, Homo sapien
cttaattgaaatggagtcagagcag

SEQ ID NO: 5503636 - DNA, 25 bp, Homo sapien
tggttcgtttgagaggacttcctta

SEQ ID NO: 5503637 - DNA, 25 bp, Homo sapien
cttttgtgatggactatagagggag

SEQ ID NO: 5503638 - DNA, 25 bp, Homo sapien
aacgaaggggtgatgccttaattga

SEQ ID NO: 5503639 - DNA, 25 bp, Homo sapien
cttagagaagcaccgcatgtacatg

SEQ ID NO: 5503640 - DNA, 25 bp, Homo sapien
tcagactgcagaatccgcaacggtg

SEQ ID NO: 5503641 - DNA, 25 bp, Homo sapien
cccgtccaagttagaagaggaagtg

SEQ ID NO: 5503642 - DNA, 25 bp, Homo sapien
agatttcctgaacagaaatggtagg

SEQ ID NO: 5503643 - DNA, 25 bp, Homo sapien
aacaaatagtccttaaaagtgaaca

SEQ ID NO: 5503644 - DNA, 25 bp, Homo sapien
cccaaacatgccacaatcactattc

SEQ ID NO: 5503645 - DNA, 25 bp, Homo sapien
aagtgaacaaaaatgcttaaaatac

SEQ ID NO: 5503646 - DNA, 25 bp, Homo sapien
tctgtcagttagaaagaacagcagt

SEQ ID NO: 5503647 - DNA, 25 bp, Homo sapien
agaaatggtaggacccctgaatgtt

SEQ ID NO: 5503648 - DNA, 25 bp, Homo sapien
ataaggcaaaaatttacacgaccat

SEQ ID NO: 5503649 - DNA, 25 bp, Homo sapien
ttatagtttgtaagatgcactaaac

SEQ ID NO: 5503650 - DNA, 25 bp, Homo sapien
tgaaaagcagtagtggtccaatatt

SEQ ID NO: 5503651 - DNA, 25 bp, Homo sapien
taaaataacaccccaaacatgccac

SEQ ID NO: 5503652 - DNA, 25 bp, Homo sapien
cagcagtttgttaggctacaaggtt

SEQ ID NO: 5503653 - DNA, 25 bp, Homo sapien
tgaagtcaggtaaacttcggcttac

SEQ ID NO: 5503654 - DNA, 25 bp, Homo sapien
gtaagccgaagtttacctgacttca

SEQ ID NO: 5503655 - DNA, 25 bp, Homo sapien
agagaatgactttaagaaaagattc

SEQ ID NO: 5503656 - DNA, 25 bp, Homo sapien
tacttgaagaactcatagacagacc

SEQ ID NO: 5503657 - DNA, 25 bp, Homo sapien
agaactcatagacagaccaagaaat

SEQ ID NO: 5503658 - DNA, 25 bp, Homo sapien
ggccacgttctcctgagtgttcaga

SEQ ID NO: 5503659 - DNA, 25 bp, Homo sapien
ttttccagctggcgcttggtgagaa

SEQ ID NO: 5503660 - DNA, 25 bp, Homo sapien
agtgttcagaagggtcttacagacg

SEQ ID NO: 5503661 - DNA, 25 bp, Homo sapien
ccttcctttagtatggagctcgatt

SEQ ID NO: 5503662 - DNA, 25 bp, Homo sapien
agaaaagattctatgatcccttcct

SEQ ID NO: 5503663 - DNA, 25 bp, Homo sapien
tggagctcgattttccagctggcgc

SEQ ID NO: 5503664 - DNA, 25 bp, Homo sapien
ttggtgagaaagtacttgaagaact

SEQ ID NO: 5503665 - DNA, 25 bp, Homo sapien
ccgttgagctggtacaccgtccgga

SEQ ID NO: 5503666 - DNA, 25 bp, Homo sapien
gtttccagcctgaagaggcatgggt

SEQ ID NO: 5503667 - DNA, 25 bp, Homo sapien
aatcacagcagtcagaagaaagtgc

SEQ ID NO: 5503668 - DNA, 25 bp, Homo sapien
gcacaagtaatagaaagcaaagggc

SEQ ID NO: 5503669 - DNA, 25 bp, Homo sapien
gaaagtgctttagggaaccaagaga

SEQ ID NO: 5503670 - DNA, 25 bp, Homo sapien
taaaacattgtcaggtgaggcaaat

SEQ ID NO: 5503671 - DNA, 25 bp, Homo sapien
ttattgagcagctaaggagatacaa

SEQ ID NO: 5503672 - DNA, 25 bp, Homo sapien
tgttgatgacactcagtatggacta

SEQ ID NO: 5503673 - DNA, 25 bp, Homo sapien
aaaaggggattgagattaaaataga

SEQ ID NO: 5503674 - DNA, 25 bp, Homo sapien
taaggagatacaaaggcgatttaaa

SEQ ID NO: 5503675 - DNA, 25 bp, Homo sapien
agggcaaggttcactgaatcacagc

SEQ ID NO: 5503676 - DNA, 25 bp, Homo sapien
aggtgaggcaaatgcacaagtaata

SEQ ID NO: 5503677 - DNA, 25 bp, Homo sapien
acctgtgtggtcccaaatgtcgcag

SEQ ID NO: 5503678 - DNA, 25 bp, Homo sapien
tgttccctcatccagagagggcgga

SEQ ID NO: 5503679 - DNA, 25 bp, Homo sapien
catttgacacccaagaaaggagggc

SEQ ID NO: 5503680 - DNA, 25 bp, Homo sapien
caggctgtctccgcacccagcgaca

SEQ ID NO: 5503681 - DNA, 25 bp, Homo sapien
gtggtgcatcagatgtccaggacac

SEQ ID NO: 5503682 - DNA, 25 bp, Homo sapien
ctggggcctgcatcaggccatggct

SEQ ID NO: 5503683 - DNA, 25 bp, Homo sapien
ctccagtcttctgaggatgggcttc

SEQ ID NO: 5503684 - DNA, 25 bp, Homo sapien
gacagatgccctcctctagtgcctc

SEQ ID NO: 5503685 - DNA, 25 bp, Homo sapien
gggcaacgctcacaccagatacctc

SEQ ID NO: 5503686 - DNA, 25 bp, Homo sapien
cacggtgcccatgcattcctcaatc

SEQ ID NO: 5503687 - DNA, 25 bp, Homo sapien
ataaggaagcccacctgtgtggtcc

SEQ ID NO: 5503688 - DNA, 25 bp, Homo sapien
gactccgccccaatggaagaaacca

SEQ ID NO: 5503689 - DNA, 25 bp, Homo sapien
agcatccttggacaaaccacccatc

SEQ ID NO: 5503690 - DNA, 25 bp, Homo sapien
tagtaggctctctgcccaccgttcc

SEQ ID NO: 5503691 - DNA, 25 bp, Homo sapien
ccaagagggccttcccaacagaaaa

SEQ ID NO: 5503692 - DNA, 25 bp, Homo sapien
cacccatcagagcagtgggttgtgg

SEQ ID NO: 5503693 - DNA, 25 bp, Homo sapien
gggcttccacattgaccaggcatta

SEQ ID NO: 5503694 - DNA, 25 bp, Homo sapien
ccctgggcaacctcatgggcttcca

SEQ ID NO: 5503695 - DNA, 25 bp, Homo sapien
tcggggtggaataatgaatcattca

SEQ ID NO: 5503696 - DNA, 25 bp, Homo sapien
tcagttcccaaagcagcatcgattc

SEQ ID NO: 5503697 - DNA, 25 bp, Homo sapien
ccaggactgtcactggctgatggtc

SEQ ID NO: 5503698 - DNA, 25 bp, Homo sapien
ccgttccagggtagcagctactcat

SEQ ID NO: 5503699 - DNA, 25 bp, Homo sapien
cgcgggatgctccttaagccccttc

SEQ ID NO: 5503700 - DNA, 25 bp, Homo sapien
gaacgtcttggcccagcgatgcaaa

SEQ ID NO: 5503701 - DNA, 25 bp, Homo sapien
gtctggcatccgcgggatgctcctt

SEQ ID NO: 5503702 - DNA, 25 bp, Homo sapien
ggcagcttgtggaagcctcatttgc

SEQ ID NO: 5503703 - DNA, 25 bp, Homo sapien
ggaacggttgtgaccacaccgacac

SEQ ID NO: 5503704 - DNA, 25 bp, Homo sapien
gtgacgtcttgtaactagcagtgtg

SEQ ID NO: 5503705 - DNA, 25 bp, Homo sapien
agataaatcattcttgcggcggcgg

SEQ ID NO: 5503706 - DNA, 25 bp, Homo sapien
cagatgttttgaagatcgtgacgtc

SEQ ID NO: 5503707 - DNA, 25 bp, Homo sapien
cttgataatcgtttcgaggggcgtc

SEQ ID NO: 5503708 - DNA, 25 bp, Homo sapien
ccagcgatgcaaagaactgaagttt

SEQ ID NO: 5503709 - DNA, 25 bp, Homo sapien
atttgcaaagccacccctcagatgt

SEQ ID NO: 5503710 - DNA, 25 bp, Homo sapien
gcagaggggtcatgaataatgattc

SEQ ID NO: 5503711 - DNA, 25 bp, Homo sapien
agctacacaaaatttggggggagat

SEQ ID NO: 5503712 - DNA, 25 bp, Homo sapien
ctggcagtgagtctctgacatgaac

SEQ ID NO: 5503713 - DNA, 25 bp, Homo sapien
aatgggtaaggcttttctggcagtg

SEQ ID NO: 5503714 - DNA, 25 bp, Homo sapien
ttcggaatcaactcaggcatgcaca

SEQ ID NO: 5503715 - DNA, 25 bp, Homo sapien
tgacatgaacggctccctctctgct

SEQ ID NO: 5503716 - DNA, 25 bp, Homo sapien
tcagtgcaagcagttgcggtctcaa

SEQ ID NO: 5503717 - DNA, 25 bp, Homo sapien
ggggggagatactctctttggagac

SEQ ID NO: 5503718 - DNA, 25 bp, Homo sapien
agcccgaacaccagaccaactaaaa

SEQ ID NO: 5503719 - DNA, 25 bp, Homo sapien
agactgacacatttgcagaggggtc

SEQ ID NO: 5503720 - DNA, 25 bp, Homo sapien
ctgaatcaggcaaagaataagtgac

SEQ ID NO: 5503721 - DNA, 25 bp, Homo sapien
cgggtgaaccgctccttgtccgagg

SEQ ID NO: 5503722 - DNA, 25 bp, Homo sapien
cctcggacaaggagcggttcacccg

SEQ ID NO: 5503723 - DNA, 25 bp, Homo sapien
ttcctcacctcgggctggaggttcg

SEQ ID NO: 5503724 - DNA, 25 bp, Homo sapien
actactatacggctgcgagaagacg

SEQ ID NO: 5503725 - DNA, 25 bp, Homo sapien
gccatcgaaaaggacttcaaggacg

SEQ ID NO: 5503726 - DNA, 25 bp, Homo sapien
caagggcatcggcttcctcacctcg

SEQ ID NO: 5503727 - DNA, 25 bp, Homo sapien
ccaggaacttcctgcgctagctggg

SEQ ID NO: 5503728 - DNA, 25 bp, Homo sapien
aggggcggcctgccctcatctcatt

SEQ ID NO: 5503729 - DNA, 25 bp, Homo sapien
tcaagccctacgtgagctacctcgc

SEQ ID NO: 5503730 - DNA, 25 bp, Homo sapien
cagaagggaaagctcttccagctct

SEQ ID NO: 5503731 - DNA, 25 bp, Homo sapien
tacctcgcccctgagagcgaggaga

SEQ ID NO: 5503732 - DNA, 25 bp, Homo sapien
cggatctgaccggcttcaagctcaa

SEQ ID NO: 5503733 - DNA, 25 bp, Homo sapien
cggagttcgtcgtcccggatctgac

SEQ ID NO: 5503734 - DNA, 25 bp, Homo sapien
aggcaggcatttgaccttgaaggtg

SEQ ID NO: 5503735 - DNA, 25 bp, Homo sapien
ttatttcctcggcctggcaagggga

SEQ ID NO: 5503736 - DNA, 25 bp, Homo sapien
cacatcacgcagaagacaacgcatt

SEQ ID NO: 5503737 - DNA, 25 bp, Homo sapien
agaaaagtatttgtaaagtggcatt

SEQ ID NO: 5503738 - DNA, 25 bp, Homo sapien
gacaacgcatttcgctaagggccac

SEQ ID NO: 5503739 - DNA, 25 bp, Homo sapien
ttaaaatacaggcgcgaattccaca

SEQ ID NO: 5503740 - DNA, 25 bp, Homo sapien
tacagcaggctacaatgctcccttc

SEQ ID NO: 5503741 - DNA, 25 bp, Homo sapien
gctggaatggtctacagcaggctac

SEQ ID NO: 5503742 - DNA, 25 bp, Homo sapien
aacatagtcgacacacatcttgccc

SEQ ID NO: 5503743 - DNA, 25 bp, Homo sapien
aggggagggcttttcagtattgtta

SEQ ID NO: 5503744 - DNA, 25 bp, Homo sapien
caagggagaaaccacaccatctttt

SEQ ID NO: 5503745 - DNA, 25 bp, Homo sapien
ttccgcaccgtgcccgtcttcacac

SEQ ID NO: 5503746 - DNA, 25 bp, Homo sapien
gctcttctctcccggtgcggtggcg

SEQ ID NO: 5503747 - DNA, 25 bp, Homo sapien
gtcttcacactgccctcccaactgc

SEQ ID NO: 5503748 - DNA, 25 bp, Homo sapien
acgacgccttccgcgcctcgctcag

SEQ ID NO: 5503749 - DNA, 25 bp, Homo sapien
cgtggcttggtttcacgcgcagcgg

SEQ ID NO: 5503750 - DNA, 25 bp, Homo sapien
tcagctgcgtgctgcccgacttctt

SEQ ID NO: 5503751 - DNA, 25 bp, Homo sapien
cgcccttttccgcaccgtgcccgtc

SEQ ID NO: 5503752 - DNA, 25 bp, Homo sapien
ccaactgccagacttcctgggggcc

SEQ ID NO: 5503753 - DNA, 25 bp, Homo sapien
actgccctcccaactgccagacttc

SEQ ID NO: 5503754 - DNA, 25 bp, Homo sapien
gcccgacttcttgcagggccgggcg

SEQ ID NO: 5503755 - DNA, 25 bp, Homo sapien
gcccgtggcttggtttcacgcgcag

SEQ ID NO: 5503756 - DNA, 25 bp, Homo sapien
caacacttggcacacactggctgat

SEQ ID NO: 5503757 - DNA, 25 bp, Homo sapien
ttgctgtgctggacaacaggatcta

SEQ ID NO: 5503758 - DNA, 25 bp, Homo sapien
aacaggatctatgtgttaggtggcc

SEQ ID NO: 5503759 - DNA, 25 bp, Homo sapien
ggcctgctacagctgcacgtctgga

SEQ ID NO: 5503760 - DNA, 25 bp, Homo sapien
tcaacaagctgtatgtgatcggggg

SEQ ID NO: 5503761 - DNA, 25 bp, Homo sapien
acggcatggcaaccctcctcaacaa

SEQ ID NO: 5503762 - DNA, 25 bp, Homo sapien
gcacgtctggacagtggtcatctgt

SEQ ID NO: 5503763 - DNA, 25 bp, Homo sapien
atgtgttaggtggccgctcacacaa

SEQ ID NO: 5503764 - DNA, 25 bp, Homo sapien
agcctggcattgctgtgctggacaa

SEQ ID NO: 5503765 - DNA, 25 bp, Homo sapien
ggcagcaacaacgatgccggataca

SEQ ID NO: 5503766 - DNA, 25 bp, Homo sapien
aggcagcaacacttggcacacactg

SEQ ID NO: 5503767 - DNA, 25 bp, Homo sapien
agtagaggtccagaactttcccaac

SEQ ID NO: 5503768 - DNA, 25 bp, Homo sapien
ttctgaagaccaccatttatggcta

SEQ ID NO: 5503769 - DNA, 25 bp, Homo sapien
gaacgctgttcaggatggcttgctg

SEQ ID NO: 5503770 - DNA, 25 bp, Homo sapien
tgggtgctggcagccacaatctcca

SEQ ID NO: 5503771 - DNA, 25 bp, Homo sapien
agagatgagtggctctatgctaatc

SEQ ID NO: 5503772 - DNA, 25 bp, Homo sapien
ggatggcttgctgcctgcatggcat

SEQ ID NO: 5503773 - DNA, 25 bp, Homo sapien
ttatggctagatccagtagaggtcc

SEQ ID NO: 5503774 - DNA, 25 bp, Homo sapien
ggagaacaagtcccttttcctctca

SEQ ID NO: 5503775 - DNA, 25 bp, Homo sapien
aagtgtttcacagtcagaggagaga

SEQ ID NO: 5503776 - DNA, 25 bp, Homo sapien
ttgctgcctgcatggcatgaggctg

SEQ ID NO: 5503777 - DNA, 25 bp, Homo sapien
tatgctaatcttagggttccttctc

SEQ ID NO: 5503778 - DNA, 25 bp, Homo sapien
ttgtccatcaccccaggacagggca

SEQ ID NO: 5503779 - DNA, 25 bp, Homo sapien
ccccatctgtggacccctctagggt

SEQ ID NO: 5503780 - DNA, 25 bp, Homo sapien
gagggctcagcctagaggcttccaa

SEQ ID NO: 5503781 - DNA, 25 bp, Homo sapien
ccctctagggtctgagatgagatga

SEQ ID NO: 5503782 - DNA, 25 bp, Homo sapien
ccgtgccctcagatgaagcacagag

SEQ ID NO: 5503783 - DNA, 25 bp, Homo sapien
aggttgttacttgcccgggccatcc

SEQ ID NO: 5503784 - DNA, 25 bp, Homo sapien
catgaaactcgtgttaggccctggg

SEQ ID NO: 5503785 - DNA, 25 bp, Homo sapien
ccagagcctagcttcccctcagcct

SEQ ID NO: 5503786 - DNA, 25 bp, Homo sapien
gctggctgggtcttgtgtccccatc

SEQ ID NO: 5503787 - DNA, 25 bp, Homo sapien
gagaagtgtctcctgtatccacctc

SEQ ID NO: 5503788 - DNA, 25 bp, Homo sapien
gtccactcctcaggttggtgctctc

SEQ ID NO: 5503789 - DNA, 25 bp, Homo sapien
gagatggtgaagacacacactcgtt

SEQ ID NO: 5503790 - DNA, 25 bp, Homo sapien
caggatggtctgaacacatgcaaca

SEQ ID NO: 5503791 - DNA, 25 bp, Homo sapien
catccagctgaaaccgaagacagat

SEQ ID NO: 5503792 - DNA, 25 bp, Homo sapien
gtcactaaatttggtggctctgctc

SEQ ID NO: 5503793 - DNA, 25 bp, Homo sapien
tttaaaatgctggagatggtgaaga

SEQ ID NO: 5503794 - DNA, 25 bp, Homo sapien
caactgaagcagcccattccaagct

SEQ ID NO: 5503795 - DNA, 25 bp, Homo sapien
tgctaacatggctagacactgtcac

SEQ ID NO: 5503796 - DNA, 25 bp, Homo sapien
gtcttaggatgaatagcaccagcag

SEQ ID NO: 5503797 - DNA, 25 bp, Homo sapien
caaatctgtgggatacagaatgtac

SEQ ID NO: 5503798 - DNA, 25 bp, Homo sapien
ccccctccctccaactgaagcagcc

SEQ ID NO: 5503799 - DNA, 25 bp, Homo sapien
catctgaaactgaggtatgagacct

SEQ ID NO: 5503800 - DNA, 25 bp, Homo sapien
gcgcgagtaccagctctccgactct

SEQ ID NO: 5503801 - DNA, 25 bp, Homo sapien
agcgcggcttcaccaagctcgtcta

SEQ ID NO: 5503802 - DNA, 25 bp, Homo sapien
ctctacaagtacgagcagaacaagg

SEQ ID NO: 5503803 - DNA, 25 bp, Homo sapien
gtgccatcaagaccctgtgggagga

SEQ ID NO: 5503804 - DNA, 25 bp, Homo sapien
ccatggagacgctcaagatcctcta

SEQ ID NO: 5503805 - DNA, 25 bp, Homo sapien
gccaagtactacctgaccgacgttg

SEQ ID NO: 5503806 - DNA, 25 bp, Homo sapien
gcagatgcgcatcatccacggcgcc

SEQ ID NO: 5503807 - DNA, 25 bp, Homo sapien
ggaagagcacgttcatcaagcagat

SEQ ID NO: 5503808 - DNA, 25 bp, Homo sapien
gagtccatgatggcgtgttgcctga

SEQ ID NO: 5503809 - DNA, 25 bp, Homo sapien
gaacaaggccaatgcgctcctgatc

SEQ ID NO: 5503810 - DNA, 25 bp, Homo sapien
cgagcatcagtacgtcagtgccatc

SEQ ID NO: 5503811 - DNA, 25 bp, Homo sapien
tactattggtgtagagttcggtgct

SEQ ID NO: 5503812 - DNA, 25 bp, Homo sapien
tgcacgagaacatggactcatcttc

SEQ ID NO: 5503813 - DNA, 25 bp, Homo sapien
ggcagggcaagaatcctttcgttcc

SEQ ID NO: 5503814 - DNA, 25 bp, Homo sapien
aagaagaaggtgaagcttttgcacg

SEQ ID NO: 5503815 - DNA, 25 bp, Homo sapien
cacaaggtcgtattacagaggtgca

SEQ ID NO: 5503816 - DNA, 25 bp, Homo sapien
aagaggtttcagccagtgcatgacc

SEQ ID NO: 5503817 - DNA, 25 bp, Homo sapien
ctacagtttacagacaagaggtttc

SEQ ID NO: 5503818 - DNA, 25 bp, Homo sapien
actattgatgggaaacagataaaac

SEQ ID NO: 5503819 - DNA, 25 bp, Homo sapien
tacacggagagatacattcaaccac

SEQ ID NO: 5503820 - DNA, 25 bp, Homo sapien
aaaacttcagatatgggatacggca

SEQ ID NO: 5503821 - DNA, 25 bp, Homo sapien
ggtgcagcaggagctttactagttt

SEQ ID NO: 5503822 - DNA, 25 bp, Homo sapien
tttcttcttgcgtcaccccagcgtg

SEQ ID NO: 5503823 - DNA, 25 bp, Homo sapien
gtggccgcagccgctgtctttcacg

SEQ ID NO: 5503824 - DNA, 25 bp, Homo sapien
agccgctgtctttcacgcctgtctc

SEQ ID NO: 5503825 - DNA, 25 bp, Homo sapien
ggagttttcttcttgcgtcacccca

SEQ ID NO: 5503826 - DNA, 25 bp, Homo sapien
atgatcacttccaggtcctcagtac

SEQ ID NO: 5503827 - DNA, 25 bp, Homo sapien
ccgcagccgctgtctttcacgcctg

SEQ ID NO: 5503828 - DNA, 25 bp, Homo sapien
gtctcactccacacggtgccccgac

SEQ ID NO: 5503829 - DNA, 25 bp, Homo sapien
gtcccgaaagtcccaggctgttgga

SEQ ID NO: 5503830 - DNA, 25 bp, Homo sapien
aaagtcccaggctgttggacgtggt

SEQ ID NO: 5503831 - DNA, 25 bp, Homo sapien
ccaaaatatgatcacttccaggtcc

SEQ ID NO: 5503832 - DNA, 25 bp, Homo sapien
acgcctgtctcactccacacggtgc

SEQ ID NO: 5503833 - DNA, 25 bp, Homo sapien
gaagagcagagagaaaaactttata

SEQ ID NO: 5503834 - DNA, 25 bp, Homo sapien
agagacaaggttttgccatgttccc

SEQ ID NO: 5503835 - DNA, 25 bp, Homo sapien
caatggttgtttgaagagcagagag

SEQ ID NO: 5503836 - DNA, 25 bp, Homo sapien
ggaaagtactccatcatacagcaaa

SEQ ID NO: 5503837 - DNA, 25 bp, Homo sapien
agccatgatgctcagcctatacctt

SEQ ID NO: 5503838 - DNA, 25 bp, Homo sapien
ttatggtgactctgatgatggtttc

SEQ ID NO: 5503839 - DNA, 25 bp, Homo sapien
ttataaaggctccaagtaaatacaa

SEQ ID NO: 5503840 - DNA, 25 bp, Homo sapien
tacaaaggtgatagattagataaat

SEQ ID NO: 5503841 - DNA, 25 bp, Homo sapien
tgatggtttcacgggattataataa

SEQ ID NO: 5503842 - DNA, 25 bp, Homo sapien
tttggtgacaggtttggcaatttta

SEQ ID NO: 5503843 - DNA, 25 bp, Homo sapien
gggaatacaggcatgagccatgatg

SEQ ID NO: 5503844 - DNA, 25 bp, Homo sapien
ggcttcgacctggctgcactaaccc

SEQ ID NO: 5503845 - DNA, 25 bp, Homo sapien
cacatcactacattccctcggcccg

SEQ ID NO: 5503846 - DNA, 25 bp, Homo sapien
tcggcccgtgttagtgaataaagta

SEQ ID NO: 5503847 - DNA, 25 bp, Homo sapien
cctgtatatttgcgccggctgcggc

SEQ ID NO: 5503848 - DNA, 25 bp, Homo sapien
agggacttcaagctgccccctggcg

SEQ ID NO: 5503849 - DNA, 25 bp, Homo sapien
ggcagggacttcaagctgccccctg

SEQ ID NO: 5503850 - DNA, 25 bp, Homo sapien
ctcctcgccccggcctccgggtctg

SEQ ID NO: 5503851 - DNA, 25 bp, Homo sapien
cctggctgcactaacccaggctcct

SEQ ID NO: 5503852 - DNA, 25 bp, Homo sapien
gcccaccccacatcactacattccc

SEQ ID NO: 5503853 - DNA, 25 bp, Homo sapien
cgcacatgcggcgccgcctgtatat

SEQ ID NO: 5503854 - DNA, 25 bp, Homo sapien
tccctcggcccgtgttagtgaataa

SEQ ID NO: 5503855 - DNA, 25 bp, Homo sapien
ctctgacccaagtcgaagacagcag

SEQ ID NO: 5503856 - DNA, 25 bp, Homo sapien
tctacaaatactcaatgtccaaggc

SEQ ID NO: 5503857 - DNA, 25 bp, Homo sapien
aggccctcactgcccgccaccctct

SEQ ID NO: 5503858 - DNA, 25 bp, Homo sapien
atgtgtcttcctggcaaaggtttcc

SEQ ID NO: 5503859 - DNA, 25 bp, Homo sapien
agcgtctatgcaggcatcacaaact

SEQ ID NO: 5503860 - DNA, 25 bp, Homo sapien
actttggcggatacagtagatatgt

SEQ ID NO: 5503861 - DNA, 25 bp, Homo sapien
atgcaggcatcacaaactttggcgg

SEQ ID NO: 5503862 - DNA, 25 bp, Homo sapien
cctcagcccaaccttggaggcccag

SEQ ID NO: 5503863 - DNA, 25 bp, Homo sapien
ttgatgctgaaaggtcagtccctaa

SEQ ID NO: 5503864 - DNA, 25 bp, Homo sapien
ccctctgttgtgctgggtgcttggg

SEQ ID NO: 5503865 - DNA, 25 bp, Homo sapien
aaaggtcagtccctaagacaaaatc

SEQ ID NO: 5503866 - DNA, 25 bp, Homo sapien
aactcagaagccataaaagcgaaca

SEQ ID NO: 5503867 - DNA, 25 bp, Homo sapien
aaaatagctataatggttgacaatc

SEQ ID NO: 5503868 - DNA, 25 bp, Homo sapien
acaaaattggacataaagaagaaat

SEQ ID NO: 5503869 - DNA, 25 bp, Homo sapien
aaagcgaacatggttatacttggac

SEQ ID NO: 5503870 - DNA, 25 bp, Homo sapien
ttcccgaaatagtaaatgagctctt

SEQ ID NO: 5503871 - DNA, 25 bp, Homo sapien
aacatgaaaaaatgaccaaactcaa

SEQ ID NO: 5503872 - DNA, 25 bp, Homo sapien
atacttggacatgtaacaatcatac

SEQ ID NO: 5503873 - DNA, 25 bp, Homo sapien
ggaagagactaaatcctcctcccac

SEQ ID NO: 5503874 - DNA, 25 bp, Homo sapien
taggtgaagggttttatggactcaa

SEQ ID NO: 5503875 - DNA, 25 bp, Homo sapien
agttgaaaagtgtgtaaaaaatagc

SEQ ID NO: 5503876 - DNA, 25 bp, Homo sapien
aatacagatggctaataaacatgaa

SEQ ID NO: 5503877 - DNA, 25 bp, Homo sapien
ccccaagctatgctgcacactgagc

SEQ ID NO: 5503878 - DNA, 25 bp, Homo sapien
aagctatgctgcacactgagctccc

SEQ ID NO: 5503879 - DNA, 25 bp, Homo sapien
cagcgtgcgcaagctcaactgctgg

SEQ ID NO: 5503880 - DNA, 25 bp, Homo sapien
ggcagccgcctcacagatatctcca

SEQ ID NO: 5503881 - DNA, 25 bp, Homo sapien
cggccccaagctatgctgcacactg

SEQ ID NO: 5503882 - DNA, 25 bp, Homo sapien
gctatgctgcacactgagctccctc

SEQ ID NO: 5503883 - DNA, 25 bp, Homo sapien
gctgagctcttctacctgaaggggc

SEQ ID NO: 5503884 - DNA, 25 bp, Homo sapien
gctcttctacctgaaggggctgccg

SEQ ID NO: 5503885 - DNA, 25 bp, Homo sapien
acagcgtgcgcaagctcaactgctg

SEQ ID NO: 5503886 - DNA, 25 bp, Homo sapien
gagctcttctacctgaaggggctgc

SEQ ID NO: 5503887 - DNA, 25 bp, Homo sapien
ccagcctggctgagctcttctacct

SEQ ID NO: 5503888 - DNA, 25 bp, Homo sapien
cccaggagtaaagtttactggctac

SEQ ID NO: 5503889 - DNA, 25 bp, Homo sapien
aggctcaaaacggaaaaagtcatat

SEQ ID NO: 5503890 - DNA, 25 bp, Homo sapien
actgcatttctaggtcccaaagacc

SEQ ID NO: 5503891 - DNA, 25 bp, Homo sapien
aagaatgaaaaagcaggctcaaaac

SEQ ID NO: 5503892 - DNA, 25 bp, Homo sapien
gtgaagcctccagcaaacaagtatc

SEQ ID NO: 5503893 - DNA, 25 bp, Homo sapien
actggctaccaggcaattcagcaac

SEQ ID NO: 5503894 - DNA, 25 bp, Homo sapien
atataaggagtacaaagacaagttt

SEQ ID NO: 5503895 - DNA, 25 bp, Homo sapien
tcaaagaaatcctctaaacagtccc

SEQ ID NO: 5503896 - DNA, 25 bp, Homo sapien
atttaacgaaggattgtgggaaata

SEQ ID NO: 5503897 - DNA, 25 bp, Homo sapien
ttcagcaacagagctcttcagaaac

SEQ ID NO: 5503898 - DNA, 25 bp, Homo sapien
acagtcccggaaatctccaggagat

SEQ ID NO: 5503899 - DNA, 25 bp, Homo sapien
gggaccagttccacaagctaggcac

SEQ ID NO: 5503900 - DNA, 25 bp, Homo sapien
caacatctctgacaagcacggcttc

SEQ ID NO: 5503901 - DNA, 25 bp, Homo sapien
acaagtaccagccgcgcttccacat

SEQ ID NO: 5503902 - DNA, 25 bp, Homo sapien
tggacaagaaggccaagtatatcct

SEQ ID NO: 5503903 - DNA, 25 bp, Homo sapien
gcacctacgtgttcccggagaccga

SEQ ID NO: 5503904 - DNA, 25 bp, Homo sapien
gcacggagatggtcatcaccaagtc

SEQ ID NO: 5503905 - DNA, 25 bp, Homo sapien
gccgctgacgattgccgctataagt

SEQ ID NO: 5503906 - DNA, 25 bp, Homo sapien
gccaacgacatcctgaagctgcctt

SEQ ID NO: 5503907 - DNA, 25 bp, Homo sapien
cccccccttcaaggtgcgagtcagc

SEQ ID NO: 5503908 - DNA, 25 bp, Homo sapien
gatggctaagcctgtggccttccac

SEQ ID NO: 5503909 - DNA, 25 bp, Homo sapien
gctgatggacattgtagccgctgac

SEQ ID NO: 5503910 - DNA, 25 bp, Homo sapien
agcgaggtcccactttgcgtctcct

SEQ ID NO: 5503911 - DNA, 25 bp, Homo sapien
tgcgtctccttgtaggcagtgcgtc

SEQ ID NO: 5503912 - DNA, 25 bp, Homo sapien
accagctttccctggtggtgcggac

SEQ ID NO: 5503913 - DNA, 25 bp, Homo sapien
gtaggcagtgcgtccatccttccct

SEQ ID NO: 5503914 - DNA, 25 bp, Homo sapien
gctgaagactgtcgcctgctccgaa

SEQ ID NO: 5503915 - DNA, 25 bp, Homo sapien
actacagaaaataaaactgcgctac

SEQ ID NO: 5503916 - DNA, 25 bp, Homo sapien
tttcccgctaagcctggcctgggca

SEQ ID NO: 5503917 - DNA, 25 bp, Homo sapien
cctagggcaggaattcccacagttg

SEQ ID NO: 5503918 - DNA, 25 bp, Homo sapien
agttgctactttcctgggagggcct

SEQ ID NO: 5503919 - DNA, 25 bp, Homo sapien
gggagggcctcatgttttatctggt

SEQ ID NO: 5503920 - DNA, 25 bp, Homo sapien
ggatctcacagtgagtggcaggatc

SEQ ID NO: 5503921 - DNA, 25 bp, Homo sapien
gaagaccggcgagagcgcgtggaga

SEQ ID NO: 5503922 - DNA, 25 bp, Homo sapien
tctccacgcgctctcgccggtcttc

SEQ ID NO: 5503923 - DNA, 25 bp, Homo sapien
agggaccaggagacactccttcaga

SEQ ID NO: 5503924 - DNA, 25 bp, Homo sapien
gagggacaaagagacagtccttcag

SEQ ID NO: 5503925 - DNA, 25 bp, Homo sapien
gattgttccacctcatccaccctcc

SEQ ID NO: 5503926 - DNA, 25 bp, Homo sapien
tccacctcatccgccctccgcctct

SEQ ID NO: 5503927 - DNA, 25 bp, Homo sapien
cgcctcttgggtttcggtgattgtt

SEQ ID NO: 5503928 - DNA, 25 bp, Homo sapien
gcgtgttctcagcttactcaacctc

SEQ ID NO: 5503929 - DNA, 25 bp, Homo sapien
ggagcaagaggacactccttgatat

SEQ ID NO: 5503930 - DNA, 25 bp, Homo sapien
tcttgggtttcggtgattgttccac

SEQ ID NO: 5503931 - DNA, 25 bp, Homo sapien
ttccacctcatccaccctccacctc

SEQ ID NO: 5503932 - DNA, 25 bp, Homo sapien
gggcttgggcgattgttccacctca

SEQ ID NO: 5503933 - DNA, 25 bp, Homo sapien
aaagagacagtccttcagattatca

SEQ ID NO: 5503934 - DNA, 25 bp, Homo sapien
attagtctgataggaagatagggat

SEQ ID NO: 5503935 - DNA, 25 bp, Homo sapien
aacaaacaaacatgagtagtctgca

SEQ ID NO: 5503936 - DNA, 25 bp, Homo sapien
taaagccacaatgatttgaggtctt

SEQ ID NO: 5503937 - DNA, 25 bp, Homo sapien
gatgggggctttatcatgcaacatt

SEQ ID NO: 5503938 - DNA, 25 bp, Homo sapien
gaactgaaaaactgtagcttgtgtg

SEQ ID NO: 5503939 - DNA, 25 bp, Homo sapien
caagaaatggtcctaatcctgagtc

SEQ ID NO: 5503940 - DNA, 25 bp, Homo sapien
gacatttaagcgaagtaaaagaggc

SEQ ID NO: 5503941 - DNA, 25 bp, Homo sapien
tgtgtgaaaatgagcctttggacca

SEQ ID NO: 5503942 - DNA, 25 bp, Homo sapien
tatggatcacggagctgaccatctt

SEQ ID NO: 5503943 - DNA, 25 bp, Homo sapien
cctgagtcgtcacccttggatttta

SEQ ID NO: 5503944 - DNA, 25 bp, Homo sapien
tatgagatacttgatgggggcttta

SEQ ID NO: 5503945 - DNA, 25 bp, Homo sapien
cgtggtttatcaattagcttattct

SEQ ID NO: 5503946 - DNA, 25 bp, Homo sapien
agaataagctaattgataaaccacg

SEQ ID NO: 5503947 - DNA, 25 bp, Homo sapien
ctatgtgacttcaaccccaagagca

SEQ ID NO: 5503948 - DNA, 25 bp, Homo sapien
gctttcgtgaaggaatccaaggagg

SEQ ID NO: 5503949 - DNA, 25 bp, Homo sapien
gctgatggctacgcagccattgccc

SEQ ID NO: 5503950 - DNA, 25 bp, Homo sapien
aggtggcccagctatgtgacttcaa

SEQ ID NO: 5503951 - DNA, 25 bp, Homo sapien
aggccaacggtcctgctgatggcta

SEQ ID NO: 5503952 - DNA, 25 bp, Homo sapien
ctgcatctaaggtcacggaacagga

SEQ ID NO: 5503953 - DNA, 25 bp, Homo sapien
gatgctgcatctaaggtcacggaac

SEQ ID NO: 5503954 - DNA, 25 bp, Homo sapien
ggctacgcagccattgcccaggctg

SEQ ID NO: 5503955 - DNA, 25 bp, Homo sapien
gtggcccagctatgtgacttcaacc

SEQ ID NO: 5503956 - DNA, 25 bp, Homo sapien
aacggtcctgctgatggctacgcag

SEQ ID NO: 5503957 - DNA, 25 bp, Homo sapien
ggtcctgctgatggctacgcagcca

SEQ ID NO: 5503958 - DNA, 25 bp, Homo sapien
tcccagactggtcatatgcggatgg

SEQ ID NO: 5503959 - DNA, 25 bp, Homo sapien
tggacgctggattacaagcatggca

SEQ ID NO: 5503960 - DNA, 25 bp, Homo sapien
taccgagctcccagactggtcatat

SEQ ID NO: 5503961 - DNA, 25 bp, Homo sapien
ggaaatggacgctggattacaagca

SEQ ID NO: 5503962 - DNA, 25 bp, Homo sapien
caaaggggcttcactgaagagccca

SEQ ID NO: 5503963 - DNA, 25 bp, Homo sapien
gcaagacgagttgtactgctgtcac

SEQ ID NO: 5503964 - DNA, 25 bp, Homo sapien
aaacccaaaggggcttcactgaaga

SEQ ID NO: 5503965 - DNA, 25 bp, Homo sapien
actgaagagcccacttccaagtcaa

SEQ ID NO: 5503966 - DNA, 25 bp, Homo sapien
aagtcaataaaaagcaactcctgcc

SEQ ID NO: 5503967 - DNA, 25 bp, Homo sapien
ggagacgtttgcaagacgagttgta

SEQ ID NO: 5503968 - DNA, 25 bp, Homo sapien
tggattacaagcatggcagctcagg

SEQ ID NO: 5503969 - DNA, 25 bp, Homo sapien
tacgtgtataagaaaggacactggc

SEQ ID NO: 5503970 - DNA, 25 bp, Homo sapien
tgcctatgaccaaagctactgagct

SEQ ID NO: 5503971 - DNA, 25 bp, Homo sapien
taagaactagcattgaattcatcac

SEQ ID NO: 5503972 - DNA, 25 bp, Homo sapien
gtgaagagctgtctttacaaagatc

SEQ ID NO: 5503973 - DNA, 25 bp, Homo sapien
tgtatgtacgtgtataagaaaggac

SEQ ID NO: 5503974 - DNA, 25 bp, Homo sapien
agctactgagctgaagtgaagagct

SEQ ID NO: 5503975 - DNA, 25 bp, Homo sapien
cctctcattaagcccactgccctgc

SEQ ID NO: 5503976 - DNA, 25 bp, Homo sapien
caagccatcatcatgtatgtacgtg

SEQ ID NO: 5503977 - DNA, 25 bp, Homo sapien
tgccctgcagctgactcaagccatc

SEQ ID NO: 5503978 - DNA, 25 bp, Homo sapien
tccacatacagaaataaaagagttc

SEQ ID NO: 5503979 - DNA, 25 bp, Homo sapien
aaattatgataatggaaaacaaact

SEQ ID NO: 5503980 - DNA, 25 bp, Homo sapien
gccatcgatcacgaagctggcagag

SEQ ID NO: 5503981 - DNA, 25 bp, Homo sapien
ccgggaagcacttcactgagctggg

SEQ ID NO: 5503982 - DNA, 25 bp, Homo sapien
gtttgtgtacaaggagccatcgatc

SEQ ID NO: 5503983 - DNA, 25 bp, Homo sapien
ccaagatcatgcaccagagttccgg

SEQ ID NO: 5503984 - DNA, 25 bp, Homo sapien
cgtgttcgggacgtatttccgcgtg

SEQ ID NO: 5503985 - DNA, 25 bp, Homo sapien
gcttctacggcgcccacttcggtga

SEQ ID NO: 5503986 - DNA, 25 bp, Homo sapien
cggtgaatgaggtctacaagaacct

SEQ ID NO: 5503987 - DNA, 25 bp, Homo sapien
gagtccgccatctccgacgacatcc

SEQ ID NO: 5503988 - DNA, 25 bp, Homo sapien
gacatcctgtcgcccgacgaggagg

SEQ ID NO: 5503989 - DNA, 25 bp, Homo sapien
cccaccgtgactacaagaagctggc

SEQ ID NO: 5503990 - DNA, 25 bp, Homo sapien
cacttcggtgacctggatgagcagg

SEQ ID NO: 5503991 - DNA, 25 bp, Homo sapien
aaaaaagtctggactgtgacactgc

SEQ ID NO: 5503992 - DNA, 25 bp, Homo sapien
gaatccctgcgttagaactgagagt

SEQ ID NO: 5503993 - DNA, 25 bp, Homo sapien
cctgctagccctgggacccactgtg

SEQ ID NO: 5503994 - DNA, 25 bp, Homo sapien
ctctaataaaaacttgcccgtaatc

SEQ ID NO: 5503995 - DNA, 25 bp, Homo sapien
cctgaaggatttacaaagacagagc

SEQ ID NO: 5503996 - DNA, 25 bp, Homo sapien
gacccctgaaggatttacaaagaca

SEQ ID NO: 5503997 - DNA, 25 bp, Homo sapien
cagcacgctcctgctagccctggga

SEQ ID NO: 5503998 - DNA, 25 bp, Homo sapien
tcaccagcacactcctgccagcacc

SEQ ID NO: 5503999 - DNA, 25 bp, Homo sapien
agtctgaaagcccaattcctgaatc

SEQ ID NO: 5504000 - DNA, 25 bp, Homo sapien
gccggctcaccagcacactcctgcc

SEQ ID NO: 5504001 - DNA, 25 bp, Homo sapien
tctggactgtgacactgcagaagga

SEQ ID NO: 5504002 - DNA, 25 bp, Homo sapien
accgtacatctgcagacgtcgctgg

SEQ ID NO: 5504003 - DNA, 25 bp, Homo sapien
ggagctggtgttcactctgggtgac

SEQ ID NO: 5504004 - DNA, 25 bp, Homo sapien
agagttccttgctgccatggagccc

SEQ ID NO: 5504005 - DNA, 25 bp, Homo sapien
ggccaggtggtcaccgtacatctgc

SEQ ID NO: 5504006 - DNA, 25 bp, Homo sapien
agttccttgctgccatggagcccga

SEQ ID NO: 5504007 - DNA, 25 bp, Homo sapien
gtcaccgtacatctgcagacgtcgc

SEQ ID NO: 5504008 - DNA, 25 bp, Homo sapien
aggtggtcaccgtacatctgcagac

SEQ ID NO: 5504009 - DNA, 25 bp, Homo sapien
aggccctggatctcagtgtcccact

SEQ ID NO: 5504010 - DNA, 25 bp, Homo sapien
ttcactctgggtgactgtgacgtca

SEQ ID NO: 5504011 - DNA, 25 bp, Homo sapien
ccagaagagtggctggacattctgg

SEQ ID NO: 5504012 - DNA, 25 bp, Homo sapien
ggtgttcactctgggtgactgtgac

SEQ ID NO: 5504013 - DNA, 25 bp, Homo sapien
gctcaccccattagtgtcatcctgc

SEQ ID NO: 5504014 - DNA, 25 bp, Homo sapien
gtggcaccatccttggttgccctcc

SEQ ID NO: 5504015 - DNA, 25 bp, Homo sapien
gacagtcaggggtttgctttctgct

SEQ ID NO: 5504016 - DNA, 25 bp, Homo sapien
tgggctgtagtttagcctgggcctt

SEQ ID NO: 5504017 - DNA, 25 bp, Homo sapien
tgctcacatgtggcaccatccttgg

SEQ ID NO: 5504018 - DNA, 25 bp, Homo sapien
gccacggatgaccagcgttctgttt

SEQ ID NO: 5504019 - DNA, 25 bp, Homo sapien
ttctgctccctggactgcctagccc

SEQ ID NO: 5504020 - DNA, 25 bp, Homo sapien
cccaggaaagtgtcactatgggagg

SEQ ID NO: 5504021 - DNA, 25 bp, Homo sapien
acctgcagaccccaggaaagtgtca

SEQ ID NO: 5504022 - DNA, 25 bp, Homo sapien
atctcttcacacatccccaggccca

SEQ ID NO: 5504023 - DNA, 25 bp, Homo sapien
ctccctggactgcctagccctgagt

SEQ ID NO: 5504024 - DNA, 25 bp, Homo sapien
ggcctggcccctcgtgcatttgccc

SEQ ID NO: 5504025 - DNA, 25 bp, Homo sapien
tccaactacctccgtggcctgggac

SEQ ID NO: 5504026 - DNA, 25 bp, Homo sapien
gcctgagggtctggacgctttttat

SEQ ID NO: 5504027 - DNA, 25 bp, Homo sapien
cgccccggacactgactccaactac

SEQ ID NO: 5504028 - DNA, 25 bp, Homo sapien
cgagcgatatacgtggatcgtgctg

SEQ ID NO: 5504029 - DNA, 25 bp, Homo sapien
acaaagggtgctccctgaaggttct

SEQ ID NO: 5504030 - DNA, 25 bp, Homo sapien
ccaccgactgatgaccggcactagt

SEQ ID NO: 5504031 - DNA, 25 bp, Homo sapien
cggcactagtgttagcctgcggaac

SEQ ID NO: 5504032 - DNA, 25 bp, Homo sapien
gtcgaatggaccccattccccctgc

SEQ ID NO: 5504033 - DNA, 25 bp, Homo sapien
gccggcaacctggccatccccattc

SEQ ID NO: 5504034 - DNA, 25 bp, Homo sapien
atgcctatttaagttgggaaggggc

SEQ ID NO: 5504035 - DNA, 25 bp, Homo sapien
aactttcctgagcctgcaatcaagc

SEQ ID NO: 5504036 - DNA, 25 bp, Homo sapien
agtttagcaaggctgcaaagaacac

SEQ ID NO: 5504037 - DNA, 25 bp, Homo sapien
gattcagacagtttagcaaggctgc

SEQ ID NO: 5504038 - DNA, 25 bp, Homo sapien
caggcaatgaggtaagctctgctct

SEQ ID NO: 5504039 - DNA, 25 bp, Homo sapien
gttacccacagatgggtgggactgc

SEQ ID NO: 5504040 - DNA, 25 bp, Homo sapien
gctggatttggcctgcaggctgtag

SEQ ID NO: 5504041 - DNA, 25 bp, Homo sapien
tacaaacacaggctgtgggctggat

SEQ ID NO: 5504042 - DNA, 25 bp, Homo sapien
gaaactgtgatgtcaagttggaggc

SEQ ID NO: 5504043 - DNA, 25 bp, Homo sapien
atgcggggaagtttccagaaactgt

SEQ ID NO: 5504044 - DNA, 25 bp, Homo sapien
ggcctgcaggctgtagtttgtgatc

SEQ ID NO: 5504045 - DNA, 25 bp, Homo sapien
cctgagcctgcaatcaagcctggaa

SEQ ID NO: 5504046 - DNA, 25 bp, Homo sapien
cccccacaactccccaatccagaac

SEQ ID NO: 5504047 - DNA, 25 bp, Homo sapien
attaagaataatggcatgaactgct

SEQ ID NO: 5504048 - DNA, 25 bp, Homo sapien
caatccagaacatggaacaagggtg

SEQ ID NO: 5504049 - DNA, 25 bp, Homo sapien
gaagcctcaggtcaggtcttaccac

SEQ ID NO: 5504050 - DNA, 25 bp, Homo sapien
cactgagtaaaggttataagaagcc

SEQ ID NO: 5504051 - DNA, 25 bp, Homo sapien
taatactcttaactcctaggccagg

SEQ ID NO: 5504052 - DNA, 25 bp, Homo sapien
cagatccagggcacttcctctaagt

SEQ ID NO: 5504053 - DNA, 25 bp, Homo sapien
acttgaaaacacttggaatgcagct

SEQ ID NO: 5504054 - DNA, 25 bp, Homo sapien
ggcagaacactggcttattgtcaac

SEQ ID NO: 5504055 - DNA, 25 bp, Homo sapien
gagcaggttttgtcttgataagcag

SEQ ID NO: 5504056 - DNA, 25 bp, Homo sapien
gctgtttgatggacttggtctgttc

SEQ ID NO: 5504057 - DNA, 25 bp, Homo sapien
cccaaacccagactaaaggctacag

SEQ ID NO: 5504058 - DNA, 25 bp, Homo sapien
agtgactatggcagttcgaaaaaga

SEQ ID NO: 5504059 - DNA, 25 bp, Homo sapien
aaaggaaatgcccaaacccagacta

SEQ ID NO: 5504060 - DNA, 25 bp, Homo sapien
tacagtgacgccaagtccagtgaaa

SEQ ID NO: 5504061 - DNA, 25 bp, Homo sapien
aggctacagtgacgccaagtccagt

SEQ ID NO: 5504062 - DNA, 25 bp, Homo sapien
atggcagttcgaaaaagaaaaacaa

SEQ ID NO: 5504063 - DNA, 25 bp, Homo sapien
acccagactaaaggctacagtgacg

SEQ ID NO: 5504064 - DNA, 25 bp, Homo sapien
gacgatagtgactatggcagttcga

SEQ ID NO: 5504065 - DNA, 25 bp, Homo sapien
tgacgccaagtccagtgaaaggcaa

SEQ ID NO: 5504066 - DNA, 25 bp, Homo sapien
ctaaaggctacagtgacgccaagtc

SEQ ID NO: 5504067 - DNA, 25 bp, Homo sapien
cgccaagtccagtgaaaggcaaagg

SEQ ID NO: 5504068 - DNA, 25 bp, Homo sapien
tgaacttgagacttgtgcatgttac

SEQ ID NO: 5504069 - DNA, 25 bp, Homo sapien
acaacgtattaggcactgaaaaggc

SEQ ID NO: 5504070 - DNA, 25 bp, Homo sapien
cactgaaaaggcagagtagatttgg

SEQ ID NO: 5504071 - DNA, 25 bp, Homo sapien
tagatttggcagtcaacaaagtccc

SEQ ID NO: 5504072 - DNA, 25 bp, Homo sapien
ataaacacttgtccacgagatctgc

SEQ ID NO: 5504073 - DNA, 25 bp, Homo sapien
tagttgctagccagaaactgatttc

SEQ ID NO: 5504074 - DNA, 25 bp, Homo sapien
gtcaaaattcagaaagccatgaact

SEQ ID NO: 5504075 - DNA, 25 bp, Homo sapien
gggaaaatcaggccatatgactaac

SEQ ID NO: 5504076 - DNA, 25 bp, Homo sapien
ccacgagatctgcaaaaatgggaaa

SEQ ID NO: 5504077 - DNA, 25 bp, Homo sapien
ctgaacccactaacaagctgcaacc

SEQ ID NO: 5504078 - DNA, 25 bp, Homo sapien
tactgcatgcagattacacctcaat

SEQ ID NO: 5504079 - DNA, 25 bp, Homo sapien
aggacatgaccttatctggagacag

SEQ ID NO: 5504080 - DNA, 25 bp, Homo sapien
acaccaaagataaccagcagatgcc

SEQ ID NO: 5504081 - DNA, 25 bp, Homo sapien
cgtcaaagtcctaacccagaacacc

SEQ ID NO: 5504082 - DNA, 25 bp, Homo sapien
agtctagatgacggcactgacatgg

SEQ ID NO: 5504083 - DNA, 25 bp, Homo sapien
taaggcaacacgaccagcgtcctaa

SEQ ID NO: 5504084 - DNA, 25 bp, Homo sapien
acccagaacacctcaggacatgacc

SEQ ID NO: 5504085 - DNA, 25 bp, Homo sapien
caccaccccccaccattcaaacgtc

SEQ ID NO: 5504086 - DNA, 25 bp, Homo sapien
aggatcactgcgggcatcatcagtc

SEQ ID NO: 5504087 - DNA, 25 bp, Homo sapien
agctgtctacagggaacaccaaaga

SEQ ID NO: 5504088 - DNA, 25 bp, Homo sapien
cctaaaaagactacgtgaagagaag

SEQ ID NO: 5504089 - DNA, 25 bp, Homo sapien
cattcaaacgtcaaagtcctaaccc

SEQ ID NO: 5504090 - DNA, 25 bp, Homo sapien
gcggggaccctcactccctgctttc

SEQ ID NO: 5504091 - DNA, 25 bp, Homo sapien
gaacggctctcgcacccctgctcta

SEQ ID NO: 5504092 - DNA, 25 bp, Homo sapien
cagtcaccttatttgtacacagttc

SEQ ID NO: 5504093 - DNA, 25 bp, Homo sapien
ctaactcctctttctgggggaggaa

SEQ ID NO: 5504094 - DNA, 25 bp, Homo sapien
gttcaaagacaaacccacagcgaac

SEQ ID NO: 5504095 - DNA, 25 bp, Homo sapien
cctgctttctatcacacgggtcaca

SEQ ID NO: 5504096 - DNA, 25 bp, Homo sapien
tacctaagactacagccaaccccca

SEQ ID NO: 5504097 - DNA, 25 bp, Homo sapien
atttcttaagagtaaatgtgactag

SEQ ID NO: 5504098 - DNA, 25 bp, Homo sapien
cacatcaggtcacatctccagtcac

SEQ ID NO: 5504099 - DNA, 25 bp, Homo sapien
gagagtaggaactttcagttaccta

SEQ ID NO: 5504100 - DNA, 25 bp, Homo sapien
acacacactgcagtggaagttgaga

SEQ ID NO: 5504101 - DNA, 25 bp, Homo sapien
tcggccaaagatgcactcctccttt

SEQ ID NO: 5504102 - DNA, 25 bp, Homo sapien
taaatgaggctagcgagtatctgtt

SEQ ID NO: 5504103 - DNA, 25 bp, Homo sapien
tctcagaaactctgaaaggaagtgc

SEQ ID NO: 5504104 - DNA, 25 bp, Homo sapien
atgactagaaatataggaccaaacc

SEQ ID NO: 5504105 - DNA, 25 bp, Homo sapien
cagacttgcacatggtttcagcccc

SEQ ID NO: 5504106 - DNA, 25 bp, Homo sapien
agccccattccacccagactgttcc

SEQ ID NO: 5504107 - DNA, 25 bp, Homo sapien
ttacaccactgtcggccaaagatgc

SEQ ID NO: 5504108 - DNA, 25 bp, Homo sapien
tatatgaagatggtatacaaaatac

SEQ ID NO: 5504109 - DNA, 25 bp, Homo sapien
ttgcattcttgtgggctaggaaaca

SEQ ID NO: 5504110 - DNA, 25 bp, Homo sapien
cacgggtccctaaaattaacatctc

SEQ ID NO: 5504111 - DNA, 25 bp, Homo sapien
gaaaggaagtgctcgttctttgtta

SEQ ID NO: 5504112 - DNA, 25 bp, Homo sapien
ttcaagaacatgaagactcgggtga

SEQ ID NO: 5504113 - DNA, 25 bp, Homo sapien
gaattccaacatgccatgggaggag

SEQ ID NO: 5504114 - DNA, 25 bp, Homo sapien
tggttgacatgatgaacaatcggtt

SEQ ID NO: 5504115 - DNA, 25 bp, Homo sapien
gagaatgaagcaaaaggtaattttc

SEQ ID NO: 5504116 - DNA, 25 bp, Homo sapien
ggaaggatatgatgaaaaatgctag

SEQ ID NO: 5504117 - DNA, 25 bp, Homo sapien
gcccgagggttcaagaacatgaaga

SEQ ID NO: 5504118 - DNA, 25 bp, Homo sapien
atgaggaaatggttgacatgatgaa

SEQ ID NO: 5504119 - DNA, 25 bp, Homo sapien
acttaaagaagaattccaacatgcc

SEQ ID NO: 5504120 - DNA, 25 bp, Homo sapien
atcggtttcggaaggatatgatgaa

SEQ ID NO: 5504121 - DNA, 25 bp, Homo sapien
gatgaacaatcggtttcggaaggat

SEQ ID NO: 5504122 - DNA, 25 bp, Homo sapien
cgagggttcaagaacatgaagactc

SEQ ID NO: 5504123 - DNA, 25 bp, Homo sapien
tccctctcagaaaccaggaagagcc

SEQ ID NO: 5504124 - DNA, 25 bp, Homo sapien
ggtgcagcattaagcctgaattccc

SEQ ID NO: 5504125 - DNA, 25 bp, Homo sapien
actgaacgtgtatcctatgtacaat

SEQ ID NO: 5504126 - DNA, 25 bp, Homo sapien
ctccccaacccatcctcattcctcc

SEQ ID NO: 5504127 - DNA, 25 bp, Homo sapien
gagtagggatgaagatgtccctctc

SEQ ID NO: 5504128 - DNA, 25 bp, Homo sapien
atatgcagaaataaaggatcagaag

SEQ ID NO: 5504129 - DNA, 25 bp, Homo sapien
tcagaaggctataaacccaagtatc

SEQ ID NO: 5504130 - DNA, 25 bp, Homo sapien
ttatatctaggtgcagcattaagcc

SEQ ID NO: 5504131 - DNA, 25 bp, Homo sapien
tctgcctgcacagagggcatcataa

SEQ ID NO: 5504132 - DNA, 25 bp, Homo sapien
tgcacagagggcatcataaatgaga

SEQ ID NO: 5504133 - DNA, 25 bp, Homo sapien
ggatcagaaggctataaacccaagt

SEQ ID NO: 5504134 - DNA, 25 bp, Homo sapien
cgtccgcatctgcggcaagagcgag

SEQ ID NO: 5504135 - DNA, 25 bp, Homo sapien
acctcttctgcatggactgcgccgt

SEQ ID NO: 5504136 - DNA, 25 bp, Homo sapien
gactgcgccgtccgcatctgcggca

SEQ ID NO: 5504137 - DNA, 25 bp, Homo sapien
gaacagccgcaagcccccttcggcg

SEQ ID NO: 5504138 - DNA, 25 bp, Homo sapien
gccacccaggccattcatatctttt

SEQ ID NO: 5504139 - DNA, 25 bp, Homo sapien
acagccgcaagcccccttcggcgtc

SEQ ID NO: 5504140 - DNA, 25 bp, Homo sapien
gccgcaagcccccttcggcgtcctc

SEQ ID NO: 5504141 - DNA, 25 bp, Homo sapien
cccctgcggccacaacctcttctgc

SEQ ID NO: 5504142 - DNA, 25 bp, Homo sapien
tatcttttcctagagcgcggaccac

SEQ ID NO: 5504143 - DNA, 25 bp, Homo sapien
acgccggccacccaggccattcata

SEQ ID NO: 5504144 - DNA, 25 bp, Homo sapien
cgccgtccgcatctgcggcaagagc

SEQ ID NO: 5504145 - DNA, 25 bp, Homo sapien
ccttttagagattgtcatttgacag

SEQ ID NO: 5504146 - DNA, 25 bp, Homo sapien
ctgtcaaatgacaatctctaaaagg

SEQ ID NO: 5504147 - DNA, 25 bp, Homo sapien
gagaggctacaaattgatgagcagc

SEQ ID NO: 5504148 - DNA, 25 bp, Homo sapien
ggaaagtgatccaggagattgtgga

SEQ ID NO: 5504149 - DNA, 25 bp, Homo sapien
agtagatttagagcccagaatgatc

SEQ ID NO: 5504150 - DNA, 25 bp, Homo sapien
tgggattgttctttgagagggtgga

SEQ ID NO: 5504151 - DNA, 25 bp, Homo sapien
ccagaatgatcccactgggcaggct

SEQ ID NO: 5504152 - DNA, 25 bp, Homo sapien
attgtggataaatctggtgtggtga

SEQ ID NO: 5504153 - DNA, 25 bp, Homo sapien
actgggcggcgttaatccttccatt

SEQ ID NO: 5504154 - DNA, 25 bp, Homo sapien
aagtgggcatagagattggtttcca

SEQ ID NO: 5504155 - DNA, 25 bp, Homo sapien
tccagaagtaaatgggattgtcctc

SEQ ID NO: 5504156 - DNA, 25 bp, Homo sapien
tttttgttggcacccgagagaacat

SEQ ID NO: 5504157 - DNA, 25 bp, Homo sapien
tgggctttcgccctcctgggagtgg

SEQ ID NO: 5504158 - DNA, 25 bp, Homo sapien
agcctggattcaaacccgagccctg

SEQ ID NO: 5504159 - DNA, 25 bp, Homo sapien
cttacacatgacgagacaaaccaga

SEQ ID NO: 5504160 - DNA, 25 bp, Homo sapien
agaggtaggtatctggtgtcacctt

SEQ ID NO: 5504161 - DNA, 25 bp, Homo sapien
gagggcccataataggcaccactgt

SEQ ID NO: 5504162 - DNA, 25 bp, Homo sapien
tcttattttagtctcggggcagccc

SEQ ID NO: 5504163 - DNA, 25 bp, Homo sapien
tcaaacccgagccctgctgtgtgca

SEQ ID NO: 5504164 - DNA, 25 bp, Homo sapien
gccctaagaggtaggtatctggtgt

SEQ ID NO: 5504165 - DNA, 25 bp, Homo sapien
gagagcaacaggcactttggtaagt

SEQ ID NO: 5504166 - DNA, 25 bp, Homo sapien
tcatgcacatggtcttattttagtc

SEQ ID NO: 5504167 - DNA, 25 bp, Homo sapien
tttagtctcggggcagccctaagag

SEQ ID NO: 5504168 - DNA, 25 bp, Homo sapien
cactttggtaagtggttcatgcaca

SEQ ID NO: 5504169 - DNA, 25 bp, Homo sapien
ccctgcttgcagctcaggtttcggg

SEQ ID NO: 5504170 - DNA, 25 bp, Homo sapien
cagatagaacccctgagattctcaa

SEQ ID NO: 5504171 - DNA, 25 bp, Homo sapien
gcggtgtcgccgccacaccgcgagg

SEQ ID NO: 5504172 - DNA, 25 bp, Homo sapien
catctatatgggatccttcatgctg

SEQ ID NO: 5504173 - DNA, 25 bp, Homo sapien
aaagaaacagatattgatgacagat

SEQ ID NO: 5504174 - DNA, 25 bp, Homo sapien
ccccgcctgcagaaccctgcttgca

SEQ ID NO: 5504175 - DNA, 25 bp, Homo sapien
tatcttcaaggtggaaaaactggtg

SEQ ID NO: 5504176 - DNA, 25 bp, Homo sapien
gagatttggattccagaacagattc

SEQ ID NO: 5504177 - DNA, 25 bp, Homo sapien
ttccaccatcctcagatagaacccc

SEQ ID NO: 5504178 - DNA, 25 bp, Homo sapien
ttgatgacagatatggagatttgga

SEQ ID NO: 5504179 - DNA, 25 bp, Homo sapien
acagattctgatattccggaaattc

SEQ ID NO: 5504180 - DNA, 25 bp, Homo sapien
atcgggaaagatgtcctcaccagca

SEQ ID NO: 5504181 - DNA, 25 bp, Homo sapien
aaataaacagtgctggtaagtatga

SEQ ID NO: 5504182 - DNA, 25 bp, Homo sapien
agcatcttggcttcgaaacgtcacc

SEQ ID NO: 5504183 - DNA, 25 bp, Homo sapien
cattatgaaggtgcagcttgtagga

SEQ ID NO: 5504184 - DNA, 25 bp, Homo sapien
tgtccttacctgacaccctgggtgg

SEQ ID NO: 5504185 - DNA, 25 bp, Homo sapien
aaacgtcaccttcacagagcccttt

SEQ ID NO: 5504186 - DNA, 25 bp, Homo sapien
gaggtttgtacggatgtgctttgaa

SEQ ID NO: 5504187 - DNA, 25 bp, Homo sapien
gggggtggttatattctgcagatca

SEQ ID NO: 5504188 - DNA, 25 bp, Homo sapien
ctccagagcccactgtccttacctg

SEQ ID NO: 5504189 - DNA, 25 bp, Homo sapien
gggccactgcagatgactctccttt

SEQ ID NO: 5504190 - DNA, 25 bp, Homo sapien
tctgcagatcatcgggaaagatgtc

SEQ ID NO: 5504191 - DNA, 25 bp, Homo sapien
ttagtcaccgccttcttggagccct

SEQ ID NO: 5504192 - DNA, 25 bp, Homo sapien
taggttcaggcatcgtagcgttaat

SEQ ID NO: 5504193 - DNA, 25 bp, Homo sapien
gatgcgctcgaagatgtcgttgacg

SEQ ID NO: 5504194 - DNA, 25 bp, Homo sapien
gatggtcgagcgcttgttgtaatgc

SEQ ID NO: 5504195 - DNA, 25 bp, Homo sapien
ggatctccctggaggtgatggtcga

SEQ ID NO: 5504196 - DNA, 25 bp, Homo sapien
cccattgccttggaagagatgccgg

SEQ ID NO: 5504197 - DNA, 25 bp, Homo sapien
aaaagagcctttgggattaggtgta

SEQ ID NO: 5504198 - DNA, 25 bp, Homo sapien
tggagcccttctttggggcaggagc

SEQ ID NO: 5504199 - DNA, 25 bp, Homo sapien
ttattgaaaacatgcgtggctctta

SEQ ID NO: 5504200 - DNA, 25 bp, Homo sapien
tgggattaggtgtaaagatgcttac

SEQ ID NO: 5504201 - DNA, 25 bp, Homo sapien
tcgttgacgaaggaattcatgatcc

SEQ ID NO: 5504202 - DNA, 25 bp, Homo sapien
ggccacttcctgagggcaagtccta

SEQ ID NO: 5504203 - DNA, 25 bp, Homo sapien
gagcccaagcgcgacttccactttg

SEQ ID NO: 5504204 - DNA, 25 bp, Homo sapien
ccggcgccctcttcacacgtagctc

SEQ ID NO: 5504205 - DNA, 25 bp, Homo sapien
gacatgggccattccatgacgtgcc

SEQ ID NO: 5504206 - DNA, 25 bp, Homo sapien
tcctaatagccctgagacaccgaga

SEQ ID NO: 5504207 - DNA, 25 bp, Homo sapien
gagacaccgagacggcatgttcttc

SEQ ID NO: 5504208 - DNA, 25 bp, Homo sapien
gtgaaaataacatgacgctcgtcca

SEQ ID NO: 5504209 - DNA, 25 bp, Homo sapien
gccaacgtcgcaggacagttgtgaa

SEQ ID NO: 5504210 - DNA, 25 bp, Homo sapien
gctgccgcactgcatcaagggctac

SEQ ID NO: 5504211 - DNA, 25 bp, Homo sapien
gagcccaacttcctgtgaggccctc

SEQ ID NO: 5504212 - DNA, 25 bp, Homo sapien
gcctcccctcacccccaggcgcacg

SEQ ID NO: 5504213 - DNA, 25 bp, Homo sapien
tacaaaaaacgcactatgaataatt

SEQ ID NO: 5504214 - DNA, 25 bp, Homo sapien
tataaaatacaatgcagcccttgat

SEQ ID NO: 5504215 - DNA, 25 bp, Homo sapien
attataaattatggtagtgtctgta

SEQ ID NO: 5504216 - DNA, 25 bp, Homo sapien
gctaagaatctttataaacgccaat

SEQ ID NO: 5504217 - DNA, 25 bp, Homo sapien
atggtagtgtctgtaaaaccctgtt

SEQ ID NO: 5504218 - DNA, 25 bp, Homo sapien
caactcatatgatctaggtgaaccc

SEQ ID NO: 5504219 - DNA, 25 bp, Homo sapien
agtatcaccttataaaactgagtat

SEQ ID NO: 5504220 - DNA, 25 bp, Homo sapien
tttgttctagaagtatcacatcaac

SEQ ID NO: 5504221 - DNA, 25 bp, Homo sapien
catagtaaagtcaactgcatacagt

SEQ ID NO: 5504222 - DNA, 25 bp, Homo sapien
atgcagcccttgatagctaagaatc

SEQ ID NO: 5504223 - DNA, 25 bp, Homo sapien
tgatctaggtgaacccaaaagtaaa

SEQ ID NO: 5504224 - DNA, 25 bp, Homo sapien
ccttctaccaccccagggtcatgaa

SEQ ID NO: 5504225 - DNA, 25 bp, Homo sapien
ttagaggtttacagtaatcataggc

SEQ ID NO: 5504226 - DNA, 25 bp, Homo sapien
gatggaggcagctagacatgctgcc

SEQ ID NO: 5504227 - DNA, 25 bp, Homo sapien
ggggtgcctcagatcacacgatgga

SEQ ID NO: 5504228 - DNA, 25 bp, Homo sapien
ttattttagaggtttacagtaatca

SEQ ID NO: 5504229 - DNA, 25 bp, Homo sapien
cttgcacttccttctaccaccccag

SEQ ID NO: 5504230 - DNA, 25 bp, Homo sapien
atgctgcctgcatgtgagcccaatt

SEQ ID NO: 5504231 - DNA, 25 bp, Homo sapien
gcctcagatcacacgatggaggcag

SEQ ID NO: 5504232 - DNA, 25 bp, Homo sapien
acagtaatcataggcctcatggggt

SEQ ID NO: 5504233 - DNA, 25 bp, Homo sapien
tccaagtgataaaacttgcacttcc

SEQ ID NO: 5504234 - DNA, 25 bp, Homo sapien
gtaatcataggcctcatggggtgcc

SEQ ID NO: 5504235 - DNA, 25 bp, Homo sapien
tggaatacaagcagattttagagct

SEQ ID NO: 5504236 - DNA, 25 bp, Homo sapien
gtgggtatgctggtaaaacagaagt

SEQ ID NO: 5504237 - DNA, 25 bp, Homo sapien
ctgtaaaacctagagtgatgacata

SEQ ID NO: 5504238 - DNA, 25 bp, Homo sapien
tacataaggtatgcaccaacattta

SEQ ID NO: 5504239 - DNA, 25 bp, Homo sapien
tcatggattattgaactgctccctt

SEQ ID NO: 5504240 - DNA, 25 bp, Homo sapien
cgagtctgataaaccaacaaatgcc

SEQ ID NO: 5504241 - DNA, 25 bp, Homo sapien
gaagaattagagaagtaacaaagga

SEQ ID NO: 5504242 - DNA, 25 bp, Homo sapien
tggaatgaggataaagtgcacattt

SEQ ID NO: 5504243 - DNA, 25 bp, Homo sapien
gaagtaacaaaggaataaatctgta

SEQ ID NO: 5504244 - DNA, 25 bp, Homo sapien
tgttatttgtgtgggtatgctggta

SEQ ID NO: 5504245 - DNA, 25 bp, Homo sapien
gagtgatgacatattcagagcaatg

SEQ ID NO: 5504246 - DNA, 25 bp, Homo sapien
agggctagctgctggaaccagcaac

SEQ ID NO: 5504247 - DNA, 25 bp, Homo sapien
agctgctggaaccagcaacccggac

SEQ ID NO: 5504248 - DNA, 25 bp, Homo sapien
ggaccggaaagtccgtgacttgcaa

SEQ ID NO: 5504249 - DNA, 25 bp, Homo sapien
ccggaccctcccactgtatccacgg

SEQ ID NO: 5504250 - DNA, 25 bp, Homo sapien
gcagttctctcggcactggtgactg

SEQ ID NO: 5504251 - DNA, 25 bp, Homo sapien
tcccactgtatccacggaccagctg

SEQ ID NO: 5504252 - DNA, 25 bp, Homo sapien
cccggcggaatctcctgagctccgc

SEQ ID NO: 5504253 - DNA, 25 bp, Homo sapien
ggaaagtccgtgacttgcaagaggc

SEQ ID NO: 5504254 - DNA, 25 bp, Homo sapien
gaagctctttctggctgcagttctc

SEQ ID NO: 5504255 - DNA, 25 bp, Homo sapien
aagcactggccacaccaaacaagga

SEQ ID NO: 5504256 - DNA, 25 bp, Homo sapien
ggcagatctggaccttttgagagtc

SEQ ID NO: 5504257 - DNA, 25 bp, Homo sapien
catcagagataaatacgagttgtac

SEQ ID NO: 5504258 - DNA, 25 bp, Homo sapien
ttcagcatccaaagtgcaaagaaaa

SEQ ID NO: 5504259 - DNA, 25 bp, Homo sapien
tgggatgccaaaggatgatatattg

SEQ ID NO: 5504260 - DNA, 25 bp, Homo sapien
aacattctacagaagaaaatcgttt

SEQ ID NO: 5504261 - DNA, 25 bp, Homo sapien
tagatgtggctatgttccatgggaa

SEQ ID NO: 5504262 - DNA, 25 bp, Homo sapien
ttacagataagggtcaatacgaagt

SEQ ID NO: 5504263 - DNA, 25 bp, Homo sapien
gtgcaaagaaaaaatgactgtagct

SEQ ID NO: 5504264 - DNA, 25 bp, Homo sapien
agggtcaatacgaagtcaaacattc

SEQ ID NO: 5504265 - DNA, 25 bp, Homo sapien
aagaaaaagctcacatctatctaga

SEQ ID NO: 5504266 - DNA, 25 bp, Homo sapien
ttccatgggaaaaatttcagcatcc

SEQ ID NO: 5504267 - DNA, 25 bp, Homo sapien
tatcccaaataggtgttttacagat

SEQ ID NO: 5504268 - DNA, 25 bp, Homo sapien
ctcctactctacagcattaaagact

SEQ ID NO: 5504269 - DNA, 25 bp, Homo sapien
tcagggacaagagtagtcctttacc

SEQ ID NO: 5504270 - DNA, 25 bp, Homo sapien
tgaaccttctcccaggtaggggcag

SEQ ID NO: 5504271 - DNA, 25 bp, Homo sapien
tctgtggtccttgcccaaacccatc

SEQ ID NO: 5504272 - DNA, 25 bp, Homo sapien
ctgccttctcagggacaagagtagt

SEQ ID NO: 5504273 - DNA, 25 bp, Homo sapien
atgccagcctctgtggtccttgccc

SEQ ID NO: 5504274 - DNA, 25 bp, Homo sapien
tctccatgccagcctctgtggtcct

SEQ ID NO: 5504275 - DNA, 25 bp, Homo sapien
atcagcgcaatacttgaaccttctc

SEQ ID NO: 5504276 - DNA, 25 bp, Homo sapien
tacccattcctttatccatccctcc

SEQ ID NO: 5504277 - DNA, 25 bp, Homo sapien
aagagtagtcctttaccaccctcac

SEQ ID NO: 5504278 - DNA, 25 bp, Homo sapien
gcccaaacccatcagcgcaatactt

SEQ ID NO: 5504279 - DNA, 25 bp, Homo sapien
attgccagccgctttcgccggcaga

SEQ ID NO: 5504280 - DNA, 25 bp, Homo sapien
ctgtctcgccatcccagccgaggag

SEQ ID NO: 5504281 - DNA, 25 bp, Homo sapien
gccagccgctttcgccggcagagca

SEQ ID NO: 5504282 - DNA, 25 bp, Homo sapien
ccgctttcgccggcagagcattttc

SEQ ID NO: 5504283 - DNA, 25 bp, Homo sapien
gtgccagccctgtctcgccatccca

SEQ ID NO: 5504284 - DNA, 25 bp, Homo sapien
tgaaatcaaccccattgccagccgc

SEQ ID NO: 5504285 - DNA, 25 bp, Homo sapien
caaccccattgccagccgctttcgc

SEQ ID NO: 5504286 - DNA, 25 bp, Homo sapien
agccctgtctcgccatcccagccga

SEQ ID NO: 5504287 - DNA, 25 bp, Homo sapien
tcgccggcagagcattttccgtggg

SEQ ID NO: 5504288 - DNA, 25 bp, Homo sapien
atcaaccccattgccagccgctttc

SEQ ID NO: 5504289 - DNA, 25 bp, Homo sapien
ccctgccttgaaatcaaccccattg

SEQ ID NO: 5504290 - DNA, 25 bp, Homo sapien
aacgccacctcctccgaagtgcgga

SEQ ID NO: 5504291 - DNA, 25 bp, Homo sapien
atctacacaaagactgacaagctgg

SEQ ID NO: 5504292 - DNA, 25 bp, Homo sapien
ggcggccatctgctagagcgcattt

SEQ ID NO: 5504293 - DNA, 25 bp, Homo sapien
gctggatccactcgacggaacccag

SEQ ID NO: 5504294 - DNA, 25 bp, Homo sapien
aggtctgtcgcccgcgtcttcgtcg

SEQ ID NO: 5504295 - DNA, 25 bp, Homo sapien
tcttcccatgaaacgccacctcctc

SEQ ID NO: 5504296 - DNA, 25 bp, Homo sapien
cggttttctgagcaccggacagcgt

SEQ ID NO: 5504297 - DNA, 25 bp, Homo sapien
tgctagagcgcatttcttcccatga

SEQ ID NO: 5504298 - DNA, 25 bp, Homo sapien
tacacaaagactgacaagctggatc

SEQ ID NO: 5504299 - DNA, 25 bp, Homo sapien
gcccgcgattaccggttttctgagc

SEQ ID NO: 5504300 - DNA, 25 bp, Homo sapien
acctcctccgaagtgcggagcgaac

SEQ ID NO: 5504301 - DNA, 25 bp, Homo sapien
agcagctgcataagctgcggtaccc

SEQ ID NO: 5504302 - DNA, 25 bp, Homo sapien
cggcctgcgcgtctacctgctgccg

SEQ ID NO: 5504303 - DNA, 25 bp, Homo sapien
acagcgccgagctcttccgtaagca

SEQ ID NO: 5504304 - DNA, 25 bp, Homo sapien
gtaccgggtcatcttcacggggatg

SEQ ID NO: 5504305 - DNA, 25 bp, Homo sapien
cgtcttcctcaccacgtaccgggtc

SEQ ID NO: 5504306 - DNA, 25 bp, Homo sapien
ctcctgcacattccagctgctgaaa

SEQ ID NO: 5504307 - DNA, 25 bp, Homo sapien
cctcaccacgtaccgggtcatcttc

SEQ ID NO: 5504308 - DNA, 25 bp, Homo sapien
agctgctgaaaatggcctttgacga

SEQ ID NO: 5504309 - DNA, 25 bp, Homo sapien
ctgaaaatggcctttgacgaggagg

SEQ ID NO: 5504310 - DNA, 25 bp, Homo sapien
ggtccgctccttcccggtggctgcg

SEQ ID NO: 5504311 - DNA, 25 bp, Homo sapien
tcttccgtaagcagctgcataagct

SEQ ID NO: 5504312 - DNA, 25 bp, Homo sapien
aatctcatggaaaagctggattcct

SEQ ID NO: 5504313 - DNA, 25 bp, Homo sapien
ctgaaagtgaccttccaaatccttg

SEQ ID NO: 5504314 - DNA, 25 bp, Homo sapien
gcagaaacacccgggctccatctgc

SEQ ID NO: 5504315 - DNA, 25 bp, Homo sapien
gctccatctgccaggtgcttgccac

SEQ ID NO: 5504316 - DNA, 25 bp, Homo sapien
tcgacaactgcagctgaatctcatg

SEQ ID NO: 5504317 - DNA, 25 bp, Homo sapien
cctctccacggtgtactcaggcctg

SEQ ID NO: 5504318 - DNA, 25 bp, Homo sapien
tggctcacacagggttttcgacaac

SEQ ID NO: 5504319 - DNA, 25 bp, Homo sapien
tgtactcaggcctgagtggtgactc

SEQ ID NO: 5504320 - DNA, 25 bp, Homo sapien
acagaacagccgtggctgctttatc

SEQ ID NO: 5504321 - DNA, 25 bp, Homo sapien
cttcagcgccacaggctctccaata

SEQ ID NO: 5504322 - DNA, 25 bp, Homo sapien
gaactggaactgctggctcacacag

SEQ ID NO: 5504323 - DNA, 25 bp, Homo sapien
gcgtttaaaggacactgtacaggcc

SEQ ID NO: 5504324 - DNA, 25 bp, Homo sapien
ctggaaaaaagccagtctaaaggcc

SEQ ID NO: 5504325 - DNA, 25 bp, Homo sapien
cctgccaaagcccaactcccagggc

SEQ ID NO: 5504326 - DNA, 25 bp, Homo sapien
actcccagggctctggaaatggtga

SEQ ID NO: 5504327 - DNA, 25 bp, Homo sapien
ggagcgtttaaaggacactgtacag

SEQ ID NO: 5504328 - DNA, 25 bp, Homo sapien
cgctagactgacttcgcgcagcggt

SEQ ID NO: 5504329 - DNA, 25 bp, Homo sapien
ggtgctgcgtagtacagtgccaccg

SEQ ID NO: 5504330 - DNA, 25 bp, Homo sapien
cttccactggtgctgcgtagtacag

SEQ ID NO: 5504331 - DNA, 25 bp, Homo sapien
agtctaaaggcctctggatactggg

SEQ ID NO: 5504332 - DNA, 25 bp, Homo sapien
cggccgctagactgacttcgcgcag

SEQ ID NO: 5504333 - DNA, 25 bp, Homo sapien
tggatactgggctccccagaactgc

SEQ ID NO: 5504334 - DNA, 25 bp, Homo sapien
aatccatatggaaatattcacaatc

SEQ ID NO: 5504335 - DNA, 25 bp, Homo sapien
gacatggtaacagacatacgcaagc

SEQ ID NO: 5504336 - DNA, 25 bp, Homo sapien
agcaacatatgaaaaaggggctgta

SEQ ID NO: 5504337 - DNA, 25 bp, Homo sapien
gtgccgtgagcctaaagcaacaaca

SEQ ID NO: 5504338 - DNA, 25 bp, Homo sapien
acagacatacgcaagcgtgccgtga

SEQ ID NO: 5504339 - DNA, 25 bp, Homo sapien
acattcatcctctcaagtgtgggct

SEQ ID NO: 5504340 - DNA, 25 bp, Homo sapien
gactcatactgtctaaacctggttt

SEQ ID NO: 5504341 - DNA, 25 bp, Homo sapien
tttttattcaaaggctccaggagca

SEQ ID NO: 5504342 - DNA, 25 bp, Homo sapien
ggaaagattcaagtcccctgagggc

SEQ ID NO: 5504343 - DNA, 25 bp, Homo sapien
aagtcccctgagggcattcggcata

SEQ ID NO: 5504344 - DNA, 25 bp, Homo sapien
cactgcacattgactcatactgtct

SEQ ID NO: 5504345 - DNA, 25 bp, Homo sapien
ttccttcccaggtcttgaggggaca

SEQ ID NO: 5504346 - DNA, 25 bp, Homo sapien
ttaaagccagtggatcgaatcaagc

SEQ ID NO: 5504347 - DNA, 25 bp, Homo sapien
gttgctcgtcttagagaccaccagg

SEQ ID NO: 5504348 - DNA, 25 bp, Homo sapien
tctccgagagtcctgccctgactac

SEQ ID NO: 5504349 - DNA, 25 bp, Homo sapien
tgtcttttagtgagcagtatggttt

SEQ ID NO: 5504350 - DNA, 25 bp, Homo sapien
gaatggagtcaagcccttgcgctct

SEQ ID NO: 5504351 - DNA, 25 bp, Homo sapien
cttgcgctctccgagagtcctgccc

SEQ ID NO: 5504352 - DNA, 25 bp, Homo sapien
cctgactacaggactagtttctccc

SEQ ID NO: 5504353 - DNA, 25 bp, Homo sapien
tttagtgagcagtatggtttaggtg

SEQ ID NO: 5504354 - DNA, 25 bp, Homo sapien
tcccaggtcttgaggggacattcaa

SEQ ID NO: 5504355 - DNA, 25 bp, Homo sapien
aaatcacagtttatccctgcacctt

SEQ ID NO: 5504356 - DNA, 25 bp, Homo sapien
gagttcaccctgtccgtggagagca

SEQ ID NO: 5504357 - DNA, 25 bp, Homo sapien
cctggttgcccggatccaactgctt

SEQ ID NO: 5504358 - DNA, 25 bp, Homo sapien
gttgctttttaatggcggcagcggc

SEQ ID NO: 5504359 - DNA, 25 bp, Homo sapien
ggccggacagtgttcgtcccatccg

SEQ ID NO: 5504360 - DNA, 25 bp, Homo sapien
ccatccggagaggatcgctttctcc

SEQ ID NO: 5504361 - DNA, 25 bp, Homo sapien
tttctcctggcgtcaccagcgctgg

SEQ ID NO: 5504362 - DNA, 25 bp, Homo sapien
tacaacaagcaaaatcagcgccggt

SEQ ID NO: 5504363 - DNA, 25 bp, Homo sapien
tgtccagcaagagttgcctggttgc

SEQ ID NO: 5504364 - DNA, 25 bp, Homo sapien
cgctggcgtcaatgctcccttcctc

SEQ ID NO: 5504365 - DNA, 25 bp, Homo sapien
aaagaagaagatgccactgccattt

SEQ ID NO: 5504366 - DNA, 25 bp, Homo sapien
aataacgagtttgtggagttcaccc

SEQ ID NO: 5504367 - DNA, 25 bp, Homo sapien
agatagcaggcagctctgttcctcc

SEQ ID NO: 5504368 - DNA, 25 bp, Homo sapien
accctgccagtgcctgagtgatagg

SEQ ID NO: 5504369 - DNA, 25 bp, Homo sapien
cagtcagggacgtgtgttcctttca

SEQ ID NO: 5504370 - DNA, 25 bp, Homo sapien
tgtcatccgaaatagcaggttcacc

SEQ ID NO: 5504371 - DNA, 25 bp, Homo sapien
tgcccagctcgctttggagccgcag

SEQ ID NO: 5504372 - DNA, 25 bp, Homo sapien
tctcacttagtctgggaggaagttg

SEQ ID NO: 5504373 - DNA, 25 bp, Homo sapien
gattcgggtgcccctagacgaatga

SEQ ID NO: 5504374 - DNA, 25 bp, Homo sapien
tgggaggaagttgttccagatagca

SEQ ID NO: 5504375 - DNA, 25 bp, Homo sapien
atatagaactaaaatgcccaatgtc

SEQ ID NO: 5504376 - DNA, 25 bp, Homo sapien
tcctcctagtcagtcagggacgtgt

SEQ ID NO: 5504377 - DNA, 25 bp, Homo sapien
gcccatctcccctcctctgcccgcc

SEQ ID NO: 5504378 - DNA, 25 bp, Homo sapien
gtggacacaccattgaaaaccttgt

SEQ ID NO: 5504379 - DNA, 25 bp, Homo sapien
tgttgaagaagtacctaaaaattga

SEQ ID NO: 5504380 - DNA, 25 bp, Homo sapien
acacagaaccccactgtggctcact

SEQ ID NO: 5504381 - DNA, 25 bp, Homo sapien
aaagtgtgggacatttgctgttttg

SEQ ID NO: 5504382 - DNA, 25 bp, Homo sapien
tacaaggaggaacacaactgttgaa

SEQ ID NO: 5504383 - DNA, 25 bp, Homo sapien
aagtacacagcagcaagtgctctac

SEQ ID NO: 5504384 - DNA, 25 bp, Homo sapien
ttacttgaacaaagtgtgggacatt

SEQ ID NO: 5504385 - DNA, 25 bp, Homo sapien
tccaacttaagtacacagcagcaag

SEQ ID NO: 5504386 - DNA, 25 bp, Homo sapien
tgatggattttaccacactgtcttc

SEQ ID NO: 5504387 - DNA, 25 bp, Homo sapien
catctttgggtagctacacagaacc

SEQ ID NO: 5504388 - DNA, 25 bp, Homo sapien
taggtcacttagtacaaggaggaac

SEQ ID NO: 5504389 - DNA, 25 bp, Homo sapien
ggtgcatttttcttactaggaggag

SEQ ID NO: 5504390 - DNA, 25 bp, Homo sapien
tcctgtcctgttcacatcctttgcc

SEQ ID NO: 5504391 - DNA, 25 bp, Homo sapien
agatgagttcagccctaaggtgcat

SEQ ID NO: 5504392 - DNA, 25 bp, Homo sapien
tttatgggatataagcattagctac

SEQ ID NO: 5504393 - DNA, 25 bp, Homo sapien
aaatggcagatgagttcagccctaa

SEQ ID NO: 5504394 - DNA, 25 bp, Homo sapien
ttgcccatgtgtctatgaggttatt

SEQ ID NO: 5504395 - DNA, 25 bp, Homo sapien
caatacataggaacacttgggtccc

SEQ ID NO: 5504396 - DNA, 25 bp, Homo sapien
cttaggaggttaattagccttttgc

SEQ ID NO: 5504397 - DNA, 25 bp, Homo sapien
taggaacacttgggtccctgcagtc

SEQ ID NO: 5504398 - DNA, 25 bp, Homo sapien
tgtagctctttacttaggaggttaa

SEQ ID NO: 5504399 - DNA, 25 bp, Homo sapien
gtccctgcagtcagggtgtggaaat

SEQ ID NO: 5504400 - DNA, 25 bp, Homo sapien
agagtgagaaatggcacttggttct

SEQ ID NO: 5504401 - DNA, 25 bp, Homo sapien
taaataaagtctcagctccatctca

SEQ ID NO: 5504402 - DNA, 25 bp, Homo sapien
gtttattaaggctccagagtgagaa

SEQ ID NO: 5504403 - DNA, 25 bp, Homo sapien
gctgggtccaaacatgttggaggga

SEQ ID NO: 5504404 - DNA, 25 bp, Homo sapien
gtgagaaatggcacttggttctggg

SEQ ID NO: 5504405 - DNA, 25 bp, Homo sapien
acaaattgcagtttattaaggctcc

SEQ ID NO: 5504406 - DNA, 25 bp, Homo sapien
tgcagtttattaaggctccagagtg

SEQ ID NO: 5504407 - DNA, 25 bp, Homo sapien
ggtccaaacatgttggagggacctc

SEQ ID NO: 5504408 - DNA, 25 bp, Homo sapien
aggagctgggtccaaacatgttgga

SEQ ID NO: 5504409 - DNA, 25 bp, Homo sapien
gagaaatggcacttggttctgggca

SEQ ID NO: 5504410 - DNA, 25 bp, Homo sapien
tattaaggctccagagtgagaaatg

SEQ ID NO: 5504411 - DNA, 25 bp, Homo sapien
ttataggctatggacattttcaact

SEQ ID NO: 5504412 - DNA, 25 bp, Homo sapien
agttgaaaatgtccatagcctataa

SEQ ID NO: 5504413 - DNA, 25 bp, Homo sapien
aagtagtttgaagaaatccttagaa

SEQ ID NO: 5504414 - DNA, 25 bp, Homo sapien
aagcaggatattacagtgcagatta

SEQ ID NO: 5504415 - DNA, 25 bp, Homo sapien
actggatattaaagttaatggtgac

SEQ ID NO: 5504416 - DNA, 25 bp, Homo sapien
tctgccatggtatctcaacactttc

SEQ ID NO: 5504417 - DNA, 25 bp, Homo sapien
aaacaattatgagagccaaaggagc

SEQ ID NO: 5504418 - DNA, 25 bp, Homo sapien
ataaagagagacttaatggcagaag

SEQ ID NO: 5504419 - DNA, 25 bp, Homo sapien
cagctataaaacaattatgagagcc

SEQ ID NO: 5504420 - DNA, 25 bp, Homo sapien
agaatatcagataaagagagactta

SEQ ID NO: 5504421 - DNA, 25 bp, Homo sapien
aatggtgacaaattattaagtagtt

SEQ ID NO: 5504422 - DNA, 25 bp, Homo sapien
agaagaagtctactggggttcaaag

SEQ ID NO: 5504423 - DNA, 25 bp, Homo sapien
agtctactggggttcaaagcttagg

SEQ ID NO: 5504424 - DNA, 25 bp, Homo sapien
cgactctatcgttcatgaccaaaag

SEQ ID NO: 5504425 - DNA, 25 bp, Homo sapien
cttttggtcatgaacgatagagtcg

SEQ ID NO: 5504426 - DNA, 25 bp, Homo sapien
gaatcctatgaccagacgatctccg

SEQ ID NO: 5504427 - DNA, 25 bp, Homo sapien
cggagatcgtctggtcataggattc

SEQ ID NO: 5504428 - DNA, 25 bp, Homo sapien
cggtacctcttactacaacactgag

SEQ ID NO: 5504429 - DNA, 25 bp, Homo sapien
ctcagtgttgtagtaagaggtaccg

SEQ ID NO: 5504430 - DNA, 25 bp, Homo sapien
ggaattctcataggaggctcccctt

SEQ ID NO: 5504431 - DNA, 25 bp, Homo sapien
ggggccaggattgctggatttccta

SEQ ID NO: 5504432 - DNA, 25 bp, Homo sapien
cagtgagaaagacagattgatttat

SEQ ID NO: 5504433 - DNA, 25 bp, Homo sapien
gccaccccactgtgccaatctcctc

SEQ ID NO: 5504434 - DNA, 25 bp, Homo sapien
tgggaaccacctccacagggaatca

SEQ ID NO: 5504435 - DNA, 25 bp, Homo sapien
cttctctcctcgggcagatgagcct

SEQ ID NO: 5504436 - DNA, 25 bp, Homo sapien
cagtggttcttagggggaacttctg

SEQ ID NO: 5504437 - DNA, 25 bp, Homo sapien
cattaccaggccctgcgtgaatgcc

SEQ ID NO: 5504438 - DNA, 25 bp, Homo sapien
agggaatcactaggggaattctcat

SEQ ID NO: 5504439 - DNA, 25 bp, Homo sapien
gccctgcgtgaatgccatgttgctt

SEQ ID NO: 5504440 - DNA, 25 bp, Homo sapien
tggagctccatgactagatgctgat

SEQ ID NO: 5504441 - DNA, 25 bp, Homo sapien
caaggaatgcctgtagccaccaaag

SEQ ID NO: 5504442 - DNA, 25 bp, Homo sapien
atattgtactggaaaaaagagagca

SEQ ID NO: 5504443 - DNA, 25 bp, Homo sapien
aaggccatgtaaagacacaggaaaa

SEQ ID NO: 5504444 - DNA, 25 bp, Homo sapien
aacttaaagtgtagtcaggaggaga

SEQ ID NO: 5504445 - DNA, 25 bp, Homo sapien
aaagagtaattaggtgaaatgaacc

SEQ ID NO: 5504446 - DNA, 25 bp, Homo sapien
aggcatttatgctgaggaaggacaa

SEQ ID NO: 5504447 - DNA, 25 bp, Homo sapien
ggagttatgcagccacaagacaagg

SEQ ID NO: 5504448 - DNA, 25 bp, Homo sapien
attaagttaaaggtctcaggatgag

SEQ ID NO: 5504449 - DNA, 25 bp, Homo sapien
acaagagtaaataggaaaactggtc

SEQ ID NO: 5504450 - DNA, 25 bp, Homo sapien
gacaaaggagatgaagcatgctcct

SEQ ID NO: 5504451 - DNA, 25 bp, Homo sapien
aggatgagatgacactggattatcc

SEQ ID NO: 5504452 - DNA, 25 bp, Homo sapien
ccacttagagaggtaataggaatca

SEQ ID NO: 5504453 - DNA, 25 bp, Homo sapien
tgattcctattacctctctaagtgg

SEQ ID NO: 5504454 - DNA, 25 bp, Homo sapien
gaaagcgcttccatcatcactgttg

SEQ ID NO: 5504455 - DNA, 25 bp, Homo sapien
gagaaaagaacatgtaccaagaaaa

SEQ ID NO: 5504456 - DNA, 25 bp, Homo sapien
atggtgttaaggtttacggcattgc

SEQ ID NO: 5504457 - DNA, 25 bp, Homo sapien
agaagccctacccacaacataaaca

SEQ ID NO: 5504458 - DNA, 25 bp, Homo sapien
tctgtctgaaatggccagcagctac

SEQ ID NO: 5504459 - DNA, 25 bp, Homo sapien
aggtttacggcattgcactagacac

SEQ ID NO: 5504460 - DNA, 25 bp, Homo sapien
cacaatgaaaactacacaagagggc

SEQ ID NO: 5504461 - DNA, 25 bp, Homo sapien
catatgggtctcatggtgttaaggt

SEQ ID NO: 5504462 - DNA, 25 bp, Homo sapien
aacataaacaggcaataacacatat

SEQ ID NO: 5504463 - DNA, 25 bp, Homo sapien
tcgataatgtagcccactgttgacc

SEQ ID NO: 5504464 - DNA, 25 bp, Homo sapien
actgtacatatcaagcaagtcgctt

SEQ ID NO: 5504465 - DNA, 25 bp, Homo sapien
gaaactccatgccgaagaagaagaa

SEQ ID NO: 5504466 - DNA, 25 bp, Homo sapien
aagtacaaagattagctgggtgtgg

SEQ ID NO: 5504467 - DNA, 25 bp, Homo sapien
ggaaggcagttttgtggtctcatat

SEQ ID NO: 5504468 - DNA, 25 bp, Homo sapien
gttgcggtgagccaagtttgcacca

SEQ ID NO: 5504469 - DNA, 25 bp, Homo sapien
gaggctggagaatctattgaacccg

SEQ ID NO: 5504470 - DNA, 25 bp, Homo sapien
aaaattaaaactgagcagggaaggc

SEQ ID NO: 5504471 - DNA, 25 bp, Homo sapien
agtacacaattctggtgaggcacgg

SEQ ID NO: 5504472 - DNA, 25 bp, Homo sapien
ggccgtgagcgtggttattttggta

SEQ ID NO: 5504473 - DNA, 25 bp, Homo sapien
atcttcaaatgaacggccgtgagcg

SEQ ID NO: 5504474 - DNA, 25 bp, Homo sapien
ttattttggtaaccagagaaggcta

SEQ ID NO: 5504475 - DNA, 25 bp, Homo sapien
gctactcagcaggctgaggctggag

SEQ ID NO: 5504476 - DNA, 25 bp, Homo sapien
aatataagtcccagtgcaaggctcc

SEQ ID NO: 5504477 - DNA, 25 bp, Homo sapien
ccagaggccaggactattttgactc

SEQ ID NO: 5504478 - DNA, 25 bp, Homo sapien
gagatactggttccaggagggatag

SEQ ID NO: 5504479 - DNA, 25 bp, Homo sapien
tcaggattcatgtggtctgaggcgt

SEQ ID NO: 5504480 - DNA, 25 bp, Homo sapien
gtacgagctggactgctcccatgac

SEQ ID NO: 5504481 - DNA, 25 bp, Homo sapien
gagcaaccagccagttttgggtggc

SEQ ID NO: 5504482 - DNA, 25 bp, Homo sapien
ccccagagctgctaaacgctgctac

SEQ ID NO: 5504483 - DNA, 25 bp, Homo sapien
cactggactggagcatgttaatctg

SEQ ID NO: 5504484 - DNA, 25 bp, Homo sapien
ctaaaagtagcgctgacccaatcat

SEQ ID NO: 5504485 - DNA, 25 bp, Homo sapien
agatgtggtgccaggaatgttctgg

SEQ ID NO: 5504486 - DNA, 25 bp, Homo sapien
agaaggctccttagagacagcaaac

SEQ ID NO: 5504487 - DNA, 25 bp, Homo sapien
cactagtgctagtggcatcacttta

SEQ ID NO: 5504488 - DNA, 25 bp, Homo sapien
aatgtgtggcattttaagtggatac

SEQ ID NO: 5504489 - DNA, 25 bp, Homo sapien
actgctgaaacagaggtgatcagtg

SEQ ID NO: 5504490 - DNA, 25 bp, Homo sapien
aagtggatacttgcagcacctgaac

SEQ ID NO: 5504491 - DNA, 25 bp, Homo sapien
atagcaataggaggtggctatgaaa

SEQ ID NO: 5504492 - DNA, 25 bp, Homo sapien
tactacagagacaaactgctgaaac

SEQ ID NO: 5504493 - DNA, 25 bp, Homo sapien
agaggtgatcagtgccgattaaaat

SEQ ID NO: 5504494 - DNA, 25 bp, Homo sapien
gtggtaggcaatttactacagagac

SEQ ID NO: 5504495 - DNA, 25 bp, Homo sapien
agaatagcagctgcagacattaatc

SEQ ID NO: 5504496 - DNA, 25 bp, Homo sapien
tcttgaaatggcagaatagcagctg

SEQ ID NO: 5504497 - DNA, 25 bp, Homo sapien
acgatgaaaaatacatgagaaccac

SEQ ID NO: 5504498 - DNA, 25 bp, Homo sapien
ccagacattgtcctaggtgctagag

SEQ ID NO: 5504499 - DNA, 25 bp, Homo sapien
tgggtttgacaaagtagcaatcctc

SEQ ID NO: 5504500 - DNA, 25 bp, Homo sapien
atgtttcaattgggaaggtcaagtc

SEQ ID NO: 5504501 - DNA, 25 bp, Homo sapien
aggtgctagagctatagtgataaac

SEQ ID NO: 5504502 - DNA, 25 bp, Homo sapien
ggttaaaaggcaaacacagtagcac

SEQ ID NO: 5504503 - DNA, 25 bp, Homo sapien
atgtttcagaaatcagggtcctgta

SEQ ID NO: 5504504 - DNA, 25 bp, Homo sapien
ggaaggtcaagtcagataggttaaa

SEQ ID NO: 5504505 - DNA, 25 bp, Homo sapien
gtgaggaaactagggctctttaaga

SEQ ID NO: 5504506 - DNA, 25 bp, Homo sapien
ctcacagtggctttgtgggtttgac

SEQ ID NO: 5504507 - DNA, 25 bp, Homo sapien
cagatgaaagtagaaatccatgccc

SEQ ID NO: 5504508 - DNA, 25 bp, Homo sapien
atggcaactagtgtttgtgcagtgc

SEQ ID NO: 5504509 - DNA, 25 bp, Homo sapien
agcccagacaggactctcttagcct

SEQ ID NO: 5504510 - DNA, 25 bp, Homo sapien
tatctatattacggaggtgaagact

SEQ ID NO: 5504511 - DNA, 25 bp, Homo sapien
gtgaagactggcaagtgtgttcatt

SEQ ID NO: 5504512 - DNA, 25 bp, Homo sapien
gccggatagtccacgctctaccttc

SEQ ID NO: 5504513 - DNA, 25 bp, Homo sapien
tggctcagcccgttcgctggactgc

SEQ ID NO: 5504514 - DNA, 25 bp, Homo sapien
gtagaagataaaacccggtggatga

SEQ ID NO: 5504515 - DNA, 25 bp, Homo sapien
tgacagtggctactgagcgccatga

SEQ ID NO: 5504516 - DNA, 25 bp, Homo sapien
ccagaaaagaatgctgtccggatac

SEQ ID NO: 5504517 - DNA, 25 bp, Homo sapien
tgcaaaccgagctcccgtctgcctt

SEQ ID NO: 5504518 - DNA, 25 bp, Homo sapien
gctgcttcagtgtgttggagctgtt

SEQ ID NO: 5504519 - DNA, 25 bp, Homo sapien
atgaggacaacttacaaggacctgt

SEQ ID NO: 5504520 - DNA, 25 bp, Homo sapien
caataagacgaatgaggcaacaaag

SEQ ID NO: 5504521 - DNA, 25 bp, Homo sapien
ctttgttgcctcattcgtcttattg

SEQ ID NO: 5504522 - DNA, 25 bp, Homo sapien
aaaatgactctagcagtgtttgcac

SEQ ID NO: 5504523 - DNA, 25 bp, Homo sapien
gtacacatgtaagaaacaaagtgaa

SEQ ID NO: 5504524 - DNA, 25 bp, Homo sapien
catacaaagccctggaaaagaggaa

SEQ ID NO: 5504525 - DNA, 25 bp, Homo sapien
tttgccagcagttaaaaagacaacc

SEQ ID NO: 5504526 - DNA, 25 bp, Homo sapien
caacccacaaagaccccacttacta

SEQ ID NO: 5504527 - DNA, 25 bp, Homo sapien
taagttccagattaaccatgtcatt

SEQ ID NO: 5504528 - DNA, 25 bp, Homo sapien
tatacaagtgcatacaaagccctgg

SEQ ID NO: 5504529 - DNA, 25 bp, Homo sapien
ttgcctttaaataaagtggcagaaa

SEQ ID NO: 5504530 - DNA, 25 bp, Homo sapien
aatatgcttaaagatggccattttc

SEQ ID NO: 5504531 - DNA, 25 bp, Homo sapien
ttacagactgaaattcaaactctac

SEQ ID NO: 5504532 - DNA, 25 bp, Homo sapien
gcttgagcttcaaaatgactctagc

SEQ ID NO: 5504533 - DNA, 25 bp, Homo sapien
tccacgttccacatccaaagttctc

SEQ ID NO: 5504534 - DNA, 25 bp, Homo sapien
ctgccacaccaaaagtttcaccatc

SEQ ID NO: 5504535 - DNA, 25 bp, Homo sapien
ggcagaagtgaggctttcaaaacta

SEQ ID NO: 5504536 - DNA, 25 bp, Homo sapien
gtgcttccattggcagaagtgaggc

SEQ ID NO: 5504537 - DNA, 25 bp, Homo sapien
accatcagctgcgatgccgactgag

SEQ ID NO: 5504538 - DNA, 25 bp, Homo sapien
aacttccgaagtttgtggacactct

SEQ ID NO: 5504539 - DNA, 25 bp, Homo sapien
tgctgaccaccccaagtgcagatcc

SEQ ID NO: 5504540 - DNA, 25 bp, Homo sapien
ggcgacatgctggaatgtgcttcca

SEQ ID NO: 5504541 - DNA, 25 bp, Homo sapien
gcagtgactttgctgggcatccgca

SEQ ID NO: 5504542 - DNA, 25 bp, Homo sapien
gtggaccaggcagtgactttgctgg

SEQ ID NO: 5504543 - DNA, 25 bp, Homo sapien
gtgcagatccccacttcgtgttcct

SEQ ID NO: 5504544 - DNA, 25 bp, Homo sapien
ttgtccggaccagtcctagcgtgac

SEQ ID NO: 5504545 - DNA, 25 bp, Homo sapien
agtgcccttgtccggaccagtccta

SEQ ID NO: 5504546 - DNA, 25 bp, Homo sapien
ggggactcctcgcagccagtccttt

SEQ ID NO: 5504547 - DNA, 25 bp, Homo sapien
ccagcccggagccacctccactaga

SEQ ID NO: 5504548 - DNA, 25 bp, Homo sapien
gcgaacactgagtgaacctgctggc

SEQ ID NO: 5504549 - DNA, 25 bp, Homo sapien
tgctacccttacccggcggccagga

SEQ ID NO: 5504550 - DNA, 25 bp, Homo sapien
agttatgctacccttacccggcggc

SEQ ID NO: 5504551 - DNA, 25 bp, Homo sapien
ccagtcctttgccctgcgggcccgg

SEQ ID NO: 5504552 - DNA, 25 bp, Homo sapien
ggcagcaccctaggcagttatgcta

SEQ ID NO: 5504553 - DNA, 25 bp, Homo sapien
cacctccactagatgagagcccagg

SEQ ID NO: 5504554 - DNA, 25 bp, Homo sapien
gagccacctccactagatgagagcc

SEQ ID NO: 5504555 - DNA, 25 bp, Homo sapien
ctaggcagcaactcaactgaccttc

SEQ ID NO: 5504556 - DNA, 25 bp, Homo sapien
aacatatcttgcaatgggacaaatt

SEQ ID NO: 5504557 - DNA, 25 bp, Homo sapien
acccatgcagacaacagaaacatat

SEQ ID NO: 5504558 - DNA, 25 bp, Homo sapien
tgcagacaacagaaacatatcttgc

SEQ ID NO: 5504559 - DNA, 25 bp, Homo sapien
actgaccttctatattaaaaatgct

SEQ ID NO: 5504560 - DNA, 25 bp, Homo sapien
taataaacatgacgggaaaatggaa

SEQ ID NO: 5504561 - DNA, 25 bp, Homo sapien
tgggacaaattaataaacatgacgg

SEQ ID NO: 5504562 - DNA, 25 bp, Homo sapien
aagatcaggttgcatcctaggcagc

SEQ ID NO: 5504563 - DNA, 25 bp, Homo sapien
tgcatcctaggcagcaactcaactg

SEQ ID NO: 5504564 - DNA, 25 bp, Homo sapien
tttgtaaattaagatcaggttgcat

SEQ ID NO: 5504565 - DNA, 25 bp, Homo sapien
taaaattatctctacccatgcagac

SEQ ID NO: 5504566 - DNA, 25 bp, Homo sapien
gaactctgaatttctccgcagctgc

SEQ ID NO: 5504567 - DNA, 25 bp, Homo sapien
aaaactatgtaggcatccgaagcag

SEQ ID NO: 5504568 - DNA, 25 bp, Homo sapien
tccctggtactgattcaccactatc

SEQ ID NO: 5504569 - DNA, 25 bp, Homo sapien
tagacgtccagttttgtgatgacaa

SEQ ID NO: 5504570 - DNA, 25 bp, Homo sapien
cccaaaaactatgtaggcatccgaa

SEQ ID NO: 5504571 - DNA, 25 bp, Homo sapien
agggctcttgtagacgtccagtttt

SEQ ID NO: 5504572 - DNA, 25 bp, Homo sapien
ctatcagatgctgttccagaccctg

SEQ ID NO: 5504573 - DNA, 25 bp, Homo sapien
cagccaggctttttgtgtggtggtc

SEQ ID NO: 5504574 - DNA, 25 bp, Homo sapien
gtgacatgaccaatttcacgtcttt

SEQ ID NO: 5504575 - DNA, 25 bp, Homo sapien
aatcctgttcttcaatccctggtac

SEQ ID NO: 5504576 - DNA, 25 bp, Homo sapien
tgcttgctgagataaatcttggatc

SEQ ID NO: 5504577 - DNA, 25 bp, Homo sapien
aaataatgtagtgcagtcctatctg

SEQ ID NO: 5504578 - DNA, 25 bp, Homo sapien
ttgaattaatatagcacctagaaat

SEQ ID NO: 5504579 - DNA, 25 bp, Homo sapien
agatgatatgatttactgagaaaaa

SEQ ID NO: 5504580 - DNA, 25 bp, Homo sapien
tactaggaattgacctgatggtaac

SEQ ID NO: 5504581 - DNA, 25 bp, Homo sapien
ttcaggggttttcaacataggtctc

SEQ ID NO: 5504582 - DNA, 25 bp, Homo sapien
gagacagtggcctgaattattttgc

SEQ ID NO: 5504583 - DNA, 25 bp, Homo sapien
attattttgcagagaacatttcaca

SEQ ID NO: 5504584 - DNA, 25 bp, Homo sapien
acaagctgtaacttacctttgcaaa

SEQ ID NO: 5504585 - DNA, 25 bp, Homo sapien
atttatgcatactaggaattgacct

SEQ ID NO: 5504586 - DNA, 25 bp, Homo sapien
atgtagtgcagtcctatctgaatat

SEQ ID NO: 5504587 - DNA, 25 bp, Homo sapien
aggaattgacctgatggtaacagat

SEQ ID NO: 5504588 - DNA, 25 bp, Homo sapien
tgcactgtaccaaattagctcccaa

SEQ ID NO: 5504589 - DNA, 25 bp, Homo sapien
aaaggcctaagactgtcatggatcc

SEQ ID NO: 5504590 - DNA, 25 bp, Homo sapien
tgatcatgaccgaagaatcagtgtc

SEQ ID NO: 5504591 - DNA, 25 bp, Homo sapien
aatactagccatggtaaactgatta

SEQ ID NO: 5504592 - DNA, 25 bp, Homo sapien
atgcaaatctttgttaaggggttca

SEQ ID NO: 5504593 - DNA, 25 bp, Homo sapien
ctatatcatccctgtgagaaaggaa

SEQ ID NO: 5504594 - DNA, 25 bp, Homo sapien
aggagaaattctaaaggcctaagac

SEQ ID NO: 5504595 - DNA, 25 bp, Homo sapien
gggaggaaatcaagtttcaggagaa

SEQ ID NO: 5504596 - DNA, 25 bp, Homo sapien
tttcagtaagactgcaagaagggag

SEQ ID NO: 5504597 - DNA, 25 bp, Homo sapien
ctcagtagtccaagaatatttcagt

SEQ ID NO: 5504598 - DNA, 25 bp, Homo sapien
acagagaaatcatagttatgcactg

SEQ ID NO: 5504599 - DNA, 25 bp, Homo sapien
gctgcatatgtgaacctgtctctac

SEQ ID NO: 5504600 - DNA, 25 bp, Homo sapien
actccgacctcgacaacagagcaga

SEQ ID NO: 5504601 - DNA, 25 bp, Homo sapien
gacctcgacaacagagcagactctg

SEQ ID NO: 5504602 - DNA, 25 bp, Homo sapien
tcactagagtcgagtcagacagctg

SEQ ID NO: 5504603 - DNA, 25 bp, Homo sapien
gagtcgagtcagacagctgcatatg

SEQ ID NO: 5504604 - DNA, 25 bp, Homo sapien
caccactgcactccgacctcgacaa

SEQ ID NO: 5504605 - DNA, 25 bp, Homo sapien
ttgagcagtggtgatcactagagtc

SEQ ID NO: 5504606 - DNA, 25 bp, Homo sapien
ctgtaatcttagcattttgagcagt

SEQ ID NO: 5504607 - DNA, 25 bp, Homo sapien
gtggtgatcactagagtcgagtcag

SEQ ID NO: 5504608 - DNA, 25 bp, Homo sapien
agatcgcgtggtgctctagctgtaa

SEQ ID NO: 5504609 - DNA, 25 bp, Homo sapien
gtcagacagctgcatatgtgaacct

SEQ ID NO: 5504610 - DNA, 25 bp, Homo sapien
aaattgaaatgagatgagaagaaat

SEQ ID NO: 5504611 - DNA, 25 bp, Homo sapien
tgagatgaaatggtgaaatgttgaa

SEQ ID NO: 5504612 - DNA, 25 bp, Homo sapien
aatgagctgaaatgatgagatcaaa

SEQ ID NO: 5504613 - DNA, 25 bp, Homo sapien
gatgaaatgagatcagatgaactga

SEQ ID NO: 5504614 - DNA, 25 bp, Homo sapien
atgaaatgttgtaatgaaaggagga

SEQ ID NO: 5504615 - DNA, 25 bp, Homo sapien
aaatgagatgaaatgttgtaatgaa

SEQ ID NO: 5504616 - DNA, 25 bp, Homo sapien
aaatgttgtaatgaaaggaggaaat

SEQ ID NO: 5504617 - DNA, 25 bp, Homo sapien
tagatgtgacatgaaatgagctgaa

SEQ ID NO: 5504618 - DNA, 25 bp, Homo sapien
tatcaaaaatatgagatgagatgaa

SEQ ID NO: 5504619 - DNA, 25 bp, Homo sapien
attaggtgaaataatgaaatgagat

SEQ ID NO: 5504620 - DNA, 25 bp, Homo sapien
atgaaataatgaaattaggtgaaat

SEQ ID NO: 5504621 - DNA, 25 bp, Homo sapien
ttcttttatacaataagacagtaac

SEQ ID NO: 5504622 - DNA, 25 bp, Homo sapien
gttactgtcttattgtataaaagaa

SEQ ID NO: 5504623 - DNA, 25 bp, Homo sapien
cttttatacaataagacagtaacta

SEQ ID NO: 5504624 - DNA, 25 bp, Homo sapien
tagttactgtcttattgtataaaag

SEQ ID NO: 5504625 - DNA, 25 bp, Homo sapien
cgctgaacagccgcttttggccggg

SEQ ID NO: 5504626 - DNA, 25 bp, Homo sapien
agctgccctcaggcttgcttaaagg

SEQ ID NO: 5504627 - DNA, 25 bp, Homo sapien
ccctcaggcttgcttaaaggggaga

SEQ ID NO: 5504628 - DNA, 25 bp, Homo sapien
atgtatatgagccactgttgagcgc

SEQ ID NO: 5504629 - DNA, 25 bp, Homo sapien
ccgcggagctgtttaaccgttccgc

SEQ ID NO: 5504630 - DNA, 25 bp, Homo sapien
tgagccactgttgagcgcaatggcg

SEQ ID NO: 5504631 - DNA, 25 bp, Homo sapien
ggcccgctgaacagccgcttttggc

SEQ ID NO: 5504632 - DNA, 25 bp, Homo sapien
atatgagccactgttgagcgcaatg

SEQ ID NO: 5504633 - DNA, 25 bp, Homo sapien
tcctagaaagccagctgccctcagg

SEQ ID NO: 5504634 - DNA, 25 bp, Homo sapien
gtatatgagccactgttgagcgcaa

SEQ ID NO: 5504635 - DNA, 25 bp, Homo sapien
tatatgtatatgagccactgttgag

SEQ ID NO: 5504636 - DNA, 25 bp, Homo sapien
gtcccgcccagactagtggacagac

SEQ ID NO: 5504637 - DNA, 25 bp, Homo sapien
gagccgccgtgcttctgtcacctgc

SEQ ID NO: 5504638 - DNA, 25 bp, Homo sapien
tgggcccttaggcctggctgggccc

SEQ ID NO: 5504639 - DNA, 25 bp, Homo sapien
ctagcatcagtccgaaccatgcgcc

SEQ ID NO: 5504640 - DNA, 25 bp, Homo sapien
gggacccagctccatgcacgtcaac

SEQ ID NO: 5504641 - DNA, 25 bp, Homo sapien
tcttgcgtctccctgtgatgggccc

SEQ ID NO: 5504642 - DNA, 25 bp, Homo sapien
acacaaaggaattcagggtcgcttt

SEQ ID NO: 5504643 - DNA, 25 bp, Homo sapien
tgctctctgtgctccgtggaggcct

SEQ ID NO: 5504644 - DNA, 25 bp, Homo sapien
tgccccaactgtgtgctggtcctgc

SEQ ID NO: 5504645 - DNA, 25 bp, Homo sapien
tttttttggcggaaaccttgcagca

SEQ ID NO: 5504646 - DNA, 25 bp, Homo sapien
gaccgggtgtgtttggctctttatg

SEQ ID NO: 5504647 - DNA, 25 bp, Homo sapien
gtacaacagcccgcagctgtcggct

SEQ ID NO: 5504648 - DNA, 25 bp, Homo sapien
agtcccacatgtgccaagaagacgc

SEQ ID NO: 5504649 - DNA, 25 bp, Homo sapien
gggggcagcacaattactttgggct

SEQ ID NO: 5504650 - DNA, 25 bp, Homo sapien
aagacgccctctgaagccatgtcct

SEQ ID NO: 5504651 - DNA, 25 bp, Homo sapien
gggtcacagcctggtagtcccacat

SEQ ID NO: 5504652 - DNA, 25 bp, Homo sapien
ggatgttgattttgggaaaggacac

SEQ ID NO: 5504653 - DNA, 25 bp, Homo sapien
gagccaggacctggattcctctggg

SEQ ID NO: 5504654 - DNA, 25 bp, Homo sapien
actgtaatagcgtaccgcacgggtc

SEQ ID NO: 5504655 - DNA, 25 bp, Homo sapien
tgtcctgactcatgggtggatctcc

SEQ ID NO: 5504656 - DNA, 25 bp, Homo sapien
gccctacagggtcaccctcaggatc

SEQ ID NO: 5504657 - DNA, 25 bp, Homo sapien
ggcaacaagagcatcctggatgcgg

SEQ ID NO: 5504658 - DNA, 25 bp, Homo sapien
tcacgatgagcatagagccttcttc

SEQ ID NO: 5504659 - DNA, 25 bp, Homo sapien
tctcctctgtctaccaagtgctcaa

SEQ ID NO: 5504660 - DNA, 25 bp, Homo sapien
gtctaccaagtgctcaaaattagtt

SEQ ID NO: 5504661 - DNA, 25 bp, Homo sapien
gttaaaaaatgtatagcaactacta

SEQ ID NO: 5504662 - DNA, 25 bp, Homo sapien
atttgacaggtgaactttaatgtac

SEQ ID NO: 5504663 - DNA, 25 bp, Homo sapien
tggagttcaactggtaaaagcagct

SEQ ID NO: 5504664 - DNA, 25 bp, Homo sapien
ttgctggtatttagaacctccatcc

SEQ ID NO: 5504665 - DNA, 25 bp, Homo sapien
aaatgaaaatttgacaggtgaactt

SEQ ID NO: 5504666 - DNA, 25 bp, Homo sapien
ctgaaaaggatatcttccaaagtac

SEQ ID NO: 5504667 - DNA, 25 bp, Homo sapien
aatgcaaagctactaagggtgaaat

SEQ ID NO: 5504668 - DNA, 25 bp, Homo sapien
tttatcacgatgagcatagagcctt

SEQ ID NO: 5504669 - DNA, 25 bp, Homo sapien
tccttcaaaaatctctgccatcgtg

SEQ ID NO: 5504670 - DNA, 25 bp, Homo sapien
tctgccatcgtgactttacatacca

SEQ ID NO: 5504671 - DNA, 25 bp, Homo sapien
aataagctgcacaacagacagaatt

SEQ ID NO: 5504672 - DNA, 25 bp, Homo sapien
cctccaactacgaagtacttgtttc

SEQ ID NO: 5504673 - DNA, 25 bp, Homo sapien
tacattgttaacatgaacgaatatt

SEQ ID NO: 5504674 - DNA, 25 bp, Homo sapien
tgcttctccatcaaaaaagacacac

SEQ ID NO: 5504675 - DNA, 25 bp, Homo sapien
gtaagactttgtaataataagctgc

SEQ ID NO: 5504676 - DNA, 25 bp, Homo sapien
tgtataacaacaagtgtatgtcata

SEQ ID NO: 5504677 - DNA, 25 bp, Homo sapien
ctgggcatccaaattttcataaacc

SEQ ID NO: 5504678 - DNA, 25 bp, Homo sapien
gtgggcactgacgctgtaaatgtaa

SEQ ID NO: 5504679 - DNA, 25 bp, Homo sapien
tcataaaccttgaagtgggcactga

SEQ ID NO: 5504680 - DNA, 25 bp, Homo sapien
tgcctcccagataccacacaaggac

SEQ ID NO: 5504681 - DNA, 25 bp, Homo sapien
tccggccccatgagtgctcttcggc

SEQ ID NO: 5504682 - DNA, 25 bp, Homo sapien
agcgtggccttcggcaagtgactaa

SEQ ID NO: 5504683 - DNA, 25 bp, Homo sapien
agtaaatgttcaatagatagctaga

SEQ ID NO: 5504684 - DNA, 25 bp, Homo sapien
caagtgactaaagggcttcctgcct

SEQ ID NO: 5504685 - DNA, 25 bp, Homo sapien
ccgagccagctttctgagggttaac

SEQ ID NO: 5504686 - DNA, 25 bp, Homo sapien
cccagataccacacaaggacttctc

SEQ ID NO: 5504687 - DNA, 25 bp, Homo sapien
gagtgctcttcggccgcccaaaacc

SEQ ID NO: 5504688 - DNA, 25 bp, Homo sapien
gccttcggcaagtgactaaagggct

SEQ ID NO: 5504689 - DNA, 25 bp, Homo sapien
tgactaaagggcttcctgcctcagc

SEQ ID NO: 5504690 - DNA, 25 bp, Homo sapien
ggggcgtgaatccggccccatgagt

SEQ ID NO: 5504691 - DNA, 25 bp, Homo sapien
atatgtagccaggtgttagaccagg

SEQ ID NO: 5504692 - DNA, 25 bp, Homo sapien
tgaaccaccatttgggtaccttctc

SEQ ID NO: 5504693 - DNA, 25 bp, Homo sapien
agttgaaagcagaagttcaagggtt

SEQ ID NO: 5504694 - DNA, 25 bp, Homo sapien
ttagccagcctgtgtttgaaccacc

SEQ ID NO: 5504695 - DNA, 25 bp, Homo sapien
agagacgggtgctataaacaaccca

SEQ ID NO: 5504696 - DNA, 25 bp, Homo sapien
atcagcctggcaattaatcatcacc

SEQ ID NO: 5504697 - DNA, 25 bp, Homo sapien
tagcataaagtagaagttgaaagca

SEQ ID NO: 5504698 - DNA, 25 bp, Homo sapien
ttctcccaacctcaggcctggcaca

SEQ ID NO: 5504699 - DNA, 25 bp, Homo sapien
caacccaatttaggctagaaaggga

SEQ ID NO: 5504700 - DNA, 25 bp, Homo sapien
tagaccaggaagattggaccaaata

SEQ ID NO: 5504701 - DNA, 25 bp, Homo sapien
cctgcaccagcatcctaaccatttt

SEQ ID NO: 5504702 - DNA, 25 bp, Homo sapien
gcacttgctgagtgctgggctttgc

SEQ ID NO: 5504703 - DNA, 25 bp, Homo sapien
ttaaggtaggtcctgagtctggaag

SEQ ID NO: 5504704 - DNA, 25 bp, Homo sapien
ggctttgcaggcaggtctgcctcca

SEQ ID NO: 5504705 - DNA, 25 bp, Homo sapien
gttttgtgctagatgcaaggcattc

SEQ ID NO: 5504706 - DNA, 25 bp, Homo sapien
acagaggggcaataatcagttttgt

SEQ ID NO: 5504707 - DNA, 25 bp, Homo sapien
agttaagcactgggaaccttgatgt

SEQ ID NO: 5504708 - DNA, 25 bp, Homo sapien
atgcaaggcattcttccagaaagac

SEQ ID NO: 5504709 - DNA, 25 bp, Homo sapien
tagttcccctcccgcctgaggccag

SEQ ID NO: 5504710 - DNA, 25 bp, Homo sapien
atgttcccatttgcagggagggcag

SEQ ID NO: 5504711 - DNA, 25 bp, Homo sapien
agaaagacatttctgttgggagtgg

SEQ ID NO: 5504712 - DNA, 25 bp, Homo sapien
gtcctgagtctggaagacagtctgg

SEQ ID NO: 5504713 - DNA, 25 bp, Homo sapien
catgagtttaatgcaggtaaggcac

SEQ ID NO: 5504714 - DNA, 25 bp, Homo sapien
agtaaacacgtataaaatggctaac

SEQ ID NO: 5504715 - DNA, 25 bp, Homo sapien
agtagggcccgtaataaactcacta

SEQ ID NO: 5504716 - DNA, 25 bp, Homo sapien
gtaaggcacttagaatatgggcaca

SEQ ID NO: 5504717 - DNA, 25 bp, Homo sapien
caacggccagtagggcccgtaataa

SEQ ID NO: 5504718 - DNA, 25 bp, Homo sapien
cagagcaaaccccgtcaccactaaa

SEQ ID NO: 5504719 - DNA, 25 bp, Homo sapien
caggacaggtgttcagtaaacacgt

SEQ ID NO: 5504720 - DNA, 25 bp, Homo sapien
actcactataaggggtattgggtgc

SEQ ID NO: 5504721 - DNA, 25 bp, Homo sapien
tgaaggttacatgagtttaatgcag

SEQ ID NO: 5504722 - DNA, 25 bp, Homo sapien
gcacttagaatatgggcacaggaca

SEQ ID NO: 5504723 - DNA, 25 bp, Homo sapien
aatgcaggtaaggcacttagaatat

SEQ ID NO: 5504724 - DNA, 25 bp, Homo sapien
ggagccaggttgatcacgttggaat

SEQ ID NO: 5504725 - DNA, 25 bp, Homo sapien
cccatcagtggaatacaatggagac

SEQ ID NO: 5504726 - DNA, 25 bp, Homo sapien
gtgtagacagcaaagtcgtcctcct

SEQ ID NO: 5504727 - DNA, 25 bp, Homo sapien
tcacgttggaatatatggcatcagc

SEQ ID NO: 5504728 - DNA, 25 bp, Homo sapien
caatggagacatattccacttggtc

SEQ ID NO: 5504729 - DNA, 25 bp, Homo sapien
tccacttggtctggcaatgtcctcc

SEQ ID NO: 5504730 - DNA, 25 bp, Homo sapien
aatgtcctcctggggtgatgaaaag

SEQ ID NO: 5504731 - DNA, 25 bp, Homo sapien
tggaatatatggcatcagcatggca

SEQ ID NO: 5504732 - DNA, 25 bp, Homo sapien
caaagggtatgccaagattcagctg

SEQ ID NO: 5504733 - DNA, 25 bp, Homo sapien
ggggccaggtctgacccccactctg

SEQ ID NO: 5504734 - DNA, 25 bp, Homo sapien
ataaatctaaagcaaagggtatgcc

SEQ ID NO: 5504735 - DNA, 25 bp, Homo sapien
gttggccacagataacaaggctcac

SEQ ID NO: 5504736 - DNA, 25 bp, Homo sapien
aaaattccctaggttggccacagat

SEQ ID NO: 5504737 - DNA, 25 bp, Homo sapien
aaggctcaccagtccagggttcata

SEQ ID NO: 5504738 - DNA, 25 bp, Homo sapien
agggttcataacagattgtggacaa

SEQ ID NO: 5504739 - DNA, 25 bp, Homo sapien
ggaccagagacaaggttaacctcca

SEQ ID NO: 5504740 - DNA, 25 bp, Homo sapien
gctggaaaaactatgagagacaaca

SEQ ID NO: 5504741 - DNA, 25 bp, Homo sapien
cagagtaaagtaaaactaggtagcc

SEQ ID NO: 5504742 - DNA, 25 bp, Homo sapien
aactaggtagccagaagaattgaag

SEQ ID NO: 5504743 - DNA, 25 bp, Homo sapien
gcctctggggattgtgactaggagg

SEQ ID NO: 5504744 - DNA, 25 bp, Homo sapien
aattgaagtagctgcctctggggat

SEQ ID NO: 5504745 - DNA, 25 bp, Homo sapien
ctccagaaaacaagagtctgtcaac

SEQ ID NO: 5504746 - DNA, 25 bp, Homo sapien
cagccactgctgtctagccaagtct

SEQ ID NO: 5504747 - DNA, 25 bp, Homo sapien
gatggccaccctcccacacgggata

SEQ ID NO: 5504748 - DNA, 25 bp, Homo sapien
aaagccaggctttcatgccacatcc

SEQ ID NO: 5504749 - DNA, 25 bp, Homo sapien
cgcggtggttcatgccctacaatcc

SEQ ID NO: 5504750 - DNA, 25 bp, Homo sapien
cctcttcttgggtgtgtggtatgtg

SEQ ID NO: 5504751 - DNA, 25 bp, Homo sapien
ggctaaaatcacagaactgggtccc

SEQ ID NO: 5504752 - DNA, 25 bp, Homo sapien
caaatgtgattgaggccaccggttt

SEQ ID NO: 5504753 - DNA, 25 bp, Homo sapien
ttctaagccgctgacaccatctaac

SEQ ID NO: 5504754 - DNA, 25 bp, Homo sapien
tgcttaggtaaatttgttggccatc

SEQ ID NO: 5504755 - DNA, 25 bp, Homo sapien
gtgtggtatgtgtgctgcctcctga

SEQ ID NO: 5504756 - DNA, 25 bp, Homo sapien
taaactcaacctaaggggagcgcta

SEQ ID NO: 5504757 - DNA, 25 bp, Homo sapien
ctttgccactgaattcaagggaatg

SEQ ID NO: 5504758 - DNA, 25 bp, Homo sapien
tgcaatggacgatcgtgctcactgc

SEQ ID NO: 5504759 - DNA, 25 bp, Homo sapien
gatactgttagtaatgacttgcatt

SEQ ID NO: 5504760 - DNA, 25 bp, Homo sapien
agatggagaatcacagttttgttgt

SEQ ID NO: 5504761 - DNA, 25 bp, Homo sapien
agttacaattcaaaaaggaagaaga

SEQ ID NO: 5504762 - DNA, 25 bp, Homo sapien
aagaaaatatttgctcctggactac

SEQ ID NO: 5504763 - DNA, 25 bp, Homo sapien
atggaactagctgggaacccagtta

SEQ ID NO: 5504764 - DNA, 25 bp, Homo sapien
ttcctgaattcagtaagcaagttac

SEQ ID NO: 5504765 - DNA, 25 bp, Homo sapien
aataggttttaatgggtcttgtgtg

SEQ ID NO: 5504766 - DNA, 25 bp, Homo sapien
tgtaaaaagttagatggagaatcac

SEQ ID NO: 5504767 - DNA, 25 bp, Homo sapien
actgaattcaagggaatggaactag

SEQ ID NO: 5504768 - DNA, 25 bp, Homo sapien
aggacagtgatagatttacaaagct

SEQ ID NO: 5504769 - DNA, 25 bp, Homo sapien
gcctggtgttgtgacaacgtaaaac

SEQ ID NO: 5504770 - DNA, 25 bp, Homo sapien
ttctcagggaaatcattactcttag

SEQ ID NO: 5504771 - DNA, 25 bp, Homo sapien
ttgtttacagaatagcagtcgacgc

SEQ ID NO: 5504772 - DNA, 25 bp, Homo sapien
gagaagaatctgataaggtggatga

SEQ ID NO: 5504773 - DNA, 25 bp, Homo sapien
agattttaaaaagaccagtgcatac

SEQ ID NO: 5504774 - DNA, 25 bp, Homo sapien
aagaccagtgcatacacaaagaaga

SEQ ID NO: 5504775 - DNA, 25 bp, Homo sapien
aatggataaagttttctcagggaaa

SEQ ID NO: 5504776 - DNA, 25 bp, Homo sapien
tagcacttgggttttgcctggtgtt

SEQ ID NO: 5504777 - DNA, 25 bp, Homo sapien
tttacaaagcttgcaatagcacttg

SEQ ID NO: 5504778 - DNA, 25 bp, Homo sapien
ttggtacaccaagaaatatgaacat

SEQ ID NO: 5504779 - DNA, 25 bp, Homo sapien
tcctcagaagcctacatcatagaca

SEQ ID NO: 5504780 - DNA, 25 bp, Homo sapien
gtctaagggtcagaactttgttcta

SEQ ID NO: 5504781 - DNA, 25 bp, Homo sapien
tttgttctagcctgcaagggatccc

SEQ ID NO: 5504782 - DNA, 25 bp, Homo sapien
cattctaccactaaagccaagcttc

SEQ ID NO: 5504783 - DNA, 25 bp, Homo sapien
actttgttctagcctgcaagggatc

SEQ ID NO: 5504784 - DNA, 25 bp, Homo sapien
aagggatccctaagttctgtcattc

SEQ ID NO: 5504785 - DNA, 25 bp, Homo sapien
tctgtcattctaccactaaagccaa

SEQ ID NO: 5504786 - DNA, 25 bp, Homo sapien
agaagcctacatcatagacagaaac

SEQ ID NO: 5504787 - DNA, 25 bp, Homo sapien
tacatcatagacagaaacggaaagg

SEQ ID NO: 5504788 - DNA, 25 bp, Homo sapien
gcctacatcatagacagaaacggaa

SEQ ID NO: 5504789 - DNA, 25 bp, Homo sapien
ctgcaagggatccctaagttctgtc

SEQ ID NO: 5504790 - DNA, 25 bp, Homo sapien
tggaaacacatgaagctttcaatat

SEQ ID NO: 5504791 - DNA, 25 bp, Homo sapien
gcactgccccgcagacgtgtgcggg

SEQ ID NO: 5504792 - DNA, 25 bp, Homo sapien
cccgacggcaaatctggccgctgga

SEQ ID NO: 5504793 - DNA, 25 bp, Homo sapien
caattacaactttttgcctggaaac

SEQ ID NO: 5504794 - DNA, 25 bp, Homo sapien
gtccagagccgccaggtttattgct

SEQ ID NO: 5504795 - DNA, 25 bp, Homo sapien
aagacccctactcgtccagagccgc

SEQ ID NO: 5504796 - DNA, 25 bp, Homo sapien
agacccccgacctcattggcggcga

SEQ ID NO: 5504797 - DNA, 25 bp, Homo sapien
tgctgctggatgacctaccggcagc

SEQ ID NO: 5504798 - DNA, 25 bp, Homo sapien
tgctcaattactaccgcaccggcaa

SEQ ID NO: 5504799 - DNA, 25 bp, Homo sapien
attactaccgcaccggcaagctgca

SEQ ID NO: 5504800 - DNA, 25 bp, Homo sapien
cgctggacatcttcgagacccccga

SEQ ID NO: 5504801 - DNA, 25 bp, Homo sapien
cgttcactatcaacagaacagcaag

SEQ ID NO: 5504802 - DNA, 25 bp, Homo sapien
cacgtcttaccatggcacagcagga

SEQ ID NO: 5504803 - DNA, 25 bp, Homo sapien
atcagatttcgtgagaactcgttca

SEQ ID NO: 5504804 - DNA, 25 bp, Homo sapien
atagaaacccaatgaatgcaacaca

SEQ ID NO: 5504805 - DNA, 25 bp, Homo sapien
ggcaataattgggcttcaagaggtc

SEQ ID NO: 5504806 - DNA, 25 bp, Homo sapien
attaaagtaattgtgaaataaaaga

SEQ ID NO: 5504807 - DNA, 25 bp, Homo sapien
aattgtctgataaaaccacatctca

SEQ ID NO: 5504808 - DNA, 25 bp, Homo sapien
caaggcacgtcttaccatggcacag

SEQ ID NO: 5504809 - DNA, 25 bp, Homo sapien
ctgtatttaacttttgggactggga

SEQ ID NO: 5504810 - DNA, 25 bp, Homo sapien
catttggttaaagaagtaagtggcc

SEQ ID NO: 5504811 - DNA, 25 bp, Homo sapien
aagaagtaagtggcctgtatttaac

SEQ ID NO: 5504812 - DNA, 25 bp, Homo sapien
cattgatgcacaaaaaatatagtac

SEQ ID NO: 5504813 - DNA, 25 bp, Homo sapien
taaaggtggcttttgtgtgtgcact

SEQ ID NO: 5504814 - DNA, 25 bp, Homo sapien
tttgacagactagaccactttttta

SEQ ID NO: 5504815 - DNA, 25 bp, Homo sapien
atggttcactgaagatacacttcac

SEQ ID NO: 5504816 - DNA, 25 bp, Homo sapien
agaaaaatacattgatgcacaaaaa

SEQ ID NO: 5504817 - DNA, 25 bp, Homo sapien
tcaataattaaaggtggcttttgtg

SEQ ID NO: 5504818 - DNA, 25 bp, Homo sapien
aaggccagtggaatctatagctaat

SEQ ID NO: 5504819 - DNA, 25 bp, Homo sapien
tacacttcacttttacataggcttg

SEQ ID NO: 5504820 - DNA, 25 bp, Homo sapien
ttacagcttaattggcacatggttc

SEQ ID NO: 5504821 - DNA, 25 bp, Homo sapien
ttgtatgtttaaggccagtggaatc

SEQ ID NO: 5504822 - DNA, 25 bp, Homo sapien
gtgtgtgcactatatcatgtataca

SEQ ID NO: 5504823 - DNA, 25 bp, Homo sapien
tctgttacaatacatctcacaccac

SEQ ID NO: 5504824 - DNA, 25 bp, Homo sapien
aaaatcaacttgtcaaagcccattc

SEQ ID NO: 5504825 - DNA, 25 bp, Homo sapien
ttttacagttgatagaaacagggac

SEQ ID NO: 5504826 - DNA, 25 bp, Homo sapien
cctggccaacatggcgaaacctcat

SEQ ID NO: 5504827 - DNA, 25 bp, Homo sapien
tacagttgatagaaacagggacaaa

SEQ ID NO: 5504828 - DNA, 25 bp, Homo sapien
ttaaacatcttgcagcctggtgcgg

SEQ ID NO: 5504829 - DNA, 25 bp, Homo sapien
gcccattcttaaacatcttgcagcc

SEQ ID NO: 5504830 - DNA, 25 bp, Homo sapien
ctgcactccagcattgttcttggtg

SEQ ID NO: 5504831 - DNA, 25 bp, Homo sapien
tgttcttggtgctttgtgtgtatta

SEQ ID NO: 5504832 - DNA, 25 bp, Homo sapien
cacaacaactctagaacccccattt

SEQ ID NO: 5504833 - DNA, 25 bp, Homo sapien
gccaacatggcgaaacctcatctct

SEQ ID NO: 5504834 - DNA, 25 bp, Homo sapien
acagcagatgggcattatcagcatg

SEQ ID NO: 5504835 - DNA, 25 bp, Homo sapien
taggaagcagatatttaagtggtaa

SEQ ID NO: 5504836 - DNA, 25 bp, Homo sapien
agttgttcaatgcagaaaaccctgg

SEQ ID NO: 5504837 - DNA, 25 bp, Homo sapien
ggccatcagagacaccaggcatgta

SEQ ID NO: 5504838 - DNA, 25 bp, Homo sapien
atgagtttgagaccttagtacctgt

SEQ ID NO: 5504839 - DNA, 25 bp, Homo sapien
caagaataaaccgcggaccctcgcg

SEQ ID NO: 5504840 - DNA, 25 bp, Homo sapien
agcatgagttcagaagctaggaagc

SEQ ID NO: 5504841 - DNA, 25 bp, Homo sapien
agatgggcattatcagcatgagttc

SEQ ID NO: 5504842 - DNA, 25 bp, Homo sapien
atcagagacaccaggcatgtaaaga

SEQ ID NO: 5504843 - DNA, 25 bp, Homo sapien
aagggggaaggtctattcctcacta

SEQ ID NO: 5504844 - DNA, 25 bp, Homo sapien
ctgacctcaagaataaaccgcggac

SEQ ID NO: 5504845 - DNA, 25 bp, Homo sapien
tttcactgtcagcaaaaatcttttt

SEQ ID NO: 5504846 - DNA, 25 bp, Homo sapien
tgtagcctcgcccttctgtcgtctt

SEQ ID NO: 5504847 - DNA, 25 bp, Homo sapien
ttctgtcgtcttctcgcacctagtc

SEQ ID NO: 5504848 - DNA, 25 bp, Homo sapien
gtcttctcgcacctagtcgacgcgg

SEQ ID NO: 5504849 - DNA, 25 bp, Homo sapien
ctttttaataagagagtaggatcca

SEQ ID NO: 5504850 - DNA, 25 bp, Homo sapien
tttttaataagagagtaggatccag

SEQ ID NO: 5504851 - DNA, 25 bp, Homo sapien
tcttctcgcacctagtcgacgcggc

SEQ ID NO: 5504852 - DNA, 25 bp, Homo sapien
aggatccagggttagtttttgtagc

SEQ ID NO: 5504853 - DNA, 25 bp, Homo sapien
cagggttagtttttgtagcctcgcc

SEQ ID NO: 5504854 - DNA, 25 bp, Homo sapien
gtttttgtagcctcgcccttctgtc

SEQ ID NO: 5504855 - DNA, 25 bp, Homo sapien
atctttttaataagagagtaggatc

SEQ ID NO: 5504856 - DNA, 25 bp, Homo sapien
taagagagtatgaaataagagactg

SEQ ID NO: 5504857 - DNA, 25 bp, Homo sapien
gaggcagcagcagactagctcttaa

SEQ ID NO: 5504858 - DNA, 25 bp, Homo sapien
attacataaggaagggcctactgca

SEQ ID NO: 5504859 - DNA, 25 bp, Homo sapien
gggaatggctaattaaaggacttgc

SEQ ID NO: 5504860 - DNA, 25 bp, Homo sapien
gacagcattgctgggccaaaagtca

SEQ ID NO: 5504861 - DNA, 25 bp, Homo sapien
ctgataaaaagctatagatgggccg

SEQ ID NO: 5504862 - DNA, 25 bp, Homo sapien
gcaggtgtggaataaagatttagaa

SEQ ID NO: 5504863 - DNA, 25 bp, Homo sapien
aaggtaagacagcattgctgggcca

SEQ ID NO: 5504864 - DNA, 25 bp, Homo sapien
tgggccaaaagtcataagagagtat

SEQ ID NO: 5504865 - DNA, 25 bp, Homo sapien
ttaaagcttttgagggaatggctaa

SEQ ID NO: 5504866 - DNA, 25 bp, Homo sapien
aaaggacttgcttgataggaaagtt

SEQ ID NO: 5504867 - DNA, 25 bp, Homo sapien
gataagagaccatcctgggtaacac

SEQ ID NO: 5504868 - DNA, 25 bp, Homo sapien
catctaggtgtgaaattatgatatg

SEQ ID NO: 5504869 - DNA, 25 bp, Homo sapien
ctaggtgtgaaattatgatatgtac

SEQ ID NO: 5504870 - DNA, 25 bp, Homo sapien
ttgatcttagttatacagatgtttt

SEQ ID NO: 5504871 - DNA, 25 bp, Homo sapien
tcttgatgctgtacttgatcttagt

SEQ ID NO: 5504872 - DNA, 25 bp, Homo sapien
ttcttaatgagtattatagcttaat

SEQ ID NO: 5504873 - DNA, 25 bp, Homo sapien
tgaaaaactcatctaggtgtgaaat

SEQ ID NO: 5504874 - DNA, 25 bp, Homo sapien
aggagataagagaccatcctgggta

SEQ ID NO: 5504875 - DNA, 25 bp, Homo sapien
tttaaaagattaatggaagtctggc

SEQ ID NO: 5504876 - DNA, 25 bp, Homo sapien
aaaatttgaaaaactcatctaggtg

SEQ ID NO: 5504877 - DNA, 25 bp, Homo sapien
aaaagattaatggaagtctggctgg

SEQ ID NO: 5504878 - DNA, 25 bp, Homo sapien
gtccagtccaccataatgggtattc

SEQ ID NO: 5504879 - DNA, 25 bp, Homo sapien
acagaagggttatttggtgctggag

SEQ ID NO: 5504880 - DNA, 25 bp, Homo sapien
gcaggtcagctgaagacataagaca

SEQ ID NO: 5504881 - DNA, 25 bp, Homo sapien
tctaaatgggagtctatcatgtctc

SEQ ID NO: 5504882 - DNA, 25 bp, Homo sapien
gtgacaaactttgaacaggtaacaa

SEQ ID NO: 5504883 - DNA, 25 bp, Homo sapien
gtctcccctttgcaatactggcttc

SEQ ID NO: 5504884 - DNA, 25 bp, Homo sapien
atttaggattaaacagtcaatttct

SEQ ID NO: 5504885 - DNA, 25 bp, Homo sapien
aattaagaatgggtagtgacaaact

SEQ ID NO: 5504886 - DNA, 25 bp, Homo sapien
gctgaagacataagacataggatac

SEQ ID NO: 5504887 - DNA, 25 bp, Homo sapien
aggatacttatatacagcagacacc

SEQ ID NO: 5504888 - DNA, 25 bp, Homo sapien
ggagctctccaaattaagaatgggt

SEQ ID NO: 5504889 - DNA, 25 bp, Homo sapien
ctttagaatactgcagaaaggactg

SEQ ID NO: 5504890 - DNA, 25 bp, Homo sapien
tgccagagacgtacatcatcattat

SEQ ID NO: 5504891 - DNA, 25 bp, Homo sapien
aagcagactcactaggctgaagttt

SEQ ID NO: 5504892 - DNA, 25 bp, Homo sapien
caataatgatatacaaaggaaaatg

SEQ ID NO: 5504893 - DNA, 25 bp, Homo sapien
aaggaaaatgtaatatgccagagac

SEQ ID NO: 5504894 - DNA, 25 bp, Homo sapien
tcagaaaccgcataagcatcgtcaa

SEQ ID NO: 5504895 - DNA, 25 bp, Homo sapien
tttgaggaggccaattttaaaatca

SEQ ID NO: 5504896 - DNA, 25 bp, Homo sapien
catgcttaaaatgtccggccaaatc

SEQ ID NO: 5504897 - DNA, 25 bp, Homo sapien
aaggactgtgctgagttttgcctct

SEQ ID NO: 5504898 - DNA, 25 bp, Homo sapien
ccggccaaatcaaacaagcagactc

SEQ ID NO: 5504899 - DNA, 25 bp, Homo sapien
gcaagacgctaaactttgaggaggc

SEQ ID NO: 5504900 - DNA, 25 bp, Homo sapien
gtgacagatggctacaaaccggtca

SEQ ID NO: 5504901 - DNA, 25 bp, Homo sapien
ttgagaaaggtcacagaagaaatta

SEQ ID NO: 5504902 - DNA, 25 bp, Homo sapien
gacacatctgaactgaggtaccctc

SEQ ID NO: 5504903 - DNA, 25 bp, Homo sapien
gtcataggccatcacactcaggagc

SEQ ID NO: 5504904 - DNA, 25 bp, Homo sapien
acaggtggagaaggctttatacttc

SEQ ID NO: 5504905 - DNA, 25 bp, Homo sapien
tattgatgaaggtgtcacaacggca

SEQ ID NO: 5504906 - DNA, 25 bp, Homo sapien
gaagaaattaggaatgtccacctcc

SEQ ID NO: 5504907 - DNA, 25 bp, Homo sapien
atggaggtgaccaccgtgtacatca

SEQ ID NO: 5504908 - DNA, 25 bp, Homo sapien
aagcaggtcattagtaaggcaatca

SEQ ID NO: 5504909 - DNA, 25 bp, Homo sapien
aatcaagttgtacagctgggagtct

SEQ ID NO: 5504910 - DNA, 25 bp, Homo sapien
tcagcaaacaactgacaggtgagac

SEQ ID NO: 5504911 - DNA, 25 bp, Homo sapien
ctcctcagtagaacatggcagacct

SEQ ID NO: 5504912 - DNA, 25 bp, Homo sapien
ctcctctcagcattggtaagcctcc

SEQ ID NO: 5504913 - DNA, 25 bp, Homo sapien
cagtagaacatggcagaccttcatc

SEQ ID NO: 5504914 - DNA, 25 bp, Homo sapien
ttaaatttggagtctggtgtctagc

SEQ ID NO: 5504915 - DNA, 25 bp, Homo sapien
cccatgtccaagatcacccagttac

SEQ ID NO: 5504916 - DNA, 25 bp, Homo sapien
agcaccccactgtttgaaaaactcc

SEQ ID NO: 5504917 - DNA, 25 bp, Homo sapien
ggtgtctagcattagctggggttgg

SEQ ID NO: 5504918 - DNA, 25 bp, Homo sapien
tccaccagtgctaatgtcatgtctc

SEQ ID NO: 5504919 - DNA, 25 bp, Homo sapien
tgaaatctgtattgaagtcagtatt

SEQ ID NO: 5504920 - DNA, 25 bp, Homo sapien
gtacacattgcagacagcaccccac

SEQ ID NO: 5504921 - DNA, 25 bp, Homo sapien
attggtaagcctcctcacccacccc

SEQ ID NO: 5504922 - DNA, 25 bp, Homo sapien
ttcaagtgcagcctaagcgacatgg

SEQ ID NO: 5504923 - DNA, 25 bp, Homo sapien
gagatatggcggcaataataaaatc

SEQ ID NO: 5504924 - DNA, 25 bp, Homo sapien
actgaaagaaccccaacttggagta

SEQ ID NO: 5504925 - DNA, 25 bp, Homo sapien
ggaatgtcatgaaattcttgaaccc

SEQ ID NO: 5504926 - DNA, 25 bp, Homo sapien
taaatgtaagggctagtactgttcc

SEQ ID NO: 5504927 - DNA, 25 bp, Homo sapien
ttggagtactgcaacccaaatgttc

SEQ ID NO: 5504928 - DNA, 25 bp, Homo sapien
tcaagtgctcctgagcaaggagttc

SEQ ID NO: 5504929 - DNA, 25 bp, Homo sapien
taaacaccttctcatggaatgtcat

SEQ ID NO: 5504930 - DNA, 25 bp, Homo sapien
atacaatgctcaaaaaagattcttc

SEQ ID NO: 5504931 - DNA, 25 bp, Homo sapien
gagttcaagtgcagcctaagcgaca

SEQ ID NO: 5504932 - DNA, 25 bp, Homo sapien
gatactctagagatatggcggcaat

SEQ ID NO: 5504933 - DNA, 25 bp, Homo sapien
gatgatacgcaaaaaggacatgaac

SEQ ID NO: 5504934 - DNA, 25 bp, Homo sapien
tgggaattactgattgagcccaatt

SEQ ID NO: 5504935 - DNA, 25 bp, Homo sapien
ctttgggggcaatttgctaaaacat

SEQ ID NO: 5504936 - DNA, 25 bp, Homo sapien
gtaggacgacaaccctatttcctga

SEQ ID NO: 5504937 - DNA, 25 bp, Homo sapien
gatcccagccatcatgggtactgct

SEQ ID NO: 5504938 - DNA, 25 bp, Homo sapien
acacgcaaatacggcagcattctca

SEQ ID NO: 5504939 - DNA, 25 bp, Homo sapien
tgtctggcccaaccttgtcaaccac

SEQ ID NO: 5504940 - DNA, 25 bp, Homo sapien
atgggtactgcttgagatgatacgc

SEQ ID NO: 5504941 - DNA, 25 bp, Homo sapien
ggcagcattctcaaaggtgggttct

SEQ ID NO: 5504942 - DNA, 25 bp, Homo sapien
atttcctgagtgtctggcccaacct

SEQ ID NO: 5504943 - DNA, 25 bp, Homo sapien
aggggctgaagttcttacaggaagt

SEQ ID NO: 5504944 - DNA, 25 bp, Homo sapien
ctaaattcgcggccgcgtcgacttt

SEQ ID NO: 5504945 - DNA, 25 bp, Homo sapien
tatgaagctttaactgtccctttgc

SEQ ID NO: 5504946 - DNA, 25 bp, Homo sapien
gtaagcttggatcctctagagcggc

SEQ ID NO: 5504947 - DNA, 25 bp, Homo sapien
taatgcatatgaagctttaactgtc

SEQ ID NO: 5504948 - DNA, 25 bp, Homo sapien
ctactactactaaattcgcggccgc

SEQ ID NO: 5504949 - DNA, 25 bp, Homo sapien
ttccttgcacaagctctggatttct

SEQ ID NO: 5504950 - DNA, 25 bp, Homo sapien
ttttgagagtctatttcggtcatta

SEQ ID NO: 5504951 - DNA, 25 bp, Homo sapien
ctctagagcggccgcctactactac

SEQ ID NO: 5504952 - DNA, 25 bp, Homo sapien
atgcacgcgtacgtaagcttggatc

SEQ ID NO: 5504953 - DNA, 25 bp, Homo sapien
gagttgaacgctcaatttgtcactc

SEQ ID NO: 5504954 - DNA, 25 bp, Homo sapien
atgacgtcgcatgcacgcgtacgta

SEQ ID NO: 5504955 - DNA, 25 bp, Homo sapien
taaccggcgcaagcccattggagat

SEQ ID NO: 5504956 - DNA, 25 bp, Homo sapien
atctccaatgggcttgcgccggtta

SEQ ID NO: 5504957 - DNA, 25 bp, Homo sapien
taacattgaaaaaccaagttcctgc

SEQ ID NO: 5504958 - DNA, 25 bp, Homo sapien
ctaggagcttttcttataaaccgta

SEQ ID NO: 5504959 - DNA, 25 bp, Homo sapien
agctactaaacaataggaataaggt

SEQ ID NO: 5504960 - DNA, 25 bp, Homo sapien
ataaaatatgatacagcatcacaat

SEQ ID NO: 5504961 - DNA, 25 bp, Homo sapien
gcattttatacctaggagcttttct

SEQ ID NO: 5504962 - DNA, 25 bp, Homo sapien
aataggaataaggttacttcagcct

SEQ ID NO: 5504963 - DNA, 25 bp, Homo sapien
tgccgttacgtcaaaaacagtagga

SEQ ID NO: 5504964 - DNA, 25 bp, Homo sapien
aaccaagttcctgctatgtagcatt

SEQ ID NO: 5504965 - DNA, 25 bp, Homo sapien
tatcaaaagcatgctattagctact

SEQ ID NO: 5504966 - DNA, 25 bp, Homo sapien
caaaaacagtaggaaataataacat

SEQ ID NO: 5504967 - DNA, 25 bp, Homo sapien
gatcataagcatatcaaaagcatgc

SEQ ID NO: 5504968 - DNA, 25 bp, Homo sapien
taaataaatgagataatttcagata

SEQ ID NO: 5504969 - DNA, 25 bp, Homo sapien
attctacaggagtggacatagacaa

SEQ ID NO: 5504970 - DNA, 25 bp, Homo sapien
aatgataaagccttgaagcccaggt

SEQ ID NO: 5504971 - DNA, 25 bp, Homo sapien
ttatacaaagtccctgctgccatgg

SEQ ID NO: 5504972 - DNA, 25 bp, Homo sapien
tcagataatgataaagccttgaagc

SEQ ID NO: 5504973 - DNA, 25 bp, Homo sapien
attacattctacaggagtggacata

SEQ ID NO: 5504974 - DNA, 25 bp, Homo sapien
tatgtagacattgcgattatagtac

SEQ ID NO: 5504975 - DNA, 25 bp, Homo sapien
tgaacagcttctatgttatagtccc

SEQ ID NO: 5504976 - DNA, 25 bp, Homo sapien
aggagtggacatagacaataaatga

SEQ ID NO: 5504977 - DNA, 25 bp, Homo sapien
aaaaagacaaccattctcaagtatc

SEQ ID NO: 5504978 - DNA, 25 bp, Homo sapien
ttattactcaggagtgaatattttt

SEQ ID NO: 5504979 - DNA, 25 bp, Homo sapien
atgcttcaaagtcaagaagtacagc

SEQ ID NO: 5504980 - DNA, 25 bp, Homo sapien
acttattctgaactggagattaaat

SEQ ID NO: 5504981 - DNA, 25 bp, Homo sapien
tttaaagactgctaagagttttatc

SEQ ID NO: 5504982 - DNA, 25 bp, Homo sapien
agtgctagggatttaaggtgatttt

SEQ ID NO: 5504983 - DNA, 25 bp, Homo sapien
atatctgtctacgaattcctctccc

SEQ ID NO: 5504984 - DNA, 25 bp, Homo sapien
agtgagaactaatcagtaagtagat

SEQ ID NO: 5504985 - DNA, 25 bp, Homo sapien
agtagatgacttcagtgctagggat

SEQ ID NO: 5504986 - DNA, 25 bp, Homo sapien
agtgataagatagagtgagaactaa

SEQ ID NO: 5504987 - DNA, 25 bp, Homo sapien
aagaagtacagctatcacttacact

SEQ ID NO: 5504988 - DNA, 25 bp, Homo sapien
aggataattatcatagacagcatac

SEQ ID NO: 5504989 - DNA, 25 bp, Homo sapien
caaacaaaaccactgtggataaact

SEQ ID NO: 5504990 - DNA, 25 bp, Homo sapien
gttgctagttggacagtcggtatgg

SEQ ID NO: 5504991 - DNA, 25 bp, Homo sapien
ctccttcctaagtgctcagctcccc

SEQ ID NO: 5504992 - DNA, 25 bp, Homo sapien
ccccgggacatcagaagttgttttc

SEQ ID NO: 5504993 - DNA, 25 bp, Homo sapien
atgagagagacctatcctaggagtc

SEQ ID NO: 5504994 - DNA, 25 bp, Homo sapien
tccaaaaccaggtgaagtctgttgc

SEQ ID NO: 5504995 - DNA, 25 bp, Homo sapien
ctactactaaattcgcggccgcgtc

SEQ ID NO: 5504996 - DNA, 25 bp, Homo sapien
agctcccccattgtgtagccccggg

SEQ ID NO: 5504997 - DNA, 25 bp, Homo sapien
cctactcatgattcttggagctgtc

SEQ ID NO: 5504998 - DNA, 25 bp, Homo sapien
ttgtgtagccccgggacatcagaag

SEQ ID NO: 5504999 - DNA, 25 bp, Homo sapien
aggagaagggctgtttgtatttcca

SEQ ID NO: 5505000 - DNA, 25 bp, Homo sapien
gggtgaagcaatgacgtctctgtct

SEQ ID NO: 5505001 - DNA, 25 bp, Homo sapien
cttgaataatgacaagtggcaaggg

SEQ ID NO: 5505002 - DNA, 25 bp, Homo sapien
aagacaaggcagtaaagacatttgt

SEQ ID NO: 5505003 - DNA, 25 bp, Homo sapien
tgctaggctctatccactgcaggcc

SEQ ID NO: 5505004 - DNA, 25 bp, Homo sapien
actgtgacaggtcttgcaacgcaag

SEQ ID NO: 5505005 - DNA, 25 bp, Homo sapien
gtcgctggaaatcactgtcagagat

SEQ ID NO: 5505006 - DNA, 25 bp, Homo sapien
tttattgaatgcactcgggcctagc

SEQ ID NO: 5505007 - DNA, 25 bp, Homo sapien
gggttggctagtttgaatggtgcag

SEQ ID NO: 5505008 - DNA, 25 bp, Homo sapien
cttgcaacgcaagcacagctggtaa

SEQ ID NO: 5505009 - DNA, 25 bp, Homo sapien
tcctcttatacttgctgggggcgga

SEQ ID NO: 5505010 - DNA, 25 bp, Homo sapien
cggaccgtgttgacaaagtcgctgg

SEQ ID NO: 5505011 - DNA, 25 bp, Homo sapien
tcgggcctagcatgagccccgaaga

SEQ ID NO: 5505012 - DNA, 25 bp, Homo sapien
atgaaaaagtagcatacaactatca

SEQ ID NO: 5505013 - DNA, 25 bp, Homo sapien
catacagttcgctgagaaaaacaga

SEQ ID NO: 5505014 - DNA, 25 bp, Homo sapien
gatcacgaacaagcaggaatcaaga

SEQ ID NO: 5505015 - DNA, 25 bp, Homo sapien
gaaagtataagataaacattgaagt

SEQ ID NO: 5505016 - DNA, 25 bp, Homo sapien
atgaaaaaagtgagattaactaggg

SEQ ID NO: 5505017 - DNA, 25 bp, Homo sapien
aaagagaataatggatcacgaacaa
